United States Patent Application Publication US 2017/0009304 A1 - sequence listing, part 34

SEQ ID NO: 712291 - DNA, 100 bp, Homo sapiens
ctgcaacaggagatgggtcagctcctgtgatggcagtcgttcggctccttgctgaaataaggacaagaaagttactgtggcccatgtcctaaaaactgga

SEQ ID NO: 712292 - DNA, 75 bp, Homo sapiens
tttcccctccccgggccacccagcccgcccaactcccagcggagagcaagtgaaaccaatccgtaatctaaatgg

SEQ ID NO: 712293 - DNA, 100 bp, Homo sapiens
caagtccatccgcgacctcatgccaaagaccatcatgcacctcatgatcaacaatgctgtaacagaagacaagtacgaaatactgcaatctgtcgacgat

SEQ ID NO: 712294 - DNA, 75 bp, Homo sapiens
gtttaaggggaactcaggttacacacagagaatttagcaaacctttacttcctgttggaagagctggggtcttgc

SEQ ID NO: 712295 - DNA, 143 bp, Homo sapiens
gcgggctgaagggttagcggagcacgggcaaggcggagagtgacggagtcggcgagcccccgcggcgacagtattaaaggtggaagaaggtccatatctttttctgtgggtgcttcaagtgttgttggaagtggaggcagcag

SEQ ID NO: 712296 - DNA, 100 bp, Homo sapiens
gtcgcgcgggccgggatgagggactgtggcggcgcggcccgcgcgcagccggccgcacttgcacctcctgcgccgccgccccccatccaaggatatgcct

SEQ ID NO: 712297 - DNA, 100 bp, Homo sapiens
tggggaaatgcgtgcactgcgtccctctagaggagcatggggaagtgattgactgtgtgcaggagctgagccactccgtgaacaagctgtttggtctggc

SEQ ID NO: 712298 - DNA, 76 bp, Homo sapiens
tgagctctccagaaaattgatgcagggatttgtcttggctgttactatgacacgggaagcaattgatgaatttcgg

SEQ ID NO: 712299 - DNA, 83 bp, Homo sapiens
tgaagtaatgcaatggtctcaatctctggaaaaacttcttgccaaccaaagatcaaaatacttgctggatggtggactcagag

SEQ ID NO: 712300 - DNA, 74 bp, Homo sapiens
cacagaatagacctgaagacaaaaatccagaagtacaagcagtctggcaccatgactcctgtgaggatgcagca

SEQ ID NO: 712301 - DNA, 90 bp, Homo sapiens
tctttgtaacaccacctgagggctcttctcgcaggaggatcattcatggcacagcggtgctgttacactaccaaactgtcagtgaacccg

SEQ ID NO: 712302 - DNA, 75 bp, Homo sapiens
ctacttccaggtgaatccaacaagatcccccgtctgaggactgacctttttccattatggtgacaagctgaacat

SEQ ID NO: 712303 - DNA, 50 bp, Homo sapiens
ctggtctctgaggtctggcataagaaacgaaagaagttttcccatttcca

SEQ ID NO: 712304 - DNA, 87 bp, Homo sapiens
tacgctggcttcatcatgcccatcgaggtgcacttcaaaaacaaggtggacgacatccttggagaaggcagcgacgacagcgacagc

SEQ ID NO: 712305 - DNA, 75 bp, Homo sapiens
ctctagccaactacctgctctccaaggagcatgctcgcagctgtatctctcctaaatgtgtgatcaaggaattac

SEQ ID NO: 712306 - DNA, 90 bp, Homo sapiens
taggaggaattcttttagaagacatagaagaagcactgcccaattcccagaaagctgtcaagttctgtgtcctacatagagcagcaactt

SEQ ID NO: 712307 - DNA, 83 bp, Homo sapiens
gcgcgccccaccaccgccctcaccatggccctttctggttactgtggctttatggcagccaacctttatgctcgttccatatt

SEQ ID NO: 712308 - DNA, 101 bp, Homo sapiens
gggctgcggacgctcggtcccgcgctgcgcatccccgcggacgccacagcgctatggatgagatcaaagggaaagaccgtgtgattctggccttggagaag

SEQ ID NO: 712309 - DNA, 100 bp, Homo sapiens
ccgtgacatccgaggtgcctttctccaaaagatgccctcggccaccagccacagcgggagcggcagcaagtcgtccggaccgccaccgccgtcgggttcc

SEQ ID NO: 712310 - DNA, 75 bp, Homo sapiens
ttagggtcctttatatagaagggagagtaggagcttctggaagaggtgaagaaggaattgcagaaagtgaaagag

SEQ ID NO: 712311 - DNA, 98 bp, Homo sapiens
tggagaagtccttctccgacctcttcaagcgttttgagaaacagaaagaggtgatcgagggctaccgcaaggacagagcgggatgccaccagcttgtc

SEQ ID NO: 712312 - DNA, 74 bp, Homo sapiens
gacgattctccaccgagtatgagctgcagcaggctaaatttattgtgaagaaatcagaagatgaagaagacgcc

SEQ ID NO: 712313 - DNA, 100 bp, Homo sapiens
gcccagctggcttctacacggcccaacacctgctaaagctgggatctagcaattgggaggcagcagacttgggtaatgaagagagaaaacaaaagttctt

SEQ ID NO: 712314 - DNA, 88 bp, Homo sapiens
gaaaaccgaagttggaagtgtctcttagcagcgcgcggagaagaacggggagccagcctcgccgctcctgctatttgccaaccgccgg

SEQ ID NO: 712315 - DNA, 83 bp, Homo sapiens
cggtttttcatcctttgatcccgcggtcccttcctgtaccttgtcctcagatcaatgtccgagttaccaccatggatgcagag

SEQ ID NO: 712316 - DNA, 88 bp, Homo sapiens
ccagatctcacacaagtggtcagtttggttgtggaaagtgcttttttaggaccaaaggatatatttccttactcagaaaataaggaaa

SEQ ID NO: 712317 - DNA, 100 bp, Homo sapiens
tggcaggcaagctacaaagcctagacctttcagccgctgccgaaatgtgtgcccagctggctggaaacctggcagtgataccatcaagcctgatgtccaa

SEQ ID NO: 712318 - DNA, 96 bp, Homo sapiens
atcatcaaggatcaggaccgcaagtcccgtcttatgggacttgaggccctcaagtggtcagtatatatccgagccgctgtccgaaaagagaaaggc

SEQ ID NO: 712319 - DNA, 100 bp, Homo sapiens
aaacctaaccaatgactgtggaataatatggaagaagatggaaaaaacttgtttaatggtgaaactggaacgccaagctgaagaagaacgaatacggaag

SEQ ID NO: 712320 - DNA, 99 bp, Homo sapiens
ccggcgtgggcggcggcaacggggcactgacctgggtgacagagtctagctctttcacccaggctggagtgaagtggtgcaatctcagctcagtgcaac

SEQ ID NO: 712321 - DNA, 82 bp, Homo sapiens
cagctacagcttggttccatgtactatacccaagaagatgaaaggattgttcttgttgacaacaaatgtaagtgtgcccgga

SEQ ID NO: 712322 - DNA, 100 bp, Homo sapiens
tgttcttcgtaggcggagtcgccgagtcgagcactctgctatttggtcctgaagcagtacacagaagcagtgaaggactgcacagaagccctcaagctgg

SEQ ID NO: 712323 - DNA, 100 bp, Homo sapiens
gaaacttcctcctggaggaatacctggcattgacctctcagatcccaaacaactggcagaatttgctaggtactccaaagattcaggtttactcacgtca

SEQ ID NO: 712324 - DNA, 125 bp, Homo sapiens
tggtgtcgtttttccttgagctgaacgtcttgcaacagtggccgcacgcataggtgctggagaatctggtaaaagcaccattgtgaagcagatgaggatcctgcatgttaatgggtttaatggag

SEQ ID NO: 712325 - DNA, 100 bp, Homo sapiens
tcctcatccagctaaaactaggaaaactactgcagacacagatgccccttggtgagagagcgattacgagtagcacttgaaagatgtagtttgttagaag

SEQ ID NO: 712326 - DNA, 83 bp, Homo sapiens
ctgaagagagatgggcgatatatatattacttgcttatttccagtgatgctgatggagccatccaaagggctggaagattcag

SEQ ID NO: 712327 - DNA, 90 bp, Homo sapiens
cttcaaagcacataaaaacactttctgaagctcatgaagactgtgtaaataatatcaggtgcagcttcaagcttaggaccacccaccatg

SEQ ID NO: 712328 - DNA, 78 bp, Homo sapiens
tggaggctccgacttcctcatgaagagactccagaaaggggccaaatttgagtttcatcatggtgactatgaaaaaca

SEQ ID NO: 712329 - DNA, 82 bp, Homo sapiens
ggtccaggaattaatcaagagcaagactcccaagcagctatctctacctcatttccgaaatggaaaattgtattttaaaccc

SEQ ID NO: 712330 - DNA, 75 bp, Homo sapiens
ttgcatacaagcaggaaaatgagatgttatccaggagttgttcctttggccacatatatgcgaatctataagaaa

SEQ ID NO: 712331 - DNA, 100 bp, Homo sapiens
cttcgatgtggagcttctaaaactggaatgacaggaatggcctcctcccttagctccctgttcttggacatatctgaagagatggattaagaatgctttg

SEQ ID NO: 712332 - DNA, 73 bp, Homo sapiens
tgagatggtagccaaacccccagcagcccactcacccagtgtacaacattggaccagacaaggtgatccaggc

SEQ ID NO: 712333 - DNA, 98 bp, Homo sapiens
gaaacacaaagccggctacgcgctgcgagtacttcgggatgacttcagacaaaacccttcggatgtcatggttgcagtaggagagcctgcagtaatgg

SEQ ID NO: 712334 - DNA, 90 bp, Homo sapiens
cggtaatgctggtggtctgcatcaccaccggatcaacttcgacaaatagatgaacttgcgtcctttctcttctccgccatggaattctgc

SEQ ID NO: 712335 - DNA, 148 bp, Homo sapiens
ttccttcaagagttttcatggattctaatggaatcaggcagttttgtgtccatgtgaacaactatcctgtctcagaaagaagagtgggagagcaggactcagcaccaacccaggaaaaacccacctcacctggcaaggctattgaaaa

SEQ ID NO: 712336 - DNA, 82 bp, Homo sapiens
gagaggcgagctcgcgatgagtggtctcggcaggctcttcgggaaggtctattatcctcccagtccacaacgctgaaccgtg

SEQ ID NO: 712337 - DNA, 75 bp, Homo sapiens
tattctggtgcttatggtgcctcagcaacccagactactacggactcatctaacaaaacagcaccgactccagca

SEQ ID NO: 712338 - DNA, 100 bp, Homo sapiens
aaaaagaaaaaaaaatgataaagaagaagtcaccgtttctacctggtaccagctggaggatgagtctgcgcatttggatgaaatgccactaatgatgtct

SEQ ID NO: 712339 - DNA, 100 bp, Homo sapiens
cggcggggaaaatggcggacgggaaggcgggagacgagaagcctgaaaagtcgcagcgagctggagccgccggagacacgaagatcgattgagaagttat

SEQ ID NO: 712340 - DNA, 110 bp, Homo sapiens
agagcctcaacgtggacgtggtcaagtacgagagtggccctgacggaggggaggaagttgggcccgaaggcatcctgcagaacggggctgtggacgacagtgtagccaag

SEQ ID NO: 712341 - DNA, 98 bp, Homo sapiens
tgcgggtgttcttttggggtagtgtctgggatccagtacgagttgaatcattgttcaaataaggtcctcagaatggttggaatgaccctccagctttg

SEQ ID NO: 712342 - DNA, 75 bp, Homo sapiens
tcgaagagctacagaatatgctccaaagaagagcacaagtgcatacaccttgatagcaccaaatataaaccggag

SEQ ID NO: 712343 - DNA, 95 bp, Homo sapiens
gatacctttgatccagaacttgcagcaacaatagattatcgggatttcagctgccctcctctatagtgagtacaggatctatcctcactctgtgg

SEQ ID NO: 712344 - DNA, 75 bp, Homo sapiens
gacagtgcccaggggtctgagtctcacagcttgtaaagagatgaccaagcgagacgtgcctggcttcgccatcgg

SEQ ID NO: 712345 - DNA, 80 bp, Homo sapiens
cccaggagaagccgcccaaagaactgtggatggatgaaaaggcaagaggaaaaacaaagcagccgaaacacacccagacg

SEQ ID NO: 712346 - DNA, 98 bp, Homo sapiens
aaggcggtcgtcagcctatctcttctgctggctgggctcaatgccgcggtattgaagaatgtcgcaatataatcgtgcagtttggtgttcgggaggtc

SEQ ID NO: 712347 - DNA, 101 bp, Homo sapiens
acaagatgtccgccagagctgcggccgccaagtctcctgaatatttacgcgttgctgaatctcctgtggacaaaccaccaataggccaggactgtcctgtg

SEQ ID NO: 712348 - DNA, 100 bp, Homo sapiens
caagatctcaccaccacgctctctgcgtagcctctttggcagcggctactcaaagtcaccagattcatggatagagatctgatggtaggaaagctggaaa

SEQ ID NO: 712349 - DNA, 50 bp, Homo sapiens
ccaacaactgccccatctgccggctgcgtttcattgaaaacagatcctgc

SEQ ID NO: 712350 - DNA, 100 bp, Homo sapiens
aggaggagtgcatggcgagaatcaagcacgcacacgagaacgacatcacccacttctacatgctcactatagacaaggaggagaaagtgcaggccatgcc

SEQ ID NO: 712351 - DNA, 100 bp, Homo sapiens
gacgtcatccttgaagccgaccagaatgatagccagtccctggagctggtgcacaggttccaggcctcatgcattgtgcgtcagcagcaatgtttatggt

SEQ ID NO: 712352 - DNA, 100 bp, Homo sapiens
ctgctcctatgcggtacttgaaggatggcgaagaggtcgcgcaggttcaaaccttgtactactcagctgatcacaagctgcttgatgggaacctactaga

SEQ ID NO: 712353 - DNA, 100 bp, Homo sapiens
tgagaatagtggttcttaactctgacccattccaacaatctcgtaaaacatggtggattactatgaagttctaggcgtgcagagacatgcctcacccgag

SEQ ID NO: 712354 - DNA, 75 bp, Homo sapiens
gccagaaaagccggcaaaaccacttacagctgaaaaggcattccgcgagttatccaatgtaaatttagacttccc

SEQ ID NO: 712355 - DNA, 50 bp, Homo sapiens
ctcgcctcctcgcagcagcgccatggacatccggaacacggtgggcaacg

SEQ ID NO: 712356 - DNA, 51 bp, Homo sapiens
cagaatacagagatatggaatcagttcacagtacagagccagttgtccagg

SEQ ID NO: 712357 - DNA, 75 bp, Homo sapiens
tgacactgatggtgctgagctccccactggctttggctggggacacccgacaaatgcactcggtgatggaaagag

SEQ ID NO: 712358 - DNA, 96 bp, Homo sapiens
gcagcttcagcacaatgacattgacaaacggaactcaacagtgacaattgaggaattccactgtaagctccaagaagccacaaactttccccttcg

SEQ ID NO: 712359 - DNA, 75 bp, Homo sapiens
tccggaaggactttggcgaggcgtgcctgccagtgtagagccggtggagcagctgggctcggcgctgaggtttcg

SEQ ID NO: 712360 - DNA, 83 bp, Homo sapiens
cctttcgctcctcggccgcgcaatgggcacccgcgacgacgagtacgactacctctttaaagacaatgcagatcttcgtgaag

SEQ ID NO: 712361 - DNA, 101 bp, Homo sapiens
gagttgtaagacgttcatcgccgtgttatccttgagtaaaggtttctctggaaacccccctggtaagtgtggaggaggcgggacactctgacccaagacga

SEQ ID NO: 712362 - DNA, 82 bp, Homo sapiens
caggtgctctcggttgcacaataaaccgacgtttagccagaacttcctcaacaatttccaaactgctaaagaagctttgagt

SEQ ID NO: 712363 - DNA, 120 bp, Homo sapiens
ccgggcgattggcatcctcagccgcttttctgccttcaggatcctccgctcccgagggatacagcaggccaggagcgatttcacaccatcacaacctcctactacagaggcgcaatgggt

SEQ ID NO: 712364 - DNA, 90 bp, Homo sapiens
ggcggaggcggcggaggccagggaggaagatgtcgtaatgagcggagttaaagttcctcgtaattttcgcttgttggaagaacttgaaga

SEQ ID NO: 712365 - DNA, 82 bp, Homo sapiens
gagggaagagattcagccagcacactcctcgcgagcaaggacacaatgtttgcacgaggactgaagaggaaatgtgttggcc

SEQ ID NO: 712366 - DNA, 83 bp, Homo sapiens
gccacccccaccctcaccaaatgtgaagttcatttccaatccgccctccatggtggcagcggggagcgtggtggccgcagtgc

SEQ ID NO: 712367 - DNA, 82 bp, Homo sapiens
gcctgcgtaactttctcccttgatccgggagtctttccactggtggtcccaggctgcacccatggcagaaggaggagggcag

SEQ ID NO: 712368 - DNA, 100 bp, Homo sapiens
gcgaggcggcatgagggagccgctcgtcctattttgtaacggattatgatccaaccattgaagattcttacacaaagcagtgtgtgatagatgacagagc

SEQ ID NO: 712369 - DNA, 100 bp, Homo sapiens
cttcatcaccccctacctcctggggcccgacaagaacttcacgcgggagcaggctttactgcagatggtgcgtgacgagagccaccagatcctggcgctg

SEQ ID NO: 712370 - DNA, 75 bp, Homo sapiens
ttgcagaagaagtatataccagagttgtcgttcgagaacttgtcttggacaattgcaaatcaaatgatggaaaaa

SEQ ID NO: 712371 - DNA, 100 bp, Homo sapiens
agatggtgttctgtgacaaatgcaacatctgtgtgcaccagatcagtacaatggaacatgaattttcaataaaggaacgtggatttgaagttcaattgag

SEQ ID NO: 712372 - DNA, 98 bp, Homo sapiens
aaaccgtgaccggggaattcattgataaggagagcaagcgtcccaagaacatccccatcatagtcctccccctcaaaatatcttcagagccaggagat

SEQ ID NO: 712373 - DNA, 51 bp, Homo sapiens
cggcggttaagtatgcggcgccaggagctgttcgagaacttgtcttggaca

SEQ ID NO: 712374 - DNA, 75 bp, Homo sapiens
agaggaggaaggagggacttcttggcttctcccagcatagccccaggtgtgatgaatgcagactctgctaccatt

SEQ ID NO: 712375 - DNA, 100 bp, Homo sapiens
gcctcctgcgtcatcaacttaggcgtgtcctcagcctgcgggggctgcgtggaggtggactcggagaccgaggccgtgtatgggatgaccttcaaaattc

SEQ ID NO: 712376 - DNA, 75 bp, Homo sapiens
agctgatcaaaccaaggatggagtgacctccattgcagacaggctgaatgtggactttgccttgattcacaaaga

SEQ ID NO: 712377 - DNA, 88 bp, Homo sapiens
gtgtgttcgagtggacaaaatggcgaagatcgccaagactcacgaagaagaacatgagctgcctgtggacatggaaaccatcaacctg

SEQ ID NO: 712378 - DNA, 50 bp, Homo sapiens
gtcagcttgttaattcctggctgcagatttgaaaaagggcgcatctatac

SEQ ID NO: 712379 - DNA, 50 bp, Homo sapiens
cccagctccagaagcgctacaaagacctaaaaatgagcaggcggaattgt

SEQ ID NO: 712380 - DNA, 96 bp, Homo sapiens
ctcatcccttatttattccaatctcttgtgtggggtgttgcggggagctttggagatgctgtgcaaccatattgcttctgggaaaaaatgtcaata

SEQ ID NO: 712381 - DNA, 82 bp, Homo sapiens
cagaggcttgtggagttgatccacccgagccaggatgaagatttccagtgtctcgccccatcctcaccctcagggttcccag

SEQ ID NO: 712382 - DNA, 83 bp, Homo sapiens
atcgcaaccaccgccctggccatctaccatgtgaaactatgttccaacttcctgtcaacaatcttggcagtttaagaaaagcc

SEQ ID NO: 712383 - DNA, 100 bp, Homo sapiens
aaatacaaatcacacgcataatggatgaaaggaaccgacagatggccctgctgtggcaccagtgaccaacgggaacacaacggtgccacccctgaacgat

SEQ ID NO: 712384 - DNA, 100 bp, Homo sapiens
gaatttaaaggagcagccctggtgtcacctatcagtaaaagagagagatcatcattgcctgaatttagctttgtgactgcaagagcaagaccagttcctg

SEQ ID NO: 712385 - DNA, 100 bp, Homo sapiens
cgaggcggagccgctgtcctcgtccccagcggtcccgcccaacgcccgactctctccttcgagaactcatagaacggaagaccagctccttggatcccaa

SEQ ID NO: 712386 - DNA, 50 bp, Homo sapiens
ggggctccaatggcgctttctacaagattgtggtggtgccatgcagcaag

SEQ ID NO: 712387 - DNA, 76 bp, Homo sapiens
ggtggttccaatgagacagggcacaccaaactccatctgaggagcaggagcggcttcgcttggagcaggagcgaga

SEQ ID NO: 712388 - DNA, 100 bp, Homo sapiens
tctcagtagggacaacaggcaggagaattatgggagcgcatttccccagggactcagcccaggagagtgttattactcgagatattcatcgtacatttcc

SEQ ID NO: 712389 - DNA, 100 bp, Homo sapiens
caagactcacagcattctttcttggcatttttgaatacgcctaccgatgctctggatcaatttgaactgctcctggaacacctggagtgcctggtgtcca

SEQ ID NO: 712390 - DNA, 82 bp, Homo sapiens
ctgtgctcgcgctactctctctttctggcctggaggctatccagcaaacttgaagggtcaaagtgcaaagggcagcttttga

SEQ ID NO: 712391 - DNA, 97 bp, Homo sapiens
tccaaagcagtcgtaagaagaggtcccaatcccccactctttccgccctaatggaggtctccagtttcgtactatactggcaattgctggagaagat

SEQ ID NO: 712392 - DNA, 82 bp, Homo sapiens
gagcagaggcttaaggtcttcagcggggcgctccaggaggcactcacagggaagatcagttttcctgccatccaggctgctc

SEQ ID NO: 712393 - DNA, 50 bp, Homo sapiens
cgcgaagctgccaaagccttagacaaattcagccgttggtctttgaaatt

SEQ ID NO: 712394 - DNA, 106 bp, Homo sapiens
cgcggagccggcgctgagaggggctgcggccggagcgggcggctgagacaaaggcgacggaattgaatgatctggcacgggaccctccagcacagtgttcagcagg

SEQ ID NO: 712395 - DNA, 83 bp, Homo sapiens
cgagctgagtggttgtgtggtcgcgtctcggaaaccggtagcgcttgcagcatgtcctcctgcatatgcccaagaggattggg

SEQ ID NO: 712396 - DNA, 75 bp, Homo sapiens
gtccgttggccttcgtacccgtcttgattgagagccagccccagtgcctgctgagccgtttgacaacactaccta

SEQ ID NO: 712397 - DNA, 50 bp, Homo sapiens
tccctaagaagacagcttgaacctagatcgggctcctgacaaccatggcc

SEQ ID NO: 712398 - DNA, 90 bp, Homo sapiens
agtcttccggttcttcgaggctcgacccgaggatgtcaaccctccaaaagatgtcttgggacaaggtgcgcattcctggtgtgctgcagc

SEQ ID NO: 712399 - DNA, 75 bp, Homo sapiens
cgatgcatgaaaccctttgccctggtgtaactgatgctgccaaagggtgtcgtagtcattcttcagcacaattct

SEQ ID NO: 712400 - DNA, 82 bp, Homo sapiens
tcgcaacctggcagccgccgccgtggaagagtgttctgccagttctggataatccactgtccaagaaggttcgaggcctcat

SEQ ID NO: 712401 - DNA, 75 bp, Homo sapiens
gctgaaataacccttgatcctcctcctaattgcagctggagaccatggccaaaatggaggtgaaaacctcacttc

SEQ ID NO: 712402 - DNA, 100 bp, Homo sapiens
tgtgaaaaaagccatttccgaagaatggtcctagtgccagatcgtgtcataaaatgtgcattgatattcaacggaggcaaatctacacattggggcgtta

SEQ ID NO: 712403 - DNA, 100 bp, Homo sapiens
tggatctgtacatcaaaaggatggattaaacgatgatgattttgaaccttacttgagtccacaggcaaggcccgacagtcattttgtttactcattcagc

SEQ ID NO: 712404 - DNA, 100 bp, Homo sapiens
ccacgatgaaaagaaatacctgtgatttgctttctcggagcaaaagtgccagaggcattgatgtgcagcaggtttctttagtcatcaactatgaccttcc

SEQ ID NO: 712405 - DNA, 75 bp, Homo sapiens
caactctagccagctaggttcctggtgctttgggggtgggagatgccatcccagcagtggaggtgtttgaagggg

SEQ ID NO: 712406 - DNA, 82 bp, Homo sapiens
cggcacccagacaggtggcgaaggcagaggagattttttatcaagcagaaatgcatcgaacaacgagaatcaagatcactga

SEQ ID NO: 712407 - DNA, 100 bp, Homo sapiens
gtggctgtgctggctctggctgtggcaaatgtgactgccatggagtgaagggacaaaaggtaacagttaacctcttccacatgcagcatctgcaggctgc

SEQ ID NO: 712408 - DNA, 100 bp, Homo sapiens
ggaagatggcggcgggggcgagattgaccctcttgctggaatgacatctcttagtataggtggttcagctgcccctcacacccagagtatgcagggtttt

SEQ ID NO: 712409 - DNA, 74 bp, Homo sapiens
ccagttccaaggactccacggggtgcaagcggtcttctctgtcttctttatggccagtaaaattctccagaaga

SEQ ID NO: 712410 - DNA, 74 bp, Homo sapiens
acttgtgaacattcaagtgaagcaaaagcctttcatgattatgttcctgcacttggccatcatccatgaagaaa

SEQ ID NO: 712411 - DNA, 51 bp, Homo sapiens
atcagcttcttaccaaatacagaagattgtgtcagcagctaaggtgtgtgg

SEQ ID NO: 712412 - DNA, 50 bp, Homo sapiens
aatatttaacttatatctgcctgtcagacttaattcagtgcacaaatgag

SEQ ID NO: 712413 - DNA, 100 bp, Homo sapiens
gagagttggaggaggtggcggcgggcagaggtgatgtctgggagcccttccttgacagcccgggccgagaagcctcgaagcggaggatccctgtgtccca

SEQ ID NO: 712414 - DNA, 100 bp, Homo sapiens
ggcgatggcgctctataacccctaccgccacggaatgggtaccacagaccatgtcatcgtcctggcgtccacgaaccgagctgacattttggacggtgct

SEQ ID NO: 712415 - DNA, 83 bp, Homo sapiens
aacttgtgtgttaaagtaacagatgatttagtttcctaaagaatattcttacatataataaagaattcccatttgatgttcag

SEQ ID NO: 712416 - DNA, 98 bp, Homo sapiens
aggaactgcgcagcctcttcgagcgccgcggacgcgtcatcgagtgtgacgtggtgaaagcgtggtaccatgcgacgacgctatgaagatgatggcat

SEQ ID NO: 712417 - DNA, 75 bp, Homo sapiens
ccggcgccaggccacccggccgtcagcagcatgcagggaccagctctcagctgatatgtacagttttgtggccaa

SEQ ID NO: 712418 - DNA, 90 bp, Homo sapiens
atctggacaaaggaacaggtatctcagttctaggtacatgaaatccactggtgtgctggtaaatgtttaataaccagtcctctggaaagg

SEQ ID NO: 712419 - DNA, 126 bp, Homo sapiens
acttggagacattcacactgaattgggatgggatcgcttctaagccactcactctatggtcatcagaagctgaagttgctccttgagggcaggacagttcttatggctttatccgttgcgtaagca

SEQ ID NO: 712420 - DNA, 76 bp, Homo sapiens
gcgaatttgaagatagagacaggtctcatcgggaggaaatggaggaatccgctgtgtggcttacaataaccagtca

SEQ ID NO: 712421 - DNA, 100 bp, Homo sapiens
ggcagcagtgctgttaccactctgggtgatccagccaaaggagtacttcttgcaagcagagctgacaagcaacgtcttaaaaacaggcgtggtgcgctgc

SEQ ID NO: 712422 - DNA, 100 bp, Homo sapiens
tacgcggccgcggagacctacctgcggcgtcggcagctgctgctccgaggacaaccctccatatgataagggagccttcagaatcgaaatcaactttcca

SEQ ID NO: 712423 - DNA, 98 bp, Homo sapiens
tccccactgagctcttggaagagaggaaatgctgtctatgatttcttcattggccgtgaattaaaccctcgaattggtacttttgatctcaaatactt

SEQ ID NO: 712424 - DNA, 80 bp, Homo sapiens
aaatttggagtgtgcgtgcgcgccgagcggccttcaatgtgatcaacgggggctcccatgctggaaacaagctggccatg

SEQ ID NO: 712425 - DNA, 82 bp, Homo sapiens
cagggactgaaggtcacaccacagcgcttgagaagctgatgtctcctcgacttccaactggaaccttgaacccccacatttc

SEQ ID NO: 712426 - DNA, 100 bp, Homo sapiens
ccgccgcgggcgccgggagcgagctgggagggagccgcgcgcctttgtgcgcgcgccgagttgattatggaagattcccacaagagtaccacgtcagaga

SEQ ID NO: 712427 - DNA, 75 bp, Homo sapiens
cagcctgcggagcctgtggggcagttgtctgtgctgtgaatgccctcgcccaccatgtgctcaacaaggacctca

SEQ ID NO: 712428 - DNA, 106 bp, Homo sapiens
atgttcacgcacgggatccagagcgccgcgcacttcgtcatgttcttcgcgccctggtcgcaatggaagaagagatcgccgcgctggtcattgacaatggctccgg

SEQ ID NO: 712429 - DNA, 100 bp, Homo sapiens
attcactccagaaaatttgttccttgctatgctctctgttgtacattgcaactcacgcaagaataatccagaatggctactctgatctatgttgataagg

SEQ ID NO: 712430 - DNA, 100 bp, Homo sapiens
ttgaagtaccatggcgtggattaaaagcagaatcaaattggatatccccaaccttatggccagtggggccagtggtatggaaatgcacaacaaattggcc

SEQ ID NO: 712431 - DNA, 100 bp, Homo sapiens
gattcgcagtggtcgcttcttctccttggtattgttgcagcatctggcagtgagactgaggatgaggacagcatggacattcccttggacctttcttcat

SEQ ID NO: 712432 - DNA, 82 bp, Homo sapiens
cggggcgaggcagggccagcagcaggcgggagctgtttttggaaggaagaaagatggaaagcggtgcagttctgctggaatc

SEQ ID NO: 712433 - DNA, 100 bp, Homo sapiens
gattccgcgccagttgcctggctcacattcggaggctggtgtccagggtctcagcgcgggggacgactcaggtagctacagcaagctgggtagcaggcag

SEQ ID NO: 712434 - DNA, 50 bp, Homo sapiens
agacatggagattctcttaaaaaggaattgaatgatctggcacgggaccc

SEQ ID NO: 712435 - DNA, 100 bp, Homo sapiens
gcttttgaaccactggaaagtgaggaattttgaagtacaccgtggtgacattgtatcattggtttggcccagtcccgcggtgaaaggaaggttcaagtct

SEQ ID NO: 712436 - DNA, 82 bp, Homo sapiens
ctgctcatgttcaaagtaaaaacaagtaaagatctccgagcggcagtacacaatggcactgctcagcacgcaggcatgtgag

SEQ ID NO: 712437 - DNA, 76 bp, Homo sapiens
ggcaagcgcatcaacgtggaactctccaccaagggccgagacgcatccagagctttcgtgaccggggactgttctg

SEQ ID NO: 712438 - DNA, 83 bp, Homo sapiens
acagtcactgctgtggctgcgggaaagcctctctcttgcccaaaccacgatgggaatccaccacatttgctcaaagtatgggg

SEQ ID NO: 712439 - DNA, 100 bp, Homo sapiens
tcaggaatggagacacggcttcccccaaggaatatacaggtcccgcggcagtgctggtggccatggttcccgtagccagaaggagttgcccacagagccc

SEQ ID NO: 712440 - DNA, 82 bp, Homo sapiens
gtcacactttccagacagccaggagaaaatggatccatcgtgtggactaaagaggatggacatagaacttccacctctgctg

SEQ ID NO: 712441 - DNA, 83 bp, Homo sapiens
cgagggctcgcactcttctggtctcccaggcccaacccacctgaagatccacattgtttgaagttattgtgagtgcctcgagg

SEQ ID NO: 712442 - DNA, 76 bp, Homo sapiens
ctccatctggttcgaagtctcagcggtattctggtgcttatggtgcctcagggatgaactcaagcggcattacaac

SEQ ID NO: 712443 - DNA, 100 bp, Homo sapiens
gaggtgaacccaggggccgaagcccacccagggagttgatgactttttaaaactgtggacttaaatgttctgcaaagtcttacacaaaagcccaatacag

SEQ ID NO: 712444 - DNA, 97 bp, Homo sapiens
ctgactcgtaaactgcgcacaggagacctgggcatcccccctaaccctgaggacagtaccacagcagcctggcttcactgaatgggctggaagtcca

SEQ ID NO: 712445 - DNA, 82 bp, Homo sapiens
caggcgctcaccatgttccctggagatagcctgggctggaagctcttctacgtcacaggctgcctgtttgtggctgtgcaga

SEQ ID NO: 712446 - DNA, 89 bp, Homo sapiens
tgtacctggtccactgaaaaattcttcagattggaaaataccacaggatggagactacgagtttaaagatgtgcgggacatcctcaccc

SEQ ID NO: 712447 - DNA, 102 bp, Homo sapiens
aaatctaagcaactgttcaatgggttaagttccagggtcacccccgagaggacaacaggcatctggaagtgctctctcgccactctgggtgctttactgtct

SEQ ID NO: 712448 - DNA, 97 bp, Homo sapiens
tggtggatcattgctctttgaattccagtcccgtcatcacagaacacatagattttgccacccctatacagcagccagcaatggagcctctttgcaa

SEQ ID NO: 712449 - DNA, 51 bp, Homo sapiens
ggcgctcatggaggtgtctgtgtctgatcgaagcaaagctgagatggattt

SEQ ID NO: 712450 - DNA, 100 bp, Homo sapiens
cttagaagctaccgagttaccctaagaaagatgcacaaagcagggtcatcagaagcctctcgattcaaaagatgataataccgaaaaacactgcccagtg

SEQ ID NO: 712451 - DNA, 98 bp, Homo sapiens
cccagccgaggtaccgctgaagaggaatcaattttgtttttggctttcacccccaaccagtgaccaaagacttgaccactcaaagtccagctccccag

SEQ ID NO: 712452 - DNA, 73 bp, Homo sapiens
ggcgctcgccctagctccactgcacagatgccacggcggagccggcgggacctgctgaagctcacacccgtgg

SEQ ID NO: 712453 - DNA, 100 bp, Homo sapiens
cgacaggacagaaagagtgtgcagcggattaaagctaaagacatagttcctggtgatattgtagaaattgctggcaccgacatatgtttgtaaaacaagt

SEQ ID NO: 712454 - DNA, 49 bp, Homo sapiens
gattctttggggaacactgtcagaatgagttactgtgacaacaacatac

SEQ ID NO: 712455 - DNA, 74 bp, Homo sapiens
atcacatcatccttactccagtggagaatttctgtcatttgcatgatctgggaaaggttatttgtcaatgaaga

SEQ ID NO: 712456 - DNA, 78 bp, Homo sapiens
cagagtaaagctgctggacaacaccatggaaatatttgacattgagaggagaattctgcctaagccaactcgaaaaag

SEQ ID NO: 712457 - DNA, 75 bp, Homo sapiens
cttgcgaccgtatccgctagcgcggcctgggatgcgcttgggctccctgctctgcttatgataatgtcaacaaag

SEQ ID NO: 712458 - DNA, 50 bp, Homo sapiens
tctgccttctggacaatctttccgatgaagttggagcccttgtttttgac

SEQ ID NO: 712459 - DNA, 51 bp, Homo sapiens
tcgcaagtctgccacagtaaaacctgggaccagcgcatcagccaggacgtg

SEQ ID NO: 712460 - DNA, 100 bp, Homo sapiens
cccaatggctggactcctgagggaggctgtggcttctgcaaccaggaccggaggacactcccgggggggcagcctcccgcgacgatgcccctcaacgtta

SEQ ID NO: 712461 - DNA, 100 bp, Homo sapiens
atattattgtagatctagaagtcactttggaagaagtatatgcaggaaattttgtggaaaaaaatctgctgatattgtaatttgtgatgaagagtgtgac

SEQ ID NO: 712462 - DNA, 90 bp, Homo sapiens
ttggtgtcaaaggtttgcactgagctggacaatcacttggggatcaacgacaaggaccttgcggcaacctttggcactgcatccatgagc

SEQ ID NO: 712463 - DNA, 96 bp, Homo sapiens
tggaaggatgcacaagttccaaggttacgtttcaacttatgaaaatatgcatcagtttaatactgtcttggaattcatgagatggaagcataggtc

SEQ ID NO: 712464 - DNA, 96 bp, Homo sapiens
gcgcatcgaggatttggcgctgcagaaccagatccgggagcacgtcatctccatcgaggcattcagcaactagttcctgaatataaggaaaaacag

SEQ ID NO: 712465 - DNA, 75 bp, Homo sapiens
ggcggcccagctgggcgagtatctggaggagatgatcccagactttaaacagcaaatttcagaattggagaaaca

SEQ ID NO: 712466 - DNA, 98 bp, Homo sapiens
gatttttggcctaccctccaaagaaaaggtgcggtggctactaaagttcgaaggcacgatatgcgtgtccatccttaccaaaggattgtgaccgcaga

SEQ ID NO: 712467 - DNA, 117 bp, Homo sapiens
cttcccgcgtccgccgattcctcctccttggtcgccgcgtccttggctggcgtgacggggaggtttactgcatcgacgcgcggttctacgggaacgtcagccggttcatcaaccacc

SEQ ID NO: 712468 - DNA, 74 bp, Homo sapiens
gaggctaaaggaagaacaacagatggatcccttcagaattatatccagatcgagagacagaagattctgaaagg

SEQ ID NO: 712469 - DNA, 100 bp, Homo sapiens
gcagcagcagcagcggcggcggcggcagcagcagcagcagcattagcagcagcagcttctctcaatgctgagtagtgctgcagggtgcacagctgatcgc

SEQ ID NO: 712470 - DNA, 51 bp, Homo sapiens
aagctttcctaggccaaaaagagacccagaacgctggacaaacattccttt

SEQ ID NO: 712471 - DNA, 75 bp, Homo sapiens
gaggcgccctagacatcttctccctcccttgcctcagtacgaggatgtcgtccaggaaagattgtgcagatgact

SEQ ID NO: 712472 - DNA, 74 bp, Homo sapiens
ccgcctttgatcgtcttcctcttcagccatccagatgaagactggcccatttgcagagcactccaaccagctgt

SEQ ID NO: 712473 - DNA, 101 bp, Homo sapiens
ggataacccttctcctttctacaacccgttccagttcgagatcaccttcgagtgcatcgaggacctgtctgaaggaatttagataatgggctgtgtgcaat

SEQ ID NO: 712474 - DNA, 100 bp, Homo sapiens
agggattgctactgcacggtgaacctggaccaggaggaggttttcaggaccaaaattgtggaaaagtcactctgataacgaaggaggcccaacttcattc

SEQ ID NO: 712475 - DNA, 84 bp, Homo sapiens
ggaagatgcattttctaagctgaaggagaagtttatgaatgagttgcataaaattccatgaaatgggtcctgatgaatatgaag

SEQ ID NO: 712476 - DNA, 100 bp, Homo sapiens
gccaaggctaaaagacgaaataccaccggaactggtcgaatgaggcacctaaaaattgtataccgcagattcaggggcttcaagaagcgtgcacctcggg

SEQ ID NO: 712477 - DNA, 83 bp, Homo sapiens
ctaaacttttggccaagagaatgaaggaggcatttggctttattgaaagaggtgatgttgtaaaagagatattctttcactat

SEQ ID NO: 712478 - DNA, 75 bp, Homo sapiens
cacggccacggcgctggtcaccggggtctgcctggtggtaagcatccgtggcattcaagacgaagatccccctga

SEQ ID NO: 712479 - DNA, 100 bp, Homo sapiens
atgatattgaaaaaatcgtctgtctcctgttttctaggtggaaagaatctgatgagccttttaggcctgttcagatctttgtagaatttgatggctgtaa

SEQ ID NO: 712480 - DNA, 75 bp, Homo sapiens
gttccttattttgtgcttgaacttgatcaaacaggcatcttattatagaaaactttatccctctggaagaaaaaa

SEQ ID NO: 712481 - DNA, 98 bp, Homo sapiens
atgtcaaagtgcttaggctgatatccttgggaactgtggaggaaatcatgtatttacgacagatatacaagcagactaccatggctgcaggagtcttg

SEQ ID NO: 712482 - DNA, 105 bp, Homo sapiens
gacgctggcactatggtcatggcggaggggacggcagtgctgaggcggaacaggccgggcaccaaggcgcagtgaagggaatttggctacaaagcagatcgtatt

SEQ ID NO: 712483 - DNA, 100 bp, Homo sapiens
agctgagctgcgaggaaaatggcggcgggaggttccatgcaggtgatgaacaagacccggcgcatcatggagcagggcggggcgcacttcatcaacgcct

SEQ ID NO: 712484 - DNA, 98 bp, Homo sapiens
ctgcacttcttttttgagaaaggaaggaatatatcctgactgattcagatataatttctacagtagaatttaatcattctggagaattactagcaaca

SEQ ID NO: 712485 - DNA, 71 bp, Homo sapiens
ttcctgatgggggcgtgcatattgtagggggtgaactggttcctgttaaaggtcaagacactgtcaaaggc

SEQ ID NO: 712486 - DNA, 75 bp, Homo sapiens
gccgcgggcgcgaccggaggcaggaactgtggctgcaccatctgtcttcatcttcccgccatctgatgagcagtt

SEQ ID NO: 712487 - DNA, 82 bp, Homo sapiens
aacttgctgcggtttttgttcctggggctgagtgccctcggtgagaagccctaccactgcaactgggacggctgcggctgga

SEQ ID NO: 712488 - DNA, 74 bp, Homo sapiens
gcagtaccagggagcgactgaagtgcccatgccgcttgctccggagaaggcgacactaacaggtgaagatctcg

SEQ ID NO: 712489 - DNA, 82 bp, Homo sapiens
cttagctgtgctcgcgctactctctctttctggcctggaggctatccagcgctctccgtgtgaaatggtcccatctcagact

SEQ ID NO: 712490 - DNA, 83 bp, Homo sapiens
cagaaaaccaaacaccacatgttgtctcttagaagtgggagctgaacgtactgccaaatctgtcgaaagggagataatgaaga

SEQ ID NO: 712491 - DNA, 99 bp, Homo sapiens
ggtgcacattctcctaggctctcccggttatggtggagaattcagactttaccccctcacaagtaggatgtctctttaccttccttgctcggcagcttg

SEQ ID NO: 712492 - DNA, 82 bp, Homo sapiens
gccaagatggcggtgctgtcaggtcaaaatgcagatcttcgtgaaaacccttaccggcaagaccatcacccttgaggtggag

SEQ ID NO: 712493 - DNA, 100 bp, Homo sapiens
cgaacagtgctgagtggcggcagcctctacatcgagatcccgggcggcgcgctgcccgaggggagcaaggacaggggaggagccccagccccgcgacgag

SEQ ID NO: 712494 - DNA, 100 bp, Homo sapiens
aagggattgctggctacagcttcagaagaccgaagcgttcgtatctggaagacttaattcagtgcacaaatgagatgaatgtgaacatcccacagttggc

SEQ ID NO: 712495 - DNA, 100 bp, Homo sapiens
gatgagaaaagcagatggttaagagctctacaacttctgtgagtgtactaatggtcacttgatgtgcgctggctgttttatccacctactagcagatgcc

SEQ ID NO: 712496 - DNA, 90 bp, Homo sapiens
caagcaatcctaccatgtcagccttcccagtagctggaactacaggattccactgcaatgagctggtggaggaataatttctggatcatc

SEQ ID NO: 712497 - DNA, 90 bp, Homo sapiens
cgactccgaagacttctctacgtcggaggaggacgaggactacgtgccgtcggtcaccaggagactaaagtccatcaaaaacatccagaa

SEQ ID NO: 712498 - DNA, 75 bp, Homo sapiens
cacctgatgaatggtggagagttacgcagataaatgcggtacgtgcaatagttcctaataagagcaacaatgaaa

SEQ ID NO: 712499 - DNA, 90 bp, Homo sapiens
ggccatgcctttcaagtgcatgcagctcactgatttcatcctcaagtttccgcacagtgcccgtccgtgatgatgggaacatgcccgacg

SEQ ID NO: 712500 - DNA, 100 bp, Homo sapiens
tccaagaaaaaaaccacaaatgtttttctgttttgcctgaatacatgatttaaacaagagatttccacagaaggatccacctctgatgttcactgaagag

SEQ ID NO: 712501 - DNA, 100 bp, Homo sapiens
gcgggacacaaaagccctgtcacagctgtctctgccagtgaaacctcaggtgatattgctactgtgtgtgattcaggaggagatgttaaagtaacccatc

SEQ ID NO: 712502 - DNA, 106 bp, Homo sapiens
aaaattctgaactcaggacttggcaagtggatgtggacctggccaagcagtgtgcagacctgcctgaggaggatgaggaattgcgcaagaagctgtggctgaagat

SEQ ID NO: 712503 - DNA, 100 bp, Homo sapiens
cagcgaggctttcagttctttggaattccattcttttccttattcttctgatgtggatccagtgctccagctgaggctgcaacaaaggaggacgagagaa

SEQ ID NO: 712504 - DNA, 85 bp, Homo sapiens
aacgcctcccggctctcgtcagcctcccgccggccgtctccttaacaccgaacacctgatgatgatgatgattttgatgatgagg

SEQ ID NO: 712505 - DNA, 96 bp, Homo sapiens
acctgccgcttttaccgtccccctcgatgttcccactgcagtgtctgtgacaactgtgtggagataagaaacctgatcgggaagaaattcagatga

SEQ ID NO: 712506 - DNA, 98 bp, Homo sapiens
ggggccccagaggccgcggacaccgacctggagatttaatccagagactgacttcactatagaacccacagttgtatcaatggttggggaaagatagt

SEQ ID NO: 712507 - DNA, 87 bp, Homo sapiens
caccgttatgtgggaagcgaatccaagatcgagatggtgatcatggagcgtagcaagctctcagagctggccgccagcacctccgtg

SEQ ID NO: 712508 - DNA, 75 bp, Homo sapiens
aggaagccacgtgcagacatctacaaccttcgatctcctgacgaagccagccccagtgcctgctgagccgtttga

SEQ ID NO: 712509 - DNA, 100 bp, Homo sapiens
cccccacctccccccggagccaggctggtttcggaaatgcccttacagcagcagtgaacacctacctcttcatgatgcaagcccaaggcattctgatccg

SEQ ID NO: 712510 - DNA, 73 bp, Homo sapiens
ccgagagcgtgaccgagagcgcgaatatcgtcatcgttagaagagctgaggcttcgaagacctcagaggactt

SEQ ID NO: 712511 - DNA, 82 bp, Homo sapiens
tgatattgtggatcccaatgattcagatgtggaggagaatatatcctctaaatctgataggcatttgacaatgaatatggaa

SEQ ID NO: 712512 - DNA, 90 bp, Homo sapiens
ccgagttcaacatcctcctggccaccgactcctacaagggggatatgagactttctactcggaatatcctgagtgttgcgtggatgtaaa

SEQ ID NO: 712513 - DNA, 75 bp, Homo sapiens
cagacggctgcccttcaagtaccagtgacttaagagattaaaattaatttggttgctgttggttctgaacaaata

SEQ ID NO: 712514 - DNA, 110 bp, Homo sapiens
atgccactggtcaagtccttagatatgggcaggacttttgcctggggataacaggaggatttgacaacaaaatgatatttggagttcttacaacatggcagacattgaca

SEQ ID NO: 712515 - DNA, 100 bp, Homo sapiens
cgacttcctcaaaggctactgccccctgggtgcaaaggtactccaaagattcaggtttactcacgtcatccagcagagaatggaaagtcaaatttcctga

SEQ ID NO: 712516 - DNA, 75 bp, Homo sapiens
gaaaggtggaggccgggaggacgaaggtccctgtgcgttttattgcgacctgccggtgggaactttgtctccgag

SEQ ID NO: 712517 - DNA, 101 bp, Homo sapiens
gtttgaacaggccatccaggcagccagccggatcattcgaaacgctagtcctgctgatgggcaaagaaggtgtccacggtggtttgatcaacaagaaatgt

SEQ ID NO: 712518 - DNA, 98 bp, Homo sapiens
aggacatgatccaggaagagcagtaagggactgagctgctgcttggattccttagcaccaccacagctcagccagaacagaaggcctcgaatctcatt

SEQ ID NO: 712519 - DNA, 82 bp, Homo sapiens
taggcgtggagagggagtgatgtcttccagactcggtgctgtacccgccgaggctgaaccgtctgagcccagaagtgctgag

SEQ ID NO: 712520 - DNA, 73 bp, Homo sapiens
accgccatgcccaagaataaagccgcagggccgtaggcagccatggcgcccagccggaatggcatggtcttga

SEQ ID NO: 712521 - DNA, 98 bp, Homo sapiens
cagtttctttgagcagtttgtggaagcgatcagaccctctttgcaagttcagtgcttaacctgaccgaactggctgcccttcggcctgaccttgggaa

SEQ ID NO: 712522 - DNA, 75 bp, Homo sapiens
tgacctttttgaagcctttgcaaaacacacagcatgcctctgcaatgccatcattgctttgctgaaagttcccct

SEQ ID NO: 712523 - DNA, 75 bp, Homo sapiens
cggaaggtgatgcccaagatggaccagggaactgctcgcagaaagaagaaggtggttcatagaacagccacagca

SEQ ID NO: 712524 - DNA, 100 bp, Homo sapiens
cgggaaaccgtgcaggattggtggtgattttcatagccaactgtggacgtggctggaggagctgcagaaggagctgctggacgacgtgtatgccgagtcg

SEQ ID NO: 712525 - DNA, 98 bp, Homo sapiens
cagggggcagaatacatcgattgcatcagcaatgtggcgcacggtgtcatggagaaactccagctgggcccagagattctgcagcgggaaaatccaag

SEQ ID NO: 712526 - DNA, 100 bp, Homo sapiens
cagcctacttcggcagatgtgggagaggatggacgagggatgcggagagaccatatatgtcattgggcagggatcagattcagtacctctcgccagactc

SEQ ID NO: 712527 - DNA, 100 bp, Homo sapiens
tgagacactactaccaccgccacacgcgcagcatcttctgggagctccaggatacctgggatgaactcctaattggtagtgtagaagtgaaaaaggtaat

SEQ ID NO: 712528 - DNA, 98 bp, Homo sapiens
acagacccgcgccgccgacgacccagcagccgccatggctctgctccgaggtttggaaggcgctttgagtccccgctgctgtggcagagcgccatcat

SEQ ID NO: 712529 - DNA, 80 bp, Homo sapiens
cactagaatatggagactgttcaatcaccaggaaactgccaagttttggaccttatctggaacagcgcaagaaaatcata

SEQ ID NO: 712530 - DNA, 82 bp, Homo sapiens
cgggcgtccgggcagcggagttcatcaagaattacatgaagggttttttatcagcaattggacaccctttccccaaaatgat

SEQ ID NO: 712531 - DNA, 90 bp, Homo sapiens
ccctcagccaccgcccaggaagcttcatggctgggcaccaggccctgactaccagaagcaaggtctcgctgtgttaccctggctggagtg

SEQ ID NO: 712532 - DNA, 102 bp, Homo sapiens
ctctgggactcttggtgccaacagagttactctgtccatggaaataaaaggcacatgaacaagtgcattctctctcttagagaccttaaagtggctgttgtt

SEQ ID NO: 712533 - DNA, 78 bp, Homo sapiens
aacagacacaaattcacagggaagaaagtgactgaagagcttctgaccgataatagcattgatatgaaccatggacaa

SEQ ID NO: 712534 - DNA, 51 bp, Homo sapiens
cgaccattgtctcatctcaccaggctccggtagattgcaaatgacctgctt

SEQ ID NO: 712535 - DNA, 83 bp, Homo sapiens
gccattcctagagagaggcgatgggcctatttagacccaaatgatttgtacattgtagaacccctcaagttttctccagaaaa

SEQ ID NO: 712536 - DNA, 85 bp, Homo sapiens
ttcaaaagatgtttgaaaagctggtgctgaagagacctgtcacctctgaggaactccttactcccggggctccgtatgcaaggaa

SEQ ID NO: 712537 - DNA, 96 bp, Homo sapiens
cccagagatacagagagtccgggagaaccaaaagaacttcagccttgaacatcagaaagcctgggctttgaacctgaacggttttgatgtagagga

SEQ ID NO: 712538 - DNA, 100 bp, Homo sapiens
gacgatctgcacttcgcattttggcattgacatttaattttagggtcctttatatagaagggagagtaggcacgtggaggagttcagccccagagctgtc

SEQ ID NO: 712539 - DNA, 75 bp, Homo sapiens
cccggccagacgtgcgaacagctccagctggacgagatgatgcctattggccagaaggaaagcgtgtggcaatgg

SEQ ID NO: 712540 - DNA, 89 bp, Homo sapiens
tggaatgtttcagtttgggaaatctggatgccaaacgagattggggccatgccaaggactatgtggagtctcgctctgtcgtccaggct

SEQ ID NO: 712541 - DNA, 82 bp, Homo sapiens
cccggagagaagcctgagctgccggcattgccgggcaccctgctgcggagcagacgtgaagtacgaattggagcaatgttgg

SEQ ID NO: 712542 - DNA, 83 bp, Homo sapiens
cctggatcttcgaacttttgacacggctttggaaacgacgtcatgtgttagatgaatgatttcggaatcaagaatatggacca

SEQ ID NO: 712543 - DNA, 90 bp, Homo sapiens
gagactccttgggggtcgagcacataacggggttcgggtgtctcgtgtgtgaacatcacagggaaaccagcagatgagggcgtaagtgaa

SEQ ID NO: 712544 - DNA, 75 bp, Homo sapiens
gaagctggtgacggatgaggacgtgttccccacaaaatacgggggcttcgccaccttctcctcctgcttccccgg

SEQ ID NO: 712545 - DNA, 118 bp, Homo sapiens
aaggtgatagacttcgggccttgaaaagcagaagacaatccaaaacaaacgctattcctctcacatcctaaatgcccaggagatgttgattttcataatagtgactgggacattaaga

SEQ ID NO: 712546 - DNA, 100 bp, Homo sapiens
ctgaagagcgcgccgccctctcgtcccactttccaggtagctacagcaagctgggtagcaggcagatccaaaggatatcatgaagtttccagggcctttg

SEQ ID NO: 712547 - DNA, 100 bp, Homo sapiens
agattgtgaagaagaatttcgatctccgccctggggtcattgtcaggcccagcagtgagaaactttcacaatctgtaatagatggtgtgactgttctagg

SEQ ID NO: 712548 - DNA, 75 bp, Homo sapiens
ccccgccagcagcactgtggaggccgtcctcgggtggatgtgaacactgaccggaagatcagtgccaaggagatg

SEQ ID NO: 712549 - DNA, 96 bp, Homo sapiens
gtaaaggcggcagtgcgggaaggatctccaggccagttcagctgcagctcagtgcggaaagcgtgggggaggtgtatataaagagtaccgagactg

SEQ ID NO: 712550 - DNA, 50 bp, Homo sapiens
tattatgaagttataaggttccccatggggccctcctcaggacctgtctg

SEQ ID NO: 712551 - DNA, 100 bp, Homo sapiens
tctgatgcagcagagcttggaaggatgcttcagctcatcttaggctgtgctgtgaactgtgaacagaagcaagtcctacgaggacctggtccagagactg

SEQ ID NO: 712552 - DNA, 98 bp, Homo sapiens
gcatcatgaagcgggctggcggcgctgccgctcccgggcggccgcgggcggccatccgggtgacctgcataggttcctgcggggtctccaacaaggct

SEQ ID NO: 712553 - DNA, 100 bp, Homo sapiens
gagggaaatgggaatgtacacgataattaaagagtaaagttgtgctcaacggagtacaagcgcaagctagccagagtttccctggtgcgcaaagaactca

SEQ ID NO: 712554 - DNA, 97 bp, Homo sapiens
cattatggagggaggtttggcagatggagaacctgatcgaacttcggttaccattgccacctggggctttttcaggactctggaagaatcaggaagc

SEQ ID NO: 712555 - DNA, 88 bp, Homo sapiens
aaggggcagtacaagcttacgtctctgctcttcagtacaatcctatcgtaaagctgaaaattgaaatcatgaaagtagacaggactaa

SEQ ID NO: 712556 - DNA, 100 bp, Homo sapiens
gatccccagccgcttctgaccacacagacggggcggacctgtcggcactggcggctgaggctgaaggccctgaagtgggttcggtggaggatcagaggag

SEQ ID NO: 712557 - DNA, 74 bp, Homo sapiens
atgaattgggtagagagaccaaagatcttgatgagtttttcagaagaagtgaagtcaagatgaagaaccatttg

SEQ ID NO: 712558 - DNA, 100 bp, Homo sapiens
ccaaaatgatacctggaggcttatctgaggccaaacccgccactccagaaatccaggagattgttgataagggtgcgggtgagccaatggatttgggtga

SEQ ID NO: 712559 - DNA, 100 bp, Homo sapiens
tactggcaattggttttcggctttggcgctcggggtgactcttctcaaatgccttctcatccccacatactatcaagcccagagagagacgtggagaggg

SEQ ID NO: 712560 - DNA, 96 bp, Homo sapiens
tcccaaatcatgggccagtaacaagcaaggtgggcaaggagatggtcctccacagcctgtgaatccccctagacctttcaagcatagtgagcggag

SEQ ID NO: 712561 - DNA, 74 bp, Homo sapiens
gagtgaaggacctgaaaatcatatagagaaagacagatggaagtctttaagccgattacacctcaacaagaagg

SEQ ID NO: 712562 - DNA, 100 bp, Homo sapiens
agcggtggcggctgcgctggcgcggcttttggcggcctttctgctcctcgcggcccaggtgacgcggctctgtgacctctcagtggaaggggactcagtg

SEQ ID NO: 712563 - DNA, 106 bp, Homo sapiens
ccttcttcaggagagcgccccagggcaagccccgctccggccaacaaacaagttggatggcttgaggactggtactaaaaggaaacgtgactgggaggccattgcc

SEQ ID NO: 712564 - DNA, 100 bp, Homo sapiens
gttcttccatagtggatgttttggccactggacatcagaaccacattttgggtttgaagaatcttctacatggctcgcttctcatatgtgcggatgaaat

SEQ ID NO: 712565 - DNA, 82 bp, Homo sapiens
cgcgcaagggctgcggagccgcgggccggcgagcgcgtcgccaccatgagctcccagctcctccagcagccgacaggaggcc

SEQ ID NO: 712566 - DNA, 99 bp, Homo sapiens
ccactatgccccttaccacaggagctctgcacagggctccagtggtccagaatcttttactgtctaccactacaatggattgaagcagtcaaattataa

SEQ ID NO: 712567 - DNA, 75 bp, Homo sapiens
ggaaaaagcctcatccccagctctgcagtctccagggtaaagaattctccggaaatcctatcaaggtctcatttg

SEQ ID NO: 712568 - DNA, 78 bp, Homo sapiens
ggatgctgatagtctccagcgggcctggactgtgggctggtgtgtggaactggatgaagctggaggcagattcgtcgc

SEQ ID NO: 712569 - DNA, 75 bp, Homo sapiens
caccgtcaagtttctctccaagaaacacccgccgggcagcagaggtctggatggatgaatacaaaaatttctatt

SEQ ID NO: 712570 - DNA, 100 bp, Homo sapiens
gactgaggaaacacctgaaggtgaagaacatcatccagtggcagacactgaaaataatttaattggttggggtcagataagaagaggagtgacaatcaag

SEQ ID NO: 712571 - DNA, 83 bp, Homo sapiens
ctcagatctgtggagcagatccgatggagaggctgagctgctccaggacttgggaatagcctaacatggcagaccagagacag

SEQ ID NO: 712572 - DNA, 100 bp, Homo sapiens
ggcagctcttcatggcatggtggccttggtaggctctgaaggggatgtaatgcaggcatataaaacctttgctaaccgagtaaacaatttaaagaagaag

SEQ ID NO: 712573 - DNA, 101 bp, Homo sapiens
ctgaaccccaaggccaaccgcgagaagatgacccagaccctgaaaattgttcggacagcagaactttcgcctttcattgtgttcattgcacctactgacca

SEQ ID NO: 712574 - DNA, 100 bp, Homo sapiens
tgaaaggcggctccaaggagtactggtttgtgctgactgccgagtcactgtcctggtacaaggatgaggaggccctagactggagctggttacagacgga

SEQ ID NO: 712575 - DNA, 100 bp, Homo sapiens
atgcaagtgtcatctctcgattcccactcagctgtatctggaaatgcccaatcctttcagacaggggcaagtgtccgagtggtgaatcagctacttacag

SEQ ID NO: 712576 - DNA, 100 bp, Homo sapiens
aacattttgggctttcctgtaccgaacagatttgcttgttgggtcgaacttgtggctattcatttattctcaccaggtatcttaaatagcgaagatggag

SEQ ID NO: 712577 - DNA, 102 bp, Homo sapiens
tggccaagaagatctgctcccattcggccccggaacagcaggcgcgcacgcgggaaagtgactgagaccgaagatgatagtgatagtgacagcgatgatgat

SEQ ID NO: 712578 - DNA, 101 bp, Homo sapiens
gttcgagatcagccagccgaccgagggcagcccaatggatccaatggtgatgaagagacctcagttgtatggcatgggcagtaaccctcattctcagcctc

SEQ ID NO: 712579 - DNA, 75 bp, Homo sapiens
tattattacaagaataaaggcaggaatcaatccattcaatggacctgtagttcataaacatcaattcaacagtaa

SEQ ID NO: 712580 - DNA, 74 bp, Homo sapiens
acccaaaattgcaagacctttcatagagacaatgcagatcttcgtgaagactctgactggtaagaccatcaccc

SEQ ID NO: 712581 - DNA, 98 bp, Homo sapiens
tacgtggagatcaagcgcagcgatggttggacgtgataagtatgagcctgcagctgtttcagaacaaggtgataaaaagggcaaaaagggcaaaaaag

SEQ ID NO: 712582 - DNA, 100 bp, Homo sapiens
tctggttcttcagagagtcctgctagtctaaagcgagtagcctctccagcagccaagccggtcgtttcgggagaagtttcagagtgctggccacaccaaa

SEQ ID NO: 712583 - DNA, 110 bp, Homo sapiens
cttggattgtaaacccagagcctccccaagggcactctcttcctggaagaagggggatgtgagcgtgcaggagcatgaaagatagtgtgtgtaccatatcagtggcgtgt

SEQ ID NO: 712584 - DNA, 82 bp, Homo sapiens
cttcaagtgcatgatgtgcgatgtgcggaagggcacctccacccgggctggaaacaggattgttgaaatactccctgaacat

SEQ ID NO: 712585 - DNA, 83 bp, Homo sapiens
agagctgccgagcaaggatgcctgagagtttttagaacttcagccataaaaatgggcagaattttccttgatcatatcggtgg

SEQ ID NO: 712586 - DNA, 75 bp, Homo sapiens
caggaagaaaacgagccagtgatttacaatagagcaaggtctgttgcggttctcccacttttccataagcagaac

SEQ ID NO: 712587 - DNA, 50 bp, Homo sapiens
ctttcagcacctgatggcctatcaccaggctggagtgcactggcacaatc

SEQ ID NO: 712588 - DNA, 96 bp, Homo sapiens
tcaagaagacaggcaaggaggtggtgctggaggactactggtgcctggatgatctgtaccgggagatggtgagatgctatgtggaaatcgttgaga

SEQ ID NO: 712589 - DNA, 100 bp, Homo sapiens
gaaggacggggcctggcccccgggactccctgtgccttgcttggagctgacgccgacgggtgggtttggaggatttgggacaacatctacaactgcaggt

SEQ ID NO: 712590 - DNA, 74 bp, Homo sapiens
aacaatcttgaatcatgaagctactaaccagagccggctctttctcggtacttcttgcaagggatatgcattag

SEQ ID NO: 712591 - DNA, 100 bp, Homo sapiens
gtcttcaatgacttccttatgctctctaatacccagttcatagagaatctttggagtttaacccttctgccaatccagaggcaagcacaatattccagag

SEQ ID NO: 712592 - DNA, 101 bp, Homo sapiens
acaacttggttcaatgggtagcctcaccatgaaatcacagcttcagatcactgattttcagttcacccactagaggcaaagacgtaagagagctaccagcg

SEQ ID NO: 712593 - DNA, 100 bp, Homo sapiens
accaaaattggacgtcgctctttgtctcgttccatttctcagtcatctactgacagctacagctcagatcttaccaatatatttgagtccttcctgcctc

SEQ ID NO: 712594 - DNA, 75 bp, Homo sapiens
ctccgagtccctcaactctctacgctttgcctccaaggttcatgtagtattgaaactctggaagagtggattcag

SEQ ID NO: 712595 - DNA, 100 bp, Homo sapiens
gaagctttacgttcatgtaaacagcatgacgtgaggccgtggatgcaggcattaaggtggcgacatgtctaagaatgtgagccagtcacagatggcaaaa

SEQ ID NO: 712596 - DNA, 101 bp, Homo sapiens
tccgggtctgtgccagcgacacactactggtgcctggatgatctgtaccgggagatggtgagatgctatgtggaaatcgttgagaagcttccagaacgccg

SEQ ID NO: 712597 - DNA, 75 bp, Homo sapiens
caacaatgagatcgtggacaagatcatgggcaaaggacagatccaggctgttactgaggcggagacacgggtgat

SEQ ID NO: 712598 - DNA, 83 bp, Homo sapiens
cacttctacacacccctgaagacagagagaccttaactgatgtaagaaatctcaaatttccaccattatttactcagaaatat

SEQ ID NO: 712599 - DNA, 97 bp, Homo sapiens
cgccagttttccactcccttccagcttcagtgccacttggaaaatgttcatagtccctatgaatctactagcaagaggaggaacgacgtagaagaga

SEQ ID NO: 712600 - DNA, 100 bp, Homo sapiens
gacttcggcggggcccaggtgagaaaggcccacctgtgtcctggttgagggtctccagggttctttggggcccgagaataaagccattattgcccgtgtc

SEQ ID NO: 712601 - DNA, 149 bp, Homo sapiens
agcgggtgaggttacagcccgagtgcaaaaagcgcctcaatgaccggattgagatgtggagttacgcagcaaagttactaaaagatgtaactgaactgcagatccttggtgaaatatctttcaacaaatctctatatgagggactgaat

SEQ ID NO: 712602 - DNA, 75 bp, Homo sapiens
cgtcgctggcagccgctgtacttgctgcctgtggaggaaccgattgtgtccacagatgaggtcatcttcccactc

SEQ ID NO: 712603 - DNA, 75 bp, Homo sapiens
gccgagttgtcgccccgctgggagaagtgaccctcctgcgcctgctgcagaaccttggcctgaaaatgctacatt

SEQ ID NO: 712604 - DNA, 101 bp, Homo sapiens
cgctgccgtctctggcacctaacccagcagaccgctcaccccatcgggagccaagccgccatggcctaccacagcttcctggtggagcccatcagctgcca

SEQ ID NO: 712605 - DNA, 75 bp, Homo sapiens
aaggtcctgtgctgcgtcagcgtgtgccaggggtacagtgcactgagggctgccatcctggaaaaaatgcctctt

SEQ ID NO: 712606 - DNA, 97 bp, Homo sapiens
gctaagatgccaggaccacctggaagcctagaaatgatcttaccaatatatttgagtccttcctgcctcagttattggcctatcctaaccccataga

SEQ ID NO: 712607 - DNA, 98 bp, Homo sapiens
gcacattccttttcacctcagagtcggtcggggaaggccacccaggagtacgagagggcctccaaagtggaccagtttgtgacgcgcttcctgctgcg

SEQ ID NO: 712608 - DNA, 100 bp, Homo sapiens
aaggggctccgcgccctccccagaggcatgcccaaggatgtgaccgagctcacaaagacattagcaggctgctggtttcatggacctgtaccacaatgac

SEQ ID NO: 712609 - DNA, 50 bp, Homo sapiens
ctcccaagtagctgggattgcagctactacagagccaatgaagtgcagca

SEQ ID NO: 712610 - DNA, 74 bp, Homo sapiens
ggacccgcctggctgcgagatatctgagatctgtatctgtggacctgaatgttgatccctcgcttcagattgac

SEQ ID NO: 712611 - DNA, 80 bp, Homo sapiens
ctgtccagccagcatggaaccaaagcggatcagagagggctaccttgtgaagaagatattaaggctaagacatactgcat

SEQ ID NO: 712612 - DNA, 51 bp, Homo sapiens
tgggtgtacctgctttgcttctctgcagagcatgtcctttgcaacctgatc

SEQ ID NO: 712613 - DNA, 100 bp, Homo sapiens
cgcccgccttccgccgtctcttcgagttcttcgtgctgctcaagggactttgaacatgtcggggatcgccctcagcagactcgcccaggagaggaaagca

SEQ ID NO: 712614 - DNA, 127 bp, Homo sapiens
agagaaacaagaaaatggactccctggctgctggagagttgaatgccagccaccagccatgggattactacagcatcccatttcccacacccactactccgctgactgggagggatggtagcctggc

SEQ ID NO: 712615 - DNA, 97 bp, Homo sapiens
ggaggcgggagaggcgagctcgcgatgagtggtctcggcaggctcttcgggaaggggccatggagttggggagagaatgtctaaatctctgggggta

SEQ ID NO: 712616 - DNA, 100 bp, Homo sapiens
catctttaagaagaaactcaagggtcagagtcaacaagatgaccgcaatccccttgacactcatgaggaccatgatacttccactgagaatacagacgag

SEQ ID NO: 712617 - DNA, 100 bp, Homo sapiens
tggcggccgaggtagaggcagtggcgcttgagttggtcgggggcagcggcagaaatggtggagtcaatgaagaaagtagcagggatggatgtggagctga

SEQ ID NO: 712618 - DNA, 87 bp, Homo sapiens
atcaagtggcatccacgcttaaacaggtgaaacatgcaacacagtcactcctggcggcaaaccaaacaaaaccagagtcatctgggg

SEQ ID NO: 712619 - DNA, 100 bp, Homo sapiens
cagggctttgaatgcatcagaaccatgcacggttgggataattcttcactattccacccttgccacagtactatgggtaggagtgacagctcgaaatatc

SEQ ID NO: 712620 - DNA, 118 bp, Homo sapiens
agagaagcttcttcttgtgccgtgaacctcgttttgagattaagcctcagcaccccaatcagatgaaggctctgatattgactctgaaccagatttaccactaaagaggaaacagcgc

SEQ ID NO: 712621 - DNA, 82 bp, Homo sapiens
ctgagatcgtcaagtctcccagcgaccccaagcaataccgttcttttagaactcatcaaattgaagctgttccaaccagctc

SEQ ID NO: 712622 - DNA, 83 bp, Homo sapiens
caggaaattcagcctcaaaaccgtcctgctgcttgctgaccaaatgcgggctgacgcacgaggcacacaggaaggaggtggag

SEQ ID NO: 712623 - DNA, 100 bp, Homo sapiens
catggacagcgtgcggtctgggccttttgggcagcttttccggcctgacaacttcatctttgacatcaatgaatgccagtcttcaccttgtgcctttgga

SEQ ID NO: 712624 - DNA, 82 bp, Homo sapiens
ggcccaccctacatttagcgcatcatgtgatccgggtttggtgcacctcgatttggaggaagtagggcagggcccttatctg

SEQ ID NO: 712625 - DNA, 75 bp, Homo sapiens
cactggcaagtgcagcgcctgtaatgtttggcgagtctgctgcaagctttcttcctggtggcagatgacatcatg

SEQ ID NO: 712626 - DNA, 100 bp, Homo sapiens
tgcgcgtgcgcctgggggcaccgctgccgttccgagtccttattggaaatgaaggagttaagaagaagtaagaagcaaaccaaatttgaagtactcagag

SEQ ID NO: 712627 - DNA, 100 bp, Homo sapiens
gaccccaagacctgctccttccaggaaggccgagtgaagctgcccgaggcagcggcggcggcggcagcggtggggaaaagcggattccgccccgaaccac

SEQ ID NO: 712628 - DNA, 101 bp, Homo sapiens
acagacaaaattaaggaagatatccttaccgatgaagatgaaaaaacaaaaggactgtgggattccattaaaagggttctccaaaaaatgtggaatccttt

SEQ ID NO: 712629 - DNA, 83 bp, Homo sapiens
ggccgctctgggatcccggccaccagcaattgtccgagttttcttgaagtacaactaaggacaggtcaccactaggcactaac

SEQ ID NO: 712630 - DNA, 100 bp, Homo sapiens
acacaaggatcgagccaaaagctgcaacctcataggctgacccgcggctgattgagtccctctcccagatgctgtccatgggcttctctgatgaaggcgg

SEQ ID NO: 712631 - DNA, 90 bp, Homo sapiens
tccgaccgcctcggcaggaaccgggaccgccagcgcaggaggacctcagcagccatgtcgaagccccatagtgaagccgggactgccttc

SEQ ID NO: 712632 - DNA, 100 bp, Homo sapiens
gcagacggagctggagcgaccgagagagcttgtattggttggtgatggtggtactggaaaaacgaccttcgtgaaacgtcatttgactggtgaatttgag

SEQ ID NO: 712633 - DNA, 100 bp, Homo sapiens
tggagcactcgctggccgactgcgccgagctgcacgtcctcgaacgcgaggccaacagccccgattatagcatttgatgagctgaagactgattacaaga

SEQ ID NO: 712634 - DNA, 100 bp, Homo sapiens
acccctggacccccttgttccctcagctctaagggccgcgatgttgtacctagaagactatctggaaaatggcccactgcgtgaccttggttcagctgtc

SEQ ID NO: 712635 - DNA, 98 bp, Homo sapiens
tcatgccagagagtttggaaaaataattaacttcaagaccccagaggatgccaggcaccagtatgcatgagcgggtgaaccgaacagaaagacagttt

SEQ ID NO: 712636 - DNA, 98 bp, Homo sapiens
ccgaccaacatccagaacttccagctgcccccagagctgagctcaatgtgcagcaatggatgacgacagcctggatgagcttgtggcccggagcccag

SEQ ID NO: 712637 - DNA, 99 bp, Homo sapiens
actactccgtgacctggtacatcgccgagttctgtgctggagaatctggtaaaagcaccattgtgaagcagatgaggatcctgcatgttaatgggttta

SEQ ID NO: 712638 - DNA, 75 bp, Homo sapiens
ccaacaatggaggccagtggctggtctcaggcccctccagccagcgtcaggtgcagaatggcccctctcctgatg

SEQ ID NO: 712639 - DNA, 100 bp, Homo sapiens
gtctcagcggtattctggtgcttatggtgcctcaggagatacaactcgtcaacgaatcaaattcagtgatgacagagtatgcaagagtcaccttctcaac

SEQ ID NO: 712640 - DNA, 100 bp, Homo sapiens
gttgctatacagaatctttggatatgtgcatcagtggtttatgccaaagttagactggctgagcaacccaagcttttgtgttggatccataacgtccctg

SEQ ID NO: 712641 - DNA, 50 bp, Homo sapiens
ctggcttgagagttccggaataccaaaggatggaatccgacgtggtaggc

SEQ ID NO: 712642 - DNA, 100 bp, Homo sapiens
cccagacaagtccccagggaatgccacagcatcctccagcacctcaggcggtgcctcgggaggagctgtttgtgacatccaagctgtggaacaccaagca

SEQ ID NO: 712643 - DNA, 101 bp, Homo sapiens
aatagtgatagctttgataagtttctctattagaataccgtaagagacaacgtgaagctaggaaaagtggctctaagacagagaactttccactcattagt

SEQ ID NO: 712644 - DNA, 74 bp, Homo sapiens
ttcttccagtcccctgaggtgatggcagaaaacagagctgtatcctcaggacctagtttactaactgtcttcct

SEQ ID NO: 712645 - DNA, 100 bp, Homo sapiens
gccggccccttggcactcgcctcggatttgggggcttcctcactcgtggctttccgaaggctgctgcacattgagtcacgtactcttgcaattgcccgca

SEQ ID NO: 712646 - DNA, 98 bp, Homo sapiens
gcaacaatatgtttatctgaaagatggagatgtgattaagactgagggagccactctaaggttatggtgcctggaagccagaacaacctccttctgaa

SEQ ID NO: 712647 - DNA, 83 bp, Homo sapiens
gagtaagccagcggcaggaccagcgggcgggggcccacgagtgagccagccatgagagggtatcttgtggccatattcctgag

SEQ ID NO: 712648 - DNA, 98 bp, Homo sapiens
cctcattgctgaggtctggtgtcccgaggcggatctgcaggacctgcgccgggcactggaggagggctcgtctgaagatgatgagaaactgaaaaaga

SEQ ID NO: 712649 - DNA, 50 bp, Homo sapiens
caatttccttgcaattaaccaaaaatagcctctagttcgttagtcaaaac

SEQ ID NO: 712650 - DNA, 82 bp, Homo sapiens
tcggtgggtcggggatcggtcgcctgagagttgatattcactgatggactccaaagaatcattaactcctggtagagaagaa

SEQ ID NO: 712651 - DNA, 50 bp, Homo sapiens
gttggacagataccaaagaggtatgccttcaagacagtgtgttggctttc

SEQ ID NO: 712652 - DNA, 99 bp, Homo sapiens
gggaccggctgccatcttagtctagggactgaggagtcgccgccgccccgagtcccgggacatcgataaagttgatgagttaatgcaggacattgctga

SEQ ID NO: 712653 - DNA, 88 bp, Homo sapiens
gtctcacagcttcccagcgactctagaaacacaagagcaagatgtggacttagtccagacaaatttacatgtattggagaccagacca

SEQ ID NO: 712654 - DNA, 100 bp, Homo sapiens
gacacgggctgcaacctgcagcacatcagcgaccgggagaacatagacgctgagatctgtatctgtggacctgaatgttgatccctcgcttcagattgac

SEQ ID NO: 712655 - DNA, 82 bp, Homo sapiens
ctgcccaagcgacagctgtcagaggggcaggagcttctgggagccaccgtctgaaggtagagcagagccggagccaggtgca

SEQ ID NO: 712656 - DNA, 100 bp, Homo sapiens
gcacgaggaattcttcttccattaataaatcaactcagtgatcctgattatattaatcagtatgtcatatggatggactctgacttgaagaaaacagtgg

SEQ ID NO: 712657 - DNA, 97 bp, Homo sapiens
aaagaattcaagaagtgagttgctgtttgctccataggcttacattaggtgaccaagaatatggcccaggtgaccaaagccctggacaaggccctga

SEQ ID NO: 712658 - DNA, 100 bp, Homo sapiens
agatgcaagtgatgatggaatcttggccaaaatcgtgccagtagacaagatttgactctggaggtgacgtctgagccaataggtatttggagtctggaga

SEQ ID NO: 712659 - DNA, 115 bp, Homo sapiens
ctcgtccagccctcacagcggcgtgcctgctgaggtgctctgcaggggccgagacttcgttgtacaacgccgtcaccggggaatggctggatgatgaagttctgatcaagatggc

SEQ ID NO: 712660 - DNA, 100 bp, Homo sapiens
caaggggacccagtgcgcccgcatcgtcgaggacccctcgtccagtcattgtggaacccatggagcagtttgatgatgaagatggcttgccagagaagct

SEQ ID NO: 712661 - DNA, 97 bp, Homo sapiens
ctgtgatccctcaagactggtccacggagtgtatgaccacaaacagccatcaaggaggatgaaattttgaacagatcaccaagaaacagaaagccac

SEQ ID NO: 712662 - DNA, 96 bp, Homo sapiens
gatgaagataagacactttctcagttacagagaggcgaccgactggaccccacggccgtgaacatcctgcagcagatcattgagctgggcgccgag

SEQ ID NO: 712663 - DNA, 50 bp, Homo sapiens
tcccgactgtggagatgtggtgcgactagaggagaaggcagagccccccc

SEQ ID NO: 712664 - DNA, 51 bp, Homo sapiens
gaatggctggcccagcagctgagatcacagaaaccatactcaggaggtctt

SEQ ID NO: 712665 - DNA, 100 bp, Homo sapiens
ggaccagagtggaccagcacaccccaggagagaggactggggtcccaggagtaggaggagggccaattcctgtccccccagcagcatggcatcgtgtgct

SEQ ID NO: 712666 - DNA, 100 bp, Homo sapiens
gggacttggatgaaaccatcatcatcttccactcacttcttactggatcctatgcccagaaatatggaaagggctgttttgctgcagcttctgaagtgtt

SEQ ID NO: 712667 - DNA, 101 bp, Homo sapiens
cggagttgcagccaaaaatcagacatttttacaggaaggaatgcctacttctgcacgatgtgatgatttagaagccttaaaaaagaagggttgccctccag

SEQ ID NO: 712668 - DNA, 74 bp, Homo sapiens
gcaagccccgcctgaagccccccttccccgcagacgtggttccagggtcacccccgagaggacaacaggcatct

SEQ ID NO: 712669 - DNA, 98 bp, Homo sapiens
actgttcaaaatcatgcgagtggggacagcttcttcctagtatccatatattcctgcacatattacaaagcctaaggaacataagaagttgtttctgg

SEQ ID NO: 712670 - DNA, 82 bp, Homo sapiens
caggatcgtcaggctgaaggaatcttggtaaatgggtccaataaaacactggctgattctctggataatgcgaacgaccccc

SEQ ID NO: 712671 - DNA, 75 bp, Homo sapiens
gttaaattcaaaaactacctcatccccaagattgctcgctgtaagcagctcatctgtgaccccagctacgtaaaa

SEQ ID NO: 712672 - DNA, 75 bp, Homo sapiens
tcgagagctcgccccgaacgggggtcttcctcctccgccgttgacaggtttggtgcacctcgatttggaggaagt

SEQ ID NO: 712673 - DNA, 78 bp, Homo sapiens
tagatccgcaggagtacccgagagggctaacagtccagagaagggagccctggaagcttatgttcaatcagtgagaag

SEQ ID NO: 712674 - DNA, 80 bp, Homo sapiens
cacttggtgaatggagatgcagctcagcaggagctagagttaatgccaaagacagcaaatggttgacacctttacacaga

SEQ ID NO: 712675 - DNA, 83 bp, Homo sapiens
agaagtcgcgtgtctaggtgagtcgcggtgggtcctcgcttgcagttcagcgaccacgttgagccccatatgggggttggcag

SEQ ID NO: 712676 - DNA, 100 bp, Homo sapiens
aatgaatggtgctatacttgaattttctaaggtgtcattaggtaggtttaggcctcagtaacatcatcggtatcatcgtctacatttccagcaacacagg

SEQ ID NO: 712677 - DNA, 100 bp, Homo sapiens
tcaaatacacacacctgttgccattatagagctggaattaggcaaatatggacaggatcagatgtggccgcccagcagttgtgcacataggaggagaagg

SEQ ID NO: 712678 - DNA, 75 bp, Homo sapiens
gcctgtgcgccctcaacctgctttacaccagacatcatctcattatgttgcccagactgatcttgaacttctgga

SEQ ID NO: 712679 - DNA, 100 bp, Homo sapiens
gctgtgtggccccgtgtcctgcaggtattgggagatccacagctaagacaccgggacctcctggaagccaaaaatggttggaaaaagactatgttagcaa

SEQ ID NO: 712680 - DNA, 100 bp, Homo sapiens
ggacatccataaaaattcatcagagagcattttactactgagctgcaaagaggcatttcatccttcatgaagccattcaggattttgaattgcatatgag

SEQ ID NO: 712681 - DNA, 75 bp, Homo sapiens
caggcgactacagccacgtgaaggtccagtggcattgcagagcacggatggttgcaggagccaacttttacattg

SEQ ID NO: 712682 - DNA, 95 bp, Homo sapiens
cgcccggccgcgggagcctcgtggctgcgtcaccgccgcccccccagacaagatggacaccgcggaggaaggcccctggccccaacatggcccgt

SEQ ID NO: 712683 - DNA, 89 bp, Homo sapiens
gaacagcacgtccccgctgagtggagcgaattgcaaacccaccgggaaaatgagcgaagagacggtccccgaggctgcctcgccgccgc

SEQ ID NO: 712684 - DNA, 150 bp, Homo sapiens
ggagctgctgcaagtgccgcctgtgctggggaagggaccatgtggctgccttgggctctgttgcttctctgggtcccaggcaatgccaccgtagataagttggaggacttcatcaacaacattaacagtgtcttggagtccttgtatatt

SEQ ID NO: 712685 - DNA, 50 bp, Homo sapiens
ctcttgccttctccacctcacactgtggccagagcccccttcccaggcag

SEQ ID NO: 712686 - DNA, 97 bp, Homo sapiens
gaatggcagcctccagaaagccaccgcgagtaagccctggaacagctgctgacagagttggatgacttcctcaagattcttgaccaggagaacctga

SEQ ID NO: 712687 - DNA, 100 bp, Homo sapiens
ccggcccctccccttctttgtcttttgcagatgatcgccgggtgtcgatccttttccctccagtcagatttaatccagagactgacttcactatagaacc

SEQ ID NO: 712688 - DNA, 80 bp, Homo sapiens
ccgatttaaagctgagctgcgaggaaaatggcggcgggagcaattctgtggtgttcttggtcacacatttatggagtttc

SEQ ID NO: 712689 - DNA, 82 bp, Homo sapiens
caccttcgtggtcgtctggtcctactacgcgtacgtggtggagctctgcgtgtatgatgataattccgaagaaggcttccac

SEQ ID NO: 712690 - DNA, 82 bp, Homo sapiens
caaacccactggacaccttcgtcccctttgatccctgtgtgctgaagagggggatatgagactttctactcggaatatcctg

SEQ ID NO: 712691 - DNA, 96 bp, Homo sapiens
gggtctggcctcctcacctggtacctgatcagcatcggcccgccatcttcaccatcaaggactctttgctggacggccactttgtcttggccacac

SEQ ID NO: 712692 - DNA, 100 bp, Homo sapiens
ccgagtgctggtagacggagaagagcacgtcggtttccttaagacctcagcagccatgtcgaagccccatagtgaagccgggactgccttcattcagacc

SEQ ID NO: 712693 - DNA, 82 bp, Homo sapiens
gcgggggattgtgggagtctccgcgtcccgctcgctgggagagaggattttttatcaagcagaaatgcatcgaacaacgaga

SEQ ID NO: 712694 - DNA, 100 bp, Homo sapiens
caccaggacagaaaagacagtgttctgctttcatggagttcacagaagagtcgaggaggtccagaggtgtccttctaaagctggtagaggtttcacgagt

SEQ ID NO: 712695 - DNA, 75 bp, Homo sapiens
gacttctgaaagacagtgctctgggttcaagttgtcctcagagcttacaagaccctatgaaaaaattagttgaga

SEQ ID NO: 712696 - DNA, 98 bp, Homo sapiens
gaatatcctgacatgtgacaatgaaattgaattgaagaaaattgcacgtaatcacccaaatgccaaaaatttccatgcagtatcggcatgatggagct

SEQ ID NO: 712697 - DNA, 74 bp, Homo sapiens
caggtgccaagaactatgaacaggcagaaggaggagacagttactgtctatcccgcagacgtggtgctctttga

SEQ ID NO: 712698 - DNA, 110 bp, Homo sapiens
cggggggcccgggttcgccgagccgcaggagagacacgctgggccgaccccagagcggcgctggacaggaactgctgctggagtttgaatcgaaaatgcggaagagggag

SEQ ID NO: 712699 - DNA, 107 bp, Homo sapiens
gaccttcctttctattcacccatctggcaagttggccctgtcggttggtacagataaaactttaagccacaggtggaattaagaaatctggcaaaaagtaagctgtt

SEQ ID NO: 712700 - DNA, 96 bp, Homo sapiens
gtggggacttctgcattcaggttggcaggcagcctgcttctgcaaagtggtacgatcgaagggactatgtcttcattgaattttgtgttgaagaca

SEQ ID NO: 712701 - DNA, 123 bp, Homo sapiens
gtgattgggacaaaaatgcaaaagactgctaaagtgagagtgaccaggcttgttctggatccctatttattaaaggatgctttcattggatttggaggaaatgtgatcaggcaacaagtcaag

SEQ ID NO: 712702 - DNA, 97 bp, Homo sapiens
gacatgcaagttggacagacgggaaaaatagtagcaccactggaagtagcagtggtcacaactgagagagccaaacatttctacagcccccaggaca

SEQ ID NO: 712703 - DNA, 118 bp, Homo sapiens
acagcctctgttgacctatgatctgcagggagacgcacagccaggacatcctggaacctgggaaaggctccctgtgctgtcaggaatctacaggacttggctcgtatttacattcgac

SEQ ID NO: 712704 - DNA, 100 bp, Homo sapiens
ctcctctcccctctttgacagcggtttgcatctgaacggaaactccagtaccacagatctagtgaaaagccatttgatgtatgcggtcagagaagaagtg

SEQ ID NO: 712705 - DNA, 88 bp, Homo sapiens
ggcgctgctttaccacgcgttggtgtgaaagaagaacgtccagaaaaaataccagatttaaaattattggtagagaagaaatttttgg

SEQ ID NO: 712706 - DNA, 75 bp, Homo sapiens
gcttccccagccatgtggaactaaagagtgtttcctgcctccattaaatccatccaccagggttatttatcatcc

SEQ ID NO: 712707 - DNA, 82 bp, Homo sapiens
ccctgcagagagagaagatcttctttgagaaccacccatatttcagtctgatatcctgttgggcattctggacaacttggac

SEQ ID NO: 712708 - DNA, 98 bp, Homo sapiens
tcatctttggaaaaggaacccgtgtgactgtggaaccaaacaccaaacttgggcctgaggccttctggtttaactccggcagagaggccgtggccacc

SEQ ID NO: 712709 - DNA, 83 bp, Homo sapiens
catgtcgcgttacgggcggtacggaggagggaacttaggctgcggaactatgtcccggaggatgaggacctgaagaagaggag

SEQ ID NO: 712710 - DNA, 100 bp, Homo sapiens
atcacccccatggaggccctggcagagcagagcactgcagtttcctcctgaaggctggctccggctctccctcaataatggcagcatcacccacctggtg

SEQ ID NO: 712711 - DNA, 75 bp, Homo sapiens
caagaactggattcgtggcgccacaagctcattcactgtgtagcgtgaagcctctgcgggccttcttttcgtctt

SEQ ID NO: 712712 - DNA, 96 bp, Homo sapiens
caccatcgtccccggcgagcagggagcggagtaccagcacttcatccagcagtgcacaggtgtttccccccgggccggcctgccgtgacgatcaca

SEQ ID NO: 712713 - DNA, 74 bp, Homo sapiens
tctggaagcagcagtttatctgatatctatcagctcactaccctgggaaatcttacaccttcaagcactgtgtt

SEQ ID NO: 712714 - DNA, 75 bp, Homo sapiens
tggtggaggagttaacgacgctttcaaagatgcactgcagagagcccggcagtatgccgagattttgctgtcctg

SEQ ID NO: 712715 - DNA, 75 bp, Homo sapiens
agttaccttgcagagatgatgtccacccacaaatgaattatcaggagtgaacccagaggcacgtatgaatgaaag

SEQ ID NO: 712716 - DNA, 90 bp, Homo sapiens
aaaagggcttcaaggcccacttcttctcaggaaagaccacagcaagattctttcattcgtctcctcctagcctgggggaccaggctcgaa

SEQ ID NO: 712717 - DNA, 100 bp, Homo sapiens
cgggaaaaaccacagatttcagcagcacaatcaacgcaaccacagaaacaagtggtacaggttgaattctcttacccgcccctgattccaggagatggac

SEQ ID NO: 712718 - DNA, 90 bp, Homo sapiens
tgtgaaaaacagaaaccaagatttcatgcttttctcaaggcatgcccaagagaatcgtaaatgcaaaaattgcttgccttgacttcagcc

SEQ ID NO: 712719 - DNA, 82 bp, Homo sapiens
cttcggcagtccacccaccgccgccgcctcccaggtgacagcgggaaggtgaccacagtcgtagccactctaggccaaggcc

SEQ ID NO: 712720 - DNA, 82 bp, Homo sapiens
ctgacatatctgagggagaagcacaagatcatgcacagaggctgatgtccaagtgcagttgatcagcaaaggccaaccaaac

SEQ ID NO: 712721 - DNA, 75 bp, Homo sapiens
caggaatcaatccattcaatggttccttcaatggtgccttagctgctgttcctgtccaggacctgggctccactg

SEQ ID NO: 712722 - DNA, 75 bp, Homo sapiens
cacaataccaggcatacatttggcagaataaatgaaccagtgttctaagaacggaagcatctgggctggatggaa

SEQ ID NO: 712723 - DNA, 74 bp, Homo sapiens
aatgcttcattaccgtttttcataggataaagaggaggaactctctggaatgaaaaataaaatacaagtagttg

SEQ ID NO: 712724 - DNA, 100 bp, Homo sapiens
tgtctccaaaactcaatcgggcaacagaaggggagttgctgagtcagcccagaccggaaggagtggcagagatcatttgccccaagaacggcagcgagcg

SEQ ID NO: 712725 - DNA, 83 bp, Homo sapiens
gttcccccaaatgtctgactctgactctcggactgagaaacgcaagaataccctctaccatctgctttggtcagggtgccgct

SEQ ID NO: 712726 - DNA, 100 bp, Homo sapiens
tttcggctcagtggggaggccttcgactggctgcttggggagattgagtccaagttcaaccaagccattaggtctgcggggtttccgagaggctcgccgg

SEQ ID NO: 712727 - DNA, 100 bp, Homo sapiens
aacatcataaatctggctttaatgacaacagtgttaaatatcagcaaagaaaacatgaccctcacagaaaataattttgattctgacattagcagtgtgg

SEQ ID NO: 712728 - DNA, 97 bp, Homo sapiens
gagcccgagcgcggaggcttcggttccggtggcggcgatggcttctctttccacctggagcagtgaccatgcagcaggtggccaggacagtggctaa

SEQ ID NO: 712729 - DNA, 90 bp, Homo sapiens
tgcctggtcctgctgcaggtggcaagctctgccatcgacgagtacaagccccaggatgctaccaccaacccgtccctgatcctggccgca

SEQ ID NO: 712730 - DNA, 75 bp, Homo sapiens
tgatctacctaccaatcgtgaaaactatattcacagggaggaaaatttggagctcaagaagttgttgatgagcaa

SEQ ID NO: 712731 - DNA, 75 bp, Homo sapiens
gcagaatccaaaacatcctacgagtccttcaataatgttaaacagtggctgcaggaaatagatcgttatgccagt

SEQ ID NO: 712732 - DNA, 98 bp, Homo sapiens
ggatgcctctcatcgggagaatgctcttcaggatagtatcttggccagggaactcaaacagcagatgcaggttccaattgtggacaagataaggacca

SEQ ID NO: 712733 - DNA, 100 bp, Homo sapiens
aaatacgaaggtttctggctggaacactggaactattttggggctgatgagaatcttggtccagtggctgtgagcattcgaagggaaaaaccagatgaaa

SEQ ID NO: 712734 - DNA, 100 bp, Homo sapiens
gttaacagactcctgacgcccacacattcgttcctggccagaagtaaaagcacagctgccttgtctggagaagcagcatactggagcatagtgaaagagt

SEQ ID NO: 712735 - DNA, 94 bp, Homo sapiens
ggcgcgctgctggacgaagagctctcctccttcttcctcaactatctcgctgacacgcaggtttggtgcacctcgatttggaggaagtagggca

SEQ ID NO: 712736 - DNA, 83 bp, Homo sapiens
gagaggaccccgggacatctgaaagccaggaaatgacctgcctagagctggaacgttacctccagagcgagccctgctatgtt

SEQ ID NO: 712737 - DNA, 75 bp, Homo sapiens
ggcaacagaggatgtcaacaattttttggaggctctcgaacagtgtggcctgatgaaactatgggaccctttgga

SEQ ID NO: 712738 - DNA, 97 bp, Homo sapiens
ccaccacccctcttctttcagatctgctggcgcttcgtctctcccgccatcatcttcccaaatgatttctcagtatcactaaaagcacaagggaaaa

SEQ ID NO: 712739 - DNA, 91 bp, Homo sapiens
ccgggctggctgcggccgccctgggccgggccccaccggacgcaaaatgatgcttcaacacccaggccaggtctctgcctcggaagtgagt

SEQ ID NO: 712740 - DNA, 100 bp, Homo sapiens
agcagcttgacaagatggtgacagaaaaggcaggatttaagaggtacaaggaacatgaagatggctatatgcggctgcagctggttcgctacgagagtgt

SEQ ID NO: 712741 - DNA, 100 bp, Homo sapiens
gaaagagtcaacagcagtggcaacagtccaaaagaaactcttccttcaaaacctgtgaagaaagagaaggaacagaggacacgtcacttactcacagacc

SEQ ID NO: 712742 - DNA, 83 bp, Homo sapiens
ggtgggtcgggcgcggagagaagccgcaaccagagccgccgccacgaactgccattggatgtccagaatcccctgtagttgat

SEQ ID NO: 712743 - DNA, 83 bp, Homo sapiens
acgccagacacgacgtctggcaggaacctcggcctcagaggctaactcaggtgagatggagccgctatagtcctgaattcaag

SEQ ID NO: 712744 - DNA, 75 bp, Homo sapiens
agagcgcgaatatcgtcatcgttagaaggcacgtggaggagttcagccccagagctgtctacaccagtggtaaag

SEQ ID NO: 712745 - DNA, 50 bp, Homo sapiens
tggaggagaagaagggatggcagagaaggaggctgaacagtacccagggg

SEQ ID NO: 712746 - DNA, 100 bp, Homo sapiens
aaaggccaagagaagacgcagcctacaccacaagcagcagctggagagagaccccaggctccaaaaggaattcttcatttgtctcctgatgtttatcaag

SEQ ID NO: 712747 - DNA, 75 bp, Homo sapiens
atggcaaacagtacggcagtgagggcaaatacgccatgcgagacctagtccacaggcttccaggagggaacaaca

SEQ ID NO: 712748 - DNA, 106 bp, Homo sapiens
tctggcttggcgcctgaggttctcccattagggcggggcggtgattgtccaaaagttctggtgggcctgtgcattgttggctgtgtgatggatgagaattgtcaag

SEQ ID NO: 712749 - DNA, 100 bp, Homo sapiens
tgcagcgcacgcgggaggccgaggagaagctggaggagcggctgaagcgcgtgcgcatgatctgcagcctcatgagagggggcattgctgagcgaggggg

SEQ ID NO: 712750 - DNA, 98 bp, Homo sapiens
gccgattacccacttcgagtcctttattgtggagatgtctttggtggacttgggaaagaggttgctagaagcagcaagaaaaggccaagatgatgaag

SEQ ID NO: 712751 - DNA, 101 bp, Homo sapiens
gccaggaaggactcaccgaggcgcaggggctggaggtggtgctgggggtttgtttgaagagactgtaccagagggccagggaggaggagaaaggaattgag

SEQ ID NO: 712752 - DNA, 75 bp, Homo sapiens
caaaaagcggcggccgttggaggtggctgcggcagctggttcagggtcggagggagaagatggctttcaggtaga

SEQ ID NO: 712753 - DNA, 75 bp, Homo sapiens
aaccgctctcgcttcgtcctacacttgcgcaaatgtctccgccggcccaggcctttgtggtgaagcggggcgtcc

SEQ ID NO: 712754 - DNA, 75 bp, Homo sapiens
aaagaaagaggagtacacattgtttccgagcactggcttttagataattggcagagggggtcgatttgggaggaa

SEQ ID NO: 712755 - DNA, 75 bp, Homo sapiens
gactttttgatattcagagccttggaagtcaacactgtcaaactcaacagtgacaattgaggaattccactgtaa

SEQ ID NO: 712756 - DNA, 75 bp, Homo sapiens
ctgatgggtcattatgaccagagtattgccgcggtggaaatggaggccaagcatggggatcagcacgagggtcag

SEQ ID NO: 712757 - DNA, 82 bp, Homo sapiens
taccgcaaatacttctatggcaaagccgcggcgagtcctttgcacatgttggcaacacacgcatccgcatcggcctccctgc

SEQ ID NO: 712758 - DNA, 99 bp, Homo sapiens
gcagatgctgcaggacgccatcagcaagatggaccccaccggctgcctgaccatggtccccagtgagaaggaagtggaacccaagcaatgctgagcacc

SEQ ID NO: 712759 - DNA, 124 bp, Homo sapiens
gaactgagcgtatgtgccacgccgcccaggagacccctctgctgcaccacttcatgctcgggttcatgacgctctcgatattcctgtgcagaaacctggaccacgtctacaaccggctcgctcg

SEQ ID NO: 712760 - DNA, 100 bp, Homo sapiens
gccaagctcatctctgagacccggaggaggttcgaagctgagtatgtgacaggttaaacaaacacagttctttacatcaatgcttccgtccctggccatc

SEQ ID NO: 712761 - DNA, 121 bp, Homo sapiens
agtttatggcttccagtggaggcattttggggcagaatacagagatatggaatcagatgactctggggacgacgacgaggctaccaccccagccgacaagagcgagctgcaccacaccctg

SEQ ID NO: 712762 - DNA, 100 bp, Homo sapiens
cggcgtgccccaccatgtcagacgcagccgtagacaccagctccgaaatcaccaccaagcttgatcctctcccagaaaaggttttacagcaaagacccaa

SEQ ID NO: 712763 - DNA, 73 bp, Homo sapiens
gggatcagaggtccctggagtttctgcttcctccagagccagctggcccggtgatcatgtccattgaggagaa

SEQ ID NO: 712764 - DNA, 83 bp, Homo sapiens
ctcaaggccatgatcaaaacgtggtcagaaggcgcgagttgtgtttgctgagctggcctgtcgggaacctgatgtcctcatct

SEQ ID NO: 712765 - DNA, 75 bp, Homo sapiens
agagccaggaccccctagaagtctagaaatggagtacgaccccagcaaagcgacctttgtgaaggtggtgccaac

SEQ ID NO: 712766 - DNA, 100 bp, Homo sapiens
gcgcaacctacatcagtcggggttcagcctatctgaaactggcctacgccattgcacccgagaaggaccgtgagctggtggacagaggggaggtgcgcca

SEQ ID NO: 712767 - DNA, 73 bp, Homo sapiens
gtcatttcccccgcttctatgtcctgtacacaatcttcatgaaagaatcctcactatggatgggctcattgag

SEQ ID NO: 712768 - DNA, 82 bp, Homo sapiens
gcagcaccccggcggggccaccccagtctgcgtgtacacgagggatgagacaatgcagatcttcgtgaagactctgactggt

SEQ ID NO: 712769 - DNA, 83 bp, Homo sapiens
agctggcttcctcaagcagaacactgctgggagtcctaaaacctgcgacaggaaggtcagggaagtcaaagatgcatccctga

SEQ ID NO: 712770 - DNA, 75 bp, Homo sapiens
caattcgttttcaggagcatctccaggttttgaacgaagaatgtgatcagaactggtacaaggcagagcttaatg

SEQ ID NO: 712771 - DNA, 100 bp, Homo sapiens
ccaaaggaaggactggtcatctctttcatatctcaaaaccatggctcaggttgctgctaaatgggaaaaacttagcttagtactgatagatgactttatt

SEQ ID NO: 712772 - DNA, 100 bp, Homo sapiens
ggtgtggccagagcgttcctcaaggcccaggctgctttcttcggtagctaccgaaacgctctgaaaatcgagccggacaaagtggccttggagagtatgc

SEQ ID NO: 712773 - DNA, 73 bp, Homo sapiens
aaataaaggaaacacatttcatatactgcaggctgcattgcgtcagattactgataaagctcgtgaatttgga

SEQ ID NO: 712774 - DNA, 86 bp, Homo sapiens
cccagaccctggagcctcagttggaagcagccgatccagcctgcggagcctgtggggcagatgattgtggaaactgagaagtgcag

SEQ ID NO: 712775 - DNA, 97 bp, Homo sapiens
tgccttgctgatctgagctcagacctgccaatttaccagagataattgataacaccctgtaacagctgaacaatgcctgtggaagacaagtcagacc

SEQ ID NO: 712776 - DNA, 100 bp, Homo sapiens
gctccggcttctgctgttgctcttctccgccgcggcactgatccccacagcaaatgaagctcgtgaccgagaacctgaaggaggaaccaatggaaagcgg

SEQ ID NO: 712777 - DNA, 95 bp, Homo sapiens
gacagctgtcagaggggcaggagcttctgggagccaccgtctgaaggtgacttaagagattaaaattaatttggttgctgttggttctgaacaaa

SEQ ID NO: 712778 - DNA, 75 bp, Homo sapiens
aagaaggagatacattaaatgcaatagcccttcagtactgttgtacggactgaccactgagcagatgctgagaaa

SEQ ID NO: 712779 - DNA, 148 bp, Homo sapiens
gaaagaccatggctttctcgcttttcatctttttggatggctgcttgtcgcaatattgtcttcttcgctttagacaaattgactttgaagatgtgattgcagaaccagaagggacacacagttttgacggcatttggaaggccagctt

SEQ ID NO: 712780 - DNA, 83 bp, Homo sapiens
aggcaaggagctaaagcagcgtgcgttcagccctggggtgccagaaccctgtggagcatcatgaactgggaagagtagctgag

SEQ ID NO: 712781 - DNA, 96 bp, Homo sapiens
tcaatcggaggtcacgggctagacttcacagagaatgcagttgtcttgacttcaggtctgtctgttctgttggcaagtaaatgcagtactgttctg

SEQ ID NO: 712782 - DNA, 98 bp, Homo sapiens
ggcggccgtggaaggcgacccggcggctgtggaggccacgctcagctcgccaggcggcgcaggcgcttctctgaagtagctttggaaagtagagaaga

SEQ ID NO: 712783 - DNA, 100 bp, Homo sapiens
agaaagtgttagaaacagtagtggagaatcaagcaatacgagaattggagacccaaccagccagacagcttcttttctgctggagaagactgtgttgtaa

SEQ ID NO: 712784 - DNA, 82 bp, Homo sapiens
cgcggccggcgtccggagcatggcggacccccagagctgactggatacacgtctgtttaactacgcaaaaggtaatgctggc

SEQ ID NO: 712785 - DNA, 100 bp, Homo sapiens
aacttccagctggagagcgtcaacaagctgtaccaggacgaaaagtggacagtttgcggttgtgaagaaatgccgtgagaaaagcaccggcctccagtat

SEQ ID NO: 712786 - DNA, 100 bp, Homo sapiens
ctcaggtcctcgggggcggcggccacgccaaggacgggctttgctctctgtacatgatactgtggctcagaagaattacgacccagtgttgcctcctatg

SEQ ID NO: 712787 - DNA, 75 bp, Homo sapiens
cagaacgtgccatggagacgcttaacggaattgattcggaaggccatgcagctaactttgtagaaacagaacaaa

SEQ ID NO: 712788 - DNA, 75 bp, Homo sapiens
gcggcgtgggcaagtcggcgctcaccatccagttcatccagacctgcctagagctggaacgttacctccagagcg

SEQ ID NO: 712789 - DNA, 100 bp, Homo sapiens
gctgttttggaactgtcaggtacctcaaagcgacaagcactgatcctgaggggatactgtggagcagcccagtccacaccagagccccacgcggctgccc

SEQ ID NO: 712790 - DNA, 83 bp, Homo sapiens
cgtggagatcgtcccgcgcctgccggtgaccatggaggaagaagatgagtctcgagggaagacagaggagtcgggggaggatc

SEQ ID NO: 712791 - DNA, 75 bp, Homo sapiens
tgaatgaggagtacgacgtgatcgtgctgggcaccggcctgacgtgcctggctctctggctatgaaaatcctgtg

SEQ ID NO: 712792 - DNA, 75 bp, Homo sapiens
tcccttagccagcccgagcaagtaaagattggctggggctgccccgacctcgtctgctacaccgattacctccag

SEQ ID NO: 712793 - DNA, 75 bp, Homo sapiens
gaacaagcccatcgtcacctagaccttttaatcaaagtgaagtttggggaaagcattgaggacttgcacacctgc

SEQ ID NO: 712794 - DNA, 80 bp, Homo sapiens
gaaactccagcgtgtctccagccgtggtgacagagctgaatgaacctctctccaatgaagatcgaaatctcctctctgtg

SEQ ID NO: 712795 - DNA, 50 bp, Homo sapiens
gaaggaaatgctaaagcgattccaagacgcaaacatgcagatctttgtga

SEQ ID NO: 712796 - DNA, 99 bp, Homo sapiens
tgttgcttgacacttaggacagaaggaaaagagccagacattcctctgtacaaatcaatgatgagaccgagctggaggccctgtgcgctgagatcgcct

SEQ ID NO: 712797 - DNA, 82 bp, Homo sapiens
ccgattcctcctccttggtcgccgcgtccttggctggcgtcctcccgcgacgatgcccctcaacgttagcttcaccaacagg

SEQ ID NO: 712798 - DNA, 100 bp, Homo sapiens
ctccatagtgcggcgcgggatgctcctggcgcggcaagtggttcttcctcagctctctcctgcagggggaaaaaaatagtggctttgatgtcctctacca

SEQ ID NO: 712799 - DNA, 74 bp, Homo sapiens
gacatttaattttagggtcctttatatagaagggagagtaggctgctctttggcgtaaattgcaatcgattagg

SEQ ID NO: 712800 - DNA, 90 bp, Homo sapiens
ctgaaagctggcaacgtgctgatgaccctcgagggagacatcaggctgggagttgcgggagcttcaggacgagaaggcagagctgcagaa

SEQ ID NO: 712801 - DNA, 75 bp, Homo sapiens
taagtgcagatggaacacaacagaacactcgtgaaactgctcaggccatcaagggtatgcatatacgaaaagcca

SEQ ID NO: 712802 - DNA, 100 bp, Homo sapiens
caagaatgtgaaatttgttctcaagcacaattttaagacaattatctcctatattgatgagcaatttgagaggtacctgcatgacgagagcggcttgaac

SEQ ID NO: 712803 - DNA, 101 bp, Homo sapiens
gtgactcatcagagtgtgggggttgtgaaaggcagcagaacaaggacggccccctgagcacaccagcaagttttatgcgaagggagcactacagtatctgg

SEQ ID NO: 712804 - DNA, 80 bp, Homo sapiens
cggcgcccggcgagggcgcgcggctggtgtccgccccgcccgaaagggtcggcactcttcaccctcccgagccctgcccg

SEQ ID NO: 712805 - DNA, 83 bp, Homo sapiens
ctcctccgaaccccttcatgcccaaatcccggaaactccagcgtgtctccagccgtgctgtttgcagacaaggtcccaaagac

SEQ ID NO: 712806 - DNA, 82 bp, Homo sapiens
ctgtcttgcatctgtttctccaccacctagcctggaatatagatcaaatctaaatcgctgtggtttccgaggctcttcatac

SEQ ID NO: 712807 - DNA, 100 bp, Homo sapiens
taaagccaaaagcttactgctcactaccatacctcagatagggtccacagaatggtcagaaaccctccataacctgaagtgccagaacagataaagccca

SEQ ID NO: 712808 - DNA, 144 bp, Homo sapiens
tcctctctgctatatgaaatatgggagacgacagaccgtttgtgtgcaatgccccgggctgtggacaggtactaggttttgacaagcttgcatcatgcgtgagtataagctagtcgttcttggctcaggaggcgttggaaagtc

SEQ ID NO: 712809 - DNA, 74 bp, Homo sapiens
tcccggggaagaggaggcggcggaggccctggccaacgtcaacattgggagcctcatctgcaatgtaggggccg

SEQ ID NO: 712810 - DNA, 75 bp, Homo sapiens
cgccctgcgccgccatccccgcggcccgcggaaagggtgtgctgtccgacctcaccaaagtgacccggatgcatg

SEQ ID NO: 712811 - DNA, 90 bp, Homo sapiens
gactatgtggctcccacagctaatttggaccaaaaggacaagcagtttgttgccaagatcctgtttgaccaaactcagagatcaattaag

SEQ ID NO: 712812 - DNA, 82 bp, Homo sapiens
cggtcatcaaccagcaggaggactccagcgaggttggtgttcgaggaagagacattgttgttcttggtgtggagaagaagtc

SEQ ID NO: 712813 - DNA, 75 bp, Homo sapiens
caacttctactctgacatcaagcacagaagatttagcaccactatctccgttccatctgggcttatatgtacttt

SEQ ID NO: 712814 - DNA, 90 bp, Homo sapiens
cagcgcggcggggagcgacgaaaatgcatcgtgattcctgtccattggactgtaaggtttatgtaggcaatcttggaaacaatggcaaca

SEQ ID NO: 712815 - DNA, 87 bp, Homo sapiens
gtcactctgtccctggaccgatttgaaaaccaggtggatatgaaaggcctccggtgtggctgtctctgatggtgtcatcaaggtgtt

SEQ ID NO: 712816 - DNA, 98 bp, Homo sapiens
caggtgccagatttggagctggggctactgctggcaacattcctggttattttggagctgttggagcactccttgagctgttgaagatcccgtgatca

SEQ ID NO: 712817 - DNA, 82 bp, Homo sapiens
gtggatgggtaaaacctatcatcataggtcgtcatgcttatggggatcaatgcacagccagaggacaacacatcacacacaa

SEQ ID NO: 712818 - DNA, 82 bp, Homo sapiens
ggagtgccagaagaggatcgacgcctatgtcgacgagcaggtctcctctgagcctccggcctccataagacccaaaacagat

SEQ ID NO: 712819 - DNA, 50 bp, Homo sapiens
ccaccccgccagctccagagccacgtacgatgtctctgtgttaggaaaac

SEQ ID NO: 712820 - DNA, 90 bp, Homo sapiens
gtccgggactatggccaccgactcgtgggccctggcggtggacgagcaggaagcggctgtcaagtcgatatgtgttgagacggattctcc

SEQ ID NO: 712821 - DNA, 100 bp, Homo sapiens
ccaagaccccaggctgcctcccaggtcctctgggacagcccctgccttctaccaggtgagaagccctaccactgcaactgggacggctgcggctggaagt

SEQ ID NO: 712822 - DNA, 82 bp, Homo sapiens
gctactacttaataatgacaatctcctcagggaaggggcagcacaaattggcagagggggtcgatttgggaggaaaggtgtg

SEQ ID NO: 712823 - DNA, 100 bp, Homo sapiens
tcttgtgttttcagcttttcacatgtctggttttgcaccatcacagatggagttcgctcttgttgcccaggctggaatgcaatggcatgaccttggctca

SEQ ID NO: 712824 - DNA, 100 bp, Homo sapiens
caccatgacccacttcaacaagggcccttcctatgggctctcggccgaagtcaagaacaagatagagtcttgctctgtgacccaggcttgtgtgcagcgg

SEQ ID NO: 712825 - DNA, 89 bp, Homo sapiens
ccacagcgacgccggcgccgagggacaccgcagtatgaggcagagcctttctgagaaaagtctacagcattctttctctgcaggttctc

SEQ ID NO: 712826 - DNA, 100 bp, Homo sapiens
ctttcaagtcatcccaaatatggttccatccctaaacttatactatgccaccacgggctgttccctgaccctgcaccatacggagaaaccagaacatgaa

SEQ ID NO: 712827 - DNA, 100 bp, Homo sapiens
gttctgtatccagagggcattcagactaaaatctacaaccttctcattcagacacacgtgccgcagaatggaattcggcattgttcctacacagcttctc

SEQ ID NO: 712828 - DNA, 97 bp, Homo sapiens
tgtcttcttagaagagcccattatttataggtagaagaaggctggtggagtggaaccctgaataacaagttgggactgtttccctcaaattttgtga

SEQ ID NO: 712829 - DNA, 100 bp, Homo sapiens
agccggccagagcttctggacccggagcccggcggcctcctcaccagccaagggaggctgccggcgtggaccgcgggaaggcggggctggggctcggcgg

SEQ ID NO: 712830 - DNA, 51 bp, Homo sapiens
gtagcgaagtgtcccaagaacatggaagggaagatcagttttcctgccatc

SEQ ID NO: 712831 - DNA, 90 bp, Homo sapiens
agcaaggcaaagtttgagaacctctgcaagctcatgaaagaaatcttagataagaaggttgagaagactctgtttgctggctacacggac

SEQ ID NO: 712832 - DNA, 100 bp, Homo sapiens
gccggctccggaggcttggtgactccagtggcccagcctttctgagaaaagtctacagcattctttctctgcaggttctcttaactacagtgacttcaac

SEQ ID NO: 712833 - DNA, 95 bp, Homo sapiens
acttggttatggttgtctcaagaggcgtagaggctccggtgttttttgtgccaattgcctgaccacaaagacctctctctggcgaaagaatgcaa

SEQ ID NO: 712834 - DNA, 109 bp, Homo sapiens
ggatgtttgccgagccttgacaggcgtggcagagggagcagtgcccgagcgcggaccctgctccagcagctgcagaaactccagactctggtcaccaacaagatctcca

SEQ ID NO: 712835 - DNA, 96 bp, Homo sapiens
gggcctccagggtctgcagacaaggcaggaatatcctccgaatcctaaatctagagctccaaggatgctggtcattaagaaaggtaatacaaaaga

SEQ ID NO: 712836 - DNA, 87 bp, Homo sapiens
gagcctcttcggcttctcgctggccatgcactggcaactgcagcccgaggacaagcggctgcatcctgtacacgtcaaagaagagcc

SEQ ID NO: 712837 - DNA, 74 bp, Homo sapiens
cgacatctagccctgaatctgcaggtgacctctgagaaggatgtgcaaacagctctggctctagcaaaaggaaa

SEQ ID NO: 712838 - DNA, 82 bp, Homo sapiens
cgcgcgcagggcctgcagcgggagctggacggcgagcgcgagcggcgcgagaaagcagcagcccagacgcggcacagagagg

SEQ ID NO: 712839 - DNA, 100 bp, Homo sapiens
gatacgggagctcaaagtgtgccttctcgggcggagctggagttcgcccaaatcatcatcatcgtcgtggtggtcacggtgatggtggtggtcatcgtct

SEQ ID NO: 712840 - DNA, 100 bp, Homo sapiens
ggacttggccatgtgagatacaaggctacacagagacagatcaaagcagctcgttacttttcacatagaaccatatagcaatcgagatgatcaaaacatg

SEQ ID NO: 712841 - DNA, 90 bp, Homo sapiens
cgcagctactaattttcatgatgctcttagctccaataattcatggtacgctctgttaggattccacagattggagacaaatttgctagt

SEQ ID NO: 712842 - DNA, 82 bp, Homo sapiens
atggacctgtacagcatcaactacctgcactttggggagcctaagtcctgaccacctcctccaccctgaagggtgccatcca

SEQ ID NO: 712843 - DNA, 75 bp, Homo sapiens
tgctgagggtggcggccggataggagctggagtggctgctggagattaaccggctcacgcatcggctgctctgta

SEQ ID NO: 712844 - DNA, 82 bp, Homo sapiens
ctccgcgcccggccggacccgggcccgagagatgcgctggcagctgagcgagcagctgcgctgcctggagctgcagggcgag

SEQ ID NO: 712845 - DNA, 49 bp, Homo sapiens
tgactgctcaggaagtaaaatcggtatcgaatgataacagaaggcggag

SEQ ID NO: 712846 - DNA, 87 bp, Homo sapiens
accacaaggcctgtgtgcgtgacgtcagttggcacccctttgaagagaagattgtcagcagttcggctggcctgctgtctgccttgg

SEQ ID NO: 712847 - DNA, 82 bp, Homo sapiens
cagtggctgacctcgtgttcccgtgtgtggagttgaaaacatcagaagagctgagtctcttaatggaaatccattgttctct

SEQ ID NO: 712848 - DNA, 83 bp, Homo sapiens
cacctcctcgccagcagccgtccggagccagccaacgagcggttttttattggcacctcagtctcaacattttcttttcggat

SEQ ID NO: 712849 - DNA, 75 bp, Homo sapiens
atggaatcatggatgctgccaattttacgactgcaagaacattgccaacatcatgaagacactcgcctatcgagg

SEQ ID NO: 712850 - DNA, 75 bp, Homo sapiens
ggctgccgcgccgccgctacgggaccgcctgagctttctacaccgggtttggtgcacctcgatttggaggaagta

SEQ ID NO: 712851 - DNA, 75 bp, Homo sapiens
aggagtctggtcaggcgtcaggctagtccgacgaagagtggaaactaattctgaagcaagcccttatagttgtgc

SEQ ID NO: 712852 - DNA, 100 bp, Homo sapiens
aacaatggcatttacagaaagagtcaacagcagtggcaacaggtttgctgtaatggcacaagagtatttgtgcagaaagaaattcttgataaatttacag

SEQ ID NO: 712853 - DNA, 100 bp, Homo sapiens
cttctggaaaagaaattggccaaggcacagtatttttcagtgctgtacaagcgtcttgaattactctggtagcttttccagaaagacccatgacttcacc

SEQ ID NO: 712854 - DNA, 100 bp, Homo sapiens
aagatgttgttgttagtgatgaatgcagaggaaagcagcttggcaaattttgcatgtgccatgggaggcggagtctctgaggacatcctggctgtgcctc

SEQ ID NO: 712855 - DNA, 90 bp, Homo sapiens
cagttcagaagagccaaggaataaacatgcaatgaacccaaaaggacttccattagtttgatgaatctgacttccacaccactatgcaac

SEQ ID NO: 712856 - DNA, 100 bp, Homo sapiens
cctcaaccccatgtccgacaagctgaccttctctgtgatctggacactgactccagagggcaagcagctcttgccaggtaaaaagttttgggaaacagat

SEQ ID NO: 712857 - DNA, 83 bp, Homo sapiens
cggaaactaggaagaggaaattaactatctgtacttataagacctggaatcatttttctgataatgaggcagagcgggttaaa

SEQ ID NO: 712858 - DNA, 100 bp, Homo sapiens
cccaagaacccgtgaagactctgagaagcctggtcaatatccgaaaggacacactgaggctcgtcaatgtacatatgaagattgaagaaaagataacatt

SEQ ID NO: 712859 - DNA, 87 bp, Homo sapiens
aagcggatggatgccttcaatcaggaaaagcaactacactgcgctgcatcggactcgacgcccgctggtgacgcacacgctgcgccg

SEQ ID NO: 712860 - DNA, 90 bp, Homo sapiens
atcatatgacaaaggctttgccgcagttcatcttcctccctgtgtactttccatttgccttcctgggacaatataaggcttcaagattgc

SEQ ID NO: 712861 - DNA, 95 bp, Homo sapiens
gtggaaaggtgaccaagcccaaagaggagaaagatgcttctaaggatctttaaatggatgagatggctaccactcagatttccaaagatgagctt

SEQ ID NO: 712862 - DNA, 74 bp, Homo sapiens
gaatcttcactcccgctgtctcagcagtctacagcacggtttgcccaaaggaccagccaaaacctcacctcaag

SEQ ID NO: 712863 - DNA, 75 bp, Homo sapiens
caaccatgatgctgccatctttccaggaggctttggagcggctaaaaacctgacgcgctccaggagatatataat

SEQ ID NO: 712864 - DNA, 76 bp, Homo sapiens
tctctttctggcctggaggctatccagcaatacagattctgttcatcttgctctgaaattaaataattctgaactc

SEQ ID NO: 712865 - DNA, 100 bp, Homo sapiens
gctgcctgctcaaagagctgcaccgcttcgagtctattgccattgcccaagggatcgatttgcttagtggtataatacctgaactctgtcagaaatatcc

SEQ ID NO: 712866 - DNA, 90 bp, Homo sapiens
tgacctgctgctcgtgctgatctcagcctactttggggataaaggattatttggtcttctggatttggaggcaatcagcggacagcatgg

SEQ ID NO: 712867 - DNA, 98 bp, Homo sapiens
caagaagtggccttctcagtacttttggaggatccactggacgaatgatgctgaaagctatacctgcaggcccgcttcacttggcgaggagcccgcct

SEQ ID NO: 712868 - DNA, 117 bp, Homo sapiens
tacttgggagatttccagccttccaagctctactgtgacttcagagacactgccaagcagccttagccctagtgtagagagtctccgggaccattatggcagtcaagtggacgggtg

SEQ ID NO: 712869 - DNA, 100 bp, Homo sapiens
ctttgacaagtgatgagaagctgtcggagcttcccaaggaaactgttaaggcagcaataatagaagagcagaaacgaagtgaaaaggctgtggaagaggc

SEQ ID NO: 712870 - DNA, 75 bp, Homo sapiens
cacaggcgacttcaacagcaagagggacgagatgtggaaaaagagcactacaaacaccactggtttcccgaaaag

SEQ ID NO: 712871 - DNA, 75 bp, Homo sapiens
aaagagatctttctgagagagctcatttcaaattcatcagatggaaatcctcattgacgattcaatttgttgaag

SEQ ID NO: 712872 - DNA, 90 bp, Homo sapiens
ctctgctggcgactggcaggacgcggtgcagagagcggacttccgcgacgcggatgacggcaaccgcccagccaccctccaaggcccagg

SEQ ID NO: 712873 - DNA, 90 bp, Homo sapiens
gcgctcgagggcgtgctcagcaaatacaccaacctcctccagggctggcagaacagttaataacgacatgatagtcactgacaacaacgg

SEQ ID NO: 712874 - DNA, 82 bp, Homo sapiens
ggaagcaggactgcgccgcgtcttcctcaagagtcatcttagtgggatttggggaagcaacagggctgtgtggggtaacctg

SEQ ID NO: 712875 - DNA, 98 bp, Homo sapiens
aggagctcttacagatggacctgtacgcgctgctaggcattgaggagaaggcagcggacaaagagtcactcaagactgcttgcaactgattgcagaca

SEQ ID NO: 712876 - DNA, 75 bp, Homo sapiens
agaagctgtcggagcttcccaagggtgatgttgcaaatgaagtggagactgaacaaatactctgcgatgcttctg

SEQ ID NO: 712877 - DNA, 96 bp, Homo sapiens
gggcactccacagattctgttgcgaaggcagccatctttagttcgtctttcctagagaggtctcagcttgactatgaagttcccagggaaaaggcc

SEQ ID NO: 712878 - DNA, 100 bp, Homo sapiens
cgcgcagttgggtgtgtggtgctgaatgaagggatgaaggaggactgctagcgtctaagaatagcctaacatggcagaccagagacagcgctcactgtct

SEQ ID NO: 712879 - DNA, 101 bp, Homo sapiens
ccccgagatgagaggagaagagcccagcacaacgaagcaccacaccccactctggccggagcacgccaagcagctccccatcgctccggaaacggctgcag

SEQ ID NO: 712880 - DNA, 82 bp, Homo sapiens
tttttggaactgtgcacgggacagattggacgcacacccctcgggaggcgcgaagatttacagccagttacttactcagaac

SEQ ID NO: 712881 - DNA, 75 bp, Homo sapiens
gcgaccgatatagctcgccaggtggttatgaagacagtatggagtttccagaccatagtagacatttgctacagt

SEQ ID NO: 712882 - DNA, 101 bp, Homo sapiens
cagcgaggaggccgtgggtggtgacagcacgcccagcccggacctgctgatggcccgcagcttcggtgacaagacaggcaggattgaacccaactacccca

SEQ ID NO: 712883 - DNA, 110 bp, Homo sapiens
gaaccaccggatcgaagacagtcaagtgtagactctcgccaaagccgctctgggcaaggtgcttgtgagtgaggattctgacagtgatggcattgtggcccacttccctg

SEQ ID NO: 712884 - DNA, 101 bp, Homo sapiens
ggcggaggcagaggtggaggcgctttgaaaggagatgcctacatagaagagtgacagcagctagactaaatgtttaactgctgaactagttcctcaggtat

SEQ ID NO: 712885 - DNA, 128 bp, Homo sapiens
atgttctctgtgttctcagaagacgttctgtatttcagcttcctgctatgtgccctctttgttcctaaaggtgggcagtgtcaaaccgggaaatgcttatagctcaaaacagctccttggaatttaag

SEQ ID NO: 712886 - DNA, 98 bp, Homo sapiens
acttcgcattttggcattgacatttaattttagggtcctttatatagaagggagagtagatgtggaagactgaggcctgttgaaagtgcagagctcag

SEQ ID NO: 712887 - DNA, 50 bp, Homo sapiens
tccaggggctctgggagtggctgccagtgacttcctccactgaagtcttg

SEQ ID NO: 712888 - DNA, 90 bp, Homo sapiens
gttcaaggaggccttccagctgtttgaccgaacagactggaatacgctaattgtgggaaagctttctccatggattcgtccagactcaaa

SEQ ID NO: 712889 - DNA, 75 bp, Homo sapiens
cacaggccctcgttgcccagatgccaggtcagagcagcccaccatgggatggggagggggtggaggctgcacccc

SEQ ID NO: 712890 - DNA, 100 bp, Homo sapiens
gctgaagctgttcagaagttcttccttgaagaaatacagcttggtgaagagttactagctcaaggatctatcttgggatcccatggctttctttactggg

SEQ ID NO: 712891 - DNA, 75 bp, Homo sapiens
actgggtcccttgaagaatctacagatgagtctgagggtatgtccagaaatcttgatgcatgtatctgaaaagaa

SEQ ID NO: 712892 - DNA, 100 bp, Homo sapiens
gcagcatgattggccgaccgcaggagaagcccccagaaccaggcccccaactcagccatctgcggaggtcaaggagagcgaagacctggagaaacagaac

SEQ ID NO: 712893 - DNA, 101 bp, Homo sapiens
tcacaaaggagccacttttccaaaccctcctctcaatggatcgccaaatgagtgtgaacatggctacgcctcttcattcccgtccatgccgagcccccgac

SEQ ID NO: 712894 - DNA, 75 bp, Homo sapiens
aggagcagttgtctgatgaagagaaggggacaagggcctgtccgacacgccctacgacagcagcgccagctacga

SEQ ID NO: 712895 - DNA, 74 bp, Homo sapiens
ctggttctggaatcctcagttcaagccctccaagccacaaaactgtggtgaatggaaaagaatgtataaacttc

SEQ ID NO: 712896 - DNA, 90 bp, Homo sapiens
gcaacttctaatgagccaagaatttccagtgatacagctgatggaaaatgtgtccaggaaggtggtctgctgtgtgaataaataattcct

SEQ ID NO: 712897 - DNA, 75 bp, Homo sapiens
ccaggctgctggagccacagtgcacccctggaggagtgaagaactttgcccactgcattggtggaggaggatact

SEQ ID NO: 712898 - DNA, 100 bp, Homo sapiens
aaaagaagtcagctcttgcctcagttataaaagagctacgacagttgcgtcaaaaatatcaagtccaggtgcaggtacagcagtctccgcaacaggtctc

SEQ ID NO: 712899 - DNA, 107 bp, Homo sapiens
tctgcgtgagtgtggtctacgagctgtttctcatctttatactcttccaggaatccctttgcccacgtccagctgaagccgacagtgaccaacgacaggtctgcccc

SEQ ID NO: 712900 - DNA, 100 bp, Homo sapiens
caggactctagtaacccgcgaaatgatgggatagcgttgcaaatccttaaaagagtcttaacgaagggtgatgatctggaggagggtgtcacaagtgaag

SEQ ID NO: 712901 - DNA, 82 bp, Homo sapiens
cagcaagcggaggtgctgggagcgagttggctggccacctcttcccaaacgtgccggctcaagaagcctcaaagagtgccag

SEQ ID NO: 712902 - DNA, 75 bp, Homo sapiens
actccttctatggctggacgcccgtgcactgggccgcgcatttcggcaagtgccctctggtggtcagaagatgct

SEQ ID NO: 712903 - DNA, 100 bp, Homo sapiens
caggagttcgtctcttacgtctgcggaagtgcagctgcctcagttcttagcgcagatgtctttggtggacttgggaaagaggttgctagaagcagcaaga

SEQ ID NO: 712904 - DNA, 75 bp, Homo sapiens
ctcagcctcctgtgaccactgttggatttcttacaatctccagctacaacctgcttagcttgctactcagtacgt

SEQ ID NO: 712905 - DNA, 83 bp, Homo sapiens
gccttacaggttttacgtgaaatgaaagccattggaatagacttgaaagagggctccagaaaaagtagatgcgtatctgtaca

SEQ ID NO: 712906 - DNA, 74 bp, Homo sapiens
cggatatgtcgtccggaaaccaggaatctggtgaacagtaacaaactttggtgaaatttcaggaaccatagcca

SEQ ID NO: 712907 - DNA, 80 bp, Homo sapiens
gccgtccgcaccgggaccggagaggaagcggagggaaagcaggcaggatgggagagtcgccgatagaaccacctcttccc

SEQ ID NO: 712908 - DNA, 101 bp, Homo sapiens
cgcaggcccacggtagcgcagccgctctgagtgccggtggtggtgtgcacattgagccccggtatagacagttcccccagctgaccagatcccaggtgttc

SEQ ID NO: 712909 - DNA, 82 bp, Homo sapiens
cttggactgagtcctgcaggacacagctgtcggaaaaggtaacagaagatggaactcgaaatcccaatgaaaaacctaccca

SEQ ID NO: 712910 - DNA, 82 bp, Homo sapiens
tctgtcttcggtggactccttcggcagtccacccaccgccgccgcctcccagactcactgccacaacgacattgtcaacctt

SEQ ID NO: 712911 - DNA, 100 bp, Homo sapiens
gagaatacacacatcacaaagatcctggaatatataaatgtgttgtttgtggaactccattgtttaaggccacccgttcatcgtgcagttcaatgatgga

SEQ ID NO: 712912 - DNA, 98 bp, Homo sapiens
ggtgagcggcgcagcggcggcagcggagagcgagagaggggagcagttaacagccaggtccttgcctgctgtgcagtctgatgaaagacttcagcctc

SEQ ID NO: 712913 - DNA, 90 bp, Homo sapiens
actggaaagtgaggaattttgaagtacaccgtggtgacattgtatcattggtgggtgatccattcatgttgcagcagtctacaaatccag

SEQ ID NO: 712914 - DNA, 100 bp, Homo sapiens
ggaagatgggaaaaggcataccgctcaatgaccagaaaactggatgcccaggtgagggccgcggtggagatgtatattgaggactgggtcattgtccaca

SEQ ID NO: 712915 - DNA, 100 bp, Homo sapiens
gtggcactgaggctctggaacttctgcccagctctccttgtttgcagacagtaggttgcatgcctccgcctgtgtcttctgcagtgattttaaccaaggc

SEQ ID NO: 712916 - DNA, 100 bp, Homo sapiens
gtctgagtgtctgtccccagagcctcagtttgtgcaggacaccgacatggaacagggactcactggggctgtttttggaaggaagaaagatggaaagcgg

SEQ ID NO: 712917 - DNA, 100 bp, Homo sapiens
tgggaacttggttcctctggaggatgtccacatcaaagggagaatcatagacactgtagcccagagatttaccgcattgtttctcagaagcaaatgtcag

SEQ ID NO: 712918 - DNA, 80 bp, Homo sapiens
ttatggtctttgtgcacatttacatcaaggtccaaactaaatgacatgatagatgctattccaaaaagtaagaagaataa

SEQ ID NO: 712919 - DNA, 98 bp, Homo sapiens
aggtgaacaccaagggcctagatgacgacacgcctttgcacgacgctgccaacaacgggcactacaagccgtgagacacacaaaatcgcagtgtttta

SEQ ID NO: 712920 - DNA, 90 bp, Homo sapiens
cgggctgcaacctgcagcacatcagcgaccgggagaacatagacgagccaactgggagccgggatgggaaactactaaagtttgatgcac

SEQ ID NO: 712921 - DNA, 51 bp, Homo sapiens
caacaacaaaatgccactttcaacacatattttaattgataaagaccagag

SEQ ID NO: 712922 - DNA, 97 bp, Homo sapiens
cgggctgcaacctgcagcacatcagcgaccgggagaacatagacgggctggaaacaggattgttgaaatactccctgaacatctgaaagagtttcag

SEQ ID NO: 712923 - DNA, 83 bp, Homo sapiens
gaagatgaagatgagaacattgagactcatgaaatggccacagatgataagacgtccccaacactggactctgctaatgattt

SEQ ID NO: 712924 - DNA, 100 bp, Homo sapiens
acccacggaccattaatggacaaaaacatgagtcaatatgtattgtggcattcaaatcctagcactctgggagagtacgactttactccgtgacataaaa

SEQ ID NO: 712925 - DNA, 90 bp, Homo sapiens
cgctcatcgaaaggcactagagcttctgtcaaagaacaaggaagacgcgacatgtcaacatcttgctgtttatgggcttcatgacccggc

SEQ ID NO: 712926 - DNA, 100 bp, Homo sapiens
tccagtgcatatcagtatcatggagggacattactatgatccacgtatatgaatgacctaaaggtacaaataaagacggagagagaacagtgccaactgg

SEQ ID NO: 712927 - DNA, 73 bp, Homo sapiens
agaagctgcggccgcacctggccaagacaggtgcagttcaggagcagatgagatccaagggaaaccgagatag

SEQ ID NO: 712928 - DNA, 75 bp, Homo sapiens
cagaaatgcaatcacagacgtcacaaggtttttacagtattcaagtcaaacaacgttgaaatggattgggtgttg

SEQ ID NO: 712929 - DNA, 75 bp, Homo sapiens
ttcttcactgcatgatttcaaaaggtttgaaatatctccattcagctggcattttacatcgagacattaagccag

SEQ ID NO: 712930 - DNA, 117 bp, Homo sapiens
tcaaagaactcatgcaagtggaacttacagcttccttgatcggactcagcattcagtgtacgtggttgggaatgaacctttaacagttttgatggattccctgcttccagtcctggg

SEQ ID NO: 712931 - DNA, 83 bp, Homo sapiens
acaaccgttgtttaatggaagatttcgatcagttagggatggatagaatgacagaagatgctcttcgcttgaatctgttgaag

SEQ ID NO: 712932 - DNA, 78 bp, Homo sapiens
gcctttgccgatccgccgcccgtccacacccgccgccagagatcctgaaggagctagacgagtgctacgagcgcttca

SEQ ID NO: 712933 - DNA, 86 bp, Homo sapiens
tcaaagaagatgcctcgaactaaacaaattcatcccagaaatctaagaggtggatcttgaacgcaccttcacgtttcgaaattcaa

SEQ ID NO: 712934 - DNA, 100 bp, Homo sapiens
ctaatgtcccacagttggacagacctgaaattgagctctgtgattttgggacatttgggcttccaggacagttttgtcacatcaggtgtttttagtgtca

SEQ ID NO: 712935 - DNA, 96 bp, Homo sapiens
aagagagaaagagtggatttcagcctgcacggatggtcttgaaacacaaatggtttttgggattaatgaaaatcaagttccatcctcagacaagag

SEQ ID NO: 712936 - DNA, 90 bp, Homo sapiens
aggatctggactccgtttcctgccttgctctttggaccacattgtcaattcacaccgctttaccgatttgttacaactcaagcaagggcc

SEQ ID NO: 712937 - DNA, 124 bp, Homo sapiens
aatgtagacaatggttagagaagaattttccaaatgaatttgcaaaacttactgtaggttggatggcaagcatgtggtgtttggcaaagtgaaagaaggcatgaatattgtggaggccatggag

SEQ ID NO: 712938 - DNA, 100 bp, Homo sapiens
tggggcggcggcccgagtacacagaccccaaggtggtggctcagggtgaaggccgggaaggtagtcggtcttctcttgcccaaccagacactggcatcca

SEQ ID NO: 712939 - DNA, 73 bp, Homo sapiens
ttacaaattttttttgaaagaaatttgggggaagtttaactaactctttgaatatctcagagtttgaagaatc

SEQ ID NO: 712940 - DNA, 75 bp, Homo sapiens
ggaagagcgagcccggacggcgcctctcgaacgagtgtgggcgcgaggcagttaccggtattgtaagaacaagcc

SEQ ID NO: 712941 - DNA, 75 bp, Homo sapiens
tccgtattctactacgaaattcttaattcccctgaccgtgcctgcaggtattaaactgacactgtcagctcttct

SEQ ID NO: 712942 - DNA, 101 bp, Homo sapiens
agggtgtccccgccgccctcagctcgaagtcagccaccatggaggcgcaggcacaaggtggctgtacttttgatgatggtccaggggcctgtgattaccac

SEQ ID NO: 712943 - DNA, 74 bp, Homo sapiens
acaaaaccacaggaaagtcccggagctccatccctatcatcgagaaaggagaagaacactgtggacatctaatt

SEQ ID NO: 712944 - DNA, 100 bp, Homo sapiens
gcctgttgcagccatggtgcattgcagttgcgtgttgttcagaaagggtgtaccagtgatggcaataagaaacaaaatgatatcagaaggactagaccca

SEQ ID NO: 712945 - DNA, 75 bp, Homo sapiens
ctcccaagtggctgggattacagatggagttcgctcttgttgcccaggctggaatgcaatggcatgaccttggct

SEQ ID NO: 712946 - DNA, 50 bp, Homo sapiens
attttggaatctatagagtatgtcagcaaattcaacacccaacagcttcc

SEQ ID NO: 712947 - DNA, 111 bp, Homo sapiens
ggaggttttcaggaccaaaattgtggaaaagtcactctggttcgagaacttgtcttggacaattgcaaatcaaatgatggaaaaattgagggcttaacagctgaatttgtg

SEQ ID NO: 712948 - DNA, 109 bp, Homo sapiens
accctctgccgagtctcaatatctgtcttcggtggactccttcggcagtccacccaccgccgccgcctcccaggggaggagccccagccccgcgacgaggaggaagcgg

SEQ ID NO: 712949 - DNA, 75 bp, Homo sapiens
ttcgaggtggagtcggagctgggacggaattgaaacctgacatagtaactaaatctgctcttggtgatgatatca

SEQ ID NO: 712950 - DNA, 50 bp, Homo sapiens
caaagcttgcgaggtggcgttaggtggtttgaagtgtcctgtttgcagct

SEQ ID NO: 712951 - DNA, 90 bp, Homo sapiens
ggaatgatgatgtctcatatgtctcaggcttccatgcagcctgccttaccgtcggcagaaccaattgaaagaccaacagcaacagcaagt

SEQ ID NO: 712952 - DNA, 100 bp, Homo sapiens
aacggcctggacgccccaagggcgggcgcagatcgcggagccatggattgcactttcgaaggtgacggccctgctcgggaggccctccagtctctgagcc

SEQ ID NO: 712953 - DNA, 50 bp, Homo sapiens
ccgcgttggcctcgccgcccctgctcggactttgagcaaagcatggtcct

SEQ ID NO: 712954 - DNA, 78 bp, Homo sapiens
gatgtgcctgaatctataatgctggagatgaaagggagacttgcagctcctctgctgaaacgtttaagcctctccaca

SEQ ID NO: 712955 - DNA, 75 bp, Homo sapiens
gaactgattgagaagcatgctggtttcctggaagtggcggatgaggccacgggcgccctggcatcggcggtgtcg

SEQ ID NO: 712956 - DNA, 90 bp, Homo sapiens
cccggagcacccgacccctgaaggcggggtttcaccatgttgcccagactggtcttgaactcctgagcttaagcaatccacctgcctcgg

SEQ ID NO: 712957 - DNA, 100 bp, Homo sapiens
gcagattctcgcaaatctggaagcggatcgcgtggagtgacggtcacaccgcggcggatcatccagcagctcgtcaacggcatcatcacgcccgccacca

SEQ ID NO: 712958 - DNA, 98 bp, Homo sapiens
caataccaggatagctgttgtttcagagaaagttcccttttagactatggcgacatacctggagttcatccagcagaatgaagaacgggatggtgtgc

SEQ ID NO: 712959 - DNA, 100 bp, Homo sapiens
gcggaagaagatggcgctcaccagtttttcagaaactttggaattggcagatgacatggccattgatattccccatatttggttgtaccttgctgaactg

SEQ ID NO: 712960 - DNA, 75 bp, Homo sapiens
ttcagggacagttatctgctttttaaaggagtcaaattctcaaattgaaactgaaattgaagttccatcgtccgc

SEQ ID NO: 712961 - DNA, 75 bp, Homo sapiens
atggcctgcattttattggtctacaaagacagcagtcctagcagaagatgtgactcagactgcctctgggtgggg

SEQ ID NO: 712962 - DNA, 50 bp, Homo sapiens
cgaacatggcacgaaagagatcaaggtcccaatttgggccccgagtctgc

SEQ ID NO: 712963 - DNA, 102 bp, Homo sapiens
ccccgatctacggggctgacatcagcggctctttgtatgatgacgtgatgtgtccaatctagatcccaacttctcatttgaaggcaccaaactggatgtggg

SEQ ID NO: 712964 - DNA, 74 bp, Homo sapiens
tcggacgcacggaccaggcccatttccctttcatctaatgctgcttctaaattacttgggcaaaattgggtcca

SEQ ID NO: 712965 - DNA, 50 bp, Homo sapiens
atcacatgattttgaccccacagcacttttccagccattaactccaggct

SEQ ID NO: 712966 - DNA, 100 bp, Homo sapiens
tgttaggaactgggtccccaaagtcttggaacagcgacgacaaggcttggaaacatacttacagtgaacagctctgcgctttttgttactgtggggaaaa

SEQ ID NO: 712967 - DNA, 97 bp, Homo sapiens
attcgcaagaccttcaatatcaaaaatgactttactgaagaggaggaagcccaggttgttgtcgggataccagatttcctactccgagaggccccgg

SEQ ID NO: 712968 - DNA, 74 bp, Homo sapiens
aggattccaagtaactcttatttggatactcctatacctggcacttaccacttgaaaacttttattgaagaatc

SEQ ID NO: 712969 - DNA, 112 bp, Homo sapiens
gggacccagaccctggagcctcagttggaagcagccgatccagcctgcggagcctgtggggcagaacattaaccaggtggtatttgttggaaatttcttgagaattaatacg

SEQ ID NO: 712970 - DNA, 90 bp, Homo sapiens
tgattgtgaggcctccccagccatgtggaactgagcctatcaacccagataaagcgggacctcctctctggtagaggtgcagggggcagt

SEQ ID NO: 712971 - DNA, 82 bp, Homo sapiens
agcccgctcccctgagtaagagtcagccagccgcggatggggagcgtgagtggcgaggcttgttagcagtggcacaagatct

SEQ ID NO: 712972 - DNA, 88 bp, Homo sapiens
cgttggggtgagaccctcacttcatccggtttccacttgagcggcacagtgacagaacctgcaatacaatcggagccagaaactgttt

SEQ ID NO: 712973 - DNA, 74 bp, Homo sapiens
ccggccccggcggcggcggcggccttgggccggtggacgtacccagcgctcggatttccatcaccaaggagtaa

SEQ ID NO: 712974 - DNA, 75 bp, Homo sapiens
gaggacaacagctacaaccgggggtggctgtgaaaaacaatatcgatgtcttctacttcagctgcctcatcccac

SEQ ID NO: 712975 - DNA, 50 bp, Homo sapiens
atcgtgttcctgaatgaaagaagtcagacccccagaggagcccaccacct

SEQ ID NO: 712976 - DNA, 95 bp, Homo sapiens
ggactctgaggaatcctatccatatgaggcaacagaactgttgacattcagggatgtgaccatagaattctctctggaggagtgggagtttctga

SEQ ID NO: 712977 - DNA, 132 bp, Homo sapiens
ggggcatggccctccggagtgcgcagggcgacggccccacctccggccactgggacggcggcgcggagaaggcagacactctcgaaagcgatgggaacgctttgtccacagtgaaaatcagcaccttgtcag

SEQ ID NO: 712978 - DNA, 74 bp, Homo sapiens
ctggctgtgctgcgcgacccccgcgcatgtgctcttaaagttccgtacagataaaggaagagatcccagttctg

SEQ ID NO: 712979 - DNA, 96 bp, Homo sapiens
atttctgggtgacactcaacaggattcccggtgcattttctagaatcatgaaactttgtgaagaaaaatgtgaaacagatgaaatacagaagggag

SEQ ID NO: 712980 - DNA, 100 bp, Homo sapiens
aataaaggacttccctgaaaaagctaaggatatctttattgaagctcacctttgtctaaataagaaccatcactgttgctggaggcacctgacaaatcct

SEQ ID NO: 712981 - DNA, 74 bp, Homo sapiens
ctgctgagcccaaggccaaggaccccttcgctcacctgcccaagaggtctgagcaaataaggtgtataaaaaat

SEQ ID NO: 712982 - DNA, 97 bp, Homo sapiens
gatgtgtctggtgtgggtttcccaagcaaggttccttggaagaagatgtctgcagaggggcaagattcttgccaagagaattaatgtgcgtattgag

SEQ ID NO: 712983 - DNA, 100 bp, Homo sapiens
ggcgagccgggtgtgagctgcctgaaaatgcactcggatgccgccgctgtcaactgtgccctgtccacggtgcctcctgcatgtcctgctgccctgagct

SEQ ID NO: 712984 - DNA, 100 bp, Homo sapiens
ctgctctgacgtgctgaagaaatttgtgtggagcgaggaaaggtgtgctgtgcctgaggccagattcatgatgttgctatcaaaagttgagaaattgtca

SEQ ID NO: 712985 - DNA, 75 bp, Homo sapiens
cctctatgccgacatcgacgccgcctggcaggccctgcgcaccaggttacgggcaggacttgagtggcttcggac

SEQ ID NO: 712986 - DNA, 83 bp, Homo sapiens
ctcacaatgaggctccctgctcagctcctggggctgctaatgctctgggtctctgcggccaccatgctgccactgggctcaga

SEQ ID NO: 712987 - DNA, 100 bp, Homo sapiens
tacagaccggtggatcctgtccttcatgcagtctctcattggcttctttgagactgaaatggcaggaattcctcctgatcagcagagactgatctttgct

SEQ ID NO: 712988 - DNA, 76 bp, Homo sapiens
ctaaaaagaattaggaaggtccttcagggggacttgatctcatcttcatgccaggccttgggtttgacaaacatgg

SEQ ID NO: 712989 - DNA, 51 bp, Homo sapiens
ctagacgccagttagccttgaagacagaaagaatttactttcaggttttct

SEQ ID NO: 712990 - DNA, 103 bp, Homo sapiens
cttccgatgtcattaaggaagaatttccaaatgaaaatcaagtagtgtttgccagagttgattgtgatcagcactgtgttccattgcctaaagaggagaacat

SEQ ID NO: 712991 - DNA, 82 bp, Homo sapiens
cataaaaatggctgagtgtcttgtcatgctagcactgcattaagtgatgcatacaggtcttccccagggaggtcctgaacta

SEQ ID NO: 712992 - DNA, 90 bp, Homo sapiens
ctgagtttacttctcctccttctttgttcaagactgggcttccaccgagcagacacgaagatcgattgagaagttattagaatgggaaaa

SEQ ID NO: 712993 - DNA, 90 bp, Homo sapiens
ctcatttcctggccgctcctgggcttcgcggagaatgcagttgaaactaattttgtggatagagaaactgttggaactgctttacaaagt

SEQ ID NO: 712994 - DNA, 90 bp, Homo sapiens
gccggcgccgccgcgtcttcccggtctcctttcccggccgcacagggaatttgtgaccctcaaggatgtcggcatggacttcaccttggg

SEQ ID NO: 712995 - DNA, 100 bp, Homo sapiens
gattccctgcctgcagagggttacatgggctttagtctcggagcgcgttctgccagagtttcataaatggacgctgacatggactacgaaagacccaacg

SEQ ID NO: 712996 - DNA, 100 bp, Homo sapiens
ccggagcccgggaggggccgcgccgccaccgtctgaactaggatgtcccgacatgaagcaatcatcaaggtgctacccctttagttctggcaaagcgcag

SEQ ID NO: 712997 - DNA, 99 bp, Homo sapiens
ggaaaagaatcactggtgcaatgtgtgaaggcatttgatgaagcaattgctgaattggatacgctgaatgaagagtcttataaagacagcactctgatc

SEQ ID NO: 712998 - DNA, 76 bp, Homo sapiens
aagtctgttggtgcacaaaaagacacttatactatgaaagagactgtacaatttgttcaaggaatttttgtagaaa

SEQ ID NO: 712999 - DNA, 90 bp, Homo sapiens
agaaatggataatgagtgtgttgcacagacatggtttcgctttttacacatgttaagctatgctaagaaggaatctgatcttaatggcgc

SEQ ID NO: 713000 - DNA, 75 bp, Homo sapiens
cttatgcaacagtttctctagtgggcccttctagtatacgctcaacggcaagaaagtggaagttgccgtcaaaca

SEQ ID NO: 713001 - DNA, 78 bp, Homo sapiens
ctcaaggaaacctttccaacacagatgtccaagctgccaatactaaggctcgtacgtctgcatcgattatcttacgtg

SEQ ID NO: 713002 - DNA, 90 bp, Homo sapiens
agcgaaggggcaggcctgaaatggatcagtgtccttcagtgatgtggctgtgggcttcacccaggaggagtggcagcatctggactctgc

SEQ ID NO: 713003 - DNA, 96 bp, Homo sapiens
ctcaaccctgagctgcgtgagaacccgcccatgaagccagatttctcccaggtaattttaaccaatcagatgacaacaaagattgatagaaatcag

SEQ ID NO: 713004 - DNA, 100 bp, Homo sapiens
acagctggctaggctgcaggagctgggattcagcatggatgattgtcgcaaagctcttttggcgtgtcaagactgtgtacagtgccctgggcctgaggga

SEQ ID NO: 713005 - DNA, 76 bp, Homo sapiens
actgggtttggctcaatggaggaattggtgctcctattgtacagaaatcatttctaccagttcggagagatccgga

SEQ ID NO: 713006 - DNA, 50 bp, Homo sapiens
attggctgggggacttctgtcaagaatgaagtccctgaggtgaagaaaga

SEQ ID NO: 713007 - DNA, 97 bp, Homo sapiens
ggactggggagcggtcgaggattgccctggggggagtcaggacttcaaggcccctacaggatccgagccaggagacactgagcctttggagttagga

SEQ ID NO: 713008 - DNA, 82 bp, Homo sapiens
cagcttctcccaacccggcagcatgggcctggataagaacacagtgcacgaccaagagtggacccaagtggagagattgtgg

SEQ ID NO: 713009 - DNA, 74 bp, Homo sapiens
cgggtctggagtgcgtgggggaccggctgttggcggaatttatagagcggcagcacgcaaagaacaggtattac

SEQ ID NO: 713010 - DNA, 82 bp, Homo sapiens
ggataaagttccagagcctggagtgcccactgaaaccataaaggtgtatgcaacagcgttattgcaacaggctaacgaaaac

SEQ ID NO: 713011 - DNA, 87 bp, Homo sapiens
gagaaacccactgaagacgtctgcgtgagaatagagaccaccgagcaattctgtggtgttcttggtcacacatttatggagtttctg

SEQ ID NO: 713012 - DNA, 75 bp, Homo sapiens
ccgcgacctccggatgacccgggcttcggcccccaccagagactcgatgactttgggaaattgctgctggctgag

SEQ ID NO: 713013 - DNA, 82 bp, Homo sapiens
cgggcctctggaatttagcgctcgcccagctagccgcagaatccacattcatctcaatggaaggatcctgccttaagtcaac

SEQ ID NO: 713014 - DNA, 95 bp, Homo sapiens
gggagaccagactggttttggaggtggcccagcatttgggtgagacacagtaacctggttgaactctgcatctggaaagctgaagactgaagaaa

SEQ ID NO: 713015 - DNA, 75 bp, Homo sapiens
tgaatgtttggggtggatgaggcagcaaagggaatttatcaaagagctgctttctcggataagaggcatgaggaa

SEQ ID NO: 713016 - DNA, 83 bp, Homo sapiens
cttagctgtgctcgcgctactctctctttctggcctggaggctatccagcttctggacttcagtgaccccttcagcactgaag

SEQ ID NO: 713017 - DNA, 101 bp, Homo sapiens
gtggacgtcttcaccgccccacactggcggatgaagcagctggtggggctctactgcgacaagggggccgaaggccagagaccaggatttggctacggagg

SEQ ID NO: 713018 - DNA, 88 bp, Homo sapiens
cccatcagcccagcctgcaaggaggcgccaccggacctgcacactcaggagcaggtgatgcctcccatgaaacccaggaacctgagtc

SEQ ID NO: 713019 - DNA, 88 bp, Homo sapiens
aaaatggaacatgatggttcactttttcaagcagtaggaattaagagacgctcaaaccgccaagttaagcgaaaaaaatatacagagg

SEQ ID NO: 713020 - DNA, 75 bp, Homo sapiens
ggccctctgtactctggctgcagactgatctctctcaggatcacagatggagagacattttgccacacgatgaat

SEQ ID NO: 713021 - DNA, 80 bp, Homo sapiens
aggaggaagtctcaagaaacaaagtgtacaaagagagcacttcctaagaagagtcaggacagagcgggatgccaccagct

SEQ ID NO: 713022 - DNA, 76 bp, Homo sapiens
ccgccaggctctcctgctgctcgcagcggccgccgagctctcgccagacctgcctagagctggaacgttacctcca

SEQ ID NO: 713023 - DNA, 75 bp, Homo sapiens
cgctctgcacattccaaaggcagggcgcaccctacgacgcgcacaccaccggcatgaccggcgccatcagctacc

SEQ ID NO: 713024 - DNA, 73 bp, Homo sapiens
acaccccggaaaaccttcgcctcaagcaacagagtgagctccagagtcagattttgcaagaacgaggctcaag

SEQ ID NO: 713025 - DNA, 88 bp, Homo sapiens
agcgccagctcagcgtgcccatcccggggggcagcaacggcgacatccagcaaggaataatcggtggagatggattgtgaaatggagg

SEQ ID NO: 713026 - DNA, 100 bp, Homo sapiens
agatgtgtcctatgaataccgcttcctggagttcacgactctgagtgctggaccatggccaacctggagcgcaccttcatcgccatcaagccggacggcg

SEQ ID NO: 713027 - DNA, 50 bp, Homo sapiens
cgctcttcgacttcctgttgcagcacattgataaggtgttcaaacataag

SEQ ID NO: 713028 - DNA, 83 bp, Homo sapiens
cttgttcccccaaatgtctgactctgactctcggactgagaaacgcaaggtgcccgtggttgacacgagctgtgtccccagct

SEQ ID NO: 713029 - DNA, 74 bp, Homo sapiens
taacagctggagagaacagttcattgaagctatcactgtcagtgctggagctgatggtacacacatggatggtg

SEQ ID NO: 713030 - DNA, 95 bp, Homo sapiens
gttgtatatcaagagaccaatggagttccctgacatcgtggagttctgcgaggccatggccaacgccgggaagaccgtaattgtggctgcactgg

SEQ ID NO: 713031 - DNA, 100 bp, Homo sapiens
gaattacgggaacagaaagaaaagtccgaaagagctgcttcccctaaagtacgactgagcttggcaaacgaagctctgctgcccaccctcatctgcgaca

SEQ ID NO: 713032 - DNA, 100 bp, Homo sapiens
cccatcctctccacgccgctgccgctgccgccatgcaaggggaggacgccagatacctcaaaagttggcaaacatgaattgactgggcataaagtagctg

SEQ ID NO: 713033 - DNA, 98 bp, Homo sapiens
gacgagccagtggcaatgacccagacccggacgacccccattgctgagccagcggagctgcttggagcttactccacgggaacagcctctagataatc

SEQ ID NO: 713034 - DNA, 82 bp, Homo sapiens
ctttcctgcacacaaggtcgtcctggctgcctgcagcgactacttcagattcttctgctgatcgacattgagcagtcctaca

SEQ ID NO: 713035 - DNA, 100 bp, Homo sapiens
gcctggaatttgattaactcattcaaggttacccagttggacctatatccagactttgcctgacactgcagggtccaagagaattaaagaaatatggaat

SEQ ID NO: 713036 - DNA, 100 bp, Homo sapiens
gagactcactctcctgggatgttctcatggtttcccatcctcttccctattaaggtaatgagagacccccaaacaaaacgttccaggggctttggttttg

SEQ ID NO: 713037 - DNA, 74 bp, Homo sapiens
ctggacctgctggtgttcgcccacgaccatgtgcagaatacagaaactgcagccatgaccacgcacgtcaccct

SEQ ID NO: 713038 - DNA, 90 bp, Homo sapiens
ggtgtgaagacagggagacgctgctgcagctccgggacacctggggccgccgaggcaaagtgtttggcatgcagaacaatctggccccca

SEQ ID NO: 713039 - DNA, 74 bp, Homo sapiens
ggaggtgaagggcgacctgactgccaagccattccacagattttgaagtacaccgaaactggcttgctatcact

SEQ ID NO: 713040 - DNA, 100 bp, Homo sapiens
ctccgcctcctgggatcaagtgattctcgtgcctcagcctcctgagtagccgggactacaggttcgccaagcagcttttcagtctctgggacctttcata

SEQ ID NO: 713041 - DNA, 82 bp, Homo sapiens
accaaacaccctcagctccacattgagagcaaaatctacaagatgatgcagggaggaggtgtcagaaactatttaaaagaag

SEQ ID NO: 713042 - DNA, 74 bp, Homo sapiens
cggagctgacggtggaggttcgcggctctaacggggctttctacaagtctctgagatatgataccagctgtttt

SEQ ID NO: 713043 - DNA, 83 bp, Homo sapiens
ctaatgttttcagggagaaaagcatgcagaacagatatgtacaaagtggtatttctttaaatccagaacaatggagccagctg

SEQ ID NO: 713044 - DNA, 100 bp, Homo sapiens
catgcccgcctgtctgctgatggcaagaaacctattggaattcgagacttaattaatgaagctttgcatcgagaaacgatgggtctgaagtccaaagtga

SEQ ID NO: 713045 - DNA, 75 bp, Homo sapiens
ttacctcaagaaagtgatccagactactcagcacagaaatgattctggggaccattctgaccacatgcattacta

SEQ ID NO: 713046 - DNA, 100 bp, Homo sapiens
aagcaccggaagcaccccggcggccgcggtaatgctggtggtctgcatcaccaccggatcaacttcgacaaatacaggctgaggaattaccaaggaggca

SEQ ID NO: 713047 - DNA, 100 bp, Homo sapiens
cgggacacttctgcaaccccgcagagcgcatccatcaaagctttgcgcaacgccaacctcaggcgagatgatatggaatgtgcagatgtcccactattaa

SEQ ID NO: 713048 - DNA, 75 bp, Homo sapiens
gttccatcatggcgtcaatgcagcccccaggctccgctcttgccagagggacaggagccatggctcagaaaatgg

SEQ ID NO: 713049 - DNA, 98 bp, Homo sapiens
tcgggggccgctctgggatcccggccaccagcaattgtccgggcggcgactggcggcgcgatggacctgaccgggctcctgctggacgaagaaggcac

SEQ ID NO: 713050 - DNA, 83 bp, Homo sapiens
cctgtgcctgaacctctctttcgcttttgtggaactactctacggcatctggagcaactgaccattaaaaatctcaagtgacg

SEQ ID NO: 713051 - DNA, 51 bp, Homo sapiens
ttgagaaaaacctgaaagatgtctcagcctttttgcaaatgtgtaacttgc

SEQ ID NO: 713052 - DNA, 100 bp, Homo sapiens
aagctattgagttctgctcagaggaccctgtacagggaggtgatgctggagaactacagccatctggtctccctggggaaatgaggcaagttatcctttg

SEQ ID NO: 713053 - DNA, 75 bp, Homo sapiens
atggatttcgttatatcccctttagaatatatcagatcacctctgcagcctgcacagccgggcctttggactcct

SEQ ID NO: 713054 - DNA, 100 bp, Homo sapiens
caagacatcagagacttttatgaaatgttagccgaaagaagattcgggaactggagcctctcctctgtcacagtgacaatccatctcagctcatctggac

SEQ ID NO: 713055 - DNA, 52 bp, Homo sapiens
agttgcagaaggcacagaccagcacaggacttggtggctttcgaggatgtgg

SEQ ID NO: 713056 - DNA, 75 bp, Homo sapiens
tgcaggatggagaagaacattcttacatgctgcttcaaggttactgactttttatgatgtttggtggctatgaga

SEQ ID NO: 713057 - DNA, 90 bp, Homo sapiens
aatttggccagttatccaattgatgaactagtagatagagccaaacaatcttttcaaggtcacagaacagaaagtgctggtggacatctc

SEQ ID NO: 713058 - DNA, 75 bp, Homo sapiens
aacccagcctgtttcacttcttgcctgaaaaaggactgcgcggactgacttcttggctactgaaagcaaagctcc

SEQ ID NO: 713059 - DNA, 95 bp, Homo sapiens
tgtattctttacctgcttcccaatcccactgatgaggatcagcccatgacatcaacgagtgtgatgaggccgaggctgcctccccgctgtgcgtc

SEQ ID NO: 713060 - DNA, 83 bp, Homo sapiens
gccgtgccctggggctgagccctcaggtagcagtagctgatgtgcagtttggccccatgagatttcatcaagatcaacttcag

SEQ ID NO: 713061 - DNA, 100 bp, Homo sapiens
cggagatctctctcatctcgctcggctgcgggaaatcgggctgaagcgactgagtccgcgatggagagagaagaagaaggaggttcctgctgtgccagaa

SEQ ID NO: 713062 - DNA, 93 bp, Homo sapiens
tcagcccccggatcagcctgcctctgggtatttacatgaggaatttccagagtcctggtcagttcccaggttggctgaaggctttgatgtcag

SEQ ID NO: 713063 - DNA, 80 bp, Homo sapiens
ctggccaagagcttctctgagaagagaatcaaagagaacttccagaatgacagcaattcagcaggagcaggtggaccagt

SEQ ID NO: 713064 - DNA, 100 bp, Homo sapiens
tgtggaaatgcagaaaagcttgcagaatatatttgttccagaagtctcaaatctccacacagaagaacattaagctttgatacttctaaaatgaaccaac

SEQ ID NO: 713065 - DNA, 83 bp, Homo sapiens
attcagaaggatatcgacgtcgtgatccagaagtccagagctgaggactgcctgtttgcagggtccctcaggctccctatcag

SEQ ID NO: 713066 - DNA, 100 bp, Homo sapiens
cagtcatgaagatggaacctctgaataacctccaggttcttaaagatgtgggattgaaaaaagaagatattgcaatgtgggaagtaaatgaagcctttag

SEQ ID NO: 713067 - DNA, 75 bp, Homo sapiens
ggagctggagcccgaggccaagaagctctgtgcgaagggctccgaactgaaaagctccatcattggcaagaagaa

SEQ ID NO: 713068 - DNA, 100 bp, Homo sapiens
tcggaggccgattcgacacagacaaggagggtgaggacaaaatcttcttaatcaacaagcttcactccatctacgagaggaaggagagggaggagaggag

SEQ ID NO: 713069 - DNA, 100 bp, Homo sapiens
gctaaaaataaaggagaagtatttccaacaactgaaggccgactgcagcagtggcccagggcaaagagtgtgcgtcatcgatgagattgggaagatggag

SEQ ID NO: 713070 - DNA, 98 bp, Homo sapiens
ggatcgatttcaaagtaaaaactgtattcaaaaatgaaaagagaatcaagcttcagatttgggaagtgtttggattgtgagctatttcagaactgttc

SEQ ID NO: 713071 - DNA, 78 bp, Homo sapiens
agggtcctcctgctcacagtgtgaataacaggaagcagtgtggttcctctccaacatcactgcaggaaatcagcagca

SEQ ID NO: 713072 - DNA, 83 bp, Homo sapiens
gcaaggaggagtggaatgaaatacggcaccagattggaaacacactgatccgatctattccagaggggagcttcaccacttca

SEQ ID NO: 713073 - DNA, 100 bp, Homo sapiens
gatgagaagctgtcggagcttcccaagaatcttgacaaaacttttggaagtgtcagatgatccccaagtcttagctgttgctgctcacgatgttggagaa

SEQ ID NO: 713074 - DNA, 157 bp, Homo sapiens
gcagtccctgatgcaggctcccctcctgatcgccctgggcttgcttctcgcggcccctgcgcaagcccacctgaaaaagcaatgttcacagcatctttaccgggagcagattccatctcaagaaaccacttcctttgctcatccataagaagcaact

SEQ ID NO: 713075 - DNA, 90 bp, Homo sapiens
cgatgtcttctctttgctacgatgccagaagtgggtggagaactgtaggagagcagacttagaagataaaacacctgatcagctaaataa

SEQ ID NO: 713076 - DNA, 100 bp, Homo sapiens
ctggttatagatggacaagagacgatcattctgcaagcaggcaacctgaatacagcgtcaagggttccacactgttgggagtcgctgcaagaatcggaca

SEQ ID NO: 713077 - DNA, 100 bp, Homo sapiens
aagagtctgtacatagagctacttcctgcatgtgcagtctttgccaacaaaaaaaattaccaagaaacctattccagatgagcacctcattctaaagacc

SEQ ID NO: 713078 - DNA, 100 bp, Homo sapiens
gttattttcccaatttttgctatactcctgttctggggacagtttggtattaaaagtgaatctggattgggaaagtcgacattaatcaactcattattcc

SEQ ID NO: 713079 - DNA, 100 bp, Homo sapiens
cggaaccgtgctgccccgccccgctccacccgtgaggccgtagctccatattggacatccccagaaaagatggaaaagaaattgcatgcagtgccggctg

SEQ ID NO: 713080 - DNA, 82 bp, Homo sapiens
cctcccgagtagctaggattacagcggatgcagtggtgcagtatgacgtggagctgattgcactaatccgagccaactactg

SEQ ID NO: 713081 - DNA, 50 bp, Homo sapiens
aacgagctgagctggcagagtcgttaaggtaatcattgagaaaagtgaca

SEQ ID NO: 713082 - DNA, 96 bp, Homo sapiens
cagctaagacaacatggtacatgtggaaacaatgtgatgagaaccattcatggggtgggagagatgatgacccagatggtactcagtagaggctcc

SEQ ID NO: 713083 - DNA, 83 bp, Homo sapiens
atccttaagaaggggcaggctgtagactacgagggctccagaacccaggaaggtgggaaagcagtgccactctccgcttcaca

SEQ ID NO: 713084 - DNA, 83 bp, Homo sapiens
agggacagcctcatgatcacaaacatttaatgccaacccaaattatacctggttctggctcatcaacagagcagacgagcaga

SEQ ID NO: 713085 - DNA, 101 bp, Homo sapiens
aagatcatcgcctccctggtttatagtagacagaccttttctgtttttcatccgacataatcctacagggtgctatcgtggctgtgactggtgacggtgtg

SEQ ID NO: 713086 - DNA, 100 bp, Homo sapiens
cggaggtgtgggaacgggtatctggaagatggggaagagtgtgactgtggagaagaagaggcccagtacatcttgatccatcaggctttggtggaataca

SEQ ID NO: 713087 - DNA, 82 bp, Homo sapiens
cccacccggcccaactcactgttgaaatcacaaagattagacacctttttagataggtgttcttcagcaccactgacaacac

SEQ ID NO: 713088 - DNA, 75 bp, Homo sapiens
ctcttgcgggccctgttcaagcggaatcctgccaaccggctcgcctggtgcctgctgaagccagtcctggagccc

SEQ ID NO: 713089 - DNA, 75 bp, Homo sapiens
tctttttacttcatttatttcattgtataacacatctatgaagtattcctggaagcttgtgcaccccaccgacaa

SEQ ID NO: 713090 - DNA, 75 bp, Homo sapiens
ttgatgctgaggagctcctggtcgatgaagaggatgatgtttttggtgaaggaagaagctgtttgttttgattct

SEQ ID NO: 713091 - DNA, 99 bp, Homo sapiens
ccgctcggccggcagcatccttggggagagcagcaccgaggccagcaagacgctgcccgccatcgaggtctctgtcttcaacgctggagtgcagtggcg

SEQ ID NO: 713092 - DNA, 97 bp, Homo sapiens
agatgttcctgtggaccccagtccaggcattgaatgccccagaggagcccgaaacctcccaggcttggtgcaggaaggagagcccttcagcgaggaa

SEQ ID NO: 713093 - DNA, 80 bp, Homo sapiens
tgccaccatgcctggccatcttcgctcttgagcacctgtgtcatgagttctaaagttcctgttgcttcagacaatggatg

SEQ ID NO: 713094 - DNA, 87 bp, Homo sapiens
acgtgggccagctgcgggctgagctggccagcgcaggacaatacatggcttgatatacaacgccctgaagctcttcatggagatgaa

SEQ ID NO: 713095 - DNA, 90 bp, Homo sapiens
tcatcgctgacagctgaggaagtctgcatccacattgcacataaagttgtttggtcagatgatgactggttgaagaagttttctgggaag

SEQ ID NO: 713096 - DNA, 75 bp, Homo sapiens
actcgaagaacagctgtggaaagaagttgcaaaacactggcaacatttcattgaattggatgaaaatagacagag

SEQ ID NO: 713097 - DNA, 97 bp, Homo sapiens
gaccacctgggcggaggctacagcatcgtggcgctgggcaatgacatctacgtgacggacctcctgccccccgaggtctgcagtctcctgaacccag

SEQ ID NO: 713098 - DNA, 83 bp, Homo sapiens
tggactgcagtgactatgttctaggtaccttaacatggggaatcttcttaaagttttgacatgcacagaccttgagcaggggc

SEQ ID NO: 713099 - DNA, 87 bp, Homo sapiens
cagctccagagagacgtgaaacatgtgaacactcaagtgaagcaaaagccttccatgattacattgcagcaaaaattggaggtgatg

SEQ ID NO: 713100 - DNA, 100 bp, Homo sapiens
ggtagcttcagcactcattgacaacgatgccgcaagcatggaatctttatatggatcgacttgtggaacaatggaaacctagtccaagatgttttcctag

SEQ ID NO: 713101 - DNA, 76 bp, Homo sapiens
tagagggaatgatcatggttataatcaaaagtggtcttcagaatcttctttgcctgcctagggtagttaaaagacg

SEQ ID NO: 713102 - DNA, 75 bp, Homo sapiens
ggagtcgtgtgtactgctccttggccaagccctttctaaggcacaaaatgatgtgatggaaatgaagatgcagtc

SEQ ID NO: 713103 - DNA, 100 bp, Homo sapiens
aagcttactgctcactaccatacctcagatagggtccacagaatggtcagaaaccctccataacctgaagactttgctaccaggacttgctggcccctct

SEQ ID NO: 713104 - DNA, 75 bp, Homo sapiens
ccctgcaggccgagggacgtgccaagaagcgcaagctgtttttggaaggaagaaagatggaaagcggtgcagttc

SEQ ID NO: 713105 - DNA, 99 bp, Homo sapiens
atgttcacgtgacatcaagaggaagcggaaaccagtggccacagcatctttgtctagccccagtgcaggatgactttgacaacgatgtggatgctctgc

SEQ ID NO: 713106 - DNA, 83 bp, Homo sapiens
agcagccgatccagcctgcggagcctgtggggcagcttcaggatgagttagagaaaggtgaacgggacaatgcagaactgcag

SEQ ID NO: 713107 - DNA, 98 bp, Homo sapiens
gttctcctgtgctggcccagccgagcccagcaccaccatcttcacccagctcgccaccatggccgccttcccctggagagcagaagcccccatctttg

SEQ ID NO: 713108 - DNA, 94 bp, Homo sapiens
cttgcgtccttccggctccgtcgtggaagcaggactgcgccgcgtcttcctcaaggtggccatggtggaggtgcagctggagagtgaccacgag

SEQ ID NO: 713109 - DNA, 101 bp, Homo sapiens
ttttgatctgaagagacatgagctgtgtggagattacattaaagacatcctttgccagaaatgaagctgttgtcatttctggaaggaaactggcccagcag

SEQ ID NO: 713110 - DNA, 85 bp, Homo sapiens
cgcagctggcgcagcccacgctcatgatcgacttcctcacccgcgcctgcgacctcgccatggccatgcagaaaatctttgcccg

SEQ ID NO: 713111 - DNA, 100 bp, Homo sapiens
acccgttcttgcctcaggccagtcgcctccaggccaagagggatccttcacccgtgtctgcaccagcagaaccaaaatcgtgtgtggtggcagatcctcc

SEQ ID NO: 713112 - DNA, 75 bp, Homo sapiens
aaaatggcgaagatcgccaagactcacgaagtccagaatctcgcccacccgccagaagtcgtgttgacagatttc

SEQ ID NO: 713113 - DNA, 75 bp, Homo sapiens
tgtcttccgggaaagtatggaaaacccaaattgttgatattcactgatggactccaaagaatcattaactcctgg

SEQ ID NO: 713114 - DNA, 76 bp, Homo sapiens
gggagatggacacatctgaggcaaagctaggttacaggaaatacaggaggcagaggaacaaataaaagacaccacg

SEQ ID NO: 713115 - DNA, 74 bp, Homo sapiens
acctatgccctgttcattggtgacacagtgcttgtggatgagttctttctacaacttcaacaggctgcactgga

SEQ ID NO: 713116 - DNA, 98 bp, Homo sapiens
caagatcttcacattctggatctcagctgctcttgaagtaccatgcggagaccatcaagaatgtgcgcacagccacggaaagctttgcttctgacccc

SEQ ID NO: 713117 - DNA, 50 bp, Homo sapiens
tgacaacagcctcaagatcatcagcgatgccagagagaatatccagagat

SEQ ID NO: 713118 - DNA, 96 bp, Homo sapiens
atgtacaccagcagcctggccacgctcaccaagtaccctgactccaggtccaaccgtgactgccagatcgaccagcaccaccggaaccagtgccag

SEQ ID NO: 713119 - DNA, 98 bp, Homo sapiens
ccaagtctcctgaagaggaaggagcggtgtcctcttaagaaaatgattgcgagagagctgcatcagttcacttttgacctgctaatcaagtcacacat

SEQ ID NO: 713120 - DNA, 82 bp, Homo sapiens
gcaagagtggagacaaagagatgagcaggcctatggcatgtctgcgttacctttaaatctgataaaaggcactagaagcgct

SEQ ID NO: 713121 - DNA, 100 bp, Homo sapiens
ccgcaaccattgacgccatgtcgggttattcgagtgaccgagaccgcggccgggaccgaggatcctggccaatttggagcaaggcttagcagaagacggc

SEQ ID NO: 713122 - DNA, 88 bp, Homo sapiens
gtttgttgtgcttgtcaagatcagatcctgactgctgtcatggcgtgccctctggagaaggccctggatgtgatggtgtccaccttcc

SEQ ID NO: 713123 - DNA, 82 bp, Homo sapiens
gcaccaccacagccgcccacttctggaaggttccatcccctgcaggcccagatgaaggactgcatgcgcgagctggatgaca

SEQ ID NO: 713124 - DNA, 100 bp, Homo sapiens
aacactaccactgctggcgctgaccttcatcacagacaacagcctggtggcagcgggcttcctgaggctgcggtggtcacgcttcgcccgtgtcctcctc

SEQ ID NO: 713125 - DNA, 98 bp, Homo sapiens
ctgggtgctggcgaagcggaggccggaggtatccagctcacatagaagacattgactacgaggaaggaaaagtactcatccatttcaagcgttggaac

SEQ ID NO: 713126 - DNA, 100 bp, Homo sapiens
ggtcatcttgcttacctacgtgctggccgccacagaacttacctgcctcttcatgcagttctccatcgtgccactgctgatgcaaggaatcccctgggct

SEQ ID NO: 713127 - DNA, 100 bp, Homo sapiens
tcccaggctcaagcaatcctaccatgtcagccttcccagtagctggaactacaggttggtggtgtggacccaaagcagttggctgtttacgaagagtttg

SEQ ID NO: 713128 - DNA, 96 bp, Homo sapiens
gtgcgggccctctccatacagaggctgtggtacttctggtcacactgcagaacagagtgatattgcaaaaagccaaattatcagtctacgtgcaac

SEQ ID NO: 713129 - DNA, 82 bp, Homo sapiens
tgtggggctctggccgcgcctggcctggccgggaccatgcgagcagctgatgcagctgtacagtgcgcgccagcggcggcgg

SEQ ID NO: 713130 - DNA, 100 bp, Homo sapiens
ctatctcaaagacgaccagcgcagcactccggacagcacatacagcgagagcttcaaggacgcagccacagagtagccggatcgagctgggagatgtgac

SEQ ID NO: 713131 - DNA, 88 bp, Homo sapiens
gactcggtgattgaggacaagaccatcgagctcatgacaagttggatggcttgaggactggtactaaaaggaaacgtgactgggaggc

SEQ ID NO: 713132 - DNA, 101 bp, Homo sapiens
ggaggaggttcgaagctgagtatgtgacagctttctaagaagtatggagtacatgtttgtggagaaggtggagagtatgaaactttcactttggattgccc

SEQ ID NO: 713133 - DNA, 90 bp, Homo sapiens
ggcgggcacgcacggcccgggccggcgctccaaggcccgcccgggagggccggggccgcgctcaggattggttgccgtggtctttactgc

SEQ ID NO: 713134 - DNA, 82 bp, Homo sapiens
tgcctgcctgcctgcctgctacggtgtgttccagagaacaagccttcagacatttgctatattgacgctgagctgtcagggg

SEQ ID NO: 713135 - DNA, 74 bp, Homo sapiens
ctgtgtcttctgcagtgattttaaccaaggcagttggtggaaatgagcctcagaagaggaaagtggaaagcctt

SEQ ID NO: 713136 - DNA, 50 bp, Homo sapiens
cagacatctgattgctgacctttgatgaaacttctgagcaggaacaaaaa

SEQ ID NO: 713137 - DNA, 100 bp, Homo sapiens
cgaggacttccaggtcacggaggaggtgaaaatgcgagccacccctctggctgctcctgcgggttccctgtccaggaagaagcggttggagttggatgac

SEQ ID NO: 713138 - DNA, 80 bp, Homo sapiens
ctactcgggacgctgcacctcccgcgccgcacggtggacgaggtgagaagccctaccactgcaactgggacggctgcggc

SEQ ID NO: 713139 - DNA, 90 bp, Homo sapiens
ggttgggttcattagcgccatcccagcaaacatccatatctatgacacgaagtgctccagaaccgggttctggatgcccggatctttcac

SEQ ID NO: 713140 - DNA, 105 bp, Homo sapiens
aagccctgtggtacaaattggataagcgtggttcccacaaagagtataagcgagggaagtcgtgcacgaacaccaagatagaaaatgctgctgaagaacctagag

SEQ ID NO: 713141 - DNA, 96 bp, Homo sapiens
cctggagattcatgacaaaatcatggaggagttcatgatcaagtgttgcccacaccaaatgcttcatccagagtcatagtacatgtggatctggat

SEQ ID NO: 713142 - DNA, 100 bp, Homo sapiens
gctgtttgtttacagatgctagaagagactcggcaagttaaaagtaatcaagtcagaggattatatgacttttatctgcctagagaagaactatggatct

SEQ ID NO: 713143 - DNA, 109 bp, Homo sapiens
tgacgccctcaaggtcgccaaggaggtggacccccagggtccagacccagtacttattatgaactgttgggggtgcatcctggtgccagcactgaggaagttaaacgag

SEQ ID NO: 713144 - DNA, 100 bp, Homo sapiens
ggagacggagttctacgtgtcccccgaggatctggaggcacagctgcagtctgacgagaggggttgagcttcagcgacagcgagagtgacaacagcgccg

SEQ ID NO: 713145 - DNA, 101 bp, Homo sapiens
caaaactcgctgattttaaaagatctggaacatcgaaaggaccaagtaacacagctttcacaagaggtgaccaagaatatggcccaggtgaccaaagccct

SEQ ID NO: 713146 - DNA, 90 bp, Homo sapiens
gtgaaggcgtcggccggaggacaccccatcgtgcagtgcggaaacatggctcgcgaaggactgcggaccctcgtggttgcaaagaaggcg

SEQ ID NO: 713147 - DNA, 99 bp, Homo sapiens
tcccccgaagagcttctgtcgccgctctaggaaagaacacccaggttaatgcctgataaagaaagcatgtattacccacgggtacaacattaccgagag

SEQ ID NO: 713148 - DNA, 51 bp, Homo sapiens
gagaagatcctggacatgaagaccgaggggcttcgcttttttgcaaatgca

SEQ ID NO: 713149 - DNA, 73 bp, Homo sapiens
cagcagggggccagctcaggacacacagacccagctggaactcggatgaagcctgctgggagcgtgaatgaca

SEQ ID NO: 713150 - DNA, 50 bp, Homo sapiens
cagcttttggcagcatgaaagttagcaatgatgaataaggtatttggagg

SEQ ID NO: 713151 - DNA, 83 bp, Homo sapiens
cgacgacgagatggtggaggaggcggtggaagtgtactaatggtcacttgatgtgcgctggctgttttatccacctactagca

SEQ ID NO: 713152 - DNA, 145 bp, Homo sapiens
gctgctgctgccgctgccgccctgagtcactgcctgcgcagctccggccgcctggctccccatactagtcgccggtggtttcagacaccctcacaggttttctaccatgcagcaactgaacatggaggaaaagatgtatatccag

SEQ ID NO: 713153 - DNA, 88 bp, Homo sapiens
tctctgattctccagcgacaggacccggcgccgggcactgagcaccgccaccatggggaaggggtctgcgctcctcagaccaccggca

SEQ ID NO: 713154 - DNA, 75 bp, Homo sapiens
cccgcgtccgccgattcctcctccttggtcgccgcgtccttggctggcgtgtactggttttggattaggaattgt

SEQ ID NO: 713155 - DNA, 100 bp, Homo sapiens
gcgcgagtacagctgcaccgtgcggctgctggacgacagcgagtacacctgcaccatccagctgttgtgaacttggataattctgtggttgacctggaga

SEQ ID NO: 713156 - DNA, 75 bp, Homo sapiens
tcgagaccgggcccttcctcgaggcggtgtcccacctgccgcccttcttcgggacacgtgatggaccgtaggaag

SEQ ID NO: 713157 - DNA, 100 bp, Homo sapiens
tcctgcctcagtctcccacgtagctgggattacagaatcttttagctgaaaaagtagagcagctgatggaatggagttccagacgctcaatcttccgaat

SEQ ID NO: 713158 - DNA, 75 bp, Homo sapiens
ctccggtccgtgcctccaagatgaaacctctgcgccatgagagccaaggtgagcggttcctggtagtaagcttgg

SEQ ID NO: 713159 - DNA, 82 bp, Homo sapiens
ggccgagccgggatctcaggtcctcgggggcggcggccacgccaaggacggatgccttcaattaagttgcagagttctgatg

SEQ ID NO: 713160 - DNA, 75 bp, Homo sapiens
cagagttccctgcaacccgtgcttatgcagatagttactattatgaagatggagattaacgtcttcaaggaccca

SEQ ID NO: 713161 - DNA, 100 bp, Homo sapiens
ttgaggaagaagacatgctctacagtgctcagtctttgagaagcatcaagtgtacctgatttgtgaacctatcttgcttcagttggtttcctcctaaata

SEQ ID NO: 713162 - DNA, 82 bp, Homo sapiens
caaaggctcagcccacaactcttgtcctaccacctcactgcagaaccttggcctgaaaatgctacattatatcagcaattga

SEQ ID NO: 713163 - DNA, 75 bp, Homo sapiens
gtgaacgaaagcagtgacggaggagcttgtaccaccgagtatttgatttctgacactggaggacaacagctctca

SEQ ID NO: 713164 - DNA, 118 bp, Homo sapiens
aattgggtggagctaccctgcgtatctggacacctttaaggattctcgcctcaggtgtggcatgcagcattttggaaggaaaattgaagacgtgttcaagaaaacatgaacagaagca

SEQ ID NO: 713165 - DNA, 88 bp, Homo sapiens
ggccaggaagtcggagtttgagccccggaggcagagcggctgccatgcgtgagtgcatctccatccacgttggccaggctggtgtcca

SEQ ID NO: 713166 - DNA, 90 bp, Homo sapiens
tttcagctgaatgcatgctacagtataagaaaaaagctgctgcctatatgaagtctttgagaaagacatagacgagtgcactgcagggac

SEQ ID NO: 713167 - DNA, 50 bp, Homo sapiens
atcctggatctgtatgctttgagcaagggtattaatggcattcttgctga

SEQ ID NO: 713168 - DNA, 89 bp, Homo sapiens
gcttaagttccgtgaactcagtactgatgcccagtggggcattcgtcttggtaaacttggtaacaaaatccagtctcatagcagaggag

SEQ ID NO: 713169 - DNA, 90 bp, Homo sapiens
acgtgaaggagcagatttacaaactggccaagaagggccttactccttcacagatcgctgtcacagcttctatagcaaacgctactcccg

SEQ ID NO: 713170 - DNA, 90 bp, Homo sapiens
cgcctcaatgaccggattgagatgtggagttacgcagcaaaggaaatttgtacatagattctaggcaaaatctccctccttcagtgatgc

SEQ ID NO: 713171 - DNA, 100 bp, Homo sapiens
gagcgtatgtgccacgccgcccaggagacccctctgctgcaccacttcatgcacatcctcatggcccagaggcaggtccaggtggcagaggaaggcctgc

SEQ ID NO: 713172 - DNA, 100 bp, Homo sapiens
cctaaccatgaagacttgaacttaatacagcaagaaagaccatcaagtttaccagacccagccgccgcctccatctctgacggagactgtgacgcccggg

SEQ ID NO: 713173 - DNA, 100 bp, Homo sapiens
agatgatctggttgtcatgtttactgaatgggatatcatgataacacattttgaaccttccatctcctttgagggcctttgcaatgaggttcgagacatg

SEQ ID NO: 713174 - DNA, 75 bp, Homo sapiens
gcgcaggtgaccggcgcgcgggagcgctacggccccaacggaagctcttcgtgggcggtcttgactggagcacga

SEQ ID NO: 713175 - DNA, 75 bp, Homo sapiens
tagaagtctggatgtcggtgggcctctgagatatgccgtttacggacctcccacagcccagtgtgccaggacgtg

SEQ ID NO: 713176 - DNA, 101 bp, Homo sapiens
ggggacacctcggcacgcagcggagatgcctctttttgccaccaatcccttcgatcaggatgttggttgcagtattttacagagctagcccaaggcacaag

SEQ ID NO: 713177 - DNA, 75 bp, Homo sapiens
ccacgatgaagaccctcagtgacgacctaggccgcctttttgcctatcctgacactcaccgccatcgcctgggac

SEQ ID NO: 713178 - DNA, 92 bp, Homo sapiens
cagattcgcagtggtcgcttcttctccttgtgtccccagttgtcctcatccagggtgctattcgagtccagcctgaagggccggctccctct

SEQ ID NO: 713179 - DNA, 100 bp, Homo sapiens
ctgagatctgagatcgaccatgtcaagaagcagtgccagactcttcaggtatccgtggctgatgcagagcagcgaggtgagaatgcccttaaagatgccc

SEQ ID NO: 713180 - DNA, 91 bp, Homo sapiens
cgcccggcagccaccccatctgggaaagtgtatccagaagctactgtcaggaggacactgtaagagaaccttggcacctctgggcccaaag

SEQ ID NO: 713181 - DNA, 90 bp, Homo sapiens
ggaagatgcactgactagaactgaacttgaaacacttcaaacttctacagatgacagtgcagctgagaagaaagggggaaccctccacgc

SEQ ID NO: 713182 - DNA, 75 bp, Homo sapiens
ggcaggaatcgtcatgaccaaagaggacgggaggggcaagctgcggccaaccaaggccaagagcgagcggaagaa

SEQ ID NO: 713183 - DNA, 100 bp, Homo sapiens
ccttattaatctcagggaactggatgtcagcaagaatgctccagggcccacaacggcagtgtcctacatgtcggtgaaatgtgtggatgcccgtaagaac

SEQ ID NO: 713184 - DNA, 75 bp, Homo sapiens
agcagtcacgacctccagcacaggaagctgttttaggttatgtgaaagagatgtttcctcatctctaaggcttac

SEQ ID NO: 713185 - DNA, 75 bp, Homo sapiens
ccaagatccacgctgacgcagagcggaaggagataacgaaggaggcccaacttcattcaataaggagcctgacgg

SEQ ID NO: 713186 - DNA, 97 bp, Homo sapiens
tggatctctttctccacccatcccgagaacatatctctcagaagatagaagtgtgcaagaagtactacagaagcatttcaatatcagcaaaaacctg

SEQ ID NO: 713187 - DNA, 91 bp, Homo sapiens
ccgcaccatgccgctcctaagcctgcacagccgcggcggcagcagcagtgagagagcgccatgctgcactgcccctactggaacaccttct

SEQ ID NO: 713188 - DNA, 88 bp, Homo sapiens
ctacaacacccccagcggccgccggctcccccacgagctgggagtgtccactcgccttccaccagcatggcaacgtcttcacagtacc

SEQ ID NO: 713189 - DNA, 100 bp, Homo sapiens
accattacacaatgcctgttcttatggtcattatgaagtaactgaacttttggtcaagagggtcaccatgaagttcaatcccttcgttacctcggaccgc

SEQ ID NO: 713190 - DNA, 82 bp, Homo sapiens
gccaggggcacctgtgagatctttgcctggtgcccgttggagacaagctccaggccggaagggaagtcttgccggaccatca

SEQ ID NO: 713191 - DNA, 100 bp, Homo sapiens
ctggccactatggaattctaatttgaaccatgtttggattgaagccgcctctgtattacttaccagttggaatcgaagcctcttaaaatggcagatgact

SEQ ID NO: 713192 - DNA, 100 bp, Homo sapiens
cggaacaggattggtcagctatccagaatttctgtgagcaggtgaacactgaccccaatgggtgctgcccataaactcgtgtgttatttcaccaactggg

SEQ ID NO: 713193 - DNA, 74 bp, Homo sapiens
aacgcagaaggactgcctcactgagcaaccaagagtcggctcaatgacatgtatggagactacaaatacacata

SEQ ID NO: 713194 - DNA, 75 bp, Homo sapiens
ggatctggattctaaggcaacacttccttgaagaaacaagcttacagggtgtcgtagtcattcttcagcacaatt

SEQ ID NO: 713195 - DNA, 58 bp, Homo sapiens
catgaggatagcaaaagcttatgctgcggggcttgtacatgacagctggaatagcctc

SEQ ID NO: 713196 - DNA, 83 bp, Homo sapiens
catcagcctgtgtggccacctcttctggcgttcgtggcattcagggatgtggctgtgtacttcacccaggaggagtggaggtt

SEQ ID NO: 713197 - DNA, 75 bp, Homo sapiens
tggatgaaggagcttcaaacccaaagaggtaagcattcaggtcttctcgttcgcaactgcaccatcactgccaat

SEQ ID NO: 713198 - DNA, 75 bp, Homo sapiens
tgtttctccaaggtttgaaaagcagctggcctgcaagatcccagatgcagtgactggttactacctgaaccgtgc

SEQ ID NO: 713199 - DNA, 122 bp, Homo sapiens
agtttatataaccttcctaagcacctggatgttgagatgctagatcaaccactacccacgggtcagggtctgcggaagagggagctgctgaaggagctgctaccagtcatcgggcagaacct

SEQ ID NO: 713200 - DNA, 100 bp, Homo sapiens
ggaagaattctgttcgacataatctgtccctgaataaatgttttcagaaagtggaaagaagccatggcaagagaaacttgcccaggccaaagaagagaac

SEQ ID NO: 713201 - DNA, 97 bp, Homo sapiens
ggctgaggggcggcccccgggagagagcggccaggtggaggaggagcgcggaggcgaccgcagagctcttcagtatccccatcagccagtttccgag

SEQ ID NO: 713202 - DNA, 75 bp, Homo sapiens
tcctcttgaaccccttccatttaataggcaggagcatcttatagagacattcaatccacgtcaaggaagagccag

SEQ ID NO: 713203 - DNA, 74 bp, Homo sapiens
gagtctctgcagttgaatctgacaaagatcgaacagttgtgctcagagtctcgctctgttgcccgggctggagt

SEQ ID NO: 713204 - DNA, 100 bp, Homo sapiens
caaatggagctcagaaagctgtatggacctctgtgtggattcagaattcctgggctccctgggtgcattctatcattccagttgaaagtttgcttccttc

SEQ ID NO: 713205 - DNA, 74 bp, Homo sapiens
gcaggcatccaatggtgtcttggatatgggccctcacattttccaaacctgtccatctgctaactattttgact

SEQ ID NO: 713206 - DNA, 75 bp, Homo sapiens
caacggcggtggcgcccggagcccgaggaaaaacgtggtcttcgagaaatgcgagttcttgaaaatttgaagaac

SEQ ID NO: 713207 - DNA, 83 bp, Homo sapiens
gggagagggagaacacagttggagaaaatcggcagctgagacggccttggccgctgcccaagctggaacactatagacccaga

SEQ ID NO: 713208 - DNA, 73 bp, Homo sapiens
gtgaggctcacgttggagggcttcgcgtctgcttcggagaccgtaaggtcttgtgaaaatgccattgtgtgct

SEQ ID NO: 713209 - DNA, 78 bp, Homo sapiens
tacaggccggagcttatcaaagactctcttgagcctgagggatccattacagtttcaatgggtattgacttttgtgat

SEQ ID NO: 713210 - DNA, 75 bp, Homo sapiens
tttggttacctatgtacctgttaccactttcaaaagattttgacacttcatgacatgtcattatttagagcaata

SEQ ID NO: 713211 - DNA, 90 bp, Homo sapiens
gactcttctgacctccgcgcgacgtacccgccgccgccgttggctggagatcatatctgaagatattagtgagctacaaaagaatcaaac

SEQ ID NO: 713212 - DNA, 75 bp, Homo sapiens
ccccctcccctcagcggtggctcccaagaagtccgagacacgcgtattctaccttgtaaatactgttatttgtat

SEQ ID NO: 713213 - DNA, 90 bp, Homo sapiens
agcggtagcacgagtgcgggcagcagcagccccggggcccggagagagcctgccttctggtacaagatgcctgtggaatgttcggtgaag

SEQ ID NO: 713214 - DNA, 83 bp, Homo sapiens
gcagcttcaagtgccttttgctgcgcaccaatgcccagcaggggaggtgaaaacttttggcccgtttggaagcggcagccagg

SEQ ID NO: 713215 - DNA, 50 bp, Homo sapiens
acaagaacgactcaaaacctgcgaatgaggatgaaagtcctggacagact

SEQ ID NO: 713216 - DNA, 100 bp, Homo sapiens
gagcgtgcggccgtggagaacctggtgtttggagaagagggattgaccctgaatcttgaagacgttcagcctcatgacttaggaaaagttggagaggtca

SEQ ID NO: 713217 - DNA, 75 bp, Homo sapiens
aaccccccctatcttccattcagaagagaagctgaatttggacgacagccagtgggaggacatccacgttgtcac

SEQ ID NO: 713218 - DNA, 80 bp, Homo sapiens
cctcacagattccagcttcggaacaagagaccctgtggtactgactgtcctcacccacacccctgcccctcgagtgagac

SEQ ID NO: 713219 - DNA, 75 bp, Homo sapiens
gcggagcagcgggcggaggtggaccggatgctcaggaatcccttggcaccatgtcctgtgtgcattataaatttt

SEQ ID NO: 713220 - DNA, 100 bp, Homo sapiens
gacatcgcaagcgtgaaagcactggacaataagctgtgctctgaggtctgcttacctggtgagtgatgaaatggtagtggagctcattgagaagaatttg

SEQ ID NO: 713221 - DNA, 90 bp, Homo sapiens
caggtctggagctcgaccgggccaggttgtttacattcagagctctatcaataagaggaatacatattacagtgaattcgacaaccgcac

SEQ ID NO: 713222 - DNA, 90 bp, Homo sapiens
atatgtatgacgagattattgagttaaagaagatggactcaccctgtcacccaggttggactgcactggcctcaacctcctgagttcaag

SEQ ID NO: 713223 - DNA, 151 bp, Homo sapiens
ccggcgcgcgcgcggcggaggacgaggaagagttgtggcgaggcagatcctgccccgtggccgcggccgtctcgtagaatatatacagccctgctctgggacacacctccattggatttaaaagacagtcctcgtcagcactgactttcag

SEQ ID NO: 713224 - DNA, 100 bp, Homo sapiens
gatgttgctaaatgtagacaatggttagagaagaattttccaaatgaatttgcaaaacttactgtaggtgtcttggctgggcatgacaaccgcgtcagct

SEQ ID NO: 713225 - DNA, 132 bp, Homo sapiens
tggcagtcctcatttctgtggaatctgaagaagcccacgcagattttaattcccactctagattctgatatgggacacagcaggacaggaacggttccagtctctcggtgtggccttctacagaggtgcaga

SEQ ID NO: 713226 - DNA, 100 bp, Homo sapiens
gatgaactaagcttgaataaaatttctgctgatactacagagcaaacgaggcccctgagagctccacctagttcacaggataaaatcccacagcagaact

SEQ ID NO: 713227 - DNA, 50 bp, Homo sapiens
ccccgaacgcggcctcgcacaggaaaatggctttgtaaagaagtttgaac

SEQ ID NO: 713228 - DNA, 96 bp, Homo sapiens
gcttaaggaggcaaaacgtgggaaaactagagctgaaacaatgggacccatgggttgcctttctgagaaaagtctacagcattctttctctgcagg

SEQ ID NO: 713229 - DNA, 75 bp, Homo sapiens
gacgaggaggaagcgagcagcccagacagcggccacctcaagataactgtgtccagaggacccccaggccatccg

SEQ ID NO: 713230 - DNA, 49 bp, Homo sapiens
ctgaaagtacgtctaatagacaggttcagtcatttttagcatcacttga

SEQ ID NO: 713231 - DNA, 98 bp, Homo sapiens
cctgttgtttgaaagctctcagcgggacaatgctgacccagttggattggatgctgctggcaagacaaccattctgtataaactgaagttaggggaga

SEQ ID NO: 713232 - DNA, 100 bp, Homo sapiens
cccaggacacagagctcagtgcaggcactggcaacttctatttggtagctacagcaagctgggtagcaggcagatccaaaggatatcatgaagtttccag

SEQ ID NO: 713233 - DNA, 100 bp, Homo sapiens
cagagctagttcctctccagctcagccgcgtaggatttcagatgcatgccaggtttccactgattgccagaactcgagatcactacacatggatccccaa

SEQ ID NO: 713234 - DNA, 100 bp, Homo sapiens
gggcttgggcggcgacgaggacaagatggagaatggcagtgggggcggcggcttctttgagtctttcaaggtggagcccccgaggaggggtcccgcggtg

SEQ ID NO: 713235 - DNA, 100 bp, Homo sapiens
ggctgcagagcccatagccaccttctatgggttaaggcaacaggaatgccatctccaaccacactgaagaagtcggagaagtctggtttcagcagcccct

SEQ ID NO: 713236 - DNA, 96 bp, Homo sapiens
ctgcagctctgcggggcgcaggaggcggtgcacagcgccaagggcaccagctgagagacagaatttttggaagaacttaggaaagaaactaagaaa

SEQ ID NO: 713237 - DNA, 83 bp, Homo sapiens
caaagcaataccaggatagctgttgtttcagagaaagaaatggaatctagttcatcagactactataataaagacaatgaaga

SEQ ID NO: 713238 - DNA, 82 bp, Homo sapiens
gggtcagataacattaatggatgttccagtatttaaagctattcaaccagatgaaagtatgcctcagactcctcccttttca

SEQ ID NO: 713239 - DNA, 100 bp, Homo sapiens
atcttgtggacaaatccaggggaagagatgcccgagtggtaaaagacatggcaacaggaaagtctaagggatatggctttgtctcctttttcaacaaatg

SEQ ID NO: 713240 - DNA, 75 bp, Homo sapiens
agctgataggctgcgctaccggaatgtcatccagcgagtgattagatgctgtacccctcaaggatttaaactaac

SEQ ID NO: 713241 - DNA, 98 bp, Homo sapiens
gggtgaaggcgctcatggacggaagacccctggctctataagctgaattatggcagcccagtcaaggagaacggcccttccagtgcaatcagtgcggg

SEQ ID NO: 713242 - DNA, 90 bp, Homo sapiens
caagaagctgattgattctttagagctggaagtacagctcaggcttcgttactgccgacatgatcaaggagcaccttcctcctccagcga

SEQ ID NO: 713243 - DNA, 100 bp, Homo sapiens
ctcagcctcctgagttgctgggactacagatttggagtcaaaaacgtatgagaccaaaaaaatattttcagaaaatgatatttttgaaataaatttttcc

SEQ ID NO: 713244 - DNA, 98 bp, Homo sapiens
ggagttagcagtcacgacctccagcacagcacgtcagctaactgttcagatgatgcaaaatcctcagattcttgcagcccttcaagaaagacttgatg

SEQ ID NO: 713245 - DNA, 96 bp, Homo sapiens
gtggcaaacagtgatatcttcagcgaaagtgaaaccagggtttccaatacttatctacaggaatcgccatgaccccagctctgagggaggcaacag

SEQ ID NO: 713246 - DNA, 90 bp, Homo sapiens
ggagacccattcagataacccactaaggttctttcatgctggtgaatgcctctgggagacctgaggggcagagagcccacctgctcttac

SEQ ID NO: 713247 - DNA, 100 bp, Homo sapiens
ccggatttctatgtgcagatgaaatgggaattcaccagctgggctaagtaatcatttgtttgaagaacttgccatggatgtgtacgatgaagttgacagg

SEQ ID NO: 713248 - DNA, 83 bp, Homo sapiens
cggcggtggcggcggcggcagctgcagtgacatgtccagcatgaatcccgaataggagtgcatccgccccaacccttttcccc

SEQ ID NO: 713249 - DNA, 125 bp, Homo sapiens
tctcgggcagaggcgacctccccgcgttccatgcgcacagggacagggatgatgaccactggatcgtcgacacagactacgacacgtatgccgtgcagtactcctgccgcctcctgaacctcgat

SEQ ID NO: 713250 - DNA, 73 bp, Homo sapiens
ttcaagtgattcttctgcctcagactccagagtatctaggattacaggtggacatccccacaattggacagcc

SEQ ID NO: 713251 - DNA, 145 bp, Homo sapiens
tgagacctgaaaagagatattgactcctgtggcagtggaaagacccaagaatgccagtcaagaagacaggaggcaggtggaagtcatcataaagtttctgtttcacccgtcgtccatgttcgaggactctgtgaatctgtggtgg

SEQ ID NO: 713252 - DNA, 75 bp, Homo sapiens
ggacaggttaagggactcccaggaatatcagagcaatatactttgctgcttattcaaactgcaaggaaaagttga

SEQ ID NO: 713253 - DNA, 100 bp, Homo sapiens
gggctgcggtggccaccgcggcggagcccgagagttctaaagttcctgttgcttcagacaatggatgagcaatcacaaggaatgcaagggccacctgttc

SEQ ID NO: 713254 - DNA, 100 bp, Homo sapiens
aagaaatgaagaacgagattcagacacaggtcacggtctagatcacattctcgatccagaggaaggcgatactctcgctcacgcagcaggagcaggggac

SEQ ID NO: 713255 - DNA, 98 bp, Homo sapiens
agcacagacagaatccctgctaccaatcatgattctggaaggaggtggtgtaatgaatctcaaccccggcaacaacctccttcaccagccgccagcct

SEQ ID NO: 713256 - DNA, 101 bp, Homo sapiens
tgaaggaggaggacaaagagcccctcatcgagctcttcgtcaagagggagaaccgaagattacaggaggccagcatgaggttggaacaagagaatgatgac

SEQ ID NO: 713257 - DNA, 100 bp, Homo sapiens
aaattacatattccagtaatggtggatgaagttgttcattgtttgtcaccacaaaaaggacaggatttttttcccaggaagccatcccgtcagaggggtt

SEQ ID NO: 713258 - DNA, 82 bp, Homo sapiens
ttggggcagtacagatcaacttaaggaggatagcagtgagattcacttcaaagtgaaaatgacaacacatctcaagaaactc

SEQ ID NO: 713259 - DNA, 83 bp, Homo sapiens
tggagcctcagttggaagcagccgatccagcctgcggagcctgtggggcaggatatgggtctgcaggatggagttcttccggt

SEQ ID NO: 713260 - DNA, 82 bp, Homo sapiens
aacttcgttgcttgcttgcctgtgcgcgcgtgcgcggacatggcctcaaacgactagacgcttgaagcaaagctgccatccc

SEQ ID NO: 713261 - DNA, 88 bp, Homo sapiens
ggtcctgctgctcggggtccgcgcggcctccgcggagccagacagaaacagtctccgccagtcaagaaaccctcaaaagtattttgcc

SEQ ID NO: 713262 - DNA, 83 bp, Homo sapiens
gccgaaccccgcgcccgcaggacgccccagccaggcattaactgaacgtctggatgctcttcttctggaaaaagcagagactg

SEQ ID NO: 713263 - DNA, 100 bp, Homo sapiens
aactagtcacagtgttgctgcaacatagagctgacattaactgtcaggtacccattcctggcccagtgggtaacaagagaatggttcatttttccccgga

SEQ ID NO: 713264 - DNA, 80 bp, Homo sapiens
tgagatttacctgtgagatgtttcatcccaacattctttatagctccaagctctacagattcttcaaatatattgagaat

SEQ ID NO: 713265 - DNA, 100 bp, Homo sapiens
ccatccagagctgtgcctcccagcaccacagtccttctgcagtccctcgtccagccacccccaggttggctgatcaagatgacactgagtaacccttcag

SEQ ID NO: 713266 - DNA, 83 bp, Homo sapiens
ctcccctctcaggacaacccagatgtgcaacaaagtgcgatgagatcctgaaggagctagacgagtgctacgagcgcttcagt

SEQ ID NO: 713267 - DNA, 108 bp, Homo sapiens
tctcaatatctgtcttcggtggactccttcggcagtccacccaccgccgccgcctcccaggccctgggctgcatcttgtacctgctgtgcttccggcagcaccctttt

SEQ ID NO: 713268 - DNA, 100 bp, Homo sapiens
gtggaaagaagttgcaaaacactggagggctctgaactcctacttcgagcctccggtggaggagagcgccttggaacgccgacctgaaaccatctctgag

SEQ ID NO: 713269 - DNA, 75 bp, Homo sapiens
tcctgagcggccaggacgacgaggagcagggcctgactgcgcagagctggaagtcgagtgtgctactcaactcag

SEQ ID NO: 713270 - DNA, 72 bp, Homo sapiens
ctggaggcggccgactatctggagcggcgggagagagccatccgcagggccagcgccatcctgcgcagccag

SEQ ID NO: 713271 - DNA, 89 bp, Homo sapiens
gagagagcgagctgagtggttgtgtggtcgcgtctcggaaaccggtagcgcttgcagcatgccaaaagaatgcaatggtgtaaagattc

SEQ ID NO: 713272 - DNA, 82 bp, Homo sapiens
ggcccggcggctgctgctgctgctgacgctgctgctgcccggcctcggggatgtcatgaccgggccgtcctgctctatgagt

SEQ ID NO: 713273 - DNA, 51 bp, Homo sapiens
ggcgagcagccctgcctccggacgcccaggatccggttgtggccgtggctg

SEQ ID NO: 713274 - DNA, 102 bp, Homo sapiens
aactggacaaggctttggcaaagctggggattggccagctgactgctcaggaagtaaaatcggtggcaggtgtcacagctttagcctgtggaatgatagcag

SEQ ID NO: 713275 - DNA, 100 bp, Homo sapiens
cagagcctcgcctttgccgatccgccgcccgtccacacccgccgccagcttcctgcctgacacagctcacttcaagaagtgcacaatgtcagaacgtgga

SEQ ID NO: 713276 - DNA, 50 bp, Homo sapiens
acctaaaaattgtataccgcagattcaggccgccatggcatcagatgaag

SEQ ID NO: 713277 - DNA, 50 bp, Homo sapiens
atatcatgcttccagtctactgtaaagagcttttatctcagttatcagga

SEQ ID NO: 713278 - DNA, 96 bp, Homo sapiens
agccctcaaggccagcggagtcttcagcacccccacaagcatgcaggaagatgagaatgtgcctactgctcctgatcctccaagtcaacatttacg

SEQ ID NO: 713279 - DNA, 95 bp, Homo sapiens
gctcctactatccatttcaactacagatactttgaagtagaagaagctgatggaaatcaaggactttctgttcacagcccaatgaaaggatgctg

SEQ ID NO: 713280 - DNA, 73 bp, Homo sapiens
gcggttccagcagcagcagtagctatggcagtggcagaagattttaattagctgtccagactaccctcaagtt

SEQ ID NO: 713281 - DNA, 100 bp, Homo sapiens
aaatcttagatttggctcctttttgcacccttaaatgtaaggaagctgaatatggtgggcatgatcagatagatttgtatgacgatgtcatatctccatc

SEQ ID NO: 713282 - DNA, 101 bp, Homo sapiens
ccccagcagcacctcctctccctaccccctccctgaggaaattaggaacctgttggcagattcagaatggacagtttagaagaacctcagaaaaaagtctt

SEQ ID NO: 713283 - DNA, 90 bp, Homo sapiens
ggtacctgccggacacgcttctcttggagaaaaatggctacaaacttcctagcacatgagaagatctggttcgacaagttcaaatatgac

SEQ ID NO: 713284 - DNA, 100 bp, Homo sapiens
caccacctccgccagttaagaggaaaaaggtatattcaagagcaaatgaccaagagccatgtgggtggtggttggctaaagttcggatgatgaaaggaga

SEQ ID NO: 713285 - DNA, 82 bp, Homo sapiens
gcgcctctcgatgggcagctcgcacttgctcaacaagggcctgccgcttggcgtcacaatgtagcagggaccccaggcgtcg

SEQ ID NO: 713286 - DNA, 100 bp, Homo sapiens
ccccaacaaggtggcccctgttgtgatcacggacgtgtggtgtgctactgcggaaggtgaatggcacagccattatccagctgccctctaagaggcagat

SEQ ID NO: 713287 - DNA, 83 bp, Homo sapiens
ctcttagcagcgcgcggagaagaacggggagccaggtgcgcgcggagccatggttatcatgtcggagttcagcgcggaccccg

SEQ ID NO: 713288 - DNA, 100 bp, Homo sapiens
aaccggcacctgcacacctggatccaggataacggaggctggaacatctgctcaaattaatgaccatgggggatatgaagaccccagactttgatgacct

SEQ ID NO: 713289 - DNA, 83 bp, Homo sapiens
tccagaaagcggcttatcgaacagagccgggagttcaagaagaacactccagaggctgaccccgcactacatctacccaccag

SEQ ID NO: 713290 - DNA, 50 bp, Homo sapiens
tggagatcaagcgcagcgatgggaactgctcgcagaaagaagaaggtggt

SEQ ID NO: 713291 - DNA, 100 bp, Homo sapiens
agctcctgtgcaagatggagagggagaagagcattgagatcgagaacctgcagaccaggaaggatctgagtctctccctgcggagacagccctgaagaac

SEQ ID NO: 713292 - DNA, 98 bp, Homo sapiens
cctcggagtactcaacacagattgacatgtgcctttaaagtatctagcatagattcttcagaacagaaaaaaaccaagaaaaacttaaagaagtttct

SEQ ID NO: 713293 - DNA, 75 bp, Homo sapiens
ggcgaggagtctctgtccgggggcctggctaaggaaaccctattacctccagggtgaaaagttcggaccctttgc

SEQ ID NO: 713294 - DNA, 89 bp, Homo sapiens
gagaaactggacaaccaacggctcaagaatttcaagaacaaaggccgcgacttggagacggaaatggagagctggatttctccactttt

SEQ ID NO: 713295 - DNA, 90 bp, Homo sapiens
gccgctccatccagggccaccatgtctgcctcctggtgaaaaagagacgtctcccacaacctgctccgggcgctggacgttgggctcctg

SEQ ID NO: 713296 - DNA, 98 bp, Homo sapiens
tttctccaatctttctacatcccagaaataactgaagtgaagtgatggactccgatttggagagtagtaagacgtgaaaggaatacacttgtgtttaa

SEQ ID NO: 713297 - DNA, 82 bp, Homo sapiens
gccgccgctacgggaccgcctgagctttctacaccggggtggatgtgaacactgaccggaagatcagtgccaaggagatgca

SEQ ID NO: 713298 - DNA, 100 bp, Homo sapiens
agtatacagaaaatcggtgaagagaggttttgaattcacgcttatggtagtggcaagatgagtatcatatggttcatctagtatgtacttctcggactcc

SEQ ID NO: 713299 - DNA, 82 bp, Homo sapiens
tgaaaagggatggaactacattcttgagaaaggaaggcagaggaagccacggccactggaccctggcgagggttccaaggac

SEQ ID NO: 713300 - DNA, 100 bp, Homo sapiens
tacatttcccggaaggttaacagcccccttctcagttttcctgatattgatgatgttaagaagttcaaaccgggttacctggaagctactcttaattggt

SEQ ID NO: 713301 - DNA, 83 bp, Homo sapiens
cgggggtagagccccgccggagaggctgggcggctgccggtgacaggtactccaaagattcaggtttactcacgtcatccagc

SEQ ID NO: 713302 - DNA, 75 bp, Homo sapiens
caaatgctccttctcctggagacgcaactcaagttctccaaggagaagtacatcctggactcatcgccagagaaa

SEQ ID NO: 713303 - DNA, 76 bp, Homo sapiens
atgatgaaagagccacagagttggcagaactgtttgaaaatgcttggatgacgtagtagatgaaagtgatgacaac

SEQ ID NO: 713304 - DNA, 50 bp, Homo sapiens
ggccaagctatcttctcgctagcagattgacgagatgcctgaggctgccg

SEQ ID NO: 713305 - DNA, 97 bp, Homo sapiens
acgagaacagcaatccagacctctctggagacgagaatagactctccaacatgtgccttctgaccatacaaatgaaacttccaacagtactgtgaaa

SEQ ID NO: 713306 - DNA, 100 bp, Homo sapiens
tctcgccgtccgagtcgtttattggtggtaattaataacaaactagagcaaagaattattggagtgatcaatgagcataaaaagcaaaataatgacaaag

SEQ ID NO: 713307 - DNA, 100 bp, Homo sapiens
cgtcaagaagggctcgaccgcgaatatatacagccctgctctgggacacacctccattggatttaaaagacagtcctcgtcagcactgactttcagctat

SEQ ID NO: 713308 - DNA, 75 bp, Homo sapiens
ccagctcctttcggctcttgcaggaagccctggaggctgaggagagagatgcagtggcagaacgtggagcacgtt

SEQ ID NO: 713309 - DNA, 82 bp, Homo sapiens
tcttgcattggatgcaatccattccatgggttttattcacagaatatgaacatcgacatttctgccttctcctgcattgctg

SEQ ID NO: 713310 - DNA, 98 bp, Homo sapiens
ccccccgcgggccgcaggggctcatgcagccgccaagggaggttcccctgaaggatgctaaggaatacgctgaatccataggtgccatcgtggttgag

SEQ ID NO: 713311 - DNA, 73 bp, Homo sapiens
gctgcagctctactccaaggagaggaaaaatgaggaagctgtgagtaccagtggaaggaacgagccaggaaga

SEQ ID NO: 713312 - DNA, 100 bp, Homo sapiens
aaagagattcaggattagaggatggaagggagtcaccttcttttggtgcttttgaagatgatgatatcacgcacgttgaaggaagtgtagatcctattcg

SEQ ID NO: 713313 - DNA, 88 bp, Homo sapiens
aaatattgaacctcatttgaagaaagctatgcagactgtttatctcagggaaatatcaagatgtattcttggggaactattcacaaag

SEQ ID NO: 713314 - DNA, 101 bp, Homo sapiens
ctacggtctacaagatctgcgcctggatgcagctcttggcagtatctgaacacagtcattccttacgagaagaaagcctctcctccctcagtggaagacct

SEQ ID NO: 713315 - DNA, 98 bp, Homo sapiens
gcagatgttgtcaaggtggcctaccaggaggccaggggtgtcgccatggacttcctccgtcaggcagctggcaggacctgaaggatcacatgcgagaa

SEQ ID NO: 713316 - DNA, 98 bp, Homo sapiens
cctggtgggcccagtcctcggtgcggcgcggccaggcatcaagcatgatggaaccatgtgtgatacctgccgccagcaaccaatcattggcattcgat

SEQ ID NO: 713317 - DNA, 100 bp, Homo sapiens
tccagggagataactttcgtatcacaaaagcagatgctgctgaattctggagaaagttttttggagacaagtttctagaccaactggggagattcccgtt

SEQ ID NO: 713318 - DNA, 100 bp, Homo sapiens
actcatcgaggcctgaattgctccagcctgttgttccaggctatggccatgcagtactaaggaagactgatccgcgatatacctgtcagcgagagtttgc

SEQ ID NO: 713319 - DNA, 90 bp, Homo sapiens
ttgcggttcagccctttgatgaccgcagcagcataatgcaaggcaaggtccagccgttccacccggcatgcaagcttatggagcagcccc

SEQ ID NO: 713320 - DNA, 100 bp, Homo sapiens
cgcgcgtacacactgggtctccaggcagcggccgtcgccgcatccccggcagcagctccaggcaaagtgacaggtccagagccaaacccgtcactgaccc

SEQ ID NO: 713321 - DNA, 95 bp, Homo sapiens
gaaagaccctttgagcatagctgtggaagcagccaatgctgatatagtcacctttgtaatgttcaagctcagaaatgccttatgtggatcgtcag

SEQ ID NO: 713322 - DNA, 74 bp, Homo sapiens
gttcaaggaggccttccagctgtttgaccgaacaggtatcatctttatcagaaagtgaggagtcccaggactca

SEQ ID NO: 713323 - DNA, 82 bp, Homo sapiens
ggcggctactgggccgggagtcgggacgtgaagaattgattggctgcataatcgggcgtcaaggcgccaaaatcaatgagat

SEQ ID NO: 713324 - DNA, 101 bp, Homo sapiens
gccagttcctgccgtctgctcttctgcctcttgatctccgccaccgtcttcaggccaggtcccgagcgcgagcggagacgatgcagcggagactggttcag

SEQ ID NO: 713325 - DNA, 75 bp, Homo sapiens
ctcgggagtccttggtcaagttttttggacctcttagactttaagaaagaaaggccttaatggttgtgagagccc

SEQ ID NO: 713326 - DNA, 83 bp, Homo sapiens
gcgttcccccccattcaggactcctcgcctggctcggaagggcagctgtgcggagggtagtggcagccatgaaccggatggac

SEQ ID NO: 713327 - DNA, 50 bp, Homo sapiens
tggcccaggcagaccttgcagtcaaatcccgcatggtccagaatgagatc

SEQ ID NO: 713328 - DNA, 50 bp, Homo sapiens
gtttttctcagaagagaattccacaagtattgaatttgaccgggattgtg

SEQ ID NO: 713329 - DNA, 96 bp, Homo sapiens
cttcaatatcaaaaatgactttactgaagaggaggaagcccaggttttcctggcaaaggagcctttggtggtggatgtcttcatggcacatgtgag

SEQ ID NO: 713330 - DNA, 87 bp, Homo sapiens
ggcagtcaggacatattcgatgccatcgtgatggcggatgagagatagaagaagtcagagatgccatggaaaatgaaatgagaaccc

SEQ ID NO: 713331 - DNA, 82 bp, Homo sapiens
caccagcagctgtactggagccacccgcgaaaattcggccagggttctcgctcttgagtacagaatgcaggctattctgtga

SEQ ID NO: 713332 - DNA, 82 bp, Homo sapiens
agcgccgtcccgtccgacagccaggcccgggagaaaccatactttgccttttaaaagaaatgccacccacattcagagacac

SEQ ID NO: 713333 - DNA, 100 bp, Homo sapiens
tgacaaaaggcatggtgatccttcgggacaagattcgcttctatgaggaggcatttcatccttcatgaagccattcaggattttgaattgcatatgagtg

SEQ ID NO: 713334 - DNA, 97 bp, Homo sapiens
gttgctcacacaaagcctgtttggtggtctcttcccacggacgcgcgagacaatgaggagactggtcaaacaaatggattttacagaggcttacgcg

SEQ ID NO: 713335 - DNA, 75 bp, Homo sapiens
gttggggatggcgtgcagcgcaaccacgagacggccttccaaggtattgatgaagatgaccctactgctgatgat

SEQ ID NO: 713336 - DNA, 72 bp, Homo sapiens
ctgtgctccaggactccctcaataatgtggcccacctccgtgcccatgtgcttatccacactggtgagaagc

SEQ ID NO: 713337 - DNA, 75 bp, Homo sapiens
aaggagttgttgtctcggcagcgcccgcggagacgtgaagagatggagaaggatgaaactgtgagtgactgctcc

SEQ ID NO: 713338 - DNA, 75 bp, Homo sapiens
tatacagtttgcacaacttcagttcctggaagctaaagagctcttcaggaacaggaaatatagtggtcattatga

SEQ ID NO: 713339 - DNA, 80 bp, Homo sapiens
ctcgggtaaagctcctcggcctcggcgtgctgcgcctccgcggctgccctgcgccaggagaactacgatgacccgcacaa

SEQ ID NO: 713340 - DNA, 98 bp, Homo sapiens
ctcagttggaagcagccgatccagcctgcggagcctgtggggcagggagttgaccacatttggccatttcccagaagggccccaccccaagggtgagt

SEQ ID NO: 713341 - DNA, 107 bp, Homo sapiens
gtcaacaagaatgccttctgattctgatgattctttgaccaaaaaagtgccaggtctcatctccaggcctttcctctaggccaggcagtgtggaaggaagcatttgc

SEQ ID NO: 713342 - DNA, 96 bp, Homo sapiens
aagccaggagaggttttggtcttgatttgatggtagagtggtggcaaagcttccttttacccctctttcttacatccaaggactgtctcatcgaaa

SEQ ID NO: 713343 - DNA, 75 bp, Homo sapiens
aacagcagaaaatcaaaacaagctctttatgagaatggcatctaagagctgccaaatgctgttaaatcaactgag

SEQ ID NO: 713344 - DNA, 113 bp, Homo sapiens
cgctccgactccaggggagccgtggcctcctctccgccctagcgctgagaggactaccccaatggcacctggctgggcgacgagaacaaccccgagatgcgggtacgctgcgc

SEQ ID NO: 713345 - DNA, 102 bp, Homo sapiens
gttctttgtggatggacttgattctgatgagagggaatctaagggaggaaattatcaactgtgcacaaggaaaaaaatagatatgtgaaaggttcacgtaaa

SEQ ID NO: 713346 - DNA, 100 bp, Homo sapiens
ctcccgtggcgccatggcggaagcagaggagcaggtttgcctgcaatgagatttcattctctacatttaaaggacatcctttctgagctgctgtgaataa

SEQ ID NO: 713347 - DNA, 89 bp, Homo sapiens
cttcgacattttgaagagctggaaactatcatggacagagagaaagaagctgttttgactggatcatctcgtcaaagttattcacctgg

SEQ ID NO: 713348 - DNA, 96 bp, Homo sapiens
tgtttttgtgcttggctgactaccttgttcccattctagcgcctagaatttttggctccaataaatggaggagatgttaaagtaacccatcttgca

SEQ ID NO: 713349 - DNA, 82 bp, Homo sapiens
cctggacatggaggagaaggtccgcttcaagtgacttaagagattaaaattaatttggttgctgttggttctgaacaaataa

SEQ ID NO: 713350 - DNA, 92 bp, Homo sapiens
ccttagctgtgctcgcgctactctctctttctggcctggaggctatccagcccactgaagatcctggtgtcgccatgggccgccgccccgcc

SEQ ID NO: 713351 - DNA, 100 bp, Homo sapiens
ccagagagtagtgaaagaggaggaagccatagcactcgcagagaaatatgggcacaattcagattcagaagcgtcaacagttagtcagaaagatacatga

SEQ ID NO: 713352 - DNA, 90 bp, Homo sapiens
gaagaagaaaggattcgttacagccagagattggaaagaccacagcaagattctttcattcgtctcctcctagcctgggggaccaggctc

SEQ ID NO: 713353 - DNA, 100 bp, Homo sapiens
gcgagaagttggaagtgtgaaagcattgatggaatgtgctttagaagttaaaaaggctgagagcagtttcagtgaagaagaggaagaaaaacttcaagcg

SEQ ID NO: 713354 - DNA, 100 bp, Homo sapiens
gccgggccctcttcgacagctacacaaatctggaacgggtggccgattactgcgagaacaactacatacaggtggatccataaagaacccagccaacccg

SEQ ID NO: 713355 - DNA, 75 bp, Homo sapiens
gtttgactctgacagtcctcccactaagctagagaccgttggatggcagcttaaccttcagatggctcactctgc

SEQ ID NO: 713356 - DNA, 83 bp, Homo sapiens
tttgaatttgctagtaacgtcatggaggatgaacgacagatctgcttggctttgaggaagagtggcagtactgcctcactgca

SEQ ID NO: 713357 - DNA, 75 bp, Homo sapiens
ccaatctccgatctgtttagtaagaaggtgctcagcagggagaccccctttcccgctatatcttcaggaaggctg

SEQ ID NO: 713358 - DNA, 100 bp, Homo sapiens
agagataaacgggctggccctgcgcaagacggacaagtatggcttccttgggggcagccagtactcgggcagcctggcctgccttaagtgtgaaagtaat

SEQ ID NO: 713359 - DNA, 90 bp, Homo sapiens
ctgaaagtagaggctccaggaacacattagtgccagcagtagttcccaagggctgtctcagccatccacccagacgactcagtatctgag

SEQ ID NO: 713360 - DNA, 74 bp, Homo sapiens
ttcccagcctaccactggaccctctgctgcctctccagtgttctaagaacggaagcatctgggctggatggaat

SEQ ID NO: 713361 - DNA, 100 bp, Homo sapiens
ctatgaccggcgtcgagaatttcaactggttacaagtgaacctgaaatgattggagctgaagttatttcagagttcttaattaatggcgaagaatcaaaa

SEQ ID NO: 713362 - DNA, 50 bp, Homo sapiens
gggcctgagacggctgcttggcaaggtcctcaaaggcttcccttccctac

SEQ ID NO: 713363 - DNA, 98 bp, Homo sapiens
cgaagggagcttggggaggaagaacggaaaacagttcttccttcaaagcatgcagtacctgaagtaatagaagactttctctgcaatttcttgatcaa

SEQ ID NO: 713364 - DNA, 100 bp, Homo sapiens
ttgcttgcaattggcactaagctaccagagaatcaagctatccaaatgcgattagttgatgtggcctgcaagtgtcaggggaagctgatggagaatcgag

SEQ ID NO: 713365 - DNA, 83 bp, Homo sapiens
ctccaagcccgaacgccccatgaagttcctccgggagcacttcgagaagctggagaaggtacatgtcccagagcaagcacacg

SEQ ID NO: 713366 - DNA, 75 bp, Homo sapiens
aaggacctgctgccgcagatggacgaatgcgtattggagatgaactcttagaggcaatcttgctgccaatgatct

SEQ ID NO: 713367 - DNA, 100 bp, Homo sapiens
ggggaggactgctttatggacttgcatcaggagtagcaagcatcaagcatgatggaaccatgtgtgatacctgccgccagcaaccaatcattggcattcg

SEQ ID NO: 713368 - DNA, 98 bp, Homo sapiens
gatcccaagttgtcgacgaccgacagggtggtgaaagaacaatgagatggtggagctacagagaatacggatgaaggatgaaatccgagaatataagt

SEQ ID NO: 713369 - DNA, 100 bp, Homo sapiens
gttcgggcgagaggaggcgagaggcgcaaaggaggactcacgaatggcagtggaagatacatctctgctgctccaggcgctgaagccaagtaccgcagtg

SEQ ID NO: 713370 - DNA, 80 bp, Homo sapiens
taccaggcatacatttggcagaataaatgaaccaggcacctctgtgggcatatattgcttgtgcctgtggccttttcatt

SEQ ID NO: 713371 - DNA, 74 bp, Homo sapiens
tcaagagaagctgcaagagcaacatctttcctcaccccaagattctgaaagtcaagaagacatcatccggaata

SEQ ID NO: 713372 - DNA, 98 bp, Homo sapiens
ttggctgtctcaacccccagccagggtcaccatcaaaatggaatgtaaccctagccaggtgaatggctcaagttaccgaagtgcatgtttgggatttt

SEQ ID NO: 713373 - DNA, 114 bp, Homo sapiens
atttgactatgagatgatcttccggggaacaggagcactgatatttgtcattgactcacagctgttaaacgtttaatgaaagaagcggcagaattgaaagatccaacagatcat

SEQ ID NO: 713374 - DNA, 95 bp, Homo sapiens
gcccgggacctgtacaagggccgccagctacaagtgataccatgtgtgggaagttgttctgtcaaggtgggtcggataatttgccctggaaagga

SEQ ID NO: 713375 - DNA, 90 bp, Homo sapiens
agaaatcacattggaccctcctcccaactgtagcatcaacaacagcaacttgtgattggcggtgaccggatattcagttgcacatcccca

SEQ ID NO: 713376 - DNA, 50 bp, Homo sapiens
ctagacttctggctgaaggagtacaacattttcagctgaactctcatctc

SEQ ID NO: 713377 - DNA, 100 bp, Homo sapiens
tatctcctccctcttctcccgactatttggcaagaagcagatgcgcattttgatgggatctagtgaaaagccatttgatgtatgcggtcagagaagaagt

SEQ ID NO: 713378 - DNA, 83 bp, Homo sapiens
cgaccgacgcgccacccgccgacgcctcagccgcttggggcccgcacggaccctctacttcaattttgcaagaacgaggctca

SEQ ID NO: 713379 - DNA, 75 bp, Homo sapiens
ggttcagattaagaaatctgccccaaagtcttagaactggtttggagaaaattgaagttttacagcaacatgaaa

SEQ ID NO: 713380 - DNA, 50 bp, Homo sapiens
caagctcccattggatcttaaggcctgggaaatcacgaagaagacctgtg

SEQ ID NO: 713381 - DNA, 101 bp, Homo sapiens
gtgtggggccggaggagtcagctgtgtgtccagaacgtgccatggagacgcttaacgaacaagaaactcctttacgagaagatgaagggaggagagagacg

SEQ ID NO: 713382 - DNA, 100 bp, Homo sapiens
cctggatggaggatgctgacagtgtatggcctcacaagtcttggtctacccaccatatgtttatcaaactcagtcaagtgccttttgtagtgtgaagaaa

SEQ ID NO: 713383 - DNA, 100 bp, Homo sapiens
gttatcatgagggaattccggtcagggtcaagtcgtgttctgatcactactgacttgttggaacgtcaaggtcgtgggaaataaaaggcagttctacaca

SEQ ID NO: 713384 - DNA, 88 bp, Homo sapiens
tcaaacaatttatgagattattgataattctcaaggattctacgtaaaatatttacaccagcagctccagttcataccaataaagaag

SEQ ID NO: 713385 - DNA, 82 bp, Homo sapiens
caaaatacaaatcatggagccgctggggtcccttttgcctcagatactattttgaaggccccagaggtgatccgaatgcagg

SEQ ID NO: 713386 - DNA, 100 bp, Homo sapiens
gcctgtccactatgtcctggtgccttttcatgacccaggagcaccagaaggtggagctgctgcggaaggccgtgcaggcccaccgaggctacaccgaccg

SEQ ID NO: 713387 - DNA, 100 bp, Homo sapiens
ctcaggccctcaacctctagcagccttacggacatccaaaaattgcttggaactgacttcatgggtaccataagtacagagaacaagggatgctgaggct

SEQ ID NO: 713388 - DNA, 83 bp, Homo sapiens
gatcatgtctgcgagccaggattcccgtctcacagaaagttctccgctcccagacatgggtccctcggcttcctgcctcggaa

SEQ ID NO: 713389 - DNA, 99 bp, Homo sapiens
cgatgtgagcaacccgcaaacggtgggggtcggccggggccgcttcaccacttacgaaatcagggtcaagcaatgtctcaggctgtgcagacaaacgga

SEQ ID NO: 713390 - DNA, 99 bp, Homo sapiens
gacatcacccacttctacatgctcactatagacaagggaagtgttcgccagttactacatgaaaagataagagatgcttatactcacccacaatttgtg

SEQ ID NO: 713391 - DNA, 76 bp, Homo sapiens
gttgaacagaacgcggctcccagccacaccaagttcaggtcatacttacctggttgcttgcgcatctagtaatgtt

SEQ ID NO: 713392 - DNA, 101 bp, Homo sapiens
agtgccgggagatcttgtctgtggaacaaaagtgaagtggtggcaaagtgctggaccagatgttagaagtctccaatttgctctcgacaacaacaatccac

SEQ ID NO: 713393 - DNA, 75 bp, Homo sapiens
tatcgaagttttagaaaaagagaagtcattactgagtcaagaaaagggtcgtgtagggataaaaagaactgtaag

SEQ ID NO: 713394 - DNA, 75 bp, Homo sapiens
aggcagagagcagaagatattcacagacatgcggaatttgaggtctccaggaaaagttgggctttcaacattcaa

SEQ ID NO: 713395 - DNA, 100 bp, Homo sapiens
taactttgaggggtttcttgcaaaacgcttctccggctgcaccctgaccgatgggaccctggactaatggctgaaggataaatcaacatggcaactatga

SEQ ID NO: 713396 - DNA, 82 bp, Homo sapiens
tggttttttcctttggtatagtcagaggcatgtttacggagttcattgtcgaaatgctggacctgtagctgtagctgagaag

SEQ ID NO: 713397 - DNA, 98 bp, Homo sapiens
accagatcttgccctggtgcagacaagacttagtatcgggggaaatggattcgggtagaacgaagtcgagagatgcagatgatagacttgcagacggg

SEQ ID NO: 713398 - DNA, 82 bp, Homo sapiens
gagacgagaagcctgaaaagtcgcagcgagctggagccgccggagtgggaaagaagcctaaggaataaagtcatctctctag

SEQ ID NO: 713399 - DNA, 83 bp, Homo sapiens
cagaagcgggcggcgcgggggagatgggtgtaccagtgatggcaataagaaacaaaatgatatcagaaggactagacccagat

SEQ ID NO: 713400 - DNA, 75 bp, Homo sapiens
ctggtgtcacctatcagtaaaagaagcctaaagaaactgttccaactcttgctccaaaaactctttcagtagcag

SEQ ID NO: 713401 - DNA, 75 bp, Homo sapiens
tctctctttctggcctggaggctatccagcgatcacagaagaactgcagcttcctggggagcagtttcacctcca

SEQ ID NO: 713402 - DNA, 90 bp, Homo sapiens
ggtcctggtcggggtggtctgtctgctcctggcatgccctgccacagccactggttcaactactcaatttcatgctggcatgagaagata

SEQ ID NO: 713403 - DNA, 75 bp, Homo sapiens
cgaaaatcagtgaaaaaaggttttgagttcacactgatggtggtcgcaccagtggcagttcgcagcctccaggac

SEQ ID NO: 713404 - DNA, 51 bp, Homo sapiens
gcagtacctgaccactctctcccaggctgatgaaaacttttacacttgtgc

SEQ ID NO: 713405 - DNA, 82 bp, Homo sapiens
ctgctacctgcagcgccgtgtggcacgacacaaaaatcaggcaatactagcccctctggagcacggagctccttccccaaag

SEQ ID NO: 713406 - DNA, 90 bp, Homo sapiens
tggccgtacattctataatcaggcaattatgtcttctaaaaatattgcacagggatcatagacggtatttctatgtaaacgaacagtcgg

SEQ ID NO: 713407 - DNA, 98 bp, Homo sapiens
cggaagttaaagaagtgggtgacccagccactccttaaattaaggtacatggactatatcgcacaacaggtgctagttttgagaaggcccaacaggag

SEQ ID NO: 713408 - DNA, 100 bp, Homo sapiens
cacgcctgcgctctccgctcccaccttctttcttcagccgaggccgccgccgcctctccttgctgcagccatggagctcttgtcaggatggtgaagctgt

SEQ ID NO: 713409 - DNA, 98 bp, Homo sapiens
gaactttcttccaagataatgtccagtttggaagatgaaggcttttctcatgaatgtcagcatcatcattcaaagaacaagaaacattctaagaaatc

SEQ ID NO: 713410 - DNA, 100 bp, Homo sapiens
caaggctcttccctgaccattttctactgtccctgcgcgagttgatgctgatgtaacagttataggttctggtcctggaggatatgttgctgctattaaa

SEQ ID NO: 713411 - DNA, 73 bp, Homo sapiens
ccctggcggacgcaggagcgatggcagcgaccgatatagctcgccaggtgggactattggcattcagggatgt

SEQ ID NO: 713412 - DNA, 101 bp, Homo sapiens
cagcggggaccgagcctgggaggccggccggtgccagcacctttcggcttctgagacggcggcagcagcggcattcagaggtcctgctgtactagccacca

SEQ ID NO: 713413 - DNA, 90 bp, Homo sapiens
ctgagggtggcggcggtcgacatgttccaggtcccggatagcgagggcggccgcgccggctccagactgtgagctgcttgtccccatcct

SEQ ID NO: 713414 - DNA, 100 bp, Homo sapiens
gccgggacccggttccccggcccacagtgggggtgtgcaaacccgagagaactgggcaacatttcatttgttgcatttccagtttccaataccaactcac

SEQ ID NO: 713415 - DNA, 95 bp, Homo sapiens
aataggaacagatgtcagcaatgtcgcttcaaaaagtgtctgtctgttggaatgtcaagagatggaatggaagattgcgaaacaatggaagatgt

SEQ ID NO: 713416 - DNA, 75 bp, Homo sapiens
ggcggggatgcgggaccggctgccagacctgacggcggagatcatgaatcagacagataaaaatcaacaagaaat

SEQ ID NO: 713417 - DNA, 75 bp, Homo sapiens
aaaaatcacatgtggctatgaccttcctgcaaaatacatgccacaaaatgttgaatgaagataggcagcgttggc

SEQ ID NO: 713418 - DNA, 75 bp, Homo sapiens
cggatctgcatgccgctcaccgtagacgagatgccctccaaatccttggttatggaatatttggctcatcccagt

SEQ ID NO: 713419 - DNA, 50 bp, Homo sapiens
cctgtgctttactctgaagactcaaatcgagctatagcagattatcttcg

SEQ ID NO: 713420 - DNA, 74 bp, Homo sapiens
gcagttcaccaccgtggtggccgacacgggcgacttccacgtaagactttgaccccgacgcaggcttcagtgat

SEQ ID NO: 713421 - DNA, 100 bp, Homo sapiens
gacactttgggacactttgctgatggtgtggttggagtttatgaatgtcacaatgctgggggaaaccaggctgaggctgaggtggcctccttgaaccgta

SEQ ID NO: 713422 - DNA, 100 bp, Homo sapiens
gttttgacacaagaacagttggccaatactggtgcccaagcctggattaaaaagcggaagatggagaaccgtgattaccgggatgcacaggagtttgctg

SEQ ID NO: 713423 - DNA, 51 bp, Homo sapiens
tcaggagcggaacaacgtcggcgagcggggccggagcctcaacagaaagct

SEQ ID NO: 713424 - DNA, 101 bp, Homo sapiens
gtgtcaaaagagcttctctccagagtagaaagagagttggaaactcaactattggaacaatgtactgttgacacaagtgttgctaaagaacagagccttcc

SEQ ID NO: 713425 - DNA, 50 bp, Homo sapiens
cggggcccgctgcggggcaaagggcggcgactggcggcgcgatggacctg

SEQ ID NO: 713426 - DNA, 88 bp, Homo sapiens
aaagctggtattgaacaagaaggatattggttgccaggagatgagattatggctcccgcaaagaagggtggcgagaagaaaaagggcc

SEQ ID NO: 713427 - DNA, 109 bp, Homo sapiens
cttagctgtgctcgcgctactctctctttctggcctggaggctatccagcatgagttttgatcatcctgagaaaaatgggccttggcctgcagacccaataaaccttcc

SEQ ID NO: 713428 - DNA, 75 bp, Homo sapiens
gcagtgggagaggagaagagatgctggcgtgaagggatagcagaccccacgttagctgaaatgggaaaaaacttg

SEQ ID NO: 713429 - DNA, 98 bp, Homo sapiens
cgcgaagagccgttagtcatgccggtgtggtggcggcggcggagactgcgggcccgtagctgggctctgcgagggagaagttgtggaatatgtggatg

SEQ ID NO: 713430 - DNA, 90 bp, Homo sapiens
ctagccctgcagacagaggtgtgctgacgacctgctacaacagaaagttgcatgctgagaatttgaaaaatgaagatgatgtagacactg

SEQ ID NO: 713431 - DNA, 75 bp, Homo sapiens
caggtgcgcaggggagaaacaaggcgccttggagttcaggatccggccccagctgtcgaaggagaagattgaggg

SEQ ID NO: 713432 - DNA, 90 bp, Homo sapiens
ggggagaacacgggacaccgcggaagccgggaaatggttaatttggagtggcccctggagtcagtttcctacaccatccgaggccccacc

SEQ ID NO: 713433 - DNA, 101 bp, Homo sapiens
ggattgcccagagtgaagccgagctcatcagtgatgaggcccaggccgacctggcgctgcggagttttgagcagctcaaaatggcagtcaccaacctaaag

SEQ ID NO: 713434 - DNA, 100 bp, Homo sapiens
gttctgtcagtgtgaagaggaagcgtagacttgaggatgcattcattgtgatatccgatagtgatggagagctatcagctggcccagcggaccttccgca

SEQ ID NO: 713435 - DNA, 101 bp, Homo sapiens
cctcccaccatggacagcttcgacttagccctgctccaggaatgggacctcgagtcactgtgtaaatgaactgtcagctctcatggaggatggacgttgtc

SEQ ID NO: 713436 - DNA, 75 bp, Homo sapiens
cggccgtgtcccggaggagcggcctgcgccgccgcgcgagaggaagtctcttcagagctgctgtgcccagtggtg

SEQ ID NO: 713437 - DNA, 75 bp, Homo sapiens
tcatcctggaaaaagaaatgggaacttatttggttgcaatgaatgtgtatgagttatcatcagctgccggattac

SEQ ID NO: 713438 - DNA, 76 bp, Homo sapiens
gaggagaaattcagacggctcccgagggtgttggagcgggccggagagaagtagagtgggctgcgaggagaaggaa

SEQ ID NO: 713439 - DNA, 96 bp, Homo sapiens
tgcgctctttgaaagcgccccggaatgacctgtcgcctgccagctctgctgccgcagcgggaaccgcaagagcttggtggtaggaacgccctcccc

SEQ ID NO: 713440 - DNA, 74 bp, Homo sapiens
ctgaggagtccccgctgcttggtctgagcagagggcggggtgcaggcggaatggccctcgtgccctatgaggag

SEQ ID NO: 713441 - DNA, 100 bp, Homo sapiens
ctgcttgctgggctgcttaagaaggaccccaagcagagatatccttcgggagtttaacagaaacctcacaggctacgccgtgggcacgggtgatgccaat

SEQ ID NO: 713442 - DNA, 100 bp, Homo sapiens
caggagccggggcccgagccccgcccggcccgggccatgtcggtgggcgagctctacagccaggtgtgggccatgtttgaggattgccccagcattcagt

SEQ ID NO: 713443 - DNA, 82 bp, Homo sapiens
ggagctcgaggtggactatgaggctatccgcagcgagatggagcagctcaaggagatatatagatcaaggtcgaaatcccca

SEQ ID NO: 713444 - DNA, 75 bp, Homo sapiens
tcggaggggaacagaccctctttgctgtgacggctgatgggaagagtgtcaatccatatctacaaggacagagac

SEQ ID NO: 713445 - DNA, 75 bp, Homo sapiens
cattgtattgagaacaatatagatttgcagagacaaagcatggaggacacaagaatgggaggaaaggcggactct

SEQ ID NO: 713446 - DNA, 51 bp, Homo sapiens
ggctggcggagcagaacggattgcaggcgagtgatagacagccaagcagag

SEQ ID NO: 713447 - DNA, 83 bp, Homo sapiens
ctacggggcgggggcggggcggcagtgagctcggccggcaaccgagggacccgcgtccaggagcatcagatccatgctgctgc

SEQ ID NO: 713448 - DNA, 101 bp, Homo sapiens
gcatggcatagtccaccgtgacattaaaggtctgggaggggctgaacgtggtgaagacaggccgagtgatgcttggggagaccaatccagcagattcaaag

SEQ ID NO: 713449 - DNA, 90 bp, Homo sapiens
agagaataaccgttgtaacatcagtcacagcatatccagacatttaatgtggatgcaccatgccagaccgtggaagatttaacgaatggg

SEQ ID NO: 713450 - DNA, 97 bp, Homo sapiens
aatgagaaagtggagatgctactaggagctgagacgcaacagttcggcatggttttcctcatcagcccacagcattagcctttgatccagttcagaa

SEQ ID NO: 713451 - DNA, 83 bp, Homo sapiens
cctgggtcccactatagcggcttcgcaggaacaagatcactcaaggtgaaggataatctactaataccagcactttgaatgaa

SEQ ID NO: 713452 - DNA, 100 bp, Homo sapiens
caagaagaccattcagatgggatctttccggatcaatccagatggcagccagtcagtggtggaggtcacagagatgcggcggaccctgacgcctgccagc

SEQ ID NO: 713453 - DNA, 49 bp, Homo sapiens
caaagactccggctgcaagcacagggttgcctttttcctctacaatggg

SEQ ID NO: 713454 - DNA, 83 bp, Homo sapiens
gagaaatccgaaaacaggcactggaccacttcaatgcagatgggtctgagaattggcagagggggtcgatttgggaggaaagg

SEQ ID NO: 713455 - DNA, 96 bp, Homo sapiens
ctcgggcaagccctccgagaagaacctctacgccgacatcgacgccgcgtggcaggcgctgcgcacccggtttccactgtatccaaaaggagggga

SEQ ID NO: 713456 - DNA, 100 bp, Homo sapiens
ccatgtcgggttattcgagtgaccgagaccgcggccgggaccgaggcatcatggcagaacaggatgtggaaaacgatcttttggattacgatgaagagga

SEQ ID NO: 713457 - DNA, 100 bp, Homo sapiens
ccgcggatccccaagcccgccacgccgcccagcccggccccgcccgcgccggaagagccacgccgggcagcgggtggcatgagacgtgggaacatgggcc

SEQ ID NO: 713458 - DNA, 82 bp, Homo sapiens
ctgccacaccagcaccagcaagcggcattggctgcgggaacggcaggagcagctgatgggatatcggaagagagggccgaag

SEQ ID NO: 713459 - DNA, 83 bp, Homo sapiens
ggctgccctgagacctcataacctctacatctaggaagaactgccctccacttccaaatagcatgggggtccctcgtacccct

SEQ ID NO: 713460 - DNA, 83 bp, Homo sapiens
gcctgcgaaggtggcggcgctgctgctcgggctgctcttggagccctgaaggatggctgccatattgggagacaccatcatgg

SEQ ID NO: 713461 - DNA, 100 bp, Homo sapiens
aacagggtggccgcttggtccagatttaaattccaggttgtcatcaatggccgagagtttcccccagctgaagctggaagcaagaaagtggccaagcagg

SEQ ID NO: 713462 - DNA, 82 bp, Homo sapiens
gaaactctttgggaaagccactcgaaaagcctactttggggataaaggattatttggtcttctggatttggaggcaatcagc

SEQ ID NO: 713463 - DNA, 100 bp, Homo sapiens
gttccacaatctatgcaagatttgctgggtatgaataatgactttcctccaagagcacattgcctggtaagatggaataatcaagctgggaaggtggaac

SEQ ID NO: 713464 - DNA, 74 bp, Homo sapiens
aaactctcagtttgtgtttctgagaaaggtgacaaaacacgacagccttcttcaagcccctccagtattatccg

SEQ ID NO: 713465 - DNA, 74 bp, Homo sapiens
ggctgctcccatcattgatgtggtgcgatcgaggaatgtcgggtcctcacaattcaaaacaattgaagatgact

SEQ ID NO: 713466 - DNA, 90 bp, Homo sapiens
cttggaccgagacctcatgacacttcctattcagaaaggaggaagatgactatctctttgatgatcctctgccaatacctttaaggcaca

SEQ ID NO: 713467 - DNA, 50 bp, Homo sapiens
cgacaacagcctggcgtccgccacggttctgctgtgaatgggaacataga

SEQ ID NO: 713468 - DNA, 100 bp, Homo sapiens
tcaatctgcctcttcgagaaattcatactcctggaaatctgaaatagagtactatgctatgttggctaaaactggtgtccatcactacagtggcaataat

SEQ ID NO: 713469 - DNA, 95 bp, Homo sapiens
gggccgaggcctgggacagctaccgcagcatgagcgaaagctacacgctggagagtgatcagcagctggactgtgccttggacctaatgaggcgc

SEQ ID NO: 713470 - DNA, 83 bp, Homo sapiens
gccccacaggtcttgggaggattaagtgaggggacatgagacctgcctagagctggaacgttacctccagagcgagccctgct

SEQ ID NO: 713471 - DNA, 98 bp, Homo sapiens
ctgtctgtctcttgattggacgtcaggatctttccaagcaggcctgcgaaggaaacttacccaaagggaagtctgtttcaggtgttgaccaggggcaa

SEQ ID NO: 713472 - DNA, 100 bp, Homo sapiens
cacacttctaacttcagaatcaaaactatgaccctagggagtgaggaggagagtgaaaaatgcacaaatttacatgtattggagaccagaccagaagccc

SEQ ID NO: 713473 - DNA, 82 bp, Homo sapiens
ctgcccggacggtgttggttggggaaaaccagtgttctctggacatgaaaagcaaactgaatacaagtaaacaagcagaaaa

SEQ ID NO: 713474 - DNA, 95 bp, Homo sapiens
ccagagttgtgggccgccgtcggcagcaagaacagagagagaggtggacagatctgagagatactgaggcctgcaggacaagctgaacaagaggg

SEQ ID NO: 713475 - DNA, 85 bp, Homo sapiens
catttcgtggttcacccgctgccgggcaccgaggaccagctcaatgacagacttaattcagtgcacaaatgagatgaatgtgaac

SEQ ID NO: 713476 - DNA, 100 bp, Homo sapiens
ggtcagtccgccgctcaccccgcggccgcaccttcccgccttctcaggtggtagctgagcacccagatgcttcaggtgaggagattgaagagctgctcag

SEQ ID NO: 713477 - DNA, 100 bp, Homo sapiens
gggaagggcgagactggagcagagccgctgggcgccggagccgaggcgagcgccgcgcgcaccactgcaattctgtggtgttcttggtcacacatttatg

SEQ ID NO: 713478 - DNA, 49 bp, Homo sapiens
gatttttagcccagcccatgaaggaatgtgcggcaagaggagaagacta

SEQ ID NO: 713479 - DNA, 83 bp, Homo sapiens
tcccattcgacagcgggtctactcactcttactggaggactgtcaagacctgcctagagctggaacgttacctccagagcgag

SEQ ID NO: 713480 - DNA, 96 bp, Homo sapiens
agcaagaaaagcctctgggagcagaagggaggctccaagacctcatcaacaattaagatgagcacctctgaggagttggatgaaatgccagtgccg

SEQ ID NO: 713481 - DNA, 101 bp, Homo sapiens
aagtgactgatgaagggaaggaaatcatgtcaagcgaagccttgaaaaagctgccctgagacggtgtcccgccgaaagatctcacgccacctgggcaagat

SEQ ID NO: 713482 - DNA, 100 bp, Homo sapiens
ggaagaaattgtgataggaactgagaattctccactctggtggctgaaagctaagaagcactgactgcccctggtcttccacctctctgccctgaacacc

SEQ ID NO: 713483 - DNA, 75 bp, Homo sapiens
gcgactcctcacatctataaccacacttgaattcggagtgatttaccactgcacagaggagcggctgtacacggg

SEQ ID NO: 713484 - DNA, 87 bp, Homo sapiens
agactcctggaaaaagtttcacaaggagtaagaccacacctgtgacaatgcaggttggagaaggtcagcaggtgcagattgtccagg

SEQ ID NO: 713485 - DNA, 100 bp, Homo sapiens
ataacccttgatcctcctcctaattgcagggtgtccgcaatgttgccagtgtctgtctgcagattggctacccaactgttgcatcagtaccccattctat

SEQ ID NO: 713486 - DNA, 80 bp, Homo sapiens
cagcgcagcgctgcggcctttcggcagccgaacggccgcggcaggaattgaatgatctggcacgggaccctccagcacag

SEQ ID NO: 713487 - DNA, 100 bp, Homo sapiens
accagatgcgctccttcggcatgaccccagtgctgcctgcattcgcggggcatgttcccgaggctgtcaccaggcagtgtgtgaagaaaccctgaaggtc

SEQ ID NO: 713488 - DNA, 85 bp, Homo sapiens
cggccagaagcgggcggcgcgggggagatgaagatggctgtgccacccacgtatgccgatcttggcaaatctgccagggatgtct

SEQ ID NO: 713489 - DNA, 90 bp, Homo sapiens
cgtcggcttgtataacctgaaaacgctcctgtttttctcatctgtgcagtgggaaatggctagtgatgagctgaaagagatgcggaaaaa

SEQ ID NO: 713490 - DNA, 100 bp, Homo sapiens
cagaagaggagaaaacggaatctaatcaggaggttgctaacccagaacactatattaaacatcccctacagaacagatgctgcctcgaactctgtcactg

SEQ ID NO: 713491 - DNA, 75 bp, Homo sapiens
cagcctctgcctcccagaaactcagctatcatggtgaacttacttcagattgtgcgggaccactgggttcatgtt

SEQ ID NO: 713492 - DNA, 97 bp, Homo sapiens
tagctgcaaggaaggtggagatctcctgtgctgcgaccactgcccggctgccttccacctccagtgctgtgcactggtgattgctgcggtgtttgac

SEQ ID NO: 713493 - DNA, 121 bp, Homo sapiens
ttcaaggcaagaccgaattcagaaggatatcgacgtcgtgatccagaagtccagagctgaggactgcctgtttgcaggatatccatacttcagagagtgaaagcaaaatttttgaacgagc

SEQ ID NO: 713494 - DNA, 127 bp, Homo sapiens
tcagtcagagctggagcacatttccatggagttggccagtaaagggcctcataaatcccaggtccagcttcgatatatttttgccatcatggatcagtttggagatatattagaaggtgaagtggac

SEQ ID NO: 713495 - DNA, 156 bp, Homo sapiens
ggaactcgggctttcagttgttagaccttgtccacgaggagggagaacctgaagccgcctctgcaggctcctgcaaaattttagtcctagatccagccaacaggattgtgaagttgggagctgtcctaccagggcaggttgtgaaaagaacagttt

SEQ ID NO: 713496 - DNA, 75 bp, Homo sapiens
gcactacaacaggaaaatcatattatagatggagtaaaggattcgctaaatattgtaatggatcaaggagataca

SEQ ID NO: 713497 - DNA, 100 bp, Homo sapiens
cagcatttcatccctcgtcgaaaggattggattggcatctttagagcatgttatttgaaagcaattgagacgcaaccgaactttgcagtagcttggagta

SEQ ID NO: 713498 - DNA, 90 bp, Homo sapiens
gtaatttgcagtgaaattttaagcgactgtgactctgctgcaagttccccagatcttgaggtatggcccgggtccactgccttccccgac

SEQ ID NO: 713499 - DNA, 75 bp, Homo sapiens
ccgggttgggggagcggctcgtggagtccagttacaacacagggatcacaacaaacacaaccgccacagaagcac

SEQ ID NO: 713500 - DNA, 122 bp, Homo sapiens
ctcggtggaggcgtacatcactgtcgtctcatgggagaaagacactgtttcacttgtctcagggccttgttttaggaatctattccaaagaaaaagaagatgatgtgccacagttcacaagt

SEQ ID NO: 713501 - DNA, 99 bp, Homo sapiens
tgccagaacccaaggaggtgcaaatggacagagccatactgcgttatagcggccgtgagtgtgatccctcacatccacaaatctctgattggaaagaag

SEQ ID NO: 713502 - DNA, 82 bp, Homo sapiens
cgaccgccgcccgactgccatcgcccggcccggccgcgcccgcggaaccagaccaggccagcactccttgcccgaggacaga

SEQ ID NO: 713503 - DNA, 75 bp, Homo sapiens
tggcctcacggaccttgggctgaccggtctgtctggcttcagttttctttttaaaagcggaaggagagttttaca

SEQ ID NO: 713504 - DNA, 74 bp, Homo sapiens
aaacagcagcaatcaccacccaagctgcaagctttcttcctggtggcagatgacatcatggattcatcccttac

SEQ ID NO: 713505 - DNA, 100 bp, Homo sapiens
cttggcatccccttgctggacagtggctgtgcaggaaggagcgccccacctccctgaacgtgttccccctggctgacggcacggtacgtgcacagatcgg

SEQ ID NO: 713506 - DNA, 100 bp, Homo sapiens
gagagagagtatggaggacacgaacaactatcttacaaagcacaggaaagcactgggaaaaccagtctatgcaccaaaaatgtctaaaactggaaccaag

SEQ ID NO: 713507 - DNA, 87 bp, Homo sapiens
ttcctgggcagctcgtcggtgttctgcaaagactgcaggaagtgtgcaggagaagagaattgggtggacagcaggaccatctacgtg

SEQ ID NO: 713508 - DNA, 100 bp, Homo sapiens
cagtgggtgctcacagctgcccattgcctaaagaacctcacctgagtcaccttccaagttgttccatgggctcctggctctggactgtggccaaccttct

SEQ ID NO: 713509 - DNA, 101 bp, Homo sapiens
gaggcatctgagtcaacaacggatgaaaatgaagacgacattcagtttgtcagtgtactccaaagattcaggtttactcacgtcatccagcagagaatgga

SEQ ID NO: 713510 - DNA, 100 bp, Homo sapiens
gtctcgccttccccatgagagcctacacattcagagcctgctgcgtgggagcctgaaagctccttcctgtcctgaaagaccacagcaagattctttcatt

SEQ ID NO: 713511 - DNA, 96 bp, Homo sapiens
gcggaaggagctggagacggtcgtagctgcggtcgcgccgagaaagtgtgttaacagggcacaaccattatgtgatgtgtgctcagttccacccca

SEQ ID NO: 713512 - DNA, 100 bp, Homo sapiens
aaggccgccgaacctgcctggctagccggcgacttgagtgacgagtatttctgggaaaagccagcttctgtttgcactggtcttcacaactcgttacctg

SEQ ID NO: 713513 - DNA, 71 bp, Homo sapiens
ccctaacagcaggaaggttgtgagctggaaaatgcagaatttatccccatgcctgacagcccatctcctct

SEQ ID NO: 713514 - DNA, 100 bp, Homo sapiens
aaagaatcatactgtcaaagacagtcatgatcagccgcacactggggcccgaggtcgggggcagcattgggctcatgttctacctggctaacgtctgtgg

SEQ ID NO: 713515 - DNA, 75 bp, Homo sapiens
ttcataagggatccgcagctgctcccgctctccaggccccggcctggcctttattgcgtaccccaaggcggtcac

SEQ ID NO: 713516 - DNA, 51 bp, Homo sapiens
aggattccaagtaactcttatttgggtcttctaagtcagagacatcaaaac

SEQ ID NO: 713517 - DNA, 75 bp, Homo sapiens
gctaagactcccgaatacttcagaagtggggaaatggccctttctggttactgtggctttatggcagccaacctt

SEQ ID NO: 713518 - DNA, 98 bp, Homo sapiens
ctgccgccgccagggtctgcagggcctgggccgccgctgctacctgcagcgccgtgtggcacgacacaaaaatcagcggatgtgatgctggtacaacc

SEQ ID NO: 713519 - DNA, 50 bp, Homo sapiens
gaccgagaccgcggccgggaccgagggaggtcctcaggccctatggagcc

SEQ ID NO: 713520 - DNA, 74 bp, Homo sapiens
tacaaccttcgatctcctgacgaattggagctggagtgagccttccaggaattttggctgccaaatgtggtgca

SEQ ID NO: 713521 - DNA, 75 bp, Homo sapiens
cagcagcgtggcctccgccaccgtgcacatccgaatggctcttgcccctgttctttgcttctcgttttgttggtg

SEQ ID NO: 713522 - DNA, 75 bp, Homo sapiens
ccacagtggaccacttctgggtgtccccaactcctgcccagccagtccacgcggtgccggctcctccagttaccg

SEQ ID NO: 713523 - DNA, 100 bp, Homo sapiens
gttgaactttaggagagctgtgttctctgcagattctaataatctatgccagcaattatgacaatgttagcagaccatgcagctcgtcagctgcttgatt

SEQ ID NO: 713524 - DNA, 82 bp, Homo sapiens
tccgatttaaagctgagctgcgaggaaaatggcggcgggaggccaccttgaacaaagaatcctgcaggtgctgacagaggct

SEQ ID NO: 713525 - DNA, 100 bp, Homo sapiens
cctggagaacgccaagcgcttcgccatcgacatagcataaatgcagttccaactacaacgaagattttgtgctacagctagagaaggaattggtccaagc

SEQ ID NO: 713526 - DNA, 75 bp, Homo sapiens
ttttactttctgacaatgcagcttctcttgcagtgcaggtatcatcttcaccaaataaagaaagtaatgaagaag

SEQ ID NO: 713527 - DNA, 100 bp, Homo sapiens
gatggggaaagctttttctgaagctgccttcaccactgcctacctgttcacttcagagttgtaccctacggtgctcagaggtgctgatactcaaagaagg

SEQ ID NO: 713528 - DNA, 83 bp, Homo sapiens
caccaagcaagtcaccgtgcatgcaaggacactgacaactctgagggagtgtattggaacaacacaaactaacaaaagaacag

SEQ ID NO: 713529 - DNA, 100 bp, Homo sapiens
agaagcgcagatcaaggccaactatgacgtgctggaaagcgagctgaaaatcctggtggactacgacgagaaaggctacctcctgcagatcttcaccaaa

SEQ ID NO: 713530 - DNA, 100 bp, Homo sapiens
ggggactgcacgtagcccggcgctcggcatggctctcctggtgctcggctgaccggttccctgatgtgttacctgcttctgctactgatccaaactgcag

SEQ ID NO: 713531 - DNA, 100 bp, Homo sapiens
cagaagttaggtcaagatgaagacatggatgtcaaatactttgcacaggaagctataagtgactatcttgctaatcatggccggttaaatgagtctgaag

SEQ ID NO: 713532 - DNA, 100 bp, Homo sapiens
ggggagacgccgtgacaactttcgtttccctctgagggaattgggaggtcggcggccccaaaagaggactggaatgaaattgaccccattaaaaagaaag

SEQ ID NO: 713533 - DNA, 100 bp, Homo sapiens
ttacgacttgggcttatgttcaaagtgaacacagactatgagtctagtttaaagattgccaaaatgctttggagtttttaactgaatctaagaaaagtcc

SEQ ID NO: 713534 - DNA, 74 bp, Homo sapiens
ttccgaaaccacaagtttgccgattttgtgatggacgcctctgaccccacccagctctctgcatcctgtgtgca

SEQ ID NO: 713535 - DNA, 100 bp, Homo sapiens
acaagtgtttccggaaggtgcccagacctcgggatgaccctgggaaggtcagcaaaagagaacgatctgaccatcatcctaggacagctacaattacacc

SEQ ID NO: 713536 - DNA, 89 bp, Homo sapiens
agccgactggagcaggcagcagcccagtacctcctatggaagattgtaaggaacaagagcctattatggacaacaatatttctctggtg

SEQ ID NO: 713537 - DNA, 97 bp, Homo sapiens
gcctggcgtgaggaccccccaatccgcgtgagacagcaaggccatcgtggacgggaacctgaagctgatcctgggcctcatctggaccctgatcctg

SEQ ID NO: 713538 - DNA, 100 bp, Homo sapiens
gcgtattcaccacaggaatcatgactcctggagaacggatcaagtgcttattacaggtctgtgggttctggcaccacctgagcccactgggcatctggtc

SEQ ID NO: 713539 - DNA, 82 bp, Homo sapiens
cccccgtaacctgcgcgctgccctagggcccggccgacccgcggcccgtcattgcacgtgcagaagagcgacgtggacctga

SEQ ID NO: 713540 - DNA, 74 bp, Homo sapiens
caggagccttgggcaggcctccgaagctgggtggcccagttgaaatccttcccttcctctaccttggaagtgcc

SEQ ID NO: 713541 - DNA, 73 bp, Homo sapiens
tttgggccgtcaggcagttggttgggacccgctccaaccctcgatggcggctgcagaggctgtgcatcacata

SEQ ID NO: 713542 - DNA, 90 bp, Homo sapiens
cggccatggagcgcacagcaggcaaagagctggccctgattgatgtggacatcttcgagccccaggggatcagcaagctggatgcccagg

SEQ ID NO: 713543 - DNA, 50 bp, Homo sapiens
ggaaactccagcgtgtctccagccgtgtcttaggaaaagtcctcagtgct

SEQ ID NO: 713544 - DNA, 75 bp, Homo sapiens
agtgggcacgcctggcgctcttcgacttcctgttgcaggacatggatttgattgacatactttggaggcaagata

SEQ ID NO: 713545 - DNA, 100 bp, Homo sapiens
gatggcctactggggataacattcatgcagaacatcaggtgtgggttttgctaccaggcaggtggccagcatgaccaagcctaccacaatcatcgaaaag

SEQ ID NO: 713546 - DNA, 82 bp, Homo sapiens
gagagctcgccccgaacgggggtcttcctcctccgccgttgacaggccgggctctcgccatgggtcactgtcgcctctgcca

SEQ ID NO: 713547 - DNA, 101 bp, Homo sapiens
cgtgcacccagaggaccaggcggcggtcaacactggacgtatgagggtgagcagatctcaaggcctcccgacaaccctttcacactgggacctcctcacct

SEQ ID NO: 713548 - DNA, 100 bp, Homo sapiens
tagatgacaaacagctcagaaagctgctgctgagtgctactagtggagagaaaggggtgcgcatcaaggagagatacgaagactatggaatgactccccc

SEQ ID NO: 713549 - DNA, 82 bp, Homo sapiens
tggtgcgggatccttgtctttgtcctgtactttgtgcagctcgcaaaggatctccttcatccctctccagaagaggagaaga

SEQ ID NO: 713550 - DNA, 101 bp, Homo sapiens
agctaaactcaatgctgctgtgtgggaagaagatttgtaaagaaaactcttaggtgttggccgaggtcctcacgggcatccctgcaatggataacaaccga

SEQ ID NO: 713551 - DNA, 82 bp, Homo sapiens
aggtgatattacttctgattctagatggcaagtgaaccggagcaaacgacttccgatccagtctgcgctgttgcggctcccg

SEQ ID NO: 713552 - DNA, 75 bp, Homo sapiens
gcagagcggagggagccccagacacgggccatgaagcccccaggaggagaatcgagcaatctttttggaagtcca

SEQ ID NO: 713553 - DNA, 101 bp, Homo sapiens
taccccatctgtggaggcggactccccagaccagaagaaaatcattagcctatggttctcttgccacatcaatatcccagatggtaaagactgaagggaaa

SEQ ID NO: 713554 - DNA, 149 bp, Homo sapiens
gcggcggcggcgcctcccgggctccggctccggcttctgctgttgctcttctccgccgcggcactgatccccacagcatcgagagtaaacatgaggttacgatcctgggaggacttaatgaatttgtagtgaagttttatggaccacaa

SEQ ID NO: 713555 - DNA, 75 bp, Homo sapiens
gaaaaactggagagcttcatcaaaaatagtgatagctttgataactcatgcccagacctacgatttagtatggct

SEQ ID NO: 713556 - DNA, 100 bp, Homo sapiens
gctgttgcttggcctggtgggcccagtcctcggtgcggcgcggccagatgaagtacaggccattgccaccctaattgagaagcaggcacaaatcgtagta

SEQ ID NO: 713557 - DNA, 100 bp, Homo sapiens
ggtccatggcagtatcccagccaaatctcggaaagaccacagcaagattctttcattcgtctcctcctagcctgggggaccaggctcgaactgaccctgg

SEQ ID NO: 713558 - DNA, 96 bp, Homo sapiens
ggcattgcaaggtacattgagcaggctacagtccactccagcatggccctgggctgcatcttgtacctgctgtgcttccggcagcacccttttgag

SEQ ID NO: 713559 - DNA, 75 bp, Homo sapiens
cttccaaaaccacaaacttgcctacgtcagtaacagccaccaagattcatctgaaaactacattaagatgaagac

SEQ ID NO: 713560 - DNA, 49 bp, Homo sapiens
cgcctcgctgtccctgcggcttctggggcattcagcctgtatatggagc

SEQ ID NO: 713561 - DNA, 100 bp, Homo sapiens
tagccatcagccgctacgtgactcttttctccagcaagagtgagccatggagctacgtgtggggaacaagtaccgcctgggacggaagatcgggagcggg

SEQ ID NO: 713562 - DNA, 100 bp, Homo sapiens
gcctcccaaagtactggaattacaggtgtgaaccatcgtgcccagcccaatttgccactgttccatccctgacccatctttgtcgtttggaaattcggtc

SEQ ID NO: 713563 - DNA, 98 bp, Homo sapiens
gcaaatgttcgcttcaatgtggccaaatctctacaaaagattggaccaattctagataccaagcctgaagctgcccagcaggcattccaaggcctggg

SEQ ID NO: 713564 - DNA, 100 bp, Homo sapiens
cccgtccgacagccaggcccgggagaaggaagaggaagaacgtctgagaaataaaattcgagctgatcatgagaaggccttggaagaagcaaaagaaaaa

SEQ ID NO: 713565 - DNA, 74 bp, Homo sapiens
attggagattccacccaaacttgctggtcactgggaggccatcatgcagaagggggatacaaacataaagccca

SEQ ID NO: 713566 - DNA, 75 bp, Homo sapiens
ggaaatcaagcaaggcaatgacaatgcgggctacattgagagacctcagctgattcgagcaaaagtgccaattgt

SEQ ID NO: 713567 - DNA, 146 bp, Homo sapiens
cggacctgggacgcggagtcctgaagccggcggacggttttcgtacgggcggccgtgcgcgaggcgagaggcggccttagcaacatgctgttccagtgctccctacctgacaccacagccacccttggtgatgagcctcggaaagt

SEQ ID NO: 713568 - DNA, 98 bp, Homo sapiens
ccaccatctccatcacccaccaacaacaccacaataatccacagccaagacaacagaaaccagtggtaggactctgccagacaagggtgaagaggcct

SEQ ID NO: 713569 - DNA, 101 bp, Homo sapiens
agaaatccgcagaagcttattaaagttaaggaatctgtctgctattcaggatagagaaatttgctgctattcaatttcttgcaaagaaaaggataatatag

SEQ ID NO: 713570 - DNA, 75 bp, Homo sapiens
ctgagggtctcggggcgggcgccgcgggacctctccgggccatggcaggacagctggcctgaagctcagagccgg

SEQ ID NO: 713571 - DNA, 100 bp, Homo sapiens
atactattatggataagatgatggttgtgagaactgctttattggatgctgctggtgtggcctctctgttaactacagcagaagttgtagtcacagaaat

SEQ ID NO: 713572 - DNA, 100 bp, Homo sapiens
tgagacgtgcctttgaccttctgccatgattgtgaggcctccccagccacgtgaaactgacgtggccgctttggagagtcagcctttattaggattcact

SEQ ID NO: 713573 - DNA, 100 bp, Homo sapiens
gtggaccccggctcctggccccgtggatgcctatgaaattcagttcatccccacgactgtgcaggtgcctgtgtactcggagcaggagtaccagctttat

SEQ ID NO: 713574 - DNA, 83 bp, Homo sapiens
caaaaagaaagctgctgttatcatcatggctgtagagatctgctcactttagcactctggcaattaaacagaacccccttctg

SEQ ID NO: 713575 - DNA, 85 bp, Homo sapiens
gccctacttcaaggataagggcgacagcaacagctctgccggctggaagtgcctacaccaactaatgttacaattgaatcctata

SEQ ID NO: 713576 - DNA, 100 bp, Homo sapiens
attttgacagtcgtagatacaaatttttggatgatgatggatccatttctcctattgaggagtcaacgtgaatcagtggctaacctggttagaaactgct

SEQ ID NO: 713577 - DNA, 74 bp, Homo sapiens
gaacaatgggcgtatcaaaatatgggatgtatatacagtgagaaagatcagtctaaagaaaaggagaagaaagt

SEQ ID NO: 713578 - DNA, 82 bp, Homo sapiens
ctttaatccagctactctacctctaacacagtacctgttaacaacggtcctgcagttctgagcttgggttccctttgcctgg

SEQ ID NO: 713579 - DNA, 100 bp, Homo sapiens
gtgtgtaccattccgacgttacaatggtggagttggcaggtgtgcgcagatctttatttcccgcacatatgatgccaccactcattttgagacaacgtgt

SEQ ID NO: 713580 - DNA, 87 bp, Homo sapiens
attgccgccggtcctgaccaccgtgaacggacagtcccccccaggcatcttggccatcctcatcccccgcctggacctggtcatctc

SEQ ID NO: 713581 - DNA, 101 bp, Homo sapiens
tgctcgagagcctcacttcggcaaacgtggtccttgcaacaaacacagcccctgcggatccgccggcttctccgtcccttcttcctgctgcagaactcctc

SEQ ID NO: 713582 - DNA, 50 bp, Homo sapiens
gaagcgtccggcggcctcgactcggggaaactactttgcttcgcactttt

SEQ ID NO: 713583 - DNA, 97 bp, Homo sapiens
tgccaaccagtgggcagatatttttcaggcctctggtgccaaatacattgtcttaacttccaaacatcatgaagataggtgatcttcagctttgcaa

SEQ ID NO: 713584 - DNA, 83 bp, Homo sapiens
ggacagcatcctggaggaccagtcagaccagcgcgtcatcatcaagcacattcaggaattcaccaatgagacatggcaggcgc

SEQ ID NO: 713585 - DNA, 75 bp, Homo sapiens
ggggcggaggcggaggcagaggtggaggcgctttgaaagcttgctgagcgagagcgagaagcggcccttcgtgga

SEQ ID NO: 713586 - DNA, 90 bp, Homo sapiens
gaatgataaagccagaagaaagcatgctttctgatcattggcaaggggacgcgagataaggtcctgatcagaatcatggtctcccgcagt

SEQ ID NO: 713587 - DNA, 73 bp, Homo sapiens
cgagtgcagtttcgatggaaaatgaagtgcatctgggggaggtgttgtagccattgacaacaaaatagaacaa

SEQ ID NO: 713588 - DNA, 80 bp, Homo sapiens
gacaaatcaaattagtggttttgcaatactggagtaaccgcttcctaaaccattttgcagaaatgtaagggtgttcggtt

SEQ ID NO: 713589 - DNA, 51 bp, Homo sapiens
aagattttcaaagatggtagaggaatgtcgttgtctgctgggtcttcccct

SEQ ID NO: 713590 - DNA, 80 bp, Homo sapiens
atgggtgccaaggagtcacggatcggattcctcagctacgaggaggcgctgaggagaggatctcatagatcagaacatac

SEQ ID NO: 713591 - DNA, 97 bp, Homo sapiens
ggagaaaggattttgaggagggtattctaccttgtaaatactgttatttgtatatactgtaaatgatgacatcggtgggcactaaccgagcccgggg

SEQ ID NO: 713592 - DNA, 75 bp, Homo sapiens
tcccctttcatccctatgtggaaaacggtccacctcattcatttaaccgagatgagacaataatcattgctttgg

SEQ ID NO: 713593 - DNA, 83 bp, Homo sapiens
ggcgcggtcgcagtctccacggcgcaggcccacggtagcgcagccgctctgagtttcagctcctggcatcagctctattcaaa

SEQ ID NO: 713594 - DNA, 90 bp, Homo sapiens
gaaattctgcttggtgatgagtatgatgcacctgcagtaggaatagcgggttttgcagcaattgttgcatatggattatataaactgaag

SEQ ID NO: 713595 - DNA, 83 bp, Homo sapiens
ctcagccgccaaagaccccgtccgttactccacaggatccgctgaacataggatgttgccacaaaatctacctcgtgtatttt

SEQ ID NO: 713596 - DNA, 75 bp, Homo sapiens
tgcaagatgattctgtcgaacccaaaatttgctgaacatggaggtggatctccttacgtagcagccaaaataaat

SEQ ID NO: 713597 - DNA, 50 bp, Homo sapiens
tctccaccaaattctcagcctgataagggcctggcagctgcgattcagcc

SEQ ID NO: 713598 - DNA, 100 bp, Homo sapiens
tgtgggcgctcttcgaggatccctactcctcccgggccgctaggatctttcagcaaagagtgcctctgttccagacgaacttggtgcctgtggacattct

SEQ ID NO: 713599 - DNA, 100 bp, Homo sapiens
gccaaccccgtgaactatggccggccctacagactttcctgcgtggaagcgtttgctgccaccttctgcatcgtaggagtcatgtcccccgacgagtacc

SEQ ID NO: 713600 - DNA, 75 bp, Homo sapiens
agacatggacgaagccttcaaatccatcaagctcatcaaaaggactccaacctgtctgtgcacacagaaaacccg

SEQ ID NO: 713601 - DNA, 100 bp, Homo sapiens
gctaccgcagcatgagcgaaagctacacgctggaggtcaaaatgcagatcttcgtgaaaacccttaccggcaagaccatcacccttgaggtggagcccag

SEQ ID NO: 713602 - DNA, 123 bp, Homo sapiens
gagagaagacgatctgcacttcgcattttggcattgacatttaattttagggtcctttatatagaagggagagtaggtgccattgttacatgaggtgaacagtgaagacgatgaaaatatttc

SEQ ID NO: 713603 - DNA, 100 bp, Homo sapiens
ctgaggtccgcggcagggtcccgcatggcggcgcacaggaagcacggagctctttgttcaatgcctagccacctattcctacagacacggcagtggaaag

SEQ ID NO: 713604 - DNA, 100 bp, Homo sapiens
gccagatctacggagccaagggcttcagcctgagcgacgtgccccaggcggagatctcggcggggatctgacgagcttttctctacttgtgtcactaacg

SEQ ID NO: 713605 - DNA, 98 bp, Homo sapiens
cgggctgcagacggctgcgaggcgctgggcacaggaagatgaagtcctcagtacattctgaagaagatgattttgttccagagctacatagaaatgta

SEQ ID NO: 713606 - DNA, 90 bp, Homo sapiens
tgccatctgattttgtgaatgaagttttactggaacacagctctcgtgctcattcccccatgatcgccgtaggaagtgatgacagtagcc

SEQ ID NO: 713607 - DNA, 100 bp, Homo sapiens
agaaaagaaaaaagaaaagaaaaaagccaaaactgtggaacagactgcaacaaccacaaacaaaaagcctggccaggtagatatagttgtaggtactccg

SEQ ID NO: 713608 - DNA, 75 bp, Homo sapiens
aatcccttgcatggctctcagaccgtataatagacgctggccccaaaggaaactactctcgatttatgaatcaca

SEQ ID NO: 713609 - DNA, 100 bp, Homo sapiens
ccacctcccacctgcaccagcaccaacgggaacagcctgcaagtcctggtacctgggataaaagttgcagcgtcccaccatccaccagacagaccacctg

SEQ ID NO: 713610 - DNA, 75 bp, Homo sapiens
cgaccccagagcggcgctggacaggtccagatcctgcacctgctgctgtgccgctctttccagctggcttacctc

SEQ ID NO: 713611 - DNA, 98 bp, Homo sapiens
ccgctggcagccgcggatctcaccgccgctcaggtcttgctctgttgcccaggctggagtgcagtggtgccatcatgccaacctcgacctcctggact

SEQ ID NO: 713612 - DNA, 75 bp, Homo sapiens
gctgaaggccctacgggagaaaaccgggcgcaagattcccaacttcttctggagcctggggatcggtcacactgg

SEQ ID NO: 713613 - DNA, 82 bp, Homo sapiens
ggggctctgtggctgctcctggctctgcgcaccggtcatcatcagatttgaaatatttaaagtggatacaaaactatttcag

SEQ ID NO: 713614 - DNA, 100 bp, Homo sapiens
cttcaatgaagatggagttatcagaccgtacaggttgagggatgggactggaaatcaaatgttacagctcagtgtgattacagtgcagagaagaaaagca

SEQ ID NO: 713615 - DNA, 100 bp, Homo sapiens
tgctcctgcaagatactgagagattgaagcatgctctggaaatgttcccagaacattgcacgatgcctcctgtgtcttctccgaaacaaccagcattgaa

SEQ ID NO: 713616 - DNA, 82 bp, Homo sapiens
gtcgccgctgcagccctagtgactgcggcctgcatcccgcttagaccatgctcagcctccaagcagccttgtcatcgacaaa

SEQ ID NO: 713617 - DNA, 74 bp, Homo sapiens
caaacgtggagatcaactcctctctgttaatggagtgagagacaagagagacacctccaacttcgacaaagagt

SEQ ID NO: 713618 - DNA, 75 bp, Homo sapiens
cttcatccagaagggacagtttgtgccagctctccagagagaaaagacaatgcagatcttcgtgaagactctgac

SEQ ID NO: 713619 - DNA, 51 bp, Homo sapiens
aggacatggagcgcttgaaagaggagctttctcttgcataccctcgcttag

SEQ ID NO: 713620 - DNA, 80 bp, Homo sapiens
gccaccgagatcctgctgacgccggctaggacatccggctccgggttcgagcagagtactgcgagcatgggccagccttg

SEQ ID NO: 713621 - DNA, 82 bp, Homo sapiens
caggctctggagcagttccatcagctcagccaggtctttgcctccggagccagcgtggtggccatagacaacaagatcgaac

SEQ ID NO: 713622 - DNA, 97 bp, Homo sapiens
acttcaaagggtactttttagaaccaaagacaaagaaacagccttggtataatagcacgttagcatcaagacgaaaacgacttactgctcattttga

SEQ ID NO: 713623 - DNA, 50 bp, Homo sapiens
gttccagaactgctggaagctgagagatgctgcaatttgtcagtaatcaa

SEQ ID NO: 713624 - DNA, 82 bp, Homo sapiens
tgcagcgggagctggacggcgagcgcgagcggcgcgagaaagccttcctggatgctctgcagaaccaggctgaggccagcag

SEQ ID NO: 713625 - DNA, 98 bp, Homo sapiens
tcaaaagagcttctctccagagtagaaagcatccatgagtatgttttctgatttcctgcagtcttttctgaagcactcttcgagtacagtttttgatc

SEQ ID NO: 713626 - DNA, 100 bp, Homo sapiens
ggagaagctcaccatcctcaacgaccggggcgtcggcatgctcacccgcctctacaacatcaagaaggaataatcaagctgggaaggtggaaccctctcc

SEQ ID NO: 713627 - DNA, 83 bp, Homo sapiens
agatctaccttctggaagctactactacgtggtgcttggaaaggtgtatgtggaatttgatgatcttgaatgggataaacgag

SEQ ID NO: 713628 - DNA, 75 bp, Homo sapiens
aagccatcgagatcgactgttacaacagcctggcagtttgcctgagaatacagatcaacccacagaacaaagcgg

SEQ ID NO: 713629 - DNA, 100 bp, Homo sapiens
gagtgcaagatagaatatgatgatttcgtagagtgtttgcttcggcagaaaacgcttgccgaactaaagcaagaatgtcttgctcgtggtttggagacca

SEQ ID NO: 713630 - DNA, 75 bp, Homo sapiens
ctgtcttcggtggactccttcggcagtccacccaccgccgccgcctcccaggttgacatcatggacatatgtgag

SEQ ID NO: 713631 - DNA, 100 bp, Homo sapiens
gtcaccatttctttcacaaaccttgtgtctcaatttggctacaaaagatggcaccgaaagcgaaggaagctcctgctcctcctaaagccgaagccaaagc

SEQ ID NO: 713632 - DNA, 75 bp, Homo sapiens
gtgggtgttggacaagttggtatggcgtgtgctatcagcattctgggaaaggatatggctttagttgcccctgaa

SEQ ID NO: 713633 - DNA, 100 bp, Homo sapiens
cgctcgattggttctactgtgggtctggactgatctccatgtcctgttgtggggcttttacagcctttggttgtcgagatgtccacagaaggaggatttg

SEQ ID NO: 713634 - DNA, 75 bp, Homo sapiens
cggcgagcagtctcaggcctttagtgatgatggctgctcccggcagatcggcttctcctttgtacgacccaagct

SEQ ID NO: 713635 - DNA, 82 bp, Homo sapiens
tccatttctcctattgaggagtcaacctgcccaaactccaaaatgatggtagagaattgaccaagaaaaataaagaaatctg

SEQ ID NO: 713636 - DNA, 75 bp, Homo sapiens
ctggacgccactgtggggctctgagagtcctgaattcttactgggtttctggaaggggaggatggggaagacaca

SEQ ID NO: 713637 - DNA, 100 bp, Homo sapiens
tagaggacctgtgcaacaacctcttgaggatcgaatcttcactcccgctgtctcagcagtctacagcacggtaagaatgattgatgttggctgatattgg

SEQ ID NO: 713638 - DNA, 100 bp, Homo sapiens
cacacgcttcagcatcagtctggtgatttgatgaaggctgctgcaggagagttcgcagatgatccctgctcttctgtgaagcgaggcaacatggttcggg

SEQ ID NO: 713639 - DNA, 100 bp, Homo sapiens
tcaaacaggagctggagcagctcaaagagttgccttgttgaaggggatgctaaagaagaaatactgcagccaccggaacctcatccagtgccacccatct

SEQ ID NO: 713640 - DNA, 75 bp, Homo sapiens
taaccgaaaaattgcagaagcacaagccaaactggttacaactgatggaaaaccaaaaatcgttgatatcattga

SEQ ID NO: 713641 - DNA, 98 bp, Homo sapiens
ttcaaagttttactccaaatttcatggcaggtcggatttgaatccactgcttttcaactcatgaacatcactgctggcacaagccacgttatgatttc

SEQ ID NO: 713642 - DNA, 100 bp, Homo sapiens
catctcggagcaactgaggcgccgggaccggctgcagagacaggcgttcgaggagatcatcctgcagtgaagccattaatttgctagaaccaatgacaaa

SEQ ID NO: 713643 - DNA, 99 bp, Homo sapiens
ccagagccgacctgcagcaaataattgtcagtctaacagaatcctgtcggagttgtagccatgccctagggaactctaatgatccaggacaaagaagtt

SEQ ID NO: 713644 - DNA, 74 bp, Homo sapiens
ctggggtgacgcggggtacaccacaagcacggacaagggctcagaggactggacgtgctcagacatcggtgttc

SEQ ID NO: 713645 - DNA, 96 bp, Homo sapiens
cttctgcccctgatcgcttggttttccttgcagtcgcctgctgctgtcgtcgggagaagttatagaccttactcatgataacaaagatgatcttca

SEQ ID NO: 713646 - DNA, 100 bp, Homo sapiens
tcttcactcccgctgtctcagcagtctacagcacgccctggaagaaagcgggacttttcccctgttccttggagtcagtattttgagtccatggaagatg

SEQ ID NO: 713647 - DNA, 82 bp, Homo sapiens
tttgtatttcattccactgcggtacatcattttaatctggggaattgcattttgtgaaaaaagaacaagaattttctgcaag

SEQ ID NO: 713648 - DNA, 97 bp, Homo sapiens
ccccgaaaacagaggtgtcagagccaggtcgttgaggacttccacatggagattggcacaggaccagactcaagacacacaactcataacagttgat

SEQ ID NO: 713649 - DNA, 98 bp, Homo sapiens
ccagaagagcggaccagggctgctgccagcacctgccactcagagcgcctctgtcgctgggacccttcaggatgttgcttcagagtgtgaagtcaaat

SEQ ID NO: 713650 - DNA, 74 bp, Homo sapiens
gcggccccgcggggggcgatgaccgtgcgctgaccctgactcactccagtggacagaggactgcagaaaatcaa

SEQ ID NO: 713651 - DNA, 100 bp, Homo sapiens
tactggataggcttaggaattttgtcttctgttgggcttggaacagggctgcacacctttctgctttatctgctaagtgttaggcggaaaaatactaaag

SEQ ID NO: 713652 - DNA, 100 bp, Homo sapiens
cgcggactcccgggccatggacgagtcgagcctcctgcggcgccgcgggctccaggaccagtccatgggcaattggcagatcaagcgccagaatggagat

SEQ ID NO: 713653 - DNA, 50 bp, Homo sapiens
aaccaagttaggaggaagacttaagaacaatgcagatcttcgtgaagact

SEQ ID NO: 713654 - DNA, 146 bp, Homo sapiens
cgaggagtaccagttcacttgcttgacctacaaggaatctgagggtgccctcaatgagcacatgaccagcttagcttctgtcctaaaggatggaatttttaagatgagcctttctccagatgggatgctcctggcagccattcact

SEQ ID NO: 713655 - DNA, 50 bp, Homo sapiens
gtttggatcagacatcataaaactggatggcaccacagatgtgacgcgga

SEQ ID NO: 713656 - DNA, 100 bp, Homo sapiens
ccccatatccagaatgaaatccatgctcagagatgccaagaagaatctagacagacaggcctttctagttacagaatgtctgaaggggacagtgtgggag

SEQ ID NO: 713657 - DNA, 125 bp, Homo sapiens
tgcccctgccgaggcaggcgcccaccgccggcggtgatgcggctgtgaagccctagtcgcgggaatgcatatcagtccacgtgggccaagcgggagttcagattggcaatgcctgctgggagctc

SEQ ID NO: 713658 - DNA, 83 bp, Homo sapiens
ctgctggggcctcccggggccggtaaagggacccagctctattaccaggttttaaacttcgccatgatcgtgtcttctgcact

SEQ ID NO: 713659 - DNA, 101 bp, Homo sapiens
gcgcggggaagtcatgctcgcttcacggaggcaatagctagccgggttacgactcactgattaaaaagagggactttttcaaatactttgcacttttgatt

SEQ ID NO: 713660 - DNA, 89 bp, Homo sapiens
agatcacccgcatcaagaaggagtgcgagcgggagatccgcaggctggcttggcaaaatctctgcgtcactgagcagcattttaacctc

SEQ ID NO: 713661 - DNA, 82 bp, Homo sapiens
ctgctcatgaaatcatcgagaccatccggtgaacttcacggtagaccagatccgcgccatcatggacaagaaggccaacatc

SEQ ID NO: 713662 - DNA, 100 bp, Homo sapiens
ctggtgcacccccagtgggtgctcacagctgcccattgcctaaagaacctcgccaacctggtgaccctggagctccgggagaacctgctcaagtccctgc

SEQ ID NO: 713663 - DNA, 100 bp, Homo sapiens
cacttgtcaatggagaattcccaggccctggaacagatcaacgtccgatggaaacaactacagctaaacgacggacagttcacagtcatccagctcgtgg

SEQ ID NO: 713664 - DNA, 75 bp, Homo sapiens
tgagtcaattctgaaagctccggtattattctttgatagaaatccaataggttaatgttgaagaaggaaaatgcg

SEQ ID NO: 713665 - DNA, 82 bp, Homo sapiens
aacgaggcaaggagctaaagcagcgtgcgttcagccctggggaagccatcttcgacaagagcacagggaaggttgttttgaa

SEQ ID NO: 713666 - DNA, 75 bp, Homo sapiens
cctggataacacagatcgcaagggtgtccattttctgatggctgatgggtgtagtgactatgacttggaatttgg

SEQ ID NO: 713667 - DNA, 82 bp, Homo sapiens
tgcatcagtgcccttgtggcgaatggggctcacgtcgagatcaatatggaaattatgtaatccaacatgtactggagcacgg

SEQ ID NO: 713668 - DNA, 78 bp, Homo sapiens
gggcctttcctgaggacggcgtacggagtgtgggaaggtgggagtcaatcattttgacaagtctcctgaaaggaacag

SEQ ID NO: 713669 - DNA, 74 bp, Homo sapiens
tctgttttgcctgaatacatgatttaaacaagagatttccacagaagcacctcaatgacctgaagaaggagaac

SEQ ID NO: 713670 - DNA, 100 bp, Homo sapiens
atcggttttagaagtgaggacagaggtgaatgaaaactttgccattgatttgatagcagagcagcccgtgagcgaggtggagactcgggtgatagcgtgc

SEQ ID NO: 713671 - DNA, 50 bp, Homo sapiens
cagcgactatgatatgcacacaggtgtgcatcaccttcgaccaggccaac

SEQ ID NO: 713672 - DNA, 74 bp, Homo sapiens
aaccagaatgaaagtagtcaggcctcctgtataagaagtaccgtattttctgcccatcatactttgtaataaaa

SEQ ID NO: 713673 - DNA, 100 bp, Homo sapiens
gcgggcgtgagcggcggcgtcttatccaaccttgcgctgcatccgctcgacctcgtgaagatccgcttcgccgaatttcgctaaggagtttgtgatcagt

SEQ ID NO: 713674 - DNA, 50 bp, Homo sapiens
cattgtttgtcaccacaaaaaggacagaacaaagatcccaagatggctcg

SEQ ID NO: 713675 - DNA, 98 bp, Homo sapiens
gtaattttcctcaagaggtgaaagatcttctctcctgcaatcataccgtattggatccagatctgcgaatgaaatgaatactgcattgagggacggac

SEQ ID NO: 713676 - DNA, 100 bp, Homo sapiens
ctgcaggccggtgctcttgcaactgacgcagtcactgcagcactggtggaacttgaggattcagtggtcccaatttaaaggctattttattttcaaactg

SEQ ID NO: 713677 - DNA, 98 bp, Homo sapiens
cctcctccaccgaggaggtgaatacacctctgattttaatcagttctgcgtttgaaaggaaacccgatcaagaagctactctagaagtcggagcagag

SEQ ID NO: 713678 - DNA, 95 bp, Homo sapiens
ggtcctacgaggagggctgtcagagcctcatggagtacgagccccggagctatgtggagtctgtggcacggacagcggtggctggaccccgagct

SEQ ID NO: 713679 - DNA, 75 bp, Homo sapiens
ccagtcacgccgggagctggtacacagcctcagttttgcgtttggctccctaatatctgctgtcgatccagtggc

SEQ ID NO: 713680 - DNA, 97 bp, Homo sapiens
caatcacggttgtgggtgatgttggaggaaggattgccatcatcgtgtggatgattcaacagccacacaaagcagcaacattttttggatgcattgg

SEQ ID NO: 713681 - DNA, 90 bp, Homo sapiens
agaatatttccctcgggaaactccgttagtattttggaattaaggctgcctttaatattggttgggaacaaatctgatctggtggaatat

SEQ ID NO: 713682 - DNA, 100 bp, Homo sapiens
gcggagagagccactcccgcccacgtcccatttcgcccctcgcgtccggagtccccgtggccagctgagctgactgctgcccactttggaggaggcggtg

SEQ ID NO: 713683 - DNA, 98 bp, Homo sapiens
tcgcttgccctgattctctccgccctgcacttttgccagctgaaggtccaggatgttgacaatgcgtctctggcacgtcttgaccttgaacgcaaagt

SEQ ID NO: 713684 - DNA, 100 bp, Homo sapiens
ataaaaacaaggtggaagattcttccaaggaaccagtgcgaagggtgtccgcaatgttgccagtgtctgtctgcagattggctacccaactgttgcatca

SEQ ID NO: 713685 - DNA, 100 bp, Homo sapiens
gttacatcgtgcgccgtggaccaggagaaccaagatccaaggtctcacaccattttgctggtacagcctaccaagaggccagaaggcagaacttatgctg

SEQ ID NO: 713686 - DNA, 100 bp, Homo sapiens
ttcatctcaaaaacaaaattctgaactcaggacttggcaactcaaccagaacgtaagttctttccaaagaaaatttgttggtgaggtgaagaggtgtgaa

SEQ ID NO: 713687 - DNA, 98 bp, Homo sapiens
tgctgttgcggccgctgccccagggctgcggggacgcccgtggaccgggagcccgtggaccgggagccggtggtgtgccaccccgacctggaggagcg

SEQ ID NO: 713688 - DNA, 100 bp, Homo sapiens
caaaacgacaggagcatcccaggaaggggttcccagaagtcagaatccaagatggtgatggagaggtgattgaacaaattataagcctgcaaaccaatga

SEQ ID NO: 713689 - DNA, 83 bp, Homo sapiens
tcaggggccaggttttcttcaggcagagggtctcttcaggagctcgaggccatgagcagatataccagcccagtgaacccagc

SEQ ID NO: 713690 - DNA, 100 bp, Homo sapiens
gcccccatcattgggagaaatccccactcctccaagaaccaacccccaaattggctgggacaggctcatatgacattaacagacaagacacttttcagaa

SEQ ID NO: 713691 - DNA, 75 bp, Homo sapiens
tcatccacgacctggacaggacggagcgcaggcaggagatctattgggaaactgattataaccactcgggcacca

SEQ ID NO: 713692 - DNA, 100 bp, Homo sapiens
gagaagcagcgcctgttcccggggcagatccaggttcagccgccgccatgtctgcgcatctgcaatggatggtcgtgcggaactgctccagtttcctgat

SEQ ID NO: 713693 - DNA, 82 bp, Homo sapiens
cgctgcgcggcgcggcggccgggccctcgagacggggacggtccagctgggagctccccgacctccaggagggcaagatcca

SEQ ID NO: 713694 - DNA, 83 bp, Homo sapiens
tgctagctatgtggtgtcagtgattgaacaaattttgcactacatgattcacaatgttctctacagaaagaaccaatgaaccc

SEQ ID NO: 713695 - DNA, 97 bp, Homo sapiens
taaaatcacctcctctgggacgccttcctctacttctcacagttcaggccataggaaaaggatacagagtagagtttcatgaacctgaaacttggtg

SEQ ID NO: 713696 - DNA, 74 bp, Homo sapiens
cacagtcaagatgttgccaacattcgtaaggtccattcctgatggctctgggcttctttcgccgcacaatccag

SEQ ID NO: 713697 - DNA, 100 bp, Homo sapiens
tagtgatcctgagtacaacacggtggcaagcaagtttaatcagacctgctcacacttcagaatagagaaggtgtggtggctcacgtctgtaatcccagca

SEQ ID NO: 713698 - DNA, 98 bp, Homo sapiens
ggaagtgctggtggtgaagctccctctctccgagcactgggccctgcctggggcgtcctgcctctgcggctctgccccctgcatcctgtgcagctgct

SEQ ID NO: 713699 - DNA, 74 bp, Homo sapiens
ctaaacctgtgaccacccctgaagaaattgcacaggtggtgatcgtggcagaggtggccctggtggcatgcggg

SEQ ID NO: 713700 - DNA, 90 bp, Homo sapiens
gcgtctcggaaaccggtagcgcttgcagcatgatgctgcagtctgaagagacttccagcacctctcagttgaatgaattaatgatggctt

SEQ ID NO: 713701 - DNA, 100 bp, Homo sapiens
aacagacttcggagtacctgcgctatgaagacacgcttcttctggaagaccagccaacaggtttgctggttggctcccgagcagacagcaggaaagaaga

SEQ ID NO: 713702 - DNA, 90 bp, Homo sapiens
cagcctcaggcctgcacggacggtgttggttgggaatgtaaaaagggcagctctctggcatgttcctgactgaggatctcataacattta

SEQ ID NO: 713703 - DNA, 50 bp, Homo sapiens
gtaagaacgaggaggatgaaggtgatgatgatgatgattttgatgatgag

SEQ ID NO: 713704 - DNA, 75 bp, Homo sapiens
ttcggcagtccacccaccgccgccgcctcccagccttttgtcatacatgatatggagacactgtgtatggctgag

SEQ ID NO: 713705 - DNA, 100 bp, Homo sapiens
ggagccgctggggctggaggttgaccagttcctggaagacgtgcggctacaggagcgcacgagcggacagcaccagttgcccttgaagcagaaaacagag

SEQ ID NO: 713706 - DNA, 97 bp, Homo sapiens
agcataatccttttgcagacatctcaacgctggctctccagagagccagctgctccccgggaacaacttcaccaatgagtgcaacataccaggcaac

SEQ ID NO: 713707 - DNA, 98 bp, Homo sapiens
cgcagatcctgagacccggacagtggcagtgaaacagttaagtgggcagaccaacatccacctcagcaaaaacttcttcctgacgaatcgcgccaggg

SEQ ID NO: 713708 - DNA, 89 bp, Homo sapiens
tagtggatatagcacaccatccccagccaggcagctgcaatgactctccgcacggtattattgtcattgcaagcactattggcagctgc

SEQ ID NO: 713709 - DNA, 89 bp, Homo sapiens
ggaaaggttgaagttcaagagctcagaccctaaagcagctgagtatgtcccagagaaggtgaagaaagcggaaaagaaattagaagaga

SEQ ID NO: 713710 - DNA, 87 bp, Homo sapiens
ggatgccctcaagtcctggctggccaagttactggagccgattttggaaattttagcattcaggtgccaggaatgcagatgggacag

SEQ ID NO: 713711 - DNA, 101 bp, Homo sapiens
cggccgggaggcccccccgctgcccacagtggccaggacagaggaggctgtcggcagagacctcacctctgaggaccagatcgtactgctgaagtcaagtg

SEQ ID NO: 713712 - DNA, 90 bp, Homo sapiens
tacctgatgctggaccggggtcacttagactaccccaggaacccgcgccgcgagggctccttccctcagctagagaccgttggatggcag

SEQ ID NO: 713713 - DNA, 82 bp, Homo sapiens
gttgatgttctggtggattatggatcagatccaaatcaagacaagaggagcagcagcggcaccgcccctcaccctggagggt

SEQ ID NO: 713714 - DNA, 100 bp, Homo sapiens
gggtcgcgctcgaccccccagtggatgtctttgtgcaccagattacctggctggtgtttgcttgttctggagtgatcttctgactggaaaagaactatgt

SEQ ID NO: 713715 - DNA, 100 bp, Homo sapiens
gaaacatcagttgaaacatagggaactctttttgtcacgccagtatgaatctctgcccgcaacacatatcaggctgaccaactgactgaagagcagattg

SEQ ID NO: 713716 - DNA, 100 bp, Homo sapiens
ctgagtgccagtcacccaatggtgggcaagtggctggagaaacaagaacagggtgaaaatcctatttataagagtgccgtaacaactgtggtcaatccga

SEQ ID NO: 713717 - DNA, 75 bp, Homo sapiens
gaagcccccacgggctctacctgaccctgcagcctgtaactgcaacctgcatgcccggcgctgccgcttcaacat

SEQ ID NO: 713718 - DNA, 90 bp, Homo sapiens
accaatagtagttctcctctgggagaactttttgatcatggctgtgattcactatcaacagaccactatgatcccgactatgaattcctc

SEQ ID NO: 713719 - DNA, 98 bp, Homo sapiens
attgtctcccacggcagcagctaacttcacacgccgaaacctggctgactgtcttcggagtcggatctcttccctgaagaacaggctgaaaaaggtct

SEQ ID NO: 713720 - DNA, 90 bp, Homo sapiens
ccgtaattgtgagtttcctgaggcctcaccagccatgcctcctgtacagcctgtggaacttaccttccactggaagaatctcaaacagcg

SEQ ID NO: 713721 - DNA, 99 bp, Homo sapiens
tcgggaatgctgagaaaacagacagatttgtcatgaagaaactcaatgatcgtgtcatgagagtgttcatgaagtctgtgaagctggagtgggtgcaag

SEQ ID NO: 713722 - DNA, 82 bp, Homo sapiens
gtcatgagctttgtgaacctgggtcagcccaaggccaaccccactgtcactctgttcccgccctcctctgaggagctccaag

SEQ ID NO: 713723 - DNA, 96 bp, Homo sapiens
ggagccgagccggaactgcggcagtctctccctgccaggctcttcatccaagggtgaggacgcttgagcggaagttagaagcaaaaatgatcaagg

SEQ ID NO: 713724 - DNA, 90 bp, Homo sapiens
ctcatctccggccctctcggcgtccgccagcgatggcacagtggaatgcagtagccctctgggcctgggatattgtggttgataactgtg

SEQ ID NO: 713725 - DNA, 83 bp, Homo sapiens
tggaggtcgccatggggcgaggcagcggcaccttcgagcgtctcctaggctaactcaggtgagatggagccgctatagtcctg

SEQ ID NO: 713726 - DNA, 100 bp, Homo sapiens
tggaggaggaacttcgaaccatggaccaggccctcaagtccctgatggcctcagaggaggaggtaatagcctgcagctggtgttttgagaagccctactg

SEQ ID NO: 713727 - DNA, 100 bp, Homo sapiens
ctaaacttttggacctctcggattctacaagtgttgctagttttcctagtgctgatgaaactgatggtaacctcccagaactagacagtacggatggtgc

SEQ ID NO: 713728 - DNA, 80 bp, Homo sapiens
ctcaccccgcggccgcaccttcccgccttctcagacagaagccctgggggatgcggaggaagatgaggacgatgaggact

SEQ ID NO: 713729 - DNA, 82 bp, Homo sapiens
agataaagcccttaaggacaagagtacgggaatgtcaggtgctatttttagctggcaaaaccaaaggctgtttttattctcc

SEQ ID NO: 713730 - DNA, 50 bp, Homo sapiens
aagacagagggttttcttttgagaaggacagaataacgggctcccagatt

SEQ ID NO: 713731 - DNA, 102 bp, Homo sapiens
ttgagaaactgaaactctccgagggaaaaggccttgaagggccattagacctgataaattatatagacgttgcccagggaacactgactatgccaaatggag

SEQ ID NO: 713732 - DNA, 75 bp, Homo sapiens
ggaactggcaaagcagctacacaaagagggtcatctcttctattgtacctgcagagaatgtaactggtcactaca

SEQ ID NO: 713733 - DNA, 100 bp, Homo sapiens
ttcagggctttgaatgcatcagaaccatgcacgaaaatcacatcttggaggatgtgaacaagtgtgtgatagccctccaagagggcgatgtggacactct

SEQ ID NO: 713734 - DNA, 82 bp, Homo sapiens
tggaattttgccgatttcatgactaaccagtgactaaatcattttgctactttaaaaaaatcacgaaagtacattatttgaa

SEQ ID NO: 713735 - DNA, 99 bp, Homo sapiens
tcaggcatggagatgctactgatgtcagggctcacggaatttgaagacacccccaccagtcagttgaccattgatgagttcatgaagatcgacctggag

SEQ ID NO: 713736 - DNA, 96 bp, Homo sapiens
ctaatgaactacaagcaatggtcattggaaatacaaattatgattggaaggaactggaaaagttcttctcaccactaaatccaatacgagttcata

SEQ ID NO: 713737 - DNA, 82 bp, Homo sapiens
ggactcccaagggaaaccggcctgtcatcctcacctaccatgacatcggcatgaacctggggatcaggaggcctggcagaaa

SEQ ID NO: 713738 - DNA, 49 bp, Homo sapiens
ccccttcaagttctagtcatgggcaagtgtccagagaatggctgggatg

SEQ ID NO: 713739 - DNA, 50 bp, Homo sapiens
ttggcattgaaggttcactcaaaggcagcttgccaattctgtaactcctt

SEQ ID NO: 713740 - DNA, 90 bp, Homo sapiens
ctgggccccagtctccaagggcgagaatggaccctgatggacttggacatggagctgtccttggcctcaggcccaggcccaaggccaagt

SEQ ID NO: 713741 - DNA, 100 bp, Homo sapiens
ctaagaggaagcatgtggcagaagccatctgcaaggagcaacacctcttcctgcctttctcctacaagcatttatgtttgaatcatctttaagtctggcg

SEQ ID NO: 713742 - DNA, 50 bp, Homo sapiens
acttcaccgagtaaagaggagtgtactccaaagattcaggtttactcacg

SEQ ID NO: 713743 - DNA, 75 bp, Homo sapiens
aaccttatagcctgcttatgggggaaggaagattgttgatcgaatcgacaatgatggggatggctttgtcactac

SEQ ID NO: 713744 - DNA, 82 bp, Homo sapiens
tgaggcctccccagccatgtggaaccgacagctgggaagtggtggaaggactgaggggggagatgaattacacccaggagcc

SEQ ID NO: 713745 - DNA, 82 bp, Homo sapiens
tgatccacctggtggggccttcagactgcaccctgcacggctttgtgcacggagtgccctctggtggtcagaagatgctgtg

SEQ ID NO: 713746 - DNA, 54 bp, Homo sapiens
gttccaggaggtggcaccaagagagcaagatggagtctccctctgttgcccagg

SEQ ID NO: 713747 - DNA, 99 bp, Homo sapiens
gtggccaccgcggcggagcccgaggtgaaagaacttgtcctggacaacagtcggtcgaatgaaggcaaactcgaaggcctcacagatgaatttgaagaa

SEQ ID NO: 713748 - DNA, 101 bp, Homo sapiens
acttgtcttccactaaagagttggacctgtcaggtggaatgaatcttacttgttgaatatcttctggttactagttggattcatttgtgaaagaatcattt

SEQ ID NO: 713749 - DNA, 98 bp, Homo sapiens
cttcctcaacaccagcaccgcagatgttgtcaaggtggcctaccaggaggccaggggtgtcgccatgtcatctcaactcgaactccacctccaccttc

SEQ ID NO: 713750 - DNA, 75 bp, Homo sapiens
tacaaggacggaggcgttgcgattattgaccagtggatctgcgcacacgccagcctgacaggagcaatggccacc

SEQ ID NO: 713751 - DNA, 75 bp, Homo sapiens
cgcaaaccaacctcctggctccaaagctgcagttccagtccctgcactaggtcagacaatcccctttggggtaca

SEQ ID NO: 713752 - DNA, 75 bp, Homo sapiens
tggccccgatggctctgtgcaacggagactccaagaaatgggacgtcggtcatcagatactgaagaagaaagcag

SEQ ID NO: 713753 - DNA, 75 bp, Homo sapiens
atgagttttgtgaaagggtggggagcagaataccgttgtggacatcggatacccaaggagacgaagctgaagcag

SEQ ID NO: 713754 - DNA, 96 bp, Homo sapiens
ccgcggtttgtcgccagaaggaagatggcggatctggaggagcagttgtctgatgaagagaagggaatgtatcccagtcctctgccattgacctca

SEQ ID NO: 713755 - DNA, 100 bp, Homo sapiens
tcgagcagcctctcgccatttcccgggagccacctgggcctgggccagacatgaccatcttgtgtgacccagaaacgctattttatgaatctccacacct

SEQ ID NO: 713756 - DNA, 100 bp, Homo sapiens
tggtttgatactgacctgtaaatcatcctttaggttacaggaaatacaggaggcagaggaacaaataaaagacaccacgagaaacagacacatccagaac

SEQ ID NO: 713757 - DNA, 82 bp, Homo sapiens
ggaaggctccaaacctcgacaaaatggctgatgatttgctggcagctgctgacaaggtcgactaatggaaaatgaaaccaac

SEQ ID NO: 713758 - DNA, 90 bp, Homo sapiens
gctgcacctggagattgacgcagagtgggcggcggtggtgggaaaagtccggcatttacagaaggcttttgcttcaagagtagataaatc

SEQ ID NO: 713759 - DNA, 83 bp, Homo sapiens
cggcagccctgcggctacggagacagggggatatgagactttctactcggaatatcctgagtgttgcgtggatgtaaaaccca

SEQ ID NO: 713760 - DNA, 74 bp, Homo sapiens
cccagcactttcggaggccgaggagtttccaggtgtctaggaaaatgccagaagaactcaccaggtgccaggaa

SEQ ID NO: 713761 - DNA, 75 bp, Homo sapiens
gccagacacaggcagagcaagctgcacagaacaccaatcagggtcttcaggcctggaagattgaagacattccag

SEQ ID NO: 713762 - DNA, 50 bp, Homo sapiens
acaaaccagggctcgccatgaagccagttcaggacctcaaggggctcggc

SEQ ID NO: 713763 - DNA, 75 bp, Homo sapiens
caacacggtgttcatcttttctacaggtgagacatggaatccattaaaattgcattatcagttaagaaatgtacg

SEQ ID NO: 713764 - DNA, 80 bp, Homo sapiens
gagctccccaggggagttctctgtgtctgtgaatacaacagggtctggattcccgatcctgaagaagtttggaagtctgc

SEQ ID NO: 713765 - DNA, 98 bp, Homo sapiens
atggtttttctttgatgtactgatcaaatctatggctcagcatttgatagagaactccaaagttaagacctgtggatgaagagccagagtcctctgag

SEQ ID NO: 713766 - DNA, 87 bp, Homo sapiens
cagaatcgaatctcttctccctccccttcttgaataactgaagtgaagtgatggactccgatttggagagtagtaagacgtgaaagg

SEQ ID NO: 713767 - DNA, 120 bp, Homo sapiens
ctctcctgccaggtgtgtggctgcacaggagtcttgctgatgtgtatttgcatgcccgagtctttgagccgtgctataccagtttgtccagattgtttatactagcaatgcagtttacgg

SEQ ID NO: 713768 - DNA, 95 bp, Homo sapiens
gaatgatgtatttgatcctgattctacccaagtacatatgatttcagctgcaatggcaggtgctttggaaataccagccagctcatgcatcttaa

SEQ ID NO: 713769 - DNA, 82 bp, Homo sapiens
ccgtcatcgagtatgagcagttcatcgcaggtgccaagtcctgccctgccaacttcttggcagctgccgacgacaaactcag

SEQ ID NO: 713770 - DNA, 82 bp, Homo sapiens
gtcgctcctgcgcctgcgccgtgcccaccgaccggcctcgagcgccccggcgggagagcccactgcggaagagggcagcccg

SEQ ID NO: 713771 - DNA, 100 bp, Homo sapiens
caacaagcagagttgattcttcaaagctcctcagtgggtagtgcacttccacgaagacgctgctgtgcatatattaccattggaatgatatgtattttca

SEQ ID NO: 713772 - DNA, 88 bp, Homo sapiens
ttgactctcgcgggaatcccactgttgaggttgatctcttcacctcaaaagcagttatgatgatcgttcgtccgaccggagggtgtat

SEQ ID NO: 713773 - DNA, 100 bp, Homo sapiens
aagaaatgcagagtgatcccatctcaggagcacctgaatgccgagagggtgacctctctgggcaaggactggcatcggccctgcctgaagtgcgagaaat

SEQ ID NO: 713774 - DNA, 100 bp, Homo sapiens
gcaagaacggaggggctgacaactgcgtgtccagtccttcagaaggcatcaggaagggcgggctaggggtgtttgtgcagctgatgcctatcctcatcct

SEQ ID NO: 713775 - DNA, 74 bp, Homo sapiens
agctggccaaagcctgcccagacggctcacctgtgcgggatggaacaaaagtgtgtcccggcatggatatccgg

SEQ ID NO: 713776 - DNA, 100 bp, Homo sapiens
gccaggactttggctgggacccctgctttcagcctgatggatatgagcagacaatcttctggaagttcagacctatatcagcatcctgcagcagatcatc

SEQ ID NO: 713777 - DNA, 100 bp, Homo sapiens
gaggtggaggccgtcaaagtgcacagcttccccacactcaagttctttcctgccagtgccgacaggacgcagaacagccctgtggcccccacagcccagc

SEQ ID NO: 713778 - DNA, 114 bp, Homo sapiens
tctgagaatacttgctgaaaaggaagttttctggaatgggtgtgatgaatgcagactctgctaccattttggctgtttggatcctcctttgaaaaagtctcctaaacagacagg

SEQ ID NO: 713779 - DNA, 74 bp, Homo sapiens
agtcagtgatttccataaattgaagcaaaacgctgaccggaaaggagattgagattgacattgaacctacagac

SEQ ID NO: 713780 - DNA, 98 bp, Homo sapiens
catttctttccagaattatacaatatttgatatggccgcgtggaaagtgtcaaaattcttcccaagaggggatctgaaggaggagtggctgcctttgt

SEQ ID NO: 713781 - DNA, 75 bp, Homo sapiens
tggagaatggcatgctggtgacggacagtgcagggaagcaactgcagagccttatgtttgatcatcggccaaggt

SEQ ID NO: 713782 - DNA, 50 bp, Homo sapiens
accaaattgtcgccattaagaaaggtcaaagaattgactgtagatccaac

SEQ ID NO: 713783 - DNA, 83 bp, Homo sapiens
aaaaatccgcagagaaattcagaacctcaagcttttcaggcatcctcatataattaaactgacggcagcctctactttcaaag

SEQ ID NO: 713784 - DNA, 100 bp, Homo sapiens
tacgaagaatgaactctgagaatgtttggagctcaaagttatgaagtttcaggatgaattggaatctgggaaaagacctaaaaaaccaggccagagtttt

SEQ ID NO: 713785 - DNA, 51 bp, Homo sapiens
tgcaaggcttcctgtattttgcccagacacatggccccaggccaagcaccc

SEQ ID NO: 713786 - DNA, 73 bp, Homo sapiens
agaatatgctaaacttttggccaagagaatgaagggtgtgggccgaagatatgctcatgtggtgttgaggaaa

SEQ ID NO: 713787 - DNA, 90 bp, Homo sapiens
ccaaagggcaaaggtcggaagccggctgcgggagcccagagcgcaggtacattcgctgccagaaagaggtgggaaagagctttgagcggc

SEQ ID NO: 713788 - DNA, 98 bp, Homo sapiens
gatccttgagtgataaaggagtagagggcaaaataacatggcagccagacgaattacacaggagacttttgatgctgtattacaagaaaaagccaaac

SEQ ID NO: 713789 - DNA, 98 bp, Homo sapiens
atgctgctattgtcatcttccttgaattctttgcgtggggccttttgacaactccaatgttgactgatgggtcatcagttaaggaagttgaaacctac

SEQ ID NO: 713790 - DNA, 51 bp, Homo sapiens
gccgagcgcgcggccgtaagaccgcgggatgctgaaaacgccattcaacag

SEQ ID NO: 713791 - DNA, 97 bp, Homo sapiens
aacagttgaaaagttccggcagagaattctggctccctgtaaggttgggaaggatgacgttgataactccaagccagggcccagccgcccaggccct

SEQ ID NO: 713792 - DNA, 82 bp, Homo sapiens
caccgggcgctggtctgctcccagccgatcttcgtgaagactctgactggtaagaccatcaccctcgaggttgagcccagtg

SEQ ID NO: 713793 - DNA, 74 bp, Homo sapiens
atatttccaacacacttataatgctcgcagataagcatgctactgccactgcagagccccgccatggaagacac

SEQ ID NO: 713794 - DNA, 50 bp, Homo sapiens
caggaggtgaccgaggcggtggcaggtgcacaaatggagtccagaggagg

SEQ ID NO: 713795 - DNA, 75 bp, Homo sapiens
aagacccaccccggagacccccgcttccagtgcaggatttaagcgagagcctcactggttcccaggacatcaacc

SEQ ID NO: 713796 - DNA, 90 bp, Homo sapiens
cctcccgagcccggccttctgcctaacggcaccgttaccctgtatcaacttgaactgaaggatgactacatcattagaactaatcgactg

SEQ ID NO: 713797 - DNA, 116 bp, Homo sapiens
cccctcctcacccgaacatcagggccctccagactcaggcgccccaacaatacggctacgtcaccaactccaaggtgaagtttgtcatggtggtagattcctccaacacagccctt

SEQ ID NO: 713798 - DNA, 96 bp, Homo sapiens
atgtcgacagctggaaggcatctctactaagagctggggtctatcctgacaaatctgtatttcaggcaggaagactcatcctgagctgagctgctt

SEQ ID NO: 713799 - DNA, 90 bp, Homo sapiens
agctgcggccgcacctggccaagggcttccgagtggacctgccaatcaagtcggcccgctaccgtggccagtacaacacctatcccatca

SEQ ID NO: 713800 - DNA, 104 bp, Homo sapiens
gcagctgcaaggagggcggcgggactgcactcgagtgtccagacctgctcgatggcagccttaagtgccttgaaacaattttctgaacaaggactggatccaat

SEQ ID NO: 713801 - DNA, 75 bp, Homo sapiens
ctctagaaactcgctctaaagacggaaccgccacagcactcaaggtctagtggacagagaagactcttggccagg

SEQ ID NO: 713802 - DNA, 90 bp, Homo sapiens
caggaacccagcaacaattcttctgccaggaataaacatcatcctgaccttcatctctgggcttgttccgggaagcgaaaagaccaagat

SEQ ID NO: 713803 - DNA, 100 bp, Homo sapiens
tccccacacatagccaacatcgggcgcctggtagagggtttggatccagctcgagtcaacgtccctgtcattggtggccatgctgggaagaccatcatcc

SEQ ID NO: 713804 - DNA, 82 bp, Homo sapiens
cccactttctcggcgccgcggctcttttctaaaagtgtcacccctcctaatttctcagtgtcacaagtgcccaacatgccca

SEQ ID NO: 713805 - DNA, 83 bp, Homo sapiens
ctggccaagaagatcatcattaaggacggaggcacggctactgcagcactggggtgtcagttgttggtccgacccagaacgct

SEQ ID NO: 713806 - DNA, 75 bp, Homo sapiens
gcattgacatttaattttagggtcctttatatagaagggagagtagacttaagccagattgggttttgagaagag

SEQ ID NO: 713807 - DNA, 83 bp, Homo sapiens
cccctatgcgggcatcgacctggccgtctacgagtctattatcctcccagtccacaacgctgaaccgtggctggacgaatgtt

SEQ ID NO: 713808 - DNA, 80 bp, Homo sapiens
ctaaagtcacccggcggccaaaggccagtgactaccaacgtttggaccagaaggttttgcgtgtgaagctgtgtggaaat

SEQ ID NO: 713809 - DNA, 75 bp, Homo sapiens
agaagtgatgctggagaattacaggaatcttctctcattggaccagttaaagaccctgcagaggaattacggcag

SEQ ID NO: 713810 - DNA, 80 bp, Homo sapiens
gtgggcggtgccctgcatgccctacccactggcctcaggggctactgttcccgtagacaaagacgtcttcgaaaaacact

SEQ ID NO: 713811 - DNA, 102 bp, Homo sapiens
caactggctgagggactcacagctgatgacctgctgctcgtgctgatctcagtgtactaatggtcacttgatgtgcgctggctgttttatccacctactagc

SEQ ID NO: 713812 - DNA, 100 bp, Homo sapiens
ccgggctgcgccgcgggagttcgagaaactcagccacctgtgacaaatttgagtgtctctgttgaaaacctctgcacagtaatatggacatggaatccac

SEQ ID NO: 713813 - DNA, 106 bp, Homo sapiens
acgccgtccacgtgaaggggcccttctcggtggaggccgacccatccaggccaccagcccctcgggttccaagatgcagctactggagacagagttctcacacacc

SEQ ID NO: 713814 - DNA, 100 bp, Homo sapiens
tggctctttggcatttggtgctgtggcaggaagatgcccaggatatggatgcctataccctggccaaggcctactttgacgttaaagagtatgatcgggc

SEQ ID NO: 713815 - DNA, 75 bp, Homo sapiens
gggtacgggaagctgctgaaaaggctaaatgtgaactctcctcatctgtgcagttaaaaaaacagtttcctgcta

SEQ ID NO: 713816 - DNA, 75 bp, Homo sapiens
tttgacaacctctactccatggtcatttccctcaaagcttctgaagagtcatcctttgagaaaacaaaagagact

SEQ ID NO: 713817 - DNA, 100 bp, Homo sapiens
ggcgaagaagagcggcttaaaaagccaccgcggctccaggagtcctgtgactcagccaaccacctatcccctcaagccctcaagtggcgggaatacagga

SEQ ID NO: 713818 - DNA, 89 bp, Homo sapiens
gggaggtaggcgcggggcggtcggctgcggtggcggcgtttggatgattgtctctcggcggcggagtcgacgcaaacatgcagatcttt

SEQ ID NO: 713819 - DNA, 101 bp, Homo sapiens
ctcggataccagcgctcagcccacctgtgattatgcaaagaatggctcaagaagtactgacacatttaaaggagcatcctgatgcttggacaagagtcgac

SEQ ID NO: 713820 - DNA, 100 bp, Homo sapiens
aacgcttttcacgtcacctggagagatgcacaggccatctggctgctgtgcacaggcgctcgtgaggctgccttccggaacattaagaccattgctgagt

SEQ ID NO: 713821 - DNA, 110 bp, Homo sapiens
gagatgacgaagacggggaggacgaggctgaggacacaggtgtggacacagcacctgaactcctggggggaccgtcagtcttcctcttccccccaaaacccaaggacacc

SEQ ID NO: 713822 - DNA, 51 bp, Homo sapiens
gccagccaggcggagagggagatgcaagatgctgtgggccctgagggaaag

SEQ ID NO: 713823 - DNA, 147 bp, Homo sapiens
gtgattcccaggaggatgtcgacagctggaaggcatctctactaagagctggggtctatcctgacaaatctgtagggctgataacatccggaaatactggagccgctactaccaaggatctcaaggggtaatatttgtattagacag

SEQ ID NO: 713824 - DNA, 76 bp, Homo sapiens
tcctggacccctggttcgccggctcctccaatgtgggcatcaacaggtggcggtccagcaagactatgaatctctg

SEQ ID NO: 713825 - DNA, 50 bp, Homo sapiens
aatgctgggattggctgcttttcggaatgacgttggccggagctcctatg

SEQ ID NO: 713826 - DNA, 50 bp, Homo sapiens
tgaccgagaccgcggccgggaccgaggagatcctgaaggagctagacgag

SEQ ID NO: 713827 - DNA, 75 bp, Homo sapiens
cgaagtcgcagcgccagacccaaggcccccgagtgagcgcgggcgccgagtgctgaagctgctgaaagatggcag

SEQ ID NO: 713828 - DNA, 51 bp, Homo sapiens
ctgaaaagcaatttgcaatctttgcattagtttcatgatcaacatgggaga

SEQ ID NO: 713829 - DNA, 100 bp, Homo sapiens
gcaggaagcgccgaaaacgctgcatgcgtcacgctatgtgctgccccgggaattactgcaaaaatggtgtggatgaggtcaccattgtcaacattttgac

SEQ ID NO: 713830 - DNA, 83 bp, Homo sapiens
cttggcccccagcggcttcctcggcctcccggcgcccttcagcgaggaagtatgacgccgtgcccatccagtccagcgtggtg

SEQ ID NO: 713831 - DNA, 99 bp, Homo sapiens
attgtgaagctgattggagtcatcacagagaatcctgtctggataatcatggagctgtgcacacttggagaggtgggactcttccctggacactgtgtt

SEQ ID NO: 713832 - DNA, 90 bp, Homo sapiens
cctggtttatagcctggttaatcaacagtcttttcaggtatttacctcctgagtgttttgtagttggaaaagagccaccaaagatttcca

SEQ ID NO: 713833 - DNA, 89 bp, Homo sapiens
caccagtttccggacagcttcgtgctggaatttttccctagattggtgtaaacagccagacgtgggccttcccaaacccgacctggtcc

SEQ ID NO: 713834 - DNA, 127 bp, Homo sapiens
ggaacagccacgctgaaagctcggccaagagtccggcccctgctgaccttccttccgctgatttgttcccgacaaggagttttctggttcagaccgtagacagagaggccgagaaggaccagtgcag

SEQ ID NO: 713835 - DNA, 100 bp, Homo sapiens
atcgaaacagatacagagatgtaagcccataatgatatggaacctagcaaagctgttccactgaatgcatctaagcaagatggacctatgccaaaaccac

SEQ ID NO: 713836 - DNA, 74 bp, Homo sapiens
gaccacacccgctccgagcagtgctacagagacgtgtctgatctaaaggcatcacgttgggtggtttccattta

SEQ ID NO: 713837 - DNA, 100 bp, Homo sapiens
aatgtcttccaggaggcccctgatcttctctgctcagggaccactcttatctgacccagagacagggtctcttcttcgatgattcctatggcttctaccc

SEQ ID NO: 713838 - DNA, 101 bp, Homo sapiens
cggcagagaattctggctccctgtaagacctctcaagctggatccaaggataaaaagatggaccaaccaccccaagccaagaaggcaaaagtgaagaccag

SEQ ID NO: 713839 - DNA, 49 bp, Homo sapiens
gcctacccgggatacggaggaggggccccctcccaccacctcctccagt

SEQ ID NO: 713840 - DNA, 50 bp, Homo sapiens
caaaagtccattatgaaactgaatttcagaaactgtggaggagtgtcact

SEQ ID NO: 713841 - DNA, 96 bp, Homo sapiens
tccaagggatgcagatgatgctgtgtatgagcttgatggaaaagaactctgtagtgaaagtctcttgcatggcaccaagaatgttaccaattcaag

SEQ ID NO: 713842 - DNA, 100 bp, Homo sapiens
caaggtctctcgcgggcgggagaacggaaaactcccaacttcctggtgaaaggtgtagcagtcactcggcctacacccacagcatcgaccttgtgaaccc

SEQ ID NO: 713843 - DNA, 83 bp, Homo sapiens
gcctttgccatcactgccattaaggtcgtcgtcccgcagacacacaatccagaagtcactttcctcgagacattggtcagccc

SEQ ID NO: 713844 - DNA, 100 bp, Homo sapiens
tttgaaaaggagaaaatgaatgccaaatgggacacgcgcctgattaatctctctgagctgaccccatacatcttgtgttccatttgcaaaggttacttaa

SEQ ID NO: 713845 - DNA, 74 bp, Homo sapiens
ctgcattggaactagtgacagttgatggtgtggatgaggtcaccattgtcaacattttgaccaaccgcagcaat

SEQ ID NO: 713846 - DNA, 75 bp, Homo sapiens
gacagcggcgagcagaactacggcgagcgggctcccgtcttcgtcaggaagattttccacctcgcattgttgaac

SEQ ID NO: 713847 - DNA, 53 bp, Homo sapiens
gcagccctcactcttcatggtcactggtttgatgtggctagcatgatgtctgt

SEQ ID NO: 713848 - DNA, 73 bp, Homo sapiens
tccagaaaatcttgtggacaaatccaggggaagttacagatgtagagctaaaacgactgaaggatgctttcaa

SEQ ID NO: 713849 - DNA, 75 bp, Homo sapiens
gccggcggcgaccacgaaaccgagagcaccagcgacaaatttgtggggacattcatggacaattctttgatttga

SEQ ID NO: 713850 - DNA, 75 bp, Homo sapiens
tcgcccagcggccgcgacgctatggcgcactggagtaccctgttcctggcagctgggtccgatacgccgagcggg

SEQ ID NO: 713851 - DNA, 100 bp, Homo sapiens
acactgagaacaaagagacagttatatctggaatgggagaattacacctggaaatctatgctcagctatcagttgagggatttgcagttgataaaatggc

SEQ ID NO: 713852 - DNA, 76 bp, Homo sapiens
agtcactcccaggatcctcaagggagcacatggcacagtgggaagtgaggtccaaagaagtcgatgtttccaaaca

SEQ ID NO: 713853 - DNA, 82 bp, Homo sapiens
ccagagagacgtgaaacatgtgaacactcaagtgaagcaaaagccttccatgattacggaatgacagaggaagaggaagaca

SEQ ID NO: 713854 - DNA, 83 bp, Homo sapiens
gccgcagatgcccaccggaatggagaaggaagaggagtcggtttggtgcacctcgatttggaggaagtagggcagggccctta

SEQ ID NO: 713855 - DNA, 83 bp, Homo sapiens
cagtaaagaataagagagtcttcaaagaagcggagggtgctgctcaaccaaacaactcattaatgctgcaaactagcaaggag

SEQ ID NO: 713856 - DNA, 98 bp, Homo sapiens
aggatgaagattcaccaaataagctatatactttggttacctatgtacctgttaccactttcaaaagatttgaatttgttgaaatgagcagtcgtaaa

SEQ ID NO: 713857 - DNA, 101 bp, Homo sapiens
ccaagctgggaagtccggcgcaactccgcaccgcagagccggcgcctcctcggcaggtaagaatgattgatgttggctgatattggagtgctcattcacat

SEQ ID NO: 713858 - DNA, 50 bp, Homo sapiens
gttcccaattaacaatgaagcagttcctggtccagaactttacacagaaa

SEQ ID NO: 713859 - DNA, 75 bp, Homo sapiens
gctcaggctgcccagatggtggctcccggagtccagtcagagcaccataacatggtgtgggaagtgaagacaaat

SEQ ID NO: 713860 - DNA, 83 bp, Homo sapiens
cctgctgccttcccgtcgccgctcccgaagcttttccagagaggaccctcatgctgcccctgaccgagggctcgctgcggctg

SEQ ID NO: 713861 - DNA, 80 bp, Homo sapiens
aagcactttaaagtcacaacaacgtctattgaaagcccattcaagagaatggggtactaagagaaaagcacgaagctgtg

SEQ ID NO: 713862 - DNA, 98 bp, Homo sapiens
ctccaattccttgttcgatgctagaaaactccttgggtccttttccacttttccttcaacaggtactttgacccagccaacggcaagttcagcaagtc

SEQ ID NO: 713863 - DNA, 80 bp, Homo sapiens
atcagtttctggaagaagaagaagagcatgatcggcatgtccaccaaggcagatccagagacaatggccccgatgggatg

SEQ ID NO: 713864 - DNA, 98 bp, Homo sapiens
ggctggattaagcgcctaattaggatggtttttcaacaagttggagtaagcatgcaatcgatataattgaccctgcaatcctgcgcccgggccgcctg

SEQ ID NO: 713865 - DNA, 95 bp, Homo sapiens
cggccctgagcgcactctggagggattctggcatcagggaggctttcagccggagaagcgagtttcagctgccaagatgatattgctaccattct

SEQ ID NO: 713866 - DNA, 50 bp, Homo sapiens
caatgtggtcccgacggctggccccctggacacagcattgttggttttgc

SEQ ID NO: 713867 - DNA, 99 bp, Homo sapiens
gatggctcctgtctatttcttctctctcagagactgcaggattggctaaaagatgtgtgtgaaaagaataagtggagtcacaagaattcccctatcatc

SEQ ID NO: 713868 - DNA, 75 bp, Homo sapiens
atgcctgcagagctgtggcttaccagggcagcggcagtgatgacacggagctgcggtactcgtcccagtacgagg

SEQ ID NO: 713869 - DNA, 100 bp, Homo sapiens
aagacccgacacaaggcagcttcccacagcaggttggacagttcacagcgttccacaaggctgggcgacagagagaagcggtccaggtgctggagcagct

SEQ ID NO: 713870 - DNA, 97 bp, Homo sapiens
tgccatcaagatgaactaactacagttaaccagccagctgatagcagatgcatgagtgagcccagctgagagcaggcaatggtggcttgctatccgg

SEQ ID NO: 713871 - DNA, 96 bp, Homo sapiens
gcggcagcggcggcggcgcgcgggtgagcggactgtgccctgtccacggtgcctcctgcatgtcctgctgccctgagctgtcccgagctaggtgac

SEQ ID NO: 713872 - DNA, 75 bp, Homo sapiens
gcacgtctctcctgagaactaccgagtaggtcgggcctgcctgtgtttggtgccctggttgtcagatgttggaaa

SEQ ID NO: 713873 - DNA, 100 bp, Homo sapiens
tgcaaaagatgattttacatccattattgggaaatgtcaaggcaggatggggaagcagaatagcaaactggcccctgaagtgatggaggacctggtgaag

SEQ ID NO: 713874 - DNA, 75 bp, Homo sapiens
gctctgctgagagagtgcaagccgtgggatatgatttttcttcagggaacagaggtcatatttaaagtggcttta

SEQ ID NO: 713875 - DNA, 97 bp, Homo sapiens
ggagctggtgcagcaggaattgggatcgtgtcgctgcggtgattttcttccacccccacctccacctctagatgattccagtgcccttccatctatc

SEQ ID NO: 713876 - DNA, 75 bp, Homo sapiens
tcagtactgatgcccagtggggcattcgtcttggtaaacttggtgtgtgcctacaggggttgtggaaggagacgc

SEQ ID NO: 713877 - DNA, 76 bp, Homo sapiens
atgagaactggttctacacgcgagctgatatccctcctaaatgtacaatcaaggatttgctaccaaaagagaagag

SEQ ID NO: 713878 - DNA, 100 bp, Homo sapiens
tttctccagtgctcatcttgttctcgagttttctctgccatgttgctattgcaggacggatgggatgaagctctcttgactatgagtaaaggagaaaagg

SEQ ID NO: 713879 - DNA, 75 bp, Homo sapiens
gacacccaggaggcatttgaagttccagcctcggcaagacgcgcaggaagaccagcgcgcgggatgcgtccccca

SEQ ID NO: 713880 - DNA, 100 bp, Homo sapiens
gaggaagacctactggagcagtcgcagtgagtttaaaaaaatggtttagaagttcatggacctataaggatgacccatgccaaaaatactatgagctctt

SEQ ID NO: 713881 - DNA, 100 bp, Homo sapiens
gcgcaaggtggactggctgactgagaagatgcatgccagagacttcacagtttctgctctggctgcagtgcagaaggcaattcctatgtacaaaattgcc

SEQ ID NO: 713882 - DNA, 75 bp, Homo sapiens
gtccagagctgaggactgcctgtttgcagaaggagtctcgctctgtcgccaggctggagtgcagcgacacgattt

SEQ ID NO: 713883 - DNA, 145 bp, Homo sapiens
cgaaacttgtcggctttcaagacatggagtgtgtgccttgtggagaccctcctcctccttacgaaccgcactgtatgcttcagaagtgtccttctgttgatgacttcgtaagtgccctcgtttccgacttggatctggacttcga

SEQ ID NO: 713884 - DNA, 100 bp, Homo sapiens
aactgccgaaggaaaatgtcactgtcccattggccatattttagaagagcagcattggaccttgcttaaatttgatactcttctaccccctggacgattg

SEQ ID NO: 713885 - DNA, 100 bp, Homo sapiens
aaaacaataatgcaccttatgatcaataacgacagtgtggcactgaaggggggccgtggcagtgcttccatggtccagaagtgcaagctgtgtgcaagag

SEQ ID NO: 713886 - DNA, 98 bp, Homo sapiens
aagaaggggctgtcctcgtcctccagctgttatctggaaggggatggagaagtttatgtttgggatgtgaactcaaggaagtgccttaacagatttgt

SEQ ID NO: 713887 - DNA, 75 bp, Homo sapiens
agaaagtatctctagtctttatgggaaacctcagcttgatgatgtatctcagctgctctgttaaaagcgaaaatg

SEQ ID NO: 713888 - DNA, 100 bp, Homo sapiens
acgacacatgcagtggcttctggactgcgcgatgactggacggaaagaccacagcaagattctttcattcgtctcctcctagcctgggggaccaggctcg

SEQ ID NO: 713889 - DNA, 104 bp, Homo sapiens
gaggccccttctcccaggaggggaggcactaagactttgaccccgacgcaggcttcagtgattgccgcggatcagaagcctgagcactttggctcgagacaatt

SEQ ID NO: 713890 - DNA, 90 bp, Homo sapiens
gttggagcgcggaaatctggaaccgggatggcgacgtctacactgagtcggaggcgaagaagccactggtgaaggaccgggaagctgagc

SEQ ID NO: 713891 - DNA, 76 bp, Homo sapiens
gagtctgccatcgtccaaggaggtggcagaaacttcagtgctctcaagaaggaaaatatttatgaaaacaataaac

SEQ ID NO: 713892 - DNA, 100 bp, Homo sapiens
tggacacttgtcatctgtgtactgtgtaacttttgatcgaactggcagacggatatttactgtaatgtttgaaacttaccagttttccggtgtatatgta

SEQ ID NO: 713893 - DNA, 74 bp, Homo sapiens
atatgtagcgaggaggaacgcgctaaggcaaagcacctgggagaagatgtcaaccggacactagaaggtggaag

SEQ ID NO: 713894 - DNA, 100 bp, Homo sapiens
ctctgcggcttctggttctcacttgtcgggccgttgctccagggagaactgcaaatatcttcatccacccccacatttaaaaacgcagttggagataaat

SEQ ID NO: 713895 - DNA, 50 bp, Homo sapiens
ggacaggcgacagcgacctgcggcagtgcctgaaacagtacatgcagctg

SEQ ID NO: 713896 - DNA, 54 bp, Homo sapiens
aggctggtcttgaacttctgacctcaggtgatctgcccacctcagcctcccaaa

SEQ ID NO: 713897 - DNA, 113 bp, Homo sapiens
cctctgctgaccccggggagcgtggactacgagttggcgcccaagtccagaatccgcgcgcaccgcgctggccaaatttcgcagtctcctgtgcacagcggagggtgaagcag

SEQ ID NO: 713898 - DNA, 100 bp, Homo sapiens
ctagaatcaaggatttcagcaacaatgcctctgttcaaactcccagcttctcaataggtttggcatggacaagatctatgaaggccaagtggaggtgact

SEQ ID NO: 713899 - DNA, 83 bp, Homo sapiens
atttgaagacgttccttgaggaggtttgaaaaatgagagggtccaagcctggtaagaatgtccagcttcaggagaatgaaatc

SEQ ID NO: 713900 - DNA, 74 bp, Homo sapiens
ttgagccatatattaccaatgttgaggaacaggttagcaccactgagagagtgtttcaggatagacaatatcag

SEQ ID NO: 713901 - DNA, 100 bp, Homo sapiens
ctaaagtaccttcataagttcttcaatatcccatttttgcagcttcagtggactaaagaggatggacatagaacttccacctctgctgtccctaacctgt

SEQ ID NO: 713902 - DNA, 81 bp, Homo sapiens
caaaggggactatcctctggaggctgtgcgcatgcagcacctggccctggccaacgtcaacattgggagcctcatctgcaa

SEQ ID NO: 713903 - DNA, 100 bp, Homo sapiens
cggcgccagctccctgccactgctcctggcccttgccctgggtttccatcttctacaggcagtcctcagtacaactgtgattccatcatgtatcccagga

SEQ ID NO: 713904 - DNA, 76 bp, Homo sapiens
tctagggaccctgctgaatagctggggctacaggcgtgtgtcactgcgcccaggaatatattaaaggaatctgtga

SEQ ID NO: 713905 - DNA, 90 bp, Homo sapiens
aaagaagtggacagcagtgccatcgcagcacatgtgtgtggccgcctcggacaagagacccagggggacttgatctcatcttcatgccag

SEQ ID NO: 713906 - DNA, 101 bp, Homo sapiens
tcctcaagttgatactcctccaacactggaaagcatactaaatgaggctgaagggtatgtgattggcagctgtattaaacacattccaatcgcaggacgag

SEQ ID NO: 713907 - DNA, 73 bp, Homo sapiens
tgaaggccaacattgagcgtctggaggagccatcagaagacctggtgccctatgacacggatctataccaacg

SEQ ID NO: 713908 - DNA, 100 bp, Homo sapiens
cgggactctcagcctatcaagtgtctgtaattaattaaccaactgagatccagttcaggggtgaaagttcttcaggtaccaatgctgaggacgctgggga

SEQ ID NO: 713909 - DNA, 82 bp, Homo sapiens
aatcttactgtactggaaacgtcaccggaatcaggaccgaggaattacatgaacgacagccttcgcaccgacgtcttcgtgc

SEQ ID NO: 713910 - DNA, 51 bp, Homo sapiens
acacacacctgtactcttccactcagcaattgcttgttcagagctcttggt

SEQ ID NO: 713911 - DNA, 100 bp, Homo sapiens
gaagaggcgtgggctcaagtacgagctcatctccgagaccgggggcagccacgacaagcgcttcgtcatggaggcagatgttagcagggatgaaatacag

SEQ ID NO: 713912 - DNA, 98 bp, Homo sapiens
gcccagcatgtcctcaactttctgggcgttcatgatcctggccagcctgctcatcgcctactgcacggagctggagtttgttcagatcatcatcatcg

SEQ ID NO: 713913 - DNA, 50 bp, Homo sapiens
tgaaatagttgctaaatatgacagagaaatgatctgctggaggattcccc

SEQ ID NO: 713914 - DNA, 100 bp, Homo sapiens
cccctctgaggaccgaagatgagcttcctcttgattgtcagctgacctctgtcctgtgtgcccagtggccccaggtgacgtgtcttcaagaagaggctga

SEQ ID NO: 713915 - DNA, 96 bp, Homo sapiens
tcgtgagaaagaaatcgacgtgctgttttcatagggcccgccatgttcatagaggataaagcagtagacaccctggcttacctcagtgacggtgac

SEQ ID NO: 713916 - DNA, 71 bp, Homo sapiens
gcggagcgccagctcaatgaagtccaggtgcaggtacagcagtctccgcaacaggtctcggctcagctctc

SEQ ID NO: 713917 - DNA, 133 bp, Homo sapiens
atgattgaacgatctgtggtggaagcagcagtccaggaatgcagtcagtctgttgatgaaactatgcttccattaactggcctgaacacacaaacccagcagttgctgatgactgtaaaggaaagaaaaccca

SEQ ID NO: 713918 - DNA, 100 bp, Homo sapiens
tctctccgacgcaagactgtcccggcccggtttgaacgccatgaccctgtggatgggagaattactgagaggcagtttggtggcatgctacttgcctaca

SEQ ID NO: 713919 - DNA, 80 bp, Homo sapiens
actttccaggtccactggtgtttggtgtacccatgtgactaatttgtccaaagagagactatttggagttttcctcgtct

SEQ ID NO: 713920 - DNA, 83 bp, Homo sapiens
ggaggaggtgaccacgcgcgagaaaaaggagaagcgggctctagggaactggaagttgctggccaaaggtctgctcatcaggg

SEQ ID NO: 713921 - DNA, 96 bp, Homo sapiens
gactctcaactccacaggcgcctcctgccaggtctgctcctcggtcgcccacccgcctgcccgccatgtgcgagaacgtgaaggcattcttcagcc

SEQ ID NO: 713922 - DNA, 82 bp, Homo sapiens
ggcttcggagcgggagtgttcgttgtgccagcgactaaaaagaggtcctcagaatggttggaatgaccctccagctttgaac

SEQ ID NO: 713923 - DNA, 98 bp, Homo sapiens
cgcaaggtgtccacgtcgggtcagatccgacagaaggtgtatgcaacagcgttattgcaacaggctaacgaaaacagacaaaattcaactggaaaagc

SEQ ID NO: 713924 - DNA, 50 bp, Homo sapiens
tatcgggaaagcctatattggtgttctccagcatttggctcaaggcccca

SEQ ID NO: 713925 - DNA, 75 bp, Homo sapiens
gaacagtgagggatacttgtacacctcggtgtggtcactcacctgtctaccactcccgtgaaatggcagctcgtg

SEQ ID NO: 713926 - DNA, 74 bp, Homo sapiens
atttagagtacagattttataaacagcttggcagtgcagctcctctggtgcaagtgtggtagctattgacaaca

SEQ ID NO: 713927 - DNA, 74 bp, Homo sapiens
ccatcttccaagatccatctgccttctgcataggccaaacaggctggttggaaggaaaatcatgcaacattcat

SEQ ID NO: 713928 - DNA, 75 bp, Homo sapiens
ctccgaaaagcgtttccgcagacagaagtggggagaagcggaggtcccagcatttgagggtgatgatggattctg

SEQ ID NO: 713929 - DNA, 102 bp, Homo sapiens
atctacctccatcaggaccccagatgtctgacagccctgtgtgacaccaagataagtaacgtaaaaccttgttagccaaagcagtagcaaaccaaacctcag

SEQ ID NO: 713930 - DNA, 100 bp, Homo sapiens
ctctcgcatcaggtggccgggcacatgtacgggaaggacaaagtgggactaccgaccagactcccggaaatcatgttggtaggatcccagtctttttcgc

SEQ ID NO: 713931 - DNA, 100 bp, Homo sapiens
caaagtggcagtcgcattgtctctttttcttggatggttgggagcagatcgattttaccttggataccctgctttggataatcctccaaaaggagctttg

SEQ ID NO: 713932 - DNA, 50 bp, Homo sapiens
ctggcctgcggcgcctgggcgctctgaggacactcatgaggaccatgata

SEQ ID NO: 713933 - DNA, 100 bp, Homo sapiens
ggggaatatgcggcgcgcgtggatcctgctcaccttgggcttggtggcctgcgtgtcggcggagtcggctaactcaggtgagatggagccgctatagtcc

SEQ ID NO: 713934 - DNA, 74 bp, Homo sapiens
ttgtgaagtggataggacatcatctggcgatttgatgaaactgttatcgaagagagaagacaatgtgctgaaga

SEQ ID NO: 713935 - DNA, 115 bp, Homo sapiens
cctcaaggttgaagcagaagaataaggagaaggataagtcgaaggggaaggcgcctgaagaggacgaagctgctacaggagctgagagaccctaccctcactttccgtctgcttg

SEQ ID NO: 713936 - DNA, 83 bp, Homo sapiens
cgagcgcgagcggcgcgagaaagtttggacctcctgcgtacagacggtttagtagtggtggtgcctatcccaacatccccctc

SEQ ID NO: 713937 - DNA, 100 bp, Homo sapiens
atttggatggatgtcgaccatgtgactgtgaccttgggggagccttaaacaacaggtctcctaaaaacccagaacagaagatcattaagagagtgattgc

SEQ ID NO: 713938 - DNA, 96 bp, Homo sapiens
ctctatccatctctcgaagacttgaagccgaggcctgcctggagccccagatcaccccttcctactacaccacttctgacgctgtcatttccactg

SEQ ID NO: 713939 - DNA, 101 bp, Homo sapiens
tggaagtggttggaaatggcacctatggacaagtctataaggttctccaaaatacttatcattcaggttgaataaaccagttctacagactgcttcttcca

SEQ ID NO: 713940 - DNA, 50 bp, Homo sapiens
caagctcgtagcctgccactccgtgcatgatatcatcaagttgaatcgaa

SEQ ID NO: 713941 - DNA, 74 bp, Homo sapiens
aactctgtccagttttcaaaccacacaggaggatacgaagcgttttcggcttcctgcccggagctgtgcagcaa

SEQ ID NO: 713942 - DNA, 100 bp, Homo sapiens
ctgacagccccggattattctgcctttgaactgcaagctttcttcctggtggcagatgacatcatggattcatcccttacccgccggggacagatctgct

SEQ ID NO: 713943 - DNA, 75 bp, Homo sapiens
ggatgggtccatcactgtgaccctggcagcgcaccaggctattggcctcaaggttgactatagtcaatggggcca

SEQ ID NO: 713944 - DNA, 75 bp, Homo sapiens
gtccatccgcgacctcatgccaaagaccatcatgcacctcatgatcaacaatggaaatgtttcaacgtgcgcaag

SEQ ID NO: 713945 - DNA, 75 bp, Homo sapiens
caggagccaccacaagatccaccaccagatcagaggctcagagatttgattagaactatccgggacccagaaaag

SEQ ID NO: 713946 - DNA, 100 bp, Homo sapiens
aggtccagatgaaagagaagtttctggtcactccccaggattatgcgcgagcagcccgacggccatggaggctgaagagacgatggaatgccttcaggag

SEQ ID NO: 713947 - DNA, 82 bp, Homo sapiens
acggcgtggaccacatagacatttacgcggatgtcggcgaagagttcaaccaggtgccagaaccctgtggagcatcatgaac

SEQ ID NO: 713948 - DNA, 90 bp, Homo sapiens
ctgcccgcgctcgccgcacgaggattatatctgtccaagatgcgagtctggttttatcgaggagcttccggaagagaccaggtaatgcag

SEQ ID NO: 713949 - DNA, 74 bp, Homo sapiens
acgccgtgtcaccttggaagtccagcgcagtgcccactaaacacgccaagggaggtctgagcagagggaggccc

SEQ ID NO: 713950 - DNA, 75 bp, Homo sapiens
agaaggaggccgttctaagggaaggcacaggcagaggtggaggggctgggcaagggggtcgcccggctctctgcc

SEQ ID NO: 713951 - DNA, 100 bp, Homo sapiens
tggctcattcaccaccgtaaacactcgcgtcccatcgtcaccgtgtgggagcgggagctgcggaaaggtgaagcatatatgcgtttaagcaaactccccg

SEQ ID NO: 713952 - DNA, 100 bp, Homo sapiens
tacatcacagagctgcggcggcagcacgcgcgggccagccacctgggcctggccaggaggagacccttgtccccggccaatgtccctgctctgcctggcg

SEQ ID NO: 713953 - DNA, 100 bp, Homo sapiens
tcaacttcaaagacgttctcaaggagaaggcagacctggtcctccgggcctcatatgaacaggagaaagaagcgcttacccactctttccgggaggccag

SEQ ID NO: 713954 - DNA, 90 bp, Homo sapiens
agcagcgccgcgggcccttcagagtggccgcagtccgagctttgccctcgcatcctgttccaacgcggtactactgagcgagtgtgcttg

SEQ ID NO: 713955 - DNA, 76 bp, Homo sapiens
ccaaggacagcttttttcctgcaagatcctcagtttgtggtctgccagctaaaggtgaagatatattcctccaatt

SEQ ID NO: 713956 - DNA, 90 bp, Homo sapiens
cccctacgcgctacacaagtggagctccttttcctccacctaccttcccgaagccatcacattggagaatcagctggtgatcctcgccac

SEQ ID NO: 713957 - DNA, 100 bp, Homo sapiens
tggcaactgtatgatagaagctatataaagtcaagtgtccattttctttcaactatatttgagcatacccaggtatttggctcgagtaggggagcttgaa

SEQ ID NO: 713958 - DNA, 119 bp, Homo sapiens
caatagccacttcacacatggagagatgcaagaccagtccatttggggaaatccttcggatggtgaactcattagaaacattcaatccacgtcaaggaagagccagtgattgcagagga

SEQ ID NO: 713959 - DNA, 100 bp, Homo sapiens
aaagtacgtggcatgcctagaagaacttcgtgaagctctggagatctcccccttcttcaagacccacgaggtggatttagttttggagaaggaggtggct

SEQ ID NO: 713960 - DNA, 100 bp, Homo sapiens
caaaaagaaactggagccaccatcaagctgtctaagtccaaagatttttacccaggatcaaaatacttgctggatggtggactcagagaccaataaaaat

SEQ ID NO: 713961 - DNA, 100 bp, Homo sapiens
ctgcagcgacctacccactacaatacctcttgggactgggctcgatttgaggtccttgaatgggcaagagggcacatgaagtacggcgtcctccacattc

SEQ ID NO: 713962 - DNA, 100 bp, Homo sapiens
ccggccgctaccgctcaggtgctgcaggcacagcccgagaaaccgcagcactacacaagaacatgagctgcctgtggacatggaaaccatcaacctggac

SEQ ID NO: 713963 - DNA, 100 bp, Homo sapiens
ccgacggggcggccgggggctcagagatccaagtgcgcgccctggcgggtccggaccaaggtgacacccagggcagctacactcagaagccacaaggaat

SEQ ID NO: 713964 - DNA, 89 bp, Homo sapiens
ccgaatatctttgcctatgcctgtgatttttctccaagagccattgaatatgttaaggccagaagcggactcctagaagaggggagcag

SEQ ID NO: 713965 - DNA, 100 bp, Homo sapiens
atctgttttcctaaaagactgaaatgggggcgaccattcttaggttggaaaagagactgttcaaaccactgaggatcagattttgaagagagatatgcca

SEQ ID NO: 713966 - DNA, 75 bp, Homo sapiens
caacttcaaccctcacttcgatttggaggacagagactgcaaaaactgggagtgatttttccatgtttgaagctt

SEQ ID NO: 713967 - DNA, 74 bp, Homo sapiens
gttttctgtaccccttagtaggaacggtgtgatccctcacatccacaaatctctgattggaaagaagggacagc

SEQ ID NO: 713968 - DNA, 117 bp, Homo sapiens
cccgtgtcctgcaggtattgggagatccacagctaagacaccgggacctcctggaagccaaaaatggtgcgcttcccttcccacttcagctctgacttgaaggacctgctgcggaac

SEQ ID NO: 713969 - DNA, 83 bp, Homo sapiens
cgagtcactgtcctggtacaaggatgaggagcaaacggggattcagcgtccgatcctttggaacagggactcacgtgaagctt

SEQ ID NO: 713970 - DNA, 96 bp, Homo sapiens
ggccctgtgctgtggtcctggcccagtacctttggtttcacagaagatctctgccaggcaaggccatcttagaggatcatgaggatgagaatgaag

SEQ ID NO: 713971 - DNA, 89 bp, Homo sapiens
gaaagcaggaggaggtggcggcggcgggaagatcccgagcgggaagaagttccgcagcaagccgcagctggcgcgctacctgggcggct

SEQ ID NO: 713972 - DNA, 100 bp, Homo sapiens
gactgtgcaaagaagattgttaaaggtttatcttgcagattatggactttcctacagatattgtcccaatgggaaccacaaacagtatcaggaaaatcct

SEQ ID NO: 713973 - DNA, 98 bp, Homo sapiens
cggcccaaggccatctacctggacatcgatggacgcattcagaagctgacgggtcgcctcatgctggccgtgggaggagcagtgcttggctccctgca

SEQ ID NO: 713974 - DNA, 108 bp, Homo sapiens
ggcggctcagttgtccatgaccctgaaggtccaggagtacccgaccctcaagagggcctgaaggtgcaggagaacgaggacaaccttgctctcatccacgccgcccgc

SEQ ID NO: 713975 - DNA, 75 bp, Homo sapiens
cgccacttccgcgagcccatccgtctcaagactgtgaaaccagaaagcataacccctactgtagaactaaatgca

SEQ ID NO: 713976 - DNA, 100 bp, Homo sapiens
gagatagcccagtgcctagtgtctgtgccgcctaccaggcagagcctgaggaagctgaagcagaggtttcccagtgccggtggtggtgtgcacattgagc

SEQ ID NO: 713977 - DNA, 83 bp, Homo sapiens
gaagaagctaaaccagatggagaaaaagatccagattttaatcaagtcatcatcagatttgaaatatttaaagtggatacaaa

SEQ ID NO: 713978 - DNA, 89 bp, Homo sapiens
gcgagcggcgagccggagcgcggagcccggctcccgcaccatggaggaggacgacagctacgtgtgtgttttaatagaaaagttgtcac

SEQ ID NO: 713979 - DNA, 102 bp, Homo sapiens
gcggggctgaagaagcagttctacaaggcgagccaggccgtaagttcatcatcgccaacgctcgggtggagaactgcgccgtcatctactgcaacgacggct

SEQ ID NO: 713980 - DNA, 100 bp, Homo sapiens
cgcagtggtcgcttcttctccttgtgacacctcacactcagtgccggttaaaattactgaagttagagagaattaaagactatcttctcatggaggaaga

SEQ ID NO: 713981 - DNA, 100 bp, Homo sapiens
agctgcggcgagtcctgagcggccaggacgacgaggagcagggcctgactgcgcagccatcgacgagtacaagccccaggatgctaccaccaacccgtcc

SEQ ID NO: 713982 - DNA, 75 bp, Homo sapiens
ctgtgacctgtggagacacggccagatctgccctccagctggaagtgatggagagagtattggaaactgtccctt

SEQ ID NO: 713983 - DNA, 100 bp, Homo sapiens
catgtttgatgtggaaatgcacaccagcagggaccatagctctcaggctgagtatgagtttatcagctctggtctctacctagtggtgttattgcacttg

SEQ ID NO: 713984 - DNA, 50 bp, Homo sapiens
tgagattggtttcattccagatttacatcatgctgatgacagcttcctgg

SEQ ID NO: 713985 - DNA, 96 bp, Homo sapiens
ttttgcataaacatggagaaaagctctacactggactaagagaagttgttaccgaacatctcataaataagagctccaaacgagaatggaagccgc

SEQ ID NO: 713986 - DNA, 100 bp, Homo sapiens
cctgcttgtctgactgcaagttttttaaagaaaagtgagaaagatcagtctaaagaaaaggagaagaaagtgaaaaaaacaattccttcctgggctaccc

SEQ ID NO: 713987 - DNA, 100 bp, Homo sapiens
gactccgtgttcatcagcatcaaatggctggtgcagcatggaaacacggatttgagctcattactccaattttcacgctgagtttggaagggtcctagag

SEQ ID NO: 713988 - DNA, 88 bp, Homo sapiens
cagccgctgttttgccggaggagcccctcaggccgtctggggtcctgaggctgctggcagactatgggtacaacggccagcacagccc

SEQ ID NO: 713989 - DNA, 74 bp, Homo sapiens
cacgtagcccggcgctcggcatggctctcctggtgctcggaaatttggtgagcggcctccacctaaacgactta

SEQ ID NO: 713990 - DNA, 98 bp, Homo sapiens
gccaatgtggacggactcactgccctgcaccagatgcagacaacatatgttttacagagtcttcatttgaggattccagaaatttcaaatattacaac

SEQ ID NO: 713991 - DNA, 100 bp, Homo sapiens
tttgagggaagaaacacagttcacaggttcttgggtgtctctggggagtccctgggccagaccttcctccagactccagcccacctcttcggagcagctc

SEQ ID NO: 713992 - DNA, 82 bp, Homo sapiens
tcgacagtgggcctatgccccctgagagtcaagtttacccatgggggaactggttccagccaaaccgcaccaacctgtggca

SEQ ID NO: 713993 - DNA, 99 bp, Homo sapiens
aaggtcaacaaggacaacaatgagatcgtggacaagatcatgggcaaaggacagatccagaaagtctgcaccaaatgtgggatcgaggcctcccctggc

SEQ ID NO: 713994 - DNA, 100 bp, Homo sapiens
cccaagtgcattgcctttggaaacgagatactcctgggcatggaagtggatgggctgagactcctcgaacagatcgaggtggagattctattggtgaaac

SEQ ID NO: 713995 - DNA, 100 bp, Homo sapiens
caaagttccgaatagggatgaggcatacgtggtatgatctcgtgaaaccttgagagaaactgaatgacgaatgaaactattgttcctgtttcacacagaa

SEQ ID NO: 713996 - DNA, 100 bp, Homo sapiens
ctgattgaccaagatgctcggaaaattttaagagcttgcattgaacaagtgaaaaagtattcagaattctatactctccacgaggtcaccagcttaatgg

SEQ ID NO: 713997 - DNA, 97 bp, Homo sapiens
tggctcaggagtcagtattttagcagtccattccaaagacaactataaacgagtgactgggacaaggctgctgagaactagccctagacctctgcgt

SEQ ID NO: 713998 - DNA, 83 bp, Homo sapiens
gagtatttcaaccataaagacatcttaattgggcacgaaagagcttatgttcctgaggaagaattgaaggcagcagaaataga

SEQ ID NO: 713999 - DNA, 90 bp, Homo sapiens
cctgagagaacagattcttcgagttaaagacactgatgatcttgacaaaagtaagctgaagccaggaacaagagttgctttggatatgac

SEQ ID NO: 714000 - DNA, 75 bp, Homo sapiens
agcaagatggcaaccccggcggcggtcaaccctccggcctacttctgcttcctcctggccgctctgggtgtgaca

SEQ ID NO: 714001 - DNA, 51 bp, Homo sapiens
acgctgacacttgtgtttgaatatgtgcgatcaccagaatataccaattgt

SEQ ID NO: 714002 - DNA, 95 bp, Homo sapiens
ggacggtttcgtccgcatcgaggacttcatccagtttgctacggtctacggggcagagcagaagggtgatgatctggaggagggtgtcacaagtg

SEQ ID NO: 714003 - DNA, 100 bp, Homo sapiens
gcaagaacctttccaatgggctgttgaacttcagttatcctgcaggcacaggagtcaaattgactttatcagctttaatcgatgggaagaacttcagtgc

SEQ ID NO: 714004 - DNA, 50 bp, Homo sapiens
cgtgtaaatgccattgaacatgcctgaagagttgagagaaatcattgaga

SEQ ID NO: 714005 - DNA, 74 bp, Homo sapiens
ccagctcagtgccgccagccatcaacagtattgggagcaatgcaaacacagatacgtggttgcagtaggattgg

SEQ ID NO: 714006 - DNA, 100 bp, Homo sapiens
aacctgggtgcgttcagcggcattcaacaaatggcaggttactctggccaggacttcgactgggcagattatcacaagcagcatggggcgcaggaagccc

SEQ ID NO: 714007 - DNA, 74 bp, Homo sapiens
agattgttcctaaaccagaagaggaggttgcccagaagaaaaagtagtgagttgaaactcttggaggaagcaac

SEQ ID NO: 714008 - DNA, 100 bp, Homo sapiens
gagatactgtctgcgacatgtggaaaatgacggttataagaccatttatttctttggagacaaaactatgccatgtggaaggggagtatgtcccagtgga

SEQ ID NO: 714009 - DNA, 98 bp, Homo sapiens
aggcaagagcctcaaactcaacactgcagaagatggcaaaatacatatctcagtgcattgatgagatcaagcaggagctgaagcaggacaacatagcg

SEQ ID NO: 714010 - DNA, 83 bp, Homo sapiens
tgagcaggcacgtgcgctcgcatggttggggtgactcagtgggaacgccatctgagcggggcatgacctatgacgcactccac

SEQ ID NO: 714011 - DNA, 101 bp, Homo sapiens
cacagaaattaatgcgaacagacagacttgaggctatggagttactagtagagaaagcaatcagcagtgcttctagccctcagagccctggggatgcactg

SEQ ID NO: 714012 - DNA, 100 bp, Homo sapiens
cctggagtctgcgaaggccgggacccggttccccggcccacagtgggggtgtgcaaacccgagagaactgggcaaagtgtttcatggatttcaaagctgg

SEQ ID NO: 714013 - DNA, 95 bp, Homo sapiens
caaactgaatcctctaaaggccccatacaatgaagtagacattggtggaaacatttactcttttgaaacagatggtcaccatgtttagatattag

SEQ ID NO: 714014 - DNA, 96 bp, Homo sapiens
ggacaattcaccatagttttctttaaggtgctggaaacatgcatgaagagctgcggcaagcggttccacgacgaagtgggcaagttccgctttctc

SEQ ID NO: 714015 - DNA, 107 bp, Homo sapiens
gcctgaaccgcctgcaacagcactcagacacagagaagcatgagggggagaaacgacagtgtggacaacagtgagtatatgcggaatggagacttcttacccaccag

SEQ ID NO: 714016 - DNA, 90 bp, Homo sapiens
agatcgcaacgaacgaaataaaccagaacatcgttcttcaaggattgaatatgatgcatatcgcactgatttggaagaactgaatcttgg

SEQ ID NO: 714017 - DNA, 82 bp, Homo sapiens
aaagcaattatgaaagaagtcattccttttttgaagaatatggaaggctccatgttgacaatcagctttggaagttggatgg

SEQ ID NO: 714018 - DNA, 96 bp, Homo sapiens
gagtgagttttgtacagctattcgagagtttggaaattttagcattcaggtgccaggaatgcagatgggacagccagtgccagaaacaggcccagc

SEQ ID NO: 714019 - DNA, 74 bp, Homo sapiens
ggaggcggtggctgcggttgcgggaccgtaagactttgaccccgacgcaggcttcagtgattgccgcggatcag

SEQ ID NO: 714020 - DNA, 97 bp, Homo sapiens
gagaacctgaccgacctccatcagtacagagtgaatcagacgtcccaatagatgtggagacggtcacatcaacgcctatgccactctatgacaatca

SEQ ID NO: 714021 - DNA, 74 bp, Homo sapiens
tacatcaaggcctccggcagctatgcagagctccacgcaggagatcggtgaggagctgatcaacggagtcatct

SEQ ID NO: 714022 - DNA, 98 bp, Homo sapiens
gcattttcccgcgtgcgtgtatgccttcaattaagttgcagagttctgatggagagatatttgaagttgatgtggaaattgccaaacaatctgtgact

SEQ ID NO: 714023 - DNA, 100 bp, Homo sapiens
caagcaggcagaatttggacgccgggagattgagattgcagagcaaggtttgaaagagaagatagtgaggagctttgaagtctccccagatgggtccttc

SEQ ID NO: 714024 - DNA, 100 bp, Homo sapiens
gatcctggagcactcggtcatgtacccggtggactcggtgaagatcaaagtggtcaaagcgttccatagttccctccacgaaagcattcagaaaccctac

SEQ ID NO: 714025 - DNA, 75 bp, Homo sapiens
aggagtgggctgggcggaagagcagagtggccactgcgctcaggtatcattgcccagtgcctaagatcttttatg

SEQ ID NO: 714026 - DNA, 100 bp, Homo sapiens
gggcagagcctcgcctgggttctggaggctgcggggccatcgctccagctggcctgctgctgtgggtctgcaggctgctctctctgctgtgattgctgcc

SEQ ID NO: 714027 - DNA, 82 bp, Homo sapiens
cttctccgctgcgtgtaggtgaagggggcttcctgaccgaggaagcatctgtagctcctttgctggcatggcagacagtgac

SEQ ID NO: 714028 - DNA, 100 bp, Homo sapiens
gaaattttaaaaaattttccaaaagagagatgaaaacctcggatcaattctcagctggtggcacaacaagtggcacaacagtatgccaccccaccacccc

SEQ ID NO: 714029 - DNA, 75 bp, Homo sapiens
tgccagaaatgaaggttcagttatgaggcaaccctctagcttccaaaatctttagagaagcatgaaaaagatttg

SEQ ID NO: 714030 - DNA, 97 bp, Homo sapiens
cccctatcctatccgcaaacaccaagaccgaggataggtgtggccattggcgaccagatcctggacctcagcatcatcaagcacctctttactggtc

SEQ ID NO: 714031 - DNA, 75 bp, Homo sapiens
gatatgtgcctggatgcagctcacctccggtcccgcggcagtgctggtggccatggttcccgtagccagaaggag

SEQ ID NO: 714032 - DNA, 100 bp, Homo sapiens
cacagtaaggccaaaaatgtgcatactcacagagttagagagagggatggtggacacccatcctgtttgaaattttgtcctgaattaacaacaaatgtaa

SEQ ID NO: 714033 - DNA, 75 bp, Homo sapiens
tggaatttagcgctcgcccagctagccgcaggatggtgctgctccactggtgcctgctgtggctcctgtttccac

SEQ ID NO: 714034 - DNA, 100 bp, Homo sapiens
acttttgttaccaaaggaatcagactgaacctccattgaatactccagaaaacagggaatatactgctgaaataatgtttgagtccttcaatgttccagg

SEQ ID NO: 714035 - DNA, 82 bp, Homo sapiens
tatagtgaaacccaagagctactgaggacagaaattgttaatcctctgagaatcaacgaagtggtgaatctgttaaagtgca

SEQ ID NO: 714036 - DNA, 98 bp, Homo sapiens
aaacgtccagctctacattaaagtttctaatatctcgaaatgcggctgcttttcaaggtcctagcagaagatgtgactcagactgcctctgggtgggg

SEQ ID NO: 714037 - DNA, 97 bp, Homo sapiens
acaagttaacccttgagtctttgtaccaggctgtttgtgatcgtatcaggtctgtagcatctctgtctgttggagaaggcacaggtgtcagagcacc

SEQ ID NO: 714038 - DNA, 100 bp, Homo sapiens
cttccctccatccgttccagggacctcaccctcgggggagtcaagaagatatccccaaggctcctggcaaaatcatcccaagcagaaacacagacacctc

SEQ ID NO: 714039 - DNA, 100 bp, Homo sapiens
ccaccattgctgtcaagtacactcagtctaactctgtgtgctacgccaagaacgggcagcatgaagcttgcaatcatgggcacctgaaggtagtggaatt

SEQ ID NO: 714040 - DNA, 100 bp, Homo sapiens
aagaagtcactgaacttaggagaaagtatacagaattacagctggaaaacaacaaagtcaggcgttttgcttttgagctcaagatgcaggacaaaagtag

SEQ ID NO: 714041 - DNA, 80 bp, Homo sapiens
cttcccaagatggctgatgtctcagcagaagaaaagactgttggcaagagtagcaagatgctgcagcacattgactatag

SEQ ID NO: 714042 - DNA, 83 bp, Homo sapiens
caagatgctatgtgagatcttgaaagtgggcgagttgcgatgcaacctgaagatcttcaacaaccaggagttcgctgccctcc

SEQ ID NO: 714043 - DNA, 97 bp, Homo sapiens
gcgaacctcgagaccaacgtggaggagctgtgggtggaagacagggaagttggacccccactacccaaaagtctgcgggcacagaggcaacgttttg

SEQ ID NO: 714044 - DNA, 82 bp, Homo sapiens
gacgttgtggagatggggagcgtcctggggctgtgctccatggcgagctggcttttcactagttctgtgcagatgaatccca

SEQ ID NO: 714045 - DNA, 98 bp, Homo sapiens
gacgggcgctttggagccggccccaggcagcgtgtgtcggtcgcctagtctggagaactagtcctcgactcacgttccaagatgagatgggattctcc

SEQ ID NO: 714046 - DNA, 100 bp, Homo sapiens
cacagcatcctccagcacctcagcatgtcaatccaaagaagcaaacaataggtaattcttgtaaagcctgtggctatcgaggcatgcttgacacacatca

SEQ ID NO: 714047 - DNA, 90 bp, Homo sapiens
acttattcctggtacccttcatggacagtgaagcagagagtgaaaacccaccaagagcaggaccaactacctccgtcagcaagaacccaa

SEQ ID NO: 714048 - DNA, 100 bp, Homo sapiens
cgaggagcccagggacacacgccttcaggtttgctcaggggcgaggattaaatccaccacacagggtgaaatctatctccatgacaacattcacacaaca

SEQ ID NO: 714049 - DNA, 90 bp, Homo sapiens
ttataatgctcgcagataagcatgctagccaggagtggtggctcacacctgtaatcccagctctgggaggccaaggccagtggattgctt

SEQ ID NO: 714050 - DNA, 100 bp, Homo sapiens
gctgccggaaggggtcccgaagccccctgcaggaactctacaacccaatccaggtgacaaacagcatgtttggtgcttcaagaaagaagtttgtagaggg

SEQ ID NO: 714051 - DNA, 98 bp, Homo sapiens
tcaacttcaaagacgttctcaaggagaaggcagacctggtgatgtgaaatttgaaagtaaagaacgaacagcatgtaaaggaaagattgccatatcag

SEQ ID NO: 714052 - DNA, 101 bp, Homo sapiens
gttcgattattagctttagtgaaatgggctaataatgctggcaaagtggaaaaatgtgcggttcagcagactgtacaggatctttttggcagagccccaag

SEQ ID NO: 714053 - DNA, 100 bp, Homo sapiens
gaattggagaatatgatgtcaagtatccagccttgatacccattaccactgcctcctttattgcagcaggaatttgttccggtgtctcgcccggtcctca

SEQ ID NO: 714054 - DNA, 100 bp, Homo sapiens
atcagtttcatgaaggagctcatgcagtggtacaaggaccagaagaaactgcaccggaaatgtgcctaccagaaaaagcttgtggtgaaggggggcaaaa

SEQ ID NO: 714055 - DNA, 96 bp, Homo sapiens
aacaagcggcgcttcccggggctgcggctcttcgggcacaggaagcaatgcctgtgtgcccaggccatgcagcctgctgtgcctgcccaaggccaa

SEQ ID NO: 714056 - DNA, 100 bp, Homo sapiens
accagcgtcctggtggtgtccagtctctcacccctgtgcgtgctgctctggagggaactcacaggcatccaggccaagatcaaggctcgagatcttcgcg

SEQ ID NO: 714057 - DNA, 75 bp, Homo sapiens
agctgagtggttgtgtggtcgcgtctcggaaaccggtagcgcttgcagcatggaaggtgggagtcaatcattttg

SEQ ID NO: 714058 - DNA, 74 bp, Homo sapiens
ccgctgccggtcgggggaagagacctgacagatgtcaagccctccaacatcctagtcaactcccgtggggagat

SEQ ID NO: 714059 - DNA, 75 bp, Homo sapiens
agaaattctcctacctcagcctcccaagtagctgggattacaagcttcctggacaagatcgacgtgatcaagcag

SEQ ID NO: 714060 - DNA, 100 bp, Homo sapiens
gggtgcggataagggacccgacactgatgccaggagtggtggctcacacctgtaatcccagctctgggaggccaaggccagtggattgcttgagcccagg

SEQ ID NO: 714061 - DNA, 100 bp, Homo sapiens
cgcgagggccctgggcaaggcccgacaggagccgaggaggtgctgctgctggcccggcggacggacctacggaggatctcgctggacacgccggacttca

SEQ ID NO: 714062 - DNA, 100 bp, Homo sapiens
gcgaagctggccaaagcctgcccagacggctcacctgtgcgggatggaacaaaagggagcagattaagcgagtaaaagactcggatgatgtacctatggt

SEQ ID NO: 714063 - DNA, 100 bp, Homo sapiens
gtcggcgctgggcacggtagcaggcgccgccgtgctgctcaatggtgtttccccaggatctgctggagaaaggcctcgaagcaaacaactttgccatgct

SEQ ID NO: 714064 - DNA, 101 bp, Homo sapiens
cccggatgagtacgataccgaagcgggctgtgtgccccttctccacccagagcaaacagtgacgaatctcagcttctgacaccaggaaagatgagtcagcg

SEQ ID NO: 714065 - DNA, 80 bp, Homo sapiens
ctccttttccctctccctttccctaagcagacggactggactgagccctggctcatggggctggccaccttccacgcgct

SEQ ID NO: 714066 - DNA, 51 bp, Homo sapiens
acgtcatggaggatgaacgacagacaatgcagatcttcgtgaagactctga

SEQ ID NO: 714067 - DNA, 76 bp, Homo sapiens
caacatcctcctggccaccgactcctacaaggattctcagtaagttaagtcaggaaatcaacaagaacgaagagag

SEQ ID NO: 714068 - DNA, 75 bp, Homo sapiens
ctcatcatcccccccgacgccgtcgcggtggactgcaaggctgaccccgcactacatctacccaccagccatcgt

SEQ ID NO: 714069 - DNA, 90 bp, Homo sapiens
cttccagctgaggctgtttgaacaggatgctgagaagtatttgtgtggaagtaatcgaaaagacaacatatttattgatcctggatacca

SEQ ID NO: 714070 - DNA, 100 bp, Homo sapiens
cacgatgttgaacatgtggaaggtgcgcgagctggtggacaaagcgttgaattgaccaaagcaatggtgatggagaagcctagtcccctgctggtcgggc

SEQ ID NO: 714071 - DNA, 51 bp, Homo sapiens
agtctgactacttgacacactggctcggccagcgatctgtacatgagaccc

SEQ ID NO: 714072 - DNA, 75 bp, Homo sapiens
gggcacagcatgagatccaaaggcagggcaaggaaactggccacaaggctttgttcgcgggggtcacagctctca

SEQ ID NO: 714073 - DNA, 99 bp, Homo sapiens
ttgaggacacttgtggagagctcgaattccagaatgatgaaattgtattgtgcttcaagaagaccatagggaagaacgcattttcatcttgctgcaaaa

SEQ ID NO: 714074 - DNA, 51 bp, Homo sapiens
gcatgacgtgcaggtctctagcgcaatttcagaaactgtggaggagtgtca

SEQ ID NO: 714075 - DNA, 98 bp, Homo sapiens
ctgcgccgagtggacgcctaccgcatctacttgagttttgcggcctccaggtggtggatccaatttttcattaggttttgatgaaccaacagaacaac

SEQ ID NO: 714076 - DNA, 90 bp, Homo sapiens
gcaaaagcaaagacccctcggggctgctcatctctgtgatcagggccatgtttatgagtggactaagtgaaagcaaacaaacccatgtac

SEQ ID NO: 714077 - DNA, 100 bp, Homo sapiens
tggataccaaggtcctaccaagatgacaaaagaagagttaaatgccctcaagtcgacaggggatgggaccctagggtgttaaataccacattatttgaaa

SEQ ID NO: 714078 - DNA, 98 bp, Homo sapiens
ggtggggagacagcatgccactgaccctatcagatttggatatgtccttcatatttgattggatttacagtggtttcagcagtgtgctacagttttta

SEQ ID NO: 714079 - DNA, 100 bp, Homo sapiens
gaaggggccagtctggagacagtcaagtgaagcagccgacacgagtcgttgttcataaaacagcttttgaaagttgagagcacacccctggagaaccgac

SEQ ID NO: 714080 - DNA, 75 bp, Homo sapiens
gccatgagggccgggcccagtcaccgaccaactgaaaagctccatcattggcaagaagaagccagcagcagctaa

SEQ ID NO: 714081 - DNA, 100 bp, Homo sapiens
tctggcggacgctcaagtacctgtggaccgtgtgctgccactgcgggggcaagacgaagacccctgagccccttccagtgctgcctgaggtgccctctac

SEQ ID NO: 714082 - DNA, 96 bp, Homo sapiens
tcgtgtggttagccaatcattgcagcattacttagagctcggaaggagccataagtgtgatccttggtgacaggtggaagaaaatgaagaatgaag

SEQ ID NO: 714083 - DNA, 90 bp, Homo sapiens
aggtttctgacgctagcatcagcacatgtaggggtctaagatgcatcaaattgcaatttggaggagaggcagcacaagcagaagcctggg

SEQ ID NO: 714084 - DNA, 99 bp, Homo sapiens
cgccgcgcccccctccaccccggccgcgcccaagcgcaggggctcctcgggctcagtgggtgtattacctgactgcttaaccgatggctctgatgtggt

SEQ ID NO: 714085 - DNA, 96 bp, Homo sapiens
gatccagccctgccattcagagtcaggaaaatcaagacttgtccagttacatgggaataactgggaacacaagtccatttggacagccctttagtc

SEQ ID NO: 714086 - DNA, 100 bp, Homo sapiens
cctgaacttccttttgagccaaaccaagaagttcctgtagcaccttcacagtccaggcaagagtgatccagagtttgtgcagtggaagaaagagttgaac

SEQ ID NO: 714087 - DNA, 75 bp, Homo sapiens
tgcgagcagagaacttctttatccttcgaaggaagcctgtggagccagaagatcagctgccatgttacttgactc

SEQ ID NO: 714088 - DNA, 50 bp, Homo sapiens
cagaaacacaaagcagcccaaccaaaggcttcctgctcgaccccaagttg

SEQ ID NO: 714089 - DNA, 75 bp, Homo sapiens
agacagaacagttaatcctcaatttaagcctgatctaacccctagaaacaggaggtttttacagaaatggaggag

SEQ ID NO: 714090 - DNA, 101 bp, Homo sapiens
aagcggcacgacaacattaaaccatcagatgaggaatcctttgtgcattgaagactttagattcctctctgcggtagacgtgcacttataagtatttgatg

SEQ ID NO: 714091 - DNA, 90 bp, Homo sapiens
ggatgagtccagcattctaagacgaagagggctccagaaaaccagaactgatggctctatttgcagtctttcagacaacattcttcttaa

SEQ ID NO: 714092 - DNA, 75 bp, Homo sapiens
ttcccgcttgcgtcagggacctgcccgactcagtggtactccaaagattcaggtttactcacgtcatccagcaga

SEQ ID NO: 714093 - DNA, 50 bp, Homo sapiens
caaatgccattccagatggtccccgaggatgcggtggtgctagaatttgt

SEQ ID NO: 714094 - DNA, 75 bp, Homo sapiens
gcagaagttggcaggagcatgggcttcggaggcctatagcccgcagatctgaattctacaaacacattgtgcttt

SEQ ID NO: 714095 - DNA, 82 bp, Homo sapiens
tttcacaaaccttgtgtctcaatttggctacaaaagatctcggcccctttccaaacactcctgatgcctcatttgcctctcg

SEQ ID NO: 714096 - DNA, 97 bp, Homo sapiens
atggcttccttgtccccacatttgaacagttggcagctttgcagatagaatatgaagtgggtgtttcttcccgatcaagatcagagatctcagttaa

SEQ ID NO: 714097 - DNA, 100 bp, Homo sapiens
cccgggcctggccctcgccgcggccctgctgctcctggccctctgcttgcttgtccggcgcaccagatgccttcaattaagttgcagagttctgatggag

SEQ ID NO: 714098 - DNA, 82 bp, Homo sapiens
actaccctaataagacctcagcttccctcgggagggacagattacatcaatgccagtttcatggatggctacaagcagaaga

SEQ ID NO: 714099 - DNA, 98 bp, Homo sapiens
ggcgccccctcccagctcccagcgactcaaatccagtacctcaagcaagtccagcagccgagcgttgcccaactgagatcaacaatggtagacccagc

SEQ ID NO: 714100 - DNA, 75 bp, Homo sapiens
ggaggctgtggcaatggaacaggcttgagaaacaggttacattcacttcgttccctaagtcttcacaataacttg

SEQ ID NO: 714101 - DNA, 82 bp, Homo sapiens
cccgcgctggtgcagccaccctcgctccctctgctcttcctcccttcgctcgcaccatgggtggcccagttgaaatccttcc

SEQ ID NO: 714102 - DNA, 83 bp, Homo sapiens
gagacagagttgcgaccgcgcggcaggtggaatgaatcttacttgttgaatatcttctggttactagttggattcatttgtga

SEQ ID NO: 714103 - DNA, 82 bp, Homo sapiens
tcgctcaagatggcggcgcagccaccccgcgggatacgcctcagcgcgaacaccttccaccatgaccacctcagcaagttcc

SEQ ID NO: 714104 - DNA, 75 bp, Homo sapiens
catggtgtcagatgaatatgagcagctgtcctctgaagctgtccaggcagccatcttgtctggagacaagtctga

SEQ ID NO: 714105 - DNA, 83 bp, Homo sapiens
atcgggtggcggctcgggacggaggacgcgctagtgtgcccgtggttgacacgagctgtgtccccagctgttcccgtctacaa

SEQ ID NO: 714106 - DNA, 74 bp, Homo sapiens
ccccacggccatcctcactcaggactccctgcagatgttcctgccccaggttgagtctccttctcagatggatg

SEQ ID NO: 714107 - DNA, 96 bp, Homo sapiens
gaggcattgaggactttccttacctgtttttccagctcacccactgccagcagaggtaatgtttgaaacttaccagttttccggtgtatatgtagc

SEQ ID NO: 714108 - DNA, 88 bp, Homo sapiens
tcagatcttaagtagtgatatttctcttttgtctgcccctattgtaagtgcagatggaacacaacagatataaaccacagtacttcag

SEQ ID NO: 714109 - DNA, 76 bp, Homo sapiens
aactcgcgtttccacttcagagatctggtaaatgagctggatggtatcccgttgatcctggacaactgcaacatca

SEQ ID NO: 714110 - DNA, 75 bp, Homo sapiens
ccgcaggttccctacacggtctcctgggtcaagattcatgttacatgtaaagctgtcctcatttgtgactatgga

SEQ ID NO: 714111 - DNA, 100 bp, Homo sapiens
aggctattgagctggatcccaccaaaggaaactgttacatgcattatgtgtatgggtttcgacagaccatgatgaaattgagaatgtggccaaacaattt

SEQ ID NO: 714112 - DNA, 89 bp, Homo sapiens
atgtagttattactgtcccgtttgattttggagaaaagcaaaaaaatgctcttggtgagaaagatcagtctaaagaaaaggagaagaaa

SEQ ID NO: 714113 - DNA, 96 bp, Homo sapiens
gaaaacctttgggcttcatggagtcgtcttagatgttgattcaatataagccttccaaagtcagcagcaatctgttacacagcagcactgttgaag

SEQ ID NO: 714114 - DNA, 90 bp, Homo sapiens
acatggagcccatcagaatggcagatggcttatgaaccacaggcagcctggcatcctcgctacaacctcattgttgtgggccgataccca

SEQ ID NO: 714115 - DNA, 100 bp, Homo sapiens
tttcatttccatttctaccttgtatgcctcaatttgctggatttaagcactgctgcactttatgaggctcgtgaagaagaaatgactgcaaaagtaaggg

SEQ ID NO: 714116 - DNA, 90 bp, Homo sapiens
ccgggggctcagagatccaagtgcgcgccctggcgggtccggaccaagatcgtctatgcggaaagacctctcacagacaaccacagatca

SEQ ID NO: 714117 - DNA, 75 bp, Homo sapiens
cagctgatccagataatgaggatgcaacaggtgactattatatggttaaaaagattttggaggaaaacagttcag

SEQ ID NO: 714118 - DNA, 90 bp, Homo sapiens
gtgcccccttccatcatcatgtcgtcgcagaaggcgctggtgtcaggcaagccagcagagagtgaaggagaacgacctgctcagaatgag

SEQ ID NO: 714119 - DNA, 87 bp, Homo sapiens
gtgaataagagcgtgctcaccaattacagcctcctgacaaggtgatccgggcgggccccgcaggaattttatcccctcaccggcctc

SEQ ID NO: 714120 - DNA, 97 bp, Homo sapiens
gatctcttgcatattccgctccagaaattctgcttggtgatgagtatgatgcacctgcagtaggtaaaagtgcagttttaaagtgtctcctggatat

SEQ ID NO: 714121 - DNA, 116 bp, Homo sapiens
tttgacttggaagcaatgtttgaacaaactcgaagaacagctgtggaaagaagttgcaaaacactggacccctttgctgatgcaagtaagggtgatgacctgcttcctgctggcac

SEQ ID NO: 714122 - DNA, 99 bp, Homo sapiens
cctgatgccaacagtgtaccagcagggcgttggctatgtgcccatcacagcccagaatgtgaccgtggacgaggtcatcggcgcctacaagcaggcctg

SEQ ID NO: 714123 - DNA, 74 bp, Homo sapiens
atacattgagtttgtggcagacagacttatgctggaactgggttttagcaaggcaaactgtccttggaagaatt

SEQ ID NO: 714124 - DNA, 144 bp, Homo sapiens
tatgcactttaccctttttaatattggccaatcatcaagacaagccagcagctcgctcagtacaagaggatctctatgaagcaccagaattatcagtgaagaatatattaaatggctcacgggctactgtaaagcatatttcta

SEQ ID NO: 714125 - DNA, 73 bp, Homo sapiens
agaaatccccactcctccaagaaccaacccccaaattggctgggacagatgttttactgtgcctggctaacta

SEQ ID NO: 714126 - DNA, 151 bp, Homo sapiens
cgccgccgcccctgcacaacaacaacaacaactgcgaggaaaatgagcagtctctgcccccgccggccggcctcaacaaacaaaatccagtctcatagcagaggagaatataatgtttacagcaccttccagagccatgaaccagagtttg

SEQ ID NO: 714127 - DNA, 75 bp, Homo sapiens
cgccctcacaggacacctcaggacccattctggcagcttcatcagccttgagcagtctgggccacgtgtacacag

SEQ ID NO: 714128 - DNA, 82 bp, Homo sapiens
ggagtgttcgttgtgccagcgactaaaaagagttccagaaacgccgctggactgcgaggtctccctgtggtcgtcctgggga

SEQ ID NO: 714129 - DNA, 75 bp, Homo sapiens
cccggcagcgggacccggcgaagacgcgaccgcggcgcgagtcaccatggttaattatagaaaatgccaagtagg

SEQ ID NO: 714130 - DNA, 98 bp, Homo sapiens
ttccacgtcatccgcatcaacaagatgttgtcctgtgctggggctgacagaaacagtatctcacctccctaaactggttaatagtggcatggaagatc

SEQ ID NO: 714131 - DNA, 82 bp, Homo sapiens
gggcctagcggagccgggactggaggtctaagagtgtaaccagttccagtagcagtagcagtgacagttctgccagtgattc

SEQ ID NO: 714132 - DNA, 95 bp, Homo sapiens
ggcccagcgccttcatccccgtggaggagagagcccgagcccagcacattgtgccctgtactatatctcagctgctttctgccactttggttgat

SEQ ID NO: 714133 - DNA, 82 bp, Homo sapiens
ctttcgcccgggtcctcctagaaattccccccgaagaagactcccccacatctgggctcttgtcaggatggtgaagctgttc

SEQ ID NO: 714134 - DNA, 75 bp, Homo sapiens
acctgctttgaggtcaacgagagggaggaggcaggcggggccagcaggtcttcctcaagccggacgagccgccgc

SEQ ID NO: 714135 - DNA, 100 bp, Homo sapiens
ctgcccaggctcgcctcgactccaaatggttgaaaacagatatacagggccctccagaatttccacagcatacacctggacctgttcccaacagtttcag

SEQ ID NO: 714136 - DNA, 75 bp, Homo sapiens
cgcgaagacggtaacccgtgtgactttgactggatcctgtttgaccaaactcagagatcaattaaggcacagctt

SEQ ID NO: 714137 - DNA, 100 bp, Homo sapiens
ttcagcattgcctctgatgtcaagcgaaaggtgtccggctttgctggcccagcaagcctgataagcatgaagctcttatctttggtggctgtggtcgggt

SEQ ID NO: 714138 - DNA, 106 bp, Homo sapiens
ccaaacctcgcacgcccaggaggagcaagtccgatggagaggctaagcaggagaaggcagagcccccccaggctatgaatgccctgatgcggttgaaccagctgaa

SEQ ID NO: 714139 - DNA, 98 bp, Homo sapiens
cgagagcgtgaccgagagcgcgaatatcgtcatcgttagaaggaaaccaattcgtgctcatggaagaaaagttcctttgccagcagccttgaagtgaa

SEQ ID NO: 714140 - DNA, 95 bp, Homo sapiens
ggaatccaccctgtctgtgcagaggtgagacatggaatccattaaaattgcattatcagttaagaaatgtacgggaacgattagctaaaaacctg

SEQ ID NO: 714141 - DNA, 74 bp, Homo sapiens
gccgatccagcctgcggagcctgtggggcagcgatgccctcctagctagccgtcacgggatggagggcttcatg

SEQ ID NO: 714142 - DNA, 100 bp, Homo sapiens
agtcggtcttggctacttgaagacacatgcaattgaatttgtcaactatcagaagtggaaacagaaacagaaaattgatgatcgtgactcggacgaagaa

SEQ ID NO: 714143 - DNA, 90 bp, Homo sapiens
gccgctatgaagagctggctcggatgctgatggggctggacctgctggtgttcgcccacgaccatgacacatttgccagcaaagtggcag

SEQ ID NO: 714144 - DNA, 135 bp, Homo sapiens
ggctggggctccctgtatgcatggtgtggggttggtgtgattagcttcgcagtctggaaagctttaggagttcacagtgagtctactcttcatcttgtgttgagacttcgtggtggtgctaagaaaaggaagaag

SEQ ID NO: 714145 - DNA, 96 bp, Homo sapiens
cctggaccctgcccagcagaatttgtatagagatgtgatgttggagaactacagaaacctggtctccctaggtgccagcttaggaataaccagcga

SEQ ID NO: 714146 - DNA, 51 bp, Homo sapiens
cacgggcattctccatctccttgcagggttggaaatcgtgccaaatgggat

SEQ ID NO: 714147 - DNA, 98 bp, Homo sapiens
tggacgccactttccggggtgcacagcaagtggttgaacttgaaagaaagttggaatctgcaactaagtctaaactgcattacaagcagcagtgggga

SEQ ID NO: 714148 - DNA, 75 bp, Homo sapiens
aagaacggcagtttgaatcggtgctgaacagaagtctggaacgttttttcttagagttccagaattgagactgaa

SEQ ID NO: 714149 - DNA, 100 bp, Homo sapiens
tagcagtttaacatcagtcatgaaaaatactggtgccattgagaaacagaaattggtgtatattttgaacagagatgctgcagcccgacttaccatttca

SEQ ID NO: 714150 - DNA, 98 bp, Homo sapiens
aacaacttcgagacatttcaagtattggtcttaaaacagtaattggagaacttcctccagcttccagtggcctgtctcctccctcctacacatttcca

SEQ ID NO: 714151 - DNA, 90 bp, Homo sapiens
taagcaaccagcatttagagctgtttatgaagcactgagaaatgaaaaacaagaatggtggtggctttacattgcagataggaaggagca

SEQ ID NO: 714152 - DNA, 51 bp, Homo sapiens
ttgagtcacataaggatgaaatattccaggaaatggatcagacaatggctg

SEQ ID NO: 714153 - DNA, 82 bp, Homo sapiens
gaacttcttcaactgcaccaccgcctgcctcatctgtgccaaagcagaatacagagtttcactcctgttacccaggctggag

SEQ ID NO: 714154 - DNA, 108 bp, Homo sapiens
gtcgggaacagccatgcaaaggcaggggaggaagccacctcgagatggactagaggcttttaccagatttcttaaaactgaattcagtgaagaaaatattgaattttg

SEQ ID NO: 714155 - DNA, 87 bp, Homo sapiens
cgaggctcggagaaacaggcgccgcgggctccgcgcccggccggacccgggcccgaggaggaggcctcggtggtaccagaagaggag

SEQ ID NO: 714156 - DNA, 100 bp, Homo sapiens
cgcggcccccgcgccccgcgggacccggacggcgacgacgggggaatgtggcgctggatccggcagcagctggctacgtgcaggcctgccgcgccctgat

SEQ ID NO: 714157 - DNA, 90 bp, Homo sapiens
ggcctaccgagagatcatccgtgacaacaacatggacttcactgacatcatcaagtttttcaatgatgcttccgatgccaaagccaggga

SEQ ID NO: 714158 - DNA, 100 bp, Homo sapiens
agattggcagcctcaacagcaaaggcagcctcggaaaagacaccaccagcccttggggtgccgaggctcaggcagcatgacgacggagacctttgtgaag

SEQ ID NO: 714159 - DNA, 100 bp, Homo sapiens
gtcatcagctcctgctccctggctgaagcccgcctcctgctagacaacttcctcaaggcatccattgacaagacgtttgtgaatgacatgcgcatcccgg

SEQ ID NO: 714160 - DNA, 98 bp, Homo sapiens
caggaatgtatcagggacagtggcggatgtgcactgctacaggactctactatggagattgctgttgcctccccagtgtgacccacctgcagtcctct

SEQ ID NO: 714161 - DNA, 50 bp, Homo sapiens
aggccttaccgaggaggagtatcagcgatgccctcctagctagccgtcac

SEQ ID NO: 714162 - DNA, 100 bp, Homo sapiens
ctttgttcttgttctgtaaacatccgagtgcccaacagacattttgctgctgctacaaagacagaagttgttatttatgttgttgagcgttcgccaaatg

SEQ ID NO: 714163 - DNA, 50 bp, Homo sapiens
caggattcatgctctacatccccatagagccaatggagatcttcgtggat

SEQ ID NO: 714164 - DNA, 100 bp, Homo sapiens
cgctccctgtctgggaccttctccctgcctggacccctactattgcaacaaggaaactctgatgaggaagaaagtgcttcagaatctgaactttggaagg

SEQ ID NO: 714165 - DNA, 74 bp, Homo sapiens
agtacctgcagaaggtctctggagacatcttcagcagtgacaacgcgcctgcaaaagggaacaagagcccttcg

SEQ ID NO: 714166 - DNA, 75 bp, Homo sapiens
agacctgctcacacttcagaatagagaaggtatggctatcctgatccttcttacctgaaacgtgtcaaagaggag

SEQ ID NO: 714167 - DNA, 82 bp, Homo sapiens
ggggattgtgggagtctccgcgtcccgctcgctgggagagagacctgcctagagctggaacgttacctccagagcgagccct

SEQ ID NO: 714168 - DNA, 50 bp, Homo sapiens
gaggaaccacacgctgatcatgaatgtcaagatgttgtcatgaagagaga

SEQ ID NO: 714169 - DNA, 100 bp, Homo sapiens
cccggacctttccgagctgcttatggtgtctgccccaaggtgatacaattctggagactggagaagtaattccaccaatgaaagaatttcctgatcaaca

SEQ ID NO: 714170 - DNA, 75 bp, Homo sapiens
cagaacttttattccttccagaagcaggcctcagctgttgaagaacgctctgcagagagcagtagagaggggcca

SEQ ID NO: 714171 - DNA, 83 bp, Homo sapiens
agagtaccttgttccaatcccaggactatacaggctccaacccaagttccagtggttgtgtctcctaggaatcagcagttgca

SEQ ID NO: 714172 - DNA, 82 bp, Homo sapiens
agctgtggattggcattaactttgacagactcacacttttggccctgtttgatagcaggaggccactgtctgcagctcccgt

SEQ ID NO: 714173 - DNA, 100 bp, Homo sapiens
ggatctgcagccatttatattgcttaggctactggaaacggaggtggagctgtacaacgaatttcctgaacctatcaaactggacaagaatgaccgggcc

SEQ ID NO: 714174 - DNA, 75 bp, Homo sapiens
gcactctgggcgaaaattggatgtgaaaatgaagccagaccgaggtttgtatacagagttcttcagggatccctg

SEQ ID NO: 714175 - DNA, 100 bp, Homo sapiens
ccaccaccgccgctgccccggctgcctcctccctgaggttgttcccacagcctggaagtctcttccctgacttgttccacgatcaacctctactcaccct

SEQ ID NO: 714176 - DNA, 97 bp, Homo sapiens
cctctgaggcgacggccgcggctgcacaggtataaatgaccaaggattgtacagagttgtgggggtgagttcaaaggtccagagacttctgagtatg

SEQ ID NO: 714177 - DNA, 100 bp, Homo sapiens
gggagagcctgctggcacgggcacgccggggtctgcagcgcctgtttaatgcgctgaaggttcccgtgccagaggataaatatactgcccaggtggatgc

SEQ ID NO: 714178 - DNA, 98 bp, Homo sapiens
tttcttaccactgtgtttcagcttttcctcatctgaatcaaacatttgaattctttctagaaggtgcaaattgagcatgacccagaattagaaaaaga

SEQ ID NO: 714179 - DNA, 100 bp, Homo sapiens
ggccgctcgcagagtgaccccagcgtcctcaccgactcctcggccacctcctccgcggacgccggggagaacccagcaatatgaatgctggcccatcttg

SEQ ID NO: 714180 - DNA, 100 bp, Homo sapiens
cggagccaagcagcagctgagcggggaagcgcccgcgtccggggatcgggatgtccctcctccttctcctcttgctaggatgaagtgaagctgccggcca

SEQ ID NO: 714181 - DNA, 100 bp, Homo sapiens
tggcactgaggctctggaacttctgcccagctctccttggttttgcactgattgcaaaaataaagtcctccgagcatacaatatccttattggtgaactt

SEQ ID NO: 714182 - DNA, 117 bp, Homo sapiens
cgctggcgctagtctgaccctccgccaggcaaaaggaaggaaaaggggaagatagtgatgtactcagtataaatgcagatgcttatgacagcgacatagaaggcccatgcaacgaag

SEQ ID NO: 714183 - DNA, 97 bp, Homo sapiens
ccaactccactacagctgttcccagcttggttgcacttgagaaaattaatgtggcagatgcagattctgcccaagaagcccctgcattgcagaggga

SEQ ID NO: 714184 - DNA, 100 bp, Homo sapiens
cgccatcatcctcatcatcatcatagactcgctctccgtctccagcaatgacgccagtccacccgcatccgtggcttccctccagccccacatgatcggg

SEQ ID NO: 714185 - DNA, 112 bp, Homo sapiens
gcgctctcgtcttctgcggctctcggtgccctctccttttcgtttccggaaacatggatgagacctgcacgcagtggctcacagcagcacgatttgtgacagcccgaggcgg

SEQ ID NO: 714186 - DNA, 86 bp, Homo sapiens
atgacccaccaatggaagcagctggcttcactgctcaggatttaaaaactggaacggtgaaggtgacagcagtcggttggagcgag

SEQ ID NO: 714187 - DNA, 50 bp, Homo sapiens
ctttgaagtagaagaagctgatgcagagacagggtttcaccgtgttagcc

SEQ ID NO: 714188 - DNA, 82 bp, Homo sapiens
agcgctctcgtcttctgcggctctcggtgccctctccttttcgtttccggaaacatggtggaagttaaacgagctgagcctc

SEQ ID NO: 714189 - DNA, 100 bp, Homo sapiens
agacaccaggacagaaaagacagtgttctgctttcatggagttcacagaagagtcgaggagaaagaagatgctgatatgctacaacacggatgaacctgg

SEQ ID NO: 714190 - DNA, 117 bp, Homo sapiens
cgaggaagctaaggccgcgttggggtgagaccctcacttcatccgaacattgatgatggcacctcagatcgcccctacagccatgctctggtggctggaattgaccgctacccccgc

SEQ ID NO: 714191 - DNA, 98 bp, Homo sapiens
tgtgctcgcgctactctctctttctggcctggaggctatccagcgaatggttttagggaagactgttgccggatgacaaggctgtcactattgttctg

SEQ ID NO: 714192 - DNA, 75 bp, Homo sapiens
ggacatgccccagctggtttgccctccagatgacacctttgaggccctgtgcatcgagccgttttccagcccgcc

SEQ ID NO: 714193 - DNA, 75 bp, Homo sapiens
gctacttcaaagggtactttttagaaccaaaggactatttaagaaacaactgaggcatcagaccaactttcccca

SEQ ID NO: 714194 - DNA, 75 bp, Homo sapiens
ttataggaccccagcagcacttcctggaagactatatgttctcctttcagccaagacctttcaccagtgcagggg

SEQ ID NO: 714195 - DNA, 98 bp, Homo sapiens
acgcccggcgcgagctcaagctgctgctgctcgtctcgcccaagaacttcaaggtgaaaatgatcatgaagacatcagttctgctcagctgggagttc

SEQ ID NO: 714196 - DNA, 98 bp, Homo sapiens
gaacagagagagaggtggacagatctgagagatactgagcagattatgagcttacagaaagcctggcctacattttactctttttggatttcttcctc

SEQ ID NO: 714197 - DNA, 100 bp, Homo sapiens
ggtgtaggagaagaaatccgcagaagcttattaaagttaagggttatgtggtccgaatcagtggtgggaacgacaaacaaggtttccccatgaagcaggg

SEQ ID NO: 714198 - DNA, 100 bp, Homo sapiens
aagaaagattatgagaaattgcagcagtcacccaaacctggggagaagttgcattaaaatcctcccctactgaaagaaacggaggccaggataactgtag

SEQ ID NO: 714199 - DNA, 90 bp, Homo sapiens
ccttaaaaaacctggagctagaaagcagtagactggaggcttctacagactgtaggattcaagtggtattgttggaaatagtgcaactgc

SEQ ID NO: 714200 - DNA, 75 bp, Homo sapiens
ttctgacgtttacaaaactacagaggaaaatcacagtgaaattgaacggcggcgacggaacaagatgacagccta

SEQ ID NO: 714201 - DNA, 82 bp, Homo sapiens
cccagcctcaggcgtgcgcggacggtgtgcgggaaacttttgagaagaactttgaaagagaaacccataaaataagtgagca

SEQ ID NO: 714202 - DNA, 101 bp, Homo sapiens
cgggccgcggcgccgagtcgaacggggagccgagctggagctgccgcggcgcagccaggctgaccccgcactacatctacccaccagccatcgtgcagccc

SEQ ID NO: 714203 - DNA, 83 bp, Homo sapiens
ggaaaaatttgtctttgacatcttccagtttgcaaaatcccaccaaatattttggttgtgagctgggagcacagacccagttt

SEQ ID NO: 714204 - DNA, 75 bp, Homo sapiens
caaagaagactcttgtcacactaattgccaacaacaatggtgtttcagtcacctccagtaacacgggcgtgccag

SEQ ID NO: 714205 - DNA, 98 bp, Homo sapiens
cagaggcgtcggaatggacctgtgccacccagaaaaatggctacaaacttcctagcacatgagaagatctggttcgacaagttcaaatatgacgacgc

SEQ ID NO: 714206 - DNA, 101 bp, Homo sapiens
caccattattctacacattgtgtttgccatcaaattggactatgaactaggcagagaactcgtgaaacacttaaaggatctaaaagctcggatgcaggagg

SEQ ID NO: 714207 - DNA, 100 bp, Homo sapiens
aggggcagagggaccactctgacaggttctgccctgatgtttcctggaataatgctgaggactgcctttcgggtagccgccctattcagttcacttcatc

SEQ ID NO: 714208 - DNA, 74 bp, Homo sapiens
gaagacatttatgaaagcccaaatcacctgtacttggtcatgcagctgatcactactcttggaatcaaagataa

SEQ ID NO: 714209 - DNA, 82 bp, Homo sapiens
acaggcctgatggcggcggctgagccgatgggcccggcacagacaatgcagatcttcgtgaagactctgactggtaagacca

SEQ ID NO: 714210 - DNA, 51 bp, Homo sapiens
ggctgctattgtatatcacactaaagcagcctgaaaaggtgatggcaaagc

SEQ ID NO: 714211 - DNA, 100 bp, Homo sapiens
cccaactatacccctgggaagaaggaggacctctacctgaagccaatccagaggtggtttcatggccccctgaacagggcggatgcagagagcctcctgt

SEQ ID NO: 714212 - DNA, 73 bp, Homo sapiens
aactcttcagtttaaagctcaaggtcattacacctactctgagaatcgtgtggaaaaagacggcctgattctt

SEQ ID NO: 714213 - DNA, 90 bp, Homo sapiens
tggcccgtgggcagagccaattcaacatctatgagcgagtgatagacagccaagcagagaaactgaaggagcttgacaaggagatccggc

SEQ ID NO: 714214 - DNA, 82 bp, Homo sapiens
cagccaggatgaatccttagattccaagggacaggccttcagtatttggcatcacctttacatggagcacaaagatgatgat

SEQ ID NO: 714215 - DNA, 101 bp, Homo sapiens
gtctcggaaaccggtagcgcttgcagcatgggaacctcagaacctgttctggatccacagcaaatccaagcatttgatcagctttgccgtctctaccgagg

SEQ ID NO: 714216 - DNA, 88 bp, Homo sapiens
gaacccaacagaagctgaattgcaggatatgatcaatgaagtggatgctgatgtgacggaagcaggatttggagcagacattggaatg

SEQ ID NO: 714217 - DNA, 100 bp, Homo sapiens
cagtcagctgcgtgattcccgtgattgcgttacaagctttgtctccttcgacttggagtctttgtccaggacggtgccaggaccattgacaccagaaatg

SEQ ID NO: 714218 - DNA, 101 bp, Homo sapiens
ggggagactgtgccgtggagggcctcgccatgtcctgctgcccgcaacatggccaacgccctggccagcgccacttgcgagcgctgcaagggcggctttgc

SEQ ID NO: 714219 - DNA, 100 bp, Homo sapiens
gctgccaatgcggaggacatcaaggcttcgcaaggcatggtgggtcagctggcggcacggcgggcggctggcgtggtgctggagatgatccgggaaggga

SEQ ID NO: 714220 - DNA, 90 bp, Homo sapiens
aaagcatcatccacgagttcgacccgtggcagaggcaaggctggcagcaaaacgggctgcccgggcagaagcaagagatatacgcatgag

SEQ ID NO: 714221 - DNA, 75 bp, Homo sapiens
agcgggcgggaggaggccggggaccacacagtctttcccagggaactccgatgaagtgttccaacaaaatgagcg

SEQ ID NO: 714222 - DNA, 82 bp, Homo sapiens
gcaaaaggcagactttttgatattcagagccttggaagtcaacactgtcaagtttgaacaactgactcttgatggacacaac

SEQ ID NO: 714223 - DNA, 100 bp, Homo sapiens
tgttcacggtgaccttcgcttggtgtcctcctggcctcagcaacctgacaattctgtcgtgtcccggtgtcagttgtacccgaggcgttctcagcagcag

SEQ ID NO: 714224 - DNA, 75 bp, Homo sapiens
ccgctttccgggagactggagtcgaaggccgtgaggtatttataacagcaatgatgtagcagtatcgtttccaaa

SEQ ID NO: 714225 - DNA, 90 bp, Homo sapiens
gggagccttcctgatccgggagagtgagagctccccaggggagttctctgtgtctgtgaaatgtttgagacggaggcagatgagaagagg

SEQ ID NO: 714226 - DNA, 50 bp, Homo sapiens
agagagcagccgggctgccagcggttatgaagacagtatggagtttccag

SEQ ID NO: 714227 - DNA, 88 bp, Homo sapiens
tttcttgaagctgcagcagaaatggagctatgaagacaaagcccctgtccctgccttacccagcaagcttcccacgtttggagccccg

SEQ ID NO: 714228 - DNA, 82 bp, Homo sapiens
atgagacatttgctacagcatcccacattaagtcaacggtgtgttccagagaacaagccttcagacatttgctatattgacg

SEQ ID NO: 714229 - DNA, 75 bp, Homo sapiens
caaccaggcaatgctggatagataccgaattcttatcacaaaggctttcaaggatatgctgtattcagctcagga

SEQ ID NO: 714230 - DNA, 98 bp, Homo sapiens
cttggaacaagcaactggctattgaaaagactatctgtgccacgtctacgtccggaatgatagtcttgcaggtgtggtcattgctgacaatgaatacc

SEQ ID NO: 714231 - DNA, 96 bp, Homo sapiens
gtgaaacagagaaagataggcggccatggtccaaccttgaaggcacgcaggctgaagaaagtcccttcgtgggcaacccagggaatatcacaggtg

SEQ ID NO: 714232 - DNA, 100 bp, Homo sapiens
ccaggactgtgatggtacaggaagggaacgtggaaagcgcatacaggaccctaaacagccaccagtgaagactataagctcctggaaaatatgaataaac

SEQ ID NO: 714233 - DNA, 97 bp, Homo sapiens
ggcattgactgggaccatggtctacagcatcactaacaacttcccattcaggatcccttggttccagtaccccattatctatgacattcgggccaga

SEQ ID NO: 714234 - DNA, 82 bp, Homo sapiens
aaagacgctaaacgtgccctactctgccccgggggagagctgcctgtggaggaaccgattgtgtccacagatgaggtcatct

SEQ ID NO: 714235 - DNA, 100 bp, Homo sapiens
cttccggatgagaagtgcttagattctggatacattttgaagagcagcccgacggccatggaggctgaagagacgatggaatgccttcaggagttccctg

SEQ ID NO: 714236 - DNA, 80 bp, Homo sapiens
cgaaaattggatgtgaaaatgaagccagaccgagtgctgccgggccaccactctcggaggacgacaagctgcagggtgca

SEQ ID NO: 714237 - DNA, 101 bp, Homo sapiens
cctccggagtagctgggactacagggaagcggggccggcgcgggcggccgagggtccaggcgagcccgcgggcggacgggagatgccgctgctacaccgaa

SEQ ID NO: 714238 - DNA, 82 bp, Homo sapiens
tgagacccggaatcagttccttgatgagctcatggaggcaactcatgcagcaattccagaaccccgacttcccacccgaagt

SEQ ID NO: 714239 - DNA, 122 bp, Homo sapiens
gaccgtcccgcaggccgctgatgccgcccgcggcgaggtggcccggaccgcagtgccccaagagagacgccatcctgggcctggaggaagtgcggctgacgccatccatgaggaaccggagt

SEQ ID NO: 714240 - DNA, 75 bp, Homo sapiens
cgaaaacggaagcgcagggagaaggaagaggtgtttgaaaaggtgcagcagtaccgcgtcgccatgactgccaag

SEQ ID NO: 714241 - DNA, 50 bp, Homo sapiens
aggagaagccctcagcttcggagcaagaaatgagccgtcagactgctaca

SEQ ID NO: 714242 - DNA, 100 bp, Homo sapiens
gccaaattgggcgagggcacaaaataaccacttaccccttctcaccgaggaagagcgggagaaaggccctttctaaggcacaaaatgatgtgatggaaat

SEQ ID NO: 714243 - DNA, 73 bp, Homo sapiens
ggtgcatctgagataattctgaaaaacttagcagtgtctgcaaaaacgaatcttttcctacaacctgttaact

SEQ ID NO: 714244 - DNA, 87 bp, Homo sapiens
aaaatacaaatcacacgcataatggatgaaaggaaccgacaggttggatggcaagcatgtggtgtttggcaaagtgaaagaaggcat

SEQ ID NO: 714245 - DNA, 100 bp, Homo sapiens
agcaggactgcgccgcgtcttcctcaaggatctggcgacatggccagaaaggctctcaagcttgcttcgtggaccagcatggctcttgctgcctctggca

SEQ ID NO: 714246 - DNA, 101 bp, Homo sapiens
gctgtctctagacagcagtcttgtgattccgagtccgaaaggtccctgagtagattggaagcagtgacagcacgctcctttgaagaggaaggagagcattt

SEQ ID NO: 714247 - DNA, 74 bp, Homo sapiens
aaaggtggatcctacatgtgccataggcttcatgaagaaaattttgagattactacactacggattgatgtcac

SEQ ID NO: 714248 - DNA, 75 bp, Homo sapiens
gctgctcagcgtcctcatgtggggggtaaaccactcgacatctcgagatctggcgtgttttatacagtttgaaaa

SEQ ID NO: 714249 - DNA, 98 bp, Homo sapiens
gcatctagtcctgagcttcccaccgaagatgaacagggttcctggggcatcgacgatctccatatttcattgcaaggggaactgatcacagccgcaca

SEQ ID NO: 714250 - DNA, 100 bp, Homo sapiens
gcaacacgtggaggcggagctgtcagctcagatccgctacctcacccaggtgtctgaagtggactgtgtgagcctgggcattcccagagaggaagggccg

SEQ ID NO: 714251 - DNA, 100 bp, Homo sapiens
gtaatctacatgctcatccaggcctataagtttgctcaggtccacggccaagatgccgaccacaccagtgaaggccaagagggtcagcaccttccaggag

SEQ ID NO: 714252 - DNA, 100 bp, Homo sapiens
cgtcgcttccatgaaagctacaacttcaatatgaagtgtcctacaccaggctgtaactctctaggtgagggagattctgggccgctgcacctgccctgac

SEQ ID NO: 714253 - DNA, 88 bp, Homo sapiens
tgctgcctgattcgtgagttgtttgttgctcaggatctttcgaagatggtttggctgccttggagatttggagatctgatgccacgat

SEQ ID NO: 714254 - DNA, 100 bp, Homo sapiens
cctcagtaccagagacagaagcagatggattcgtccttttagagcgggcagagaagatgggccagaatctcaaccgtattccatacaaggacacattctg

SEQ ID NO: 714255 - DNA, 80 bp, Homo sapiens
caccatgagctggggcaccgagctctggatgacgacaacccccccgtgtcttttgtgaagttctccccgaacggcaaata

SEQ ID NO: 714256 - DNA, 90 bp, Homo sapiens
cagaagacgatgaggctcctgcaaaaggattttttatcaagcagaaatgcatcgaacaacgagaatcaagatcactgagctaaatcccca

SEQ ID NO: 714257 - DNA, 100 bp, Homo sapiens
agctcccagtacagcatctgcttcacgctgggctcctttgccaagatctatgccgacacctttgatgtaaacaggttacccagctgggagagaggacatc

SEQ ID NO: 714258 - DNA, 75 bp, Homo sapiens
cggacccgccagaggcacaccaggagaacagccctgtggcccccacagcccagcccaaagccccaccctcaagaa

SEQ ID NO: 714259 - DNA, 75 bp, Homo sapiens
ctgggaccaaagtggatatcaaacgcctctgaggaaacactacattccagtaatgaagaggaagaccctttccgc

SEQ ID NO: 714260 - DNA, 90 bp, Homo sapiens
gctcgtgcttcgggatggaaacctatggttatctgcagagggagtcatgctttcaaggacctcatacaatgagttacaaggcactaatag

SEQ ID NO: 714261 - DNA, 101 bp, Homo sapiens
ggcctggatgcttctctctgctctgccctggctgggccactacagctggcaggacctaatctgtcggatggctgcatcagtgaaggagcaatccacaaagc

SEQ ID NO: 714262 - DNA, 82 bp, Homo sapiens
cacccaccgccgccgcctcccaggaggaaaactccctcttcgtcatgaccaacgtgatcctcaccatgaaccagacacaggg

SEQ ID NO: 714263 - DNA, 75 bp, Homo sapiens
gcggccatcgtggctaaacaggtactgctggccactgaagatcctggtgtcgccatgggccgccgccccgcccgt

SEQ ID NO: 714264 - DNA, 100 bp, Homo sapiens
agacatgagcaagaaaagcctctgggagcagaagggaggctccaagacctcatcaacaattaaggtccagatggctgtggaggccaagtttgtccaggac

SEQ ID NO: 714265 - DNA, 98 bp, Homo sapiens
cagccatggactgctacacggcgaactggaacccactcggggactctgccttttaccggtgttggagcgggccggagagaagtagagtgggctgcgag

SEQ ID NO: 714266 - DNA, 100 bp, Homo sapiens
gtgaatcccaactgttatgccaaaggtctgtggacggtctgctgaatgcccataggaggaatgcccacgtgcccctttggaactatgcagtgctccgtgg

SEQ ID NO: 714267 - DNA, 83 bp, Homo sapiens
atgccggggatcgacaagctgcccatcgaggagacgctggaggacagcccgcagatgatatcatcaagttgaatcgaaaggaa

SEQ ID NO: 714268 - DNA, 73 bp, Homo sapiens
acagcagtttggcgtcagtctgcaatagtgggatgtgtgtgggctgaaattccgagctgcggttgtgcatgag

SEQ ID NO: 714269 - DNA, 75 bp, Homo sapiens
ctcagatgctgccagggtccctgaagagggaagacacgcggaaacagctcccatcccagatctcaaagtgtttga

SEQ ID NO: 714270 - DNA, 90 bp, Homo sapiens
aacatggataagcatgccctgaaaaagtatcgtcgagaagcctatcatcgctttgacaattattctgccaatgttatggtagatggaaaa

SEQ ID NO: 714271 - DNA, 100 bp, Homo sapiens
atggaatcggtcctggaggacaggcactccaggaagctcatcgggtgctgaaaccaggaggacggtttctctgtctggaatttagccaagtgaacaatcc

SEQ ID NO: 714272 - DNA, 96 bp, Homo sapiens
gctccattggatcgagtaaaggttttattacaagctcacaatcaccattacaagcatttaggttggagatttacagtatgcctcccctgcaactgt

SEQ ID NO: 714273 - DNA, 89 bp, Homo sapiens
ccaagactgaatttcaattggattcttgccagctctcattactgcagttctgaccaatcatcttgcctgggttccaacagtcatgccaa

SEQ ID NO: 714274 - DNA, 75 bp, Homo sapiens
ccagcccgtggtccttctccatattcgagcagcagctgtcgattcggcagaccgaagtcctcggcccacttctgc

SEQ ID NO: 714275 - DNA, 90 bp, Homo sapiens
gtgcaaccacctcacccgctcgctgatgaagaaggtgcacctgaggccggatgaggacctgctaccaagatgaatgaactaatggagaaa

SEQ ID NO: 714276 - DNA, 90 bp, Homo sapiens
gttttcatggagactgtcttacgctgacaaagattattgaagcaagactaaaggaggttcccatgatccctcggccccactatgcccaac

SEQ ID NO: 714277 - DNA, 101 bp, Homo sapiens
cggagatgccgcagacccatcaccatgcccttttacttttgggcactgttgctggaatatttccgttcaacaggttattgagtcacatttgttgaagctgc

SEQ ID NO: 714278 - DNA, 82 bp, Homo sapiens
ctgcatgtgaagctcaccgagacggcgatccgggcgctcgagacttaccagagccacaagggacccagacatggagctgcgg

SEQ ID NO: 714279 - DNA, 75 bp, Homo sapiens
cgcaagcatgatgagatcaaccatgtgcagaaggtgggacgagctatggccattgcagccctggacatggcggaa

SEQ ID NO: 714280 - DNA, 100 bp, Homo sapiens
cgagcgggtgcgtctgccgcagagtcggcacctgaaggacatggaggagcccagtttcctccaattgcagcacaagaccttccttttgttctaaaggctg

SEQ ID NO: 714281 - DNA, 98 bp, Homo sapiens
gaggaaagtcccaggatgactactgtgtcaaatcagacactcctctaatttacaaagcagtgcccagctggtttgtgcgagtggagaacatggtggac

SEQ ID NO: 714282 - DNA, 75 bp, Homo sapiens
tgcggccgcttcgtcctctgcagtcaagacgctgggcgcgtcgaggactgggtacaggtttgcagattccgccag

SEQ ID NO: 714283 - DNA, 100 bp, Homo sapiens
ataaccccaggaagtaccttcgcagtgtaggagatggagagactgtggagtttgatgttgttgaaggagaaaaggaggttgaaacggaacagtattacag

SEQ ID NO: 714284 - DNA, 87 bp, Homo sapiens
agatccactaccggaagaagaaacagctcatgagaattcgagaagagaagcgagaagaacggaggaggagagagttagaaaagaaac

SEQ ID NO: 714285 - DNA, 101 bp, Homo sapiens
cccagatttgttgccataatcatagaggcaagtgggggaggagcgttccttgtcctccctctgcacaaggacattacctgttgattcttgggcaaggccca

SEQ ID NO: 714286 - DNA, 75 bp, Homo sapiens
gatccaggtgaagggggcagaggtctgctgagaacagacccagtccctgaggaaggagaagatgttgctgccacg

SEQ ID NO: 714287 - DNA, 90 bp, Homo sapiens
gaacggacatatcaagcaggtgcacacttctgagcggcctcacaagtgtcaggttcagcagactgtacaggatctttttggcagagcccc

SEQ ID NO: 714288 - DNA, 90 bp, Homo sapiens
ggaaatctggccgccgccgccgcgagcgctcccgacacgaagatcgattgagaagttattagaatgggaaaacaataggttataccacaa

SEQ ID NO: 714289 - DNA, 100 bp, Homo sapiens
actgaaggaaaaagtggtgctgatgtatgatgagatcttcatgttttcagcattgcaaataacaatctcagctactgggatgcccccctgggaagttctt

SEQ ID NO: 714290 - DNA, 75 bp, Homo sapiens
gcggtttctagtgcaaatcccctgctcagggtcttcatccagaaacgagttacagcaagctgctgaagtttctca

SEQ ID NO: 714291 - DNA, 100 bp, Homo sapiens
gctggcagcccagcgggaggatctggagacagccatggagttctacttagagatttgttcccgacaaggagttttctggttcagaccgtagacagagagg

SEQ ID NO: 714292 - DNA, 100 bp, Homo sapiens
agaaagcatttaaccagcatggctacttcatattttggaaagcagtttttaagacaaaaggaagaggcccagcagaagggactcgctgagccaccccccg

SEQ ID NO: 714293 - DNA, 100 bp, Homo sapiens
ctataacaatcatagctcttccaattcttttggtcgaaacctaccaccaaagaggcgatgcagagattatgatggtgcttgaagtttctgggaagtcggc

SEQ ID NO: 714294 - DNA, 62 bp, Homo sapiens
actctgtttacgttattatcaacacaggaccaggaactcgaatcatttatgacagaaagttt

SEQ ID NO: 714295 - DNA, 98 bp, Homo sapiens
aagacctggatgaacaaatttatatcattaccttagaggaagaagcactccagagacgactaaatgatttcttcagaggccccacagtatcaaatatc

SEQ ID NO: 714296 - DNA, 75 bp, Homo sapiens
ctatggtttaatgaaaatagatgaaccaagcactccttaccataggatttgcctcaaagggcactgcaaaaattg

SEQ ID NO: 714297 - DNA, 75 bp, Homo sapiens
agaactactccgtgacctggtacatcgccgagttctaggcatgccaggtggaagtgaggctgctgctggcctaca

SEQ ID NO: 714298 - DNA, 75 bp, Homo sapiens
gagaataagaaggagtatgtacacctggtatgccagatgagaatgacaggtgaatctcatgggcaccttcaatgt

SEQ ID NO: 714299 - DNA, 75 bp, Homo sapiens
actgccatggcccctgtgctcagtaaggactcggcggacatcgaggttgaagaaatatggagatcaacacaaaac

SEQ ID NO: 714300 - DNA, 100 bp, Homo sapiens
cgctgggagagaggtacctctccttttccctctccctttccctaaggtttagaagatcatgaccacatggatcatctaactaaatggtacatggggacaa

SEQ ID NO: 714301 - DNA, 83 bp, Homo sapiens
tctccaggccctggttactgcagggccatgtccgcacccacacagggaagaggacccagatgatgtgccccatggacatatca

SEQ ID NO: 714302 - DNA, 75 bp, Homo sapiens
gccaacatgtacagggtcggagctaattgattggagcgctctgatggacaaaaaagtaaagccaccatttatacc

SEQ ID NO: 714303 - DNA, 89 bp, Homo sapiens
aacagaatactgaagatcagtacaaaaatcctaggagaaatctaagggatctcaagggcatttccctttgcccacctcaccttttcata

SEQ ID NO: 714304 - DNA, 76 bp, Homo sapiens
ggacgacctggaggtgttcagcaagctctttgacctcatctaccgcgaggagacgctgttcaacgtcatcaagagt

SEQ ID NO: 714305 - DNA, 50 bp, Homo sapiens
gaaagaatggccttgaatttgacacaggctgcaggccaacttcaccatcc

SEQ ID NO: 714306 - DNA, 75 bp, Homo sapiens
gccgctcccgggcggccgcgggcggagtgcttgtgatttcacgtatttttgctgaactcgtaaaagagacacttg

SEQ ID NO: 714307 - DNA, 88 bp, Homo sapiens
gaggagagagagtgaacagggagcggggcttttgtctggctcaaaatctccttcgccaagaccaaacatgcctgttcgatacttcata

SEQ ID NO: 714308 - DNA, 82 bp, Homo sapiens
cctggagaccttcgagcaccccaacgtggtcagtattgttgtccagacatgataaataactttttgggactggctaaaacag

SEQ ID NO: 714309 - DNA, 89 bp, Homo sapiens
atcgtctatcattggatgaagtggctccggagatcatggcggacaccgacctgttcatggaatgtgaggaggaggagttggagccatgg

SEQ ID NO: 714310 - DNA, 82 bp, Homo sapiens
cgatgatgatgaagaggatgatgatgaagattgtggacatcggatacccaaggagacgaagctgaagcaggagaaggagggg

SEQ ID NO: 714311 - DNA, 112 bp, Homo sapiens
cctaaaatgaccaatgtgtgatttcagtggaataaatggcgtccaaagtcacagatgctatagtctggtatcaaaagaagctccagtaataaaccgattcacaaggcgtgcc

SEQ ID NO: 714312 - DNA, 97 bp, Homo sapiens
aaattgcccttcgggaaatccgaatgctcaaggatggatcaaacctcactgcaagtcagagggcctatgcgcctgagcagctgcagaaacaggataa

SEQ ID NO: 714313 - DNA, 82 bp, Homo sapiens
ccgggctctgagcgcgccgcggcacaggtcatcatcagatttgaaatatttaaagtggatacaaaactatttcagcaatgca

SEQ ID NO: 714314 - DNA, 100 bp, Homo sapiens
ctccttctctcgcacttctatcacgccatccagccaggacatctgcaggtgtgatcccctgggcccgtttgttgtcgggggagaagacttagaccctttt

SEQ ID NO: 714315 - DNA, 100 bp, Homo sapiens
ccctggctcaggaacagggacagcacctcatcccctggatgggggaccacaagatcctcatcgacaggtgttggagcgggccggagagaagtagagtggg

SEQ ID NO: 714316 - DNA, 98 bp, Homo sapiens
ctggaagccaatgcccctgctttcgacaggccaaatttgagtttcatcatggtgactatgaaaaacagtttctgcatgtactgagccgcaaggacaag

SEQ ID NO: 714317 - DNA, 100 bp, Homo sapiens
gaaccagttaactgtacaaactacacagctcatggtcctggcattgatgtgcctgctccagacatgagcacaggtgagcgggagatgtcctggatcgctg

SEQ ID NO: 714318 - DNA, 96 bp, Homo sapiens
gtcaggaggtgctcaaaacgcccgtgcggaccacggcctgtcagcacgtttcacatgagagatcctaataatcaacttcacgtaattaaaaatttg

SEQ ID NO: 714319 - DNA, 100 bp, Homo sapiens
ctccagtcggcccaggcgccgcggcgaggagcgagcgctgcgaggtggcggcctgagatttctcacattggcaaactgagagattttcttctggaacaca

SEQ ID NO: 714320 - DNA, 100 bp, Homo sapiens
gcaagtgcggggaagagctgggtcgactcaagaattggatttgcaactcaaaaccaaaggctccccactgctgcaagatatttctgcagaaagatcacca

SEQ ID NO: 714321 - DNA, 100 bp, Homo sapiens
ctcctccgtttctgtatccccacgaggccatcctcacgcttcccagacctgtccgggcctcactgccgactctgccttcccaggtgtatgacgtgcctac

SEQ ID NO: 714322 - DNA, 90 bp, Homo sapiens
agcctgctcttgaggttcacagatgatacgtttgatccagaacttgcagcaacaataggattcactccttctccagttgcacagccacac

SEQ ID NO: 714323 - DNA, 96 bp, Homo sapiens
gggagaagagccatgggtcctcgacctgcagggagcagaggggacagaggcaccaaggacctccaagacagtacaagccagctgccatgttgtgag

SEQ ID NO: 714324 - DNA, 51 bp, Homo sapiens
ggaggccgtgaagaccttcaatagcgaggaatttagataatgggctgtgtg

SEQ ID NO: 714325 - DNA, 75 bp, Homo sapiens
cttggggcaaaatgtggacaaggccaaatttgtatcctactgtggggcttcaaacaccaggagaagtggtcgatg

SEQ ID NO: 714326 - DNA, 82 bp, Homo sapiens
aggaatgggacctcgagtcactgtggactttgtgttttatgccccacgtctgagaatcaacaagcggatcctgcagctctgc

SEQ ID NO: 714327 - DNA, 75 bp, Homo sapiens
ccaagaaacatatatcccagatttctgtggcagaagatgatgatgaaagtggaccgtttggagggagccattcac

SEQ ID NO: 714328 - DNA, 83 bp, Homo sapiens
tcatcctgctgggcttcgtccagatcgggaagggatgatcggctgaatgtaacagaggaactaacgtccaacgacaagacgag

SEQ ID NO: 714329 - DNA, 50 bp, Homo sapiens
gggtgtcttctccctcgccagctgggctcccagtaccagccttgcaagag

SEQ ID NO: 714330 - DNA, 100 bp, Homo sapiens
ttgagggacccccgactccaagcgcgaaaaccccggatggtgaggagcagaaccttgatgctctgcacgaccaccttgctaccatctacccaggaatgcg

SEQ ID NO: 714331 - DNA, 100 bp, Homo sapiens
gctatcgccttcgccgaccggctacgcgccgtggacacagacggggtggagcccatggaatcggtcctggaggacaggtgtgatgaatgcagactctgct

SEQ ID NO: 714332 - DNA, 80 bp, Homo sapiens
agcagacagcgccatcatgaatccagctagcaaagtaattgcactgaaagatgtgaaggagctcttagattctgacagtg

SEQ ID NO: 714333 - DNA, 95 bp, Homo sapiens
aggaaacttgcagcaaagccattcgggttggagtaattgaagaactggacggggctggaggagaagagtatcccatggatatttggctattgctg

SEQ ID NO: 714334 - DNA, 88 bp, Homo sapiens
gaggatggacccaggagatcccgctggtgaccctgccgctggcgagcgccaccgcatgggacggggaggtttactgcatcgacgcgcg

SEQ ID NO: 714335 - DNA, 114 bp, Homo sapiens
gcaggaggaaggcatggactcggagattggctgcctcatccgcttctatgcagctgtcgtgagcgccatcccggtgccaacgctagaaagtgcccagtacccaggaatcctccc

SEQ ID NO: 714336 - DNA, 88 bp, Homo sapiens
tcgggcggaggaggaagtaggggtgcacctcagcactatcccaagactgctggcaacagcctcttagcaatgcataccacgagttagc

SEQ ID NO: 714337 - DNA, 90 bp, Homo sapiens
cggtgctgcgagggcagaacctggacccagaagtccacattcccctcgagaatctacagcagtttcctgccttcaattcttatacctgct

SEQ ID NO: 714338 - DNA, 74 bp, Homo sapiens
gttcgctgcaagtcggcggaaagtttggctgcgcgggttcccccgaagttcagagatggagtttcaccatgttg

SEQ ID NO: 714339 - DNA, 98 bp, Homo sapiens
agactattttggagggcatagatccggccaagcatcaggtgtccatctatgcatccccagacaaacggaatcaaacacattatgctttgcaggcatca

SEQ ID NO: 714340 - DNA, 96 bp, Homo sapiens
gtggctacatgaagttctgaaggatgttcagccccgggtcactccacttgcgggccaatccgagcctacatccttgcccacaaggatgccatccag

SEQ ID NO: 714341 - DNA, 87 bp, Homo sapiens
caacattgacctcacaaccgagcaaattgaagagacgttaaaatacttcccctctggtgcacatggcttcctccccggcggtggacg

SEQ ID NO: 714342 - DNA, 75 bp, Homo sapiens
gataattgggatgatgacaatgtagaggatgacttctctaatcagttacgactttataggccattttatcttcag

SEQ ID NO: 714343 - DNA, 98 bp, Homo sapiens
gactccacagtattcgacatcaaatacagaataatccagaatggctactctgatctatgttgataaggaaaatggagaaccaggcacccgtgtggttg

SEQ ID NO: 714344 - DNA, 98 bp, Homo sapiens
tgagcatcagcccacaacctggtcctcatactattttgacctgcagctcctcgtcttcatgtttccaggcattgaacctggccacatcccaggtaccg

SEQ ID NO: 714345 - DNA, 97 bp, Homo sapiens
gcctgctggaccctgccaagaagtcgcccatcgcagcagctcgagccagcggtgagcctggagcagtgtgagcagctggtggcagagctccgcggca

SEQ ID NO: 714346 - DNA, 75 bp, Homo sapiens
gaaagagattgggtacttaatgacttccatggagtcactgattcatcactttaagttgtatactgagggctacca

SEQ ID NO: 714347 - DNA, 82 bp, Homo sapiens
ctgaaacccgcagaggaaaattcaggcaacgcctcgcgttgatgtctttggtggacttgggaaagaggttgctagaagcagc

SEQ ID NO: 714348 - DNA, 78 bp, Homo sapiens
cagcagctaacattccctggacagggcacagcaaggatttgaacctagaatttgatcaactcttcaaactaaacatca

SEQ ID NO: 714349 - DNA, 122 bp, Homo sapiens
cggcgcgactcgcttctttcggttctacctgggagaatccaccgccatccgccaccatgacctgcaggctgggacaatgaaaagaaaatagctattttacatgaaaattttacaaccgtgaa

SEQ ID NO: 714350 - DNA, 83 bp, Homo sapiens
gcaacaacgtttattgtgcgcaggcttttccatcctcatcctcacaggttgtgcatgcctaaagggctatctttcaggacaca

SEQ ID NO: 714351 - DNA, 75 bp, Homo sapiens
ttgagaagaggcggaacccggcagcaggcctgatccagaataatccagaatggctactctgatctatgttgataa

SEQ ID NO: 714352 - DNA, 151 bp, Homo sapiens
cctgaaccaggctgagattctgcggggagacaagttcatccccattttccaaggggacgacagcgtcgttattgggttctgcttgcaaaggatccaccagggtctgattttttatgagaagctgctaggatcggatattttcacaggggag

SEQ ID NO: 714353 - DNA, 100 bp, Homo sapiens
atgcaagaggcgtttctataagaattggtacatcgaggaggccattgagaaactaagcaagcggcaccagtaccacatccgtgcctatgatcccaaggga

SEQ ID NO: 714354 - DNA, 100 bp, Homo sapiens
ctccacactcctggaactgtacacctattggaacccttaagtcaagtaagggagaattgactacgcttatacatcagcttcaagaaaaggacaagttact

SEQ ID NO: 714355 - DNA, 100 bp, Homo sapiens
cccgtactgcacatcgtggtggtcggatttcaccacaagaagggctgccaggccggagcctcaacagaaagctcctttagttcctcctcctccaccgcca

SEQ ID NO: 714356 - DNA, 101 bp, Homo sapiens
ggagaaccaactggtcccgaaagagggagcatgataaagatccagaaagcttttttaaggtattaatgcatcttaaagacttaggactcaatttccacgtg

SEQ ID NO: 714357 - DNA, 100 bp, Homo sapiens
ttttcagctggaagaattgcccggtgtgtgctgtatttatggagtttaaagattaatcatcccaaaacattgtttctgcttcggggaaatcatgaatgca

SEQ ID NO: 714358 - DNA, 89 bp, Homo sapiens
attccgcggcgggggctccgcgagcggaattccggcggctgccgtgactccagtgcaaagacaaagcatggaggacacaagaatgggag

SEQ ID NO: 714359 - DNA, 51 bp, Homo sapiens
cccgttaaccccaatactttaaaagagaatgtttcctatggactcaaagcc

SEQ ID NO: 714360 - DNA, 97 bp, Homo sapiens
ggcaatctgatccagcctggggacattatccggctcaccaaaggtgagacggtttaagcggaagcatcttactgccattgactgccagcatttggct

SEQ ID NO: 714361 - DNA, 83 bp, Homo sapiens
tcaccgccctcaccacccctatccagacggctgcccttcaagtaccaaattcagtttgcctgttctgtatgcaagttccgtag

SEQ ID NO: 714362 - DNA, 83 bp, Homo sapiens
cccgggccatggccgccgccgatgccgaggtggtataagttgaaatccaaaccaggaaagaaggacaaggagcgaggagaaat

SEQ ID NO: 714363 - DNA, 98 bp, Homo sapiens
gccgacgcggaggcggcagcggcgggcctgaggcgaaggagcggccgggagcccgccgcgctggtagcgttcctccaactcctctgccaaccaatgat

SEQ ID NO: 714364 - DNA, 98 bp, Homo sapiens
acttagttctgtaacgccatctcccaccccagagaacgagcccagacatactccaactaagagtaatactattgtaaatagaaaaaaaataagttctc

SEQ ID NO: 714365 - DNA, 100 bp, Homo sapiens
gttaaggattccaagtaactcttatttggattcatctaattgatgagtttaataccgatatggatatctttgtgtttctgctatcaacaaaagctggtgg

SEQ ID NO: 714366 - DNA, 100 bp, Homo sapiens
cttgtctcttatttagttctggggagcgcctcgtcgacatgagtgatgtggaggaaaacaacttcgagggcagagatcagctgctgctctctgaaaagcc

SEQ ID NO: 714367 - DNA, 74 bp, Homo sapiens
aaggtcgaagattcataactctcatcgataacttttatgatctcaagtatgagaccagggcccgcctagagagg

SEQ ID NO: 714368 - DNA, 97 bp, Homo sapiens
cagtttctgtgtcccacttcatctttaataagaattacgcaaaacttattcctggagctacagtaggtctacttcagaaggactccggaaacattct

SEQ ID NO: 714369 - DNA, 98 bp, Homo sapiens
ggaggcagcgcgggatcccagcctcaggcgtgcgcggacggtgtgcggggttaatgcctcttggaagtcaggagtcttcagacagtctagctgcagag

SEQ ID NO: 714370 - DNA, 75 bp, Homo sapiens
tgccccgcgtcgggccgggcgccacctcccccctgcctccctctccgctgtgttcaaaaggtgatgacctatcaa

SEQ ID NO: 714371 - DNA, 100 bp, Homo sapiens
cctcctcctgctgttctcgggagccgtggccctgatccagacctgggcaggtcagcccaaggccaaccccactgtcactctgttcccgccctcctctgag

SEQ ID NO: 714372 - DNA, 82 bp, Homo sapiens
agttccaagatgtctcctttgcctacccaaaccgcccagatgtcttagtgctacaggtatgtgcactgcgcgtgaccagccg

SEQ ID NO: 714373 - DNA, 100 bp, Homo sapiens
ccgccccggtcggccgccgctccccgcctagtccacggagctcaatggcggcagtcgcgctgagggactcggctcaggaagatcagcccatctacttggc

SEQ ID NO: 714374 - DNA, 96 bp, Homo sapiens
tgcaatatgctgctccaggcggtcttattggccataggaaaaggatacagagtagagtttcatgaacctgaaacttggtggaaatttgatcctgaa

SEQ ID NO: 714375 - DNA, 100 bp, Homo sapiens
acggccccagggaggatgacgaacccaacctggtgcccggcccgcagccctgggcgctgcctatggcacagccaagagcggtaccggcattgcggccatg

SEQ ID NO: 714376 - DNA, 90 bp, Homo sapiens
gccccagcccgggtgcccacactggccgtcccggccatctcgctgcccgacgatgtccgcaggcgcagtcctgcgttaactgcggccggg

SEQ ID NO: 714377 - DNA, 100 bp, Homo sapiens
ctgggacacccgggagtcaggaaatgttcaatctcatccctcccagcagctccccttccaccccccggggaactgaagattgtcctggccgcgacctgag

SEQ ID NO: 714378 - DNA, 83 bp, Homo sapiens
gtccaggcctgacagctctgcggctcgggccctgaggaggaggcaaaacagattcagaatctgcagaaagcaggcactcgtac

SEQ ID NO: 714379 - DNA, 98 bp, Homo sapiens
gtgccggcctagcgtcctggaattacttcaatcaaagttgctggagaatgtaaccctaatccataaaccagtgtcgttgcaaccccgtgggctgatca

SEQ ID NO: 714380 - DNA, 90 bp, Homo sapiens
gtggaacagattctcagggtggagatgtcagcccttcagaaacagtattacaaaattacctctctgaacaggactttgtgtctgtgtttg

SEQ ID NO: 714381 - DNA, 50 bp, Homo sapiens
ggactgggaggagcatgtcaacagttctgggattaccgccagcctcggaa

SEQ ID NO: 714382 - DNA, 82 bp, Homo sapiens
cctggatcttctggggttccctatgcaaatgccaaaggaattggttatccaggctccaggaacactcggaggtgtctggctt

SEQ ID NO: 714383 - DNA, 75 bp, Homo sapiens
taggaaagacaccagaagccggtggagagattcaaccagttagcgtgaaagttggagataaagttcttctcccag

SEQ ID NO: 714384 - DNA, 83 bp, Homo sapiens
ttcagccgaggccgccgccgcctctccttgctgcagccatggaatgcctgaggaaacccagacccaagaccaaccgatggagg

SEQ ID NO: 714385 - DNA, 100 bp, Homo sapiens
cgcactgacagcgggaggcagagggaggaacctggacgccggaagccgggaaatgactggtcaaacaaatggattttacagaggcttacgcggacacgtg

SEQ ID NO: 714386 - DNA, 98 bp, Homo sapiens
atctgacaaacactgtattcgttgacagagctttgatagtcgtaccatatgcagaagttcgttcccacatgcagggcagcacaaggagaatgggcgtc

SEQ ID NO: 714387 - DNA, 101 bp, Homo sapiens
ttgagaactactatgatgatctggacttcaaaaacatcatggactttgttcagaaaaagagtatctgcggggactgtgtccaggggcagagggcccaccca

SEQ ID NO: 714388 - DNA, 73 bp, Homo sapiens
gggtgatgaagatggttatgaagaagaagaagatgagaacagtagacagtcgaaaaagcttgtggtgaagggg

SEQ ID NO: 714389 - DNA, 50 bp, Homo sapiens
cgctccccgaactcactccgctgcgaaactacattgtgcaggacctgatg

SEQ ID NO: 714390 - DNA, 75 bp, Homo sapiens
atcccagtttgaaagtgaggctagatcctgactctggacaaaggcgtcagtggctgcaggaggccatgtcggctg

SEQ ID NO: 714391 - DNA, 74 bp, Homo sapiens
ggcaagtcggcgctcaccatccagttcatccagaattccttgatctatgaacttttctctgttatggttcattc

SEQ ID NO: 714392 - DNA, 75 bp, Homo sapiens
tctgaagcatctgcttacaagcgtaaatttggaaggcaaagccagccctctgtcacttctacaaatggcctcccc

SEQ ID NO: 714393 - DNA, 101 bp, Homo sapiens
cccacctgcgacacatcgagcacatggaggatatgggccctcacattttccaaacctgtccatctgctaactattttgactgcagagccatgtccattgga

SEQ ID NO: 714394 - DNA, 74 bp, Homo sapiens
aactctatcccaggaatacagctttgcattaggtctcagcatcagaggagcccaggaggaggaccctcccgatc

SEQ ID NO: 714395 - DNA, 90 bp, Homo sapiens
tgtcaaggggatttgaagccaatgcacctgcttttgacagctgttaggcaattttcttcagtggtatggcattttctcaaataaaactct

SEQ ID NO: 714396 - DNA, 71 bp, Homo sapiens
tggagccattgaagggaacaacacccttgatgctctgtgagtttgtgcagaaggatgagttgaaaccagca

SEQ ID NO: 714397 - DNA, 75 bp, Homo sapiens
tgcatgtcttctgaatagcaataaatattttcccagcaggacagtactgcttttaaagagacagtgttagggatc

SEQ ID NO: 714398 - DNA, 75 bp, Homo sapiens
cggtgtctgttgcagcttgcgtttggggctttcgacatgacaggtcactagagcctgacattgagatggcttggg

SEQ ID NO: 714399 - DNA, 51 bp, Homo sapiens
gggaggaggccggggaccacacaggtcatccttgtcagctcctcactcagt

SEQ ID NO: 714400 - DNA, 75 bp, Homo sapiens
ggggaggcagcgcgggatcccagcctcaggcgtgcgcggacggtgtgcgggtgcagtagacattgttgcaatcat

SEQ ID NO: 714401 - DNA, 100 bp, Homo sapiens
ccatcgtgtgcctgatgatcacgcagctggctggcttcagtggaccagcatttggctttatgtcccgagttgccctacaagcagagaagatgaatcatca

SEQ ID NO: 714402 - DNA, 75 bp, Homo sapiens
catctgagcctcatcttcctcatctgttttgaggtttccctgaaacctgggctcttgaagacgcatcactggagc

SEQ ID NO: 714403 - DNA, 100 bp, Homo sapiens
cgggaaacaagtccaaaccgaataggattaggttctcctgaaaagaaagctgaacattcatctataaatcaagaaaatggcactgcaaaccctatcaaga

SEQ ID NO: 714404 - DNA, 75 bp, Homo sapiens
cccaaggccctggaagtgacagatgactgtgaagtgctgaccacactcaccccagacactggccgtatcctgtcc

SEQ ID NO: 714405 - DNA, 98 bp, Homo sapiens
cgctgcctggcccaggcgcacacggaagtgaacttgaaggtgcacattcttgatactgaaagttttgaaactacatttggccctaagtcacagaggaa

SEQ ID NO: 714406 - DNA, 90 bp, Homo sapiens
tgttgtctgagacccctccggccggccgcggcgtggggatgccgtcgcaccgaatgccctccgaagtcaggatggctaaaggtgacccca

SEQ ID NO: 714407 - DNA, 74 bp, Homo sapiens
gaagctgtatggcagctaccctgaggatcattgaagagaacatccctgagaaacctgctcctccaaagccagag

SEQ ID NO: 714408 - DNA, 82 bp, Homo sapiens
atcagactgcacggcggccgcctgtggtgctgtttggtgcacctcgatttggaggaagtagggcagggcccttatctggaaa

SEQ ID NO: 714409 - DNA, 75 bp, Homo sapiens
tgtttggggtgtgttttacaaagcatccacccgttttgtcaagtgtgaaaagtgtcatcatttttttgttgtgct

SEQ ID NO: 714410 - DNA, 100 bp, Homo sapiens
attcagtttgcatctctccctcctttaaacagcttctccgggtctcagcatggtttggaattcacccagttgcaggccgaatgcctggtcagcttaatgt

SEQ ID NO: 714411 - DNA, 94 bp, Homo sapiens
cagaagtcgcgtgtctaggtgagtcgcggtgggtcctcgcttgcagttcagcgaccacgccaagaactacatcgcgctggatgactttgtggag

SEQ ID NO: 714412 - DNA, 51 bp, Homo sapiens
attccaagtaactcttatttgacagcatgagtatctatgacgatattgatg

SEQ ID NO: 714413 - DNA, 98 bp, Homo sapiens
gtggaacaccctcactggcccgggccggcgcgggagggctgtgtgatggcctcggagcgcccggagccggaggtgctttacaaggccaagtacggtcc

SEQ ID NO: 714414 - DNA, 49 bp, Homo sapiens
gataagcctccacttacagatctgggtagcataatggcagaacctgttt

SEQ ID NO: 714415 - DNA, 49 bp, Homo sapiens
aaatcctgttaccctagcaacagatatatttttgccatcatggatcagt

SEQ ID NO: 714416 - DNA, 100 bp, Homo sapiens
gcctgggaggccggccggtgccagcacctttcggcttctgagacggcggcagcagcggcattcagctgaagagacttgctttgacaagtacactgggaac

SEQ ID NO: 714417 - DNA, 75 bp, Homo sapiens
gtgggccggacctgggagtggcaggtacgagtgcttccatatccatttacccaccattggcaatttgaaaggacc

SEQ ID NO: 714418 - DNA, 100 bp, Homo sapiens
aggttgaaaagatccgatggcagcaccacttcgaccagcttcatcctcagacagagcacaaagttatcattgttgggctggataatgcagggaaaactac

SEQ ID NO: 714419 - DNA, 75 bp, Homo sapiens
cttagactaccccaggaacccgcgccgcgagggctccttccctcaggtcttctttgatgtgaggattggagacaa

SEQ ID NO: 714420 - DNA, 95 bp, Homo sapiens
ggaagaggattatgaagatgacaaggatgatgatattagtgatactttctctgaaccagcatcttcatgatacagttaagaggaatcttgacagc

SEQ ID NO: 714421 - DNA, 100 bp, Homo sapiens
gccagggaacggggcatcgcggttccaacgatcagacctattgtgaccgcctggtgcaggacacgcctttcctgacaggccatgggcgcttgagtgagca

SEQ ID NO: 714422 - DNA, 98 bp, Homo sapiens
gcgtctctgtccccatctggttttaggaggaggacggttccacctgcctccaccacgcagccaaaatcgggaacttggagatggtcagcctgctgctg

SEQ ID NO: 714423 - DNA, 75 bp, Homo sapiens
cttcagcacaatgacattgacaaacggctggacagtgccacatcgcttatccaggcagctaaaaacctgatgaat

SEQ ID NO: 714424 - DNA, 75 bp, Homo sapiens
gaatgaggaggacaacagctacaaccgggggtggtccattatggctgacatgcaaaatctggtagaaagattgga

SEQ ID NO: 714425 - DNA, 120 bp, Homo sapiens
gcctatgaccagcaagaggatggggccctggatgagggggaagggcctcaaagccagaaggaactgtggctgcaccatctgtcttcatcttcccgccatctgatgagcagttgaaatctg

SEQ ID NO: 714426 - DNA, 82 bp, Homo sapiens
gacgtcttgcctgtgtcccacttgttcgcggcctatagaattcagaaggagctggcggacatcactttagaccctccaccta

SEQ ID NO: 714427 - DNA, 90 bp, Homo sapiens
atgctgaagatgacaacatctatcaacagaagatcaagatattctctaagccgctttcatcatgggagaaatagagcagaggccgacccc

SEQ ID NO: 714428 - DNA, 50 bp, Homo sapiens
gaatgaagctgcggaccctcgcgggaccagttactctccacaagaaaatt

SEQ ID NO: 714429 - DNA, 50 bp, Homo sapiens
ctggtgtgcatgcagtgggcgactgattcttgctattccaaatcctcttc

SEQ ID NO: 714430 - DNA, 100 bp, Homo sapiens
ggaactttgggtcctgaatcttctgggagctgaggaaccagatatcttgaaaagctgccagaaaggttacttcttgctgcagattctgcgcaggatcgga

SEQ ID NO: 714431 - DNA, 82 bp, Homo sapiens
ccttactgtaatgggactatttctactccacataatctgatcacagaactgtgtggtgcaaagcgggttggttattttggtc

SEQ ID NO: 714432 - DNA, 75 bp, Homo sapiens
gaaaacctgaaaatcagcaatttcctgacactgagaatgaagagtatcacagaaaccttccttccttccagttgt

SEQ ID NO: 714433 - DNA, 50 bp, Homo sapiens
ttggagatacctcatcatatcacacaaagagatgcagatagatctttggg

SEQ ID NO: 714434 - DNA, 107 bp, Homo sapiens
gtgaacctggaccaggaggaggttttcaggaccaaaattgtggaaaagtcactctgagatcctgaaggagctagacgagtgctacgagcgcttcagtcgcgagacag

SEQ ID NO: 714435 - DNA, 82 bp, Homo sapiens
ccagccatggcagattcctccgggcagcaggggaaccctactctggaaactgtcagtcccagggcactggggagggctgagg

SEQ ID NO: 714436 - DNA, 90 bp, Homo sapiens
ctgcaacactcctctacagtttgaggtatttgcatgttgctgaccattcttgaggaacaagccatggattccctgttgttgggctcagac

SEQ ID NO: 714437 - DNA, 97 bp, Homo sapiens
ggcgcttcaggactaccgcaagaagttgcttgaacacaaggagatcgacggccgtcttaaggagtatgacgaagatgatcctgcagaagctgaaaag

SEQ ID NO: 714438 - DNA, 75 bp, Homo sapiens
cgtggagcaggcgcagaacagtcggaggtgcacatgaacttgaacagatgcagctgattttagaatctattcctg

SEQ ID NO: 714439 - DNA, 90 bp, Homo sapiens
gtcttaacatgcttcaaataaatcagtttgtgaagaaatatgggaacctttttagcttggagcttggtgacatatctgcagttcttatta

SEQ ID NO: 714440 - DNA, 100 bp, Homo sapiens
aaaaggagggagctactctcaggctgcgtctggttgtcttcttgcctgccctgtgtcgtaaaatgggggtcccttactgcattatcaagggaaaggcaag

SEQ ID NO: 714441 - DNA, 82 bp, Homo sapiens
agatccatttacactttacaaacatgaaaggctcccggagcagcgctgactcctccaggaaacactgaggcagacgtgtcgg

SEQ ID NO: 714442 - DNA, 83 bp, Homo sapiens
gcggcggcaacgagggaatagtggacgaactgcacgtgtacaacacggggggatatgagactttctactcggaatatcctgag

SEQ ID NO: 714443 - DNA, 100 bp, Homo sapiens
caacgagaagaaccggaagctctttgaccttctggatgtccttgagttcaaccaggaaccactcgttttgactattattttatcactctttgtgaaactt

SEQ ID NO: 714444 - DNA, 90 bp, Homo sapiens
gcgtacccgggacccgcccgcccgcgggagtgcagccttcatattcatgcttcctacagcatctcccagaaactgaatgttccaatggcc

SEQ ID NO: 714445 - DNA, 101 bp, Homo sapiens
atccctgtgaatgtgtttgctctcatgaacatgcaatgagaagactgatcaatctggtcaagaacccagtatggaagggagaagtgaaaagttgaagaaaa

SEQ ID NO: 714446 - DNA, 100 bp, Homo sapiens
gtgacaatcagtttcatgaaggagctcatgcagtggtacaaggaccagaagaaactgcaccggaaatgtgcctaccagccaatcctgaggcaaaagaaac

SEQ ID NO: 714447 - DNA, 75 bp, Homo sapiens
aacatacagtcagatctcaggaatggaaggcgatcattatttcgaagttctagtattctggatcaccgtgaagga

SEQ ID NO: 714448 - DNA, 83 bp, Homo sapiens
ttccccctccctcagcttccgccccaaaaggttaaagatcgaggtccggaagccactaggagattttttaattggttttattg

SEQ ID NO: 714449 - DNA, 75 bp, Homo sapiens
tacttggctgacctcctgatgcctcacttgtacaaaattggacagctgtacatgatcagcaaacacagccatgaa

SEQ ID NO: 714450 - DNA, 100 bp, Homo sapiens
ggctttcaaaagtgcgagatcaacttggacaggaattggaagaactcacagctagtctatttgagagaagtatatcagagaattccctggtagcaatgga

SEQ ID NO: 714451 - DNA, 100 bp, Homo sapiens
cgcagtggtcgcttcttctccttgcatgcacggtgcaaatgagactccctcaggacgtccgcgggaagccaagcttgtggagttcgatttcttgggagca

SEQ ID NO: 714452 - DNA, 80 bp, Homo sapiens
cgaggagccagccttcaatgtgtcctacaccaggcagcccccaaatcccggcccaggaaaaccagtagattcccagacat

SEQ ID NO: 714453 - DNA, 83 bp, Homo sapiens
ttatttttccccaattcagcagagaatattttcaagggggatattaataaggcagcggaaagaagaaatatgaatacggctcc

SEQ ID NO: 714454 - DNA, 74 bp, Homo sapiens
aaggaatccaccttcttacgctatggcagcaggatcaaggtgaaaaggagaaccccatgcgggaacttcgcatc

SEQ ID NO: 714455 - DNA, 100 bp, Homo sapiens
aaaaaaacctctgaccgtgaagagacatgagatgattgccaaacccccagggaggtggggaagacagggctccagctaccacaggacgggctctgggtat

SEQ ID NO: 714456 - DNA, 76 bp, Homo sapiens
tgggggctgaagagcgcgccgccctctcgtcccactttccaggtttttggattcaaagcataaaaaccattacaag

SEQ ID NO: 714457 - DNA, 75 bp, Homo sapiens
taaccacttaccccttctcaccgaggaagagcgggagaaagggtattagaaaactactcggatgctccaatgaca

SEQ ID NO: 714458 - DNA, 75 bp, Homo sapiens
ctggaggctggcggacaggcgacagcgacctgcggcagattgccaacactcctgatagctgaatgtgtgctggtt

SEQ ID NO: 714459 - DNA, 83 bp, Homo sapiens
gaatgcatcagtgcccttgtggcgaatggggctcacgtcgagagtacttgattcttcagaaaacctccaaagtagatgtggac

SEQ ID NO: 714460 - DNA, 82 bp, Homo sapiens
tggaggagctgtgcagccgcgaggaggcgcgggaggtgttcgagaacgaccccgagacgggtgcttcaaggatgaccgcatc

SEQ ID NO: 714461 - DNA, 97 bp, Homo sapiens
cccaccgtgggctccacgttcttacttggaaaaggcccgccgtcccccgcgcgatggagcctgggacggaagcgcagagccgacggcaggcgctgga

SEQ ID NO: 714462 - DNA, 100 bp, Homo sapiens
cctggtggataaccaacaagatggggaagaaaaggattgagaactttaagagtggtgtggttcttatagaaaattggaacgatatggggaatttctaaag

SEQ ID NO: 714463 - DNA, 80 bp, Homo sapiens
gttcgtgtgtggagacaggggcttttatttcaacaatgcagatcttcgtgaagactctgactggtaagaccatcaccctc

SEQ ID NO: 714464 - DNA, 100 bp, Homo sapiens
ttcagaatcgactcaagagttacatgcatcaggaccgtgtgtatgtacaacaaaataatgtggagaacgtctacaatttgggattaattatttttcgaga

SEQ ID NO: 714465 - DNA, 82 bp, Homo sapiens
ccgagaccgcggccgggaccgagggtgtcttcccggaccagcggtgcagtcccgccaaaggaagaggagctccgggcggcgg

SEQ ID NO: 714466 - DNA, 75 bp, Homo sapiens
ctcagtcctgtgcctcccgtccctggagcgccacccacggtgctcgtggtttccctggaactcctggacttcctg

SEQ ID NO: 714467 - DNA, 74 bp, Homo sapiens
ccggacgctggcggatgtgcgagcgaggtctcagtggcccttagcagcagctccattcgtgtggccatgctgga

SEQ ID NO: 714468 - DNA, 90 bp, Homo sapiens
ccgccaatcgcaaggcacctctgagaacttcagtgttctaagaacggaagcatctgggctggatggaatttagcatcaagcagagtcccc

SEQ ID NO: 714469 - DNA, 85 bp, Homo sapiens
cccattccctgaagatgattctaattcaacaaatcataacttgggcaactccaacaacattgccaccgtggacatctccgcaggc

SEQ ID NO: 714470 - DNA, 98 bp, Homo sapiens
cgagtatatatctgggatccacataatggagacattctgatggaatttggtgaaagtagagcctattcccgccattggccacgccacgctcggcactg

SEQ ID NO: 714471 - DNA, 74 bp, Homo sapiens
gaatagttcaactacgaatactaagaacccagtccttatttggaaaaaacttgacaacaattttaaatgagtat

SEQ ID NO: 714472 - DNA, 100 bp, Homo sapiens
tgacagggttccggaaggacgatgatgaggatgttggtacctgcatctgtaggcctccttgaaaccgggctgcttttgtcagagacgttttattaccggg

SEQ ID NO: 714473 - DNA, 100 bp, Homo sapiens
gcctttcaaatctgtaaagtgttaactaccacctgcattgtttatacagcaaaaatatggctacacacacctttctgcaggagagctgcttcgtgatgaa

SEQ ID NO: 714474 - DNA, 90 bp, Homo sapiens
gaccgattgtcgctcggcggcgggagtcgattattctggaaaactatgcgtaccctggtgttcttctgattggcactgactcccacaccc

SEQ ID NO: 714475 - DNA, 101 bp, Homo sapiens
cctgggactgagtaaggggaataaatacagtgctcagggcgagcgacagagaatggatcttggagaatgtctgaaagtccatgacctggctttaagagcgg

SEQ ID NO: 714476 - DNA, 87 bp, Homo sapiens
aaacatcaaatgaacatcttcaaaagcatgtggaggatctgttgaccaaattaaaagagtattgactcggagacaaaaagaggccaa

SEQ ID NO: 714477 - DNA, 98 bp, Homo sapiens
aaaaagagatgtggggggattctcgacctgctaacagaactggaccttttcgggctgtgactcccaaatgagcgtgtcagaaatgtcgtgtagtgaaa

SEQ ID NO: 714478 - DNA, 75 bp, Homo sapiens
gccccctgtgtggcaaacctttcttgagctcagatgatggtggtgctaccccagtacaggatgaacgggattcag

SEQ ID NO: 714479 - DNA, 90 bp, Homo sapiens
ccccagcgcccactggggatggcaaagacgacatccggtgcgccgaggctgctcacaaaagtaaaaaagagtgtcaagtggacatgcaaa

SEQ ID NO: 714480 - DNA, 101 bp, Homo sapiens
ccctgatgcgggagctggatgaggagggctctgatccccccctgccggggagggcccagcgcatccgacagctgcatcttcctcccgtgaggctggccgag

SEQ ID NO: 714481 - DNA, 75 bp, Homo sapiens
tatcttctgctgtagcctggcacaagatcgatcctgtcctcggtaccgtgggctttgggtctggcctccacgggt

SEQ ID NO: 714482 - DNA, 101 bp, Homo sapiens
ggcccaaccgccgccagcaccatggccagcaccatttccggtctcctctgagcctccggcctccataagacccaaaacagatgacacctcttcccagtccc

SEQ ID NO: 714483 - DNA, 135 bp, Homo sapiens
cgcctggagaaagagcagctcatcgagatggggaacaggctccgtgcagagctgggccgacccgaaaaacaatcccgaagagatgacttggagtctctgggctacgtgctaatgtacttcaacctgggctctctc

SEQ ID NO: 714484 - DNA, 75 bp, Homo sapiens
ttaaatacttaagagaagaagttaaaacatttcagggcaagccaattatgatgtatcctccactcctcgctggcc

SEQ ID NO: 714485 - DNA, 100 bp, Homo sapiens
aaaacgaagaaatcctcttttactgcctgtggacaaaatccatccttcgttgaaggcatttcactgaaagcagaagctgtctcagtcaagaaagaatcag

SEQ ID NO: 714486 - DNA, 50 bp, Homo sapiens
gagttagagccaacatgagtgagacactggaggtggtattaatattccag

SEQ ID NO: 714487 - DNA, 100 bp, Homo sapiens
cgcagaacccgggagtaggagactcagaatcgaatctcttctccctccccttcttggtcatttgaaccaattctccgcctccttccccagggaatctctc

SEQ ID NO: 714488 - DNA, 83 bp, Homo sapiens
cgcagcaccgcagccttgggcctcgcgccggctatggccgtgccctggggctgagccctcagaacactatggctatgcatcct

SEQ ID NO: 714489 - DNA, 100 bp, Homo sapiens
aggtggatcccgccgggaggtactttgctgatgtggtgctggaaaaagccatgcacaagtgcatcttgaagcccctcaaggggcacgtggaggccatgct

SEQ ID NO: 714490 - DNA, 75 bp, Homo sapiens
catcaccatcaccttcaatccgctctactggaatgtggtttggcaaatacgtgtagacctacatttattaaatca

SEQ ID NO: 714491 - DNA, 101 bp, Homo sapiens
taggaaaccaggaatccagggaaggcaggcaatgaatcgctccctggctaatgtgattcttggaggctatggcaccacttcaacagctggtggaaaaccca

SEQ ID NO: 714492 - DNA, 50 bp, Homo sapiens
tgttcaccatgctgcgggaagagtggtgaagcagcgcttgcagatgtaca

SEQ ID NO: 714493 - DNA, 90 bp, Homo sapiens
ctgaactgaagaagcttgggctcacttccacaaatggttaatgcgagatgatacaatatacgaggatgaagatgtaaaagaagccataag

SEQ ID NO: 714494 - DNA, 82 bp, Homo sapiens
cgtccgtccgccgccaccacccactccggacacaggctgaaggtgatgtggccgccctcaaccgacgcatccagctcgttga

SEQ ID NO: 714495 - DNA, 75 bp, Homo sapiens
agctccagtgagtccagctcctctgacagcgaagactccgaaacaggaaaatgtttataggaggccttagctggg

SEQ ID NO: 714496 - DNA, 80 bp, Homo sapiens
cagatggcggatgccctgcagtacctgcagaaggtctctggagacatcttcagcaggccgccatggcatcagatgaaggc

SEQ ID NO: 714497 - DNA, 96 bp, Homo sapiens
ccgccgagcagcagaaggcgcagtttactgcacaggtctcctctgagcctccggcctccataagacccaaaacagatgacacctcttcccagtccc

SEQ ID NO: 714498 - DNA, 97 bp, Homo sapiens
caggtccccaaggacgaggaatgggaattggcccagctgataccccaatgtccttctttgactttgtggttgatcctcattctttcccccgtacagt

SEQ ID NO: 714499 - DNA, 83 bp, Homo sapiens
accactcattcacttctagacgacaaaatgcaaaaaaggaggccaaagactttatgaggatgggtggcgtgcggaacagagag

SEQ ID NO: 714500 - DNA, 100 bp, Homo sapiens
agcggcgagacgcgcgtgtgtgagcgcgccggaccaagcgggcccagaagcggtatggtttgaagtggtgaacatggatttttctcggcttcacatgtac

SEQ ID NO: 714501 - DNA, 88 bp, Homo sapiens
agtaacaatgtggagaaagacattacaccatctgaattgcctgcaaacccagtttcgccgtgaggaagatgcggaaaaggctgtgatt

SEQ ID NO: 714502 - DNA, 100 bp, Homo sapiens
gaactagagtcccaggtcaacctgtgggaaagcagtgccactctccgcttcacagatgccccctgccaagatgtcagtgatgctgccgtcagtgaacctc

SEQ ID NO: 714503 - DNA, 83 bp, Homo sapiens
caagtcgacgccgcaacccggggaaagcaggtttttagaacttcagccataaaaatgggcagaattttccttgatcatatcgg

SEQ ID NO: 714504 - DNA, 98 bp, Homo sapiens
aaacaccacgatgaaaagaaatacctgtgatttgctttctcggagcaaaagtctttccccagacatggccaacaagggtccttcctatggcatgagcc

SEQ ID NO: 714505 - DNA, 109 bp, Homo sapiens
ggagagcaggagccactgagatgaggaggcgtcgcgcgcgcctgtagctcgcgggcctcgcagtgtggacgaatgtggaacctcgctctgtggctgtgttcccttggca

SEQ ID NO: 714506 - DNA, 98 bp, Homo sapiens
gaggcagagggttctggaaggaagattccggattccgtatttcatgtcagaaggattgttagcaaagaaagctgtggatgctggcctgaacgtgatgc

SEQ ID NO: 714507 - DNA, 100 bp, Homo sapiens
atggcttgtatctctgccaaccaagccatgaccacaggtttggacttgctaacaggatccaggccaggctgtggtttcccctgaaccagccctggacctt

SEQ ID NO: 714508 - DNA, 75 bp, Homo sapiens
ccatgtcagccttcccagtagctgggaccacagatggtgaatgtgtaccacgtacatcagcattcctgcttcctg

SEQ ID NO: 714509 - DNA, 92 bp, Homo sapiens
gagcgagctgagtggttgtgtggtcgcgtctcggaaaccggtagcgcttgcagcatggtgcgcgcggagccatggttatcatgtcggagttc

SEQ ID NO: 714510 - DNA, 100 bp, Homo sapiens
caggaagcaattctggaagcgcagcaacagcaagctcccgggcagcatgcttttcacttccactgcatctctcgctggctcaaaacacgacaggtgtgtc

SEQ ID NO: 714511 - DNA, 83 bp, Homo sapiens
ggagtcagtcagaggggcgagcaggagcgattccgtcgccaaacaggactggaatgtcacgtggaataccagcaaccccgact

SEQ ID NO: 714512 - DNA, 73 bp, Homo sapiens
aaggactcaccgaggcgcaggggctggaggtggtgctggggacctctgtgagtgaaagccttcagagggaagc

SEQ ID NO: 714513 - DNA, 96 bp, Homo sapiens
gacagtgaggaggagatccgagaggcgttccgtgtctttgacaagaaaggatcttgttcgagtagaagccacagtcattgaaaagacagaatcatg

SEQ ID NO: 714514 - DNA, 100 bp, Homo sapiens
agacttctttgtggctttgctaaaggacagaactttcagtactgtactaccacagattgatactactggacagttgtttgtacagactcggaaaggtcag

SEQ ID NO: 714515 - DNA, 98 bp, Homo sapiens
gcagagctaccgcttcggttagccagccacgaagttctcgcgagagtcgtctcctcgataccaaaagcccccaatgcatccaacttgaaaattgtaag

SEQ ID NO: 714516 - DNA, 100 bp, Homo sapiens
gattgggaaagctgggggagtgtctctgtcaaataattcgccaaaatgacgaacacaaagggaaagaggagaggcacccgatatatgttctctaggcctt

SEQ ID NO: 714517 - DNA, 100 bp, Homo sapiens
cctggatgagacatttgctacagcatcccacattaagtcaacggatttggtgctatggagaaatttttggtagaatataagagtgcagtggagaagaaac

SEQ ID NO: 714518 - DNA, 90 bp, Homo sapiens
tcacaccagaatcccaaagacgatccaggattttttatcaagcagaaatgcatcgaacaacgagaatcaagatcactgagctaaatcccc

SEQ ID NO: 714519 - DNA, 90 bp, Homo sapiens
gtgggctccgtggcaatgaattcttctgtgaaatgagtcagtctgacagtggggtggacctgagtggggattctcaggtgtcatcaggtc

SEQ ID NO: 714520 - DNA, 101 bp, Homo sapiens
cgtgtcgccggcagggaggcatagcgcctctctgatcttcctgcatggctcagcgcttctctgaagtagctttggaaagtagagaagaaaatccagtttgc

SEQ ID NO: 714521 - DNA, 150 bp, Homo sapiens
cgctgcctgcttttgtggcgctcttgctcctctctccttggcctctcctgggatcggcccaaggccagttctccgcagtgcatcctaacgttagtcaaggctgccaaggaggctgtgcaacatgctcagattacaatggatgtttgtcat

SEQ ID NO: 714522 - DNA, 75 bp, Homo sapiens
cttgtacaaaggagagtttaaacagccaaaacagttcattcatattcagcttgctcaaaatgtggtaagcatgag

SEQ ID NO: 714523 - DNA, 101 bp, Homo sapiens
agacaagtcaagaatccttttggcttagagatcactaatccatcttcagcttcaattacaagttagactctgaaggaattgagttgataacaaaatttctt

SEQ ID NO: 714524 - DNA, 75 bp, Homo sapiens
catcagtgcccttgtggcgaatggggctcacgtcgagctattcaagatctctggcagtggaggaagtctctttaa

SEQ ID NO: 714525 - DNA, 100 bp, Homo sapiens
cgcttcaaggtcaatgtgaaagctgtggtcgccaggacccccccagagccaagaccttctccagaaggtgacccttcccccccaccaccaccaatgtcag

SEQ ID NO: 714526 - DNA, 100 bp, Homo sapiens
gcgtcgccaaggagagtatcccgctgttcacctacgggcctgatcaaacttgccttcctgttctccaagaccagactgcttttggcttctggatgccctc

SEQ ID NO: 714527 - DNA, 50 bp, Homo sapiens
acagactatgctgggcttattgaaacagagcaaatgcagcgttacaatca

SEQ ID NO: 714528 - DNA, 75 bp, Homo sapiens
aaaaacagaacgttgcaaactctggaaaaaaacttggtcaaacgacaacttccttcttgccacttatcggtgcca

SEQ ID NO: 714529 - DNA, 74 bp, Homo sapiens
gagaagtttgtagacacaccgaggtcaatgaatacatttttgataatttatctagtaattcttatatctgaagc

SEQ ID NO: 714530 - DNA, 75 bp, Homo sapiens
ctggcagccgccgccgtggaaggtagcgctggtatatggtcaaatgaatgaaccacctggtgctcgtgcccgggt

SEQ ID NO: 714531 - DNA, 100 bp, Homo sapiens
ggtgtccaggaagaacatccaagggaagatgggcttcatgggattgtgagctgcactgcttgtggacaacaggtcaatcattttcaaaaagattccattt

SEQ ID NO: 714532 - DNA, 74 bp, Homo sapiens
ggtgctgggacttcccgtccgcggcgtggaggtactttaggaagaatcatcaaagtaactcaggaggtgattga

SEQ ID NO: 714533 - DNA, 75 bp, Homo sapiens
ccggctgctgtgcagagaggaggccgagtcgatgtacagatcagctctcaaaatgtcttctgtgtcttctgagcg

SEQ ID NO: 714534 - DNA, 90 bp, Homo sapiens
aggtcaccaggacccgcttcagcacaaggaatgtcatcaagggatccatcagtgagccaggcctgggccttctctcctggtggaccagca

SEQ ID NO: 714535 - DNA, 115 bp, Homo sapiens
cgagcgagtcgccgctgcagccctagtgactgcggcctgcatcccgattgtagaaggcatgaaacaaaaaatgtggagtattgaaaatattgccttcggttctggtggaggtttg

SEQ ID NO: 714536 - DNA, 140 bp, Homo sapiens
ccaggacccgcttctctgaaaggctctccttgcagctgcttagacgctggatttttttcgggtagtggaaaaccaggcctgatcttttggccagaaggagattaaaaagatgcccctcaagatggctgtgcctgtcagct

SEQ ID NO: 714537 - DNA, 100 bp, Homo sapiens
ggcgtgcgagagactcacgggacgcgacgcgccccgcctcccccgtccggtccctctctccacggtaagggctgtatgccactgggtatggtgcaggtgg

SEQ ID NO: 714538 - DNA, 90 bp, Homo sapiens
ttctgctcagtgtctctgctcactaactttgaagatgtctgtgattatttggactgggaggaacggaaaacagttcttccttcaaagcat

SEQ ID NO: 714539 - DNA, 50 bp, Homo sapiens
aagagagctctgttgttgcaagctcccagctcctccagcagccgacagga

SEQ ID NO: 714540 - DNA, 100 bp, Homo sapiens
gtgggtctggactgatctccatgtcctgttgtggggcttttacagcctttgggtttttcgttggaatatacgttgcacatttatggcgattctgagtgtg

SEQ ID NO: 714541 - DNA, 100 bp, Homo sapiens
caggggccatcgctgccgtctttcacacactgataggtggtgaaaacaggaatgagaacgaggagtcaacctcaaaggctgaaacctcggaagattcagc

SEQ ID NO: 714542 - DNA, 100 bp, Homo sapiens
tcatggctcattatagcctcaaactcccaggctcaagcaatcctaccatgtcagccttcccagtagctggaactacaggaacaggcctttgagagcagcc

SEQ ID NO: 714543 - DNA, 74 bp, Homo sapiens
tttgtcaattaggtcacttcaacctcttattggaagattatccaaaagttgtcactcagcccagtccatcagtt

SEQ ID NO: 714544 - DNA, 132 bp, Homo sapiens
gggacgcggcgccgcggcaccagggcgcgcagccgggccggcccgaccccaccggccatacgtactatactggcaattgctggagaagattttgcaattgttgcttctgatactcgattgagtgaagggttt

SEQ ID NO: 714545 - DNA, 105 bp, Homo sapiens
tcaagatggcggacaaaacgccaggcggatctcagaaggccagttcaaagggccgttgctccagggagaactgcaaatatcttcatccacccccacatttaaaaa

SEQ ID NO: 714546 - DNA, 100 bp, Homo sapiens
tggagacccagctttgagcagagccctgcctaaggtccagggctcgatctggccctaaccacagagtcaccttgagctttgagagagaaaagaaccacag

SEQ ID NO: 714547 - DNA, 75 bp, Homo sapiens
agccgatccagcctgcggagcctgtggggcagatgctgaagagtttctggcagaaggtttgcggaatgagaacct

SEQ ID NO: 714548 - DNA, 90 bp, Homo sapiens
gactcgcccacatcaccaaccacggaggctccccctctgcctcctaggaacgccgggaaaggtttttctattgggaaagctactgatcgg

SEQ ID NO: 714549 - DNA, 60 bp, Homo sapiens
ggagttcaagaccagcctgcccaacatgtccacaagaatcggaatgtcagttaatgctat

SEQ ID NO: 714550 - DNA, 83 bp, Homo sapiens
cgcatggtcagtgccatttcgcctttatcgtggtggagtccaccctggctgtgattctctttgtggccagatgggtttgtatg

SEQ ID NO: 714551 - DNA, 75 bp, Homo sapiens
tttgagcccatgctacaagtgaagtcacccacaaaagctgtatataatgccagacattggaatcatccagattca

SEQ ID NO: 714552 - DNA, 75 bp, Homo sapiens
ttataagaccatttatttctttggagacaaaactatgccagtgctcagaattttgatgtcatacgactatcaact

SEQ ID NO: 714553 - DNA, 100 bp, Homo sapiens
ccctctcagcacctgggcggacggtcagttgctccgattaaaaatgtttcgagaagatcatgggtcgtggatgacaatgttcttcagcacaattctcttt

SEQ ID NO: 714554 - DNA, 90 bp, Homo sapiens
tccggattttgcggggttcgtcgggcctgtggaagaagcgccgcgcacggacttcggcagagataacgaaggaggcccaacttcattcaa

SEQ ID NO: 714555 - DNA, 100 bp, Homo sapiens
gtggagggggcccagcgggagatccagctgtggttccagagcagtgagctggtttgggtacccagaccccacctacctgacccgggtgcaagaggagctg

SEQ ID NO: 714556 - DNA, 90 bp, Homo sapiens
cttgggcgggggatgtgagcgctgagcccttggcagatggcagccctccagagccccttctatggagataagatgaatctcttctccctg

SEQ ID NO: 714557 - DNA, 98 bp, Homo sapiens
caggatgggatccggctcctccagctaccggcccaaggccatctacctggacatcgatggacgcattcagaagtgtcatcctgtgaccaagagcacca

SEQ ID NO: 714558 - DNA, 100 bp, Homo sapiens
tggaagcaggtggaattatgccctgttggttccaatgctgggattggctgcttttcgaagaagaaatgccagaggtagaaattgacattgatgatcttct

SEQ ID NO: 714559 - DNA, 75 bp, Homo sapiens
atttgcctccacttagtgagcggaagaatgagaaatgggagattaacccttcagaactgacctttatgagggaat

SEQ ID NO: 714560 - DNA, 100 bp, Homo sapiens
cgctcgctccggcgccggcctcgcctcctcgcagcagcgccatgactgtccaggacggccggcagtttctaaagtatgttgaccccaagctgggagtccc

SEQ ID NO: 714561 - DNA, 100 bp, Homo sapiens
gacccaaacattcggaacactgatgggaaatcagccctggacctggcagatccttcagcaaaagctgtccttacaggtgatcatggaggaagcactttac

SEQ ID NO: 714562 - DNA, 75 bp, Homo sapiens
ccgctcctgtcatcaaacaaggggcaggcaactttggctttggggattcacgtggtggcggtggaaatttcggac

SEQ ID NO: 714563 - DNA, 82 bp, Homo sapiens
ataacttgaaaggggtttctctggatctcagcaactgtgagaagaaaaagtcagcactttttgaagtgtctgaggttatacc

SEQ ID NO: 714564 - DNA, 100 bp, Homo sapiens
caacggtggcttctggcacagtggcaagagtagagccaaatattaaatggtttggtttgatgacaaatacaccttgaagctgaccttcatcagtgggaga

SEQ ID NO: 714565 - DNA, 80 bp, Homo sapiens
aaactgaatgggcaggtgctggtcttcaccctcccactcacggaccagctcctgcacaggcagagcacccaactgctggc

SEQ ID NO: 714566 - DNA, 100 bp, Homo sapiens
aggaggccttctattacatccataaccttgtggttgcctgtgagatccaggtcatgaatgaaaaacttcagcactgcatggaactaacagatctaatgcg

SEQ ID NO: 714567 - DNA, 100 bp, Homo sapiens
cctactgatggtgctgtaaccacctcacagattccagcttcggaacaagagaccctgagcccacccacctttgggttcctgttggacatcgatggagtgc

SEQ ID NO: 714568 - DNA, 100 bp, Homo sapiens
caagagttggtgggagacgggtgaagtacaggctcagtctgcggccaagactccatcctgcaagacctgatggccaaaagaaaggaagaaaatttttcct

SEQ ID NO: 714569 - DNA, 75 bp, Homo sapiens
atattctcttctgtgctgtcaagggtacatggccacctctggcctagaccaccagctgaagatctttgacttgcg

SEQ ID NO: 714570 - DNA, 97 bp, Homo sapiens
ccctgaccctccaataccccacagctattctagtgataggattcacagcttgagctcaaataaggtttggaaatatcttgggatggagacagttttg

SEQ ID NO: 714571 - DNA, 99 bp, Homo sapiens
cttcagagtgtgaagtcaaatgcatgccaacattccagttttttaagaagggacaaaagtgacttctgacagctctctccatggaaggaggcggcggcc

SEQ ID NO: 714572 - DNA, 90 bp, Homo sapiens
ttttattccacaaacttatacaacctgatcatccgcagatatctcagcagactgctgatcttggacttgatattggtgcccagggagaac

SEQ ID NO: 714573 - DNA, 100 bp, Homo sapiens
cttcctagatgtggagctggaggatggagaggttgctgcagcaactggtcacacagtagtgttggtagaccagacagaggacatcctggcaaaatccaaa

SEQ ID NO: 714574 - DNA, 46 bp, Homo sapiens
acaaaatcagaggcatactttatagctggagctccgttactctcat

SEQ ID NO: 714575 - DNA, 75 bp, Homo sapiens
cctctgggagcttctcagccattttccacagatcagggccctgttggaggaagccagaaagcgaagactgctgga

SEQ ID NO: 714576 - DNA, 100 bp, Homo sapiens
tgcaggaaaacttcaatatctctcgggcaaagtcacttcagcctgctgttgcagaaaagcagggacatcagtggaaagattcagatcctgtaatggctgg

SEQ ID NO: 714577 - DNA, 100 bp, Homo sapiens
gatttttcttcacagccagtttctgaaatagccaggcaagcagcacaaataaagcttttgagaaaacttcaaaagcaggaacaggctcgggttgctaaag

SEQ ID NO: 714578 - DNA, 50 bp, Homo sapiens
cctacacagggcagaatgtgaagctacgatggctattcatatgaaaagga

SEQ ID NO: 714579 - DNA, 100 bp, Homo sapiens
ctgggtttcccgggagatcccaggcggtgacagagtggagccatggctagagcgtgacgacagcatgtacgatccctgaatgggcccgtgggcatattta

SEQ ID NO: 714580 - DNA, 75 bp, Homo sapiens
aagctgataggctgcgctaccggaatgtcatccagcgagtgattagggggcagtacccaaaggaaacgctacgaa

SEQ ID NO: 714581 - DNA, 71 bp, Homo sapiens
tgtacagcgccggtcaacatcgcggtcatcaagtactgtgaaaggtgtagcagtcactcggcctacaccca

SEQ ID NO: 714582 - DNA, 89 bp, Homo sapiens
cgccagcccaaacaggcgtgtcacagccttatgtttgatcatcggccaaggtcctggcgagaactgcctctgcggctagctgattttgg

SEQ ID NO: 714583 - DNA, 100 bp, Homo sapiens
gctccattggttaaatacttccaggaaaaggggctcatcatgacataggcaaccacggttacgataatgcgttagcagatatgcatccaatatttttagc

SEQ ID NO: 714584 - DNA, 100 bp, Homo sapiens
ggccacagcacagacacgctcacgggctccggcttccgcgtggagtttgtccggatgatgtcccgctgaggccgcgagggcccctccaggactgccaagc

SEQ ID NO: 714585 - DNA, 51 bp, Homo sapiens
aggattccaagtaactcttatttgcctctgcagtccttgtccctggctgac

SEQ ID NO: 714586 - DNA, 78 bp, Homo sapiens
gcagattttgtggatcaatattattatggatggacccccagctcagagtgagatgtataaaagagctcaaggaagaac

SEQ ID NO: 714587 - DNA, 100 bp, Homo sapiens
ttaaggataggtggacaagttcatgctgtccaggctttagtgcaggtgaaaggaaagcaagccaggatggatatttacgacactcaaaccttgggggttg

SEQ ID NO: 714588 - DNA, 76 bp, Homo sapiens
ggaggatagactacagtgccgctgagtcgtgtcccaaatgcgaacatcctcgtgcttacttcatgcagcttcagac

SEQ ID NO: 714589 - DNA, 100 bp, Homo sapiens
cggaggcagagcggctgccatggtggtggaggtggatacagcagtcggagaacatctggcagagacaaatacggaccacctgttcgtacagaatacaggc

SEQ ID NO: 714590 - DNA, 98 bp, Homo sapiens
gtggatgaggctctgcggctggtccaggccttccagtacacagacgagcatggggaagagtgtgaacatggctacgcctcttcattcccgtccatgcc

SEQ ID NO: 714591 - DNA, 96 bp, Homo sapiens
tggaagctctttgcggtggcgttggtgctgtttgcggatgctgatgcaggagatcaatgatctgttggttaaggaaaagattatgcaacttgtcca

SEQ ID NO: 714592 - DNA, 75 bp, Homo sapiens
ctcgaaactctcgggatgccatagctgctcttggattgctccaaaagattgttctctggggccggactgagaaat

SEQ ID NO: 714593 - DNA, 75 bp, Homo sapiens
cgccgcctggcaggccctgcgcaccagatatatttttgccatcatggatcagtttggagatatattagaaggtga

SEQ ID NO: 714594 - DNA, 50 bp, Homo sapiens
gtggcatctgtgacaacttgcttattccaactccacagagtgaccagaga

SEQ ID NO: 714595 - DNA, 115 bp, Homo sapiens
aagctgggagagcagaaacaggcagaggctggagagaagctcttccttgtcctcttctttgacaacaagcgcacctgatgagtatctcagagtcctcaacgtgggtgtggccgag

SEQ ID NO: 714596 - DNA, 75 bp, Homo sapiens
caggaaccagactgggggcgagctgagcacctgtagtcaatcacacgcagtttttggctttcacccccaaccagt

SEQ ID NO: 714597 - DNA, 98 bp, Homo sapiens
ctaccttatgagctcggttttcttatgcttataagagtggaacagggcagcgggtggcatgagacgtgggaacatgggccacctcacacggatcgcca

SEQ ID NO: 714598 - DNA, 100 bp, Homo sapiens
ctgcagatgctaagaatgctgccaaacatatgattggaaaggattactacagcatcccatttcccacacccactactccgctgactgggagggatggtag

SEQ ID NO: 714599 - DNA, 100 bp, Homo sapiens
atggaaaaggagccaggaattcccagtttgacaccacaggctgagctccctgaaccaggaaaaggagaaggcccagttggcagcagaagctctaaagcag

SEQ ID NO: 714600 - DNA, 100 bp, Homo sapiens
cgactgagtgagatacccagctgtgcggagctaggacgcggaacatcccagaggccagcatcaacatcccactgtttgtaacatggaagattggtcgaga

SEQ ID NO: 714601 - DNA, 90 bp, Homo sapiens
cctacatcaggaatttcatggcaagggctccgagctctgtccagtggtgggagtattacatcccctcctctttctccagcattgccgaag

SEQ ID NO: 714602 - DNA, 51 bp, Homo sapiens
caaatcctagcactctgggagagggaacctcagaacctgttctggatccac

SEQ ID NO: 714603 - DNA, 98 bp, Homo sapiens
ctgccgagcgcagagcgccgcgcgttcgcgctcaagatcaacaggtttttcgttggaatatacgttgcacatttatggcgattctgagtgtgagggca

SEQ ID NO: 714604 - DNA, 82 bp, Homo sapiens
tctcagcagcactgatgctggattgtttaccaatgatgagggaagacaagtcttctcattcacaggttaaggctacctttcc

SEQ ID NO: 714605 - DNA, 100 bp, Homo sapiens
gccggcggggccacgcccggggccaccctccccaagtccccatctcagtctgaacaagtgtcggaggccgagttactcccacagctgagcagagccccat

SEQ ID NO: 714606 - DNA, 75 bp, Homo sapiens
caaagatgaagatgaaaccaagcccttggatatcaatgcttacaattgtgaagagcccacagaaaagttaccttt

SEQ ID NO: 714607 - DNA, 74 bp, Homo sapiens
tatggtggtgcaggacccgctgctctgcgatctgccgatccaggtgtgggcccatcgctggatggatctgtcag

SEQ ID NO: 714608 - DNA, 90 bp, Homo sapiens
tcccctctcaggacaacccagatgtgcaacaaagtgcgatggccagaactgcacgttccaactgcacggtcccaatgggacagttgagag

SEQ ID NO: 714609 - DNA, 97 bp, Homo sapiens
ccatgaactcacccgtggaccctggcgctaggcaggcgttgaggaagaagccacccgagcggactcccgaggttcgatacaagaggctgttttccta

SEQ ID NO: 714610 - DNA, 101 bp, Homo sapiens
tagaagaagatccgaatatctttgcctatgcctgtgatttttctccaagagccattgaatatgttaaggagatgttgcagtaaagatcctaaaggttgtcg

SEQ ID NO: 714611 - DNA, 82 bp, Homo sapiens
ggatgatgacactattgctaaggtcaacgctgcaatgaatacctagaggatcaagacataatgggagcatttttagacaagc

SEQ ID NO: 714612 - DNA, 119 bp, Homo sapiens
tatagtctctcgccacagcggcctcggcctccccttggattcagacgccgattcgcccaggtggaaaggagactatggaaccaggatccagcagtacttcccatccaactacgtcgagg

SEQ ID NO: 714613 - DNA, 96 bp, Homo sapiens
ctttagctgttcaacttatgaaacaaagctgtattcatcaccaaagaaaaaacttacaccaatgcagaaatcggttagtccattagtttggtgcag

SEQ ID NO: 714614 - DNA, 100 bp, Homo sapiens
caatccagaggtacgctacgaagtctgtgacattcctcagtgttcagaagcttggatttacactgggcaacgtggttggaatgtatctggctcagaacta

SEQ ID NO: 714615 - DNA, 51 bp, Homo sapiens
accctggtgaaggaggtcgtacagactggagcgctgctcagcgctttcgtt

SEQ ID NO: 714616 - DNA, 50 bp, Homo sapiens
acttacaattctccaagtaaacaactggcaagggcactattacaaactgc

SEQ ID NO: 714617 - DNA, 73 bp, Homo sapiens
ctgatgagctgagaaacaaagccacccagccaatgaagtgtaatccagtgatgattgatgccatcaaagtttc

SEQ ID NO: 714618 - DNA, 100 bp, Homo sapiens
ggactttgggcgtcccattgccatggtacttgagctggatacactggtggataatttatctattgatccttcctcgggggacatctgggtaggctgtcat

SEQ ID NO: 714619 - DNA, 83 bp, Homo sapiens
cacgacccacgagatcatggggcccaagaaaaagcacctggacttggagacctttggcgacttggcctttggcgacatcttcc

SEQ ID NO: 714620 - DNA, 90 bp, Homo sapiens
ggagaatgaggagtttctgaggaccatgcaccacctgctgctggaggtccagcatcctttgaagcatgagttcttaccagcagaagcaga

SEQ ID NO: 714621 - DNA, 75 bp, Homo sapiens
gaggaactggcccggaaacaggaggacggatgattctctgaacgactgtcggatcatcttcgtggacgaagtctt

SEQ ID NO: 714622 - DNA, 100 bp, Homo sapiens
ggaggaagaagaggaagaggattatgaagatgacaaggatgatgatattagtgatactttctctgaaccaggtcagaacaaaatctgcttcatcccaggc

SEQ ID NO: 714623 - DNA, 100 bp, Homo sapiens
agtgaaaataaaagccatgatagttcaacatacagaggtgactctgacatcattagaagcatgccagaacagactggtgaaaagtaaaccttttcaccta

SEQ ID NO: 714624 - DNA, 90 bp, Homo sapiens
tttatatcctgacactatgaatgctacttggatgcctcttaaggccaagtataaggagcgagggacggtcttggctgaggaccagctagc

SEQ ID NO: 714625 - DNA, 75 bp, Homo sapiens
aaaaaatcccatgaggagaaggcattctaatttagaaatgcactcggtgatggaaagagagccactattctgaag

SEQ ID NO: 714626 - DNA, 74 bp, Homo sapiens
cccatgaggatctgcccgcttcccaggaaaggtccgagggaggagatatcaccaaacatgatggaacaggcgga

SEQ ID NO: 714627 - DNA, 82 bp, Homo sapiens
gctctttgccgtgacaacaccgttcccccagccgggctgacttcccaagtaagaagcggaagaggagccgctggaaccaaga

SEQ ID NO: 714628 - DNA, 96 bp, Homo sapiens
acccactatggttacagcactgggcagccctgtgtcttcatcaagatgaaccgggaccctgatgctcccataagacagaaaatgccccttgatgat

SEQ ID NO: 714629 - DNA, 87 bp, Homo sapiens
gcttaacttcttatccatcccatctcttggacagatgatgccagttaattactttgaatggagctggatgtacctctgcctgacatc

SEQ ID NO: 714630 - DNA, 100 bp, Homo sapiens
cgcggccggggctctcctcgtctatgatatcaccagccgagttcatgcccattctgggcaccaacctgaacccagagttcatctccgtctgcaacaacgc

SEQ ID NO: 714631 - DNA, 101 bp, Homo sapiens
gccatggcgtacgcctatctcttcaagtacatcataatcggcgacacagaattaaacaaccaccatgtcgagcaaaaaggcaaagaccaagaccaccaaga

SEQ ID NO: 714632 - DNA, 83 bp, Homo sapiens
gaaacattaagacctactaccagcagcccactcacccagtgtacaacattggaccagacaaggtgatccaggccactacatac

SEQ ID NO: 714633 - DNA, 100 bp, Homo sapiens
ggccctcaaaatgccttcttcctcgtaaaattctggcctgtagattttgaaaccaaaagagcctatagcttgaaggtagaggcagccaacgtgcacatcg

SEQ ID NO: 714634 - DNA, 100 bp, Homo sapiens
attgaaaatgcaataaacgaataccgaattaggtgtggaaagaaacccagccagaaagcaacagtgttaccaggctgccaagctcctctatgaatctcgg

SEQ ID NO: 714635 - DNA, 82 bp, Homo sapiens
tcacaatgaggctccctgctcagctcctggggctgctaatgctctgggtctctggtgatgatgaacagtctacacagatggc

SEQ ID NO: 714636 - DNA, 75 bp, Homo sapiens
ggagctatcggcgccgcggcaagagccaggctgaaggtgatgtggccgccctcaaccgacgcatccagctcgttg

SEQ ID NO: 714637 - DNA, 90 bp, Homo sapiens
ggaggacgtgaagctggagttcccttcccttccacagtgcaaggaagacgccgaggataagttctgaacgtcgaaaagaaaagtctcgag

SEQ ID NO: 714638 - DNA, 90 bp, Homo sapiens
tgtagtgtttgccaatgttggagccgtctgcaaagtgtccccggcaagaaggcttctccagggaaagtgaccgaggcagtgaaagaggcc

SEQ ID NO: 714639 - DNA, 75 bp, Homo sapiens
gccggcgcccgggagacccaggaggagcccgcagagacagggtttctccactttggtgaggctggtctcgaactc

SEQ ID NO: 714640 - DNA, 100 bp, Homo sapiens
tcctccctgcagcaggcagcctcccggagcccctcctttggtgacccacagctatcccctgaggcccgacccaggctgaccccgcactacatctacccac

SEQ ID NO: 714641 - DNA, 96 bp, Homo sapiens
caatccgacagattttgtacctcggggacctgctggagacctgccatttccaggccttctggggctccgctgatcctctaaatagtgctttccatt

SEQ ID NO: 714642 - DNA, 75 bp, Homo sapiens
agtttcctgcttactgcttcattatggattatacaggagcatattaatgaaaagtgccataaactgaaaaaccaa

SEQ ID NO: 714643 - DNA, 51 bp, Homo sapiens
ggacccgcggtccccgctcttgctgctgagatgagtgaactgagtgtggca

SEQ ID NO: 714644 - DNA, 75 bp, Homo sapiens
gccatgctccatttgggcattgacacccctacccagaacaacatctttaagaaaccgtgtcagcatggttgcctg

SEQ ID NO: 714645 - DNA, 100 bp, Homo sapiens
gatcagcagacccccaccatccctaaccggctggctgcagacccgaacaaagatacttatgagcctttctgcaaggtccctgtgatcacctcatccaagg

SEQ ID NO: 714646 - DNA, 83 bp, Homo sapiens
ctcaaaactgtcattttgggactgctgtgcctcctcctcctgtggtggaggagaaggaaagatttctaccactccaaacgccg

SEQ ID NO: 714647 - DNA, 101 bp, Homo sapiens
ggtgtttacccccctattcaagttcatgtcacgctgggtaatgaggatttgactgtgaagccacccgtgggaaactgttacaacagctgcaatgcagaaat

SEQ ID NO: 714648 - DNA, 100 bp, Homo sapiens
gtgttgtcgcaggtggacttcttgcaacaggttaacgtgtatggcgtgtgcgtgccagtctgcgctcctcagaccaccggcaggtgaacagcctgatgca

SEQ ID NO: 714649 - DNA, 105 bp, Homo sapiens
ggcagcggcagcggaagatggtgttgctgagagtgttaattctgctcctctcctgggcggcggggatgggagacttttcccaggtccctcgtatcaaaacattaa

SEQ ID NO: 714650 - DNA, 75 bp, Homo sapiens
gatttaaccgctctctgcctcccagcgcttctctgaagtagctttggaaagtagagaagaaaatccagtttgctt

SEQ ID NO: 714651 - DNA, 90 bp, Homo sapiens
gaggggccatggacattggaaggggaagccccacatcagagctgttcagtgacaaagctgcaggtgagcaaatcgaagaggaccctcacc

SEQ ID NO: 714652 - DNA, 113 bp, Homo sapiens
ctgtgtttctccattctgttggttttatgcatctttatccaatcaagtgcccttggacaaagcctgaaaccaggagcgagaacccgagcagcgccatgagcaacactaccgtc

SEQ ID NO: 714653 - DNA, 100 bp, Homo sapiens
ttttctcatggatgttcttcttcgagtatttgtagaagggtatttgacctgtccaaagacgacttgatacctctataatgtaacagaaaaggtcagaaaa

SEQ ID NO: 714654 - DNA, 83 bp, Homo sapiens
tatgtctttggagaacttctggagctggccaacgtgcaggagatgatatcatcaagttgaatcgaaaggaagggaagaagcag

SEQ ID NO: 714655 - DNA, 100 bp, Homo sapiens
ctggaacttgccctgtctcctcgcagatgaggtctggagcccggcactgtggtcataacagagcaggcagtggatacctgcttcaaggcagagtttgagc

SEQ ID NO: 714656 - DNA, 82 bp, Homo sapiens
tccttgtggagccggagctgggcgcggattcgccgaggcaccgaggcactcagaggagccgctgccatggcccagacactgc

SEQ ID NO: 714657 - DNA, 97 bp, Homo sapiens
cgcatcgctgaatgtgcccggacctgcgccttctgggattctgaaaccttccttgtatccctcctgagacatctttgctgcaagatcgaggctgtcc

SEQ ID NO: 714658 - DNA, 75 bp, Homo sapiens
caagtggcagattatggaatagttgcagatttatttaaggtttatgttccagatgaaaataatactattttgggg

SEQ ID NO: 714659 - DNA, 100 bp, Homo sapiens
gcaaaatggaggtgaaggcggcatcattatcaatatgtcatctttagcagcttgccatgaagtggatgactcatctgttgttggattaaagtatttgctt

SEQ ID NO: 714660 - DNA, 100 bp, Homo sapiens
atcctcagaagtactcggacaaggagctgcaggtctgaaggggcgtctcgattacctgagctctctgaaggtgaagggccttgtgctgggtccaattcac

SEQ ID NO: 714661 - DNA, 83 bp, Homo sapiens
tagagaatgagatagccgtcctgagaaaggggatatgagactttctactcggaatatcctgagtgttgcgtggatgtaaaacc

SEQ ID NO: 714662 - DNA, 75 bp, Homo sapiens
ttggaaacgacgtcatgtgttagtgcctccggagccagcgtggtggccatagacaacaagatcgaacaggccatg

SEQ ID NO: 714663 - DNA, 100 bp, Homo sapiens
tgcagcaccgcatgatggtacccaaagtcaggacttttcttggtagagatggaaatccaaataaacggaatgtgcacaatgaaacatctatgcatttgtt

SEQ ID NO: 714664 - DNA, 83 bp, Homo sapiens
ccgagcttgaggaatccgtgctccaaactctacactcaaggtatttctgggaaaagccagcttctgtttgcactggtcttcac

SEQ ID NO: 714665 - DNA, 75 bp, Homo sapiens
cgtacgccctcatggggaaaatctccccggtgactttcaggatgatctgtctgctgtgcgtccggaccgcgtcct

SEQ ID NO: 714666 - DNA, 80 bp, Homo sapiens
gctttcagttctttggaattccattcttttccttattcttctgatgtggatccagagccccagtttgagggacagcggga

SEQ ID NO: 714667 - DNA, 98 bp, Homo sapiens
ctttgttattgcatacattatggaaacatttggaatgaagtacagaagcattcctgcgtaaatactgctgtaatactgtcatgcaaagtgtatccttt

SEQ ID NO: 714668 - DNA, 120 bp, Homo sapiens
gaaacctcaagatgtggatttaccttatcccctcaacaacttttcagtggcaaaggtcattttcttctgaggaagtcattcttaaggactgttctgtccccaaccccagctggaacaagg

SEQ ID NO: 714669 - DNA, 123 bp, Homo sapiens
gaggacagacaattgttcagttgcaaaaagaaactggagccaccatcaagctgtctaagtccaaagatttttacccagctcctctggtgcaagtgtggtagctattgacaacaaaatcgagca

SEQ ID NO: 714670 - DNA, 82 bp, Homo sapiens
ctggaacaagttgccggccaacgtgagacaggtaccgctggctgcccagtaggagaggaggagtatcaggatttggtgtgcc

SEQ ID NO: 714671 - DNA, 75 bp, Homo sapiens
taatggtccggacttccgtgtgttcaagggcagcaggaaagacgagatcctgggcatcgccaacaaccgactgat

SEQ ID NO: 714672 - DNA, 100 bp, Homo sapiens
tttcatttcactgactgtttattttttggttcactgatgtctgctacagatccagtgcaactgcagatagaagacctgactcgtaaactgcgcacaggag

SEQ ID NO: 714673 - DNA, 98 bp, Homo sapiens
gctaaggccgcgttggggtgagaccctcacttcatccgaatgccgggtctaagttgtagattttatcaacacaaatttcctgaggtggaagatgtagt

SEQ ID NO: 714674 - DNA, 74 bp, Homo sapiens
tgctgatcacttggagtgctgtcccttggaacaggaggagtaagattgagtgttatagttttgccgctggactc

SEQ ID NO: 714675 - DNA, 85 bp, Homo sapiens
cgaactcgggttctgacaagatggccgggctgccccgcaggatcatcaagcatcctggtggggaagaagttttaagggaacaagc

SEQ ID NO: 714676 - DNA, 82 bp, Homo sapiens
gggagcagaaggactcggacacagccgcggcgagtcctttgcacatgttggcaacacacgcatccgcatcggcctccctgcc

SEQ ID NO: 714677 - DNA, 50 bp, Homo sapiens
cggagctcccccaagagccggaaaggagcagtgaggagaatgaatacctt

SEQ ID NO: 714678 - DNA, 75 bp, Homo sapiens
cgaccaccgtcagcactcagcgcgggccgggtgcaaatagctatgggcaacttggcctcggccataaggaagatg

SEQ ID NO: 714679 - DNA, 74 bp, Homo sapiens
caagctcctacttccagaaaaagtgctcctgggactccaggataccaggagctgcctgagttcgagggggatgt

SEQ ID NO: 714680 - DNA, 100 bp, Homo sapiens
gtggatcaagcaggttttaaatcaagatttaacattccaacacataaaaattatttatccaacagctcctcccaggttgatctcctatcaagagtttttg

SEQ ID NO: 714681 - DNA, 124 bp, Homo sapiens
caaaagttggaagcctggagtgcctaagcctgcttgtagccagtgatgcccaaattgaggcaactccaacaacattgccaccgtggacatctccgcaggcttcgtgggcttagacacctacgtg

SEQ ID NO: 714682 - DNA, 90 bp, Homo sapiens
acaggcctgctgaactgggtgctttatatagggatgttggagctggtggcccagaagcagcgggagcgtgaagaaagagaggaacgggag

SEQ ID NO: 714683 - DNA, 98 bp, Homo sapiens
ctctttgtgtatgaccttcacgcagtcaagaacgacttccagttcaaatctgaacatcaatgatgtactagggaactactcattgactcttgttgatg

SEQ ID NO: 714684 - DNA, 100 bp, Homo sapiens
ttgccctggggttaacactccagtgggatgaacagacaaaccccacaagcactgcatacgctacagattctcgttgacactggaagcagtaactttgccg

SEQ ID NO: 714685 - DNA, 75 bp, Homo sapiens
atcgctacggaccttaaaatacccgcaacagccccttcgtcccaaggcctgcagggtgtgctgtgacctcatctg

SEQ ID NO: 714686 - DNA, 50 bp, Homo sapiens
agcctcctgagtagcttggattacagggtctcactttgttgcccaggctg

SEQ ID NO: 714687 - DNA, 89 bp, Homo sapiens
gaaaggagtcggaagaggtctcacgaggctgtcatcaccgccatgcccaagaataaagcaatccagtggggagaagatggccgtccatt

SEQ ID NO: 714688 - DNA, 99 bp, Homo sapiens
tgataaaggccatgaccaaggctcgcaattttgagagagttttgggaaaggtgccaggattgctgagtattcccagttgtatgaccagattgtattcag

SEQ ID NO: 714689 - DNA, 75 bp, Homo sapiens
tgacgagctttcgaccagctactctcacagtgacaaatttttttaagcagggaaattgcaaagaagattctttgg

SEQ ID NO: 714690 - DNA, 75 bp, Homo sapiens
ccagcctcttaatcggatgtatcttgtattcatgcttggattagaagaacaagaaagactccacctactatggag

SEQ ID NO: 714691 - DNA, 75 bp, Homo sapiens
tgtatggggactccaattgcttggatgacagtcaccgacagaaggtgcacagccagagaacaacacatcacacac

SEQ ID NO: 714692 - DNA, 100 bp, Homo sapiens
cttgagtgacattgacctcatggcacctcagccaggggtgtagccaagtaggtttggaaagcagagtggagaacaaagagttgattccaatgcaacaaat

SEQ ID NO: 714693 - DNA, 75 bp, Homo sapiens
agaaaatgtaaaggccaagatccaggataaggaagctatcagttgagggatttgcagttgataaaatggctggag

SEQ ID NO: 714694 - DNA, 49 bp, Homo sapiens
cccctgctttaaccatcgaaaatgagtatgatggctacacatcatgtcc

SEQ ID NO: 714695 - DNA, 135 bp, Homo sapiens
agcctggctgccggcttgttcttactggccctgagtctttgggggcagcctgcagaggctgcggatcaggatgcagtgaaaaaagctagaagctttctcgaatttgctgaagatgtaatacaagttccaaggaac

SEQ ID NO: 714696 - DNA, 50 bp, Homo sapiens
ttctgcccagatagtgtctgcagctaccccacttcagtctccagcacaag

SEQ ID NO: 714697 - DNA, 100 bp, Homo sapiens
ttctgcggctggtgtggagccatggaagaggatgaaatggattctggcacgatggttcgagcagtgggtgatgagatgggcactgtccgagtagccagca

SEQ ID NO: 714698 - DNA, 83 bp, Homo sapiens
tgtggatcgctgtgatcgtcacttgagccccccaagatgaacccagtggtggagccactgtcctggatgctgggcacctggct

SEQ ID NO: 714699 - DNA, 75 bp, Homo sapiens
atcagtttctggaagaagaagaagagcatgatcggcatgtccaccaaggcaggtgaccagaagtcagcagcttcc

SEQ ID NO: 714700 - DNA, 109 bp, Homo sapiens
ctttctcgctgatcgcctaacttctactgacgaagcttggaagttgcagaagtggcttttcatggcctgccactgaaaatcaagaaagaaccccacagtccatgttcag

SEQ ID NO: 714701 - DNA, 96 bp, Homo sapiens
gaggcttaccacttctttatacttgcacagaggcagctctatgagggatgtgtggacactgcactgaagacagtgttgccctggaaactgtccacc

SEQ ID NO: 714702 - DNA, 74 bp, Homo sapiens
aaataagctatatactttggttacctatgtacctgttaccactttcaaaagtgctggaaatggaaacctgcaag

SEQ ID NO: 714703 - DNA, 74 bp, Homo sapiens
gaagccctacgccgtggacttccagcgcagatggagtcatcagaacccactgtgaggaagtgacttctccttga

SEQ ID NO: 714704 - DNA, 75 bp, Homo sapiens
gccgtgatcaccaggatcatcaaggaggcgtttggtgccctggttgtcagatgttggaaagcagtaggacggaac

SEQ ID NO: 714705 - DNA, 51 bp, Homo sapiens
ttacgatttaaaacttcgccagaatttgtgaagattgtccccagtggatgg

SEQ ID NO: 714706 - DNA, 71 bp, Homo sapiens
ttattgacatctcttgtatttatgggttgatgatgcaatgatggcaaatgcagcccagaaatttcccttca

SEQ ID NO: 714707 - DNA, 101 bp, Homo sapiens
aataaatgagcaggtccttgcttgctggtctgattgtcgtttttacccggccaaagtcactgctgttaacaaggatgatgatgaagaacgagagcttcaaa

SEQ ID NO: 714708 - DNA, 98 bp, Homo sapiens
aaggaccagatctatgacatattccaaaagctcaacagcaacacccaggtccgtttattaatggttagtcgaatggctaaaccagaggaagtattggt

SEQ ID NO: 714709 - DNA, 83 bp, Homo sapiens
tctcggatcgaatccctcacgcgggcgcggatcgaccggagcagagagctggcgagcaaggagtacgaccccagcaaagcgac

SEQ ID NO: 714710 - DNA, 75 bp, Homo sapiens
gcgcctgttcccggggcagatccaggttcagatcttactgtgccgagatcgctcacaatgtttcctccaagaacc

SEQ ID NO: 714711 - DNA, 90 bp, Homo sapiens
ccgcccgcctcggcctcctacagtgctgggattacaagcctgatcctacagttaaagacttaatcggaggcttcacggctcttcactatg

SEQ ID NO: 714712 - DNA, 83 bp, Homo sapiens
tgccaaacatcatacttcggaagcaattgaaagttattaccagaggccaagaataaaatctttatgaactaacaagatgaatt

SEQ ID NO: 714713 - DNA, 50 bp, Homo sapiens
cttaggaatgttatcgaaggacaaggaagggaaaaggccgaggcatcagc

SEQ ID NO: 714714 - DNA, 75 bp, Homo sapiens
agccgatccagcctgcggagcctgtggggcagcgtgctgagctacgtggcgggcatcgcctggttcttggcgctg

SEQ ID NO: 714715 - DNA, 100 bp, Homo sapiens
tagtaacccgcgaaatgatgggatagcgttgcaaatccttaaaagagtcttaacggccgggattatgaaaagaataaagtctgcaaggaattctcccatc

SEQ ID NO: 714716 - DNA, 74 bp, Homo sapiens
gaaaaaaatttgctggatattgatgcgccagtcactgattcaagtcaatctgaaagtcccagccagccaagtga

SEQ ID NO: 714717 - DNA, 99 bp, Homo sapiens
gccaaagcagcagccttctcgacagccttttactgtgaacaggtctctcaggcagctgcagagcttcaacagtactgtatgcagaatgcctgcaaggat

SEQ ID NO: 714718 - DNA, 100 bp, Homo sapiens
ccacctgcgccggcacacgggtgagaagcccttcgcctgcacctggccaggctgcggctggagatgacagtcatgtccctttccagggacctcaaggacg

SEQ ID NO: 714719 - DNA, 98 bp, Homo sapiens
cttctgggacagcctgctgaggctgggcacgctccaccagcagccactcccccaggttggttcctgtataccttgggccagagagcaaacataggtgg

SEQ ID NO: 714720 - DNA, 91 bp, Homo sapiens
gcctgtaattccagctactcaggagacagaggttacctgggcttgtatgtgttctatgtggtcactgtgattctctgcacctggatctacc

SEQ ID NO: 714721 - DNA, 75 bp, Homo sapiens
ctccgggcctcccgccgcttagcctgatgctggaaggacgaaggtaagaatgattgatgttggctgatattggag

SEQ ID NO: 714722 - DNA, 75 bp, Homo sapiens
gcacttcggctgcagagttttgcccacgcttcgagacttagggagcaggtatgatctcgtgaaaccttgagagaa

SEQ ID NO: 714723 - DNA, 100 bp, Homo sapiens
aagacctacccagatactgattccttcaacactgtagcagagatcactgggagcaaatatccagaacaggatcgccccaggacattcgacatgcactcac

SEQ ID NO: 714724 - DNA, 100 bp, Homo sapiens
agagaacctggctctcatatcctcgctgggacctgatcccaaccttgaagaaagtcctaaaagaaaaaatattacatatgaggaattaaggaataagaac

SEQ ID NO: 714725 - DNA, 75 bp, Homo sapiens
ctctttcctcgtggaatttgaagattctacagataaatcagagcttagaaaccaagatagccaagtggaacctgc

SEQ ID NO: 714726 - DNA, 97 bp, Homo sapiens
acctgaaccgcatcttttcctcttctgaacatgcacccccagcagccaccagcaggtgaccaagaatatggcccaggtgaccaaagccctggacaag

SEQ ID NO: 714727 - DNA, 100 bp, Homo sapiens
cattgagacctacgtcatggacagccggatcggaatagccaggtctggctgggtcggcacaacctgtttgagcctgaagacacaggccagagggtccctg

SEQ ID NO: 714728 - DNA, 50 bp, Homo sapiens
ctcacctgtgcgggatggaacaaaaggcctgctcctgtctcagaaccttg

SEQ ID NO: 714729 - DNA, 74 bp, Homo sapiens
gactaccgggctgtcaaatttacattaactatgagaattaagcagcacccatatatctcccatcagcatcctac

SEQ ID NO: 714730 - DNA, 100 bp, Homo sapiens
agctggaagagcaacagcgccggcaccgcgagcaccctaaagtcaacgtgcctggcagccccgagaaccacaggtgtacaccctgcccccatcccgggat

SEQ ID NO: 714731 - DNA, 75 bp, Homo sapiens
tcgaccattccaaaaaaatcggatttggtgctatggagaaatttttggtagaatataagagtgcagtggagaaga

SEQ ID NO: 714732 - DNA, 90 bp, Homo sapiens
atctggaggagcagttgtctgatgaagagaaggccctgaaaaggagcctttaaaagtcaattctactccatttggcaaagagggaactga

SEQ ID NO: 714733 - DNA, 90 bp, Homo sapiens
caaggatcttcaacactagaagatatttgctgcagcctttagttctttaaggaaaaacagtagtgctctgcatagtttactgaaacgagt

SEQ ID NO: 714734 - DNA, 89 bp, Homo sapiens
caccacagaggatccagatattagcacagcagaccttggtgatgtgctacaggtgtttcaccaaaaccaacagcactttcagcagcagc

SEQ ID NO: 714735 - DNA, 83 bp, Homo sapiens
caggaaaccacccgcgctcggcggccgccagcagcaaaatgatgcttcaacacccaggccaggtctctgcctcggaagtgagt

SEQ ID NO: 714736 - DNA, 97 bp, Homo sapiens
tcaaatgctagcagacacggtggctactctgcctcggggacgaaagcagacatatctgaagagatggattaagaatgctttggattaaggattgtgg

SEQ ID NO: 714737 - DNA, 95 bp, Homo sapiens
agctgtcttcccaccgtggagacctcatcacggagccctttctgccaaagtgctgctgcatgaggaggcgggtgattctggctttgtcagtctct

SEQ ID NO: 714738 - DNA, 83 bp, Homo sapiens
ctccttcggcagtccacccaccgccgccgcctcccaggagttcatgatcaagtgttgcccacaccaaatgcttcatccagagt

SEQ ID NO: 714739 - DNA, 82 bp, Homo sapiens
gcgctgtgaggagctggagaagaccttcaaaccacgttcgtttgaagtaggaatgctagtctggcataaacataaaaaatac

SEQ ID NO: 714740 - DNA, 100 bp, Homo sapiens
gccatcccctccagcggctcgctcgtggccacccacgactactaccggcgatgtttcaccaaggaaatattgagagagaagtcggccaggtaggatgaac

SEQ ID NO: 714741 - DNA, 74 bp, Homo sapiens
atccgcaagaacaagtaccgccccgacctgcgcatggaacctagaaagattgtacaatgaatggtgattctcgt

SEQ ID NO: 714742 - DNA, 73 bp, Homo sapiens
gagggctacccgctctttgccgtgacaacaccgttcccccagccgggctggctactgcagcactggggtgtca

SEQ ID NO: 714743 - DNA, 100 bp, Homo sapiens
cccagctccgtctcggcggcggcgggtctcggcgcggaagatggccggcggcgtggacggccccatcgggatcccgttccccgaccacagcagcgacatc

SEQ ID NO: 714744 - DNA, 100 bp, Homo sapiens
agtacccagtggagcagatgacaaccatagcccagtgccaatgcatcttctgtactctggcagcagtgaggatgccagagttcatgggtttctagaagac

SEQ ID NO: 714745 - DNA, 82 bp, Homo sapiens
tggctcgcgcctctcccaggacccgcctggctgcgagatatctgagcgggctttggacaccatgaactttgatgtgattaag

SEQ ID NO: 714746 - DNA, 46 bp, Homo sapiens
actgccttatgggacagatcaagcagtcgacaagtactttaagctt

SEQ ID NO: 714747 - DNA, 100 bp, Homo sapiens
aggaaatcatgtcaagcgaagccttgaaaaagctgccctgagacggtgtcccgccgaaagccatggattgttacagaacttcactaagcagttcctggat

SEQ ID NO: 714748 - DNA, 75 bp, Homo sapiens
tgttccctgacaactttgtaagaggagtgcatccgccccaacccttttccccctcgtctcctgtgagaattcccc

SEQ ID NO: 714749 - DNA, 75 bp, Homo sapiens
ctgcagcaaccgagaagatatttacagctctgcaaagaagaatgcagtaatagtggccttgtcttcaaaatcatg

SEQ ID NO: 714750 - DNA, 46 bp, Homo sapiens
aggttgtgactttagtatacagttttactgcaatcacagcaaccaa

SEQ ID NO: 714751 - DNA, 100 bp, Homo sapiens
ccttgtcagccagggctgaacccccgcaggagccgcaaagacagcctggaaagtgacagctccacggccatcattccccatgagctgattcgcacgcggc

SEQ ID NO: 714752 - DNA, 50 bp, Homo sapiens
acgccagcggacacgcgggcgaggtgtctcactttgtcgcccaggctgga

SEQ ID NO: 714753 - DNA, 96 bp, Homo sapiens
acaagaatgggcattacatcatcccacagatggctgacaggttcctggagagccactggtttgtgtgggtcacacagatgaatcacatcgtcatgg

SEQ ID NO: 714754 - DNA, 50 bp, Homo sapiens
tgcacgaaacactgaaattttggcagcactattcctgatcagagaactcc

SEQ ID NO: 714755 - DNA, 100 bp, Homo sapiens
cggccgcctagagtggttcagccacaaggaggcatcatggccgccctcagaccccttgtgaagcccaagatcgtcaaaaagagaaccaagaagttcatcc

SEQ ID NO: 714756 - DNA, 100 bp, Homo sapiens
acagctaagacgccaggacccactggaagcctagaaatgaattcctagaggacctgtgcaacaacctcttgaggatcgaatcttcactcccgctgtctca

SEQ ID NO: 714757 - DNA, 50 bp, Homo sapiens
tgagatggagtctcactctgtcgcccaggttggagtgcagtggcatgatc

SEQ ID NO: 714758 - DNA, 82 bp, Homo sapiens
aacgaggcaaggagctaaagcagcgtgcgttcagccctgggcaaactgtcatcaggagcttaaataggacagattttcacgg

SEQ ID NO: 714759 - DNA, 131 bp, Homo sapiens
tccatcgaggagcggatcctgcgcatcactggctactatggctaccagccctgggcagcgagctgcaaaagaaccacgtgaatgttgagggggcgacacacaagcaggtggtggacctgattcgagcaggc

SEQ ID NO: 714760 - DNA, 75 bp, Homo sapiens
cttcggagaatggagtcttccatcaatcatatctcacagtgctaccttgccctggccaaaggaggcttatctgat

SEQ ID NO: 714761 - DNA, 75 bp, Homo sapiens
aggagaagaaccatggacaatggaagatgaaaggcacagtcgaatctgtccagatatctcttccaaacgcatgat

SEQ ID NO: 714762 - DNA, 90 bp, Homo sapiens
cgcggggacagcagccggccagccggggggcactgcccgcccgggctctgacctgcccttcgtgcggaatcacatttgctcccaaatctg

SEQ ID NO: 714763 - DNA, 83 bp, Homo sapiens
gggcagttcttgaaaagtgtacaatgatgcttctcacagcttcaaagcagtcccactactgggcgtctacccagaagaaaaga

SEQ ID NO: 714764 - DNA, 90 bp, Homo sapiens
tggggatggcgtgcagcgcaaccacgagacggccttccaaggtcaccatggctgttattggctcccttgctgtccccagctgttccccag

SEQ ID NO: 714765 - DNA, 96 bp, Homo sapiens
ggttttacattggttcttcattgaatggtactcggggaaaaagaggattggagaatccatgttgaccaaatgcaccagcacagaagtggaattgaa

SEQ ID NO: 714766 - DNA, 51 bp, Homo sapiens
aaggaactggtgctgcagcgagagaaatcacctgcccaccaccccctgtta

SEQ ID NO: 714767 - DNA, 148 bp, Homo sapiens
ctcaagttcgctgacaggtccagttgcagatacaaacttggattttttccagtctgatccttttgttggcaatttgaagaacccaagtgattcagcagtgcacagcccctttacaaagcgccaggcttttaccccatcttcaaccatg

SEQ ID NO: 714768 - DNA, 101 bp, Homo sapiens
caaccaagaacgtcaaacactccaacaattgagagcatttaaagatgtttgttggcatccaaagctgttggggttgatggtgctgaaaaaaaggaagacta

SEQ ID NO: 714769 - DNA, 98 bp, Homo sapiens
aaaaggcagtgagacagattcagcccaggatcagcctgtgaaggtgcgggccagtgctattgcccaggacgcggaccagaactacgactacgccagca

SEQ ID NO: 714770 - DNA, 76 bp, Homo sapiens
gggctaataatgctggcaaagtggaaaaatgtgcgacaaaaagtaaccttcctgaagaggacatgtgattggaagt

SEQ ID NO: 714771 - DNA, 100 bp, Homo sapiens
atgccagttttttggaagtcttagttcgagatgtgtgtatttcatgtgagatttcaatggaaaaagtgaaggtaaagcgttatgtgtccggaaaaaggcc

SEQ ID NO: 714772 - DNA, 100 bp, Homo sapiens
gatgggggcgcaggaccggccgcagtgccacttcgacatcgagatcaaccgggagccgggtccgtgtgaaaaaattcatgatgaaaatctacgaaaacag

SEQ ID NO: 714773 - DNA, 83 bp, Homo sapiens
ctacttctgccgctattgtagcgaactgcggtcgctggaatgtgtgtctcacgagtgatgtcttggcattgcccattttcaag

SEQ ID NO: 714774 - DNA, 100 bp, Homo sapiens
tctgcagtgaagattgctgtaaaaaatttcaggattggtactacaagcgagaaaatgtcattgaatataaacactgtttgattacaaaaaatgagaatga

SEQ ID NO: 714775 - DNA, 100 bp, Homo sapiens
atagactgtcttcaagctcactgatattttcctctgcttgatccattgtgctgttgagagcctctagtaaatttttcagagtctcactctgtcgcccagg

SEQ ID NO: 714776 - DNA, 100 bp, Homo sapiens
tcggaacccgtggtcctccgcttcatgtatccgttacagcactgatgtgagtgtagatgaagtaaaagctttggcttctctgatgacatacaagtgtgca

SEQ ID NO: 714777 - DNA, 83 bp, Homo sapiens
ctcatcttcgtggggcgtgaggagtgtgagctcatgctacaggagcagctgatgagccagatccgggagacgcagcagctctg

SEQ ID NO: 714778 - DNA, 100 bp, Homo sapiens
atctcagcaacccctgtgcttctccccaggtccagccaatgcattcagaagccaaaatggacacagcattgttggttttgccatgtactattttacctat

SEQ ID NO: 714779 - DNA, 98 bp, Homo sapiens
ctgtggttgactactgcaacagattttgggaaccagtaggacattgacatacatccgagaacattctgtggtggatccagtggaaaagaaaatggaac

SEQ ID NO: 714780 - DNA, 101 bp, Homo sapiens
gatgggctcgatggattccccggcctcccaggccctccctactactataattccttgacccagcagtacctttactgggatggggaaaaagagacctacgt

SEQ ID NO: 714781 - DNA, 100 bp, Homo sapiens
taaagtggttggttgcagttgtgtagtagttaaggactaatggggagtcggggaatatttgtgggtattttttttacttcctcttggttcccagctgtga

SEQ ID NO: 714782 - DNA, 82 bp, Homo sapiens
ccgagttcaacatcctcctggccaccgactcctacaaggcaccacactgtaactcgaggcatcaccaaaggcgtgaaggagg

SEQ ID NO: 714783 - DNA, 100 bp, Homo sapiens
caagatagaattaggcctctctggaagcattacttccagaatacccaggttctcctgaaaagaaagctgaacattcatctataaatcaagaaaatggcac

SEQ ID NO: 714784 - DNA, 83 bp, Homo sapiens
caaatattgaccaactggcatcccacagcctcctcttccagaatgcctttgcgcaggtttgaagactgcttcattctgcctct

SEQ ID NO: 714785 - DNA, 90 bp, Homo sapiens
tattgagtgattttgtggagggcagaagtaggaagtctttgggacaaaactgtatttaccttggtttttcgttggaatatacgttgcaca

SEQ ID NO: 714786 - DNA, 50 bp, Homo sapiens
cgcctgcgacctgcccgcctggataaacctctcataatgaaggcccccgc

SEQ ID NO: 714787 - DNA, 139 bp, Homo sapiens
cgcaggggtggggccgcggcgcgcatgcgtcctagcagcgggacccgcggctcgggatggaggacagagaatgtcccagttacactatcagaggagaaccgttctgaaggaaaagttggttttcaggcctataagaatt

SEQ ID NO: 714788 - DNA, 50 bp, Homo sapiens
gcagtctaacatctgggtgaatatggatattctaaagggaaggactgaga

SEQ ID NO: 714789 - DNA, 75 bp, Homo sapiens
cgcggcgggccaccggccggcacgaaggcgtccccacgctggaaggggtttccaggcctgaggtgcccgccctgg

SEQ ID NO: 714790 - DNA, 100 bp, Homo sapiens
ccggccccaacacggaccttggttatgaagacagtatggagtttccagaccatagtagacatttgctacagtgtctgagcgagcagagacaccagggttt

SEQ ID NO: 714791 - DNA, 102 bp, Homo sapiens
cggcgcccggcgagggcgcgcggctggtgtccgccccgcccgaaagcaaacggggattcagcgtccgatcctttggaacagggactcacgtgaagcttccag

SEQ ID NO: 714792 - DNA, 80 bp, Homo sapiens
cgatccagcctgcggagcctgtggggcagggtaacaagatgctcaactatagtgctcccagtgcagggggttgcctgctg

SEQ ID NO: 714793 - DNA, 76 bp, Homo sapiens
ggatgagatggggcacccagagataggagatgctattgcccggctcaaggaggtcaccatcgtggtccttggcaac

SEQ ID NO: 714794 - DNA, 75 bp, Homo sapiens
acgcacacaggagagccaggattcatgctctacatccccatagaggccaggtgtggtgtcttacacctgtaatcc

SEQ ID NO: 714795 - DNA, 100 bp, Homo sapiens
agctcctgcagcagtaccgagtgccccggggaagccattccccaccccccagagcccgcggttcccttcaaaaagcggctgcaagatctggaggtgcggg

SEQ ID NO: 714796 - DNA, 82 bp, Homo sapiens
ggactctggagctgacagcgcgcacttcacccgcagttgacacgaatgcagagtttgagtccagatcccaaagcccagtaca

SEQ ID NO: 714797 - DNA, 90 bp, Homo sapiens
gtcgtcagtaatgcctggaatgatgatgtctcatatgtctcaggcttccatgcagcctgccttaccggtcaaaatgcagatcttcgtgaa

SEQ ID NO: 714798 - DNA, 90 bp, Homo sapiens
acccgggctgggctttcctcacccggtgatttgctgtcctctgaatacatagagagacacattgaacatggaggcaagactgtggaagtt

SEQ ID NO: 714799 - DNA, 75 bp, Homo sapiens
agattcggagagagaggtgctagtggctggacttgacctggaaaggctgtgggtgagcgtggaggatgctcagat

SEQ ID NO: 714800 - DNA, 75 bp, Homo sapiens
gggaacgctcacggactgtgtggcgcagcccagcctcgaaatgcagaacgacgccggcgagttcgtggacctgta

SEQ ID NO: 714801 - DNA, 80 bp, Homo sapiens
accttctttgtggttctcattgtcatccttgtgctgttggtcatcggtctctaattaacagaagatggcaaagcccagcc

SEQ ID NO: 714802 - DNA, 156 bp, Homo sapiens
gccaggcatccccagttgctgtacgagagcaagctctataagattcttcaaggtggggttggcatcccccacatacggtgaccagaggtgatatctaaaagaagaaaggaagcattaataacatgaaaaacagatctgcctttagggaatgtgctc

SEQ ID NO: 714803 - DNA, 100 bp, Homo sapiens
gttgccgctgccgctgccgccatcgtgccagcccctcgggtgtagacggggcactgccttcagagcaggtcctgccagcctcgctggagaggatgccctc

SEQ ID NO: 714804 - DNA, 100 bp, Homo sapiens
aaaggagatgcctggcagccccgctctctgcaagagaagacacggttcaatgtgtagaccttctccctctccagtgtctccagcctccaatcccaggaca

SEQ ID NO: 714805 - DNA, 84 bp, Homo sapiens
ttaaggattccaagtaactcttatttgaccctatcagatttggatatgtccttcatatttgattggatttacagtggtttcagc

SEQ ID NO: 714806 - DNA, 75 bp, Homo sapiens
cagcagcagaagctggagcagcagcagcgaggagaaggtgctcgggtcttcggggcactgggtcccatcggtccc

SEQ ID NO: 714807 - DNA, 75 bp, Homo sapiens
attgtaaatttcctgaggcctcctcagccctgcagaacttctactgcttatgaaaagcaatttcctgcaaccagt

SEQ ID NO: 714808 - DNA, 101 bp, Homo sapiens
acagcagcgccgtcccgtccgacagccaggcccgggagaattactggctgaccaacaaagttcctatcaaaagacccagcacaggtcttctcatgtataca

SEQ ID NO: 714809 - DNA, 75 bp, Homo sapiens
ggctcggctctcgctgcggcagacgggctcccccgggatgatctacagggtgactatgaccagagcaggaccaaa

SEQ ID NO: 714810 - DNA, 75 bp, Homo sapiens
ggccatggcggcgactactgccaaccccgggctcagataatcaagaaacaatgtcgagtgatgataaaagtaaat

SEQ ID NO: 714811 - DNA, 98 bp, Homo sapiens
tgatataagctgctttaaccctgatgagctgataaggtggcacaagaatggctcaactctccaaatagagagaatttctatcagttgcaagtacgaaa

SEQ ID NO: 714812 - DNA, 101 bp, Homo sapiens
tggggaccgccctggacatcaagattaaaagagcgaataaagtttatcacgccgggccagagactgctgctactttgaaacgtacgatagaggccctgatg

SEQ ID NO: 714813 - DNA, 98 bp, Homo sapiens
tccaactgaacgtaggggggaccagtatactgcattggaacaaaaactgaaaaaattgacggaagatttgagttgtcagcgacaaaatgcagaaagtg

SEQ ID NO: 714814 - DNA, 97 bp, Homo sapiens
gccctcattgagggcgttggcatcctcctcactcgctacacagcccagcagttccgaaatgcctgaagaaagttcgtggcaaagtctggaagcaaag

SEQ ID NO: 714815 - DNA, 75 bp, Homo sapiens
cgttttggtgtcttcgtttgttatggccgctgctgtcgctatggagacagaatgtggacatgcttactcggggat

SEQ ID NO: 714816 - DNA, 101 bp, Homo sapiens
tgcagaacccccagaccatcatgccatggcgattacgcctaccagcagtcatcctacacggagcagagctacgaccggtccttcgaggagtccacgcagca

SEQ ID NO: 714817 - DNA, 73 bp, Homo sapiens
agaaaatccccgttgtttttcgattgcaagagacgcaaaatgatttcatggttatctgcaatgttgcaaaaat

SEQ ID NO: 714818 - DNA, 97 bp, Homo sapiens
gagttcaagcaggcctatatcacctggagaagtccttgtgttcctggacagccactgtgaagtgaatgtgatgtggctgcagcccttgctggccgcc

SEQ ID NO: 714819 - DNA, 82 bp, Homo sapiens
ccatggccgacgaaaagcccaagggttacacatcattttggaatgactgtatatcatctggattacgtggctgtatgttaat

SEQ ID NO: 714820 - DNA, 90 bp, Homo sapiens
tgttttagagctggcagcagcatctcagcccaagagaaggttggtgctatgtaatgacatggatatgaacgagctgcctacgaacctccc

SEQ ID NO: 714821 - DNA, 75 bp, Homo sapiens
ctgacctcgctgtacgccgagcacccaggcgactgcctcatcttcaaggttcattttccagacactgaaagagca

SEQ ID NO: 714822 - DNA, 90 bp, Homo sapiens
cttcctgatttctgcagctctgtgtgaaggggaacttatgacattttagtaacaaaagataatcaaacccgctctgttggtcaatatgac

SEQ ID NO: 714823 - DNA, 51 bp, Homo sapiens
tggaacctggtcttcatgcaacacaacagggctcggggttgcccgctcccg

SEQ ID NO: 714824 - DNA, 75 bp, Homo sapiens
ttcgcagtggtcgcttcttctccttggtgctggtaaaccgcctatgtttggtgattatgaagctcagagacactg

SEQ ID NO: 714825 - DNA, 100 bp, Homo sapiens
gctgcagcagaacaggccatctccgtccgacagcaggtcgtggaaagtggagaatgaggacatgaataaagaccagatcttgctggaaaaagaagctgag

SEQ ID NO: 714826 - DNA, 124 bp, Homo sapiens
cagcaactggctgagggactcacagctgatgacctgctgctcgtgctgatctcagacctcctgccccccgaggtctgcagtctcctgaacccagcagccatctacgccaacaacgagatcagcc

SEQ ID NO: 714827 - DNA, 90 bp, Homo sapiens
cttcattatatcacaggataagtctgaaaaggcctacaagaggaggttcagatgagcccctgctgacttgagagagacagagagaccacg

SEQ ID NO: 714828 - DNA, 80 bp, Homo sapiens
ccccaggatgagtctgccggcagcatatataagggggaaggttcctcctcattcttgtcggaaacttgccatgaggatcc

SEQ ID NO: 714829 - DNA, 99 bp, Homo sapiens
ctcggcgcggtcctgtactggctgctgctgccctgcgcgctgctggctgggagtgcatccgccccaacccttttccccctcgtctcctgtgagaattcc

SEQ ID NO: 714830 - DNA, 51 bp, Homo sapiens
cacgccgccatccgggaggcccagggaagggcctgctttcttccccgggcg

SEQ ID NO: 714831 - DNA, 50 bp, Homo sapiens
cttagaaaggatcaggactggcggcttcaaggttactgactttttatgat

SEQ ID NO: 714832 - DNA, 76 bp, Homo sapiens
aggatctgaaggacttctttcaaaaaacttacgctggaaaaactccaacagcttcatatggacagatggacttcaa

SEQ ID NO: 714833 - DNA, 82 bp, Homo sapiens
atttcagtgtcctccttagctctgcagatccacaagaaggtgctgtggtggttctccctgcagactctcagcagcgtttggt

SEQ ID NO: 714834 - DNA, 100 bp, Homo sapiens
aaaagaaaagcaaccttttgaaagactagaagtcagcaaggaaatcctcctggaaatgtttaagggtgatctggaccctctggcatctctcaaatcgctg

SEQ ID NO: 714835 - DNA, 100 bp, Homo sapiens
tgagggtcggaccccagtaccaggcggtggtgcccgacttcgaccccgatcctcagtttgtggtctgccagctaaaggtgaagatatattcctccaattc

SEQ ID NO: 714836 - DNA, 100 bp, Homo sapiens
gtcatcctccacagctccagggaaggcactcaaaagtggggggcaggaaagttcattggaaatcctgggattcagaaatgtggattaaaagtaatttctt

SEQ ID NO: 714837 - DNA, 74 bp, Homo sapiens
cagctatcgtggacgtcactggccctggtggggattgacagccacgggaaggtttacccaaggtccagcctagc

SEQ ID NO: 714838 - DNA, 100 bp, Homo sapiens
acaggacctgaaagagtattttagtacctttggagaagttcttatggtgcaggtcctggtgcttgatggtcgaggccatctcctgggccgcctggcggcc

SEQ ID NO: 714839 - DNA, 118 bp, Homo sapiens
ggccccgagccccgtggatccgctggagcggagccggccgtacgcggtgctgcgagggcagaacctgggaactgacccaggagtgtgatgaaaagaaatcccagtatgatagctgtgc

SEQ ID NO: 714840 - DNA, 75 bp, Homo sapiens
ccgtgggcctgtggactgcagcctcggcggtcagcagacaatgcagatcttcgtgaagactctgactggtaagac

SEQ ID NO: 714841 - DNA, 90 bp, Homo sapiens
ccctgagcctcgggctccggcccggacctgcagcctcccaggtggctgggaagacacgttggtcgtcattgcctccgagcccactttagc

SEQ ID NO: 714842 - DNA, 100 bp, Homo sapiens
ctccgcccaatgccattctggaaaaggtcttcactgcaattacaaaggaagtggaaattgagcgaagtttgtgctcgccagcttttaagagtcaccctgg

SEQ ID NO: 714843 - DNA, 75 bp, Homo sapiens
ctgcctttgacctttttgaagcctttgcaaaagttcattcatggcattggacgatccggtgatatttctgctgtg

SEQ ID NO: 714844 - DNA, 51 bp, Homo sapiens
ccggcgttgagtacttcaacacgggagaccaaggacaagatggagctgctg

SEQ ID NO: 714845 - DNA, 100 bp, Homo sapiens
cgggatcgtgaccgagaccgtgaccgagagcgtgaccgagagcgcgaatatcgtcatcgttagaaggtgctgctgatgtagagaaggtggaggaaaagtc

SEQ ID NO: 714846 - DNA, 80 bp, Homo sapiens
atggggaggaggtcatcagctttgctactgtcacagggtgaggacgcttgagcggaagttagaagcaaaaatgatcaagg

SEQ ID NO: 714847 - DNA, 100 bp, Homo sapiens
cggaattctttgatcctctctttgttgagcaaaaggatggttttagattgtcatctcaagaagctgcttctagttttggcgatgatagactactaataga

SEQ ID NO: 714848 - DNA, 90 bp, Homo sapiens
tggaggagcagtacggccagatgtacatcaaggcctccggcagctatgcagagcactgcagtttcctcctgaaggctggctccggctctc

SEQ ID NO: 714849 - DNA, 98 bp, Homo sapiens
tgcagatggaggcggggctgtgtgaggagcagctgaaccaggccgacgccctgctgcagtcggtttcagcgttaaaaacaatggccagtcagggaggc

SEQ ID NO: 714850 - DNA, 51 bp, Homo sapiens
tggagaaatataaacttctgccagagctggtacagaaggcagagctggtac

SEQ ID NO: 714851 - DNA, 96 bp, Homo sapiens
tgaacagacaaggttcaaaaactaagcatccagaggccctgagcagctttcagcactggaggtgctggagaatctggtaaaagcaccattgtgaag

SEQ ID NO: 714852 - DNA, 75 bp, Homo sapiens
gcatatgatgtgcagtgtccaaagagaggatcttaagattgaaagtgatgttcaagaaccaactgaaccagagga

SEQ ID NO: 714853 - DNA, 77 bp, Homo sapiens
aattgataacaccctgtaacagctgaatccaagaaaacattcttggccaaaatctaggggaagttactgccacttcg

SEQ ID NO: 714854 - DNA, 100 bp, Homo sapiens
cttttggggggaaactaggtcgatggtcggcggcgcccggatgggcagctgagaacaatttctgtgagggaagtatctcggcttctcccttgaattccag

SEQ ID NO: 714855 - DNA, 83 bp, Homo sapiens
cacagacagaatccctgctaccagcatgccagaggaacagagagaagggctccaggaagaactgattgacatcatcctcctca

SEQ ID NO: 714856 - DNA, 82 bp, Homo sapiens
tacagcgggagcaggagctggagcaagagtgagccatggagctacgtgtggggaacaagtaccgcctgggacggaagatcgg

SEQ ID NO: 714857 - DNA, 98 bp, Homo sapiens
tcgccctcaagttcacctgcaggtgggaatgactgttcactgccgcatcatgaagattgacattgagaagttcagtgcagacctgacctgccgcacct

SEQ ID NO: 714858 - DNA, 100 bp, Homo sapiens
agcccgagctgaccctaggcctccaccctggcaggaatcccaatttgcctccacttagtgagcggaagaatggtatgggcactaggaaaagacttcttcc

SEQ ID NO: 714859 - DNA, 83 bp, Homo sapiens
agggcagccggcgggaggaacgctcactgtcagcgcctggaaacttgctcacggaaggtggccatccagaaggaggacttgca

SEQ ID NO: 714860 - DNA, 100 bp, Homo sapiens
agaacaccaaccaaattgtcgccattaagaaaatttcctcctctgatgctcctcttcagcctttggtatcctctccttctctgcaagctgctgttgacaa

SEQ ID NO: 714861 - DNA, 75 bp, Homo sapiens
tgggccgcctgctgctggtgcgcgtgggggtgatcagcttcgcccagaagctaacaggcctcacctcttccattc

SEQ ID NO: 714862 - DNA, 83 bp, Homo sapiens
gccatattggagtagcgaggaatctgattccaagcaaaaaccaggtgtgcaactgaggaacatggctcaagaaactaatcaca

SEQ ID NO: 714863 - DNA, 82 bp, Homo sapiens
acgacttcgaccctgcccagcacgaccagctcatgcagcgatgactacctgtccctggagggttcccgctggccaccagcca

SEQ ID NO: 714864 - DNA, 90 bp, Homo sapiens
tgcgtcccgcctccctgggagctccgcacggatgaatcagaactccttacggttcctgatggttggaaggaaccagctttttccaaagag

SEQ ID NO: 714865 - DNA, 96 bp, Homo sapiens
cgaacatcttctggacctttgtccaggacagtcattttgtttactcattcagccctgttgcaggtcccaataaactcttcataaggttgacagaag

SEQ ID NO: 714866 - DNA, 82 bp, Homo sapiens
cagcatgtcgcggcggcggcacagcgacgagaacgacgtcgcaatgtatctgctgagcaaaaagatgaaaacaaagaagcaa

SEQ ID NO: 714867 - DNA, 82 bp, Homo sapiens
cccggagaaggtctacagagcggcctgcgccagcgaaaagccaaacttggccctgctggcaacaaagtcatcagtccctctg

SEQ ID NO: 714868 - DNA, 50 bp, Homo sapiens
gtacctgaccactctctcccaggtccgattcccatcccacttcagttcag

SEQ ID NO: 714869 - DNA, 146 bp, Homo sapiens
ctgagctgctgctgcgactgcagaaggacggcctgacgcaggcggacaaggacgcgctggatggcctcctccagcagcccctgcggatccgccggcttctccgtcccttcttcctgctgcagaactcctctatgatgaagaagacc

SEQ ID NO: 714870 - DNA, 100 bp, Homo sapiens
tgtaaggaaaggctggcacgaacatgtcactcaggacctgcggagccatctagtgcataaactgttccacttccaaacatgagttccaggccgagacaaa

SEQ ID NO: 714871 - DNA, 123 bp, Homo sapiens
tttcaacacaggccccaagccgaatagcacagcagctggagtttctgtcatagcagccatggaggcacagatacagaactttggacagacgccatctcagttgcttattgagccacatccgcc

SEQ ID NO: 714872 - DNA, 82 bp, Homo sapiens
cccgggaggaaggaacgaggcaaggagctaaagcagcgtgcgttcagccctggggacagaatgaccgagaacatgaaggagt

SEQ ID NO: 714873 - DNA, 74 bp, Homo sapiens
gaagccatgcccctcaggctggaacttgccctgtctcctcgcagatgaggcaatgtggctgggataccctggga

SEQ ID NO: 714874 - DNA, 76 bp, Homo sapiens
gacggattcatttagagctgcggaacaggacgccctctgataccatgccgtccatcagcagtgaccgcgccgcgct

SEQ ID NO: 714875 - DNA, 71 bp, Homo sapiens
gagcccgcgtcggctgagagcccacaggcccccacaggccaccgaggtccgtatctgccctgtggaattca

SEQ ID NO: 714876 - DNA, 98 bp, Homo sapiens
atcgatctaagatggcgactgtcgaaccgacccaacatgagtgaagtttcctgcaagaaacgggacgactatttggaatggccagagtattttatggc

SEQ ID NO: 714877 - DNA, 82 bp, Homo sapiens
ttggactgagtcctgcaggacacagtatatgactctcaacccttctactaagaggaagaatactggatccccagacaggaag

SEQ ID NO: 714878 - DNA, 74 bp, Homo sapiens
tcttgcgctggggacccaggataggcggctatgagaggttttcctccgagtacccagaattctgttctaaaacc

SEQ ID NO: 714879 - DNA, 100 bp, Homo sapiens
gacagggaagtggcagaaggaggccttccccgggcggagagcccctctccaggagccttccttccgacctggccttcaacggggacctggctaaggcagc

SEQ ID NO: 714880 - DNA, 75 bp, Homo sapiens
aacggtttcgctctttggaaaatacgggagtacaagcgcaagctagccagagtttccctggtgcgcaaagaactc

SEQ ID NO: 714881 - DNA, 83 bp, Homo sapiens
ggcgcaggtgaccggcgcgcgggagcgctacggccccaacgggctgggttacgacccctacaaccctgagctgcccaagcccc

SEQ ID NO: 714882 - DNA, 122 bp, Homo sapiens
ccgaacccgcgatggaataatgcccagcggcccgccaggtcccgaaggacagaataacgggctcccagattcacaagccccaccaagaggatcaccccaggaacgcttggaggctgaggagt

SEQ ID NO: 714883 - DNA, 100 bp, Homo sapiens
cgagggaacagatgagaaacccggcaatgaaagtctacttccccagcaggacagcatcattctcctatatcttctagacatcactcatcttcctcacaat

SEQ ID NO: 714884 - DNA, 80 bp, Homo sapiens
acaacgtcatcacgccctttctcttgctcaaggccaaatttgagtttcatcatggtgactatgaaaaacagtttctgcat

SEQ ID NO: 714885 - DNA, 75 bp, Homo sapiens
cagcatgctgccctggggggcacagctagaacgactgagacggctaaaccacagtgttgccaaggaaacagcccg

SEQ ID NO: 714886 - DNA, 75 bp, Homo sapiens
agcagtggtgctgtgcacagcacaaggttggatggcaagcatgtggtgtttggcaaagtgaaagaaggcatgaat

SEQ ID NO: 714887 - DNA, 88 bp, Homo sapiens
cctgaccagtgtcaatatcctgctgaaaaagcaacaggaagtcctggctgagcaaggttggaagccctagttctcgcattgaccgcac

SEQ ID NO: 714888 - DNA, 100 bp, Homo sapiens
cagcctcccgagtggctgggactacagacctgagatccaagctggaaagaggcagtgcctgcagcaaccgctccatcaagaaagaggacgactcttccca

SEQ ID NO: 714889 - DNA, 75 bp, Homo sapiens
caagtttgcagatcgggagcgcaaggtcgccctcaaggccatgatcaaaacagcagcccgacggccatggaggct

SEQ ID NO: 714890 - DNA, 100 bp, Homo sapiens
gacggagtcggcgagcccccgcggcgacagcggaaggagagttttacatggaagtggcttacagaaacttggcgctgaggtgcagggaagccagaaactc

SEQ ID NO: 714891 - DNA, 100 bp, Homo sapiens
cgggcacggcggaggcagcggagccctgggccatcgatacactctgtgcagttttagagagagacacactcagtattcgagaaagtcgactttttggagc

SEQ ID NO: 714892 - DNA, 100 bp, Homo sapiens
caaggacagaatcaccagcactggctgaagatgacccagcagatggctgggatgaacttctatggagccaatggcatgatgaactatggacagtcaatga

SEQ ID NO: 714893 - DNA, 50 bp, Homo sapiens
tcagctgaggcctgagacacaggaccagcttcaaacactccagagtgaaa

SEQ ID NO: 714894 - DNA, 97 bp, Homo sapiens
acaacaggagaagctcaccatgtctctctcagaacttggtgctgctagaatgcaggaacagcaggaagatattttcgattcagataaagaagttcct

SEQ ID NO: 714895 - DNA, 98 bp, Homo sapiens
ccggaagactctggctgacctccagctggagtatctggacctgtacctgatgcactggccttatgcctttgatctattatcctcccagtccacaacgc

SEQ ID NO: 714896 - DNA, 61 bp, Homo sapiens
attcgcagtggtcgcttcttctccttgacaaatttacatgtattggagaccagaccagaag

SEQ ID NO: 714897 - DNA, 74 bp, Homo sapiens
tccaggagagagagcagctgctcatcaaagcctcagccacctgtatagaaatggtgacatcactggcatatact

SEQ ID NO: 714898 - DNA, 75 bp, Homo sapiens
ttacgtctgcggaagtgcagctgcctcagttcttagcgcagacgcaaacatgcagatctttgtgaagaccctcac

SEQ ID NO: 714899 - DNA, 118 bp, Homo sapiens
cggcagcatgtcggtggcggggctgaagaagcagttctacaaggcgagccaggctaaccttgccgcgggccgagccctgcctcgccatggaccaggactatgagcggcgcctgcttcg

SEQ ID NO: 714900 - DNA, 100 bp, Homo sapiens
ttcatcacccctctcttccaaatcctgtagccataaatgtctggctaatggcatttacaggaggttattgaagagagggaaaaactaaagaatgaccggg

SEQ ID NO: 714901 - DNA, 75 bp, Homo sapiens
tcttacctctttgatctcgacaataaggtttattacccagaactctttgtctgggtcagtcaagaaccatttcca

SEQ ID NO: 714902 - DNA, 90 bp, Homo sapiens
ctggactggtctacaccgctgaaggatccctccccgcggcggcgatggcccgagccatgagagtgaggactttccgcgcccattggtgac

SEQ ID NO: 714903 - DNA, 100 bp, Homo sapiens
ctaaaaagaggcgaaaggaagcaagcagttcagaagagccaaggaataaacatgcaatgaacccaaaaggaatattatccagcaatgcaaatgaacaaac

SEQ ID NO: 714904 - DNA, 99 bp, Homo sapiens
gtcagatactgccaagggctacaacctcctgaaacccatgggcaaagtcgtcacctatgagctcccagctcctccagcagccgacaggaggcccgtcaa

SEQ ID NO: 714905 - DNA, 110 bp, Homo sapiens
cgggtcgccagcggccccgccgagagccggaggcaatggatgaacagagcgtggaggctcatgacttgcagagtgaacttgataaaggaaaagaagatactcaaaagaaa

SEQ ID NO: 714906 - DNA, 98 bp, Homo sapiens
atgggttaaaatagaaaatctagccaaagccaatccccagaccccaagactgcttctgagacagaaacagatatctgtgctgaatgggagataaagac

SEQ ID NO: 714907 - DNA, 100 bp, Homo sapiens
atttgaagatacatgagacagcagccaaacccccagtgttcgactacagttatagagattacattctgtcctggtatggaaacctcagcagagatgaggg

SEQ ID NO: 714908 - DNA, 100 bp, Homo sapiens
ggcagagcacgagcggatcctgcgagagatcgagagcactgacacggcctgcatcgggcccacgctcagagttacatccatatgggagaatagtctccag

SEQ ID NO: 714909 - DNA, 100 bp, Homo sapiens
ttctgggctggtcgaagcctgaagccgcagtatgtccttgagtgggtccccccctacccatctagctgttgcccccatgacagggtctcgctctgttgcc

SEQ ID NO: 714910 - DNA, 98 bp, Homo sapiens
agggcactggcctagttcccgacttgtttctcaggagctatgcctgttccagaccagccttcatcagcctcagagaagacgagttccctgagccccgg

SEQ ID NO: 714911 - DNA, 101 bp, Homo sapiens
actccccggctcgaagcctggatgaaatagatctctcggctctgaggttgttgacctcctgtactggagagacattaagaagactggagtggtgtttggtg

SEQ ID NO: 714912 - DNA, 90 bp, Homo sapiens
cgtgagagaagaaaaaacacgctcagagataacctgccctggccaacgtcaacattgggagcctcatctgcaatgtaggggccggtggac

SEQ ID NO: 714913 - DNA, 135 bp, Homo sapiens
cggcgcccggcggcggaactgctacgaaggcgcctactacaacgaggcgcccagcgtatgtggccttcgcttccctcttcttcatcctggtctccatcaccaccttctgcctggagacccacgagcgcttcaacc

SEQ ID NO: 714914 - DNA, 100 bp, Homo sapiens
agtaaatccaaacgtgaaccagagaatgagttaaccaaacagcacccttctgtttctttacagcagtataagaccatgtctgcaaaggagaagtcgaagt

SEQ ID NO: 714915 - DNA, 83 bp, Homo sapiens
tgtgagcagcaagaatggcacggtctgcctcagtccaccctgtaccctggagcaggtctccactccagaaattaaagttttaa

SEQ ID NO: 714916 - DNA, 82 bp, Homo sapiens
tcgcgacgacgttgcctaccgtcaagatgattgtggagggactggtgattgcagctggaagtgcccatgaccgagctggcgt

SEQ ID NO: 714917 - DNA, 100 bp, Homo sapiens
gagtggatggtcaagagcgtgccctacttcaaggataagggtgacagcaacagctcggcgggctggaaggacccctcgtccagtcattgtggaacccatg

SEQ ID NO: 714918 - DNA, 87 bp, Homo sapiens
gagccggaggagtcagtcagaggggcgagcaggagcgattccgtcgccaaacagttactgcaacaaggaggtatacaataaggagaa

SEQ ID NO: 714919 - DNA, 75 bp, Homo sapiens
gatgttgaacatgtggaaggtgcgcgagctggtggacaaagcgtagcccagccatgacccataggaatctgactt

SEQ ID NO: 714920 - DNA, 96 bp, Homo sapiens
attaacagtatttactgagagctcatcagatacaccatcagttaagattataccatcgactccttttccacaagaaggacagcctttaattttgac

SEQ ID NO: 714921 - DNA, 83 bp, Homo sapiens
gccgagccgggatctcaggtcctcgggggcggcggccacgccaaggacggggtggcccagttgaaatccttcccttcctctac

SEQ ID NO: 714922 - DNA, 74 bp, Homo sapiens
aaattttggaaagagaagatgctcggctgatgcaagtctggaaaagtttgaaattccagtaaaaattcgtttga

SEQ ID NO: 714923 - DNA, 100 bp, Homo sapiens
atgcagaagtggtattacaaagatcctcagggagaaattcaagtcattgaagtcaacaagagagacatagtcttcctggtggatggctcatctgcactgg

SEQ ID NO: 714924 - DNA, 95 bp, Homo sapiens
attttgaagatgaccactttggaaatggttgctccttgagggcaggacagttcttatggctttatccgttgcgtaagcacagagaggtctgcgag

SEQ ID NO: 714925 - DNA, 100 bp, Homo sapiens
tgagcaccgcctggtctctttcctgtggccagcccagggagtaccctgacttctaccggaagctctacggcctcttggacccctctgtctttcacgtcaa

SEQ ID NO: 714926 - DNA, 97 bp, Homo sapiens
ggaaagaaagagccctggactgtgaagagtgaggagaccatagctgcacagccaggctatggaggctatgatgattacaatggctataatgatggct

SEQ ID NO: 714927 - DNA, 50 bp, Homo sapiens
gggactggcgcactcacagctttccagtatcttaaatagcgaagatggag

SEQ ID NO: 714928 - DNA, 100 bp, Homo sapiens
gaacctcttccagttggaattgaagaatattcccaagtccttcacccgggacctgaaggagaagaaggagaaggtggaggagaaggcaagccggaaagag

SEQ ID NO: 714929 - DNA, 95 bp, Homo sapiens
cgagcagctcatcacccagtacgagcgggagaaggcgctgcgcaagcacgctgaggaggtccgtgtgaaaaaattcatgatgaaaatctacgaaa

SEQ ID NO: 714930 - DNA, 100 bp, Homo sapiens
attactgaaagttttgaaattagagacgcagacagcggagattctggagctggctggcaatgcagcgagagacaacaagaagggacgggtcacaccccgg

SEQ ID NO: 714931 - DNA, 100 bp, Homo sapiens
ctgctaagtacatgctggattgtagaacttctctctcttgctgtgctgtggctttcattgagaagctagacgcccagtctttgaatctaagtcaggagga

SEQ ID NO: 714932 - DNA, 101 bp, Homo sapiens
ccagagatttccacagaaggactgggatgatacaccttttccacagggaattgagttggagttcatgatcaagtgttgcccacaccaaatgcttcatccag

SEQ ID NO: 714933 - DNA, 100 bp, Homo sapiens
caccaagtacatcgactttgatcatggagggccctcctggacccgggagcggaccctggtggcggtgaagcccgatggcgtgcaacggcggctcgttggg

SEQ ID NO: 714934 - DNA, 75 bp, Homo sapiens
ggaagagcgctcccaggagaaacaagactcatctgatgatgtgagaagagttcagaggagggagaaaaatcgtat

SEQ ID NO: 714935 - DNA, 100 bp, Homo sapiens
gataagccaactttgaatttcttctatcaacagattgatgaactcccagagggcgctgtgaagcctccagcaaacaagtatcctatcttcttttttggca

SEQ ID NO: 714936 - DNA, 75 bp, Homo sapiens
cgggcgtgggaacccaggccccgccgaggcggccagatataatgaagatctggaacttgaagatgccattcatac

SEQ ID NO: 714937 - DNA, 51 bp, Homo sapiens
aggatttctccgcctcagcccaacggggagcatcaagatggtgctcatgtg

SEQ ID NO: 714938 - DNA, 74 bp, Homo sapiens
tgaaccccaccaacacagtttttgaaaacccgcctagtgccaagcaaccctccaagatgctagttatcaaaaaa

SEQ ID NO: 714939 - DNA, 97 bp, Homo sapiens
aagcaaaggccggggcagacctcctagcctcaggagtgcaagtagctgatgaagtatgtcgcattttttatgacatgaaagttcgtaaatgctccac

SEQ ID NO: 714940 - DNA, 137 bp, Homo sapiens
atcagggtaacggttgttgatgtcaatgaatcaagaatcaatgcgtggaattctcctacacttcctatttatgagattgagcttctagagcctcagagatggaattcgccgttttgccgcgatttggcgttaactta

SEQ ID NO: 714941 - DNA, 74 bp, Homo sapiens
ttctatgacggagaatccgtttcaggaaagcagtgcctgatttgagatggggtcccaggtctcggtggaatcgg

SEQ ID NO: 714942 - DNA, 82 bp, Homo sapiens
cgagctgacgtggcttgaattgggaggggggcagctggagcctcaggcggcagcgcttctagttttgcacatttgggagccg

SEQ ID NO: 714943 - DNA, 90 bp, Homo sapiens
tcctccaggagaagttagcttcagagttctttgtggatggacttgattctgatgagaggtctctaattaacagaagatggcaaagcccag

SEQ ID NO: 714944 - DNA, 100 bp, Homo sapiens
cctgcgccgccgcctcccgccgcgccccgccatgccgctctactccgagaccatcatgcagacatcagagactgggtcggacacaggctcgacagtgacc

SEQ ID NO: 714945 - DNA, 73 bp, Homo sapiens
tacaggacctggcttagctattcattgcatgcaggaaactcagctctgtatttatttgagtgctatgatacga

SEQ ID NO: 714946 - DNA, 97 bp, Homo sapiens
tggaacaggtaatgagaatcttcgccttgcgatcaggatcctcatgaccagccaaagagaagaagaattaggaagcataaatcaaagaaaaaattta

SEQ ID NO: 714947 - DNA, 150 bp, Homo sapiens
gatgaccagcgcgaccttatctccaacaatgagcaactgcccatgctgggccggcgccctggggccccggagagaggatgtcacccccatcccctctgacagcactcgcaggaaggggggtcgccgtggtcgccgtctgtgaacaagatt

SEQ ID NO: 714948 - DNA, 90 bp, Homo sapiens
tccgggagggagtgcctggccaggccggcctgtctgccgcgatggatgacagtaagtctttaacacctctgtgtgaagatgacaaccagg

SEQ ID NO: 714949 - DNA, 75 bp, Homo sapiens
gtagaatttgccaagcaagccatgttttcaagttatgatatgactctgacaaatgcttgtattgccttaagtcaa

SEQ ID NO: 714950 - DNA, 98 bp, Homo sapiens
ctgcgaaggccgggacccggttccccggcccacagtgggggtgtgcaaacccgagagaactgggttattttgtccacaaatattgctgaaacaagcat

SEQ ID NO: 714951 - DNA, 80 bp, Homo sapiens
ctgctcctgtcaggaaagatactcaaggtcacttcatcctggcccaggtactgcagctccaaatcgtggggattctgtaa

SEQ ID NO: 714952 - DNA, 100 bp, Homo sapiens
atttcatgagagaagaaatacaggatgcctctcagctgccacctgcctttgacctttttgaagcctttgcaaaatcctgttccagattatatcaaatcaa

SEQ ID NO: 714953 - DNA, 100 bp, Homo sapiens
aagatattcacagacatgcggaatttgaggccagagatcctcagcaggagcctatggaagagatagaaaatttgaagaaacaacatgatttattaaaaag

SEQ ID NO: 714954 - DNA, 98 bp, Homo sapiens
cagccaacctatgttgccctgagttacataaataggtatctcagatgaagacatcatcaacattactcttcctactggagtccccattcttctggaat

SEQ ID NO: 714955 - DNA, 75 bp, Homo sapiens
gttaatcctcaatttaagcctgatctaacccctagaaacaggctcaggccacagggtcaccacatacatcgccca

SEQ ID NO: 714956 - DNA, 82 bp, Homo sapiens
gagattctctcccaggccacaagacatttcctgctcggaaccttgtttactaattgagccttcattccaggagttccagtgc

SEQ ID NO: 714957 - DNA, 100 bp, Homo sapiens
tgctgatccacatgagagtccactctggggagaagcccaacaagtgtacgggcgatgccagtccctccactccagaggagaacgaaaccacgacaaccag

SEQ ID NO: 714958 - DNA, 75 bp, Homo sapiens
ggttaattcaacagttcaccaccattaccgatgacttcaaacctgcttctattgacacttcttctgaaggatacc

SEQ ID NO: 714959 - DNA, 99 bp, Homo sapiens
cgagcgcaaggacagcgcgaggtccgcgcagcccagcgcagccatggtttccaggcctgaggtgcccgccctggccccaggagaatgaaccagccgcag

SEQ ID NO: 714960 - DNA, 101 bp, Homo sapiens
aatgcctatgaccggcgtcgagaatttcaactggacttcatagacctcacgttgtcgaagactcaacgaaagactccaaccgttattcataaacattacca

SEQ ID NO: 714961 - DNA, 101 bp, Homo sapiens
cttcctcgcagaggtggacaagctggtgcagctgattgagtgccccatcttcacattgtaaacaggaacatcgataagtagtgtaaaaacttgcacaatga

SEQ ID NO: 714962 - DNA, 83 bp, Homo sapiens
ccacgcactcctcaacaagaaggacgtggaagaggcagtctcggatgagagccactcagagtgggtgtcttgtgtccgcttct

SEQ ID NO: 714963 - DNA, 88 bp, Homo sapiens
gttcggggaaatggctgcgagaccctagaggcctgcggcctgcggaaagcctacatccttgaaaactgcacagtcgtcatgggtgaat

SEQ ID NO: 714964 - DNA, 82 bp, Homo sapiens
ttggcccttgttcccccaaatgtctgactctgactctcggactgagaaacgcaagatcaatgtccgagttaccaccatggat

SEQ ID NO: 714965 - DNA, 50 bp, Homo sapiens
gaagatcatcattaaggacggaggcacgatagcctgggctggaagctctt

SEQ ID NO: 714966 - DNA, 51 bp, Homo sapiens
gatgttcttcttcgagtatttgtagaaggtgccagttgccagctgacggtc

SEQ ID NO: 714967 - DNA, 50 bp, Homo sapiens
acctacgttggcggccccagaagacatatgtagagtgtgtcggtcagaag

SEQ ID NO: 714968 - DNA, 75 bp, Homo sapiens
actccttcggcagtccacccaccgccgccgcctcccaggtcgctttggtcatcttggcttagccatcaacttgat

SEQ ID NO: 714969 - DNA, 100 bp, Homo sapiens
tatcagcaagaagtagatcgcataaaggaagcagtcaggtcaaagaatatggccagaagagggcattctgcacagattgatatcaatgatgtcaaacggc

SEQ ID NO: 714970 - DNA, 100 bp, Homo sapiens
ggtggtgaccatcgaaaggagcaagagcaagatcaccgtgacatccgaggtgcctttctccaaaaggaaagtgggggctcagcaagaactgattaccgag

SEQ ID NO: 714971 - DNA, 74 bp, Homo sapiens
aaaaaggaaaatgggcaatcgtcataacaacaagctcaccctcttccgccagctgcagcagatgacgtacagcc

SEQ ID NO: 714972 - DNA, 74 bp, Homo sapiens
gcctatcggcgcatcttccaaaaattcctacagagaaccatatttatttagagtcagaatggagcgatttgtag

SEQ ID NO: 714973 - DNA, 78 bp, Homo sapiens
aaatgtaaaggccaagatccaggataaggaaggaagaaggaccatggaaatctcagttatcttcaacaaaatctaaaa

SEQ ID NO: 714974 - DNA, 82 bp, Homo sapiens
gaagacctgctatggatattccacccattcatcctgagtacaagaagatcatcctattatgtcttttactatttcaaaaaat

SEQ ID NO: 714975 - DNA, 83 bp, Homo sapiens
cttgagtcagtgcgccgctctccagcccgcttgaacgagtaaaggtgggattctatccaaagcttgtgattatatccaggagc

SEQ ID NO: 714976 - DNA, 100 bp, Homo sapiens
cgggagcggagacctcgctgcgctcatggcgtcgcccggcagggtggcaacatccggggtccctgggcccgaggctggaagagcctctggacaggtttgg

SEQ ID NO: 714977 - DNA, 100 bp, Homo sapiens
cggccgcctccggccaggacgctgggagctgcctgcgggaaggtgcggggagcggagccatggcctccggatctatctggttcaatagatgacctcccca

SEQ ID NO: 714978 - DNA, 50 bp, Homo sapiens
agccgaaaaaggcagcagcgaagagggtaaaactgattattatgctcgga

SEQ ID NO: 714979 - DNA, 98 bp, Homo sapiens
aacaggctgtgaagaagctgtatgacattgatgtggccaaggtcaacaccctgattcgggtggttgagtttgcctcttatggtgacttaaagaatgct

SEQ ID NO: 714980 - DNA, 75 bp, Homo sapiens
tttctcgattcgctgtcggaggagaatgagaccctggtggagtttgctattgattatcctcttgacttgaaccac

SEQ ID NO: 714981 - DNA, 100 bp, Homo sapiens
tgctgggagggaagaatggagtctgtcagtacaggtgccgatatgctgcgcaaaccatgcaggatgatttactgatggacaaaagcaaaacccagcccca

SEQ ID NO: 714982 - DNA, 74 bp, Homo sapiens
attcttcagagaacaacctacacgcagactttgcaaagcaattaccagctctggctgggtcgccacaacttgtt

SEQ ID NO: 714983 - DNA, 100 bp, Homo sapiens
agagaggccaacattttttgaaatttttaagacacgctgcaacaaagcaggaagatgttaccgagtacttcagtgaattccttagtgcaggggaacggag

SEQ ID NO: 714984 - DNA, 100 bp, Homo sapiens
gttcggaaccccagagcacgagtagtagtcttaagaatatcagttttagagaatgtggcgtggagaaattctcaaggaaagagtaaaatgctggtgatgt

SEQ ID NO: 714985 - DNA, 83 bp, Homo sapiens
ggatcccccagttccaaagtgtcttaaaggtgatgcagctaattgccccagtttggaaaacatggacttggatgaattgtctt

SEQ ID NO: 714986 - DNA, 75 bp, Homo sapiens
gcggctcagaagataaacgaggggctggaacacctcgccaaagcagagaaataggaaacttcgtggcttgcatga

SEQ ID NO: 714987 - DNA, 81 bp, Homo sapiens
gcagcagcgagaggaagagctccgggaaatcctgatgaccttccatcagtgcccgtgtttgacagaactctgccagtgaag

SEQ ID NO: 714988 - DNA, 75 bp, Homo sapiens
cgcagcccccgccgtagccgcctccgagcccgccgccacatcctctgaggcggcggcggcggcgcccgggagccg

SEQ ID NO: 714989 - DNA, 75 bp, Homo sapiens
tggtggacacttttgcttgcagttaggtcaagtggaggtgatctgtgaaaatggttcgctattcacttgacccgg

SEQ ID NO: 714990 - DNA, 118 bp, Homo sapiens
gagtcaatatctgcttaggattcactgcacatcgaattaagagagcagaaggatgggaggaaggtcctcctacaggtgactgtggggatcatgttgttataatgaacacaagacacat

SEQ ID NO: 714991 - DNA, 100 bp, Homo sapiens
cacgcacccgctggacctgctcaagccccacagtggatgacgaggaggagatgctgtatggggattcgggctccctcttcagccccagcaaggaggaggc

SEQ ID NO: 714992 - DNA, 100 bp, Homo sapiens
agaacactatattaaacatcccctacagaacaggaatgtctgaatctgaacaggctcttaaaggtacttctcagattaaattactctcatctgaagatat

SEQ ID NO: 714993 - DNA, 75 bp, Homo sapiens
gagagggacacgcagtgacgagcggccgaagcagctttgcgatcagcttgaacgggtctttttacgacttggcca

SEQ ID NO: 714994 - DNA, 98 bp, Homo sapiens
gggggtggagcccccagcggaggaggagctctcaaaagtgtcactactccatccagaagggagctgcgtttctgggacttggcaccgacagtgtccga

SEQ ID NO: 714995 - DNA, 100 bp, Homo sapiens
ttttagaggcaatcctaagcaagtacaggaatatcaggatcttttgactccagtacttcatcataccacagaaggaaaagcacagtgcagagcgcttgta

SEQ ID NO: 714996 - DNA, 98 bp, Homo sapiens
ggctccagtgatgttgtccttgtcagctatgtcccatcctcccagcgacagcaggccgcttacaaacacgcagatggcaagaagattgatggcaggag

SEQ ID NO: 714997 - DNA, 58 bp, Homo sapiens
gaagcgtggccggcagcgtcccggacgaggaggtctgggatctgccgatatgggggat

SEQ ID NO: 714998 - DNA, 100 bp, Homo sapiens
gcaaagccagcgttacagtaatgttccaggtgctgggtaggccaggtttcagcatcgcagacaagaagcgcaggacaggctgcattggggccaaacacag

SEQ ID NO: 714999 - DNA, 74 bp, Homo sapiens
gagcactcggtcatgtacccggtggactcggtgaaggtttttagaacttcagccataaaaatgggcagaatttt

SEQ ID NO: 715000 - DNA, 96 bp, Homo sapiens
tttcacaaaccttgtgtctcaatttggctacaaaagaataatccagaatggctactctgatctatgttgataaggaaaatggagaaccaggcaccc

SEQ ID NO: 715001 - DNA, 82 bp, Homo sapiens
gaagagatgttacccagtatcttggtgttgctgaagaggtggaaccgtcccaaaatgtcccttgctcagaagaaggatcggg

SEQ ID NO: 715002 - DNA, 100 bp, Homo sapiens
gacaacatccagcttcatggccagcaggtggcgagaatcctcctccaggagaacggccatatttatgtgtgtggaatgttctgaaggatctggaaaagag

SEQ ID NO: 715003 - DNA, 100 bp, Homo sapiens
agacaacaagcagcctattatgcccagacaagtccccagggaatgccacagcatcctccagcacctcaggaaactcaagagtatacccgaaatgttgtta

SEQ ID NO: 715004 - DNA, 51 bp, Homo sapiens
taatcatgactattggccacaggtctatgttaacaatgaatgggcaaccag

SEQ ID NO: 715005 - DNA, 95 bp, Homo sapiens
ggaagacgcgtgccgcggcgcctggttgcctgcagcggcccggacccgagagggaacttctaatggattggggtccatagatgacatcgaaacag

SEQ ID NO: 715006 - DNA, 98 bp, Homo sapiens
ttcacccacagcggggcggcggcggcggcggctgcggcccaatataggattgtcagtggcttcgccccgaggagagctgactgccctgggctgctgcc

SEQ ID NO: 715007 - DNA, 99 bp, Homo sapiens
gaaggcggcaaaatggcggaccgcttctcccgcttcaacgaagaccgagactttcagctcgccctcccctacctgcggaagagtcaagggaatgtcatc

SEQ ID NO: 715008 - DNA, 100 bp, Homo sapiens
tattttacacccttggagaatgtgggctcatatccttttcagactacattttcctcacaactgttctttccagtcttgatttcccagttaaagatgttct

SEQ ID NO: 715009 - DNA, 101 bp, Homo sapiens
cctgcagagtgaagaaagctggtaatagatgtctgacaaactaaagaaagacttgtgttacgcagaaggagaagacagcctgaagaagatgcagctgatgg

SEQ ID NO: 715010 - DNA, 97 bp, Homo sapiens
aagaaggcggtggtggcgggtggaggttcgagcgctgttctcgctccggagccgctgcacatttcgattggccatctgcaagcttcccttctccgtg

SEQ ID NO: 715011 - DNA, 100 bp, Homo sapiens
tcaggaggaagcgatggcttcagacagcatatttgagtcatttccttcgtacccacagtgcttcatgagaggaatccatgggaaagagctatgatgggag

SEQ ID NO: 715012 - DNA, 100 bp, Homo sapiens
cttcttgaagagcttgaagacacttggctcccttatctgacccccaaagatgatgaattctatcagcaggctgttcacggaagaccaggatgtagatgag

SEQ ID NO: 715013 - DNA, 100 bp, Homo sapiens
accccaggactgcgcccccgggagcgggcgcccagaggacccagatgatgtggtaccagttggccaaagaagagcctggtgttggtgcatgtgctttgga

SEQ ID NO: 715014 - DNA, 83 bp, Homo sapiens
ctacaagaagctgctgactcttttcagagctggccacgaccaggggaaagcaggcaggatgggagagtcgccgatagaaccac

SEQ ID NO: 715015 - DNA, 100 bp, Homo sapiens
ccgggcgcagagtgccatgggcggcctctcttatacacagcaggcaagtagcctgcagtatgaaatgctgctgctgacggattctatctccaaggaggac

SEQ ID NO: 715016 - DNA, 80 bp, Homo sapiens
ggaacagattcagaaggagcaggattaccaaaggatctatgggagtcgtcagattatactggagaaagaggaaacagaag

SEQ ID NO: 715017 - DNA, 75 bp, Homo sapiens
caagctcatggcctgccactgcgtgcgtggtgaagcagtattttccaatttgaagattcatttgaaggtggctcc

SEQ ID NO: 715018 - DNA, 90 bp, Homo sapiens
aagcatttcaacgcctccaaaaagccaaactacagcgaactggacacacatacaggagaagatggtataaactggtccatcagtgacaaa

SEQ ID NO: 715019 - DNA, 83 bp, Homo sapiens
cacctcccacctgtcctcaggcatatcaaagatcacagattctgctggccatattctctactccaaagaggatgcaaccaagg

SEQ ID NO: 715020 - DNA, 100 bp, Homo sapiens
ctctgcagtggaccacagcattcctgaaatacatccaggaaagacatggagattctcttaaaaagcctacaacacagcagtcccctcaggatgagcagga

SEQ ID NO: 715021 - DNA, 74 bp, Homo sapiens
aaagctaccaaagacgtagaaagaaatcttagcaggtggaaccaagctcacaaatcctcaggaaccaactttca

SEQ ID NO: 715022 - DNA, 117 bp, Homo sapiens
gcattttgggtgtacaggcatcacaagatggcctaccctcctgtacttgttccaactcaagatttgaatttgttgaaatgagcagtcgtaaatcaaagagtaacagcttaattcaca

SEQ ID NO: 715023 - DNA, 82 bp, Homo sapiens
cggaactgcggagttgctgggtccaccgacccttaccctcagcgagagaagtaaccctattgacctgaaaagtggttctgga

SEQ ID NO: 715024 - DNA, 74 bp, Homo sapiens
cagaggctcagagcttggagacagacgataagctgtcattggaaggaatagtggtacaaagagctgaatgccga

SEQ ID NO: 715025 - DNA, 100 bp, Homo sapiens
gagggcagggacccgctaagctgatctcctgtacagtagtgctacttaaaatatgctggggaccatcaccatcacaggttccaattgtggacaagataag

SEQ ID NO: 715026 - DNA, 100 bp, Homo sapiens
tcaatgtgcaaatgctgatcagttttacctctttcaatgatgaatcaggttgctgcttgcagagaagatgggccatctttgccgtgatgactcagtggaa

SEQ ID NO: 715027 - DNA, 100 bp, Homo sapiens
gcctattacacatacatcttcactaatctgatggaactttctgctctacagtccatgatggctgtgcaggaagaagagctgcaggtgcaggctgctgata

SEQ ID NO: 715028 - DNA, 100 bp, Homo sapiens
cctggatttcctggttctgtgggctccgtggcaatgaattcttctgtgaagtctagtgacggagcccgcgcgcggcgccaccatgcggcagaaggcggta

SEQ ID NO: 715029 - DNA, 108 bp, Homo sapiens
cagagcagtgcttgctgctttttctaactatttcaagatgatatttattcaccaaacaagtttaaggaatttctggggacctacaataaacttacagagacctgcttt

SEQ ID NO: 715030 - DNA, 100 bp, Homo sapiens
agcttctccgagtgtgtgcagcgctgcacccgcaccctgcaggccgagggacgtgccaagaagcgcaagaatgtggccccgtcccagagcaccacccgag

SEQ ID NO: 715031 - DNA, 80 bp, Homo sapiens
tcgatgtgcggcgtccgctgtataagaatgtgaaagatgttgcagaagtgttccagaagtggctgaagatagaaggaaaa

SEQ ID NO: 715032 - DNA, 50 bp, Homo sapiens
ggcgaatgcaacccgacgagggagtggggcagtccttgatggagatgcag

SEQ ID NO: 715033 - DNA, 75 bp, Homo sapiens
tctaatcatcagcatttacatgacagaaatcacctatgtttacagcgacagaatgagtccctggaacgccagatg

SEQ ID NO: 715034 - DNA, 100 bp, Homo sapiens
ggacatcgtcccgctctgtgctgccgacatccaggaccagctaaagaagcgctttgcttacctgtccgctgttccggagacttcaaggcactagctcgat

SEQ ID NO: 715035 - DNA, 95 bp, Homo sapiens
ctggtgttggaggaccctccctgcttcagatgcgagccacccctctggctgctcctgcgggttccctgtccaggaagaagcggttggagttggat

SEQ ID NO: 715036 - DNA, 51 bp, Homo sapiens
aaaccacgggaccctgcaggaagctgaggcataagatgcacatttttctgc

SEQ ID NO: 715037 - DNA, 75 bp, Homo sapiens
gagcagcattggaaactctgtttacgttattatcaacacaggaccaggtagtaccgttgtcagcacacagcgttc

SEQ ID NO: 715038 - DNA, 75 bp, Homo sapiens
ttgggtttagcaaaagttcatctccttctgcatccttaactgagaatgaggttacaggaggttccagtggcatcg

SEQ ID NO: 715039 - DNA, 75 bp, Homo sapiens
ccacccgctcgcgctccaagctccctgcggggaagaacgtgctactgctggcaatggctgccatccggaagaaac

SEQ ID NO: 715040 - DNA, 83 bp, Homo sapiens
gacccggatcgtgctcctgaaggccctagccttcgtgtactggggatatgagactttctactcggaatatcctgagtgttgcg

SEQ ID NO: 715041 - DNA, 50 bp, Homo sapiens
cgggaagaacaaagacttagactcgggatttgttcctgggctgtttggaa

SEQ ID NO: 715042 - DNA, 82 bp, Homo sapiens
gatccagaagtccagagctgaggactgcctgtttgcagatatcagaaaggtagatttgtcaaaaaacctgttgtcatcatgg

SEQ ID NO: 715043 - DNA, 84 bp, Homo sapiens
aagtcatcatgggccggcctggaacagggggatatgagactttctactcggaatatcctgagtgttgcgtggatgtaaaaccca

SEQ ID NO: 715044 - DNA, 75 bp, Homo sapiens
ggcaccacggggactcggagacagggaaacgtgttcgttagtcttggaggccaaggctgagtgggtttatctctg

SEQ ID NO: 715045 - DNA, 90 bp, Homo sapiens
aacggccaagaggcagacctaggaaatggtttgcctatctggggcgcctggctcacgaggttggctggaagtaccaggcagtgacagcca

SEQ ID NO: 715046 - DNA, 100 bp, Homo sapiens
cctggggaccacctactcctgggcggcgactggcggcgcgatggacctgaccgggctcctgctggacgaagaaggcaccttctccctcgccggcttccag

SEQ ID NO: 715047 - DNA, 100 bp, Homo sapiens
ctcgggagtcggcgtccaggctcggagcgcgacacggagactaggtggcaggtgctggagaatctggtaaaagcaccattgtgaagcagatgaggatcct

SEQ ID NO: 715048 - DNA, 80 bp, Homo sapiens
ggagaggtaaacagaacaccaggacatcccagagtctgggaaatgaaaactttagaaactgttcctttggagaggaaaaa

SEQ ID NO: 715049 - DNA, 50 bp, Homo sapiens
accaccttcatctccaccatcgattggcagtatggagttactcaggcctt

SEQ ID NO: 715050 - DNA, 100 bp, Homo sapiens
atctgcgaacacagtagtggaagatgtaaagcaatatttcgagcagtttggcaagatggagggagcgaggaaccaccggatcgaagacagtcaagtgtag

SEQ ID NO: 715051 - DNA, 88 bp, Homo sapiens
gaggcagtggcgcttgagttggtcgggggcagcggcagcctgtgaagccccgcgcaccaaatccctggttacaaagttcagtcccagg

SEQ ID NO: 715052 - DNA, 100 bp, Homo sapiens
cggcccctagctttctccttctggtgtggggcccgagtaatctatgccagcaattatgacaatgttagcagaccatgcagctcgtcagctgcttgatttc

SEQ ID NO: 715053 - DNA, 82 bp, Homo sapiens
cccccaaatgtctgactctgactctcggactgagaaacgcaaggtgtggccgacgacgatgccctcgctgaggagcgcatgc

SEQ ID NO: 715054 - DNA, 98 bp, Homo sapiens
tgcaatcatggtgcagaaataccagtccccagtgagggtgtacaaatacccctttgaattaattatggctggctgtaatccccttgcacaaaccggcc

SEQ ID NO: 715055 - DNA, 100 bp, Homo sapiens
gcgcctgccgctgccctacggcttctccgccatgcaaggctggcgcgtctccatggagttacagaatgtctgaaggggacagtgtgggagaatccgtcca

SEQ ID NO: 715056 - DNA, 82 bp, Homo sapiens
ttcaagatagacattgaccccgaggagacgatgccgacaaaaggatcaaggtggcgaagcccgtggtggagatggatggtga

SEQ ID NO: 715057 - DNA, 100 bp, Homo sapiens
gaagttacggcgacagctcctcgcgcagcagatcatatctgaagatattagtgagctacaaaagaatcaaactacatctgtagccaaaattgcacaatac

SEQ ID NO: 715058 - DNA, 100 bp, Homo sapiens
cctcatcctctggagtaactgggactgcaagtatacataccgtgcctgacgaaatatcacaatatttggcagaaggagaagacagcctgaagaagatgca

SEQ ID NO: 715059 - DNA, 75 bp, Homo sapiens
gccggaggaggaggggagaggcctggaggacaccaacatgaaggacagaataacgggctcccagattcacaagcc

SEQ ID NO: 715060 - DNA, 100 bp, Homo sapiens
ggcggcggacggctgcgtcgcccgaggcgaggaggagcgctggcgaacagtgctcggcatggcagggattccagggctcctcttccttctcttctttctg

SEQ ID NO: 715061 - DNA, 100 bp, Homo sapiens
gcacagctaagatgccaggaccacctggaagcctagaaatggacctacaagaacagtgaggagcttcggtctcgtattgtgtctggaatcatcacaccta

SEQ ID NO: 715062 - DNA, 75 bp, Homo sapiens
gcctgcggagcctgtggggcaggtttgatgagaagagggcagtgcagcagctgagagcatgtggtgtcctggaaa

SEQ ID NO: 715063 - DNA, 98 bp, Homo sapiens
cgaggcttgcggccaaagctctggcttctgtgtcgggcactgagtaccaagtgggtcccacctgcaccactgtctatatatagctggattgacaactt

SEQ ID NO: 715064 - DNA, 75 bp, Homo sapiens
gccacagcggcctcggcctccccttggattcagacgccgattcgcccagattgcagagggaatggcatacatcga

SEQ ID NO: 715065 - DNA, 100 bp, Homo sapiens
ttccggaaaggaggcatgctggtgaacgcagtcttctaccttggaatagtgaatggtgtctactatgaaccatcctgtactcagaatgtgaatcatggtg

SEQ ID NO: 715066 - DNA, 90 bp, Homo sapiens
cgagaacgacatcacccacttctacatgctcactatagacaagaattcttccatctctatgacaacaagcccattttagctttctggaga

SEQ ID NO: 715067 - DNA, 83 bp, Homo sapiens
ggaagagccagattcctgcatcagggctcccactgcagcagctcgggggaccccgctgagtacaacctgcgctcgcgcaccgt

SEQ ID NO: 715068 - DNA, 73 bp, Homo sapiens
tcgtctctatcgatatgctgccgagtttttaacttcatgggatatgtcttgtcgttcaagacttgcaacacta

SEQ ID NO: 715069 - DNA, 90 bp, Homo sapiens
ctctactcctacacatgatgatgtacagcagagcttttttcttgctgaaacattaaaggacttgcacttaggaatctgttacagtgagca

SEQ ID NO: 715070 - DNA, 98 bp, Homo sapiens
ttcaattttggggctccctcgggcacctccggtaccgctgcagccaccgcggcccccgcggatatgagatcctgactccaaactccattcccaagggt

SEQ ID NO: 715071 - DNA, 100 bp, Homo sapiens
aatttgaaagacaagagttctttagtttcatctctctataaagttatccaggagccacaaagtgaggtgaatctggattgggaaagtcgacattaatcaa

SEQ ID NO: 715072 - DNA, 100 bp, Homo sapiens
ctcagcagccttggtgctcaggtgccagatgcaaagcttccactgcgattccaaagacttggacacctagtggctctgatggcactgctctgtggggacc

SEQ ID NO: 715073 - DNA, 82 bp, Homo sapiens
ctactgccctctgcgctcctgcatctgcctccccatgaactgtggctgcaccatctgtcttcatcttcccgccatctgatga

SEQ ID NO: 715074 - DNA, 74 bp, Homo sapiens
gtcactgcaagaacattcccactctggagtatggattcctcgttcaggacctcagcagccatgtcgaagcccca

SEQ ID NO: 715075 - DNA, 83 bp, Homo sapiens
gaggagctgagcgagcgcggaaggaagatattttcgattcagataaagaagttcctatcgaatccacttttgttcgcatcaaa

SEQ ID NO: 715076 - DNA, 90 bp, Homo sapiens
ccttaacccaaggaagtgactcaaactgtgagaacttcaggttcatcatgcctagtggcgtataagaagaccccgccaccggtccctcca

SEQ ID NO: 715077 - DNA, 75 bp, Homo sapiens
cgttttggcattgctgctaagtacatgctggattgtagaacttctctctctgtggacccaagtggagagattgtg

SEQ ID NO: 715078 - DNA, 100 bp, Homo sapiens
ctctgaattacatctgacccccaaagctcagcagatgtttgagacggaggcagatgagaagagggagatggccttggaggaagggaaggggcctggtgcc

SEQ ID NO: 715079 - DNA, 100 bp, Homo sapiens
ctggacatgactgctgttcttcttgcctgtggcataaacccggaaaaaagcatccttttccaacaatctcagggccgttgctccagggagaactgcaaat

SEQ ID NO: 715080 - DNA, 96 bp, Homo sapiens
gtatttgaagcaagttctcggccagatggtgacttaccacattacaggacagaccacagtgcatgtctgtctgctccaacagaagtggctttcttg

SEQ ID NO: 715081 - DNA, 99 bp, Homo sapiens
catatgctcggaaagttgaaggggacatgtatgaatctgcaaacaatcgatggaatgcagtagccctctgggcctgggatattgtggttgataactgtg

SEQ ID NO: 715082 - DNA, 75 bp, Homo sapiens
acttcaaggataagggtgacagcaacagctcggcgggctggaaggaggagatgaccgccgggttctgctatggca

SEQ ID NO: 715083 - DNA, 89 bp, Homo sapiens
tggctctgttttcccacaacaggtggcttcccacacttctgactcggacgttccttccggtgtcactgaggtggtcgtgaagctctttg

SEQ ID NO: 715084 - DNA, 98 bp, Homo sapiens
ccagcgggaggatctggagacagccatggagttctacttagaggatgagaaggcgcgcattgaagcattgggtggctttgtgtctcacatggactgct

SEQ ID NO: 715085 - DNA, 75 bp, Homo sapiens
cggcttcgcggcgcgtcctccgcagaggcccccgacggagacaaggacgtctctcatgtctaccacccagagccg

SEQ ID NO: 715086 - DNA, 50 bp, Homo sapiens
gcagtactcggcaggaaattggttatcaagttatacccaaccagcagcaa

SEQ ID NO: 715087 - DNA, 76 bp, Homo sapiens
gatggtggttggacagtcagcatttgcagactttgttcctccaggagtgatccaaaatggagcgcgggtcctgagc

SEQ ID NO: 715088 - DNA, 98 bp, Homo sapiens
gccggagtcttcccttctaactatgtgaggcttaaagattcagagggagctctcttttgggcgtggctccacggcacctgtaggaggcggggctttcc

SEQ ID NO: 715089 - DNA, 75 bp, Homo sapiens
tcaccactgaacaatatcagaaagctgctgaagaggtggaagcaaagttcaaggcagcttttggcaaggagtctg

SEQ ID NO: 715090 - DNA, 75 bp, Homo sapiens
cgatacttcacactatggagagggaagcagatgtgtgttgtggcgaggatgaaatagtgtatcctaggatgccag

SEQ ID NO: 715091 - DNA, 100 bp, Homo sapiens
ccatttgcaaaaaacatttatggactcatagctccgaactttggagttggttttgcaattggcattggaatggatacttgtgtcattcctttgaggcacg

SEQ ID NO: 715092 - DNA, 82 bp, Homo sapiens
ctctctctttctggcctggaggctatccagccctcctgcccgaaggccacctgaacctaacggctccctgcaacgctgcctg

SEQ ID NO: 715093 - DNA, 89 bp, Homo sapiens
gtgccgccttcccaggaccctcagggagagcgggcagccttccaggtggacagttgcacaatatccttttgaagaccataacccaccac

SEQ ID NO: 715094 - DNA, 90 bp, Homo sapiens
cttgccctgtcatcccacctgagaaccatgctcaccgaccctttaatgaaggagttcccccttctgagtatgttcaatatccatgaaaac

SEQ ID NO: 715095 - DNA, 50 bp, Homo sapiens
ttttagctgccgccggagtcgagtcaccaggagactaaagtccatcaaaa

SEQ ID NO: 715096 - DNA, 100 bp, Homo sapiens
tcatgacaagctggtgttgaagggtgattttgatgcttgcgaagagttgattgaaaaggctgtaaatggtaaggagtgccaatggaccgatgcctgcctg

SEQ ID NO: 715097 - DNA, 97 bp, Homo sapiens
ggcggtgcagagaccagcatccttggagaagatgtccaacatcacagtcacatacagagatggccgagtggcacagctggagcaggtatacatccgt

SEQ ID NO: 715098 - DNA, 90 bp, Homo sapiens
tgacaagcttaaaaccagaaatcgagaatccatttctctgctcatgcgcttggctgcgctacatggtgaagcagttggagaatggggaga

SEQ ID NO: 715099 - DNA, 82 bp, Homo sapiens
gctctggctctggctgtgcgcgctggcgctgagcctgcagccggccctgccggaagctcttcgtgggcggtcttgactggag

SEQ ID NO: 715100 - DNA, 83 bp, Homo sapiens
cacgacttgaagacacgcacttatcattcagtggatccaggatgagaagactgataaaagaagaagctagctgaacagctgta

SEQ ID NO: 715101 - DNA, 75 bp, Homo sapiens
agcccagaaccactgcctacaaaccaccctctcctgaccctgaagaactgtgatgtgaacgagtgtgccaccgag

SEQ ID NO: 715102 - DNA, 75 bp, Homo sapiens
aaaatcaacgacaacttgagcacagtgccggtggtggtgtgcacattgagccccggtatagacagttcccccagc

SEQ ID NO: 715103 - DNA, 75 bp, Homo sapiens
ctggagactttcacaggaatgacagcatctatgaggagctcctggcagtcatgcaagcaagatggtcaacgtcag

SEQ ID NO: 715104 - DNA, 98 bp, Homo sapiens
ctccctcggcgtcctcggcccccgccccattccgttcgcgactggaactctaactgaagatggtttagatctttgggggattcaacgagtggaaaatg

SEQ ID NO: 715105 - DNA, 90 bp, Homo sapiens
atcgagcagttggtttagtatcagccaaacttgcagctgttcagaccgcgctccgccgaggttgcacactgggccacagaggatccagca

SEQ ID NO: 715106 - DNA, 100 bp, Homo sapiens
aggccgaccgcacgctcggctgctacgtggaaatcctcaagctgctgttgaggaaacgtcccatgcagtcaactgttgctacttaaatgcagctgtttct

SEQ ID NO: 715107 - DNA, 100 bp, Homo sapiens
gtttgaggcacgagagcagaagatgtataagcattccaataataaggccatgactacgggggcaattgctgcaatgctgtctacaatcctgtattcaagg

SEQ ID NO: 715108 - DNA, 90 bp, Homo sapiens
gagcagttttcatggatgcccctgtttctggtggtgaccaagaatatggcccaggtgaccaaagccctggacaaggccctgagcaccatg

SEQ ID NO: 715109 - DNA, 82 bp, Homo sapiens
ggagacgggagtattatgaaaagatcgaatgttccatttggctgctgcactcccatccaccctgtgtacacatcctccagag

SEQ ID NO: 715110 - DNA, 98 bp, Homo sapiens
cctcagccagctgggtcagcccagcattttcgatacccagaaaggtcaggggccaggaggaggctcccggcgggcttcgtccatcgccgcctcccggc

SEQ ID NO: 715111 - DNA, 75 bp, Homo sapiens
ccaaagtcttaggactgctgggcaggagaactggcctgtgttcaaggctgctctttggcgtaaattgcaatcgat

SEQ ID NO: 715112 - DNA, 83 bp, Homo sapiens
gctccctccacctatgtatcaacttacttgaaaagtggcttgaacctggcatctgtagcaagactcagaggaacttgggaaaa

SEQ ID NO: 715113 - DNA, 100 bp, Homo sapiens
ctgaagctgttcagaagttcttccttgaagaaatacagcttggtgaagagttactagctcaaggtctagtgacggagcccgcgcgcggcgccaccatgcg

SEQ ID NO: 715114 - DNA, 100 bp, Homo sapiens
cccagaggcaggtggtgctgaccctgtaacccaaaggaggaaacagctggctaagctcatcattgttactgttacagcaagctgctgaagtttctcagct

SEQ ID NO: 715115 - DNA, 100 bp, Homo sapiens
tggccgctggcctactctggaagttcaggagaatgtgtgcaagtgtggctatgcccagagccagcacatggaaggcacccagatcaaccaaagtgagaaa

SEQ ID NO: 715116 - DNA, 98 bp, Homo sapiens
gccgggtccccaaccgacgatggagggagacgtgctggacacactggaggcgctgggatgcagatggaaacctgtgtcgaagtaaccaactgttgcaa

SEQ ID NO: 715117 - DNA, 76 bp, Homo sapiens
tcgggatagccatgggcaagctgcaccttgcatgagggacaaagctacacagatggatcctgagcttgaaaaaaaa

SEQ ID NO: 715118 - DNA, 74 bp, Homo sapiens
cagagatcggcggagaccctcgaagtgcgcaaacttgacactcaccctgaccgtaaagatgacggcgccttgag

SEQ ID NO: 715119 - DNA, 80 bp, Homo sapiens
aggtcctggatgaccccaatgaggaccatctgtacatgggatgaagaatccatccagaagataaatccttccaagcctgg

SEQ ID NO: 715120 - DNA, 75 bp, Homo sapiens
gtgaagcacagcacggtactggagaacacggatggttccaggagaaggaagactcttgacctttttcctgggcaa

SEQ ID NO: 715121 - DNA, 101 bp, Homo sapiens
acctaatccgcgagacttgctaaaatgtggcagatcagattgcatttcaagctgctggtggattaacagcccttgaacacatccttcaagcagtagtccca

SEQ ID NO: 715122 - DNA, 100 bp, Homo sapiens
ctgtggaagggctccttcaagcccagcgagcatggatggctgacttcaggctgcggaaactgaaggcaataatgttggcttttggaaggggcaagacgag

SEQ ID NO: 715123 - DNA, 75 bp, Homo sapiens
accgacaccatctggaggaggcgttgccgtgaggccgcagcaatggcgctgagttcctctgctggagttcatcct

SEQ ID NO: 715124 - DNA, 75 bp, Homo sapiens
tcgaagtgatggccctgcccaaaccgggcggggcccacagcctaggcctgtcctcctcggtacacatgctgtccc

SEQ ID NO: 715125 - DNA, 100 bp, Homo sapiens
ttgttcttcagcagaatttgaccaacatcaccatgtcgcgggaggcagacctggactttgcaaggacatggtccggcgaggagagatcatcgacaatgac

SEQ ID NO: 715126 - DNA, 141 bp, Homo sapiens
gttggataaaaggaggacctctcgccaagggccccaatgagtggcacacagtctactatcaccgacagcttagaccatgctcagcctccaagcagccttgtcatcgacaaagaatctgaagtttacaagatgcttcaggag

SEQ ID NO: 715127 - DNA, 100 bp, Homo sapiens
acctccacctcctgggatcaagggattctcctgcctcagcctcccgaatagttgggattacagatccccctgaaattaagcttaggaggacttcttcaac

SEQ ID NO: 715128 - DNA, 75 bp, Homo sapiens
ggccgtccggcctccctgacatgcaggttatcagtgagctgaatggaaaaaacattgaagacgtcattgcccagg

SEQ ID NO: 715129 - DNA, 89 bp, Homo sapiens
atgctttttcttctcaccatttctggccaaaactacaaacaagacttcgcaggtttccaatacttatctacaggaatcgccatgacccc

SEQ ID NO: 715130 - DNA, 74 bp, Homo sapiens
cagattcgcagtggtcgcttcttctccttgattttgaaatcagaatggacactaacaggaatcaagtgctacca

SEQ ID NO: 715131 - DNA, 83 bp, Homo sapiens
tggagagaatcttgaaatgtcttttagggtttttagaacttcagccataaaaatgggcagaattttccttgatcatatcggtg

SEQ ID NO: 715132 - DNA, 98 bp, Homo sapiens
tctaatttttaaaaagcagcctctggagccagccatgtttggcactgaatcttcatttgacatcacttgttagaagagcaactctgaaagaaaacgag

SEQ ID NO: 715133 - DNA, 100 bp, Homo sapiens
attccagttttttaagaagggacaaaagaggagatcgccaagcacaaggggcccccggtgttcactcaggaggagagatacaagatggtgcaggccatca

SEQ ID NO: 715134 - DNA, 87 bp, Homo sapiens
aaacatcaggaatttgataaccatatcaactcctatgatcatgcacacaagcagatatttggagttcttacaacatggcagacattg

SEQ ID NO: 715135 - DNA, 128 bp, Homo sapiens
caaataagttatgctatgaggatgacaaactctggagtaattggagccaagaaatgagtataggtttttgccaatccagaagactgtgtagcatttggcaaaggagaaaatgccaagaagtatcttcg

SEQ ID NO: 715136 - DNA, 75 bp, Homo sapiens
cctcggctggacagctcgccctgttcgctctgggtcaactttgtagtgtgccaactctttgccttgctagcagcc

SEQ ID NO: 715137 - DNA, 98 bp, Homo sapiens
atggaaaaggcgtgatacacaaggacctgaagcctgaaaatatccttgttgataatgacttccacattaagaagaagcctgtgaggaggagatatgag

SEQ ID NO: 715138 - DNA, 119 bp, Homo sapiens
gtggcattatccttcagtggggctattggactgacttttcttatgctgggatgtgccttagaggattatgggtgcctcatctccagacatggagcccagctatgggggaggtctctttg

SEQ ID NO: 715139 - DNA, 75 bp, Homo sapiens
atacgtttgaacccagaactgtttgcaagtgacagcataaagacggaacacaacaaatccttcctgaagtgaatt

SEQ ID NO: 715140 - DNA, 90 bp, Homo sapiens
tccgggaacacctgattttcatacaatcccagcatttcttcttccagaccagctggtcttgcttctggagcatctcttggagcagaagac

SEQ ID NO: 715141 - DNA, 118 bp, Homo sapiens
ctggggacgcagacgccaaggcccctccggccagggccgggagccgggccggcctagccagacaatgcagatcttcgtgaagactctgactggtaagaccatcaccctcgaggttgag

SEQ ID NO: 715142 - DNA, 98 bp, Homo sapiens
tgtctacctctctggacttgctcccagcatccggaccaaaaccatcagtgccacagccacgacagcatctctgcgccggatgtcatctaacagattcc

SEQ ID NO: 715143 - DNA, 75 bp, Homo sapiens
cctggctcttgccctcatcctggttctggaatcctcagttcaagttcctgtgccttaagaacattagaaccttcc

SEQ ID NO: 715144 - DNA, 100 bp, Homo sapiens
gcgcaggtgctagcggccccttcgccctgcagttggtgatggagttttgtggtgctggctctgtcaccgacctgatcaagaacacaaaaggtaacacgtt

SEQ ID NO: 715145 - DNA, 75 bp, Homo sapiens
gcatctgtctgaggagcggtcagtgacgcgatggagcgggcaagcatcaagatggtgctcatgtggaccagtggt

SEQ ID NO: 715146 - DNA, 96 bp, Homo sapiens
gactaccaacgtttggaccagaaggtggtgttcccactgatgaagagcaggcgactgggttggagagggagatcatgctggctgcaaagaagggac

SEQ ID NO: 715147 - DNA, 98 bp, Homo sapiens
ggctttttaaatgaccccaggcgtctgaacgtggccctgaccagagcaaggttttgaaaaagtcgctgtgcatggtcaagtgccactggaaagagaag

SEQ ID NO: 715148 - DNA, 75 bp, Homo sapiens
atagcaacttggtgtcactggatttggagtcaaaaacgtatgagaccaaaaaaatattttcagaaaatgatattt

SEQ ID NO: 715149 - DNA, 101 bp, Homo sapiens
ttgctatgacaacattcatttcatgaaagccttccagaaaatagtggtgcttttttataaagccctagggtggtcccaaccatgtgatgtctggagcatag

SEQ ID NO: 715150 - DNA, 75 bp, Homo sapiens
aaggctaaagaaattaatgacaataatggatagtatgaatgatcaagtgatgatgatgatgattttgatgatgag

SEQ ID NO: 715151 - DNA, 97 bp, Homo sapiens
gccagcgttacagtaatgttccagactgcaataaggtcactgatcagtgcctgtccttcttcaaacgctgtggaaacatctgtcatattgacctgag

SEQ ID NO: 715152 - DNA, 126 bp, Homo sapiens
tgccctaccgcggggaactcttgcctcgtttctggctggggtctgctggcgaacggagctgtgattccccctgaaggatcccagactccattcccaagcactttctccagtgccagcaaagtcctc

SEQ ID NO: 715153 - DNA, 130 bp, Homo sapiens
ctaagctagcgccgtcgtcgtctcccttcagtcgccatcatgattatctaccgggacctcatcagccgataaagtggccagtgtgtacgaagccccgggctttttcctggacctggagcccatcccggga

SEQ ID NO: 715154 - DNA, 50 bp, Homo sapiens
cactgagtgtactctctgccagtgcaagaaatacactttcgggaaatggc

SEQ ID NO: 715155 - DNA, 83 bp, Homo sapiens
ggatggaggagggggatcccagcaaaggttaaagatcgaggtccggaagccactaggagattttttaattggttttattggag

SEQ ID NO: 715156 - DNA, 96 bp, Homo sapiens
gtcagaaagcaaggaagatcagtggatgggggtcaccgtccagagccaaggtccagggggcaaggtcgtgcttgccagcaaagcacggacagagaa

SEQ ID NO: 715157 - DNA, 76 bp, Homo sapiens
gggacggagagaacacgagcccatcaggaatgatttcctgaaagaggtgaagatcatgtcgaggctcaaggaccca

SEQ ID NO: 715158 - DNA, 98 bp, Homo sapiens
cctggatccagaccaagatggaggaggttcgggaactccaggagcagctggcccgacagcaggtccatgtggagcttgacgtggccaagccagacctc

SEQ ID NO: 715159 - DNA, 50 bp, Homo sapiens
gcagaagtgggttacaatagggacagatgtgttttcgcattataacaagg

SEQ ID NO: 715160 - DNA, 90 bp, Homo sapiens
ggtcaagtcgtgttctgatcactactgacttgttgaatgacagcccatatcaaggcggtgtattctttttgacaattcattttcctacag

SEQ ID NO: 715161 - DNA, 82 bp, Homo sapiens
gagagccgggtaccggccgtggaagcggccaccgactactgtcagcagctgtgccagtggtcccaggctgcacccatggcag

SEQ ID NO: 715162 - DNA, 100 bp, Homo sapiens
gaagcattgcattgattgtcttatatttcaagttaaggtccaaaaaaactccagctgtgaaagcaacataaatggtcttgtccaataagcatgtggctcc

SEQ ID NO: 715163 - DNA, 82 bp, Homo sapiens
cctggatcatggctgccgcgccgccgctacgggaccgcctgagctttctacaccggcaaattgtggctactaatttgccccc

SEQ ID NO: 715164 - DNA, 100 bp, Homo sapiens
ggagaagggcagtggctgtagctgccctttccgtttccagggttccgaccaggttgtccttctattcaggccactcttcgttttccatgtactgcatgct

SEQ ID NO: 715165 - DNA, 100 bp, Homo sapiens
ttaatcctcagacggtgggcgtgggacgcgcgcgcttcaccacctatgagggccaaaagagaaacattggctactttgacaaccttaaagcggactccag

SEQ ID NO: 715166 - DNA, 82 bp, Homo sapiens
aagactctcttcgctctttgcatcttaactgcagacatccacgacagcgatggcagttccagcagcagccaccagagcctca

SEQ ID NO: 715167 - DNA, 100 bp, Homo sapiens
ttcagctacatattctgccttttcaacactacacagggacaggccttcagtatttggcatcacctttacatggagcacaaagatgatgatgatgatgatg

SEQ ID NO: 715168 - DNA, 75 bp, Homo sapiens
ataatatggaagaagatggaaaaaacttgtttaatgggaatcaagtactggaaatgtttgatcatgcttatggta

SEQ ID NO: 715169 - DNA, 76 bp, Homo sapiens
gatttcacctgtgaaaaaatagggtctggcttcttttctgaagtgttcaagcatgctacaagtgaaaactgatgag

SEQ ID NO: 715170 - DNA, 51 bp, Homo sapiens
gccgagcaggaggcgccatcatgggttgctcatcacccatggtggtaaaat

SEQ ID NO: 715171 - DNA, 100 bp, Homo sapiens
ttgatacccccgatgaagcagattcttttgagtacactggccatggtgtgatgaatgcagactctgctaccattttggctgtttggatcctcctttgaaa

SEQ ID NO: 715172 - DNA, 100 bp, Homo sapiens
cgcgcgcctgccgccgccggagcctgcgagccgagaccagcgcatcagcgaggaggtggggctgctgcagctccttggggaccccccgccccagcaggtc

SEQ ID NO: 715173 - DNA, 98 bp, Homo sapiens
gtggtttcaactaatggtagacaagacactgaagaaagcatcgtcctaggaatggatttctcctctaatgacagaaatggaatctatttggaatttgc

SEQ ID NO: 715174 - DNA, 75 bp, Homo sapiens
ctctgggatccccgccgctctgtctacaacccgagatgcagctgactttgcctgtagcctcatagaacccatccc

SEQ ID NO: 715175 - DNA, 75 bp, Homo sapiens
cgacaagttcaagcagctgcttgccggccccaacacggaccttggggacggcaaaacagaacagaaaggcggaga

SEQ ID NO: 715176 - DNA, 98 bp, Homo sapiens
ttacaccgccaatccacttcctgtggcaactacagggcgtggatcctttggtcaccttcagatattttagagctacatcctagagtattctactttat

SEQ ID NO: 715177 - DNA, 74 bp, Homo sapiens
cggaagtgcagctgcctcagttcttagcgcagatttgcatctgctggtgatgatggaattgtagttgtgtggaa

SEQ ID NO: 715178 - DNA, 100 bp, Homo sapiens
agatgttaatgatggcagtacagtcaggtatgcagttttgtgtggctatgtatctgagtttgagggtttacaaaacaaaatcaactatgggcacctcttc

SEQ ID NO: 715179 - DNA, 99 bp, Homo sapiens
gctgcggcccgcgggcaggcgtcgggattcctggtcgggtggcttccagtggtcttcagtctgtcgtgcaccgatgagaactctccttattgctgtgaa

SEQ ID NO: 715180 - DNA, 90 bp, Homo sapiens
caacactggagtcatcaatgccccccagaagcccacccctcggtccttcctgggtgtccgtctcccacactgccacagccagcactctcc

SEQ ID NO: 715181 - DNA, 98 bp, Homo sapiens
catggccgaggtgttgcggacgctggccgccatcgactacagtgacagcgccatgctccaagctcagcagctgctcctggggctgggctctttcctgg

SEQ ID NO: 715182 - DNA, 100 bp, Homo sapiens
gaggacgcggcgggcgagcgagaggccgaggcttcatcaaacccagaagtcatcaagataaattcaattctggatatagtaacaaaagtggaaaactatt

SEQ ID NO: 715183 - DNA, 100 bp, Homo sapiens
acacctctccagatggtaccagatgcataggtgaagaagctaagtctcagaaagataactcacccaagaggacacaaggataaacctgatacccatggca

SEQ ID NO: 715184 - DNA, 108 bp, Homo sapiens
caggaatgcttactgttgcgtggttcgttattaacagataagccaatggacacgtcagtgttatctgaagaaggaggagagccttttcagaagaaacttcaaagtggt

SEQ ID NO: 715185 - DNA, 90 bp, Homo sapiens
cggcaaggggacccagtgcgcccgcatcgtcgagagagaagaagaaggaggttcctgctgtgccagaaacccttaagaaaaagcgaagga

SEQ ID NO: 715186 - DNA, 100 bp, Homo sapiens
cttcgacgtcgagagggagccgctgccgcgttagttccgagcttgaagtcagtggttattggtggtagaaataaatatttaatcaatggagtcaatgcca

SEQ ID NO: 715187 - DNA, 100 bp, Homo sapiens
tgagcctggactcgccctcctatgtcctgtacaggtcacattgaagtagtgaaattgcttgtgtcgcatggagctgaagtgacatgcaaggataaaaagt

SEQ ID NO: 715188 - DNA, 148 bp, Homo sapiens
ctttgttggaccctcgtcaatctctttcgaagccattcagtcctcaatctccttttccttggctacccgatgaatttcatcctttcatcgaagcacttctgccccacgtccgagcctttgcctacacatggttcaacctgcaggcccg

SEQ ID NO: 715189 - DNA, 75 bp, Homo sapiens
cgacaatgttggcctgtctgcaagcttgtgcagggatgtttgatgtaggtggccaaagatcagaacgaaaaaagt

SEQ ID NO: 715190 - DNA, 50 bp, Homo sapiens
cagagcccggctcctcagctgatgcaaccttaaaatcagtgacaagaaac

SEQ ID NO: 715191 - DNA, 83 bp, Homo sapiens
ttgggttggcttcgtggctccacgacttactctctacccttggcagattgagaggatccagaatccagatctctggaatagct

SEQ ID NO: 715192 - DNA, 98 bp, Homo sapiens
ggagtgtcctggacccagctgagcgggcggtcattcgcatcgcagagcatttccgacatgtggaccatggtaaaacaaatgacagacgtgttgttgac

SEQ ID NO: 715193 - DNA, 121 bp, Homo sapiens
aatcgctctggtcgaccccaacacactaggaggacagacacaggctccaaactccactaatgtccaaggtccccagctccataagtcaggaacaatccaggcaagacgcgatctaccagaa

SEQ ID NO: 715194 - DNA, 100 bp, Homo sapiens
cgagggcagagctgcatgaagaggcacggcattcccatgagccacgttgcccggcaggtatcagacttggtgataattctgaattatgaccgtgctgtag

SEQ ID NO: 715195 - DNA, 100 bp, Homo sapiens
gaaaacaagtccaaggatgaatcccagtccctgttacgggaccctctttgcaagttcagtgcttaacctgaccgaactggctgcccttcggcctgacctt

SEQ ID NO: 715196 - DNA, 102 bp, Homo sapiens
cctcagatgctcccttctgctcctggtactaggttttgacaagcttgcatcatgcgtgagtataagctagtcgttcttggctcaggaggcgttggaaagtct

SEQ ID NO: 715197 - DNA, 100 bp, Homo sapiens
tagtgatggaggagagaagatggcggaagcggagtttcctcaagcatctgcttcctacatattactacaatttgcacagtatgggaatatcttaaaacat

SEQ ID NO: 715198 - DNA, 96 bp, Homo sapiens
ggcagctcctgcgcctcttctactgcactgtcctggtctgctccaaagagatctcagcgctcaccgacttctctgtgttctgtgccaaggtctttg

SEQ ID NO: 715199 - DNA, 98 bp, Homo sapiens
ctggactcctggcccccttccttttgtgtttctgctgatgtactccacggttctgtgcagctattacaattcagccctgacgacagcagtggttggag

SEQ ID NO: 715200 - DNA, 122 bp, Homo sapiens
gcgagatccgggccgtgaacgaaagcagtgacggaggagcttgtaccaccgactctaaaatagagctcaagcttgagaagagagaaccactaaagggcagagcaaagactccagtaacactc

SEQ ID NO: 715201 - DNA, 74 bp, Homo sapiens
cctggaaggtgcgtgtggggctgggtctcggagtgggagacgtggagtgcagggaactgcagcccggagttaaa

SEQ ID NO: 715202 - DNA, 100 bp, Homo sapiens
tgaacttaaaaagcagtctaaacctgtgaccacccctgaagaaattgcacagattgcattcacagagtggattgaaccacctaaacgagaaagaaaagcc

SEQ ID NO: 715203 - DNA, 98 bp, Homo sapiens
tcgggggtaggcaagacctgcctcctgttccgcttctcagaggacgccttcaacaccaccttcatctccaccatcgatatgttaatgaatacacccag

SEQ ID NO: 715204 - DNA, 75 bp, Homo sapiens
gagcgccctgagagaacagggtggccgcttggtccagtgatatcagtatcaagataaaagtttggaatgggagaa

SEQ ID NO: 715205 - DNA, 96 bp, Homo sapiens
gaaaggaagctgcacaggaagccgtgaaactgtttcgccgtgaggaagatgcggaaaaggctgtgattgacttgaataaccgttggtttaatggac

SEQ ID NO: 715206 - DNA, 74 bp, Homo sapiens
ctggagcagcttgagttagaacggaagcaagcacttgagcagtacgaggcaggaagttatgttcgtgatgatgc

SEQ ID NO: 715207 - DNA, 50 bp, Homo sapiens
cgctgctgtcgctatggagacagaggaggcgaccaccgcgtggagcttta

SEQ ID NO: 715208 - DNA, 51 bp, Homo sapiens
aggggtcagtgatggagctgcttcagggtatgttagagcccaccaaggaac

SEQ ID NO: 715209 - DNA, 75 bp, Homo sapiens
gaccggcacaaggacgttctcaagtggggcgatgaggatggttcctacctggctgagttcctgctggagaaaggc

SEQ ID NO: 715210 - DNA, 75 bp, Homo sapiens
accacaaatttattcaagtcaattaccatcctttaccagggttggtgaaagatgctccttgggatgaggtcccgc

SEQ ID NO: 715211 - DNA, 99 bp, Homo sapiens
aggacctctgccactctcaccgtgaagggctccaggaacactcggaggtgtctggcttccttctggagtgtgacagctcggtgcagggcgcgctgcaga

SEQ ID NO: 715212 - DNA, 100 bp, Homo sapiens
ctcccgagtggctgggactatagctcacctgttctccaggaccagccctgctggggcccaggcccaggctctgagaggccgtgtcctaacctgccctggc

SEQ ID NO: 715213 - DNA, 75 bp, Homo sapiens
ttgtaaattctccttttaccaagatgctgtgagagaagtaaggaaatattcctcagttcataccattgagaagag

SEQ ID NO: 715214 - DNA, 75 bp, Homo sapiens
gtactccacagaggataaatttcaacctccggggccacaatagcgagctccagtgatccacaagctcagaaatac

SEQ ID NO: 715215 - DNA, 153 bp, Homo sapiens
ccgccgcccctgcacaacaacaacaacaactgcgaggaaaatgagcagtctctgcccccgccggccggcctcaacagaaaacgggccttactatacatcatatcccccatcaccagatttgtgacctgccatctttcagtgcttcttggttcc

SEQ ID NO: 715216 - DNA, 83 bp, Homo sapiens
gccccatagatggccagctttcccccgagggtcaacgagaaagagatcgtttggtgccctggttgtcagatgttggaaagcag

SEQ ID NO: 715217 - DNA, 83 bp, Homo sapiens
ctgaagagcgacaagccgctggcagccgcggatctcaccgccgctcagggtgggaggaggagctcgccaagcgcatgaacctt

SEQ ID NO: 715218 - DNA, 90 bp, Homo sapiens
aaggcagactttttgatattcagagccttggaagtcaacactgtcaccacaccaggagaggagtgtgccatctgcttctatcacgctgcc

SEQ ID NO: 715219 - DNA, 93 bp, Homo sapiens
cctgcagcgggagctggacggcgagcgcgagcggcgcgagaaagctaccggctctctgaccagttccacgacatcctcattcgaaagtttgac

SEQ ID NO: 715220 - DNA, 102 bp, Homo sapiens
taacccgtggaattgaagcagttggtggcaaattaaggatgaaatctttgacatggtaaaaccaaaggatcctttgaaaatctctcttcaggatttaatcaa

SEQ ID NO: 715221 - DNA, 74 bp, Homo sapiens
ccgccctgcgcttcgtgcaccggggcggtccgttgccaaagccagaacactctgctccagccaaggtggtgagg

SEQ ID NO: 715222 - DNA, 100 bp, Homo sapiens
gtcctctggtgcgaaattccggatttccttgggtcttccggtaggagctgtaatcaattgtgctgacaacacagctatgtgaatctttagaagaactaca

SEQ ID NO: 715223 - DNA, 82 bp, Homo sapiens
gcgaagctggccgagcaggctgagcgatacgacgtgtctcaatgagatcttggagtcagcagatgcacccttagaagtcact

SEQ ID NO: 715224 - DNA, 75 bp, Homo sapiens
cagaatcctgaccttgctgcacagtgtggacttccatatgtggaggtgctgtgtaaaaaccggtatgtagggaga

SEQ ID NO: 715225 - DNA, 74 bp, Homo sapiens
ccggactgagaggcagcgagaggtgactgaagcaaggctgtgtgacattccatgttggagaaaaaaagaaaaaa

SEQ ID NO: 715226 - DNA, 89 bp, Homo sapiens
tgtacctgactcccagtgagaaacatatgctcctcaaggttcttgatagtccacaatgggtgaaccacagcaagtgagtgcacttccac

SEQ ID NO: 715227 - DNA, 73 bp, Homo sapiens
gcccggaggcggcggagggcaccccgggcgggcggcggctgctcggctccagcaggagaaccatgagctccgg

SEQ ID NO: 715228 - DNA, 98 bp, Homo sapiens
gccggcagtcagagtcaaaacagagcttttggaatctgaacaaggggacccagatgatgtggtaccagttggccaaagaagagcctggtgttggtgca

SEQ ID NO: 715229 - DNA, 98 bp, Homo sapiens
agagactgaagattcgaggctccctggccagggcagcccttcaggagctccttagtaaaggtcaagtttacccatgggggaactggttccagccaaac

SEQ ID NO: 715230 - DNA, 107 bp, Homo sapiens
gaggaaagccaaagagctgaatgttatgtttattgaaactagtgcaaaagctggatacaatgtaaagcagatcagcggtttgagtgctacgtttgcagaaattttct

SEQ ID NO: 715231 - DNA, 100 bp, Homo sapiens
aagaatttcttatcaaacctgaatccaaagttgctaagttggacacgtctcagtggccccttttgctaaagatcaccatctggttcaaggacacctaaaa

SEQ ID NO: 715232 - DNA, 50 bp, Homo sapiens
gctcttcctcccttcgctcgcaccatgggatgtttcagcagcccctgaga

SEQ ID NO: 715233 - DNA, 90 bp, Homo sapiens
agcaacattccgatcatgggcaggataaagatgattcagttgatgctcaaaatatttgtcatgtgtggcacatgaatgtagaagcccttc

SEQ ID NO: 715234 - DNA, 74 bp, Homo sapiens
cacaccgccagcaagagtaagaaggagatcttccgctggccagccagtggaatcctgaagggcttcgacccact

SEQ ID NO: 715235 - DNA, 100 bp, Homo sapiens
caaagcagaataaatctgtactcgtgcctcatggatccaaattaaaggtctcggcgcggaagatggccggcggcgtggacggccccatcgggatcccgtt

SEQ ID NO: 715236 - DNA, 80 bp, Homo sapiens
cccgcagcctggacgacatcgacctgtccgccctgcgggttgatctgttccagctgcaggtgaacaccctacgacgttat

SEQ ID NO: 715237 - DNA, 82 bp, Homo sapiens
agaacatccacagaatagacctgaagacaaaaatccagaagtacaagcagtctgggggtgcactatagccatctggagctga

SEQ ID NO: 715238 - DNA, 80 bp, Homo sapiens
tcagaaagatggatttttgcatgagacgcttctggacagccctttcttttcagaagacacatttagacaatcaccattca

SEQ ID NO: 715239 - DNA, 97 bp, Homo sapiens
agcacgagggcgcgctcgagacgctcctgaggtttgtggaatcttgcttcccttttttccaacctttgtttatttgtattgatgccctttgcctttt

SEQ ID NO: 715240 - DNA, 100 bp, Homo sapiens
gccaggcggtccgtgcgagaggaccaacggagcgctgaggcgggcgttttcttggatgaattgcttgctttggaggattatatgcgtcaggcaggagaag

SEQ ID NO: 715241 - DNA, 83 bp, Homo sapiens
attacattctctcggccagcgcctccgcggtagctacagcaagctgggtagcaggcagatccaaaggatatcatgaagtttcc

SEQ ID NO: 715242 - DNA, 75 bp, Homo sapiens
ttcggctgcgcggcggggctgaggcggccgcggggcccgagcgcaggtttacccaaggtccagcctagcccctag

SEQ ID NO: 715243 - DNA, 100 bp, Homo sapiens
cagacccgcgccgccgacgacccagcagccgccatggctctgctccgaggttgcagagcctgaggcctgtgatcagatgtacgagagcttagcgcgactc

SEQ ID NO: 715244 - DNA, 82 bp, Homo sapiens
ttcagccagcacactcctcgcgagcaagatcatccgggaagcccacgggaccctcaggcgggcaggatgaacgactggcaca

SEQ ID NO: 715245 - DNA, 83 bp, Homo sapiens
cggcgcgcaagggacgtgcggagtgagtggcgctgcgggtggggccgtcggcggcgctgcctcccgcgacgatgcccctcaac

SEQ ID NO: 715246 - DNA, 90 bp, Homo sapiens
tccccgcttcgagggttacaagctctctcttgagccgctgccttgttaccagctggagcttgacgcagccctggtacctgacagtgtaaa

SEQ ID NO: 715247 - DNA, 100 bp, Homo sapiens
cggcgccgctgcccatggagggagtggacatcagccccaaacaggacgaaggcgtgctgaagggcgccctgcgtccggcagaggaggcgagcatcccgct

SEQ ID NO: 715248 - DNA, 82 bp, Homo sapiens
cggggggaccggtgctggcgagacctcacctgcatggacttccactatgagagcgggatgccttcgacacgctgttcgacca

SEQ ID NO: 715249 - DNA, 119 bp, Homo sapiens
cgcctatggagttgtcactatgccttttagtgtaagagaaggggctatctgatgggttagagtgcctttgagaagaaatcagtggatactggatttgctcctgtcaatgaagttttaaa

SEQ ID NO: 715250 - DNA, 82 bp, Homo sapiens
atcgtgatcccggcgacatactacctctggccccgagatcagaatgccgttccagtgtctcgccccatcctcaccctcaggg

SEQ ID NO: 715251 - DNA, 100 bp, Homo sapiens
gcgcccgacccgggactagaggacggaagggtctggaaggatggtgattgctcacaccaaagccttggacccctcccagcctgtgacctttgtgaccaac

SEQ ID NO: 715252 - DNA, 76 bp, Homo sapiens
gcaggatccggctgccgaaggtcctcgccagatcctgaaggacacagccctgcagaaagtgaagcgtggccagagc

SEQ ID NO: 715253 - DNA, 111 bp, Homo sapiens
acgaggggctccgggtcttccagagcgtgaagatcaagatcggtatcatgatattagctggtttgacatcaagtcatttgtgagtcatcagatcttctcctgaaaatggga

SEQ ID NO: 715254 - DNA, 83 bp, Homo sapiens
ccatctactgtctttttcttcaatgggcagcatatgaaagtggattatggggtcctctgaaggagttcaaagctgctggccaa

SEQ ID NO: 715255 - DNA, 76 bp, Homo sapiens
ggtgtacagtggcatgggccccgattacagtccactgtcatggattgaagaaaaaggacctggtctaaaacgaaac

SEQ ID NO: 715256 - DNA, 83 bp, Homo sapiens
gtaaaatggacatacctaatactttccagtgctaaggaaattcctgaagatgtagatatggaagaagaaaaagaaagtgaaga

SEQ ID NO: 715257 - DNA, 75 bp, Homo sapiens
ggttgttttttcctgtatgaagcggttggcaccactgaagtgaccgaatgagcttgaagctcaactagagaaaaa

SEQ ID NO: 715258 - DNA, 75 bp, Homo sapiens
ttatcccagggtggctgaatcacggaatgctccttgacctgtttatggtttgggattggtctacttacctagctg

SEQ ID NO: 715259 - DNA, 75 bp, Homo sapiens
aaccacgtctcgtccacgacctccctaggtaacatttgtcgatcacccattgcagaagcagttttcaggaaactt

SEQ ID NO: 715260 - DNA, 51 bp, Homo sapiens
caagtggtcagtttggttgtggaaaggaccactatgagacctcagtccttc

SEQ ID NO: 715261 - DNA, 100 bp, Homo sapiens
agacctcggtcatcagagcccataaaagcgttacggaatggtatatgtctcgagtccacggtatgcaccctaaagagaccacccgtcagctgagcttagc

SEQ ID NO: 715262 - DNA, 95 bp, Homo sapiens
gttttggggaggctgctgcgacgaagagttccctcagcctccggccttgtgtgtccgactcggcagcagtggtgctggagagtcatgcctgtgag

SEQ ID NO: 715263 - DNA, 49 bp, Homo sapiens
catctgccaacaagactggaagcaggaagctaaagccaagcaggaaaag

SEQ ID NO: 715264 - DNA, 75 bp, Homo sapiens
ccgtgtccttcattgccacgtacaggaacttgatgggaaacctgcttctcctactccggttattgtggcctccca

SEQ ID NO: 715265 - DNA, 80 bp, Homo sapiens
agaggaaaatgcaagaagactgatggagcaggcttgcaatattaaaagatccgtgctcagctcacagagcagatgaaatg

SEQ ID NO: 715266 - DNA, 98 bp, Homo sapiens
accctccaaacctaaccctgtctttaaagtgtttggtgcagcacctttggagaatgtgggagcgaagaatggtcaagaaagtggactcgaaattggaa

SEQ ID NO: 715267 - DNA, 100 bp, Homo sapiens
aattcaggaaggactattctcattaagaaatctccgagaagcaagggataatgctgtggctgaaaaggaacgagcagtgatggctgaaaaggatgcttta

SEQ ID NO: 715268 - DNA, 75 bp, Homo sapiens
agcaaaagtgaaatatttgtcagatccaatggatttgaacagaagcgctttgccaggcttgccagcaagaaggca

SEQ ID NO: 715269 - DNA, 90 bp, Homo sapiens
ttgggttatgtggttcgacgattccaaccaaggtcctggtccagtggcgggaagctgtgtcagtgcagatgtattaccgacagcaggagg

SEQ ID NO: 715270 - DNA, 82 bp, Homo sapiens
acgctactactttgggtgctgtgaaatgcaagcatcaagtaccacgtttttgaagaccatggcctatcatcattatgcattc

SEQ ID NO: 715271 - DNA, 88 bp, Homo sapiens
aggattccaagtaactcttatttggaagtgcacggctgtctataacgtgctgccgggtctcaggatggaggagtgaagtctcctgtcg

SEQ ID NO: 715272 - DNA, 74 bp, Homo sapiens
gtctcactgacttcaagaatgaagccacggacccttgcgatgtgttcagagcaacattgttttgttgacacaag

SEQ ID NO: 715273 - DNA, 98 bp, Homo sapiens
cggactcttcttcgccttcgactgataggaagatgtcttcaggaaatgctaaaattgggcaccctgcccccaacttcaaagccacagctgttatgcca

SEQ ID NO: 715274 - DNA, 83 bp, Homo sapiens
cttagctgtgctcgcgctactctctctttctggcctggaggctatccagcgacttgaactgccatgtcctctgaagaaggaaa

SEQ ID NO: 715275 - DNA, 100 bp, Homo sapiens
ctcaagtccaagcacggggacaactacctggtaacaactccaagtttcctttggataatacacctgttcgaaatcggggcgatggagatggagattttca

SEQ ID NO: 715276 - DNA, 90 bp, Homo sapiens
atgaagacttgaacttaatacagcaagaaagaccatcaagtttaccaaaatacaaacctggtcgatgtgatgatattttgaaatggaagc

SEQ ID NO: 715277 - DNA, 87 bp, Homo sapiens
ggaaggactggggccacgtggagctgctggaggctggctatgctgaggactacaccacgggagccgtgatgaattttgccagcgtct

SEQ ID NO: 715278 - DNA, 95 bp, Homo sapiens
aaaacctccttatgctgatatacatccaatgagggttatgtgcagagtctgattagacgagttgtaaataatgtaaacattgtgataaataatct

SEQ ID NO: 715279 - DNA, 74 bp, Homo sapiens
ggattccaagtaactcttatttgagaagtcattcagaattcaaaagaagttctaagtttattgcaagaaaaaaa

SEQ ID NO: 715280 - DNA, 74 bp, Homo sapiens
cagatgtgcaacgatgacccagatgtcctgccaaaaatatttacaccagcagctccagttcataccaataaaga

SEQ ID NO: 715281 - DNA, 82 bp, Homo sapiens
aaaagatgagtctgaagttatatcgcaaaatgaaacgtgctctccaggtatccaaaccttgaaacctttgctctagatgtca

SEQ ID NO: 715282 - DNA, 74 bp, Homo sapiens
ccagcggtgtggaatgagagcgctgcaggtgcgcaccgggaagttcagggggatatgagactttctactcggaa

SEQ ID NO: 715283 - DNA, 75 bp, Homo sapiens
tcagatcgtgtgcccagaccttccctgccaaacagggggggccctcagcctcttggccttgaacgggctgttcat

SEQ ID NO: 715284 - DNA, 75 bp, Homo sapiens
ccagcctggtggggctgcccctggctgcgtgccaggccgctgtccgcttcctcagcactttgtttgcccccttaa

SEQ ID NO: 715285 - DNA, 76 bp, Homo sapiens
gagttgctggccaaaggggcctgtgtacttgctgtagatgaaaatggtactaggttttgacaagcttgcatcatgc

SEQ ID NO: 715286 - DNA, 100 bp, Homo sapiens
caatcactagggaagcacagatgtggaaagtgaatgtgcggaaaatgccttcaaatcaggttattcagcttctcaaggctggaaaagcgaaggaagtttc

SEQ ID NO: 715287 - DNA, 80 bp, Homo sapiens
gggacattattgcgcgtggaacggctgcttttggaaggttgacatcatggacatatgtgagtccatcctggagaggaagc

SEQ ID NO: 715288 - DNA, 100 bp, Homo sapiens
tgcagggcgccggggtgctggacgccaacacggcggcgcagagtttgaaaacgaaatcatcctgaagctggaccacgaggtagaagggggccgaggcgac

SEQ ID NO: 715289 - DNA, 100 bp, Homo sapiens
gtaaggtcttctatctgaaaatgaagggtgattacttccggtaccttgctgaagttgcgtgtggtgatgatcgaaaacgcaactcatgcagcaattccag

SEQ ID NO: 715290 - DNA, 75 bp, Homo sapiens
taagcggcataaagcaattgagaattcagcttctcaataggtttggcatggacaagatctatgaaggccaagtgg

SEQ ID NO: 715291 - DNA, 83 bp, Homo sapiens
ggggacgacaaggagggcatgatcaacctcgtcatgtcctacgcgggccgccttcaacaacaacgtgagcgtggcctacgagt

SEQ ID NO: 715292 - DNA, 100 bp, Homo sapiens
ggctgctggagccccggctggctcaccccggggccgggcagaattgggctccaggtgccagaaccctgtggagcatcatgaactgggaagagtagctgag

SEQ ID NO: 715293 - DNA, 100 bp, Homo sapiens
gatggctataatggatttggtaatgatggtcgtagttcccccgctccctgggaaagcgtttttgcgtcagcttccttttagaggagatgatggaatattt

SEQ ID NO: 715294 - DNA, 100 bp, Homo sapiens
atgtcctagataacccaactcctgagatggaagcagcgagacgttccctgtgctttagactggagcaaggtatctttcagatgaaggcattgaagcttgc

SEQ ID NO: 715295 - DNA, 96 bp, Homo sapiens
gcaaagggccaaagtcttaggactgctgggcaggagaactggcctgtgttcaagaaatgattctggggaccattctgaccacatgcattactatca

SEQ ID NO: 715296 - DNA, 83 bp, Homo sapiens
attgaaggacatcagtggctggaaaataatatagctgtcccctttcctccaacccaacggcttactttcaaggaagtatttga

SEQ ID NO: 715297 - DNA, 96 bp, Homo sapiens
cctgtgtcttctgcagtgattttaaccaaggcagttggtggaaatgaggatatgtgatggcgtccagtttggagctgggataaggttcctgtagcc

SEQ ID NO: 715298 - DNA, 90 bp, Homo sapiens
gggttatatatggaattatggtaccctccctcagagtatctgactgtcttctctcagatgattgcatttcatgatccagagctgagtaat

SEQ ID NO: 715299 - DNA, 83 bp, Homo sapiens
gctgtggagaaggcgctccggggcgaagcagatgccgacaaaaggatcaaggtggcgaagcccgtggtggagatggatggtga

SEQ ID NO: 715300 - DNA, 50 bp, Homo sapiens
cgggtctgctctgtgtgccatggacggagtgcctggtgaagaatgtgatg

SEQ ID NO: 715301 - DNA, 75 bp, Homo sapiens
ctatgcctctccgccactcatcaccaatgtcacggtgttggtaaatcatgcttattgctacagtttacagacaag

SEQ ID NO: 715302 - DNA, 101 bp, Homo sapiens
atgtttaagaacatgacgccgtcacccttcctgcgattctacttaggtggatttgccgctgcagtcaccacccctctagacgtggcaaagacaagaattac

SEQ ID NO: 715303 - DNA, 101 bp, Homo sapiens
aatgttttgctacaaatggaggaggaggaggacgacgacgatggggatatcgggcagctgcaatgactctccgcacggtattattgtcattgcaagcacta

SEQ ID NO: 715304 - DNA, 90 bp, Homo sapiens
gagagagcgagctgagtggttgtgtggtcgcgtctcggaaaccggtagcgcttgcagcatgatgcagacagacatgctgaactatctgga

SEQ ID NO: 715305 - DNA, 98 bp, Homo sapiens
aactataaaggagagcgccaaaccattactgatgatgtggaggttaacagctatctttctacttgatcctgctccctcggtgtctgcattgactcctc

SEQ ID NO: 715306 - DNA, 134 bp, Homo sapiens
tactggatctcagccttgtcaaagatgccagatgtgggagacacgccaaagctcccaaggtaaatgtgaatgtggcaaatgcacctgctatcctccaggagatcgccgggtgtatggcaagacttgtgagtgtg

SEQ ID NO: 715307 - DNA, 75 bp, Homo sapiens
tcgcggccgtgggcagcggctgccgcgcctgtctgcccgagggaggtaagaatgattgatgttggctgatattgg

SEQ ID NO: 715308 - DNA, 99 bp, Homo sapiens
tgatgagcagagaactgctactatgatgcttcccagatggacttgttccacagagactctgatgatgatcagactgaagaacagcttgatgagtcagaa

SEQ ID NO: 715309 - DNA, 100 bp, Homo sapiens
ttgctgacccagaggagagttctccaaacatgatcgtttactgcaaagctcggggaccagttctacaaggaagccattgagcactgccggagttacaact

SEQ ID NO: 715310 - DNA, 75 bp, Homo sapiens
cgagcggaggtgtgtgcggactgcagcgccccggagctacagagacttctgaagtggagagtctgcgacctcctc

SEQ ID NO: 715311 - DNA, 100 bp, Homo sapiens
ggcttatacagtatgcattggaccagggcgtgaacgtcacccaggtgaaggtgctaaaggagaagatagaagctgagaagggtcgtgatgccttccccgt

SEQ ID NO: 715312 - DNA, 88 bp, Homo sapiens
cgtcgcctcggacgtccactgcaccctgcgcgagaagagcacctgaagaagcctcttgaagactacatggcccttttccccagtgtga

SEQ ID NO: 715313 - DNA, 75 bp, Homo sapiens
atggctagtgcttcatccagccaaagaggcgatgctctacgagaagttcagcccggccgggcccatcctctccat

SEQ ID NO: 715314 - DNA, 100 bp, Homo sapiens
ttccttgggctgcctttcctgcaggtagtcagatgcctccgcagccacccgggagccagtcagaatccagttcccatcccgccttgagccagtcaccaat

SEQ ID NO: 715315 - DNA, 100 bp, Homo sapiens
tgatttcaaagggacacccactaggcgctacaggtgctggagaatctggtaaaagcaccattgtgaagcagatgaggatcctgcatgttaatgggtttaa

SEQ ID NO: 715316 - DNA, 75 bp, Homo sapiens
ggcccctgcagcggaaccggacccagtccctgagccgcccctacacccacagaaagtttcctacactactgaggt

SEQ ID NO: 715317 - DNA, 98 bp, Homo sapiens
agaccctggagcctcagttggaagcagccgatccagcctgcggagcctgtggggcaggtatgggctacgtgagttcgtggtgattgcccctgctgcac

SEQ ID NO: 715318 - DNA, 90 bp, Homo sapiens
gtaatttcaacagaagagtgagagatggaacccgaagaagaaaggattcgttacagccagagattggagtggagtcaacatatcaatgga

SEQ ID NO: 715319 - DNA, 82 bp, Homo sapiens
catcctcctgagactccggggtcagacgcccactccaggttgaaatcacaaagattagacacctttttagataggtgttctt

SEQ ID NO: 715320 - DNA, 90 bp, Homo sapiens
agatggatgaaaggagacgtcagaacgtggcttatgagtacctttgtcatttggaagaagcgaagagctctggattaatcgaattacagc

SEQ ID NO: 715321 - DNA, 89 bp, Homo sapiens
caagtcaagctgccttaggcttataacatcacatttaaaagcatctcagattgtcaagacattgccaataagggagctaaacagagcgg

SEQ ID NO: 715322 - DNA, 100 bp, Homo sapiens
ctgacgctcaggctccgccccctgcatgtctttgttggcaaacagttctgggggtcgtccgatcctgcaggaaggagtcaagactgagaacaacgatcat

SEQ ID NO: 715323 - DNA, 99 bp, Homo sapiens
gatgaacagttgaacatgaagaatactggaaagttgctatgttttgttggctggggaacagaccagggaattggtggatttggagaagagccgggaatt

SEQ ID NO: 715324 - DNA, 100 bp, Homo sapiens
gacggggagctgaacgtggacagcctcatcacccggctgctggagggctaaagaattacctccaaagccattgtcaagaccacagcagtcatctgcacca

SEQ ID NO: 715325 - DNA, 90 bp, Homo sapiens
gcaaagcccaacaccttcccccactggttcaaaccttgtactactcagctgatcacaagctgcttgatgggaacctactagatggacagg

SEQ ID NO: 715326 - DNA, 100 bp, Homo sapiens
gcggggatacagcctggaaggtgcgtgtggggctgggtctcggagtgggagacgtggagtgcaggttcagggagattactatggagatctggctgctcgc

SEQ ID NO: 715327 - DNA, 96 bp, Homo sapiens
ccgggcgacctgggcaccagcaggacccgaggccaggagccaggggcccagaagcgtggggtagagcagcggctgccatgctcttctgtggcttca

SEQ ID NO: 715328 - DNA, 101 bp, Homo sapiens
caacaatgtctcagcctttcagccttaccaagcaacaagtgaaattgaggtcacaccttcagtccttcgagcaagtttttcgttggaatatacgttgcaca

SEQ ID NO: 715329 - DNA, 90 bp, Homo sapiens
ttgcacttgttagtggaccttgtgcgaagaaattagagattcctgacattcagacaactgacttgtaactgacttataactgacttgtaa

SEQ ID NO: 715330 - DNA, 105 bp, Homo sapiens
ttcggtggactccttcggcagtccacccaccgccgccgcctcccagaggtacttggaaggctccatcgcccctgaagacaaaggaagctgctcattgctgcctgg

SEQ ID NO: 715331 - DNA, 100 bp, Homo sapiens
agactatttaccaggaaccattttgcagtaatccttctgatgtaccagaaaagcccaggtttacaagtaaaagtaaccaagctaaaacaggaacgaatct

SEQ ID NO: 715332 - DNA, 128 bp, Homo sapiens
cacagctttgccacaaagcccagtctgtgtctcaaatcaaccacaagctggaggatattggtgctggaaaaggcaaatactatgctgtcaattttccaatgagagatggtatagatgatgagtcatat

SEQ ID NO: 715333 - DNA, 98 bp, Homo sapiens
tttaatggaaaatcgcttggttaaaacctgacacttttaacagaatgccgggtctaagttgtagattttatcaacacaaatttcctgaggtggaagat

SEQ ID NO: 715334 - DNA, 90 bp, Homo sapiens
gaaggaagccttgaggatggcccttgtccctggcaaagccctctgggatgagtctgatgacagtaactcagaaattgaggctgctttacg

SEQ ID NO: 715335 - DNA, 82 bp, Homo sapiens
acccacagggccctcatggcgtgcggccgcttgctcacttccgacagagaaaaacaaaaggtgacagttcgcattcggagaa

SEQ ID NO: 715336 - DNA, 83 bp, Homo sapiens
cctggaggacggctgggacagcgagcccttcaccctggtggagcgagacggagtgcctgtgaagaaaacggggtattgccctg

SEQ ID NO: 715337 - DNA, 101 bp, Homo sapiens
tggcctcgttacctgcaggtattgggagatccacagctaagacgccaggacccactggaagcctagaaatggttttatgaatgaagctatggctacagatt

SEQ ID NO: 715338 - DNA, 96 bp, Homo sapiens
ccagatgggtccagaaagccaggcatggaaggatgcagaaacgtgacgagcaatgatgaagtggtgaagcagtattttccaatttgaagattcatt

SEQ ID NO: 715339 - DNA, 98 bp, Homo sapiens
agatggcgcctggcagggcagccagctggccaggggggcccgtctgggccagccacctggtgtccgaccttccttcccaattctcagcccccaaccca

SEQ ID NO: 715340 - DNA, 100 bp, Homo sapiens
gacaacagaacttgtgaacaaggatctggatatttattataagactcttgaccagagattaacgagaccagaaggaagcatgaaacgcgcttggtagagg

SEQ ID NO: 715341 - DNA, 89 bp, Homo sapiens
gttaaggattccaagtaactcttatttggcattcctgcatcgcatccggcagaacgtggccgactcagtggagaagggcctcacggagg

SEQ ID NO: 715342 - DNA, 75 bp, Homo sapiens
ctttcgtcaacctgtggaccctcagcttttaggaatcccttttgtgatggacgcctctgaccccacccagctctc

SEQ ID NO: 715343 - DNA, 75 bp, Homo sapiens
ggccctgagtctttgggggcagcctgcagaggctgcgcccactgtttgtaacatggaagattggtcgagacaaaa

SEQ ID NO: 715344 - DNA, 75 bp, Homo sapiens
gccgatgcaccgagtccagcccaggaaaatggagaggtgctggagaatctggtaaaagcaccattgtgaagcaga

SEQ ID NO: 715345 - DNA, 100 bp, Homo sapiens
atgatatccctgtttgggaccaagaattcctgaaagttgaccaaggaacactttttgaactcattctggctgctggcaaaggggacgtcccaacgaagag

SEQ ID NO: 715346 - DNA, 87 bp, Homo sapiens
gatcatggccgcagccgctctggggcaggcagatcgggagcggtgccgagaaaaatttccttactagatgacatttcatcgcaatgt

SEQ ID NO: 715347 - DNA, 75 bp, Homo sapiens
gggcgcttcgccccgggccccccagcatgaagaccccggcggacacaggttcgtgctggccgtgggcagcgccgt

SEQ ID NO: 715348 - DNA, 74 bp, Homo sapiens
gatgcagaagcagtgaagggcataggatccggcaaagtcctgaagagtggctgtcgctgggcgcggactccaac

SEQ ID NO: 715349 - DNA, 100 bp, Homo sapiens
cagggagttgaaggctgcagtgagccctgtttttgccaccacactccagcttggtccacaggtcctggctaccctgggaagagacaagaagtaaatgaag

SEQ ID NO: 715350 - DNA, 100 bp, Homo sapiens
acaacctggccgagttcactgtggatcctaaggatgctggaaaagctcccttaaagatatttgctcaggatgaccgagtgggagacagcagcaccagcgg

SEQ ID NO: 715351 - DNA, 82 bp, Homo sapiens
attcagccagcacactcctcgcgagcaagtgtccttgaatccgacccctactttgggtttgaagaagcaaagaggaagttac

SEQ ID NO: 715352 - DNA, 90 bp, Homo sapiens
ctttcggcttctgagacggcggcagcagcggcattcagaggcaatgccacttgctttgcttatggacagacaggtgctggaaagacctac

SEQ ID NO: 715353 - DNA, 90 bp, Homo sapiens
taacggctctagcagtgttaattggccaccaggtcttcatggaagttcggggaaattaactggatctacttctagtctaaataagctcag

SEQ ID NO: 715354 - DNA, 89 bp, Homo sapiens
agcagatggagaatagaccctctgtccaggcagcattaaaacttaagcagttccctgacatcgtggagttctgcgaggccatggccaac

SEQ ID NO: 715355 - DNA, 82 bp, Homo sapiens
cggatcacgttacccgcccggaggaggagaccgcgggacacagagtaaacaaggggtttggtgcacctcgatttggaggaag

SEQ ID NO: 715356 - DNA, 100 bp, Homo sapiens
gtcctcaactttgaagagatcgactacaaggagatcgaggtggaagaggggctttgttatgcacctaaagccatattggaagctccagaagaaagagcac

SEQ ID NO: 715357 - DNA, 90 bp, Homo sapiens
gcggagatatgctcccgaccctgtattagtgcggggtgccggccacatcactgtagtcgacttcaatgttcctatgaagaacaaccagat

SEQ ID NO: 715358 - DNA, 50 bp, Homo sapiens
gatatagcacaccatccccagccatggatgcctggactttggccttttct

SEQ ID NO: 715359 - DNA, 83 bp, Homo sapiens
aactggagtcttctgcctgcgcagattggtgctctcctctgtctcagactattttgctgccatgtttactaatgatgtcagag

SEQ ID NO: 715360 - DNA, 100 bp, Homo sapiens
tggcggatgccctgcagtacctgcagaaggtctctggagacatcttcagcagctctgctgtgtgcgtgcaccagctgcctccaggccaactacacgtgtg

SEQ ID NO: 715361 - DNA, 50 bp, Homo sapiens
cgaggatcgtgggagctaagaaacctctgtgagtgaaagccttcagaggg

SEQ ID NO: 715362 - DNA, 98 bp, Homo sapiens
acgtccgcttctggtggacagattgagcaaaggcccaagtctgttttggtggtctgagaggaaaaaagatgagcttctaaagttttgggaaaattata

SEQ ID NO: 715363 - DNA, 125 bp, Homo sapiens
gaagattggaagaaatatattactggcacagatatattggatatgaaactggaagacatcctgagggccaagatgggtcgccgagctcaacaggagtcagcgcaggccgagaatcacctcaatgg

SEQ ID NO: 715364 - DNA, 75 bp, Homo sapiens
tttcacagtcttttgaaaatcttcttgatgagccagcatatggtttaatacaattgtgcggtctgaaagtagaag

SEQ ID NO: 715365 - DNA, 152 bp, Homo sapiens
ttcaaacagcactgccaaatagcagaagaataccatgaggtcaaaaaggaaatcaccctgcttgagcaaaggaacacgtctccttcctgccatcttgtgaagaagtgccttgcttccctttcaccttctgccatgattgtaagtttcctgag

SEQ ID NO: 715366 - DNA, 51 bp, Homo sapiens
ctgcaagcaggcaacctgaatacagagttacatccatatgggagaatagtc

SEQ ID NO: 715367 - DNA, 100 bp, Homo sapiens
aggccctagagctccgggacaatgataagactcgctatatggggaaggataaacattgacgatcttgaggatgaccctgtggtgaacggggagaggtctg

SEQ ID NO: 715368 - DNA, 82 bp, Homo sapiens
aaggttattcttaatcctgtaaatacgaatctttccaaaggagatgcccggctaactggcatgaacctcccctctccagtta

SEQ ID NO: 715369 - DNA, 106 bp, Homo sapiens
tccagcacctacgtcccgctgccgtcgccgccgccaccatgcccaagagaaagctacgagttccagggagctctgtcctggtgaccgtgcccgggttatgacgact

SEQ ID NO: 715370 - DNA, 82 bp, Homo sapiens
aaaaacctcaaaatatgatggtggttggacagtcagcatttgcagactttggttgcagagaacacatcttagaagatgaaaa

SEQ ID NO: 715371 - DNA, 96 bp, Homo sapiens
cgccactgctgcagcagcgccgaggccgagactcagacctgctacaccagcgtgaagagagattggaacaattatcaggtcattaggatgctgtcc

SEQ ID NO: 715372 - DNA, 80 bp, Homo sapiens
ctcggtgattgaggacaagaccatcgagctcatgtttgcagttaacatgtttcgaacattaccaccttcctccaatccta

SEQ ID NO: 715373 - DNA, 75 bp, Homo sapiens
attggcattgactttttatcaaaaactatgtacttggaggatcgaacatctcttcaagaaaatgaggaggaggag

SEQ ID NO: 715374 - DNA, 90 bp, Homo sapiens
aggatgcatacatcctcacttgtaacgtgtcattagagtatgagaaaacgactctccagaatccgatgctgagcgagagaaggataaaaa

SEQ ID NO: 715375 - DNA, 75 bp, Homo sapiens
ttttgagcagaaaggattccgccttgttggtctgaaattcatgcaattgactggtctgagtgtctccaatggaaa

SEQ ID NO: 715376 - DNA, 101 bp, Homo sapiens
cttatgtacaagatttaaaaagcatcgtagaggtaatggaactgctggtccatctgaataaacgtataaaaagccgccccaaaatacaacttccagtagag

SEQ ID NO: 715377 - DNA, 74 bp, Homo sapiens
atgcacttgaacagactagaaattgcaccacagatatatgggttgctatcaaaaggagatgtgagagagggtat

SEQ ID NO: 715378 - DNA, 90 bp, Homo sapiens
agctgctgctgacttgagtgagaacaagagagaggacggcagcgccaagcaggagctgaaggacttcagatcactccaagaactgaggcc

SEQ ID NO: 715379 - DNA, 98 bp, Homo sapiens
gcggcgtctggctgctgcggaccccgccgagtcctagcgcctggcctgcgcgccgctgcccgcgccacagatatgaattgagaattcgttatttgcca

SEQ ID NO: 715380 - DNA, 100 bp, Homo sapiens
aaaaaagagaaacctgggtgaactttcacggacaacctcagaggacaacgaagtgttcgatttcagatcagaaccacagctacccaagaaaacccatctc

SEQ ID NO: 715381 - DNA, 100 bp, Homo sapiens
aaacgccaggtgcttattaggccgtgctccaaagtcatcgtccggtttctcactgtgatgatgaagcatggttacccatgcagttgttactgtaccagcc

SEQ ID NO: 715382 - DNA, 100 bp, Homo sapiens
cggcagtatccttggggcactgtgcaggccaagaaggatcaagaaggtggagaagaaaagaaatctgtgcaaaagaaaaaagtaaaagagttaaaggtgt

SEQ ID NO: 715383 - DNA, 90 bp, Homo sapiens
gcagttcaagtcaagcaactaggacagtatggaaattaccagcagtgaaaaagtacttacattccagtagccagtatctattagcagcca

SEQ ID NO: 715384 - DNA, 100 bp, Homo sapiens
aggactcccaggtctactggacagtggcgtgtgtgctgtggagcatccgagtgtgccagagtctccagaattcgtcagggtcagatcatatgaatcccaa

SEQ ID NO: 715385 - DNA, 110 bp, Homo sapiens
agagaagagcacagaatgtaccagagaggagcatctttccttgaagaagtacattattgacattgtggttgaaagtacagctccagcagaagctttgaaagatggagaag

SEQ ID NO: 715386 - DNA, 50 bp, Homo sapiens
gacccgtacatggacaccaccctgaaggatcagttccatgacaagacccc

SEQ ID NO: 715387 - DNA, 90 bp, Homo sapiens
acgggatcccgaggctgaagaaatagaagctgaatatgctgcattagacaaacgagagggtgaccatcgggatgaggaggaagagaccca

SEQ ID NO: 715388 - DNA, 83 bp, Homo sapiens
gaccctgctgctgtcttcaaagaaggtgtccctggccagtgtccttccacctgtccacaagcatggggaacatcttcgccaac

SEQ ID NO: 715389 - DNA, 50 bp, Homo sapiens
catcctgctggtcagcactgcggctgcgagtaaccagctcataaatcaca

SEQ ID NO: 715390 - DNA, 75 bp, Homo sapiens
ccctggagaaggcggaagtggaggtggctgacgagctgctggccgcggcgagtcctttgcacatgttggcaacac

SEQ ID NO: 715391 - DNA, 74 bp, Homo sapiens
cgagctggagctgccgcggcgcagccaggctgccctgaggatctgtgtttggtgaaaaggagccaaattcacct

SEQ ID NO: 715392 - DNA, 74 bp, Homo sapiens
gaagaagtaggcatcaatactgaggagatcatcacctccatcctgctgagcgggcggatcgggcccaacatccg

SEQ ID NO: 715393 - DNA, 100 bp, Homo sapiens
ccaaatcatccatttctaataactatctcaacctcacatttccaaggaagaggactccacggccttcacagttgttgatcacatagcatggtcatccact

SEQ ID NO: 715394 - DNA, 75 bp, Homo sapiens
ggccatgctcgaagccagctctgcagctcagccaatcagtgacatcattgattccgagtccgaaaggtccctgag

SEQ ID NO: 715395 - DNA, 97 bp, Homo sapiens
gtgtacctattgtgaagaacattttaaatcacggtttgctcggttaaagcatcaagaaaagttccatctggcaatgtctcaggctgtgcagacaaac

SEQ ID NO: 715396 - DNA, 101 bp, Homo sapiens
gaaccactggaaagtgaggaattttgaagtacaccgtggtgacattgtatcattggtccgaaggagtaaaggtgctgcaatgatgttagctgtggccactg

SEQ ID NO: 715397 - DNA, 98 bp, Homo sapiens
tgggatgtgaagtagatgataaagatgatgatatccttctcaaccttgtgggatgtgaaaactctgttactgaaggtgtgttgaggctcctggaacac

SEQ ID NO: 715398 - DNA, 100 bp, Homo sapiens
gcctcccaagtagctaggactagagtttcggagcaacatcccctgtcacctggttgatatctcttgcggattaccctgcagtgccacgctaccatgtggg

SEQ ID NO: 715399 - DNA, 100 bp, Homo sapiens
ggagctggacggcgagcgcgagcggcgcgagaaagctgaggcctccgtagaagacagcgccttgcttatgcagaccttgatggaggccatccagatctca

SEQ ID NO: 715400 - DNA, 98 bp, Homo sapiens
ttcctcgcccagagcgtcttggcgggtgtgaacttgtatgtgaagaatctggacgactccattgatgacgacaaactgaggaaagagttctctcccta

SEQ ID NO: 715401 - DNA, 51 bp, Homo sapiens
aagcgcatacaggaccctaaacagccacatgaaatgaagatcacctctgcc

SEQ ID NO: 715402 - DNA, 82 bp, Homo sapiens
aagaactggaaccagaagctgcagaagaagccctggagaatggaccaaaagggcttccgagtggacctgccaatcaagtcgg

SEQ ID NO: 715403 - DNA, 50 bp, Homo sapiens
ccagcccagcgattctcagtcaggctcgctcgcctccgtgttcgtccggc

SEQ ID NO: 715404 - DNA, 117 bp, Homo sapiens
gaatgggacccaccactgcgcaggttctctgctcaccagccgctgggtgatcactgctgcccactgtttcaaggagacttcgagtaagaaggtgatttacagccagcctagtgcccg

SEQ ID NO: 715405 - DNA, 49 bp, Homo sapiens
gcccaggccagcattcccgcagtcctggctataagtcaccatggcacag

SEQ ID NO: 715406 - DNA, 82 bp, Homo sapiens
agaagtccagagctgaggactgcctgtttgcagaagaaaaagtcagcactttttgaagtgtctgaggttataccagtcatga

SEQ ID NO: 715407 - DNA, 50 bp, Homo sapiens
tatagagtttgtggacagatttatattgacctgcgaccgcatcaagcagt

SEQ ID NO: 715408 - DNA, 82 bp, Homo sapiens
ggagcggcagctcagcttggagcaggaggtccaggagccttcacgtaaatgggtccagtcatgcctcccagtaagaagccag

SEQ ID NO: 715409 - DNA, 100 bp, Homo sapiens
ccatggagtcctgagatccagggatcccactggcagcaaagttcttatttacagaatcgaaatcttaaagaaactctccaccttttctaagtagtgtatc

SEQ ID NO: 715410 - DNA, 100 bp, Homo sapiens
cagagttacattgcagccatcagcgctcgttttgtgcagcttcagcacaatgacattgacaaacgggactgcatcgacgtaggctggtgggaaggagagc

SEQ ID NO: 715411 - DNA, 100 bp, Homo sapiens
cgccccgccgcgccgcgctccaaccgcctcctcctcctcagtaacgcgggtttcctcaagcatctgcttcctacatattactacaatttgcacagtatgg

SEQ ID NO: 715412 - DNA, 90 bp, Homo sapiens
accttggaagaactccgtgcccagatgctcataaggattgtcctctttctacaaaaggctcaggccacagggtcaccacatacatcgccc

SEQ ID NO: 715413 - DNA, 96 bp, Homo sapiens
tatgggctatttgtgtagcagaaggtgaagtgaaactgctgctgtcctccgagacacccattgaggggaagaacatgtcctttgtgaatgatctta

SEQ ID NO: 715414 - DNA, 82 bp, Homo sapiens
atccaacacaaaacatggacatgccccagctggtttgccctccaggtggtggaggtggatacagcagtcggagaacatctgg

SEQ ID NO: 715415 - DNA, 75 bp, Homo sapiens
ggaagtagagagataacaaaagctgctcagagtctcaatgaacttggatcttacacatttgttccatggcttctc

SEQ ID NO: 715416 - DNA, 98 bp, Homo sapiens
actgctggcatcaggagaagacgcccttgactttactcaagaaagcgaggtggctcctgcacgtgcgccggctcctgcaagtgcaaagagtgcaaatg

SEQ ID NO: 715417 - DNA, 82 bp, Homo sapiens
cctcaggccagtcgcctccaggccaagagggatccttcacccgtgtctgcgccatcatgaccgggtcctataacaacttctt

SEQ ID NO: 715418 - DNA, 74 bp, Homo sapiens
cctactacaggactgcggacaagggctggcaggcgagacttgaaatctgtgctttgagggacactgtggctgtt

SEQ ID NO: 715419 - DNA, 97 bp, Homo sapiens
aaggaaaaccaacttctcggacacaggtggtcatttgattgcccgcctcagaacgatggatctgcatctcttcgactactcagagccagggaacttc

SEQ ID NO: 715420 - DNA, 95 bp, Homo sapiens
agacttcaagaagtcattgaaacccttctctctctggaaaagcagactcgtactcaatgtgcaggttctatctgtgagaaatatggcttagagga

SEQ ID NO: 715421 - DNA, 75 bp, Homo sapiens
cagctcttgagcaggcagcttacaagttggatgcatattcaaaaaaactggttattgccttgtctgtcaagatcc

SEQ ID NO: 715422 - DNA, 74 bp, Homo sapiens
ggggcctttcctgaggacggcgtacggagtgtgggaggcccgccgtgggggcagagaagtccaacccctccaag

SEQ ID NO: 715423 - DNA, 82 bp, Homo sapiens
gcggaccggcgtccccggcgcgaagaggctggactcggattcgttgcctgaggatgatcggctgaatgtaacagaggaacta

SEQ ID NO: 715424 - DNA, 97 bp, Homo sapiens
ggagccctcgcgacgcgcccggcccggagcccccagcgcagcggccgcggttttaaatgcacagagagcaggatacaaggcagccatagttcacaat

SEQ ID NO: 715425 - DNA, 98 bp, Homo sapiens
ataaacattgttcaagagttggagagagtgccccacaacacccctgtgggtcctgacttccagtccttgttctcaccacagacttatctcagacagag

SEQ ID NO: 715426 - DNA, 98 bp, Homo sapiens
gtgaccggcaccttctgtgcgtcctggactcctctgagaaacaggtctcctctgagcctccggcctccataagacccaaaacagatgacacctcttcc

SEQ ID NO: 715427 - DNA, 80 bp, Homo sapiens
acaagtttgcagatcgggagcgcaaggtcgccctcaaggccatgatcaaaacgaactgtggctgcaccatctgtcttcat

SEQ ID NO: 715428 - DNA, 99 bp, Homo sapiens
gccacacaggtagccctggacggcattcagtgttttggtgtcatggagaaactccagctgggcccagagattctgcagcgggaaaatccaaggcttatt

SEQ ID NO: 715429 - DNA, 100 bp, Homo sapiens
cggaaaccccgcctcttacagtcacgagacatggagcccaaacctgcaaccaagaaggctacacgaacaaaggctatttctgaagatttatcacaggagg

SEQ ID NO: 715430 - DNA, 101 bp, Homo sapiens
aggcctccaccctggcaggaatcccaatttgcctccacttagtgagcggaagaatgaaaaagcttgtggtgaaggggggcaaaaaaaagaagcaagttctg

SEQ ID NO: 715431 - DNA, 100 bp, Homo sapiens
cgggagcgcaaggtcgccctcaaggccatgatcaaaacctgctcctggaacacctggagtgcctggtgtccaggcacgagaggtcactgcgcatgaccgt

SEQ ID NO: 715432 - DNA, 97 bp, Homo sapiens
ggcagtaaattcttcagctgctcggacagatgaagctccccaaggagctgcagatcggtttgggcttggccagccaggaagaatacctggttctgtg

SEQ ID NO: 715433 - DNA, 80 bp, Homo sapiens
ccccaacaagaggaaagacacacctaccaagaagccagtcaagcggccaggtgacaccggaaactggtactcaagtgatg

SEQ ID NO: 715434 - DNA, 74 bp, Homo sapiens
gaaggttcgcgccaaggagaccaggaagcgagcactcagcaggttaaagcggcaactggggaagaagtatctgc

SEQ ID NO: 715435 - DNA, 75 bp, Homo sapiens
tccgggggagaccttgaatttggtgtggaagaaataacatcagtagttcagggtgtcagatgcctgatacattca

SEQ ID NO: 715436 - DNA, 83 bp, Homo sapiens
ccgacgcgggaatgaagcgggcgctgggcagggggatatgagactttctactcggaatatcctgagtgttgcgtggatgtaaa

SEQ ID NO: 715437 - DNA, 80 bp, Homo sapiens
gatggcttagaggactctgaggatagcaaagatttaagtgccctgtatgctcaaaatttgtatcctcagatgaaatggat

SEQ ID NO: 715438 - DNA, 83 bp, Homo sapiens
ccccaggttaccactaaaaatgccaaagtattgcccaattaatagagaaagaagaacagagaaaagaagtacagaatcagcta

SEQ ID NO: 715439 - DNA, 82 bp, Homo sapiens
cgagtatgagcagttcatcgcagacaatgcagatcttcgtgaagactctgactggtaagaccatcaccctcgaggttgagcc

SEQ ID NO: 715440 - DNA, 82 bp, Homo sapiens
gtatggcaagctagaaagcttgagcatacttatttcatcgggtactccaaagattcaggtttactcacgtcatccagcagag

SEQ ID NO: 715441 - DNA, 83 bp, Homo sapiens
ggctttggtccccagcgcagtgaagtggtgagcctttttgtcactggtcagcccaaggccaaccccactgtcactctgttccc

SEQ ID NO: 715442 - DNA, 96 bp, Homo sapiens
agctgcttccagtgggaatccacattaagaagtacaatagcattcgcggatgcctttgtggaactgtacggccccagcatgcggcctctgtttgat

SEQ ID NO: 715443 - DNA, 83 bp, Homo sapiens
ctgtcccggggaatctagaagaagatccagctccaggtcccacaggggctcttcttccccacgaaaaagatcttattcaagtt

SEQ ID NO: 715444 - DNA, 90 bp, Homo sapiens
atcaggaccccagatgtctgacagccctgtgtgacaccaagataagtaacaaatgcactcggtgatggaaagagagccactattctgaag

SEQ ID NO: 715445 - DNA, 82 bp, Homo sapiens
ctttggaaacgacgtcatgtgttaggcttctcacggcattcagcagcagcgttgctgtaaccgacaaagacaccttcgaatt

SEQ ID NO: 715446 - DNA, 83 bp, Homo sapiens
gtggaacatcattctcaccaccagtctcttctctgacctcctgccccccgaggtctgcagtctcctgaacccagcagccatct

SEQ ID NO: 715447 - DNA, 101 bp, Homo sapiens
gggagccgggctaggacgccgagcggtgactccccgccgctcccgggggccgtgacggatttaagtgccctgtatgctcaaaatttgtatcctcagatgaa

SEQ ID NO: 715448 - DNA, 100 bp, Homo sapiens
ttttcaggaaaatgacccagcgtacatactgaatgatctctacatctcagactactgtgtgtggattcagaaagtcaagacatcttccttttaagcagtg

SEQ ID NO: 715449 - DNA, 100 bp, Homo sapiens
agacagtctccagtgcaagtaggatgtttaccaaccctgataatgacctgaagattatcggctataagagaataagaattgcagaaaataacagtgaagt

SEQ ID NO: 715450 - DNA, 75 bp, Homo sapiens
gagttacccctcttaccaccgtcatggcagtcccagtgcctgatggcgaaaccccagaagatgaaaatccaacag

SEQ ID NO: 715451 - DNA, 100 bp, Homo sapiens
acttgagatccatttgtaaggaaagaaaaggaagcaacaacataatgcccagagttggagccaattaaaccaggaagttggtgaaccatctaaagaagag

SEQ ID NO: 715452 - DNA, 97 bp, Homo sapiens
ccaatctcccaaatcaagtatacagaaaatcggtgaagagaggttttgaattcacgcttatggtagtgggcctcagaagtttctagaaacagaggag

SEQ ID NO: 715453 - DNA, 75 bp, Homo sapiens
aaataataatatgcgtgcaggcgccctgcatgattcctggccgcgtgctttctaaattcccgctaccagacctac

SEQ ID NO: 715454 - DNA, 51 bp, Homo sapiens
aagataaagcccttaaggacaaggttcttcagatagatcctgaagttacag

SEQ ID NO: 715455 - DNA, 75 bp, Homo sapiens
cgcgtcgtgcgcctgggggtgcgcgcctgcgacctgcccgcctggttgtgaaaaacttcaggacaaaaatgtttc

SEQ ID NO: 715456 - DNA, 100 bp, Homo sapiens
ggggggagctagtggaagttactgccgcgccaccgagtccggaccggagactttggggcctaactagtaacaatttggacaagacagcaaatgctattgt

SEQ ID NO: 715457 - DNA, 97 bp, Homo sapiens
ttgaatgtgtcaaaaccaaacaccctcagctccacattgagagcaaaatctacaagatgatgcagggaggagcttctcgctgaattccgagggggct

SEQ ID NO: 715458 - DNA, 83 bp, Homo sapiens
cctaggagtgctgagcccgcggaaccgcagccatgtaggagctgtggcgcggggccttccaggagtctgagctatgagtggcc

SEQ ID NO: 715459 - DNA, 75 bp, Homo sapiens
gccggggacccagcagcgggcgcgcggcctactttggggataaaggattatttggtcttctggatttggaggcaa

SEQ ID NO: 715460 - DNA, 73 bp, Homo sapiens
agaaactgcaccggaaatgtgcctaccagattctggatgaaattgaagaacataacatcaaaatctatcactt

SEQ ID NO: 715461 - DNA, 100 bp, Homo sapiens
gaaacaagccgtggaataggtgtatcaagtaatggtgcaaagcctgaacaagcttgggcaacagatgatgtagctcagatttatgataagtgtattacag

SEQ ID NO: 715462 - DNA, 100 bp, Homo sapiens
ggatcaggaaagcctggagctgaagccaacctcccgagcaggttcacctttccttgccagtgaagatggcgtgcttggcggagtgattgtcctccgttca

SEQ ID NO: 715463 - DNA, 50 bp, Homo sapiens
tactgccctacagctacagagcagatgctggcccgcgagagacattgatg

SEQ ID NO: 715464 - DNA, 99 bp, Homo sapiens
ggaccagtgggtcgagcagctgaacgagtgtaagcagctgaacgagaaccaagtgcggacgctgtgcgagaaggtccggaccctatttgtcagtggcct

SEQ ID NO: 715465 - DNA, 97 bp, Homo sapiens
tcatgagggaaatcgtgcacttgcaggccgggcagtgcggcaaccaaatcggcgccaagtgcctccggagccagcgtggtggccatagacaacaaga

SEQ ID NO: 715466 - DNA, 96 bp, Homo sapiens
ccgcgggaagatggcggcgccgctcatccccctctcccagcaggacagaactgtaccgctctctttttggccagctccaccctcccgacgaaggcc

SEQ ID NO: 715467 - DNA, 100 bp, Homo sapiens
tggtgctggccacttgcttgggatcctttatcctggtcatcttctatttccaaagatgcctaaatcaaaggaacttgtttcttcaagctcttctggcagt

SEQ ID NO: 715468 - DNA, 100 bp, Homo sapiens
aagcaaacattcatatcccaacattcctgtgtcaattcgacggagctggatgaactcattcagcacaccaaatgaaaagctgttgggtcatttggtaaag

SEQ ID NO: 715469 - DNA, 75 bp, Homo sapiens
tggagacttcacactttccgttagcaggaggatgcattagcacaacaggcctttgaagaggctcggagaaggaca

SEQ ID NO: 715470 - DNA, 79 bp, Homo sapiens
ctcgggatggtgccacaggaggctgtgcgggccccgctccgcttcgaatgggtgctggagaatctggtaaaagcaccat

SEQ ID NO: 715471 - DNA, 82 bp, Homo sapiens
atgaaaaagaagaaaatgaaggaaagcgaggctgacagcgagaccttgtatcctacttatggactcactccgaggcccttct

SEQ ID NO: 715472 - DNA, 74 bp, Homo sapiens
gaaggggacatcatctgtgtgttctcacagacactttgccaccatcaccttgaccttcatcgacaagaacggag

SEQ ID NO: 715473 - DNA, 100 bp, Homo sapiens
gagaattcccggccgctgcaagggggtcatctagtagcaggcacccaaatcaggcaactcccaagaaaagtggtttaaagaatggccagatgaagaataa

SEQ ID NO: 715474 - DNA, 100 bp, Homo sapiens
atcaaaacccagcagagtgcaagcagcagtgaagcaggattgccagccatttttggagtctcctttggtatccgcaaactctacatgaaaagtctgttaa

SEQ ID NO: 715475 - DNA, 130 bp, Homo sapiens
aattgttcagttgcaaaaagaaactggagccaccatcaagctgtctaagtccaaagatttttacccagacatatctgaagagatggattaagaatgctttggattaaggattgtggagcacatttcaatc

SEQ ID NO: 715476 - DNA, 100 bp, Homo sapiens
ctgaagaggagggatcagctaatatgtatgcaatacatcaggattttgcaggttaattcctcacacacgttcaccaggtacttggacaatatattttgaa

SEQ ID NO: 715477 - DNA, 100 bp, Homo sapiens
cggcggcgggggccacggcggcaagggcgcgcccgggccgggcggcgcgctgcccacttgcccagcctgccacaagcttcgcctcaacagcatcaagaag

SEQ ID NO: 715478 - DNA, 92 bp, Homo sapiens
ccccgaggaggaagacgaatcgttaaacatctgaaagggtcaggttttaaaatcaaagatgggaaaatcggagaaaattgcccttccccatg

SEQ ID NO: 715479 - DNA, 100 bp, Homo sapiens
ttactcactctctcgggattattgccgattgccagggtgctgaccgtgggagccgaccgagggagcatgataaagatccagaaagcttttttaaggtatt

SEQ ID NO: 715480 - DNA, 100 bp, Homo sapiens
ggaaaatggggtgaggaagattttgaagacaatcgtcacttatacaggttggccgttgtccaatgtgttgctgttatctggaactcctacctgtcctgga

SEQ ID NO: 715481 - DNA, 107 bp, Homo sapiens
ggatgcttccacagatgtacctgaaaagtcgtcactctttcaccaaggttggaaagggcaaagaaattacaagaacagcgagaaaaggaaatggttgaaaaacaaaa

SEQ ID NO: 715482 - DNA, 80 bp, Homo sapiens
taagaacgcattgccgccggtcctgaccaccgtgaacggacagtcccccccagatgaaggatttgggggcagagcacttg

SEQ ID NO: 715483 - DNA, 95 bp, Homo sapiens
tgaagccaccccggtcaaaggatgctgagtccggagcgcctagccctaccggactacgagtatctgggcactgtggttggcgtggacgagagcac

SEQ ID NO: 715484 - DNA, 88 bp, Homo sapiens
tcaaggctgtcacacatcaagttaaatttggtcaacaaaatccacgtcagcctggatttgtggtatcatttctatcactgtcattagc

SEQ ID NO: 715485 - DNA, 75 bp, Homo sapiens
cagcctacgaggtctgctatggcctggtcaacgatgacaaccgaaaatgtttcaacgtgcgcaagagttgcggtg

SEQ ID NO: 715486 - DNA, 82 bp, Homo sapiens
agagaatgatccctttgttagaccaaatttaccacaactagtgcttcatgttggcggaaccattgtattgttgcttagtgaa

SEQ ID NO: 715487 - DNA, 82 bp, Homo sapiens
tttcatgcagtgacatgttgataaaaaatgatgtgtactaatggtcacttgatgtgcgctggctgttttatccacctactag

SEQ ID NO: 715488 - DNA, 82 bp, Homo sapiens
ctttacccgactctttgggccgttatctcacaacctgagagccagaagcaacaaagatgccaaggatccaacgaccaagaac

SEQ ID NO: 715489 - DNA, 98 bp, Homo sapiens
cggaacaggctaccaagtccgtgctgtttgtgtgtctgggtccctatcactgttcagtccatcgtcattcagtctctaaataaaacgctcacccgacg

SEQ ID NO: 715490 - DNA, 90 bp, Homo sapiens
gtccggaccggagactttggggcctaactagtacacagctgtcttctgggcacactgtggctgtgatgggcattgacttcacactcagat

SEQ ID NO: 715491 - DNA, 100 bp, Homo sapiens
gagattcttctggcaaaagaccttggctcagactttcagaacccagcaagcgtagtcgaggagccctggggtccatcgccctcctgggcttggtgggcac

SEQ ID NO: 715492 - DNA, 90 bp, Homo sapiens
gctttgaggagattcatgcaaacgtttgtccttgctcctgagggcgaggaggcttccgaggaggcagaggaggaggaggtgaccacaagc

SEQ ID NO: 715493 - DNA, 74 bp, Homo sapiens
tctttctggcctggaggctatccagcgaaagtcgtggaaggcgctgacgctgtcccagaagaggccgtacgtgg

SEQ ID NO: 715494 - DNA, 99 bp, Homo sapiens
caggactgcgccgcgtcttcctcaaggttagctttatacgtctacgaatatttactgcacgtaggagcacagaaatctgcacagaccttcttatcggag

SEQ ID NO: 715495 - DNA, 76 bp, Homo sapiens
ctcccaagtagctgggatcacaggcagtcaccactgtgcccagatagcctaatttttttaagaaagacatcttctc

SEQ ID NO: 715496 - DNA, 73 bp, Homo sapiens
gacgccatcaggctcaacgaggaactcaaagtggatgaggaaaggcgaccattgacgaggtggagacggacgt

SEQ ID NO: 715497 - DNA, 50 bp, Homo sapiens
cccccgaacgcggcctcgcacagtgcccactgttgatgtctttcagattt

SEQ ID NO: 715498 - DNA, 83 bp, Homo sapiens
ctgtgggcacagacaaggagctcagtgacctcctggacttcagcatgttgaagaagctggatctggcagctgcggcagcacac

SEQ ID NO: 715499 - DNA, 75 bp, Homo sapiens
tgcacactgatgatgtgcctccaggacaaaggactggggtacacatctttctggaatgactgcatatcatcaggc

SEQ ID NO: 715500 - DNA, 83 bp, Homo sapiens
ctgactttggcctggccagaatctacagctaccagatggcacttacacccgtgctgaaggaagaggatcaccttccaagacaa

SEQ ID NO: 715501 - DNA, 75 bp, Homo sapiens
tggatcccgccgggaggtactttgctggaatgggtaccacagaccatgtcatcgtcctggcgtccacgaaccgag

SEQ ID NO: 715502 - DNA, 88 bp, Homo sapiens
atgaagtggtttcaaaggctgtttggagtcatctccatttaaggccctgaaagccattatcgccatggatacagcaggaatgatcctg

SEQ ID NO: 715503 - DNA, 75 bp, Homo sapiens
gcaagtgggagcactggaagtacgggcagttgcagtgttggagctaaaatttttgggaacgttacagatgctacc

SEQ ID NO: 715504 - DNA, 100 bp, Homo sapiens
ctgctcatcacccacctgggcctgccccagtggcaatatgccttcaccagctatggcattagcccacaggccaagagtcttgctctgtcacccaggctgg

SEQ ID NO: 715505 - DNA, 95 bp, Homo sapiens
cgacgctatggcgcactggagtaccctgttcctggcagtttgccaagatggtggataagaatatttacatcattcaaggggagattaacattgtg

SEQ ID NO: 715506 - DNA, 87 bp, Homo sapiens
cgagagcgtgaccgagagcgcgaatatcgtcatcgttagaagctctacattaatcatactcctccaccactgtccaagagtaaggag

SEQ ID NO: 715507 - DNA, 90 bp, Homo sapiens
ctgaaggagcaggaaaaccggaagggcctgatagccgccatctgtgcagatccccgtcgaggtcaagatcaagatccaggtctatttcac

SEQ ID NO: 715508 - DNA, 100 bp, Homo sapiens
cctgcgtggccgtcaccagcgcccagccacagaacatgagccggcgggcccagggggaggaaaccatcaacacaggcccttttgtgatgcgttccacgtg

SEQ ID NO: 715509 - DNA, 100 bp, Homo sapiens
aaattaggaagactgaaaggcaaggccatttaaatgttgatgatcaggagaaacagtccaagaagaaacctcgcctcttctgtgacatttgtgactgctt

SEQ ID NO: 715510 - DNA, 75 bp, Homo sapiens
gtgcgctgcagcgtctccttcccgttctccaggatttagagggaaagatcattgtagatgaactgaagcaagaag

SEQ ID NO: 715511 - DNA, 98 bp, Homo sapiens
gagaggggtgggcagtgctggatggccagacagggtcaccttccggggccaatacacaggatggccggctcctgccagagttcaacatggcggagcct

SEQ ID NO: 715512 - DNA, 83 bp, Homo sapiens
ctggaactgggacttcacctccgcgctcttcttcgccagcaccgtgctctccaccacaggaggagagacttcagcatgcaaac

SEQ ID NO: 715513 - DNA, 83 bp, Homo sapiens
ggagattttgatgtggatgatgccaaagttttattagcggatgagaacatcccagcgaagatcctttcttataaccgtgccaa

SEQ ID NO: 715514 - DNA, 82 bp, Homo sapiens
ctcagagcagctgccgcagcccgagacaatgcagatcttcgtgaagactctgactggtaagaccatcaccctcgaggttgag

SEQ ID NO: 715515 - DNA, 96 bp, Homo sapiens
caagaggacactgaagatcacagactagccaaagccttggctggacagtcagtacgaatctgtaaaggccccagggctgtgttttcccgcatcttg

SEQ ID NO: 715516 - DNA, 100 bp, Homo sapiens
ccctgagccatgcccatcgcagccgccccgaaggagccaggttcctaaatatttgtcacagcaatgggctaaagcctctggaagaggtgaagttgggaaa

SEQ ID NO: 715517 - DNA, 90 bp, Homo sapiens
gagatggaaacctcatagcagctgcctgccagaatggaagcatacagatctgggaccgaaatttgacttctaaatgcccagccgaaagtg

SEQ ID NO: 715518 - DNA, 75 bp, Homo sapiens
ctgcagagctgtggcttaccaggtggaagatggtatcttgaagttgaggaatgctggcaatgaacaagacttagg

SEQ ID NO: 715519 - DNA, 75 bp, Homo sapiens
gtgcagaagtcattgatacacctgtatttgaactaaagactctgatgccagtatggactggagatgatgggagcc

SEQ ID NO: 715520 - DNA, 90 bp, Homo sapiens
ttcactatgatagaattacttctctacaggatctcaaagatttcatgagacaagctggggaagtaacgtttgcggatgcacaccgaccta

SEQ ID NO: 715521 - DNA, 83 bp, Homo sapiens
tctcccgactatttggcaagaagcagatgcgcattttgatggacaatcattccggttcagtatgagacaagaatggcctgcgg

SEQ ID NO: 715522 - DNA, 92 bp, Homo sapiens
ggcgacggccacaggggcggcgacggcgcagtgcgaagcgaaacaggtatctggtgacccatctcatgggggcagatctgaacaacattgtg

SEQ ID NO: 715523 - DNA, 99 bp, Homo sapiens
attccaagtaactcttatttggatattttcattgtctccgaattttagagctgaaaagtgccttagagatcatctagttcaacctctccgttcaaatgg

SEQ ID NO: 715524 - DNA, 75 bp, Homo sapiens
ggggaggggagtggaaaggctctcagtgaaaaagttaattcatctgcctacactatttacatgggaaaagataaa

SEQ ID NO: 715525 - DNA, 75 bp, Homo sapiens
gtctattcctggattcaatgtcatccagagcccagagcaggatcagggagcttccaaggcatttgataccttttt

SEQ ID NO: 715526 - DNA, 74 bp, Homo sapiens
cttccgtgctgtcctacgaaagcctggtccacgccgtggccggagccgtgatgcagacagacatgctgaactat

SEQ ID NO: 715527 - DNA, 100 bp, Homo sapiens
ctccatccgtgtctgggacctggaagctgccaaaagagtggaggcagcacagacagtgaggacgaagaagaggaggacgaggaggaggaggaagacgagg

SEQ ID NO: 715528 - DNA, 75 bp, Homo sapiens
ggtgattgctgcggtgtttgaccgagacataaactgcagaagagcagcctctcgggctgacgcacgaggcacaca

SEQ ID NO: 715529 - DNA, 97 bp, Homo sapiens
ctgctgttgcttctgggccagaggaagagaatgaggggatggagaagtttatgtttgggatgtgaactcaaggaagtgccttaacagatttgttgat

SEQ ID NO: 715530 - DNA, 100 bp, Homo sapiens
cgtcgcctccttgcccgtgaccgtcgctagaactcagttgtgcgttgcggccagtcgccactgctatcgctccttcgatatcctaaaaaaatccaagccg

SEQ ID NO: 715531 - DNA, 82 bp, Homo sapiens
tgaagagcgacaagccgctggcagccgcggatctcaccgccgctcaggtgtgtgttttaatagaaaagttgtcactttccaa

SEQ ID NO: 715532 - DNA, 99 bp, Homo sapiens
caagttttcacttatcatctattccaccgtgttctggccacaatggtgcgcatgaatgtcctggcagatgctctcaagagtatcaacaatgccgaaaag

SEQ ID NO: 715533 - DNA, 75 bp, Homo sapiens
agagctcatctggaattttgccgatttcatgactaaccagtgtgaagatgtctggaggtgtccaggctgtgggga

SEQ ID NO: 715534 - DNA, 90 bp, Homo sapiens
ggctattgtgaataatgctgcagtgaacatgggagtacatacatctgtttgagaaagcatcatcattcaccagttacgaatgaactccag

SEQ ID NO: 715535 - DNA, 100 bp, Homo sapiens
ctggagaggtttctacaggaacacgaggaaactccacggagaatgctggagaaccagactcctggagcagtttatcctatgaaataccgtatggagactg

SEQ ID NO: 715536 - DNA, 50 bp, Homo sapiens
caaaagcgaaatgggcacaccacagagagaagagagacccccaaccctta

SEQ ID NO: 715537 - DNA, 100 bp, Homo sapiens
tgagcgaattgtggcagagtgtaatgctgtccgccaggccctgcaggacctgctttcggagtacatgggcaatggcggcaccttcctacttctgcccagc

SEQ ID NO: 715538 - DNA, 75 bp, Homo sapiens
cttaccagctttgacaatacaggaaatgtttaataagaagatctacttggacattattcacacatacatggaagt

SEQ ID NO: 715539 - DNA, 90 bp, Homo sapiens
gaaacgtgataagaagcacctggatgagacatttgctacagcatcccacattaagtcaacgttctgaatgcagtgatggggaatggtctg

SEQ ID NO: 715540 - DNA, 75 bp, Homo sapiens
gctgtagctgccctttccgtttccagggttccgaccagcatgcaatgatgctacctgttctgacccatcatatcc

SEQ ID NO: 715541 - DNA, 82 bp, Homo sapiens
ggacatcacggacatccagaaggctgaagctcagggccctgtctgctctgtggactcaacagtttgtggcaagacaagctca

SEQ ID NO: 715542 - DNA, 108 bp, Homo sapiens
agtccccagtgagggtgtacaaatacccctttgaattaattatggctgttttgaacgaagaatgtgatcagaactggtacaaggcagagcttaatggaaaagacggct

SEQ ID NO: 715543 - DNA, 82 bp, Homo sapiens
accgcgcgcagggcctgcagcgggagctggacggcgagcgcgagcggcgcgagaaagctatgactttgcagccgtcctggag

SEQ ID NO: 715544 - DNA, 75 bp, Homo sapiens
atcatatcagacctgcgcagccgggatgttttagaagaatgtatgtctcttcccaagctatcttcttattctgga

SEQ ID NO: 715545 - DNA, 100 bp, Homo sapiens
ttgctgtccagccagctgtaaagccttgggctcccttgcaggattcagaagtgtatttagcatctctagtggctgcttcaacccccaactccactgctgg

SEQ ID NO: 715546 - DNA, 51 bp, Homo sapiens
gtgcagggtaacatggcggatgcggaagcatgttggcagataaattgaaca

SEQ ID NO: 715547 - DNA, 75 bp, Homo sapiens
cacgcccctcaccccccgagagccggtgtgggacatccagaacctgcagaaggtgaacaccatccgggcccatga

SEQ ID NO: 715548 - DNA, 82 bp, Homo sapiens
ccttgacagaaatttacaaatacatcgtaaaatattttgatgagaattctccactttaccaatacttacaggatctgggaca

SEQ ID NO: 715549 - DNA, 75 bp, Homo sapiens
ggagaatccgcatctggggcacggaggagaggagcaagcaagggagctgtacaggagactaagggaaaaacctcg

SEQ ID NO: 715550 - DNA, 83 bp, Homo sapiens
ctcgactccaaagagagcgtcccagcttctttgaaagagggcagggctgaagaagatgcagagcagcctgaagctggtggact

SEQ ID NO: 715551 - DNA, 75 bp, Homo sapiens
caattctgaattcttctgcagtccctcacagctcagccttgaaacccactcttgatcaagacttcaaatcccaaa

SEQ ID NO: 715552 - DNA, 52 bp, Homo sapiens
gccctgcgctacgatgccatgttcacagccatgaatgaaccacagtgcttct

SEQ ID NO: 715553 - DNA, 96 bp, Homo sapiens
aaaaggaatgaccctagccagactcagggatcaaagagcaaacagattcagtggcctgcattgtaccagtactggaacaccaaggctcggcgcaac

SEQ ID NO: 715554 - DNA, 100 bp, Homo sapiens
gaccctgacagcaaacccttcaggctcggtggaagccctgcatgaggttctacagctgcctgctgccctgcgcgcctgcccgcccctccgcaaggccttg

SEQ ID NO: 715555 - DNA, 83 bp, Homo sapiens
ctacaagggatcaagatcagctccaggcctgggaaagtgaaggaaatcccctcagaatggcacattgaactgatgttagacag

SEQ ID NO: 715556 - DNA, 75 bp, Homo sapiens
cagaccctctcctttccctttgagaccgtgaagagaaagatgcagggtgaaggttgccgaactgtccccctggct

SEQ ID NO: 715557 - DNA, 100 bp, Homo sapiens
gcaagagtcaccttctcaactgttgtcctcatgatgtcctttctggaactagttcacccagggcatgatcttacctacaatgaatggagagtcagtagac

SEQ ID NO: 715558 - DNA, 100 bp, Homo sapiens
gaataatttctttctcgctgatcgcctaacttctactgacgaagcttggaagttgcagaaggctggaggctcccaggtgattttcacaaatcctttagaa

SEQ ID NO: 715559 - DNA, 90 bp, Homo sapiens
ccgactcttcctggtgaagcatctgatgcacgttccatccggcgctcagctgggcttgagctgcaggacaagttcgagcatcttaaaatg

SEQ ID NO: 715560 - DNA, 82 bp, Homo sapiens
cgactgaatgagatcaaaggtcacctggaaattgccttattggaaaaacatttcttacacttcccaagtaagaagcggaaga

SEQ ID NO: 715561 - DNA, 98 bp, Homo sapiens
ccgccgccaccgccgcctccgccgctgcctcaggagcggaacaacgtcggcgagcggggaagcgttgttgacgaccatggacatcatccacgatggat

SEQ ID NO: 715562 - DNA, 78 bp, Homo sapiens
gctaggggaagagactgggccttagcaggggccagtgtcattcaaagatgtggctgtggatttcacccaggaggagtg

SEQ ID NO: 715563 - DNA, 82 bp, Homo sapiens
caagtttgcagatcgggagcgcaaggtcgccctcaaggccatgatcaaaacgcagaagctcctcctggggtagagacagatc

SEQ ID NO: 715564 - DNA, 74 bp, Homo sapiens
aaatacaaaaggaagccaccgcccagaagatccacatgaagaccatgcccgccgccatgttcaggctcctcacg

SEQ ID NO: 715565 - DNA, 105 bp, Homo sapiens
gcgtgtgcctgtgaatgacagcttttgtgagaaaattttgccgtggttggacaaatcagtagatttcattgaaactaattctgaagcaagcccttatagttgtgc

SEQ ID NO: 715566 - DNA, 82 bp, Homo sapiens
tggccgagtacctcaccgtggccatgctcatgattggggtctttggctgcaccctccaggttaagaatgtctgaggggtcag

SEQ ID NO: 715567 - DNA, 90 bp, Homo sapiens
ggaaaatgatcagaaaaagaaagaagccaaagagaaaggtacctgggttcaactaaagcgccaggttggaaaagagactgttcaaaccac

SEQ ID NO: 715568 - DNA, 100 bp, Homo sapiens
ggcaggacgtgcccggccccgcgtcgtctggcgccgccgccgccagcgcggtactgaagatttaccccccaaaaaaaattgtcaatgagaaataaagcta

SEQ ID NO: 715569 - DNA, 75 bp, Homo sapiens
ccgcgttggggtgagaccctcacttcatccgtagccggatcgagctgggagatgtgacaccacacaatattaaac

SEQ ID NO: 715570 - DNA, 87 bp, Homo sapiens
tcttcatctgtatcctctgcagcatccttgatgataaaccagtaaatggagtgcatccgccccaacccttttccccctcgtctcctg

SEQ ID NO: 715571 - DNA, 100 bp, Homo sapiens
gatgaaacttccttcagtgaggccttgctgaagaggaatcaggacctggctcccaattctgctgaacaggacccgtcgccatgggccgtgtgatccgtgg

SEQ ID NO: 715572 - DNA, 100 bp, Homo sapiens
ctgatccaaacaagcttcattgttttcagctaacagtaaccccaggaaaaccaattctgtgtcctcggaggaccacagcccagttgggccccaggcgaaa

SEQ ID NO: 715573 - DNA, 100 bp, Homo sapiens
tcgctacacagcaatgcatcgagagtaatcaagtcagaggattatatgacttttatctgcctagagaagaactatggatctacaacatggagactggaag

SEQ ID NO: 715574 - DNA, 83 bp, Homo sapiens
cggaaccggcgccgcgcttgctgctggtaacagggccttgcctagtgggccttccttcccagtggctagaaagtttgaaatgg

SEQ ID NO: 715575 - DNA, 75 bp, Homo sapiens
ggccgcctggctccccatactagtcgccggcatatgttgaaacaattagactaaaagatgatgaaatactcaagg

SEQ ID NO: 715576 - DNA, 98 bp, Homo sapiens
aaaaattccaagaaaaggcacagatggagttgcaggactatgttcagaaaacctactcagaagacacctaccgtgagaaagatcagtctaaagaaaag

SEQ ID NO: 715577 - DNA, 74 bp, Homo sapiens
gaggggaaatggctgccgaaaacaagccggaagaacagtgcaaccctgaaactcgtcctgttgagaaaaaaata

SEQ ID NO: 715578 - DNA, 100 bp, Homo sapiens
ctgaaaatggagaaagagaatctcatacacctgtctctattcaggaagagataggttgatgacccaagcctccccaatgatgaaggcatcacggctcttc

SEQ ID NO: 715579 - DNA, 90 bp, Homo sapiens
gaggaccgggggtggaggtggtgcctctggcagtgacgaggacgaagtgtccgagctccagtgatccacaagctcagaaatacatcgcgg

SEQ ID NO: 715580 - DNA, 100 bp, Homo sapiens
ccatcatcctcgtgggcaacaagagcgacctggtgcgctctcgtgaggtctcggtggatgcttgtctttaaccgaactgtcacactgaaggaagacccag

SEQ ID NO: 715581 - DNA, 119 bp, Homo sapiens
ggtgctgagccggcgcggggtcggcgctgggctggaggcggcggagcgcgagagcttcgagcggactcagggtgtcaaattgagaaccaggtagatccccaccacctacagtaaaaagg

SEQ ID NO: 715582 - DNA, 83 bp, Homo sapiens
gcgaaccccgggcagcccgggaaatctccaagtcagaaaggttggatggcaagcatgtggtgtttggcaaagtgaaagaaggc

SEQ ID NO: 715583 - DNA, 90 bp, Homo sapiens
ctcgcctcccggccgagctgacgacttgtgtatgcggatacctgcttcagtaccatcaagttaaaagcagaagatgcttctggtagagag

SEQ ID NO: 715584 - DNA, 100 bp, Homo sapiens
gccgtgtggacccgtaaaataaaatgggcgcagacggggaagcggagccaacatgccagtggcccggagctgggtttgtcgcaaaacttatgtgaccccg

SEQ ID NO: 715585 - DNA, 100 bp, Homo sapiens
cgcagtttcgcagccagggcagccaggcagagctgcacccgctgccccagctcaaagggtaatactgaacaacctgtccaaactagcaagattggacttg

SEQ ID NO: 715586 - DNA, 75 bp, Homo sapiens
caccaaaccaatttctcctgcaaaccagggtatcagaggagcgagaacccgagcagcgccatgagcaacactacc

SEQ ID NO: 715587 - DNA, 100 bp, Homo sapiens
gagactggaataactgatgaggaacaagccattagcaggcacttaagtattcatcgaagagtcaccccagtagcggtgatcacagacatgaaaagatgcg

SEQ ID NO: 715588 - DNA, 75 bp, Homo sapiens
gtcttctagtactttaaatttagtggttgctggagcacctaaaagtcagattgggaactctaatgatccaggaca

SEQ ID NO: 715589 - DNA, 101 bp, Homo sapiens
tgacatcgcgacgctgctcaaaacctcgctccggaaaggggacacctgatggactagaggcttttaccagatttcttaaaactgaattcagtgaagaaaat

SEQ ID NO: 715590 - DNA, 99 bp, Homo sapiens
tgagaccaaaggaagatgagaactcttggtttaacttatttgtgattcatcagaacagtgtatgcagagaatatttccaaaatggtgggaagagaaaag

SEQ ID NO: 715591 - DNA, 100 bp, Homo sapiens
atttgacaaagaaaatgaagtttttcgagattggaattctcggatcccgagagatgtcagagacacagtaggcttcgtgacggagttatcagagacattg

SEQ ID NO: 715592 - DNA, 102 bp, Homo sapiens
gcaaaggctgctctgaagcgcacgacctccgactactttctccttcaagcttttcatgcaacacccaacacttataagcggaagaacacagaaacagctcta

SEQ ID NO: 715593 - DNA, 48 bp, Homo sapiens
aattagcccaagcagattcctcccagattggaataattggtggaacag

SEQ ID NO: 715594 - DNA, 83 bp, Homo sapiens
cacaaacggcgcacattggtatgatgtggaaggaaaggggactaccacaggtatctggcagaatttgccacaggaaacgacag

SEQ ID NO: 715595 - DNA, 74 bp, Homo sapiens
accagagacagaagcagatggattcgtccttttagggaggtggggaagacagggctccagctaccacaggacgg

SEQ ID NO: 715596 - DNA, 75 bp, Homo sapiens
tcaagactacaagagatcagtcattacaatagcaacttctgttgataagttgggggtccattgtagggggagaaa

SEQ ID NO: 715597 - DNA, 75 bp, Homo sapiens
atgtgaaaactctgttactgaagcgaaggacaaggttgcccttttgataggaaatatgaattaccgggagcaccc

SEQ ID NO: 715598 - DNA, 50 bp, Homo sapiens
cgcctgctttgattcattgaaagaggtgatttcctcacctttctgagaag

SEQ ID NO: 715599 - DNA, 100 bp, Homo sapiens
gcaaaggagacccaaggaacagtgccaagttagatgccgattacccacttcgagtcctttattgtggagatgctgagggttggaaaagcaaaagcagatg

SEQ ID NO: 715600 - DNA, 88 bp, Homo sapiens
gctaatgttccttcagctctgccatcactccctgccgggtcaggtgccggtggtggtgtgcacattgagccccggtatagacagttcc

SEQ ID NO: 715601 - DNA, 100 bp, Homo sapiens
aggagactctgtccttcatccgagacagcctggagaagagcgaccagctcactaagaacatggagcttggtttgatccgcaaacctgcctcgttcatgac

SEQ ID NO: 715602 - DNA, 75 bp, Homo sapiens
ctgaactctgatcttgacctagagtcatggccatgtctattgcgtctgcagacatggatttcaaccagctggagg

SEQ ID NO: 715603 - DNA, 50 bp, Homo sapiens
gggggagccccgggagccgcacggctcaaactgtccaggttgctgaagtt

SEQ ID NO: 715604 - DNA, 82 bp, Homo sapiens
aagatgtggactacaatggaaaccttccaggtccgtaaaagccctgggctcagccagagcagggcagaggatgacgggatga

SEQ ID NO: 715605 - DNA, 82 bp, Homo sapiens
aatacattgtgggcaagcaccattgttgcatcaggctgccaggatatcgcagatgaattcagagcacaggagattgatggac

SEQ ID NO: 715606 - DNA, 73 bp, Homo sapiens
gcacttggaatagtagcaggcggcggcggcggaacgccaggcaggtttttctatatgagtggagaagacagct

SEQ ID NO: 715607 - DNA, 75 bp, Homo sapiens
ggcaggatagatcttggttcagagcatcaaatgagacacagacgacatatctgaagagatggattaagaatgctt

SEQ ID NO: 715608 - DNA, 82 bp, Homo sapiens
tgcctttttggtggagaaaatggattggaggcgctcccactgccctcctagaccctcggagctaccacacgtatggccgcac

SEQ ID NO: 715609 - DNA, 49 bp, Homo sapiens
cggcagcatcctgaatcttaacctggggacaggcattagagcccaaaca

SEQ ID NO: 715610 - DNA, 98 bp, Homo sapiens
tcacaatgggcagggcctggggaatgcttttttatctcatattagtgcctgtgatggcatctttcatctaacacgctgaccaactgactgaagagcag

SEQ ID NO: 715611 - DNA, 100 bp, Homo sapiens
tgaagctcacgcacatctcagccacagccagcatggccgtcccactgctggagttcctgtccactctggattaatcgaattacagctgctagccaggaac

SEQ ID NO: 715612 - DNA, 83 bp, Homo sapiens
gccaaatggacgggactattaagcaaattgtggctactaatttgccccctgaagatcaagatggctctggggatgactctgac

SEQ ID NO: 715613 - DNA, 80 bp, Homo sapiens
cggggcagttcgggccggctgtcctggcgcgcaatggctgccatccggaagaaactggtgattgttggtgatggagcctg

SEQ ID NO: 715614 - DNA, 90 bp, Homo sapiens
atccttggcactacctatagtgagacttttggcaaagacatgcgcaaggttctggagacagcctgtatttcttggatcttggcttccttc

SEQ ID NO: 715615 - DNA, 100 bp, Homo sapiens
gccaagcctggaacatcacatctgtacgttgcaatctgtggatcagctacgagaattaaacaaccaccatgtcgagcaaaaaggcaaagaccaagaccac

SEQ ID NO: 715616 - DNA, 153 bp, Homo sapiens
ggcgtggtcagagcgagtctcggagaagatgtggtggcttccgtttgttggtggaggaggtggcaggcctcggcggtaaataccagctgtcccctacagtgaatatgccccaagatgacactgtcattatagaagatgacaggttgccagtgc

SEQ ID NO: 715617 - DNA, 100 bp, Homo sapiens
gtcgggctgactctgcttgtgttcgtggccacgctgctgatcgtcctgctgctgatggtgtgcggtaaatatgcagaggacatttttggagagctcttta

SEQ ID NO: 715618 - DNA, 75 bp, Homo sapiens
tgaaggatgaattctgtaggtggtgcatccaaaacagatcgaaagctgctttgcgtcgcagttggagcagcaccc

SEQ ID NO: 715619 - DNA, 75 bp, Homo sapiens
gtgccaccttctcctatgactggtttttcgttggaatatacgttgcacatttatggcgattctgagtgtgagggc

SEQ ID NO: 715620 - DNA, 97 bp, Homo sapiens
agaaccgtcccaaaatatggcaaagaaacctattctgagggccacgactgcttcccggtgctgttcacctatgacgccgccgcggggatgctgagct

SEQ ID NO: 715621 - DNA, 100 bp, Homo sapiens
tataccagaatgcagctactagctttcaaggaatagctattcagtcagacagaaccacttatcacgttttgcagtatctcctgaggaagtcagaattctg

SEQ ID NO: 715622 - DNA, 100 bp, Homo sapiens
cctcctccccaccaccaccatctccatcacccaccaacaacaccacaataatccacagccaagtggttcagcactgagtcatgcttgcttctgctacgca

SEQ ID NO: 715623 - DNA, 75 bp, Homo sapiens
tggcggcaagatgaatgaggagatctccagcgactctgagagcgagaggttttatgctgggggctcagagagaag

SEQ ID NO: 715624 - DNA, 111 bp, Homo sapiens
aaacgaagtcgtggaggtggcgaaacgaggaggagataacgcggccttgggctctggctaagtcctatcagccatggaaacaccattgctctcttcttccggtcactgttg

SEQ ID NO: 715625 - DNA, 96 bp, Homo sapiens
gggactcttggcctgtccctcacatccgatgcaccctttttgtcagattatcaggatgagggtggaaaaggattattcatacctgaaggagatatg

SEQ ID NO: 715626 - DNA, 100 bp, Homo sapiens
cagcaacgccagaatgggttcgaatggcctgtgcagatcgattcacagaaatgggtgtcttttatgaataatcaaaagcagcaaaagccaacgctatcag

SEQ ID NO: 715627 - DNA, 75 bp, Homo sapiens
tccacgctgacgcagagcggaaggaggctgcaagatcaaggccctgcgggccaagacaaacacctacatcaagac

SEQ ID NO: 715628 - DNA, 98 bp, Homo sapiens
acagaaatacgaaaggattagcgagaagaaaatgtccacccccatcgaagtgttgtgtaaaggctacccttggaaaaagaccttgatgaagttctgca

SEQ ID NO: 715629 - DNA, 100 bp, Homo sapiens
aacaacctcaagtttgcacgccacgtggagcccggcaatgccgccatccgggagaagctggcctgggccaaggagttacctggagggcagcctcctggcc

SEQ ID NO: 715630 - DNA, 90 bp, Homo sapiens
cagcaccttgatcttgaacttctcagcctccagaacggaggaatgccagctcctgagcaggcctcattggtggaggaggggcaaccacag

SEQ ID NO: 715631 - DNA, 75 bp, Homo sapiens
cggacatggtcatgagctttgtgaacctggttttccaagagataacttcaccaagatgtccagtgataggcaaag

SEQ ID NO: 715632 - DNA, 100 bp, Homo sapiens
cagaaagatggcatatcagatatgcaagtctgtgaattgttgactatagtcaatggggccaatggagccaagtgtatggaaacccacaacagtatggaca

SEQ ID NO: 715633 - DNA, 98 bp, Homo sapiens
atggttcagtggccctgtacgacatccggactggaaaatgtcagtgcaaggaaggtggcttccctcaggaactctggttgggtgtcagcgcggacgcc

SEQ ID NO: 715634 - DNA, 82 bp, Homo sapiens
tcttattgattcacttaagaaaactcagcctgagaatggtgacttaagagattaaaattaatttggttgctgttggttctga

SEQ ID NO: 715635 - DNA, 97 bp, Homo sapiens
agtaccagtacattaggaaacatgctagaattacctggaacttcatcatcatctacttcacaggaattgccatttttttgcacaaagatccaagaca

SEQ ID NO: 715636 - DNA, 100 bp, Homo sapiens
ttccagttggaattgaagaatattcccaagtccttcacccggattcatggggatacggtccagaaccagctggtggtccaaggagtggagctcccatctt

SEQ ID NO: 715637 - DNA, 100 bp, Homo sapiens
tatttatgaagatggacctgttgaactatcagtacttggacaagatgaacaacaatatcggcattctgtgctacgaagcctactcagcaggaagacaatg

SEQ ID NO: 715638 - DNA, 100 bp, Homo sapiens
ggagaagctgctgaatgactacctgaaccgcatctttcctcttctgaccatgcacccccagcagccaccggcagggcaatttgcatatttctccaaagaa

SEQ ID NO: 715639 - DNA, 96 bp, Homo sapiens
tcaagctgagtaagggggaaatgaaggaacttctgcacaaggagctgcccagctttgtggggaaaactacccctgagtgtggtcccacaggatatg

SEQ ID NO: 715640 - DNA, 100 bp, Homo sapiens
ccagcatcaaaattactgcagccaggtgataaaattattcaggttgatactgcctctccaagcccaatggaaacatctggatgtgcccctgcagaagaag

SEQ ID NO: 715641 - DNA, 85 bp, Homo sapiens
cttccccggacgggttgagtgctcctgcttaggaagcagttcaggtacttttgaagcattctgcagatgttaatgctcgagacaa

SEQ ID NO: 715642 - DNA, 83 bp, Homo sapiens
ctcttcctcctccaccgagtcgtgctctcgccccaacccgcgcgccaggaggataagatcaatgccctcattaaagcagccgg

SEQ ID NO: 715643 - DNA, 98 bp, Homo sapiens
gtggacacctgtgtcagcatgtgggacctggttctctccatcgccttgtctgtggggtgcactggtggaacctgaaaatgctgcagtgccggagctgc

SEQ ID NO: 715644 - DNA, 76 bp, Homo sapiens
ttgcaacctgctactggacgctggagaagtttgttccaagatgaagattcatgcagtgattgtagctaccgtgata

SEQ ID NO: 715645 - DNA, 75 bp, Homo sapiens
ggacagttgtttggtgttttgcttcaggttatagatggagagacctataaagatatcagttttagagaatgtggc

SEQ ID NO: 715646 - DNA, 83 bp, Homo sapiens
gtgaacgccagttggattgcagttcaggttcctcatgagagtgctggactcctacggggatgactaccgggccagccagttca

SEQ ID NO: 715647 - DNA, 83 bp, Homo sapiens
cgctgaacggcttgaggctccagtcaaaaaccattaagatacatcagcccacagcaaggcgggctccagcagcccggagccat

SEQ ID NO: 715648 - DNA, 100 bp, Homo sapiens
taggatattgctgttgtcccaggacagaaaccatgtctgggaggggctgaacgtggtgaagacaggccgagtgatgcttggggagaccaatccagcagat

SEQ ID NO: 715649 - DNA, 100 bp, Homo sapiens
tgagggaacaaacacttctggatgcatcctacaaaattggacagctgtacatgatcagcaaacacagccatgaacagagtgaccggggagaaggggtgga

SEQ ID NO: 715650 - DNA, 80 bp, Homo sapiens
ggatcttgctcacactctttcaagagaagcttccttggtgtcagcggtgcccactgtgctggccatgaagaatggggacg

SEQ ID NO: 715651 - DNA, 98 bp, Homo sapiens
ccttggaggaggaggaggcgctggaccctctgggcattatgcgcctactttggggataaaggattatttggtcttctggatttggaggcaatcagcgg

SEQ ID NO: 715652 - DNA, 100 bp, Homo sapiens
cacctgtgcgggatggaacaaaagttgggccatatggtgctcttcccagtctggttcctgtacagtctgctcatgaagctgttccagcgctccacgccag

SEQ ID NO: 715653 - DNA, 98 bp, Homo sapiens
gccaaccggctggacctgttcgagatcagccagccgaccgagactacatgaggaaataattgacttttataacttcatgtccccttgtcctgaagaag

SEQ ID NO: 715654 - DNA, 80 bp, Homo sapiens
agcacctcatcccctggatgggggaccacaagatcctcatcgacaggtaaaagtacacctgtaagccagcttggttccgc

SEQ ID NO: 715655 - DNA, 75 bp, Homo sapiens
cagtagtgaaggcaacagtctgcccacctgtggacaccagttggtgttggtattaggagatctgcacatcccaca

SEQ ID NO: 715656 - DNA, 100 bp, Homo sapiens
tttttccagctcaactacctccaacacctatcactcagtcggtgctatgatataatacctgaaactttactgcccggcttgggacattgttcacttcccc

SEQ ID NO: 715657 - DNA, 50 bp, Homo sapiens
ccgggctgccccgcaggatcatcaagggacatgagagatggctttagaag

SEQ ID NO: 715658 - DNA, 97 bp, Homo sapiens
ggagctggtcgcagatcctgagacccggacagtggcagtgaaacagcagcagtgttgtactgctacttctataaacggacagccgtaagactaggcg

SEQ ID NO: 715659 - DNA, 83 bp, Homo sapiens
ggcaccgcggatctggggccgtcctcaggtgaaaacttttggcccgtttggaagcggcagccaggacaacctgactatgtaca

SEQ ID NO: 715660 - DNA, 85 bp, Homo sapiens
ccggacccgggaagaactggtgagccaagggatcatgccgcggtgagaactctgtctcagtcgacgggaagtgcagtgactccac

SEQ ID NO: 715661 - DNA, 83 bp, Homo sapiens
tgcagcccggtttgctttgcttcgattggaggaaggacctccacacactaaaaactggagaccggaacatgaacattttgcag

SEQ ID NO: 715662 - DNA, 82 bp, Homo sapiens
ccggagaatcgcgaggcagagcgggagcgcgcagccaggctccatctactctttgaagcttctgcccagcttgcattgtttc

SEQ ID NO: 715663 - DNA, 100 bp, Homo sapiens
gaaagagagaataaccgttgtaacatcagtcacagcattacccggcagtgtcacctgctcctggatgtcttcaactccaccgagcatgagctgaccgtca

SEQ ID NO: 715664 - DNA, 100 bp, Homo sapiens
caaaacctggaccttctggattacaggccaaattagcaaatgacatggaagccattcctgtcaaacagtttgtcaaacacatcggtgagctctattctaa

SEQ ID NO: 715665 - DNA, 75 bp, Homo sapiens
tgtcccttatggctcagaggagtacttgcagctgagatctaagctttttacctgcacctactcagctatctcagg

SEQ ID NO: 715666 - DNA, 75 bp, Homo sapiens
gagtcctccgtgtcctcccccgcatgacccccttggcccacctgccgtttgctgtcattggcagcacagaagaac

SEQ ID NO: 715667 - DNA, 106 bp, Homo sapiens
ctgcattttgggaaactcgactttggagaaaccaccgtgctggaccgcttttacaatgcagtgcctacaccaactaatgttacaattgaatcctataacatgaacc

SEQ ID NO: 715668 - DNA, 83 bp, Homo sapiens
ccagcctcagtactctttgccgtacccaccggagcctggcgcagcctccctctattaccagggctctctttacctatgaaggc

SEQ ID NO: 715669 - DNA, 51 bp, Homo sapiens
ggccgcgtgtcccaaaggccaggtggccccccacctcctacagccagccag

SEQ ID NO: 715670 - DNA, 101 bp, Homo sapiens
aggggtcttcggctagcaagttcaccagcatccctgcagccttctggtataccatcgtcaccatgacaacactagggcagtatttggcagtcgtattcaga

SEQ ID NO: 715671 - DNA, 87 bp, Homo sapiens
ggcctggctttctgcgccatcctgcaccgccaccggcccgacctcatgggtagaagataaggagtcttggcatgggaagcccctccc

SEQ ID NO: 715672 - DNA, 106 bp, Homo sapiens
gttaaacccaggaagctttggatcagacttttgtgttgcagttcgggtgtggacactgccagcggctgcagccgacttggaatgacctgggagacaaatacaacag

SEQ ID NO: 715673 - DNA, 83 bp, Homo sapiens
ctggagaatgacaagagcttccgcggtgtcattctgacctcggatgagacctgcacgcagtggctcacagcagcacgatttgt

SEQ ID NO: 715674 - DNA, 104 bp, Homo sapiens
gaagatccttgacagccaagagagagcgttctgggacgtgcacaggcccgtgatcaccttctacgaggaccgagactttcagggtcgctgctacaattgcatca

SEQ ID NO: 715675 - DNA, 97 bp, Homo sapiens
tggagaaattgtatacactggaacagaatcaacccagaacggatagctccctcctggaaaagagttatggtgaatggttgcatggatttgaaaaaaa

SEQ ID NO: 715676 - DNA, 126 bp, Homo sapiens
gaggagccatgaggcgccagcctgcgaaggtggcggcgctgctgctcgggctgctcttggagcaaattcaacacccaacagcttccttaatagcaaaggtagcaacagcccaggatgatataactg

SEQ ID NO: 715677 - DNA, 98 bp, Homo sapiens
tccttccgctttttttggatccagaatgtcagtcttaagtttcagcaacaccagcaaacagtgggctccataatcgtgggaattgattacgactgccg

SEQ ID NO: 715678 - DNA, 101 bp, Homo sapiens
cccagccgaccttgagctccaggagttcgtctcttacgtctgcggaagtgcagctgcctcagttcttagcgcagcaacaacgaactgtctacagactgatg

SEQ ID NO: 715679 - DNA, 100 bp, Homo sapiens
ggcctaccgaggcattgtaattattctggagttccgatgccctggaagcctgggagaatggggagagatcccggaaaaggagagcagtgctcacccaaaa

SEQ ID NO: 715680 - DNA, 101 bp, Homo sapiens
caatgcatctgggaagctacctgcattaagtcaggactgagaccaaatgcttcatctgtgggataggcaatgattacttcgacacagtgccacatggcttt

SEQ ID NO: 715681 - DNA, 80 bp, Homo sapiens
tctggctgtccagagttgcttcctgttgacgacagctctcctcagggtttggaaatcccttgtctccaggttgctgggat

SEQ ID NO: 715682 - DNA, 83 bp, Homo sapiens
gttcagcagtgacatctacaggcagctgctctataagccctaaaggacagcaaggtggtggagatcgttgatgagaaagttcg

SEQ ID NO: 715683 - DNA, 100 bp, Homo sapiens
tggctctggatctccgattgtcaagttctcgagcagcttctattaggtgacctcacagtgactcaagctaccacttactgttgattgtgacgaaatgcca

SEQ ID NO: 715684 - DNA, 87 bp, Homo sapiens
gcctggaatttgattaactcattcaaggttacccagttgctggagagatttaccagcatgagaattaagaaggagaaggaaaagccc

SEQ ID NO: 715685 - DNA, 100 bp, Homo sapiens
tgctctcacccacgaaaggcatctgtcccaagcaggagaacattgcaggagtgaaacctcggtccggctgggctattgatccctttggacactcaccaac

SEQ ID NO: 715686 - DNA, 82 bp, Homo sapiens
tggaagacgcgctcctgcgccgccctgggcgctgcctatggcacagccaagagcggtaccggcattgcggccatgtctgtca

SEQ ID NO: 715687 - DNA, 87 bp, Homo sapiens
aaacttcaagccaaacatcaagcagaatgtgatttgcttgaagatatgagtagaacttcatggaggaacacggagtgacccaaaccg

SEQ ID NO: 715688 - DNA, 95 bp, Homo sapiens
gatgatatctgtgtggcaaaagctgttgaatgccctccacctcggaccacagccaggctccttgacaaggttgccaaggaaagtgtactgcagtt

SEQ ID NO: 715689 - DNA, 75 bp, Homo sapiens
cgatttaaaacttcgccagaatttggggcaatggcggcttcctgtgttctactgcacactgggcagaagatgcct

SEQ ID NO: 715690 - DNA, 51 bp, Homo sapiens
actcggatttctctatctgatagaggaaggctgtgggatgacaccaaatgc

SEQ ID NO: 715691 - DNA, 100 bp, Homo sapiens
accgaacccagcattttcggcaaccgctgctggcagttttgccaggtgtttgttaccttgttaattggccttggtcctcacagctccaaaaagaaacagg

SEQ ID NO: 715692 - DNA, 75 bp, Homo sapiens
aactgcgcacagaaggagatggaaaggtgtctgtgaggagacgtctggagcttatgagaaaacagatactgatgg

SEQ ID NO: 715693 - DNA, 75 bp, Homo sapiens
cagcctggtcaatttgtacctgcaggcctcctacacctacctctctctgatgcagagcaaagcggcagtccccgg

SEQ ID NO: 715694 - DNA, 100 bp, Homo sapiens
gtagcagaagcaatcactcagtttcttcctaactgtgatccagatgatcctcacagaaacccggcgagtgaatctacccagagctgaagcttcctttgca

SEQ ID NO: 715695 - DNA, 74 bp, Homo sapiens
gggcttcctcactcgtggctttccgaaggctgctgatttgaagaccttgcttctcatcacccactggattatgc

SEQ ID NO: 715696 - DNA, 105 bp, Homo sapiens
cctgggcggggggcgcgcggccgggccccggtgtctgggaccccaactgggacaggtgaaatgacaatggatgctctgttggctcgattgaaacttctgaatcca

SEQ ID NO: 715697 - DNA, 90 bp, Homo sapiens
ctgctcaatggagagaaggaaagtcaatcgtaggaagaacacagtacagatgtgttcagagcaacattgttttgttgacacaagcattta

SEQ ID NO: 715698 - DNA, 100 bp, Homo sapiens
acgtggatcgttgttttgaaacgtgtggaaaaagaagctctcggcggccgtggaggtgggcgacgcggctgaggtgaagcgctgcaagaacatggaggtg

SEQ ID NO: 715699 - DNA, 90 bp, Homo sapiens
gcagctgccaggaacgagggtagcagatcttggccctgattgcattcatctgcatagagaccatcatggcatgctccccgtgtgaaggcc

SEQ ID NO: 715700 - DNA, 83 bp, Homo sapiens
gttgtcgtggccggagcggcccgcgcctgggctgccggcacttcgcggcagttcctgtgccttaagaacattagaaccttcct

SEQ ID NO: 715701 - DNA, 124 bp, Homo sapiens
gaaattgctgaagaactcgcaagctcctacgaaagaaagctcatcgaggaggcctatgagacacgtgaagatatcatcaggctggtgggggagctggtgagcatcgttggggctgtgatcatcc

SEQ ID NO: 715702 - DNA, 100 bp, Homo sapiens
aaggaatccaccttcttacgctatggcaggccttggacaagattcgctatgagagcctgacagacccttcgaagttggacagtggtaaagagctgaaaat

SEQ ID NO: 715703 - DNA, 96 bp, Homo sapiens
ggcggatggccccaggtgtaagcgcagaaagcaggcgaacccgcggcgcaataacgtggcctggtttgctttcgaccctggctcggcgcactcgga

SEQ ID NO: 715704 - DNA, 83 bp, Homo sapiens
gcaagcgacagcgcctcacgcacctgagccccgaggagaaggcgctgaggagatgcacccactgggcctatgtaataacaatg

SEQ ID NO: 715705 - DNA, 75 bp, Homo sapiens
cgcggtgcgcaagcgcaaccgtcggtgggtcggggatcggtcgcctgagagtctctgctttctatccgtcaagat

SEQ ID NO: 715706 - DNA, 100 bp, Homo sapiens
tccctgcagactggcaggagcagattccaaaggcacaggaagaagcttgcaggtgacaaaatatctgaacagaagaggacttaggagagatctgaactcc

SEQ ID NO: 715707 - DNA, 100 bp, Homo sapiens
tgggacgtctgagactttctccttcaagtacttggcagatcactctcttagcagttgattatggaagattcccacaagagtaccacgtcagagacagcac

SEQ ID NO: 715708 - DNA, 51 bp, Homo sapiens
cagaccaacctgtcagtgctgcaaaagttgattcaagtcagttgagacgcc

SEQ ID NO: 715709 - DNA, 100 bp, Homo sapiens
cctggccacatgatgaaccgaggaggaatgtcagggaacatggcgctgctctgggggctcctggtgctcagctggtcctgcctgcaaggcccctgctccg

SEQ ID NO: 715710 - DNA, 50 bp, Homo sapiens
gcttcgccaaggctggcgcagtcgcatgtccggcatgatttcgggtggca

SEQ ID NO: 715711 - DNA, 76 bp, Homo sapiens
ttcgagaagcgccacaagaacatgtctgtacacctgtccccctgcttcaggacggcggacccagccgagaagacgc

SEQ ID NO: 715712 - DNA, 100 bp, Homo sapiens
ccccagagcattttagatgatgttgccatggtgtggctccacaaggcgctgcagctccctgaacaaccttccctccaacattcccaggcctcagacccag

SEQ ID NO: 715713 - DNA, 90 bp, Homo sapiens
gcaacttcgcggtggtcaagcgggccacgcacctcgtcaccaaggccaaggtgaatcacaagcctttgagaacagcctgagccttcagcc

SEQ ID NO: 715714 - DNA, 98 bp, Homo sapiens
agagaaattaaccctatacctctgacccagataatctcagtgataccttgaagaagctgaagataacagctgttgacaagactgaggatagtttagaa

SEQ ID NO: 715715 - DNA, 50 bp, Homo sapiens
cagccactccctagcactcacagtgtgaaatggcctttccccgggtcaag

SEQ ID NO: 715716 - DNA, 75 bp, Homo sapiens
ataagcactatggaaaatacttcgagccagaggcttacttcccatcttggagggaatctggaaaaattgcaatca

SEQ ID NO: 715717 - DNA, 75 bp, Homo sapiens
ccaaggactaatctgatcgggtcttccttcattttttcagaagaagtgaagtcaagatgaagaaccatttgcttt

SEQ ID NO: 715718 - DNA, 101 bp, Homo sapiens
aggctgagctgctccaggacttgggaggagtattcaagctgtagtcggcatccgtgccaaaatgggggcacgtgcataaatggaagaactagctttacctg

SEQ ID NO: 715719 - DNA, 90 bp, Homo sapiens
caagaagtaggcattgaccccttgtccagttactctaacaagtctggaggataacaaagccattgacctttgccgattgtgttggggacg

SEQ ID NO: 715720 - DNA, 80 bp, Homo sapiens
ttttccccagcatcatcttccccacacaatatatggtgagcaaggtacaagaaaattccccaggacacagagctggtttg

SEQ ID NO: 715721 - DNA, 96 bp, Homo sapiens
taggatcggccagtggcgacagcaggagctgagcctaagccctggcggggctttgggctgtagaaccctcggcctcaggaaagtcggacagtattc

SEQ ID NO: 715722 - DNA, 82 bp, Homo sapiens
atcttctcaggacaccatccgttcaattggtacaaagctggctgtcattatttgtatcaaaaacaaagaatttgaaaaggct

SEQ ID NO: 715723 - DNA, 90 bp, Homo sapiens
gcaagcatgcagcttactgcttgaaagttatggctgattgtcctcacacaattggtgttgaatttggtacaagaataatcgaagttagtg

SEQ ID NO: 715724 - DNA, 100 bp, Homo sapiens
ggcccgattgatagaagacaatgagtacacagcaagacaagaatacaagtcacttgatgattgtgaggagctggtgatcaatgctacagcgacaatcaac

SEQ ID NO: 715725 - DNA, 83 bp, Homo sapiens
aagcgacaagtggaggcgccgctctagcggccgggactctgaactatggcggtaatagcctgcagctggtgttttgagaagcc

SEQ ID NO: 715726 - DNA, 100 bp, Homo sapiens
cacaattcaaagttcagcaacaagtaatagttcagaggaagcagaaagtgaaggagggattctcaaagttggattggtggaaacaatgaaccattgacag

SEQ ID NO: 715727 - DNA, 76 bp, Homo sapiens
caagaagctgctaaaccgggatatccagtcagattctgaggaagatgaacccacaaagaagaaaactatccttcag

SEQ ID NO: 715728 - DNA, 100 bp, Homo sapiens
cagaagtccagagctgaggactgcctgtttgcaggtcctatggcagcgtatacaaagctattcataaagagaccggccagattgttgctattaagcaagt

SEQ ID NO: 715729 - DNA, 100 bp, Homo sapiens
gcggcggaggatgagcctgcagagcgcgcagtacctccggaattacatgaatgacagtcttcgaaccaatgtgtttgttcgatttcaaccagagactata

SEQ ID NO: 715730 - DNA, 74 bp, Homo sapiens
aacaaggcccgggcctcccgctcctccgtacaggtttttcttcccccagtccctcagctgctgctgctgctcag

SEQ ID NO: 715731 - DNA, 90 bp, Homo sapiens
ttggagccgtgagggatacagcagtttggtcaatattgtcttaacatgcttcaaataaatcaggaaaatcctgccttgcttcgttgggcc

SEQ ID NO: 715732 - DNA, 83 bp, Homo sapiens
gttcaagtttgtgctgttctgcctgaggttcctttggcttgagtgacgagcgcattagtttgggtcagctgtcatcatcgcgg

SEQ ID NO: 715733 - DNA, 82 bp, Homo sapiens
tgaccgagagcgcgaatatcgtcatcgttagaaggctgggccagtaataaaggtgaaaattccaaaagataaggatggtaaa

SEQ ID NO: 715734 - DNA, 80 bp, Homo sapiens
taccttctggaagctactactacgtggtgcttggaaaggtgtcgtgaaaactacccctaaaagccaaaatgggaaaggaa

SEQ ID NO: 715735 - DNA, 83 bp, Homo sapiens
ctcaagcaagggctgtatgagctctcagcaagcaactttgagctgcacgttgcacaaggccataaaattttgagtagaaaaat

SEQ ID NO: 715736 - DNA, 83 bp, Homo sapiens
taagaacgcagggacattgtgctgtgcggtcaaaatgcagatcttcgtgaaaacccttaccggcaagaccatcacccttgagg

SEQ ID NO: 715737 - DNA, 100 bp, Homo sapiens
gtagtggcattacacctaaaggattagaccagcatctcagacatgtcgaaaaagatgttttgatccctaaaataatgagagaaaaggccaaagagaggtg

SEQ ID NO: 715738 - DNA, 100 bp, Homo sapiens
cttcaagtgcatgatgtgcgatgtgcggaagggcacctccacccgggaccagttactctccacaagaaaattcacacaaccacagtgctcttcatagttc

SEQ ID NO: 715739 - DNA, 100 bp, Homo sapiens
accccgagagccagccctgcccttggaaccagacagcggtggtaacacgagtcctggggtcactgccagagaaattgacacaagattctctttttgtgcg

SEQ ID NO: 715740 - DNA, 83 bp, Homo sapiens
aagagattcagccagcacactcctcgcgagcaagaattggcagagggggtcgatttgggaggaaaggtgtggctataaacttt

SEQ ID NO: 715741 - DNA, 100 bp, Homo sapiens
caaccaggcaatgctggatagataccgaattcttatcacaaagggtcctgatgaagaagctgttgtggatcttggcaaaactagctcaactgtgaacacc

SEQ ID NO: 715742 - DNA, 80 bp, Homo sapiens
tgggaaagccaaatggagctcagaaagctgtatggacctctgtgtggatggcgaggaagctcagtgtattggaagtcctt

SEQ ID NO: 715743 - DNA, 98 bp, Homo sapiens
ctgagcgcaacacttctccgagccagcgagccagcgagccgccgacccgccgagcaaaatggaagccagttgagggaagttctccatgaatgtacgtc

SEQ ID NO: 715744 - DNA, 51 bp, Homo sapiens
atggaggctgagcatttattcagatgttgatcttgtctcagaatattgccc

SEQ ID NO: 715745 - DNA, 100 bp, Homo sapiens
ggtgtgaaggttggcctgacaaattatgctgcagcatattgtactggcctgctgctggcccgcaggttggactaaatgctcttccttcagaggattatcc

SEQ ID NO: 715746 - DNA, 75 bp, Homo sapiens
atgcttcgtttttcgccgtcatgggcgcctcggccgccatggtcttcagcggtttgccatctgcaaatctggccg

SEQ ID NO: 715747 - DNA, 88 bp, Homo sapiens
aagagctcaaagatttggtttgaatgtctcttcaatctccagaaagatgacaacggcaacacgacaagaagtccttggcctctaccgc

SEQ ID NO: 715748 - DNA, 101 bp, Homo sapiens
ccgcgacagcagcagccatggaggacgagatgcccaagactctggaggaggtacaggagaactgtgtgcggtggcgaaagaggttcaccttcgtgtgtaag

SEQ ID NO: 715749 - DNA, 100 bp, Homo sapiens
cgggctgccccgcaggatcatcaagaaatatggctacacacacctttctgcaggagagctgcttcgtgatgaaaggaagaacccagattcacagtatggt

SEQ ID NO: 715750 - DNA, 90 bp, Homo sapiens
ccccatccttcctgtcttcgcagaggagtcctcgcgtgaaatcgacttaaagcctccagagaagtagaatctgtagaccttccacactgc

SEQ ID NO: 715751 - DNA, 100 bp, Homo sapiens
ctacggtttgagctcagatatcgggctgaacggtcaaagacattcacaacatggatgatgaggagcgggaaggcctcctgcaccctggagaccgtgtggg

SEQ ID NO: 715752 - DNA, 90 bp, Homo sapiens
agaacatcgacctcacagccatcatatcagacctgcgcagccggatcctgaaggacacagccctgcagaaagtgaagcgtggccagagct

SEQ ID NO: 715753 - DNA, 80 bp, Homo sapiens
agagaggatttgcttttgtaacttttgatgatcatgatacagttgataaaattgttgtaaccttcgagaaagctttgaat

SEQ ID NO: 715754 - DNA, 74 bp, Homo sapiens
cgcaatgaggcgggcagcactgcgaggtctcttcattattgatgacaaaggaatcctaagacaaattactctga

SEQ ID NO: 715755 - DNA, 80 bp, Homo sapiens
agaccgtgaccgagagcgtgaccgagagcgcgaatatcgtcatcgttagaaggtagaaacctgtgggttcttgttgtggg

SEQ ID NO: 715756 - DNA, 74 bp, Homo sapiens
aatgactccgattcgtgaccctcagcgccggtgcatgtcgattaatctatgccagcaattatgacaatgttagc

SEQ ID NO: 715757 - DNA, 74 bp, Homo sapiens
ctgagccttgagctcccagtcgcaggcggctgagccagaggccaactgcagaggaactggaacagaggaacatt

SEQ ID NO: 715758 - DNA, 75 bp, Homo sapiens
aagtttaacgacaagcacatcaccactctgcagcatcagaagagctaacaattgctggaatgacctttacaactt

SEQ ID NO: 715759 - DNA, 74 bp, Homo sapiens
catacaggaacagggcagacgttagcgtgagtgatcactctcaatcccgggctacagaaattgacagaagaaag

SEQ ID NO: 715760 - DNA, 100 bp, Homo sapiens
ctggaggacatctgggggccacaaatgctccttctcctggagacgcaactcaagattgctgcagcaaaaccaactccaccaaaaagccaggtaacattaa

SEQ ID NO: 715761 - DNA, 82 bp, Homo sapiens
ctgggaacccgcggtggagcgggacacgaacgtggttggtgttcgaggaagagacattgttgttcttggtgtggagaagaag

SEQ ID NO: 715762 - DNA, 98 bp, Homo sapiens
gagacccggggacagcatcgcccaggcccctgaggaattcagaaaagcagctcagcaacaggaagaacaagaagaaaaggaggaagaggatgatgaac

SEQ ID NO: 715763 - DNA, 101 bp, Homo sapiens
cggccggcctgggcgccggcggccctgacagcccccacctcgcaagagcagccgcggcgccactatctttaatctcatgaagtacgacagctacagccgct

SEQ ID NO: 715764 - DNA, 75 bp, Homo sapiens
gaggacacgggctgcaacctgcagcacatcagcgaccgggagaacatagacggtagcagcaattgcagagacaga

SEQ ID NO: 715765 - DNA, 126 bp, Homo sapiens
gaatgagtacctacgctatcaggaggccctgagtgagctggccactgcctctggattaatcgaattacagctgctagccaggaacatggactgaagtatccagcgctcattgggaatttagttaag

SEQ ID NO: 715766 - DNA, 87 bp, Homo sapiens
tttctggacgcggatttttggcctcatactctgttatagataaacaaggtgctgatattcgtggcttcagtgctcctaggacatttg

SEQ ID NO: 715767 - DNA, 82 bp, Homo sapiens
gtgaaacaggggacacccatgtgtgtcccaagcaaaaatgtgaattttattgtgagtgactctggagcacatgttttaaatt

SEQ ID NO: 715768 - DNA, 108 bp, Homo sapiens
ccaaggaaaaactggagagcttcatcaaaaatagtgatagctttgataagtttggtgcacctcgatttggaggaagtagggcagggcccttatctggaaagaagtttg

SEQ ID NO: 715769 - DNA, 102 bp, Homo sapiens
atcgttctatttctctagctattgccttattttttctcatggatgttcttcttcgagtatttgtagaaggggcccttatattctcaagaccgaatccttcaa

SEQ ID NO: 715770 - DNA, 100 bp, Homo sapiens
ggggctgctggtgggccgcgtcgaagacatggaccagggctacggaggtaagtccatggcctacatgcgcggcatgtactttcgcatgaaggatgaggtg

SEQ ID NO: 715771 - DNA, 74 bp, Homo sapiens
cagagttcaaggaggccttccagctgtttgaccgaacagatgtggcaaaatctggcaaaggcagagaccaaact

SEQ ID NO: 715772 - DNA, 100 bp, Homo sapiens
tggaaatcctaatgacagtctccaaattcgcctccatctgtaccatgtacggccaagtacagcgtgttgacatttctacctcgattcttgtatgagcaga

SEQ ID NO: 715773 - DNA, 96 bp, Homo sapiens
tcggtgacatattatggaccatctggccagaaaacaattcattctgaacaggcagtatttgatatttactggcatatcgatgcatttacttcaaaa

SEQ ID NO: 715774 - DNA, 96 bp, Homo sapiens
atcaccgccatgcccaagaataaagacctacaacaagaaaggggcctcccgaaggaaagaccacctgaaggaccaccagaatgggtccatggctgc

SEQ ID NO: 715775 - DNA, 90 bp, Homo sapiens
gaagaggcgttgcggcgaaaggaacggctgaaggccctacgggagaaaaccgggcgcaaggctccaaccaggaatggagacgccattgga

SEQ ID NO: 715776 - DNA, 88 bp, Homo sapiens
agagccgggagttcaagaagaacactccagagggttacctgttcgggtgggcccatttccagaaaaacctttggctgctgggctacct

SEQ ID NO: 715777 - DNA, 82 bp, Homo sapiens
ttgaactcatccggcagaataagagactggacgctgtgagattttgcaagaacgaggctcaaggatgtgagggacacagtat

SEQ ID NO: 715778 - DNA, 85 bp, Homo sapiens
gaactgttatgcaggctcctgctgttcggcaggtcaatccccaaaatatgtgcaacttgctttggtgtttgctgttttattgcca

SEQ ID NO: 715779 - DNA, 101 bp, Homo sapiens
cttcactatgggtgtcatcggtggcggagtcttccaggccatcaagggtttccgcaatgcccctgttgggaagctggtggcagactccgccaagcacctgg

SEQ ID NO: 715780 - DNA, 83 bp, Homo sapiens
cgcgtctccgacaacttgccggaacgtcaaggtcgtgggaaataaaaggcagttctacacagactgcagcaacggttgcatct

SEQ ID NO: 715781 - DNA, 105 bp, Homo sapiens
agtggtctccagcactaactatttcaaaaggcgatatgaaaggtgaggtctatccatttggcatcgttgggatggccaacaaaggggattgcctgcagaaagggg

SEQ ID NO: 715782 - DNA, 75 bp, Homo sapiens
ccttggcctctcctgggatcggcccaaggccagttctccgcaggttatccaaatgtgaaacatttttcttgggat

SEQ ID NO: 715783 - DNA, 90 bp, Homo sapiens
acgaagatcttatctgccctatttgcagtggagtcttggaggagccagtacagcttaattggcttagtgtcgacttcaataattggaaag

SEQ ID NO: 715784 - DNA, 100 bp, Homo sapiens
aacctcctgcaaaagtggaagcgaagccgaaaaaggcagcagcgaagtgtggctcgcctgttctcagatgctcggaggcttcttttatacagccagaaag

SEQ ID NO: 715785 - DNA, 50 bp, Homo sapiens
aaggattccaagtaactcttatttggaagttccaggttaaaggcagcctc

SEQ ID NO: 715786 - DNA, 104 bp, Homo sapiens
aaccctgatttcctgcttctccttttcatgagtgttcctgtggtctctgcacctcctttctcatccttcaacctggaagatgggcatgcaagcagcttagagga

SEQ ID NO: 715787 - DNA, 100 bp, Homo sapiens
gaccaaggtcaacaaggacaacaatgagatcgtggacaagatcatgggcaaaggacagatccaggaacccaagacagaccaggatgaggagcattgccgg

SEQ ID NO: 715788 - DNA, 100 bp, Homo sapiens
cgaagtcggggaggagtttcatgaagagcccaaaacctattacgaactcaaaagtcaaccgctgaagagcaggttgaagccatccttgtcaatatatttg

SEQ ID NO: 715789 - DNA, 75 bp, Homo sapiens
tccagactgctgacaaattgtactttgtcctagactacattaatggtggagaggagagaaggaggacgaggacga

SEQ ID NO: 715790 - DNA, 98 bp, Homo sapiens
gagatttcatttctgtcctgctgatgaagtctacgttcattcagggcctgctgtggaagaccagccccaaagattgcccaaggactccagatactcca

SEQ ID NO: 715791 - DNA, 105 bp, Homo sapiens
aacagactggggcagtggaaaaggtggaagagcagtgccatccattgaatgggttgaacttttcacagtgccgcagaatggaattcggcattgttcctacacagc

SEQ ID NO: 715792 - DNA, 90 bp, Homo sapiens
tggccgggggcgcgggcggcggcgccggcaggaaggttcagtcctcagtggctgtaggaactccagattatatctctcctgaaatccttc

SEQ ID NO: 715793 - DNA, 82 bp, Homo sapiens
gggggttccgggaagatggtgctgatcaaggaattgtgatttgatgaaggctgctgcaggagagttcgcagatgatccctgc

SEQ ID NO: 715794 - DNA, 110 bp, Homo sapiens
gccgcctcccgggagtgccgtgcgccgcagcccgggcccaggccccggcagcgcctgggacaaggtttgccgggcaccgctccagacctggaaaagagaaagcaaatttt

SEQ ID NO: 715795 - DNA, 75 bp, Homo sapiens
ccccaaaagagtattcttggatcttgcacaggaaggaattaaaggtgcagagtccagtggtgacatggatgttct

SEQ ID NO: 715796 - DNA, 83 bp, Homo sapiens
ccgggatttgggtcgcagttcttgtttgtggatcgctgtgatcgtcacttggtgcaagcggttcagggtgccagtggagaaga

SEQ ID NO: 715797 - DNA, 51 bp, Homo sapiens
acacgggacaccgcggaagccgggaaatgctgcagcccaagaggccaactg

SEQ ID NO: 715798 - DNA, 127 bp, Homo sapiens
atgcttgaagacagagatttattcgtaatgcgactcaaagctgcacggcagtctgtttatgagtggatgattcaacagccacacaaagcagcaacattttttggatgcattgggatagataaatttg

SEQ ID NO: 715799 - DNA, 100 bp, Homo sapiens
gataaactcaacatcgacagcattatccaacggctgctggaaggtcatcatcagatttgaaatatttaaagtggatacaaaactatttcagcaatgcaga

SEQ ID NO: 715800 - DNA, 82 bp, Homo sapiens
ccagttcattcctagctcagaaagcaacgttttgagccacaactgtcacaactccaggttgccttcttcctcatctctgcag

SEQ ID NO: 715801 - DNA, 131 bp, Homo sapiens
tcaagaggcacacgccgctgagcaagctgatgaaggcctactgcgagaggcaggggcccagaagacacctgctttgagtttggtgtttttcctgccatcctgagtttcccacttgattacccgttaagtcc

SEQ ID NO: 715802 - DNA, 75 bp, Homo sapiens
cacagggctactgttttccaatcctcaggtgaatgaaaactttgccattgatttgatagcagagcagcccgtgag

SEQ ID NO: 715803 - DNA, 87 bp, Homo sapiens
tctcatctcgctcggctgcgggaaatcgggctgaagcgactgagtccgcgatggaggaatgtatcctgtcaggtataatgtcagtga

SEQ ID NO: 715804 - DNA, 96 bp, Homo sapiens
cacctgcaccatccacggaccacagctcactttccccaaggaccagcttgacgaggcctggactggcttgcagggtggcccccgctccgacttcga

SEQ ID NO: 715805 - DNA, 98 bp, Homo sapiens
aacaagtcccacttccgaaaccacaagtttgccgatttgaagactgggatagtttccaagctattttggatcatacctacaaaatgcatgtcaaatca

SEQ ID NO: 715806 - DNA, 83 bp, Homo sapiens
ccggtgtgtggcgcgcccagagccccgcgtttcagccctagggaagggctccacgtgttccccacgtttgtggcgtacgagct

SEQ ID NO: 715807 - DNA, 104 bp, Homo sapiens
aaacactgaatgctggggcgtactccaaagttgttcaggaacgacatatcaagtggatttgaagcccaatgggtcagaaataatggtcacaaatgaaaacaaaa

SEQ ID NO: 715808 - DNA, 100 bp, Homo sapiens
tatatatctgggatccacataatggagacattctgatggaatttgggatctctatgaagcaccagaattatcagtgaagaatatattaaatggctcacgg

SEQ ID NO: 715809 - DNA, 75 bp, Homo sapiens
cgagtggccaccggagactgaagtacaggtggctagaggtgcaggtagctaatttaacaagtccacagcgctggg

SEQ ID NO: 715810 - DNA, 75 bp, Homo sapiens
agtcgccgttcgcctgtggctggacaacacggagaacgacctcaaccagggagcttgggaaagtcgaggtgacgg

SEQ ID NO: 715811 - DNA, 80 bp, Homo sapiens
aagcgtcaccatcctgctcctgaacttcctgcgctcgcactgaaagtttcctacactactgaggtttaggggcactgtga

SEQ ID NO: 715812 - DNA, 100 bp, Homo sapiens
ccgagctccagccgaaggagaaggggggtatttctgggaaaagccagcttctgtttgcactggtcttcacaactcgttacctggatctttttacttcatt

SEQ ID NO: 715813 - DNA, 74 bp, Homo sapiens
cgctcgatccagcaccatggggaagcgggacaatcgggtggtgtcttctctttagggatggtgaggttggaaaa

SEQ ID NO: 715814 - DNA, 100 bp, Homo sapiens
ggggcaggatggctgcgttgacacgtcttatttaatccacatcataggtatgagcagcagcgggacaatcttgcccaacagtcattcaacatggaacaag

SEQ ID NO: 715815 - DNA, 82 bp, Homo sapiens
attgtcgatgattcagtcagagatgaggtggaaagtgagaaatggtacctgtctacagacttcccttcaacatccatcaaga

SEQ ID NO: 715816 - DNA, 100 bp, Homo sapiens
ggccgtcctgagcgccatggctcactccccggtgcagtcgggcctgcccggcatgcagggccagtggggagtgacggcagcagaggaagaggaggaaaat

SEQ ID NO: 715817 - DNA, 51 bp, Homo sapiens
cccggagcgcagcgcggccgcacaggcattatcctgcactgaaaactctgg

SEQ ID NO: 715818 - DNA, 75 bp, Homo sapiens
gtgatctgcgctaggtggcatctcctctcacggatgcctcggtacatgtcccagagcaagcacacggaggcccgg

SEQ ID NO: 715819 - DNA, 74 bp, Homo sapiens
gcgatcccaccgaagcagcgtgtcctccgtgggagcccgaggagggccctcctggacccgggagcggaccctgg

SEQ ID NO: 715820 - DNA, 102 bp, Homo sapiens
tagtgccctagatgtgcagtgcgagcaggccgagagaagacgatctgcacttcgcattttggcattgacatttaattttagggtcctttatatagaagggag

SEQ ID NO: 715821 - DNA, 82 bp, Homo sapiens
ccggcgtgctggaccgccgcgactccgccgcgctgcgcacgcccaggtgagaagccctaccactgcaactgggacggctgcg

SEQ ID NO: 715822 - DNA, 75 bp, Homo sapiens
caatttttagtggaaatgaagatggagttctttccctgtgctctaagtcaggaacgtatcaatgagtgtgatgag

SEQ ID NO: 715823 - DNA, 82 bp, Homo sapiens
ctgcacgataaaggaactcaggcgcctcttcttagttgatgatttagttgattctctgaagaccgtctgttcccgttcagtt

SEQ ID NO: 715824 - DNA, 100 bp, Homo sapiens
acggacaagcagaagaagaaggtgtactcctttctattttaaagagccaagcctcagagacctgagaagccaggccccggcagcaaggaccccaaggccg

SEQ ID NO: 715825 - DNA, 83 bp, Homo sapiens
gacaaagccaaccgatacttttctccaaattttaaggggcagaggcctggcctccaggggtttgtcttaaatatgtcggggga

SEQ ID NO: 715826 - DNA, 75 bp, Homo sapiens
cttaccggaatacgtgcggctggattgctcatttagaaagtggatgtgtgggataacatgtccaatgtgtccgag

SEQ ID NO: 715827 - DNA, 100 bp, Homo sapiens
ccaccatcaaaaagtgggaagagaggacatgacaatggatgaagtccgagaatttgaacgagccactcaggaagccaccaacaagaaaatcggcattttc

SEQ ID NO: 715828 - DNA, 75 bp, Homo sapiens
aacctgcccagctacaaggccaagtgtttacaggcattggagtttttacatgctaatcaagtgatccacagagac

SEQ ID NO: 715829 - DNA, 83 bp, Homo sapiens
tgtggctgtgccgttggtcctgtgcggtcacttagccaagaggatgtccggcttccagatcaacctcaacccgctcaaggagc

SEQ ID NO: 715830 - DNA, 50 bp, Homo sapiens
ctccgccctggggtcattgtcaggaagtggttacctggaaggaaaggagc

SEQ ID NO: 715831 - DNA, 75 bp, Homo sapiens
gccgacatgaagaaagacgtgcggatcctgctggtgggagaacgtagagcaggtctctctgcagccatgtcggcc

SEQ ID NO: 715832 - DNA, 82 bp, Homo sapiens
ttggtgggatgttacgtggccggaatcattcccttggctgttaatttctcagagtttataggcaagcaataaacagcaagat

SEQ ID NO: 715833 - DNA, 75 bp, Homo sapiens
gggcaagcgctgttcaaacccatgaaacagccctcagcgcctttttccaggagaccaacatcccctacagccacc

SEQ ID NO: 715834 - DNA, 83 bp, Homo sapiens
cttcgcgctctggctggtctcccctctgctgggtgattgaattactcagatatgaagatcatcatctaggttttgtgtaaaag

SEQ ID NO: 715835 - DNA, 74 bp, Homo sapiens
gggtgaccagagagcccaacgcctggtgctcaagactttctccgaggactctacatcaacagatgatatgtggt

SEQ ID NO: 715836 - DNA, 99 bp, Homo sapiens
ggcgctgtgcacgcggctggccatcatggtgaacggtcgcctgcggtgcctgggcagcatccagcacctgaagaaccgtctcgcccaagaacttcaagg

SEQ ID NO: 715837 - DNA, 100 bp, Homo sapiens
atgcaaaaggctttcaataaaacaatcgtgaaacttcagaatacttcaagaatagcagaggagcaggaacgggaggatgaaattgctactatggagtgca

SEQ ID NO: 715838 - DNA, 100 bp, Homo sapiens
gcactgtggcccacagcccaacagcgctgatatctggagggaccctcaaggggtgatacgtcattatgttgtgtgttccacacctcagagccagtattac

SEQ ID NO: 715839 - DNA, 76 bp, Homo sapiens
taaaaagcaccaccaagatgtctctaaatgagcgcttcttggacacttaatgattgttggcaagaaatgtgctgct

SEQ ID NO: 715840 - DNA, 50 bp, Homo sapiens
ggcctgtccagccggggcaagaaggtcctacaacgtgactttaaaaagac

SEQ ID NO: 715841 - DNA, 98 bp, Homo sapiens
aactactctgacaaatcagatattgaaaatgctgatgaatccagcagcagcatcctaaaacctctcactaacctcttactcatccttcaagatcatcg

SEQ ID NO: 715842 - DNA, 102 bp, Homo sapiens
aaaaaccagagaggaaaacacaaaaaacaggataaaatcttatgattatgaggcatgggcaaaacttgatgtggtagccaatgagactcacgggcatgtggg

SEQ ID NO: 715843 - DNA, 83 bp, Homo sapiens
cactgagggtgaagtggcaggaggaggaggaggggctccggctggtctgtggtgaggttgcttatggaaccacagagaacagt

SEQ ID NO: 715844 - DNA, 87 bp, Homo sapiens
acgacccagcagccgccatggctctgctccgaggagttgggctgtgaagctggaaacatcagaggctgtctccttggaacttcatac

SEQ ID NO: 715845 - DNA, 83 bp, Homo sapiens
acctacagtctcagctaaagctaagggaaggggaaatcactcatttacagtaccaaggatgattgcttcaatgttaatattca

SEQ ID NO: 715846 - DNA, 101 bp, Homo sapiens
agatgcccgggccgtggctctagcaggctccactaactggggctacgactctgatgggcagaaaaggagaacaacttcccgccactgcccaagttcatccc

SEQ ID NO: 715847 - DNA, 100 bp, Homo sapiens
gagcagtcgcagctgctttccgaggaagccggtgttgccgaggtagatttcgggcagacaacttgaacaagctgaagaacctatgcagcaagacaatcgg

SEQ ID NO: 715848 - DNA, 100 bp, Homo sapiens
gctgcaggagaagctgagcgagctgaaggaaacggtggagctgaagaagggagccactctcaaaatcacgctggataacgcctacatggaaaagtgtgac

SEQ ID NO: 715849 - DNA, 76 bp, Homo sapiens
ctacagtgttctcgacttcgtcgctggacctggcctgggccgtcagctactacatccggttcttcatcacctacat

SEQ ID NO: 715850 - DNA, 75 bp, Homo sapiens
tatggcgctgaaacggattaataaggtggaaaacgaagctcattcccaacgtgcaaagccaaggcagcgacccca

SEQ ID NO: 715851 - DNA, 101 bp, Homo sapiens
ggaggacctgttgaccttactttgaagcagccaagatgttttgtattaatggatcacattttgaatttgaaggccgaatccgggtgcatggtattggcggg

SEQ ID NO: 715852 - DNA, 75 bp, Homo sapiens
caactccaaccacgacggggccgacgagacctcagggggggccctcagcctcttggccttgaacgggctgttcat

SEQ ID NO: 715853 - DNA, 75 bp, Homo sapiens
ctgaagatgacaatttattagatggtgacactgcagttggtcagaagccaatgacctggccctgaggctggctcg

SEQ ID NO: 715854 - DNA, 74 bp, Homo sapiens
tcggaatggacctgtgccacccagacccgggaaaaggagaagatgaaggaagccaaggatgcccgctataccaa

SEQ ID NO: 715855 - DNA, 75 bp, Homo sapiens
tccgtgcagagctgggccgacccgaaatcaccttcaggccattcagaggaggaaagagaggggaatatgaagtca

SEQ ID NO: 715856 - DNA, 90 bp, Homo sapiens
cccgactgggcctgccggggctgccccgcgcacgtcaaggttgcagctagatcacgctattccaaagatccatttgagttcaagaaggag

SEQ ID NO: 715857 - DNA, 84 bp, Homo sapiens
aagaagatcatcattaaggacggaggcacgatgccatggacaatattaccaggcagaaccaattctacgatacccaagtcatca

SEQ ID NO: 715858 - DNA, 75 bp, Homo sapiens
tttgaagtctttgaccatgagtcgaataatacagtggatgtgagaaatatggctacacacacctttctgcaggag

SEQ ID NO: 715859 - DNA, 90 bp, Homo sapiens
cgctgccagttccagaccaagttccctgcggagctggagaaccggtgccggtggtggtgtgcacattgagccccggtatagacagttccc

SEQ ID NO: 715860 - DNA, 87 bp, Homo sapiens
tgtgaacgccgcggactccggagccgcacaaaccagggctcgccatgaagccagggactttgaacatgtcggggatcgccctcagca

SEQ ID NO: 715861 - DNA, 100 bp, Homo sapiens
aaggtaagggggagcgagagcgccagagagagaagatcggggggctgaaatccatcttcatcctaccgctccgcccatcatgagcgtcttgttgttcatc

SEQ ID NO: 715862 - DNA, 74 bp, Homo sapiens
gaatactggaagagaataaccgaaaaattgcagaagcacaagccaaactgtcagtactgctccccagcctaaac

SEQ ID NO: 715863 - DNA, 74 bp, Homo sapiens
ctggttcagcttcaagaaaaagatacgtaattcacctctgggacctcaaccacgaagggacgtgggaaggaaag

SEQ ID NO: 715864 - DNA, 82 bp, Homo sapiens
cccgaacccaaaggggtggacgcggcctccaggtgagaagccctaccactgcaactgggacggctgcggctggaagtttgcg

SEQ ID NO: 715865 - DNA, 51 bp, Homo sapiens
tgcttgcaggctgtgtcacagaagagaaatatgaggccccaggattcctgg

SEQ ID NO: 715866 - DNA, 75 bp, Homo sapiens
tcatgttaaccaggccaaacaggcagaaataatatgtttcatacattgttgatgtttctctacatcataaagacc

SEQ ID NO: 715867 - DNA, 74 bp, Homo sapiens
gaagtcggagtttgagccccggaggcagagcggctgccatgaatagcattcctttcgaacaccacggcaagtag

SEQ ID NO: 715868 - DNA, 83 bp, Homo sapiens
cttcatcccagtcccgggcgagcagcgttgggtttatgtctttatttgacgaaaacgagctttttgacaactacatgcaacaa

SEQ ID NO: 715869 - DNA, 98 bp, Homo sapiens
tacagtatctgagagtcagctgaaatctggatggagaagcagtatttatctcaaagagaagtggacctagaggcttatttcactaggaatcacaccgt

SEQ ID NO: 715870 - DNA, 82 bp, Homo sapiens
gccttcgagagctaccgcgccagacagagagcgcgccagccttggaaggaatccacggcattccagtgtgtcctcaagtggc

SEQ ID NO: 715871 - DNA, 96 bp, Homo sapiens
ggagctgggtcagtccgccgctcaccccgcggccgcaccttcccgccttctcagatgagacaaggggccttcctggtgaacacagcccggggtggc

SEQ ID NO: 715872 - DNA, 98 bp, Homo sapiens
agtgaagtgctccactcgaacagatgtgagcgagaaagccgttgcctccagcaccacttctaatgtggattccaaagcatgagttgggctgcttttga

SEQ ID NO: 715873 - DNA, 75 bp, Homo sapiens
atcgacctcaaggacatcaacttccggccgcagatgtcccagcacatggattaattgatgtatgttgagtttatg

SEQ ID NO: 715874 - DNA, 75 bp, Homo sapiens
gataaatggctctctcttgatttggagcagctacagaatccagaagtcagatttcagcaacaactggaacaactc

SEQ ID NO: 715875 - DNA, 100 bp, Homo sapiens
ctgcgaaggcggcggctcctgccctctcgctttccctctcgcgtctctggctgcagggatacccacccaccatcccagggtctacaacatccacagccgg

SEQ ID NO: 715876 - DNA, 74 bp, Homo sapiens
tcgcagtctggaaagctttaggagttcacagtacttaattcagtgcacaaatgagatgaatgtgaacatcccac

SEQ ID NO: 715877 - DNA, 82 bp, Homo sapiens
ctctctttctggcctggaggctatccagcgttgaatgcctttgagaacttgatgcataaaatttgcatgactcctcactcct

SEQ ID NO: 715878 - DNA, 74 bp, Homo sapiens
ccggactggatcaacaccggggagtctgcgggcccttggctccttctccctggaactttaggacagaggagaac

SEQ ID NO: 715879 - DNA, 131 bp, Homo sapiens
gaactgctgcacatatatgttggcattgagtcaaaccatcttctcccaaggtttttgcaggccatcgaagacggcaatttggaggaaatggaagaggaagtacggcttaagaagcgaaaaagacgaagaaa

SEQ ID NO: 715880 - DNA, 100 bp, Homo sapiens
tggccgcctgcggcatcgtcctcagcgcctggggagtgatcatgttgctgactggaaataccggcatgcaggattgatggccttatctgccattggtgaa

SEQ ID NO: 715881 - DNA, 75 bp, Homo sapiens
atcaactggggatgattacagttcttcctaaaaaagaaaactttcccctctcagagctgatgacagagatcagta

SEQ ID NO: 715882 - DNA, 50 bp, Homo sapiens
ctgttcttcacttccagcaagccagtgtggtttattgacaatcatttaca

SEQ ID NO: 715883 - DNA, 100 bp, Homo sapiens
tactgggagagctgcagccaggagcaggaggtcaagcagtttcgccgtgaggaagatgcggaaaaggctgtgattgacttgaataaccgttggtttaatg

SEQ ID NO: 715884 - DNA, 89 bp, Homo sapiens
ggataaaaggcaaactcttcacctgcagtccagagcgtgagtccattcacatcctgagtgttgatgagaagaacaagttgggagccaag

SEQ ID NO: 715885 - DNA, 100 bp, Homo sapiens
ctcctctgcccttcagccttcaaagtaagagtcagctttttctccccatttgggacatcaagcctagcatgaagaaccttttgtgatggtctctgaaaat

SEQ ID NO: 715886 - DNA, 82 bp, Homo sapiens
cggtggactccttcggcagtccacccaccgccgccgcctcccagacatctaggcttgctgtcaaggcttctgatcaacatga

SEQ ID NO: 715887 - DNA, 76 bp, Homo sapiens
caaggacctggccgacatcgcggccttcttccgatccggtactccaaagattcaggtttactcacgtcatccagca

SEQ ID NO: 715888 - DNA, 75 bp, Homo sapiens
acgaagccccgggcaccttccgggtggagttcagtgaaagggcagggtgttcagacttacatctcttggatatgt

SEQ ID NO: 715889 - DNA, 74 bp, Homo sapiens
gccgggagatcgactgtttgagcccggaagcgcagaagctggacatggatttgattgacatactttggaggcaa

SEQ ID NO: 715890 - DNA, 80 bp, Homo sapiens
gaagagcgacaagccgctggcagccgcggatctcaccgccgctcaggaagaagctcattcacacagaagacccatttaat

SEQ ID NO: 715891 - DNA, 75 bp, Homo sapiens
ctagcaccccgagaaccgtcagtttgagccagatgccatgcaagtttctgctagatgctgtgtttgctaaaggaa

SEQ ID NO: 715892 - DNA, 75 bp, Homo sapiens
tgccgccgtccatcctgctcaagctctctgatgtaaaggatggagtaaatcaagcagcacctgcatttggatttg

SEQ ID NO: 715893 - DNA, 100 bp, Homo sapiens
gtggttggatatttagaggacattatcatggaggccatgtggaagtgttacatcaccttttgcttggaaagatttactaagaagtcaaatagtgggttcc

SEQ ID NO: 715894 - DNA, 83 bp, Homo sapiens
caggacctgcagctgcccccgagtcagagggcgcagtccgcattcaaagactacatgaggaaataattgacttttataacttc

SEQ ID NO: 715895 - DNA, 96 bp, Homo sapiens
agcatcgaaactaggagaaataagaatggctgtagaggaacttcagtctataataaagagatgtattatgagcctcaaacaatttgtgagcatctc

SEQ ID NO: 715896 - DNA, 50 bp, Homo sapiens
atgccatgcagtgcgttcagtgcaaaaagtaggcagtactcatcttggcc

SEQ ID NO: 715897 - DNA, 89 bp, Homo sapiens
ttttatgcatctttatccaatcaagtgcccttggacaaagcctgaaaccaggccccagcacccgcagagcagacactgcgatgacaacg

SEQ ID NO: 715898 - DNA, 50 bp, Homo sapiens
ctgacactaatgtatcagtgcatgcaggattactacagcatcccatttcc

SEQ ID NO: 715899 - DNA, 74 bp, Homo sapiens
atgtggacagtggagaaggcccagccaatgaagatgaagacataggagaatggctgttgatggtgggtgtgggg

SEQ ID NO: 715900 - DNA, 95 bp, Homo sapiens
gccacttttcccctggtcttcaatgccagaatggtgtttgaaaagcccgtgatgctgatgagcgagagaagtggatccatgccttagaagaaaca

SEQ ID NO: 715901 - DNA, 100 bp, Homo sapiens
ctgggagccgcaccacctaacgctggccgacaacagcctggcgtccgccacggtgaaaggaaagcaagccaggatggatatttacgacactcaaaccttg

SEQ ID NO: 715902 - DNA, 83 bp, Homo sapiens
tgcatacttggaatgaatccttctagagacgtccacgacttgtgcaccatggacaattttgctgagggagatttcactgtggc

SEQ ID NO: 715903 - DNA, 75 bp, Homo sapiens
gccccccactttttaccttggatgagcaatcagtggatggtccccaccatccagaactccatgaagcccttcaag

SEQ ID NO: 715904 - DNA, 50 bp, Homo sapiens
ttgatggatcactagtttttctggacctagatgtgaaggctggtggaggc

SEQ ID NO: 715905 - DNA, 100 bp, Homo sapiens
aggagatacattaaatgcaatagcccttcagtactgttgtacgattattcttggagaaaccctgtctgtttactgtaaccttttgcactcaaattccttt

SEQ ID NO: 715906 - DNA, 48 bp, Homo sapiens
taaaagaagccaacaaagcattgcagcacctggccacattcatcatgg

SEQ ID NO: 715907 - DNA, 101 bp, Homo sapiens
ctccaccccttccacgtcatccgcatcaacaagatgttgtcctgtgctggggctgacaggtggagatgcggaaagccctgacggacttcattcaagaggaa

SEQ ID NO: 715908 - DNA, 90 bp, Homo sapiens
gaggaatttatgaaagcacttgaatggggaaattcataagtgatctacttcagttagtctctatgacatgtctgtggccatctgaaaacg

SEQ ID NO: 715909 - DNA, 75 bp, Homo sapiens
tggccaagtttccagaaaacagaaatcgaaacagatacagagatgtaagcccattgcctgaagacgtacactggc

SEQ ID NO: 715910 - DNA, 51 bp, Homo sapiens
gagcagccgaccatggagccccagaggaaatcctcattgacgattcaattt

SEQ ID NO: 715911 - DNA, 101 bp, Homo sapiens
tctcctagcggcctggcgccgaggcggcggtacgcaaggctggagccgcagcgggagcccccggttttgaacgaagaatgtgatcagaactggtacaaggc

SEQ ID NO: 715912 - DNA, 100 bp, Homo sapiens
ctgctgcccttgctgtcctcctctgcaccatggctctctgcaaccagttctctgcatcacggcagcagaagaagcctttgtaaatgacattgacgagtcg

SEQ ID NO: 715913 - DNA, 90 bp, Homo sapiens
aagagggcggagcggagacgggagtattatgaaaagatccacccccccaggcagcagcagcagttttcatctctggatgacaagccccag

SEQ ID NO: 715914 - DNA, 87 bp, Homo sapiens
ctacttctaccacccctcagttgcacactcgcttgacccctgctgcaattgggaaatttgcgagaatccccgatttatcattgatgg

SEQ ID NO: 715915 - DNA, 100 bp, Homo sapiens
cagttctcctgggattccagccagccctggctctcacaggagctctctgcctccaacagagaaccatggagtctggcagtaccgccgccagtgaggaggc

SEQ ID NO: 715916 - DNA, 100 bp, Homo sapiens
tacactgtcaaaactttacaagttaattgaagagtcttgtccacagctggcaaattcagtgcagatcaggagtccttcaataatgttaaacagtggctgc

SEQ ID NO: 715917 - DNA, 75 bp, Homo sapiens
aacaatggaaaggtcatttcaaataacaacgaacttgatgcaagtgataggtttgccaaggtcagacctctcatc

SEQ ID NO: 715918 - DNA, 95 bp, Homo sapiens
tcactacctgcacaacgttcaaccatgctcggtcatctgtggcagtatatcaaggtcgaatgagtgatttgagtgtaattggtcatccaatagat

SEQ ID NO: 715919 - DNA, 100 bp, Homo sapiens
aatggccttgctgtgctacaaccggggctgcggtcagcgcttcgatcctgagaccaattccgacggggtcctacacaagaggaattgatcctaattatgc

SEQ ID NO: 715920 - DNA, 100 bp, Homo sapiens
gatcgtatggctgatgacgactggtggccaatgcagatactaattaagtgccctaatcaaattgtgagacagcctaaacccaccaagggacgaatgcgca

SEQ ID NO: 715921 - DNA, 82 bp, Homo sapiens
agatgcttaaaaatcaccagttactttaatgacactgcagcagcacctggcagacattaatgtggatggaccagaaaatgga

SEQ ID NO: 715922 - DNA, 75 bp, Homo sapiens
ttggcgtcctggcacccctgatggtggcaattgctgggcatattggattttacccatcataggcgctgttctctt

SEQ ID NO: 715923 - DNA, 101 bp, Homo sapiens
cagatgttacttgaagctgagtgactttctcagggtcaagcaaataagtaaatggaggagccagaattataccccagacgttatgaagaggacatgtactg

SEQ ID NO: 715924 - DNA, 100 bp, Homo sapiens
acatcaaagaggtctagcaaagaacatgccgagtttttgcactgcaagtccaaaaagtttacagactttgatgaagtccggcaggagattgaagcagaga

SEQ ID NO: 715925 - DNA, 101 bp, Homo sapiens
acaggtgatgaaggaggagcacaaggaatcatgggtaaagaaggaagacaggctgcaagaaacagtgactatgcaatagccagatttaagttcctctccaa

SEQ ID NO: 715926 - DNA, 96 bp, Homo sapiens
agaacctgaatgacgcctacggaccccccagcaacttcctcgagatcgatgaacttggcattagaattcctcgaccactaggacagggaccaagca

SEQ ID NO: 715927 - DNA, 74 bp, Homo sapiens
actgaccttcctcagactgaggactgttccagtgtatacatcaagtcactgagatatggggttttgccatgttg

SEQ ID NO: 715928 - DNA, 100 bp, Homo sapiens
atgctgggcctcgaggagggggaccttgaagacgacttcgaccctgcccagcacgaccagctcatgcagccctggtcctgaggaggaaaagaaagcgaat

SEQ ID NO: 715929 - DNA, 100 bp, Homo sapiens
gggttagagacatgctgactgatgagatcaccaaggcagctgcaaaactaccatggctgcaggagtcttgcctcagaatgaacaaccatattctaccttg

SEQ ID NO: 715930 - DNA, 100 bp, Homo sapiens
gaggtctaccccgtgggcatcttccagaaacgcaagaagtacaacgtgccggtccaggaacagattatggcctttgcaagcaaatgagtactcctctcct

SEQ ID NO: 715931 - DNA, 90 bp, Homo sapiens
agagaaaaagatggaggacctgcggcgggagaaggatgctgccgagatgctgggcgccaagatcaaggatcagttccatgacaagacccc

SEQ ID NO: 715932 - DNA, 75 bp, Homo sapiens
aaggaaaggggaaaatgtctcagtcgaaagacttcaggcccgcatagctcataggatacaagaactggaaaatct

SEQ ID NO: 715933 - DNA, 100 bp, Homo sapiens
gctgccacgtctggaaggcggtgaccaagacgctgcgggagcccggcgccggagcccaaggtactccaaagattcaggtttactcacgtcatccagcaga

SEQ ID NO: 715934 - DNA, 100 bp, Homo sapiens
ctacccccggccagcggtccggccaaggacgctgaggatgttcacggaagaccagggtgtagatgacaggctgctctatgacattgtattcaagcacttc

SEQ ID NO: 715935 - DNA, 50 bp, Homo sapiens
agcccacaaagactcccataaggagtttgtagaagactatgaacctacca

SEQ ID NO: 715936 - DNA, 98 bp, Homo sapiens
gaagcagtaactgcggtgttgggcttgtggtgcagaatcccttgcagctagagtcatggaagcgaagaagtttccacaattagatgtgcctatgcaag

SEQ ID NO: 715937 - DNA, 76 bp, Homo sapiens
ccggcttgtagcatttagggcaaggtatcatctggtggataaagatcatgacaggaaagatctaggagagagggag

SEQ ID NO: 715938 - DNA, 75 bp, Homo sapiens
gggaggaccgcgcgggagagcacggatgggcaccctgggctcgatgatccctttgtggccttccacatcaacaag

SEQ ID NO: 715939 - DNA, 88 bp, Homo sapiens
cagatttcttctctgtgtagcaagattgtacgaacagatctgaaagagttaagagatttcaatttggatggtgctccttatggttaca

SEQ ID NO: 715940 - DNA, 100 bp, Homo sapiens
gggttcagattgcaaggtggcaaggagcagaagcagcccttacaagttgcaaaggtgagagttacgtgtgtgcatccaatgaaccatttcgtaaagtcga

SEQ ID NO: 715941 - DNA, 75 bp, Homo sapiens
aagatactgcagagatattctactccatctcattcattgtacagatggaggaaaggaagtgctgtccatgcacca

SEQ ID NO: 715942 - DNA, 97 bp, Homo sapiens
gaggagctggtgagcctcatcacacaggatccgcccctggacatggaggagaaggtccgcttcaagctggaggaagtacccctggaggtgctgaggc

SEQ ID NO: 715943 - DNA, 101 bp, Homo sapiens
cttgaccccatcaaggaatggttgaagtgaatcacaagcctttgagaacagcctgagccttcagccctcacagatgcccagcctcatagctgaagttgcct

SEQ ID NO: 715944 - DNA, 83 bp, Homo sapiens
catggagaagatgttcaagcagtctcctctgagcctccggcctccataagacccaaaacagatgacacctcttcccagtcccc

SEQ ID NO: 715945 - DNA, 76 bp, Homo sapiens
gccgcggctccggccctggccccgatggctctgtgcaacggagactccaaggtactgtccaagaagctggaacatt

SEQ ID NO: 715946 - DNA, 100 bp, Homo sapiens
catccacagttatgcactttaccctttttaatattggccaatcatcaagacaagccagcagctcgctcagtacaagagattcctgctccaaaacgaggag

SEQ ID NO: 715947 - DNA, 83 bp, Homo sapiens
gatgaaccatttagagatcctgctgtttggccaccccctgttcctgcagaacacagtgcaagtggtgacccaggatgaaagag

SEQ ID NO: 715948 - DNA, 95 bp, Homo sapiens
gtgttccaaatcatcgcctttctggtgggaggcttgattggtttcgtttataatgtcagcccttatatggagtatcatcctggtggagaagatga

SEQ ID NO: 715949 - DNA, 100 bp, Homo sapiens
cggcggcgacggaggagagcagctcctcactgtcaagcacgagctgcggactgaatgtgacagtgatgataacatgggtgccaaaaatacttcaatagga

SEQ ID NO: 715950 - DNA, 74 bp, Homo sapiens
ttgagaagcagaacccagctgaaggactgctccataatgggagaagtaaagaacaaagacttaaggaacagctt

SEQ ID NO: 715951 - DNA, 82 bp, Homo sapiens
tgctgtgtgcggtgctgctgagcttggcctcggcgtcctcggcctggtccgacccccagtggcactaacgtgggatcctcag

SEQ ID NO: 715952 - DNA, 83 bp, Homo sapiens
cccatggttgccggctcccctctcaggacaacccagatgtgcaacaaagtgcgatggtattgttgcagcatctggcagtgaga

SEQ ID NO: 715953 - DNA, 119 bp, Homo sapiens
aggacgaagaggaggaggaggaggggcggagggagacgcccgaggacagggaggtgcgtctgcagctggcgcggaagagaaatgcactcggtgatggaaagagagccactattctgaag

SEQ ID NO: 715954 - DNA, 100 bp, Homo sapiens
ggttcgcacacccattcaagcggcaggacgcacttgtcttagcagttctcgctgaccgcgctagctgttcttcctcccaacctgaatgacctggcatccc

SEQ ID NO: 715955 - DNA, 75 bp, Homo sapiens
acagaacctcctatgaacccaaccaaaaacagagagaagattgtagaggagccggcatcatggattccttcaaag

SEQ ID NO: 715956 - DNA, 75 bp, Homo sapiens
acgttcatcatggtgcctggctgccaggcagctgggatctagcaattgggaggcagcagacttgggtaatgaaga

SEQ ID NO: 715957 - DNA, 98 bp, Homo sapiens
gaaaagctgagatatgatgattttgaagtcatttcacatcgaagccatgatttaaatatcggcgttaaggctggacgtaaagaaagaagtgatgcact

SEQ ID NO: 715958 - DNA, 75 bp, Homo sapiens
aagcccaccggtccccaacgcatcatgccagggagccaagcgtcctgcccggccaacctgtgagaagtttctaca

SEQ ID NO: 715959 - DNA, 53 bp, Homo sapiens
cgcgacgccaggctgagaccgtccagggaactaattcagaagttgaagtcttt

SEQ ID NO: 715960 - DNA, 101 bp, Homo sapiens
agcggctcagccagcggcagacagaacgggacctgtgtcaggatgccgaggaatgtgacagggctgggagtgtggccacctgccaggccgtcatgcgtgcc

SEQ ID NO: 715961 - DNA, 88 bp, Homo sapiens
tttcgaatcaagttgtccccaacagtgggtagttgatgtcacttggcgatattcctgcaaacatgaagaggtgattgccagaagaact

SEQ ID NO: 715962 - DNA, 82 bp, Homo sapiens
atcctgtcacaggccatgctctggcaaaaacgttggacttggctcagtctctgggactcactcagctgcaggtgaagacctg

SEQ ID NO: 715963 - DNA, 74 bp, Homo sapiens
ggcaaaatggcggaccgcttctcccgcttcaacgaagaccgagactttcagaacctgctaaggctgcctcagac

SEQ ID NO: 715964 - DNA, 99 bp, Homo sapiens
gggacctcggcggagcaggagggccttcaagaaggagaccagattctgaagcttctcaataggtttggcatggacaagatctatgaaggccaagtggag

SEQ ID NO: 715965 - DNA, 100 bp, Homo sapiens
cgacagctgtcagaggggcaggagcttctgggagccaccgtctgaaggtatgaagctaaaatgcagcggctaagaacgcggctctggagcttgacaggcc

SEQ ID NO: 715966 - DNA, 75 bp, Homo sapiens
cctcacggagctgggcgacgagctgaccctgggagacatcgacgatgtgaactatgaagactttactttcaccat

SEQ ID NO: 715967 - DNA, 83 bp, Homo sapiens
aagtttcctataaggttagaaggccttgtgctcacccaccaacaatttagtagatcaacaacccctccccgtcgtaaacgctg

SEQ ID NO: 715968 - DNA, 83 bp, Homo sapiens
ctccacccatcaccccagaacaccccgcagaaagtgcctgtgcatcaggtgtgaaatctaagaatcccctgccaactcttgag

SEQ ID NO: 715969 - DNA, 90 bp, Homo sapiens
tcgagcgcatcgaggatttggcgctgcagaaccagatccgggagcacgtcatctccatcgaggcgtatctggtgcaggccgtgagagcag

SEQ ID NO: 715970 - DNA, 78 bp, Homo sapiens
agcagctgaaagagctattgaaaaaatgaatggaatgctcctaaatgatcgcaaagtaaggatgccctgcagtggtct

SEQ ID NO: 715971 - DNA, 71 bp, Homo sapiens
gcggtcatggagggagcaggagctggatccggcttccggaagaaatacccgcagcccaaagggcagaagaa

SEQ ID NO: 715972 - DNA, 100 bp, Homo sapiens
cgagctggacccggaccggttttgggatgatcacggacgtgcagctcgccatcttcgccaacatgctgggcgtgtcgctcttcttgcttgtcgttctcta

SEQ ID NO: 715973 - DNA, 74 bp, Homo sapiens
aagattagcaaaggtgctaatccagtggaaatcaggagaggaaactttaccctcccagaggtagctgagtgctt

SEQ ID NO: 715974 - DNA, 100 bp, Homo sapiens
tttttcaaggaatataaagatcgggattacatggcagaagggctcatatttaactggaagcaggagccagggagtaacgaagagatcaaagagttcgccg

SEQ ID NO: 715975 - DNA, 51 bp, Homo sapiens
agcctggaagagccccgagcgtctcatcagaaaattgaagactccgaagaa

SEQ ID NO: 715976 - DNA, 100 bp, Homo sapiens
ctcattatagcctcaaactcccaggctcaagcaatcctaccatgtcagccttcccagtagctggaactacagcaaggtgattgagcactgcagtaacttt

SEQ ID NO: 715977 - DNA, 101 bp, Homo sapiens
ccctttgaattaattatggctgccatggccagtgcagctgtggggactgcctgtgtgactccgactggaccggctactactgcaactgtaccacgcgtact

SEQ ID NO: 715978 - DNA, 50 bp, Homo sapiens
atctaaacttggcaccaagtatgtgaattttgaagattgcaccggtcgac

SEQ ID NO: 715979 - DNA, 100 bp, Homo sapiens
caaaaaagaagacttcaagcgtttggggatggatagaatgacagaagatgctcttcgcttgaatctgttgaagcggagcttggacccagcagatgagcga

SEQ ID NO: 715980 - DNA, 82 bp, Homo sapiens
cccggacagagcccgtggtcgcgcagtactatactggcaattgctggagaagattttgcaattgttgcttctgatactcgat

SEQ ID NO: 715981 - DNA, 100 bp, Homo sapiens
gcccagcctaactgcccagtggcttccagatgtaaccagaaaccgaaacttcattgccccttcaatgtgggaatccagccagaccctattcttggacagc

SEQ ID NO: 715982 - DNA, 100 bp, Homo sapiens
agctctgcgccgatctatgcacgcagatgctggagaagtccccttatgaccagcaatctgcacatcgtgctgccacacgaggcttcattcgttatggctg

SEQ ID NO: 715983 - DNA, 90 bp, Homo sapiens
gtctcaaactcctgagctcaagtgatccacccaccgtggcctcccaaagtgctgagattaaagctgatcctggagaaactaaaaccttct

SEQ ID NO: 715984 - DNA, 51 bp, Homo sapiens
gcaccttcccctgccttggaaagatatctccggagcatttggataatgtga

SEQ ID NO: 715985 - DNA, 82 bp, Homo sapiens
ttgtcgcaggtggacttcttgcaacaggttaacgtgtatggcgtgtgcgtgccaggatgaccgagtgggagacagcagcacc

SEQ ID NO: 715986 - DNA, 98 bp, Homo sapiens
agggaaggaaatcatgtcaagcgaagccttgaaaaagctgccctgagacggtgtcccgccgaaaggtgaagctcgtgtgtggagtgccacggtacaat

SEQ ID NO: 715987 - DNA, 75 bp, Homo sapiens
tcagacggagtggatgaccagtatctttattgcccaggttttgagagtattttagaagggctttatggaccacgg

SEQ ID NO: 715988 - DNA, 75 bp, Homo sapiens
ttttcagtctccttcccaccacaactatctgtaagagaggttgtcatttagtaaaaacggagtagttagaataga

SEQ ID NO: 715989 - DNA, 74 bp, Homo sapiens
tttctgctggagggaagtgttttcacaggtgacctggtactgcttgatgtatgtccccttacacttggtattga

SEQ ID NO: 715990 - DNA, 98 bp, Homo sapiens
ctttgacctggacctcggctacagactgctggctgtgtgtgctgcaaaccgagacaagttcaccccgaagtctgccgagctagggccatgagtacctt

SEQ ID NO: 715991 - DNA, 98 bp, Homo sapiens
caaaggagctggcccagcaactttcccagaacgcaccgcaagctccctcctcggcctgagacctgggaggaagctggagaaaagatgccctctgaatc

SEQ ID NO: 715992 - DNA, 51 bp, Homo sapiens
aaaagaatgaaccgcttgcttcttatttagtcctattttgtaacggattat

SEQ ID NO: 715993 - DNA, 90 bp, Homo sapiens
tcggatttcaccacaagaagggctgccagaatgattacggacctgaagccaaagaacaagatgcgctagtggacagattgctgaccaggg

SEQ ID NO: 715994 - DNA, 74 bp, Homo sapiens
gcccggcaccgttccgcggacgtgctcgaacgtgcgcatcgaccccagtagcctgtccttcaacatgtggaagg

SEQ ID NO: 715995 - DNA, 83 bp, Homo sapiens
ccgaggacatggacctgtacagcatcaactacctgcactttggggagcctaagtcctgctattactataacaagcgcattctg

SEQ ID NO: 715996 - DNA, 100 bp, Homo sapiens
ttcacataaagaaaggcgagctgacccaggaggagaaggagctactggaagtcatcgggaaaggtggaagcagggaaaggcctggagatgaggaagctgg

SEQ ID NO: 715997 - DNA, 50 bp, Homo sapiens
gtttgttcaggaaccaccagtgacagagaatactctgaagatagtaactc

SEQ ID NO: 715998 - DNA, 100 bp, Homo sapiens
cagccagtgccccttgctgtggaggatgtatttgaactttctgcacccatttgtcaggagtgccaaaggagtgtcaatactgcgagacttaattaatgaa

SEQ ID NO: 715999 - DNA, 83 bp, Homo sapiens
gacctaagtacagaccccctccgcaaaccaacctcctggctccaaagctgcagttccagggtctgccacaaggtacctccagg

SEQ ID NO: 716000 - DNA, 98 bp, Homo sapiens
ccatatcacagtatcccagatgccaaatgatggagctatgacattgaagagaggaaggttccaaaacccaagtccaagtcttatggtgcaaacttttc

SEQ ID NO: 716001 - DNA, 98 bp, Homo sapiens
cgcacaagatcgccggagtcatattatcgacgtagttaaagcccactagcctaaagccgggcggactgcgccaaactggcaagacgcagtcaagaacg

SEQ ID NO: 716002 - DNA, 80 bp, Homo sapiens
agaagcctgacataccaggactgcctgagacaagccacaagctgcggttcaagctctacgttcgtgacatcaaacctcct

SEQ ID NO: 716003 - DNA, 100 bp, Homo sapiens
gaaagagaaggcagaattaaatcctgagctagatgctttactaggccatgctttacaaggtgaggagcgggggcgttgcttcaccatagaatatgtgatg

SEQ ID NO: 716004 - DNA, 100 bp, Homo sapiens
gcgtctgtactactgaaataggacctcagaaaaagacatgacctaagatgaaggggttctttgcagatgtagttccagcagtcaggaagtggagagaggc

SEQ ID NO: 716005 - DNA, 90 bp, Homo sapiens
aggaatacatggaagtccgggagagaatacacagagccattacaagaatttgaagctgccattaaacaaagagatggcattataacccag

SEQ ID NO: 716006 - DNA, 101 bp, Homo sapiens
tcggacacagaggacagcggcagcgacgagaacctggatcagctgaccacagtggccgagaagtcgcgcgtgctgcagctggaggaggagctcaccctgcg

SEQ ID NO: 716007 - DNA, 100 bp, Homo sapiens
gaccgagggactgggagtcgttagtgagcaaccccaaggtccaggtggaggccatcgaagggggagccctgcagaagctgctggtcatcctggccacgga

SEQ ID NO: 716008 - DNA, 83 bp, Homo sapiens
cttagccctctacttttcaagacaccaagtgagaggccaaccagatttatttaattgcccaactaccactgatgaagatatat

SEQ ID NO: 716009 - DNA, 83 bp, Homo sapiens
ccgggcgaagcgggcgagcggtggtttggacgccggcggagacgcgggcgagtcgagtaatcctgcctgtgtctgtagatgag

SEQ ID NO: 716010 - DNA, 75 bp, Homo sapiens
cgacctccaaggatgcccgtgagcctgttgtcggggccaggaggaacgcagtggatgcctttcgggtcaatgtta

SEQ ID NO: 716011 - DNA, 116 bp, Homo sapiens
gagacgagaccagaggccgaactcgggttctgacaagatggccgggctgccccgcaggatcatcaagactcctgggagagttggctctcaaggttctgatttagattcatcagcaa

SEQ ID NO: 716012 - DNA, 82 bp, Homo sapiens
ctactttctggagtttgtgtaaaacaaaaatattatggtctttgtgcacatttacatcaagactcagattgatggacaactt

SEQ ID NO: 716013 - DNA, 100 bp, Homo sapiens
ctcagccttctgagtcagcctgaaaggaacaggccgaactgctgtatgggctctcggtcttgcgagtggctggttccctgcagaagagcacagaagtgat

SEQ ID NO: 716014 - DNA, 75 bp, Homo sapiens
aattttccccccaaactgcaataagccgccttccaaggacccacgcagccacccagcctcagcactcatctgcgc

SEQ ID NO: 716015 - DNA, 82 bp, Homo sapiens
gaccaagtacctgcagatcctgacctctctgatgagatggatcgtactgtcaagatgataagcatggaataaagcttcagaa

SEQ ID NO: 716016 - DNA, 75 bp, Homo sapiens
catgaagatggcggtggagataagaggatgactaatccaactgctgaggtctccctttatgtgtttgatggaaca

SEQ ID NO: 716017 - DNA, 75 bp, Homo sapiens
cagaccctctgggagcttctcagccattttccacagatcaggtactccaaagattcaggtttactcacgtcatcc

SEQ ID NO: 716018 - DNA, 114 bp, Homo sapiens
gagcgcggggcgacgctggctgcagggacccggtgacagcgtgagaggttcgcagaagtttccaggatggcttctgcatcaacttctaaatataattcacactccttggagaat

SEQ ID NO: 716019 - DNA, 90 bp, Homo sapiens
tcaagagctcagaccctaaagaggatatgatggttaccgcccttcattctctaacactccaaacagtggttatacacagtctcagttcag

SEQ ID NO: 716020 - DNA, 74 bp, Homo sapiens
tcgtcgagagattcactatggaatcggtagtgaagctgattttagctcctcgagcagcacaggcagcatttccg

SEQ ID NO: 716021 - DNA, 98 bp, Homo sapiens
ctaatggcacaactgtccacgtaggcattcaccccagcaaggtggcacttactcaaaagcatctactcctaatggttatgataatggcattatttggg

SEQ ID NO: 716022 - DNA, 87 bp, Homo sapiens
caccctccaactttgcgacggaaatgtgtcatcgaaagccagctttaatgaagcaccagttgagattcccagtccttctgaaacccc

SEQ ID NO: 716023 - DNA, 100 bp, Homo sapiens
ctaaagtgaatgactccaacgaattaggtggtctgactaccagtggctctgcagagctggaaagtgaaatttcaaccacagcagatgactgcagttcaga

SEQ ID NO: 716024 - DNA, 80 bp, Homo sapiens
aggaggcgaggaggagagacttacggcaagaagaagctgaaatacctgccctacaatcaccagcacgaatacttcttcct

SEQ ID NO: 716025 - DNA, 83 bp, Homo sapiens
gccgagcagattctacaacacatggtggaatgtatccgggaggtcaacgaggtcatccaggtttggtgcacctcgatttggag

SEQ ID NO: 716026 - DNA, 83 bp, Homo sapiens
atggaagccaaagttcatcagagtccaaaatggtgatcaggaatttggtgccctggttgtcagatgttggaaagcagtaggac

SEQ ID NO: 716027 - DNA, 89 bp, Homo sapiens
catgcttcaggctcctctctttactgctgaagctttacttcgagctcatggatatgatgtttcagcttctccgaggtctggactttctt

SEQ ID NO: 716028 - DNA, 90 bp, Homo sapiens
cactggacgctcatcagagggaagatctttttcctcaattgagcaacattttgcagatgttgtacttagtgaagaatttctcaatcttgg

SEQ ID NO: 716029 - DNA, 100 bp, Homo sapiens
agaccaactgccccgccaccgtcatcaacgggcagtttgtcgaacgatgttggactcatagtcactgccagaaagcaaccttggccatggaccagccggc

SEQ ID NO: 716030 - DNA, 100 bp, Homo sapiens
agctgtgatctccttattggaacaaggaaaagagccctggatggttgatagagagctgactagaggcctgtgttcaggaagccaaagctgtagttgaaga

SEQ ID NO: 716031 - DNA, 75 bp, Homo sapiens
gcgaccactgcccggctgccttccacctccagtgctgagcttggaggactcctgaagtatgtacgacccttcttg

SEQ ID NO: 716032 - DNA, 100 bp, Homo sapiens
ccaacccatccaggagacagctaattgaccaggagccccctggtgaaggccatcttccatgcctgcagagccatgcatgcctcactccctgggaaagcag

SEQ ID NO: 716033 - DNA, 75 bp, Homo sapiens
gcagtgctgcacgaggagcgattcctcaagaacagtcattcagtggtgcacccaccacaaggatgaccctcctcc

SEQ ID NO: 716034 - DNA, 75 bp, Homo sapiens
cagtgacgggtctggagtgcgtgggggaccggctgttggcgggcaccatgactcctgtgaggatgcagcactccc

SEQ ID NO: 716035 - DNA, 50 bp, Homo sapiens
cttggaggagggagcgcatcgcccgagagagctggcggtcaccatggcaa

SEQ ID NO: 716036 - DNA, 100 bp, Homo sapiens
gcctttgtaaaattgacagagaggggaaaccccgtaaagtggttggttgcagttgtgtagtagttaaggattattgcatcgagcttttagtgtcttctta

SEQ ID NO: 716037 - DNA, 98 bp, Homo sapiens
tttgtgcaggacaccgacatggaacagggactcactgggggaatggtggaaagcagcagacataattggagtgggttggataagcaaagtgatattca

SEQ ID NO: 716038 - DNA, 50 bp, Homo sapiens
cagaatcgcgtttggctgtgctggaacaagcacatcatgattgacttggg

SEQ ID NO: 716039 - DNA, 82 bp, Homo sapiens
ccagtggaggccgacttcttgtatgcatactccacagcacctgcccccacagaacctttattgtgtaagtttgctgatggag

SEQ ID NO: 716040 - DNA, 101 bp, Homo sapiens
aaacagaccttgaaagacaaaactggcactgattcaaattcaacagaatcctctgaaacttccacaggtgagtggtgtcattgagcaaacacgaagtcggg

SEQ ID NO: 716041 - DNA, 100 bp, Homo sapiens
gtgacatcaatgaaaggagggttctgacacgttctcacctcgcgggatggcagctgctgatttgtcccatggatcctgatggtgaacatgccaggagagc

SEQ ID NO: 716042 - DNA, 97 bp, Homo sapiens
cgcagggtcgcgatgctgcccggtttggcactgctcctgctggccgcctggacggctcgggcgctggaggtcaaagctcagattcacagttgcataa

SEQ ID NO: 716043 - DNA, 90 bp, Homo sapiens
ccgcgatgtagccacccggcgctcgctgggctacgcctacatcaacttccagcagcccgcggacggcaagatgatgatgaatgaagtcct

SEQ ID NO: 716044 - DNA, 75 bp, Homo sapiens
ccacaatcttcaatgagtaaacatattcctgtctcctctgagcctccggcctccataagacccaaaacagatgac

SEQ ID NO: 716045 - DNA, 83 bp, Homo sapiens
cagaaggcgatcaaggccaagtatccgccagtcaataggaagtacgagtgtgaggtgttctaaggatacattttattgaagct

SEQ ID NO: 716046 - DNA, 100 bp, Homo sapiens
ctagcatttatgcttgcaggtgttattctaggaggagcatacttgtacaaatattttgcacttcaagaagagagaagggcacagttacctaagtatcaac

SEQ ID NO: 716047 - DNA, 83 bp, Homo sapiens
aaggagctcaactccaaccacgacggggccgacgagacctcagcgagggcggcactgctcacaggacggctacccatccgcaa

SEQ ID NO: 716048 - DNA, 100 bp, Homo sapiens
ggaagatcctggagccaaagatgttgtccaccttgacagtgaaaagattcaagatggaaaaggtgatgtaaccattacaaatgatggtgctaccattctg

SEQ ID NO: 716049 - DNA, 100 bp, Homo sapiens
aatcaagatttaacattccaacacataaaaattatttatccaacagctcctcccaggctgtcattttagaaaatgaagaacttcccaaactgtttcttga

SEQ ID NO: 716050 - DNA, 75 bp, Homo sapiens
ctggccaccaccagatgccaagagttcaaactcaacaatattatccccatgccaacagagcacttatggcaaggc

SEQ ID NO: 716051 - DNA, 97 bp, Homo sapiens
agcatgctctctgccggtggcatcacagccaccacagcatctttctgaagccgggagagggcctgtagggttaagatccttctattctacgtaatat

SEQ ID NO: 716052 - DNA, 97 bp, Homo sapiens
tctgtggagacggacatagtcgtggatcactacaaggaggagaagtttgaggacaggtccccagctgtctgcgagcctggctgtggtgcacatggaa

SEQ ID NO: 716053 - DNA, 50 bp, Homo sapiens
gtgcttaaggaagagtgatgaagaagtgtatgctgacttgtaaagtgaag

SEQ ID NO: 716054 - DNA, 101 bp, Homo sapiens
ggcgggcgagcgagaggccgaggatataattggtgattacaactttcctctataaattaactcttgacactccttgggatttgaagaaaaaaatgcctggt

SEQ ID NO: 716055 - DNA, 82 bp, Homo sapiens
ctgccacaaaccaggccaagatccacgctgacgcagagcggaaggaggaacttgctactaccagcaccatgccctaccaata

SEQ ID NO: 716056 - DNA, 113 bp, Homo sapiens
gcctgccggaaggctccctcggtcgcgagtatctccgtttcctggatgtgaaccttcctgtgcttcccagaattccatcatctgactgccatcctagaaggcattctcatgag

SEQ ID NO: 716057 - DNA, 90 bp, Homo sapiens
tctgctgtgggcgctgctggcgctctggctgtgctgcgcgacccccgcgcatgggatggcaccacagatgtgacgcggacaatgcatttt

SEQ ID NO: 716058 - DNA, 98 bp, Homo sapiens
cgccttgtaaatgatttatccaaaattgctcagggaagaagtggacatgagctgggaatgacacctctgcaggagcccgtaggtcatcttggagggtc

SEQ ID NO: 716059 - DNA, 100 bp, Homo sapiens
actctcaccatcatcaagacggaaaaagtcgatctggagcttttcccctccccggccaaagatgtaacttatatatgtccattcactggcgctgtacgag

SEQ ID NO: 716060 - DNA, 138 bp, Homo sapiens
ccagccgtccgacctggatctccaagacgtagaggaagtggagatcggcagagacaccttctggcccgaaattgttccaactgctggtgttctgcaagatggagccaggaggagagcccacaggtgctaaagagagca

SEQ ID NO: 716061 - DNA, 80 bp, Homo sapiens
ggatgaactgataaaacccaccagtctagtacttcctcctgtgctggttccaagacacagcgaatataatcctcagcaca

SEQ ID NO: 716062 - DNA, 83 bp, Homo sapiens
cacatatacatgggcagtgccaacatggactggcggtctctgacgcaggtatttgaaataccttaccaagaaataccttaaga

SEQ ID NO: 716063 - DNA, 90 bp, Homo sapiens
ggtggacagccaaacagaagctttatttgagaacaggtgtccggctttgctggcccagcaagcctgataagcatgaagctcttatctttg

SEQ ID NO: 716064 - DNA, 75 bp, Homo sapiens
cagtggagctggtcgcagatcctgagacccggacagtggcagtgaaacagaaccagctgctgacaaaaggcatgg

SEQ ID NO: 716065 - DNA, 82 bp, Homo sapiens
aaccattgacgccatgtcgggttattcgagtgaccgagaccgcggccgggaccgaggattcttcgctgctgctgccttaccg

SEQ ID NO: 716066 - DNA, 100 bp, Homo sapiens
atctttcggtgtctatctgcactttctttgacctgaatgttacgttcataacttactaaggattagtgtatattttccaaccttgaggcatgaaattctg

SEQ ID NO: 716067 - DNA, 75 bp, Homo sapiens
cagatgattctctgttgccagcgccagcaggaggagcaggctattgagggcacctacattgacaagaaatgcccc

SEQ ID NO: 716068 - DNA, 101 bp, Homo sapiens
tttagaagaggaagaagaagaagaacagaaaattggaaaagttgttcatcaaccagggcagagcggcttgggtaaatccaccttaatcaacaccctcttca

SEQ ID NO: 716069 - DNA, 98 bp, Homo sapiens
tgattttgtagcaagtggtgataacacactcagcatcactaaagctttcaagtgttctctgggatagagagagatcaagcttttatagcctgacgagt

SEQ ID NO: 716070 - DNA, 98 bp, Homo sapiens
cacctaagcagcagccattggaaccgggagaagccgcactccactctgactcccaggacgggcaccagcccagcgacttctccgtgtcccttaaagcg

SEQ ID NO: 716071 - DNA, 50 bp, Homo sapiens
aagatgaagatgaaaccaagcccttggtgcagcagtgaacagcagtgaga

SEQ ID NO: 716072 - DNA, 96 bp, Homo sapiens
agaaagtgcgcagcctgcaagattgtggtgcacacgccctgcatcgagcagctggagaagctaacaggcctcacctcttccattccggagatgatc

SEQ ID NO: 716073 - DNA, 100 bp, Homo sapiens
ctgtttactacaaatgcttgctctactagtggaaattctaatctttcacagacacaggagtcttttagtcctgctatacagctgcaccttgtacatcaag

SEQ ID NO: 716074 - DNA, 74 bp, Homo sapiens
agatccagaggcaacagggacatggccacctgggacgaaaagattgaccctcttgctggaatgacatctcttag

SEQ ID NO: 716075 - DNA, 100 bp, Homo sapiens
ttggtggctaaagaaggaaaactccatttgttgttcaccgtccggtcagagaaggaaccactcgttttgactattattttatcactctttgtgaaacttc

SEQ ID NO: 716076 - DNA, 90 bp, Homo sapiens
gatgtcctagaagtcagtctcagatgctatactgacttctgttgaaaccattcaaagctaaagacatggaccttcagcagtgtaagaaga

SEQ ID NO: 716077 - DNA, 100 bp, Homo sapiens
cgccgcccggctctgcttgctggcgtttgccctgcagcccctccggccgcgggcggcgcgggagcctggatggacaagcaccgtctgcgtcctgctgtcc

SEQ ID NO: 716078 - DNA, 100 bp, Homo sapiens
ccagcccgaggtggacatgagtgaccggggcatctccaacatgctggatgtcaacggcctctgaaaatcctgccttgcttcgttgggcctatgcaagaac

SEQ ID NO: 716079 - DNA, 88 bp, Homo sapiens
ctcctcctccccaccaccaccatctccatcacccaccaacaacaccacaataatccacagccaaggggacaaagcatgtaacttgatg

SEQ ID NO: 716080 - DNA, 98 bp, Homo sapiens
gtggcgaagggaatcgcaaggctcttccctgaccattttctactgtccctgcgcgagttgttgaatgttgggtcacgaagatctcaacctggccaaag

SEQ ID NO: 716081 - DNA, 83 bp, Homo sapiens
agaaggtggcagacccggtttgctgatcgccccagggatcaggagacaatgcagatcttcgtgaagactctgactggtaagac

SEQ ID NO: 716082 - DNA, 80 bp, Homo sapiens
tgtccagttttcaaaccacacaggattctgaaaccttccttgtatccctcctgagacatctttgctgcaagatcgaggct

SEQ ID NO: 716083 - DNA, 100 bp, Homo sapiens
ggctgcgcgcgcgggaccccggagcccaaacccggggcaggcgggcagctgtgcccgggcggcacggccagctcctgtcttcgttcctggctagaacaag

SEQ ID NO: 716084 - DNA, 98 bp, Homo sapiens
gcagatggcactttccaaagtggatgcctccggggagggaaatgtttcaacgtgcgcaagcgttgcggcggcgggcagaggactactacagatgcaaa

SEQ ID NO: 716085 - DNA, 75 bp, Homo sapiens
tggagctccgcgtttgaccccaactccgaggaggaaaatttgctgtttgatgaatatcataaattaaagctgatt

SEQ ID NO: 716086 - DNA, 80 bp, Homo sapiens
gttgtctcagggagcacagaaattgattataccggaacagagccttccagtccctgtaataaatgtttatctccggatgt

SEQ ID NO: 716087 - DNA, 104 bp, Homo sapiens
ctcccagccacctctgaagttgccaggcttcccaacattcttgtctgtgcaattctgtggtgttcttggtcacacatttatggagtttctgaagggcagtggag

SEQ ID NO: 716088 - DNA, 76 bp, Homo sapiens
aatgagcctgaagacaaggatgtgactgtatctgtgcctaggtttgctgtggggattgtaataggaagaaacgggg

SEQ ID NO: 716089 - DNA, 83 bp, Homo sapiens
agactgatggccagcagagggcgaagtttcaagcagacttcacttgctcttgtacatgagctggatgctagtgattccagttc

SEQ ID NO: 716090 - DNA, 90 bp, Homo sapiens
aaatctccctgctccgcagcgacatcaccaagctggaggtggacgccatcgtcaacgccgcaacgaaggttttgggaacagtaaaatggt

SEQ ID NO: 716091 - DNA, 82 bp, Homo sapiens
cccgcgggtaactgggccgttgccgccgtccgcgctcggcccccgcggagagattgaccgactcatcagtcacggggccgac

SEQ ID NO: 716092 - DNA, 99 bp, Homo sapiens
ggtaaatgacgaaggggcttcttccagagccaaggaggaagggttgtccggtttgtcactcaagccctatcagaaggttggtttgaattggctggcatt

SEQ ID NO: 716093 - DNA, 80 bp, Homo sapiens
aaactcaggaccatgatggctcagtttcccacagctatgaatggattacaagggccagaagctagctgaacagatgtttc

SEQ ID NO: 716094 - DNA, 101 bp, Homo sapiens
gtcatcaactcactcagctcgtgttttggcttcctcgatcctactctgtctctctttgttttggagaagggtgctcgaatcattgtgactccagaagatgc

SEQ ID NO: 716095 - DNA, 140 bp, Homo sapiens
aaaatgtaaaggatcctgtagaaattcaaaccctagtgaataaagccaagagagaccttggagtaattcgtcgacagcaccagaagaatgggccacaacccgctctagcttgaaggcaccaccgcaaaggtcagccagag

SEQ ID NO: 716096 - DNA, 97 bp, Homo sapiens
ggatctccctgtcctacctcacgggggcggcggtcctcacctgtcccaacgcctccttcacggaccttgccgaaattgtgtctcgcattgagcccgc

SEQ ID NO: 716097 - DNA, 100 bp, Homo sapiens
tcaccttgaagaggaagacggggcggaagaccaagatcatcgagatggaatctttgtgacattctctctcagcattctttatcccctgtttgctgaagac

SEQ ID NO: 716098 - DNA, 82 bp, Homo sapiens
caggaactggggggccgactatatcctgctcatgggcctcctgagtgacccagaattaggtccagcagcagctgatggcttc

SEQ ID NO: 716099 - DNA, 75 bp, Homo sapiens
aaagagaagggaatgctaagaactgctgggaggatgacagattttgacacttcatgacatgtcattatttagagc

SEQ ID NO: 716100 - DNA, 75 bp, Homo sapiens
gtaaatttgacagagagcgaatagaactgttttgcacggaatatcaggtgtttgacttcacctttagcccagaag

SEQ ID NO: 716101 - DNA, 112 bp, Homo sapiens
gatcaaatggcacttcattggccacctacagaaacaaaatgtcaacaaattgatgggccctgggaggagcggggacactgaggacctctctccaaattggcctctcaactca

SEQ ID NO: 716102 - DNA, 82 bp, Homo sapiens
ccaagacgatcgtgtacgacttggacacatcaggggggctgatggaggtttggtgcacctcgatttggaggaagtagggcag

SEQ ID NO: 716103 - DNA, 98 bp, Homo sapiens
cgccgagaggccgtgcgggacgcgggcgccaggaccggccgaacgcagagggttcccagcaccatgagggcctggatcttctttctcctttgcctggc

SEQ ID NO: 716104 - DNA, 100 bp, Homo sapiens
tcccaagcagttgttgcacaggtaacaggtctgtttatgatggtgaagaacatggacgtttcatggagaagcttgaaactcgtatccgtaatcacgaccg

SEQ ID NO: 716105 - DNA, 75 bp, Homo sapiens
cgaagaagaaaggattcgttacagccagagattggcctccccatggccacccatggaccagtcggcattcacttc

SEQ ID NO: 716106 - DNA, 82 bp, Homo sapiens
cggtggatgggagtgaaggacggaagaggccctgcggaggcggcggtgcagcgctccggaggcagtaggggacacattagaa

SEQ ID NO: 716107 - DNA, 83 bp, Homo sapiens
ctggccgctaatggaactgaagacagctgggcctaacaagtgcccaggtgactcagtaagactttgaccccgacgcaggcttc

SEQ ID NO: 716108 - DNA, 100 bp, Homo sapiens
gacaagcttaccctcttctgcgaggaaaggcagactacaagttactgagcacctccctgagaaaattgaaagtagtttacaggaagatgaacctgagaat

SEQ ID NO: 716109 - DNA, 100 bp, Homo sapiens
ccatttatgaagcacccgttaaaaatagttctacgaggagtgaccaatgatcaggttgacccttcagatgaatttcacccattcatcgaggcacttcttc

SEQ ID NO: 716110 - DNA, 98 bp, Homo sapiens
ctcaaacaatgatgaaggccttattaacaaaaagttacccaaagaacttctgttaaggcaaaaatagacatcttattagttggagatgtcactgtggg

SEQ ID NO: 716111 - DNA, 100 bp, Homo sapiens
aaagagtcaacagcagtggcaacagggattcgataaacaagtggatgtgtcatatattgccaaacattacaacatgagcaaaagcaaagttgacaaccag

SEQ ID NO: 716112 - DNA, 90 bp, Homo sapiens
accatcgcagttggaagcccatggggcagtccctggctatcttcttcagtgactgctccatccatggtagccccagtcacttttgcatct

SEQ ID NO: 716113 - DNA, 100 bp, Homo sapiens
taaattttatgttcacaatgatatgtttcgttatgaagatgaagtgtttggtgattctgagcctgaacttgatgaagaggatggagatgaagatgaggaa

SEQ ID NO: 716114 - DNA, 50 bp, Homo sapiens
ggctggctgctgcccgaaatgccaggcctgtcttcgctcctgcttccaag

SEQ ID NO: 716115 - DNA, 98 bp, Homo sapiens
ccaccaccaccatctccatcacccaccaacaacaccacaataatccacagccaaggaatggtctggaacacggacctggtggagaccctggagctgca

SEQ ID NO: 716116 - DNA, 100 bp, Homo sapiens
gtccagcagagcgaggaggccatgcagtctctaggttctgtggatggagttataaaggaagtgaatgtgagcccatgccccacccaaccctgccagctga

SEQ ID NO: 716117 - DNA, 50 bp, Homo sapiens
tctggactgatgaaaatccatatgcttccttcaaaatgtctactgttcac

SEQ ID NO: 716118 - DNA, 90 bp, Homo sapiens
cgctgctgctcgggctgctcttggaggctcagaacgcccagcagctccatgaacgaatccagtcctcgagtatggatgccaagctggaag

SEQ ID NO: 716119 - DNA, 83 bp, Homo sapiens
ccccagatgtcctcatcatcccgtcagagctgaggtacttcgtgaaggccacggcagagacaacgtgtgtaccccaagtgcac

SEQ ID NO: 716120 - DNA, 100 bp, Homo sapiens
agccaacaacagtgacggaatgcctccatacatgtgatgatcctgcaggaagtgcaggagagacccccgggtggctttcgagagaacaggtttttgtact

SEQ ID NO: 716121 - DNA, 100 bp, Homo sapiens
gagtcaacatatcaatggagcaagtcacagtcgtcgatgccagcttcttcttgaaatcgggctacattgagagacctcagctgattcgagcaaaagtgcc

SEQ ID NO: 716122 - DNA, 75 bp, Homo sapiens
tccgagctgagatccatctgcaccacggtgctggattatgtgctggccgtggaggcgtatcattcggttatcaag

SEQ ID NO: 716123 - DNA, 80 bp, Homo sapiens
gctctgagggcactggcctagttcccgacttgtttctcagcatctagataaaacccttcccaccatgaataatctcatca

SEQ ID NO: 716124 - DNA, 50 bp, Homo sapiens
atgcacaagctgcacttcctgcacagaatgtccctcttccagtggaaagc

SEQ ID NO: 716125 - DNA, 107 bp, Homo sapiens
agcaaatctccttggatttcctccagagttcggttatcaacgaaacttctcagcatcacgatgaccttgaataaaaattgcacacactcagtgcagcaatatattac

SEQ ID NO: 716126 - DNA, 100 bp, Homo sapiens
gaaaatagcctttgccatcactgccattaagggaatgggtactgttcaaaaaggaatgccccacaagtgttaccatggcaaaactggaagagtctacaat

SEQ ID NO: 716127 - DNA, 83 bp, Homo sapiens
ataccagtccccagtgagggtgtacaaatacccctttgaattaattatggctccgcttgatggcattgaaacgaatgggaatt

SEQ ID NO: 716128 - DNA, 100 bp, Homo sapiens
gtcctacttcaaatgtgtgcagaaggaggtcctgccgtccatgcggaagatcgtcgccacctggatgctggaggtgctggagagtcatgcctgtgagccc

SEQ ID NO: 716129 - DNA, 74 bp, Homo sapiens
attgtgaggcctccccagccacgtggaactcccgacttaaatctctgcaatggctaacgaagcttatccttgtc

SEQ ID NO: 716130 - DNA, 82 bp, Homo sapiens
gcacatccaggctggtcagtgtggcaaccagatcggtgccaagttctttatagctccaagctctacagattcttcaaatata

SEQ ID NO: 716131 - DNA, 75 bp, Homo sapiens
ccaccctgcccccaagaaggaagtcatcatgggccggcctggaacagtgatcagggccaaagcggtcagtgagaa

SEQ ID NO: 716132 - DNA, 75 bp, Homo sapiens
ataaaaggggtctctgcgtctgtagttcatttgaccaaacgcgctttgaacttcaagattcaggaagctctctac

SEQ ID NO: 716133 - DNA, 102 bp, Homo sapiens
tgcagaaaccaacagacaatgccaatttacgtgtcattatggaactacttatgagggcccagtcatatatgcacagttagaccactccggcggacatcacag

SEQ ID NO: 716134 - DNA, 100 bp, Homo sapiens
ccagaagccgccaacgaggacgatccatggcatcccggggctttgacggacttggaccactctataggaactcagtatagtgccaacccacctgttacaa

SEQ ID NO: 716135 - DNA, 101 bp, Homo sapiens
aattggagatggggaccgccctggacatcaagattaaaagagcgaataaagtttatcacgccggggttcacgagtactaatcttcagtcaaatgacaaggg

SEQ ID NO: 716136 - DNA, 75 bp, Homo sapiens
cacaatggcccagatggagaaagctctgagcatcggatttgagacctgcagatacagaagatcattgagacactg

SEQ ID NO: 716137 - DNA, 74 bp, Homo sapiens
ttgatgggcacctcccgggacggtcccgtgggagtagggctgaatgaactgaaacgaaagctgctgatcagtga

SEQ ID NO: 716138 - DNA, 134 bp, Homo sapiens
cttaatctgggccaaaaggaatgaccctagccagactcagggatcaaagagcaaacagattcagtggcctgcattgtggctgcttcaacccccaactccactgctggtgcagccatgaactccttgacctctct

SEQ ID NO: 716139 - DNA, 75 bp, Homo sapiens
ccaagtgggtgcatgtcagctgtgccctatggattcctgagcttcgccgacacgaggtgaccatctgcaattacg

SEQ ID NO: 716140 - DNA, 86 bp, Homo sapiens
gcgtccgccgattcctcctccttggtcgccgcgtccttggctggcgtaccttcacggcatggtgcaactcccacctgcggaaggca

SEQ ID NO: 716141 - DNA, 100 bp, Homo sapiens
gctatcctctttttaagggctgggagaactcaggaagcctggtggtatggtcaggaaaaagactacaatgtactagtcatggatcttctgggacctagcc

SEQ ID NO: 716142 - DNA, 75 bp, Homo sapiens
cgaccggagcgaacgccacgccgttggatccagagacaatggccccgatgggatggagcccgaaggcgtcatcga

SEQ ID NO: 716143 - DNA, 75 bp, Homo sapiens
ctgcagttaccggaacctttgccaggactagtacaggaccacggatttccaatctgggcaaagtgatgtcggtgg

SEQ ID NO: 716144 - DNA, 90 bp, Homo sapiens
ggaaatgtcgggggcctcatcagaaatgttacacacggagtatcaaactctgctgccaaggaagctattttgccagccacttcattatgg

SEQ ID NO: 716145 - DNA, 100 bp, Homo sapiens
cacctcctaaccttcccttcttgaacccccaggtttttctatatgagtggagaagacagctgttaccagggaggtcatacaacatttttttaggatgtct

SEQ ID NO: 716146 - DNA, 100 bp, Homo sapiens
cctatctcagcccttcgtactgggacgttggggagggggctgtgccgggcggagagaactcagcgaggattctgagagcatgaataatctttcatttagt

SEQ ID NO: 716147 - DNA, 48 bp, Homo sapiens
cagtgccagccgtatccagcagtgtccccctgaagcccagaaaagagt

SEQ ID NO: 716148 - DNA, 75 bp, Homo sapiens
gcctcggcagccaaggagggccaggttcaggagaagtggcacctggtggaggacctgtcgcgactgctgccggag

SEQ ID NO: 716149 - DNA, 100 bp, Homo sapiens
gcgccttcgcggaccgagcctgacggagccggaggctgggagccgcggcggcctgggaacaactctgctcatggtgattacatgcaaaataacgagagca

SEQ ID NO: 716150 - DNA, 110 bp, Homo sapiens
ggaaaaggaggaattcgccgtgcccgagaatagctccgtccagcaggttcctgatgttattagcagcataaggcaattatctaaagcggccatgaaagaggatgccaaac

SEQ ID NO: 716151 - DNA, 73 bp, Homo sapiens
tgtccagtttgaaattctcagtgatcagtcagtcaactttggttttagtaatgattacagtggcgagatcttg

SEQ ID NO: 716152 - DNA, 100 bp, Homo sapiens
ggggaacgcggcgaccgccaagaaaggcagcgaggtggagagcggtgccaaagatgtacaatgggaatttgtacatggtttacttgaaaatgctatttat

SEQ ID NO: 716153 - DNA, 83 bp, Homo sapiens
ccttggaggatgactctgaatcgagatcggatgtcagcagctctgccttaacagcattggcatcaacaaaagtcagaattccc

SEQ ID NO: 716154 - DNA, 83 bp, Homo sapiens
gtgtgtggagtttgcaaacaaattattgacggtcaaggtatttcatgccgagctgtttgcagacaaggtcccaaagacagcag

SEQ ID NO: 716155 - DNA, 101 bp, Homo sapiens
gcggctctccagcaagaaggtggcaaggctgctttgactctcccgcgaagacctttccttcactgttctactgtgattcccgttgtggttctgaccctgaa

SEQ ID NO: 716156 - DNA, 75 bp, Homo sapiens
gacaagaagaaaatctctgccacgtccatcttctttgaatctatgccctacaagattgagtctcgctctgttgcc

SEQ ID NO: 716157 - DNA, 80 bp, Homo sapiens
ggagtgcgtgggggaccggctgttggcggcatgtccggcatgatttcgggtggcaacaaccccttgggaactcccggcac

SEQ ID NO: 716158 - DNA, 83 bp, Homo sapiens
tccgcccaggcgcagatgcgggccctgctggaccagctcatgggcacggctcgggacggctactgcagcactggggtgtcagt

SEQ ID NO: 716159 - DNA, 100 bp, Homo sapiens
acgccctcatggggaaaatctccccggtgactttcaggctgaagccgacgtagcttctctgaacagacgcatccagctggttgaggaagagttggatcgt

SEQ ID NO: 716160 - DNA, 88 bp, Homo sapiens
tgacaagaaaagctgtggcaaccgaaatgagactccctcagatccagtgataattgacaggtaagaatgattgatgttggctgatatt

SEQ ID NO: 716161 - DNA, 100 bp, Homo sapiens
tgcagctcgggaaagcctcgcgaagatgataggggggaaacctcaagatataatcttcacttccgggggcactgaggtttgtggcactgacaatcagacc

SEQ ID NO: 716162 - DNA, 83 bp, Homo sapiens
atgtctgagactcctgctcagtgtagcattaaggtgattgaattactcagatatgaagatcatcatctaggttttgtgtaaaa

SEQ ID NO: 716163 - DNA, 75 bp, Homo sapiens
gccgtccggagccagccaacgagcggtgcaaagtccttcgtggatgcaacctcaaccatatattctacagcaccc

SEQ ID NO: 716164 - DNA, 100 bp, Homo sapiens
cttcgacttggagtctttgtccaggacgggtgtcttttatgaataatcaaaagcagcaaaagccaacgctatcaggccagcgttttaaaactagaaaaag

SEQ ID NO: 716165 - DNA, 90 bp, Homo sapiens
tagaagcaggagtaggacaaggagtaggagtcgaacatcgggtcagaagttgagatttccactatcgagaaacaacggaaggagctgcag

SEQ ID NO: 716166 - DNA, 90 bp, Homo sapiens
ctgaaataaaaggcaatcttgctgaaaataaatttgtagatgaatatatcatatctccatcacctgttgtgcagaagattctgaccttat

SEQ ID NO: 716167 - DNA, 75 bp, Homo sapiens
ctctcccagcagagtcgtatggcaacgatattggcacttctctgtttgatgaagagggagccaagattgtcaaag

SEQ ID NO: 716168 - DNA, 100 bp, Homo sapiens
gaggaagatcctggagccaaagatgttgtccaccttgacagtgaaaagctgcaagctttcttcctggtggcagatgacatcatggattcatcccttaccc

SEQ ID NO: 716169 - DNA, 75 bp, Homo sapiens
tcatctagaaaaacaagagatgcagattctgggtcacgaagatgcagcagcttttttatgagaattacgagcaga

SEQ ID NO: 716170 - DNA, 50 bp, Homo sapiens
cccagcctcctggccagccctgtaccaaatatgccccaacagcggcaaga

SEQ ID NO: 716171 - DNA, 75 bp, Homo sapiens
cttctctggaccaacttgaccgtctactggaaatctgaatgctgttatcacagtcagaggttccggttgagatca

SEQ ID NO: 716172 - DNA, 51 bp, Homo sapiens
agtacacacactggaacacacaccagccgcatggactctcgtcctgtcacc

SEQ ID NO: 716173 - DNA, 83 bp, Homo sapiens
gccctcatcctggttctggaatcctcagttcaagtatccggctgctttgatgaacctgggagccattctgcacctcaatggca

SEQ ID NO: 716174 - DNA, 75 bp, Homo sapiens
ccgttgcgagctgcagctgcgatctctgtggtaggcccagtgtctgcacatcaccgaacgatgagagaggactac

SEQ ID NO: 716175 - DNA, 101 bp, Homo sapiens
ctgaaaggtggtccagccgcctggccctgcgtgggaccctccacctggcagcagggcagcgaggtcacaggccccacctttgctgatggcgagctcatccc

SEQ ID NO: 716176 - DNA, 100 bp, Homo sapiens
ctgcgccgatctatgcacgcagatgctggagaagtccccttatgaccagaatgtatgacaacatgtccacaatggtgtacataaaggaagacaagttgga

SEQ ID NO: 716177 - DNA, 74 bp, Homo sapiens
tggaaaaaaactacagaattcactgttcagtccataatattgaggagatgttaaagtaacccatcttgcaggac

SEQ ID NO: 716178 - DNA, 75 bp, Homo sapiens
caactcccccatcgtatgaatctgaacaggagtacagctgtgtagtaaagatgccttctggtgaatttgcacgta

SEQ ID NO: 716179 - DNA, 74 bp, Homo sapiens
tcgacctgctaacagaactggaccttttcggaaagtgtgctgtgttgtcattcaaggacttcctctcctgcagg

SEQ ID NO: 716180 - DNA, 82 bp, Homo sapiens
cccaggtgtaagcgcagaaagcaggcgaacccgcggcgcaataacgataaactcaagccatggagggattactgcattacat

SEQ ID NO: 716181 - DNA, 100 bp, Homo sapiens
agtcataggattagatgatccaagtcaccaagaaattactgtctcaagtgatacgctatttccgtgaaagaagaaatgttgctacctcaactgaaaaatc

SEQ ID NO: 716182 - DNA, 97 bp, Homo sapiens
ggataatgaagtgaaggcctttatgagaggacagaggctatatgaaaagtttgatgagaagagggcagtgcagcagctgagagcatgtggtgtcctg

SEQ ID NO: 716183 - DNA, 100 bp, Homo sapiens
tagcaagcacatggtgcagatagtgggactgcaagagcttcaggtggacagtgtggagctcctcttagagaaatgcactcggtgatggaaagagagccac

SEQ ID NO: 716184 - DNA, 82 bp, Homo sapiens
agagcgtgtggcatctccacctcaaggggagatgcagttaaagacttgatgcttcgctttctgggtgaaaaagctgcagcaa

SEQ ID NO: 716185 - DNA, 74 bp, Homo sapiens
ctcgtccgacctcacaggccgacaagatacctctcgcatgtccacctcacagatcaccgcagacctgctgtcca

SEQ ID NO: 716186 - DNA, 100 bp, Homo sapiens
gtttcttcaagcggaaaataatgatcaagcggcacgaggtggagcagcagaacattcgggagggtcacgtcgtggacggccacaagctggaagtgaggat

SEQ ID NO: 716187 - DNA, 100 bp, Homo sapiens
aagtggatggatcgttacgaaattgactccttgataggcaaaggttcctttggacagcttgctagagaagttttggatgttgctgccggcatgattaaac

SEQ ID NO: 716188 - DNA, 76 bp, Homo sapiens
ctggaacatgcagagtctgcacaataacaaatgtggcaattattttggatctatcacctgtcatcataactggctt

SEQ ID NO: 716189 - DNA, 100 bp, Homo sapiens
ttctgggacaacgcgtacgagttcaacctcagcgctctgaagttgcaaaagcttctcatttcagagagatgccaggatcctaagtgcctgccaaacttac

SEQ ID NO: 716190 - DNA, 75 bp, Homo sapiens
attccaagtaactcttatttggcaatccgatttacgacttttttctgggacgagagctcaaccctcgtatctgtt

SEQ ID NO: 716191 - DNA, 113 bp, Homo sapiens
gatcagaaatgttgcttctacttttgaggcgcttccctgaaacggtggtgcagcatgggtctctcatcacttttgtgaacaagcacctgaacaagctgaatttggaggtgacg

SEQ ID NO: 716192 - DNA, 85 bp, Homo sapiens
tctgctccctcgcttgtcttctcgggcttctcgccccggccgcggccgggtcctcagctatggcattgctggttctaccaacgtg

SEQ ID NO: 716193 - DNA, 100 bp, Homo sapiens
ctttttttttcttgtgagagagttacttcaagttgtgtttggagctgacgtgagcgaggttggtcatgtgctcgggtacaccaggggttggaaaaaccac

SEQ ID NO: 716194 - DNA, 90 bp, Homo sapiens
caaaggcaagagtaacagcagcgccgtcccgtccgacagccaggcccgggagaaaaaaaagcagcaagcctcggcagcagtcaatcctcc

SEQ ID NO: 716195 - DNA, 88 bp, Homo sapiens
gattcgcagtggtcgcttcttctccttggctcatagcctcaggagtggtgatgcgcccctatgtggaggccaacatctcccacaagtc

SEQ ID NO: 716196 - DNA, 98 bp, Homo sapiens
cgggcagcatggttcactccagcatgggggctccagtttaagaggcgagttcaggagtccacgcaggtgctacgggagctggagacctccctgaggac

SEQ ID NO: 716197 - DNA, 50 bp, Homo sapiens
tagcagacaagatcagatccacaggacactgcccatctctaagataagaa

SEQ ID NO: 716198 - DNA, 51 bp, Homo sapiens
actacctcgcccacgagagtcggaggctgttttggagtcagcggaagatca

SEQ ID NO: 716199 - DNA, 100 bp, Homo sapiens
gttacttcttcctcaacaccagcaccgcagatgttgtcaaggtggcctaccaggaggccaggggtgtcgccatgcacatggacggcagcttctctgtgaa

SEQ ID NO: 716200 - DNA, 76 bp, Homo sapiens
aagtgatgagaagctgtcggagcttcccaaggcaattactaaagatatgtttgaagaagcactgcgtgccctggca

SEQ ID NO: 716201 - DNA, 100 bp, Homo sapiens
gcgcagggcctgccaggtggcgctcggtctcctagtaggacaaggaaagcccagcaagcacaaccacatggcagagactgagaaggaggaagtgagcaat

SEQ ID NO: 716202 - DNA, 100 bp, Homo sapiens
gaagaattaagcgccttgagcaagaaaaacttgaactcagtagaaaacttcaagtttcgagaggcccgtgccatgagaccgcctggggtgagcaaggcga

SEQ ID NO: 716203 - DNA, 83 bp, Homo sapiens
ggccaagttcggggccaggacgtcgggaggacctggtgctttgcaagatatcaccttgtcacagcagaccccctccacttgga

SEQ ID NO: 716204 - DNA, 100 bp, Homo sapiens
cacatccccagccattttcctgagttccctgatccccacacctacatcaaaactccgattgactggggcgactttggggtagaggcagtgtctgagggga

SEQ ID NO: 716205 - DNA, 100 bp, Homo sapiens
cagatgtggtggaatatgccaaggaaaaactggagagcttcatcaaaaatagtgatagctttgataagaaatggctagtgatgagctgaaagagatgcgg

SEQ ID NO: 716206 - DNA, 88 bp, Homo sapiens
ggtcgataatggaatgctttacctggaatggatattactgattttgggcactccaagattttgggagagacctctctcatgagaacct

SEQ ID NO: 716207 - DNA, 75 bp, Homo sapiens
ctgatttttagaactccacatttgagatcaacctctccacttctcctacacctgcacagttaataagccgttccc

SEQ ID NO: 716208 - DNA, 50 bp, Homo sapiens
ctgacagtgaggttgacaaaaagcaatggccaatgtacatggtggactat

SEQ ID NO: 716209 - DNA, 50 bp, Homo sapiens
attttatgttgtgtcatttcgaagggagatgacctggcttccaccacttt

SEQ ID NO: 716210 - DNA, 98 bp, Homo sapiens
gggcagagcgcggcggcgcgggatttattggctatgctccatatgtcaaccgtatagttcaacaatggaatctccaggataatgatgatgatcagctc

SEQ ID NO: 716211 - DNA, 49 bp, Homo sapiens
gcgtcggcagctgctgctccgaggtcagcccaaggccaaccccactgtc

SEQ ID NO: 716212 - DNA, 106 bp, Homo sapiens
tgctttgtgaataataatcgtcaatgccagtgtacttcagttggtgcacaaaatactgtcatttgctcaaagcttgttgacctcctgtactggagagacattaaga

SEQ ID NO: 716213 - DNA, 96 bp, Homo sapiens
gtttcgttcaattgtttcagctttgaagagagaagctttggttaaaggttttaaaacatgaatcctacactcatccttgctgccttttgcctggga

SEQ ID NO: 716214 - DNA, 100 bp, Homo sapiens
tctttggggattttgccagtacagtggtgccttaaaaatggagtcagcctcactcctcccaaagtgggaaagaagcctaaggaataaagtcatctctcta

SEQ ID NO: 716215 - DNA, 96 bp, Homo sapiens
aagagatgggcctcctgcagggcagcagcggtgacaagagggctccgggagaccagtgtgacaagctggctgctgactgtgcccacgagctgcggc

SEQ ID NO: 716216 - DNA, 79 bp, Homo sapiens
gccccttctcccaggaggggaggcaccacccaccaaggctccggatgtgttccccatcatatcagggtgcagacaccca

SEQ ID NO: 716217 - DNA, 90 bp, Homo sapiens
aggttacgcagcaaaccatccagaaggaaagaccacagcaagattctttcattcgtctcctcctagcctgggggaccaggctcgaactga

SEQ ID NO: 716218 - DNA, 101 bp, Homo sapiens
gaaactaaagcttgacggcttggacgaagatggggagaaggaagcgagactcatacgcaacctcaatgtgttctaagaacggaagcatctgggctggatgg

SEQ ID NO: 716219 - DNA, 97 bp, Homo sapiens
aaaagaggcgaaaggaagcaagcagttcagaagagccaaggaataaacatgcaatgaacccaaaaggggccatgtgaaactttctgactttggtctt

SEQ ID NO: 716220 - DNA, 73 bp, Homo sapiens
gctcagcaagtgccatgctacagcccctgcttgacaaccaggttcgggatgagtatcggcaggactacgatgc

SEQ ID NO: 716221 - DNA, 83 bp, Homo sapiens
aaaaaagtagctgtcattggtggtggcttgaacatccagtcatggataaaaatgagctggttcagaaggccaaactggccgag

SEQ ID NO: 716222 - DNA, 100 bp, Homo sapiens
ccgcttactacggacagaccccaggtcctggcggcccccagccgccgcccacgcagcagggacagcagcaggaagctcttcgtgggcggtcttgactgga

SEQ ID NO: 716223 - DNA, 74 bp, Homo sapiens
gaaccacaagaaaatcaaaagaaacttttgcccttatcagtaacacctgaggaccttgttgctcgcctggatga

SEQ ID NO: 716224 - DNA, 75 bp, Homo sapiens
ggccaccaacgtgggctccattcgcatctactttgaccggacctgcaatgcttcttttgccacccgagaccgtct

SEQ ID NO: 716225 - DNA, 75 bp, Homo sapiens
ttgatttgaggaggatgcttcgcagtttacgaaagccaggccaagtctattgcagaacagaagagattcccgttt

SEQ ID NO: 716226 - DNA, 50 bp, Homo sapiens
atggatatctctactcgctccaaaggatctccctaatactatgaacgcgg

SEQ ID NO: 716227 - DNA, 98 bp, Homo sapiens
gtgtttactccaacatgggcaactacaagtcctttggtgacaccaagtttgttcccaacttgcccaagcttaccctcttctccacctgctccccggct

SEQ ID NO: 716228 - DNA, 50 bp, Homo sapiens
ttatggatgaaatagatgctattggacgactgggtttggattcagaagag

SEQ ID NO: 716229 - DNA, 98 bp, Homo sapiens
tgggaggcgaggacggtctctgccagtataaatgcagtgacggccctggagagtgaatttgtttcctgccagcttcaccaatggattgatctcatttt

SEQ ID NO: 716230 - DNA, 49 bp, Homo sapiens
acttcctaggcagaatgcttggaaaggcttgcaccctcacgacatgctc

SEQ ID NO: 716231 - DNA, 52 bp, Homo sapiens
gtggcatcttacagggcagatttctgggtctccctctgttgcccaggctgga

SEQ ID NO: 716232 - DNA, 100 bp, Homo sapiens
ttttccacagaatttgggcctgaaaatctgagctgcgaagaagtggaatacttttgtaacaaagcacctgttcttcccggagcctatcagcaaagccatt

SEQ ID NO: 716233 - DNA, 94 bp, Homo sapiens
cccagctcccgtagggagccgtgggcgctcggtgcccgggccgggcagggcgtctctggccgagcctctttttgtggaaaacgacagcagcagc

SEQ ID NO: 716234 - DNA, 98 bp, Homo sapiens
gagacagagtgaagaaactgtgttccccccttgggttgctatcggtgaaatgacaatggatgctctgttggctcgattgaaacttctgaatccagatg

SEQ ID NO: 716235 - DNA, 100 bp, Homo sapiens
cctgggatcggcccaaggccagttctccgcagtgtactaatggtcacttgatgtgcgctggctgttttatccacctactagcagatgcccggctgaagga

SEQ ID NO: 716236 - DNA, 100 bp, Homo sapiens
agaccgtgaccgagagcgtgaccgagagcgcgaatatcgtcatcgttagaagggttattcaaatgctcagaagactattcttctgcaggtggatcagaac

SEQ ID NO: 716237 - DNA, 51 bp, Homo sapiens
gcagctgcctcagttcttagcgcaggtggagtctcgctctgtcacccaggc

SEQ ID NO: 716238 - DNA, 75 bp, Homo sapiens
ccaaatgagctcatcctgggctgtgatgctgcttcaaaagtcatggtggaattgctcggaagttacacagaggac

SEQ ID NO: 716239 - DNA, 82 bp, Homo sapiens
taaacgccaataatatggagacactaatcgaatgtcaatcagaggtcctggcaaaactggcctgtggactaaacaagcccaa

SEQ ID NO: 716240 - DNA, 95 bp, Homo sapiens
aatggccaaagccctctgccacctcaacgtccctgtcactgtggtgctagatgctgctgtcgggttcctcctgcacaccagcttcctgtctcccc

SEQ ID NO: 716241 - DNA, 123 bp, Homo sapiens
ctcagcggtgttggaacttcgttgcttgcttgcctgtgcgcgcgtgcgcggacatggcctcaaacggttgattcttcaccacactgaaaccattaggaaaaatccttgtggttaacagcagag

SEQ ID NO: 716242 - DNA, 100 bp, Homo sapiens
ccagccgctcgcaggcgccgcacggagttgcgtcccggggacttggggccgcagggagttgcatccttaatgtccagtcaaggagtggtgacaccagtgg

SEQ ID NO: 716243 - DNA, 130 bp, Homo sapiens
gaagcgcttccccaggcggcggcggtcctggtgcggaccctccggccgcagccatgtgggacccgcgggcagctaggtctcctctgagcctccggcctccataagacccaaaacagatgacacctcttcc

SEQ ID NO: 716244 - DNA, 90 bp, Homo sapiens
gccctgaaaaacggagacttggatgaggtgaaagactatgtggccaagtgccggtggtggtgtgcacattgagccccggtatagacagtt

SEQ ID NO: 716245 - DNA, 100 bp, Homo sapiens
ggacacagcggggcaggagcgcttccgcaccatcacctccacgaacacctcatcaaaatgcagaagcagaaactgcagatgcccccgcagcccccaccgc

SEQ ID NO: 716246 - DNA, 98 bp, Homo sapiens
cagggaccaggggggcggcagcgctggacacccagcctccagagtcactttgtggcatgtatgacagccatcttaaaccagatgggtgaccagcacta

SEQ ID NO: 716247 - DNA, 129 bp, Homo sapiens
gacgctcccagccctgaagagaaactgcaccttatcacccggaacctgcagcgccctcacaaagccaatgctgaggagatgaccaagtaccacagcgatgactacattaaattcttgcgctccatccgt

SEQ ID NO: 716248 - DNA, 101 bp, Homo sapiens
ccgggactagtggaccagctggtgaaggcagacagcgagtggcgacgatctgcccaacatgttcggcgaccttcggtccacgtttattgccttgatgattg

SEQ ID NO: 716249 - DNA, 78 bp, Homo sapiens
tcttcgcctcgcctcgggacccgcggtccccgctcttgctggaaacttccattttagaagaatacagtatcaattgga

SEQ ID NO: 716250 - DNA, 100 bp, Homo sapiens
ccaattcaggcccctccacttcctctagggagactgcaaacccctcttgtacatgcagtggccatgcaaatatctgtcatctgcacacaggaaaatgttt

SEQ ID NO: 716251 - DNA, 52 bp, Homo sapiens
gtgtttgtgggaaaggcttctcaagcactgctcagcacgcaggcatgtgagg

SEQ ID NO: 716252 - DNA, 90 bp, Homo sapiens
acggggcaggctgagttcctcttgctcacagagctctgtaaaggcattgccgtctgcaacgtgcccgcggcgtctgtggaggagacggcc

SEQ ID NO: 716253 - DNA, 50 bp, Homo sapiens
ttggacacagattctggaaaacaggaactcttaacattcagggatgtggc

SEQ ID NO: 716254 - DNA, 75 bp, Homo sapiens
gaggacaagaccatcgagctcatggatatttggccttgacattaaaggcagagactgtggcaatgaggcagctaa

SEQ ID NO: 716255 - DNA, 74 bp, Homo sapiens
gagaactcagcgaggattctgaggtgagattaaatttacctacacctagagaaataattggagcacatgtctat

SEQ ID NO: 716256 - DNA, 74 bp, Homo sapiens
cggaacttgccgcgtcgaggactgtcggccatgccagtgacggtaacccgcaccaccatcacaaccaccacgac

SEQ ID NO: 716257 - DNA, 82 bp, Homo sapiens
tcattaatgacaatcagccatcctggattggacagaagaggatcacctagcccgggtagaagaggcaatcacccgtatgctt

SEQ ID NO: 716258 - DNA, 75 bp, Homo sapiens
tctggaagcggctcaatgaccatggcaagaactggcgtcacgtttacaagaaaaggtgtgagcggtactgggccc

SEQ ID NO: 716259 - DNA, 80 bp, Homo sapiens
agtttatctggatgttatcagatcacagaccatggtctcagcttaccctgaaagaagcagatcccagttcaaaagtagcc

SEQ ID NO: 716260 - DNA, 76 bp, Homo sapiens
ccggcaggttgggaggagcggccgaaggtggacttaaatgaagaagaaactatattgatcatcaggcgtctacata

SEQ ID NO: 716261 - DNA, 50 bp, Homo sapiens
cagacaccatacaatgaaagttccacgtcagtcattggcaccatgaactg

SEQ ID NO: 716262 - DNA, 88 bp, Homo sapiens
cgctcctgagggcaaaacccagagcagacaccgcagccaccgcggatgcaaaatataaagatgaagcgcagctgtataaagaagagca

SEQ ID NO: 716263 - DNA, 88 bp, Homo sapiens
ggagagagcgagctgagtggttgtgtggtcgcgtctcggaaaccggtagcgcttgcagcatgcagccagacccggtccgtttggaatg

SEQ ID NO: 716264 - DNA, 74 bp, Homo sapiens
cccattcattctggattggtggatctgaagtacaaaatattttccagggtctgggtctgccgcccaggatggag

SEQ ID NO: 716265 - DNA, 90 bp, Homo sapiens
cttggggaaggaggcgtcttggcccgggcagcagtggcggcagcgcccgagagaggaagctcttcgtgggcggtcttgactggagcacga

SEQ ID NO: 716266 - DNA, 101 bp, Homo sapiens
ggttcctctcattgcaggctgaaggactttctgggacaagtgttttgtacattgggagagatcgttggttcacagggaagtcgcctggaaaaaccaatagt

SEQ ID NO: 716267 - DNA, 98 bp, Homo sapiens
cgcagttactcatctcaagggcagggtctgggtctttatcgtatgcacgaaggagagagagtgagaagtctctagaaaatgaaacactcaataaggag

SEQ ID NO: 716268 - DNA, 96 bp, Homo sapiens
aaactcagtgagacacaatttatcattgaataagtgttttaagaaagtggacaaagagaggagtcaggagccttttgtggcagatgaatatattga

SEQ ID NO: 716269 - DNA, 74 bp, Homo sapiens
ggagatctggaagatcaagaagctcattaagagcttggaggcggcccgcggcaagtgcagccgcggagccctgt

SEQ ID NO: 716270 - DNA, 100 bp, Homo sapiens
tctagaccctaagaataacctggtgattttccacagaggtgaccatgtctgggatggaaaatccagtagtaatcatgcaagttattcatccagatgggac

SEQ ID NO: 716271 - DNA, 83 bp, Homo sapiens
caattaagaaacatcagggagataaattcaacccagtggaatgtgtttctgatcatctgaatcttaatcatgtccaactgcct

SEQ ID NO: 716272 - DNA, 75 bp, Homo sapiens
agaaagcctcctaccttgattgcatcagggccattgcgctctcaaaggtctatggccctgtgttcactctgtatt

SEQ ID NO: 716273 - DNA, 112 bp, Homo sapiens
cccagtgaagctgccagtgaagaaagtaacagtgagatagagcagcatttggccatccagtgtcattggtctcagaggccagcagttattggagatgtccttcaagtctaca

SEQ ID NO: 716274 - DNA, 100 bp, Homo sapiens
gatgaacaacctgctgatgagggaggtgcccctgcgttgtaccatccgcctgtgggacacctaccagtgaaacaaagagtcctcttcgtggaaaagaaaa

SEQ ID NO: 716275 - DNA, 101 bp, Homo sapiens
gcctctgccgggtcgacaagctggggacgcgtcctcagacgcagcgtctagtccctggccatagctccgccgctgcccgatatttggagttcttacaacat

SEQ ID NO: 716276 - DNA, 90 bp, Homo sapiens
gcgggagagagaatgagccagagggacacgctggtgcatctgtttgccggagggtatgtcgagagtaccaacgtggcaattgcaaccgag

SEQ ID NO: 716277 - DNA, 100 bp, Homo sapiens
gttcagcacaccagtggggcagtgcctcggtggctttctttcagatgcaggctggtacagtgatgctgagaaagtttttctgtcctgccttcagttgtgt

SEQ ID NO: 716278 - DNA, 75 bp, Homo sapiens
cttgtatgcctcaatttgctggatttaagcactgctgcactttatgagttgagtcagcagatactggagttattt

SEQ ID NO: 716279 - DNA, 100 bp, Homo sapiens
catcagtgtttgggaatgattctgatgatgatgatgaggagatctattgggaaactgattataaccactcgggcaccatcgatgcccacgagatgaggac

SEQ ID NO: 716280 - DNA, 98 bp, Homo sapiens
aatgataaactgcgaggacagagccactgggaatggttttagggaagactgttgccggatgacaaggctgtcactattgttctgtactacctgacatt

SEQ ID NO: 716281 - DNA, 83 bp, Homo sapiens
tcgtctcttacgtctgcggaagtgcagctgcctcagttcttagcgcaggaagatgagaatgtgcctactgctcctgatcctcc

SEQ ID NO: 716282 - DNA, 121 bp, Homo sapiens
cagagagatgtcggatttcgacagtaacccgtttgccgacccggatctcaacaatcccttcaaggtgaggccgcaggcggtgctctgggtccgggagcgctgtccccagcatgaacgcggc

SEQ ID NO: 716283 - DNA, 100 bp, Homo sapiens
cgccagcagcagctgcagcagtggcagctgcagtagcggcagcagccccagcctcaaggccagcttcagtatcagacacagcacagcagccatctgaaga

SEQ ID NO: 716284 - DNA, 74 bp, Homo sapiens
ctgttggtttcaaggttaactacaaagacactggccaaaagaagaccctagacaagaaagatggaagacgaatg

SEQ ID NO: 716285 - DNA, 82 bp, Homo sapiens
aaccaacgcctggctcggagcagcagcctctgaggaagttctccagcagctgattgtaatgaatttgcccaatgttttgatg

SEQ ID NO: 716286 - DNA, 100 bp, Homo sapiens
gagatctaccgctatgcccggagcctggaggagctgctgctggacgccaaccagctccgcgagctgcccgaggatactgctattgttcatccagttccca

SEQ ID NO: 716287 - DNA, 50 bp, Homo sapiens
gtcacgtggcccagatttatgatggtgagagatgagaacctcaagtttat

SEQ ID NO: 716288 - DNA, 78 bp, Homo sapiens
ttccacatcattgacttactgctttgtgaggagacatggaaatttacactacagaaggcaagacaaattgtcaagaag

SEQ ID NO: 716289 - DNA, 76 bp, Homo sapiens
gtggcaatgagaccagtggaagcagcaccatcggggagacaagcaaattcgacacctcttagaggctgcaatccca

SEQ ID NO: 716290 - DNA, 100 bp, Homo sapiens
gtgctgatggacaccgtctccatgcccgagttcatggccaacctcaggctcagctgaagaagcatctgtagggaatccagaaggagcgttcatgaagatg

SEQ ID NO: 716291 - DNA, 74 bp, Homo sapiens
cttacaacattaatcagatactgcatttaagatgttccatttaagcagacctcttccatagctgtagctggagc

SEQ ID NO: 716292 - DNA, 83 bp, Homo sapiens
cgatcctctagagcactgtgtgtctccccggacgcgagcccgctcccctgactgttcctgggcatgtacccagaagagcattt

SEQ ID NO: 716293 - DNA, 75 bp, Homo sapiens
agcctcaaacaggagctggagcagctcaaagaggacactctttaaattcatgaagaaatttgaagcagtcctgag

SEQ ID NO: 716294 - DNA, 100 bp, Homo sapiens
ttcatatgagaccttccagcagaagatgctgcgcttcctggagagccacctggatgacgccgagccctacctcctcacgtctatacgagatactccagcc

SEQ ID NO: 716295 - DNA, 75 bp, Homo sapiens
tctacagtgctgttagaccttttggctgcaggaattgaaatgcaccagcggttgtctaacatagaaaggaattgg

SEQ ID NO: 716296 - DNA, 98 bp, Homo sapiens
cttccgtcacctccgctcccccgatcctattcccagtcgtgacctattcaaactcagtctgtctcttgactggaggaggagaaggaaaagttgagcac

SEQ ID NO: 716297 - DNA, 90 bp, Homo sapiens
aaaaaaaccttcgactatgcagagacatgagatggtagccaacccctcagcatattattaagtttcaccgtgcatcaaaagcaaataaaa

SEQ ID NO: 716298 - DNA, 82 bp, Homo sapiens
cctcctgagcagctaggattacagatggggacattggttttggacctttacaacagaggatgtctgaagaagtttctttcca

SEQ ID NO: 716299 - DNA, 100 bp, Homo sapiens
atgaggatgaagattcaccaaataagctatatactttggttacctatgtacctgttaccactttcaaaaaactgataaatttcaaacggaagagagtggc

SEQ ID NO: 716300 - DNA, 50 bp, Homo sapiens
tggcgctggagcagcagcagcgcatccggtcttgggatgtcgatcctggc

SEQ ID NO: 716301 - DNA, 76 bp, Homo sapiens
agaagagaggtgatgcaagcaacagccactagtgggtttgccagtggaagtgaagatgcaatgaccggggacacag

SEQ ID NO: 716302 - DNA, 74 bp, Homo sapiens
ccaaccgccccaggcagcacagtggttctccagaagctggggaaggcagatgagaccaaggatgagcagtttga

SEQ ID NO: 716303 - DNA, 83 bp, Homo sapiens
gccaggctctggagcagttccatcagctcagccaggtcttcttaaagcttttcaagccaggccaagaagctgtgaagtaccag

SEQ ID NO: 716304 - DNA, 74 bp, Homo sapiens
cgcgagtgaggaaaggaggtactgtaggtctgggaggggctgaatgtggtgaagacgggccgagtcatgctcgg

SEQ ID NO: 716305 - DNA, 83 bp, Homo sapiens
cccgcacctcagccaaccgaggagaggctgccctcgagccccgtctatgaggaggatttgatgaagatgttaaagcgaaagtg

SEQ ID NO: 716306 - DNA, 87 bp, Homo sapiens
gccgtgatggaaaactgtttctttggggacaagcactttatatcatcgcaaaactcctggtgcagctgtctgcttcagaaagtgagg

SEQ ID NO: 716307 - DNA, 100 bp, Homo sapiens
tgcggggagttgaatctcccgctcccttgaggctggggttgcgtctgttgacgcggccgactacaatcccgagctcattgctatggacagtgctatcacc

SEQ ID NO: 716308 - DNA, 100 bp, Homo sapiens
tccgcggtccaggctgctgccgcgacggggccggcggcggggcagctgccaggaacgagggtagcagatgatatcatcaagttgaatcgaaaggaaggga

SEQ ID NO: 716309 - DNA, 82 bp, Homo sapiens
tccagcacctacgtcccgctgccgtcgccgccgccaccatgcccaagagaaaggctgaccccgcactacatctacccaccag

SEQ ID NO: 716310 - DNA, 50 bp, Homo sapiens
gtccggacccgctgtggccacgtgctgaccccgcactacatctacccacc

SEQ ID NO: 716311 - DNA, 74 bp, Homo sapiens
cccctgagctccaggaagcacgttctctacgtggagcacagggcccactgatgatggtgaagaagagatggaag

SEQ ID NO: 716312 - DNA, 51 bp, Homo sapiens
cagcagcggcgggaggagcctccggggtctacttccccagcaggacagcat

SEQ ID NO: 716313 - DNA, 80 bp, Homo sapiens
aacttcaagccaaacatcaagcagaatgtgatttgcttgaagatatgaggaactgtggctgcaccatctgtcttcatctt

SEQ ID NO: 716314 - DNA, 100 bp, Homo sapiens
gcggaattgcagtgtggaacatggatgttagcagagaagagaatggatcttctaaccaaagacggagatttaatccacagtatcataacaacaggctaaa

SEQ ID NO: 716315 - DNA, 75 bp, Homo sapiens
gcccccttttcctggtgcatgtgaagttatcaaaaacagacccctccacgtcgctgcgcgcaatggcttaaaggt

SEQ ID NO: 716316 - DNA, 97 bp, Homo sapiens
tcagccggggggagttgctcggactcaaacgtccagtcctcgtgcgaccgcgctgggtcggaagtgagcagggaatcatcgcagaagagaacaagaa

SEQ ID NO: 716317 - DNA, 100 bp, Homo sapiens
aacctcgccccttgcaacaaaggcagactgagcgccagagaggacgtttccaactcaaagtgtacgtgaacggagagtgggtgaccaacatcagcgaggg

SEQ ID NO: 716318 - DNA, 100 bp, Homo sapiens
aaggttattttacatgtggatcagtctcgagaagcaggcttcaaacgccttcttcagtcaggaggagcaaagatgtgtatatctcatgattgatatggag

SEQ ID NO: 716319 - DNA, 100 bp, Homo sapiens
ctgccgtacttctgattttgaaacacctgggtctgggcttcccgggcgagcggtggggttctccaaaaaatgtggaatcctttgcatctatgctgagaca

SEQ ID NO: 716320 - DNA, 83 bp, Homo sapiens
aatgacagcaagaggcaaaacttcggacatagaggccaaccaacctttggagggctccagtggtccagaatcttttactgtct

SEQ ID NO: 716321 - DNA, 100 bp, Homo sapiens
taccttcgcattaagaaagacccggtgccttacatctgtgccgagcccctcccttcgaatattctcgagtgaggctgaggggatctggcggtggagcgct

SEQ ID NO: 716322 - DNA, 98 bp, Homo sapiens
tcggcggagcagaggaaccacacgctgatcatgtccaggaaaagcgtgatggttgcagagataccctccacggtctcccagcactcagagagtcacac

SEQ ID NO: 716323 - DNA, 83 bp, Homo sapiens
ctccgtcaatggcttcatcagcactttggggtgacttaagagattaaaattaatttggttgctgttggttctgaacaaataat

SEQ ID NO: 716324 - DNA, 100 bp, Homo sapiens
gtgcgaatgcttgaagactgtgtccaggaaacgattcatgaacataacaagcttgctgcaaattcagatcagggcaagattcttgccaagagaattaatg

SEQ ID NO: 716325 - DNA, 101 bp, Homo sapiens
ggcccttggcctcctcctgctgctactgtgtccagcgcagattcgttgggcttttgccagctctttttagattgtcctcttgagacctgtttacagaggaa

SEQ ID NO: 716326 - DNA, 75 bp, Homo sapiens
ccagcacctacgtcccgctgccgtcgccgccgccaccatgcccaagagaaagagagtcacaccccaaagcctctt

SEQ ID NO: 716327 - DNA, 82 bp, Homo sapiens
ggcggatgccctgcagtacctgcagaaggtctctggagacatcttcagcaggtcatcatcagatttgaaatatttaaagtgg

SEQ ID NO: 716328 - DNA, 75 bp, Homo sapiens
agaagccgagttcaacatcctcctggccaccgactcctacaaggtacatgtcccagagcaagcacacggaggccc

SEQ ID NO: 716329 - DNA, 80 bp, Homo sapiens
ctcagccctgaagaaaagggaaaacttgctgcggttgctcaagagacaactgaagaattggatgtatccattgatattct

SEQ ID NO: 716330 - DNA, 82 bp, Homo sapiens
cctgcacacccgcccctctcctgtgccagttcctggtccagaactttacacagaaaaggtgctcaaaggatatttgtttaat

SEQ ID NO: 716331 - DNA, 51 bp, Homo sapiens
aaagagtaaagttgtgctcaacggtggacaagagcaaggaccaagtgtgga

SEQ ID NO: 716332 - DNA, 83 bp, Homo sapiens
gccaaccatgctcaacttcggtgcctctctccagcagactgcggtttgatctgtggatgaaatgaatcatgattttcaagctc

SEQ ID NO: 716333 - DNA, 88 bp, Homo sapiens
aggacagttcgctacacagcaatgcatcgaggcatatcacacctgaaaaattttatgtggaagcttgtgatgatggagcagatgacgt

SEQ ID NO: 716334 - DNA, 83 bp, Homo sapiens
ccgctctccagcccgcttgaacgaatgtgaaaacctttgcatcttctgatagtctagccaaggtccaagaagtagcaagctgg

SEQ ID NO: 716335 - DNA, 90 bp, Homo sapiens
ccattttgccctgaaagtcccagatttttgctcattaacagaaaagaagaggagaatgctaagcagaccgaattcagtatctggacccgg

SEQ ID NO: 716336 - DNA, 74 bp, Homo sapiens
cgttcattcagggcctgctgtggaagaccagccccaaagcactagaaagtttgggatttggctcttacatcagt

SEQ ID NO: 716337 - DNA, 82 bp, Homo sapiens
tgcagccgcctgaccacggcgactggacttacgaggagcagtttaagcaggaagcggggagaggtggtgagagatgacccct

SEQ ID NO: 716338 - DNA, 135 bp, Homo sapiens
cgaagacaacgacagcgacggctacgccgaagcactcgttccgggggtgaagcctcctgcgccggccttgcctcggcactattcctgatcagagaactccagttgcttcaacacacagtatcagtagtgcagcca

SEQ ID NO: 716339 - DNA, 96 bp, Homo sapiens
aagagattcagtatcactcgctcccttgatgatcttgaggcttcctggactgggtccccaagaagatgcagcgggtgggctgtgtggagctgctca

SEQ ID NO: 716340 - DNA, 148 bp, Homo sapiens
cggcccgatccccggcccggccctgagcttcccttgcccagcatccctgcctggactggtcctgagattcctgaatcagacatccagctctgtcacccaagctgcagtgtggtggcatgattgtagctcactgtaactttgaactcct

SEQ ID NO: 716341 - DNA, 83 bp, Homo sapiens
ctactacgtggtgcttggaaagggccgccgccacaatgggccgcgagtttgggaatctgacgcggatgcggcatgtgatcagc

SEQ ID NO: 716342 - DNA, 73 bp, Homo sapiens
tgctcaggctggtctgcaaaaagttctttggcgagttcacaggttggccctaaaggtgctgtgcgttgcccag

SEQ ID NO: 716343 - DNA, 50 bp, Homo sapiens
ggagatcgctcggacacagaagaacaaggagttttatggacgaggagccc

SEQ ID NO: 716344 - DNA, 89 bp, Homo sapiens
aaatacccctttgaattaattatggctgtcaccatggctgttattggctcccttgctgtccccagctgttccccaggtcacctccccac

SEQ ID NO: 716345 - DNA, 75 bp, Homo sapiens
aacaaagaatacaaagaagctttgaaacactgtaagcctccaccaggcggtgtgaagatgcctaatgtacccaat

SEQ ID NO: 716346 - DNA, 100 bp, Homo sapiens
ccgacacgccggggcgcccgcgcgcggggaccccacggggtgtggaaacaggaagagaactagaactggaagtaaagcattgaagatgtgactgaattgc

SEQ ID NO: 716347 - DNA, 83 bp, Homo sapiens
gatgacccatcttacaatggtgctatcattgtgtcaggtgatgaaaaggctgtggatgagatgaacggaaaggagctcaatgg

SEQ ID NO: 716348 - DNA, 75 bp, Homo sapiens
gccagcgcagcgacggggcgctgcctggcccaggcgcacacggaagtgcattttgaaagcgaagcagaagccgta

SEQ ID NO: 716349 - DNA, 50 bp, Homo sapiens
agaagatcgaaaattaaacctcaggttctggcctataggaacaagacatt

SEQ ID NO: 716350 - DNA, 98 bp, Homo sapiens
gccggcctcctcagtgcgaagaagctgcagccgcacctggccaagggcgaggaaacgagacctctttcgttccttctagaaggtctggaggacgtaga

SEQ ID NO: 716351 - DNA, 75 bp, Homo sapiens
ctgcttttggtttccctggcaggggttgaactgtggagtgtgtgggatgtaattggaaaatcgatgaatcaagca

SEQ ID NO: 716352 - DNA, 73 bp, Homo sapiens
cagcccacagccgggctcgggcttcggccacggcatagctgaagaaggaccatggaaatctcagttatcttca

SEQ ID NO: 716353 - DNA, 83 bp, Homo sapiens
gggacaagaaactagagcaaataaccgttttgaaatttcttgtgaaaatgccattgtgtgctggaaacctggcaagatggaag

SEQ ID NO: 716354 - DNA, 75 bp, Homo sapiens
tgccgcgccaccgagtccggaccggagactttggggcctaactagatgtaggtgcaaaaaactacagacatctct

SEQ ID NO: 716355 - DNA, 75 bp, Homo sapiens
gaacagaaaatcgtcttatagttgagaatttatcctcaagagtcagctggcagcccagacgcagctgagtcggaa

SEQ ID NO: 716356 - DNA, 75 bp, Homo sapiens
tatcggggccctgactcacaagatcactcacctgtccacactgcaggacacaatgtttgcacgaggactgaagag

SEQ ID NO: 716357 - DNA, 100 bp, Homo sapiens
aagcgacagctgtcagaggggcaggagcttctgggagccaccgtctgaagaatagcctaacatggcagaccagagacagcgctcactgtctacctctggg

SEQ ID NO: 716358 - DNA, 100 bp, Homo sapiens
cagtcgcctccaggccaagagggatccttcacccgtgtctggtgagtcgctctgcctgtctgatgacgacacagctgatctgtaagttgctgcggtccag

SEQ ID NO: 716359 - DNA, 96 bp, Homo sapiens
cggtccagcggtcacctacccccagcaccacctccagcccctgcgcctcgtgtgagccactgccccatgttgtgttgatgccaatctgccatgcta

SEQ ID NO: 716360 - DNA, 100 bp, Homo sapiens
gacactgagctttgtggaagcatttggcggcataccaccctgcactgtgagcgcgatgtacaatacggtgtggagtatggaccgcgatgacgcagactgg

SEQ ID NO: 716361 - DNA, 83 bp, Homo sapiens
gcaaagcgctgagaacaggaccccccgcccccgttagtggttacttggatgattgtacctgtgatgttgaaaccattgataga

SEQ ID NO: 716362 - DNA, 83 bp, Homo sapiens
gagctgctaggaagcccctatcgccgagctcgttggagcttgaacccattgtcacccctccgaaaattcatttgcaaattgcc

SEQ ID NO: 716363 - DNA, 75 bp, Homo sapiens
cgccacaccgccgccacaccgccgctgcctcagtcatgccgggtcttcctgagagctatcaacaagtttgcagaa

SEQ ID NO: 716364 - DNA, 83 bp, Homo sapiens
gacctctgagaaagtgagccagaaacatgctgagcctttgacagtgagtcagatggcaaccccagcactgaagatgaatccag

SEQ ID NO: 716365 - DNA, 87 bp, Homo sapiens
agtaatggtggatgaagttgttcattgtttgtcaccacaaaaaggacagatcagtgtactgttacccggacatacctattccttcac

SEQ ID NO: 716366 - DNA, 105 bp, Homo sapiens
cggaacacgagcgagattcctctggttctggtgggaacccagggatgtcacatgtacttcagtttgaggataaaagcagaaaagtgaaagatgcaagcatgcaag

SEQ ID NO: 716367 - DNA, 100 bp, Homo sapiens
agcacctgccctgccagggacctcactgtggccaccatggcacaggaccaagatcactccatggatgaaatgacagctgtggtgaaaattgaaaaaggag

SEQ ID NO: 716368 - DNA, 100 bp, Homo sapiens
gaggaggggtgccggccgggattcgcggcccggagctcgggaccgttaaacacagtgggaatatcacttttgatgagattgtcaacattgctcgacagat

SEQ ID NO: 716369 - DNA, 95 bp, Homo sapiens
ccagacgctgcccgcgggcccggccacggcggagccaaggtgaaagaacttgtcctggacaacagtcggtcgaatgaaggcaaactcgaaggcct

SEQ ID NO: 716370 - DNA, 83 bp, Homo sapiens
tgaacatcctttgactggttagccagatccaggatgagaagactgataaaagaagaagctagctgaacagctgtaaaatgccc

SEQ ID NO: 716371 - DNA, 75 bp, Homo sapiens
acaacccatctacaagtggctgcagggatcctggagcgggttgtgagaaggaatgggcgcgtggatcgtagcctg

SEQ ID NO: 716372 - DNA, 95 bp, Homo sapiens
tccatcgtgtgcctgatgatcacgcagctggctggcttcagtggaccaatcctgtttgaccaaactcagagatcaattaaggcacagcttcagaa

SEQ ID NO: 716373 - DNA, 96 bp, Homo sapiens
gagagctagtctacatggtggagagccaaccaccatcattagacaaggacacagcattgttggttttgccatgtactattttacctatgacccgtg

SEQ ID NO: 716374 - DNA, 80 bp, Homo sapiens
gaagcagaagggcatcaccgtgaagcagaagaggtaacctctaatgtgaagttagcgcacacagttctcaagcatgtttg

SEQ ID NO: 716375 - DNA, 76 bp, Homo sapiens
ggaagacatacaccatgggggaggccagtgtggctatcagaggactcctgaaacctggagagctacctgctgtata

SEQ ID NO: 716376 - DNA, 96 bp, Homo sapiens
cctttccttttgggtcttagacaggttctgccggagacttccatttggcctcaatgtgaaattaaagtagaaaatcacatctacatgcatgttgct

SEQ ID NO: 716377 - DNA, 75 bp, Homo sapiens
agaggttccagttgaccagcattcatagggctaaatttggccgaagatggaccaaaatttcaaagctaattggaa

SEQ ID NO: 716378 - DNA, 114 bp, Homo sapiens
cctgcctgaatggcgggaagtgtgaagcggccaatggcacggaggcctgcgtacaatgcagatcttcgtgaagactctgactggtaagaccatcaccctcgaggttgagcccag

SEQ ID NO: 716379 - DNA, 100 bp, Homo sapiens
tgactgtggagatggcggctcagaagataaacgaggggctggaacacctcgccaaagcagagaaatagtttgttcggacagtgttaccattttctcagga

SEQ ID NO: 716380 - DNA, 101 bp, Homo sapiens
tggtgggcccagtcctcggtgcggcgcggccagctggccaaatttcgcagtctcctgtgcacagcggagggtgaagcagcagcttttctggtgagcaatca

SEQ ID NO: 716381 - DNA, 74 bp, Homo sapiens
tgttttggaactgtcaggtacctcaaagcgccagcattgaaacaggggaccgtgtctggaggatgcctctcttc

SEQ ID NO: 716382 - DNA, 101 bp, Homo sapiens
gcctggagaggttaaagagacccgttcagagtcctacagtggcagttacagatttatggtaatggaaagactaggaatagatttacagaagatctcaggcc

SEQ ID NO: 716383 - DNA, 82 bp, Homo sapiens
gatgcagatgcccctcctccaccagaggactgggaggagcatgtcaacaggtatcaggacctcccctgtcagatgattcagg

SEQ ID NO: 716384 - DNA, 98 bp, Homo sapiens
gcggccgcgggcggcaggaaggagaaccaccagaaaaagcttgagtctccacccccatctaccaatcccttcctggaagatgagccaacaccagagat

SEQ ID NO: 716385 - DNA, 100 bp, Homo sapiens
cctcagtaccagagacagaagcagatggattcgtccttttagcaggagcgagaacccgagcagcgccatgagcaacactaccgtcgtccccagcactgca

SEQ ID NO: 716386 - DNA, 75 bp, Homo sapiens
taaaccattggtccttcgccgtcagtatttgaggagaaagcatttggattggcctaatgaagaagttcaacctgg

SEQ ID NO: 716387 - DNA, 100 bp, Homo sapiens
cgagctggtggtgaccgtgctgggagacctggagcagctgctcttcagccagatgctgggttcatcatgcctagtggcgtataagaagaccccgccaccg

SEQ ID NO: 716388 - DNA, 50 bp, Homo sapiens
gccgcgagcgcggcctgcaggagacctccgcgctctggcagctcctcttc

SEQ ID NO: 716389 - DNA, 100 bp, Homo sapiens
agattctgccaattcgttttcaggagcatctccagatagggccagatttgagtgtgtgaatttttgagtgaaacctggaacccaaatgagaagaaatctg

SEQ ID NO: 716390 - DNA, 75 bp, Homo sapiens
gagaacccttccggtgggctaggtactgagcgcgcgaggaccccaggcccctgccgtatctgtgccatgacgagc

SEQ ID NO: 716391 - DNA, 98 bp, Homo sapiens
accaatacattggacacacctaccaagagattggatctgatgatgaacgtgaacaccagaggcacctaccttgccggggatctgatgagcttctttct

SEQ ID NO: 716392 - DNA, 98 bp, Homo sapiens
atccagcatctttgggcagccattgagattatacggaaccagaagcagattgccaacattgaccgtattacaaagcccacggatgacagtaaccagcc

SEQ ID NO: 716393 - DNA, 98 bp, Homo sapiens
ctgaggaattccgggagtggagccgacttggaaactcaaggccaatctcaggttgagacatgacaatgcagatcttcgtgaagactctgactggtaag

SEQ ID NO: 716394 - DNA, 51 bp, Homo sapiens
cactcagcaccctctgcttaccacagccagacaacatctggggaagatgta

SEQ ID NO: 716395 - DNA, 50 bp, Homo sapiens
gcggacgcggcgccatcgcagtcagataccggggagaccacgacgctgcc

SEQ ID NO: 716396 - DNA, 83 bp, Homo sapiens
ggccgcagcgcgtggccgaggcgggcggcggccagctgggctccacagcccaggtgagcatgtttttgaacacattaacaccg

SEQ ID NO: 716397 - DNA, 100 bp, Homo sapiens
agataacatcgctgatgctgtagcttgtgcaaagagggttgtccgtgatccacaaggcattagagcatggctttgtgccttgggcaaagggcagcttact

SEQ ID NO: 716398 - DNA, 48 bp, Homo sapiens
cgtcgtcggcctctgggcagcaggagagattaaacagattctagaaaa

SEQ ID NO: 716399 - DNA, 82 bp, Homo sapiens
ggctttcctgctggtggcaaccgcctacgagacactcaaggatagctagcggccaggagaaatacagtggaaaatgcaaaac

SEQ ID NO: 716400 - DNA, 100 bp, Homo sapiens
agctgtctgcttcctcattcacatctaggaggagcaagagacttcccacagggcttaaaagacaaccttcttgcttctgggacatccagcctgacagcca

SEQ ID NO: 716401 - DNA, 73 bp, Homo sapiens
tggactaaacaggtcacctgcagtgatgctacaggacgaagaggaatggataaaaacattggcgagcaactca

SEQ ID NO: 716402 - DNA, 75 bp, Homo sapiens
gcagaccgtttggaacaagccaacagtgaaaagttctaggaactattttggtgcacaaccacattatagattatg

SEQ ID NO: 716403 - DNA, 100 bp, Homo sapiens
ggcagacagcgagtggcgacgatgtgtcatggagaaactccagctgggcccagagattctgcagcgggaaaatccaaggcttatttatgccaggctgagt

SEQ ID NO: 716404 - DNA, 90 bp, Homo sapiens
agggaaaatggtccccgaggatctggagaggcagattggtatggccgaggctgaggtgtgcctacaggggttgtggaaggagacgctgcc

SEQ ID NO: 716405 - DNA, 99 bp, Homo sapiens
cggcagttctgaggcgtgcggaacaaatccaggctcgcagaaccgtgaaaaaggagtggcagtgtgcaacttgctttggtgtttgctgttttattgcca

SEQ ID NO: 716406 - DNA, 83 bp, Homo sapiens
agggtcatgtttcctgtgtgaaattgcttctgtcaaagccaacaagtcccaaatttggaaaagctgactcatatgaaaagctg

SEQ ID NO: 716407 - DNA, 100 bp, Homo sapiens
cgggacccagggcccgggatcgccgagcccgacctcgggcgccccgccggtcacctccgcgcggacaccaggaggccccgtgtgggccgcggcccggccc

SEQ ID NO: 716408 - DNA, 83 bp, Homo sapiens
ttgatttagctggtagtgaaaagcagcccactcacccagtgtacaacattggaccagacaaggtgatccaggccactacatac

SEQ ID NO: 716409 - DNA, 83 bp, Homo sapiens
agcggccccagcactcccagctgcgcagggcctgccaggtggcgctcgaaactatgttccaacttcctgtcaacaatcttggc

SEQ ID NO: 716410 - DNA, 75 bp, Homo sapiens
ttccgtgaatcatttgctgatgtacttcctgaagcagctgctctagtgaaggtggcccagttgaaatccttccct

SEQ ID NO: 716411 - DNA, 100 bp, Homo sapiens
aagatgaagagcaagcccctaggaatctgcctgataatcgattgcattggcaatgagacagtgctgttccctcgtcacaccaatgccagtgctcgagaca

SEQ ID NO: 716412 - DNA, 83 bp, Homo sapiens
gggaagaccaagacagtgcctggataccttcgaatagggtgtggatgtggaagcagccaagcgggcagaagaggaattgctcc

SEQ ID NO: 716413 - DNA, 75 bp, Homo sapiens
caacactcgcttggttggggagatcggcgcttggccggtcagttcaccgggacctggaggcccagattgcgatcg

SEQ ID NO: 716414 - DNA, 83 bp, Homo sapiens
cagggattgatcgcctcttcaggtcccgcggcagtgctggtggccatggttcccgtagccagaaggagttgcccacagagccc

SEQ ID NO: 716415 - DNA, 75 bp, Homo sapiens
tgacatcgcgacgctgctcaaaacctcgctccggaaaggggacacctgctgatggtgagaccattctaaaaggcc

SEQ ID NO: 716416 - DNA, 74 bp, Homo sapiens
ggtcgcctagtctggagaactagtcctcgactcacgatggacgacctcagtgggaggtagaagggaagataatc

SEQ ID NO: 716417 - DNA, 100 bp, Homo sapiens
aaggagccagacttcctgtgttaactccttcctctgccactttttaccttggggacctcagatgagattgtggggaacctgggtgaaggcacctttggca

SEQ ID NO: 716418 - DNA, 97 bp, Homo sapiens
agaccttggagcactatacccacaacactgtccgagggtgctcttatttctacaggcgggagacctttgactttgacgacgactgtgacagcctgac

SEQ ID NO: 716419 - DNA, 75 bp, Homo sapiens
tggctgtcctgaaatattataagcaactattggatgattatccgaaatgtttcattgtgggagcagacaatgtgg

SEQ ID NO: 716420 - DNA, 96 bp, Homo sapiens
cagttggatcttgctcagtctctgtcagaggaagatcccttgaatcaaaggcatgggaggttgatacctgccggggccattacaacaatgtatctt

SEQ ID NO: 716421 - DNA, 75 bp, Homo sapiens
ccgagcacggccgcccggccacgaaaaggcgacggcggattgacagaagtatgattggagagcccacaaactttg

SEQ ID NO: 716422 - DNA, 51 bp, Homo sapiens
aaatacgaaggtttctggctggtgcaggaatcacagccatggcccccaccc

SEQ ID NO: 716423 - DNA, 90 bp, Homo sapiens
tgaggttctgcccctattctcacaggacccgcctcgtcctcaaggccaaagacatcagaacatgcttaaggcggtcaatgcgacccagaa

SEQ ID NO: 716424 - DNA, 100 bp, Homo sapiens
cggtgatctacaccatggagaacaagcccatcgtcacctgtggttttacgcacgacgagctgctgaaggtgtggaaaggactgttttattgcatgtggat

SEQ ID NO: 716425 - DNA, 100 bp, Homo sapiens
aaaaatatgatgttcctttgtcgtgggaacaagccaggttgcagacgcagaaggagctacagctgagagagggacgcagcagactgctcgacaaacactg

SEQ ID NO: 716426 - DNA, 76 bp, Homo sapiens
agctgaataaagctgttttggaactgtcaggtacctcaaagcgaatcacactgtcagagtacttccgtgacatggg

SEQ ID NO: 716427 - DNA, 100 bp, Homo sapiens
ctatgggcgtcgaccacagtattccaaccctcctgtgcagggagaagtgatggaggtgccgacttcctggtgacggaggtggaaaatggtggctccttgg

SEQ ID NO: 716428 - DNA, 98 bp, Homo sapiens
gaaccagacgatgagacagagttgcgaccgcgcggcaggttgcctgttcactctgatcgtagtattggaagttctggccaaggcaatcagacaagagg

SEQ ID NO: 716429 - DNA, 74 bp, Homo sapiens
cactttttctaaccccaaggaagtatccacattgaaacgtaaattggaccaggaacctctgtgatggaggtcac

SEQ ID NO: 716430 - DNA, 83 bp, Homo sapiens
ctgcggccggagcgggcggctgagacaaaggcgacgggggatatgagactttctactcggaatatcctgagtgttgcgtggat

SEQ ID NO: 716431 - DNA, 75 bp, Homo sapiens
ggaggaataatatttatggagcatatattatggaacacaatgtatagccatggaattgaattggcttgccaaaag

SEQ ID NO: 716432 - DNA, 75 bp, Homo sapiens
gcctctagtatcaaggatctcaccaaacaacttcagcaagggctccacgtgttccccacgtttgtggcgtacgag

SEQ ID NO: 716433 - DNA, 115 bp, Homo sapiens
gccgccgccagagaggcccgcccaccagttcgcccgtccccctgccccgttcacaataacactctgctccagccaaggtggtgagggcagctgttcctaaacagcgcaaaggcag

SEQ ID NO: 716434 - DNA, 73 bp, Homo sapiens
agaagctacaaacaagaaatgggaaaactcgaaacagattttgaaggtgaaattgttgaagtggatgaagaaa

SEQ ID NO: 716435 - DNA, 100 bp, Homo sapiens
acgtccacatgtgggtactgcattcctaccggtgtgacaggacacattcagctaacgtattttagcaggtggagtgaggttgaagattcctgtgacagcg

SEQ ID NO: 716436 - DNA, 50 bp, Homo sapiens
cgcctcacagctcatctttcctaaagttctggagagtcttggcttctggg

SEQ ID NO: 716437 - DNA, 83 bp, Homo sapiens
tgctgagaaaacagacagatttgtcatgaagaaactcaatgatcgtgtcatgagaacagagtgttgctcagttacccaggctg

SEQ ID NO: 716438 - DNA, 83 bp, Homo sapiens
cgcagacagaagtggggagaagcggagcccaggatccggttgtggccgtggctgaggatggccgggagaagccgaagctgccg

SEQ ID NO: 716439 - DNA, 75 bp, Homo sapiens
ctacttcacactgcagaactgggttctggactttgggcgtcccattgccatggagtcatactccatgggtttatg

SEQ ID NO: 716440 - DNA, 98 bp, Homo sapiens
tcaacagatggagcgggaagaacgggaaaacaacctgcccgaagacagtattgttgcagcatctggcagtgagactgaggatgaggacagcatggaca

SEQ ID NO: 716441 - DNA, 75 bp, Homo sapiens
taaatgatgtattttgtgatcgcagcgatgaaaggtattgttgcagcatctggcagtgagactgaggatgaggac

SEQ ID NO: 716442 - DNA, 132 bp, Homo sapiens
tgtttcgggccagcgacccgctgctcagcgtcctcatgtggggggtaaaccactcggaaacttggatttaactggccagaagcaggtattcaaagcagagaacaatccctgggtgacccccattgcagacca

SEQ ID NO: 716443 - DNA, 83 bp, Homo sapiens
ccaagatcggccccctgggtctgttgtcggacaagtaaccgcaagagcttgattgtgacctctagcacatcacctacactacc

SEQ ID NO: 716444 - DNA, 96 bp, Homo sapiens
gcagcatctggacccgccggcgccgctgccgttggtgatctggcatgggatgggtaagaatgattgatgttggctgatattggagtgctcattcac

SEQ ID NO: 716445 - DNA, 82 bp, Homo sapiens
gctccgtggccttagctgtgctcgcgctactctctctttctggcctggaggctatccagcagatggagtctcactgtattgc

SEQ ID NO: 716446 - DNA, 75 bp, Homo sapiens
ggactacttccacatggcctacaacgtcatcacgccctttctcttgctcaaggtttttgtggaaactctggataa

SEQ ID NO: 716447 - DNA, 75 bp, Homo sapiens
atgagcgagcgcctccgtcccagactgtgccctgtccacggtgcctcctgcatgtcctgctgccctgagctgtcc

SEQ ID NO: 716448 - DNA, 101 bp, Homo sapiens
taaaattcttaaaaaggctcagaaagatggatttttgcatgagacgcttctggacaggtggtggagacactgccacttgctgtgccaaatggaacacggag

SEQ ID NO: 716449 - DNA, 90 bp, Homo sapiens
ccgatgagccagagaagcttgccttgttcgggagtctagcagttctcgctcaccaaccccaaagcagaagaagaagaaaaagaagaaaga

SEQ ID NO: 716450 - DNA, 83 bp, Homo sapiens
gcagtcacagtggactcccaaggggcaggtgtgagatgcacaatgcgaaacctaggccccagcttttacaccatgatgcgcag

SEQ ID NO: 716451 - DNA, 100 bp, Homo sapiens
gctttacgatgtcacttgggaaggtcagaagagatcaattctacagaaatttccagtggttctgttgaggctttatggaattcagcatgtcaaaattcac

SEQ ID NO: 716452 - DNA, 100 bp, Homo sapiens
ggtggccgtgaagcacctgcacatccacactccgctgctcgacaggtatcagtttttggaagaagcttttcaaaatcagaagggtgcaattgagaatcta

SEQ ID NO: 716453 - DNA, 75 bp, Homo sapiens
gaattatttcttggatggccgctctacccaggagccttggagtatgatcagattgaagataaaactttccaagtc

SEQ ID NO: 716454 - DNA, 82 bp, Homo sapiens
acacagaacaacaaggtgttgatgccgccggacggaacgtggctgaagagcggtctgggtcttgtgcaccaggaaggcagcc

SEQ ID NO: 716455 - DNA, 100 bp, Homo sapiens
ggagacagattgtaggaccgagcgcgggcaggcgggaggcaacggagctaccagccgtccacagctgtttgcagaagcaccgtgaaggtatctgcccagc

SEQ ID NO: 716456 - DNA, 97 bp, Homo sapiens
gtggaagtggttggaaatggcacctatggacaagtctataagatgggaagctgtatgacgcctatgtcttataccccaagccccacaaggaaagcca

SEQ ID NO: 716457 - DNA, 98 bp, Homo sapiens
actgattcccaaatggatgatgttgaagttgtttatacaattggtgcagagcattgtagaccaaggagccatggataggagaagtatgggtgaaacag

SEQ ID NO: 716458 - DNA, 101 bp, Homo sapiens
cctggaatcacccagcatgttgcaaggtctcctgccagtcagtctcctcctctctgttgcagcatacaagacagtatctggagtcaatggtccactagtga

SEQ ID NO: 716459 - DNA, 90 bp, Homo sapiens
ggcgtcccttctccctctccgagtgctgctcctgtcattgtggccatggacgggactgccaaaaagagcaagatcctgtccaaggaagaa

SEQ ID NO: 716460 - DNA, 100 bp, Homo sapiens
ccgccgcggcactgatccccacagacagctgctccaaaagagtcagatgctgagatccattgtccaccctggctcctgctctgaattgacatcagtttgc

SEQ ID NO: 716461 - DNA, 73 bp, Homo sapiens
tctgagctcctgcagctcgtcagcccatttctgggggtaaagcatgaatcatcctccagtgatgaggagcgcg

SEQ ID NO: 716462 - DNA, 50 bp, Homo sapiens
atcaacgatgaaagagtatttggtggtgtgacaagaatgactgtctccct

SEQ ID NO: 716463 - DNA, 50 bp, Homo sapiens
gggaaccctggtcaccgtctcctcaggcatgttggagacttgggcaatgt

SEQ ID NO: 716464 - DNA, 100 bp, Homo sapiens
cagaggaaagcgagctccaacccgcggccccggcgccaagccgccgtcatcttcttcctgtgccaggctctccgtgtgaaatggtcccatctcagactgc

SEQ ID NO: 716465 - DNA, 83 bp, Homo sapiens
aaccctgcggaggagaccggcgaggagaagcagtggaatgcagtagccctctgggcctgggatattgtggttgataactgtgc

SEQ ID NO: 716466 - DNA, 100 bp, Homo sapiens
ccagctctcagttgcacttctcaaagatggaaaagggatagcagtggaaataaaatcatgcatcctgtttctgggaagcatatcttacaatttgttgcaa

SEQ ID NO: 716467 - DNA, 100 bp, Homo sapiens
aaggaatccaaatgcatcattcagatgcaaggcaactcgaccataggtggcaagtgggagaaaccatcagaaattttggaaatcaaaggacagaactggg

SEQ ID NO: 716468 - DNA, 100 bp, Homo sapiens
ctgtgcctgctgagtcagcttgcatctgcgccttcggtcgcaatacttccaagaacgtcaactctgtcattgcctgaactctttgcttccggaatccggg

SEQ ID NO: 716469 - DNA, 82 bp, Homo sapiens
cgctctccatgaagcagttcctggacttcgctgcatcttcctcccgtgaggctggccgagctccacgctgatctgaagatac

SEQ ID NO: 716470 - DNA, 98 bp, Homo sapiens
gagggacttcttggcttctcccagcatagccccaggattttctgccgtctcttggcaaaaatggcaaataatgatgctgttctgaagagactggagca

SEQ ID NO: 716471 - DNA, 97 bp, Homo sapiens
taatcacagactcctatttgaagtatttgacgaaaatagactgggagatgcacttatttacatggaaccagagaaacaagtgatgtccaggtcgtca

SEQ ID NO: 716472 - DNA, 98 bp, Homo sapiens
gcagaagaagctgaggatgaagaagatggtggcgacatgtctaagaatgtgagccagtcacagatggcaaaattgaaccaacaaatggccaaaatgat

SEQ ID NO: 716473 - DNA, 75 bp, Homo sapiens
acgtaccaaacaggcacgagataagtcaagtccatcatctccagaaccagctagtcttcctgcagaagatattag

SEQ ID NO: 716474 - DNA, 75 bp, Homo sapiens
atacagtttgcccagggggatcgaaagaaccctgtgcgcactcattcgaggagtccatcaaaagaataagtctac

SEQ ID NO: 716475 - DNA, 82 bp, Homo sapiens
tgcaacgggcagctgggctgcagtgaccccgctttcctcacgcccagcctcggagaagtcaatgtgcccatcgctggacgaa

SEQ ID NO: 716476 - DNA, 74 bp, Homo sapiens
ataactacaatcacctaatgcccacaaggatactgctattgttcatccagttcccattcgtatgactccaagca

SEQ ID NO: 716477 - DNA, 74 bp, Homo sapiens
cgcctttgaatcaggaagttagcatcaaaaatgcagggtttccaggcctgaggtgcccgccctggccccaggag

SEQ ID NO: 716478 - DNA, 50 bp, Homo sapiens
gaaaaggaacgggagctgagagatggtcagtaggacagaaggtaacattg

SEQ ID NO: 716479 - DNA, 100 bp, Homo sapiens
catggtcatgaggtttctggttgcctctgtgtgttagaagcttggagaccaatatggtcagactgaggtccagagaggggaaggtactgacccaaagtca

SEQ ID NO: 716480 - DNA, 50 bp, Homo sapiens
cagaaggctgtcttctactgcggggatgccaaggcctgcgtgatccacgg

SEQ ID NO: 716481 - DNA, 100 bp, Homo sapiens
cttcctcaaaggctactgccccctgggtgcaaagggggatatgagactttctactcggaatatcctgagtgttgcgtggatgtaaaacccatttcacaag

SEQ ID NO: 716482 - DNA, 98 bp, Homo sapiens
aggacccgcttctctgaaaggctctccttgcagctgcttagacgctggatttttttcgggtagtggaaaaccagagccagtcttggtgctctgtgttc

SEQ ID NO: 716483 - DNA, 100 bp, Homo sapiens
gaaagacaccacacattgcgcagtcgggaccatcgccggagcctgaggacacttctctgtcgtcacagttaggcaatgccaccgtagataagttggagga

SEQ ID NO: 716484 - DNA, 83 bp, Homo sapiens
gcccctggtaactgacaaggaggccaggaagaaggttctcaaacaagcttgagagtttttccagcagtaccagctccagccag

SEQ ID NO: 716485 - DNA, 90 bp, Homo sapiens
caactccatgcccagctgcgagacctcaactcctgaggaagaagagattttaaacaaaaaacgatctaaaaaaattcagaagaaatatga

SEQ ID NO: 716486 - DNA, 82 bp, Homo sapiens
agagctatcaggggaagatatgcatcagttccatcgagccattactacagttgcacactgacaagaaacagatcagtgttgg

SEQ ID NO: 716487 - DNA, 74 bp, Homo sapiens
ctttgagagttatgaggcgcttccccagcacaaactgacctgcttcaggcctgaggtcctttcgagactgctgg

SEQ ID NO: 716488 - DNA, 96 bp, Homo sapiens
gatttcttgctggttgaatacctccctctccactcccatcttcagggttgaaatcacaaagattagacacctttttagataggtgttcttcagcac

SEQ ID NO: 716489 - DNA, 100 bp, Homo sapiens
ctgcgggccggggacctgcatgtgtgtgcgcgcgaaggagcggaagaatggcagtgctcaaactcaccgaccagtcttcaggcagtgacagtggtgggag

SEQ ID NO: 716490 - DNA, 95 bp, Homo sapiens
taataaccaactgcaattcctacctccagctttccccacaaataaaccagagaaagatgcaagacatgtagtaaaagtggtaagtgttgctcata

SEQ ID NO: 716491 - DNA, 96 bp, Homo sapiens
gcgcgggcggacgacagaggatgccgaaccactccagttatcaatactctggctgaccatcatcatcgtgggactgactttggtggaagtccttgg

SEQ ID NO: 716492 - DNA, 50 bp, Homo sapiens
ccacacatgtattaagatttgcatacatggaagatctcacaagatatgtt

SEQ ID NO: 716493 - DNA, 96 bp, Homo sapiens
ctcggtgctgctgacggcggccacagtggccggcgtacatgtgaagcagcagtgggaccagcagactgtgccctgtccacggtgcctcctgcatgt

SEQ ID NO: 716494 - DNA, 100 bp, Homo sapiens
ggtgtcagcaaccagagggaaaccactgtagtctgggacaagataactggagagcctctctacaatgctgtgggtggtaataagctgcagtcaacaggaa

SEQ ID NO: 716495 - DNA, 100 bp, Homo sapiens
aagccgactgatgactggagaggatggctactatttcaccaatctggtgctgcgggaacccctggagccggccgctctccagcgtgagcttccccgtgag

SEQ ID NO: 716496 - DNA, 100 bp, Homo sapiens
gttctccgtaaccagaaacaggttcattcattggttcggggatcgcctctagcttcccaggacaaccagccacggatcctgtgggcaggagggctgccaa

SEQ ID NO: 716497 - DNA, 82 bp, Homo sapiens
tcccgcaacccgataccatcggacaggatttctccgcctcagcccaacggggaggccaagactaaggggctgcagagcgggg

SEQ ID NO: 716498 - DNA, 51 bp, Homo sapiens
ctctgagcaatgttgaggtgtttatgtcggagtctagccagtcagaggcgt

SEQ ID NO: 716499 - DNA, 90 bp, Homo sapiens
gctcccttcgccttcgccctttccacctcgcggcagttcggctaaagaattacctccaaagccattgtcaagaccacagcagtcatctgc

SEQ ID NO: 716500 - DNA, 100 bp, Homo sapiens
cggcgcccagcccacctcatggccctcctgcagcacgtggccctgcagtttgagccaggacccctggtctgagagtcactggagctaccagaagcatcat

SEQ ID NO: 716501 - DNA, 51 bp, Homo sapiens
gccagccactgtgacactagccacaacttatgatgttttctcaagccctac

SEQ ID NO: 716502 - DNA, 83 bp, Homo sapiens
gaccgggctcggggagccggtctatggactttccgaagacgagtccaagtggtaagaagttcagaagcaagcctcagttggca

SEQ ID NO: 716503 - DNA, 101 bp, Homo sapiens
gacgacgacgatggggatatcggtactccaaagattcaggtttactcacgtcatccagcagagaatggaaagtcaaatttcctgaattgctatgtgtctgg

SEQ ID NO: 716504 - DNA, 50 bp, Homo sapiens
taatttggaagactgttgtggggaatctcggaggaaaacaccggtgatcg

SEQ ID NO: 716505 - DNA, 100 bp, Homo sapiens
atcacattgctgttcatgagtggaatccatgtttctggacgcggatttttggcctcatactctgttatagataaacaagacaagttggatggcttgagga

SEQ ID NO: 716506 - DNA, 74 bp, Homo sapiens
acctctttggatctgatgatgaggaggtccaggttcacactagaaggccaaaacttccgcaaacatctgatgat

SEQ ID NO: 716507 - DNA, 98 bp, Homo sapiens
ctggagcttaaaaagctgcacgcaagtgttaaacttctgctgagcgggctttggacaccatgaactttgatgtgattaagggaaagccaatccgcatc

SEQ ID NO: 716508 - DNA, 123 bp, Homo sapiens
gccagttgcttgatcaggtggaacagattcagaaggagcaggattaccaaagggttcctccccgggcagaagaaatcaccattccagctgatgtcaccccagagagagttccaacacacattg

SEQ ID NO: 716509 - DNA, 95 bp, Homo sapiens
gcggaggacagcctcctggccgccgaagaggccgccgccaagcaattaccagctctggctgggtcgccacaacttgtttgacgacgaaaacacag

SEQ ID NO: 716510 - DNA, 90 bp, Homo sapiens
tgattatcctggaaaacactatttacctattttccaaggatgctttggagtctgcaatgaagaatggcctgtggggtcacgctctgctac

SEQ ID NO: 716511 - DNA, 112 bp, Homo sapiens
ccagagactgctgagcccgtccgtccgccgccaccacccactccggacacagggggatatgagactttctactcggaatatcctgagtgttgcgtggatgtaaaacccattt

SEQ ID NO: 716512 - DNA, 82 bp, Homo sapiens
gcagaagagaagcagtgaaggagtgcagaggcatcacctgaaagacctgatggacaccagaacaacctgaggagttctgcat

SEQ ID NO: 716513 - DNA, 82 bp, Homo sapiens
gacaatcatcaccaagttcgcatgttggctgcagagtcaatcaatagctgaacctccacagtcctctacactcttccaggag

SEQ ID NO: 716514 - DNA, 100 bp, Homo sapiens
tgacctcggtcccagtgccccacaccaccgcactgtcgctgcccgcctgccctgaggagtccccgctgcttgcattgcagtgtcgagatggctatgaacc

SEQ ID NO: 716515 - DNA, 88 bp, Homo sapiens
gcgctgcccaacgcaccgaatagttacggtcggaggccgatccagagcaaacgccctggaggagcagctgaaggagcaggagctgaga

SEQ ID NO: 716516 - DNA, 90 bp, Homo sapiens
acctgacaaatgtgcaatcttaaaagaaactgtgaagcaaattcgtcagatcaaagaacaagaggacagttatgggatggatgggaaggt

SEQ ID NO: 716517 - DNA, 100 bp, Homo sapiens
gagtgattgcccggcagagcgcgatgaccgcacctcgagcaggagtggggatgccacgtctgcccccagcgcccggccctctgtccaccacggtcattcc

SEQ ID NO: 716518 - DNA, 98 bp, Homo sapiens
tcgaaagctgggtttcccgggagatcccaggcggtgacagagtggagccatggctagaggtgacagagttagtccttgataattgcctgtgtgtcaat

SEQ ID NO: 716519 - DNA, 83 bp, Homo sapiens
tctggactactgttgaaaaaatttccagtgaggtgaaatgacaatggatgctctgttggctcgattgaaacttctgaatccag

SEQ ID NO: 716520 - DNA, 82 bp, Homo sapiens
cggaagctcggccgacatttcctggcattctgtgaaactttagaagagacaaactaccgcttacagaaagaactacttgaaa

SEQ ID NO: 716521 - DNA, 100 bp, Homo sapiens
agcccggactcaagtgggtgccagaaactcccgtgccaggagccatgtggctagaaatcctcctcacttcagtgctgggctttgccatctactggttcat

SEQ ID NO: 716522 - DNA, 102 bp, Homo sapiens
ggtggacaagaagatggtggagaagtgctggaagctcatggacaaggccaaagatgaagaggaagcctttctggattggagtgatgatgatgatgatgatga

SEQ ID NO: 716523 - DNA, 49 bp, Homo sapiens
cacgtttaaagtactttcaacaaagcaataccaagtttccaggcccgaa

SEQ ID NO: 716524 - DNA, 75 bp, Homo sapiens
agagaacagttcattgaagctatcactgtcagtgctgggtgatcagcccatgacctaaacctccagacaaaataa

SEQ ID NO: 716525 - DNA, 90 bp, Homo sapiens
ctcctttctccatcacctccttattggacagaaacgacccaggaatgcgcctcgctggaacctggtgtgtgaggacgactggaaggcccc

SEQ ID NO: 716526 - DNA, 100 bp, Homo sapiens
cacctctggttcctacatctggattgtagccataagtggacttgtggagccgccaccaaaatgcagattttcgtgaaaacccttacggggaagaccatca

SEQ ID NO: 716527 - DNA, 100 bp, Homo sapiens
gtggaaccaaccaaatttccatttccaaataagatctattaatgagatgaagcggttggaagaaatgtcaaatatgtttcagagctctggagtccagcac

SEQ ID NO: 716528 - DNA, 83 bp, Homo sapiens
acgagaagaagtgggagctcatctgtgatcagcagtacttctggaatagaaattctaaacattagcctgccgaacaactggat

SEQ ID NO: 716529 - DNA, 101 bp, Homo sapiens
ccgcccctgtctcccgctccgcagccccgggcacggcggaggcagcggagccctgggccatcggtgagcgagtgctgtgctttcatgggcctcttctttat

SEQ ID NO: 716530 - DNA, 85 bp, Homo sapiens
tgcttttacagaatgttgccaagctgctgataaagctgcctgcctgttgccaaaggaccaactacctccgtcagcaagaacccaa

SEQ ID NO: 716531 - DNA, 82 bp, Homo sapiens
actgatggtgctgtaaccacctcacagattccagcttcggaacaagagaccctggaagctgcagtaaaggaagatgaagaag

SEQ ID NO: 716532 - DNA, 74 bp, Homo sapiens
ggagactgggctccaccgaggaggctggaggcaggtcccccgaatccactgggacctgtccacggagcgggtcc

SEQ ID NO: 716533 - DNA, 76 bp, Homo sapiens
ggaaatattcaagtgggatgtgtagactgttcaatgcaacaaggcaagctgggctcaaaatgcagagaactcaaag

SEQ ID NO: 716534 - DNA, 83 bp, Homo sapiens
cgacaagatcaccacggacgagatgatcaaacgcctgaaggaatgaattcttccaaaacaaaactagaactgcaaaagcacct

SEQ ID NO: 716535 - DNA, 100 bp, Homo sapiens
gcctttgacctttttgaagcctttgcaaaaatctcccagctgatgacagagagtagccgggagggactaacagaagcagtgctgaaccgctacaatgcag

SEQ ID NO: 716536 - DNA, 75 bp, Homo sapiens
agaaagaaaaggcacaagcagttgagcaacaggctaaggttgcagcatgcagagatactggatatgactggtttg

SEQ ID NO: 716537 - DNA, 98 bp, Homo sapiens
aaatttaaacacagaagataacagcctccaggaccacagtgtggcacaggagaaaggaaacagagcaaatgcagcgttacaatcaaagacttattgag

SEQ ID NO: 716538 - DNA, 51 bp, Homo sapiens
ccccagccagtccccacagcataacaggtgttctgttccagtagagccagg

SEQ ID NO: 716539 - DNA, 76 bp, Homo sapiens
tttgtatagagatgtgatgttggagaactacagaaacctggtctccctaggtattgaagcccctgggtgataattt

SEQ ID NO: 716540 - DNA, 101 bp, Homo sapiens
ggaccctggaaaacctggccctcttcaatttctgacaaaagattttaagtaaccaagaggagtggtttaaggcggagcttgggagccaggaaggatatgtg

SEQ ID NO: 716541 - DNA, 90 bp, Homo sapiens
atttatttctttggagacaaaactatgccaaagaccgtgatgataatcgtagcaatcagccccaaatacaaacaggacgtggaaggcgct

SEQ ID NO: 716542 - DNA, 101 bp, Homo sapiens
gggagccccgcgcgcggcgtcggtctatcatttggcaagtgtacgcttacgtgatctatgtctaaaactggatgtttcaaatgagttacgaaggaagatat

SEQ ID NO: 716543 - DNA, 100 bp, Homo sapiens
cagcgtcccggcgccgtcgcgccactcctccgaagccaaggattgtcaccagtgaagaggtcattattcgagacagccctgttctccctgtcaccctgca

SEQ ID NO: 716544 - DNA, 83 bp, Homo sapiens
gcccgggaggaaggaacgaggcaaggagctaaagcagcgtgcgttcagccctggggagctcgaggccatgagcagatatacca

SEQ ID NO: 716545 - DNA, 100 bp, Homo sapiens
gaaccgagcctcggcttgcggccggcagtttccgtgggtctgtgaagaggtcggcggcccctgcgggcgccagtcaggtgaatctggattgggaaagtcg

SEQ ID NO: 716546 - DNA, 99 bp, Homo sapiens
ccggcctggagctcccagggccgaggagccgggtgtgggctgagccctgcctgattgatgctgccaaggaggagtacaacggggtgatagaagaatttt

SEQ ID NO: 716547 - DNA, 101 bp, Homo sapiens
aggtcgatggtcggcggcgcccggatgggcagctgagtgtatgttttaactggaaaaagtcttccatgaaaacgtcacttttaaaaaataagtaatgccat

SEQ ID NO: 716548 - DNA, 100 bp, Homo sapiens
ctcctttttacctttggttcacaacatcatcaaatggttggtcaaagaaaaagtgatgtatgaaaaagaggcaaaacaacaagaagaaaagattgaaaaa

SEQ ID NO: 716549 - DNA, 100 bp, Homo sapiens
actgtacagttcctcaaccgcttttctacagtttgtgaggagtacctggagtagaacagaaaaattattatgtctgtgttcccttgggactcattggaaa

SEQ ID NO: 716550 - DNA, 75 bp, Homo sapiens
gatggctgcgttgacacgtcttatttaatccacatcatagatcagcaagttgctcggatggaaaaactagctggt

SEQ ID NO: 716551 - DNA, 100 bp, Homo sapiens
gccgggaggcgaggaaaccgtgataattcctgagaacttcagtgttttcagtttgatccgggaaatgcggacacagaggccttcattagttcaaacgcag

SEQ ID NO: 716552 - DNA, 83 bp, Homo sapiens
ctagaatcaactgagagagatgcttaaaaatcaccagttactttaatgacatgaatacaactttgtctgagagccccttcaag

SEQ ID NO: 716553 - DNA, 83 bp, Homo sapiens
ctcggcgcgactcgcttctttcggttctacctgggagaatccaccgccatccgccaccatgctacgagttccagggagctctg

SEQ ID NO: 716554 - DNA, 74 bp, Homo sapiens
ccaattccagccataaagcaagctccgaaaactaaatgtgacccttacgtacttgagcatggagatgaagtcaa

SEQ ID NO: 716555 - DNA, 83 bp, Homo sapiens
caaccgcctacgagacactcaaggctgcgatggatagtgctcggcttagtgctgccaaatcttctccaatgatggaaacaatc

SEQ ID NO: 716556 - DNA, 75 bp, Homo sapiens
caacttatcagtccccagggggaaagactctcacaagattttatcatgtgggcaacctgctgcaactggttctgc

SEQ ID NO: 716557 - DNA, 75 bp, Homo sapiens
cgcttcccctttccagagagccagaaagaagtgcggccgggtgtgtggcaacattacttcatgatgcagccatga

SEQ ID NO: 716558 - DNA, 75 bp, Homo sapiens
cacgcataatggatgaaaggaaccgacagttggtagctggcagtgttgtgatggcttttgaagaagtatgcccgg

SEQ ID NO: 716559 - DNA, 82 bp, Homo sapiens
gaagatggatatcagctacagactttcctgagtcaggatcaaaaccattcaagtgcaagatatgccattttgcaacagctca

SEQ ID NO: 716560 - DNA, 74 bp, Homo sapiens
gccaccactattctagcatccgtgaaggagcaggttattcagcttctcaaggctggaaaagcgaaggaagtttc

SEQ ID NO: 716561 - DNA, 83 bp, Homo sapiens
tgctgatcgccccagggatcaggagttgcagatctgatctcttctgaacacctcatcgtgtctccatccctgggaatctgacc

SEQ ID NO: 716562 - DNA, 74 bp, Homo sapiens
gtttcatctgtggatggagtattgtcacattaactttgctctagaagacaactttacaaggatctaaaaggaac

SEQ ID NO: 716563 - DNA, 76 bp, Homo sapiens
agatgttgtcaaggtggcctaccaggaggccaggggtgtcgccatgactgccactctccgcccctacctgagtgcc

SEQ ID NO: 716564 - DNA, 101 bp, Homo sapiens
tagaagatgatccttactattttctccagtttaacaagatggctgtatgggcgaaaaagatgaccgaaattcaaactcctgaaaatactcctcgtttattt

SEQ ID NO: 716565 - DNA, 100 bp, Homo sapiens
tttgaaatgacattaacagaaggaagtaagttggagaagaaactcttttattcaacctttgccactgttatattcccagaggatgtcagtcccaaggacc

SEQ ID NO: 716566 - DNA, 87 bp, Homo sapiens
tcaccactggacctccaaggaagccacgtgcagacatctacaaccttcgatctcctgacgacactttcatttggacccgtggatacc

SEQ ID NO: 716567 - DNA, 100 bp, Homo sapiens
agcagaccctcgcccggaagggccgcagctccgtgggcaacggttcttccaggggacccagccccctaaccatgggagctcaggacactctccctgttgc

SEQ ID NO: 716568 - DNA, 99 bp, Homo sapiens
acacgaccaaattcagaatgcagctttcatgtatccaccaaatccctggaaggaaatatctcatgaagactgttaccaatgctgtggtcacagtgccag

SEQ ID NO: 716569 - DNA, 100 bp, Homo sapiens
cagatacctgttcccggccctcctgcttcacgcactccagttctcgcctgaattaccaaagcagcgttcagggatcctctcagtcccagagcacacttgg

SEQ ID NO: 716570 - DNA, 74 bp, Homo sapiens
ctccgtgttctgctgtcttcatcagcgtgggccgcgggtgcccctgggcgctgggattgctctagcctgtaagt

SEQ ID NO: 716571 - DNA, 101 bp, Homo sapiens
tctaactcattgtattcctcctgagataataatgaaggtgaccaagaatatggcccaggtgaccaaagccctggacaaggccctgagcaccatggacctgc

SEQ ID NO: 716572 - DNA, 51 bp, Homo sapiens
ccttgactcagcttgacatctgcagtgctgtccccggcataggtccatctc

SEQ ID NO: 716573 - DNA, 100 bp, Homo sapiens
tcaaggtctaaattgacatatttgggaagagcagggtgttggggaaacagaactgggttacacatcattttggaatgactgtatatcatctggattacgt

SEQ ID NO: 716574 - DNA, 80 bp, Homo sapiens
tcatttgtctacaccatcaaggaggaaggcctggttcttcaagcttcagacagcaaagtcctgacatgtgcagccgtgtg

SEQ ID NO: 716575 - DNA, 96 bp, Homo sapiens
aggtcaagtcttcatcatcagtgtggagactcatgctgtagaggatgaagatttgataaagtggaaggcactgtttgaggaagtccctgagttact

SEQ ID NO: 716576 - DNA, 96 bp, Homo sapiens
tgggcctggagcagctgcggcggctcggggtgctctactggaagggatgccagatgatatgaacttcagtgatgtaaagcaaatccatcaaacaga

SEQ ID NO: 716577 - DNA, 83 bp, Homo sapiens
cctctcaccattaacaggattttcaaagccgttggacataccagatggtcgaagagctccacttcctgctcattaccggagca

SEQ ID NO: 716578 - DNA, 139 bp, Homo sapiens
ggagacgccaccgaccccaacggcaccagccctttgcacctcgcagctaaaaacggccacatcgacatcatcagaaaccagcctggacaccaagtctgtgtcagaaggccacctcaagaggaacatcgtggtgaagacc

SEQ ID NO: 716579 - DNA, 87 bp, Homo sapiens
accggagtccctctcctttccatgttattttaccaagaaaatggtttgcacgactttgaacatatactatccatgctgatgggacag

SEQ ID NO: 716580 - DNA, 82 bp, Homo sapiens
gcagggcctgcagcgggagctggacggcgagcgcgagcggcgcgagaaacaaaccaagatggagtatgagtggaaacctgac

SEQ ID NO: 716581 - DNA, 51 bp, Homo sapiens
cacagagggagatgtcaggtgggagaaagctacttaaagagtttaaagatg

SEQ ID NO: 716582 - DNA, 100 bp, Homo sapiens
agttcagaaccataacaacaaatctgtgaatgaatcattgaacaatctttttattacagaagaagattatcagtggactaaagaggatggacatagaact

SEQ ID NO: 716583 - DNA, 112 bp, Homo sapiens
ggagagccgggtaccggccgtggaagcggccaccgactactgtcagcagctgtgccagtcacagcccgttggagattgtgattttaatgttcgtctgcagtgtatagaacga

SEQ ID NO: 716584 - DNA, 75 bp, Homo sapiens
agggcggatgtgcctggggtggggtcctttgaaggtgtggcttcggaccgagagatgacagtcatgtccctttcc

SEQ ID NO: 716585 - DNA, 75 bp, Homo sapiens
tcctggttccatgccgcagtaggacagcaggcccaagtctgcacatcccagagcaaatttttcagaacataaaac

SEQ ID NO: 716586 - DNA, 100 bp, Homo sapiens
actactggcccctgatccggttcttggtgcccctgggcatcaccaacatagccatcgacttcggggagcaggtgccgtgagcgatgtggagatgcaggaa

SEQ ID NO: 716587 - DNA, 100 bp, Homo sapiens
gccctctattgccaactgttaaaaagatgtagcacttaagcctcaggaacgtgtggagaaacgccagacgcccctgaccaagaagaaacgagaagcactt

SEQ ID NO: 716588 - DNA, 88 bp, Homo sapiens
ggccacagcccggactccatcgactcccccggctcttagactacggaatggccaaagactatgacgggtcttcctagcacatcaggga

SEQ ID NO: 716589 - DNA, 90 bp, Homo sapiens
caggaggatcctgaaatgttgattgatctaatgtacagttgtggtcagaaatgagaagacatgaaatgttgagggaggagctgcgacaga

SEQ ID NO: 716590 - DNA, 98 bp, Homo sapiens
tggctgccggcttgttcttactggccctgagtctttgggggcagcctgcagaggctgcggcaccttggaagttgttttcaaccatatccagcctttgc

SEQ ID NO: 716591 - DNA, 90 bp, Homo sapiens
aggggaccaagttctagctgtgaatgatgtggatttccaagatattgagcacagcaagggttccccactgaaggacttggtccagctgtc

SEQ ID NO: 716592 - DNA, 100 bp, Homo sapiens
tacaggctgaagctcagcatgctagtggagaagttgaagaaccggttcatatccagctttcagagtggcaccgtgcaatttttcttccacaggcctggct

SEQ ID NO: 716593 - DNA, 101 bp, Homo sapiens
cagccgtgaggaggagggagcagagcgaggtccgtgtgggagacttcctagaggagggtctccatctgttgtccaaggctggagtgtagtagtgctatcac

SEQ ID NO: 716594 - DNA, 90 bp, Homo sapiens
ggcggcgcaagggtgagggcggccccagaaccccaggaattgaatgatctggcacgggaccctccagcacagtgttcagcaggtcctgtt

SEQ ID NO: 716595 - DNA, 71 bp, Homo sapiens
gagacccaccggaccccgaacccaggttgcttgtctggagatggagccactacaggcgggcctgggcgcct

SEQ ID NO: 716596 - DNA, 74 bp, Homo sapiens
ccgccggagcagcatcatcaaggtccggaaggtccatttcgacacccaggagcacgggcctcaggccatcacgg

SEQ ID NO: 716597 - DNA, 50 bp, Homo sapiens
tatattgactactgccacaattccgaagcggagggtgctgctcaaccaaa

SEQ ID NO: 716598 - DNA, 100 bp, Homo sapiens
aggacatgcagctgcattttcagaagattgtgattcagcctctactaaagttgtcatccgtggagcaggaaaccaggagtttgggctttgcaaaactgag

SEQ ID NO: 716599 - DNA, 75 bp, Homo sapiens
ctctggggccccttcacctgtgtaagcagagtgctgagccatcactgtttcagtggaggaagaagcgaatgcgca

SEQ ID NO: 716600 - DNA, 101 bp, Homo sapiens
gaagtgcagctgcctcagttcttagcgcaggcacaaatcctgaagagcccgtgggcgtggactgctcatctgtaaagaaagtggagacatgaccttgagat

SEQ ID NO: 716601 - DNA, 75 bp, Homo sapiens
taatatatctgtacattcaaaagaaagagattctactttaatttcgaaacagagcaaaaagaacttttacctcgg

SEQ ID NO: 716602 - DNA, 100 bp, Homo sapiens
atcattgctttgcgtcatttaagatacggtactgaagtttctactaagaacacaccatgctcagagaacaaacttgacatccaggaaaagaagttgataa

SEQ ID NO: 716603 - DNA, 100 bp, Homo sapiens
ccgagaacgtgcgggaagagaagatcatcgagcatttcaaacggtgcctcatctccagacatggagcccagctatgggggaggtctctttgacatggtaa

SEQ ID NO: 716604 - DNA, 82 bp, Homo sapiens
ctccctaccccctccctgaggaaattaggaacctgttggcaggtgctggagaatctggtaaaagcaccattgtgaagcagat

SEQ ID NO: 716605 - DNA, 74 bp, Homo sapiens
aaacaaatgcaagtattacatccagcagccagaatggtgcgtataacccgtatatagagataattgaacaaccc

SEQ ID NO: 716606 - DNA, 51 bp, Homo sapiens
gcaagcgtttcagcgcctacaattacagaaaggagatgaagttgctggagc

SEQ ID NO: 716607 - DNA, 80 bp, Homo sapiens
ggatttagataaactcaacatcgacagcattatccaacggctgctggaaggctgtctgtccccagaccccagagcacgtc

SEQ ID NO: 716608 - DNA, 100 bp, Homo sapiens
cttcgacaggaaaaaaatttgctggatattgatgcgccagtcactgagaataccttctgcctcctgagacacagcctctccatgaggtggtgtacttcag

SEQ ID NO: 716609 - DNA, 90 bp, Homo sapiens
tgataatgtcagtgtggtatctctacaggttttcccatcatatgattcccggtcctcctggtccccacacaactggcatccctcatccag

SEQ ID NO: 716610 - DNA, 90 bp, Homo sapiens
ggagtcggggacccaggagtttcctgtgtccagcgctgccggagccgcctgagaatgtcatacccaggctatcccccaacaggctaccca

SEQ ID NO: 716611 - DNA, 90 bp, Homo sapiens
ctcacagggattgagtgggccccaaacggctgtgtgctggcagtgtgggacacctgcttggaggacctatctaggacatctgtgctgcct

SEQ ID NO: 716612 - DNA, 82 bp, Homo sapiens
cgggctcctgctggacgaagaaggcaccttctccctcgccggcttccaggacttcacggtgtcttcagtgccctgggtttgc

SEQ ID NO: 716613 - DNA, 90 bp, Homo sapiens
gctagtcgctgcaacactcctctacagtttgaggatgacatgcacttggtgataagaaagcagctctctagcaccgtattcaagtacaag

SEQ ID NO: 716614 - DNA, 83 bp, Homo sapiens
ctcagacctgccaatttaccagagataattgataacaccctgtaacagctgagttggtcaaagaaaaagtgatgtatgaaaaa

SEQ ID NO: 716615 - DNA, 101 bp, Homo sapiens
ctcgatacaatttcacacctgaacagtccactttggaaagtgaagaatggaatccttgggaaggagatgaaaaaaatgagcaacaacacagatttaaaact

SEQ ID NO: 716616 - DNA, 93 bp, Homo sapiens
gcccgccgcgcggagcgccccttcgcgtcccctgcaccatgagctggggcaccgagctctggcgggctgacgcacgaggcacacaggaaggag

SEQ ID NO: 716617 - DNA, 100 bp, Homo sapiens
gggtccgtcgcggagccggagggcgggaggaacatgacatcgcggagttcccattctgtgatggggctcacacaaaacataacgaagagactggagacaa

SEQ ID NO: 716618 - DNA, 100 bp, Homo sapiens
gaatggcataccacaccagacagatgcgttcagccgatgaagggcaaactgtcttctacacctgtaccaactgcaagatcgtctcaggagtcgactggaa

SEQ ID NO: 716619 - DNA, 90 bp, Homo sapiens
cgcaggtctgagctgtgggctgaggcagcgcagccgctgccgcagggtgcgcgatgccttgaacctgggagtacagttgtgaatttggct

SEQ ID NO: 716620 - DNA, 50 bp, Homo sapiens
gcgttggaggccaccgtttccagaggctgcctaccacaaggactttagct

SEQ ID NO: 716621 - DNA, 100 bp, Homo sapiens
cgaacagttttttctaatggctattcaagcatgctatggaaagcaaccattgtactcagtagaggagtatcagttcagtatcgctacttcaaagggtact

SEQ ID NO: 716622 - DNA, 75 bp, Homo sapiens
agggtacttcattgatgccacaaccataatagaatgtctacattcctgagatacaactcgtcaacgaatcaaatt

SEQ ID NO: 716623 - DNA, 75 bp, Homo sapiens
cagaggcacccacgctcctacaatatgagttttgatcatcctgagaaaaatgggccttggcctgcagacccaata

SEQ ID NO: 716624 - DNA, 100 bp, Homo sapiens
gcggaagccggcatgctggagaagctggagttcgaggacgaagagtgaagatagtccaagtcctaagagacagcgcctctctcattcagtctttgattat

SEQ ID NO: 716625 - DNA, 98 bp, Homo sapiens
atgaatgcaaagatagctgattttgaatggcttcctttgggtggaagaggaaaattggtgagaaggtctcaaaggtcacttcccagcagtttgaagct

SEQ ID NO: 716626 - DNA, 98 bp, Homo sapiens
gaggaagggaaggatgtcccagatcatgcggtcttagaaatgaaagaaagaaatctcgccattgccgggaatgggtaaatcactcaggccgcgtgggt

SEQ ID NO: 716627 - DNA, 98 bp, Homo sapiens
cgtcgttgtcgccccctcctcgtcgggaagaatcgtttggtctcctgccgtgcccggtaaatatttccaactacagtctggtgatggagtctgacgca

SEQ ID NO: 716628 - DNA, 90 bp, Homo sapiens
tactctgtcgctcttgtgccctagcaccccgagaaccgtcagtttgagccagatgattgtcaaaagagtggggaatggtgaggaaacgcc

SEQ ID NO: 716629 - DNA, 90 bp, Homo sapiens
agatcatcgagcatttcaaacgcatcaagatggtgctcatgtggaccagtggtgacgccttcaagacggcctacttcctgctgaagggtg

SEQ ID NO: 716630 - DNA, 50 bp, Homo sapiens
ccccagcccactgggctacgcaggcaaagcgaaggctggagctaggagaa

SEQ ID NO: 716631 - DNA, 98 bp, Homo sapiens
cctcaagacacctgggcagacactgcaagttatgcaatgccaaccaaaaccatagaagtgttgcagttgcaggaccaaggcagcaaaatgctcctgga

SEQ ID NO: 716632 - DNA, 82 bp, Homo sapiens
gagaagcaagcggaacttcctgaggcatcaactctcaattgacttatagcattgcttcaggtgatagccttgggcagtttac

SEQ ID NO: 716633 - DNA, 75 bp, Homo sapiens
acccgagctggagctgaagcgcaggctgcggggcgcggagtcgggagaaagaagcttccggttctgaggtcctgg

SEQ ID NO: 716634 - DNA, 83 bp, Homo sapiens
atccgctttgacgtgatggtgaacggcaaggtttggtgcacctcgatttggaggaagtagggcagggcccttatctggaaaga

SEQ ID NO: 716635 - DNA, 100 bp, Homo sapiens
ctggagggcgtttctcgggagcagttcatgcagcacctctacccacaggcatgtggagaccccaaggcaaaaccatcctatcttatcgacaaaaacctgg

SEQ ID NO: 716636 - DNA, 100 bp, Homo sapiens
caaccgcccattcagtctacggctggggccgtcccagttcgcaatgagaaagggcaggctttctattttaaaagtctgtacaaaaaccatgccaataggg

SEQ ID NO: 716637 - DNA, 75 bp, Homo sapiens
catgagacaaatgcgctcagcttcaattgatacccttcatgagacccaactctgccacagctcatcctcggaggc

SEQ ID NO: 716638 - DNA, 101 bp, Homo sapiens
caactacctgcagccgcagctggactggcaggcccgagggcgaggcgagatggaaagaaagtatcaaggagtgagctgaagccactgcccttgagaaccct

SEQ ID NO: 716639 - DNA, 96 bp, Homo sapiens
acagtgggaaggccaaggctaaggcagtatctcgctcacagagagctgggctacagatcccagatgcagtgactggttactacctgaaccgtgctg

SEQ ID NO: 716640 - DNA, 50 bp, Homo sapiens
atagataccgaattcttatcacaaaggctgaccaactgactgaagagcag

SEQ ID NO: 716641 - DNA, 90 bp, Homo sapiens
ggcggatctcatatcttcacttggcaaactcaacaaggtggagaacgaccaggagcggttcctgagtgacctgcgtcgtgatgtccagaa

SEQ ID NO: 716642 - DNA, 96 bp, Homo sapiens
aaagacaaggaagatgagctgtcctttcaggaaggagccattatttatgtcatcaagaagaatgacgatggacagagcgggatgccaccagcttgt

SEQ ID NO: 716643 - DNA, 83 bp, Homo sapiens
cgcatccatccagatgaacgtggccgagacctgcctagagctggaacgttacctccagagcgagccctgctatgtttcagcct

SEQ ID NO: 716644 - DNA, 74 bp, Homo sapiens
cccttcgcgtcccctgcaccatgagctggggcaccgagctctgggttatcaatactctggctgaccatcatcat

SEQ ID NO: 716645 - DNA, 100 bp, Homo sapiens
gaaaacgtagggaccacatcaaagacagctttcacagtttgcgggactcagtcccatcactccaaggagagaagggccatcgatgcacccctcggagcta

SEQ ID NO: 716646 - DNA, 100 bp, Homo sapiens
cagagccctggatgtcatttggaaaaacactagagacagacggctggcagatgtgctcatcttttgctacgggacccagacaatacgatggaatattcta

SEQ ID NO: 716647 - DNA, 82 bp, Homo sapiens
gtcaggccgagtgtcaggccgggcaggagcggtggtgccccccccgggcacggggccatgtacaacgggatcgggctgccga

SEQ ID NO: 716648 - DNA, 108 bp, Homo sapiens
ccctggccctgatcatcctgctgggcttcgtccagatcgggaaggggtcctcactgagcagcgagtcgtcccccgtgtcctctccggccaccaaccacagctcccccg

SEQ ID NO: 716649 - DNA, 90 bp, Homo sapiens
tgacagcctttcagctgctgtttgcctggagggataaaacagctcgcagggaagatgaaagttacggatggagtttcactcttgctgcca

SEQ ID NO: 716650 - DNA, 51 bp, Homo sapiens
ggtatggcgagcaggaccaagctgagtgcctggaagagctgggatgtctgg

SEQ ID NO: 716651 - DNA, 99 bp, Homo sapiens
cagcacgctgcctccgcgggcccaccccgcacccagcatggggagcctgagaatatttgattttcatcaagcagctgatggtatccaggaacaacagag

SEQ ID NO: 716652 - DNA, 76 bp, Homo sapiens
caagccagccatcctgggaccccaggcgtgcaggttctctttgaggttgctgtggttggctgataaatatttgtcg

SEQ ID NO: 716653 - DNA, 75 bp, Homo sapiens
aggtcctgagcctcgagccgcagcacgagctcaaattccgagtctctcctgctgcagaacgcatccgattcatct

SEQ ID NO: 716654 - DNA, 51 bp, Homo sapiens
cgcaatgccaacctcagcaccatcaagcagatggagtttcgctcttattgc

SEQ ID NO: 716655 - DNA, 82 bp, Homo sapiens
gtaaagtcgagtatctggtgaagtggaaaggatggcccccaaagatgctttggagtctgcaatgaagaatggcctgtggggt

SEQ ID NO: 716656 - DNA, 75 bp, Homo sapiens
agctggtggcccagcgaagatgcgaaggccctagactggagctggttacagacggaagaagaagagcacagctgc

SEQ ID NO: 716657 - DNA, 100 bp, Homo sapiens
ggctggtcagagactattacattttatgcagcaaaacccagatgtcctgcagcaggtcagggatgttggaagctggagtagacaggattatttctcaggt

SEQ ID NO: 716658 - DNA, 101 bp, Homo sapiens
cagaaaggaaccgggttgtcttgggccgggcagggcgggatgttggcaaaggatgaactgatgaccatacttgagaaatgtttcaaggtttttaagtctta

SEQ ID NO: 716659 - DNA, 82 bp, Homo sapiens
tggtgtcgccatgggccgccgccccgcccgttgtactgtcccactgaccaggctgctgcaggcacagatgctgagcatgtgc

SEQ ID NO: 716660 - DNA, 100 bp, Homo sapiens
ataacgtggacattcctgatgtccccctcctggcagcccagacgtttattcagagacctgtggatatctgggctttgggctgtatgatcattgagatggc

SEQ ID NO: 716661 - DNA, 80 bp, Homo sapiens
cactgcgcagggcggctgggcagctatgtcatcaacgggcgcaccaaggtgagaagccctaccactgcaactgggacggc

SEQ ID NO: 716662 - DNA, 73 bp, Homo sapiens
tgttcaacagcacccagagcctcatctacctccataaggcattagcatccctagccacagccactctggagtc

SEQ ID NO: 716663 - DNA, 82 bp, Homo sapiens
ctgggccgccagcctcggcaccgtcctttcctttctccctcgcgttaggcgccatgtcagaaccggctggggatgtccgtca

SEQ ID NO: 716664 - DNA, 76 bp, Homo sapiens
gcctctctcccattctgttttgccaggttggtgttcgaggaagagacattgttgttcttggtgtggagaagaagtc

SEQ ID NO: 716665 - DNA, 73 bp, Homo sapiens
aaaaaacaggctgctgtccagtgtcttcgatctgcttctgatgaaggtcggtgtacccgagagaactgcaagt

SEQ ID NO: 716666 - DNA, 83 bp, Homo sapiens
ccatgagcgtcccggccttcatcgacatcagtgaagaagatcagggcttgtcaatgaggcagatcagattcaggttcgacggg

SEQ ID NO: 716667 - DNA, 83 bp, Homo sapiens
ggggtcgctggctctgctgctgccgccggcgaaggaggaggcgttgccgggtgctggttgccgaggagaacgtggacttccgc

SEQ ID NO: 716668 - DNA, 88 bp, Homo sapiens
ccgattctcatctgcccataatcatggacacagccccaggatgtgcaggctcatgatggagcagtccaagaagtcctccctcatggtg

SEQ ID NO: 716669 - DNA, 98 bp, Homo sapiens
accaacattcaaggaaacaaatcaactaaaaacaaaattgccagaaaatctttcctctaaagtcaaactgtttggaaattttagcattcaggtgccag

SEQ ID NO: 716670 - DNA, 82 bp, Homo sapiens
ctggagcctcagttggaagcagccgatccagcctgcggagcctgtggggcaggtgcaaggatggcttgaaaggatttacatt

SEQ ID NO: 716671 - DNA, 99 bp, Homo sapiens
agacactgatttttttttcttctttttaaaaagcaagatagctgatcagcttccttgggttttgctgatgacacaagagagctttgcctgaagatggaa

SEQ ID NO: 716672 - DNA, 75 bp, Homo sapiens
gggcagagggaccactctgacagattttgggaaccagtaggacattgacatacatccgagaacattctgtggtgg

SEQ ID NO: 716673 - DNA, 90 bp, Homo sapiens
agaacagaggattcaaatttttcctgttgattctgccattgacactatatctccattgaatcagaagtctgttgtccaggctggagtgca

SEQ ID NO: 716674 - DNA, 74 bp, Homo sapiens
ctcatcctggttctggaatcctcagttcaagtaatggcaacgttgcagctaccagccactaatttggccaactt

SEQ ID NO: 716675 - DNA, 50 bp, Homo sapiens
ccgtcgcgccactcctccgagtgacagagctgaatgaacctctctccaat

SEQ ID NO: 716676 - DNA, 98 bp, Homo sapiens
gatgatccaagtcaccaagaaattactgtctcaagtgatacggaagtctgcggtcttgcagttcttcagactgctttaataaagtgatgccaccaagg

SEQ ID NO: 716677 - DNA, 83 bp, Homo sapiens
caaaaatcccatctaccgcaactctcagttcgagagtaaagtgggtaattccagaattgattggccataccattgtcactgta

SEQ ID NO: 716678 - DNA, 90 bp, Homo sapiens
agggataggagaaggatgtggactgcagtgctgcagtgccaggtgtcagcttcctctggtgcaaccagcaagtcttccagtatgaatccc

SEQ ID NO: 716679 - DNA, 75 bp, Homo sapiens
ccaaggattggagcacagaggctcagaagcaagtccagctaataatcacaagaagttgtcagaatttggaattag

SEQ ID NO: 716680 - DNA, 100 bp, Homo sapiens
aactgctttcctttccctcagcacacagaggatgatgctgactttgatgaaggggtcggcaccaggaattattatagaaagatcggctacagattacaag

SEQ ID NO: 716681 - DNA, 50 bp, Homo sapiens
caaagttgaaaacaaagtgctgcttggattccttagcaccaccacagctc

SEQ ID NO: 716682 - DNA, 108 bp, Homo sapiens
agcggcaaggaccagaccgtcgggaacagccatgcaaaggcaggggaggaagccacctcgaggtaagaatgattgatgttggctgatattggagtgctcattcacatg

SEQ ID NO: 716683 - DNA, 75 bp, Homo sapiens
cttgatacccattaccactgcctcctttattgcagcaggaatttgttttctggatatgccgcagaaggatccgtg

SEQ ID NO: 716684 - DNA, 50 bp, Homo sapiens
tggaggctgagcatttattcaggaggctcgtaggaatactctcataaaag

SEQ ID NO: 716685 - DNA, 100 bp, Homo sapiens
gtggatgactgagtacctgaaccggcacctgcacacctggatccaggataacggaggctggcctctgaagagccaatccattcaggatgggaaaccacgc

SEQ ID NO: 716686 - DNA, 100 bp, Homo sapiens
acaagctcctacttccagaaaaagtgctcctgggactccaggataccaggaaatcactcagaaaatcctagaagctgtggggaacattgccggctcttcc

SEQ ID NO: 716687 - DNA, 83 bp, Homo sapiens
acagctgcagggccgcggcctgggttgatgataattagaagcatgctttccactgaacttcccgacaacatttgttatgcaga

SEQ ID NO: 716688 - DNA, 100 bp, Homo sapiens
tttagttgaggataccacattagagccagaagggtcagtatagaccttctgatttgctgtgccctgagacatatgtttgggtacccattgagcaatgcct

SEQ ID NO: 716689 - DNA, 82 bp, Homo sapiens
cctggagcctcagttggaagcagccgatccagcctgcggagcctgtggggcagcctgccacagtgactcaggtcactcaagg

SEQ ID NO: 716690 - DNA, 101 bp, Homo sapiens
tctcgcaggaaatgggaattctacttgtgtgggatattgtacctgtggatgcatcttatgaagtaaaagaactatatgtgccagaaaataaacttcatttg

SEQ ID NO: 716691 - DNA, 80 bp, Homo sapiens
tgttactcggggtgcgccagtggaagcgggaggcagttgcagctttcaggtcctacgttttctgtaatagagagtcaccc

SEQ ID NO: 716692 - DNA, 88 bp, Homo sapiens
aaacagtgtcgagaagaggtgctcaagacccgctggggcccagcccctactcatggtgcccagaagacctggctatggcaccatgggc

SEQ ID NO: 716693 - DNA, 75 bp, Homo sapiens
ttgcagatcgggagcgcaaggtcgccctcaaggccatgatcaaaacgaaaatgtttataggaggccttagctggg

SEQ ID NO: 716694 - DNA, 80 bp, Homo sapiens
agagctaaatgggggcctctccagggagtgctctgttcacggctccatcgctgttaaaagtagcacgtctggaaattgag

SEQ ID NO: 716695 - DNA, 83 bp, Homo sapiens
ggaggtcctgccgtccatgcggaagatcgtcgccacctggatgctggaggctgaagctcagggccctgtctgctctgtggact

SEQ ID NO: 716696 - DNA, 74 bp, Homo sapiens
ttcggggacctgaagaagatgaacaagcgccagatttgtaagactccagggcctcccagccgtgaataatctga

SEQ ID NO: 716697 - DNA, 101 bp, Homo sapiens
ccttcgcggtgattttccggtcccggcgcccggcgagggcgcgcggctggtgtccgccccgcccgaaaggttgcacgttttcaaaaaatacctaatggtga

SEQ ID NO: 716698 - DNA, 82 bp, Homo sapiens
ctggcagccgcggatctcaccgccgctcagggctgagaagaaagccaaggtcattgcaggaatgaatgctgtggaagaaaac

SEQ ID NO: 716699 - DNA, 75 bp, Homo sapiens
ccctcccgcgcgtgctgcgggtctgctcgggggtctacttcgagggatgtcatgaccgggccgtcctgctctatg

SEQ ID NO: 716700 - DNA, 88 bp, Homo sapiens
tgtttgcggtccacttgatggcattttacttcagcaagctgaaggaggaccagatcaagaaggtggagattctggacgcaaagacaag

SEQ ID NO: 716701 - DNA, 76 bp, Homo sapiens
ctggaggagccttctcaagaacagagtcaaataaagtgcccgtggtgcagccatcccatgcggtccatcctctcac

SEQ ID NO: 716702 - DNA, 100 bp, Homo sapiens
catcaatatctctgtctgggacgatgttggcaatctgatccagcctggggacattatccggctcaccaaagggcatggtggtgtgcacgtttgatcccag

SEQ ID NO: 716703 - DNA, 90 bp, Homo sapiens
gtcggactggtctgtctgagggagatggtgacaagctcaaggcctgcgagaaccctggggttattagtaaaacgattggagaaaggtggt

SEQ ID NO: 716704 - DNA, 75 bp, Homo sapiens
cgcagctggctggcttcagtggaccaaatctaggtcaacctattaagatacgtttccaggaatctgaagaacgac

SEQ ID NO: 716705 - DNA, 87 bp, Homo sapiens
gacagcggcgagcagaactacggcgagcggaccctacagcttggggcctgggctcctctgaccatcctcattgagaaaggaaagtga

SEQ ID NO: 716706 - DNA, 75 bp, Homo sapiens
aacaaatctaaaagaagctgccagacttggtattcacaccattaagaagtctggaacgttttttcttagagttcc

SEQ ID NO: 716707 - DNA, 90 bp, Homo sapiens
cagcctcgagtttagccacaccaggctggagaatatggtgcagaggccctccacggtggttatcactaggctaaaactggacaaagaccg

SEQ ID NO: 716708 - DNA, 75 bp, Homo sapiens
cttctcagaagacagagggttttcttttgaggcagcagtgaggatgccagagttcatgggtttctagaagacaag

SEQ ID NO: 716709 - DNA, 83 bp, Homo sapiens
ctcgactcttggcgccaccgcctcatgcactgtgtaggtttggtgcacctcgatttggaggaagtagggcagggcccttatct

SEQ ID NO: 716710 - DNA, 100 bp, Homo sapiens
gttcctcaaatatgcagcaaagattacaccaagatctgtgctgaccacaggaattggatctactagtgcaggtcttcagaactactagcagataatttgg

SEQ ID NO: 716711 - DNA, 58 bp, Homo sapiens
cgggctttttggaagtttgtggcggagcacctgtggaatcctctcaagaggaacagtc

SEQ ID NO: 716712 - DNA, 90 bp, Homo sapiens
cggaggagccgcgagcgctgagggtgagtgccgggagctctgagggtgctggagaatctggtaaaagcaccattgtgaagcagatgagga

SEQ ID NO: 716713 - DNA, 50 bp, Homo sapiens
aaaaacacgctcagagataacctgtcagaatggcggcagtggagcatcgt

SEQ ID NO: 716714 - DNA, 73 bp, Homo sapiens
gaaaagggaagtgaaaagagatctgttttcagatgatgaggagtctgatgaggaagctgtgaagaaaaccaac

SEQ ID NO: 716715 - DNA, 100 bp, Homo sapiens
caggatgaactgaaacggattgccagagaattggcagaaggaggagtggaggttgttgagccctgctcagaggaccctgcacagggaggtgatgctggag

SEQ ID NO: 716716 - DNA, 100 bp, Homo sapiens
gtaacatccccgggtccgactacatcaatgccaactacatcaagaagccagctgaagatgagtggggtaaaaccccagacgccatgaaagctgccatggc

SEQ ID NO: 716717 - DNA, 76 bp, Homo sapiens
gagcagtgaaagagaagggaatgctaagaactgctgggaggatgacaattttggggtaagtgcgttcctagcaaca

SEQ ID NO: 716718 - DNA, 100 bp, Homo sapiens
ggaatttggccatagcaggtggtgtaacgttgtctgtaatcgtgtctccagtagtagctgcagtgactgtaggcctactaagaaaacatctaatgaaaag

SEQ ID NO: 716719 - DNA, 50 bp, Homo sapiens
gtcatgtacccggtggactcggtgaaggttacagcaactccatgtaaaga

SEQ ID NO: 716720 - DNA, 75 bp, Homo sapiens
gctttggctctctgcttatcttttttgccaaatactgatgtccctacagatgaagaagatgaaatggaggagtcc

SEQ ID NO: 716721 - DNA, 75 bp, Homo sapiens
ccaggattcatgctctacatccccatagaggtgtggacactgccagcggctgcagccgacttggaatgacctggg

SEQ ID NO: 716722 - DNA, 106 bp, Homo sapiens
ttcccccggccagagcaatggccgctgagaacagcaagcagttttggaagaggagcgctaagctgccggggagactttgacccctggtggacaaacgactgtgagc

SEQ ID NO: 716723 - DNA, 82 bp, Homo sapiens
tgctttgtgatcgaaaccctgaccggatcccataaacactgtcgggattatctccacattccttcatgttcacccatttgga

SEQ ID NO: 716724 - DNA, 75 bp, Homo sapiens
cgggatctcaggtcctcgggggcggcggccacgccaaggacggccacccacacagaatatgcctatgggtcctgg

SEQ ID NO: 716725 - DNA, 75 bp, Homo sapiens
gtagactacgagggctccagaacccaggaaggtgaggaaaagagccatgaatctaaacatcaggaatcagttaaa

SEQ ID NO: 716726 - DNA, 126 bp, Homo sapiens
ctgaactgagcgtatgtgccacgccgcccaggagacccctctgctgcaccacttcatggctgctggcaacgcagtgaagcgagcctcagataatctggtgaaagcagcacagaaggctgcagcctt

SEQ ID NO: 716727 - DNA, 74 bp, Homo sapiens
ttcgtgtgacaaacagagatatcatttgtcaggtttggcaaatacgtgtagacctacatttattaaatcatgat

SEQ ID NO: 716728 - DNA, 75 bp, Homo sapiens
cgaggggctccgggtcttccagagcgtgaagatcaagatcgcctcctgacaaggtgatccgggcgggccccgcag

SEQ ID NO: 716729 - DNA, 98 bp, Homo sapiens
ggctagtgttggacacactggcagtaatacggactcttgtagataacttggatcctagcatgactatacattgtgacatggtcattacatatggatta

SEQ ID NO: 716730 - DNA, 90 bp, Homo sapiens
cggctctctggaccttgtctcgctcgggagcggaaacagcggcagccagagattttaggtgatgggcaagtcagaaagtcagatggatat

SEQ ID NO: 716731 - DNA, 90 bp, Homo sapiens
ctggagtggatggacacacctggttgctcagacagatagaaaatgctgctgaagaacctagagtcttatgtattatacaagatactacta

SEQ ID NO: 716732 - DNA, 100 bp, Homo sapiens
gatgtcttcagctttgtgaagattgcaaagctttcgagcgtggagattggtgaaagcgtgagaggggaagatgtctacatcatccagagcggctgcgggg

SEQ ID NO: 716733 - DNA, 75 bp, Homo sapiens
gaaagctcatcaagccagagctggagtatctcaggttgaactcattcctaatggtgtaaatataccagtcactcc

SEQ ID NO: 716734 - DNA, 98 bp, Homo sapiens
gtgctcactgcagagatcaccagcaagattgcgagggtcccacgactcccgcctgaaattgataaagaaggtgtgattgaaccagacactgatgctcc

SEQ ID NO: 716735 - DNA, 99 bp, Homo sapiens
ttggatttaaaagacagtcctcgtcagcactgactttcagctatggaatcgcgccagcagccctgtggtggcgacgacgatggaccaggagccagtggg

SEQ ID NO: 716736 - DNA, 50 bp, Homo sapiens
ctggacggcattcagtgttttgattccaactccacagagtgaccagagag

SEQ ID NO: 716737 - DNA, 74 bp, Homo sapiens
gcagaaggtcaacgccgcaggcacaggcaaaatcctgacagatgactttgcagacaaggagggtctggaaatgg

SEQ ID NO: 716738 - DNA, 101 bp, Homo sapiens
gttagtgctcaagagcctcattatctaccacccgagatgccccaagcatttggaggctacttaagtgaagtagtagaagaaaatactccaccaaaaatgga

SEQ ID NO: 716739 - DNA, 75 bp, Homo sapiens
gcggaacgcaggagacacaagaagcggatccagcgttctcccggggaagtacttggaagagatcgccacacagat

SEQ ID NO: 716740 - DNA, 100 bp, Homo sapiens
cctgtgtggccatctcctcgctgggcatgatcgaggccacagcccaggtcacagtgaaagggcttggagaagatctctgcctacatgaagtccagccgct

SEQ ID NO: 716741 - DNA, 90 bp, Homo sapiens
ggtggcagcggaaaatccacgcctagctggcaaagaagtgaggatagcattgctgaccagatggatctgggacataggaggacaaccccg

SEQ ID NO: 716742 - DNA, 76 bp, Homo sapiens
cgggccacacttcagctgtctgggacgtccagatcggtgacatcgtcacagtgggcgagtgccggcctctgagcaa

SEQ ID NO: 716743 - DNA, 96 bp, Homo sapiens
tgatgccgcatttccagaaggctgcgactcagctgcgaggccacgccgttcacaagtttttaaacagaaaccgggatcagctggaccctgctgtgg

SEQ ID NO: 716744 - DNA, 100 bp, Homo sapiens
ggcgccgcccgggtgtccccgcggcgcaggaggcggtggagcgcagagcgggcgagcgcggatggagaacctgttcatcaaccgcttcatgcacatgttc

SEQ ID NO: 716745 - DNA, 100 bp, Homo sapiens
ctctgaagtaagcacagtagaactgctgcatctgcaacaacagcaggtacaaacacaagtgcgccttgcaaaaaaaaactttgacaaattgaagatggat

SEQ ID NO: 716746 - DNA, 74 bp, Homo sapiens
ataataagacacaatctattctgctgattcacaattatggagactgtgctgaaggggatgctaagggagataaa

SEQ ID NO: 716747 - DNA, 99 bp, Homo sapiens
atccagagggtccaggccatgaagagtcctgaccacaatggggaggacaacttcgcccgggacttcatgaaatgcactcggtgatggaaagagagccac

SEQ ID NO: 716748 - DNA, 101 bp, Homo sapiens
ttgcaaaaagaaactggagccaccatcaagctgtctaagtccaaagatttttacccaggttgaaaacgttagcggaagaacttatgcaaacacagcagatg

SEQ ID NO: 716749 - DNA, 75 bp, Homo sapiens
cccaagaattcatctctgaagttacagtttcaccagtgatcattaaagaatgggcagcttacaaaggaaagtctc

SEQ ID NO: 716750 - DNA, 100 bp, Homo sapiens
cctgctcttcgctctcttcctggctgcgtccctagattgacaagtatctctatgccatgcggctctccgatgaaactctcatagatatcatgactcgctt

SEQ ID NO: 716751 - DNA, 100 bp, Homo sapiens
gaggaacccgacatggattccacaggaactgtggaaggtgcatcagtgaagaaatggaccaatgtgtataatcatggaatctccttgctaaccatcacca

SEQ ID NO: 716752 - DNA, 82 bp, Homo sapiens
tttgtggaggtgaaggacccagaggacaaggatctcgaggacctggaagaagcagaggagccagacatggaggaagacgatg

SEQ ID NO: 716753 - DNA, 83 bp, Homo sapiens
aacggatgtaaataagattgaggaatttcttgaagaagtcttatgccctcccaagattatatgcgtcaggcaggagaagtgac

SEQ ID NO: 716754 - DNA, 75 bp, Homo sapiens
atttcaacgagaaggcgatccataaggaggctattgagggcacctacattgacaagaaatgccccttcactggta

SEQ ID NO: 716755 - DNA, 82 bp, Homo sapiens
tttatattcatctcaaaaacaaaattctgaactcaggacttggcaaatttggagcaagaggtggtggtggccttcccccgaa

SEQ ID NO: 716756 - DNA, 98 bp, Homo sapiens
agccctcgcgacgcgcccggcccggagcccccagcgcagcggccgcgatgcgtctgttactagagtggagagtctaccttcgtctcacatgtgccaca

SEQ ID NO: 716757 - DNA, 75 bp, Homo sapiens
ctctgggagcagaagggaggctccaagacctcatcaacaattaagagctcaggccccggggcctccagcggcacc

SEQ ID NO: 716758 - DNA, 83 bp, Homo sapiens
gggtccgggtccggagcgccacagtaattttttctgcaggatgaattaagagaagagacacttgctcatcaggcatggagagc

SEQ ID NO: 716759 - DNA, 90 bp, Homo sapiens
cccgagtggatcggggacggagagaacacgagcccatcagaacagatctcggcccctttccaaacactcctgatgcctcatttgcctctc

SEQ ID NO: 716760 - DNA, 80 bp, Homo sapiens
gccagtagcttggatccttgtgggcatgatccataatcggtttcaagcaggttcacaggctgcagcctcagccaggagca

SEQ ID NO: 716761 - DNA, 100 bp, Homo sapiens
cattgaggacgcgcttgtcgtgtcgttccgcttcggggagaagctcttctccggggtcctcatggatctgtccaaaagaaatgcactcggtgatggaaag

SEQ ID NO: 716762 - DNA, 90 bp, Homo sapiens
aatctgcccacccctcctgtaacccagcctgtttcacttcttgtctaaggttgtgggtgacagagagaacggcagtgacaacctcccttc

SEQ ID NO: 716763 - DNA, 83 bp, Homo sapiens
gaggaatccgagaagagcagagcggagggagccccagacacgtcttcccacacaggttgagagaggaggggatccaattgcct

SEQ ID NO: 716764 - DNA, 89 bp, Homo sapiens
aaagccacctacagttactatgcctcgaatcaaggcactgaaggtcctgagaactgcagagtttgctccttttgttgttttcattgctg

SEQ ID NO: 716765 - DNA, 50 bp, Homo sapiens
gtcaggctctaaacaaaattctggtgctgtcattttgcaaaaggaaatct

SEQ ID NO: 716766 - DNA, 97 bp, Homo sapiens
agctggccaaagcctgcccagacggctcacctgtgcgggatggaacaaaaggtatcactggacaggccatggctccacggtcccggcgacgaaggca

SEQ ID NO: 716767 - DNA, 100 bp, Homo sapiens
ggcgtggggcgggacagcggccccctggagggggcagtcccgggagaacctgcggcggccggagcgctgctctgttaaaagcgaaaatgaaacaattgcc

SEQ ID NO: 716768 - DNA, 75 bp, Homo sapiens
gctgcataatattgacccgaacttcgtggactcttcaccgtaattcaactagagggcagccttgtggatggcccc

SEQ ID NO: 716769 - DNA, 50 bp, Homo sapiens
gccaagactggagaaacaatgattttttatcaagcagaaatgcatcgaac

SEQ ID NO: 716770 - DNA, 88 bp, Homo sapiens
gcggcggcctcggctgaagaaagaaggctcctgacatgagcagctctgaggaatttcccagctttggggctcaggtggctcccaagac

SEQ ID NO: 716771 - DNA, 100 bp, Homo sapiens
aaacttcgcaatgaaaccaggcgggtaaacatggtggacagaaagtcagcctcttgtggctctggaagaggatctgaaccagaagaagcgggagcaggag

SEQ ID NO: 716772 - DNA, 100 bp, Homo sapiens
attcttcttccgactggtactgaacatatacattgcccctcaggtgattatcctgaaccatccaggccaaataagcgccggctatgcccctgtattggat

SEQ ID NO: 716773 - DNA, 100 bp, Homo sapiens
gcactgcggcagcttccccgcggcggcggccggcagcggcgagatcgtccaactgaacgtaggggggaccaggctaaggcagctggataagcacagccag

SEQ ID NO: 716774 - DNA, 100 bp, Homo sapiens
ttcgcctcagacgcggtggagccgccggagtctgagaaggcaggatgacgcaaaacacggtgattgtgaatggagttgctatggcctctaggccatccca

SEQ ID NO: 716775 - DNA, 83 bp, Homo sapiens
ctttacaaagctacagcaattgacagctatgtggctctcagataatcagcttaccctgaaagaagcagatcccagttcaaaag

SEQ ID NO: 716776 - DNA, 95 bp, Homo sapiens
ccaagattgccctcctggaagaggcgcggaggcgcaaggaggatgaagttgaagagtggcagcacagggcacgaggacggcacggtgcggttctg

SEQ ID NO: 716777 - DNA, 76 bp, Homo sapiens
tgcaggtcgagaccccaggcacagagaccccatcctacaaggttgagactgagctaaagttaatctgttgtgacat

SEQ ID NO: 716778 - DNA, 100 bp, Homo sapiens
ctcaccgggcagcgtgggtgagcggcgcagcggcggcagcggagagcgagagaggggagcaggtcagttcaccgggacctggaggcccagattgcgatcg

SEQ ID NO: 716779 - DNA, 99 bp, Homo sapiens
acggagaggcgccagtcggagcctcatggccttttcgaaacctctgcgccatgagagccaaggtgagcggttcctggtagtaagcttgggaggtaggag

SEQ ID NO: 716780 - DNA, 100 bp, Homo sapiens
aacctgccactgggttcactctaggaggaacaaatacaggtgttggaacaggcgatggatatgatctaaaagtccaaatagtaatgaagaaaaagattgt

SEQ ID NO: 716781 - DNA, 100 bp, Homo sapiens
ctttatgtcagaaacacaaagcagcccaaccaaagggacttggatgttgtgggtgatggtatgcagtgtcctccttcacctttgctttttgatccttcac

SEQ ID NO: 716782 - DNA, 100 bp, Homo sapiens
tcgcattttggcattgacatttaattttagggtcctttatatagaagggagatgttcctttctgccgaaattctccattcatatagaaaccaagtatgag

SEQ ID NO: 716783 - DNA, 139 bp, Homo sapiens
gagaatgaaccagccgcagaggatggcgcctgtgggcacagacaaggagctcagtgacctcctggacttcagcatggtatcacctcttctgggctcaagatggacaacaagaagcgcctggcctacgccatcatccagt

SEQ ID NO: 716784 - DNA, 100 bp, Homo sapiens
ggcccgttggaagtggttgtatatcagttttagagaatgtggcgtggagaaattctcaaggaaagagtaaaatgctggtgatgtgctgagggaacagaag

SEQ ID NO: 716785 - DNA, 90 bp, Homo sapiens
cattaaggtctggtcggatggggcaggatggctgcgttgacacgtcttatttaatccacatcataggtatggtctctctggcagtgatgt

SEQ ID NO: 716786 - DNA, 101 bp, Homo sapiens
aaaagggactgaagaatgttaaggaaatcaaagagcaggaggttgtggacaaagtcatggaaacactggacaatgatggagacggcgaatgtgacttccag

SEQ ID NO: 716787 - DNA, 82 bp, Homo sapiens
agggcaacttcgctgtggtgaagctggggcggcaccggatcaccaagacggagcagaaatgatggaagaattgcatagcctg

SEQ ID NO: 716788 - DNA, 100 bp, Homo sapiens
gggatgtggtatgataccagcaactggtctattatatcatttaaaccacatggctatctaaagagatcctccaggtcctattgacaatactaagattgca

SEQ ID NO: 716789 - DNA, 75 bp, Homo sapiens
aggagaagtggagaagaaatcagtcagccgcaggagtgaaacctcggtccggctgggctattgatccctttggac

SEQ ID NO: 716790 - DNA, 100 bp, Homo sapiens
accgagaccgtgaccgagagcgtgaccgagagcgcgaatatcgtcatcgttagaaggaacagatggagtcggataactgttcaggaggagatgatgactg

SEQ ID NO: 716791 - DNA, 75 bp, Homo sapiens
caacatctctcagagacgaaaggaaatcatcgagttccccatcctaaagctaaatggccggaccatggagattga

SEQ ID NO: 716792 - DNA, 90 bp, Homo sapiens
cctgggaccatggccactgactcatgggccctggcggtggacgagcaggaagctgcggctgagtcggctattgagggcacctacattgac

SEQ ID NO: 716793 - DNA, 82 bp, Homo sapiens
ggcctgaagtaatcctcccaccttggcctcccaaagttctgggactacagccttatgccagcctggaccatcttggaggcag

SEQ ID NO: 716794 - DNA, 83 bp, Homo sapiens
gctgggctcgctgctgcggacgttcaagcaggtgaaatgacaatggatgctctgttggctcgattgaaacttctgaatccaga

SEQ ID NO: 716795 - DNA, 50 bp, Homo sapiens
gtttgagtccagcagtgctttagataaaaaggattttgatgctttcgtat

SEQ ID NO: 716796 - DNA, 96 bp, Homo sapiens
ctctgaggagactcagctcttccacatcccccgggttacctccctgaagctgtagggccttgtggggtgattctgggggtccacttgtctgtaatg

SEQ ID NO: 716797 - DNA, 91 bp, Homo sapiens
cgaccggtggctgtggcgacatgtcgacctgacgctctacacgatgaagatgtgtgtgtctttaagtgctcagtgtcccgagagacagagt

SEQ ID NO: 716798 - DNA, 87 bp, Homo sapiens
gcacctgcacacctggatccaggataacggaggctggaaactatgttccaacttcctgtcaacaatcttggcagtttaagaaaagcc

SEQ ID NO: 716799 - DNA, 83 bp, Homo sapiens
gccttcccacctagctctcctctctttgcagagccatacaaagttgctcaaagtctaactccccaggactataatctgaggtg

SEQ ID NO: 716800 - DNA, 50 bp, Homo sapiens
ttcagagagtccacacaccctttgaaagactctgttacggcatggtgcaa

SEQ ID NO: 716801 - DNA, 100 bp, Homo sapiens
cagcagcagctggcgccgctctcgcagtccctacagccctgtgctcaggcaccagttggagatgccaggacattactctcatctggctgccttctatgag

SEQ ID NO: 716802 - DNA, 102 bp, Homo sapiens
atacacccccaaagagcaactgaagattcatacgcagctggcagatattatcatagttgctgcagggaggtggggaagacagggctccagctaccacaggac

SEQ ID NO: 716803 - DNA, 76 bp, Homo sapiens
ccgccatccgggaggcccagggaagatcacagattctgctggccatattctctactccaaagaggatgcaaccaag

SEQ ID NO: 716804 - DNA, 100 bp, Homo sapiens
gagactggaggctgagtgctaaactgtgtggggcgcggatgggatccagctgttagtcggacgtgaagccctccaatatgctagtaaacacaagaggaca

SEQ ID NO: 716805 - DNA, 111 bp, Homo sapiens
caatatctgtcttcggtggactccttcggcagtccacccaccgccgccgcctcccaggtgtccctggccagtgtccttccacctgtccacaagcatggggaacatcttcgc

SEQ ID NO: 716806 - DNA, 100 bp, Homo sapiens
cgtgtcccggggccgacccggcccgtagtgtggaagcagcttcagaatgatatggaacctagcaaagctgttccactgaatgcatctaagcaagatggac

SEQ ID NO: 716807 - DNA, 75 bp, Homo sapiens
tgaaacagaaattctggaacacctatatggtcaaaatgcagatcttcgtgaaaacccttaccggcaagaccatca

SEQ ID NO: 716808 - DNA, 75 bp, Homo sapiens
tcgtcgggagtgatcacctaccctacagcccgagcgggaagaagttccgcagcaagccgcagctggcgcgctacc

SEQ ID NO: 716809 - DNA, 96 bp, Homo sapiens
ctgacagtccccgacgtccgaaggcaggtgacagagctgaatgaacctctctccaatgaagatcgaaatctcctctctgtggcctacaagaatgtg

SEQ ID NO: 716810 - DNA, 100 bp, Homo sapiens
cagcagtcggcttctctacgcagaacccgggagtaggagactcagaatcgaatctcttctccctccccttcttggattaaagcaaggagagccaatcatg

SEQ ID NO: 716811 - DNA, 101 bp, Homo sapiens
cggagctgggcgcggattcgccgaggcaccgaggcactcagaggaggttgtgaccgagattcccgacgagagagactgaggggaagagaggaaggaggggc

SEQ ID NO: 716812 - DNA, 98 bp, Homo sapiens
tgatgtggtgcttttgaaccactggaaagtgaggaattttgaagtacaccgtggtgacattgtatcattggtgtggctttctagaagatgaccataga

SEQ ID NO: 716813 - DNA, 82 bp, Homo sapiens
aatgctgtgcgctggcaccctcagaacagtaatctgtaagtcagatgctccaacaggggatgttcttcttgatgaagctctg

SEQ ID NO: 716814 - DNA, 100 bp, Homo sapiens
ggcactgctgcaacagatggaggagctgaagctgaaggaggtggagagctcaggccccggggcctccagcggcaccagcggagaccacggtgagctcgtc

SEQ ID NO: 716815 - DNA, 74 bp, Homo sapiens
attctacccaagtacatatgatttcagctgcaatggcaggaacagtacgtatttggcattcaagcacctaccgg

SEQ ID NO: 716816 - DNA, 100 bp, Homo sapiens
ctcttagtaagatgaaatacgatgaaatcacagctacatatttgttattggggagaaaatcttcagagtctacatcagcatcagcatctgcgtcaccatt

SEQ ID NO: 716817 - DNA, 110 bp, Homo sapiens
gcttgccttcaagaataactgcgaactacttgatacattaattgtttggtcagaagcagagaactatgatttggctctgagttttcaggagaaagctggctgtgatgaga

SEQ ID NO: 716818 - DNA, 75 bp, Homo sapiens
aagataaatccaaatactgcatatcagaaacaacaggcctactctgtgaagagaacattgatgactgtgcccggg

SEQ ID NO: 716819 - DNA, 98 bp, Homo sapiens
aagtcagtgcttcccgggagcaagctggtggactggctgctggctcagttaaaagcatattggcagaggaagagccctggcattccagcaggagctaa

SEQ ID NO: 716820 - DNA, 100 bp, Homo sapiens
tttatttttgtggcaggcatctgtgggatctgtaatagaaatagcctagaagaggagataacatcaattttgtttagtgaaaagggcttttctgatagca

SEQ ID NO: 716821 - DNA, 75 bp, Homo sapiens
gaaaagcggactgtggatctgccacctgcaagcagctcggagctgaaaccaccaatgggtgaggtcgtcacccct

SEQ ID NO: 716822 - DNA, 113 bp, Homo sapiens
agcagcagaaagcgggcgagcagcagttgagcgagcccgaggacatggagatggaagaaagcgtggatacccatcaacgaagttttgatattggaattcagattggctatcag

SEQ ID NO: 716823 - DNA, 100 bp, Homo sapiens
tccttcccagccttcagaaattgccggtctgggagttgggggcaaggagaagatcctgcccagggtccgtctgcattttgtggagctgggctccggccct

SEQ ID NO: 716824 - DNA, 82 bp, Homo sapiens
gctcgcgcagccatgtccgaggagaagcccaagatgtgaagttcatttccaatccgccctccatggtggcagcggggagcgt

SEQ ID NO: 716825 - DNA, 75 bp, Homo sapiens
cttcgtcatgttcttcgcgccctgggaacggcaggagcagctgatgggatatcggaagagagggccgaagcccaa

SEQ ID NO: 716826 - DNA, 100 bp, Homo sapiens
acaatcacagcaacagactctcctgcagaccttcccaggaagccagagccacacacaccatcatggtcctggatgaccatgaaagctgtggttctaattc

SEQ ID NO: 716827 - DNA, 100 bp, Homo sapiens
gactgaccaaggcaatatactgttacgatccagttgaagattactggatgcacgtacagaatacattcagccgtcaggcagcagaagaggatgaaacaca

SEQ ID NO: 716828 - DNA, 98 bp, Homo sapiens
gctatgcttcagccttgatgacggccatcttcccccgggccgcaagcttcttatcattgggaccactagccgcaaagatgtccttcaggagatggaaa

SEQ ID NO: 716829 - DNA, 100 bp, Homo sapiens
agcccaaggcaattgatcccaagttgtcgacgaccgacagggtggtgaaaggccatccggctgtccttagagcaagccctgcctcctgagccaaaggaag

SEQ ID NO: 716830 - DNA, 90 bp, Homo sapiens
ggaaaacccactcaacaagctccgcgtgaagattgaaccaggtttcccaaaccactccttatgatccagtgaatattcaagagagctaca

SEQ ID NO: 716831 - DNA, 98 bp, Homo sapiens
ctgccgtcttcctatccttacccgacctcagatgctcccttctgctcctgacaatgcagatcttcgtgaagactctgactggtaagaccatcaccctc

SEQ ID NO: 716832 - DNA, 100 bp, Homo sapiens
accggcaaagaggtgttgcagaacctcggccccaaggacaagtgatatcagtatcaagataaaagtttggaatgggagaaaaattctcaaagcctgaaag

SEQ ID NO: 716833 - DNA, 74 bp, Homo sapiens
tcagacacgtcgctgatttgtgttatagaagatttctttgacactgcattgatgattcgaaaaggtgtgttcaa

SEQ ID NO: 716834 - DNA, 100 bp, Homo sapiens
caaaacctaacaacagttatatgttcaaaagggaacctcctgagggctgtgaaagggtcaaagtctttgaggaatgctccgttgacaaatggcatgcccc

SEQ ID NO: 716835 - DNA, 82 bp, Homo sapiens
ccagaatttcctgcgctgttccacctcattcaacttcagcctcttctgaaacagtctccctggagcaaccatcagagcagtg

SEQ ID NO: 716836 - DNA, 50 bp, Homo sapiens
ctgtaggtggtgcatccaaaacagattttgatcttggctcctacaagaga

SEQ ID NO: 716837 - DNA, 82 bp, Homo sapiens
gcctggaagaaaaagatacaacgaactagcacaacgaggtaacagcaacaagtgggaatggagactttggtgactggagtgc

SEQ ID NO: 716838 - DNA, 100 bp, Homo sapiens
aggaccccttgatgggcaggacggcccgattccaactctgaaagctacaaggctttggccgaccaagtgtgtaccatgctgctattgtcatcttccttga

SEQ ID NO: 716839 - DNA, 100 bp, Homo sapiens
aaaagttttcctttgaaccaaaaatccgatcacctcgaagatttattggcagcccacgaacacctgtcagatgctgcacttaaaaggatgcttgttttga

SEQ ID NO: 716840 - DNA, 82 bp, Homo sapiens
acggtggggttcctgccggctgtattcgggccttggactggactgagaagctacggtgtcagttgtacccgaggcgttctca

SEQ ID NO: 716841 - DNA, 100 bp, Homo sapiens
gaagaagcaggaggctaagaaagtggtgaatcccctgtttgagaaaaggcctaagaattttggcattggttatgaagttcatggaatggaaaaaatacca

SEQ ID NO: 716842 - DNA, 88 bp, Homo sapiens
cgacagttgtgttgtgccaatggtggagaagaaaacttcgggttacgaagtgacagtgctggtgcgggactcctccaggctgccatca

SEQ ID NO: 716843 - DNA, 80 bp, Homo sapiens
ggcggagctgtagccactgtagcagcaaggtggtaatcactcaaggaaaaggaattatcagagtaacaatagttcctgtt

SEQ ID NO: 716844 - DNA, 100 bp, Homo sapiens
ccatcttcatgagctgccagagtttaacctcatccactccctgaggtccgtgatgttagacagagccgagaacctacttcacgaccactatggagggaaa

SEQ ID NO: 716845 - DNA, 98 bp, Homo sapiens
gttgggctcgcggcgagcggacggggtcgagtcagtgcgttcgcgcgaggtcaaaatgcagatcttcgtgaaaacccttaccggcaagaccatcaccc

SEQ ID NO: 716846 - DNA, 100 bp, Homo sapiens
cacgtcctcgaacgcgaggccaacagccccgaactgtttgaggcgaagagatgctggtttgttgaatcagttgcaagagcttgacaagcagataagtgac

SEQ ID NO: 716847 - DNA, 50 bp, Homo sapiens
gcctggtgccccattacaacccgtggcagttcaattaacctccagaagat

SEQ ID NO: 716848 - DNA, 101 bp, Homo sapiens
ctggccctgctggcgagaaaggatcccctggtgctgatggtcctgctggtgatcctggcaaaaacggtgataaaggtcatgctggtcttgctggtgctcgg

SEQ ID NO: 716849 - DNA, 80 bp, Homo sapiens
caaagagtcaaacttctcagatgttaataccaaccgttgttcaggagctccatgaggaggaggcacagtgggtgaactat

SEQ ID NO: 716850 - DNA, 82 bp, Homo sapiens
tgatacagttgataaaattgttgatcccaaagagaagattgatattgggctgcctccacccaaagtctcccggacccaacag

SEQ ID NO: 716851 - DNA, 75 bp, Homo sapiens
ttcctgtggaacgttttccagagctgtcaataccagcaaatatgcagaaagctatcggatccaaacctatgctga

SEQ ID NO: 716852 - DNA, 75 bp, Homo sapiens
ctcacagcctggaccctctgtcagcagtccacatagcagactcctgaaacagactactctttgcctttttgctgc

SEQ ID NO: 716853 - DNA, 89 bp, Homo sapiens
agagattgagaatgtccatggatttgtttctcattctcatatttcaccaataaaggttgaagccatccttgtcaatatatttggtggta

SEQ ID NO: 716854 - DNA, 117 bp, Homo sapiens
ccgggggcccccagcaccctccagctccctacccatccgccaggagccctcttccttcagagacaaggtttccctctgtaacccaggctggagtgcagtggaacttctgagctcaag

SEQ ID NO: 716855 - DNA, 75 bp, Homo sapiens
tgctcatacagaattacgcatttccacttctaatgggttgaagctttgagagaagcagcaactgctgttgagcaa

SEQ ID NO: 716856 - DNA, 128 bp, Homo sapiens
cagaaggacagcataaggaagccaagttggaccgttctgatgtgactgagagagaagctggatattgcgtgatcacctatatacttggagttggagacaggcacctggataaccttttgctaacaaaa

SEQ ID NO: 716857 - DNA, 51 bp, Homo sapiens
atggtactggaagatgtcactgagttggggtgctcaaaggatttaaaggag

SEQ ID NO: 716858 - DNA, 100 bp, Homo sapiens
ctggaagaccttgttccgtatttaaatcgctgtctccaagtcctttttccaccagctcagatagcacagactttagacttcccaagtaagaagcggaaga

SEQ ID NO: 716859 - DNA, 82 bp, Homo sapiens
agtgaaaaagtggctcacaacattttgtcaggtctgggaggggctgaacgtggtgaagacaggccgagtgatgcttggggag

SEQ ID NO: 716860 - DNA, 96 bp, Homo sapiens
cgaaggccgcagtacttgaccctgtattttgggagtcgaacggaagaatgtaactggtcactacatttccccctttcatgatattcctctgaaggt

SEQ ID NO: 716861 - DNA, 50 bp, Homo sapiens
acctgttaccactttcaaaaaaagctgacttcatgagaccgaggatctcg

SEQ ID NO: 716862 - DNA, 100 bp, Homo sapiens
cgatttaaagctgagctgcgaggaaaatggcggcgggagatgtcctcaatggaaccataacgtttttgcctttggaagaagatgatgaggggaacctaaa

SEQ ID NO: 716863 - DNA, 90 bp, Homo sapiens
gctcatcatgatggacttggagctgccgccgccgggactcccgtcccagcagaaacaagtgttgaaaatgttaaaggctgtgctgaagaa

SEQ ID NO: 716864 - DNA, 131 bp, Homo sapiens
ggaaaattaactataaaggagagcgccaaaccattactgatgatgtggaggttaacagctatctttctgccatagtgtatgaaggccaagacaagaacccagaaatgtgccgagtcttgctcacacatgag

SEQ ID NO: 716865 - DNA, 100 bp, Homo sapiens
caaagaagtgctatctggaaagagaggtgcaaaatgagttgataacaaccagaagttgacttgttagtgctgtgcttctactcgagcttggaaaaatccc

SEQ ID NO: 716866 - DNA, 51 bp, Homo sapiens
gcccagccagcgcccgcgatggctctggaagaggatctgaaccagaagaag

SEQ ID NO: 716867 - DNA, 75 bp, Homo sapiens
gaaggctgaggtggcagcggcaggagagtccggccgcgacaggacggcaagaagttatgaaatggaatggatggg

SEQ ID NO: 716868 - DNA, 75 bp, Homo sapiens
ctgcccccagctcagctcttactgcgggccgctccgacggcggtccatcctgatctccagtctatgtgctgaaga

SEQ ID NO: 716869 - DNA, 104 bp, Homo sapiens
aagagaatttaagaaacacagagcggatacatcaggagactcttagaagactggaaagcagattttttgaagaaaaggctggagcacagtggcgtgatctcagc

SEQ ID NO: 716870 - DNA, 100 bp, Homo sapiens
gtttgttcaggaaccaccagtgacagagaacattccatacttatgatagatgaaatcaatgatatccgaattattggagccattacagtcgtgattcttt

SEQ ID NO: 716871 - DNA, 74 bp, Homo sapiens
cattggcaaggagatcattgacctcgtgttggaccgaattcgcaagctggactcagaattcatgattgaagaaa

SEQ ID NO: 716872 - DNA, 122 bp, Homo sapiens
aacctggtgcccaggcccatcttttcccagctgtacctggaagctgagcagcagcttgccgctctagaagttccctgtattgaacactgatatacaaggaatgaatagaagtcaagaaaaac

SEQ ID NO: 716873 - DNA, 98 bp, Homo sapiens
gaagaaggcgagcagggtgcgggagagccccttgcagaagacgccgtacgagttggtgacaaagttcctgctgatataaggttaacttccatcaaatc

SEQ ID NO: 716874 - DNA, 100 bp, Homo sapiens
cgttgggctccggccctcctagagaggcctccatagcgcagctcctgagaaccatgtctatgcccaaaggtagagttctggataaaaacctggatgagga

SEQ ID NO: 716875 - DNA, 88 bp, Homo sapiens
ggctgtgctagacttcattcactactgcagagccaccgtgtgctgggaactaaagatccccctccaccacagcagcagccaccgccac

SEQ ID NO: 716876 - DNA, 75 bp, Homo sapiens
ggaggaggatgaacactatgattaccaccaggagattgcaaggatgaatttttagatgtgatctactggttccga

SEQ ID NO: 716877 - DNA, 106 bp, Homo sapiens
cgggatctaacccaggagcagacagagaagctgctgcagtttcaggcaccaggatcatctacgaccgaaagttcctgctggagtgcaagaactcacccattgcccg

SEQ ID NO: 716878 - DNA, 83 bp, Homo sapiens
aagacaccgtgagcaggctagagggtgcagaagctgccaatgtgactggcccggatggagttcctgtggaagggagtcgttac

SEQ ID NO: 716879 - DNA, 73 bp, Homo sapiens
gaagccgcacgtagaattaagacggagttcctagtgcaaatgcaagcctatttaccaccatcagtgatgcttc

SEQ ID NO: 716880 - DNA, 96 bp, Homo sapiens
cttctttaagggctacgggaagatcctggaggtggatctgaagaacgggatcctcagtcttccacaatgaaccctgtttacagccccgtgcagcct

SEQ ID NO: 716881 - DNA, 90 bp, Homo sapiens
atcatgtggggactgagccatccattaaggaggtgcataaggcaaatccaatacgcaagtaccagggtctggagataaagtcaagtgacc

SEQ ID NO: 716882 - DNA, 75 bp, Homo sapiens
cgtcagcaacatgctcctagcagaagcctatggatctggagggcagcaaggagcgcttccactggcagagccaca

SEQ ID NO: 716883 - DNA, 100 bp, Homo sapiens
aaggagttcacgttcatgggcgagggaacagatgagaaacccggcaatgaaagaaagatatgtggcaagcttgatgcctttgcagaaaagtatttcccca

SEQ ID NO: 716884 - DNA, 101 bp, Homo sapiens
ggctcagtgaggaaaatgagagacagaaaccccaaggtggcagagattcctttcaactctaccaacaagtaccaggtgtttccccccgggccggcctgccg

SEQ ID NO: 716885 - DNA, 100 bp, Homo sapiens
cgcgtcccgctcgctgggagagaggtacctctccttttccctctccctttccctaaggtatggcacagtcacaagggtgggtgaaaagatacatcaaggc

SEQ ID NO: 716886 - DNA, 83 bp, Homo sapiens
ccccagctcccccgcctcggggagggcaccagcggagctggagtttgttcagatcatcatcatcgtggtggtgatgatggtga

SEQ ID NO: 716887 - DNA, 75 bp, Homo sapiens
gctcagaactgagaagctgtcaccacagattcaattagcagagcctcacagacaatggccaaatgtgtcaaagct

SEQ ID NO: 716888 - DNA, 50 bp, Homo sapiens
cagggaaccctggtcaccgtctcctcagccgtcattgtgtggcactggac

SEQ ID NO: 716889 - DNA, 50 bp, Homo sapiens
gcgggagcacggcgacgccagcggcgggtaacacaagtggcaagacagcc

SEQ ID NO: 716890 - DNA, 100 bp, Homo sapiens
ttctccaggagcctgacgaaggcgcataaacttggaggaggcagtggagagagcatcctggtatcacagcttcagcatggactgacgttagagtttgaac

SEQ ID NO: 716891 - DNA, 100 bp, Homo sapiens
gcctgactcccacaggcacactccctctgggcgtcctctcaggaggcaagcagactatcgagacagggaacctagaaaagttgttcttcatcgtggctca

SEQ ID NO: 716892 - DNA, 90 bp, Homo sapiens
gccaaaggccctgcaaggacaaggcaatggcagcagataaaagtgacgagtggtttgccaaacacaataaacccaaagcttcaggttaac

SEQ ID NO: 716893 - DNA, 80 bp, Homo sapiens
agcagagcagcaactcacccagcacacaaaatggatctcttacgcttcagtatcagacacagcacagcagccatctgaag

SEQ ID NO: 716894 - DNA, 96 bp, Homo sapiens
cgagagcgcgaatatcgtcatcgttagaagatacaaaatcttaccctaatcagtgtggagttgcatgctcgaactagacgagacttagaaccggat

SEQ ID NO: 716895 - DNA, 100 bp, Homo sapiens
ccatttcaagtttggattggagtccagataaaaggggtctctgcgtctgtagttcatttgaccaaacgatggcaagattattttatcataaaccccagtt

SEQ ID NO: 716896 - DNA, 75 bp, Homo sapiens
gccaagaagctggtgtgcggagatgaaggtcaccatcgtggtccttggcaacaagtgtgacttacaggagcagcg

SEQ ID NO: 716897 - DNA, 100 bp, Homo sapiens
ggagattgcagctgacaaactgctgagcctgccaatgcaacagccacggaagattaagcagatcacttcagcatcggtgaggttggtctctcaagaaccc

SEQ ID NO: 716898 - DNA, 87 bp, Homo sapiens
tgcacccccagcagccaccggcaggcaccttcagtgccccgtgggctgccctggcccacagccgtgagcagtactgcctggcctggg

SEQ ID NO: 716899 - DNA, 100 bp, Homo sapiens
cagctttttccaggaactcacatgtcctgggaggattacaggtacaacagaatagctcgggaatggactcagaagtatgcgatgtaattaaagaaattat

SEQ ID NO: 716900 - DNA, 101 bp, Homo sapiens
aaggaatgactcatcttgaagcccagaataagattaagggttgtacaggctctttgaatatgactctgcaaagcatttgacattgtgcagcaaagaaatgg

SEQ ID NO: 716901 - DNA, 142 bp, Homo sapiens
tggactctgcttcatttctctgcagcaagaggaaaggaaagatgtgttcgggtttttctagaacacggagaccattcctcaagaattttgtatccaaggcccaaaagtttgttacccaagatgatgaatgctgacatggatg

SEQ ID NO: 716902 - DNA, 50 bp, Homo sapiens
atgtggaggaaaacaacttcgagggcagaaactcttgatgtttcagtgag

SEQ ID NO: 716903 - DNA, 82 bp, Homo sapiens
gtgcacggcaggagctacggcccagcgccgggcgctggccacgtgcagagagaagaagaaggaggttcctgctgtgccagaa

SEQ ID NO: 716904 - DNA, 100 bp, Homo sapiens
gtagaacaggctcccatagacatgtccaaagacttccactacagagattcttctgcacagtcagtatcctcgggagttcgtgcaccatctcctgccccat

SEQ ID NO: 716905 - DNA, 101 bp, Homo sapiens
ctccatttatgaagcacccgttaaaaatagttctacgaggagtgaccaatgatcaggttgacccttcagatggggatagtgtgatggtccttccaaccatc

SEQ ID NO: 716906 - DNA, 75 bp, Homo sapiens
tccaagcccccctcgcctatgccttcagacatcaccagccagccaatggagatcttcgtggatgatgagacgaag

SEQ ID NO: 716907 - DNA, 100 bp, Homo sapiens
ctaaaattaagctggagcctcatgaagtggatcagtttctaaacttctctcctaaagaagtcagattctgaggaagatgaacccacaaagaagaaaacta

SEQ ID NO: 716908 - DNA, 90 bp, Homo sapiens
atgtggctaagatgctgccgactctgggcggcgaggaaggcgtctcccgggtgagaagcgccactgctttgatgtcaactataattcaag

SEQ ID NO: 716909 - DNA, 100 bp, Homo sapiens
cgcccgcccctgcctcagagaaggcaaactcaaatgctgagaaccccaagctgatatcagcaatgctgtgtgctgctttgtatccaaatgtagtgcaggt

SEQ ID NO: 716910 - DNA, 82 bp, Homo sapiens
tgactatggttatgggggacaaaaaagacctttagaagatggagattgactggggcgactttggggtagaggcagtgtctga

SEQ ID NO: 716911 - DNA, 100 bp, Homo sapiens
acatcctcatccgagcctttgatttgagtggctgcgttcctttgcctgcaacaggggtcaagatgagttttgcctgacttctttgatgtcctgaactttc

SEQ ID NO: 716912 - DNA, 100 bp, Homo sapiens
atcatcaccaccacacactgtgtgacaccggctccgacacgccgctaaccggccgctcgtccccgcgccacggtccgcccaccgccgccgccgctgtccc

SEQ ID NO: 716913 - DNA, 98 bp, Homo sapiens
gacctgtggaatatgagtgatgacaaaccctttctatgtactgcgcctggatgtggccagatgcctggaatgatgtcgtcagtaatgcctggaatgat

SEQ ID NO: 716914 - DNA, 102 bp, Homo sapiens
caccctgcatgtctggctacctcgtggacaagtttgcagatcgggagcgcaaggtcgccctcaaggccatgatcaaaacgccatgcggaccctcagttggaa

SEQ ID NO: 716915 - DNA, 100 bp, Homo sapiens
accgagatgcggttttcctcgcagaacgcctttatgcagaaggtggtggaagatggatatgaattttttgctaaacgacagttggtaaccttattttcag

SEQ ID NO: 716916 - DNA, 71 bp, Homo sapiens
ccaagagtcttcccagccagttggatctgtgattgagttgatccctgaattttattatctccctgagatgt

SEQ ID NO: 716917 - DNA, 95 bp, Homo sapiens
tgctcctagccgtctgcaccagcgacttcgcccccaaatacatcaagatgtttgtactggatgaagctgacgaaatgttaagccgtggattcaag

SEQ ID NO: 716918 - DNA, 100 bp, Homo sapiens
caaacgtggagatcaactcctctctgttaatggagtgatgtcccaggagagaggagtacagccagcacctttcctacagacccagtttccccattgacaa

SEQ ID NO: 716919 - DNA, 90 bp, Homo sapiens
gtggttcaagaaccttgacaagctcatccggctggtaaatgcgcagctgcccctgagcctggacctgcccagcccccggcccttcgcttt

SEQ ID NO: 716920 - DNA, 74 bp, Homo sapiens
cggcgagcagaactacggcgagcggtttcagaagaggagccccgccgaggcatgagggccgtgctccccccaga

SEQ ID NO: 716921 - DNA, 75 bp, Homo sapiens
cgccaccacccactccggacacagccatgccagtgacggtaacccgcaccaccatcacaaccaccacgacgtcat

SEQ ID NO: 716922 - DNA, 80 bp, Homo sapiens
cggcgagcgcgagcggcgcgagaaagggtctaatgtgatggaagagcaggacctgcgggacatcggcatcagcgacccac

SEQ ID NO: 716923 - DNA, 75 bp, Homo sapiens
ggcctcggcgccaagatcccagtcacaattatcaccgggtatttaggtgctggctgctgtctacaaggctctgag

SEQ ID NO: 716924 - DNA, 50 bp, Homo sapiens
tgaaggttgtgaccaaaagaggctccgcttaggaaggaaggttggcggcg

SEQ ID NO: 716925 - DNA, 83 bp, Homo sapiens
aggaggagaaccgcgacctgcgcaaagccagcgtgaccatcaataccctctaccatctgctttggtcagggtgccgctcgagg

SEQ ID NO: 716926 - DNA, 74 bp, Homo sapiens
gggaaaactgcaattttggagcagctcctttatggaaatcatactattgagtttcgctcttgttgcccaggctg

SEQ ID NO: 716927 - DNA, 100 bp, Homo sapiens
gaccgcagaagtaaagaagtggggagtttaggaaaacgggccttactatacatcatatcccccatcaccagatttgtgacctgccatctttcagtgcttc

SEQ ID NO: 716928 - DNA, 100 bp, Homo sapiens
ttgagaacagaatgttaatgcttgatgggatgccggcagtcagagtcaaaacagagcttttggaatctgaacaagggggcaagtgtccagagaatggctg

SEQ ID NO: 716929 - DNA, 74 bp, Homo sapiens
cggcgttgaattccgggaagtgggagcttcaggctcgctccgtgcgggccacggcatatgcctccaaggacggg

SEQ ID NO: 716930 - DNA, 75 bp, Homo sapiens
ctcggaggatgagctaccccctcaggtgcacaaggtcccaggtgtgacaccttcagcaggtctcagggaagatgg

SEQ ID NO: 716931 - DNA, 90 bp, Homo sapiens
gaaccttccctgattacagaatcttgggttaatgatgaaatggcaggtaattcacacttttggacagagcgcaccgcccccgtggaatca

SEQ ID NO: 716932 - DNA, 75 bp, Homo sapiens
tccgtggtcgtttgtttctccaaggtttgaaaagcagctggcctgcaaggtatgtcgagagtaccaacgtggcaa

SEQ ID NO: 716933 - DNA, 95 bp, Homo sapiens
atatttggcatactttgtgcatgcagcaggacctgctgaagttcccatgatgtcacccaatggatccattcctcccattcatgtgcctccaggtt

SEQ ID NO: 716934 - DNA, 74 bp, Homo sapiens
tagcctccagaaccgtgagaagtaaatttctgtttgccaccctggagaaatgtgccacgtgctcccagcccatc

SEQ ID NO: 716935 - DNA, 75 bp, Homo sapiens
ttgccttggtaggcaataaaacacaaacgtgcagatatctgatagccctttccgttgcactcaagaggaagcaag

SEQ ID NO: 716936 - DNA, 98 bp, Homo sapiens
tcccgccggccgtctccttaacaccgaacacctgatggaatggggagaagatattaaagcagtttcaaaagatgaagcagtgatgttggtgaatcatc

SEQ ID NO: 716937 - DNA, 100 bp, Homo sapiens
gcacctgcacacctggatccaggataacggaggctgggttgaccccctgtttacagtgccagcgccaccaccgccgatttccagcagtctcacgcctcag

SEQ ID NO: 716938 - DNA, 74 bp, Homo sapiens
cctcagccccgtcctcttgtcctcctcagcctcgtgccagaaatcacatccaaagtcagttccagtttcttcaa

SEQ ID NO: 716939 - DNA, 112 bp, Homo sapiens
tgactgccgaggccccatgaatcaatgtctggtagccaccggcactcacgagcccccctccatgcgcctgaaggcccgacccagcagccctggcttttccgtgcttacctgc

SEQ ID NO: 716940 - DNA, 50 bp, Homo sapiens
tactacaaccagagcgaggacgatagaaaaggagggagttacactcaggc

SEQ ID NO: 716941 - DNA, 76 bp, Homo sapiens
ttacaccgaaaaagaggggccacttctcagcgattcacatgtagctttcagggacgtggccgctttggagagtcag

SEQ ID NO: 716942 - DNA, 100 bp, Homo sapiens
ttctacagtaaacaggtttttgggacttgccagtttctttgctgggatggctgtcctttctggaccacctatagcagaaaaagcttgtggtgaagggggg

SEQ ID NO: 716943 - DNA, 117 bp, Homo sapiens
ggagatccagcacctcaccgaaaagagcctgtacaaccagcgcctgcgcctacagaacgagcaccgagcaataagagctaactgccatcaagagccatcagtatgtcttcaagctgc

SEQ ID NO: 716944 - DNA, 82 bp, Homo sapiens
acatctccttcgcagccgcgcaaaaaaacactgccagtgaaagatgtagaagataaacctgaacaacaaaccagaacaagag

SEQ ID NO: 716945 - DNA, 98 bp, Homo sapiens
ataaccgtgagatgttgctgctcagttgccaagcaagctacaccaaaattgcattgagccaaacttgccaccaagagcccaacaatcaccatgatgct

SEQ ID NO: 716946 - DNA, 100 bp, Homo sapiens
tgcagagatattctactccatctcattcattgtacagcttgtggagagactccagagcaaatacgagcaccaagtggcataatcacaagcccaggctggc

SEQ ID NO: 716947 - DNA, 88 bp, Homo sapiens
cttcttttattcttcttaacctaacaagagcagcttgccagagtgatctctcggcttgccgactttgctaaggaacgagccagtctac

SEQ ID NO: 716948 - DNA, 75 bp, Homo sapiens
gctggcagcctacctggatgctttgcagacgctgaaggggaagcgggtattcccctacatctcagccatggtgaa

SEQ ID NO: 716949 - DNA, 107 bp, Homo sapiens
ctcagttggaagcagccgatccagcctgcggagcctgtggggcagacgccatttggaatgaacaggaaaaggctgaactttttacagataagttttgtcaagtatgt

SEQ ID NO: 716950 - DNA, 78 bp, Homo sapiens
taattacaaagatgcaactgcaaagagaagccgaggctcatttataagtgctcctgtgaaatggtcttcaacaagaag

SEQ ID NO: 716951 - DNA, 100 bp, Homo sapiens
cagaagttacttattcttttaagaggtctgcctggttctgggaaaacaacattgtctcggtctatgccagaaaggaggccttgaagggaggtttggagaa

SEQ ID NO: 716952 - DNA, 100 bp, Homo sapiens
ggcggatagagcgaggccagccatgtaacgcctgtggtgaccagtgccctgggttcgccttgcataaatggagatatcatggaaatcaggacagtggcag

SEQ ID NO: 716953 - DNA, 75 bp, Homo sapiens
gaaacacccgtaccttacccaactctactgctgcttccagaccaagcccaatgccgactgcatggacgacttgcc

SEQ ID NO: 716954 - DNA, 50 bp, Homo sapiens
gaatgggcattgtcgccaattttcagagctccttaataagcatttatagt

SEQ ID NO: 716955 - DNA, 75 bp, Homo sapiens
ctggcgctctggctgtgctgcgcgacccccgcgcatgggcaccatgccggtggaaaggatgcgcatgcgcccgtg

SEQ ID NO: 716956 - DNA, 100 bp, Homo sapiens
aagaactcaacatagaacccactaacctcgtgatgttcctgagcgtcctcgtggactggatgattccagacatccccacggacatcagcgaccagatcaa

SEQ ID NO: 716957 - DNA, 100 bp, Homo sapiens
tgatatgttatcaaaagtagagaaaatgaaaggagagcaagaatctcatagtttgggacagagcactgaatatcgtcacatttggtcccttgaaatctcc

SEQ ID NO: 716958 - DNA, 100 bp, Homo sapiens
gtgcgaaattccggatttccttgggtcttccggtaggagctgtaatcaattgtgctgacaacacaggtagctacagcaagctgggtagcaggcagatcca

SEQ ID NO: 716959 - DNA, 75 bp, Homo sapiens
catgtatttggaacaaaaaaaggagatgcctggcagccccgctctctgcaaactcacgtgctgtgtgtcagactg

SEQ ID NO: 716960 - DNA, 98 bp, Homo sapiens
aaccagtggccacagcatctttgtctagccccagtgcaggttaatccctatatcctgaagaagaacatgatcctcatgacaaatcatttctatgcagc

SEQ ID NO: 716961 - DNA, 100 bp, Homo sapiens
agatcgaagatttagaggccgctacagaagtccttatgcagatacactttgggggatccaaaaggagctgcaattttaaagtcttctgatgtcatatcat

SEQ ID NO: 716962 - DNA, 82 bp, Homo sapiens
agcaaatgagctgatggaagatctgtttgaaactgaagagagaagggcacagttacctaagtatcaacgtaatcttcctcgg

SEQ ID NO: 716963 - DNA, 75 bp, Homo sapiens
aagaaacagacattcaacatgattgcatttgaatgtaagaagaagcttgggaagctgccacctcagtatgccctg

SEQ ID NO: 716964 - DNA, 98 bp, Homo sapiens
gataacttcaatacctacaaaatcttccccaaaataaaaaaattgcaagagagagactattttcgttattacaagcaatggctgccatccggaagaaa

SEQ ID NO: 716965 - DNA, 100 bp, Homo sapiens
attcgatggacatggacatgagccccctgaggccccagaactatcttttcgagtactattaatcccgtagatgcaatatatcaacctagtcctttggaac

SEQ ID NO: 716966 - DNA, 75 bp, Homo sapiens
gcctgggaagccaacgaccacacgcactacgagttccagggagctctgtcctggtgaccgtgcccgggttatgac

SEQ ID NO: 716967 - DNA, 151 bp, Homo sapiens
cgggtgatctttggtctcttcggaaagactgttccaaaaacagtggataattttgtggccttagctacaggagaggtctttctgtggaatttggaacaattctagtttacacatgtgagaagagttgctggcccccaaatcatcagactcc

SEQ ID NO: 716968 - DNA, 82 bp, Homo sapiens
ttccagtgactagtaatggagaagttgatgactctcgtgaacatagctttaataggatggagtcttgctctgtcaccaggct

SEQ ID NO: 716969 - DNA, 100 bp, Homo sapiens
gtccatgttcaatcaccactgtccaaattcagaagctcagaacgctggactctccctttgcagaaagatgttgtgtccctcctggtgagcgctgtcccag

SEQ ID NO: 716970 - DNA, 83 bp, Homo sapiens
agcggggtggcgcctcttcctcgcagtctccactcggcaaccaccatcggaaataagtactccaaagattcaggtttactcac

SEQ ID NO: 716971 - DNA, 76 bp, Homo sapiens
accagagatggacggtcactcagcctatggagtttgacggtgagaacatgtatatgagcatgacagagccgagcca

SEQ ID NO: 716972 - DNA, 96 bp, Homo sapiens
tggcagttctaaatttgaatttgaggattctccttttacaaatgcaggaatgggatctaatctaaatctgttaggtgaaattgagtgtgatgccag

SEQ ID NO: 716973 - DNA, 95 bp, Homo sapiens
cgggaacgattgggctgagcagaggacgacatgttgcttttcgtggaggttgggggccgtcccgctcctaaggcaggaagatggtggccgcaaag

SEQ ID NO: 716974 - DNA, 73 bp, Homo sapiens
tatctcatggagtgtattattcaggctggtgcagaagtgaatgtgttgaatgacatgggagacacgccgcttc

SEQ ID NO: 716975 - DNA, 100 bp, Homo sapiens
atggagatgaacctctaacacagtggaaaggaaccgttctggatcagacacttctgagaaattcatcaggctgtgaagcgcgccgtgatgaatatcgaac

SEQ ID NO: 716976 - DNA, 97 bp, Homo sapiens
gctctgccgtgccacctgctgcacccacgaatctgcccacccctcctgtaacccagcctgtttcacttcttggttcccccagatctccagaacgaag

SEQ ID NO: 716977 - DNA, 82 bp, Homo sapiens
aggagaaagagggaatccccccacaacagcagaggctcatctacagtggcaagcagatggttccccactgaaggacttggtc

SEQ ID NO: 716978 - DNA, 82 bp, Homo sapiens
tgatcggctccttaccagctcacctctcaccgcgcatgtttggagaatgagaagactttgggacatttcatgagtcattcaa

SEQ ID NO: 716979 - DNA, 90 bp, Homo sapiens
gagatggcagcagaagctgcatatcaaactggtatcgagaaccttccctgcgaacttcagaggaacttccagctgatgcgagagctggac

SEQ ID NO: 716980 - DNA, 100 bp, Homo sapiens
atacctttggtaatatcgcatcaattgggagatgggaataactgggaacacaagtccatttggacagccctttagtcaagctggagggcagccaatggga

SEQ ID NO: 716981 - DNA, 100 bp, Homo sapiens
tgtgaggacatcggacgcagcctcctgacctatggccgccgcatccccctggctgaatgggaaagccggattgcgggacctggctgcaggtgctggagac

SEQ ID NO: 716982 - DNA, 98 bp, Homo sapiens
cccagggaccgcccgccctgggccccgaggctgccaggcccgccatccacagccgagataacgaaggaggcccaacttcattcaataaggagcctgac

SEQ ID NO: 716983 - DNA, 82 bp, Homo sapiens
ggagcctcagttggaagcagccgatccagcctgcggagcctgtggggcagctggagaagaagcaggcgctccctccattcca

SEQ ID NO: 716984 - DNA, 75 bp, Homo sapiens
agccttctggtataccatcgtcaccatgacaacactaggggcagctgcaatgactctccgcacggtattattgtc

SEQ ID NO: 716985 - DNA, 75 bp, Homo sapiens
cttccacttgcacgaaagctttcctaggccaaaaagaggagcttactccacgggaacagcctctagataatctga

SEQ ID NO: 716986 - DNA, 104 bp, Homo sapiens
ggactgcggcggcgccggcctccggggagaaacgcatttgacattgtgcagcaaagaaatggttatggagaagcccagtccgctgcttgtagggcgggagtttg

SEQ ID NO: 716987 - DNA, 90 bp, Homo sapiens
aactactttggattcacccacagcggggcggcggcggcggcggctgcggcccaatatagctagtggcggttggcaggaacctgaaaatcc

SEQ ID NO: 716988 - DNA, 71 bp, Homo sapiens
ccggcacgcgactccccccgggcccaaaggtctcctatggacagaagtgcgggcaaggagctttgttcctc

SEQ ID NO: 716989 - DNA, 100 bp, Homo sapiens
ggccgttgaaaaatggcgactgtggcagagttgaaggctgggatcgccgtgtttggctactccatggccgtgtccatcggggggatcttggcttcccgct

SEQ ID NO: 716990 - DNA, 96 bp, Homo sapiens
cattgacatttaattttagggtcctttatatagaagggagagtaggtggccaagcaagaggagttcttcaacctgtcccactgccaactggtgacc

SEQ ID NO: 716991 - DNA, 75 bp, Homo sapiens
ccagcttcctcttcaacctcaataatggtggtgttcccactgatgaagagcaggcgactgggttggagagggaga

SEQ ID NO: 716992 - DNA, 83 bp, Homo sapiens
cctggtcccggagtcgccgctgggcctgtccgctggcgtcatgtgagccagagcgaggaaggctaactccctcaccagacatc

SEQ ID NO: 716993 - DNA, 101 bp, Homo sapiens
ggatagaaataaatatcaaattcacattccattgcctcctaagattgacccaacagttaccatgatgcaggtggagcgagaacggaggaagctgaagaggg

SEQ ID NO: 716994 - DNA, 100 bp, Homo sapiens
ggagctcgagcggcagatcgagagcacagagacttcttgccatggctgccgtaagaataaactggcgatggaatatgagaggagccctctggaaagaaaa

SEQ ID NO: 716995 - DNA, 49 bp, Homo sapiens
tgtggcaaccagatcggtgccaaggccaggtcagagcagcccaccatgg

SEQ ID NO: 716996 - DNA, 74 bp, Homo sapiens
gcggcgcaggcaccggcccggggagaggcaccatgagcgcacctgtggaatcctctcaagaggaacagtcattg

SEQ ID NO: 716997 - DNA, 75 bp, Homo sapiens
cgggaagacgcggggaagaggaggcggaaaaggacgcaaagttctccggcgagatttccgtgagggtggaagaaa

SEQ ID NO: 716998 - DNA, 90 bp, Homo sapiens
cagattcgcagtggtcgcttcttctccttggcacacaagtctctgaattttgtctcaacactgctccagattactatgtcggaacagctg

SEQ ID NO: 716999 - DNA, 100 bp, Homo sapiens
agccggtacaggtgccctgcggacacgtgttagtctgaatgattcccacaatcagatggtggtgcactgggctggagagaaaagcaacgtgatcgtggcc

SEQ ID NO: 717000 - DNA, 50 bp, Homo sapiens
gactgcgtcaggcatctcaatcatggtcctaggcctacttacaagcctcc

SEQ ID NO: 717001 - DNA, 97 bp, Homo sapiens
cggagtgaccagaggagggacacgagtcaactactggattttctgtctggcaaacagtatgcagtaggtgatgaaactgatctttctataccaacat

SEQ ID NO: 717002 - DNA, 100 bp, Homo sapiens
gtgacacctttcgaccacaacatagtcaatttgcttaccacctgtagcaccagtgatgtgcagctgatcaagactggagacaaagtgggagccagcgaag

SEQ ID NO: 717003 - DNA, 75 bp, Homo sapiens
gttccatcatggcgtcaatgcagttcccagtgacctgacagcagaggagcgtcaagaactggagaacatccgacg

SEQ ID NO: 717004 - DNA, 100 bp, Homo sapiens
gggagatggccgaggccttcgccggggagatccctaaggtcctcgtagccgggggcctcatccacatgctcacccacttggccgaggctctgcaccaggc

SEQ ID NO: 717005 - DNA, 75 bp, Homo sapiens
aattcaaaaaggataaggagatcatagcagagtacgatactcaggtcaaagaaactgccaagttttggaccttat

SEQ ID NO: 717006 - DNA, 82 bp, Homo sapiens
gtcggtgagcgcgtttcccgcctgagcgcaactagcggcgggtcgtgggcacctccaggtctcatctgagtagcagcttcct

SEQ ID NO: 717007 - DNA, 75 bp, Homo sapiens
ccacaagctactgtgagttgctgcaaaataaagtccctttgctcggcccatctttggaaaaaagatctgggaatg

SEQ ID NO: 717008 - DNA, 83 bp, Homo sapiens
aagggaacgtggaaagcgcatacaggaccctaaacagttacccagcatgccacaatctgattgctgacctggatggaacagag

SEQ ID NO: 717009 - DNA, 82 bp, Homo sapiens
gggaagggccgcgcctgacgtctggccgcagcttgcttggctcaggaacaacagaagagaataaagaaaatgacctcagacc

SEQ ID NO: 717010 - DNA, 75 bp, Homo sapiens
ggtcatcggggatgtggacgaaggggccgacctcctagagcctcattttacagatgaggaaactgaggctggctg

SEQ ID NO: 717011 - DNA, 96 bp, Homo sapiens
gccaacatcgcggtgcagcgaatcaagcgggagttcaaggaggtgctgaagagcgaggagattagccggcttgagggacaggttctgagatataaa

SEQ ID NO: 717012 - DNA, 81 bp, Homo sapiens
gtgctgaaacagtgccgacttgcaaacgtccacctctggaggtatgaaggaggctatccagccctcacagaagtcatgaat

SEQ ID NO: 717013 - DNA, 97 bp, Homo sapiens
gcaggctttccttggacatctccatcaggccgtcgctttcgggttctctcatcgcttcgtcgttcgccaatgtttgaggagaaggccagcagtcctt

SEQ ID NO: 717014 - DNA, 111 bp, Homo sapiens
cgcgggggagggcggagctggcgcggcccctagctttctccttctggtgtggggcccgagctgccgggccgcaagtacagccctgggtacaacaccgaggtgggagacaag

SEQ ID NO: 717015 - DNA, 83 bp, Homo sapiens
catacctgatccggagaatcgaggagctcaacaagacaatgcagatcttcgtgaagactctgactggtaagaccatcaccctc

SEQ ID NO: 717016 - DNA, 90 bp, Homo sapiens
ccctgtgaaggtgaaagtggagaaatcagctggacaatcacggccggcgactgctcctcagtgaggaggcgtcactcaatatccctgcag

SEQ ID NO: 717017 - DNA, 85 bp, Homo sapiens
ccgctgccgcgttagttccgagcttgaagtcagaggaagaacgtgcaaaacgtgaggagctagagcgaatactggaagagaataa

SEQ ID NO: 717018 - DNA, 75 bp, Homo sapiens
cggacatcctggaagctgggaaatgctgagtccacctcaggacgaggccagtgcctgaaacgcatccgctaccat

SEQ ID NO: 717019 - DNA, 100 bp, Homo sapiens
atggtttaaggcaaagggaagttcttcggaacctttcttcccctggatgggaaaacatctcaagggcttcctgctgctgcagatggactttggcttccct

SEQ ID NO: 717020 - DNA, 73 bp, Homo sapiens
agatctgtgggactggtttgaatccttccttgatgatgaagagaaacgtgaagagggctggtgggtggtgatt

SEQ ID NO: 717021 - DNA, 102 bp, Homo sapiens
cgcgagggcagcggccgcggcgtcttcaagccgtgggaggagcggaccgaccgctccaagaacttcagtgaagatttcatacattggcctcatgacccagag

SEQ ID NO: 717022 - DNA, 74 bp, Homo sapiens
gcactggactcatggaggctgagcatttattcaggtacgcccctgtgggcatcatgttcctggtggctggcaag

SEQ ID NO: 717023 - DNA, 99 bp, Homo sapiens
ccggattcctttctttgtcaagccacccaatgcagagccacttgtggccccccaggtggatagatacttctcaagacatcacacagcgtgagtcaatca

SEQ ID NO: 717024 - DNA, 83 bp, Homo sapiens
ttacagcctggggagtgcgagagaaacccagccgaagcatttaaaaggggctgcttgctctcggtgactacatgaatgtccag

SEQ ID NO: 717025 - DNA, 50 bp, Homo sapiens
ggaagaaacaagaggagagtgtacagtttcaggaattagtgacattcagg

SEQ ID NO: 717026 - DNA, 75 bp, Homo sapiens
cacggacgagatgatcaaacgcctgaaggacccagatgatgtggtaccagttggccaaagaagagcctggtgttg

SEQ ID NO: 717027 - DNA, 100 bp, Homo sapiens
cagacagaggggagcacagagaaagagaatgatgaagagaaaggcccggagactgagctgctaagacacatggttgcacagaaggtgaaaccaaatcttc

SEQ ID NO: 717028 - DNA, 100 bp, Homo sapiens
gggaaatggccgctgtgtggttgcaacggagataaattcccggaaccgcgattcggcgtgtcaggaggaagaacgtgcaaaacgtgaggagctagagcga

SEQ ID NO: 717029 - DNA, 100 bp, Homo sapiens
tcagcttcttaccaaatacagaaggttaccttccgaacaagaatctatcactgtaatattaacagccaaggtgtgatctgtctggacatcttaaaggaca

SEQ ID NO: 717030 - DNA, 88 bp, Homo sapiens
agagtcttcggcatcgggcgacagcaggtcacagtggacgaggtgttggcggaaggtactttagattgattgccgagcggggcagttt

SEQ ID NO: 717031 - DNA, 50 bp, Homo sapiens
cagaggacaacgaagtgttcggcgccccagcgggatcccagagaaggatc

SEQ ID NO: 717032 - DNA, 75 bp, Homo sapiens
ggccgcctggctccccatactagtcgccgatcaatgaactgagccatgttcaaatccctgttatgttgatgccag

SEQ ID NO: 717033 - DNA, 90 bp, Homo sapiens
gcggggctgctggaggcggagaggcacggaggagccgctggggctgccgccacggccgcccggagatccgttcttccccctctccttcct

SEQ ID NO: 717034 - DNA, 75 bp, Homo sapiens
ttctcattatttgccagatctgcagagatcaaaacaagccctccaggaactcactgcgtaagagacgagttgaag

SEQ ID NO: 717035 - DNA, 82 bp, Homo sapiens
ctgccgctggcgagcgccaccgcatggttcaaatctgaacatcaatgatgtactagggaactactcattgactcttgttgat

SEQ ID NO: 717036 - DNA, 100 bp, Homo sapiens
ctcgctccggcgccggcctcgcctcctcgcagcagcgccatgatcaggatcctcatgaccagccaaagagaagaagaattaggaagcataaatcaaagaa

SEQ ID NO: 717037 - DNA, 110 bp, Homo sapiens
tgatccaccggcctcggcctcccaaagtgctgggattataggcgtgagccaccgtgcctggctgaaggtaattatcagcattgtaaccggcctcccaggctgtcacgcta

SEQ ID NO: 717038 - DNA, 83 bp, Homo sapiens
gtgacaactttcgtttccctctgagggaattgggaggtcggcggccccaaaatgattgccttcatgttgtggagcccatgcct

SEQ ID NO: 717039 - DNA, 83 bp, Homo sapiens
catgcgtcgtcggcctctgggcagcaggtatcgacttcaatattataaagattctgaacaacccaagagcatatacgttgccc

SEQ ID NO: 717040 - DNA, 80 bp, Homo sapiens
attagacaggaagccagaagatgtagacacagtgcagccaaaaggtgggtcctacgtgtatgaactcagcgcagtcctca

SEQ ID NO: 717041 - DNA, 100 bp, Homo sapiens
attggtcctaaagtccagagacagagcactaattagaaaatgtggtgacctggaagaagaactcaagaatgttactaacaatctgaaatctctggaggct

SEQ ID NO: 717042 - DNA, 100 bp, Homo sapiens
gtggaccccaagaagaccattcagatgggatctttccggatcaatccagatggcagccagtcagtggtggagctgtccccaatctcttcatgctggaaac

SEQ ID NO: 717043 - DNA, 82 bp, Homo sapiens
cgcgcccggcgcccctgagccggccgagcggcgacggaccgcgaggtgctgccttcacctgcctggagactgccttccgcct

SEQ ID NO: 717044 - DNA, 90 bp, Homo sapiens
gaggtgatggaagaagagtggaatgctttgcagtcagtggagaattgtccagaagacttggctcagattgattttgatgatgtggctgca

SEQ ID NO: 717045 - DNA, 75 bp, Homo sapiens
gtaccgggcagctggagacgccagagccggcggtgccggtggtggtgtgcacattgagccccggtatagacagtt

SEQ ID NO: 717046 - DNA, 80 bp, Homo sapiens
cttggactgagtcctgcaggacacaggtaatgctatgggctatgtacgaatgataagatctggtggtcttcattgtagca

SEQ ID NO: 717047 - DNA, 121 bp, Homo sapiens
tgggggttgctgacccagaggagagttctccaaacatgatcgtttactgcaaagaggctgaaagggaaacatcagccgcccggggggagttaaaatgagtgacaacactactctgcctgct

SEQ ID NO: 717048 - DNA, 98 bp, Homo sapiens
ccagatctcagaggagcctggctaagcaaaaccctgcagaacggctgcctaatttacagcaaccatgaggtgtgtgtctggggaagagacttacagaa

SEQ ID NO: 717049 - DNA, 90 bp, Homo sapiens
ctggcatcagctccacgtagcccagcgccggcacgcgcgaggccctgcctgatttgagatggggtcccaggtctcggtggaatcgggagc

SEQ ID NO: 717050 - DNA, 98 bp, Homo sapiens
ctcttatggcccatgccatggaggaagtcaagaaatttctagtaccggtttcagcaaccaaggagcacacaccctgatccttgattggtgaaaggata

SEQ ID NO: 717051 - DNA, 98 bp, Homo sapiens
ttaaagtcattgaggacaagagtggacggcagagttttcaagctgtgacagatagtggatgaggatgaggatgacctggaggaagaacacataactaa

SEQ ID NO: 717052 - DNA, 100 bp, Homo sapiens
gaaaggagcagtagatgatgatgtagcagaaggcctggaagaaacgctggtttatcctgcggagtggccggatgagcggtgacccagatgttctggaata

SEQ ID NO: 717053 - DNA, 82 bp, Homo sapiens
catctcctcgtccgacctcacaggccgacaagatacctctcgcatgtccacctcacaggagggagccatggatttgctgcgg

SEQ ID NO: 717054 - DNA, 74 bp, Homo sapiens
ggataatcactaaattctgccgaaaggactgaggaacggtgcctggaaaagaactgataaatttcaaacggaag

SEQ ID NO: 717055 - DNA, 76 bp, Homo sapiens
tggcatgcacctgactttgcctgatgcccatgatgcagactctgcaaattgtggctactaatttgccccctgaaga

SEQ ID NO: 717056 - DNA, 75 bp, Homo sapiens
aaaaactggagagcttcatcaaaaatagtgatagctttgataacccagtgtgccatcataatgtttgatgtaaca

SEQ ID NO: 717057 - DNA, 95 bp, Homo sapiens
aacatccgtgacacctggactctttcaggttctgaagcccagtgctaaacgacggtataaaaaccagaagtttggttttggtggaaagaagaaag

SEQ ID NO: 717058 - DNA, 82 bp, Homo sapiens
tggcttgttgcagatcctgattgtaggtggtgtccagctccagactgtgggtaccggcggacgtcgagaaatgtcaggatcg

SEQ ID NO: 717059 - DNA, 76 bp, Homo sapiens
gttcatgcttatgaatgctcgacttcaggttgcacagtgaattaaaagatgctgttgaaaaaaaattggaggcctt

SEQ ID NO: 717060 - DNA, 90 bp, Homo sapiens
aaacaaaaaggagttggatattttaacagtatcggcacttcagtggcagctgaatccatcaggagcttatggtcttgaacaaaatgagcc

SEQ ID NO: 717061 - DNA, 100 bp, Homo sapiens
aaccacagcaagagcacctggctgatcctgcaccacaaggtgtacgatttgaccaaatttctggaagagataatgccatgtacctcctggtggtgaacca

SEQ ID NO: 717062 - DNA, 90 bp, Homo sapiens
gcaacagcaagggctgagacatgttgtcttcacagcagagactcacaactttcccacagggccgtggtggagaagcgcctagcagcctgc

SEQ ID NO: 717063 - DNA, 98 bp, Homo sapiens
atgtgtcttccccagctctgcagccacatactatccgtttgttcaggaaccaccagtgacagagctcatgcacaattagttcgagaagttgatgtgga

SEQ ID NO: 717064 - DNA, 75 bp, Homo sapiens
ggagagtggagtggcccaccacctgaatgcagaggctatgacttctgccaggtcctgcagtggtttgccgagagg

SEQ ID NO: 717065 - DNA, 98 bp, Homo sapiens
tgggctgtgttccacaagttcaaaggaggagactcgaaagaagcccaagatgtccattgtggcgtccgcccagcctggcggtgagcccctgtgcaccg

SEQ ID NO: 717066 - DNA, 89 bp, Homo sapiens
tgaagcgtgatctgctcttccaagccctgggccgcacctacagaccgtatccttgatgagcttgacaaagacgatagtacccatgagtc

SEQ ID NO: 717067 - DNA, 100 bp, Homo sapiens
gggacagagtcaccatttgatttggaacagcagtggcaagatctcatgtccatcatggaaatgcaggaccaggaagaaacaggctcctgccagcaccgac

SEQ ID NO: 717068 - DNA, 50 bp, Homo sapiens
gctgtttgctccataggcttacattaggccaagctataacatcagaaatg

SEQ ID NO: 717069 - DNA, 82 bp, Homo sapiens
cgacggacgcaagatggcgacggcgaccatagctctctgcaagaagaaacacacgctgctgtgccccgactttgcccgcagg

SEQ ID NO: 717070 - DNA, 100 bp, Homo sapiens
cgactcatggagctgccgtaagacgcaaacatgcagatctttgtgaagaccctcactggcaaaaccatcacccttgaggtcgagcccagtgacaccattg

SEQ ID NO: 717071 - DNA, 100 bp, Homo sapiens
cagcagggaccatagctctcaggaaacttttgagaagaactttgaaagagaaacccataaaataagtgagcaaaatgatgctgataatgctagtgtcctg

SEQ ID NO: 717072 - DNA, 107 bp, Homo sapiens
aacaaaggaaaaacaaagcagtcaatggagcagagaatgatccctttgttagaccaaatttaccacaactaacagagagtacctgattgagaagctgcttacaagaa

SEQ ID NO: 717073 - DNA, 96 bp, Homo sapiens
gatctttccggatcaatccagatggcagccagtcagtggtggagctggagtatcagaggcagcagctcctggccgacagacaagccttccacatgg

SEQ ID NO: 717074 - DNA, 100 bp, Homo sapiens
atcagtttaaccttatggccagtgatttgattgcccttaatagaagtctgccagatgtaagattagaaggggtcgagctgtgcagttttagcgggtacaa

SEQ ID NO: 717075 - DNA, 75 bp, Homo sapiens
atcgagtctctgcgaacattccttttaacctatgtcttacaaaggcccaagtgccatcatggaagaacaggcagc

SEQ ID NO: 717076 - DNA, 75 bp, Homo sapiens
ttgggtcgatctgtgacagatggctcctcgcacctaccccagcaactcaaattcaccacctcggactcctgcgac

SEQ ID NO: 717077 - DNA, 98 bp, Homo sapiens
catctggatgacttggtggtggagtgtagagatatagttggcaacctcactgagttagaatcagaggtgtgagctctttgaccagaacctgaagctag

SEQ ID NO: 717078 - DNA, 74 bp, Homo sapiens
ttccttcaggaagtgaaatggatggagcagaatctggaaagaaagtgactgagaccgaagatgatagtgatagt

SEQ ID NO: 717079 - DNA, 82 bp, Homo sapiens
ccacgctctcggaatcacgacccctccctgccatgtatccgcagggcagacatccggtgttggagagcacaatggctgaaca

SEQ ID NO: 717080 - DNA, 50 bp, Homo sapiens
agattcgcagtggtcgcttcttctccttgctaaagctccatggaatagag

SEQ ID NO: 717081 - DNA, 96 bp, Homo sapiens
taaagacgttgaactctcagtggtcctacctggggatattatcaaatctactactgttcatggcagaataactgaagtgaagtgatggactccgat

SEQ ID NO: 717082 - DNA, 51 bp, Homo sapiens
aagcggtctggtggagctggagctgcgggatatgcagtgtaattgcatgat

SEQ ID NO: 717083 - DNA, 78 bp, Homo sapiens
tgctttccccccacctgaacagaaaactgcatttgacaaggaagatgagaatgtgcctactgctcctgatcctccaag

SEQ ID NO: 717084 - DNA, 88 bp, Homo sapiens
aggagcgcgggggcggctcctgctcttcctggactcctgagcagaggtagtaagcattaataatgtctttcatctttgagtggatcta

SEQ ID NO: 717085 - DNA, 105 bp, Homo sapiens
tgcatttgctttataaaagaccactggatcccaagagtgaagctcagcttcagctctacgtctcctccgagagccgcttcaacaccctggccgagttggttcatc

SEQ ID NO: 717086 - DNA, 90 bp, Homo sapiens
caagaagtcgcccatcgcagcagctcgcaagagtgagccatggagctacgtgtggggaacaagtaccgcctgggacggaagatcgggagc

SEQ ID NO: 717087 - DNA, 75 bp, Homo sapiens
gaacgaaagcagtgacggaggagcttgtaccaccgggcgacataccttctgttgaataccttttacaaaatggaa

SEQ ID NO: 717088 - DNA, 107 bp, Homo sapiens
atttttcattatccttttctgggtgctatgggtgatcattccaagaacaatgcagatcttcgtgaagactctgactggtaagaccatcaccctcgaggttgagccca

SEQ ID NO: 717089 - DNA, 96 bp, Homo sapiens
aagaggtttgggactgccccggcaactccagggtgtctggtccacgacctatcctaggcgccatggagtggttaatgtgttgctaacaactccact

SEQ ID NO: 717090 - DNA, 101 bp, Homo sapiens
tggcttcagacagcatatttgagtcatttccttcgtacccacagtgcttcatgagagtctgaacaacccagtcctgccagctccagctccagctccagctc

SEQ ID NO: 717091 - DNA, 100 bp, Homo sapiens
accaggtggacggcacggacgacagaagcgactttggtgagactctggttggattagcttttcaaaacagaaattcttggaaagaattaaatgacattgc

SEQ ID NO: 717092 - DNA, 82 bp, Homo sapiens
ggcggagcggccaacatggcggaacgcaggagacacaagaagcggatccagattggagctggagtgagccttccaggaattt

SEQ ID NO: 717093 - DNA, 50 bp, Homo sapiens
gtgctcagctcagctcagtgtaaaagatttgtagccaaaccgtgcgccat

SEQ ID NO: 717094 - DNA, 50 bp, Homo sapiens
agcagcagctacagctgggcaagatactttcattcagaaaaccaagaagc

SEQ ID NO: 717095 - DNA, 102 bp, Homo sapiens
cctcggagtccttggggacggagcagcgcgtcgtggggcgagcggcagcaaaatgatgcttcaacacccaggccaggtctctgcctcggaagtgagtgcttc

SEQ ID NO: 717096 - DNA, 98 bp, Homo sapiens
gacactctctgaggacatctctgcaaaggccccagcggcccaggtatacaaaactaggatatgctggaaatacagaaccacagtttatcatcccttcc

SEQ ID NO: 717097 - DNA, 98 bp, Homo sapiens
agcagacagctccctgggcaccaggcagctaacagggtctccgtctctccaccgggggcttcatccttccagggaggagaagagggactccagaatgg

SEQ ID NO: 717098 - DNA, 80 bp, Homo sapiens
ggcagctagcagggcgcttcgggtgacatttacaaagaggaaatttgggttgatgaagaaggcttatgagctgagcgtgc

SEQ ID NO: 717099 - DNA, 95 bp, Homo sapiens
aacacgaccatctcagtgactgtgaaagtccctcctcctatgtctccatcctccaaatctgtgagcactccaagtgaagctggaagccaagactc

SEQ ID NO: 717100 - DNA, 101 bp, Homo sapiens
cgctcgacagctccaagacgctgcggccaagcagaaagttgaacagaacgcggctcccagccacaccaagttcagatggagaggagaaaacctatggtggc

SEQ ID NO: 717101 - DNA, 50 bp, Homo sapiens
cagatggctttctcactgaaagatggggaaggccaacgcattgacatcca

SEQ ID NO: 717102 - DNA, 90 bp, Homo sapiens
gctctcttggcagccttcctgatttctgcagctctgtgtgaaggttatgatgtgattgctcaagcccaatctgggactgggaaaacggcc

SEQ ID NO: 717103 - DNA, 75 bp, Homo sapiens
acgtcttcaccttcggcagccggctgtacgcacacaccatcgcagcaggacagctggcctgaagctcagagccgg

SEQ ID NO: 717104 - DNA, 100 bp, Homo sapiens
gagacatcaatgtatttcttaccaaaagacactttcagatctacgcagaccccaccaagaggctggagctgtacttccggcccaaggacccatactgcca

SEQ ID NO: 717105 - DNA, 100 bp, Homo sapiens
gcagatttgaacctatctgctttcaagctggtcatcatgatgaaacttagacacagtcctccagcagcctgacctgagtgggttagtgatccagagaaac

SEQ ID NO: 717106 - DNA, 100 bp, Homo sapiens
tgtctttgaccagcaatcctgtgagggtgataaaagaaaatgtggctgaagttacccgaagttcagcttgcagtgtaattcagaagagttaagaccagaa

SEQ ID NO: 717107 - DNA, 50 bp, Homo sapiens
ccgaactcagcagcaggtagaagcagagaactctagaggaaagcgtctac

SEQ ID NO: 717108 - DNA, 100 bp, Homo sapiens
caagattgtggtgcacacgccctgcatcgagcagctggagaaggtggagcagctcctgtacgaaagccctgagcggtactcccgctcagtgcttctcatc

SEQ ID NO: 717109 - DNA, 100 bp, Homo sapiens
atctgcaaaagaagagaagcagaattatacctagaagtctactaatggacagttagtcacccacctacatgttgagagttgtggaaagtaaaaatgtagc

SEQ ID NO: 717110 - DNA, 100 bp, Homo sapiens
ctcggctctccacagccccgcgcacaggcctccgggtgatcccattaagatactaatgccatcactgtctcctacaatggaagaaggaaacattgtgaaa

SEQ ID NO: 717111 - DNA, 80 bp, Homo sapiens
ggctgggctggcggaggccttgctgatgaacctgactgaggttgaaatcacaaagattagacacctttttagataggtgt

SEQ ID NO: 717112 - DNA, 100 bp, Homo sapiens
cggcgaggtggatttattcgcatatttcctacatctgagacatgggaaatatatgggttttataggatcacattgacaaaagtaccatggagttttatga

SEQ ID NO: 717113 - DNA, 75 bp, Homo sapiens
gtcctggaggtgttccacccgacgcatgagtggcaggcccttcagccaggtggaggtggaggaagcgtccctggg

SEQ ID NO: 717114 - DNA, 83 bp, Homo sapiens
agaaactggaggagtcccgctcgaagctaggagccactggaagtggggaaatggtctgtacaatatgtcaagaagagtattca

SEQ ID NO: 717115 - DNA, 90 bp, Homo sapiens
cgcacctggacgacgcccggcgccagcacatcgcagcacgagtacacgagacaggattgagaaaggagagattcaaattgtgacttcaga

SEQ ID NO: 717116 - DNA, 90 bp, Homo sapiens
cagagacaattatgacaactgaaatgagacatgcacataatatagccatccaacatattctttacaatggatgatgtggtcaaggttgga

SEQ ID NO: 717117 - DNA, 146 bp, Homo sapiens
cctgtgggaagtctccatggtgaagtataggctgaggctacctgtgaacagtacgcagtgaatgttgctggttatgatggtgagagtatcggaaattgcccgttttctcagcgtctctttatgattctctggctgaaaggcgttat

SEQ ID NO: 717118 - DNA, 75 bp, Homo sapiens
cagcggagcgggcgccaggccggccgggcaggatgcgctaccgggcgtcggttattgcagctgactgcaaaaggg

SEQ ID NO: 717119 - DNA, 90 bp, Homo sapiens
cgaaaactggataacactaagtttagatctcatgaggtctggctctgggagaggagtggacagcagctggttgagatacatccccatctg

SEQ ID NO: 717120 - DNA, 87 bp, Homo sapiens
tcttggcgacattgacaatgatggctttgaaggaaactaaatatattttgccaactttggaaaaagaattattcttggcagagcaca

SEQ ID NO: 717121 - DNA, 50 bp, Homo sapiens
ccgccggtcacctccgcgcggacaccagttggttgaatctggcgatgtgg

SEQ ID NO: 717122 - DNA, 100 bp, Homo sapiens
ctggagtctgcgaaggccgggacccggttccccggcccacagtgggggtgtgcaaacccgagagaactgggtggaatgcaagattacaactacatctggg

SEQ ID NO: 717123 - DNA, 83 bp, Homo sapiens
tccaggtgctcatggagctggaaaaacctgtgctcatatcactgggaaaaggctccatggctacatggaaaacaagcctctgg

SEQ ID NO: 717124 - DNA, 74 bp, Homo sapiens
caatcttcctgctaaggccattggacacagaatccgagtgcgcatttgtagccatgaagtgccatcttgcccaa

SEQ ID NO: 717125 - DNA, 97 bp, Homo sapiens
agcctcccgagttgctgggactacagcattagtgccagcagtagttcccaagggctgtctcagccatccacccagacgactcagtatctgagagcag

SEQ ID NO: 717126 - DNA, 74 bp, Homo sapiens
agctctccgggttccccggctcgcggggcccggcgaagggcagggcagtcagggcgacagcaagaatgccaaga

SEQ ID NO: 717127 - DNA, 98 bp, Homo sapiens
gcccggcccgggccgcacccgccggccccatgaggagggacgtgaacggagtgaccaagagcaggtttgagaccttcacggcatggtgcaactcccac

SEQ ID NO: 717128 - DNA, 100 bp, Homo sapiens
acagcggcgaggagaacgtcccgctggatctgacccgagatttttcggacgccgcccgatactacattccctgagcccacctgcctgtcagcatcacccc

SEQ ID NO: 717129 - DNA, 100 bp, Homo sapiens
tcctagtagctgggaccacaggtgtatgccaccacacccaggaagctctatgcagaactgtgccaaggcatcgtggacatagccatttccagtgtcttcc

SEQ ID NO: 717130 - DNA, 88 bp, Homo sapiens
tggagcgatggctttgggtggtaccattgtttattctccagatatgccttcacggcttccaattcaagacatatttgctggactggtt

SEQ ID NO: 717131 - DNA, 100 bp, Homo sapiens
tcaagtacacggagtacaatgagccacacgagagccgcaccaacgccgacatcatcgaggcctatatgaacccaatagcaatggcgagatcaaggggtcc

SEQ ID NO: 717132 - DNA, 100 bp, Homo sapiens
cgacgcccgcaggtcctcgcggtgcgcaccgtttgcgacttgctctgtggctgtgggctgctgggagtgggcatctggctctccgtgtcccaaggcaact

SEQ ID NO: 717133 - DNA, 76 bp, Homo sapiens
ttgacaatacaggaaatgtttgctggaggctctcaggtcatttttaccaacccattggagatagtgaagattcgtc

SEQ ID NO: 717134 - DNA, 82 bp, Homo sapiens
acgacttggtcttcccagggttcttcgagctggtcgtgcgagtgctgtggtcagtgacttcctgtcgggccgttcgccactg

SEQ ID NO: 717135 - DNA, 88 bp, Homo sapiens
cgaggaacagaagaagaagaaccggaagaaactgtccgagaagcccaaagtacaccagaggatcgcttcctggcagaatttgggagct

SEQ ID NO: 717136 - DNA, 74 bp, Homo sapiens
gtcagactccagcagccaagatggtgaagcagatcgagagcaagaatcatttgctgtttcaaatagagaactgt

SEQ ID NO: 717137 - DNA, 50 bp, Homo sapiens
gtgcagcctggcagtgcagtgctacccaggtggatttagacaagtaacag

SEQ ID NO: 717138 - DNA, 97 bp, Homo sapiens
ccccgcccccaggtggctacccaccagctgcaccaggtggtagaagacggctacgagttctttgccaagcggcagctggtgacacttttctcagctc

SEQ ID NO: 717139 - DNA, 100 bp, Homo sapiens
tggattattgcagattttgataagccttctgggagaaaacttctttttaatgcattaaagcacatggaggagatgttaaagtaacccatcttgcaggacg

SEQ ID NO: 717140 - DNA, 51 bp, Homo sapiens
tatcaggacatggagtatgaaagacggcctgctgggaacgggacttctaaa

SEQ ID NO: 717141 - DNA, 83 bp, Homo sapiens
ctcgccgcagcctccggagaggaacagaccctcactctctctgtcagaaaaatgacctgcaagcgcaggaccgagcccaccgc

SEQ ID NO: 717142 - DNA, 75 bp, Homo sapiens
atctcttggagcagctggggatcatgtgaaagccctgtgtaaggaatgtgtagtagaacgttgtcgcatattgcg

SEQ ID NO: 717143 - DNA, 102 bp, Homo sapiens
tcaagtttaactcctcaaagcttcgtgttaataagctgggagtgcatccgccccaacccttttccccctcgtctcctgtgagaattccccgtcggatacgag

SEQ ID NO: 717144 - DNA, 51 bp, Homo sapiens
ggcaaggcaagtagcggcggcgcttcaaggacgccaggaaagcatgtgcag

SEQ ID NO: 717145 - DNA, 97 bp, Homo sapiens
ggagaaggagcacgattacagggatgagcatttggactttatccagtcacacctgcggaggttctgccttcagtccaaaagttttggaaggtctcca

SEQ ID NO: 717146 - DNA, 110 bp, Homo sapiens
gggagccaaagaccaagcatctcagagaagaggaggaagaaggcgagaagcacagctttttgaaagattgccaagttattttgaccttcagaggaggctgatgattttag

SEQ ID NO: 717147 - DNA, 100 bp, Homo sapiens
gagaagccagtcacgccgggagctggtacacagcctcagaaagtggagctgttccaaaaagaaaagaccccttaacacacactagtaattcactgcctcg

SEQ ID NO: 717148 - DNA, 100 bp, Homo sapiens
cggtagctaccgaaacgctctgaaaatcgagccggtgattccttcaacacccagaatgagccagaagacatgatgaaaaaagagaaaaagtctgaagctc

SEQ ID NO: 717149 - DNA, 141 bp, Homo sapiens
ctctgaatctttgtgtttggctgcccaggctcgcctcgactccaaatggttgaaaacagatatacaggtatgagagaatcgaaatcccaatccatattgtacctcatgtcactatcgggaaagtgtgccttgaatcagcag

SEQ ID NO: 717150 - DNA, 100 bp, Homo sapiens
ctggggactttgatgattttaacctggaggatgcagtgaaagaaacttcctcagtaaagcctcccagatggacgtatcatcaaagttgggggagagagat

SEQ ID NO: 717151 - DNA, 100 bp, Homo sapiens
tagaatcagttgtcgcaggtgggagagtttctagggaaaaagcagaagctgatgctaaatcagagcctcattcccttagtagtgaagcattgatgaggag

SEQ ID NO: 717152 - DNA, 100 bp, Homo sapiens
ctgaaaactaccctcactgcctttggatttgcttcagctgacctcatcgaggcgggatgtagctcattttgggatacgagtctccatcgtggagcctggc

SEQ ID NO: 717153 - DNA, 100 bp, Homo sapiens
aatgacgacagcaacccgaagacagggaaatttagccagagactgctgctactttgaaacgtacgatagaggccctgatggacagaggagcaatagtgag

SEQ ID NO: 717154 - DNA, 109 bp, Homo sapiens
ccggaacggcggcgacaagggtgttcccgaactagagtgggaaatgggtcctgatgaatatgaagagatggaagaagaggaggaggaggaagaggaggaagacgaggat

SEQ ID NO: 717155 - DNA, 82 bp, Homo sapiens
agaccgcgcgcagggcctgcagcgggagctggacggcgagcgcgagcggcgcgagaaaatccacctccgacccttaagccag

SEQ ID NO: 717156 - DNA, 83 bp, Homo sapiens
agccgctgggaagcccctagacgcgccgaggggccgggctacgagcggctgagttgacattttgctaaaggctgtgggagaca

SEQ ID NO: 717157 - DNA, 74 bp, Homo sapiens
cccaattgaccggacagatgatgacattggattcagtatctttacataagaaattcattgctgattgctacaca

SEQ ID NO: 717158 - DNA, 101 bp, Homo sapiens
cagaccggaagcgctccgctgtacctggatcctgctcctctgggttgaaacccgggcgccgccaagatgccggtgaacctgggcccaaacaaaatggtggt

SEQ ID NO: 717159 - DNA, 83 bp, Homo sapiens
agattacgaggattatggatgaacgtaacagacaggatgagctttctgatgttagccaaggcggatctaaagctaccactcca

SEQ ID NO: 717160 - DNA, 82 bp, Homo sapiens
ggcgacatactacctctggccccgagatcagaatgccgtgttctaagaacggaagcatctgggctggatggaatttagcatc

SEQ ID NO: 717161 - DNA, 98 bp, Homo sapiens
catcacctgcctcagaacagactgtcacagtggaggaagggtgagtttgtagatgatgggactgaaactcacttcagtatcgggaaccatgactgtta

SEQ ID NO: 717162 - DNA, 100 bp, Homo sapiens
ctcttggtttggacatactacatggatcaggatttggtgctatggagaaatttttggtagaatataagagtgcagtggagaagaaactggcagagtacaa

SEQ ID NO: 717163 - DNA, 100 bp, Homo sapiens
tcctcgtcctccagctgttatctggaagtctccctccgtcgcccaggctggagtgcaatggcacgatctcggctcacgcaacttccgtcttccgggttca

SEQ ID NO: 717164 - DNA, 98 bp, Homo sapiens
tggcgccaccgcctcatgcactgtagcggttctggtgaggttggaaggatgcagccacccggttgtcatgaaaggcctgtgtgctgaatgtggccaag

SEQ ID NO: 717165 - DNA, 83 bp, Homo sapiens
cggctggatgggaagttaatgtttacggcgaagtctactcaacgtttccaaggacactgcccatctctaagataagaacctgg

SEQ ID NO: 717166 - DNA, 100 bp, Homo sapiens
aagtcttcaggggagattgtctactgtgggcaggtactgtgcatgcctgctgaggagttcagagagcttaaagaccaggatggagggggagatgataaaa

SEQ ID NO: 717167 - DNA, 75 bp, Homo sapiens
ccagctaggagctgatgctgcatcgtaataacatttgcagagcgctttcacagaaatgatggaagaattgcatag

SEQ ID NO: 717168 - DNA, 101 bp, Homo sapiens
cgggagtgtcctggacccagctgagcgggcggtcattcgcatcgcaggcgtccgagctgggccacagcctgaacgagaacgtcctcaagcctgcgcaggag

SEQ ID NO: 717169 - DNA, 75 bp, Homo sapiens
atcatccatctaaagcaccagtaaaatatggtgaactcattgtcttagggaactgtggctgcaccatctgtcttc

SEQ ID NO: 717170 - DNA, 83 bp, Homo sapiens
aggagcgtcccggtgcggctgcacgtctcgcggatcatgctaaaaatggctacaaacttcctagcacatgagaagatctggtt

SEQ ID NO: 717171 - DNA, 50 bp, Homo sapiens
cacaggggccactcagagtcgcccgagaaatcgcctatcgggaccggctg

SEQ ID NO: 717172 - DNA, 98 bp, Homo sapiens
gacagattcgcagtggtcgcttcttctccttggaaaacctcctgatgagaattcacttccacattgctgatgaaaccaaagaggatatatgtactgcc

SEQ ID NO: 717173 - DNA, 95 bp, Homo sapiens
ctggagcggcacgggcgacgcaagggcgtctctggccgagcctctttttgtggaaaacgacagcagcagcagtggcctggaagacgccaccgcta

SEQ ID NO: 717174 - DNA, 83 bp, Homo sapiens
ctgctatccccaacaagaggaaagacacacctaccaagaagccagtcaagcggccaggtgctttgcaagatatcaccttgtca

SEQ ID NO: 717175 - DNA, 100 bp, Homo sapiens
gaagagccatgggtcctcgacctgcagggagcagaggggacagaggcaccaaggacctccaagacagcccagctcaacattggcaatgtgctccctgtgg

SEQ ID NO: 717176 - DNA, 100 bp, Homo sapiens
cagctactatagtgttcctgagctgccaacgatacctgaggggggttgttttgatgaaagtgaaaggcgcagtgagcctgcaggccgacctcactcgtgg

SEQ ID NO: 717177 - DNA, 100 bp, Homo sapiens
cccagatctacctgacgggcctgcgagggttgaagattgtgaagcaatagcctaagcaagagtgagccatggagctacgtgtggggaacaagtaccgcct

SEQ ID NO: 717178 - DNA, 83 bp, Homo sapiens
tgaaccttgggtgatttgttctgtatcagaagacaatatcatgcaagtgtggcaaatggatgtgggctctcttgatgagaaga

SEQ ID NO: 717179 - DNA, 75 bp, Homo sapiens
gtacgccctcatggggaaaatctccccggtgactttcaggttcattgtcttggtggagaaattggagcagaaatc

SEQ ID NO: 717180 - DNA, 101 bp, Homo sapiens
aacacacctgtctatgtgtcctcaccaacctgggcattgctattggaaatacttaatagtagatgaaggacacaggattaagaatatgaagtgccgtctaa

SEQ ID NO: 717181 - DNA, 76 bp, Homo sapiens
cttgctcctcagctctgctgttttggtgcaaccttgacatttttgagttctgatcatctcagccttccagaaagca

SEQ ID NO: 717182 - DNA, 100 bp, Homo sapiens
atcttcaaagcctttgctatgatcattgacaaactggaagaggatgctggaggtcagcagattggcttcttgctaggaagctgtggtattgccttagctc

SEQ ID NO: 717183 - DNA, 75 bp, Homo sapiens
ggaaactgttgtgcctcttcatattggcgatcctgttgtgtggggaagaaaacatgacagaaacagatgccttct

SEQ ID NO: 717184 - DNA, 82 bp, Homo sapiens
ctgagctcagacctgccaatttaccagagataattgataacaccctgtaacagctgacttgcattgaaaggctctagttaca

SEQ ID NO: 717185 - DNA, 75 bp, Homo sapiens
tttttgttccagaggatgatgatgatgatgactaacaggaataacttgactgttattgacatgattggcgtggaa

SEQ ID NO: 717186 - DNA, 82 bp, Homo sapiens
cgttcccctctggcgcctttgctgctcctctctctgcacgtttttgaaatcatgaatcctgtttatagtcctggatcttctg

SEQ ID NO: 717187 - DNA, 101 bp, Homo sapiens
gctttctgctaaggatgtattgtggcttttgtttggattgcagcatgcagaattacaggtcactcctggaagcaaggcggctctagctaatttatgtattg

SEQ ID NO: 717188 - DNA, 100 bp, Homo sapiens
gatgtctcagtacagccctgctatagaagcgctgggatatgaagcttcgtcatcttggactcagtaaaagtgattctagcaatagtgattccactcagag

SEQ ID NO: 717189 - DNA, 100 bp, Homo sapiens
caggagtccagggctggagagaaaacctctgcgaggaaagggaaggagcaagccgtggtattctgagagaagcctcacaaagtgtattggaattactatt

SEQ ID NO: 717190 - DNA, 115 bp, Homo sapiens
tattaagcacccaaggaaagcacttaaaagtggaaagatgacggatgaaaagaatgaacactgtccttcaaaacgagtatatttgtaagccgagttgaatgctttgtggagagag

SEQ ID NO: 717191 - DNA, 100 bp, Homo sapiens
cctgactggggaaaatcagcaagagctttctggaagaaaggaaatgttaggatcactttattctggcacatcaaatttgggattttggtgattgttttcc

SEQ ID NO: 717192 - DNA, 141 bp, Homo sapiens
cattttcacctcgcgtcgcgcccgggaggaaggaacgaggcaaggagctaaagcagcgtgcgttcagccctggggaacattttagtggacaaaccaaatgaccaatcttcaagatggtcttcagagagcaactatcctccc

SEQ ID NO: 717193 - DNA, 100 bp, Homo sapiens
aatgacttctgaagatttagaaaatgctctaaaagcagtcatcaatgacaaaagccgcctgtcttggttagatggctctggattaggattctcactggaa

SEQ ID NO: 717194 - DNA, 100 bp, Homo sapiens
gagacagtgcctgccttttcagagcgtacctgtgccactgtcaccattggaggaatggtttgtggatgcacttagatgtttgcaatgagcactgtggctg

SEQ ID NO: 717195 - DNA, 75 bp, Homo sapiens
atgagatgggggaggagctgggcaggacgtgagcgacagaatagaaaaggaatccctggatggcccgatcgtgaa

SEQ ID NO: 717196 - DNA, 95 bp, Homo sapiens
ggtgaaccctgaagtcggtgtctgctgcgttcacggcaggattcggttaggtgacttaagagattaaaattaatttggttgctgttggttctgaa

SEQ ID NO: 717197 - DNA, 100 bp, Homo sapiens
cagtccttgacagaattgactataacgttgaacagtcctgtatcaaaactgaagatggtttgaaacagcttcacaagaaactggcgatggaatatgagag

SEQ ID NO: 717198 - DNA, 100 bp, Homo sapiens
tttgagaagccttccgctattcagcagagagctattattccctgtattaaaggtgagcctcacgtggatggggagcctggagatttacggttccgaatca

SEQ ID NO: 717199 - DNA, 75 bp, Homo sapiens
cggtgaaggcgaacgcggtctgcaagctgacgtatgttcgtgctggccgtgggcagcgccgtctttgatgccatg

SEQ ID NO: 717200 - DNA, 100 bp, Homo sapiens
ccggcctgcccggggcaccagggaaggatgggtacgacggactgccggggcccaagggggagccaggttccccaaggactctagcacctggactgtggac

SEQ ID NO: 717201 - DNA, 75 bp, Homo sapiens
ttgcctgctcccggagggagacgcgctgccgaggagaacccagcggtaagactttgaccccgacgcaggcttcag

SEQ ID NO: 717202 - DNA, 88 bp, Homo sapiens
atggaggagccggagatgcagctcaaggggaagaaaggtttttgtctgatgaaaatagtctggagtataaatattacaagctgaagtt

SEQ ID NO: 717203 - DNA, 75 bp, Homo sapiens
cggccaattcggtggaacgaggacgcggactgcgaaggcagagtgtgaacatggctacgcctcttcattcccgtc

SEQ ID NO: 717204 - DNA, 73 bp, Homo sapiens
agtggtgtgtgacggggctcctgatgaaccagaggaagagatcattgccgaggactatgacgatgatcctgtg

SEQ ID NO: 717205 - DNA, 100 bp, Homo sapiens
ttctggaacataatcttacattcacatcttcgtgtgcccagggaccctgcagaaggtgctggagcccacctcgacacacgagtcagagcaccagtctggc

SEQ ID NO: 717206 - DNA, 100 bp, Homo sapiens
caatcctgtttttaggagatacttaaataagattttaattgaagctggaaagcttggacttctggttatattctgggcactaaatgaaggcgtttctagg

SEQ ID NO: 717207 - DNA, 101 bp, Homo sapiens
gtgtgtgcagcaggctgagctggaccacctgtctggacgccacaaagacaccaggaggaattccaggctgggagaagcagaatttgcccgcatcatgagca

SEQ ID NO: 717208 - DNA, 100 bp, Homo sapiens
gctgatacctgagtctgaggaacaaggaaataaagaaaatattcaccaaataaagcagactgtacctattcatggtgatgtcagtgttggcattaagtgt

SEQ ID NO: 717209 - DNA, 74 bp, Homo sapiens
ccagccgctgttttgccggaggagcccctcaggccggggttggcactgatgaagcctgcctgattgagatcctc

SEQ ID NO: 717210 - DNA, 82 bp, Homo sapiens
gggtcagtccgccgctcaccccgcggccgcaccttcccgccttctcaggacgtagacaagtttggcaacgagatcacccagc

SEQ ID NO: 717211 - DNA, 51 bp, Homo sapiens
gccatgaggaaagaattctccgagggaccagttactctccacaagaaaatt

SEQ ID NO: 717212 - DNA, 100 bp, Homo sapiens
ctgatgactacttggagctttcgctaaagctaagaaaaggatgatgatgctgaagctatccttgctgcagacttcgaaattggtcactttttacgtgagc

SEQ ID NO: 717213 - DNA, 100 bp, Homo sapiens
aatccgggcttttgctgatatgcatgcatgtaccgaccttctgaacaaggccaacacctatgcagtccaatatcagatggaaatgatgcggagccttcgc

SEQ ID NO: 717214 - DNA, 75 bp, Homo sapiens
aagctgctggataattttatcccagggtggctgaatcacggaatggcattctgtgaaactttagaagagacaaac

SEQ ID NO: 717215 - DNA, 98 bp, Homo sapiens
ttggatgtgggaggattgcattcagtctagttcctggttgccggctgaaataacctggtggagtgcaactcaaaattggacccaacaaagaccactct

SEQ ID NO: 717216 - DNA, 100 bp, Homo sapiens
tgagcctccctcctcccattcacaaggcagtggtcccagcagtggttccccagagagaggtggagaagggctatgaggagtggttgctgaatgagatccg

SEQ ID NO: 717217 - DNA, 90 bp, Homo sapiens
ccttcctgtaccttgtcctcaggccacagtggagaccagtcagctgacctcaagccagagttctgcaggccctcaatcacaagcctccac

SEQ ID NO: 717218 - DNA, 82 bp, Homo sapiens
tggagtccatcttccacgagaaactgcagatctgggacacggccggccaggagcggttccgcaccatcacccagagctacta

SEQ ID NO: 717219 - DNA, 100 bp, Homo sapiens
agcaagcaaatcagcagctgtcaagggcagcagattatcaggtgaccaagaatatggcccaggtgaccaaagccctggacaaggccctgagcaccatgga

SEQ ID NO: 717220 - DNA, 75 bp, Homo sapiens
cagagaccaccgaagactgcatcgccaagatcatggaaaaaccatatggcatagttgaaaagaagtccagaatat

SEQ ID NO: 717221 - DNA, 98 bp, Homo sapiens
aagaggcgtcctgttcttcctgggggactggcagtaccttctccaggcaaattccgttcccctgcagcaccatctcctttggctcttcggcaaccagt

SEQ ID NO: 717222 - DNA, 75 bp, Homo sapiens
gatcttcgaacttttgacacggctttggaaacgacgtcatgtgttagtcctattttgtaacggattatgatccaa

SEQ ID NO: 717223 - DNA, 100 bp, Homo sapiens
ccaagactggtgggacccagactgacttgttcacatgtggcaaatgtaaaaagaagaattgcacttacacacagatcaatgtccgagttaccaccatgga

SEQ ID NO: 717224 - DNA, 75 bp, Homo sapiens
cctgattctacccaagtacatatgatttcagctgcaatggcagtttcgagaggcccgtgccatgagaccgcctgg

SEQ ID NO: 717225 - DNA, 100 bp, Homo sapiens
tgatcgaatgaaagagaaagcaatgagtgggctaaagtgaaacattcagcatccctgtctggtatgccttctcgaaatcaatgtggactgaacataaatc

SEQ ID NO: 717226 - DNA, 100 bp, Homo sapiens
cagcaccgcacgccctgcaagggagaaccttctgataacttaagagagattctccaaaatgtggccagattgcagggagtatcaaatatgagaaagctag

SEQ ID NO: 717227 - DNA, 83 bp, Homo sapiens
ggagaggtcatctcagttccacacaagatcatcacccaccttcgaaaagaggaacacttgtctgtgagccacaacaacctgac

SEQ ID NO: 717228 - DNA, 75 bp, Homo sapiens
gcggacttcgtggtagaatccattggctctgaagtggggtctctggctcaagaacttgacaggtctaaaccagcg

SEQ ID NO: 717229 - DNA, 100 bp, Homo sapiens
tgatattggcaggccatcgatttagtaaagcagggcagaagtctggacagctgatcacctgaaagagaggagccaagaaaaccaatctaaacatttgtgg

SEQ ID NO: 717230 - DNA, 90 bp, Homo sapiens
atccattggctctgaagtggggtctctggatgcctctggatattttaaggaatgagttgtccaatagtatcctgtcgttacaaccagagc

SEQ ID NO: 717231 - DNA, 100 bp, Homo sapiens
gccgtaacgtcactgacccaacatgcccttccctgagtcctggcgtatctaatccaaaggactgcatgacacaccataggatatagtcaagaagcctttg

SEQ ID NO: 717232 - DNA, 101 bp, Homo sapiens
ggaagtgaggtgaaaagcttctgcagcgagaagtgctttgcggcctgccgacgagcctacttcaagagaaataagagttttccgtctgatgaaggttggcc

SEQ ID NO: 717233 - DNA, 50 bp, Homo sapiens
acttgccctgtctcctcgcagatgaggctgttttgacagaatacaaatta

SEQ ID NO: 717234 - DNA, 100 bp, Homo sapiens
gtgattaccatggcgaggagtctctgtccgggggcctggctaaggaaaccctattacctccaggtaccctggctaaagccgggccggagccctctgccct

SEQ ID NO: 717235 - DNA, 75 bp, Homo sapiens
gagaccaggagctcctccaccaggccaaagacttcggcactgatcactggagattccatcgttagtgctgaggca

SEQ ID NO: 717236 - DNA, 71 bp, Homo sapiens
gcgacatcaccaagctggaggtggacgccatcgtcaacgccggcatgacccgggacgacctgttcaacacc

SEQ ID NO: 717237 - DNA, 50 bp, Homo sapiens
cacagctatcccctgaggcccgacccagctttgtgatggtcaacagcgtg

SEQ ID NO: 717238 - DNA, 83 bp, Homo sapiens
gaagctgcccttcaccgcgggcgccaatggggagcagaaggactcggacacaggagcatcagatccatgctgctgctgactcg

SEQ ID NO: 717239 - DNA, 74 bp, Homo sapiens
cgctacaacctgaagagtccgggttatgatgtgattgctcaagcccaatctgggactgggaaaacggccacatt

SEQ ID NO: 717240 - DNA, 74 bp, Homo sapiens
gcagagcctgcggggcaagatctttccagggtctccctccactgctgtagtaacccgggtccggggcctcggtg

SEQ ID NO: 717241 - DNA, 75 bp, Homo sapiens
ccggcgccggcctcgcctcctcgcagcagcgccatggaagctcttcgtgggcggtcttgactggagcacgaccca

SEQ ID NO: 717242 - DNA, 75 bp, Homo sapiens
agcctcccgagtggctgggattacaggttccaatattgaaaaatctgtaaaagacctccagcgctgcacagtgtc

SEQ ID NO: 717243 - DNA, 96 bp, Homo sapiens
gccggctggccgtgatgctgcccactggtggtcccccgctcccggggtccccggccggccaagcaggaagttaaatgaagttcgaaagagattgaa

SEQ ID NO: 717244 - DNA, 88 bp, Homo sapiens
aagtcggtgtctgctgcgttcacggcaggattcggttagaacatcgatatattgaactcttcttgaattctactcctggaggcggctc

SEQ ID NO: 717245 - DNA, 96 bp, Homo sapiens
tgaagttactccagatgaaaaactgggagagaaagggaaggaaattatgaccaagtacctcaccccaaagcctaccaggacatcctcggaaagtat

SEQ ID NO: 717246 - DNA, 125 bp, Homo sapiens
tgaccgctgccctcgccgcccgccgggcgctctcgcttcagtcagtcgggccgcgccgcgcctcagctctggtcaaaatgcagatcttcgtgaaaacccttaccggcaagaccatcacccttgag

SEQ ID NO: 717247 - DNA, 51 bp, Homo sapiens
cggaatattacagcggcgaccagtcagtttcagaagaggagccccgccgag

SEQ ID NO: 717248 - DNA, 74 bp, Homo sapiens
agagccgggcctagcccagagacatggagagttgctacaacccagagccaccatgttggtgataccccccggac

SEQ ID NO: 717249 - DNA, 98 bp, Homo sapiens
ggagctgagcagactttaccccagtgaggcaaagtcccactcatcagttacatgggaataggactctcggctcaaggcgtcaacatgaacagacttcc

SEQ ID NO: 717250 - DNA, 100 bp, Homo sapiens
tgctccatatgctgttgaagaagggagccaacaaaaattgttttttctacctgttgacgtgtcaagcactaactgaagcaggaagagctggtgcagcagg

SEQ ID NO: 717251 - DNA, 90 bp, Homo sapiens
tgttgtgattgacaggaatcttctaattcttggaaaaattctgggtgaaggtaaccgtacttttcccaaaatgctatattgcaattggac

SEQ ID NO: 717252 - DNA, 51 bp, Homo sapiens
ttcgatttggaggacagagactgcaagtgactctgacatcattagaagcat

SEQ ID NO: 717253 - DNA, 114 bp, Homo sapiens
aagtggatttacgttttggaacctcgtctttttattgacggtgtcttgtgtgaaagggccatgatccaaaggaaccagagcagttgagaaaactgtttattggtggtctgagct

SEQ ID NO: 717254 - DNA, 100 bp, Homo sapiens
agatgagtttcctgatggagtaaccctagggcatctatgtacttcaggacaacaaatttcgcctgcttactcagatgtctgcaggaaaacagtatttaga

SEQ ID NO: 717255 - DNA, 100 bp, Homo sapiens
gcccaagcgacagctgtcagaggggcaggagcttctgggagccaccgtctgaagggcatttttggtcgaagagagctgaagtaatgagaagacatcatgg

SEQ ID NO: 717256 - DNA, 100 bp, Homo sapiens
aagctgccgccgttgcctccgccgccaagagtgagcgagcggacccgcgatggtgtggaaccatcagagaatctacaatccctgatggagaagaatcagt

SEQ ID NO: 717257 - DNA, 90 bp, Homo sapiens
ccccacaatagggtatcatttttacgggccttctggagatgcttccgaactgtgggcaaaaatggcgataggggagtgtatacatcacca

SEQ ID NO: 717258 - DNA, 74 bp, Homo sapiens
ttcgtgcgcggtaagaagctgcgcggtagcgcggtgagcttatgtccctgatgccaaaaatgcacctactcttt

SEQ ID NO: 717259 - DNA, 75 bp, Homo sapiens
cgtgccatatgcagcacgaggggctgcaagagcccctcaccctgagctgggaaggcaccaccacagctgcccact

SEQ ID NO: 717260 - DNA, 75 bp, Homo sapiens
ttgaagatggatatcagctacagactttcctgagtcaggtcttgcaagagcaaaatccgtccctagccacacata

SEQ ID NO: 717261 - DNA, 75 bp, Homo sapiens
tagaaattgatcagcaacaactaactcagcagcaacttaatggaaactagaaacctctgtagaggagcaggatgc

SEQ ID NO: 717262 - DNA, 50 bp, Homo sapiens
atggaagatcaagctgcaagtgcttgattcagcgccctataaagaccagc

SEQ ID NO: 717263 - DNA, 51 bp, Homo sapiens
tctctcgttcaaggaagcgcaggctgagaaccaccaccacctaaaatcccc

SEQ ID NO: 717264 - DNA, 100 bp, Homo sapiens
ctgaagaaagagatcggattggtcagtgcctgtggtatcatcgtagctttcagccgtgccccaattccaatggctgtggtccgcagagagctatcctgtg

SEQ ID NO: 717265 - DNA, 82 bp, Homo sapiens
acctgacgctcgtcctcatcctggtcactagcggactcttcttcgccttcgagtcagcccaaggccaaccccactgtcactc

SEQ ID NO: 717266 - DNA, 75 bp, Homo sapiens
cagcaaaagaaggagggtcctctcagtgattaagagtaattccctcctggtcccagacagtctaagaggcacaga

SEQ ID NO: 717267 - DNA, 96 bp, Homo sapiens
gagaaccctgagtgtgcccctgacatgacaaggagccgtcgtcgttaggttgaaatcacaaagattagacacctttttagataggtgttcttcagc

SEQ ID NO: 717268 - DNA, 100 bp, Homo sapiens
ggacaagcaggacttcaaccgtatcatcaaggtgcacgtcggcgacgaggacttcgtacacctgcgagtgttccaatctctccctcatgaaaacaagccc

SEQ ID NO: 717269 - DNA, 121 bp, Homo sapiens
ataaagccttctgaactgagtgaaaatacagccaagatcttggcaaagcttctccctcagtatttagaccagacctgcctagagctggaacgttacctccagagcgagccctgctatgttt

SEQ ID NO: 717270 - DNA, 87 bp, Homo sapiens
cgttgacaaggcactgctttttcatgacgtgtactaatggtcacttgatgtgcgctggctgttttatccacctactagcagatgccc

SEQ ID NO: 717271 - DNA, 75 bp, Homo sapiens
aagcacgtgacggtcatcggcggcgggctgatgggcgccggcattgcccagatccctgcatgtcactgagtccac

SEQ ID NO: 717272 - DNA, 100 bp, Homo sapiens
tgatctctctcgctgtgagacatgtctgagactcctgctcagtgtagcattaaggatggggctggtaagtagcaaaaagccggacaaggaaaagccgatc

SEQ ID NO: 717273 - DNA, 75 bp, Homo sapiens
gcgcccctgggagggaggtgggaggctctaggctccaagacgccgtcgcttgagcaggaacgaatgcaggaattt

SEQ ID NO: 717274 - DNA, 75 bp, Homo sapiens
cgagaaggtggacgtgctggtgtctgagtggatggggacctgcctgctggaatgtatcctgtcaggtataatgtc

SEQ ID NO: 717275 - DNA, 95 bp, Homo sapiens
gtatggcaacactccatttttgtttcctttatatggccaaggagaactcccccagtgtttctgcagtgcaatgcgtgttttactatctaaattac

SEQ ID NO: 717276 - DNA, 100 bp, Homo sapiens
accttgtggccctgggctttaccatctttgtggctgtgcttgccaggcctggctccagcaaatacgccatgcgagacctagtccacaggcttccaggagg

SEQ ID NO: 717277 - DNA, 83 bp, Homo sapiens
agagcctcaggcccaactcggaggaggatagtaatgatgacactgaagatgtttcactgtttgatgcggaagaggagacgact

SEQ ID NO: 717278 - DNA, 73 bp, Homo sapiens
gcggatccgactacaactacgagagcaaattcactcctggggagtttgcttcacctacggcacctggtttggc

SEQ ID NO: 717279 - DNA, 75 bp, Homo sapiens
aggccaagtatccgccagtcaataggaagtacgagttagaccaaattttggtacaattgaatcacactgcagcag

SEQ ID NO: 717280 - DNA, 98 bp, Homo sapiens
cctggggatattatcaaatctactactgttcatggcagtggtgctgattactatgattacggacatggactcagtgaggagacttatgattcctacgg

SEQ ID NO: 717281 - DNA, 100 bp, Homo sapiens
caagaggttctgaagactgccctcatccacgatggcctagcacgtggaattcgcgaagctgccaaagccttagacaagctgattcaccccaagagtggcc

SEQ ID NO: 717282 - DNA, 100 bp, Homo sapiens
gtactttctggagggaagcaaaccctgcaaagcggtctatgttaacaatgaatgggcaaccagtgttggggaaggagggagctttggagaacttgctttg

SEQ ID NO: 717283 - DNA, 89 bp, Homo sapiens
ctgctgctgaccctggccttcaaccccgagccgctggtgctacagttgactaatctccttcagaatcaagcagtgaaaggaaaagttgc

SEQ ID NO: 717284 - DNA, 98 bp, Homo sapiens
cctgatcctggaagagactcggggccccccagcctccgccaacccaggcaacacttccccagatcaaaaggagccaacacctttcatcatcgagtgga

SEQ ID NO: 717285 - DNA, 99 bp, Homo sapiens
ggcggatggcccccggtgcaagaggcgcaaacaagccaatcccaggaggaaaaacgacctcgaagtagggggaaaactgcagtggaagatgaggacagc

SEQ ID NO: 717286 - DNA, 75 bp, Homo sapiens
catgatttaaacaagagatttccacagaagcacccccccaggcagcagcagcagttttcatctctggatgacaag

SEQ ID NO: 717287 - DNA, 98 bp, Homo sapiens
tggagtctgcgaaggccgggacccggttccccggcccacagtgggggtgtgcaaacccgagagaactggtttgaccttgtctgtgtcaatgcgtggat

SEQ ID NO: 717288 - DNA, 75 bp, Homo sapiens
gatggcaacaaccctttccaagcagttcaagaagtgtgccacctgggcttgaaggcatgaaggaacaggacctgt

SEQ ID NO: 717289 - DNA, 76 bp, Homo sapiens
ctggaagatcattaatgccttccgctactacggggctggtgaattaccatatctccgtcaagtgcagtaaccagtt

SEQ ID NO: 717290 - DNA, 50 bp, Homo sapiens
ttattggaagaggatctaggagaaatctacaaataagaaacctcgaaaat

SEQ ID NO: 717291 - DNA, 74 bp, Homo sapiens
caagttgcagcccgggtttggagggagtttgagatgaagcgaatgtggtgcctgggtcccggcaggaagaagtg

SEQ ID NO: 717292 - DNA, 96 bp, Homo sapiens
gggcaacttacccgagaacgtgcgggaagagaagatcatcgagcatttcaaacggtgtgtagctgggacggtgctggtctgagctggaccttgtct

SEQ ID NO: 717293 - DNA, 101 bp, Homo sapiens
gaagatgatgacgatgatgatgaagaggatgatgatgaagactttcccatggtttggcatggacattgggggaactctagtaaagctctcgtactttgaac

SEQ ID NO: 717294 - DNA, 132 bp, Homo sapiens
cggccacctctgagaagggagacgacgctgctgggtccgctgagcggggcgacccgagacaggccgacggtcgcaaggtcctacggtcaagcatccgggagtttctatgcagcgaagccatgttccacctgg

SEQ ID NO: 717295 - DNA, 100 bp, Homo sapiens
gtgaggagttcgccgagttccaggttaaaccacagcttgaagaaaaaacaaatgagacttacggaaaattggaagctgtgcagtataaaactcaagttgt

SEQ ID NO: 717296 - DNA, 87 bp, Homo sapiens
acctgctgcaccagcggcagcggcgcatagaggagcagaaggaggagcggcgccgcgtggaggagttatggctgcagcttcgattgc

SEQ ID NO: 717297 - DNA, 75 bp, Homo sapiens
agcttcacacaatcgatttgagcatagtctaggtgttatagttttgccgctggactcttccctcccttcccccac

SEQ ID NO: 717298 - DNA, 98 bp, Homo sapiens
aaaatattcatcaacctagagctgccaagaagcattcttcatctaaagataagaccaagatcactccatggatgaaatgacagctgtggtgaaaattg

SEQ ID NO: 717299 - DNA, 75 bp, Homo sapiens
ctgggggtcgtccgatcctgcagggaatatccctgcgctccagacgccaaaataagactgaggcagaacagcaaa

SEQ ID NO: 717300 - DNA, 90 bp, Homo sapiens
tatggcaaacagccacatttggacatgaaatacaccgtatttggaaaattctgctcctaagtgtaggagagaacttggtgcctcttccac

SEQ ID NO: 717301 - DNA, 98 bp, Homo sapiens
cggtcaccatcaaaattgcaccgaacacacctcagctggctgacattattgcaacaggcttcgtgctctgtctgatgatggagtatctgatcttgaag

SEQ ID NO: 717302 - DNA, 50 bp, Homo sapiens
aaaatctccccggtgactttcagtcctggactgctcttcctgctcttcag

SEQ ID NO: 717303 - DNA, 83 bp, Homo sapiens
tcccgatgtttaccctcaggaccccaaacagaaggagcatggcctgtatgagaagaaaaagacctcaagaaagcaacgaaagg

SEQ ID NO: 717304 - DNA, 90 bp, Homo sapiens
tcttctgtgtggagctcagcggctacgacctgaaactctacgaggataaccagacagctcatcttggcagccaacagggatgaattctac

SEQ ID NO: 717305 - DNA, 80 bp, Homo sapiens
ctaagcaggcagaaacatatttaaccattttactcccaaaaaagaagaggaggagagccaaccagcaaagaaaacataca

SEQ ID NO: 717306 - DNA, 75 bp, Homo sapiens
cgtccccgccagtcagaagttgagtttcagacccaaagtttacgcctatcagacctacacagaaaatcgcatctt

SEQ ID NO: 717307 - DNA, 95 bp, Homo sapiens
ctatgctggaagaatttaagaaaggtgtcatggagaaactccagctgggcccagagattctgcagcgggaaaatccaaggcttatttatgccagg

SEQ ID NO: 717308 - DNA, 75 bp, Homo sapiens
atgcagctgctgctgaccctggccttcaaccccgagccgctggtgctacaggcatctaataggattcaggaatca

SEQ ID NO: 717309 - DNA, 74 bp, Homo sapiens
agataatcaacagtaaggatgtcaaagttcaggtaactgcaaaaacaatggctcagcatgaagaactgatgaag

SEQ ID NO: 717310 - DNA, 100 bp, Homo sapiens
gagatccacagctaagacgccaggactccctggaagcctagaaatgatgatgaacaacatgggtggtgatgaggatgtagatttaccagaagtagatgga

SEQ ID NO: 717311 - DNA, 100 bp, Homo sapiens
cgaactgtgggcaaaaatggcggtaagaacaagagagttggaaagcagttagcctcacagaagatccttcagctgctgcacccacatgtcaagaactggg

SEQ ID NO: 717312 - DNA, 100 bp, Homo sapiens
tccagatggcagccagtcagtggtggagaccatgacctggtcgtttggatggaacagttctcttcctgtttactatattcgagaggaaaggcagagagtt

SEQ ID NO: 717313 - DNA, 80 bp, Homo sapiens
tctccattatttgagatgagttacatcttggagttgattatggaagattcccacaagagtaccacgtcagagacagcacc

SEQ ID NO: 717314 - DNA, 83 bp, Homo sapiens
gtttggcatggctgcggccctggcaggtaccatgagaggcatcattgctaaggcgaaactaatctggattcactccctctggt

SEQ ID NO: 717315 - DNA, 142 bp, Homo sapiens
gctgaaggaagatggcggacggcgtggaccacatagacatttacgcggatgtcggcgaagagttcaaccaggtttatggctacaaatgatttgatgacggaactgcagaaagattccatcaagttggatgatgatagtgaaa

SEQ ID NO: 717316 - DNA, 75 bp, Homo sapiens
cagacatctacaaccttcgatctcctgacgagcactcttggaaagaacaggctacacacttgatgtgaccactgg

SEQ ID NO: 717317 - DNA, 101 bp, Homo sapiens
gaaatggaagggaaacattcccagatcctcaaactatcgaagagcaaatttttcagaacataaaacaagaatatagtcgttatcagaggtggagacattta

SEQ ID NO: 717318 - DNA, 100 bp, Homo sapiens
cgcagattggagctgagctgtggctgccagaagatagcgaacggtgtgggccgaagatatgctcatgtggtgttgaggaaagcagacattgacctcacca

SEQ ID NO: 717319 - DNA, 100 bp, Homo sapiens
caggagcagtggtgctgtcagcgcggccgtcggagacatgggagacccggggtcggagactcatctttcaagaggactttagactaattgcagataatta

SEQ ID NO: 717320 - DNA, 100 bp, Homo sapiens
cttcacttcaggctgttatgaaagggtacagctcaaggagagctctttctggatgatgggcacacgttcaactatcagactcgccaagagttcctgctgc

SEQ ID NO: 717321 - DNA, 98 bp, Homo sapiens
caaggcagtcctagcagcatgcagtgactatttccggatgatgaaacatgcttggaataattataaaggttatgcctggggattaaatgaactcaaac

SEQ ID NO: 717322 - DNA, 100 bp, Homo sapiens
ccggagaagcgagtttcagctgtgtcttctgtggcttcagcgtcacctagtgcaggctgccattcaacaaacgcattgtcaacagtcaaccaaaagaaac

SEQ ID NO: 717323 - DNA, 75 bp, Homo sapiens
tgtacagtgacatcttctgggatttagtctggtaattcatttgcacacctgttagcaagaaacagaagttgaagg

SEQ ID NO: 717324 - DNA, 119 bp, Homo sapiens
cgacgctgctcaaaacctcgctccggaaaggggacacctgccctgtatgatgagattcgtcagtttcgcaaggcctgtggggaggctcatcttaaaactatattagcgacaggagaact

SEQ ID NO: 717325 - DNA, 74 bp, Homo sapiens
aagccgtggaataggtgtatcaagtaatggtgcaaagcctgaagtactggtgtggcatactcggacagagaagc

SEQ ID NO: 717326 - DNA, 75 bp, Homo sapiens
ggcacttcattggccacctacagaaacaaaatgtcaacaaattgatggtttacaggctggtaacctacatctttg

SEQ ID NO: 717327 - DNA, 100 bp, Homo sapiens
gaaagatatgacctgaggaatatcgtgcagcccaaacccttgccttcccaggtggcgacatgtctaagaatgtgagccagtcacagatggcaaaattgaa

SEQ ID NO: 717328 - DNA, 75 bp, Homo sapiens
atgtagccaagttcacatcaagtccagggttaagtacagaagcaattgtgggcacacttgaagctgaaaaagaaa

SEQ ID NO: 717329 - DNA, 75 bp, Homo sapiens
cttaaaatacccgcaacagccccttcgtcccaagtgaaaggtgtagcagtcactcggcctacacccacagcatcg

SEQ ID NO: 717330 - DNA, 82 bp, Homo sapiens
aggctcaacgagaacaagctatcaggttgcttctagaactgctggagttactgtttgacaagtttaatgctgtagccgctgc

SEQ ID NO: 717331 - DNA, 101 bp, Homo sapiens
gaactcccagagggcgctgtgaagcctccagcaaacaagtatcctatcttcttttttggcacccatgaaacggtccagattcccactatggcacaaaagga

SEQ ID NO: 717332 - DNA, 101 bp, Homo sapiens
cctggatcaccgacagcacagacagaatccctgctaccaaaagcctgatctttgaccagatggcagtaacatttgaagatgtgactattatttttacatgg

SEQ ID NO: 717333 - DNA, 98 bp, Homo sapiens
tcaagggcaagctggaggaggagcgagccaagctgcacgatgtggagcgtgtttgatcagagtgcgctttcaactgaagctaaagaagaaatgtacaa

SEQ ID NO: 717334 - DNA, 73 bp, Homo sapiens
tgataggggggaaacctcaagatataatcttcacttccgggggcactgagaatttttccctagattggtgtaa

SEQ ID NO: 717335 - DNA, 73 bp, Homo sapiens
cctgaaggactacgagaggaaggttatcttggagaaggcaggattgactggggcgactttggggtagaggcag

SEQ ID NO: 717336 - DNA, 139 bp, Homo sapiens
caagccttccttgattctctctcagccagcacagctcaggccagttcgtcggctgccagcaacaatcaccagagattttatcaaaccttcacaattcctcatcagatgtgtcttatgtctctgatataaatagtgtgta

SEQ ID NO: 717337 - DNA, 97 bp, Homo sapiens
caaatggaacaccacactctacgaaggcacctggcggcgggggagcaccgcggggggctgccgaaactacccaggtcgatttggtcagacaacgcca

SEQ ID NO: 717338 - DNA, 90 bp, Homo sapiens
cgtgtctgaggtggtgcgcggctccgtgctcctggattggatagctttagtcaaagcagctgctgcagctgcagccaagaacaaaacagg

SEQ ID NO: 717339 - DNA, 75 bp, Homo sapiens
tccttacttctccgccaacgcggtcatctcgcagaacgccatcaaccagcttttgcctgagaatacagatcaacc

SEQ ID NO: 717340 - DNA, 100 bp, Homo sapiens
gtgattgtctggagttggagatcagaatctgctgttcacatcccggctgtgacgtcgtgtccgacaggtaagacacggagacctttgggttgatggcaag

SEQ ID NO: 717341 - DNA, 74 bp, Homo sapiens
gtttgaggataactgacttaaaatctgggctctttattgagaaactaccaaaacatcgagattacaaatctgct

SEQ ID NO: 717342 - DNA, 82 bp, Homo sapiens
ggcctgcagagcccatgagagggagaagcggcagcgtctaccctgagatggggacccagagcctgctcttgggaacagccag

SEQ ID NO: 717343 - DNA, 122 bp, Homo sapiens
gccgcctggctttcgtattcgttgttctcggcgggctgtggggcctccgcgccgcggccgttagtcatgtcggccacaagtatatggttatgatgacttgcagatgcttcagacaagatttc

SEQ ID NO: 717344 - DNA, 96 bp, Homo sapiens
cacaagagcaccatactttgagggtgccaatgggtcatgtttggttagaaggtgacaatctacagaattctacagattccaggtgctatggaccta

SEQ ID NO: 717345 - DNA, 74 bp, Homo sapiens
aggattccaagtaactcttatttggatgtctcccgtgctaagctagcagctataattccggacccagttgtagc

SEQ ID NO: 717346 - DNA, 100 bp, Homo sapiens
ctgttagaagtcgggattaatgaaaattgtactcagctcagattctccctgactctgctcatctggaccttttctgtgtgtctgccacccctgtgctgct

SEQ ID NO: 717347 - DNA, 80 bp, Homo sapiens
cgcgtgtctaggtgagtcgcggtgggtcctcgcttgcagttcagcgaccacgtagagacggggttttgccatgttggcca

SEQ ID NO: 717348 - DNA, 82 bp, Homo sapiens
tgagaactataagagcctggtgagacggagctatcggcgccgcggcaagagccagggagtgcatccgccccaacccttttcc

SEQ ID NO: 717349 - DNA, 89 bp, Homo sapiens
gactgtatgaactggacatctcgttccctcccagcgccatcatgaccgggtcctataacaacttcttcaggatgtttgatagagacacg

SEQ ID NO: 717350 - DNA, 80 bp, Homo sapiens
tagaggggattgcagaatctccaacaactttacagtcaggacagttcaacgaggacatgatccccaccgtgggtttcaac

SEQ ID NO: 717351 - DNA, 98 bp, Homo sapiens
tccgggccgggcggcctccggggctgccagagcagcaggcaccacaccccactctggccggagcacgccaagcagctccccatcgctccggaaacggc

SEQ ID NO: 717352 - DNA, 99 bp, Homo sapiens
aggggctggtgtactccagcaacttccagacgcagggacagagctcatcgggaaatcaaggatattttctataaggcaatccagaaacgcagacagtct

SEQ ID NO: 717353 - DNA, 51 bp, Homo sapiens
ctgctgcccgcgctcgccgcacgagggggggccctcagcctcttggccttg

SEQ ID NO: 717354 - DNA, 74 bp, Homo sapiens
ctctctcatcttgttgatggtgttaaacgaatactggaaaacccacagtgagaaagatcagtctaaagaaaagg

SEQ ID NO: 717355 - DNA, 75 bp, Homo sapiens
aaagggtgcggctgctgcagaggtggctgatgcagggaaggtctgtttctctaacaactttttatcgaacagcga

SEQ ID NO: 717356 - DNA, 90 bp, Homo sapiens
cagcatttctctacaaagcagcccatgagtgcatgtgtgtttgctgtagtgaagggtctatgttagaagattggcagtatggagttactc

SEQ ID NO: 717357 - DNA, 75 bp, Homo sapiens
cgggagttgagccacgagctgttgtgcatccagaggtggaattggggcccgtatgtgccaagagttgtaacctct

SEQ ID NO: 717358 - DNA, 90 bp, Homo sapiens
agcgagccagcgcccggagcaagcggagctcccccaagagccggaaagattttaggacagcaaattaatgactttacccttcctgatgtg

SEQ ID NO: 717359 - DNA, 100 bp, Homo sapiens
ggtctgcgtggggatgaacatcgacatcgccagcatcgacatggtttccgaagtcaacatggcttgcattgatgacaatgttgatatggtgaagtttctg

SEQ ID NO: 717360 - DNA, 97 bp, Homo sapiens
gactttgagccagtccagaccctgctgctgtcttcaaagaaggaaatcacattctgcctgatgaagatctggcttcctttcactggagtttacttgg

SEQ ID NO: 717361 - DNA, 100 bp, Homo sapiens
tcgagcatgagggggctgaaccccaaaatcctgttttccagccgggaggagcagcaagacattctgtctaagtttggcccacccttcctccattctgagc

SEQ ID NO: 717362 - DNA, 98 bp, Homo sapiens
aacagttgcagcttcaacttttacaacaacaacatgctggaaaacagcctaaagagctgcagatctgggacacggccggccaggagcggttccgcacc

SEQ ID NO: 717363 - DNA, 96 bp, Homo sapiens
ttgacattcaaccgtacccgccaagctgtcatcacaaaagagttgattgaaattatctctggtgctgcagctctgctacagatgcacatgttgaat

SEQ ID NO: 717364 - DNA, 90 bp, Homo sapiens
gtggtgatggaagcaggtggaattatgccctgttggttccaatgctgggattggctgcttttcgtgcggattgatgagtacgattactcc

SEQ ID NO: 717365 - DNA, 50 bp, Homo sapiens
cctaagaagacagcttgaacctaggtctggagcccccaactcccttgaca

SEQ ID NO: 717366 - DNA, 127 bp, Homo sapiens
caggaggttgctaacccagaacactatattaaacatcccctacagaacagaacactatcagctatatgttcctgagtcagctcaagttggttcagctgttgggaaaatcaaggcaaatgatgctgac

SEQ ID NO: 717367 - DNA, 75 bp, Homo sapiens
attctctccgccctgcacttttgccagctgaaggtccagaggcagccttccaagttttccacccctgagtacaca

SEQ ID NO: 717368 - DNA, 82 bp, Homo sapiens
cagacatctccaactgtgggaactctttccagcttgtgtctgatatttgaatggtggtacttccataagcatggcacatctt

SEQ ID NO: 717369 - DNA, 51 bp, Homo sapiens
cccgcccgccatggccaccaagatttgtaagactccagggcctcccagccg

SEQ ID NO: 717370 - DNA, 101 bp, Homo sapiens
gtatgtggtcagcatcgttgctcttaatggcagagaggaaagtcccttattgattggccaacaatcaacaggtcggattgtttgtgctgaacgaactgtcc

SEQ ID NO: 717371 - DNA, 50 bp, Homo sapiens
atggatttaaacatatttccctgtggagccctagggtggtcccaaccatg

SEQ ID NO: 717372 - DNA, 88 bp, Homo sapiens
gctgccagcgagagccgcgggagagtgtgcagccgagtcactactgcctgcctgcctgcctgctacgtataccaacaagctacggcag

SEQ ID NO: 717373 - DNA, 71 bp, Homo sapiens
atctggacacctttaaggattctcgcctcagaacatgccgagtttttgcactgcaagtccaaaaagtttac

SEQ ID NO: 717374 - DNA, 119 bp, Homo sapiens
ttcgtctcttacgtctgcggaagtgcagctgcctcagttcttagcgcaggaggaaatctctgacatcaaagaggaggggaacctagaagctgtcttgaatgccttggataaaattgtgg

SEQ ID NO: 717375 - DNA, 108 bp, Homo sapiens
tgagggctccccagccatgcttcctgtacagcctgcaaaactgtaccgttttgcagagattcgctaccatcgccctgaggagacccacaaggggcgtacagttccagc

SEQ ID NO: 717376 - DNA, 101 bp, Homo sapiens
ccgggagaagcatgggaaggaggccgagccgggatctcaggtcctcgggggcggcggccacgccaaggacgggctcttgcagccaatgccggaacaggatt

SEQ ID NO: 717377 - DNA, 82 bp, Homo sapiens
cagcagcacaacacagggaagcttggggagcaatgtctcaggctgtgcagacaaacggaactcaaccattaagcaaaacatg

SEQ ID NO: 717378 - DNA, 74 bp, Homo sapiens
gaatcctgggtttagccattgagattatcaagaatgatctgtgggttaaccctctacgctactacctgagagaa

SEQ ID NO: 717379 - DNA, 75 bp, Homo sapiens
ctttcccttattccagttgatccccagctgcaacagcaagcgctacctggagacacttcccaacacaagcatcat

SEQ ID NO: 717380 - DNA, 98 bp, Homo sapiens
gcttaaacacctccaacggggatggctctgaaacagaaaccacctctgccatcctcgcctcagtcaaagaacagttgtggaagatatcaataagcgca

SEQ ID NO: 717381 - DNA, 74 bp, Homo sapiens
actcatttcccaacttcaggaagagctgagctccaaacgagaatggaagccgctggaggaccgtagctgcacag

SEQ ID NO: 717382 - DNA, 100 bp, Homo sapiens
tccgcccggacccccggccccgccgtgggtctccaggaaacctagagaaaaaccgttatggggatgtaccctgcctggaccaaactagagtgaagctaac

SEQ ID NO: 717383 - DNA, 82 bp, Homo sapiens
ttggaacttttcctacaccttctcctggcagcatggttcaagaaggctctcaaaataggctgctgcaaaagctggtatattg

SEQ ID NO: 717384 - DNA, 100 bp, Homo sapiens
acctggaatcgcccaagtccctctactcgcgaggagctctttgttcaatgcctagccacctattcctacagacacggcagtggaaaggaaaagaaagtac

SEQ ID NO: 717385 - DNA, 100 bp, Homo sapiens
ataagtacaagactctgcgacagattcgacaaggcaatacaaagcagcgtatcgatgagtttgaagcaatgccaaagatgaagaggaagcctttctggat

SEQ ID NO: 717386 - DNA, 144 bp, Homo sapiens
cattactgcaaggagggctactaccgcgacatgggcaagcccatcacccaccggaaggcctgcaaagagataattgacgaccttgccaacctagtggagaacacagatgaaaaacttcgcaatgaaaccaggcgggtaaacatg

SEQ ID NO: 717387 - DNA, 98 bp, Homo sapiens
ctgagtttacttctcctccttctttgttcaagactgggcttccaccgagcagggaacagctcctgcccaggtctgtgggcactcagcatggatttcag

SEQ ID NO: 717388 - DNA, 98 bp, Homo sapiens
gccgcccccagctcccccgcctcggggagggcaccaggattactacagcatcccatttcccacacccactactccgctgactgggagggatggtagcc

SEQ ID NO: 717389 - DNA, 100 bp, Homo sapiens
tttctcactgttgctggttaatcgcttcaggagctaaggggggaaatggcgatggggataagggtggagataaacaggctctgctgccatgaaggtgaag

SEQ ID NO: 717390 - DNA, 101 bp, Homo sapiens
ggttgccggggcaggggcggaggcggaggcagaggtggaggcgctttgaaaggtgtctgacttccagcaactgctggcctgtgccagggtgcaagctgagc

SEQ ID NO: 717391 - DNA, 100 bp, Homo sapiens
gctgctgggcgaagcacgctactacctggtgcagggcctgattgaggactgccagctggcgctgcagaacatacggtccctaatgagcacagagaagacc

SEQ ID NO: 717392 - DNA, 100 bp, Homo sapiens
cagcagcagtacccagggcagcaaggttacccaggacagcagcagggctacgtaatgctacagccctttgactatgatccgaatgaaaagagtaaacaca

SEQ ID NO: 717393 - DNA, 75 bp, Homo sapiens
tcaaaaccctcctcatcatctactccttcgtcttctgggagagaaaatacaggctcaggaattgagtcatccaag

SEQ ID NO: 717394 - DNA, 82 bp, Homo sapiens
ctagcactgacacgtttacccacttgaaacaggggagaatgcaccgaaaccttacggaatcggatcagagaactagaagcag

SEQ ID NO: 717395 - DNA, 100 bp, Homo sapiens
ggcaaagccaaaggcaccccgattgtcgatgggctcgctccagaggacatgagcaaggagcaggaggataagatcaatgccctcattaaagcagccggtg

SEQ ID NO: 717396 - DNA, 50 bp, Homo sapiens
gggacccccacgccgccgccaggtgtgctgggcatcaaggtgaagatcat

SEQ ID NO: 717397 - DNA, 87 bp, Homo sapiens
ggatggcaccgtcactctcaaggatctccgtgtagaactccttggagagaagaatggctacgtgactgtcagtgagatcaaagccag

SEQ ID NO: 717398 - DNA, 100 bp, Homo sapiens
gcgccgtgacctgtacaggtcgcgggagtcgtagggaggacgccgggacacctggaagccgagaaatggtttttagaacttcagccataaaaatgggcag

SEQ ID NO: 717399 - DNA, 83 bp, Homo sapiens
gtggggcaccgatgtctgggattactgcacggggtcgcgccgtggcggagcaggtgaaaggtgtagcagtcactcggcctaca

SEQ ID NO: 717400 - DNA, 97 bp, Homo sapiens
ctgtctctgcggcttctggttctcacttgtcggatgttgccttatggctgtttagcaacaggagatcgctctggcctcattgaagttgtgagcacct

SEQ ID NO: 717401 - DNA, 88 bp, Homo sapiens
gagcgagcttcggagaagcagtggtgggttccatgtgatggtggagtaggaggcaggtctccgcgctccagtcagcccggtcaagcat

SEQ ID NO: 717402 - DNA, 50 bp, Homo sapiens
gttgcagttggaaaagatgcccccgatcttcagctctgtaaatgccatcc

SEQ ID NO: 717403 - DNA, 100 bp, Homo sapiens
gcacacgcccgctcgcacaagccacggcggactctcccgaggcggaacctccacgccgagcgaggtttttggattcaaagcataaaaaccattacaagat

SEQ ID NO: 717404 - DNA, 100 bp, Homo sapiens
gctcctcgtgtgcgccttctggatcccggactcgcgcgggatgccccacgtcatccggatcggtattttgaaggtggcgtctcatctgtctacctctggg

SEQ ID NO: 717405 - DNA, 99 bp, Homo sapiens
gcagatgattgctaattccttgaaggacaataccaccctcttgacccagagggagcactatgtctgcggaagtccccgaggcagcctccgcggaggagc

SEQ ID NO: 717406 - DNA, 83 bp, Homo sapiens
ggctgctcggcggtcaggagcagctgtaaaatttggccgaatgtcaaaaaagcagagagacagcttgtatgcagaagtacaga

SEQ ID NO: 717407 - DNA, 96 bp, Homo sapiens
tgacctttaggtgcttttatattcatctcaaaaacaaaattctgaactcaggacttggcaagtcacagtttgctgtggacatgcagacaacatcct

SEQ ID NO: 717408 - DNA, 90 bp, Homo sapiens
tcagtcagcctggggaatgagacccaaactgctcatacagaattacgcatttccacttctaatggttggatacactccagattggatatt

SEQ ID NO: 717409 - DNA, 100 bp, Homo sapiens
tgctttcaagctggtcatcatgatgaaacttagacacaaccgtagctttatgggatctgcgtaacttaaaattaaaactccataccttcgaatctcataa

SEQ ID NO: 717410 - DNA, 101 bp, Homo sapiens
aggtgaagccacggaagataaggatgagacttctgtgagcagcgaggattttgatatgagcgactccacatggatgtcagctgacccgcacctggcctcca

SEQ ID NO: 717411 - DNA, 100 bp, Homo sapiens
agaggaaggcagctattctcaggatatgacaggggtaacacccttccagatgatttttgaggtcatgcaagacaagataatctgccttccgaaaagagtg

SEQ ID NO: 717412 - DNA, 80 bp, Homo sapiens
caccatgtccggatgagatcgcacttcctgcagtgggcattagccacgtccagtttggaaattttagcattcaggtgcca

SEQ ID NO: 717413 - DNA, 75 bp, Homo sapiens
cacaagtcaggtccggcacatgtttccgcggagcggacccagcaatgacgtgtgtgatccagtcttgggtgacaa

SEQ ID NO: 717414 - DNA, 75 bp, Homo sapiens
gccggctactgccgcttcagttctcccggtgtggccacgagtcgggtcaccgacgatgagggcgcacctgctgtc

SEQ ID NO: 717415 - DNA, 50 bp, Homo sapiens
aggagtgaagctgcataccttcgcgtgagaaagatcagtctaaagaaaag

SEQ ID NO: 717416 - DNA, 50 bp, Homo sapiens
ttggtcgccgcgtccttggctggcgtctcctggccactctgaatccactt

SEQ ID NO: 717417 - DNA, 97 bp, Homo sapiens
gctgcgctcggagaacgactatctcaaggaatcctatccatcttcttcaccgatatggtttgtggattctgaagacccaaatctgacatcagttctg

SEQ ID NO: 717418 - DNA, 75 bp, Homo sapiens
gacgggctcagggaagacatacaccatgggggaggccagtgtggatagcagcgacagtgagctggagctgtccac

SEQ ID NO: 717419 - DNA, 99 bp, Homo sapiens
ccggaggtggcaattcaccgaattcgaatcaccctaacaagccgcaacgtaaaatccttggaaaaggggcgccctgcgtccggcagaggaggcgagcat

SEQ ID NO: 717420 - DNA, 103 bp, Homo sapiens
tggagcagcgaaaacgtggttgtagagttccgtgactcccaggctcgtggtcccaagaagcatctgaagcgggtggcagctccaaagcattggatgctggata

SEQ ID NO: 717421 - DNA, 100 bp, Homo sapiens
caaatgacattgttcgatacagggtgtatgaggtgattttctatgatagcgactggaaccccactgtggaccagcaggccatggacagggcccaccgctt

SEQ ID NO: 717422 - DNA, 82 bp, Homo sapiens
cagctggaggaggatcgcactgctcatcttggccatcactatacacaacgttccagatattcctatcattccggatctggag

SEQ ID NO: 717423 - DNA, 90 bp, Homo sapiens
gcagcttcaagcttaggaccacccaccatgcctatccagatgaagataaaacgttacctgcagagtcgggatgtacaatagaggatcacg

SEQ ID NO: 717424 - DNA, 83 bp, Homo sapiens
ttcatcacggccgctgccagggtccttagcacagacattttgacggaagggaaaaggccgaggcatcagcgtgtgaagaccgc

SEQ ID NO: 717425 - DNA, 75 bp, Homo sapiens
atgacgcaggtgcaggtgtctcttctcgccctggcggggaagatggtcatcatgggccagtgctactacaacgag

SEQ ID NO: 717426 - DNA, 75 bp, Homo sapiens
cctgcatggagtcttgtgaaatcgcgtggactgcaacacccagcagcgcgtacgaggatgtcgtccaggaaagat

SEQ ID NO: 717427 - DNA, 100 bp, Homo sapiens
ctgcaggatggcgccaccacagatgcaaacggacgggccaacgccgtggccagctccactgagagaaccccagctgtagcaccagttgtacccgatttaa

SEQ ID NO: 717428 - DNA, 100 bp, Homo sapiens
tggagtaggaggcaggtctccgcgatatcttaatgcaattcagacaatgtgtccacacattcttcgctatttgactacagcagtcataacaaacaaggat

SEQ ID NO: 717429 - DNA, 75 bp, Homo sapiens
ggaccctcttcgcgggcgattcgcgtagcctcagcaattctgtggtgttcttggtcacacatttatggagtttct

SEQ ID NO: 717430 - DNA, 76 bp, Homo sapiens
ccgaatcactgatggaattggacagtgcatggagatggttcagcaggacaaggagttaaacacctcatcctggtgg

SEQ ID NO: 717431 - DNA, 90 bp, Homo sapiens
agtggcacctgcgcgaagctggccaaagcctgcccagacggctcacctgtgcgggatggaacaaaagggggcagtacccaaaggaaacgc

SEQ ID NO: 717432 - DNA, 113 bp, Homo sapiens
ccttgatctgtgaaagcgggcgttttggaagataccggaagtagagtcacggagagccagcttaccaaaacctgaggcagaaagtggataattttgtgtcaacacatctggac

SEQ ID NO: 717433 - DNA, 100 bp, Homo sapiens
gagaagatgaaggaagactgtctgccgagttctcacgtgcccatcagtgacagcaagtccattcagaacatctctggaagttgatggtagaagaatccga

SEQ ID NO: 717434 - DNA, 97 bp, Homo sapiens
ctcagttggaagcagccgatccagcctgcggagcctgtggggcagggcgaagctgtgctcaggcccgggctggacgcagagccagagctgtccccag

SEQ ID NO: 717435 - DNA, 51 bp, Homo sapiens
ggcagctgccaaccctgtctacggcaggtttagctgctgtggagggatttc

SEQ ID NO: 717436 - DNA, 97 bp, Homo sapiens
gcggacgggaaggcgggagacgagaagcctgaaaagtcgcagcgagctggagccgccggaggtagttccaatttgccagcagaatgagtacagaaag

SEQ ID NO: 717437 - DNA, 100 bp, Homo sapiens
ccggcacctgagcggcggagacggctgtagcacaaggaacgtggctcccaagaccacaatggggcgctccaaccccctgttccaccaggctgccagccgc

SEQ ID NO: 717438 - DNA, 100 bp, Homo sapiens
tggagaggacgcgaggagccatgaggcgccagcctgcgaaggtggcggcgctgctgctcgggctgctcttggaggagttggcatcctttggaagagttcg

SEQ ID NO: 717439 - DNA, 55 bp, Homo sapiens
gcgccgagtagtcaccaaggcctataaggcgggcaggaagacctatgccatggtg

SEQ ID NO: 717440 - DNA, 82 bp, Homo sapiens
ctacgagctgtttctcatctttatactcttccaggtactccaaagattcaggtttactcacgtcatccagcagagaatggaa

SEQ ID NO: 717441 - DNA, 75 bp, Homo sapiens
cccaagagacacagtactcctattggtatgggcactaggaaaagacttcttccatcaagcttaattgttttgtta

SEQ ID NO: 717442 - DNA, 75 bp, Homo sapiens
ggcgaggtctgcagggtgtgccagtgctacctgggcgatgccttccgctgtgccagctgcccctaccttgggatg

SEQ ID NO: 717443 - DNA, 75 bp, Homo sapiens
atggaacccgaagaagaaaggattcgttacagccagagattgttcgatatctcaatgcctatactggaatagtgc

SEQ ID NO: 717444 - DNA, 74 bp, Homo sapiens
tggcagtggaaaatgcgctcgggctggaccagcagggtggcaatgaccatgagatcttcacagaccccagaacc

SEQ ID NO: 717445 - DNA, 100 bp, Homo sapiens
gagcgggactgagagcgcctggaggctcgagcggaggaccactaaggcttttcttcctacgatgctggagattaatcatggtcatattgtgacagttgca

SEQ ID NO: 717446 - DNA, 50 bp, Homo sapiens
ccggtacatctgaaagccgggaaatggatcttcttcactctggaggtgcc

SEQ ID NO: 717447 - DNA, 50 bp, Homo sapiens
ccggaagtgctccagaactcaaggttatgaagacagtatggagtttccag

SEQ ID NO: 717448 - DNA, 100 bp, Homo sapiens
gcggcacgaggggccttcgccaccacgcactgggtcgtcacggaggacgggaaaatccagcagcagggctcattgtcatccccaagccaggccagttctc

SEQ ID NO: 717449 - DNA, 101 bp, Homo sapiens
atgaggccaaaggcagttgtattggaggagatgttaaagtaacccatcttgcaggacgacattgaagattggtcttctgttgatctaagatgattattttg

SEQ ID NO: 717450 - DNA, 100 bp, Homo sapiens
gcaagaagacaatccttatggttacaaataggaagaagttgaagctttgatatgagtaaacaagtatctctacctgaaatgattaaagactggaccaaag

SEQ ID NO: 717451 - DNA, 98 bp, Homo sapiens
gcaccgcgatcatcaggtggcagctttgagtgagcgctatgacaaattgaagtctctgctggatgaaccgaatcctaacagtccagccaatagccagg

SEQ ID NO: 717452 - DNA, 100 bp, Homo sapiens
tacaaacccagatctcacacaagtggtcagtttggttgtggaaagggttaaagctcaaaaacgacactgaaaatcatcagcctgtgtctctttctgactt

SEQ ID NO: 717453 - DNA, 75 bp, Homo sapiens
gaaggacaccaagatgcggatccgggcctttccggtaactaaatgaccatggaatctggagccgagaaccagcag

SEQ ID NO: 717454 - DNA, 75 bp, Homo sapiens
agtcattttactgtcaagacatttcttcggcattctgcaacagggcttccgttacaagatgaggtctgtgtatgc

SEQ ID NO: 717455 - DNA, 75 bp, Homo sapiens
gcctgtttctggggcaaaaacattcaagaatgagagcgagaacacctgtcaagagacgagttgtactgctgtcac

SEQ ID NO: 717456 - DNA, 100 bp, Homo sapiens
caaaactgttcggacttccccgttagaactcgcgtttccacttcagagatctgttggccacggacagagcgaaggggagaggatggtagtgtctgacttc

SEQ ID NO: 717457 - DNA, 74 bp, Homo sapiens
gaagaaatcaacctgctcaccggggagtctgatacacagtccctgtgttcccaagagaattacattattgacaa

SEQ ID NO: 717458 - DNA, 98 bp, Homo sapiens
gatctccgttggctgcttggccatatttgtcactgtgatctccctcttggtgtacaagaatttgctgattcccttggaattccgtttttggaaaccag

SEQ ID NO: 717459 - DNA, 101 bp, Homo sapiens
gccgcatgagagccggacaaactcagacatcgtggaggcagaaggagaagacagcctgaagaagatgcagctgatggagcttgcgattctgaatggcacct

SEQ ID NO: 717460 - DNA, 83 bp, Homo sapiens
cgcttctttcggttctacctgggagaatccaccgccatccgccaccatgtgtgtcccggcatggatatccggaacaacctcac

SEQ ID NO: 717461 - DNA, 100 bp, Homo sapiens
acaacaaggctttatatgataccttctccacctttgggaacatcctctcttgcaagaggcttcgtgacggagttatcagagacattgagaggcaaattcg

SEQ ID NO: 717462 - DNA, 90 bp, Homo sapiens
agagcctgaaaaaaatagtcaatagtgctcagactggtagcttcaaacagctcacagttaaggtatttggcaccaatgtgatggtgacag

SEQ ID NO: 717463 - DNA, 100 bp, Homo sapiens
tgtccatcatttgatgatgaaatactcagaattcagggcaggggtgtccgtctatggctttatcctgtggataaacgcagagtgaacgagtttggggagt

SEQ ID NO: 717464 - DNA, 83 bp, Homo sapiens
acttaagcatcattaatgaatatctttcccagtcctaccagaaattcagtttcagccgacttttcagctcctcaagtaacacg

SEQ ID NO: 717465 - DNA, 75 bp, Homo sapiens
tcctgctgccgctcctgctggtgctcctggcggcggcgcccgcagccagcaaggaaataatgaagatgtttcatt

SEQ ID NO: 717466 - DNA, 75 bp, Homo sapiens
gcagaacgccatcaaccagctggcaccatgccggtggaaaggatgcgcatgcgcccgtggctggaggagcagata

SEQ ID NO: 717467 - DNA, 100 bp, Homo sapiens
agtatccagcgctcattgggaatttagttaaggctttgatgacagtagggaaagaaccatttcctaccatttacgtagattcacaaaaagaaaatgagag

SEQ ID NO: 717468 - DNA, 75 bp, Homo sapiens
aggaaaacaagtttgtcagacctaaatgatccaaggaggagatatcaccaaacatgatggaacaggcggacagtc

SEQ ID NO: 717469 - DNA, 49 bp, Homo sapiens
ctagtgggcgttgcctttagacccagcaaagccttctagacaagctcag

SEQ ID NO: 717470 - DNA, 74 bp, Homo sapiens
ttggccccctctgatctgcgccgggtcgccacatactggaagcttgctgtcttcgatacgtggagctccttggc

SEQ ID NO: 717471 - DNA, 97 bp, Homo sapiens
tgccacccgatgaatggagtcgccttctgcctggtcgggatcccgccccgcccggagccccggcccccacaggaacgccagcgcctggagaccatcc

SEQ ID NO: 717472 - DNA, 75 bp, Homo sapiens
cctggcggtgctcgagtgcctgcaggatgtgagggaggtcctagccataaatatcctgggtcgtttcttattgaa

SEQ ID NO: 717473 - DNA, 75 bp, Homo sapiens
taatctcccaaaatattctagaaggggaaaagctacttcaaggccaagtcctgtatctgccatgtctgtggcgtc

SEQ ID NO: 717474 - DNA, 95 bp, Homo sapiens
ttgtgggcctctaccgcacaggcaaatcctacctaatgaacaagctggctgggaagaacaaagaccctaaaaagtctgccagtcgccctgggagt

SEQ ID NO: 717475 - DNA, 100 bp, Homo sapiens
aacatcagttcttgatcctgatgagggagagtcctggcccatgccgacatcccagagctgggcagtgtgcacttcgacgaagacgagttctggactgagg

SEQ ID NO: 717476 - DNA, 90 bp, Homo sapiens
gtcttccctggcaagattcttctgaattgtgctgccttggccaaaagagggcttccgagtggacctgccaatcaagtcggcccgctaccg

SEQ ID NO: 717477 - DNA, 75 bp, Homo sapiens
gccgccatccgggaggcccagggaaggactctgtctactagtgacgatgtcgaagacagggaaaatgaaaagggt

SEQ ID NO: 717478 - DNA, 90 bp, Homo sapiens
ctccaacgctgctccctgtctgcaactgacttaaccccacgcgggaccagtgcttcggggaccgcttcagccgcctgctgctggatgagt

SEQ ID NO: 717479 - DNA, 75 bp, Homo sapiens
agtggaacattgtagagtctgagaaggcccttgtggcggcttacagggagaacacagttggcctccaccgtttct

SEQ ID NO: 717480 - DNA, 51 bp, Homo sapiens
caacgttcacagcaagctcaagctgaattatatccagatcgagagacagaa

SEQ ID NO: 717481 - DNA, 100 bp, Homo sapiens
cctccccagccatgcagaactgaaaccacccctactcctaatcccccgactacagaagaggagaaaacggaatctaatcaggaggttgctaacccagaac

SEQ ID NO: 717482 - DNA, 75 bp, Homo sapiens
caagggggtgtccccttcagctgtgtcattgttgatgagactgcatcaacaagtatgggtctccgtacaccaaaa

SEQ ID NO: 717483 - DNA, 98 bp, Homo sapiens
tatctggcaagtggttcttttgacaaatgtgtacacatctggaacacgcagtgaagaactggtggctgaagcacataacctctgcaccctgctagaaa

SEQ ID NO: 717484 - DNA, 75 bp, Homo sapiens
gagttattctcaagctgtcacaggagatgtcagtgggggaggacccgcacgttcttacccagttggaggcctttg

SEQ ID NO: 717485 - DNA, 73 bp, Homo sapiens
tcgcgtggactggaagtcacactgcggcggtattctctactgccgctgatggtcaaacgcaagtggaaattaa

SEQ ID NO: 717486 - DNA, 98 bp, Homo sapiens
aacctagtgggtgtaatacatcatgaactgcaggatgtgttcagagcaacattgttttgttgacacaagcatttagaagaaagtttgtgattcctgac

SEQ ID NO: 717487 - DNA, 103 bp, Homo sapiens
ttcacatgatggaactgtttgacacaactgtagagcagctgtatagcatcttcactgtaaaggaggctgttcgctgctatgaatctctaatcttaaaagctga

SEQ ID NO: 717488 - DNA, 83 bp, Homo sapiens
gcctgcacaccaagggcgcccttcccctggatacggtcactttctacaaggaaagcttagtgatcgaccgacctcgcgtgaga

SEQ ID NO: 717489 - DNA, 151 bp, Homo sapiens
gttcatgaaacctgggaaggtggtgcttgtcctggctggacgctactccggacgcaaagctgtcatcgtgaaggtgtgggcccatcgctggatggatctgtcagaacacggctttgggctggccctgctcaacgactgcaagtatggcgcg

SEQ ID NO: 717490 - DNA, 75 bp, Homo sapiens
caacatcctgtcacaggccatgctctggcaaaaacggatttcccagatgacccaggcatgcagtgggacacagag

SEQ ID NO: 717491 - DNA, 83 bp, Homo sapiens
ggacttcgtgggcgaagtcacctctttccgtctgggaagaagaaaggtggggcgaagccagcaatgacgaggacgatcccaag

SEQ ID NO: 717492 - DNA, 118 bp, Homo sapiens
atatcttcaaagcacataaaaacactttctgaagctcatgaagactgtgtaaataatatcagattttgtggaagtataatactttgtcattatgagatgtcgtctctcggtgcctcct

SEQ ID NO: 717493 - DNA, 96 bp, Homo sapiens
tggttcccctgggccccctgggcagcctggctacacaaacaaggcgcctctgtcgaagagccttctgctggtccccagtgccctctccctcctgct

SEQ ID NO: 717494 - DNA, 100 bp, Homo sapiens
ccctcccaacccaaggctccctcctggagggagagagaggatggaggacatcagatatgaagatcaatgatgcagactgatggttttgatgaagctgggc

SEQ ID NO: 717495 - DNA, 98 bp, Homo sapiens
acagaaagagtttgtatgccgcaagacaatattttgttcagtggtgtgcagacagaaatttcaccaagccgcagcgccagcagccctgtggtggcgac

SEQ ID NO: 717496 - DNA, 100 bp, Homo sapiens
caggttttaaatcaagatttaacattccaacacataaaaattatttatccaacagctcctcccagatgccacttcaaatgaacaacaagagcttttctgt

SEQ ID NO: 717497 - DNA, 75 bp, Homo sapiens
gatgtccttaccagctttgacaatacaggaaatgttttgtcttgggacaaggtgcgcattcctggtgtgctgcag

SEQ ID NO: 717498 - DNA, 75 bp, Homo sapiens
ccgtcagatcacacccatcttgccccatgactaccaggtatcttggagatggccgcttccatctggagtctgtca

SEQ ID NO: 717499 - DNA, 100 bp, Homo sapiens
cacacctgcaatcccagcactttggaaacctttgcaccaaagagagttatgactatctcaagactctggctggtgatgttcatattgtgagaggagactt

SEQ ID NO: 717500 - DNA, 83 bp, Homo sapiens
cagcgctcctgatctccgtgtgcagtacctccgccagatccacgccaaccacgagggaccatgctggcgggaatgagaaactg

SEQ ID NO: 717501 - DNA, 95 bp, Homo sapiens
agccaggagaggccctcagcttgtctgcactggcagtgacgatggcacagttaaggaagaaggagagacgaccatcttgcaactagaaaaagatt

SEQ ID NO: 717502 - DNA, 100 bp, Homo sapiens
gcatactcacagagttagagagagggatggtgaacctgcacttgttgccaagtcttccatcttactagatgtgaaaccttgggatgatgagacagatatg

SEQ ID NO: 717503 - DNA, 95 bp, Homo sapiens
gcggcgcgggcccggcggcggcggcagcggggtccgggtccggagcgccacagatgtttcgtctgaactcactttctgctttggcagaactggct

SEQ ID NO: 717504 - DNA, 83 bp, Homo sapiens
gcccgacgctccctgtctgggaccttctccctgcctggacccctactattgcaacaagggaacagtgttgataaagactgctg

SEQ ID NO: 717505 - DNA, 100 bp, Homo sapiens
agccagaggaggagatcctgggatcagatgatgaggagcaagaggaccctgcggactactgcaaaggaatatgctgaatttcagtatcggaggaggcaca

SEQ ID NO: 717506 - DNA, 96 bp, Homo sapiens
aagaaagaaaacgagcgcgagagggggaaaagcgagcgatcgagcgagcgcgcgcgcgaaaactccgggcaggagcctgtgtgaaatgcagcaaag

SEQ ID NO: 717507 - DNA, 96 bp, Homo sapiens
attgccaccaccaccaccaccaccacagagtctgtggaagaggtggttcgaggttgcagccccacccacgtcacggtgtacagcgagtatggcgtg

SEQ ID NO: 717508 - DNA, 82 bp, Homo sapiens
ctgtgtccagcgctgccggagccgcctgagggaaatcctcattgacgattcaatttgttgaaggccaatttgtggactccta

SEQ ID NO: 717509 - DNA, 100 bp, Homo sapiens
gaaggacgtgcccgactggaaggccgacggtcgcaaggtcctacggtcaagcatccgggagtttctatgcagcgaagccatgttccacctgggagtcccc

SEQ ID NO: 717510 - DNA, 100 bp, Homo sapiens
tgagtttcccacttgattacccgttaagtcccccaaagatgagatttacctgtgagatgtttcatcccaacagaaactgggaagaactggtgaagtactt

SEQ ID NO: 717511 - DNA, 100 bp, Homo sapiens
tactacaaatctgaagatgaaacagagtatggctgcagaggatccatctgtcttagcaaggctgtcatcacagcccagattgccttcctgcagggagaaa

SEQ ID NO: 717512 - DNA, 100 bp, Homo sapiens
gggaagcagcacgggatcccagcctcaggcctgcacggacggtgttggttgggtatatttgccttccctccatgatctccaacactatccgataaagtag

SEQ ID NO: 717513 - DNA, 50 bp, Homo sapiens
ctgtgttgtggacactctgtgcagacaaatttacatgtattggagaccag

SEQ ID NO: 717514 - DNA, 75 bp, Homo sapiens
caacacaattataaaatgtcagcttttaaggcaggaacgaatgcaggaatttgggaactgagctgtgcaagtgct

SEQ ID NO: 717515 - DNA, 118 bp, Homo sapiens
ttcgttttgcctccggttggggctgctgtttctcttcgccgacggctatctatgtgcctgctgatgacttgactgaccctgcccctgctactacgtttgcccatttggatgctaccac

SEQ ID NO: 717516 - DNA, 100 bp, Homo sapiens
agcggtggcgtcgttgtcgccccctcctcgtcgggaagaatcgtttggtctcctgccgtgcccggggttctccaggacaaggacctcttctctgtcttcg

SEQ ID NO: 717517 - DNA, 100 bp, Homo sapiens
caaataagctatatactttggttacctatgtacctgttaccactttcaaaaataaactcaagccatggagggattactgcattacatcaaccctgcacac

SEQ ID NO: 717518 - DNA, 98 bp, Homo sapiens
gcagccttcgaagttgatgcgactgctgagctctaatgaggacgatgccaacatcctttcgagccccagtggtgttcccactgatgaagagcaggcga

SEQ ID NO: 717519 - DNA, 88 bp, Homo sapiens
tccggagccatgtcagaaggagtggacttgattgatatatatgctgacgaggagttcaaccaggtgcacagcgacttcaccgcggcag

SEQ ID NO: 717520 - DNA, 100 bp, Homo sapiens
cgattgccgattcagcccagcagggttgaaaggaggagcaggaggtactgatggacaaggaggtaccttccggtacacctttcatggcgatcctcatgct

SEQ ID NO: 717521 - DNA, 51 bp, Homo sapiens
cgacggccgctgcctaagctggaaagtatttcaggacagccaggagggggc

SEQ ID NO: 717522 - DNA, 75 bp, Homo sapiens
agagaaaaatcctggatctgtatgctttgagcaagatatgatacaccaacttctaaaaagaaagtacgaattaaa

SEQ ID NO: 717523 - DNA, 75 bp, Homo sapiens
ctacggtgtgctgttagaaggttctggtcttgcactaaggagccaagccgccatggcctaccacagcttcctggt

SEQ ID NO: 717524 - DNA, 83 bp, Homo sapiens
ccaggaggccgaggacacaccgctggatcagtgtaagctgtcccccgaggcagcctatgatgtgctgagcgtcgccgacatgt

SEQ ID NO: 717525 - DNA, 75 bp, Homo sapiens
caagagtgagcgagcggacccgcgatggattactgatctctcattacccaactatctgatggcatcttcggttgg

SEQ ID NO: 717526 - DNA, 83 bp, Homo sapiens
ccaacacctatcactcagtcggtgctatgatataatacctgaaactttactggcttcctactatgagatttcagttgatgatg

SEQ ID NO: 717527 - DNA, 75 bp, Homo sapiens
atggagttgaatttaagaatatttttgggacgccggaatttgttgatccagaggcaacagggacatggccacctg

SEQ ID NO: 717528 - DNA, 101 bp, Homo sapiens
ggcgaggaggaagatggcgggacggctgccggcctgtgtggtggactgtggcacggggcagtgaaatcaactgtgcagaccatcactgttggaggagtgag

SEQ ID NO: 717529 - DNA, 101 bp, Homo sapiens
aatcccagcacattgggaggctgagaaaagaatggtttgtcattcattgaaacttcggccctagactctacaaatgtagaagctgcttttcagacaatttt

SEQ ID NO: 717530 - DNA, 83 bp, Homo sapiens
cccctgctatccccaacaagaggaaagacacacctaccaagaagccagtcaagcggccaggcataatcaccagcaacacccgg

SEQ ID NO: 717531 - DNA, 50 bp, Homo sapiens
cagatcatgcctttcctgtcacaagaggtcggtgagctggtaaaggttac

SEQ ID NO: 717532 - DNA, 98 bp, Homo sapiens
gctgggcaggctctcgcacatcctggagatggaccacttcgccctggtggtgcacgagcagatccagtgtgtgcgggaggccctcggaaaggctacat

SEQ ID NO: 717533 - DNA, 75 bp, Homo sapiens
cagtgacagcgatgctgaggatcgaggaacgttgtctggcccgatgagagaaagggaaagttaaggatgctggag

SEQ ID NO: 717534 - DNA, 82 bp, Homo sapiens
gcatcccacagcctcctcttccagaatgcctttgcgcaggtgtttcccattaaacactaccaggacaaaatcaggccttaca

SEQ ID NO: 717535 - DNA, 51 bp, Homo sapiens
cggccttccctcacctacaagagtgccttggaacactatgttaattgcctg

SEQ ID NO: 717536 - DNA, 83 bp, Homo sapiens
ctggacccagctgagcgggcggtcattcgcatcgcaggagggccctcctggacccgggagcggaccctggtggcggtgaagcc

SEQ ID NO: 717537 - DNA, 102 bp, Homo sapiens
gggccgtgtttggggagagcggcgggggaggcggcagcggagagttgccaggtataaactccgaattgttaagccaccaaaattacccctagagaaaaaacc

SEQ ID NO: 717538 - DNA, 75 bp, Homo sapiens
gtgaccgagagcgtgaccgagagcgcgaatatcgtcatcgttagaagggtgtacaactatgagcctttgacacag

SEQ ID NO: 717539 - DNA, 101 bp, Homo sapiens
ctgggagaatatttaatggaaaatcgcttggttaaaacctgacacttttaacagaaatgacgctcctctcctcccagtcttcatcactggtggccccttct

SEQ ID NO: 717540 - DNA, 74 bp, Homo sapiens
tctggaccattattttgcatttccagataaatttgcgcctcattttggtaagcggaaaaacaaaagagttcctg

SEQ ID NO: 717541 - DNA, 75 bp, Homo sapiens
ccgagagcgtgaccgagagcgcgaatatcgtcatcgttagaagggatcttctgcagaaatagcgctggaagctag

SEQ ID NO: 717542 - DNA, 75 bp, Homo sapiens
gggagttctctgtgtctgtgaacccatcgccgaagcaccattcaagttcgacatggaattggatgacttgcctaa

SEQ ID NO: 717543 - DNA, 100 bp, Homo sapiens
gctgtgtggggatgtgactctccaggcaaacaacacttctgaggatcgtccgcagaattctgagggggatgcccagacgctgacggaagtggacctcttc

SEQ ID NO: 717544 - DNA, 74 bp, Homo sapiens
caaaggctgtcgcaaggaggaaggaaatgctgacttttaacccacacaagcgaatctctgcctttcgagctctg

SEQ ID NO: 717545 - DNA, 96 bp, Homo sapiens
aagagctctggtccttgctgcactttattatgccggagaagaaagtgagggatgctactggagttgatatcaacatgcgcgtgggcgtgcattctg

SEQ ID NO: 717546 - DNA, 75 bp, Homo sapiens
caccgaggaagagcgggagaaaggtatgacgaggaagcgatggtggaggctgtggccctctacaaccctgtgagc

SEQ ID NO: 717547 - DNA, 98 bp, Homo sapiens
ccagctttgacaatacaggaaatgtttgtagttacttttggtgacgctgtccagttcccacaatgtatcattccttatctgaaactagacatcctctg

SEQ ID NO: 717548 - DNA, 94 bp, Homo sapiens
atgggagattccacgatccgccagtggatggaatacttcaaagccagtatcaacatgcattctgtgctacctgacacctattgggtaagtaccc

SEQ ID NO: 717549 - DNA, 102 bp, Homo sapiens
ggcaagatgagacgagaaagaacacgctttgttgcttctaaacctctggaggaggaggcccaggctgcaagcacaaaggaagtttgctcagtctcagccgaa

SEQ ID NO: 717550 - DNA, 100 bp, Homo sapiens
ctgcacaatattaaaactttacctgggattctggctacattggagattggttgctttctaaaactgaaggagaagcccatgaagagatggtggattctca

SEQ ID NO: 717551 - DNA, 75 bp, Homo sapiens
aagatatgaaagtgctgcaagacaggcttcttaaggacatgattgtattgtaggaggcattgtggatggatggct

SEQ ID NO: 717552 - DNA, 100 bp, Homo sapiens
gggggctcggctgcagacttggccaaatggacgggactattaagacctgttatcctaaactaggtgagtcagcttttggtacatgtgatgattttcagtg

SEQ ID NO: 717553 - DNA, 75 bp, Homo sapiens
cacagacagtttaaatacagaacgaccaatggatataggtgtgatccctcacatccacaaatctctgattggaaa

SEQ ID NO: 717554 - DNA, 89 bp, Homo sapiens
gcgaaatcttggcttcactgccatccccctccatggacaaatgagtcagagacctgaaccttgctaaatgttcctcatcattaaaaaaa

SEQ ID NO: 717555 - DNA, 98 bp, Homo sapiens
aacttccttcactggtgtagggacattggggttgatgaaacttacctctttgaatctgaaggtttagatgaaggcattttcaaagctggagcagagag

SEQ ID NO: 717556 - DNA, 101 bp, Homo sapiens
acgaagaggatgaggaagagctgctgctgctgcagccagagctccagggcgggctgcgcaccaaggccctgattgtggtagagacggggtttcgccatgtt

SEQ ID NO: 717557 - DNA, 75 bp, Homo sapiens
atgtaatggctttatacaagaagattatgactctagccttgtcacctcatcttgcccccttggttttggaagtcc

SEQ ID NO: 717558 - DNA, 75 bp, Homo sapiens
gggattaaatggaatggaatacttggcctagcttatgccacacttgccaaggttcgatacaagaggctgttttcc

SEQ ID NO: 717559 - DNA, 100 bp, Homo sapiens
cgccttggaacgccgacctgaaaccatctctgagcccaagacctatgtactaaaggaagtataccaagcctttaatcccaaagcagtggtcttacagctg

SEQ ID NO: 717560 - DNA, 98 bp, Homo sapiens
gacagttcatccgaccctgctaacccagactcacataagaggaaaggatcgccatgtgacacactggcatcaagagacaactggagagaggatctgtt

SEQ ID NO: 717561 - DNA, 147 bp, Homo sapiens
cagccaaagcgaggccgtggccatccaggcgatccggaacgccaaggggaattcaatctgcgtggactgcggggcccccatcggatctgctccagtgtctccagtaccagttctaccaggtacgtgactctggcctggtaagtactc

SEQ ID NO: 717562 - DNA, 100 bp, Homo sapiens
acatcctttgactggttagccagttccatgccattgcagtgtcaactaggcctcagttacttttcagtttgcccaaattgagcccatctcaacatttggc

SEQ ID NO: 717563 - DNA, 75 bp, Homo sapiens
catccgcagtggctgcgatggaagagcttgtcaggaagatcggaggtgccaagtagcagagaaagcatcccccag

SEQ ID NO: 717564 - DNA, 51 bp, Homo sapiens
tggctttgagcatccgtcagaaggaagcccgaaagatgagatcaatacagg

SEQ ID NO: 717565 - DNA, 75 bp, Homo sapiens
tcaggaaccaccagtgacagagtggtgatggcacttctcaaatactggccaaagactcacagtccaaaagaagta

SEQ ID NO: 717566 - DNA, 100 bp, Homo sapiens
atggtgaaacaccactgaagcattgccaaggccgccatggcatcagatgaaggcaaactttttgttggagggctgagttttgacaccaatgagcagtcgc

SEQ ID NO: 717567 - DNA, 82 bp, Homo sapiens
cttacgtatttgtgtgacttgactcttcaaacacaaaggcaccatgactcctgtgaggatgcagcactccctggcaggtcag

SEQ ID NO: 717568 - DNA, 90 bp, Homo sapiens
cgtgacgcggtgcctggcgccgagcctcccaagatggcggtgtgcatcgcggtgattgccaaggaggtggaggcgctgcagggccaccgt

SEQ ID NO: 717569 - DNA, 103 bp, Homo sapiens
atgtggaattctccgtccctttccagggagggaacaaagcccacagcaccggtggagccgccaccaaaatgcagattttcgtgaaaacccttacggggaagac

SEQ ID NO: 717570 - DNA, 90 bp, Homo sapiens
tgtgccgtgggtccgcgctgcttccacccaacttcctgttagtgttctagaacagatcagacattttgtaatgatgcctgaaataaacac

SEQ ID NO: 717571 - DNA, 100 bp, Homo sapiens
cgaggatgtaccgaatttgtttgtcaattcgttctgaagagatgattcaacgagaagccgatgtaaaaaataaggtaactgctgtggcattgacagactc

SEQ ID NO: 717572 - DNA, 96 bp, Homo sapiens
gctctttggtccacttacggtgcaatgattccaacacagctggcactgtgtttagtcttgagtcagaggaggaggaataccctggaatcactgcag

SEQ ID NO: 717573 - DNA, 101 bp, Homo sapiens
ggctggaagacatggccactccagtcggtgttgagcacggcgagcagtctcaggcctttagtgatgatgccaaaattgcctggaaaagagcagtgagagga

SEQ ID NO: 717574 - DNA, 100 bp, Homo sapiens
caagcagccttagccctagtgtagaggtgaaggttgctatccttaaatacatagaaactctggccaaacagatggatccaggagattttataaattccag

SEQ ID NO: 717575 - DNA, 100 bp, Homo sapiens
acgccctcatggggaaaatctccccggtgactttcaggccagattacagaggggtattgatttgccttgcccccgcccccaccatcacagtgtgtccctg

SEQ ID NO: 717576 - DNA, 80 bp, Homo sapiens
gacagctccgggaccggccgaaaggcgaggaaccgatctgactgcagccatgagcagcaatgagtgcttcaagtgtggac

SEQ ID NO: 717577 - DNA, 75 bp, Homo sapiens
agagaaaccgaagtcctcaccactcaacagtcaaagtgaagcagattacaggctgtgccagccctggaaaaacag

SEQ ID NO: 717578 - DNA, 100 bp, Homo sapiens
ttttccggagggattccatcatagctgtgagccgtgagctttgaggcggtgggatgtgtcagcagaatgtctcctgcccccgagagcgaccccgaggcca

SEQ ID NO: 717579 - DNA, 100 bp, Homo sapiens
ggagggccgtcaagatcctcaagaagaagaagttgcgaaggatccccaacggggaggccaacgtgaagaagaagccatcttcgacaagagcacagggaag

SEQ ID NO: 717580 - DNA, 100 bp, Homo sapiens
caggcttgtaccggaagccggtgacgggcatgtgggaccatctgcaggagcaggccattctgcccttccactgcagtgccatcctggctacagccctgga

SEQ ID NO: 717581 - DNA, 90 bp, Homo sapiens
tggccgagtggtctaaggcgccagactcaagaattcctggaaaactcaagcaattcgtatttgacttacattctggaaaactgcacagag

SEQ ID NO: 717582 - DNA, 100 bp, Homo sapiens
ctggaatccctgtctgggtgcggactcggagaagccctcgagcatccccacagactctcctggcgtccccccgagtgcaaacgctcatcacctgtttaga

SEQ ID NO: 717583 - DNA, 100 bp, Homo sapiens
atggccgaggtgttgcggacgctggccggaatactcccccagttgcaagaggcgcaggaccgtggaagacttcaacaaattctgcacctttgtcttggcc

SEQ ID NO: 717584 - DNA, 83 bp, Homo sapiens
atggagcaggagccagcacagcaggcgagaaccactgtctctgatcaacgtgcggaagaggaacgtggaatctggggaagaag

SEQ ID NO: 717585 - DNA, 51 bp, Homo sapiens
agacaacaccgagtatgagaacttgtggagagactccagagcaaatacgag

SEQ ID NO: 717586 - DNA, 82 bp, Homo sapiens
agaagatccagctttgttgaaaagcgaagccgttagtcccttaatacaaaggggaaaatatttatccccaaacagaaacctg

SEQ ID NO: 717587 - DNA, 100 bp, Homo sapiens
cagacctacggagggagctggaaattcctgacgttcattgatctgatttaccggaacattccaggatttttacgtacacttatggatgccctgagaaaag

SEQ ID NO: 717588 - DNA, 100 bp, Homo sapiens
gggctttaggctggaagcgccttagaggagccatttttccagggaagcgtgacagcaatgacagtgttttttcccctggatacagctagacttcgacttc

SEQ ID NO: 717589 - DNA, 83 bp, Homo sapiens
caagacatttcctgctcggaaccttgtttactaattggtggcccagttgaaatccttcccttcctctaccttggaagtgccta

SEQ ID NO: 717590 - DNA, 100 bp, Homo sapiens
atggattctaatggaatcaggcagttttgtgtccatgtgaacaactgtggaaaacgaagctcattcccaacgtgcaaagccaaggcagcgaccccaggac

SEQ ID NO: 717591 - DNA, 51 bp, Homo sapiens
ttttatctgccacgacccagaagttctttcagaatggaaagtatacataat

SEQ ID NO: 717592 - DNA, 100 bp, Homo sapiens
ctgatgtgcagtttggccccatgagatttcatcaagatcaacttcagtccacaggtcctggctaccctgggaagagacaagaagtaaatgaagaaagagg

SEQ ID NO: 717593 - DNA, 83 bp, Homo sapiens
atccacacagctcagaacagctggatcttgctcagtctctgccaggggaagattccttggcgcagacggggaagcggagccaa

SEQ ID NO: 717594 - DNA, 82 bp, Homo sapiens
agacgggctacatgctgagatgttccctgtctcacgccatcactctgttatgaggagtcaaatcctaaggatccagcggcag

SEQ ID NO: 717595 - DNA, 100 bp, Homo sapiens
cagcgccaccatccacgccagccgcaccatgccgctcctaagcctgcacagccgcggcggcagcagcagtgagaggctcgggacgtgtacgaggaggcca

SEQ ID NO: 717596 - DNA, 97 bp, Homo sapiens
gcagcaatagcatctttgctccagtgcttttgccacattcaaccagcagccagaacaagccaccatctcccctgggctttcacagtagcctcctgac

SEQ ID NO: 717597 - DNA, 98 bp, Homo sapiens
cggcgggagcccaggagcctgccccgccctggggacgaagagctgcagctcctcctgtgcggttgcaggcagaggcaccaaggctggcagaatatcaa

SEQ ID NO: 717598 - DNA, 101 bp, Homo sapiens
agtggagatgctttccttgacctgaagaagcctcctgcctccaaatgcccccatcgctatacaaaattctccaccttcatctatggaagataaatcagatg

SEQ ID NO: 717599 - DNA, 87 bp, Homo sapiens
cggaaggccctggtggacatcctctccgaggtgatctttgcagagctgtttcaacttccagcaccccctcacattgatgtgatgtac

SEQ ID NO: 717600 - DNA, 100 bp, Homo sapiens
gtcgtcttgggcttcctggtgctccgcaggaaaatgtttataggaggccttagctgggacactacaaagaaagatctgaaggactacttttccaaatttg

SEQ ID NO: 717601 - DNA, 97 bp, Homo sapiens
agcacgctgaggaaacgcaagatgtacgaggagttcctcagcaaggtctccatcctagggagtgaggattctttggacaccagcctgagagctcacg

SEQ ID NO: 717602 - DNA, 90 bp, Homo sapiens
agcgagctgagtggttgtgtggtcgcgtctcggaaaccggtagcgcttgcagcatgagatgagtatgaagaagatggattctgtcagcca

SEQ ID NO: 717603 - DNA, 84 bp, Homo sapiens
aggttaattcgaaagtcttgtggaagatctggaagaaacagattgttgtgtccactgtatcctggcttgcttgttctgcgaatt

SEQ ID NO: 717604 - DNA, 99 bp, Homo sapiens
cagatcacctcgctcgacgtgttgcagcacatcctcatccgagcctttgatttgagtggttcattatgctgacatatcttttcatgttggcctggctgg

SEQ ID NO: 717605 - DNA, 101 bp, Homo sapiens
cggaggagtctcagagctgtcagaaaggcaccctgcagtacatggcacctgagataattgaccaagggcctcgcggatatggtgccccagccgatatctgg

SEQ ID NO: 717606 - DNA, 74 bp, Homo sapiens
ataagcccatcttgctgcaccaagtggaggcgctagccgcgatgtggacgagtgctcactagcagaaaaaacct

SEQ ID NO: 717607 - DNA, 82 bp, Homo sapiens
ggagtgcgtgggggaccggctgttggcggtgcagggctcgcggcctggcaagaatgtacagctgacagagaacgagatccgc

SEQ ID NO: 717608 - DNA, 100 bp, Homo sapiens
ccaacccggccttcaccaaactccctgggaaactgactctactctgtgatgccaagacagatgggagtttccttgtacaccactttctctccttctatct

SEQ ID NO: 717609 - DNA, 139 bp, Homo sapiens
ggcccgaggcccctatggcagatttgaaaattcacccttgtagagtcattcctgcctttgagcggactcccttttaaggccttggacaagattcgctatgagagcctgacagacccttcgaagttggacagtggtaaag

SEQ ID NO: 717610 - DNA, 75 bp, Homo sapiens
actttgcctcatttgaggagtgggaacaggcttcggcgaacacaaaggtggaacacctgcagcaggagactgctg

SEQ ID NO: 717611 - DNA, 100 bp, Homo sapiens
cctcgcctttgccgatccgccgcccgtccacacccgccgccagacctaatctgggagcctgcaagtgacaacagcctttgcggtccttagacagcttggc

SEQ ID NO: 717612 - DNA, 82 bp, Homo sapiens
caagactgcgggctgacgccaaccgcaaattcagatgcaaagccgtggccaacgggaagacaatgcagatcttcgtgaagac

SEQ ID NO: 717613 - DNA, 83 bp, Homo sapiens
cacgggggcctcacagggcctcctggacaggaaagaggtgctgggaggcgcctgtgtctggcagagctggtgtgagacgagac

SEQ ID NO: 717614 - DNA, 97 bp, Homo sapiens
aaaatcaaaagaaacttttgcccttatcagtaacacctgagactgtggcagggtataccattcctccaggacatcaggtgtgtgtttctcccactgt

SEQ ID NO: 717615 - DNA, 74 bp, Homo sapiens
gtcctggttgagggtctccagggttctttggggcccgaggtatctttcagatgaaggcattgaagcttgcacaa

SEQ ID NO: 717616 - DNA, 100 bp, Homo sapiens
atcacccaggataacccctccagcggcaaagccaggctctccccagttgtggaagatatcaataagcgcagagagccgctccccagcctggaggctgtgt

SEQ ID NO: 717617 - DNA, 74 bp, Homo sapiens
tgttacacaaattgatgcacaaaataagctggaaaaatctgagattaactactgcaatgtgcaatgaagtggcc

SEQ ID NO: 717618 - DNA, 98 bp, Homo sapiens
tttcccatggttactctacagcagcttcactgcctgaaaatgaaaactgaacaaagggattaaattgtgaggaggactcagagagagtaatgataatt

SEQ ID NO: 717619 - DNA, 100 bp, Homo sapiens
ccagtggatacgttcagggtataaatgatctcgtcactcctttctttgtggtcttcatttgtgaatacatagggatcgcttacacctgagacgaactaca

SEQ ID NO: 717620 - DNA, 100 bp, Homo sapiens
tagagctggagtcgtgagcgcgcgcccgccccgctctgggaggaccgcgaggtgctggagaatctggtaaaagcaccattgtgaagcagatgaggatcct

SEQ ID NO: 717621 - DNA, 75 bp, Homo sapiens
cgctgcgctcgcgcccggatccctcagcaggttacgggcaggacttgagtggcttcggacagggcttctcagacc

SEQ ID NO: 717622 - DNA, 75 bp, Homo sapiens
gcgctggaccctctgggcattatgcggtactccaaagattcaggtttactcacgtcatccagcagagaatggaaa

SEQ ID NO: 717623 - DNA, 50 bp, Homo sapiens
agcatattacctatcaggagaggaggaatcacatgcagcccaactacaga

SEQ ID NO: 717624 - DNA, 82 bp, Homo sapiens
cgcggccaacatgagcttcttgttggggatatgagactttctactcggaatatcctgagtgttgcgtggatgtaaaacccat

SEQ ID NO: 717625 - DNA, 74 bp, Homo sapiens
ccgggcggctggcctcaccgcccactggagtaaagacaagattgcatcctacagcaaaactccaaaaattgaac

SEQ ID NO: 717626 - DNA, 101 bp, Homo sapiens
cagcagcttcgcctacgaccgggagttcctccgcaccctgcccggcttcctcatcgtggccgagatcaatgccacccagaggatgtttgaaattgactata

SEQ ID NO: 717627 - DNA, 75 bp, Homo sapiens
tatctggccgcctctgccgcagctggagaatgtgacagtgatgataacatgggtgccaaaaatacttcaatagga

SEQ ID NO: 717628 - DNA, 50 bp, Homo sapiens
caacagctcggcgggctggaaggtactccaaagattcaggtttactcacg

SEQ ID NO: 717629 - DNA, 89 bp, Homo sapiens
cggccagcataagatttttatatgagtaattgggaaggcttctataaatataagctgcccaaactccaaaatgatggtagagaattgac

SEQ ID NO: 717630 - DNA, 101 bp, Homo sapiens
caatatctgcagttccaatttcccaaaaagagcaaaatccatgtttggtgaccagagctgtatatattgatattctcttcctattgacttgctgcctcaac

SEQ ID NO: 717631 - DNA, 75 bp, Homo sapiens
ggacctggtgccggccagcgcccagctctggagagtggaagtttccagagaaaacagccatcaaagaaggttgag

SEQ ID NO: 717632 - DNA, 116 bp, Homo sapiens
gaaggccagagtcacacacggtcctaagagctgggcaccaggaagcgaaggctggagcctcctcaacaagcccaagagtgagatgaccccagaggagctgcagaagcgagaggagg

SEQ ID NO: 717633 - DNA, 100 bp, Homo sapiens
aatgttcaagtttaccaaaagagaggcaccgctggaacactaatgaggggcttgcttctgacatgtctgatgagcgcattcctgctgttgctcctggcta

SEQ ID NO: 717634 - DNA, 100 bp, Homo sapiens
tctctgctgggcctgtgtgcctggaaaggaattgttttggcctaggatcatccaggactttgaagaatatcctgaacatagaacgaactttttcttacta

SEQ ID NO: 717635 - DNA, 96 bp, Homo sapiens
tgagtcctggccgcgggccggggccggggcgccgctggcaggagcgcttggggatcctccaaggctgggaaagggtttcttctgtccataaaagct

SEQ ID NO: 717636 - DNA, 53 bp, Homo sapiens
aagcaaccggacagttccatgtataccaaaatgccccaggccttcctgtgggg

SEQ ID NO: 717637 - DNA, 98 bp, Homo sapiens
cggatgttcggtgcagctgccagatccgctgatctagtgcttctcgaaaaaaaccttcaggcggcccatgggacattaaattgtatgattggacagat

SEQ ID NO: 717638 - DNA, 100 bp, Homo sapiens
gggctacctcttgctggcttcagaaaaggatgctgcagccatggagagcaacgtgaaagtgcagagagatcctgatcaaggtgcaggtgtatgtgagcgg

SEQ ID NO: 717639 - DNA, 82 bp, Homo sapiens
atttcgacagtaacccgtttgccgacccggatctcaacaatcccttcaaggacccagatgatgtggtaccagttggccaaag

SEQ ID NO: 717640 - DNA, 75 bp, Homo sapiens
tgtttgtaactacctggcattgccttttgttgagacatatctgaagagatggattaagaatgctttggattaagg

SEQ ID NO: 717641 - DNA, 100 bp, Homo sapiens
ttccgaggctgcgggcaggggcccgccgcgcccatcccgatggctggaggcgtctgaggggcggacggaggcggcggcggcggcggcggcggcggcggcg

SEQ ID NO: 717642 - DNA, 90 bp, Homo sapiens
gctttttctggtgtcctgaacctggaagttgtgctttttaagaatataaccttgaaccttgtgaagatcctggcattcctcaatatggta

SEQ ID NO: 717643 - DNA, 100 bp, Homo sapiens
ccctgacctggccccaaattatgactatgagagtaaattgcaggccttgcagaagcaggttgaaacccgatctctggctgcagaaacaactgaagaggag

SEQ ID NO: 717644 - DNA, 98 bp, Homo sapiens
aaactacaaaaaaatcattctgaagctttcacctataaatatataccaagataatttcagataaggtatgccattgcattggccttaagggaaaagca

SEQ ID NO: 717645 - DNA, 75 bp, Homo sapiens
gcgaacaggaactggatgccaactctgcccttatggaattggacaaaggtcctaggcctacttacaagcctccag

SEQ ID NO: 717646 - DNA, 75 bp, Homo sapiens
gtaaattgcaagaaagctctggagacttgtggcggggacctcaaacaggcctggtctccaagtcctctcctaaga

SEQ ID NO: 717647 - DNA, 96 bp, Homo sapiens
ctatgagcgagtgcaccggctgccacaaggtcaactactgctccaccttctgccaacgcaaggtacatccagacactgaaggaccacaggccccgg

SEQ ID NO: 717648 - DNA, 99 bp, Homo sapiens
aggcacccgcggaaccgacggctcaggtgccggacgctggcggatgtgcgagcgagggtcttactgaagtaacacaaagcttaaaaatggaaaatgaag

SEQ ID NO: 717649 - DNA, 74 bp, Homo sapiens
agttgtttcctccatttgctaaaggaatagtgtttgctggtccagttctgatggcaaagatgatccaattgaag

SEQ ID NO: 717650 - DNA, 75 bp, Homo sapiens
agtaacccgtttgccgacccggatctcaacaatcccttcaagtaaaatgtttatcggtggactgagctggcagac

SEQ ID NO: 717651 - DNA, 75 bp, Homo sapiens
ggacaggcttcgatgggctcggtggccggacaaaattcatccagcctatttctgacttacacaagagcctagaac

SEQ ID NO: 717652 - DNA, 95 bp, Homo sapiens
ctttctggactatctgaggacacttgtccagcgagccccactgctcggggaggaggagccacggccggggacagctttatcttcaagccaggatg

SEQ ID NO: 717653 - DNA, 75 bp, Homo sapiens
cggccacgcctgaaaggcgactctcctgataccatacttgcagagctccttcagatacataaagaacacattgta

SEQ ID NO: 717654 - DNA, 101 bp, Homo sapiens
ggggaaaaccagttcgtttaaggctttcttctttctcctgtggacaagccagtgctaccccattcacagacatcaagtctccacaaaccggaggactaccc

SEQ ID NO: 717655 - DNA, 98 bp, Homo sapiens
gggggagagtcgctcccgccgggcgagcatggggcgcctggcctcgaggccgctgctgctggcgctcctgtcgttggtgatagactggagtgatgtta

SEQ ID NO: 717656 - DNA, 100 bp, Homo sapiens
gatgcaggtgccagatttggagctggggctactgctggcaacattcctatgggcttccccaaggatttattgacattgctacttgagtgtgaacagttac

SEQ ID NO: 717657 - DNA, 78 bp, Homo sapiens
tcagcctcccgagcagctgggactacaggtctataatacgctgcgccacgccgtggggaccatgtataggagcgaagg

SEQ ID NO: 717658 - DNA, 74 bp, Homo sapiens
ctgcatcctgctcctcttctacttggcctacatccatgaagacagacgagccaaactcaggctgtaccttgagc

SEQ ID NO: 717659 - DNA, 83 bp, Homo sapiens
tttgcagatcgggagcgcaaggtcgccctcaaggccatgatcaaaacagctcgtccgcatggtgctgaatggctgaggacctt

SEQ ID NO: 717660 - DNA, 75 bp, Homo sapiens
gtgtgcagacacaactacgaggtggcgttccgcgggatcttgcagaggagagacccccagggtggccagcggcag

SEQ ID NO: 717661 - DNA, 75 bp, Homo sapiens
cgtttctgtcgctgcagtcgtccgcgggccctccacgcccttcaggaggagcaggccagactcaagatgaggctg

SEQ ID NO: 717662 - DNA, 101 bp, Homo sapiens
caaatgatgtagttattactgtcccgtttgattttggagaaaagcaaaaaaatgctcttggcctcaagttgaagtgttatcagaggaagaaggggaagaag

SEQ ID NO: 717663 - DNA, 75 bp, Homo sapiens
ctgggcatccgacacgtactgctgggctccttcagtggtagatgtcccctgtatggtgtggccaccctgaatggc

SEQ ID NO: 717664 - DNA, 75 bp, Homo sapiens
caaagaggagggcgtcatcagcgtctccgaggacaggtttttcacgactgaaaacaacatagcaaaataagccaa

SEQ ID NO: 717665 - DNA, 75 bp, Homo sapiens
atcgcactgctcatcttggccatcactatacacaacgttccaggtatccccagctttaattccctcctaagttta

SEQ ID NO: 717666 - DNA, 100 bp, Homo sapiens
gcaagaccttcaatatcaaaaatgactttactgaagaggaggaagcccaggttacaggaaatacaggaggcagaggaacaaataaaagacaccacgagaa

SEQ ID NO: 717667 - DNA, 75 bp, Homo sapiens
aacgaggagtggcgcccattaagcgtcacaaaccagtccagctacgggggcccagccagccagcagctgagtggg

SEQ ID NO: 717668 - DNA, 123 bp, Homo sapiens
caagaccgaattcagaaggatatcgacgtcgtgatccagaagtccagagctgaggactgcctgtttgcagggaagaggaagaacgtctgagaaataaaattcgagctgatcatgagaaggcct

SEQ ID NO: 717669 - DNA, 101 bp, Homo sapiens
gaacagactagccactttgcattgactggaaacaatggcatttacagaaagagtcaacagcagtggcaacaggctgtgtggttccggtgctggtgccgtgg

SEQ ID NO: 717670 - DNA, 82 bp, Homo sapiens
ttcaactctaactttaactttgcattggttggacaccttttaaaagcttggacctggcctgatgctttgaatattgaaaatt

SEQ ID NO: 717671 - DNA, 97 bp, Homo sapiens
ctatctgtactgccggcacctcaaccagatgaggaagtacaactttgaggccctccctatcctgaagacattagctgagagtctggcaccttttaaa

SEQ ID NO: 717672 - DNA, 75 bp, Homo sapiens
gggcagaaggagagaaggtgttttggatgcattctagaacacaggacagtctcatcgaactcaaggaatcttcag

SEQ ID NO: 717673 - DNA, 95 bp, Homo sapiens
ttatgaagttttaaaggatgatgaacgaaggcagagtttgaaggttgcgagaaggccttttcaaggcttgaaaatctcaagatccacttgcggag

SEQ ID NO: 717674 - DNA, 100 bp, Homo sapiens
gaaaatcgactctcataaacagcctattcctaactgatctgtacccagaaagagtcatacctggagcagcaggaagcagagctgaggctggtaaagttcc

SEQ ID NO: 717675 - DNA, 100 bp, Homo sapiens
aaaacccacctcctgccacaaacaggttttccagaggaccagctttcgctttctgaccagcagctgcaattagaagtggatcggttggaagaactgaaaa

SEQ ID NO: 717676 - DNA, 100 bp, Homo sapiens
aagcctacaaaatctgagactgtcattgcttttataagagtactgggatttaatgaatttgtctgaaaaacatgataagataccagaaatctgggaaggc

SEQ ID NO: 717677 - DNA, 95 bp, Homo sapiens
cagagagagaggtggacagatctgagagatactgaggttaatccctatatcctgaagaagaacatgatcctcatgacaaatcatttctatgcagc

SEQ ID NO: 717678 - DNA, 50 bp, Homo sapiens
tcctttatatagaagggagagtaggtttctgcataaagaccaactcctcg

SEQ ID NO: 717679 - DNA, 80 bp, Homo sapiens
atctggccgccgccgccgcgagcgctcccgtctttcccagggaactccgatgaagtgttccaacaaaatgagcgagtgaa

SEQ ID NO: 717680 - DNA, 83 bp, Homo sapiens
cgcggcggggctgaggcggccgcggggcccgagcgcaggaggaattttgttgtcagagaataaaaggaggttgtccataattg

SEQ ID NO: 717681 - DNA, 100 bp, Homo sapiens
ttcccttcctgcctcacgcgtggaaatacattgcctacgtgatatatcagctacttcagtgggctgctatctggctccatcagaatgaacagcagccctc

SEQ ID NO: 717682 - DNA, 75 bp, Homo sapiens
gcaatatctctgggctttcacagaaataccaggagtctgttcgtcaaagatataataaaatcgcatatgctgatc

SEQ ID NO: 717683 - DNA, 51 bp, Homo sapiens
gcgaagacgcggagaaaaaagttctcgtctgaagatgatgagaaactgaaa

SEQ ID NO: 717684 - DNA, 142 bp, Homo sapiens
gctttctggaagtcaacattttgatgttcctcccaggagacagctatatttgcccatgttattcaagggaggagatatcaccaaacatgatggaacaggcggacagtccatttatggagacaaatttgaagatgaaaatttt

SEQ ID NO: 717685 - DNA, 75 bp, Homo sapiens
cagggccacctaaggagcggaccccgcatcttcgccgtctggaaaggaagcaggtcctggggaccaaggtggacg

SEQ ID NO: 717686 - DNA, 82 bp, Homo sapiens
ggcccggcggctgctgctgctgctgacgctgctgctgcccggcctcgggtgtttcctgaggttataggcgggtgtttgagga

SEQ ID NO: 717687 - DNA, 102 bp, Homo sapiens
ggggaacatgtctgagtcggagctcggcaggaagtgggaccggtgtctggcggatgcggtcgtgaagatagacctgaagattatcggctataagagaataag

SEQ ID NO: 717688 - DNA, 100 bp, Homo sapiens
gaagatgacgtgtatggaaactcatcaggacggaagcacaggggccactcagagtcgcccgagaactgatcttgcatctttaatggataaaacatttgag

SEQ ID NO: 717689 - DNA, 74 bp, Homo sapiens
tatggaacacactgaagttcttcagcttctcagccccccagatccagtttgctgaccagaagcaagaattcaac

SEQ ID NO: 717690 - DNA, 75 bp, Homo sapiens
ccagacccaatggaacatcagcaatgcttctggcgggcgctaatattgacacctgctcagaagaccagaggaccc

SEQ ID NO: 717691 - DNA, 75 bp, Homo sapiens
ctcagatgctgccagggtccctgaagagggaagacacgcggaaacagctgtccctttccccccaacacatcgctt

SEQ ID NO: 717692 - DNA, 100 bp, Homo sapiens
ctgccacacgctgatggtgcagcaccgcatgatggtacccaaagtcagtgttggagagctggctggactacactggggaactggagccccctgagccgct

SEQ ID NO: 717693 - DNA, 75 bp, Homo sapiens
agctgctggctaagatcaccaacacagacgtggcctcttcagaaacgccagggtgcactgatagagggaattccg

SEQ ID NO: 717694 - DNA, 83 bp, Homo sapiens
atctcactgtttggcaccttcctgttcaactcccctcaccagcgagtgaagcaaagcacggatgagaagaaccaagttttaac

SEQ ID NO: 717695 - DNA, 100 bp, Homo sapiens
gaatgcagaagaaatggcggacttctacaaggaatttttaagtaaaaattttcagaagcacatgtattataacagctacatccgatactcccagatctgt

SEQ ID NO: 717696 - DNA, 75 bp, Homo sapiens
gagcggcctccacctaaacgacttactagggaccatggctaaacctcctggatcattagccagaagcagcagcct

SEQ ID NO: 717697 - DNA, 75 bp, Homo sapiens
gctagaaaaacttaaatgggcgaaagatcacgatgaagagaacttgttggagaaagtggcacagaaaatgcaagc

SEQ ID NO: 717698 - DNA, 75 bp, Homo sapiens
cctcaaatcgtcgtagtgggaacgcaggtgtcgtgaaaactacccctaaaagccaaaatgggaaaggaaaagact

SEQ ID NO: 717699 - DNA, 90 bp, Homo sapiens
cccgggaccgccagctctgtccgctgcccacagcctagcagtcgggaccgtactgaggatctctctaggagctgacactcgaaccttcac

SEQ ID NO: 717700 - DNA, 100 bp, Homo sapiens
aaataacttttccttggagagtcataacatatcactgactgaacactctgctccagccaaggtggtgagggcagctgttcctaaacagcgcaaaggcagc

SEQ ID NO: 717701 - DNA, 74 bp, Homo sapiens
gagaagcagagctcaagaaactgcaagaagccagagatgggtgagtcaagtgaagacatagaccaaatgttcag

SEQ ID NO: 717702 - DNA, 75 bp, Homo sapiens
ctttgggccgtcaggcagttggttgggacccgctccaaccctcgattgttgatccatttcagatacttgtggcag

SEQ ID NO: 717703 - DNA, 90 bp, Homo sapiens
gaggaatcagaaacctgaagttagaaaggctcaacgagaacaagctatcagtcatggctccgatcttcatcttgaagaagagtgacattg

SEQ ID NO: 717704 - DNA, 82 bp, Homo sapiens
accttctggaagctactactacgtggtgcttggaaagtttgcagagcagtctctgatgaagaatgccataaaaacatcggag

SEQ ID NO: 717705 - DNA, 51 bp, Homo sapiens
ctgcagagcgcgcagtacctccggtagaacacctgaaggagaagctcatta

SEQ ID NO: 717706 - DNA, 98 bp, Homo sapiens
ttgtccaggggctgactgtgggcagagaagttgcaaaccgagtttccaaggactgatcctttgaaatactccagccatgactaaaagagaagcagagg

SEQ ID NO: 717707 - DNA, 100 bp, Homo sapiens
gtttcattgagatcaacagcctccacatggtgacagagtacaaccctgtgaaggaagtcactgtgcatagccatcccctaagaagagggcattcctgctc

SEQ ID NO: 717708 - DNA, 100 bp, Homo sapiens
ccgcgcgcccggccggcccggagcaccgagctcgcggcacggtaggagtctctggctgatgaacttgctcttgtggatgttttggaagataagcttaaag

SEQ ID NO: 717709 - DNA, 95 bp, Homo sapiens
gaacatgatcaagggtgttacactgtccagcctagggtgaatgtttccccctccaagaaggggcccttgcagcaccacaacctgcttgtctgcca

SEQ ID NO: 717710 - DNA, 100 bp, Homo sapiens
gtcagcagaggggccactgctgggccctgaggctgcaccaagtggcgaaggagccggctccaagatgaggacggggacttggttgccttttccagtgacg

SEQ ID NO: 717711 - DNA, 75 bp, Homo sapiens
tggaatcttgggatccaatgttgaaggaaaacaggttttacagaaaacagcaaagaaatgatgactttattgaat

SEQ ID NO: 717712 - DNA, 100 bp, Homo sapiens
aaagagagcagtaccctgatggagtcccttgcaggtcgggtcacaaatcttcgaagagtgacatatgttgttttagatgaagcagacagaatgtttgaca

SEQ ID NO: 717713 - DNA, 98 bp, Homo sapiens
cccggacatgatggtcgagggccgcctgctcgttcctgacagaataatcttgtggaagaagaatgaagttgctgattatgaagctacaacattttcca

SEQ ID NO: 717714 - DNA, 119 bp, Homo sapiens
gagaaattttgagtcctcgagtgaatgggcggatctcatatcttcacttggcaaactcaacaagaaatgcactcggtgatggaaagagagccactattctgaagaacacttggccaaag

SEQ ID NO: 717715 - DNA, 90 bp, Homo sapiens
gcccggagtttcatctacgtcgctgtcatgaactacctgcccactctggagttctcccaccctcacaggctgagctggagattcagaaag

SEQ ID NO: 717716 - DNA, 75 bp, Homo sapiens
agccagctaggttcctggtgctttggggaccttcgccctttgcctgatgtcgccatgacaggcacatgtacccgg

SEQ ID NO: 717717 - DNA, 82 bp, Homo sapiens
gatagagcagagtggaccaccccatgaacctcgaccccttatccctctggacagaatgcaggtccaaccacgctggtatacc

SEQ ID NO: 717718 - DNA, 82 bp, Homo sapiens
tccttcggcagtccacccaccgccgccgcctcccagtttccccctttctagggtgaggatggttctacacagccacccggag

SEQ ID NO: 717719 - DNA, 89 bp, Homo sapiens
agagcctcgcctttgccgatccgccgcccgtccacacccgccgccagagacaagaggagcagcagcggcaccgcccctcaccctggagg

SEQ ID NO: 717720 - DNA, 82 bp, Homo sapiens
tggcggcagctgggctcaccgtgactgtcacccacagagaactacgatgacccgcacaaaacccctgcctccccagttgtcc

SEQ ID NO: 717721 - DNA, 87 bp, Homo sapiens
gtaccggctgacctcgctgtacgccgagcacccaggcgactgcctcatcttcaaggtggtgaagcagtattttccaatttgaagatt

SEQ ID NO: 717722 - DNA, 89 bp, Homo sapiens
gggaggcagcgcgggatcccagcctcaggcgtgcgcggacggtgtgcgggctctaaattatcttggtattcagcccacaaaggaacaac

SEQ ID NO: 717723 - DNA, 82 bp, Homo sapiens
ggaagatggacagctgggaattgctgaattagaactgcagaggttcctctacagcaaggtacctcctctttatgaagctggc

SEQ ID NO: 717724 - DNA, 100 bp, Homo sapiens
ggccggaggagtctcagagctgtcagaaaggaaaccctgatagattggtgtgatgaaaaggaacttaatttgatattaacaactggaggaacaggatttg

SEQ ID NO: 717725 - DNA, 98 bp, Homo sapiens
aaaaagtccaagaacagcatccagtggaagagcagacagtcccagctgtagcaatggcgtcgcgtccaccaagagcaaacagaaccacagtaaatacc

SEQ ID NO: 717726 - DNA, 99 bp, Homo sapiens
cacaactccagtgctaactcaacaggtatagtggaggattacaagccaccgttctacgatgtggttcccaatgacccaagttttgaagatatgaggaag

SEQ ID NO: 717727 - DNA, 83 bp, Homo sapiens
ctgttcttcaccgttatcatctatgttcggctggacttctccatcaccaagtcctgtgcctcctgattgctgagtgttcacct

SEQ ID NO: 717728 - DNA, 82 bp, Homo sapiens
ggagagaaggcggcgcgggaggtgaagttgctgctgttggtggtacaggagctgcagcaggccatctccaagctggaggccc

SEQ ID NO: 717729 - DNA, 75 bp, Homo sapiens
caggcgatctggggccattaacaagaatattccccaaagcactgagatactaaagaaattgatgacaacaaatga

SEQ ID NO: 717730 - DNA, 100 bp, Homo sapiens
aggggcccactcgctgtcccgtttacccaaggtccagcctagcccctaggcaccatgtcggacagtgatctaggtgaggacgaaggcctcctctccctgg

SEQ ID NO: 717731 - DNA, 100 bp, Homo sapiens
ctgaaacctggaaagcttacaacagtgactttgaggaatcaggaaaatatgagagccacacccgtgttcacacaggtgagaagccctttgagtgtgatat

SEQ ID NO: 717732 - DNA, 90 bp, Homo sapiens
cgaaagccatggagttgagctgcagcgaagcacctctttacgtcactctgtgagactgctgggtcagaaaaaggataatggaaggcggct

SEQ ID NO: 717733 - DNA, 75 bp, Homo sapiens
cggaaaccggtagcgcttgcagcatgatccggaagaccacggccagccaggtgtacgagacattgctcacctaca

SEQ ID NO: 717734 - DNA, 97 bp, Homo sapiens
cacaataaaggtgctaagaaagagaatgtaagacaggaaaataattaaatattcttaccgagagttgtcaggggagtgtccattggcagcacctgcc

SEQ ID NO: 717735 - DNA, 88 bp, Homo sapiens
tgaagcctttaaatgcagcatctgcgatgtgaggaaaggcacctccaccaggaacaaatgctaagcatggactgcgctgcaaagcctg

SEQ ID NO: 717736 - DNA, 82 bp, Homo sapiens
ccgtccttctccactttcgccagcccgtgccgcgagcgcggcctgcaggaggttgagaacttgttgcttagtaaccaaggga

SEQ ID NO: 717737 - DNA, 101 bp, Homo sapiens
ggagaaaaccccgacgtgttcaacctctctcctgtggaaaagaaccagctgacaatcggtgcagattcactttataggaacagcttcagcttcagtgatga

SEQ ID NO: 717738 - DNA, 98 bp, Homo sapiens
gacgaggttctgtgagagcatgttcttgattattacagacctctttctgaaaagcccggaattggtacaagccatgtttcccaaactgaacaatcaag

SEQ ID NO: 717739 - DNA, 75 bp, Homo sapiens
tgggctgaaggaggaggacaaagagcccctcatcgagctcttcgtcaagaacatgaacgattggatgcccatcgc

SEQ ID NO: 717740 - DNA, 75 bp, Homo sapiens
atggcggacagtgcggaactaaagttgcagtatccagtttattgggaccatctcgagttctgtgatggattcaga

SEQ ID NO: 717741 - DNA, 100 bp, Homo sapiens
ttattgagaaaatgttgttggaagaagacttcctgtccacttccaacgaagcggtctataagatctttgatgacagcccctgcccatttactgcgaaaac

SEQ ID NO: 717742 - DNA, 100 bp, Homo sapiens
cgagtgtacacactgcgagctactttctgactgcccgcctggcactgaagccgagctcaaagagataattgacgaccttgccaacctagtggagaacaca

SEQ ID NO: 717743 - DNA, 82 bp, Homo sapiens
ttggatggccacttacctgaatgaccacctagagccttggatccaggagaacggcggctggaacaaaatccagtctcatagc

SEQ ID NO: 717744 - DNA, 75 bp, Homo sapiens
gacaatgggcagaacgaattcagtgatatcattaagtccagatctgtaattcgccaaaatgacgaacacaaaggg

SEQ ID NO: 717745 - DNA, 100 bp, Homo sapiens
aagcagtgaaggagtgcagaggcatcacctgaaagcatggcggacaccgacctgttcatggaatgtgaggaggaggagttggagccatggcagaaaatca

SEQ ID NO: 717746 - DNA, 100 bp, Homo sapiens
gaaccacatggtgcagcaggactatttccccaaggcccttgcacccctgctgctggcgttcgtgaccaaccaactgggtacatggaaaactcagtctcct

SEQ ID NO: 717747 - DNA, 98 bp, Homo sapiens
cccctctctctctgcttggtaccacagacctcagagttgggtgtcacagaacatgttgaaggagacccttgcaaatttgcactgtgggtggggagaac

SEQ ID NO: 717748 - DNA, 82 bp, Homo sapiens
ccctgggtggtcttgctgtccatggactccttctacaagggctgaaggcctttcggcagcagctgaggaagaccacgcggac

SEQ ID NO: 717749 - DNA, 95 bp, Homo sapiens
gattgtgaggcctccccaaccacatggaactggctcacccacctcattggatctcctttcctccgggcatatatgcatgggtttttcatggatat

SEQ ID NO: 717750 - DNA, 73 bp, Homo sapiens
tcacctgtccagcatccgaccaccgaggctggagggggagaacacccaggtcaccagtgaaaagttgtgcaga

SEQ ID NO: 717751 - DNA, 75 bp, Homo sapiens
ctttagtttcatctctctataaagttatccaggagccacaaagtgaggtgatctttagacagtgactgagtatgg

SEQ ID NO: 717752 - DNA, 102 bp, Homo sapiens
ccgtccgccttctctgtcagctctttccccgtcagcatcccagccgtgctcacggtgtcgtgaaaactacccctaaaagccaaaatgggaaaggaaaagact

SEQ ID NO: 717753 - DNA, 51 bp, Homo sapiens
cgaagggccatttgcttttgcggaggagaactgcaatccaagcaaatgtgg

SEQ ID NO: 717754 - DNA, 107 bp, Homo sapiens
agaagagccatgggtcctcgacctgcagggagcagaggggacagaggcaccaaggacctccaagacagacctcctgccccccgaggtctgcagtctcctgaacccag

SEQ ID NO: 717755 - DNA, 82 bp, Homo sapiens
cacttccttgaagaaacaagcttacaggcccttgatgagcctccctatttgacagtgggcactgatgtgagtgctaaataca

SEQ ID NO: 717756 - DNA, 97 bp, Homo sapiens
gatcgtctctctcatcgaggcccaaaccgccaaggtgtcatggagaaactccagctgggcccagagattctgcagcgggaaaatccaaggcttattt

SEQ ID NO: 717757 - DNA, 100 bp, Homo sapiens
gcgaattccacattctcatgcatttattgatctgactgaagattttacagcaggtatttggcaccaatgtgatggtgacagtggccaagtccttcgaggc

SEQ ID NO: 717758 - DNA, 100 bp, Homo sapiens
gagctgtcctttcaggaaggagccattatttatgtcatcaagaagaatgacgatggattttatgggcagctgcagaagttctgtcccccacactaccccg

SEQ ID NO: 717759 - DNA, 95 bp, Homo sapiens
ccgccgccgccgccgcgccgagcggaggaggaggaggaggcgaggaggagagactgttagctttatacgtctacgaatatttactgcacgtagga

SEQ ID NO: 717760 - DNA, 112 bp, Homo sapiens
tccatctcagatgttgttgatgaagtaatacagaactgccccatcgatgtgcggcgcccgctgtataagggtgatgaccgcttctccgagagcatcctgacctatgtggccc

SEQ ID NO: 717761 - DNA, 100 bp, Homo sapiens
catgtaattcttctttgggcatgggtgaccattcgtttattagaaactattgatgtccataggtgacagcggcatggacatatgccccaggctttcctgc

SEQ ID NO: 717762 - DNA, 83 bp, Homo sapiens
ggcagccaggatgaatccttagattccaagactttgagaatcactacaagaaaaactccttgtggtgaaggttctaagacgtg

SEQ ID NO: 717763 - DNA, 75 bp, Homo sapiens
gagtgtcaacgaaggctataaagtctgtgagagtttgcattgagactccttgcattccgccagatacacaaagtt

SEQ ID NO: 717764 - DNA, 75 bp, Homo sapiens
ccctgctggaggagcgcttccgggaacagcatctgttgcagttgcaggtctccttgcagctcttcgaataaccaa

SEQ ID NO: 717765 - DNA, 100 bp, Homo sapiens
gatcggcccaaggccagttctccgcaggaccacatggtgacaatgcatgatgtgcttgatgctcagtggctgtatgataaccacaaggatgagagttacc

SEQ ID NO: 717766 - DNA, 75 bp, Homo sapiens
ctgtgctcagtaaggactcggcggacatcgaggtggccttgggggacttgcaggtctgagtagcttgggtttgaa

SEQ ID NO: 717767 - DNA, 100 bp, Homo sapiens
aggagagcccacaggtgctaaagagagcagtaccctgatggagtcccttgcagaatgtggtccaacccatgaaggagctatatggaattaacctctcaga

SEQ ID NO: 717768 - DNA, 100 bp, Homo sapiens
cctgaaaggaaattggtgccccggccccggcagtctggacaccttcatgcagtacttctacggccaggtagctacagcaagctgggtagcaggcagatcc

SEQ ID NO: 717769 - DNA, 76 bp, Homo sapiens
ctgcaggagattccatttgttatcccacgacccatccttgaagaaggggccacctacagatgctcctgcagtggac

SEQ ID NO: 717770 - DNA, 100 bp, Homo sapiens
ctgcagggctccggtgagaacctggctgcctggcaccccatcaagcctcatgggatccttatcttgggccaggagcagagaacacgtagcgactccgaag

SEQ ID NO: 717771 - DNA, 74 bp, Homo sapiens
cccggcgggaccatgttcaccagcaccggctccagtgggctctttagaacctggcccattagatgaaacccaga

SEQ ID NO: 717772 - DNA, 81 bp, Homo sapiens
cacgctgcgcttcaaccacacatgaattgcacagccctgagaatctggcctagccgcccgtgactctcacactgtctcctg

SEQ ID NO: 717773 - DNA, 100 bp, Homo sapiens
gcggggagctaagtccccagattggaggaggctggctctggtcttcgatgcacaggagtggccgttatggaacgcagtgttatctacaaacttctggcat

SEQ ID NO: 717774 - DNA, 90 bp, Homo sapiens
atcagggatgggaaagtgtacattcaccatatgtcacccactggagtcaccaggagactaaagtccatcaaaaacatccagaaaattacc

SEQ ID NO: 717775 - DNA, 90 bp, Homo sapiens
cgaatttaggagacataagaccgttggttctgacgaggcacagcgtttcttgcaagaatgggaggtaattattcgaggtggaggacatat

SEQ ID NO: 717776 - DNA, 76 bp, Homo sapiens
ctctgctgcggcgcggggaccgctgtgctctcgggagtgcatccgccccaacccttttccccctcgtctcctgtga

SEQ ID NO: 717777 - DNA, 98 bp, Homo sapiens
caagacaacagtgatgaggaaagctgtgaaagttctcaagtaccctcttatatatggactgattcttattccctgctggtgttctctagtttgcctaa

SEQ ID NO: 717778 - DNA, 105 bp, Homo sapiens
tcacactgcagaactgggttctggactttgggcgtcccattgccatgggcaattgaaggaacagactaaaaatcgtgtcctggaaggaaactacaggtactacca

SEQ ID NO: 717779 - DNA, 75 bp, Homo sapiens
attgaaaggcttcaaagctagcagaattcttccatctctatgacaacaagcccattttagctttctggagaatag

SEQ ID NO: 717780 - DNA, 152 bp, Homo sapiens
tgatgtgcgacaaggagttcatgtgggccctgaaaaacggagacttggatgaggtgaaagactatgtggccaagaatatatacagccctgctctgggacacacctccattggatttaaaagacagtcctcgtcagcactgactttcagctat

SEQ ID NO: 717781 - DNA, 98 bp, Homo sapiens
gctgtacagctcctcaagtgcaacaagtcccacttccgaaaccacaagtttgccgatggcacagccagcagcgaggtgaatgccactgaggagatgtc

SEQ ID NO: 717782 - DNA, 75 bp, Homo sapiens
atcgggccagagcattgcagaaacgtcatgaagattttgaagaagtggcacagtgtatcctactcagtacatgta

SEQ ID NO: 717783 - DNA, 90 bp, Homo sapiens
aacacctgaagctccccatcaagggaatgaacttcacattttctgaatttccagatcccatgtggggttcagattatgtgcagttgtcaa

SEQ ID NO: 717784 - DNA, 75 bp, Homo sapiens
ccggaatcagagccgcgggtgagatccccagtgtctgcagtaaaacccactgttgccccaccactagctgagcca

SEQ ID NO: 717785 - DNA, 100 bp, Homo sapiens
caagaaggtgccggtggtgcgagtcttcggagcgaccccggcaggtgtgttccagagaacaagccttcagacatttgctatattgacgctgagctgtcag

SEQ ID NO: 717786 - DNA, 74 bp, Homo sapiens
gggagccgagctggagctgccgcggcgcagccaggcgcctgtgtctggcagagctggtgtgagacgagacaatc

SEQ ID NO: 717787 - DNA, 82 bp, Homo sapiens
cctcctgacggctgtacttgagcagtcacctggcacaggaatcatattgacaggtcatgaaaatgagaccaaaagatctctg

SEQ ID NO: 717788 - DNA, 80 bp, Homo sapiens
aaaggccaatgttggtgctggcaaaaagtatttcagacaacttttaagaggtgcagaatcaccaacacgcaattcaaaat

SEQ ID NO: 717789 - DNA, 74 bp, Homo sapiens
attaaaaccagggctccacagttaggagatggagtcgggtggtacagttttgagtaccaactggtctgatgtag

SEQ ID NO: 717790 - DNA, 74 bp, Homo sapiens
acctcctcgccagcagccgtccggagccagccaacgagcggtgagccaccagctgggcagcatcatggacctct

SEQ ID NO: 717791 - DNA, 50 bp, Homo sapiens
agatgacaactgtacagatgtcactggaaaatatgttgtgttcttctttt

SEQ ID NO: 717792 - DNA, 100 bp, Homo sapiens
agagttcaaggaggccttccagctgtttgaccgaacagatgagatgagcgagagccgccagacccacgtgacgctgcacgacatcgaccctcaggccttg

SEQ ID NO: 717793 - DNA, 98 bp, Homo sapiens
tgggctaatggatactacagacaacagagaaaacttgttgaagagattggctggtcctatacagacacttctgagaaattcatcaggctgtgaagcgc

SEQ ID NO: 717794 - DNA, 75 bp, Homo sapiens
tccatcactcgtcttatggaggtgtctgtaactgagggtcaaaagcggctggtgctttccgaaagctgctcccgg

SEQ ID NO: 717795 - DNA, 90 bp, Homo sapiens
agaaagataggcggccatggtccaaccttgaaggctctgcatacaaactggtctgctactacaccagctggtcccagtaccgggaaggcg

SEQ ID NO: 717796 - DNA, 83 bp, Homo sapiens
tacaagtgcaagctggcgctggagcagcagcagcgaagcggggagaggtggtgagagatgacccctgttgaggatttcattgg

SEQ ID NO: 717797 - DNA, 100 bp, Homo sapiens
gtcaaaggatgctgagtccggagcgcctagccctaccggactacgagtatctgggcaacagcattattgagaaaagcccttacagaagagtgtggccgta

SEQ ID NO: 717798 - DNA, 80 bp, Homo sapiens
gagccagccgccctgcagccggccgtcggccccgcagccacagatcttcgtgaagactctgactggtaagaccatcaccc

SEQ ID NO: 717799 - DNA, 82 bp, Homo sapiens
ccacattctcctcgcgggaagcgcagcagtgcctccaagggttcttaaagcagagcgcgttccttcacctcgggcagaataa

SEQ ID NO: 717800 - DNA, 98 bp, Homo sapiens
gtggccttagctgtgctcgcgctactctctctttctggcctggaggctatccagcaagctggggaaactgtgccccccgacacctccaagatgctgaa

SEQ ID NO: 717801 - DNA, 80 bp, Homo sapiens
ttcctcctccttggtcgccgcgtccttggctggcgtgttttggctacgggcctccacctccaccgccagatcagtttgcc

SEQ ID NO: 717802 - DNA, 100 bp, Homo sapiens
attctgcttctgagagagacaagtggatggaaaaccttcgcaggacagttcaacctaataaggttgaagaagaggatgaacttgaatctggagaccaaga

SEQ ID NO: 717803 - DNA, 100 bp, Homo sapiens
gcagaatgtgcagagtcttttctttgccaagcaaaacagtttccaccacatcggcttcagctccccaggaatatgattgaaaacagcatgtttgaggaag

SEQ ID NO: 717804 - DNA, 97 bp, Homo sapiens
atctgagcaaaggcacgggcagccggaaggacaccaagatgcggatccgggcctttccggtggctgccccctgcgttcctccatccaaccatgagct

SEQ ID NO: 717805 - DNA, 75 bp, Homo sapiens
ccaactgtgggaactctttccagcttgtgtctgtccccgcatcagagacttctcctgggcctcccccaatggggc

SEQ ID NO: 717806 - DNA, 75 bp, Homo sapiens
tctttgtgtcccgacactctgccaccttctccagcattgtgaaaggtgagttgctacagtggctggagagacgac

SEQ ID NO: 717807 - DNA, 76 bp, Homo sapiens
cagcggcgagcagaactacggcgagcgggcagttcaattaacctccagaagatggctgaacctgcaggaataccag

SEQ ID NO: 717808 - DNA, 95 bp, Homo sapiens
cccaatgcgatgctttgcatcctaaatcagattttgtggaagtataatactttgtcattatgagatgtcgtctctcggtgcctcctttgtgcaaa

SEQ ID NO: 717809 - DNA, 100 bp, Homo sapiens
gtcggaagaggtctcacgaggctgtcatcaccgccatgcccaagaataaaggatgcgggctccgggtgcgggcgcggcctcggtggtctcgctggcgctg

SEQ ID NO: 717810 - DNA, 127 bp, Homo sapiens
ttttttcatattacatctacaagaggggacaagtacctttatgaaccagtgtatcccaacacgggctgtatattgggagttggacttgttctgtccctcatgagccacagcagccaaatgcagtccc

SEQ ID NO: 717811 - DNA, 100 bp, Homo sapiens
tgggggaccagagaggaagagcaggtattcgtggacaccgtagggatgccagagacataccaggcgcggctgcagcaaagttttcccgggattgaggtga

SEQ ID NO: 717812 - DNA, 82 bp, Homo sapiens
gtcatgagctttgtgaacctggggaaggatggagacgctgaaggataagaccctgcaggagctggaggagttgcagaatgac

SEQ ID NO: 717813 - DNA, 101 bp, Homo sapiens
tgcatgaggacagaaggaatgaacctatcatcataagtgatgatgacgagcagccctgcccaggaaggatctctacctaatcctccaagaatatattacag

SEQ ID NO: 717814 - DNA, 78 bp, Homo sapiens
gcgctgcttccacccaacttcctgttagatagcctgggctggaagctcttctacgtcacaggctgcctgtttgtggct

SEQ ID NO: 717815 - DNA, 75 bp, Homo sapiens
cggatcaatccagatggcagccagtcagtggtggaggtcgctgagattacgggtgttgtggaaactgccaaagtt

SEQ ID NO: 717816 - DNA, 83 bp, Homo sapiens
aacagctgtgtgtttgttcatcagactcttcaccaggacagtcattttgtttactcattcagccctgttgcaggtcccaataa

SEQ ID NO: 717817 - DNA, 110 bp, Homo sapiens
gtagccattctttgtactgataagtgcaaaaggcctgaaataaccaactggggaactctaatgatccaggacaaagaagttaccctggagtatgtatcaagcctggattt

SEQ ID NO: 717818 - DNA, 51 bp, Homo sapiens
gtggccctggagcagtatgccagcaaggaatcagagatcattgatttcttc

SEQ ID NO: 717819 - DNA, 100 bp, Homo sapiens
tcttcaggatagtatcttggccagggaactcaaacagcagatgcagccgtgctggtatagaggactctaagaagtggggcatgctgtttctggtgaacca

SEQ ID NO: 717820 - DNA, 95 bp, Homo sapiens
ttctctctgtctgtcatgctcgtcctcatctgggttctcactggccattggcttctcatggatggcacgagatgtgcgtaccaatgaagtggtgg

SEQ ID NO: 717821 - DNA, 90 bp, Homo sapiens
caccacaagcctttgcatatcagacgccgacgctttctccgtggaagacccagtgcggaaggtggggggcggcggcactgccggcgggga

SEQ ID NO: 717822 - DNA, 100 bp, Homo sapiens
ttgaaagcgtttgagaatcttttaggacaagcactgacgaaggtgttctgggactcagtgttagaagctgtctgtctgtaagaatcttgctgtctctgcc

SEQ ID NO: 717823 - DNA, 80 bp, Homo sapiens
gtgggaaccagcgcttctccaccaggatcacgtttgagtgtgctcagatatcgattcaagattggcaaagcatgtaccag

SEQ ID NO: 717824 - DNA, 121 bp, Homo sapiens
catcacgcccagctagccatcttctaattttcattccttcaaagtgaattttgaagattgcaccggtcgacaaaggacagcctatttttccctcgacacccgattcaaagtgggcacagat

SEQ ID NO: 717825 - DNA, 75 bp, Homo sapiens
aagactaccaggctgcggaggaggatggatagaatgacagaagatgctcttcgcttgaatctgttgaagcggagc

SEQ ID NO: 717826 - DNA, 112 bp, Homo sapiens
cgccttgacgacaagaccaccaacgtgtccttgtaccctggctacaacttcagacctgcttttttaaaggctgcagaaaacttcactcttttggttaagaacaacatctggt

SEQ ID NO: 717827 - DNA, 100 bp, Homo sapiens
tttaagggctacgggaagatcctggaggtggatctgaagaacggttctggagagtcttggcttctgggaggaagtcagagggattatctcaggatcagag

SEQ ID NO: 717828 - DNA, 76 bp, Homo sapiens
tgatgagcttcccaggacggcgctcctcatcttcaaagagctgaggcttcgaagacctcagaggacttctctcagc

SEQ ID NO: 717829 - DNA, 51 bp, Homo sapiens
caaactgactttgcagccacggagaggatctggctttgctgcccacgctgg

SEQ ID NO: 717830 - DNA, 74 bp, Homo sapiens
ttcacctccgcgctcttcttcgccagcaccgtgctctccaccacaggctaaggcagctggataagcacagccag

SEQ ID NO: 717831 - DNA, 100 bp, Homo sapiens
ctgtatcctaatggtgtatttcccaaaggacaagaatgcgaatacccacccacacaagatgggaatgatgagaagacagcagctgattacaagattttag

SEQ ID NO: 717832 - DNA, 83 bp, Homo sapiens
atgatactctgtcatccgtggatgagaaagatttagagaatcttgccgaatatggaaagtctcaattccacacgatctcatga

SEQ ID NO: 717833 - DNA, 100 bp, Homo sapiens
cccagtactacgcatatgtaactgagcgccaaaaagtacactgcctcaacacacttttctccagggtggcctccatgaaccagcgccgtgtggatttcta

SEQ ID NO: 717834 - DNA, 51 bp, Homo sapiens
attgcaagcattctatccaaatgcttgtctgagtgggatgtcgttgagtgg

SEQ ID NO: 717835 - DNA, 51 bp, Homo sapiens
tgcacctggtggagcgagtgcagaggagttggtggtgaccccgcccagttg

SEQ ID NO: 717836 - DNA, 96 bp, Homo sapiens
ttcttggatcgggtcgcctgtgtggcaagagtagaaggagcatcgatgcagatcgccaaactgaggcagcaactacaacgcagtaaacagagtagt

SEQ ID NO: 717837 - DNA, 50 bp, Homo sapiens
accagctccgaaatcaccaccaaggttccacgcaggcgcgggggacgacg

SEQ ID NO: 717838 - DNA, 96 bp, Homo sapiens
gccgacaccttcagcgccctggtcaagacgctgcagcgggactgcctggtactccaaagattcaggtttactcacgtcatccagcagagaatggaa

SEQ ID NO: 717839 - DNA, 71 bp, Homo sapiens
aagctcccggcgtctgcaccccggcagcgcgaggaaatgcccaaaggaatgttccggagaatcacagcagc

SEQ ID NO: 717840 - DNA, 120 bp, Homo sapiens
ccgcccgggagcagggagggctccgctagcccggggggccctccccgcggggcagatgacaatgcagatcttcgtgaagactctgactggtaagaccatcaccctcgaggttgagcccag

SEQ ID NO: 717841 - DNA, 122 bp, Homo sapiens
ctaaaatcctgtttttggaagcgactaggttggtccgaatcatccagatcaagcgtttcctggaggacaccacggatgatggagaactgagcaagttcgtgaaggatttctcaggaaatgcg

SEQ ID NO: 717842 - DNA, 82 bp, Homo sapiens
cagaagaaacacttcctataaatctcgcccaaacaggaaaggattattgtgcaacaaagtggtccattttgcgggaacgctt

SEQ ID NO: 717843 - DNA, 100 bp, Homo sapiens
ggagactccagttggacatgatgcagtttccaaaactgatgatgtggaaacctgcctatgattttctgtatacctggagtgctcactatggaaataacta

SEQ ID NO: 717844 - DNA, 73 bp, Homo sapiens
cattgacctcaccaagagggcgggagaactcactgaggatgaggtggatccataaagaacccagccaacccgc

SEQ ID NO: 717845 - DNA, 100 bp, Homo sapiens
accggagaccccgaaaacggaagcgcagggagaaggaagaggtgtttgaaaaggaaggatttgatgccctggatccctttattcccatcctggtttccaa

SEQ ID NO: 717846 - DNA, 82 bp, Homo sapiens
aggaacggctgaaggccctacgggagaaaaccgggcgcaagtactgtcaagatgataagcatggaataaagcttcagaaggg

SEQ ID NO: 717847 - DNA, 50 bp, Homo sapiens
ctgagactccctgtcccggaccgcaggtcataactccatgcaggaagctc

SEQ ID NO: 717848 - DNA, 113 bp, Homo sapiens
cgccagccgcaccatgccgctcctaagcctgcacagccgcggcggcagcagcagtgagagatgtgaagttcatttccaatccgccctccatggtggcagcggggagcgtggtg

SEQ ID NO: 717849 - DNA, 98 bp, Homo sapiens
ccttcccgtcgccgctcccgaagcttttccaggaatgttacgttcataacttactaaggattagtgtatattttccaaccttgaggcatgaaattctg

SEQ ID NO: 717850 - DNA, 82 bp, Homo sapiens
ttccccggaatcgtgtgctgggctggtcccccttggtccagggcttactggagaatggagacagtgtgaccagtcctgagaa

SEQ ID NO: 717851 - DNA, 100 bp, Homo sapiens
aaaaaatgaagaacaagcgagaagagaagaaggcccagaactctgaaatgagaatgaagagagctcaggtaaaggcgacacaggaggagaaccgggagct

SEQ ID NO: 717852 - DNA, 75 bp, Homo sapiens
gcacgtggagatgtaccaatgggtagaaactgaggagtccagggtgctgctggtcctcctgggccacctggtgct

SEQ ID NO: 717853 - DNA, 75 bp, Homo sapiens
cgcggagtggagctcagccaggggcagccggctctggtgctcccagaagaggtacatgtcccagagcaagcacac

SEQ ID NO: 717854 - DNA, 75 bp, Homo sapiens
ttttcacagtgggctttactgtgttgaggttgaaaggattgtagacaagaggaagaacaagaaaggaaaatggga

SEQ ID NO: 717855 - DNA, 74 bp, Homo sapiens
gtctgacagaactcattctcaccaataatagtctcgtggaactggatggttcatatcatgaagatgttggttat

SEQ ID NO: 717856 - DNA, 83 bp, Homo sapiens
ctcagtatatggatacggagtacaaaaacggcccttggatgatggaggagctggtcaggctcaccatcgagaagcagggacgt

SEQ ID NO: 717857 - DNA, 49 bp, Homo sapiens
acagagcggcctgcgccagcgagttctgcggggagtgtctccagccctg

SEQ ID NO: 717858 - DNA, 74 bp, Homo sapiens
gccagccactcggagctaatccacaatctccgcagtggttaaataaacttggatcggctgtaatccatcaggaa

SEQ ID NO: 717859 - DNA, 87 bp, Homo sapiens
catcggcagcggcacctacggcgacgtctacaagggtatgagtattatagaacaattagaccctgtatcttttagcaattacttgaa

SEQ ID NO: 717860 - DNA, 100 bp, Homo sapiens
tggactttgtgattccataataaccatctatcgggaagagggcattctaggatttttcgcgtacaagaagaacttgaaggccctctacgtggtgcacccc

SEQ ID NO: 717861 - DNA, 98 bp, Homo sapiens
ctgtttaaactcattgtcaaggaaatcttcctccaggatataagatcactctgattgatataggacttgttattgaatatctcatgggaggaacctac

SEQ ID NO: 717862 - DNA, 141 bp, Homo sapiens
cccagatggactccaacaggaagatgaatgccagcgagcgggagctggcagcctgccagctgctcatctcccagggagagtcccgtattctcagagtaaaagttgtttctggaattgatctcgccaaaaaggacatctttg

SEQ ID NO: 717863 - DNA, 100 bp, Homo sapiens
gcctaggcattttgctgtctcctcctaatacggacagtcggcccaatatgtcaagacctctgatcactagatcccctgcatctccactgaacaaccaagg

SEQ ID NO: 717864 - DNA, 82 bp, Homo sapiens
gtccccgcgttcacagccccagcgcaggtccggcctctttggcctacccccgttggctccgctgccccaggtcgatgagtcc

SEQ ID NO: 717865 - DNA, 107 bp, Homo sapiens
caccactgtttgtgctggatcgcagcgctgcctttccttatgaagaagacacaaaaatgtgtgctatactggccggaaaagagagggatatatggaaaagttgaggt

SEQ ID NO: 717866 - DNA, 100 bp, Homo sapiens
gagcgcgaggaggaggccctggcatccaagcgtttccgtgccgagcggcaggacaacaaggagaactggctgcagaggaagagcaagcaggccctgaggg

SEQ ID NO: 717867 - DNA, 87 bp, Homo sapiens
agaagggacagtttgtgccagctctccagagagaaaaggtctccgtgaggccgggtgacgctccagaatgggagacaagccaatttg

SEQ ID NO: 717868 - DNA, 99 bp, Homo sapiens
tacagaaacaaaatgtcaacaaattgatggtcagctgtcatgcgagggcactcaagcagccctgtggaaagctctacgtggtgagaaactgaagcctcc

SEQ ID NO: 717869 - DNA, 100 bp, Homo sapiens
attcgcggctcttcccgcccgccttccgccgtctcttcgagttcttcgtgctgctcaaggtgaccagaagtcagcagcttcccagaagccccgaagccgg

SEQ ID NO: 717870 - DNA, 50 bp, Homo sapiens
tgatattggagtgctcattcacatgaagacagtcattttgtttactcatt

SEQ ID NO: 717871 - DNA, 98 bp, Homo sapiens
cccccaggcctctgggctctgaggtcattgacgagactctggatgttaaggaaatgattttcaatgccgagagagttggaggcctcgaggaagagcgg

SEQ ID NO: 717872 - DNA, 82 bp, Homo sapiens
gctgtggcatggcggacgaggggaagtcgtacagcgggatgacttgtcaagctcgaacatcatatactgaagatgaagttct

SEQ ID NO: 717873 - DNA, 100 bp, Homo sapiens
ctgcccagacggctcacctgtgcgggatggaacaaaaggtatcgagaaccttccctgcgaacttcagaggaacttccagctgatgcgagagctggaccag

SEQ ID NO: 717874 - DNA, 90 bp, Homo sapiens
actccgagaggaggtggaccagaacttttggaactagtgccggcggctctccaccccccaggttaatgttgaagaaggaaaatgcggaag

SEQ ID NO: 717875 - DNA, 100 bp, Homo sapiens
ctctcatctcagcctccaaaagtgctggcattacaggtttccacttgagcggcacagtgacagaacctgcaatacaatcggagccagaaactgtttgcaa

SEQ ID NO: 717876 - DNA, 100 bp, Homo sapiens
actgtacctcagttcattgccagagagccattttttaacgatggcagttccagggaactaatgaacctcactggaacaatccctgtgccttatagaggta

SEQ ID NO: 717877 - DNA, 98 bp, Homo sapiens
gtcgtcccccagatcagtgccccgcaatccaacaaggagaggctgaagaacatggcactctccattgccgaacggttgaaacagttcctcaggctaca

SEQ ID NO: 717878 - DNA, 100 bp, Homo sapiens
ccaaagcagtcgtaagaagaggtcccaatcccccactctttccgccctaatggaggtctccagtttcgaatggacttcgatgatgaagatggtgaaggcc

SEQ ID NO: 717879 - DNA, 82 bp, Homo sapiens
ccgggacctgttggttgtcgcccatgatctgatccggaagatgtcacctgtgacagagctgaatgaacctctctccaatgaa

SEQ ID NO: 717880 - DNA, 51 bp, Homo sapiens
gtcgctggaatgtgtgtctcacgaggagtaaacatggaagtactaacttca

SEQ ID NO: 717881 - DNA, 75 bp, Homo sapiens
catctttcagcagttggcacacatggttaaggaacaggaggaaaccattcagagaacccagcgggtgccgcttct

SEQ ID NO: 717882 - DNA, 96 bp, Homo sapiens
aactgtgcacctcagaaaactcaatgacagctctattatcaagtcctaaattttggaatgattgtctcatcggcactaatgatctggaaggggtta

SEQ ID NO: 717883 - DNA, 98 bp, Homo sapiens
gaacctttgacttggtgttgaaagtgaaatgtcatgcctctgaaaatgaagaaggccttacgaccggatatgggctataatacattagccaactttcg

SEQ ID NO: 717884 - DNA, 100 bp, Homo sapiens
taccaaggacagagtcagtgatttccataaattgaagcaaactttcatgacgctggtcattatcttgctgcatgtattctggggcattgtattttttgat

SEQ ID NO: 717885 - DNA, 100 bp, Homo sapiens
cgggagagcgcgcctagccggctcgcgagagtatgctgctgctgttccgctttgcgtcctcgctacaaacgcctggtggacaacatattccctgaagatc

SEQ ID NO: 717886 - DNA, 83 bp, Homo sapiens
cttcagtatctcaggcggcaccctgtccccgaggaggggaccatgacacattctccgtgttcctcggtctcatcttcttcctg

SEQ ID NO: 717887 - DNA, 100 bp, Homo sapiens
tcttccagatgtgtaatacattactgcagagaaacacggaaactaggaagaggaaattaactatctgtacttataagaaagaaatttcagagcttccaag

SEQ ID NO: 717888 - DNA, 101 bp, Homo sapiens
cggttgccgggcgcgggcgagaaaggtgtggccgacgacgatgccctcgctgaggagcgcatgcggagaggccagaacgccctgccagcccagcctgccgg

SEQ ID NO: 717889 - DNA, 100 bp, Homo sapiens
tcgtccctgacatcatctctgtgcactgataataaccctgcagctggaagaagaactgagacagcagaaagaagcagcttgtttcaaggctcgtccaaac

SEQ ID NO: 717890 - DNA, 124 bp, Homo sapiens
cagatctgcagctcatcaatgctgaggagcagacgagtggccaggcttctggggctgactcaactggactttgtgtcattgtatcaagattttgaaaacttttatacaaggaatctgtacatga

SEQ ID NO: 717891 - DNA, 50 bp, Homo sapiens
gggaaaagcgaggcaaggcaggcggaatctatctaccgccggggagccag

SEQ ID NO: 717892 - DNA, 96 bp, Homo sapiens
gctttacagtcgaagctctgtaagaagaaaacactttgtgggccagcttagcagtgtctgcaaaaacgaatcttttcctacaacctgttaactgac

SEQ ID NO: 717893 - DNA, 75 bp, Homo sapiens
atactactacatcccgcagtacaagaactggagaggtaaaaaagagtgtcaagtggacatgcaaagcttgtggag

SEQ ID NO: 717894 - DNA, 100 bp, Homo sapiens
cacgaacaccagcttcccaggacagaattctgcaggtggatagatacttctcaagacatcacacagcgtgagtcaatcaaggagggaagccacaagcaga

SEQ ID NO: 717895 - DNA, 82 bp, Homo sapiens
catcgagaaaaccatctccaaagccaaagacagccccgaagatttttggaggtgaaatcaagactcacatcctgctgttctt

SEQ ID NO: 717896 - DNA, 74 bp, Homo sapiens
catatctgagggagaagcacaagatcatgcacagagtttgaaaatctgaacacagttgctgagtgtctgttttc

SEQ ID NO: 717897 - DNA, 90 bp, Homo sapiens
agaaaaacgaactggaagaaatgccatgaacatgcaagaaacatatactgcttacctcattgaaacaagctgtgctgtacctgcttctct

SEQ ID NO: 717898 - DNA, 90 bp, Homo sapiens
ggaagaacccatcgggcagctacacatcttgaaagagaagctcttcctgtgagtgtgtcccggcatggatatccggaacaacctcactag

SEQ ID NO: 717899 - DNA, 90 bp, Homo sapiens
acccgagagcgtggagcgggctgggccagaaatcttcccaaggctgcagacaccgacggatttgctttgggagccagagtagctgccgcc

SEQ ID NO: 717900 - DNA, 78 bp, Homo sapiens
ggccacacaggcacaggccggtgagggacctgcccagacctggagtaatctatgccagcaattatgacaatgttagca

SEQ ID NO: 717901 - DNA, 49 bp, Homo sapiens
aactgtgcacccctggatgaaaaaactaatggcagatcccggaaatcca

SEQ ID NO: 717902 - DNA, 83 bp, Homo sapiens
cagcctctggtcttgacacatctgctctctctgttcaagggaattttgatctaaatagtcagtatttacaggatgaaagtaag

SEQ ID NO: 717903 - DNA, 101 bp, Homo sapiens
ctggtggatctaaaagtttgtttgcaggtgttgggctggatcttgatagcagttgttatcatcattcttctgatttttacatctgtcacccgatgcctatc

SEQ ID NO: 717904 - DNA, 101 bp, Homo sapiens
gcaacaggaacaagatgtgaactgtttctcttctgcagaaaaagaggctcttcctcctcctcccgcgacggaaacttggatttaactggccagaagcaggt

SEQ ID NO: 717905 - DNA, 101 bp, Homo sapiens
taaaaagaccactgaggagcaggtgcagattctacgattaggactgaaaatgagcaggcctgtgaggacatggacatcctaaaatcagaatcctatgggac

SEQ ID NO: 717906 - DNA, 100 bp, Homo sapiens
aggagaccgctaacagcctgccagcccctcctcagatgcccctgccggagatccctcagccctggctggtgatgtgtccaatctagatcccaacttctca

SEQ ID NO: 717907 - DNA, 75 bp, Homo sapiens
ccctggagcacgagttcaggaaggctcaggaagaggagagcagcaagcgggtttgcctgcaatgagatttcattc

SEQ ID NO: 717908 - DNA, 86 bp, Homo sapiens
ccgcctgagcgcaactagcggcgggtcgtgggcacctccagggggatatgagactttctactcggaatatcctgagtgttgcgtgg

SEQ ID NO: 717909 - DNA, 82 bp, Homo sapiens
tgagtatgcaggagctgaatccagaaaccagcacagactgtgacgggttggttctggacattacacagcatacgcaactcac

SEQ ID NO: 717910 - DNA, 90 bp, Homo sapiens
cgcggaggggcggcggccggggaggcggcggcggcggcagaggcctccgcttcatccaggtcttcctccagagcatctgcgacggggagc

SEQ ID NO: 717911 - DNA, 75 bp, Homo sapiens
agaggcccagcatatacaaaggcatggaagtatgaaaatgtgaggtgctggcggaggagtccatagtatgtctgc

SEQ ID NO: 717912 - DNA, 90 bp, Homo sapiens
ctacatctcaagctcatattttgaagtgtttacgggtgcggtctgcctgcagcctttctgccacctgtactggggctgcacccggaccgg

SEQ ID NO: 717913 - DNA, 80 bp, Homo sapiens
cccctctccttgatgccagctcactggagtatctgtttgctcagaaactaatctggattcactccctctggttgataccc

SEQ ID NO: 717914 - DNA, 104 bp, Homo sapiens
taactggagacactgagaagaagaatcagggatgaatgcaagaaggtctctgaaagaagatgaatttggctgagatttgtgataatgcaaagaaaggaagagaa

SEQ ID NO: 717915 - DNA, 88 bp, Homo sapiens
ccgagccagccgctgttttgccggaggagcccctcaggccatttggtgcttccagatgtgagttatcaggtggaatccagtgaggagg

SEQ ID NO: 717916 - DNA, 98 bp, Homo sapiens
cgcagtggtcgcttcttctccttggtctggagcccggcactgtggtcataacagagcaggcagtggatacctgcttcaaggcagagtttgagcagatt

SEQ ID NO: 717917 - DNA, 100 bp, Homo sapiens
caaaaacaaagagtatcatcaacgggaagtgagaggtactttgaactcaagtaaacaaaagggaagattttctcgttgatactggagactgcacaacaat

SEQ ID NO: 717918 - DNA, 100 bp, Homo sapiens
tgtgaacaaggaattaacccagaagctttatcatcggttattaaggagcttcgcaaggctactgaagcactgaagcttaagatctccttcagcgagacag

SEQ ID NO: 717919 - DNA, 100 bp, Homo sapiens
tatgaagtattaattcttccactgatatctcaaaaggtgatctggacaaaggaacaggtatctcaggagcatattaatgaaaagtgccataaactgaaaa

SEQ ID NO: 717920 - DNA, 117 bp, Homo sapiens
cctgccggctatgtcggaagacgacgaggactgctatggcaatgagtgttggaggaagcagaattttacaatatcacctcattaataaaacttgtaaaggacaaaattagagaacga

SEQ ID NO: 717921 - DNA, 90 bp, Homo sapiens
ggctgtgaggcccgccgctcgcatgagcacctcatacggctgcttctggagaagagatggacagagacgtatgtgcgttggtctcctaag

SEQ ID NO: 717922 - DNA, 75 bp, Homo sapiens
gagcctctcagccggccgggatggctaccacggccgagctcttcgaggttgttttggaaaccgaaataacaaata

SEQ ID NO: 717923 - DNA, 75 bp, Homo sapiens
caaaatcagtgattctacatctcaagctcatattttgaagtgtttacggatgtgggcgctatctccaactgtctt

SEQ ID NO: 717924 - DNA, 50 bp, Homo sapiens
cctcccaagtagctgggaccacaggtgcatgccaccacacccagctaatt

SEQ ID NO: 717925 - DNA, 98 bp, Homo sapiens
ggagctccttttcctccacctaccttcccgaatttattcaggagattgagcatgctctgggtcttggcccagccaaacagtgtcctcttcgagagttt

SEQ ID NO: 717926 - DNA, 100 bp, Homo sapiens
ggagagacgcaataaaccaagcactctagatgccctcaactatgctctccgctgtgtccacagcgttcaaggaatgaaagggttttggaggcaatgacag

SEQ ID NO: 717927 - DNA, 97 bp, Homo sapiens
acacgcatatgctgttttggatattagagagttcaagggttacacatcattttggaatgactgtatatcatctggattacgtggctgtatgttaatt

SEQ ID NO: 717928 - DNA, 98 bp, Homo sapiens
gctggggaaaaagaggtgtgcggagaccagatcaaaggaccggacaaagaggagaaatggtggagtcaatgaagaaagtagcagggatggatgtggag

SEQ ID NO: 717929 - DNA, 99 bp, Homo sapiens
ctggcttaagaaacacatgccgaaagacagcaacctgctcctggaggacgtcacctggaagtacacaggaacatggatgaagctggaaaccatcattct

SEQ ID NO: 717930 - DNA, 75 bp, Homo sapiens
ccggcagtcatctcgcggccgttcagatgttaaggacatgttcacttccagatctctcaaagctgttcagaaccc

SEQ ID NO: 717931 - DNA, 88 bp, Homo sapiens
ttccagggccaccccccatacggtgctggagaatctggtaaaagcaccattgtgaagcagatgaggatcctgcatgttaatgggttta

SEQ ID NO: 717932 - DNA, 78 bp, Homo sapiens
tcaatcgtatcttgaagggacatcgaaagggcgagctgacggtcttcacagactatgaactggctgtgagagaagaga

SEQ ID NO: 717933 - DNA, 88 bp, Homo sapiens
acaatggttagagaagaattttccaaatgaatttgcaaaacttactgtaggatattaaaggactcagcaaaaagagaaagatgtattc

SEQ ID NO: 717934 - DNA, 97 bp, Homo sapiens
ctttccgggaacatccaaggcaagactggcacccagcacagcagagtctccatccccaggctggagtctagtggcgcgattttggctcactgtaact

SEQ ID NO: 717935 - DNA, 113 bp, Homo sapiens
ttttgggaaactcgactttggagaaaccaccgtgctggaccgcttttacaatgcagccatgcctgatggagctctggacacagctgtctgcgctgacgaagtggggagcgagg

SEQ ID NO: 717936 - DNA, 83 bp, Homo sapiens
gggcgagctgcggctcggacgccagcggacacgcgggcgagtgggcgacagatgcgaaagaaacgagttccagtgccaagacg

SEQ ID NO: 717937 - DNA, 50 bp, Homo sapiens
ccgggaccgccttgccctctctttaaagctgtcggaaaaggtaacagaag

SEQ ID NO: 717938 - DNA, 100 bp, Homo sapiens
tggcagcggcggaaaccgaaggggagccatggcggctgacagtcgggaggagaaaggaaaatgtttataggaggccttagctgggacactacaaagaaag

SEQ ID NO: 717939 - DNA, 82 bp, Homo sapiens
gctactctctctttctggcctggaggctatccagctgagtgtgtccgcttgaaaccaactgacatacagcccgacatcttca

SEQ ID NO: 717940 - DNA, 114 bp, Homo sapiens
gaattcagaaggagctagctgaaataacccttgatcctcctcctaattgcaggtttccaatacttatctacaggaatcgccatgaccccagctctgagggaggcaacagcaaag

SEQ ID NO: 717941 - DNA, 100 bp, Homo sapiens
agccgggaactctgaacctcaataacgaggttgccaacttggcctgttccatctcaaataatgaagaaggtgtaaagcttgttcgaatgtctgcaagcca

SEQ ID NO: 717942 - DNA, 100 bp, Homo sapiens
gccgaggccgggaggccgtgcccggaggctcttgtcaggatggtgaagctgttcatcggaaacctgccccgggaggctacagagcaggagattcgctcac

SEQ ID NO: 717943 - DNA, 51 bp, Homo sapiens
gtcggcgatccggggtctgggcgcggcgagcatcacaggacatggccccct

SEQ ID NO: 717944 - DNA, 100 bp, Homo sapiens
agacagcacgccagtgagggagatggagaccaatcacccacccagtgtgcgtctgaagatgatgagaaactgaaaaagaggaaggagcgatttgggattg

SEQ ID NO: 717945 - DNA, 97 bp, Homo sapiens
ggacatgcgcgggagggcgccgcggggcagccgccgctcctccggggtacccaggctgaagtgcagtgtcacaatcatagctcaccacggtcttgaa

SEQ ID NO: 717946 - DNA, 75 bp, Homo sapiens
tccacaagtatatggggattccgcagatccggcagctttccgaaaggagtggaaacaaaatgtcagtcagtgtgc

SEQ ID NO: 717947 - DNA, 100 bp, Homo sapiens
gttctccagcagctgattgtaatgaatttgcccaatgttttgatgattggcagagacccactgtctggtatctcagatgaagacatcatcaacattactc

SEQ ID NO: 717948 - DNA, 50 bp, Homo sapiens
gcaatatctctgggctttcacaggacccactgatctcagcatgaagagac

SEQ ID NO: 717949 - DNA, 96 bp, Homo sapiens
cgctgccgggcaccgaggaccagctcaatgacagctccagctccagaaatcccagtacctgcaactgggccccagccgaggccagtactatggcgg

SEQ ID NO: 717950 - DNA, 51 bp, Homo sapiens
gccacacacaccatcatggtcctgagagcctgttacctatccataaacccc

SEQ ID NO: 717951 - DNA, 100 bp, Homo sapiens
aggaacaatactgttttatggagactttctggaacagttgtggaaacttcagaacattttcgtatagatggtccagtaatttcagagagtactcccatag

SEQ ID NO: 717952 - DNA, 75 bp, Homo sapiens
aaaccctctctgagttcttgggcacgttcatcttgattgtgtttcccattaaacactaccaggacaaaatcaggc

SEQ ID NO: 717953 - DNA, 100 bp, Homo sapiens
agccctgcaatttgaagatacatgagacagcagccaaacccccaggtcaccctgctgattgccttcatctgtgtgcggagctccctgtggaccaactaca

SEQ ID NO: 717954 - DNA, 75 bp, Homo sapiens
gacggagctaagagatatctgcaatgatgtactgagaggcgtttccatcaaccagttttgcaaggagttcaatga

SEQ ID NO: 717955 - DNA, 98 bp, Homo sapiens
actgtgaaaacctagacaccttagctttcattttgcctcacaggactgataacagcgagagctgtgtgctcgtttcctggctgatgaagacagagagc

SEQ ID NO: 717956 - DNA, 105 bp, Homo sapiens
cccctgtttgagaaaaggcctaagaattttggcattgggagtgcatccgccccaacccttttccccctcgtctcctgtgagaattccccgtcggatacgagcagc

SEQ ID NO: 717957 - DNA, 75 bp, Homo sapiens
gaagaaaagaaggagaatagaggagctgctggctgagaagagtcagccagcctgaaagagcaggatggatcttga

SEQ ID NO: 717958 - DNA, 83 bp, Homo sapiens
catcattaaggacggaggcacgctacgagttccagggagctctgtcctggtgaccgtgcccgggttatgacgactaatcccaa

SEQ ID NO: 717959 - DNA, 82 bp, Homo sapiens
cgcccggggcgaggcagggccagcagcaggcgggagctttagatagtgacgggggcagagagctggactgccagctgtgcgg

SEQ ID NO: 717960 - DNA, 78 bp, Homo sapiens
atgaagagacacagtatggtagccacacccccaggccagctgcgggccgtccagcggctgtgccacttctacagcgcc

SEQ ID NO: 717961 - DNA, 88 bp, Homo sapiens
gggaccccagcgcgggcggcggcggctgggcgggagccccagagtcctcatcaccgggggcatcgtggccacagctgggcgcttcacc

SEQ ID NO: 717962 - DNA, 90 bp, Homo sapiens
ctctctacagtttgttgtagaaccaagtgaagccacaaacagatcaggttgtttttcaccattcagaacattgcctgaagcaggtccacc

SEQ ID NO: 717963 - DNA, 100 bp, Homo sapiens
caagactctcttcgctctttgcatcttaactgcagattcttctaacagagaaaatgccattgaggatgaagaggaggaggaggaggaagatgatgatgag

SEQ ID NO: 717964 - DNA, 97 bp, Homo sapiens
ctggctgaagccgatgaacagcgccgggatccagatcagacctattgtgaccgcctggtgcaggacacgcctttcctgacaggccatgggcgcttga

SEQ ID NO: 717965 - DNA, 75 bp, Homo sapiens
accatcccaccaaagggggctgctgaccgagagagctcactcagccaggcactccaggaagctcatcgggtgctg

SEQ ID NO: 717966 - DNA, 108 bp, Homo sapiens
aagaaagctctggagacttgtggcggggacctcaaacagctgcgttcctttgcctgcaacaggggtcaagatgagttttgcctgacttctttgatgtcctgaactttc

SEQ ID NO: 717967 - DNA, 51 bp, Homo sapiens
gtgaagaatccttccattataagaatagataccacaagagttgagtttacc

SEQ ID NO: 717968 - DNA, 83 bp, Homo sapiens
gtggcacgcagcctggggactctgcctcgtgccgctgagcctggcgcagatcggctatgcattcctgctgtttcaagatgaaa

SEQ ID NO: 717969 - DNA, 90 bp, Homo sapiens
aggcgctgacggccacccctccaggtgctggagaatctggtaaaagcaccattgtgaagcagatgaggatcctgcatgttaatgggttta

SEQ ID NO: 717970 - DNA, 75 bp, Homo sapiens
aaaaagctgaaggtggaggcgccgcaagcgctgaggtaaaaatgcatttgcaaagggagaaaatgaaggccaaac

SEQ ID NO: 717971 - DNA, 100 bp, Homo sapiens
agaatgctgatggtttcattgatctagaagagtatattgtatatgcagttcattcggctgctagaaaagttattgacatcgcagtgtggtgctgctgagg

SEQ ID NO: 717972 - DNA, 74 bp, Homo sapiens
ctattgccttattttttctcatggatgttcttcttcgagtatttgtagaagggactctggggactggtgaacaa

SEQ ID NO: 717973 - DNA, 75 bp, Homo sapiens
tcgccgccgccaccatgcccaagagaaaggttaatttggagtggcccctggagtcagtttcctacaccatccgag

SEQ ID NO: 717974 - DNA, 50 bp, Homo sapiens
caaaatcccaggctgtcggaagcaagattgctcgctgtaagcagctcatc

SEQ ID NO: 717975 - DNA, 75 bp, Homo sapiens
ttactccctgccacagatcctcatccaaagatcaatgcttcctgtgtccagtaccggttagtggtccgggatgtg

SEQ ID NO: 717976 - DNA, 100 bp, Homo sapiens
acttgtgggccaagcaggagggaaaggttcaaaccttgtactactcagctgatcacaagctgcttgatgggaacctactagatggacaggctgaggtgtt

SEQ ID NO: 717977 - DNA, 100 bp, Homo sapiens
gcagtcgctgtgaaagaccaaagactctatctctttggaggagaggacatcatgcagaaccctgtgcgccttatccagatggagctttgggaacgcggag

SEQ ID NO: 717978 - DNA, 100 bp, Homo sapiens
ttttgacacaagggcgcatatcttcaaagcacctagtacctcctaccattgtcaactgacaatggcgatgaccactcagaaggaggcctggtggagaacc

SEQ ID NO: 717979 - DNA, 75 bp, Homo sapiens
aatccagccaaatacaactggaaaacagctttttgatcagatgtggatgaggcttccaagaaggagatcaaagac

SEQ ID NO: 717980 - DNA, 74 bp, Homo sapiens
cggaatgctgctgttcgctggtgggaaggtggaggcaatgcccagagctgtggcagccaccttgcagccgtgaa

SEQ ID NO: 717981 - DNA, 100 bp, Homo sapiens
cactcatcctcttggcaggatcacagtcgcttcctgtctagtccaagattttcatacgtgaactgtgtggcatgggggaaaggaatatggctaataatca

SEQ ID NO: 717982 - DNA, 96 bp, Homo sapiens
caagaactggctcaagaaatttgcctcgaaaaccaactttgcccgaagtttttacatacaaattctactagtcacacctggccattcagtgcagtt

SEQ ID NO: 717983 - DNA, 74 bp, Homo sapiens
aactggagaagcaacattccaataaagtctttgtggtgaagggactgtcaagctccagtcagtctcagtcatcc

SEQ ID NO: 717984 - DNA, 50 bp, Homo sapiens
gtccaagatgacagaggaggagtgcaggtctctcaggcagctgcagagct

SEQ ID NO: 717985 - DNA, 82 bp, Homo sapiens
ccttagacaagaaactcctttccttaaagtgatgcagccaacacgaacggttgtcatgtgtaacacaactttcgatcaccgc

SEQ ID NO: 717986 - DNA, 82 bp, Homo sapiens
caaaggatggtgagattgttggcctttcaggaagagtgcttaagaggaaatatcattctgcaaaagaagcttatgaacaact

SEQ ID NO: 717987 - DNA, 75 bp, Homo sapiens
catttagcctggaacagagcggcactcggcctgagcggggctgaacgagtgtctgcacaacaatggcggctgctc

SEQ ID NO: 717988 - DNA, 74 bp, Homo sapiens
cttcggcaagatccagatcgggatttacgtggagatcaagcgcagcgatggcatcctctggtatcacgattcca

SEQ ID NO: 717989 - DNA, 76 bp, Homo sapiens
gctcttcatgcaaggaaacataagttggaggttctggaatctcaggcgcagctcgtgtatactaccaatatccagg

SEQ ID NO: 717990 - DNA, 74 bp, Homo sapiens
tccggtcagggtcaagtcgtgttctgatcactactgacttgttggaagctgagctgaacacattacgatggatg

SEQ ID NO: 717991 - DNA, 100 bp, Homo sapiens
aggaggctggaagaggaagatgcctagcacagaccttctgatgttggctcatggatttgagatcttatgctccaaatgtagcccacatttttctgactgc

SEQ ID NO: 717992 - DNA, 100 bp, Homo sapiens
agacagcgcagcagaaggtgacccagtgggcagaagagaggagcatcgtgcatcaagtcaccagggtggtccattcaagctgcagatttgtttgtcatcc

SEQ ID NO: 717993 - DNA, 87 bp, Homo sapiens
gggtgggggctgtctcggcaccttcacctccctgctgctgctggcgtcgacaggaacctcactctggagcctgagatcatgcctgct

SEQ ID NO: 717994 - DNA, 74 bp, Homo sapiens
ggtgatgcccaagatggaccagcctgaaaaagcaactgaaccggcttctcctttggttccattcttgcagaaat

SEQ ID NO: 717995 - DNA, 50 bp, Homo sapiens
gaatgtatgaagaacagtcacaggacaggataattggtctggtggaaggg

SEQ ID NO: 717996 - DNA, 82 bp, Homo sapiens
caaggacttgatggaagccatttccaaagacaacatcctttacctacaggatcttttgccagaaatgagggcatactggcct

SEQ ID NO: 717997 - DNA, 100 bp, Homo sapiens
ccgccttcaatctgctcatgcattacccacccccctcgggagcagggcagcacccccagccgcagcccccgctggtcctttgctgccagcatgatgtcgt

SEQ ID NO: 717998 - DNA, 103 bp, Homo sapiens
caacttcctgtcctactaccgcctcacacgcttcctctccagagtgatcaagtgtgacccgggagtgcatccgccccaacccttttccccctcgtctcctgtg

SEQ ID NO: 717999 - DNA, 80 bp, Homo sapiens
cgccgaagaagcatcgttaaagtctctcttcaccctgccgtcatgtctaagtcagaggtaccagaggtttgaaaaggcat

SEQ ID NO: 718000 - DNA, 90 bp, Homo sapiens
gtcaaactacctctcagcaggctttgctgtctgcatgccgacatgctgggctcactgggccccaaggaggccaagaaggccttcctggac

SEQ ID NO: 718001 - DNA, 75 bp, Homo sapiens
aggattcgttggctgccgtccccgctgctgtgcattggatttctccacccaggtgaactcctccctcacctcccc

SEQ ID NO: 718002 - DNA, 97 bp, Homo sapiens
ctgatacagagacgatggtcggaatcagatttgaaaatgaaagtgacagtactgcttttaaagagacagtgttagggatcttggaagcacagccaac

SEQ ID NO: 718003 - DNA, 74 bp, Homo sapiens
gtttgtgagggaaacctgctcccaggagttgaagtgccgtgagcgatgtggagatgcaggaacactatgatgag

SEQ ID NO: 718004 - DNA, 82 bp, Homo sapiens
cttgcgaggatgagagcgacgaagccaactgtccaggcctccggtgtggctgtctctgatggtgtcatcaaggtgttcaacg

SEQ ID NO: 718005 - DNA, 80 bp, Homo sapiens
tggagcttggtttcgggatctcggtgctgcagacggcgagacctcctgcacagaggcggccttagcaacatgctgttcca

SEQ ID NO: 718006 - DNA, 98 bp, Homo sapiens
ctcagctccacattgagagcaaaatctacaagatgatgcagggaggagggttttcagagaaagatgctgatgaggtgaaaggaatttttgtagatacc

SEQ ID NO: 718007 - DNA, 100 bp, Homo sapiens
atccagtcttgctcagctctcacaggagagggcgttcagcaaagaatggctcaagaagtactgacacatttaaaggagcatcctgatgcttggacaagag

SEQ ID NO: 718008 - DNA, 100 bp, Homo sapiens
gcggccgcccggcccggccgcggatcaggggctgaaagaagtgacacttcttggtcagaatgttaatagttttcgggacaattcggaggtccagttcaac

SEQ ID NO: 718009 - DNA, 100 bp, Homo sapiens
gtgagcgacccggacaccgacgcgctcatctgctggagcccggccaaacttccagatctgcaaccatttccttctccagatggtgatacagtgacccaac

SEQ ID NO: 718010 - DNA, 83 bp, Homo sapiens
tgggtgacatctgcctgagagatctccaagaattacaggcaacttcagttcatttatgcagaaggaaatatttgagcagccag

SEQ ID NO: 718011 - DNA, 100 bp, Homo sapiens
gccggggccgtgcgcgcgggcttcggggagcgccgggatgtggacggccctgggaggagcggggacactgaggacctctctccaaattggcctctcaact

SEQ ID NO: 718012 - DNA, 96 bp, Homo sapiens
cttacacagagtgtcggaggtgattccagtgcagaccgactcttcccacctcagaaatggaagcaactgtcgagattgcagcggaatatgattctc

SEQ ID NO: 718013 - DNA, 100 bp, Homo sapiens
gtgaagctggcggagcaggaggatgggcggacttgcaattgtgaccaaatatattacaaagggctggaaagaagttcatgaattgtataaagaaaaagca

SEQ ID NO: 718014 - DNA, 75 bp, Homo sapiens
ttctgggcctgcccgagctgctgggaaagacacatgtggcagttccagaaacagcattattacaaacagttgcca

SEQ ID NO: 718015 - DNA, 75 bp, Homo sapiens
aagggctggtgggcgatgggcccgtggacatgcgcacctcacacaggctctgtgtgctccgggatggagcaggtg

SEQ ID NO: 718016 - DNA, 75 bp, Homo sapiens
gtgatcacgctccaggagaagctgtcagttttagaaagagcgttttcgctacgtaaagcacattcgataaaggat

SEQ ID NO: 718017 - DNA, 83 bp, Homo sapiens
ctataagtacaaccctcctgaccatgaggtggtggccatggcccgcaagctccaggagcagatggaggacatgcggaagaagg

SEQ ID NO: 718018 - DNA, 75 bp, Homo sapiens
gcgccgaggaggctttcctgctggtggcaaccgcctacgagacactcaaggtggtctcatggattataaccattt

SEQ ID NO: 718019 - DNA, 75 bp, Homo sapiens
agtgaggcagaatatgtatcggggatatagaccacgattccgcagggtgccctgcagccacggagacgaatgtgg

SEQ ID NO: 718020 - DNA, 82 bp, Homo sapiens
gacagagatttattcgtaatgcgactcaaagctgcacggcagtctgtttatgaggatgagaacaagttgagcagtgccaacg

SEQ ID NO: 718021 - DNA, 100 bp, Homo sapiens
acaaggtggccgacaacctggccatccagcttgctaattgtgggagagagactctttgaaagtaaagaaggtcatcagcatggagaaattttgacccagg

SEQ ID NO: 718022 - DNA, 97 bp, Homo sapiens
cttggttggctcgaatgtgtacataactcccgcaggatctcagggcctgccgccccattatgatgatgtcgaggtggacatgcaaaaggaagtcata

SEQ ID NO: 718023 - DNA, 83 bp, Homo sapiens
atcaacaaaggcaaaggattcggatttattaagcttgtatagtcgtctccccctccaccacggcaagtcctgcagagggaacc

SEQ ID NO: 718024 - DNA, 82 bp, Homo sapiens
gccaagctcctggccctggccctgatcatcctgctgggcttcgtccagatcgggaaggcagcccctgtcaaagggaacagga

SEQ ID NO: 718025 - DNA, 100 bp, Homo sapiens
cttcacccaggccttctgcgctctgcaggccgcattgacaggaagattgagttccccctgcctgatgaaaagacgaagaagcgcatctttcagattcaca

SEQ ID NO: 718026 - DNA, 80 bp, Homo sapiens
caggaatcttctggtgtactctttttatgaaaaggcatcagaacacaccatgatggctgtgacctaagaccctcaggaag

SEQ ID NO: 718027 - DNA, 75 bp, Homo sapiens
tgaaatagaagctaggatcgccgcaaccacaggaacagcatatgccatatatgagctggctgtggcttcatttcc

SEQ ID NO: 718028 - DNA, 90 bp, Homo sapiens
attgtaccccacgagctgccacacggcctgcactctgcgctttgagctactgggctgtgagctgaacggcttcttctcatatcggtaatt

SEQ ID NO: 718029 - DNA, 75 bp, Homo sapiens
acgccttcaacaccaccttcatctccaccatcggctcttgtcaggatggtgaagctgttcatcggaaacctgccc

SEQ ID NO: 718030 - DNA, 97 bp, Homo sapiens
cgtttccttcaagagttttcatggattctaatggaatcaggcagttttgtgtccatgtgaacaactcagtccggagtaacactggccagaagactca

SEQ ID NO: 718031 - DNA, 82 bp, Homo sapiens
gcatgggcctgttcctggcccgcagccgccacctacccagtgaccatgataggtctctaattaacagaagatggcaaagccc

SEQ ID NO: 718032 - DNA, 80 bp, Homo sapiens
ccaaggcaattgatcccaagttgtcgacgaccgacagggtggtgaaagggacagtatgatttggtgaaatgcctggctcc

SEQ ID NO: 718033 - DNA, 75 bp, Homo sapiens
tctcaaaggatgtgcacttgccacacaattatcatattggaggtggaatttaattctcctccccttgaatatggg

SEQ ID NO: 718034 - DNA, 90 bp, Homo sapiens
gaagcagttcggttatacctggatggcgtgatcaacatgagcatccccattgtactgcccgtctctgcagaggataagacacggctggaa

SEQ ID NO: 718035 - DNA, 83 bp, Homo sapiens
cgggctgcggcgtgtgcgcgcccgccagctgctccggagatacggttcgagaacttgtcttggacaattgcaaatcaaatgat

SEQ ID NO: 718036 - DNA, 118 bp, Homo sapiens
cacaaacccactggacaccttcgtcccctttgatccctgtgtgctgaagaggtttgggccccatggtatccctgtgacagtatttcccaaaagggaatataaggataaaccagaagcc

SEQ ID NO: 718037 - DNA, 100 bp, Homo sapiens
ctttatagtcctgattcaagtgttggcggatggaagggaggagactcctgaccctcagaatgacactgtgcatcttagccaacatagcggatgggacaac

SEQ ID NO: 718038 - DNA, 50 bp, Homo sapiens
ttcatgcacaaatttttatgtggaggtgctctgtggatgtgtatagtttt

SEQ ID NO: 718039 - DNA, 83 bp, Homo sapiens
gagctggggcaccgagctctggtgccagcgccacagcccttcaatcattttggttgctatccagcttctccacatcaagtcca

SEQ ID NO: 718040 - DNA, 82 bp, Homo sapiens
gccagacacacaggacaagtagggaccaaactgtatatgagcccagagcagttgttgacctcctgtactggagagacattaa

SEQ ID NO: 718041 - DNA, 101 bp, Homo sapiens
ctctgcgctcctgcatctgcctccccatttctccaccttcatctatggaagataaatcagatgttggttatggacgaagtatttcttcttcatcttcctta

SEQ ID NO: 718042 - DNA, 100 bp, Homo sapiens
actgaagactctctgaagcccgagtttgataagcagtaccttctccaggcaaattccgttcccctgcagcaccatctcctttggctcttcggcaaccagt

SEQ ID NO: 718043 - DNA, 96 bp, Homo sapiens
ctcctgcctgcgctggtcctcagcaccagcataaagatgcctatcaagtgatattggatggtgtgaaaggtggtactaaggaaaagcgattagcag

SEQ ID NO: 718044 - DNA, 98 bp, Homo sapiens
ctcaccacagatcccagccagtctctactcagcctggagcaaggtttggaaaggccccttggattcctggctggggacaatgatgacctggaccctgg

SEQ ID NO: 718045 - DNA, 90 bp, Homo sapiens
ccagcagtggcagcttcgaagccagcccaggtctcctactccctccctccagtactgcgagaactgtgacacccacttccaagattccaa

SEQ ID NO: 718046 - DNA, 117 bp, Homo sapiens
gttctcagaagacgttctgtatttcagcttcctgctatgtgccctctttgttcctaaaggaatgaatctgaagtctgctgcagtaaaacacagaaggctttaaaatgttttcttgca

SEQ ID NO: 718047 - DNA, 82 bp, Homo sapiens
caggcctacgaggaggtgcgcgagaagtacaaaggcgagcccacaccttaaccgtgctcttcatcctcacctgtacgcttgg

SEQ ID NO: 718048 - DNA, 98 bp, Homo sapiens
aggctaatgctgagctctgtcggtatctttccaaggtcctagaactcaggaagagtgatgtggttttggataaggtaacacaagtggcaagacagccg

SEQ ID NO: 718049 - DNA, 88 bp, Homo sapiens
acccactggaagcctagaaatggtgcaagttttgaaactgcttttgaatttgtctgaaaatccagccatgacagaaggacttctccgt

SEQ ID NO: 718050 - DNA, 100 bp, Homo sapiens
caggatgggggacaggaggctgcggggcctcagatctgtctcgtaactgtgtaatcaaggaactagcaccacaacaggaaggtaacccaggagaagtatt

SEQ ID NO: 718051 - DNA, 75 bp, Homo sapiens
atcgacgtcgtgatccagaagtccagagctgaggactgcctgtttgcagaaactaatctggattcactccctctg

SEQ ID NO: 718052 - DNA, 82 bp, Homo sapiens
gtatctttcagagtgtaaagtaatcttggaatataaaggatttgtaggtgaaaatgcccagccaatcctagaaaataatatt

SEQ ID NO: 718053 - DNA, 102 bp, Homo sapiens
caaacagtaccaaacagaattctgtgttgctgttggagcagatttcttctctgtgtagcaagtctattgcgtctgcagacatggatttcaaccagctggagg

SEQ ID NO: 718054 - DNA, 83 bp, Homo sapiens
cgctgaggaggaggagcgagaggtggtgcgggtccgagtcaagggactttgaacatgtcggggatcgccctcagcagactcgc

SEQ ID NO: 718055 - DNA, 99 bp, Homo sapiens
atccaagtcgccggacccggtgtggagagcggtgctgaggctacgcgggctggagactcaggttatcttcaggcagagtgagaagctgcagcaatgtct

SEQ ID NO: 718056 - DNA, 100 bp, Homo sapiens
gtcacggcgtacgccctcatggggaaaatctccccggtgactttcagcatcattcacggttatgtgttacaatgtgttatgtgataaatacgctacccgg

SEQ ID NO: 718057 - DNA, 100 bp, Homo sapiens
ccaaccccaaggaggacgagggccggttgccgggcgcgggcgagaaagatctctcgtggaagaggaagaccaacacatgaaattgtcccttggaggcagc

SEQ ID NO: 718058 - DNA, 73 bp, Homo sapiens
cgtgaagaccggctgtgagacagtggatgccgtacaagaaagagtggacaacgcgtactggctgtggactttc

SEQ ID NO: 718059 - DNA, 75 bp, Homo sapiens
gagatggtggaggaggcggtggaagataacgaaggaggcccaacttcattcaataaggagcctgacggatttatc

SEQ ID NO: 718060 - DNA, 74 bp, Homo sapiens
cacagcatctttgtctagccccagtgcagaaacctgctcctccaaagccagagcccaagcctaaaaaggcccct

SEQ ID NO: 718061 - DNA, 100 bp, Homo sapiens
ctggcctgcagcttctgtgtgctcctgagaggtatcagcagatgttgcacacaaacttggtataccttgctacaatagcagattctaatcaaaatatgca

SEQ ID NO: 718062 - DNA, 82 bp, Homo sapiens
cgacagagccaaaatcagagctggaacctgaggagagaggtgctacctttttacccacacttaagtgacgcaaaatgccctt

SEQ ID NO: 718063 - DNA, 101 bp, Homo sapiens
gtctcaggcctttagtgatgatggaacacctgattgagaatgaagtgtcaatactgcgccgagtgaaacatcccaatatcattatgctggtcgaggagatg

SEQ ID NO: 718064 - DNA, 83 bp, Homo sapiens
gttccccctccctcagcttccgccccaaaagacctgcctagagctggaacgttacctccagagcgagccctgctatgtttcag

SEQ ID NO: 718065 - DNA, 101 bp, Homo sapiens
cagcaacagttgtcttcagtagaaagggctcattggtgggcagtattacttatgggaattgctctgatcatgctaatggctggatttattaagatatgcag

SEQ ID NO: 718066 - DNA, 83 bp, Homo sapiens
ccccacccgggctcggcgggggagcgactcatggagctgccgtaaggtactaggttttgacaagcttgcatcatgcgtgagta

SEQ ID NO: 718067 - DNA, 100 bp, Homo sapiens
ggcaggacttcgaccagcgcgcgcgcgaggagttccgccccaccatctacagcaacgtgatcaaaggaaactactttgcttcgcactttttcatgggagg

SEQ ID NO: 718068 - DNA, 51 bp, Homo sapiens
ctcttggaataacatgtattgaactagtgcaccaattccagctggacatca

SEQ ID NO: 718069 - DNA, 100 bp, Homo sapiens
cgacgttgaccgcacactggatgaatggaagcgtgaggcttcgagctctgaggaagagcctccatccccagatgataaagagaaccaggccccaaaacgg

SEQ ID NO: 718070 - DNA, 75 bp, Homo sapiens
gctgtggaggcagcggcggacgccgagctaagcaagctccaagagtcaggatcgcaagtcagaaagcaaagaaaa

SEQ ID NO: 718071 - DNA, 75 bp, Homo sapiens
ggcagcggcggcggctggactaaacaggtcacctgcagacaaagaagtatgctgatgtgatcatccctagaggtg

SEQ ID NO: 718072 - DNA, 98 bp, Homo sapiens
atttatacaaggagaagcactggatccaaagcatgtctgcaacccagccattttcagttttctggatatgccgcagaaggatccgtgccagaagcaag

SEQ ID NO: 718073 - DNA, 90 bp, Homo sapiens
gttgacagcgtccatgattgcggtcgcccggtgcttcgcccagccaaactttaaggtggtatgcagatcttcgtgaagaccctgaccggc

SEQ ID NO: 718074 - DNA, 100 bp, Homo sapiens
attcatttgaagtgctttgctgctagtggtttggagtatgccttggtagactttggtttggcccaaggaacccatgatacgaaaatagagcttcttaaat

SEQ ID NO: 718075 - DNA, 98 bp, Homo sapiens
cgcggcttcctcaacttcacgctggcgcgagccccgtcctccttcgccgccgcgcacaaccgcacgtgcagccgtcctgggccgccggacacccccgc

SEQ ID NO: 718076 - DNA, 83 bp, Homo sapiens
cgccgccgacgacctgtctcgccgagcgcacgccttgccgccgccccgcagcgagccatccagcaggctgtgggaagctccct

SEQ ID NO: 718077 - DNA, 97 bp, Homo sapiens
cttggatcccattcacctgaggcacccgaagaagagaccatccatatttccaggtcatcagctcaatgagctccctttctgagtactgcctgccttc

SEQ ID NO: 718078 - DNA, 71 bp, Homo sapiens
atgggctgagcaaggggattgtccagggaggtcgcacggggcaggcggttgcagttcgagccaaggccttt

SEQ ID NO: 718079 - DNA, 74 bp, Homo sapiens
ttcatcgtttataaaatccgggctgctggtactccaaagattcaggtttactcacgtcatccagcagagaatgg

SEQ ID NO: 718080 - DNA, 98 bp, Homo sapiens
cagtggcttactcccggtgccaggttcttggagctgtgaggctcatccaaaatacttgagttgtattgcaatcagctgttttttcctagctgccaaga

SEQ ID NO: 718081 - DNA, 81 bp, Homo sapiens
aatggattagtgataactcaagtttcatcaccttgacaccacagccaaagccctatgggaagctttactgaacactaagca

SEQ ID NO: 718082 - DNA, 74 bp, Homo sapiens
ctccgctgcagtcgctgcgtctccaagacttcctagcatgggctgttgtgctggagagaacgagagctacgaag

SEQ ID NO: 718083 - DNA, 98 bp, Homo sapiens
attgtcatttcaaatgcatatgtggatcttgcaccaacatctggtacttcagctaagacaccctctgaggaaacagagcaaatgcagcgttacaatca

SEQ ID NO: 718084 - DNA, 75 bp, Homo sapiens
tcttccagagcgtgaagatcaagatcggcaagtgaaccggagcaaacgacttccgatccagtctgcgctgttgcg

SEQ ID NO: 718085 - DNA, 100 bp, Homo sapiens
ctcggcccagcaggtgatccaggtggacagggacacaatcctagtcagctttgaacgagaaggcgcagtgtaagaagagcagctgtcagggcgggctggc

SEQ ID NO: 718086 - DNA, 90 bp, Homo sapiens
gtggaacttctacccgacacttacatgccatggccttctacgttgtgaaaatgagcaagcaccagaagcaccaggcttttgaagcagagc

SEQ ID NO: 718087 - DNA, 100 bp, Homo sapiens
cagcctgagatctatgtaactatccaggcctactcctccatcattggactgcagtcccaccaggggagacagcaggaaggcagcaagtccccacctcccc

SEQ ID NO: 718088 - DNA, 82 bp, Homo sapiens
ctgatccagctggtggtcctggtctacgtcatcggttacagaatgtctgaaggggacagtgtgggagaatccgtccatggga

SEQ ID NO: 718089 - DNA, 90 bp, Homo sapiens
ctggaagtctcgggaaatgaagacgagacagcgggcggtggccctgtatttcatcgataagatggagtttcactcttgtctcccaggctg

SEQ ID NO: 718090 - DNA, 80 bp, Homo sapiens
acaaagacccagtgaacaaatccgggggcaaggccaaaaagaaggctgggacgcagagaccggcagcgattcggaggacg

SEQ ID NO: 718091 - DNA, 83 bp, Homo sapiens
gggaaacctgggggctccctggacaactccgagcaggaaggtgctcgggtcttcggggcactgggtcccatcggtccctcctc

SEQ ID NO: 718092 - DNA, 82 bp, Homo sapiens
cgggagctcatcttcgtggggcgtgaggagtgtgagctcatgctacaggtcgcaatggaagaagagatcgccgcgctggtca

SEQ ID NO: 718093 - DNA, 98 bp, Homo sapiens
tgatgcttactgcaacctagccaatgctctcaaagagaagggcagtacatggatgggtgcaaaaaagagctgccccgcttgcaagagccggaggagga

SEQ ID NO: 718094 - DNA, 75 bp, Homo sapiens
gagaacctgcttatatccaggaccaaggagagccaagccgccatggcctaccacagcttcctggtggagcccatc

SEQ ID NO: 718095 - DNA, 96 bp, Homo sapiens
cattgacctgaaagaccgaccattcttccctgggctggtgaagtacatgaactcagggccggttgtggccatgaaaactttagaaactgttccttt

SEQ ID NO: 718096 - DNA, 75 bp, Homo sapiens
cctgactacagctggagcgcccagaggcgagccctggtggaggaagaggtggcagatatctacctagcatctcag

SEQ ID NO: 718097 - DNA, 75 bp, Homo sapiens
gaaaaacaagagaagggaagtcaaaaggctacttgctgtcagctaaagccaggttttataggatcacattgacaa

SEQ ID NO: 718098 - DNA, 98 bp, Homo sapiens
acatggtggagacagcggctgaaatggaagcatatgttctagaagacattcttgagggccaaggagatctgttgaagaatgccaagaatgaagctata

SEQ ID NO: 718099 - DNA, 85 bp, Homo sapiens
tgacaaggcactgctttttcatgacggtgaaatgacaatggatgctctgttggctcgattgaaacttctgaatccagatgacctt

SEQ ID NO: 718100 - DNA, 74 bp, Homo sapiens
ttagtagtacaatcaataatcaggcaattcaaaatcccaatgacattcagcttcaagaaaaagcttggaatgcg

SEQ ID NO: 718101 - DNA, 100 bp, Homo sapiens
atttccacagaaggactgggatgatacaccttttccacagggaattgagttggttcatcctaagttccactataaacaggctcatgactcgggcacagac

SEQ ID NO: 718102 - DNA, 136 bp, Homo sapiens
ccccggccgcccggctgctgctggccgggctgctgtgcggcggcggggtctgggccgcgcgaggatacctttgtggcagtattttcatttctgtctggaaggttagtgcacatttctgaacaggctgctttgatcc

SEQ ID NO: 718103 - DNA, 75 bp, Homo sapiens
cacaaatggttcccagtttttcatctgcactgccaagactgagtggaatgatgagaagacagcagctgattacaa

SEQ ID NO: 718104 - DNA, 95 bp, Homo sapiens
acgaaattgaaattacctccgagggaaacaagaaaacatcaaagaggtctagcaaagatcagttggccttatttcctcagtggaaatctactcac

SEQ ID NO: 718105 - DNA, 75 bp, Homo sapiens
gtgttactcaccatggagaggacagaagagtctgcaattcataatggagctactgtactggctattggaaggagg

SEQ ID NO: 718106 - DNA, 100 bp, Homo sapiens
ctcgctcccttgatgatcttgaggtgactctgacatcattagaagcatgccagaacagactggtgaaaagtaaaccttttcacctacaaaatttcacctg

SEQ ID NO: 718107 - DNA, 105 bp, Homo sapiens
cgcggtgctgctggtcacggccaacgtgggctcgctcttcgacgacgtgctggaggtggtgagagccaactatgacacgctcacgctgaagctgcaggatggcct

SEQ ID NO: 718108 - DNA, 96 bp, Homo sapiens
tgaataccgcttcctggagttcacgactctgagtgctgttgtatatgaacacagatcaagattagagaaatccttgcaaaaagaaagacttgaaca

SEQ ID NO: 718109 - DNA, 100 bp, Homo sapiens
tttggttcaaaaagagttcttgcatgggacaaaaagagatgatggccaagcaagattcttacgctgtatgacagtattaatgttattgacgtaaataaag

SEQ ID NO: 718110 - DNA, 82 bp, Homo sapiens
tccaaaccacaagttctcaaaactctctgaaaaatggctccctccgagttaagtacctggagtagaacagaaaaattattat

SEQ ID NO: 718111 - DNA, 100 bp, Homo sapiens
aacccagatcgctactaccccgcagttcccggacatgatcctctccgcctctcgaggacctgatcttcaggtttgcatatccaaaaagcctacatgttgc

SEQ ID NO: 718112 - DNA, 100 bp, Homo sapiens
gccccagttccccggcagcgggacccggcgaagacgcgaccgcggcgcgagtcaccatgatagccttagagactattttagcaaatttggagaaattaga

SEQ ID NO: 718113 - DNA, 82 bp, Homo sapiens
gggccttccacaccccctccgtgggtgtgtggttgaagtaaagccatatgtgctggatgatcagatgtgtgatgagtgccag

SEQ ID NO: 718114 - DNA, 74 bp, Homo sapiens
atgcgtcgtcggcctctgggcagcagacagcccacctgaggatattgaccataaggactcatatctcattacaa

SEQ ID NO: 718115 - DNA, 75 bp, Homo sapiens
gccccgccccggcctcggcccgccgggcccgcagtgtggtcgcaatggaagaagagatcgccgcgctggtcattg

SEQ ID NO: 718116 - DNA, 100 bp, Homo sapiens
cctggttgatgatcgttgtgttgtacagccagaaaccggggaccttaacaatccacctaagaaattcagaggaaattgccaccgccacttcaactttcag

SEQ ID NO: 718117 - DNA, 101 bp, Homo sapiens
ggcggcgggaacgattgggctgagcagaggacgacatgttgcttttcgtggagattacagtagaatgcacattccttgactatataatgggaggatgtcag

SEQ ID NO: 718118 - DNA, 83 bp, Homo sapiens
cactggggcagccagcacaatcgggcggaggtggcgctgccccttcagaacatccagtcatggataaaaatgagctggttcag

SEQ ID NO: 718119 - DNA, 95 bp, Homo sapiens
gcttccgacgtgcagcctggcagtgcagtgatgtctttggtggacttgggaaagaggttgctagaagcagcaagaaaaggccaagatgatgaagt

SEQ ID NO: 718120 - DNA, 100 bp, Homo sapiens
ctcgccctcctggcaggcacagcacgagagccgcacctttgccgtgtacctcaatagcactggctaccggacagatgctgaaagcaaaacttgcaacccc

SEQ ID NO: 718121 - DNA, 78 bp, Homo sapiens
aaagacccaggagaagccgcccaaagaactggactttctgcagggcgactgcaccaaagcgaaacagaagctgaactg

SEQ ID NO: 718122 - DNA, 51 bp, Homo sapiens
cagcaccttccttggcactctgccgttggacataccagatggtcgaagagc

SEQ ID NO: 718123 - DNA, 83 bp, Homo sapiens
gcaagcatgctcagaccttcattgctctgtgtgccaccgctccccaggtgtgtcctggtagacaactgctcccaggagctggc

SEQ ID NO: 718124 - DNA, 75 bp, Homo sapiens
ccctgaaccaagccagcaagatcaccctgcaagctttcttcctggtggcagatgacatcatggattcatccctta

SEQ ID NO: 718125 - DNA, 90 bp, Homo sapiens
cctgattgaccggagacgcaccccaggcatctctgggaagagccagatcctgtttgctctcgtcttcaccaccaggtacctggacctgtt

SEQ ID NO: 718126 - DNA, 50 bp, Homo sapiens
gcgaggatcaaaatcttcgaaggagggttatccggtgttggctcctgctg

SEQ ID NO: 718127 - DNA, 75 bp, Homo sapiens
catgtactcgggagccggccccggctttatcctgtggataaacgcagagtgaacgagtttggggagtcctacgag

SEQ ID NO: 718128 - DNA, 122 bp, Homo sapiens
ttcaaagatcagaaacatgatttgttcatttctgagtcacaaacagcaggatacctcacaggtctgcatgaatttgattccttgaaggatcctgaagtaaatgaatttcgaagaaaaatgcg

SEQ ID NO: 718129 - DNA, 50 bp, Homo sapiens
gtatcttcaagacgctaagctcaaaggcaaacgtggtgtgtgtggtgtat

SEQ ID NO: 718130 - DNA, 80 bp, Homo sapiens
ggctggacaatgtgatgaagaaacttgcaaaagtatctcatatgaccagtgcaatgtctcaggctgtgcagacaaacgga

SEQ ID NO: 718131 - DNA, 100 bp, Homo sapiens
ctctgcggctggtccaggccttccagtacacagacgagcatggggaaggcaattaagttggaatatgcaaggttggttaagttggcccaagaagacaccc

SEQ ID NO: 718132 - DNA, 51 bp, Homo sapiens
ctccacgacatcccggaagccgaaaaatggctggagtgcagtggcgtgatc

SEQ ID NO: 718133 - DNA, 75 bp, Homo sapiens
ggcggcggcgggtcaggagcagccgcagcgacggcggcgacagcaggtactggtggagaatggaacaaaagctgg

SEQ ID NO: 718134 - DNA, 101 bp, Homo sapiens
gtccgaggcagatggaccacccgctgagcgtcagaaatgggaatgattacggacctgaagccaaagaacaagatgcgctagtggacagattgctgaccagg

SEQ ID NO: 718135 - DNA, 100 bp, Homo sapiens
aaaactgtgggctcctggtgtctctgggaatgctgaaatacttttaaagctgataaacctagggaaactgcctcctgatgccaagccccctgtcaacctg

SEQ ID NO: 718136 - DNA, 82 bp, Homo sapiens
acaggacctgagaatctgagaaactgcagcggagctggagtttgttcagatcatcatcatcgtggtggtgatgatggtgatg

SEQ ID NO: 718137 - DNA, 75 bp, Homo sapiens
ggaactcagagtcaaagaagaaaccgtgctcagaaactagccagattgaagaccatggcaaaagttataaccacc

SEQ ID NO: 718138 - DNA, 100 bp, Homo sapiens
gcggcgccggccagaaatccgaccggaccgggctcgggggagcgtgagttgcaggttcttctgtgtggcagttcagaatgatggatcaagctagatcagc

SEQ ID NO: 718139 - DNA, 98 bp, Homo sapiens
tgcacttctatgagcttgtggaagacacaaaagatggcatctggctggttcaggagtccaatgtgctgattgctgctaacagtcagggtacaattaag

SEQ ID NO: 718140 - DNA, 98 bp, Homo sapiens
cagcccctgaaccacagagtggtggaatccaacttcccgaatcaggagatctggttggagttggagggtgagagaaaatgaattctaatttacctgca

SEQ ID NO: 718141 - DNA, 100 bp, Homo sapiens
cggagccgcgcgtcgctgtctctatggccccggatccgagcgcaaagaacgacaccgtaactatccgcactagaaagttcatgaccaaccgactacttca

SEQ ID NO: 718142 - DNA, 100 bp, Homo sapiens
gttttcttgtgcattgactgttccggggtgcaccgctccctgggcgtccatctgagcttcatcagaccattactgggacttccacccccaccacgtgcac

SEQ ID NO: 718143 - DNA, 100 bp, Homo sapiens
ccgccgacccgcgccctgctccctctcagcacctgggcggacgagacacgctgtgaacaagacaggccttccccaaccacagcgccccctgcgccaccca

SEQ ID NO: 718144 - DNA, 98 bp, Homo sapiens
ttgaaggcaatgaaagcattacagcataatcttgagctcaatgatgacaccattctgaatgacataaagttagcagattgtgaacagttccagatgcc

SEQ ID NO: 718145 - DNA, 75 bp, Homo sapiens
aggcctactacagctctcctcaggatttgccctatccagatcctgctatagatccttgccagctcctaaaaccta

SEQ ID NO: 718146 - DNA, 101 bp, Homo sapiens
ttgacaaactgctttcccatagagttcctggtccagaactttacacagaaaaggtgctcaaaggatatttgtttaatgaatgtggtatgctgacatttaaa

SEQ ID NO: 718147 - DNA, 82 bp, Homo sapiens
tgccatattgtgtcttccccggccggtccctcgcctcccggccgagctgacgggtttccaggcctgaggtgcccgccctggc

SEQ ID NO: 718148 - DNA, 100 bp, Homo sapiens
tgtatgctggagtcaagattgcggggactaatgccgaggtcatgcctgcccagagcctgccaggcagcatcactaaagcaggagacttccttgaagccaa

SEQ ID NO: 718149 - DNA, 100 bp, Homo sapiens
gtggtatccaccccatttggcgtggcggccatctggatcctggactccgtcgggctccgtgcggcggtcctgaacgaggctgtgggggccctgatgtacc

SEQ ID NO: 718150 - DNA, 75 bp, Homo sapiens
atttccgaagacctgatgtctctgtccaaggagatgaagtaacactggttgctccttgagggcaggacagttctt

SEQ ID NO: 718151 - DNA, 90 bp, Homo sapiens
cctatgtattccctggggatggcgcatcacacaccaaaggtgatggcaagtgtgtgatttgtgactcctatgtgcgtccctgcactctgg

SEQ ID NO: 718152 - DNA, 100 bp, Homo sapiens
tagcgaggacttctaccgctgcggctactgcaagaacgagtcgggcagccgctccaatgcaaaagctgatgaagcattgaaagccaaagaaagaaatgag

SEQ ID NO: 718153 - DNA, 100 bp, Homo sapiens
ggggtcagtgatggagctgcttcaggaagagagagaaaatccttcaaaacggagtagaattgaacgtgatatagataacaatttgatcacgtcaacacca

SEQ ID NO: 718154 - DNA, 90 bp, Homo sapiens
acaacaaaatcgagcaagctatgcatcggcgtgtcataagatccatcacagctgcaaaatacagagagaaacagcaagtgaaagatgtgc

SEQ ID NO: 718155 - DNA, 96 bp, Homo sapiens
accgaagtgtactagccaaggagttgaagtttgtgactttggttgacaggactgaggtgattcgcacctgcataaacccagtgtactcaaaactgt

SEQ ID NO: 718156 - DNA, 83 bp, Homo sapiens
caaggtacagtcgccgcgtgcggagcttgttactggttacttgacaatgcagatcttcgtgaagactctgactggtaagacca

SEQ ID NO: 718157 - DNA, 87 bp, Homo sapiens
ttaagtgaagcaaagcgtaaacaagcagagattgaatgcaagcgtgctcaggcagttcttcaagctgtgacagctgtccagacagca

SEQ ID NO: 718158 - DNA, 100 bp, Homo sapiens
gcagagtacctgctctcgagatggcaggagtcgggagctgcggcaactgatggagaagaatgcaagttctagccggtttttcctacaaggaatccagttg

SEQ ID NO: 718159 - DNA, 50 bp, Homo sapiens
cccctccagcaaaggatcaagtggaaattttctccttggaccaagatgac

SEQ ID NO: 718160 - DNA, 90 bp, Homo sapiens
atttgaagtggtgtctacacttataaaagttgatctgttccagctgcaggtgaacaccctacgacgttataaacgacactacaagttgca

SEQ ID NO: 718161 - DNA, 90 bp, Homo sapiens
cggccatcgaggccctgctgcacgacctcagctcccagaggatcaccagcgtggatgagcaaggtgtggaacgacctgaggcccaagctc

SEQ ID NO: 718162 - DNA, 58 bp, Homo sapiens
gagaggttcaaccgcgccctgagtcgagagaaagaacttatgggtttcagcaaatcgg

SEQ ID NO: 718163 - DNA, 98 bp, Homo sapiens
tctggaatgtcctgatgagctcattgagagaaccatgatggtcaattgccatgcacacttctgggcatggctttgggaagaagacaagaatttgagat

SEQ ID NO: 718164 - DNA, 83 bp, Homo sapiens
gccaacggtgtggagatcaaccgtgagcagtggatccagatgtgaagttcatttccaatccgccctccatggtggcagcgggg

SEQ ID NO: 718165 - DNA, 75 bp, Homo sapiens
tagacccacagctgttaaagcaacagtcccaaagacacctgtcgagatccccaggaattgtgtctaccaacctac

SEQ ID NO: 718166 - DNA, 105 bp, Homo sapiens
ggggatcgtgagctccggcccgggcgagcgggtgcgtctgccgcagagtcggcacctgaaggacatggaggtcccagaacagttttcttctgggctccaattatg

SEQ ID NO: 718167 - DNA, 100 bp, Homo sapiens
cggtccagaacccggccctcaccgccctcaccacccctatccagacggctgcccttcaagtaccaatgttgaacgtcgacgcatttacgatatcgtgaac

SEQ ID NO: 718168 - DNA, 75 bp, Homo sapiens
ggggacttctgcattcaggttggcagggattctttgaagatgaagatggaaaggagtatatttacaaggaaccca

SEQ ID NO: 718169 - DNA, 51 bp, Homo sapiens
cccggagcgtctggtggcgttgttggggttctggctccttggcagcaatgg

SEQ ID NO: 718170 - DNA, 126 bp, Homo sapiens
agaagcctagaagaggaggaagaggaaagaaaaggagtcaggaatgcctcttagtccacaggtcctggctaccctgggaagagacaagaagtaaatgaagaaagaggaagattccaggacctagat

SEQ ID NO: 718171 - DNA, 100 bp, Homo sapiens
caaagttgaagaagtcttgaatgactggaaactgattggaaactctttgggaaagccactcgaaaaggccataaagaatgctgatgggagaaccattttc

SEQ ID NO: 718172 - DNA, 100 bp, Homo sapiens
caaaagatagggattacagaagagaggtgatgcaagcaacagccactagtgggtttgccagtggaagtgctaaaatgatgtattttctggacaagtcaag

SEQ ID NO: 718173 - DNA, 82 bp, Homo sapiens
ctgtcaggccgagttccgagagcctctgattctcctgtgccagtgtcctcagcctgcgggggctgcgtggaggtggactcgg

SEQ ID NO: 718174 - DNA, 85 bp, Homo sapiens
tgagtcagctgaaaattgtgacaaatcacttgttcctaaaagtaaagctttagaggccaccaaattggcaattgaagctggcttc

SEQ ID NO: 718175 - DNA, 82 bp, Homo sapiens
tccccagctctgcagccacatactatccgtttgttcaggaaccaccagtgacagagcttgaagtagaaaatgccatgatgag

SEQ ID NO: 718176 - DNA, 74 bp, Homo sapiens
tctgtgaggagagagcaaggcagttcttcaggggaggggagcatcatgacagagcctcagattacacaagtaaa

SEQ ID NO: 718177 - DNA, 100 bp, Homo sapiens
tgaataaagctgttttggaactgtcaggtacctcaaagcgagcccagaggaaatgcaagggtggataaacaaaatcaattgtgtggcagctgtattttct

SEQ ID NO: 718178 - DNA, 50 bp, Homo sapiens
gttcaagactgggcttccaccgagcaggaggaagttaagtcttcagagcc

SEQ ID NO: 718179 - DNA, 75 bp, Homo sapiens
aggtcaagatgaagacatggatgtcaaatactttgcacaggaagctataagtgagtccgaaattgaagttcagag

SEQ ID NO: 718180 - DNA, 73 bp, Homo sapiens
tgaagctccttacacatcccctgataaactaaagaatcaaatggctatagcatgtggatctcgagctcattta

SEQ ID NO: 718181 - DNA, 105 bp, Homo sapiens
attgacgccatgtcgggttattcgagtgaccgagaccgcggccgggaccgagggtaactaggatttctacctcaaccgcgagacctatgcaaggacggtgtggac

SEQ ID NO: 718182 - DNA, 98 bp, Homo sapiens
gattcttttggatgcacaacatgaatcaggacagagtagttccagaggcagttctcactgtgacagagctgcagctttggaacagttcaagtctcttg

SEQ ID NO: 718183 - DNA, 100 bp, Homo sapiens
gaccctatctacgtgaagctggagaagctggacatcatgatccgcctggcctctcaggccaacatcgcccagggtggttctcttcccaaagtggaagcca

SEQ ID NO: 718184 - DNA, 101 bp, Homo sapiens
gaccccgagtcccccggagtccgactcgctacgcgggtcttgcgagatatctggccgcctctgccgcagctggaggaatatgcactttctggttggaattt

SEQ ID NO: 718185 - DNA, 83 bp, Homo sapiens
cttcaatgtgtcctacaccaggcagcccccaaatcccggcccagggggatatgagactttctactcggaatatcctgagtgtt

SEQ ID NO: 718186 - DNA, 90 bp, Homo sapiens
ctgaactcttcagataatcagagtggaggaagtacagccagcagttcaattcccatgaaagtgcagcacatgcaattgtttctgttaatg

SEQ ID NO: 718187 - DNA, 96 bp, Homo sapiens
ttcaccttggacccactttatagagaattgggtctaaaattcccaggactccacagctttgcaccagataagcctggaggaatactaatgatggat

SEQ ID NO: 718188 - DNA, 129 bp, Homo sapiens
cccactgcagcctccacctcccaggctcaagcagtccttcccccctcgccctcatgaatagctgggactacaggtatctggctaatacagttgaagaagatgaagaagaaaccaagtacgaaatttttc

SEQ ID NO: 718189 - DNA, 90 bp, Homo sapiens
gagatgcctctttttgccaccaatcccttcgatcaggatgttgtgccggtggtggtgtgcacattgagccccggtatagacagttccccc

SEQ ID NO: 718190 - DNA, 100 bp, Homo sapiens
accccttttaccactgcctggttgcagaagtgccgaaagagcactggactccggaagctgaaacagaaccgcatgagggaaagaggaaagtggaatctct

SEQ ID NO: 718191 - DNA, 100 bp, Homo sapiens
ctccaagcagaaggcatgggaccacttcacaaaagcccagcggaagaacatcagcgtgtggtgcaaacaagctgagatgacttcctgaagccacagatca

SEQ ID NO: 718192 - DNA, 105 bp, Homo sapiens
gcttctgctgctggtggggctcacggcgcctgccttggcgctggccggctacatcgagacttaattcagtgcacaaatgagatgaatgtgaacatcccacagttg

SEQ ID NO: 718193 - DNA, 82 bp, Homo sapiens
tgagttcatgcaaagcgctgagaacaggaccccccgcccccgatgtaatccctgttcattactacttaatacctccaccaac

SEQ ID NO: 718194 - DNA, 78 bp, Homo sapiens
agagagatttgtatagagatgtgatgttggagaactatagcaacttggtatcactagtttcattggggatcatgtcca

SEQ ID NO: 718195 - DNA, 98 bp, Homo sapiens
gtcagtgttatatcctccaggaatactggccagaaaaagcttgtggtgaaggggggcaaaaaaaagaagcaagttctgaagttcactcttgattgcac

SEQ ID NO: 718196 - DNA, 100 bp, Homo sapiens
tcgtctccggacggggccctgacacggccaccctactgcctggaggccggggagccgacgcctgctactggtcagaagttatatgtaaggctctttcaac

SEQ ID NO: 718197 - DNA, 83 bp, Homo sapiens
tgttcacgcacgggatccagagcgccgcgcacttcgtcatgttcttcgcgccctgctgcagccgctccggcctccttgctgtt

SEQ ID NO: 718198 - DNA, 82 bp, Homo sapiens
ctcaagtttgaagtggcgctcagacaatgcagatcttcgtgaagactctgactggtaagaccatcaccctcgaggttgagcc

SEQ ID NO: 718199 - DNA, 87 bp, Homo sapiens
gagctgcagcactccagccactgctgtctccttagctgctcacatatggatactttcacagttcagttctctctttccagacgtagt

SEQ ID NO: 718200 - DNA, 120 bp, Homo sapiens
ctgcaatgtttaatcaagttttgattttaatatctacattactatgccttatcttcacctgagagacaagagagacacctccaacttcgacaaagagttcaccagacagcctgtggaact

SEQ ID NO: 718201 - DNA, 100 bp, Homo sapiens
ggcgacaagggtgttcccgaactagagtgggtatggcctcacaagtcttggtctacccaccatatgtttatcaaactcagtcaagtgccttttgtagtgt

SEQ ID NO: 718202 - DNA, 100 bp, Homo sapiens
caccccttctggcagccccttccccagccagcagactacaatgtatcaacagcaacagcaggagcagatcaatatcaccctggaccaccgctgccgtatc

SEQ ID NO: 718203 - DNA, 75 bp, Homo sapiens
ccgctgccccagggctgcggggacgaatggctgacctctcggagctcctgaaggaagggaccaaggaagcacacg

SEQ ID NO: 718204 - DNA, 73 bp, Homo sapiens
gcggatcctgctggtgggagaacagcactccgctggtccaggcggcaacatgtccatgcttttagtgatgtcc

SEQ ID NO: 718205 - DNA, 100 bp, Homo sapiens
aaggttgtgaaaccttttaactctccacagtggagtccattatttcctctggcttcctcaaattcatattcacagtgctgggcctaaaggagataacatt

SEQ ID NO: 718206 - DNA, 96 bp, Homo sapiens
ctgctgggatttttgagctggtggaagtggttggaaatggcacctatggacaagtctataaggtctcggcgcggaagatggccggcggcgtggacg

SEQ ID NO: 718207 - DNA, 95 bp, Homo sapiens
cagatgacagtgatgatgacccagtcctgatcccaggtgcaaggtatcgagcaggacctggtgatagctgtttgcagacaaggtcccaaagacag

SEQ ID NO: 718208 - DNA, 51 bp, Homo sapiens
cgggcattctccatctccttgcagaatgaaattccacaattagttggtgaa

SEQ ID NO: 718209 - DNA, 100 bp, Homo sapiens
attagcttcgcagtctggaaagctttaggagttcacagtcctctggaattgctttggcactcgttagatgaatggctagttttaatagccacagaattga

SEQ ID NO: 718210 - DNA, 75 bp, Homo sapiens
actgtggcagaatgtcgtgtgctgcagaagctgggagcagacgctgttgatgatggagcagtggtatcacctgac

SEQ ID NO: 718211 - DNA, 83 bp, Homo sapiens
ggtgtcggagagccagctcaagaaaatggtgtccaaggtttactcctggcttgggggcattaggaagcactggaggctcttcg

SEQ ID NO: 718212 - DNA, 90 bp, Homo sapiens
gcagtgcttacacaccatccagactgaagaccgagtctggtccattgctatcagcccattactcaggcgtgaattacccttcactaagtc

SEQ ID NO: 718213 - DNA, 102 bp, Homo sapiens
ggaaaatcgcttggttaaaacctgacacttttaacagactatgaaaatgatgttagacaaaaagcaaattcgagcaattttcttattcgagttcaaaatggg

SEQ ID NO: 718214 - DNA, 82 bp, Homo sapiens
cagcgatgacatccctttccgagtcaactggcccggcaccgagttctctctggcagggcaagaatcctttcgttccatcaca

SEQ ID NO: 718215 - DNA, 83 bp, Homo sapiens
cctaaaagcacctggccccgctacagcaaaccaggagtgggcattgcttgatgggcaggaagttgagtgttccttgcaagggt

SEQ ID NO: 718216 - DNA, 90 bp, Homo sapiens
tggacctccagatttccttactggatgttgagaaagagaaggaaacccacagttacctcagcaaagaggagatcaaagagaaagttcata

SEQ ID NO: 718217 - DNA, 100 bp, Homo sapiens
cggaagatggcggccggcgaaaggagctggtgcctgtgcaagttgttgagagagaagaagaaggaggttcctgctgtgccagaaacccttaagaaaaagc

SEQ ID NO: 718218 - DNA, 100 bp, Homo sapiens
ctctgcctaccatccataaaatactcattcccctctcaggacattggctccctggattatcaagagtttgtagttgacattgaatccaggctgaggatgg

SEQ ID NO: 718219 - DNA, 99 bp, Homo sapiens
actttctccctcgagggtcgggcattgtaacaagacgacctcttgtgctgcagcttgttacttctaaagcagatctgcttggctttgaggaagagtggc

SEQ ID NO: 718220 - DNA, 100 bp, Homo sapiens
ctacagaaacaaaatgtcaacaaattgatggtgaatgatttgggaggggacttcaaaggagttggtaaaggctccttagctgctgataaggttgttgaag

SEQ ID NO: 718221 - DNA, 122 bp, Homo sapiens
aagtggaaaactgtaaaggcaaagaggggagtgcactgagccatgtacgcaaaataggacaaatatggccctgaaggctccatgagcagacgagaaggctggacttcgcaactgggtcacct

SEQ ID NO: 718222 - DNA, 75 bp, Homo sapiens
ctgtgcctctctcgcccacattttccccaagcactctcaggaacctggcaacagcatcaggcggggcaggcccca

SEQ ID NO: 718223 - DNA, 100 bp, Homo sapiens
atgaagactggaaagcgacggtggccataaaatgcagtaaaaacaaatccagttcccaagaagctgtacaaatgctttcttctgttcgactcaatttacg

SEQ ID NO: 718224 - DNA, 100 bp, Homo sapiens
ggcaactgcgatgtctgtggactgtcttgggcagcatgcagtgctttctgggcttaccagaactgggtgaagaagaacggggctgagcactcgctcccca

SEQ ID NO: 718225 - DNA, 90 bp, Homo sapiens
agagaaaaagcagaaagtagatgaagatgagattcagaagatgcacccgtgctttgaagaagaggagcacttcaaggtgctggtgaagat

SEQ ID NO: 718226 - DNA, 75 bp, Homo sapiens
catcatagccttcacctctgcagggactgctgagatgtcctctattcttgaagagcgtattcttggagctgatac

SEQ ID NO: 718227 - DNA, 100 bp, Homo sapiens
ccctcactggcccgggccggcgcgggagggctgtgtgatggcctcggagcgcccggagccggagctacagcctccgcttggcgtcccgatgctctccacc

SEQ ID NO: 718228 - DNA, 80 bp, Homo sapiens
ctcctaggcgacgagacccagtggctagtttgggatatgagattgaaaatgacgactcggaattttcctgagagagaagt

SEQ ID NO: 718229 - DNA, 100 bp, Homo sapiens
ggccgctcgcggagctgggtgggcgggggccatggcaagacttcccgcaacatccactccttggaccacctcaactgagatctgtatctgtggacctgaa

SEQ ID NO: 718230 - DNA, 101 bp, Homo sapiens
ggtcaagagacctccaggaagagcggctctcggctgtttgcatcgccgatagaggtgggagagataaacgtggaggtcccattttaacgtttccggcccgc

SEQ ID NO: 718231 - DNA, 96 bp, Homo sapiens
ccatggacgacgggtttgtgagcctggactcgccctcctatgtcctgtacaggatggatagaatgacagaagatgctcttcgcttgaatctgttga

SEQ ID NO: 718232 - DNA, 84 bp, Homo sapiens
tgctcaaatctcctgctgtgaaccagcagaatttttgaacaggatgggagcaaagtgtttacggcatcgtgtgataaaactgcc

SEQ ID NO: 718233 - DNA, 75 bp, Homo sapiens
catcacaaaagctggacaagcgaagatggttgaaaaagaaggttatctgcaaaaagctaaaattgcagatggagg

SEQ ID NO: 718234 - DNA, 96 bp, Homo sapiens
gaacaacagcacactgaaggaggctcagttcaaagacctgttcttaaaaaaagggttcccagcaccatgagggcctggatcttctttctcctttgc

SEQ ID NO: 718235 - DNA, 99 bp, Homo sapiens
gaagaggaagaggatgatgaggatgaagaagagatcgaggttgaggaggaactctgcaagcagggcggcgactggcggcgcgatggacctgaccgggct

SEQ ID NO: 718236 - DNA, 80 bp, Homo sapiens
cttgtgggagcaaaaccaacgcctggctcggagcagcagcctctgaggttggtctccgccagctggacatgtccttgctc

SEQ ID NO: 718237 - DNA, 98 bp, Homo sapiens
agtttcaagaggcataagatacaggggacaagggcctgtccgacacgccctacgacagcagcgccagctacgagaaggagaacgaaatgatgaagtcc

SEQ ID NO: 718238 - DNA, 100 bp, Homo sapiens
agttcacaatgttgattctgatgacctcattagcatgggatccaacgacagttggtactaagaagtgcctttcctgacgtctctgctgcttggaaccgct

SEQ ID NO: 718239 - DNA, 88 bp, Homo sapiens
gaggatggaacacttcagtgcattcaagttaaacacagtgggaatatcacttttgatgagattgtcaacattgctcgacagatgcggc

SEQ ID NO: 718240 - DNA, 75 bp, Homo sapiens
attgcttgcaacaattgttatgcttttgtctaacgggttttctcactatagtttatcaagtgagtcccacgtggg

SEQ ID NO: 718241 - DNA, 100 bp, Homo sapiens
gcagacacgaaaatttggaatgggatggttggagaacttgtatatgggatctgcaggagcatgtacagctgcagcattcctgaaagaattcgtaactcat

SEQ ID NO: 718242 - DNA, 75 bp, Homo sapiens
gacattccaggccacagtcctgggaagtcagatgggattgaaaggcctcaaaacttccaatgtcaataattatag

SEQ ID NO: 718243 - DNA, 100 bp, Homo sapiens
tgtactcatgaagctggtgtacatagtgttgggctaacttggattcataaacttcacaaatttcttggatcagcgatcattcttcggaacatagctccgc

SEQ ID NO: 718244 - DNA, 98 bp, Homo sapiens
gaatttgtggctggctggatctctgactggcacagcctccaggttggcgggctcatctgcgctggggttctgtgcgccatgggcatcatcatcgtcat

SEQ ID NO: 718245 - DNA, 98 bp, Homo sapiens
gcccggcagtcgcccgttgccatggaaactgcatccacaggggctttgttatgcacctaaagccatattggaagctccagaagaaagagcaccccccg

SEQ ID NO: 718246 - DNA, 49 bp, Homo sapiens
cgaaggcgggcggcagaggcgatcagctgtgagccgtgagctttgaggc

SEQ ID NO: 718247 - DNA, 100 bp, Homo sapiens
gagagcgcgaatatcgtcatcgttagaagcattgtcgtggaagttctccgaatcctggttttgattggtcagattcttttttcactagcggcggtttttc

SEQ ID NO: 718248 - DNA, 99 bp, Homo sapiens
cattttggggcagaatacagagatatggaatcagagccccccaagatgaacccagtggtggagccactgtcctggatgctgggcacctggctgtcggac

SEQ ID NO: 718249 - DNA, 100 bp, Homo sapiens
cttgcagcaaagccattcgggttggagtaattgatgtatcggcaagcagtgtaaacggaggacttggggaaaaaggaccacatagtccatcgaagaagag

SEQ ID NO: 718250 - DNA, 101 bp, Homo sapiens
gacaattatttgtgaagctttctttaactgcaatggcttagaagctgcatttaaggcaaaatactggagcactaatgcccatgagattgaaggcacagtgt

SEQ ID NO: 718251 - DNA, 100 bp, Homo sapiens
cccagacctcagccaccagcaccaatgcaaaccctctctctaccacgagcagcgccctgggagccctcacgagtcccggcgataccagaaattgcagaag

SEQ ID NO: 718252 - DNA, 100 bp, Homo sapiens
tggaagacagctgcctgagccagccagtgacagcgtttcctcagggcacttgggggaaccgtgaaggactgagccgcacctcaagcagccgccagagcag

SEQ ID NO: 718253 - DNA, 51 bp, Homo sapiens
aattgggaaggttccctcaagtccaagattactgacagccctgtcctagga

SEQ ID NO: 718254 - DNA, 87 bp, Homo sapiens
gtactctatatgaacaatccgtctggatcacggatgtaggaagtgaccacactccagacagatgaggtgaagaatgtaccttgtggg

SEQ ID NO: 718255 - DNA, 101 bp, Homo sapiens
ttaagaaagaagatgttaactttcagcttggtgatccagctatttttcctgccgtaattgtggaacatgttcctggtgctgatattctcaatagttatgcc

SEQ ID NO: 718256 - DNA, 90 bp, Homo sapiens
cccagatctacctgacgggcctgcgagggttgaagattgtgaagcaatagcctaaggtgccatcgcctgcaggattctttattcagctct

SEQ ID NO: 718257 - DNA, 74 bp, Homo sapiens
tgcggccagtcgccactgctcaaatgaagctcgtgaccgagaacctgaaggaggaaccaatggaaagcgggaag

SEQ ID NO: 718258 - DNA, 100 bp, Homo sapiens
ccctgaacgcccacgactctcagggtccagaggccgtgagaccggccgcggctgaaaggatctcgaggacctggaagaagcagaggagccagacatggag

SEQ ID NO: 718259 - DNA, 75 bp, Homo sapiens
ctttgcaccctgcttggagacggacttgcttccggattcactggcaaaatttgctggcagaaaactgaaagactg

SEQ ID NO: 718260 - DNA, 100 bp, Homo sapiens
aaacggagaaaccccgggtccggcgagaggggctgtgacagtcggagtcccaagctgcggttcggctgctgccgaggatcccaatgaagatacagaatgg

SEQ ID NO: 718261 - DNA, 100 bp, Homo sapiens
cggaaccgccgggccgaacagcatgacgtccgctttggagaactacatcaaccaacttcttccttgacatggtcctttggaaagttgtgttcaaccgaga

SEQ ID NO: 718262 - DNA, 75 bp, Homo sapiens
tacgagctcaagacctaccacgaggtggtggacgagatctactttaaggaactgtggctgcaccatctgtcttca

SEQ ID NO: 718263 - DNA, 98 bp, Homo sapiens
ttttgtgctcattttggttctcagtttctacgagctggtgtcaggtcctggaagccatacgggtgacccgtcacaagaacgccatggcagagcgctgg

SEQ ID NO: 718264 - DNA, 74 bp, Homo sapiens
tcccaagtagctgggattgcagagcaaatttttcagaacataaaacaagaatatagtcgttatcagaggtggag

SEQ ID NO: 718265 - DNA, 82 bp, Homo sapiens
attcaacagcttcgggtagaagaagatgtggccgagaactactggtggcgtggccagaacacacggacgctgtgtgtggggc

SEQ ID NO: 718266 - DNA, 88 bp, Homo sapiens
aggaagtttgtgcatgaagacagcagccacatcattgctttatgtggtgaaaggtgtagcagtcactcggcctacacccacagcatcg

SEQ ID NO: 718267 - DNA, 83 bp, Homo sapiens
tgacggatgaaaagaatgaacactgtccttcaaaacgagtttggcatagaaatggtaccccttgttcaaaatgaacaagaagc

SEQ ID NO: 718268 - DNA, 105 bp, Homo sapiens
gaacgaccggctcctgctcaagatctcagagaaggaggaggtgaccacgcgcgaggtgagaagccctaccactgcaactgggacggctgcggctggaagtttgcg

SEQ ID NO: 718269 - DNA, 78 bp, Homo sapiens
aaacatgcagattatatcgcatcctatggctcaaagaaagatgattataactacagttcctgaggaagaactaaatcc

SEQ ID NO: 718270 - DNA, 75 bp, Homo sapiens
cctccaaagatttactttcccatccgtgactcctggaatgcagttctaaatggagcccctggatttataaacttg

SEQ ID NO: 718271 - DNA, 75 bp, Homo sapiens
ttcccaaaagacaggctcttcacctgaaggttgtggcagcactgcctgaaggtatgagaccagattctaatcttt

SEQ ID NO: 718272 - DNA, 100 bp, Homo sapiens
gtgaaacagagaaagataggcggccatggtccaaccttgaagtattcaagtcaaacaacgttgaaatggattgggtgttgaagcatactggtccaaatag

SEQ ID NO: 718273 - DNA, 100 bp, Homo sapiens
aaagctctctcaccatattttgggaagttatggatcatcacattcccatgcatgcgttgcctgaagaaatccaaaaggccagaggcattgatgtgcagca

SEQ ID NO: 718274 - DNA, 75 bp, Homo sapiens
gtgaaggtgatccagagtttgccgaagaatgccgttgatccagaaattatagctcgaggtactgttggcttttcc

SEQ ID NO: 718275 - DNA, 75 bp, Homo sapiens
gaaaccccgcctcttacagtcacgagcttttatcaaaatacaactcaaacctagctactccaatagcaattaaag

SEQ ID NO: 718276 - DNA, 100 bp, Homo sapiens
gaagcccgtgtcaccgccgcccatcgagtcgaagcaccgcagcctggtgcagatcatctacgacgagaaccggactccagttccaacaccatcttctgag

SEQ ID NO: 718277 - DNA, 75 bp, Homo sapiens
gcagatccggcagctttccgaaaggtgctggagaatctggtaaaagcaccattgtgaagcagatgaggatcctgc

SEQ ID NO: 718278 - DNA, 83 bp, Homo sapiens
tgaggtcttaatcatggaacatttgaagtcacgtaaagaagaatcgcatgtgtgagtgcccctagtgtttaccagaaactcag

SEQ ID NO: 718279 - DNA, 83 bp, Homo sapiens
catgtggcagtggaaaatgcgctcgggctggaccagcagattgacgagatgcctgaggctgccgtgaaatcaacagccaacaa

SEQ ID NO: 718280 - DNA, 83 bp, Homo sapiens
gaaaagaaaggctcacggaaaatgtaagattgtcctgggtcacataatgccagctgagcgtaaaaagccagcaagtatggaag

SEQ ID NO: 718281 - DNA, 88 bp, Homo sapiens
tggattgaagacaaccttgatttcagtgtgttcacagaagaaaagcttggccaggctgagaagacagaattggatgctcacttagaga

SEQ ID NO: 718282 - DNA, 100 bp, Homo sapiens
tgcaagaagagtctttaaattgcagatgcctggaatggagatttacagacagtcatctgggtggaggacacccttttgggatcagcactgaaagtgacgc

SEQ ID NO: 718283 - DNA, 88 bp, Homo sapiens
cagcgatgacatccctttccgagtcaactggcccggcaccgagttctctctggattctgaaaccttccttgtatccctcctgagacat

SEQ ID NO: 718284 - DNA, 100 bp, Homo sapiens
caaaatgcccgccacggtataataaaaatattcaatgcactgcaagaaacaagagccaacaagcatctgttatatatttagaaatgccatgttaaagagc

SEQ ID NO: 718285 - DNA, 100 bp, Homo sapiens
tgaagacctattttactgataagaaaacacatctttacacactaagcactggagatattattgctgtcatgataacagaattgaggggtaaggatatttt

SEQ ID NO: 718286 - DNA, 74 bp, Homo sapiens
acagcctccgcggctccggggagaagcataagccggaccaagctgagggaggtggaaccagcagcatgcagtgg

SEQ ID NO: 718287 - DNA, 82 bp, Homo sapiens
ctttgtttttcctgggaactgcagggagtctccggtggactgcagcgttagcaaatgcagcaagctggtgggcggaggcgag

SEQ ID NO: 718288 - DNA, 90 bp, Homo sapiens
ccacatcaatgcactgccaatgattactacaagggaagacataaattcaaagcaggttgctacagtgaaagcagacctggagtctgaatc

SEQ ID NO: 718289 - DNA, 51 bp, Homo sapiens
cttttttcatggaatatgtgaagaggtatacacacggtctgtgattgaacc

SEQ ID NO: 718290 - DNA, 87 bp, Homo sapiens
agatggcggcgcagaggaggagcttgctgcagagtataaggagggttcctgcccccaggtgaacattaactttccccagctcggcct

SEQ ID NO: 718291 - DNA, 85 bp, Homo sapiens
accttgtccacaaattcgtcattggccacttaaagggcaattgaaggaacagactaaaaatcgtgtcctggaaggaaactacagg

SEQ ID NO: 718292 - DNA, 100 bp, Homo sapiens
gtttgtcgccagaaggaagatggcggatctggaggagcagttgtctgatgaagagaaggtgtgtcaaggatgccacaatgccatcgacccagaagtgcag

SEQ ID NO: 718293 - DNA, 99 bp, Homo sapiens
tgaggcggcagtggggcgcgctgctgcttggcgccctgctctgcgcacacgtagtttatgccaacgtgacttcattcatacagatgaaccaaggatcgg

SEQ ID NO: 718294 - DNA, 74 bp, Homo sapiens
tccggggtgaatgtcgtgctggtgatggcctacgggagcctgggcggcgactggcggcgcgatggacctgaccg

SEQ ID NO: 718295 - DNA, 83 bp, Homo sapiens
gctgacgctgctgctgcccggcctcggggttgccaacttggcctgttccatctcaaataatgaagaaggtgtaaagcttgttc

SEQ ID NO: 718296 - DNA, 100 bp, Homo sapiens
gcaggttttaaatcaagatttaacattccaacacataaaaattatttatccaacagctcctcccagggtgataagtctgtcagagttatgcgttctttgc

SEQ ID NO: 718297 - DNA, 100 bp, Homo sapiens
tggaattgatgatcaggattaccagaaatgtgatacctcaaagcacaaagtgctggtagtgtctgtgtgtcctcaatctttgccttattttgctgctaaa

SEQ ID NO: 718298 - DNA, 100 bp, Homo sapiens
gagcagggtctgcacgaaataaagctcctgggcaaggggacgtctgcagctgagaaacttggatttaactggccagaagcaggtattcaaagcagagaac

SEQ ID NO: 718299 - DNA, 82 bp, Homo sapiens
ctcccgctcggccccgccagcagcactgtggaggccgtcctcggcctccggtgtggctgtctctgatggtgtcatcaaggtg

SEQ ID NO: 718300 - DNA, 75 bp, Homo sapiens
ggatcgctgtgatcgtcacttggaagccaagttgtctgaaacaatttcagcttccaatgcctggaaaagtcatta

SEQ ID NO: 718301 - DNA, 97 bp, Homo sapiens
cagattcagaaggagcaggattaccaaaggggccatgctatgatagtggaagcttatccaaaataatagatccagaagaagtgacctgaagtttctg

SEQ ID NO: 718302 - DNA, 80 bp, Homo sapiens
cgaggctctgggcagagtggaccacggggagccccacgagttgttggattggatagcagaagcaaacagggtgcagatga

SEQ ID NO: 718303 - DNA, 100 bp, Homo sapiens
ccgatggtcctcaaagggaagatcagaccagactcatcgaggcctgaattgctccagcctgctgacatgttggatcaggaagcagccttcatgcagattc

SEQ ID NO: 718304 - DNA, 75 bp, Homo sapiens
tggctcccacagctaatttggaccaaaaggacaagcagtttgttgccaagagcacaatcattgtggagaagacag

SEQ ID NO: 718305 - DNA, 74 bp, Homo sapiens
cagaagaccgcagtgggataaatctcaaagatctcgtacaagatccttctttatgttccggaagctacacaact

SEQ ID NO: 718306 - DNA, 83 bp, Homo sapiens
caaacagcccgcccgaccccgtcccgaccctggccgccccgagcggagcctggagctggagcagttcaacatgatggagaacg

SEQ ID NO: 718307 - DNA, 80 bp, Homo sapiens
ctccactccgtcccccgcgggtctgctctgtgtgccatggacggccaaaacagagtggagtacgagaaaagggtccgagc

SEQ ID NO: 718308 - DNA, 96 bp, Homo sapiens
actgggacaatgagaacagctctgcgcggctttttgagcggtcccgcatcaaggctctggcaggtaacagcttgcctgattgctgtggccaaaaca

SEQ ID NO: 718309 - DNA, 82 bp, Homo sapiens
aagaaaccaacattcccaacagccaccaccaccaccagatgacggccgaagccctgcagcccacgctacagccggagatgca

SEQ ID NO: 718310 - DNA, 100 bp, Homo sapiens
ctcttcaaattggcccagatctttttcaacggatatctcttccaaacgcatgatgaaggaggtcttgtcaacagggcaaggcaatacagaagtgatccac

SEQ ID NO: 718311 - DNA, 118 bp, Homo sapiens
ggacgagccactgaaggagtcccgcaggaaggaggccttcttattgaagccttcagctgactgtggcccttttcgaggtctgcctctcttcattcactccatctacagctggatcgac

SEQ ID NO: 718312 - DNA, 83 bp, Homo sapiens
atctggaggaggcgttgccgtgagggtgagaagccctaccactgcaactgggacggctgcggctggaagtttgcgcgctcaga

SEQ ID NO: 718313 - DNA, 100 bp, Homo sapiens
gctgagcagaggacgacatgttgcttttcgtggagggccgcctttttgcctatcctgacactcaccgccatcgcctgggacccaattatcttcatatacc

SEQ ID NO: 718314 - DNA, 83 bp, Homo sapiens
gggaattcagcctcagtgatgtccatgaggatcctggtgcacctgagccgtggaggggctgaagtccagatctttgctcctga

SEQ ID NO: 718315 - DNA, 82 bp, Homo sapiens
tggctgcaggagcagctagcacagcttggagaaggaagccctggagggcagcctgtttgaggtgcaacggcagctggcccag

SEQ ID NO: 718316 - DNA, 85 bp, Homo sapiens
aagatcctggtgtcgccatgggccgccgccccgcccgttgtgccggtggtggtgtgcacattgagccccggtatagacagttccc

SEQ ID NO: 718317 - DNA, 100 bp, Homo sapiens
atttattaacacctcttgccactcagctgacatatgaaggactcattgatgaaatttatggcattcagaacagcacagatgaggagagcatcctgactct

SEQ ID NO: 718318 - DNA, 75 bp, Homo sapiens
cagtcccgtgggcaatagagtcactgtatttgaccttaaaaagacgcgctccaggagatatataatcagaagggc

SEQ ID NO: 718319 - DNA, 85 bp, Homo sapiens
cttgaactccttccctcaagtgattcttctgcctaatcctcccaaagttcttagattacagacccctgaatggttggacagtgat

SEQ ID NO: 718320 - DNA, 100 bp, Homo sapiens
tcgcttttcagcacctccaaattctttggtttctttttttgatgcatctctacctggaactttgccggtgctgactgggttacttttttaaacactagga

SEQ ID NO: 718321 - DNA, 83 bp, Homo sapiens
cggaaatgtccggcaagatcgagaaagcaggctccccttccctgcgggcatatccgctcctctcggtgatcacccgccagccc

SEQ ID NO: 718322 - DNA, 100 bp, Homo sapiens
ccactgaataaatccagtccagcgtgcgacgacttactggcttcatggaacttgcttgctagaaaacaaagtgcaaggcttgacaaacacaatgacttgg

SEQ ID NO: 718323 - DNA, 83 bp, Homo sapiens
tgacgctgctgctgtgtgcggtgctgctgagcttggcctcggcgtcctcgggttttcttccacccctgagatggcaagaccag

SEQ ID NO: 718324 - DNA, 90 bp, Homo sapiens
ggagattccacccaaatcctcttctccaagaagggacgtccagatcggtgacatcgtcacagtgggcgagtgccggcctctgagcaagac

SEQ ID NO: 718325 - DNA, 83 bp, Homo sapiens
gagtcgtaaacaaccctgaagagaacagccaggcctgaggagcccaaggtgggcatcaagaccatcaaggtgtactgccagcg

SEQ ID NO: 718326 - DNA, 75 bp, Homo sapiens
tggagcggcgcagccggagtggggccgtgagatggcccactgcgtgaccttggttcagctgtccatttcctgtga

SEQ ID NO: 718327 - DNA, 100 bp, Homo sapiens
tctcccctgcacttcgctgcagctccctgtgctgtcaggaatctacaggacttggctcgtatttacattcgacgcacacttagaaatttcataaatgatg

SEQ ID NO: 718328 - DNA, 101 bp, Homo sapiens
gagtgatcttccagaaggttaaagagtggtctctcatggtggagttggcatgaacttaacagcagcagatactgtgatttttgttgacagtgactttaatc

SEQ ID NO: 718329 - DNA, 75 bp, Homo sapiens
aaacgatgacattttcaggaaaatcctgtagtcgtgaaaggtgccaaattggcagaggctcacgtttcttctctt

SEQ ID NO: 718330 - DNA, 75 bp, Homo sapiens
ctccaaaatgagtcgcatcttcaacccccatctgaatcttttgggtgagttgtgaggctggcacctacattcgga

SEQ ID NO: 718331 - DNA, 51 bp, Homo sapiens
ggccagtctgtggaagaagctatcaggaggaacaaccatgtcatcagaatc

SEQ ID NO: 718332 - DNA, 50 bp, Homo sapiens
aaggaagctttggatcttcggtgggacgactgggtttggattcagaagag

SEQ ID NO: 718333 - DNA, 83 bp, Homo sapiens
caccgcggccacggagaagggcgagaagaagaaggagctgcatggctacttggagaatgagccgctgatgctgcagcttttca

SEQ ID NO: 718334 - DNA, 100 bp, Homo sapiens
gcccggccgcgacgcccgggacccagattgcgggttcagactatctgttatagtccctgggtcaagacaacaatttttataccttcgtcgtggttcagaa

SEQ ID NO: 718335 - DNA, 103 bp, Homo sapiens
aaagctggtaatagatgtctgacaaactaaagaaagacttgtgttacctggtcacctgacttttgaatgccgcaattttctccgagtagaccctaaaagggac

SEQ ID NO: 718336 - DNA, 100 bp, Homo sapiens
gctctcctccttcttcctcaactatctcgctgacacgcagatccctgaatattgccgagccttagaagagaatgaaatatctgagcactgttttgatttg

SEQ ID NO: 718337 - DNA, 100 bp, Homo sapiens
gaattatattggaccagagcttgattctgatgaagatgatgatgaattgggtagagagaccaaagatcttgatgagatgaaagccttgagggaattagac

SEQ ID NO: 718338 - DNA, 75 bp, Homo sapiens
acaaggccttctacattaccggttcgtgagccacacatctccccacaccaagctcctccatacaagacctcggac

SEQ ID NO: 718339 - DNA, 80 bp, Homo sapiens
accgagccccgacaggctatgacgtaacaatgcagatcttcgtgaagactctgactggtaagaccatcaccctcgaggtt

SEQ ID NO: 718340 - DNA, 100 bp, Homo sapiens
gcttggctacgcaggcaacactgagccccagttcattattccttcatctatgctaagaaggaatctgatcttaatggcgcccagatcaagcttcgagaat

SEQ ID NO: 718341 - DNA, 101 bp, Homo sapiens
tggattcagtcacaacagatgaagacagcaccaggttccaaatcatcaatgaagcaagtaaggagttaaacatagatgtagctgatgtggagagcttgctg

SEQ ID NO: 718342 - DNA, 100 bp, Homo sapiens
gaacttcagtttcagattaaggaatgtcatttaaatgctggacagaactgtaccgctctctttttggccagctccaccctcccgacgaaggccacgggga

SEQ ID NO: 718343 - DNA, 100 bp, Homo sapiens
gacgtctccagccaaattcaaaaaggataaggagatcatagcagagtacgatactcaggtcaaagttatcaagaagtttactatggaggatgaaaatatc

SEQ ID NO: 718344 - DNA, 100 bp, Homo sapiens
ggaacctcttctgccgtctcagcctgggcgtcgctgaagctgtgtctgcggggaggcagcggaaggcggcaggaaccacagaggacacattaataactgg

SEQ ID NO: 718345 - DNA, 113 bp, Homo sapiens
aaaatggggcggaagaaaatacaaatcacacgcataatggatgaaaggaaccgacaggtgaccaagaatatggcccaggtgaccaaagccctggacaaggccctgagcaccat

SEQ ID NO: 718346 - DNA, 99 bp, Homo sapiens
ggcagccatggacaggtacagcatggaggagctgattcagctgggccaagggggggccctcagcctcttggccttgaacgggctgttcatcttgattca

SEQ ID NO: 718347 - DNA, 100 bp, Homo sapiens
cgccagcaggcggacgctggcttctccgcctgggacccctccgccccgacccgggccccgcggccctcgatgagcccagatggctacctgtatgagcgtg

SEQ ID NO: 718348 - DNA, 75 bp, Homo sapiens
cctcccgagtggctgggactacagatcacagttgaaaactttggtgcaacagaagtgaaagagctggttctaaat

SEQ ID NO: 718349 - DNA, 89 bp, Homo sapiens
gtccgcggcgcggtcggtcggcgcctgttctcgggctgtttggcgggtatatgaatgacctaaaggtacaaataaagacggagagagaa

SEQ ID NO: 718350 - DNA, 82 bp, Homo sapiens
tgcgaatacaggagacgtgtggaggtcacgagaagagaatgccttctagatgcaaaatcacctccaaaccagaccacttttc

SEQ ID NO: 718351 - DNA, 75 bp, Homo sapiens
ggactcctacccaggcctctgccagtccccgttcctggattctagattagtgacaagagctggggttaggatccg

SEQ ID NO: 718352 - DNA, 80 bp, Homo sapiens
atcattccttctcacttggcctatggaaaacggggatttccaccatctgtcccaggtcagcccaaggctgccccctcggt

SEQ ID NO: 718353 - DNA, 99 bp, Homo sapiens
gaatgccggtcacagcccaggagaaacgctccagaggacaagtgctgtttgataaagtgtgtgaacacttgaacttgctagagaaagactactttgggc

SEQ ID NO: 718354 - DNA, 74 bp, Homo sapiens
ttgaccctgacaccaacatcgtctacctctgtggcaagggtgacaatgagaatgactcctggatctttgccttg

SEQ ID NO: 718355 - DNA, 100 bp, Homo sapiens
tgaattggagactgttaggcccagaagaacaattagggtgacgtgtgcattgagtaaacgtaaatattgggaagatggattcacccattgaaaagtggaa

SEQ ID NO: 718356 - DNA, 100 bp, Homo sapiens
gaaggaactttgggtcctgaatcttctgggagctgaggaaccagatatcttgaaaagctgccagaaagatcccagctctcctgttggcttcgtgcttggg

SEQ ID NO: 718357 - DNA, 100 bp, Homo sapiens
cagtgtgacaagtgtggcaagctcatcaatgctgtcgagcttaaggtctctggacctctgactgacactgtgcctgcccaggtccctgtatgcactgcca

SEQ ID NO: 718358 - DNA, 51 bp, Homo sapiens
gatccttcaaataacttcaggacctccctaagtttcctggcatttctagag

SEQ ID NO: 718359 - DNA, 100 bp, Homo sapiens
cagaaagagtgtgcagcggattaaagctaaagacatagttcctggtgatattgtagaaattgctgaatgtttcatccatttgtggaccaaaagatggagt

SEQ ID NO: 718360 - DNA, 83 bp, Homo sapiens
gacacacaaagaatagagttgagcctgtgggacacttcgggtgtccctggccagtgtccttccacctgtccacaagcatgggg

SEQ ID NO: 718361 - DNA, 75 bp, Homo sapiens
gaagtggtattacaaagatcctcagggagaaattcaagtttattgagagaacattcaattgatggcactggctgg

SEQ ID NO: 718362 - DNA, 75 bp, Homo sapiens
cttcaagcagcgccgcaccttcgcaactgcctgacctaccgccgcatctacctgccgcccagccgccccgacgac

SEQ ID NO: 718363 - DNA, 75 bp, Homo sapiens
agaggctatgactggtggagagcagctaaaagctgagttctcctgtgcctcctgttggctctctttgcatctggc

SEQ ID NO: 718364 - DNA, 80 bp, Homo sapiens
ttggaagcagccgatccagcctgcggagcctgtggggcagcactgggcaaaaaccattccagaaaagatggactcagtga

SEQ ID NO: 718365 - DNA, 82 bp, Homo sapiens
tcgtggcctgcctctgcgtgcgtggtctttgggaagaagcttcctgcctttgccaccatccccatccaccagctgcagcatg

SEQ ID NO: 718366 - DNA, 75 bp, Homo sapiens
cgggacaatgataagactcgctatatggggaagggacactcatgaggaccatgatacttccactgagaatacaga

SEQ ID NO: 718367 - DNA, 82 bp, Homo sapiens
cctactcgcccgccaccctgcgctgccgccgctctgaggagttaaagcccagatacttcacgcatctatgtggccctgggat

SEQ ID NO: 718368 - DNA, 101 bp, Homo sapiens
ttggaacagaggctgacaacttcacagttctcaatctggctgtggcagatcctcatgcggaagaatttgaagacaaagagtggacatttgtcatagaaaat

SEQ ID NO: 718369 - DNA, 100 bp, Homo sapiens
gaagagttgtcccagctcggcccgcgggggagccccgggagccgcacggagcatctttccttgaagaagtacattattgacattgtggttgaaagtacag

SEQ ID NO: 718370 - DNA, 95 bp, Homo sapiens
agccaggagacagaggctctagggcggtcccagggccgcctggaggcccagaagagagagctgcagcagaagccagctgaagatgagtggggtaa

SEQ ID NO: 718371 - DNA, 83 bp, Homo sapiens
cctgcgcggtcctgccgaccgtgtgcgctccttatattcccccgcagaggtgagaagccctaccactgcaactgggacggctg

SEQ ID NO: 718372 - DNA, 71 bp, Homo sapiens
accaccaatgggaacatgcacaggaagcctgagaagggagtccagtacctcatcgagcgtggctttgtgcc

SEQ ID NO: 718373 - DNA, 100 bp, Homo sapiens
tggggagacgcgggtcccagtcctgcggctcctactggggagtgcgctggtcggaagggtacagctctgccggggggggaaaaagtggtaccattttggg

SEQ ID NO: 718374 - DNA, 51 bp, Homo sapiens
acccagcacacaaaatggatctcttacgaccaagatcactccatggatgaa

SEQ ID NO: 718375 - DNA, 74 bp, Homo sapiens
gaccggaccgggctcgggggagcgtgagttgcaggtcatgcttcaccccttcctccatctgctgcacctaccac

SEQ ID NO: 718376 - DNA, 74 bp, Homo sapiens
gtttctggtgggatcgttggctatgtaaaaacaggttgaaaggattgttgacaaaaggaaaaataaaaaaggga

SEQ ID NO: 718377 - DNA, 100 bp, Homo sapiens
agcgagccgaaactgagcaagaagatcattttggaattcagcttcctttgataccgaggcttcatatcttcattttcctaccttccacggagaacttagc

SEQ ID NO: 718378 - DNA, 100 bp, Homo sapiens
agggagcctgccctcgcatggtggccagggcacgtcactgcaggccagcttcggaaccaaaaagaagcttcccagagccggggccaggagccccaagcgc

SEQ ID NO: 718379 - DNA, 100 bp, Homo sapiens
aacaagacccggacattccaggccacagtcctgggaagtcagatgggattgaaagatcaagaagctgaggccccaggttacacactaaagtaaatggcag

SEQ ID NO: 718380 - DNA, 98 bp, Homo sapiens
cacaagtgacaagaaatgttccaccaggacttgatgaatataatccattctcggattctagaacaatcctcgttcctagctgcctgccagcgtcctcg

SEQ ID NO: 718381 - DNA, 73 bp, Homo sapiens
tttccctttgagaccgtgaagagaaagatgcaggagtggagtcaacatatcaatggagcaagtcacagtcgtc

SEQ ID NO: 718382 - DNA, 98 bp, Homo sapiens
cttttatgaaaaagaggcactgtgagaaaattgaaggctccaaatccttagctcagagctggaggatgaaggatcggctccagaacctgggtatcaac

SEQ ID NO: 718383 - DNA, 100 bp, Homo sapiens
ttggagtactctagaactggactccaggctggcctgacaattgatgaatttgcaccaagagatatcaaagacacgacggtgggcactctgtcccagcgga

SEQ ID NO: 718384 - DNA, 74 bp, Homo sapiens
aggtgccatggagaactgggaccttgttacttatagattgtttccaagttgaaggatgaaataatcctaataga

SEQ ID NO: 718385 - DNA, 100 bp, Homo sapiens
cagagtcattgcaggaagtggatgagttccacctcattttagagtatcaagcaggtactggttttggattaggaattgttttctcacttaccttctttaa

SEQ ID NO: 718386 - DNA, 99 bp, Homo sapiens
gccttccaggattatatccggaagaccctggaccctacctacatcctgagctacatggccccctggtttagggaggaccattaaaaatctcaagtgacg

SEQ ID NO: 718387 - DNA, 100 bp, Homo sapiens
agttaaaagaaatatacccaagctggatgctcagagagatttaccgcattgtttctcagaagcaaatgtcagacagacgcgaaaatgacatgtctccaag

SEQ ID NO: 718388 - DNA, 100 bp, Homo sapiens
ctttcttccagcttctgctgtccttctttgtggagagcaagttctttctacaacttcaacaggctgcactggaggtgtttgcagagaataatactctgag

SEQ ID NO: 718389 - DNA, 100 bp, Homo sapiens
tgggactcaccgctctggccagggtgcttttggaaacaaactcatcactgctatatatgcagattatgcccggagtttgaagaacctcggttttaagcag

SEQ ID NO: 718390 - DNA, 100 bp, Homo sapiens
ttggaagctctcaacagggatttggtgccaactggagtcttggtgacaaatgggcatttatgtttgaatcatctttaagtctggcggtcacaaagtgggg

SEQ ID NO: 718391 - DNA, 100 bp, Homo sapiens
aagctcgggcgacggccatcttcatccgtcaccattactttaagtactgcaaaatctcagcattggctctgctgaagatggtgatgcatgccagatcggg

SEQ ID NO: 718392 - DNA, 100 bp, Homo sapiens
atggactgaagtatccagcgctcattgggaatttagttaagggtctgaatccagggaaagctattgcagagatcaagaaaatgatggcaacctataagga

SEQ ID NO: 718393 - DNA, 145 bp, Homo sapiens
cttgctggacggaccgcccaaccccaaaagagccaaactcagctcgcccggtttctcggcgaatgacagcacagacaagttggatggcttgaggactggtactaaaaggaaacgtgactgggaggccattgccagcagaatggag

SEQ ID NO: 718394 - DNA, 100 bp, Homo sapiens
cgaggtgctcatgcagttcctctacaccgacaagatcaaatacccacggaaagataagtatgctgtgcgcttcatccctcgggagaatggcgtttacctg

SEQ ID NO: 718395 - DNA, 82 bp, Homo sapiens
ttcccgcgtccgccgattcctcctccttggtcgccgcgtccttggctggcgtgactggagactgatgcatgagggggctacg

SEQ ID NO: 718396 - DNA, 49 bp, Homo sapiens
gccctgaagaactacagtgtggtgggatgtgtgtgggctgaaattccga

SEQ ID NO: 718397 - DNA, 98 bp, Homo sapiens
ggcaaagctgcttccctgttgctggagatcctgggcctcctgtgcaaaagcatggaattctgatgtgaaactaacagtctgtgagccctggaacctcc

SEQ ID NO: 718398 - DNA, 83 bp, Homo sapiens
ctggagtcgaggccccgctccgccgctggctttccgcggagccccaggcttcttccccgggagctcgcagggctgcgacgcct

SEQ ID NO: 718399 - DNA, 90 bp, Homo sapiens
aggaagtgaactttacatctgaactacgaaagcatccttcatctcctggacacactcaggacaccaacaccttctttctgtgccggacac

SEQ ID NO: 718400 - DNA, 82 bp, Homo sapiens
aaggtcggcagagcaaggggcttacgcagaaggacctggccacgggtttccaggcctgaggtgcccgccctggccccaggag

SEQ ID NO: 718401 - DNA, 100 bp, Homo sapiens
atgacagcccgcagagagttaacttctgtttacatggaactcagacatctgcaaatcatgacctgagcatgcagaattccgagggtggagcggattcgcc

SEQ ID NO: 718402 - DNA, 75 bp, Homo sapiens
ctcggtcctgtttcgacagcgaacatgtcgcggcctgtcagggtcattattcatgtggttgcccagtgccatgag

SEQ ID NO: 718403 - DNA, 88 bp, Homo sapiens
cgcagacatggacaccaaacatttcctgccgctcggggtcaccagtcgttggcacaccaagaagctgccccgcaagacccaccgaggc

SEQ ID NO: 718404 - DNA, 125 bp, Homo sapiens
agcaaagggaagaaactaaagaagacggtcaccaatgacagaagtgcaccaatactggacagtccgtaaaagccctgggctcagccagagcagggcagaggatgacgggatgaccagctgcagag

SEQ ID NO: 718405 - DNA, 100 bp, Homo sapiens
tggaaactgattggaaactctttgggaaagccactcgaaaagttctttatagctccaagctctacagattcttcaaatatattgagaatagggatgttgc

SEQ ID NO: 718406 - DNA, 78 bp, Homo sapiens
cactcatcctgcacgccggcgagtgccagcggagaagaaactgaggcctggaatttgattaactcattcaaggttacc

SEQ ID NO: 718407 - DNA, 83 bp, Homo sapiens
cgccgcgggacctctccgggccatgggtacatgtcccagagcaagcacacggaggcccgggagctcatgtactcgggagccct

SEQ ID NO: 718408 - DNA, 88 bp, Homo sapiens
actttgaagtagaagaagctgatggagttaagccatttgagtgcttaacatgtggagtagcttgggctgatgcccgatctctaaaacg

SEQ ID NO: 718409 - DNA, 90 bp, Homo sapiens
agtgaatgggcggatctcatatcttcacttggcaaactcaacaaggttgaaaggattgttgacaaaaggaaaaataaaaaagggaagaca

SEQ ID NO: 718410 - DNA, 75 bp, Homo sapiens
gagagcgcgaatatcgtcatcgttagaagtgttcactcatcttaaacatcctcagttgaaatccgtatgctccgc

SEQ ID NO: 718411 - DNA, 100 bp, Homo sapiens
cgcctttaccaccctcctcatcgcctgcctgctgctgcgcgtcttcagtctgcgggccaggcatcgacatccgcaacgactatcagcagctgaagcgcct

SEQ ID NO: 718412 - DNA, 82 bp, Homo sapiens
gtccctctgaaaactgaggaatttgaagtgaccaaaacagcaggatgagacctgcacgcagtggctcacagcagcacgattt

SEQ ID NO: 718413 - DNA, 100 bp, Homo sapiens
acctcatgactattgcaccacgcccggggggacgctcttctccaccacaccgggagaaatgcactcggtgatggaaagagagccactattctgaagaaca

SEQ ID NO: 718414 - DNA, 98 bp, Homo sapiens
cccgggtcacagaggaggccattgctcgcgccaggcactcgctgagtgaccccaacatgcggggatcctgaaactccgccacatctggaacctgaagt

SEQ ID NO: 718415 - DNA, 100 bp, Homo sapiens
ggctggtgctgtccctgctggctgaggagccgctgctgggagacagcgcagccatagaggaagtggttctaaggcccagcagctactacaaggattgcaa

SEQ ID NO: 718416 - DNA, 100 bp, Homo sapiens
ggtgtcggaggtctcatctttgaactactgccggagcttctgccaggaccctttagatcctacaagatcagtgattgtgatccgctccctggtagcagat

SEQ ID NO: 718417 - DNA, 74 bp, Homo sapiens
gcggaggcagaggtggaggcgctttgaaaggtgcagcagtaccgcgtcgccatgactgccaaggactgctccat

SEQ ID NO: 718418 - DNA, 75 bp, Homo sapiens
tgctcgagtgcctgcaggatgtgagggagaaccatgatggcagcattgacttccgagagtatgtgattggcctgg

SEQ ID NO: 718419 - DNA, 75 bp, Homo sapiens
tttggctcctttttgcacccttaaatgtaagatggcccactgcgtgaccttggttcagctgtccatttcctgtga

SEQ ID NO: 718420 - DNA, 75 bp, Homo sapiens
gcaagtgaataggcccagaaaggtgactatgatgatggatatggcactgcttatgatgaacagagttatgattcc

SEQ ID NO: 718421 - DNA, 75 bp, Homo sapiens
aatgcaaaaaaactaatggaattagcctgcaacatgaaggtgagagaactggagcagaccttgcaggcctctgag

SEQ ID NO: 718422 - DNA, 100 bp, Homo sapiens
gctagagtttgctgaagagaagatgaaagtgaactatgtcttcatctgcttcaggaagggccgagaagacagaggttctgtgactccccgaccagtgacc

SEQ ID NO: 718423 - DNA, 75 bp, Homo sapiens
ccgcctccttcccagccgcgcggcttcctccagacctctcggcgcgggtgtgggcaagagcagtttactgttgcg

SEQ ID NO: 718424 - DNA, 75 bp, Homo sapiens
ccttattttttctcatggatgttcttcttcgagtatttgtagaaggcggacaaggcaaaatctcagcaagttcgg

SEQ ID NO: 718425 - DNA, 100 bp, Homo sapiens
tggagatcctttcctgcttttggtttccctggcaggggttgaactgtggagtgtgtggctctacgtctcctccgagagccgcttcaacaccctggccgag

SEQ ID NO: 718426 - DNA, 75 bp, Homo sapiens
actcgtgatctgcccatcttgttactccctagcagtgtggtaagctcaaagttatgaagtttcaggatgaattgg

SEQ ID NO: 718427 - DNA, 83 bp, Homo sapiens
gtccgggattttatccaccggcactgccaagatcaggaagaggcgcttcagcgggcacgtgaggaagaagagaaaaggaagga

SEQ ID NO: 718428 - DNA, 82 bp, Homo sapiens
cgggtggcagcgacagagccaaaatcagagctggaacctgaggagagaggcatcataggcgagtattagtggaatggctaag

SEQ ID NO: 718429 - DNA, 100 bp, Homo sapiens
ccgagagctcgcccgtggtcgtccgcaccgacgaggatggcccgtgaaggtggagcggacccggaagcggtccgagggcttctcgatggacaggaaggta

SEQ ID NO: 718430 - DNA, 82 bp, Homo sapiens
taaacgcctgaaagaagctacctgcaagctctatttttaccagatgctcttggctgtgcagcccacttataagaagcgaagg

SEQ ID NO: 718431 - DNA, 100 bp, Homo sapiens
agcagaaaatagcagccaggaaccaagaaaacttggaatatgagagcctggagcaagaaaacaccatgctgcggagagagatcgggaagctgacagagga

SEQ ID NO: 718432 - DNA, 96 bp, Homo sapiens
tgatcacacgcctaatgatgtccgagttggagaacaggcgtggccagcactggctccttgatggtttacaaccaggcactgactacaagatctacc

SEQ ID NO: 718433 - DNA, 125 bp, Homo sapiens
tagttctggggagcgcctcgtcgacatgagtgatgtggaggaaaacaacttcgagggcagagtcaaaatgcagatcttcgtgaaaacccttaccggcaagaccatcacccttgaggtggagccca

SEQ ID NO: 718434 - DNA, 50 bp, Homo sapiens
tctttctggcctggaggctatccagcatatcctgctggatgacattgtcc

SEQ ID NO: 718435 - DNA, 82 bp, Homo sapiens
aagttaaaacaattgctgcacgaaacactgaaattttggcaggtgaagcatatatgcgtttaagcaaactccccgaagcaga

SEQ ID NO: 718436 - DNA, 76 bp, Homo sapiens
acgatgctacacaggagtacaaggatgtatttgagttccgttatgccaagatgccagatgaaccactagaaccagg

SEQ ID NO: 718437 - DNA, 100 bp, Homo sapiens
tcatggagggttatccagcacctggaggatacctgctaccttacaaaattggacagctgtacatgatcagcaaacacagccatgaacagagtgaccgggg

SEQ ID NO: 718438 - DNA, 75 bp, Homo sapiens
attaggacaagaggaagatatagaatcaccttgggattctgaggtggacccaagtggagagattgtggaactggc

SEQ ID NO: 718439 - DNA, 83 bp, Homo sapiens
gcattgccaaaaaatatatagatcagaaatttgtattacagattgagaggatccagaatccagatctctggaatagctaccag

SEQ ID NO: 718440 - DNA, 100 bp, Homo sapiens
agaagcgactggatgtctatctacaggtatgatctcgtgaaatcttgagagaaactgaatgacgaatgaaactattgttcctgtttcacacagaagaaaa

SEQ ID NO: 718441 - DNA, 85 bp, Homo sapiens
gcagcgactttggggcccgtcaccctcaggtttggcctcacaaggactaccctctcatcccagttggtaaactggtcttaaaccg

SEQ ID NO: 718442 - DNA, 80 bp, Homo sapiens
tgacagtcaagtggaaacaactgtctggacttctccaggcctcggccgccccagaaggcactcccggcaaacccagtgcc

SEQ ID NO: 718443 - DNA, 97 bp, Homo sapiens
ctttcaaggatatgctgtattcagctcaggaccaggcaccttctgtggaagatctgactgcagccatgagcagcaatgagtgcttcaagtgtggacg

SEQ ID NO: 718444 - DNA, 90 bp, Homo sapiens
gtgaccaacaggtttctgccttatcatattctgaccagattcagcaacctctaactaaccaggatcagttcttaagagcagccccggtaa

SEQ ID NO: 718445 - DNA, 100 bp, Homo sapiens
tatgaaggcccccagctggacatctgggggctcccacctgaaggagaataagtacctgattgtggtgaccgacgggcaccccctggagggctacaaggaa

SEQ ID NO: 718446 - DNA, 95 bp, Homo sapiens
ctgctgctgcgcgtcccgcccagccgcagcttcccaggctgtgaggatatcattgctgagagcatctcattagataccttaattgccatcctcaa

SEQ ID NO: 718447 - DNA, 74 bp, Homo sapiens
agtggtgggagaaccagccgactggagcaggcagcagcccagaagaatggttgagaccggtgatgagaaaagag

SEQ ID NO: 718448 - DNA, 75 bp, Homo sapiens
ccaggcctctttccagagcacctcagcaccatacccagtaactctgggtggattttaactacaactcttgtcctc

SEQ ID NO: 718449 - DNA, 80 bp, Homo sapiens
ggaccgccagcagcagtgagaagatcacccggaagttcaggctgaattctgaaggcaaacttgagcagacggtctccatg

SEQ ID NO: 718450 - DNA, 74 bp, Homo sapiens
caagcctcggcaggtacagttcctccctcagggggtgagaacatcaaaagcatcaaccagcagtcaggggcgca

SEQ ID NO: 718451 - DNA, 127 bp, Homo sapiens
cagaccagcaggaggacaatgttgatgaacagtaccaggaagaggcagaagaggaggttgcacgttttcaaaaaatacctaatggtgaaaatgagacaatgattcctgtattgacatcaaaaaaagc

SEQ ID NO: 718452 - DNA, 96 bp, Homo sapiens
ccgggcccggcgccgccgcccgcagacctggccataagggacacctttgtgaatgcctctcggaccctgtacagcagcagccccagagtcctaagc

SEQ ID NO: 718453 - DNA, 96 bp, Homo sapiens
gcttcttcttttcttccagtaaagaggctggagaggagctgggaggaaaagctttcggactgctgaaggcccagcaggaagagaggctggatgaga

SEQ ID NO: 718454 - DNA, 100 bp, Homo sapiens
gctgtgttcagtggcgattggagggtagacctgtgggcacggacgcacgccactttttctctgctgatccaggtgcttctggcctccgtgctctgcttca

SEQ ID NO: 718455 - DNA, 75 bp, Homo sapiens
cgaggcccacctgctgacatctacctgccaggcggaaggtgctctaccagcgtgcacccaggaatatccaccgcc

SEQ ID NO: 718456 - DNA, 96 bp, Homo sapiens
gaagccctttctcctcggcactgtattctttacctgcttcccaatcccactgatgaggatcagcccatgaacggtgtgctgctgaggactgtcttg

SEQ ID NO: 718457 - DNA, 75 bp, Homo sapiens
ctttttaacacagttcttcaactgcataccttcaatctaaggccaatccggagccggcaacaactgggcaaaggg

SEQ ID NO: 718458 - DNA, 84 bp, Homo sapiens
caaagaatagagttgagcctgtgggacacttcgggtgtggacactgccagcggctgcagccgacttggaatgacctgggagaca

SEQ ID NO: 718459 - DNA, 100 bp, Homo sapiens
aaacctagcaacaaaaagaaagctgcgttaatgtttgcaaatgcagaggaagaatttttctatgagagatggagtttcactgtgtcagccaggatggtct

SEQ ID NO: 718460 - DNA, 76 bp, Homo sapiens
ggcgagctcgcgatgagtggtctcggcaggctcttcgggaagggtggacatgttgagtgaaattaacattgctccc

SEQ ID NO: 718461 - DNA, 55 bp, Homo sapiens
gcaagacctctggccctggaagccgaaggattctggacaatcaggaagtccaagc

SEQ ID NO: 718462 - DNA, 51 bp, Homo sapiens
gcacttcttgccacaatgttacagagtatggaaccacccctttagtttggg

SEQ ID NO: 718463 - DNA, 84 bp, Homo sapiens
agccgcaccatgccgctcctaagcctgcacagccgcggcggcagcagcagtgagagggactttgaacatgtcggggatcgccct

SEQ ID NO: 718464 - DNA, 98 bp, Homo sapiens
cctcacgctcctgcccacctccatcagccagttcttctccgggccttggtgtaccttgttgtagtgtttgaaaacatctgaggctgcatccatctcca

SEQ ID NO: 718465 - DNA, 83 bp, Homo sapiens
gggtcgcgctcgcccgggcggcagaacaatgcagatcttcgtgaagactctgactggtaagaccatcaccctcgaggttgagc

SEQ ID NO: 718466 - DNA, 100 bp, Homo sapiens
gaacagattgttgccaaaattgaagaagtattgttaccacattctcatctggagccaggaggaagccaggacacggaagtgagagacactaaagaaggtg

SEQ ID NO: 718467 - DNA, 88 bp, Homo sapiens
tcgcaagaagcaccagttcaagtggccctcagggcatccccgttttcggacagtggggggtggacgcccatcatctgggctgcagagc

SEQ ID NO: 718468 - DNA, 100 bp, Homo sapiens
gaaacaagacagttctgtctgcagaagcccattatggctgtaactggagatgacacagaatgtatgacaacatgtccacaatggtgtacataaaggaaga

SEQ ID NO: 718469 - DNA, 50 bp, Homo sapiens
tggctcctgtttcccagcaagggcttttctgggaaagtgaggccaccatg

SEQ ID NO: 718470 - DNA, 100 bp, Homo sapiens
gggcgctggtcgtcagcgccgaggctgggctgaggcgccgcggtaccatgaggcgccggcccccgccgtggagccgtgtggtgtatgtgtggtaacacca

SEQ ID NO: 718471 - DNA, 74 bp, Homo sapiens
acttccttccttactttgtcttggtatactacatggcaaaatgggaaaggcttaccttacaaatttgaagtaca

SEQ ID NO: 718472 - DNA, 100 bp, Homo sapiens
caaatcatcaatatgtttcttctggatatccttcacttcaaaatagcttcataaagtcagcttacagttgaacatgagtcttcttatgattagtgagaat

SEQ ID NO: 718473 - DNA, 98 bp, Homo sapiens
aagagaagctgcaagagcaacatctttcctcaccccaaggctaactcaggtgagatggagccgctatagtcctgaattcaaggatcccttgattgaca

SEQ ID NO: 718474 - DNA, 100 bp, Homo sapiens
tagaggcggcggacgggccggagggaggatgttaaagccccgcggggttgagcattcatgatggtacctggaagtcagcaatttatggttttggagatca

SEQ ID NO: 718475 - DNA, 50 bp, Homo sapiens
gtcgtcgctacctcctcggacagattagtgatgatgaaccaggttatgac

SEQ ID NO: 718476 - DNA, 75 bp, Homo sapiens
aaacagaaaaataataattacatctgcaaagaccttatttccagagtcattcttatagaagagcatcagaggaag

SEQ ID NO: 718477 - DNA, 80 bp, Homo sapiens
cctggagcctcagttggaagcagccgatccagcctgcggagcctgtggggcaggttggatccatgccgtctacacccctg

SEQ ID NO: 718478 - DNA, 90 bp, Homo sapiens
gacagaggcaccccggacagagacgtgaagcactgaatgacagagcgggatgccaccagcttgtccaaagggaagttccaggagctcctg

SEQ ID NO: 718479 - DNA, 100 bp, Homo sapiens
ccgcactgagtcaacagactgagcgcgtccaggcctgacagctctgcggctcgggccctgaggtgtctcgaaataatgatgtgtggcagaaccatgaagc

SEQ ID NO: 718480 - DNA, 100 bp, Homo sapiens
acacctcatggtatatttgcagccagtactctatatgaacaatccgtctggatcacggatgtaggaagtgttggaggagagcagattagtgccattggaa

SEQ ID NO: 718481 - DNA, 100 bp, Homo sapiens
atgccagcaaacgtctacactgtacatgctttttattacaagactacggagcataggaggaaaattcatcatctgccttgccaacattccactaaccccc

SEQ ID NO: 718482 - DNA, 96 bp, Homo sapiens
tgatgaaaattctcttcattctcttggactgaacttaaatactgataggtgtttcagtcacctccagtaacacgggcgtgccagatatctcgggtt

SEQ ID NO: 718483 - DNA, 98 bp, Homo sapiens
ttgtttctcattctcatatttcaccaataaaggtgctcctgacctctgataaagctgcagccaatttctcagatcgttctttgctgaagaacttggga

SEQ ID NO: 718484 - DNA, 100 bp, Homo sapiens
ggagaactacaggaacctgctttctctcgatgaggataacatccctccagaagatggtcggattgtttgtgctgaacgaactgtcctcttgcttcagaag

SEQ ID NO: 718485 - DNA, 74 bp, Homo sapiens
ggaagcgcagggagaaggaagaggtgtttgaaaagttggaaaatggatataccttatttgattatgatgttgga

SEQ ID NO: 718486 - DNA, 83 bp, Homo sapiens
gccttgagtcagtgcgccgctctccagcccgcttgaacggtcaaaatgcagatcttcgtgaaaacccttaccggcaagaccat

SEQ ID NO: 718487 - DNA, 82 bp, Homo sapiens
ggtgtctacagtgttctcgacttcgtcgctgttatacatgggaagctgttgataccaaaaataatgtactttataaaatcaa

SEQ ID NO: 718488 - DNA, 95 bp, Homo sapiens
ctgcatgtggctgcaggacctctgtcagagaatgaaacactcatcgcatggaattgaatgatctggcacgggaccctccagcacagtgttcagca

SEQ ID NO: 718489 - DNA, 75 bp, Homo sapiens
taacagcagcgccgtcccgtccgacagccaggcccgggagaaaagctgaaacacactgagagtgacaagcttcaa

SEQ ID NO: 718490 - DNA, 83 bp, Homo sapiens
cgcaggtcgaggacggtcggactcccgcggcgggaggagcctgttcccctgagaacttcagcgagagggaagcatcgagactc

SEQ ID NO: 718491 - DNA, 100 bp, Homo sapiens
tcctgcctcagccccctgagtagctgggattacaggcacgcgccaccactcccagattctccctgactctgctcatctggaccttttctgtgtgtctgcc

SEQ ID NO: 718492 - DNA, 83 bp, Homo sapiens
ccggccgctctgcgggactctgaggaaaagctcgcaccagctctctgatgtaaaggatggagtaaatcaagcagcacctgcat

SEQ ID NO: 718493 - DNA, 75 bp, Homo sapiens
tggctgtgctgacttttttatccgtggagagcgactcagggacaaaatgtttgacggtgagaacatgtatatgag

SEQ ID NO: 718494 - DNA, 87 bp, Homo sapiens
aatatgttcatggtgatataaaagcagcaaatctacttttgggttacaaaaatccagaccaggtggtatcacggaaaacttgacaga

SEQ ID NO: 718495 - DNA, 75 bp, Homo sapiens
tcgcccactccagaagtagcatggaaatggagggcatcttcaaccacaaagtccccaaagctccagagatagatc

SEQ ID NO: 718496 - DNA, 90 bp, Homo sapiens
ccactttcttcagtgcactgctcggtttctgaccagacatccaaggaaagctgcaagctttcttcctggtggcagatgacatcatggatt

SEQ ID NO: 718497 - DNA, 74 bp, Homo sapiens
aatgtcaacattgcccagcaagtgcggctatgtgactacgtttgtgacctcctcttagaagagtcaaatgttca

SEQ ID NO: 718498 - DNA, 75 bp, Homo sapiens
gcggcgactactgccaaccccggcaatggatcacttggagtcctttattgctgaatgtgatcggagaactgagct

SEQ ID NO: 718499 - DNA, 80 bp, Homo sapiens
acattgtcgtgattcttctcttggtggcgttacttggtgctgaccttaaggaaagagccaaaatgagttccagtgaagtt

SEQ ID NO: 718500 - DNA, 75 bp, Homo sapiens
cagagagttcctgcaacaacaatacagagaggaacttgatacagatgaatatgaagaaaccaaaaaggaaactct

SEQ ID NO: 718501 - DNA, 90 bp, Homo sapiens
cggggcgagcctggaggattgtcactccaacctcttttcgctgctcatgatgcctcagatctgatccgcatctaacaggctggcaatgaa

SEQ ID NO: 718502 - DNA, 75 bp, Homo sapiens
ctgcctaatttacagcaaccatgagacctgcctagagctggaacgttacctccagagcgagccctgctatgtttc

SEQ ID NO: 718503 - DNA, 85 bp, Homo sapiens
cgcgcgcggcccggggtcgccgacagagcgggatgccaccagcttgtccaaagggaagttccaggagctcctggtgggcatcgtt

SEQ ID NO: 718504 - DNA, 82 bp, Homo sapiens
tcctggccctggccctgatcatcctgctgggcttcgtccagatcgggaaggccgccaccggcacggccaggccagcatggtg

SEQ ID NO: 718505 - DNA, 82 bp, Homo sapiens
agaaatgaagagaccttcttccaaatcacttgccatggtctccatgaactgatttttttgtgcagtgggcaggaagaaccca

SEQ ID NO: 718506 - DNA, 100 bp, Homo sapiens
gtagatgtgagtgccttgaggccaaacaccactcctcaacgacaatcctccaaacacagactgtttgacttagaatcttcccttttttactccattcaag

SEQ ID NO: 718507 - DNA, 100 bp, Homo sapiens
aggatgttctgagattgcatcaggatattaatgattataaccggagattctcagggcaacccagatctgcccaggatgttttggtgcaggagatggaagt

SEQ ID NO: 718508 - DNA, 90 bp, Homo sapiens
tgctgtgtgctggacgctggacagggggcaaaagcacctgctcgggctcctcgcacctaccccagcaactcaaattcaccacctcggact

SEQ ID NO: 718509 - DNA, 51 bp, Homo sapiens
gaaagctttcctaggccaaaaagagacgtccctggcaactgttcagaaaac

SEQ ID NO: 718510 - DNA, 51 bp, Homo sapiens
gaaggcgcctgaagaggacgaaggcttcagggatgacttcttagggggcag

SEQ ID NO: 718511 - DNA, 102 bp, Homo sapiens
ttggcgcccaatgacctgcccctgctggccatggagtactgccaaggaggagatctccggaagatcctgcagctcctgaaaggcaagctggtggtgggtcat

SEQ ID NO: 718512 - DNA, 100 bp, Homo sapiens
ggaactgctcttgaaagtgtcctgggatgcacttaggcaaactcaagcactgcatcaaaggcttctattagagttactccacaggatccgctgaacatag

SEQ ID NO: 718513 - DNA, 75 bp, Homo sapiens
agatcctcggggccccagaggccgcggacaccgacctggaggctttcagtccagtgtaaagctgttggagcgcgg

SEQ ID NO: 718514 - DNA, 80 bp, Homo sapiens
gtgacttccgcaagctgatggttgccctggcaaagggaagtgttcgccagttactacatgaaaagataagagatgcttat

SEQ ID NO: 718515 - DNA, 100 bp, Homo sapiens
ggatcttctgccgcaccaggctcatcctgtccatcgtgtgcctgatgatcacgcagctggctggcttcagtggaccaaataatccagaatggctactctg

SEQ ID NO: 718516 - DNA, 75 bp, Homo sapiens
cgaggaggaagaagcagctgcggcggccacaccctggatgaggtaagaatgattgatgttggctgatattggagt

SEQ ID NO: 718517 - DNA, 75 bp, Homo sapiens
gagatgacgaaaccataaaggagcatttatgtaagttgctgagacaaaggaaaacccactcccttggaggagcat

SEQ ID NO: 718518 - DNA, 90 bp, Homo sapiens
cccaggtcaagagcctctgcgagaagaaatgactgctgtccatgcaggcaacataaacttcaagtgggatcctaaaagtctagagatcag

SEQ ID NO: 718519 - DNA, 88 bp, Homo sapiens
ggcattgaaggttcactcaaaggcagccgggaagatttccagaggattccagaacttgccatcaacccactgggggaccggatcatca

SEQ ID NO: 718520 - DNA, 100 bp, Homo sapiens
caccttccctgggatgtccctggacaaaccagcatctcagacatgtcgaaaaagatgttttgatccctaaaataatgagagaaaaggccaaagagaggtg

SEQ ID NO: 718521 - DNA, 96 bp, Homo sapiens
ctgcatttccacatactgacttggccaagttggatgacatgatcaacaggtggaggagctggaacaggagaggaatcactggcagtctgaattcaa

SEQ ID NO: 718522 - DNA, 75 bp, Homo sapiens
agccttgggcctcgcgccggctatggccgtgccctggggctgagccctcaggtctgcagggaactggccaggcaa

SEQ ID NO: 718523 - DNA, 135 bp, Homo sapiens
ctgcgtcgaatgctccacttgccgagcctgatgatggggacgtgccgcccctttgcgggtatggacctgtctgccaatcaggacgaggagaccgaccaggagaccttccagctggagatcgaccgcgacaccaaa

SEQ ID NO: 718524 - DNA, 75 bp, Homo sapiens
gggggatcgggcctggatcggctgccggtgcctgccagtgggaacccttaggagaaatcttgagagtggacagca

SEQ ID NO: 718525 - DNA, 75 bp, Homo sapiens
ttcaccacgcggctgcacaactgcaggaacaccgtcacgctgctggaggagacactggccaaaagaagaccctag

SEQ ID NO: 718526 - DNA, 90 bp, Homo sapiens
gaacagcatcgtaggggtcagtgtcctcaccatgcccttctgcttcaaacagcacctggctgcagtggaagaaagaaagatcaagtccct

SEQ ID NO: 718527 - DNA, 75 bp, Homo sapiens
ccgagggactgggagtcgttagtgagctgccgcagcgggaaccgcaagagcttggtggtaggaacgccctccccg

SEQ ID NO: 718528 - DNA, 101 bp, Homo sapiens
atggggcccctccgcgagagcaagatatcttaatgcaattcagacaatgtgtccacacattcttcgctatttgactacagcagtcataacaaacaaggatg

SEQ ID NO: 718529 - DNA, 50 bp, Homo sapiens
ggaggatgatgcagcatccaactacgaattggagcaatgttggcttatac

SEQ ID NO: 718530 - DNA, 101 bp, Homo sapiens
tctgaaacttcttgacaatttgcttgcgcttataaggtccggcgccagctgccagtcgaggaaccgaacccagccaaaaggcttctctttctgctgctcac

SEQ ID NO: 718531 - DNA, 96 bp, Homo sapiens
ggacaaaacccaccaagatccagattgaagctattcctttggccttacaaggttgttaaaaaagcagacatgatcaacaaaaatatgactcatcag

SEQ ID NO: 718532 - DNA, 82 bp, Homo sapiens
gagtggctggagtgccagaagaggatcgacgcctatgtcgacgagcagcagatcgaggcggagaagaagccgacgagtgccc

SEQ ID NO: 718533 - DNA, 90 bp, Homo sapiens
atcacatatcccaactgtcagaggagcaggtttacaggaacagatggacctagtggttttggctttgagttgacctttcgtctgaagaga

SEQ ID NO: 718534 - DNA, 75 bp, Homo sapiens
atgatccctacagcagatatgccaaagtcacccttcaaaagacgacgatgagctttgatccaaaccttctccaca

SEQ ID NO: 718535 - DNA, 100 bp, Homo sapiens
gttgcttggcctggtgggcccagtcctcggtgcggcgcggccaggtgaccaagaatatggcccaggtgaccaaagccctggacaaggccctgagcaccat

SEQ ID NO: 718536 - DNA, 100 bp, Homo sapiens
agcagctggccaagacccaggaggagcgcgcacagctcctgcagcccacgctggagatcaaccccaggctgagcggaaggaggagaaaaaggcggctgcc

SEQ ID NO: 718537 - DNA, 76 bp, Homo sapiens
tgttcttttgctgcaaatgaagttgatggaattacactgtgatacgactgacttattgctgacagacagaacgcct

SEQ ID NO: 718538 - DNA, 98 bp, Homo sapiens
ctgcctcagcctcctaagtagctgggactacagttgagggagaagacttgcaacaagaagatggacccacaggagaaccacaacaagaggatgatgag

SEQ ID NO: 718539 - DNA, 75 bp, Homo sapiens
gcccaaccgtgttgtatgtgagtggaggaaatacgcagaattatatccagatcgagagacagaagattctgaaag

SEQ ID NO: 718540 - DNA, 95 bp, Homo sapiens
cgtggagcccggcaatgccgccatccgggagaagctggcctgggccaagggccatgaagcccccaggaggagaatcgagcaatctttttggaagt

SEQ ID NO: 718541 - DNA, 100 bp, Homo sapiens
agattagaacacagttcctcagttcaagaaggtctctccaagtttgtgcctaagaagatgataatcacacaaacaagtcactgttacatgaccagccttg

SEQ ID NO: 718542 - DNA, 80 bp, Homo sapiens
gtgagtgccctcaggggttccccaggaatatcgatacaacaccaacaggaaagcttcctgctgactcaaaaggatttttc

SEQ ID NO: 718543 - DNA, 75 bp, Homo sapiens
gcgccggctgaaggcgacggtgtcggagcagctcagccaggatttgctcagtctgcgggccaggcatcgacatcc

SEQ ID NO: 718544 - DNA, 83 bp, Homo sapiens
gcctaatcaaggagaagactgctatttttttttctattccacatgtaccaaagtttaccgaactaatcagtgtgctggggagt

SEQ ID NO: 718545 - DNA, 87 bp, Homo sapiens
cgggcatagaggatgcaaacgctgtcaggggttcagcctctcagaccctcctcagaacttgactgtgactgtcttccaaggagaagg

SEQ ID NO: 718546 - DNA, 91 bp, Homo sapiens
agaagaggcacgagatgccgcctcacatctacgccatcgcagacacggcctaccggagcatgcttcaagatcgtgaggaccagtccattct

SEQ ID NO: 718547 - DNA, 100 bp, Homo sapiens
gtgcaatgttcaaagtactcaagatgaatttgaggcaaagcagagagcagaggttcttcagtccacgcaacggttcttctctgaacagcaacagagcaaa

SEQ ID NO: 718548 - DNA, 82 bp, Homo sapiens
ccctgagcccccatctgctgaaccctgactggatgaggaagtacagacaattggtcagatagaactgtgcctcactaagcaa

SEQ ID NO: 718549 - DNA, 100 bp, Homo sapiens
gggggtgaccattaaacaggagcagaacttggaccagacctacttggatgatgaccctgaggggcgagctgcgcttcgacatcaggaaggcggggaccct

SEQ ID NO: 718550 - DNA, 83 bp, Homo sapiens
tttacaagattttagtcatcttgaccacaggattttggccccaaacagtaattatcaagatgttgagaccctctataacttcc

SEQ ID NO: 718551 - DNA, 98 bp, Homo sapiens
gacttgggaccccctcaggggaacagcgagcagatcaaaggaatactcccccagttgcaagaggcgcaggaccgtggaagacttcaacaaattctgca

SEQ ID NO: 718552 - DNA, 139 bp, Homo sapiens
ctactttgactttcaagtgggcgatgagcctcccattctcccagacatggggaacagggtcacagctctcacccagattgatgaactcccagagggcgctgtgaagcctccagcaaacaagtatcctatcttctttttt

SEQ ID NO: 718553 - DNA, 100 bp, Homo sapiens
ggcgcacgtcggctcccacgcttagccagctcccggaaattgacaatggcccttcagctatgctaggtctataatgggaagtgtcacagttcggtatttc

SEQ ID NO: 718554 - DNA, 75 bp, Homo sapiens
ctttcccgctggcgcgcagcctcagctagatctgcgatgagctgggagtgaagcggccatcttctgtgaaagtat

SEQ ID NO: 718555 - DNA, 50 bp, Homo sapiens
cgcagtgagtgttacagctcttaagacgcccagcggcagcaggatgagtg

SEQ ID NO: 718556 - DNA, 74 bp, Homo sapiens
cgcttggttaaaacctgacacttttaacagaagaagctcattcacacagaagacccatttaatgatgaacatca

SEQ ID NO: 718557 - DNA, 82 bp, Homo sapiens
acggcaggaacgtgaccgtcactgacgtggacatcgtcttcagcaagatcaagtatcgagaaccttccctgcgaacttcaga

SEQ ID NO: 718558 - DNA, 100 bp, Homo sapiens
atttacgtggagacctgtgggcaaaacactgagaaccaagtcaacccggccacctttgggaagatcaacagtacaaattctgaagtttgtaaacttgctg

SEQ ID NO: 718559 - DNA, 75 bp, Homo sapiens
ttgtctacatgcagctgcagctggagggtggacccccaaaagtacaagggcatatttaacggattctcagttaca

SEQ ID NO: 718560 - DNA, 76 bp, Homo sapiens
cgggcattctccatctccttgcaggtccctctaaatgatatgtttggttattccactgaacttaggtcatgcacag

SEQ ID NO: 718561 - DNA, 82 bp, Homo sapiens
cctgaccaagtccagccccagcatggcaattgaaaatggaagccctgactgacagggaacatggaatgatagaccctgacag

SEQ ID NO: 718562 - DNA, 82 bp, Homo sapiens
cttaggcaggaggatcactcgagcccagaagatcaagactagtgtgagcaacaaacacatgattaagtaccggtacatcccg

SEQ ID NO: 718563 - DNA, 90 bp, Homo sapiens
ttcaatcttctgagccttgtacctgtaggagtggccaaaaaaggagaaattgttgttataagggaagaacagctttgcattggtcctgca

SEQ ID NO: 718564 - DNA, 75 bp, Homo sapiens
tgctcggccgatgaagtgcagaggtttttttctgattgttgatccatttcagatacttgtggcagcaaacaaagc

SEQ ID NO: 718565 - DNA, 80 bp, Homo sapiens
ccgcaagttcacctaccgcggcgtggacctcgaccagctgctggacatgtcctaacaatgcagatcttcgtgaagactct

SEQ ID NO: 718566 - DNA, 90 bp, Homo sapiens
cgcggatttttggcctcatactctgttatagataaacaagctcttggagataaaatcgtgagggatattcgccctggagctgcctttgag

SEQ ID NO: 718567 - DNA, 100 bp, Homo sapiens
ccccaagcggtgtctctcatcctgactggggatccagagtaggagggagcctttggtggggcatcctagaatacgtttccacacgggtcttgtggatgcc

SEQ ID NO: 718568 - DNA, 145 bp, Homo sapiens
cacttcagggatgccacctcccacctcagggcccccttcagccatgactcctccctacccgcagtttgaggaagatgagaatgtgcctactgctcctgatcctccaagtcaacatttacgtgggcatgggacaggcttttgcttt

SEQ ID NO: 718569 - DNA, 101 bp, Homo sapiens
atctgcacttcgcattttggcattgacatttaattttagggtcctttatatagaagggagagtagccaaaccaaacaggaagcttacttttctctacctag

SEQ ID NO: 718570 - DNA, 123 bp, Homo sapiens
agagagaaaattgagacggagctaagagatatctgcaatgatgtactggtacaatgactcttcttgcttttcacctaagttgaataagcaccctgtgcactttaatctcctgtcggtaccatt

SEQ ID NO: 718571 - DNA, 98 bp, Homo sapiens
gtatctcatgccacggccaaattcagtagcagtggatgctgtggggcaccacctccttgaggaccaaggcactccagctgccaggaatttggctgcta

SEQ ID NO: 718572 - DNA, 100 bp, Homo sapiens
tcgggggcctcatcagaaatgttacacacggagtatcaaactctgctgccaaggcagagactccccctaatgggccagattgtggctatggctcctttca

SEQ ID NO: 718573 - DNA, 75 bp, Homo sapiens
gacctgcaagctctttgacacacagcagttcttgtcagatatgaagatcaatgatgcagactgatggttttgatg

SEQ ID NO: 718574 - DNA, 98 bp, Homo sapiens
aggatcttcgaaatcatcttgttcacaaactgatcacctcctcgcacggggagcatctcctacatcaacatcatcatgccttcggtgttcggcaccat

SEQ ID NO: 718575 - DNA, 75 bp, Homo sapiens
gaggaaggatggatccctcccgactgcgatgactcctcagtggtcttccgttaacacagaaatctgcctcctggg

SEQ ID NO: 718576 - DNA, 83 bp, Homo sapiens
ctcctgtcagtggacagtttggggaccctcacaatgatcccaatgctcagggggatgccttcaagactctcttcgtggcgaga

SEQ ID NO: 718577 - DNA, 100 bp, Homo sapiens
ggaggggagcggagcccggagcgtcgtggaaagagtcatgtgctgttcctggggcttggatgatgtaggggaagcaaggtgaaagtggtatcccgtggtt

SEQ ID NO: 718578 - DNA, 50 bp, Homo sapiens
cgcggagaagaacggggagccagaatggcttattcagaagagcataaagg

SEQ ID NO: 718579 - DNA, 50 bp, Homo sapiens
gtttcggaaatgcccttacagcagcagatcaatgtccgagttaccaccat

SEQ ID NO: 718580 - DNA, 90 bp, Homo sapiens
tcgcactgcgcggagaaggggtccgagggcagtctgtgtcaaacgcaggttgctgaaaagccaggagtcaaaatgactgagcgctttgac

SEQ ID NO: 718581 - DNA, 83 bp, Homo sapiens
ctgccgtctctggaggagtactggcaacagttcaaggagcagggacaagttacaggaatgttctccaagcagcaatccaaaag

SEQ ID NO: 718582 - DNA, 75 bp, Homo sapiens
tggctgacatggccaccaacacacgtgaacccagcttagactagaaagtctagaagacacacacataatgaaggg

SEQ ID NO: 718583 - DNA, 51 bp, Homo sapiens
gagcctgcagagcgcgcagtacctccgagttgatctctctaatgtattaga

SEQ ID NO: 718584 - DNA, 83 bp, Homo sapiens
attcacttctagacgacaaaatgcaaaaaaggaggccaaagactttgttttttgccctgacatctcttcgtcttgtgttttta

SEQ ID NO: 718585 - DNA, 80 bp, Homo sapiens
ccgtggggaaactaaaaacgcatctatctaacgtttaccctagcaaaccagatttaagtgccctgtatgctcaaaatttg

SEQ ID NO: 718586 - DNA, 50 bp, Homo sapiens
aaatgcaaaacagtggctgttgcagcatcctgaggttagcattacacttc

SEQ ID NO: 718587 - DNA, 75 bp, Homo sapiens
tccgggtgggcatgaggaaggagggcagttatacttaagcatgaacattgacgacaaactggaaggattgtttct

SEQ ID NO: 718588 - DNA, 98 bp, Homo sapiens
cgaaagactcctgctgaaagaagacagcactctgaaagcagctggaatcggtattgctattaaggagtcagcaaaagtgggtgatcaagctcaaagga

SEQ ID NO: 718589 - DNA, 100 bp, Homo sapiens
atttacctgggtgagacagcttgagccccatcgtggattccaagacatccctgctgagagagccaagataaactcatcctgaaagtcgctgttgttctcc

SEQ ID NO: 718590 - DNA, 83 bp, Homo sapiens
gtgcgcctgggggtgcgcgcctgcgacctgcccgcctggcaattctgtggtgttcttggtcacacatttatggagtttctgaa

SEQ ID NO: 718591 - DNA, 90 bp, Homo sapiens
tgcctccgcctgtgtcttctgcagtgattttaaccaaggcagttggtggaaatgagtgccctgcaggagtcattaaatcaaaacttcatg

SEQ ID NO: 718592 - DNA, 90 bp, Homo sapiens
tggtgcctcatggaaagcgaccccggggtcttcaccgagctcattaaaggattcgttactccacaggatccgctgaacataggatgttgc

SEQ ID NO: 718593 - DNA, 78 bp, Homo sapiens
tcagacctgggcacagcaaatgctgaggactcagaccagtctctgcaagactcagatcgtctgatagaagagacaata

SEQ ID NO: 718594 - DNA, 100 bp, Homo sapiens
ctcgttgtgttcggggtgggaagcccacgggctcaagacattgaaacgctaaagaaatttctcctgaataagaagcctcatgtagtgacagttgcaggag

SEQ ID NO: 718595 - DNA, 75 bp, Homo sapiens
ccagaacaggagatattccagatgagaggtggtgggcccagggtcctcctgggcctacaggtcctcaaggcccca

SEQ ID NO: 718596 - DNA, 48 bp, Homo sapiens
tccccagaaatccaacttctcaagggtgataaaagaaaatgtggctga

SEQ ID NO: 718597 - DNA, 74 bp, Homo sapiens
ctcctcagagtccgactctcccacctgctaaggacccagatgatgtggtaccagttggccaaagaagagcctgg

SEQ ID NO: 718598 - DNA, 100 bp, Homo sapiens
attctgctcagctggaattttctgtaaacttatcactattagatttcattagggcttttaccaagatggcctcagctccggccagctatggcagcactac

SEQ ID NO: 718599 - DNA, 98 bp, Homo sapiens
ctgtctctatgaatgtgactaccctggttacctcatatctggaggaaagcaggaatgttcagaggcaaatgaagattctgcagaataagcaagctcag

SEQ ID NO: 718600 - DNA, 96 bp, Homo sapiens
cagagcgtcacggcgtacgccctcatggggaaaatctccccggtgactttcagctctggattaatcgaattacagctgctagccaggaacatggac

SEQ ID NO: 718601 - DNA, 75 bp, Homo sapiens
ccagagattcatctttcatgcagtgacatgttgataaaaaatgatggggatgttcgtctaaccccagaagacttt

SEQ ID NO: 718602 - DNA, 83 bp, Homo sapiens
cggctgtgtattactgtgcgagaggcacagtgaggggagatgtaggtgcaaaaaactacagacatctctgtgctgtttattac

SEQ ID NO: 718603 - DNA, 75 bp, Homo sapiens
ttgcctttgttgattaactggacaaattcaggtactactgagcgagtgtgcttgatccagggaacggttgaagca

SEQ ID NO: 718604 - DNA, 96 bp, Homo sapiens
gtgatgtccaggaaggaggaggaataatatttatggagcatatattatggaacacaggtacagctcgcagaaagaagaaggtggtacatagaacag

SEQ ID NO: 718605 - DNA, 80 bp, Homo sapiens
aaggatctccgtgtagaactccttggagaggaactgtggctgcaccatctgtcttcatcttcccgccatctgatgagcag

SEQ ID NO: 718606 - DNA, 100 bp, Homo sapiens
cagcgcccagcaccgccgctcccggcaacccggagcgcgcaccgcaggccggcggccgagctcgcgttatgtgtctcggtaccacgtgaaagactcctca

SEQ ID NO: 718607 - DNA, 90 bp, Homo sapiens
ggccaaatttgaagagaatgcgcccgcacagtccatcggcatacggagacaggctacccacctttctgttctgagacccctcaagagaca

SEQ ID NO: 718608 - DNA, 75 bp, Homo sapiens
gcccagctcaagaacggcagccttgactccccagggaagcaggatgtttggatctggccgagaacataactttac

SEQ ID NO: 718609 - DNA, 89 bp, Homo sapiens
tgatgccattccagcactggactcatggaggctgagcatttattcaggtcgagatgacatgaaagcagactgtattttgtactacggct

SEQ ID NO: 718610 - DNA, 100 bp, Homo sapiens
ctggaggctgagttcttggctttggtcgggggccagcccccagccctggagaagctcaaaggcaaagcttcctgcctgacacagctcacttcaagaagtg

SEQ ID NO: 718611 - DNA, 100 bp, Homo sapiens
gccgtcccgtccgacagccaggcccgggagaaaggccagcagaaatagtagacgaggaagaagatggagagaaggcaaacaaggatgcagaacagaaaga

SEQ ID NO: 718612 - DNA, 100 bp, Homo sapiens
cctctccaccgtgacggccatcattgacgggacgggctctgtagttcctccaggagtgatccaaaatggagcgcgggtcctgagccgagggctgtttcct

SEQ ID NO: 718613 - DNA, 96 bp, Homo sapiens
caaagtggaccaagatctcattatgactcagaaaaagtcttatgatgtaatcagcgcgatttcacttcctgaatttcgatgaattctaagacatgg

SEQ ID NO: 718614 - DNA, 50 bp, Homo sapiens
ctgggagcttgctgcagcttcaggctctacagattctcccctgcccctgg

SEQ ID NO: 718615 - DNA, 100 bp, Homo sapiens
atgacaaaaagcttcagagttctctaaaaaaactggctgtgaataatatagctggtattgaagagagtactattaatcccgtagatgcaatatatcaacc

SEQ ID NO: 718616 - DNA, 74 bp, Homo sapiens
gcaaaccagatatatgacttgaacaccatcctgaaggaccaggaggaagacagtgacatcctgacatcttcaga

SEQ ID NO: 718617 - DNA, 75 bp, Homo sapiens
gcaccgcagatgttgtcaaggtggcctaccaggaggccaggggtgtcgccatgaacccccagtcggatcttcagg

SEQ ID NO: 718618 - DNA, 83 bp, Homo sapiens
cacagtgttaacaatgcatccacagaggccgcaccagcttctatgaggagtacggtgtcattcgcgacgtcctccagaaccat

SEQ ID NO: 718619 - DNA, 87 bp, Homo sapiens
cctgaacaacagcacactgaaggaggctcagttcaaagacctgttcttaaaaaaagcatcaagatggtgctcatgtggaccagtggt

SEQ ID NO: 718620 - DNA, 90 bp, Homo sapiens
gcactgttgcctatcagaagtcaattcaaaggacctgcccccagagagacggaaagtgaccagaagaggtgtgcagtttccaggcctggc

SEQ ID NO: 718621 - DNA, 75 bp, Homo sapiens
atttgctacagcatcccacattaagtcaacgggaattggagaagcagagggaaagcgccgccaccgatgtgctgc

SEQ ID NO: 718622 - DNA, 75 bp, Homo sapiens
gaatgctactggggccacgtcttctgggaccaggtgagcatgggtttatgcgtcttaggcattattgtgatggcg

SEQ ID NO: 718623 - DNA, 100 bp, Homo sapiens
ctgaaattgaagatccaccaattccagaaaaaccatggaagatttgtgacattatttccaaatgggaacaggcttccaaagaacagcagcctggaaaatg

SEQ ID NO: 718624 - DNA, 90 bp, Homo sapiens
acgctcacagtgctgggaaggaatctatccaagaattagaggagacagcactgattgcagtgacagaagcggtgccagctaactccccac

SEQ ID NO: 718625 - DNA, 101 bp, Homo sapiens
gggtgagcacataaaaaatccatgtcttgcacctgtattttagcgtactatgcagggctgatcccttatccaacatggttctaaccttcagtactaaagaa

SEQ ID NO: 718626 - DNA, 75 bp, Homo sapiens
tgggggtcgagcacataacggggttcgggtgtctcgtgtgtgaacatcacaggctctggagaaaaatcagcagtg

SEQ ID NO: 718627 - DNA, 80 bp, Homo sapiens
ggatccaagatggcgacggcgatgtgtaaacaggaacatcgataagtagtgtaaaaacttgcacaatgaaatccgaagcc

SEQ ID NO: 718628 - DNA, 74 bp, Homo sapiens
ctcagacaatagcaccaaggcagcgtgggactccatccagtcatttacaaagaaccggcgctgcaaactgctgc

SEQ ID NO: 718629 - DNA, 101 bp, Homo sapiens
tagacagaagatctctggaaacatagatacaccagaaggaggttttgacgccatgcttcaggcagctgtctgtgaagcaaatccagatcccaacacttgcc

SEQ ID NO: 718630 - DNA, 101 bp, Homo sapiens
aaattttatatcacacaactgaaaacagattctgagcaccttgcagagtgaagtcaagcccatcctagagaagctgacccaggaccaggatgtggacgtca

SEQ ID NO: 718631 - DNA, 51 bp, Homo sapiens
cacagtggaaaggaaccgttctggatcagattgtagaaggcatgaaacaaa

SEQ ID NO: 718632 - DNA, 97 bp, Homo sapiens
gaaaacatgacgtctccagccaaattcaaaaaggataaggagatcatagcagagtacgatactcaggtcaaagcttatgtccctgatgccaaaaatg

SEQ ID NO: 718633 - DNA, 50 bp, Homo sapiens
cagcagatggaatcaagtacttcatcaaatggagtctcgcactgtcgccc

SEQ ID NO: 718634 - DNA, 123 bp, Homo sapiens
tcagagcgtcacggcgtacgccctcatggggaaaatctccccggtgactttcaggattactacagcatcccatttcccacacccactactccgctgactgggagggatggtagcctggccagc

SEQ ID NO: 718635 - DNA, 100 bp, Homo sapiens
cggcgtgcagcgaggaccgcatgaccctgctcctcagaaaatggacccaagtggggtcaaagtgctggaaacagcagaggacatccaggagaggcggcag

SEQ ID NO: 718636 - DNA, 80 bp, Homo sapiens
cagaccctggagcctcagttggaagcagccgatccagcctgcggagcctgtggggcagaaatcaggacctttgatattta

SEQ ID NO: 718637 - DNA, 51 bp, Homo sapiens
cgtacccacagtgcttcatgagaggtctgaaggacacaccaactcaggaag

SEQ ID NO: 718638 - DNA, 100 bp, Homo sapiens
tgagaagaagcggaaaaaagaaaactctagaagtctggatgtcggtgggcctctgagatatgccgtttacggatgcatcaaattgcaatttggaggagag

SEQ ID NO: 718639 - DNA, 109 bp, Homo sapiens
aactgaggccctgtgatgtgaagtgacttgccccccagccacacagctggaactgtggctgcaccatctgtcttcatcttcccgccatctgatgagcagttgaaatctg

SEQ ID NO: 718640 - DNA, 83 bp, Homo sapiens
cttcgagagctaccgcgccagacaggtgatgtgtccaatctagatcccaacttctcatttgaaggcaccaaactggatgtggg

SEQ ID NO: 718641 - DNA, 75 bp, Homo sapiens
ccttggcggagcctgcctgcagtacctaggtgctgatatggaagaatttcatggcaggactttgcacgatgacga

SEQ ID NO: 718642 - DNA, 82 bp, Homo sapiens
aggcaactttgtctatcgcacaggtgctgaccttaaggaaagagccaaaatgagttccagtgaagttggtccttttgtctcc

SEQ ID NO: 718643 - DNA, 90 bp, Homo sapiens
gtccgccatcccgtcaagctccatccctttgggcagacagcccatggcacagagctcttcagaaaccaggctgctttcaggaacattgct

SEQ ID NO: 718644 - DNA, 95 bp, Homo sapiens
ccttcagccaaagaaacaagccgtggaataggtgtatcaagtaatggtgcaaagcctgaaggcaagagtgctgacttcactaacttcgatcctcg

SEQ ID NO: 718645 - DNA, 75 bp, Homo sapiens
ggaaaagccgttgagaggaccatcacaacctgagcagcacagggctgaagaagatgcagagcagcctgaagctgg

SEQ ID NO: 718646 - DNA, 100 bp, Homo sapiens
aatgcatcagtgcccttgtggcgaatggggctcacgtcgactctctttaccatcatcaccttcccgtttttatttgctgtgatgtttggagacttcggac

SEQ ID NO: 718647 - DNA, 75 bp, Homo sapiens
ctcgcgctactctctctttctggcctggaggctatccagccttttcttggacagtgacttactttgattcttttg

SEQ ID NO: 718648 - DNA, 100 bp, Homo sapiens
ccccaccgccagctccaccatcaacatcaacacctccacctccaagttctcttcctgcctgacacagctcacttcaagaagtgcacaatgtcagaacgtg

SEQ ID NO: 718649 - DNA, 98 bp, Homo sapiens
agagctgcaggctgtcgaaagcccatttcaagctttgtgctgcctcttgatctacctctttgtccagatattgccgatgtttctgtcaaacagtgtca

SEQ ID NO: 718650 - DNA, 138 bp, Homo sapiens
tgatggtgattcagatgatggcgaagatggtcgaggtgatgagaaacggaaaaataaaggcacttcgcttgccacagctaccttggatggtaaactccagctctttctagctgagtaaccactgacctgtgagctggg

SEQ ID NO: 718651 - DNA, 80 bp, Homo sapiens
ataagatccagccttgtttatcaaagccagcttttgcctctctgctgaggaatgtctgaatctgaacaggctcttaaagg

SEQ ID NO: 718652 - DNA, 100 bp, Homo sapiens
tgtactctcaggaactattccagctttctcagtatctacagagatggtgtttcaacttaaaacttgtgaatgtgaaatatgagccaaaagactctctcgg

SEQ ID NO: 718653 - DNA, 100 bp, Homo sapiens
atggaggaaaaagaagaccagcgacaaatttagagaaacctcggcagtattgctgacagacagaacgccttggaggctgagtggaggacggtgcaggcct

SEQ ID NO: 718654 - DNA, 94 bp, Homo sapiens
aatgacaagattttaaaaaaatcccatgaggagaaggcattctaatttaggggctcttggctttgggcctcagtgcaagtccattggaaaaggc

SEQ ID NO: 718655 - DNA, 101 bp, Homo sapiens
ccaaaatactgggattataggcgtgagccaccatgcccagccaaaaactttaaacttagaagaacattgcaaggccctgggaggagcggggacactgagga

SEQ ID NO: 718656 - DNA, 82 bp, Homo sapiens
aaaaactcaggcttcgccacctgcgtgcaaagtttggtgcacctcgatttggaggaagtagggcagggcccttatctggaaa

SEQ ID NO: 718657 - DNA, 74 bp, Homo sapiens
gactacggacctgtctgggtctcagccgccaaagaccccgtccgggtgatcagttatgaagaagggaaagcttt

SEQ ID NO: 718658 - DNA, 75 bp, Homo sapiens
gccgcttatcttcaggagcgaagagctgcttctgtatcttaaggcatggctaatgtaaaagcagccccaaagata

SEQ ID NO: 718659 - DNA, 83 bp, Homo sapiens
gcatggcccatcccctaatttctgaccagaagccctccctctaccctaagggcgaccattgacgaggtggagacggacgtggt

SEQ ID NO: 718660 - DNA, 75 bp, Homo sapiens
catattatcgacgtagttaaagcccactagcctaaagccgggcggactgcggatgataatgaagataattcaaat

SEQ ID NO: 718661 - DNA, 111 bp, Homo sapiens
gattctggcatcagggaggctttcagccggagaagcgagtttcagctgagagaactcgatgccaccgcaacggtattggcgaaccggcaggatgaaagtgagcagtccaga

SEQ ID NO: 718662 - DNA, 100 bp, Homo sapiens
ctgaaggagtgtggactttttgaatttcaagaacagtaaagttggaacacagcagagggtgtgtaataaaatacaggcacctgaatggacagaagaggac

SEQ ID NO: 718663 - DNA, 100 bp, Homo sapiens
ctcaagatctcagagaaggaggaggtgaccacgcgcgaggtcgcaatggaagaagagatcgccgcgctggtcattgacaatggctccggcatgtgcaaag

SEQ ID NO: 718664 - DNA, 83 bp, Homo sapiens
gcgctactctctctttctggcctggaggctatccagcaagaagaaaggagggcgcgggctaatgaccgagaatacaatgagaa

SEQ ID NO: 718665 - DNA, 74 bp, Homo sapiens
aggacatcctggaacctgggaaagggccaggagtggtggctcacacctgtaatcccagctctgggaggccaagg

SEQ ID NO: 718666 - DNA, 100 bp, Homo sapiens
tcggaacccgtggtcctccgcttcatgagctggtcgctgtcggctaagcaagattggagctactcgtcgtccacctccagctcgcgtaagggtggctgtg

SEQ ID NO: 718667 - DNA, 100 bp, Homo sapiens
cccgaagccccctgcaggaactctacaacccaatccagcgttccctgctggctgtggtggagattggtgtgctgtgaattgcataatcacccaaatgagt

SEQ ID NO: 718668 - DNA, 100 bp, Homo sapiens
gagagcggcctcctggcatctgccggctgctccgcaccccggggtcccaggaagggcggcccaggtggacggcctgttcatcatcgggtggatgtacctg

SEQ ID NO: 718669 - DNA, 50 bp, Homo sapiens
ggcacattcagctcctgtaagaaggaaattcacagtatggccaacagcaa

SEQ ID NO: 718670 - DNA, 100 bp, Homo sapiens
cagcagctccagccagcggacccgacggctgagagaattcctagaggacctgtgcaacaacctcttgaggatcgaatcttcactcccgctgtctcagcag

SEQ ID NO: 718671 - DNA, 100 bp, Homo sapiens
gaatctgagcaccaactgcacctcaccagctgttcaacggttttgtgtatagcatttgaggttcttcagggcttgcagtatatgaacaaacatggtatag

SEQ ID NO: 718672 - DNA, 75 bp, Homo sapiens
catttaattttagggtcctttatatagaagggagagtagattgggatcaaagccactcacattaagttaccaaga

SEQ ID NO: 718673 - DNA, 50 bp, Homo sapiens
cctgggaatttggaggtgggttcgaaaaaataaacaggggtcacatgacg

SEQ ID NO: 718674 - DNA, 75 bp, Homo sapiens
ccccatggggctggcctgcggcgcctgggcgctctgagccaagtgggaaagggccccggttgccagaggtgtact

SEQ ID NO: 718675 - DNA, 100 bp, Homo sapiens
agcatcatgccatctctgctaaactgaacaagcccttcctgtttgacaccaagcctctcattgttcagtatgttgagtctaaaaaggacagagtcacagt

SEQ ID NO: 718676 - DNA, 75 bp, Homo sapiens
ctcagctcactgcagcctccacctcccagacaaagttggaattgaagctgccgaaatgctattagcaaatcttag

SEQ ID NO: 718677 - DNA, 50 bp, Homo sapiens
ctttgcagaaatgactacattagttaagatccttctattctacgtaatat

SEQ ID NO: 718678 - DNA, 75 bp, Homo sapiens
acgagtccctcactgcctctgtccagagtgacctgaagctctgttacgaagctgttgcagggtgtgatggagaac

SEQ ID NO: 718679 - DNA, 98 bp, Homo sapiens
attgacatttaattttagggtcctttatatagaagggagagtagggcttttaccaagatggcctcagctccggccagctatggcagcactaccactaa

SEQ ID NO: 718680 - DNA, 75 bp, Homo sapiens
gagctccacattcaggggaaccgcctcaccgttctgcccccagaactagggattaatgaaaatcaagttccatcc

SEQ ID NO: 718681 - DNA, 75 bp, Homo sapiens
gacagtcaccgcaggttcgaagatctctggaaacatggctacagaacatgttaatggaaatggtactgaagagcc

SEQ ID NO: 718682 - DNA, 75 bp, Homo sapiens
aggtgttttggatgcattctagaacacagttgtattccctgaatgactataaaccacccatttcgaaagcgaaaa

SEQ ID NO: 718683 - DNA, 103 bp, Homo sapiens
cagaaggacagcataaggaagccaagttggaccgttctgatgtgactgagagagaaggaatatattaaaggaatctgtgaacctgaactagaagaaagagaat

SEQ ID NO: 718684 - DNA, 82 bp, Homo sapiens
tagtaacggaaactgtagaggggcaagcagtgatctcagtggttcaatagcatccccagatgtcaaattaaatcttggtgga

SEQ ID NO: 718685 - DNA, 95 bp, Homo sapiens
ccgatcgccgcggggcagttcgggccggctgtcctggcgcgatagaaaagtgatcatgtccaatgggagactgaagtgtgcaggttcttctatgt

SEQ ID NO: 718686 - DNA, 101 bp, Homo sapiens
acacttgttacatgaatgccacagttcagtgtattcgttctgtgcctgaactcaaagatgcccttaaaagatccgccgtcactggggtggcaatgtcctgg

SEQ ID NO: 718687 - DNA, 75 bp, Homo sapiens
gcgacgagctgaccctgggagacatcgacggagtctgctacaccatttttgatttgggcttccgctttgatgtgg

SEQ ID NO: 718688 - DNA, 100 bp, Homo sapiens
tggtgaaagtcacatttaataagcaagactcccttgtaattctcaccatcatgaccaccctgggccccctgttccggaactcccagttggcacagttcca

SEQ ID NO: 718689 - DNA, 100 bp, Homo sapiens
cagaagtggtgcacaggtactaccgaccggacctggtcctgtgggaagagcagcgtggaggtgggctgaggttagaaggtgcagagcgtggaagaagatt

SEQ ID NO: 718690 - DNA, 90 bp, Homo sapiens
gcggagccagcctgggtctcagccccgcgtacggcctttcacgagtcttcaagccttcaggctcccttcacgtgggggatgagatcctag

SEQ ID NO: 718691 - DNA, 100 bp, Homo sapiens
ctggggctgggattggaactgtgtttgggagcctcatcattggttatgccaggtcaaagattctaaactgcctgcatataaggatctcggtaaaaatcta

SEQ ID NO: 718692 - DNA, 100 bp, Homo sapiens
tgaggctgtgggtcccacccactcagctcactcgggcctctggccaacagggcatggggacatcatatcaggtttacccaaggtccagcctagcccctag

SEQ ID NO: 718693 - DNA, 90 bp, Homo sapiens
agttaccaaaattgctgtgctctcactttctgaaatggaacctcaggatcttgagctagagggtcagtatagaccttctgatttgctgtg

SEQ ID NO: 718694 - DNA, 98 bp, Homo sapiens
gttgccggagctgagaccgggcggccacagtccgcagggatgaacctcgagttgctgggcatctgtggctcttgtgcaatgaacatcaatggaggcaa

SEQ ID NO: 718695 - DNA, 82 bp, Homo sapiens
aatgcatgcgaccgatccccttctcccggaccccaggagccggcgcccccgccctgtaggtgccagaaccctgtggagcatc

SEQ ID NO: 718696 - DNA, 82 bp, Homo sapiens
aacagtgatgatcatatctcagttagagctaccatccttttaggagagcttttacatatgggcaggctttctattttaaaag

SEQ ID NO: 718697 - DNA, 100 bp, Homo sapiens
aagggggaccctggtgtttcacaagcaatccagaggtacgctacgaagtctgtgacattcctcagtgttcagaagctactggtcagaagttatatgtaag

SEQ ID NO: 718698 - DNA, 76 bp, Homo sapiens
caaattcacattcttctaatccaagcaataacccaagcaaaacttcagatgcaaaatgcactcggtgatggaaaga

SEQ ID NO: 718699 - DNA, 82 bp, Homo sapiens
ccactaatgaagttgggaactcagaccgtaccttgcaacaagcttcttggacacttaatgattgttggcaagaaatgtgctg

SEQ ID NO: 718700 - DNA, 75 bp, Homo sapiens
agcacggcctgaagccggtggtgggcgaagtgtacgatcaagatagcctgggctggaagctcttctacgtcacag

SEQ ID NO: 718701 - DNA, 50 bp, Homo sapiens
ataacttcttcatgggataataatgtactttgagaatcactacaagaaaa

SEQ ID NO: 718702 - DNA, 83 bp, Homo sapiens
ctccaggagttcgtctcttacgtctgcggaagtgcagctgcctcagttcttagcgcaggccttgctattttggaagctacaag

SEQ ID NO: 718703 - DNA, 82 bp, Homo sapiens
atttggatgtgggatccggttccttggtgtcatccagccttagcaaaccagagggtcatgaaactagtgccttgttaatact

SEQ ID NO: 718704 - DNA, 101 bp, Homo sapiens
gtgtgcattacaggagtcctccacttgccactggttaagtgggcagaccaacatccacctcagcaaaaacttcttcctgacgaatcgcgccagggagcgct

SEQ ID NO: 718705 - DNA, 100 bp, Homo sapiens
agaccagacctgcaagctctttgacacacagcagttcttgtcaggtcctggatggaaggaagcccaccggggggaagctggaggtgaaggtgaggctgcg

SEQ ID NO: 718706 - DNA, 100 bp, Homo sapiens
gacagattgtaggaccgagcgcgggcaggcgggaggcaacggagctaccagccggaaaatcctgccttgcttcgttgggcctatgcaagaacaataaatg

SEQ ID NO: 718707 - DNA, 121 bp, Homo sapiens
atcggcggagaccctcgaagtgcgcaaacttgacactcaccctgaccggtttgctgtaatggcacaagagtatttgtgcagaaagaaattcttgataaatttacagaggaagtggtgaaac

SEQ ID NO: 718708 - DNA, 100 bp, Homo sapiens
tgacagtctgcatgtgcagttttcagggctgcaagtggaattcatcaaccccatcttcgagttctccagggccatgaatgagctgcaactcaatgatgcc

SEQ ID NO: 718709 - DNA, 83 bp, Homo sapiens
ggctgcgctcctttctggccggaggacctgagggcactcgctttgctcctgtcagtacacactcccaaacagttaaacccagc

SEQ ID NO: 718710 - DNA, 98 bp, Homo sapiens
tcccaagtagctggaattacaggttggatacactccagattggatatttctgctgagaaatgtaatgcgaatcagtccagatcagggacagcagtttg

SEQ ID NO: 718711 - DNA, 147 bp, Homo sapiens
cttctttgtcaccaaaaacagaaaaatgcacaacagagggacaacaaaagcctcctacaagagtcctaccaaaagtatggcagatcccagaaaatggactcaccctttccctgactgaacctgtggtgattttggaaggccactcaa

SEQ ID NO: 718712 - DNA, 75 bp, Homo sapiens
gaaaacaaaagctgctacttatggaagatacaaagggtaagaatgattgatgttggctgatattggagtgctcat

SEQ ID NO: 718713 - DNA, 75 bp, Homo sapiens
gacgcggaggcagagaagggaacgcccggcccagccccctggcccgagataacttcttccgctgtggtgtgctgt

SEQ ID NO: 718714 - DNA, 75 bp, Homo sapiens
aacttcggtgcctctctccagcagactgcggcggtgcgtctttctacgtgaataggattttgtggctggccagat

SEQ ID NO: 718715 - DNA, 117 bp, Homo sapiens
cagcggctggtctggaaggaacctgagctacgagccgcggcggcagcggggcggcggggaagcgtatgtgtgaatgaggcaggatgaactggacaggtttgtacaccttgctcagtg

SEQ ID NO: 718716 - DNA, 100 bp, Homo sapiens
gaggcaagtgggggaggagcgttccttgtcctccctctgcacaagcctacaacacagcagtcccctcaggatgagcaggaaaagctcttggatgaagcca

SEQ ID NO: 718717 - DNA, 98 bp, Homo sapiens
cattgacatttaattttagggtcctttatatagaagggagactgaggagtacctgtcatttgcctttgagcattgtcaccgttctagtcagaagaaca

SEQ ID NO: 718718 - DNA, 100 bp, Homo sapiens
gttaacttctgtttacatggaactcagacatctgcaaatcatgtctgatgccaatgcaagttacttaagagcagctcgagctggacaccttgaaaaggcc

SEQ ID NO: 718719 - DNA, 75 bp, Homo sapiens
ccgtccacgtgaaggggcccttctcggtggaggccgacccatccaggtaaaatagaactgcacgggaaacccata

SEQ ID NO: 718720 - DNA, 100 bp, Homo sapiens
ttcctgagggcacctgttccaacaagaaggctttgcttaagttcaaaccaggaagatgagaatgtgcctactgctcctgatcctccaagtcaacatttac

SEQ ID NO: 718721 - DNA, 100 bp, Homo sapiens
caactgaagattcatacgcagctggcagatattatcatagttgctgcagaaacctctgtagaggagcaggatgcaaccgacaggctgtggccggacagct

SEQ ID NO: 718722 - DNA, 76 bp, Homo sapiens
agtgtgttagctttccccaatggtgtagagttcggtgctcgaatgataactattgatgggaaacagataaaacttc

SEQ ID NO: 718723 - DNA, 100 bp, Homo sapiens
cgggtcaagtgcagtacctggatctcatcaaaaaggacaccagcaagctgttcaatgaggaggctgttttggagtcagcggaagatcaccaaggccaggg

SEQ ID NO: 718724 - DNA, 90 bp, Homo sapiens
cgcttcttaagaagcacgaagactttgagaaatcccttagtgcccaggaggaaaagattacaggcctgtacgggagtgtcattgtcaccg

SEQ ID NO: 718725 - DNA, 74 bp, Homo sapiens
gtggcccttccaaataagcggcataaagcaattgagaattcaggctgctttgctggctctgcaagaaaatggac

SEQ ID NO: 718726 - DNA, 100 bp, Homo sapiens
tggagatcactgtagaattgtagtggatgaaaaatcaggtcaggtgacactggaagataccagcagctactccatccgccactcaataagtatgccagcc

SEQ ID NO: 718727 - DNA, 82 bp, Homo sapiens
cagttcgtggcctgttaccacgagctagtgttggagtgcaccaagaaatgaggctgaggggatctggcggtggagcgctagg

SEQ ID NO: 718728 - DNA, 83 bp, Homo sapiens
aagaacgcttggtttcatagagactgtttacaggtgtgttcatcctcgaggtggtgtgattcagagtgtttcttcatggaagc

SEQ ID NO: 718729 - DNA, 85 bp, Homo sapiens
tgctgctggaggaggataacaagttttgtgcagattgccagtctaaagattagtcagaagaagttgaaaaaatacgagaaagaat

SEQ ID NO: 718730 - DNA, 83 bp, Homo sapiens
ttctaatactcctcctctaacatgtcagcgttattgtaatgcaataccaagggaagaacacctacctggagaagattgacggc

SEQ ID NO: 718731 - DNA, 101 bp, Homo sapiens
tttccctctaccttaaggatgtgcaggatcttgatggtggcaaggatcataccctaatgatcccagcaagataatgtcctgtcttctaagatgtgcatcaa

SEQ ID NO: 718732 - DNA, 100 bp, Homo sapiens
agataagcagcctccaaggcttagagaatcatgacctcctggaagtgatcaacctggaggataataaggcagtactacgagatgctttacaacacagctg

SEQ ID NO: 718733 - DNA, 51 bp, Homo sapiens
gatgcccaggatggtccccgagtacgatacctatggaggctccagtcatgc

SEQ ID NO: 718734 - DNA, 50 bp, Homo sapiens
agatcatcgagcatttcaaacggaagccatcttcgacaagagcacaggga

SEQ ID NO: 718735 - DNA, 100 bp, Homo sapiens
tccctctccctgcagtccaccacagatgccacagcagtactcaggtcgagtcccagacaccagaagtctgaatttggagaaggctggggtagatactagc

SEQ ID NO: 718736 - DNA, 80 bp, Homo sapiens
ctggccacttgcttgggatcctttatcctggtcatcttctatttccaaaccttcagtttggaaacctgcagaattatgat

SEQ ID NO: 718737 - DNA, 100 bp, Homo sapiens
cgtagggggtgagggtggaagctgggaaacccacaggaggcaaccacactagtttaggttcattccgacaggaccaccccagtagcatgggtgtttatgg

SEQ ID NO: 718738 - DNA, 100 bp, Homo sapiens
ccggaggcggcccagccgagcgggccatggccaccgccattcagaacccgctcaagtccaagagtgagccatggagctacgtgtggggaacaagtaccgc

SEQ ID NO: 718739 - DNA, 100 bp, Homo sapiens
caggacttggtctgccttggaggcagtcgtgcccaggagcagatgacccgttggcttcctgaccacctggccgcccactgctatgcgtgcgacagtgcct

SEQ ID NO: 718740 - DNA, 75 bp, Homo sapiens
aaatctcgaaggggacctcatgtccctgtgggacacaatgcccccaaggggaaactggctctgggaagacaactc

SEQ ID NO: 718741 - DNA, 100 bp, Homo sapiens
gtttcccaacagtgatgtcacaagattgaccacattgatcacagctgtttttcttcaaataaagaacatggtgaaactgattcacacattagctgatcat

SEQ ID NO: 718742 - DNA, 50 bp, Homo sapiens
gcagcagtagtaccagcagtgacaggtgagatttgtggatttaaaattca

SEQ ID NO: 718743 - DNA, 75 bp, Homo sapiens
ggcatgactacatctgtcatggtggagccgccaccaaaatgcagattttcgtgaaaacccttacggggaagacca

SEQ ID NO: 718744 - DNA, 75 bp, Homo sapiens
cggacgcacgccactttttctctgctgatccaggtgggaaagtctgtgtctcatgagaacaaagaacaagattct

SEQ ID NO: 718745 - DNA, 75 bp, Homo sapiens
ccctggagctggacctgacggtctcgcccaagaacttcaaggtgaaaatgatcatgaagacatcagttctgctca

SEQ ID NO: 718746 - DNA, 98 bp, Homo sapiens
gtgcaaacccgagagaactgggtacggttcctggagcagcagaacaagatgctggagaccaagtggagcctcctgcagcagcagaagacggctcgaag

SEQ ID NO: 718747 - DNA, 82 bp, Homo sapiens
cgaaacgtgaccatgtggattcaacagcttttaggactcagaacccttaggagaaatcttgagagtggacagcaattgtgaa

SEQ ID NO: 718748 - DNA, 99 bp, Homo sapiens
gccttgtgaccaggacacttagaagaagcatggaccctgcaagagggtcctggagatgtggctgagctacctgcagccgtggcggtacgcgcctgacaa

SEQ ID NO: 718749 - DNA, 83 bp, Homo sapiens
gaagatcttctgttgtcatggagaaactaatctggattcactccctctggttgatacccactcaaaaaggacacttctgatta

SEQ ID NO: 718750 - DNA, 82 bp, Homo sapiens
ccgagtgggaggatggcggaaaataccctctaccatctgctttggtcagggtgccgctcgaggatttaaaagcaacaagaag

SEQ ID NO: 718751 - DNA, 50 bp, Homo sapiens
gaagaaaaggaaccctggcctgagtcaggatggctaaaggtgaccccaag

SEQ ID NO: 718752 - DNA, 83 bp, Homo sapiens
atttgcgccatcatcctcatcatcatcatagtacctggagtagaacagaaaaattattatgtctgtgttcccttgggactcat

SEQ ID NO: 718753 - DNA, 100 bp, Homo sapiens
aggacttaaggttgcaagaatgaagatttcagactccaagatcccttattctttgggccttgagcagaagaggcaattcggacataaagagaaacatcaa

SEQ ID NO: 718754 - DNA, 75 bp, Homo sapiens
gagtgttgatagtgtcaatcgttcagttttaatgattttaccaatattttttcagaggccaaaaaggcattggga

SEQ ID NO: 718755 - DNA, 82 bp, Homo sapiens
tacccttgtccacctcgacctctcagggaacgtccttcgtggagatgacctctcaatatggctcgtggacagcagaaaattc

SEQ ID NO: 718756 - DNA, 100 bp, Homo sapiens
aggtttggctttccagagggcagtgtagagctactcagctgcttaagctggcccacaagtacagaccagagacaaagcaagagaagaagcagagactgtt

SEQ ID NO: 718757 - DNA, 100 bp, Homo sapiens
cccataagcccttgttgggaactgagaagtgtatatggggctgcagatccctgggccagttggaatttcctctcccggaagctggccacccagcctcacc

SEQ ID NO: 718758 - DNA, 75 bp, Homo sapiens
accaagaggaccaatacgggcgaacacacgaggagatgccacagagcatcgtggaggccacctctaggcttaaga

SEQ ID NO: 718759 - DNA, 76 bp, Homo sapiens
atggagaccctcacggagctgggcgacgagctgaccctgggagacatcgacgaaaatggacccaagtggggtcaaa

SEQ ID NO: 718760 - DNA, 51 bp, Homo sapiens
tcctggtcgagggacgaaagcgcccgaaggatggagctggaccttcaccag

SEQ ID NO: 718761 - DNA, 83 bp, Homo sapiens
tgcgcgcaggctgggctgcaggctctcggctgcagcgctggacaatgcagatcttcgtgaagactctgactggtaagaccatc

SEQ ID NO: 718762 - DNA, 90 bp, Homo sapiens
cctcgtcaggcccagctctcctgcgccgccgcctcccgccgcgccccgccatgccgctctactccggaatatgcactttctggttggaat

SEQ ID NO: 718763 - DNA, 73 bp, Homo sapiens
aacattttgcggatactcttctgattaaaaggaatcttagagcgtggaaaagaagaattggctgaagctgaga

SEQ ID NO: 718764 - DNA, 95 bp, Homo sapiens
agcgctcatccgcgccgggagcccttggctgcgtcgcccggcagccgcgttatgcaaagggtgacctggacatatcttacatcacatccagaatt

SEQ ID NO: 718765 - DNA, 46 bp, Homo sapiens
aaatttcctgaacacaccattatgaatttgcagtggtgtgctgctt

SEQ ID NO: 718766 - DNA, 98 bp, Homo sapiens
gtgctgttctcggaatcctatctagagcttacagggtaagcttgatgattaccaggaacgaatgaacaaaggggaaaggcttaatcaagatcagctgg

SEQ ID NO: 718767 - DNA, 100 bp, Homo sapiens
cgcacccacacgggcgagaagccctacgagtgcaacatctgcaaggtccgcttcaccagttggaatcgaagcctcttaaaatggcagatgacttggactt

SEQ ID NO: 718768 - DNA, 100 bp, Homo sapiens
ggaagaactcacagctagtctatttgaggagtttgacttacaaggaatctggagtagatatcgcagctggaaatatgctggtcaagaaaattcagccttt

SEQ ID NO: 718769 - DNA, 83 bp, Homo sapiens
gaaaaggcaacatcctgtcacaggccatgctctggcaaaaacgatttcttacaatctccagctacaacctgcttagcttgcta

SEQ ID NO: 718770 - DNA, 100 bp, Homo sapiens
tgggctgaaggaggaggacaaagagcccctcatcgagctcttcgtcaagaggaaggcatcaaccacgagtgtaagctgtgcaaccagatgttcgactccc

SEQ ID NO: 718771 - DNA, 74 bp, Homo sapiens
gctttggaaacgacgtcatgtgttaggcgtggtgtccctcgtggccgttcacccctccaccgtcaacccgctcg

SEQ ID NO: 718772 - DNA, 85 bp, Homo sapiens
aaagcctgcacaggactggataaataattaagggaaattcctcgctgccggactgcgcccacccttgaggacctcacattctctt

SEQ ID NO: 718773 - DNA, 75 bp, Homo sapiens
aattctcaaggaaaaactgaaggctgtaacagaggaggaaatgattttgaatagcctctctctgtgttaccataa

SEQ ID NO: 718774 - DNA, 76 bp, Homo sapiens
gtgtatccatggagacaagagtcaaccagaaagagattgggtacttaatgcgtccaagccatatttcctacgccgg

SEQ ID NO: 718775 - DNA, 97 bp, Homo sapiens
ttttatccagatgatgaagttacagcaataatcgcttccttcaggtatacaaaactaggatatgctggaaatacagaaccacagtttatcatccctt

SEQ ID NO: 718776 - DNA, 100 bp, Homo sapiens
cagaagataaaatgaggttgtttcttatctattatataagcacacagcaagcaccttctgagtactcaagggaaagaagctcagtttgccagcataagtg

SEQ ID NO: 718777 - DNA, 83 bp, Homo sapiens
ggcggctgctgctgctgctgacgctgctgctgcccggcctcggggtcagcccaaggccaaccccactgtcactctgttcccgc

SEQ ID NO: 718778 - DNA, 100 bp, Homo sapiens
agacgctgctgcagctccgggacacctggggccgccgaggcaaaggacggggaggtttactgcatcgacgcgcggttctacgggaacgtcagccggttca

SEQ ID NO: 718779 - DNA, 100 bp, Homo sapiens
gtgttcttcctagcttccctgtatgtgatgatgaccgtcaccaactggttcaactctttcaccatgcctggatcacttcctttgaatgcagaagcttgct

SEQ ID NO: 718780 - DNA, 100 bp, Homo sapiens
tgcatttagttgcgctttcctgcctgcttctagcaagtttactcctggcttgggggcattaggaagcactggaggctcttcgggaactaatggatctaac

SEQ ID NO: 718781 - DNA, 137 bp, Homo sapiens
cgctccacgcccgcgtccatgcagcccggctccggccccgggactaggggcgactgcctggggcgccggcgagggagtaccctgacttctaccggaagctctacggcctcttggacccctctgtctttcacgtcaag

SEQ ID NO: 718782 - DNA, 78 bp, Homo sapiens
gagactcttcatttagattggattctgaatatcagagcagcccgacggccatggaggctgaagagacgatggaatgcc

SEQ ID NO: 718783 - DNA, 100 bp, Homo sapiens
gagacagcctggagaagagcgaccagctcactaagaacatgattgcccccgaggaattagcacttgttcacaacttgaggaaaatgatgaaaaatgattg

SEQ ID NO: 718784 - DNA, 98 bp, Homo sapiens
gaaacaacaattatgaaacaacctggcccatgagatgatagctgtggaagggtggaagaccaacacacacctccccagacagcccagcacgccagaaa

SEQ ID NO: 718785 - DNA, 75 bp, Homo sapiens
agagatggtgaccgcgtggcaggggctctcggacatgctgccaacgacgcgagaaagttcaggagccctggaaag

SEQ ID NO: 718786 - DNA, 96 bp, Homo sapiens
gcaagagtcaccgggatccctacgcgacctccgtgggccacctcatagactttgagaatcactacaagaaaaactccttgtggtgaaggttctaag

SEQ ID NO: 718787 - DNA, 100 bp, Homo sapiens
cccttcaagagaaagacatctttgtgtctggagtgaagattttttatggttctcagactggaacagcgaagcaccgacgagagtgctggggaataaaaag

SEQ ID NO: 718788 - DNA, 100 bp, Homo sapiens
atgccaaccgcgccatgcagactggtgtcaccgggatcatgattgcccgtccaacgtggagcacctgacggagaaaatgaagaccaccatccagagaggc

SEQ ID NO: 718789 - DNA, 83 bp, Homo sapiens
taagaaaaggcattgaggaactcaatcaaaccagtattcttttcacacagcatgaaaacattccttttgaagacaagactgca

SEQ ID NO: 718790 - DNA, 100 bp, Homo sapiens
acgttgccagctgggacaggggagatggagtaattttgctgtggaaagacttcacgtcttgccgaatgaaagtttgtgggggagagaaaccttatttgtc

SEQ ID NO: 718791 - DNA, 50 bp, Homo sapiens
tttcaaggcttaatcgaagagatggggatgccaacagacagatcagcgac

SEQ ID NO: 718792 - DNA, 76 bp, Homo sapiens
agtttgtggcccgcaactacctggaacctgggtctcctatggacagaagtgcgggcaaggagctttgttcctcccc

SEQ ID NO: 718793 - DNA, 75 bp, Homo sapiens
tgaaaagtcgcagcgagctggagccgccggagctgcatccagatctcattatgcatcagaaaaatgaaaaaacag

SEQ ID NO: 718794 - DNA, 50 bp, Homo sapiens
cggcggcgcgctcacccgccccgttcagacagcccacctgaggatattga

SEQ ID NO: 718795 - DNA, 101 bp, Homo sapiens
aaaaagagcatgaatgtcacttctaggactttatcccaaatgtacactcacacagctggcgctgaggaacgccctgcgctacttccccccggatgtccagg

SEQ ID NO: 718796 - DNA, 98 bp, Homo sapiens
tcggatcatgtctggtggctccgcggattataacaggcgacgttgtggacgtttaccagcgggagttcctggcgctgcgcgatcggttgcacgcagct

SEQ ID NO: 718797 - DNA, 100 bp, Homo sapiens
agggacctgaatgtgataacttctgtacccagcgaattgtgtttacatgcacctcttccattggggcacataaagcgaatgcaagaggtgtacaacttca

SEQ ID NO: 718798 - DNA, 108 bp, Homo sapiens
acaaaaaaattcctggaaaaagaagtccaagaagcaaaaaagggactgctaagaagataccaccaggatttctctctgatcaaacggacagttcaggactcagaatct

SEQ ID NO: 718799 - DNA, 83 bp, Homo sapiens
ctggctgctcagcaccgccaggcctggatgggccccatctgccagctggccttcccgtctattatcctcccagtccacaacgc

SEQ ID NO: 718800 - DNA, 82 bp, Homo sapiens
ctgcttatggcggcgctggagagggggcgctgagctgttgggggatcgtgggactttaccagatcggtttgtaataacacct

SEQ ID NO: 718801 - DNA, 100 bp, Homo sapiens
agtgcatctccatccacgttggccaggctagtaacgggggccacactagcgactactcttcttccctcccgtcctcaccgaatgttggtcaccgggagct

SEQ ID NO: 718802 - DNA, 75 bp, Homo sapiens
gttggccaaggcctgttggtccatccagagtgctctcgtgggcgcctgcggtgggaactactcagccatgtcttc

SEQ ID NO: 718803 - DNA, 100 bp, Homo sapiens
cagctcctctgtgtttgccgcctgggttaccttttcgacaaaatgattcatctagtcattgccagaagagtgggtctcctatttcctcagaagagcggcg

SEQ ID NO: 718804 - DNA, 99 bp, Homo sapiens
ccgaggtcaagatggccctgcacgccggcctctggcgagtctgcttctttgcagctggaaaaggattttggtctgagatgctgggcgtgggggacttct

SEQ ID NO: 718805 - DNA, 101 bp, Homo sapiens
gaataatttctgcatgaatagaccagtaagagcacgggctgtatattgggagttggacttgttctgtccctcatgagccacagcagccaaatgcagtcccg

SEQ ID NO: 718806 - DNA, 78 bp, Homo sapiens
ctcgcaacctggcagccgccgccgtggaaggaatgtcgttgtctgctgggtcttcccctcttcattcccccaagatta

SEQ ID NO: 718807 - DNA, 100 bp, Homo sapiens
atcggccccgctccctcccagcagagctacctatctatggagaaaatcattcaagtggccaagacctctgctgcacaggagccctctggcacaaatggaa

SEQ ID NO: 718808 - DNA, 100 bp, Homo sapiens
ccggcacaccgtggtgaagctggcccacacctatcaaagccccctgctctactgtgacctggagaatctttagaacacgatgttcttgatgataatacag

SEQ ID NO: 718809 - DNA, 104 bp, Homo sapiens
cggagccgctgccgccgcccccagctcccccgcctcggggagggcaccaggtgtcttcaaaaacaaacatatttaaaagattttacttctcatctccaggaaga

SEQ ID NO: 718810 - DNA, 75 bp, Homo sapiens
ttggggcctagcggcgaggcgacccgcacaggtacatgtcccagagcaagcacacggaggcccgggagctcatgt

SEQ ID NO: 718811 - DNA, 99 bp, Homo sapiens
ggagaagcctcatcttctacaggaacgaaatccggaaggtgacgggcaaggtggtgatctttgtgaagtctgtgcagcggtgcattgccttggcccagc

SEQ ID NO: 718812 - DNA, 100 bp, Homo sapiens
aggggccgcgccgccaccgtctgaactaggatgtcccgacatgaagcactttcagaccatgctgaagtctaaattgaatgtcttaacactgaaaaaggaa

SEQ ID NO: 718813 - DNA, 100 bp, Homo sapiens
gtctggaagaggggctggagcccacctgctttgagaagagcaatgacattgggggcctgtggaaattttcagcactacctggcagcaccatctaaacctg

SEQ ID NO: 718814 - DNA, 101 bp, Homo sapiens
tctttggccgagcttcagagtaaacaagctgtgatctatgaatcggaacaggaaccaccaaagcccccactaaataattttaaagtggggatgaaactgga

SEQ ID NO: 718815 - DNA, 114 bp, Homo sapiens
gccgaccagggacctgcccgcctgcggctgctccggagatctgaaactggacaatgtcctgttggaccacgagggtcactgtaaactggcagacttcggaatgtgcaaggaggg

SEQ ID NO: 718816 - DNA, 98 bp, Homo sapiens
cgccagatagaaaacggcgagagtgggcgagaacgtccactgcgggccggcgaaagctgccacccgtgggacacggtcatccaggcggccatgcgcaa

SEQ ID NO: 718817 - DNA, 100 bp, Homo sapiens
gcccccgtcagcaaaacactctcttcttcagacacaggtggagccgccaccaaaatgcagattttcgtgaaaacccttacggggaagaccatcaccctcg

SEQ ID NO: 718818 - DNA, 90 bp, Homo sapiens
ctgagcccggggatggcgcgccaggtttgcctgcaatgagatttcattctctacatttaaaggacatcctttctgagctgctgtgaataa

SEQ ID NO: 718819 - DNA, 75 bp, Homo sapiens
tgtcgacgaccgacagggtggtgaaaggtgttgacttcaaaatcaaaactgtagagctaagaggaaagaaaatta

SEQ ID NO: 718820 - DNA, 90 bp, Homo sapiens
aacgtggttgtagagttccgtgactcccagagggtaaaactgattattatgctcggaaacgcttggtgatacaagataaaaataaataca

SEQ ID NO: 718821 - DNA, 82 bp, Homo sapiens
gctgccgccggccgccaaccgtactccaaagattcaggtttactcacgtcatccagcagagaatggaaagtcaaatttcctg

SEQ ID NO: 718822 - DNA, 50 bp, Homo sapiens
cctcctgctgctactgtgtccagcgcagttggctggggaacagaccaggg

SEQ ID NO: 718823 - DNA, 100 bp, Homo sapiens
cttctggagcgaaatgaagagctgcggcggcagctggagacgctgagcgcccagcacttggagcgtgaggaagaggagataagcaaggacctcagagcca

SEQ ID NO: 718824 - DNA, 82 bp, Homo sapiens
gtcccgcatggcggcgcacaggaagcacgcttttgaaatgacattaacagaaggaagtaagttggagaagaaactcttttat

SEQ ID NO: 718825 - DNA, 100 bp, Homo sapiens
catgggccagacctcggtgtccacgctgtccccgcagcccggcagcggtgaagtattacagacacttagcacctgatcacttgctgcaaatatgtcatcg

SEQ ID NO: 718826 - DNA, 75 bp, Homo sapiens
atgaaatacttgatggaagtcaacctccctggttgctccttgagggcaggacagttcttatggctttatccgttg

SEQ ID NO: 718827 - DNA, 50 bp, Homo sapiens
agagaacagggtggccgcttggtccagatccagacctctctgatatgaag

SEQ ID NO: 718828 - DNA, 89 bp, Homo sapiens
tgatcctgaattgctgaaggaaacaactgaagcaaggaatgccttaattgaacaagcttaccttcaacagactcaagaactggttatac

SEQ ID NO: 718829 - DNA, 100 bp, Homo sapiens
aagaccaccttcgtcaatgtcatcgcggtgcatcatttctggcatggcttcaggaagcattgtgctattttacaacgactttaaccggtggcatcatgaa

SEQ ID NO: 718830 - DNA, 73 bp, Homo sapiens
gaagatggacgtactttgtctgactacaatattcaaaaggaccctgatgctcccataagacagaaaatgcccc

SEQ ID NO: 718831 - DNA, 89 bp, Homo sapiens
ctcgtctcgaccaagagctgaagctgatcgccgagggccctgtggtgacagcccagtacgactgcctcggctgtgtgcatcctatatca

SEQ ID NO: 718832 - DNA, 75 bp, Homo sapiens
actgccgtgagaacctgcttatatccaggaccaaggaagtctcctctgctgggacgtgaggacacccaaaacccc

SEQ ID NO: 718833 - DNA, 87 bp, Homo sapiens
tcgcgctactctctctttctggcctggaggctatccagcgattgacttctaaggactcttggtacatgaggaagaaacccggaaggg

SEQ ID NO: 718834 - DNA, 75 bp, Homo sapiens
gcccggagcccccagcgcagcggccgcggtcgtccttggtggaaggaaccatgaactggcatctccccctcttcc

SEQ ID NO: 718835 - DNA, 100 bp, Homo sapiens
gcctctgcctttcaaggtcatgatgttggattctgttgcctgggtaccaccagagggaaagctggggcggaagaggatcacctagcccgggtagaagagg

SEQ ID NO: 718836 - DNA, 83 bp, Homo sapiens
ccctggagcctcagttggaagcagccgatccagcctgcggagcctgtggggcagattgacgtgagtgaattcagatataactc

SEQ ID NO: 718837 - DNA, 73 bp, Homo sapiens
atttgcagcaccatcaacagatgcccctgataaaggatacgttggttctgtacagagtaatgagatgtgtgac

SEQ ID NO: 718838 - DNA, 100 bp, Homo sapiens
tcggggtgaccaagggcaaaggctacaaagggcctgctatggtgtgctgcggttcatcatggagagtggggccaaaggctgcgaggttgtggtgtctggg

SEQ ID NO: 718839 - DNA, 75 bp, Homo sapiens
tggacatggctatgtttgtggagactcaggtgtcagttgtacccgaggcgttctcagcagcagcaagtacctgtg

SEQ ID NO: 718840 - DNA, 100 bp, Homo sapiens
cgagaagaaacttgctgctcgggaagaagctaaattgttggcgggtttcatgggcgtcatgaataacatgcggaaacagagtcctgtgaagataaatcag

SEQ ID NO: 718841 - DNA, 100 bp, Homo sapiens
gattgacttctcggaatggaaggatgacgaggttgaggaacaggttagcaccactgagagagtgtttcaggatagacaatatcagattgatgctgctatc

SEQ ID NO: 718842 - DNA, 46 bp, Homo sapiens
taaaactaccaacaggcacagagccctccagaatacccatcatata

SEQ ID NO: 718843 - DNA, 100 bp, Homo sapiens
cacgccccctgggtcccctacctgagtatcgtgggcattctggccatcatcgcctctttctgcagtgggccagacctgctcccctcaaaagcttcgtgcc

SEQ ID NO: 718844 - DNA, 100 bp, Homo sapiens
attgaagctcacctttgtctaaataataacagtgtatcatgtatgccactgattccaggggacactcccctgctttcctccaacctcagaatggaaatag

SEQ ID NO: 718845 - DNA, 83 bp, Homo sapiens
gacacgggacccgcttcgaggccgctttggcgccaaatcctgagcagcctcccgcgacgatgcccctcaacgttagcttcacc

SEQ ID NO: 718846 - DNA, 76 bp, Homo sapiens
gtgcacctcagcactatcccaagactgctggcaacagatgcttcctgaaacttggagagtggcagctgaatctaca

SEQ ID NO: 718847 - DNA, 90 bp, Homo sapiens
gaagcatcgaaagcgttggagaggtgttaccggaacggcggcgacaagggtgttcccgaactagagtgggaatatgacagaactgatggt

SEQ ID NO: 718848 - DNA, 83 bp, Homo sapiens
agccgatccagcctgcggagcctgtggggcagtattggtaaaggttttcaaggtgtcatgaaaagatggggatttaaaggcca

SEQ ID NO: 718849 - DNA, 90 bp, Homo sapiens
gcgtgagccagagggagttgagccgcggcgtgtgcgccgagcgctactcgcaggaggtcttcgctcggcaagatgtcggtgaaggagggc

SEQ ID NO: 718850 - DNA, 90 bp, Homo sapiens
cctgattgaaccagtcaaccagtctattgttgtcagtggagagagtggtgctggaaagggaaatgaggcaagttatcctttggaaatgtg

SEQ ID NO: 718851 - DNA, 89 bp, Homo sapiens
agctactgggctgtgagctgaacgaccccctggacaggccgttggttggccaggatgagtttttcctggagcagaccaagaagaaagga

SEQ ID NO: 718852 - DNA, 87 bp, Homo sapiens
gccacgtccaagcaaaccgggaaaggagaggatcccggagccggctgctcccggcagatcggcttctcctttgtacgacccaagctc

SEQ ID NO: 718853 - DNA, 95 bp, Homo sapiens
gagtgcctgagcaacatccgcgagttcctgcgcggctgcggggcttccctgcggctggaggatcagttcagtgatatgagaatcagcataaacca

SEQ ID NO: 718854 - DNA, 100 bp, Homo sapiens
ttctctgaagcctggaaacgaggcactcagttggaagagtccagcaaggaggagatgttaaagtaacccatcttgcaggacgacattgaagattggtctt

SEQ ID NO: 718855 - DNA, 80 bp, Homo sapiens
ggaatgtgtttagggagtgctggaaacaagggcagatctgaaattcagagtgtagctctgagacttgcttccaaagtcat

SEQ ID NO: 718856 - DNA, 90 bp, Homo sapiens
cactatggtgcttcagccaagtgaaaggcactatcgagattggaaccacagaagcacctgtggaatcctctcaagaggaacagtcattgt

SEQ ID NO: 718857 - DNA, 75 bp, Homo sapiens
atttctccgcctcagcccaacggggagttatacatgggaagctgttgataccaaaaataatgtactttataaaat

SEQ ID NO: 718858 - DNA, 74 bp, Homo sapiens
attaaagtttctattgatccgcatgttatttgaaagcaattgagacgcaaccgaactttgcagtagcttggagt

SEQ ID NO: 718859 - DNA, 117 bp, Homo sapiens
gtctgtctggtgataccaggggcagagggaccactctgacagcatgtggatgccatggagactggaagaccattccaacttggacgcgttaccatgagagcatatcctatccaaccg

SEQ ID NO: 718860 - DNA, 97 bp, Homo sapiens
agaggaaagcgggctggcaggcgagggagcccgcgtcggctgagagcccacaggcccccacaggtgctggagaatctggtaaaagcaccattgtgaa

SEQ ID NO: 718861 - DNA, 83 bp, Homo sapiens
cacgcgaagtggccgcatccgcaaggttttaaaatcaaagatgggaaaatcggagaaaattgcccttccccatggccagcttg

SEQ ID NO: 718862 - DNA, 121 bp, Homo sapiens
caacaagccattcatgggccggttttatgagtgggaaccatttgcagaaggtgacgcatccaaagaagacattgacactgctatgaaattaggagccggttaccccatgggcccatttgag

SEQ ID NO: 718863 - DNA, 76 bp, Homo sapiens
ctggatcaacaccggggagtctgcggacttaattcagtgcacaaatgagatgaatgtgaacatcccacagttggca

SEQ ID NO: 718864 - DNA, 82 bp, Homo sapiens
gagatgcctggcagccccgctctctgcagttgagttgctatcacattttggatcagagcacttttgtccattaagccttata

SEQ ID NO: 718865 - DNA, 76 bp, Homo sapiens
cgcctctgtgccactttgcatcccacgccggaggaggcattaacgagaccgggagcctagtaataaacgggtcaaa

SEQ ID NO: 718866 - DNA, 51 bp, Homo sapiens
gccacgctttctgtacagcctgcagaacttgaccgaaggaagagaccaaga

SEQ ID NO: 718867 - DNA, 50 bp, Homo sapiens
cctcctctgcctcgctccaacacagaagcagcagtccgcggcgtgcggca

SEQ ID NO: 718868 - DNA, 74 bp, Homo sapiens
acgcggctgccttcctgctctcctgccagatccctggcttggcaaacctgcccttgctgcagcgggagctcctg

SEQ ID NO: 718869 - DNA, 74 bp, Homo sapiens
tccgagctggggttggacgctgccagtttgcacagcagcaggcctccggtgtggctgtctctgatggtgtcatc

SEQ ID NO: 718870 - DNA, 83 bp, Homo sapiens
gtgtggacgtgaacgggggtcctgagcctgccccagccagtaccagcgccgtgccattgagacccagagcagcagttctgaag

SEQ ID NO: 718871 - DNA, 75 bp, Homo sapiens
tggactctgcgggactatgtccgaggatacatccttcagacacgaatgcagagtttgagtccagatcccaaagcc

SEQ ID NO: 718872 - DNA, 83 bp, Homo sapiens
ggaaggcccgcaggaccctatggcggcaggctccccacaggtgcaggaagccgccgcccagccatggacggggaggagcagca

SEQ ID NO: 718873 - DNA, 75 bp, Homo sapiens
aggagcggcagtggcgggccgtcatgctcatccaggcaggttcgttccaccagtcataaaccagatgaaatctat

SEQ ID NO: 718874 - DNA, 98 bp, Homo sapiens
cggcgggctcctgcgagaagcaagcggaacttcctgaggagagatggagccatctcagtgtgtggaggagctggaggatgatgtgttccaaccagagg

SEQ ID NO: 718875 - DNA, 75 bp, Homo sapiens
cctggatcccagaaggtcgcgaaggcagtaccgtttcctcagcggcggagtgccaagccccggctggactgcttg

SEQ ID NO: 718876 - DNA, 101 bp, Homo sapiens
gcttcgtgggatctttgagccttttggaagagcactggaattattgatgccacctgttacagacaatgctaatgcaagaatgaaggcacatgtacgacgtg

SEQ ID NO: 718877 - DNA, 76 bp, Homo sapiens
ggggaaatccttcggatggtgaactcattagaatgttaaaagatcactgaagttggatggtctgttagaagaaaat

SEQ ID NO: 718878 - DNA, 100 bp, Homo sapiens
aggcatggagcccgaggaggagccaagtgtggcagcagttcgtgaagtctgtgaggaggtatggcgtgagtcccgagaacattatcctctatggtcagag

SEQ ID NO: 718879 - DNA, 100 bp, Homo sapiens
aaacatagagaattctgggcttccacacaactccagtgctaactcaacagctggttcgatgcccagaactgaatgctgtgctccagctgtggcctcaccg

SEQ ID NO: 718880 - DNA, 87 bp, Homo sapiens
gcattgaccccttgtccagttactctaacaagtctggaggcaaactaggcgtggcaactgctggctgcgtgaatgaagttacagaga

SEQ ID NO: 718881 - DNA, 100 bp, Homo sapiens
ccgcgcttgctcgcccggcggccgcagccatgtcccgggggcccgaggaggtgaaccggctcacggagagcacctaccgggaatacggttggacagaatg

SEQ ID NO: 718882 - DNA, 98 bp, Homo sapiens
accgggcggccacgttcccgctgcaggacggctgtcctcagcgaggggccgtgcacccgctcctgagcagcgccatgggcctgctggccttcctgaag

SEQ ID NO: 718883 - DNA, 90 bp, Homo sapiens
agcgagtctcggagaagatgtggtggcttccgtttgttggtggaggaggtggcaggcctcggcgcctcccctggtgaagacacaaactgt

SEQ ID NO: 718884 - DNA, 98 bp, Homo sapiens
taggagacataagaccgttggttctgacgaggcacagcgtttcttgcaagaatgggaggagacctccgagcttgcacatattgtagaaaaatagcctt

SEQ ID NO: 718885 - DNA, 75 bp, Homo sapiens
actggtcaaaaggtcaactaaaagcattgtttctagaacatgagtccgggaccatgtctggagaactaccaccaa

SEQ ID NO: 718886 - DNA, 100 bp, Homo sapiens
tgaaggccaagatccaggataaagaaggcatccctcccgaccagcagaggtcagtttaggggctggtgcaaaggatgagttgcacattgttgaagcagag

SEQ ID NO: 718887 - DNA, 99 bp, Homo sapiens
atggtttctatgcccctctatgcagtcatgtatcctgtgtttaatgagagtgttgcggagataggaacatgggagagaaacaatctgggtaacatgaaa

SEQ ID NO: 718888 - DNA, 90 bp, Homo sapiens
ctgtgacctgcatgtactgggggattcgcagggaggatgtcgggacaccccggaagctgggaaatgccgcccacggacgccagagccggg

SEQ ID NO: 718889 - DNA, 100 bp, Homo sapiens
gggcgacagcatggccaactacccgcagggcctggacgacaagacgaacatcaagaccgtgtgcacgcctgtctggccctgagggagtcccctttctgaa

SEQ ID NO: 718890 - DNA, 98 bp, Homo sapiens
aatctgctaaactgaataatcaggctcgctttatcttagagaaaatagatggcaaaataatcattggtggaacggcacatgtgtgatggggacattgt

SEQ ID NO: 718891 - DNA, 90 bp, Homo sapiens
aacttgccctgtctcctcgcagatgagctgtgtaaatgagtatggaagattatgatttcctgttcaaaattgttttaattggcaacgctg

SEQ ID NO: 718892 - DNA, 82 bp, Homo sapiens
tcccggaaactccagcgtgtctccagccgtgaaaggaaggcagaggaagccacggccactggaccctggcgagggttccaag

SEQ ID NO: 718893 - DNA, 75 bp, Homo sapiens
cgggccagccccgccgccctcgcaacctggcagccgccgccgtggaaggaatttgctgattcccttggaattccg

SEQ ID NO: 718894 - DNA, 100 bp, Homo sapiens
aacaggactttggagacaagatcaacagtctgcagctggaagtcgaggagctcaccaggcagcgcagaaacagtcctgctccagctgtaacagcagcatc

SEQ ID NO: 718895 - DNA, 96 bp, Homo sapiens
gagaaggacgacaagcccatccgaggtgctcaaaaatgtgataactttgctgaaaaaagacccctccttggtgtttgtaagagcattggatcttct

SEQ ID NO: 718896 - DNA, 50 bp, Homo sapiens
ttcgacttgagcgaagttttatgcaagacccctcctcctgtagagagtgg

SEQ ID NO: 718897 - DNA, 100 bp, Homo sapiens
tacagcattgcaaatcatgtatgccagatgcgatctgtgagccgagtctttaagttcattgacatgccaacagaaggtaaacctaccaagtcaaccaaac

SEQ ID NO: 718898 - DNA, 98 bp, Homo sapiens
gccggcgagatgcctttgttcaccgccaaccccttcgagcaagacgtggtttctgatgaagaattgaaaagaagagtagctgaggagctggcattgga

SEQ ID NO: 718899 - DNA, 80 bp, Homo sapiens
caagcagcgatattattccattgagaggttaggaaattcgaaatgagtcccatgactatcctcatagagtggccaagttt

SEQ ID NO: 718900 - DNA, 138 bp, Homo sapiens
ggccaggcagccccgaggaggctgctgccctagtagatgggctgcgccgggagccgggcggaccccggagatgggaatgtatcctgtcaggtataatgtcagtgaatggcaagaaagttcttcatatggatcgaaacc

SEQ ID NO: 718901 - DNA, 135 bp, Homo sapiens
tgtggtctgttgtaccccactgctggggtggtggttccaatgagacagggcacaccaaactccatctgaacatacggtccctaatgagcacagagaagaccaagggcttctgccagctggtggtctcgtccagcc

SEQ ID NO: 718902 - DNA, 74 bp, Homo sapiens
ttaaggattccaagtaactcttatttgggagtctaatctccaacacttatcagtactggaattaacagactctg

SEQ ID NO: 718903 - DNA, 100 bp, Homo sapiens
cggtaacctggcctgggcctgaagtgagtgagaggcacatgaaggctggagtgcagtggtgtgttctcagctctgcagcccccgcttcccaggttcaagt

SEQ ID NO: 718904 - DNA, 100 bp, Homo sapiens
ttgggggcttcctcactcgtggctttccgaaggctgctgggtacctttcaacagatgtggatttccaagcaagaatatgaagaaggagggaagcagtgtg

SEQ ID NO: 718905 - DNA, 90 bp, Homo sapiens
ctggtcttcacaactcgttacctggatctttttacttcatttatttcattgtataacacatctatgaagttgggacagaaataacccaga

SEQ ID NO: 718906 - DNA, 82 bp, Homo sapiens
ctcggtttcctggacccattccgactcagtaagactttgaccccgacgcaggcttcagtgattgccgcggatcagaagcctg

SEQ ID NO: 718907 - DNA, 51 bp, Homo sapiens
ggaatcctatccatatgaggcaacagacttgatcatcttccctgacgactg

SEQ ID NO: 718908 - DNA, 123 bp, Homo sapiens
cagcaccaaaatgagaagacgttggctttggtttgaggaggctgaggagtccaaatcatattcttctggaaacagaaaaggctttctgtccggcttgctagataatgtcaaacaagaattagc

SEQ ID NO: 718909 - DNA, 96 bp, Homo sapiens
aggaaaaaaaggagacagacaagaagaggaagagaaaaaaaggggcccacgaggactgtgatgaggagcagcagccgctcttctaaaacattcaaa

SEQ ID NO: 718910 - DNA, 82 bp, Homo sapiens
tctcaatcacctcagcttcgcggagctgcttaagcccttctcccgcctcacttccgagggtctccatcatcaccagttccag

SEQ ID NO: 718911 - DNA, 82 bp, Homo sapiens
gccatgtcagggactcctactcacaggtttttagaacttcagccataaaaatgggcagaattttccttgatcatatcggtgg

SEQ ID NO: 718912 - DNA, 100 bp, Homo sapiens
aacttacgtgtactttaccaacgagctgaagcagggttgtccttggctatcttgatgacccaagtgaggacattcaggatccagtgagtgacaaattctt

SEQ ID NO: 718913 - DNA, 100 bp, Homo sapiens
ccagaaattgtaaaatcttactcacagaacctcctatgaacccaaccaaaaacagagagaagattgtagagattttgtggaagtataatactttgtcatt

SEQ ID NO: 718914 - DNA, 100 bp, Homo sapiens
cacctttcctcaggagtcatttctgttccgcacaggcctgctgaactgggtgctttatataggtacagaacctgctaaggccatcaaacctattgatcgg

SEQ ID NO: 718915 - DNA, 89 bp, Homo sapiens
cgccgggcgacgacgaggaggaggcggccgccgcagccggggcccccgccgccgccggagcggttggtcaaagaaaaagtgatgtatga

SEQ ID NO: 718916 - DNA, 75 bp, Homo sapiens
gggttctggtggacctctcggctttcctggtcagcagcgacttgggtgtgtccgcagccggccaggtggtatccc

SEQ ID NO: 718917 - DNA, 100 bp, Homo sapiens
cctttgactgtggggagaagccatcatttgacagactgcctgaagttacatttagagactgaaatcactgcaccttaaaaacaaaagattgagctgcact

SEQ ID NO: 718918 - DNA, 83 bp, Homo sapiens
ccggcgtcagggacacggggtgctgcgctgcgccgacggctccacctacaagacctgcctagagctggaacgttacctccaga

SEQ ID NO: 718919 - DNA, 100 bp, Homo sapiens
atcctgcccctgagatccacccaagttgtggttgacttccccagaaatctggccaagtctgtaactgtggaatgaggctgagaccgtgacaagaccatca

SEQ ID NO: 718920 - DNA, 84 bp, Homo sapiens
gatggtggagatcaggaaactgcaaagactgggaagttcttaaaaaggtcacctggcggtagacccattcataagaggaaaaga

SEQ ID NO: 718921 - DNA, 75 bp, Homo sapiens
acgagttccaggagaccaaggaccagctcaccacggagaacatcatccttgttgctgaacctgtttgcatgagtt

SEQ ID NO: 718922 - DNA, 82 bp, Homo sapiens
gacagatctgagagatactgagaattcagtttgcctgttctgtatgcaagttccgtagctttgatgacgaagagatccagaa

SEQ ID NO: 718923 - DNA, 75 bp, Homo sapiens
caaggtcgccctcaaggccatgatcaaaacgtgccatcgcctgcaggattctttattcagctctgacagtggctt

SEQ ID NO: 718924 - DNA, 100 bp, Homo sapiens
gcagctgcggctcggggacccacagacacagccggggtcgggagccgcccggggcagggctcgggagagcgggtgctggagaatctggtaaaagcaccat

SEQ ID NO: 718925 - DNA, 123 bp, Homo sapiens
gagagagagaggcagagagggagagagggagagtgacagcagcgctcggcattgaagttgatatcgatgtggagcacggagggaaaagaagccgcctgacccccgtctctccagagagttcca

SEQ ID NO: 718926 - DNA, 100 bp, Homo sapiens
aagatggtgaagcagatcgagagcaaggtcacagtgctgtcgatatcaccaaggtggctagaagacatcgcatgtctccttttcctctgacatctatgga

SEQ ID NO: 718927 - DNA, 100 bp, Homo sapiens
agcacaatgacgcccacgcagccagaatcctttagcagtgggtcccaggacgtgcaccagaaaagagacttcccaagtaagaagcggaagaggagccgct

SEQ ID NO: 718928 - DNA, 100 bp, Homo sapiens
caagacaccatccagctccaagaaagtcacctttgggctgaacagaaacatgactgccggtatgaacgctgccgtccgtgccgtggtgcgcatgggtatc

SEQ ID NO: 718929 - DNA, 82 bp, Homo sapiens
tggacctggactcacggctgcttggagcgtccgccatgaggagaagatgctgcagtctgaagagacttccagcacctctcag

SEQ ID NO: 718930 - DNA, 82 bp, Homo sapiens
tgtaatgatgcctcctgggagactcgatggccgaacagacccaattttggatgatgttggtgaagctttccagctgatgggg

SEQ ID NO: 718931 - DNA, 100 bp, Homo sapiens
tagaagatgttgttgttagtgatgaatgcagaggaaagcagcttggcaaattcttcttggacacttaatgattgttggcaagaaatgtgctgctgatctg

SEQ ID NO: 718932 - DNA, 90 bp, Homo sapiens
gaaaaagctaaggatatctttattgaagctcacctttgtctaaataaatacttatcttcagcaaatcctaatgataacagaactagctcc

SEQ ID NO: 718933 - DNA, 88 bp, Homo sapiens
gcttcttggtgatagcaaagatgtccttgggccatcaacacgtcagctaactgttcagatgatgcaaaatcctcagattcttgcagcc

SEQ ID NO: 718934 - DNA, 99 bp, Homo sapiens
gagaaggcggcggctctctggtccgcagcggcaacagtaacgaaaaacagggctgttttcaaatggaacattttgatgcatcacttagtacctatttca

SEQ ID NO: 718935 - DNA, 50 bp, Homo sapiens
ctacgaaacagcagcggaagtagccggcaactagaagccatttgtgtcaa

SEQ ID NO: 718936 - DNA, 75 bp, Homo sapiens
gccggtcacctccgcgcggacaccagccaaaactggacaagccaaggcatctgtagccaaagtaaacaaatctac

SEQ ID NO: 718937 - DNA, 74 bp, Homo sapiens
gaaagcagtgacggaggagcttgtaccaccggtttctctactcggacgaggtgcagattggcccggagacggtg

SEQ ID NO: 718938 - DNA, 82 bp, Homo sapiens
agagccgagcacgcgggtctgtcatcatgtcgcgttacgggcggtacggaggagctgtccccgccctactccggaccgcccc

SEQ ID NO: 718939 - DNA, 76 bp, Homo sapiens
gccaggaccggccgaacgcagaggtatctctcctctttgtcacaacctctttgccctgtatgacgagaacaccaag

SEQ ID NO: 718940 - DNA, 98 bp, Homo sapiens
tgcaaaggccacaggatccattcagattctcatcaaggtcccagctagtccacagggaccagcagtgccatggaaggatttaacatgtctcagagcat

SEQ ID NO: 718941 - DNA, 83 bp, Homo sapiens
ccacaaccaccaccttcaagggagtcgaccccaacagcaggaatagctcccgcgggctgacgcacgaggcacacaggaaggag

SEQ ID NO: 718942 - DNA, 83 bp, Homo sapiens
cgggggaggcgacgctaagttgctgatcgtggcggtactactcagtcctctatccactggagaggaaaatatctgatgccaag

SEQ ID NO: 718943 - DNA, 75 bp, Homo sapiens
tccagactcggtgctgtacccgccgtatgagagaatcgaaatcccaatccatattgtacctcatgtcactatcgg

SEQ ID NO: 718944 - DNA, 100 bp, Homo sapiens
tccattcccgggaggggggagcggcgttggaggccaccgtttccagctctggatgccgggcaggttggtttggcactgtcctatgccctcacgctcatgg

SEQ ID NO: 718945 - DNA, 74 bp, Homo sapiens
cagggggactgcaaaggccaatgttggtgctggcaaaaagatgaggaaactgagtctcagagaagtcgagggac

SEQ ID NO: 718946 - DNA, 82 bp, Homo sapiens
acacaattgtctgtgacagtaacagtacttgggatcccccagttccaaagtgtcttaaaggcctgtcatctttacttcagag

SEQ ID NO: 718947 - DNA, 82 bp, Homo sapiens
gctggctctgggccttgaacattccgaaactgtcaagattggcaaggatgtccccgagcagcggagcatggagtaccctaag

SEQ ID NO: 718948 - DNA, 100 bp, Homo sapiens
cgagatcctttagcagcagatgagagtgcaccccagagggttctattgcccacacaaaaagcactcttaaaagacccattttacatgggcttgtaccaga

SEQ ID NO: 718949 - DNA, 82 bp, Homo sapiens
ggacacctttcacagctatcagggaaggagtacaagcgcaagctagccagagtttccctggtgcgcaaagaactcaggtccc

SEQ ID NO: 718950 - DNA, 113 bp, Homo sapiens
caaaggacaagaatgcgaatacccacccacacaagatggttcttcaccaaaggacatggatgaaaatgaaagcaaccagtctctgatgacaagcagccaatatcctaaagaag

SEQ ID NO: 718951 - DNA, 73 bp, Homo sapiens
ggacctaaacctgcccaatgccgtgatcaccaggatcatcaaggaggcggtggctgagctggaggctcaggca

SEQ ID NO: 718952 - DNA, 120 bp, Homo sapiens
gtgacaacatcaacttcctcaaagtgcagtggtcttcacgccagctgcccacgatcacacgccgctatgcagagttctcctccgctcttgtcagtatcaaccagacaattcctaatgaac

SEQ ID NO: 718953 - DNA, 82 bp, Homo sapiens
tgatttccagaggatttacactcagtacttctggaatagaaattctaaacattagcctgccgaacaactggattgcatttga

SEQ ID NO: 718954 - DNA, 51 bp, Homo sapiens
tggacctcaggagcctcctaaaaccacagccatgaccatgcagttcatcag

SEQ ID NO: 718955 - DNA, 100 bp, Homo sapiens
cagatgaacttgtcataaagctaatgttggagaagctcaactccccagaagtctgtcactttggtacatcaggaacgtctctatcaagaatacaatttca

SEQ ID NO: 718956 - DNA, 75 bp, Homo sapiens
ggattgctggctacagcttcagaagaccgaagcgttcgtatctggaaggtttggtgcacctcgatttggaggaag

SEQ ID NO: 718957 - DNA, 76 bp, Homo sapiens
atggaacaagttccagcacaagtgtgcttagatgagtacgaagatgatgaagcagggcagaaagagcggaaacgag

SEQ ID NO: 718958 - DNA, 100 bp, Homo sapiens
aagaaagtaacagtgagatagagcaggttcaactactcaatttcatgctggcatgagaagataatcctttgaaacatcattaattgaagtgattttaaat

SEQ ID NO: 718959 - DNA, 75 bp, Homo sapiens
ggaggtcgcagcgccatgaagtccctgtctctgctcctcgctgtggctttgggtccagctatgcatcaccccttc

SEQ ID NO: 718960 - DNA, 90 bp, Homo sapiens
gcccccgaccccaagctctgccacgaaggtgccaccggcaaaggccggcgtgtgcagccccagtggtcccctcctgctgggacccagcca

SEQ ID NO: 718961 - DNA, 100 bp, Homo sapiens
aggaacgtttccgtagcctcattcccagttacatccgtgattctgctgcagctgtagtagtttacgatatcacaagagtcatggccggcttcaacatggg

SEQ ID NO: 718962 - DNA, 100 bp, Homo sapiens
gcaaaggagaagtaacttttggtatctctgatgaatatataacacctatgtttagtttttataaaagtattggggaactgaaaatgactcaagaggagta

SEQ ID NO: 718963 - DNA, 74 bp, Homo sapiens
aaagtgtggagacaggcctgaagctggccctgtgtgaagccgccaccacgactggctaatttttttgtgtttcc

SEQ ID NO: 718964 - DNA, 101 bp, Homo sapiens
cgggagtctgcggtcgttccctcggctgtggaccgggcggcacgcacgcggtgcagggtaacatggcggatgcggaaggtgtcaagctagggatgcggtcc

SEQ ID NO: 718965 - DNA, 100 bp, Homo sapiens
ctgggagaagaaattaaagaacttcagcaaaggcttggagaagtccagggcgacaacaagggcaagtgtccagagaatggctgggatgaaagtacacttg

SEQ ID NO: 718966 - DNA, 75 bp, Homo sapiens
ttcactccagtgcctccgacgcctcctgatggattgtcagtggcttcgccccgaggagagctgactgccctgggc

SEQ ID NO: 718967 - DNA, 75 bp, Homo sapiens
atgtctgtacacctgtccccctgcttcagcaatggccaatgtacatggtggactatgccggcctgaacgtgcagc

SEQ ID NO: 718968 - DNA, 83 bp, Homo sapiens
cacacagctgcctgggggccgtgtgatgcccaagcatggcagggggcttgagatattcctttttaacactgagcagccagtta

SEQ ID NO: 718969 - DNA, 95 bp, Homo sapiens
gccgacgtcgaccagcagagactggtgacttaagagattaaaattaatttggttgctgttggttctgaacaaataatgagttcttttatttgagg

SEQ ID NO: 718970 - DNA, 51 bp, Homo sapiens
cggccactggagcaggtcacctgttacaagcccgacggccatggaggctga

SEQ ID NO: 718971 - DNA, 75 bp, Homo sapiens
ctcgagaagacactacagcctcaaggaggaagagagaagggcacagttacctaagtatcaacgtaatcttcctcg

SEQ ID NO: 718972 - DNA, 83 bp, Homo sapiens
caggactctggcagttgagagactgttggagcctcttgttacacaggctcgtggtgcagagagcattatgttaaacctggcag

SEQ ID NO: 718973 - DNA, 74 bp, Homo sapiens
tctacccagaattcaattaaagtggctcaggttaatccctatatcctgaagaagaacatgatcctcatgacaaa

SEQ ID NO: 718974 - DNA, 96 bp, Homo sapiens
cctctgaccagtgccttcagggctgtggacaacgaccctgggatcattgtctggagaatagaggttcagcagactgtacaggatctttttggcaga

SEQ ID NO: 718975 - DNA, 98 bp, Homo sapiens
acgagaagcctgaaaagtcgcagcgagctggagccgccggagtgacagaaatgttggtaaatgttctgagtatttgctctgatgatgaactaatgact

SEQ ID NO: 718976 - DNA, 100 bp, Homo sapiens
cttttccccaatgcgagctccaaagggtcatctttctgaaggattggttactaaatggtacagatctccacgtcttttactttctcctaataattatact

SEQ ID NO: 718977 - DNA, 74 bp, Homo sapiens
atcatgtacaccaaatgcagagtcacagttgcagattatatttctagagctgagtctcagagcagacaaagaaa

SEQ ID NO: 718978 - DNA, 98 bp, Homo sapiens
gcaaagttcatactcaagaactttgttcaagagaaatgatagttcacagtgtagatgacttcagttcagctttaaagtgttaaaagatcactgaagtt

SEQ ID NO: 718979 - DNA, 74 bp, Homo sapiens
tctatggccactacaaacaagcaactgtgggcgacataaatacagaacagtccactttggaaagtgaagaatgg

SEQ ID NO: 718980 - DNA, 100 bp, Homo sapiens
actatcctctgagatcccagatcatgaggataccatacttgcagagctccttcagatacataaagaacacattgtaggataccatgaacatgattctctt

SEQ ID NO: 718981 - DNA, 99 bp, Homo sapiens
gcctatgacagcagtgccgactggttctccctgggctgcatgcttttcaaacttctgagaggaatcttgagcagtggacactgaggcaatcctggttag

SEQ ID NO: 718982 - DNA, 100 bp, Homo sapiens
aaaaccacgtcgggatagtagtcaagatggataaaaagtcctttgaaatggtgctggatgaaattagaaagatataccttagatgaatttggaacagcca

SEQ ID NO: 718983 - DNA, 98 bp, Homo sapiens
gtctggatcacggatgtaggaagtgctgcactgggtgttcaacagccatcactccttggagcatctcctaccatttatacacagcaaactgcattggc

SEQ ID NO: 718984 - DNA, 90 bp, Homo sapiens
ttggcgccgggttgcagcagttactgagtcccctttacttggtaaatcacggcgagagtggaccagtcagatgcaacaggtgcaaggcct

SEQ ID NO: 718985 - DNA, 90 bp, Homo sapiens
gcggccccgaggcagcgaggcaagggggagatcactcccgctgcgattcagaagacaatgcagatcttcgtgaagactctgactggtaag

SEQ ID NO: 718986 - DNA, 90 bp, Homo sapiens
ggccgggaagcttctgcgagccctagcgctgcggccccgcttcctggcggccgggtcccagttcgatcctttggtacagaagacagaccg

SEQ ID NO: 718987 - DNA, 75 bp, Homo sapiens
ctggaaacaatggcatttacagaaagagtcaacagcagtggcaacaggaggatagtgaatgatacctacagaacg

SEQ ID NO: 718988 - DNA, 75 bp, Homo sapiens
ttcatgctgggctcgctgctgcggacgttcaagcagctacagagggccggagctggagatgtggtctctgggagt

SEQ ID NO: 718989 - DNA, 74 bp, Homo sapiens
ttcccctctgctgaggcagagctccagtgaacagtgcagtttcttaaacaattaggtctacatcctaactggca

SEQ ID NO: 718990 - DNA, 105 bp, Homo sapiens
agcaatcagctggcctggtttgatactgacctgtaaatcatcctttaggatttccagatgtgacttgcactcagaagatcagtggtcaacttcagaagctcttcc

SEQ ID NO: 718991 - DNA, 83 bp, Homo sapiens
ctggagacgccagagccggcggggtggcccagttgaaatccttcccttcctctaccttggaagtgcctaccatgcatccaagt

SEQ ID NO: 718992 - DNA, 100 bp, Homo sapiens
gccctgcgccccgctctgctgtgggcgctgctggcgctctggctgtgctgcgcgacccccgcgcatggcctccggtgtggctgtctctgatggtgtcatc

SEQ ID NO: 718993 - DNA, 82 bp, Homo sapiens
cacaaggtgaagactgtctgcagcaaggtagctacagcaagctgggtagcaggcagatccaaaggatatcatgaagtttcca

SEQ ID NO: 718994 - DNA, 97 bp, Homo sapiens
ttcattgacaaggaggacctgcacgacatgctggcctcgctgggtctgtgcagacttttgcagacaaatcaaaacaagaagctctgaagaatgacct

SEQ ID NO: 718995 - DNA, 90 bp, Homo sapiens
gcctgaacaagaaaacatattgcataccacccagacagactgctataacaatctagctgaacacaccacagccatcagcactggaatgca

SEQ ID NO: 718996 - DNA, 74 bp, Homo sapiens
aaatcttactgaaggcagtgaagcgaagaaaaggatcccagaaagtttcaggcagacctgttatcctaaactag

SEQ ID NO: 718997 - DNA, 100 bp, Homo sapiens
agaattcggccatgagccgctacatactcatcatggggctcctgtacaagtccagaatgacagggtccagaaactggcgagccacgagggacatgtgtag

SEQ ID NO: 718998 - DNA, 76 bp, Homo sapiens
cttagtcatcacatcatttcactgtgaacacttaaggagttccgtgatcgaccgaaaggacttaataatcaaaagg

SEQ ID NO: 718999 - DNA, 98 bp, Homo sapiens
cgagaggagccacaatggagacgccgccgctgcctcccgcctcattgctatggacagtgctatcaccctgtggcagttccttcttcagctcctgcaga

SEQ ID NO: 719000 - DNA, 75 bp, Homo sapiens
cagaacttcaaaatactacaagcaggttttaagagaatgggtgttgacaaagtgacttgatggagggtgagctct

SEQ ID NO: 719001 - DNA, 75 bp, Homo sapiens
cagcaaggatgactcaatcatcactgttttaacaggagctaatttcgttactcgaaaaattagccggtcagtagc

SEQ ID NO: 719002 - DNA, 90 bp, Homo sapiens
ccggagcccgcgggcctgacacgcggcgggacatgcagtgtgtcccggcatggatatccggaacaacctcactaggttgcatgagctgga

SEQ ID NO: 719003 - DNA, 80 bp, Homo sapiens
cagcgacctgccatcctacacaactcatggcaccgtgcacgtggtcgtcaacaaccaggaaacactgcgctaacttatgc

SEQ ID NO: 719004 - DNA, 50 bp, Homo sapiens
gcggtggagcgggacacgaacgtgaaaccaaggtgtatgttggtaacctg

SEQ ID NO: 719005 - DNA, 82 bp, Homo sapiens
ggaacacaagctgtgaaacactagacaagcaaagtggatcagcaaaggctgcagtcaccagcatcttttccaaccttaatga

SEQ ID NO: 719006 - DNA, 75 bp, Homo sapiens
cttgttctctgctgctactgtaaaaacgaaatgagtgccagatgacgtgtactactgtggaataaagtacatcaa

SEQ ID NO: 719007 - DNA, 88 bp, Homo sapiens
tgcggtcgccgccgtcgcacgagtctttccttagtaacctgggcgatagctgctgccccccaagagggacgagacggccctgcaggag

SEQ ID NO: 719008 - DNA, 83 bp, Homo sapiens
cgaagttggaagtgtctcttagcagcgcgcggagaagaacggggagccagtccagaatgacagggtccagaaactggcgagcc

SEQ ID NO: 719009 - DNA, 100 bp, Homo sapiens
gcagccacatactatccgtttgttcaggaaccaccagtgacagaagcgcgatgcagaaggctgcgttcgaggcactccaggtgaagaaagacctgatgca

SEQ ID NO: 719010 - DNA, 75 bp, Homo sapiens
cggctcacctgtgcgggatggaacaaaaggttgtaaacatgttaaaggcatcctgttatatggacccccaggttg

SEQ ID NO: 719011 - DNA, 75 bp, Homo sapiens
caaggacagcagcgactttggggcccgtcaccctcaggccctgggaggagcggggacactgaggacctctctcca

SEQ ID NO: 719012 - DNA, 95 bp, Homo sapiens
tcttgcactcatgcaaaagaaactggcagattatctgaaagtgcttatagacaataaacatctcttaaggtggattttatccaaagccaagaaag

SEQ ID NO: 719013 - DNA, 82 bp, Homo sapiens
ttagtgaggataggcagagaagaagggctgaaagcactctactcgggagttgttgatacccatgtgagaccagaacactctg

SEQ ID NO: 719014 - DNA, 90 bp, Homo sapiens
cggatagcgtggagtgacggtgccaccgcggcgcaaatcttcccaaggctgcagacaccgacggatttgctttgggagccagagtagctg

SEQ ID NO: 719015 - DNA, 75 bp, Homo sapiens
tccaccaccaaggaaacagccacctagccaacggtgtatgtggaatttgatgatcttgaatgggataaacgagag

SEQ ID NO: 719016 - DNA, 105 bp, Homo sapiens
tgtttgcaacgaccgtctggggaagaaggtccgcgttaaatatgactgtccaagtgcctccaaagtgtacaaagcatcagattcagcagaagcaattgaggcttt

SEQ ID NO: 719017 - DNA, 100 bp, Homo sapiens
ctgctttcaggaacattgctgtggattcccaggttatccggtgttggctcctgctgcttactatgaccaaactggtgcccttgtagtgaatgcaggcgcg

SEQ ID NO: 719018 - DNA, 83 bp, Homo sapiens
caagggggaagtagagagataacaaaagctgctcagagtctcaatgaacttgatatgtgtcacaaagatgtctacacggaact

SEQ ID NO: 719019 - DNA, 75 bp, Homo sapiens
ggactttgggcgtcccattgccatgtatttgagaacacagtggctacggtgatggctctgcgcagggagaagatg

SEQ ID NO: 719020 - DNA, 50 bp, Homo sapiens
gagagttagtgctgtcaaggccgatttggagatgtggtctcactatgttg

SEQ ID NO: 719021 - DNA, 82 bp, Homo sapiens
ccgacgcaaaccaaggatctggggatcttcgcactatcccaagtgtttgaagatactgtggaggagcgtgtcatcaatgaag

SEQ ID NO: 719022 - DNA, 113 bp, Homo sapiens
catcactgaagagcagacccgtttgggttctccacgcattctagactcccgaagagaaagccattgatctggtgacgaaagccacagaggaggacaaagccaagaactacgag

SEQ ID NO: 719023 - DNA, 88 bp, Homo sapiens
tccggggcttgccctggtcttgctcggccgatgaagtgcagaggtttttttctggccagcggaagcctgccacctcctatgtgcggac

SEQ ID NO: 719024 - DNA, 90 bp, Homo sapiens
ccatagagtacagccacagccacgacaggtacctaccaggcatccgtgtcattctggaccttactcccaactaccggggtgagaactcgt

SEQ ID NO: 719025 - DNA, 51 bp, Homo sapiens
ggattttgtcagcttgtcgtcaaggaaggtggacttttaaatattctccac

SEQ ID NO: 719026 - DNA, 75 bp, Homo sapiens
gaacatgatcaagggtgttacactgacttgggaagatccccatgaaaaagataagagcacgaactgctttggaga

SEQ ID NO: 719027 - DNA, 75 bp, Homo sapiens
gttgggcgccccggacgagagctccgtgcgggtggctgtcagggtatattcaggcctgccgggcactcatgatca

SEQ ID NO: 719028 - DNA, 100 bp, Homo sapiens
gcacccacgcccctcaccccccgagagccggcagaaaatgtgctagattggaggtgaagaccctggagccagagagcctaggcttagtcctagccctgca

SEQ ID NO: 719029 - DNA, 101 bp, Homo sapiens
gaaaaatgagcctttgtgcgtctctgttgattccaagtttcctatagaagacacccctttggttccgctctgtgcacctagaggaggctggcattctacgg

SEQ ID NO: 719030 - DNA, 75 bp, Homo sapiens
ctagttaggattttattactggcagcatgtatatcttttgctgccttcgaccagcgcatgaagacatggcagcgc

SEQ ID NO: 719031 - DNA, 98 bp, Homo sapiens
tggactgcaacctggctgtacagctcctcaagtgcaacaagtcccacttccgaaaccacaagtttgccgattgtccccagttgtcctcatccagggtg

SEQ ID NO: 719032 - DNA, 75 bp, Homo sapiens
ttgagggagaaaggcgggcccgggaacaggtatcctttgtgtggctgatcagtgtcacggcttaagagaactagc

SEQ ID NO: 719033 - DNA, 50 bp, Homo sapiens
ccctgaccgagacctgggccgatttggagcctggctgccaaccacttgag

SEQ ID NO: 719034 - DNA, 75 bp, Homo sapiens
agctggctctggaggacgccaaagaaggctacagatccttcatggatttaaaaatcaagttggcgatgaaaattg

SEQ ID NO: 719035 - DNA, 100 bp, Homo sapiens
cctaaaacaggatcagtaaagaaggaaaaagcagtaaagccagaggaagagaaccatggagtctggcagtaccgccgccagtgaggaggcacgcagcctt

SEQ ID NO: 719036 - DNA, 75 bp, Homo sapiens
tcattggcatctttgctcaaaatagacctgagggagaaaactggttgtcctggatgtttgaaaagttggtcgttg

SEQ ID NO: 719037 - DNA, 100 bp, Homo sapiens
accaccctgttgtacatccactggacctaaaatatgaccctgatccaggacacattcagctaacgtattttagcaggtggagtgaggttgaagattcctg

SEQ ID NO: 719038 - DNA, 95 bp, Homo sapiens
caggtctctgtcgagcagcggacgccggtctctgttccgcaggatgatcgtcagtatttaaacagatcacatcatgcgtgagtacaagctagtgg

SEQ ID NO: 719039 - DNA, 98 bp, Homo sapiens
caatgtgcccttcatcccagtcacccaggcctccgcttctccggcctccctgctcttaccgggaggtaggagcattgcttttcgtggtgaaagaggca

SEQ ID NO: 719040 - DNA, 96 bp, Homo sapiens
aaagagtcaaggtggggagccaacatacaatgtggctgtcggcagagctggtagaggggaagcaaaggcgaatgctccttgtgttatatttattga

SEQ ID NO: 719041 - DNA, 97 bp, Homo sapiens
gttatcacaatatccttccactgctgaatgattctggcagatgctattaactgagtacttggatatgaaaaatactcgtacggcctctgaaccatca

SEQ ID NO: 719042 - DNA, 100 bp, Homo sapiens
tctcagcctgggcgtcgctgaagctgtgtctgcggggaggcagcggaaggcggcagggcagctggtggaatttttgaagaaaatggaatctcgaggcccc

SEQ ID NO: 719043 - DNA, 96 bp, Homo sapiens
ttttggaacagtttcagctggcatggtactggatatagtacaggcttatcaggagggcagacttcaaaagctactaaaaatgaacggccctgaaga

SEQ ID NO: 719044 - DNA, 83 bp, Homo sapiens
cgccggcccgcgggtctacttcctcaaagtatcctagaaggaaaacatcaccatggctacagaaattggttctcctcctcgtt

SEQ ID NO: 719045 - DNA, 100 bp, Homo sapiens
atgtgcgcggagagcaatcgccgggacagctgcaagctaccatactgggaactgcccaatggagaggcccacattccacaaggaactgatgtcttcagcc

SEQ ID NO: 719046 - DNA, 96 bp, Homo sapiens
agcggagcgaacccgagagcgtggagcgggctgggccaggaccttctaccgctttgaggctgtgtgggatagctctctgcataactcccttcttct

SEQ ID NO: 719047 - DNA, 100 bp, Homo sapiens
agacacaggcacgactagaagcattgctagaagcagcagtctctgctggatgaaccgaatcctaacagtccagccaatagccaggcagcacagctttatc

SEQ ID NO: 719048 - DNA, 75 bp, Homo sapiens
cccaagtccagaatccgcgcgcaccgcgggggggccctcagcctcttggccttgaacgggctgttcatcttgatt

SEQ ID NO: 719049 - DNA, 100 bp, Homo sapiens
tgtggtcaaacccacccggcccaactcactatggagaacttaatgttctggatgatattttaactgaagtaccagaacaagatgatgaactgtataatcc

SEQ ID NO: 719050 - DNA, 98 bp, Homo sapiens
gcttggcgtgcagaaggttgctctctgcaagtatacagcccagatggtggtggctggcactgcaggccagaggcatttcatccttcatgaagccattc

SEQ ID NO: 719051 - DNA, 75 bp, Homo sapiens
aagccacgtggccactgaacacactctcaacaccttgcgctatgctgaccggtcacccctcctaatttctcagtg

SEQ ID NO: 719052 - DNA, 50 bp, Homo sapiens
ctgactttcagctatggaatcgcagtcctgcgttaactgcggccgggagg

SEQ ID NO: 719053 - DNA, 83 bp, Homo sapiens
ataggaatcccatctcatttaggtggtgtttcataagatgtcacccaacgagaccctctttttggaaagtaccaacaagattt

SEQ ID NO: 719054 - DNA, 80 bp, Homo sapiens
gatatttgcttggaaaaacgtgtgggtacgaccttgacctggaatggccaaatatcaaggtgaagttcaaagtttgaaac

SEQ ID NO: 719055 - DNA, 75 bp, Homo sapiens
ggacattcagtcagaagaaggctgctattgaaagagagtatgcacagccctggttgttgctatgaaacagctatg

SEQ ID NO: 719056 - DNA, 85 bp, Homo sapiens
agatctagaagtcactttggaagaagtatatgcaggaaattttgtggaaaacagctttgctgagccatcaaggtctaatggaagc

SEQ ID NO: 719057 - DNA, 100 bp, Homo sapiens
tggactcatggaggctgagcatttattcagattttccagcaaataacattgtgaagttcctggtaggctttaccaacaagggtacagaagattttattgt

SEQ ID NO: 719058 - DNA, 80 bp, Homo sapiens
gaccctggcccagctgtaaaccgaacagagagccccatgggggccctgcagccagctcaccatggatgatgatatcgccg

SEQ ID NO: 719059 - DNA, 75 bp, Homo sapiens
attatagcaatcccagacctaagtttgaagattggctttgtaacaagttagtgtgactctggatccagatacagc

SEQ ID NO: 719060 - DNA, 75 bp, Homo sapiens
gaaaagactcaggacggacaagcacagtcttcggaaggtgtgtttaagcagaggaaaattattagttgaaaaagc

SEQ ID NO: 719061 - DNA, 100 bp, Homo sapiens
gagctgcgcaagaagattgggggctggttccaagcttgaactacccttgtggctggcaaaaggactttttgacaacaagcgacggatcctttctgtggaa

SEQ ID NO: 719062 - DNA, 100 bp, Homo sapiens
cgaagaagagtccttggaacaagcaactggctattgaaaaggtccccgcggaagccgcggtgtcggcgccatggcggagctgacggctcttgagagtctc

SEQ ID NO: 719063 - DNA, 75 bp, Homo sapiens
acttgaagacctgcgccaagaagcaagtaaccttcagacacaggatattattgctggattcctatataccatttt

SEQ ID NO: 719064 - DNA, 98 bp, Homo sapiens
tccacagctaagacgccaggacccactggaagcctagaaatgggttttggccaaattgggcgagggcacaaaataaccacttaccccttctcaccgag

SEQ ID NO: 719065 - DNA, 98 bp, Homo sapiens
gcctatgtagacagccacaaatgggaagcaagagaaaaagaacattactgtcttggttatgaagacagtatggagtttccagaccatagtagacattt

SEQ ID NO: 719066 - DNA, 97 bp, Homo sapiens
acagcccccaccagtccaccagtgcagcagaatatgatgaactcggcttcaggtatcgatatcctgaagcttgtagcagcccaagtgggaagccagt

SEQ ID NO: 719067 - DNA, 100 bp, Homo sapiens
gaaaggatcctacaagaccctcaggctggtagtgcgcaggggcataaggaaatggtggcaggcacttcctcctaacaagaaggaagtagttaaagaaaat

SEQ ID NO: 719068 - DNA, 51 bp, Homo sapiens
cctcattgctctttggcgactcttattgtgtgccggtccaacaaaagccct

SEQ ID NO: 719069 - DNA, 96 bp, Homo sapiens
aggcggcccaggtcgccgacacgctcacgcaccctccctgcctggccgcgcctctgcgaccagggattgtgaagcagcagatagacagccatatca

SEQ ID NO: 719070 - DNA, 100 bp, Homo sapiens
actgctgcaggcagccctgctctgcgtcaacgccatcgcagtgctgcacgaggagcgattcctcaagaacactggacccacaaaccgtggagaccaagaa

SEQ ID NO: 719071 - DNA, 74 bp, Homo sapiens
ccagcaacagcagcatcagcagcgtgatgttatcgctcccatggctattgaagaacaagtggctgttatctatg

SEQ ID NO: 719072 - DNA, 82 bp, Homo sapiens
gttcctgccacagcggcttcgagctctcctctgatggcaggacctgccaagcactctcgagtggaccctgaggagctcttca

SEQ ID NO: 719073 - DNA, 97 bp, Homo sapiens
aagtcagaccgctcatcacgaacatcatcgtctgatgaagaagaggaaacagagtgtgaggtgtgagacaagtacttcagttcaagagtgtatttag

SEQ ID NO: 719074 - DNA, 97 bp, Homo sapiens
ggaagctagatttactggagttgcaagtgggagcactggaagtacgggcagttgcagtgttggagctaaagtgggctcagccttctttccttcaatt

SEQ ID NO: 719075 - DNA, 100 bp, Homo sapiens
atcgaggagcccagggacacacgccttcaggtttgctcaggggttctctacttaaaagacaatgactactgatgaaggtgccaagaacaatgaagaaagc

SEQ ID NO: 719076 - DNA, 50 bp, Homo sapiens
acaagatcatgggcaaaggacagatccagcccttcagatatttcaacact

SEQ ID NO: 719077 - DNA, 82 bp, Homo sapiens
gggccctcatggcgtgcggccgattgtggagtcctgcatggaagggatctgtaagccagaccctaggatctacaagctgtgc

SEQ ID NO: 719078 - DNA, 100 bp, Homo sapiens
attaatgaccgaacagaaacccctcctcccctagcttcactcaatgttagtaagatctttgtagaatttgatggctgtaactggaagcaacactcctggg

SEQ ID NO: 719079 - DNA, 83 bp, Homo sapiens
gtgcagagcgccgtctggagccgagatggagccctggtgggcacggcgtgcaaggcagccagataagctggtggtggtatgga

SEQ ID NO: 719080 - DNA, 100 bp, Homo sapiens
ctgccgttctgtacttgcttttcatgattggagaacttgtaggtggtggagtttgacaccccatcggtccttctgtccaacgacagttcccgattctatg

SEQ ID NO: 719081 - DNA, 90 bp, Homo sapiens
atctgttgctgcagttaccggaacctttgccaggactagtacaggaccacggatccaattctggtacagcagttgcgccggacatacaaa

SEQ ID NO: 719082 - DNA, 100 bp, Homo sapiens
cagtgagcgagtcaggaacagccacgctgaaagctcggccaagagtccggcccctgctgaccttccttccgctgacgggctcatcttcgcttgtgcctgg

SEQ ID NO: 719083 - DNA, 100 bp, Homo sapiens
aggtggtgaggcttcccgtcatattccaggtactccaaagattcaggtttactcacgtcatccagcagagaatggaaagtcaaatttcctgaattgctat

SEQ ID NO: 719084 - DNA, 98 bp, Homo sapiens
tgaagagaagctctgcattaaggtcctacagaccctgagggaaatgatgaccaaagatagaggctatggagaaaagggcaaatttattcggatcaact

SEQ ID NO: 719085 - DNA, 99 bp, Homo sapiens
cggccagttcacctactgctggcacgatgacatcatgcaagctacttgtcctgcactgacgaggatgaaatgtgggattggaccaccagcatccttaaa

SEQ ID NO: 719086 - DNA, 80 bp, Homo sapiens
gagaggatatgtagcgaggaggaacgcgctaaggcaaagcacctgaaatacactttcgggaaatggcctctaaatcctgg

SEQ ID NO: 719087 - DNA, 51 bp, Homo sapiens
cagggctgctttggcgaggtgtggatggccttgcatccaagggtccttaag

SEQ ID NO: 719088 - DNA, 75 bp, Homo sapiens
gtgcagactacatggcatctaccataggggttaccccacagcctatccagcagctgcccctgcctacaatcccag

SEQ ID NO: 719089 - DNA, 100 bp, Homo sapiens
tcacaccgtcttcggtctcctggggtcggcgccgagtgggaggatggcggaagtcgcaatggaagaagagatcgccgcgctggtcattgacaatggctcc

SEQ ID NO: 719090 - DNA, 73 bp, Homo sapiens
caagaaagacttgatggtctggtagaaacaccaacaggatacattgaaagtgccggtggtggtgtgcacattg

SEQ ID NO: 719091 - DNA, 85 bp, Homo sapiens
cgaccgccccgcgtcatgcggctcctcggctggtgatgacgaagatgatcctgcagaagctgaaaaggagggaaatgaaatggag

SEQ ID NO: 719092 - DNA, 83 bp, Homo sapiens
cctcggcagggaggatgacggagctgcagtcggcactgctactgcgaagacagctggcaggcctacagattcctggaggagat

SEQ ID NO: 719093 - DNA, 98 bp, Homo sapiens
tgcaccttcagatcatggcgttggcattgaacctgtatttccggagaacacaggtcacttggctgactccagcagaggccctcccgctaaggaccctg

SEQ ID NO: 719094 - DNA, 100 bp, Homo sapiens
ttcctcttctgcatcctctggtccctgctcttccacttcaaggagacaacggccacacactgtgggttgtgtgacttcattgagacacattacctgaatg

SEQ ID NO: 719095 - DNA, 96 bp, Homo sapiens
ccacccttggtgatgagcctcggaaagtgctcctgcggctgtatggagcgattttgcagatgattgtggatttcttaaagaagaagcatgattttg

SEQ ID NO: 719096 - DNA, 90 bp, Homo sapiens
agcaaaaccaacgcctggctcggagcagcagcctctgagcccactttccttgtggaactgtccagagtgctggcaaatccaggaaacagt

SEQ ID NO: 719097 - DNA, 80 bp, Homo sapiens
ctgaaggccaggttttgcagtggtctgaggtttgctctggaattagtcacagaaaagggccatacatttgccgaagagct

SEQ ID NO: 719098 - DNA, 117 bp, Homo sapiens
gtagatcatgaaagagatcctggacctatgaatatccagtttgagccatcggatctaagatccaaaagatgtgttcagagcaacattgttttgttgacacaagcatttagaagaaag

SEQ ID NO: 719099 - DNA, 90 bp, Homo sapiens
ggacttctcagcctccagaactcctcttgatgaaccggaggaagtttctttaccaattcaaaaatgtccgctgggctaagggtcggcgtg

SEQ ID NO: 719100 - DNA, 100 bp, Homo sapiens
gcaggagggccgtcaagatcctcaagaagaagaagttgcgaaggatccccaacggggaggccaacgtgaagaattgcatccttaatgtccagtcaaggag

SEQ ID NO: 719101 - DNA, 100 bp, Homo sapiens
tctccccctcctgctatggagaaggttctaatagaagactgtatcccggtactgaagaggtacgccaaagaagggagagaatttgattatgtgattaatg

SEQ ID NO: 719102 - DNA, 75 bp, Homo sapiens
tctccatcacccaccaacaacaccacaataatccacagccaagcctcccgagcacaacaaggagaggtgatgagg

SEQ ID NO: 719103 - DNA, 76 bp, Homo sapiens
caagaagatcatcattaaggacggaggcacgatcgtcagtatttaaacagatcacatcatgcgtgagtacaagcta

SEQ ID NO: 719104 - DNA, 90 bp, Homo sapiens
actcaacttgctgggccggtgcaactattcgcagtccgagcggtgctggcattgacggagtggaggaaattaagcgccatcccttctttg

SEQ ID NO: 719105 - DNA, 98 bp, Homo sapiens
aaggctttgagaaattttgagtcctcgagtgaatgggcggatctcatatcttcacttggcaaactcaacaagcttgctcacttccgacagagaaaaac

SEQ ID NO: 719106 - DNA, 75 bp, Homo sapiens
cagccgccgcctgccctcagccgcccgctggccgggagcggagcccctgtgggaagaagtccctcctggtgaata

SEQ ID NO: 719107 - DNA, 100 bp, Homo sapiens
cgcaccgactatgtcgcctgccaccgagccgggcccacctccccaccaaggaagcacgtatctcccatgcgccaagtggagcccccagccaagaagccag

SEQ ID NO: 719108 - DNA, 119 bp, Homo sapiens
agcgcactcgtaacctggatcccagaaggtcgcgaaggcagtaccgtttcctcagcggcggacctaatctgggagcctgcaagtgacaacagcctttgcggtccttagacagcttggcc

SEQ ID NO: 719109 - DNA, 100 bp, Homo sapiens
tgaatatgtgaaagatatttatgcttatctgagacaacttgaggtagtcaaaccacacactccattaataaggtttcctgacagaagagacaatcctaaa

SEQ ID NO: 719110 - DNA, 100 bp, Homo sapiens
aggacgtggcgggtggagctcagaccggtgggctagagggtctcgctgttggagttggatttggggctatagaaaagacggcatctgctacctttgagag

SEQ ID NO: 719111 - DNA, 100 bp, Homo sapiens
ctgaaatccatcttcatcctaccgctccgcccgtggctgcgctggagcggcagatctttgacttcctgggctaccagtgggctcccatcctagccaactt

SEQ ID NO: 719112 - DNA, 88 bp, Homo sapiens
agatttgcatcagccatctcttagtccagcaagtcctcatagccagggaaactctttatacagtgaaacaggaggaaagaaaaatgca

SEQ ID NO: 719113 - DNA, 100 bp, Homo sapiens
cagtatagtttgggttcgccagttggaattgaaggacagtcattttgtttactcattcagccctgttgcaggtcccaataaactcttcataaggttgaca

SEQ ID NO: 719114 - DNA, 77 bp, Homo sapiens
ggatctcgggctcggaacgagactgcacgattagtgatgatgaaccaggttatgaccttgatttattttgcatacct

SEQ ID NO: 719115 - DNA, 51 bp, Homo sapiens
cccgagacccacggagaccgcgctttcaacagacctcacatctttcttctt

SEQ ID NO: 719116 - DNA, 51 bp, Homo sapiens
cagcacaacacagggaagcttggggagcctggagtactcgggtactttgag

SEQ ID NO: 719117 - DNA, 100 bp, Homo sapiens
ctatgtttctggagagctcataggaggacttgatataattaagaaacgggtatgcaggagattagaagccagtgggcatgagcgtggctgccaccaggtg

SEQ ID NO: 719118 - DNA, 50 bp, Homo sapiens
gcgctgttgctgggctcggcgtgctgcggcgtgaattacccttcactaag

SEQ ID NO: 719119 - DNA, 51 bp, Homo sapiens
cttcagttaatggcaagacttgcagagggtgtgtgtggtttcagcgcagca

SEQ ID NO: 719120 - DNA, 75 bp, Homo sapiens
cagtagtcgctgttggatcgggttctaaaggaaaggttcatacgttttatgaagctgtggggtacatgattggtg

SEQ ID NO: 719121 - DNA, 82 bp, Homo sapiens
agttagtggtggacctgtttgtgcgcacagtgctggtctgcctgacatgtttttctatatgagtggagaagacagctgttac

SEQ ID NO: 719122 - DNA, 100 bp, Homo sapiens
tacttctggaaaaaggagccgagagacaagattttgccttatttcccaggctggtctcgaactcctgggctcaagccattcgtctgcctcagcctcccaa

SEQ ID NO: 719123 - DNA, 118 bp, Homo sapiens
ggagcggccagctaggagcgctctgtggtgcctggggctgaacgcggctttctgattttatcatgtgggcaacctgctgcaactggttctgcctggatggacagcctgaggaggtccc

SEQ ID NO: 719124 - DNA, 83 bp, Homo sapiens
gacagtctcctgcgaaaccaggcaatgggtacatgtcccagagcaagcacacggaggcccgggagctcatgtactcgggagcc

SEQ ID NO: 719125 - DNA, 109 bp, Homo sapiens
gccgtgcatggggctgctccccaggacctgagcaggaacctggagttttcaggaattgaatgatctggcacgggaccctccagcacagtgttcagcaggtcctgttgga

SEQ ID NO: 719126 - DNA, 51 bp, Homo sapiens
gccgcgcacgctacagtacaaggtgtgggcccatcgctggatggatctgtc

SEQ ID NO: 719127 - DNA, 100 bp, Homo sapiens
ccgcatgctgaacatgctcatcgtgttccgcttcctgcgtatcatccccagcatgaagggtgctttcttctgcgacctggtactcatctacctcatcaaa

SEQ ID NO: 719128 - DNA, 90 bp, Homo sapiens
caaccatcgttgggaaatcatctctaaatcccatcctctttcgaggtgttgggaaaatgtttcaacgtgcgcaagagttgcggtggcggg

SEQ ID NO: 719129 - DNA, 98 bp, Homo sapiens
cgaggaggcctcgaggtgcccagacaagcccaaggaggagctggagaaggacttcatctcccagggttccccactgaaggacttggtccagctgtctg

SEQ ID NO: 719130 - DNA, 90 bp, Homo sapiens
agggaggatccggacccccgcaaggtcaacctgggagtgggaggcattctttagtggcaggctgaaggccagagggaacatcatgctgag

SEQ ID NO: 719131 - DNA, 75 bp, Homo sapiens
aggctgctattgaaagagagtatgcacagatcgtcagtatttaaacagatcacatcatgcgtgagtacaagctag

SEQ ID NO: 719132 - DNA, 73 bp, Homo sapiens
gccggtcgggcggggcggcggcgctgacaggccagacaatgcagtgccaggggacgtgctggtgctgacaaaa

SEQ ID NO: 719133 - DNA, 100 bp, Homo sapiens
aaatattcaaaaatgatggcctttttggaaaagagtcaggaacaagaaaatcatgctacattaggttgcaaaagcttctcatttcagagagatgccagga

SEQ ID NO: 719134 - DNA, 75 bp, Homo sapiens
cgggtgtggacgccactacagttcatcaacatcaactacgtccctctgaagggtccagtgtccatcaaagtccag

SEQ ID NO: 719135 - DNA, 90 bp, Homo sapiens
tgttgccccaggcacatgaccttctgaagtgaccaggctgaaagggaagcaatactcgtgtatgccaacaagattcagaagaactgttga

SEQ ID NO: 719136 - DNA, 49 bp, Homo sapiens
gaaagctttaggagttcacagtgtcatgcttctcatcgatatcgagctg

SEQ ID NO: 719137 - DNA, 95 bp, Homo sapiens
gcatctgggccgagaccattccgtatggagagccgggtgccaagtcctgccctgccaacttcttggcagctgccgacgacaaactcagtgggttc

SEQ ID NO: 719138 - DNA, 110 bp, Homo sapiens
taagaagaaaaagagcaaagataagaagagaaaaagagaagatgaagaaacccagcttgatatgttggtttagaaacatcaactggaatcaatttgcatttgaaaattag

SEQ ID NO: 719139 - DNA, 75 bp, Homo sapiens
cctggaagagttctatgcactctgtgaccagctggagctgtgcctgagctctcggagcagattcagagggccctg

SEQ ID NO: 719140 - DNA, 75 bp, Homo sapiens
caagattggacgtactcatactcaggatgctgttccacttactcttgggcagcttggatttacactgggcaacgt

SEQ ID NO: 719141 - DNA, 83 bp, Homo sapiens
atttgcaacagctcacgggagcaagaacgatgttttgaacagagataaggatgaggagccaactgtaaaacaagagattgaag

SEQ ID NO: 719142 - DNA, 80 bp, Homo sapiens
aagtgcattttcctgatccaaacaagcttcattgttttcagctaacagtaaccccagagctgcggtgcaaccctgggcag

SEQ ID NO: 719143 - DNA, 98 bp, Homo sapiens
ctgctcaacgacgaggacctgacgcagatataattggtgattacaactttcctctataaattaactcttgacactccttgggatttgaagaaaaaaat

SEQ ID NO: 719144 - DNA, 75 bp, Homo sapiens
ccggaggaggaggggagaggcctggaggacaccaacatggtgccttagctggaccaattattgtggagccacatg

SEQ ID NO: 719145 - DNA, 83 bp, Homo sapiens
gcctggcggctacatggagagtgtcagtttgcgtgtgaacttggacatgggcaaagcggtgtatggatggatgatgatgaaag

SEQ ID NO: 719146 - DNA, 100 bp, Homo sapiens
gcgcggggatggagcccctgcgggtgctggagctatacagcggcgtgggcggcatgcaccacgcgctgagaggcatgaatgctttacagttgcagaacct

SEQ ID NO: 719147 - DNA, 90 bp, Homo sapiens
ctgaagagctatggtgaaacaccactgaagcattgccaagtcttggtcctttagtgagtaaagtgaaagaataccaagtagagacaattg

SEQ ID NO: 719148 - DNA, 73 bp, Homo sapiens
gcagataaccggaaaatcacacctcttatgtcagcatttcgcaagaattctgcttggtcagaatcgtgatggc

SEQ ID NO: 719149 - DNA, 98 bp, Homo sapiens
gttaattggggccttcgaaatcaaggactaaggcaggatggggaagcagaatagcaaactggcccctgaagtgatggaggacctggtgaagagcacag

SEQ ID NO: 719150 - DNA, 98 bp, Homo sapiens
ctggggaacctgctcaaagccctgggtcgcttggaagaagccaaggtactgaaggaatacttagacaatgtccagttgggtcatatccttgaacgtga

SEQ ID NO: 719151 - DNA, 96 bp, Homo sapiens
aaaaaatgtctgtcacatatgatgattccgttggagtagaagtgtccagcgacagcttctgggagtttcaccagtgatcattaaagaatgggcagc

SEQ ID NO: 719152 - DNA, 120 bp, Homo sapiens
ctgaagcagcgtctgcgggcgatgagtgccgaggagcggctacgccagtcccgcgtactgagccagaaggacattgtcaatacctctggccgcttcttcatcatcaacaaggaaaattac

SEQ ID NO: 719153 - DNA, 90 bp, Homo sapiens
cgctggtgtctgttcgcatcttttagaatacgctggtgtcggtgcgcacagcgcttctcttagttctgtatttaccttgctgtggattgc

SEQ ID NO: 719154 - DNA, 98 bp, Homo sapiens
gtgggtagtgtgcagccgccgcctccagtgctggagaatctggtaaaagcaccattgtgaagcagatgaggatcctgcatgttaatgggtttaatgga

SEQ ID NO: 719155 - DNA, 100 bp, Homo sapiens
ggcgggagctggggaacaggcatggacgtttccgggcaagagaccgactggcggagcaccgccttccggcagaagctggacaaccctccatatgataagg

SEQ ID NO: 719156 - DNA, 96 bp, Homo sapiens
agtttcggtcctggaggtggggccgggcctgcgtagtgaaactgcgtaggaacctgggaagaaggccaccagcttgggctccccacggagggcagc

SEQ ID NO: 719157 - DNA, 87 bp, Homo sapiens
gggccgtttcaggcctgcggctgtcggctggtgcttggcggcagggacgatcggatgagaacatcccagcgaagatcctttcttata

SEQ ID NO: 719158 - DNA, 83 bp, Homo sapiens
cacaccctcgtattctcctgcccttccccaggtctgccacaagagatttagcagcaccagcaatctcaagacccacctgcgac

SEQ ID NO: 719159 - DNA, 101 bp, Homo sapiens
ggccgagcaagcaaggataagtagagaactcgatgccaccgcaacggtattggcgaaccggcaggatgaaagtgagcagtccagaaagcggcttatcgaac

SEQ ID NO: 719160 - DNA, 98 bp, Homo sapiens
gtggccgctgctgctggcgctgtgcggctgcccggcccccgccgcagaacgagcctctgactccaggttatcatggattcccagcgcgggacagccag

SEQ ID NO: 719161 - DNA, 75 bp, Homo sapiens
gaagaaagctggccggggcctgggcctgagcatcgttgggaaacggcctcaactccatatagcatagattcagat

SEQ ID NO: 719162 - DNA, 107 bp, Homo sapiens
ggagcaaggcgacgaaccttggagagaggagaacgaacatcttctggacctttgtccagattactctcgtggctttggtggccggtacggggtggagaaggataaat

SEQ ID NO: 719163 - DNA, 74 bp, Homo sapiens
cggaggaaggcattgcccagatataccaactgattgagtatctacacaaaaatgctggctatgagtttgacatc

SEQ ID NO: 719164 - DNA, 100 bp, Homo sapiens
cactgcaggcatgttcctctatgtagccttggtggatatgaccattgccctcttgaacatttaccgtaaccctcaaaactcttcccagtctgctgacggt

SEQ ID NO: 719165 - DNA, 95 bp, Homo sapiens
aaaagagcaagaaacagaaatatgaaaaaaacaatgagtcatctgatagctcatcaagagaaagcggttggaagccaagcaacgggaagacatct

SEQ ID NO: 719166 - DNA, 75 bp, Homo sapiens
tgtcccagatatagccgttggtacaaaggtactggctgtgatcgaacttctcaaccctcagagacttagatcttc

SEQ ID NO: 719167 - DNA, 100 bp, Homo sapiens
atgtggcagttctagtcaaagaacgctttctgttcaagaggcagctgcgtatttaaaagcttgcattgatgacaatgttgatatggtgaagtttctggta

SEQ ID NO: 719168 - DNA, 74 bp, Homo sapiens
gagacctacgtggcagctgtgaaaaaagccatttccgaaggtgtcatggagaaactccagctgggcccagagat

SEQ ID NO: 719169 - DNA, 100 bp, Homo sapiens
aacgaagtcgtggaggtggcgaaacgaggaggagataacgcggccttgggctctggcacgggcgagagcgggaagagcacgttcatcaagcagatgcgca

SEQ ID NO: 719170 - DNA, 75 bp, Homo sapiens
tgaaaatggacgagtaatcgcctgctttgattcattgaaagttatcaccaatctagtgaaaatgttgaagtccag

SEQ ID NO: 719171 - DNA, 100 bp, Homo sapiens
ccttctaatgcctatggactaccagaatctgaattcttaattgttttgcgagatgtggggaattgacataggggatagcttaactattccagatgaattc

SEQ ID NO: 719172 - DNA, 97 bp, Homo sapiens
agcgtgaccgagagcgcgaatatcgtcatcgttagaaggtcctgggaactccaacaagggagcaaatcagagaaatgaacccaaactacacagaatt

SEQ ID NO: 719173 - DNA, 100 bp, Homo sapiens
gggagcgcctcgtcgacatgagtgatgtggaggaaaacaacttcgagggcagaattccgagtccgaaaggtccctgagtagattggaagcagtgacagca

SEQ ID NO: 719174 - DNA, 82 bp, Homo sapiens
gcgaatagctctgaccacccggcgaaggtctcctctgagcctccggcctccataagacccaaaacagatgacacctcttccc

SEQ ID NO: 719175 - DNA, 87 bp, Homo sapiens
ggtccaggctgctgccgcgacggggccggcggcggggcagctgccaggaacgagggtagcagtgcacgatctgattttctggagaga

SEQ ID NO: 719176 - DNA, 90 bp, Homo sapiens
cgaacatcttctggacctttgtccagagccccccaagatgaacccagtggtggagccactgtcctggatgctgggcacctggctgtcgga

SEQ ID NO: 719177 - DNA, 97 bp, Homo sapiens
tgtttcagcagaaactgtacaaactgtcagatacaagagaagggaccgcgccgtgcacatccagcatcctccaggagaagcagcgtgagtcaagcct

SEQ ID NO: 719178 - DNA, 49 bp, Homo sapiens
ccgctcagaagttctcggcgctcacgatcctttcccggagttcagttat

SEQ ID NO: 719179 - DNA, 50 bp, Homo sapiens
tcaatcatcattttgagctcaaaggtacagcagggaagaactggaaactc

SEQ ID NO: 719180 - DNA, 98 bp, Homo sapiens
cattgaggcaaaggctaatgtgtgctgtgttaaattcagcccctcttccagataccatttggctttcggctgtgcagtcatacagtttgtcaagaaag

SEQ ID NO: 719181 - DNA, 90 bp, Homo sapiens
ccacgtggacccggccaacgacacatttgacattgatccgatggtggttactggaggctgaagatgagaagtcagtcctgatggcagctg

SEQ ID NO: 719182 - DNA, 75 bp, Homo sapiens
ctgcggaggctgcggcccccaggggccaactcaccctatgcagcacagcccaccagctacgactatgatgcccca

SEQ ID NO: 719183 - DNA, 101 bp, Homo sapiens
aactatgtggaggagatgtactgtgcttggctggaaaaccccaaaagtgtacataaggagatatctgaagagattataggatcacccatcccagaacctag

SEQ ID NO: 719184 - DNA, 90 bp, Homo sapiens
aggattcgctcccagagcagctgcggccagagattgggtctctccacattgccccggctgctctccaacccctgagttcaagtgattcac

SEQ ID NO: 719185 - DNA, 90 bp, Homo sapiens
ttctgcaacacggctacggtctacaagatctgcgcctggatgcagctcttggcaggtaccctgctgactgctcactccccaactcctgtc

SEQ ID NO: 719186 - DNA, 100 bp, Homo sapiens
ggccgagcaggctgagcgatacgacggtgcaagtgcaacctgcacgccaacctgtgctccatgcgcgagggcagcctgcagtgcgagtgcgagcacaaca

SEQ ID NO: 719187 - DNA, 83 bp, Homo sapiens
ggcctcgcggcgacggcggcggtggcggcttggacgactcggagagccggattgtcagtggcttcgccccgaggagagctgac

SEQ ID NO: 719188 - DNA, 71 bp, Homo sapiens
cccgaactcccggcccgaactccagggccctgttggaggaagccagaaagcgaagactgctggaggactcc

SEQ ID NO: 719189 - DNA, 88 bp, Homo sapiens
tggaagtgaatggccccatggtgacggtggccctgtcagtggctctcttggccctcctgaaatgattcccaacctgctgagcatccgc

SEQ ID NO: 719190 - DNA, 101 bp, Homo sapiens
aattttggcatcaaggacaaacccaccttcatcaaaggggtcagcttcaggccaccaaatccctctgccatttctacagctctgtgtccccaaaccctgag

SEQ ID NO: 719191 - DNA, 98 bp, Homo sapiens
atcatcagctggaactggcaaagcagctacacaaagagggtcatctcttctattgtacctgcagtttcagtctgatggaagcaaacaagaagataaag

SEQ ID NO: 719192 - DNA, 49 bp, Homo sapiens
cgccgcgggagcgccgggccccgacgatgtttgagacggaggcagatga

SEQ ID NO: 719193 - DNA, 136 bp, Homo sapiens
ccctatctcagcccttcgtactgggacgttggggagggggctgtgccgggcggagagaactcagcgaggattctgagtgaaatgcaaaatggaggacgatgcagtacctgcagccaagatgaaaattccatcatct

SEQ ID NO: 719194 - DNA, 50 bp, Homo sapiens
ggggaacccgtgcggctggagagagggatatcagtatgaacaacattact

SEQ ID NO: 719195 - DNA, 80 bp, Homo sapiens
ccgcgcacttcgtcatgttcttcgcgccctggtgctcttacagcctgttccaagtgtggcttaatccgtctccaccacca

SEQ ID NO: 719196 - DNA, 87 bp, Homo sapiens
tgtgattaccatggcgaggagtctctgtccgggggcctggctaaggaaaccctattacctccagtacggtggggattgcagctgctg

SEQ ID NO: 719197 - DNA, 75 bp, Homo sapiens
caccatggcagatggcaacagaggatgtcaacaattttttggaggtagatatagttgtaggtactccgggaagac

SEQ ID NO: 719198 - DNA, 100 bp, Homo sapiens
tccatttcaaagaacagaatgctaaggaagctgtggcaagtgttggagcgggccggagagaagtagagtgggctgcgaggagaaggaaacaggcctttcg

SEQ ID NO: 719199 - DNA, 100 bp, Homo sapiens
cctgcaaaagaagttcgagagcctcttccctgggaagctggaggtggtgcttaagggggccccgggacagccaggcaccatcctccgcactgtgcccatg

SEQ ID NO: 719200 - DNA, 105 bp, Homo sapiens
tggcagcatctgtggactgagcaagaagaatctctgatgtctgtcctgagccttccgaccagcatgttttggaaatttgatcttcactcatcatcccacatagac

SEQ ID NO: 719201 - DNA, 75 bp, Homo sapiens
gcagtggcgtcctggagccctcctcaggaatcccgttctgcttccagaagtggaagtgctcacggatcggggaaa

SEQ ID NO: 719202 - DNA, 100 bp, Homo sapiens
cttggacctgcggtgctatagagcagtgccaaatctttggagtgttgatggagaagttacagtagctgaacagaagccgggagaaattgctgaagaactc

SEQ ID NO: 719203 - DNA, 100 bp, Homo sapiens
ctacatcatagctttaaaggcagaagtaaccagagagcacagagaaatgctggtgaaactggccaaacagaacaccaacaaggccaaagactctttacgg

SEQ ID NO: 719204 - DNA, 75 bp, Homo sapiens
ttttcgcaagaacaagactctcggctatggagtccccatgttggttccaaggagcaggggcctcgacaaaggaag

SEQ ID NO: 719205 - DNA, 73 bp, Homo sapiens
gcagcagtcagggacatttctgaagcgagcgtcttcgatgttactccacaggatccgctgaacataggatgtt

SEQ ID NO: 719206 - DNA, 90 bp, Homo sapiens
gtcgaacaatcaaactatgggttttggagaccaaagaagtctacagggtaaagagaaatgtgtatgaccttacaagtatccccgttcgcc

SEQ ID NO: 719207 - DNA, 100 bp, Homo sapiens
actgcacgtagcccggcgctcggcatggctctcctggtgctcgagagctcagaaatatgctcagcaagtcttgcagaaggaatgtcgtcccaagtttgcc

SEQ ID NO: 719208 - DNA, 100 bp, Homo sapiens
gtaattgctgaacttaaaaagcagtctaaacctgtgaccacccctgaagaaattgcacaggaagccattaatttgctagaaccaatgacaaacgaccccg

SEQ ID NO: 719209 - DNA, 89 bp, Homo sapiens
cgacccaagcgccgcggttaaccacgtctcgtccacgacctccctagcttcagaagtgtataagatcagctttatctttccaaatggag

SEQ ID NO: 719210 - DNA, 82 bp, Homo sapiens
tccgggccgcaggcagtcccgcggcagcaggatcacagctgatgcttttttcaaagccgctataagccttgttccggaagtt

SEQ ID NO: 719211 - DNA, 83 bp, Homo sapiens
gcaattttggagaattacgattaggctgtggatgagatgaacggaaaggagctcaatggaaaacaaatttatgttggtcgagc

SEQ ID NO: 719212 - DNA, 88 bp, Homo sapiens
gtctgaagctggtagtttcctcacccaccagtccggatctctatgaagcaccagaattatcagtgaagaatatattaaatggctcacg

SEQ ID NO: 719213 - DNA, 75 bp, Homo sapiens
aagagatatctgcaatgatgtactgtgtctgcactgcttggggaggaagatgaagaggcactgcattatttgacc

SEQ ID NO: 719214 - DNA, 100 bp, Homo sapiens
cgcttcccctactgcgtggtgtggacgcccatcccggtgctcacgtgtctggggaagccaatgaaactcagattgcagaagcactgaagcgttacagtga

SEQ ID NO: 719215 - DNA, 75 bp, Homo sapiens
ttatcacatttctggagcaagtacaacatatctgaagagatggattaagaatgctttggattaaggattgtggag

SEQ ID NO: 719216 - DNA, 100 bp, Homo sapiens
ggagagttgaatgccagccaccagccatggaggtcctgggcctatgtcaagaagtgcaaaaacaacatgtgtccaaatcggggattggtgagccagctgc

SEQ ID NO: 719217 - DNA, 90 bp, Homo sapiens
ttctctcgtggccaggctcattatccattttcgagacattcgcctcaggcccaggcccaaggccaagtgagagagcccaggccacaggac

SEQ ID NO: 719218 - DNA, 75 bp, Homo sapiens
gaccgggatcgtgaccgtggagggacaaccctccatatgataagggagccttcagaatcgaaatcaactttccag

SEQ ID NO: 719219 - DNA, 85 bp, Homo sapiens
ccgggacccacttcactccagtgcctccgacgcctcctgatgggcagctggtggaatttttgaagaaaatggaatctcgaggccc

SEQ ID NO: 719220 - DNA, 115 bp, Homo sapiens
ggcgggcacgcacggcccgggccggcgctccaaggcccgcccgggagggccggggccgcgctcaggtaagaatgattgatgttggctgatattggagtgctcattcacatgaagt

SEQ ID NO: 719221 - DNA, 100 bp, Homo sapiens
gtgaaaaagcaatgacaaatcactgcaagagtacacgtcataagcaaaatactgaggttcctgggggaagccaaggtcccactccgagaggtcctcgcca

SEQ ID NO: 719222 - DNA, 123 bp, Homo sapiens
gattgacatacctgatgcgctcagtgagagagacaaagtcaaatttacagtgcacacaaaggaaggcaacagcccccaggggagcaaccagggagtcaaaatcacaccggaccagcagaagag

SEQ ID NO: 719223 - DNA, 90 bp, Homo sapiens
ctcgtcttccaggacttcgacctggagccgtcccaggactgtgcaggggactctgtcacagaaaatgtttcaacgtgcgcaagagttgcg

SEQ ID NO: 719224 - DNA, 98 bp, Homo sapiens
gaaccttgtcaagcaagctgggatctatgagtggaaaggtgaccaagcccaaagaggagaaagatgcttctaaggatctttggtttcatggccacctt

SEQ ID NO: 719225 - DNA, 75 bp, Homo sapiens
aaaagactgaaatgggggcgaccattcttagttttattagctctctgggagtgagctacatgatgttgtgcactg

SEQ ID NO: 719226 - DNA, 96 bp, Homo sapiens
ggacaaaggaacaggtatctcagtttgcagaaaatgattgccagagactaatgtctgggcagcagacagggtcattgctgccatcttgaagtctac

SEQ ID NO: 719227 - DNA, 100 bp, Homo sapiens
cccgtgacaaaatgtgttccatggtcaaaaaatggcaggtctcagccttagatccaaggacagtccaaggaagtcctaagaccatggagttggtgatctg

SEQ ID NO: 719228 - DNA, 133 bp, Homo sapiens
agcgcgagtacagctgcaccgtgcggctgctggacgacagcgagtacacctgcaccatccagttttcagtgtggacagcagatgaaggaattgagagcacagcatgaagaaaatattaaaaagttagcagacc

SEQ ID NO: 719229 - DNA, 80 bp, Homo sapiens
tgaagagtcctgaccacaatggggaggacaacttcgcccgggacttcatggtgaatctggattgggaaagtcgacattaa

SEQ ID NO: 719230 - DNA, 82 bp, Homo sapiens
ctggccagcctgctcatcgcctactgcagagcatcagatccatgctgctgctgactcggagccccacagcttggcacaggct

SEQ ID NO: 719231 - DNA, 75 bp, Homo sapiens
cgagctccagccgaaggagaaggggggaagaagaactttggcatcagctacctgggccgggaccggctaggacag

SEQ ID NO: 719232 - DNA, 75 bp, Homo sapiens
gcacaacagagggacaacaaaagcctcctacaagagtcctaccaaaatgcgccaatctgcagaacgccattgcgg

SEQ ID NO: 719233 - DNA, 80 bp, Homo sapiens
cggtggactccttcggcagtccacccaccgccgccgcctcccagccaagaactacatcgcgctggatgactttgtggaga

SEQ ID NO: 719234 - DNA, 50 bp, Homo sapiens
gttcgaggagatcatcctgcagtggagaccaaattttgaggaaggtggac

SEQ ID NO: 719235 - DNA, 75 bp, Homo sapiens
ttgagatcaattcttggagaacacaaagaagtgtgatggctggtccctgcagacggcttcccatttttatgaccg

SEQ ID NO: 719236 - DNA, 90 bp, Homo sapiens
aacctccctttccttatcaagaaggatgcacaagatgaggctggagtgcagcagcacgatctcggctcactgcaacctccaactcccaag

SEQ ID NO: 719237 - DNA, 82 bp, Homo sapiens
cccacgctgctgccgccttcgctgccgctgctgctgctgctaatgctagggagtgcatccgccccaacccttttccccctcg

SEQ ID NO: 719238 - DNA, 83 bp, Homo sapiens
gtgagatccgaatgcgctacttgaacggactcgatcccttatgccagcctggaccatcttggaggcagtgtaggatcatggaa

SEQ ID NO: 719239 - DNA, 100 bp, Homo sapiens
agcaaaggaacagactcaagatttaatagtaaaaaccactaagcttcaatctgaaaggttttgatgatgatggttcagaatttcatgaacatatatttct

SEQ ID NO: 719240 - DNA, 100 bp, Homo sapiens
gtgatgaattgtgctgatattgatattattacagcttcatatgcaccagaaggagatgaaggttgggcccatgagatgtgtgctctgtatattccggagg

SEQ ID NO: 719241 - DNA, 100 bp, Homo sapiens
tcgttggctgccgtccccgctgctgtgcattggacttgccttcaaggtgtgcaagtaaggacttatctccagaaaagaacacttatgaaacagaattatc

SEQ ID NO: 719242 - DNA, 46 bp, Homo sapiens
cagagtgctcagaaaagagttttacctataacatgttcggacactt

SEQ ID NO: 719243 - DNA, 100 bp, Homo sapiens
gacttgccacaggagattgtttcccaggaagagtttcaagaagtttttaaccgaagtgtcatgattattgcagcaacaaatagacctgatgtgttagata

SEQ ID NO: 719244 - DNA, 90 bp, Homo sapiens
agcgagctgagtggttgtgtggtcgcgtctcggaaaccggtagcgcttgcagcatgcttcagacagcaaagtcctgacatgtgcagccgt

SEQ ID NO: 719245 - DNA, 100 bp, Homo sapiens
cctgcagcttgctcgaaatcctgataacttggaagaactactattgaatggggtcgctgtgatgaaattcaagaaccccccagtgaacagcctgagcctg

SEQ ID NO: 719246 - DNA, 90 bp, Homo sapiens
caagaggaagcggaaaccagtggccacagcatctttgtctagccccagtgcagacagagtttcactcctgttacccaggctggaggacaa

SEQ ID NO: 719247 - DNA, 83 bp, Homo sapiens
atttgatcctgattctacccaagtacatatgatttcagctgcaatggcagatgccatggacaatattaccaggcagaaccaat

SEQ ID NO: 719248 - DNA, 83 bp, Homo sapiens
caaagatgctctgcggtttttgggctgtgttgacatcaaggatctaccagcagcagtgttgtactgctacttctataaacgga

SEQ ID NO: 719249 - DNA, 100 bp, Homo sapiens
ctgctgtctcggcacaagcagctgctgcacagaaaaataaactcaaggagcctgggggaggttcgtttcgcttatatagaattggtgataggatcacaac

SEQ ID NO: 719250 - DNA, 98 bp, Homo sapiens
tttctgcacaggaatatcgagagcgtcatgaacccgagctatagagaaaggagatgaggtgagcatgggtttatgcgtcttaggcattattgtgatgg

SEQ ID NO: 719251 - DNA, 100 bp, Homo sapiens
cggggcggtcggctgcggtggcggcgtttggatgattgtctctcggcggcggagtcgatgtgtgcaacagcaccgatcttccggaagtcgagatcattag

SEQ ID NO: 719252 - DNA, 90 bp, Homo sapiens
gaggaggaggcttgggcttgcgccgttgaagggtttccaggcctgaggtgcccgccctggccccaggagaatgaaccagccgcagaggat

SEQ ID NO: 719253 - DNA, 98 bp, Homo sapiens
tccgacatcgctttcaaattcaatagagatgactttaagatgaaggtgccggggctcttcagagcagcaggacacctgctcaaacccagggccctgct

SEQ ID NO: 719254 - DNA, 75 bp, Homo sapiens
cagttagcaggaatactttagcctggaagaccctcaatatagtaacctggtctccctgtgggcaatatttagctg

SEQ ID NO: 719255 - DNA, 100 bp, Homo sapiens
aaacactgcaaggaccccctccggctcaagtgtgtcaagcaagtgcaagagaagcctgagccagtgccgctggagagccgctcctgcgtcctcatccgcc

SEQ ID NO: 719256 - DNA, 87 bp, Homo sapiens
aagttctacgtggccctaacaggcacttcctcactaatatcagggcttattttggtgtgtcaaggatgccacaatgccatcgaccca

SEQ ID NO: 719257 - DNA, 74 bp, Homo sapiens
gggaagatggcggctgggttcaagaagatgaagatcctgccaaaggtgatcagagtcgatcagttgaccttggg

SEQ ID NO: 719258 - DNA, 100 bp, Homo sapiens
attttggtggagaattatccaacaagaaaaagacctgtggctattaagatagtgaacagagtatctgtcaggcaagagctgctgtgatggtttatgatga

SEQ ID NO: 719259 - DNA, 100 bp, Homo sapiens
caccaagccacaccagcagctgaaggaagtttccgtggaagaaaggttaaccccaaagattggctttccttggagtgaaatcaggaacatctctttcaat

SEQ ID NO: 719260 - DNA, 100 bp, Homo sapiens
cgctccgctcctcccagttcctaagagagaataaaggcagccccgttgatgactgaaaatgacaaagcatccacctaacagacgaggaatcagctttgaa

SEQ ID NO: 719261 - DNA, 75 bp, Homo sapiens
cggatacacattctagatatgcgagaaggttttgggattcgaattcagtgggacaagcaaagtcgtccttccttc

SEQ ID NO: 719262 - DNA, 100 bp, Homo sapiens
cagatactttgaagtagaagaagctgatgagtgcctggaagagctgggatgtctggttgagtcctatggcatgaatgtttgccaaccaaccccaggaaaa

SEQ ID NO: 719263 - DNA, 100 bp, Homo sapiens
acctcccagagagacctacctgagtgagaagatccccatcccagacacaaaaccggagcttctggaagaggtgaagaaggaattgcagaaagtgaaagag

SEQ ID NO: 719264 - DNA, 90 bp, Homo sapiens
cccacaggctgctgggaggagagcataaggccagtctgcttccttcagtccctgctctcaaaggggaaatcccatcacctcagctaacca

SEQ ID NO: 719265 - DNA, 100 bp, Homo sapiens
cgagccagatgcggaggctggcggccgaggagctgggggtcgtcaccatgcagcaaagcgagctgaattccttcttgtggaccattaagcgagacccacc

SEQ ID NO: 719266 - DNA, 83 bp, Homo sapiens
gccagagctcttcccttacgcaaatgatcacagtcgtgttaaactgcaaaatgctgagaatgattatattaatgccagtttag

SEQ ID NO: 719267 - DNA, 100 bp, Homo sapiens
gcgcgttaggagagcagaacctccaaaacctgaggttgtagattccactgagagcaaagccacagaagaagtttctttggacagccctgaaagggaacct

SEQ ID NO: 719268 - DNA, 83 bp, Homo sapiens
gtgggacctgctggaagggaaggaaaaacctgtatgtggaaccaccttcccaacatggccaacacagtcaatgctgctctgaa

SEQ ID NO: 719269 - DNA, 100 bp, Homo sapiens
ccagatatcatcatagagtcttctgctcttcctcaactaccaaaggtggattctccacagttttcctcgtgcgtactcacggtggaatccgatgtgcatt

SEQ ID NO: 719270 - DNA, 83 bp, Homo sapiens
accttgtccacgaggagggagaacctgaagccgcctctgcaggctcctgcaaagatggttcctacctggctgagttcctgctg

SEQ ID NO: 719271 - DNA, 96 bp, Homo sapiens
acaccaagtctgtgtcagaaggccacctcaagaggaacatcgtggtgaagaccgtggagatgcgggatggagagattggtgctgaagacatggacg

SEQ ID NO: 719272 - DNA, 100 bp, Homo sapiens
atggattacttaggagcttcagaatctgaaattgtatacctggcactgctaatagtctatgttaacaatgaatgggcaaccagtgttggggaaggaggga

SEQ ID NO: 719273 - DNA, 100 bp, Homo sapiens
ctccactggacacccatcccaaatcagtctgaaagtacctgctatgaagtggcgctcctgagctgaatttcaatatgctgaaaccgtatttcgagataag

SEQ ID NO: 719274 - DNA, 74 bp, Homo sapiens
ccgtcaccctcaactttcccttcaggtggcgggaaatgttttttaaagtgaagaaaacagttggggaagctcca

SEQ ID NO: 719275 - DNA, 83 bp, Homo sapiens
caccctgatttggctaggcgcacagcagctgaccccgcactacatctacccaccagccatcgtgcagcccagcgtggtgatcc

SEQ ID NO: 719276 - DNA, 98 bp, Homo sapiens
gaaaatttgaagatcttgaagttagtacctttgaacgagaaaatgtcattgaatataaacactgtttgattacaaaaaatgagaatgaagagtacaac

SEQ ID NO: 719277 - DNA, 80 bp, Homo sapiens
aatttgaaagctagacaggatcgtcaggctgaaggaatcttggtaaatggttactccacaggatccgctgaacataggat

SEQ ID NO: 719278 - DNA, 51 bp, Homo sapiens
tgtgggatgtgaaaactctgttactgaaggcaaatactctatctggatctt

SEQ ID NO: 719279 - DNA, 76 bp, Homo sapiens
aatatgaaatgagtctggaaaactgggccaaagcagtgaaacgctccatgaattgtgccgcagaatggaattcggc

SEQ ID NO: 719280 - DNA, 126 bp, Homo sapiens
cccgcactgagtcaacagactgagcgcgtccaggcctgacagctctgcggctcgggccctgagaaatggtggagtcaatgaagaaagtagcagggatggatgtggagctgacagttgaagaaagaa

SEQ ID NO: 719281 - DNA, 75 bp, Homo sapiens
ggtcgatggtcggcggcgcccggatgggcagctgagctgctgatgcaaggaatcccctgggctcccgtccactcc

SEQ ID NO: 719282 - DNA, 82 bp, Homo sapiens
tggacgagcaggaagcggctgtcaagtcgataaacaacccagacatgcgagtgcagatcctcaaagattacgtcaggcagca

SEQ ID NO: 719283 - DNA, 100 bp, Homo sapiens
gtcaagtacactgaaattcatcctgagatgagggccgcgatgggcctcttggaacattggtgtgttcatctgcattcgatgtgctggaatccacaggaat

SEQ ID NO: 719284 - DNA, 71 bp, Homo sapiens
actctggagtaattggagccaagaaatgagtatagctaaagatgtgattaaagagattgaagactttgaca

SEQ ID NO: 719285 - DNA, 101 bp, Homo sapiens
ggagtgtgttgctgaagaggaattgcctcacctgctcaccgaaaggatgaggttcgggcaggaacctaccgccagctcttccatccagagcagctgatcac

SEQ ID NO: 719286 - DNA, 100 bp, Homo sapiens
cgggagcccggccggagctgggtctggagacgccgtggcagcctgaacggagtgtgcgacggattgggagattctctcgggcctagccgtccttggaacc

SEQ ID NO: 719287 - DNA, 89 bp, Homo sapiens
gtcgaatgggatcctactgggcgctacgtcgtcacctctgtgtcctggtggagccataagggttggggtgctggaggactgcttcacct

SEQ ID NO: 719288 - DNA, 97 bp, Homo sapiens
ccaatgagtcgggctactacctggacatcagcctctacaaagaagtgactgactccagatctggaaatgtggtgatctttgtgaagtctgtgcagcg

SEQ ID NO: 719289 - DNA, 83 bp, Homo sapiens
tgcagatgcccctcctccaccagaggactgggaggagcatgtcaacaggattcactccttctccagttgcacagccacaccct

SEQ ID NO: 719290 - DNA, 75 bp, Homo sapiens
ctagatgatagcacagtcagtcaaccaaacctcaagtatacaattaaatgtgattcgcctttgccagtctcatct

SEQ ID NO: 719291 - DNA, 101 bp, Homo sapiens
cgatctcagctcactgcagcctccgcctcccagctcaagactgcagtgcagatgacgacaacttccttgtgcccatagcggtgggagctgccttggcagga

SEQ ID NO: 719292 - DNA, 89 bp, Homo sapiens
ggactcagccgatgcctcaatggccaactgcaggaataactcaagtcacctgtactggaaatcagtttgctgaaattaatcaacgattc

SEQ ID NO: 719293 - DNA, 90 bp, Homo sapiens
tttgtggcaagaagcatgctggattgtaatcaggtttggcagttctctaccagtggaccaatcttttcatccccgtgtacctcaccatca

SEQ ID NO: 719294 - DNA, 82 bp, Homo sapiens
tcttctgcggcgcctacctctacaaacagggctttgccatccccggctccagcttcctgatggagtcatcagaacccactgt

SEQ ID NO: 719295 - DNA, 100 bp, Homo sapiens
aaccgaccctgattacgaggatgtatctgtggcccttccaaataagcggcataaagcaattgagaattcagactaagaaaaatggctttgtcagcccaac

SEQ ID NO: 719296 - DNA, 100 bp, Homo sapiens
aggtttcctggcctgttgcagccatggtgcattgcagttgcgtgttgttcagaaaggctgtggagtttgaaggctgggctgacaccctctttcttctgca

SEQ ID NO: 719297 - DNA, 120 bp, Homo sapiens
aggaaactggcccaaacaaaaaggagagcagttttctctgcatcacatgagttgtctgatgtcctgtgggccatgctgatgcgcgtgggcctccgcgttgacaccacctatggcgtcttg

SEQ ID NO: 719298 - DNA, 100 bp, Homo sapiens
gcggaccgcttctcccgcttcaacgaagaccgagactttcagaacaagaggaaagtatggggaaggagccaagcaggagacgttcacctttgccttaact

SEQ ID NO: 719299 - DNA, 97 bp, Homo sapiens
ggtcaccaagtacaccagctcgaaagcagcccgacggccatggaggctgaagagacgatggaatgccttcaggagttccctgaacatcataaaatga

SEQ ID NO: 719300 - DNA, 75 bp, Homo sapiens
tccagagaccccctgctctctcagcgatgtaccggctcacgctgcgcacaagtaaggaagccgtttctcagagat

SEQ ID NO: 719301 - DNA, 82 bp, Homo sapiens
ggactgtcgcaccgtaagatcgccacatccggtcctcggttactatgcatcaagatggtgctcatgtggaccagtggtgacg

SEQ ID NO: 719302 - DNA, 100 bp, Homo sapiens
gcaggactgtggccgtgggggacatcgtctggggtgtcatggagaaactccagctgggcccagagattctgcagcgggaaaatccaaggcttatttatgc

SEQ ID NO: 719303 - DNA, 74 bp, Homo sapiens
ctttggaaacgctttcctgaatcgaccatgctcgacagctgaccaaggccatgatgcgaaaggccacggccagc

SEQ ID NO: 719304 - DNA, 75 bp, Homo sapiens
caggtggatcacgaggtcaggagatcgagaccatcctggctaacacggttgcacactgggccacagaggatccag

SEQ ID NO: 719305 - DNA, 83 bp, Homo sapiens
cttcagtatctcaggcggcaccctgtccccgaggaggggaccatgacacagtgctggagaatctggtaaaagcaccattgtga

SEQ ID NO: 719306 - DNA, 75 bp, Homo sapiens
gccttctgcgtctcccggctggtggggaagcctctgcgccgccggcaccatgagttctggagagtcttggcttct

SEQ ID NO: 719307 - DNA, 100 bp, Homo sapiens
cctccgcggctccggggagaaggactgagcagggggaggaacatttaagctgatggaagtggaagtggaagttgctgtacattggcagcaaggcctccga

SEQ ID NO: 719308 - DNA, 100 bp, Homo sapiens
ctccgcatggcggcagcggcctgcacaccaagggcgcccttcccctggatacggtcactttctacaaggaaactaaatatattttgccaactttggaaaa

SEQ ID NO: 719309 - DNA, 74 bp, Homo sapiens
ggaggaggaagatggcggcgggggcgaggagctaatgacagtttttcaactgctacactggaatggcagcctta

SEQ ID NO: 719310 - DNA, 50 bp, Homo sapiens
ccaaaatgggatgaacagctaactgtgattaaaagtaagttggatcaagg

SEQ ID NO: 719311 - DNA, 101 bp, Homo sapiens
gtcccagctcctggcgagcgtcattgccgagaagagccgaagcccgcggaagatggagaaccgtgattaccgggatgcacaggagtttgctgctgatgtac

SEQ ID NO: 719312 - DNA, 88 bp, Homo sapiens
tgtggggaaaaaaaggagcttgccttctgagctttgtaccaaagacctgggaaaagtctatccaggaaaatggtgaactaaaaattga

SEQ ID NO: 719313 - DNA, 102 bp, Homo sapiens
taaccctcaagccgaagccttcagtgggactcccccagcagatacattctcaaaaagacacacttggtctgagggtatgtttcagctcaggcatgctgccat

SEQ ID NO: 719314 - DNA, 75 bp, Homo sapiens
ccggatctgcatgccgctcaccgtagacgaggaggccccgtgtgggccgcggcccggccctcaccatggagtcca

SEQ ID NO: 719315 - DNA, 90 bp, Homo sapiens
cgggaaacgtgcaccttgactaattcggttttctgtggctacgagagcagaggctgaggctgcagtggccacccaggagacatccaccgt

SEQ ID NO: 719316 - DNA, 100 bp, Homo sapiens
cgctcaaggatggtgatttcatcttgaccgaaaggtcgtgatgtctcgggagtcggatgttgaggctcagcagtctcatggcagcagtgcctgttcacag

SEQ ID NO: 719317 - DNA, 98 bp, Homo sapiens
aaagtcctctcgggagaagcagcgcctgttcccggggcagatccaggttcagttcttgcagatacagcgctaggaaaaggggagtaattcaggtctag

SEQ ID NO: 719318 - DNA, 75 bp, Homo sapiens
caggctgtggataaactacctgatgaaagatcaactgaaatcggcaaacttctgagttcctacttgcaaaagaaa

SEQ ID NO: 719319 - DNA, 100 bp, Homo sapiens
gaaagaagaaaacaagggaggagaagacaagctaaaaatgattcgggaatatcggcaaatgtttgctatgaagattatggaatcagagagagctcttgga

SEQ ID NO: 719320 - DNA, 90 bp, Homo sapiens
agaagacaagggcatcgccgcctcagccgccgccgccgccgttttcgcctgcagctgctcaccggataaaagaatcagagtgtctcaacc

SEQ ID NO: 719321 - DNA, 100 bp, Homo sapiens
gatgacctgccccgtcaagaagaactggcagataatttattgatttccttatccaaggctgccccccggattatgttcctccagagatcttccatttcca

SEQ ID NO: 719322 - DNA, 50 bp, Homo sapiens
cgacgacgaggaagaggaggtttctgagggaagctatgcgaaattattta

SEQ ID NO: 719323 - DNA, 90 bp, Homo sapiens
aagatggcgccaggacgaaggccctactgggcaagatgcccattcaccagaatctcaaggagctgctggccgtcagggcggagctgcaga

SEQ ID NO: 719324 - DNA, 75 bp, Homo sapiens
gtgaaggacaaaatcctttgcccaaaattgcctggaaaagagcagtgagaggagtccgggagatgtgtgatgcat

SEQ ID NO: 719325 - DNA, 74 bp, Homo sapiens
tagacagagccgggcctagcccagagacatggagagttgctacaacccacaggtgagctcaggagataagatgg

SEQ ID NO: 719326 - DNA, 100 bp, Homo sapiens
agctggaggagctcaccaacaagaagggaatgacgccgctggctctggcagctgggaccgggaagatcgggttctcaacatcagcacctcggttcagctg

SEQ ID NO: 719327 - DNA, 50 bp, Homo sapiens
ccaagaggcagcaatctacctccagtccacagcctctgacatgcgatttg

SEQ ID NO: 719328 - DNA, 101 bp, Homo sapiens
cttgaaggccctacgcagttccgacaaaggtcgcctttgctactaccgcgactggctgctgcggcgcgaggatgaaactgattccaagacagcctccccgt

SEQ ID NO: 719329 - DNA, 96 bp, Homo sapiens
attgctttctgttcttcaacaccacgttcaggcatggctcctccaagccagggaccccctggccctctgtcagccacatcattgcagactcctcca

SEQ ID NO: 719330 - DNA, 98 bp, Homo sapiens
acagatttcagcagcacaatcaacgcaaccacagaaacaagtggtacagaggagaaggcagagcccccccaggctatgaatgccctgatgcggttgaa

SEQ ID NO: 719331 - DNA, 75 bp, Homo sapiens
aggactaacatcaggggatatggatttgccacccagaggttatggaggttttgatgactatggtggctataataa

SEQ ID NO: 719332 - DNA, 74 bp, Homo sapiens
cgagcgccgagttccgcgcattggaaagaagcgaccgcggcggctggtgtcatggagaaactccagctgggccc

SEQ ID NO: 719333 - DNA, 100 bp, Homo sapiens
cgggagcgccacgaattctcgcgtcgtctcgcgagagtccaagttaaagaacatggcgacgtctaatctgttaaagtgagaaggcaaccaaagtgcagga

SEQ ID NO: 719334 - DNA, 98 bp, Homo sapiens
ctctccgccccccaggaggggcgagagggagccgcagctgatgtcagagctcatctcctgtcctgggtgtgaacgagtatatcttaccagggatgtaa

SEQ ID NO: 719335 - DNA, 100 bp, Homo sapiens
gggaaggcgtgggcgacccggtgtgtggcgcgcccagagccccgcgtttcagccctagggaagaaatgggacgtcggtcatcagatactgaagaagaaag

SEQ ID NO: 719336 - DNA, 100 bp, Homo sapiens
cccagtgcattcccatcctcgctcccacctgtcagccttctaccccatgagaaagaccaggtgcactaggccttccaatgagggggatgagcaacaatac

SEQ ID NO: 719337 - DNA, 75 bp, Homo sapiens
tctcttacgtctgcggaagtgcagctgcctcagttcttagcgcagaccttctctgatggatgacctctgtgaagc

SEQ ID NO: 719338 - DNA, 82 bp, Homo sapiens
aacgttggggagagtgtggcagctgcccttagccctctgggttgacatcatggacatatgtgagtccatcctggagaggaag

SEQ ID NO: 719339 - DNA, 98 bp, Homo sapiens
ctaacatcacctgcttcatccttgtttaatgactttggtgccctcaacatctctcagagacgaaaggctaggcagctggaagagaaagaccgagtgct

SEQ ID NO: 719340 - DNA, 100 bp, Homo sapiens
ttcaggccaaactggtaaatgacgaaggggcttcttccagagccaaggaggaagggttgtccgggatgttttcactccagaatgcaaattcaaggaatct

SEQ ID NO: 719341 - DNA, 83 bp, Homo sapiens
aagctatatttgatcgactgtgtaaacaactagagaagattggacagcaggtcgacaatgctctctgtgtgggtatgtgtgta

SEQ ID NO: 719342 - DNA, 83 bp, Homo sapiens
gctccctgctcagctcctggggctgctaatgctctgggtctctgccattgagacccagagcagcagttctgaagagatagtgc

SEQ ID NO: 719343 - DNA, 98 bp, Homo sapiens
agatctccatcctgctcaagacctgcaaactcatctacgactccatggccctcggcaacccagccagatctgccagtgagcctcaggctttaggaact

SEQ ID NO: 719344 - DNA, 101 bp, Homo sapiens
tttcttctctgggaaggtgaacatttgtagcattgatttcccggatctggtaacatggcaaaagatgcctgtatccggtgtccgaggcgaactcagtaaga

SEQ ID NO: 719345 - DNA, 100 bp, Homo sapiens
tgaaggaacatgagctcttggagcagcagaagcggtactgggctttctctgacatccagacagggcgtgtgctcaccaaggtgacagatgagacctccgg

SEQ ID NO: 719346 - DNA, 50 bp, Homo sapiens
tttttgacttgtttggaggtgttgatgcagaggtggaggagacactgaag

SEQ ID NO: 719347 - DNA, 100 bp, Homo sapiens
caaggaggcctgttcataaaagatatcgaggatttagccggaaggagagaagtatgagctccatgcagggactgagtccaccccaagtgtcgtcgtgcac

SEQ ID NO: 719348 - DNA, 80 bp, Homo sapiens
accgggcccagcacagccagcaccgcacgccctgcaagggagttttagaaagagcgttttcgctacgtaaagcacattcg

SEQ ID NO: 719349 - DNA, 83 bp, Homo sapiens
gaaagacttgatggtctggtagaaacaccaacaggatacattgaaaggttgtaaagctctctgaaatagtgaccttagcgaag

SEQ ID NO: 719350 - DNA, 101 bp, Homo sapiens
tctccaagatgtagctaatgaccgtggttcccactgagcaagaggtggaaacatacagaagaagcaaggaaattacagttagaggtcacaactgcccgaag

SEQ ID NO: 719351 - DNA, 89 bp, Homo sapiens
gctgtgtcttggggccctttgggacgagtgctgtgactgtgttgtgccagaacagataaagcccagtgtaagccagcctcagcctgcca

SEQ ID NO: 719352 - DNA, 98 bp, Homo sapiens
tatgaaatcaaagacatgtgcataaaatgtttccatttttcaagtgtcaaatctaagattctgaggagctctacggtgactttgaagacttggaaaca

SEQ ID NO: 719353 - DNA, 75 bp, Homo sapiens
aaagccactcaacaactctttatgtgacagaacacgagaccaatggtgtggcaaagagtgatcagaaacaagaac

SEQ ID NO: 719354 - DNA, 100 bp, Homo sapiens
acctttaactctccttatgctgggtgaaaacaaagtctggatgtggatagtgaagctaagaaactattgggtttaggacagaaacatctggtgatggggg

SEQ ID NO: 719355 - DNA, 100 bp, Homo sapiens
aattggtcgcgattgtagatgttattgatcagaacaggtctttcttgacacgaaaatattatttcaacaacccagaggatggatttttcaaaaaaactaa

SEQ ID NO: 719356 - DNA, 97 bp, Homo sapiens
ggggggagtggaagttcccgccccggagagcggcgaggcggcagccacaggacatggatttgattgacatactttggaggcaagatatagatcttgg

SEQ ID NO: 719357 - DNA, 97 bp, Homo sapiens
aagcccagaagcgtaagctggcagacaaaacagtctggttgcaatcccagtgtatgtcaaacataacatcagtttccgggacagtagttcccttgga

SEQ ID NO: 719358 - DNA, 100 bp, Homo sapiens
cagaagaacttgtacagagatgtgatgttggagaactatagcaatctggttttcttggacacagtctggaaaattgatgatcttatggattggcatcagg

SEQ ID NO: 719359 - DNA, 100 bp, Homo sapiens
cacaacctccgctttgaagggatggagaggcagtacgcatccttacccagcaaatgaagctcgtgaccgagaacctgaaggaggaaccaatggaaagcgg

SEQ ID NO: 719360 - DNA, 74 bp, Homo sapiens
gacccagccctgcgtgaggccgcggagcgccagctcaatgaagttgcactgctgtgatccatcctcatctccta

SEQ ID NO: 719361 - DNA, 74 bp, Homo sapiens
atcattcaagtggccaagacctctgctgcacagggcctgctttcttccccgggcgatgtgcagagatctttgcc

SEQ ID NO: 719362 - DNA, 100 bp, Homo sapiens
aggaggcagtagccaaacacccaggttctgcctgcaaagaagattgtgacatattgctggttgcaacaccacggtgatgttactttttgccttctcactg

SEQ ID NO: 719363 - DNA, 74 bp, Homo sapiens
gcgaagctaccagttctgggatacgcagcccgtccccaagctggttgccttgccaactaatacgacctcatcga

SEQ ID NO: 719364 - DNA, 73 bp, Homo sapiens
ggagaggcctggaggacaccaacatggcaccacaccaaccccgtgggcactgagtggcggtggaagatggacc

SEQ ID NO: 719365 - DNA, 75 bp, Homo sapiens
gtgcggagcttcctgaacgaggcaggagggatcagaccaaacattgtctggcttgcactgtaaaactagttagct

SEQ ID NO: 719366 - DNA, 95 bp, Homo sapiens
gattgctacagttgtgattggaggaggtacaggtttgcagattccgccagcagcacagcaagctctacagatgagtggctctttggcatttggtg

SEQ ID NO: 719367 - DNA, 73 bp, Homo sapiens
acaacctcaaacccgttctccgctcaacagacagtcagctaaaactgtggaatgtagggaaaccatactgcct

SEQ ID NO: 719368 - DNA, 97 bp, Homo sapiens
gtggagtgtccgctgtgcccgggcctgcaccatgagcgtcccggccttcatcgacatcagtgaagaagatcaggctgtcagcttgttggaagaggtc

SEQ ID NO: 719369 - DNA, 90 bp, Homo sapiens
caatttgtcgtcaccacaaatccagtgaacaacgatggcattttgaaaacagcaaagcaccctggaggagaagaggttctgctggaacaa

SEQ ID NO: 719370 - DNA, 100 bp, Homo sapiens
tgaacagcaggagcttgttgaaaggggttttgcggctagttggctattcaagaaacctcgcccctctgaatgtcatactgtaatctttaaggaagaaagc

SEQ ID NO: 719371 - DNA, 100 bp, Homo sapiens
ttatgcgggaaaccttttaaacacccaagcaacttggagcttcacaaacggtctcatacaggaggctgcattgaggcgtgagcaaaagaagttggaaaag

SEQ ID NO: 719372 - DNA, 100 bp, Homo sapiens
gcgtcaagcagcatgtgaaggagaccaaggaatactcccccagttgcaagaggcgcaggaccgtggaagacttcaacaaattctgcacctttgtcttggc

SEQ ID NO: 719373 - DNA, 100 bp, Homo sapiens
ctagaatgcatcagtgcccttgtggcgaatggggctcacgtcgagagcaggggagagaagacagaagaggttggagaggtcagggaggtgccagatcatg

SEQ ID NO: 719374 - DNA, 98 bp, Homo sapiens
caaggggtaaatgagggtgttgatttctccaaggatctgctgaaaatcctcagacagattctaagcctcctgagggattgttaggattccacacagac

SEQ ID NO: 719375 - DNA, 100 bp, Homo sapiens
attgccaccaccaccaccaccaccacagagtctgtggaagaggtggttcgagatttcgccagaagtttgagtatcactactcctgaagagatgattgaaa

SEQ ID NO: 719376 - DNA, 95 bp, Homo sapiens
ccgggagcgagctgggagggagccgcgcgcctttgtgcgcgcgccgagaacatgaaaggctcccggagcagcgctgactcctccaggaaacactg

SEQ ID NO: 719377 - DNA, 75 bp, Homo sapiens
cctcccgagtggctgggattacaggacctaatgcactgcacagcatttgcaacggcagatgagtatcatctggga

SEQ ID NO: 719378 - DNA, 98 bp, Homo sapiens
gaaataccagtccccagtgagggtgtacaaatacccctttgaattaattatggctgtggcagtagagaagagcatcacagaagttgctcaggagctga

SEQ ID NO: 719379 - DNA, 90 bp, Homo sapiens
ctccaacaccctgggccaggcctcggcctcagctgacttcgacgctcaagaaaaggcgacggcggattgacagaagtatgattggagagc

SEQ ID NO: 719380 - DNA, 90 bp, Homo sapiens
ttgcatgcctccgcctgtgtcttctgcagtgattttaaccaaggcagttggtggaaatgagtgtgttccatgggaaccggtacaagcaga

SEQ ID NO: 719381 - DNA, 83 bp, Homo sapiens
ttcatgcccaaatcccggaaactccagcgtgtctccagccgtggtactggctgtgatcgaacttctcaaccctcagagactta

SEQ ID NO: 719382 - DNA, 100 bp, Homo sapiens
ccgcgaaccaacggttagcggtggcaggggctgactgagagcgtctgcttgataacgaaggaggcccaacttcattcaataaggagcctgacggatttat

SEQ ID NO: 719383 - DNA, 137 bp, Homo sapiens
tgtaaaactgctggaccagctacacaactcactgaggatcgacctctctacatacaggacattttgctgtcagctggaagagctgatctgctggctgtataatgttgcagatgttactgaccacgggactgcagcca

SEQ ID NO: 719384 - DNA, 98 bp, Homo sapiens
actattttggtgaccctaaaacagacccacttaaattcaggagttattctctcaattcaccacttggatcacagtgtttgggaaatgggaagtaatga

SEQ ID NO: 719385 - DNA, 75 bp, Homo sapiens
ttgaacccgcgaccaagcgaggcggaccctgaagcggaccccgaggaagactgggctggcttagatgaagatgaa

SEQ ID NO: 719386 - DNA, 100 bp, Homo sapiens
aaatgattcagtccttgaaaacaaggtcctggacccaagccagaagcctctgcaaagcttccttccagacctgcagataactatgacaactttgtcctac

SEQ ID NO: 719387 - DNA, 98 bp, Homo sapiens
gcgtcaggccgaggagacggcggccttcgaggaggtgatgatggacatcggctccacccgggactatggtgcagccctgcggggcctgtgcgaagacg

SEQ ID NO: 719388 - DNA, 75 bp, Homo sapiens
ggcatcgcagccttctacttgtcccatgaggttggtgaccgttgttatgatgaaaaaatgtatgatgctgctaag

SEQ ID NO: 719389 - DNA, 83 bp, Homo sapiens
gtgagctcggccggcaaccgagggacccgcgtccaggacacaccagcccctcggataccacttggccactcccgctgaggcca

SEQ ID NO: 719390 - DNA, 100 bp, Homo sapiens
gggattcgtggtgaaggtccggggcttgccctggtcttgctcggccgatgaagtgcagaggtttttttctggtctacgacgttcctccatcggtgagcaa

SEQ ID NO: 719391 - DNA, 98 bp, Homo sapiens
gtccggagctagctggatcctctaggcagggcggcgactggcggcgcgatggacctgaccgggctcctgctggacgaagaaggcaccttctccctcgc

SEQ ID NO: 719392 - DNA, 90 bp, Homo sapiens
gtccacagttgggcggtaaaagagatacggcttatgaatttgaaaggcataaaatgtcactgaaattcacaaatgcaaaacggattgaag

SEQ ID NO: 719393 - DNA, 100 bp, Homo sapiens
gcgggaaaggctacagattccggggctgaccttggaatgcagacagacatgctgaactatctggaagtccactgaaaagcaaaagcactaggaagccttt

SEQ ID NO: 719394 - DNA, 75 bp, Homo sapiens
ggcgcgcggacccaggcgcggatggcgaggccagcagacacgatgaggcgagtggtacgacagagcaagtttcgg

SEQ ID NO: 719395 - DNA, 75 bp, Homo sapiens
caaatccttaaaagagtcttaacgcatgattccacctttccactgatagactcaagttcccagaaccagattaga

SEQ ID NO: 719396 - DNA, 100 bp, Homo sapiens
gagtatctggtgaagtggaaaggatggcccccaaaccatccagtccaatggatcagatgggcaagatgagacctcagccatatggcgggactaacccata

SEQ ID NO: 719397 - DNA, 100 bp, Homo sapiens
ccagattgagatctgtgtggctgactggtcttagtggtgcaatggctagtataagcgtgcgttcgagtaccccaggctctcctacacatgtaagcagtgg

SEQ ID NO: 719398 - DNA, 98 bp, Homo sapiens
tttacctgcttcccaatcccactgatgaggatcagcccatgatttggtgttgtactgcgaggcattcctgaccacctacaggaccttcatctccccag

SEQ ID NO: 719399 - DNA, 90 bp, Homo sapiens
agaaaattgatcagttctaaaaaaccatgccccacgaaagtgatgaagcattgggcccaacaatgatgagttggaatgcagttgaaaagt

SEQ ID NO: 719400 - DNA, 75 bp, Homo sapiens
gttaccttctgcctcagtgccagagtccatgacaattacacctgtggaatcctctcaagaggaacagtcattgtg

SEQ ID NO: 719401 - DNA, 100 bp, Homo sapiens
gcgagatccgctgctgctgaggagaggagcgtcaacagcagcaccatggcaggcattttggagatcaaagatgggtagaaaagatgctgctactataaaa

SEQ ID NO: 719402 - DNA, 87 bp, Homo sapiens
cgcctttcaccattaagaggaaagcgatggaggagctgagcgctgatgagatatggccgcgtggaaagtgtcaaaattcttcccaag

SEQ ID NO: 719403 - DNA, 94 bp, Homo sapiens
aagcgaccaaagcgcctgaggaccggcaacatggtgcggtcggggaataagatgccatggacaatattaccaggcagaaccaattctacgatac

SEQ ID NO: 719404 - DNA, 75 bp, Homo sapiens
cagctcggcttgctgcggtctcagacaatgcagatcttcgtgaagactctgactggtaagaccatcaccctcgag

SEQ ID NO: 719405 - DNA, 100 bp, Homo sapiens
aagcctatgtcgtgaggctttggcagaaattaagaaggaaatatctccattgtaggtagccatccaagcttcctgaaggaggttcgagatcacatgcagg

SEQ ID NO: 719406 - DNA, 100 bp, Homo sapiens
gggccagcccgcctcgccgaggaggccttcttccgtggggttagccagaatcagttgctcaactaccgttctgccatttcaaatcatggatcaaaaatag

SEQ ID NO: 719407 - DNA, 75 bp, Homo sapiens
gttttgctttgatgtggaagcagtagacaggaagcatgagtgggaaaagcatgggacctgcgccgcccaggtgga

SEQ ID NO: 719408 - DNA, 74 bp, Homo sapiens
tggcgggtccggccgcgcgcggggcgccgacacctgtggctggagggagctccttcccttaacagagctgagag

SEQ ID NO: 719409 - DNA, 50 bp, Homo sapiens
gaatattcccaagtccttcacccggatacttgccagaactaatacagctg

SEQ ID NO: 719410 - DNA, 90 bp, Homo sapiens
aatttctacagcagagaccttgagggatatctttcttcactcctcttcacttcttcagaagaaatgcagagtaacgtggaagtggtccac

SEQ ID NO: 719411 - DNA, 83 bp, Homo sapiens
aacgacatgaagcgcaagcaggagcatgcagcgcgcctccagattgatgaagaccctagccttgttccagaggcaattcaagg

SEQ ID NO: 719412 - DNA, 83 bp, Homo sapiens
tttgatgttgttgaaggagaaaaggttgtccccccggcacgctccacagctggtgacccgacagttcctggctccttgttcag

SEQ ID NO: 719413 - DNA, 90 bp, Homo sapiens
cgggggcgccatggcgaccggagcgaacgccacgccgttgggttgtgaccgagattcccgacgagagagactgaggggaagagaggaagg

SEQ ID NO: 719414 - DNA, 95 bp, Homo sapiens
cactagtaagaagaagcagaaggatcgagcaaaccaggagagcaaggatggagatcctaggaaagatgaagcgccctcagttcagcaagccgcca

SEQ ID NO: 719415 - DNA, 88 bp, Homo sapiens
aagaggaggaaggagggcgagcgaggaggatggcggagtcggggctcctgacggtctgaatttcctgctgctgttcacaaagatgctt

SEQ ID NO: 719416 - DNA, 100 bp, Homo sapiens
cagcctcagagcgggtgagcttggggacgcacggagaggtgcagctgggtgcttttctgctttgggccaagtagcaaaagctcgattcctgcatgagacc

SEQ ID NO: 719417 - DNA, 98 bp, Homo sapiens
ggctgaggatgggaagaggtgtgtgggtctgctgagaacagacccagtccctgaggaaggagaagatgttgctgccacgatcagtgccacagagaccc

SEQ ID NO: 719418 - DNA, 113 bp, Homo sapiens
ttcgttcgtttccagcctcaggaatttatggtcgcctttttgaatgaggtgctggagaatctggtaaaagcaccattgtgaagcagatgaggatcctgcatgttaatgggttt

SEQ ID NO: 719419 - DNA, 100 bp, Homo sapiens
ctgttgcgatggcgcagaaaccccgttgacaaggcactgctttttcatgacgactcagcccacctgcacccaggtgaaataaacagctttattgctcaca

SEQ ID NO: 719420 - DNA, 83 bp, Homo sapiens
aaatgtttttctgttttgcctgaatacatgatttaaacaagagatttccacagaaggttaggaattttagacccagttctgct

SEQ ID NO: 719421 - DNA, 75 bp, Homo sapiens
cgggagctagtgacggcatttctacagccctcagcgcctttttccaggagaccaacatcccctacagccaccatc

SEQ ID NO: 719422 - DNA, 98 bp, Homo sapiens
gcaggggatgtggtccaaggaagaaattgatattttgatgaacaatattgaacgctatcttaagcatttcaaaaggtttgaactacctaaccattatg

SEQ ID NO: 719423 - DNA, 75 bp, Homo sapiens
tagtggcaggtgacagtctgcatgtgcagttttcaggctgcctctaagaatcaaacttcactcttgggagaacca

SEQ ID NO: 719424 - DNA, 100 bp, Homo sapiens
gttggacgatatctaatattacagctggaaatagggcacagatccagattacaggctgtgccagccctggaaaaacagttacaattgttgttcgtggttc

SEQ ID NO: 719425 - DNA, 105 bp, Homo sapiens
ttcatggcagagctgtaccgggttttggaggctggcaagattgggatatttgagagtccaactggcactgttatcagtgagctgaatggaaaaaacattgaagac

SEQ ID NO: 719426 - DNA, 98 bp, Homo sapiens
tgcactacaacaggaaaatcatattatagatggagtaaaggagcagtcgaactgtcccggcgccaccccatcgcgtcctggctgtgcgccatgctgca

SEQ ID NO: 719427 - DNA, 100 bp, Homo sapiens
gaaaggattcgttacagccagagattgaaagtccagtatcccccctggagtcacattcgaaagctgcttcaaactcaaaggaaacaaccccattggcaca

SEQ ID NO: 719428 - DNA, 98 bp, Homo sapiens
tccaaatcgatagttttagagcctatctattggaattcctcgaactccaaggttcaggataagtttgaggtgctgaattacacaagcattcctatctt

SEQ ID NO: 719429 - DNA, 98 bp, Homo sapiens
actaaataatctcctgtctaaactaacccggaaaagagccgatttgaaaaagaagttaaaagttacatttgtaggggaagctggtttggatatgggtg

SEQ ID NO: 719430 - DNA, 90 bp, Homo sapiens
gacaggacctagcattcaccttcctcttctgttccgagtgcgagaagctatcagttgagggatttgcagttgataaaatggctggagagg

SEQ ID NO: 719431 - DNA, 74 bp, Homo sapiens
tttgtggatcgctgtgatcgtcacttgtgaaagagtttctagccaaagccaaagaagactttttgaaaaaatgg

SEQ ID NO: 719432 - DNA, 90 bp, Homo sapiens
tgatgtctccagaccggtaaatccagatgcagttgatcccagatgcagtgactggttactacctgaaccgtgctggctttgaggcctcag

SEQ ID NO: 719433 - DNA, 82 bp, Homo sapiens
cgagaaaacggctcgagcagcgacaacccgtcctctcccgagtttttcatgagggtgaggacaaaatcttcttaatcaacaa

SEQ ID NO: 719434 - DNA, 51 bp, Homo sapiens
ctgtccctcacggacagcagcgtgccctcgggaccaaggatcacgtcatga

SEQ ID NO: 719435 - DNA, 89 bp, Homo sapiens
ctgggaaccatcactcctgacggggcagacagagtttcactcctgttacccaggctggaggacaatgatgtgatctcgggtcaccacaa

SEQ ID NO: 719436 - DNA, 100 bp, Homo sapiens
ttttcaaatagagctgcagcaaggatgaaacaggtgatttgaagatattaaagctagaaattggaactagaaaatcaaaagaattcaaggcatcttaacg

SEQ ID NO: 719437 - DNA, 83 bp, Homo sapiens
catggtctacaagactctcttcgctctttgcatcttaactgcaggtggtggagattgtgaagaagctggagtctcgccagcgg

SEQ ID NO: 719438 - DNA, 73 bp, Homo sapiens
tgcaaaccgagacaagttcaccccgaagtctgccgggaaggtggccatccagaaggaggacttgcagaagtac

SEQ ID NO: 719439 - DNA, 50 bp, Homo sapiens
ccagggacggtgactgtggttaagcagggtacagctctgccgggggggga

SEQ ID NO: 719440 - DNA, 50 bp, Homo sapiens
gaagacaatgagtacacagcaagacaagtccttactgagcatccgtggct

SEQ ID NO: 719441 - DNA, 97 bp, Homo sapiens
tgcctctgtgtacgctgaggggggaggtccacagaactcgaccctggaagagagagtcggggtcaggtcttcgggaggtggagggatcgaatgaggg

SEQ ID NO: 719442 - DNA, 100 bp, Homo sapiens
ctggagcgtgtgcagcaccgagtcccggaggaggcactcaagctccagcagtacccgcggctacgggaggagatggagcgcatcgtgaccacccacatcc

SEQ ID NO: 719443 - DNA, 75 bp, Homo sapiens
cgacgacgacctgtttgtggacttggggagcggagtggacagtgcaatgaaggaagaagtgcagaggctgcagtc

SEQ ID NO: 719444 - DNA, 75 bp, Homo sapiens
tcgccacctcccttccccacagctaggaaccaagattggaaccaaccagatggctgtgtgtgccaaagcacagaa

SEQ ID NO: 719445 - DNA, 100 bp, Homo sapiens
tgccgtcagttccacaccagtgcctcagaggtccatggcagtatcccagccaaatctcgttctccgtgttcctcggtctcatcttcttcctggagctggc

SEQ ID NO: 719446 - DNA, 82 bp, Homo sapiens
ttggaaatcaatcatgaggacctgaaggtgaaatgtatagatgttgttcaggcttatatcaacagaatcaaggacgtgaacc

SEQ ID NO: 719447 - DNA, 100 bp, Homo sapiens
tcagtcagatatatgacgaattatttcagatacatctgaaattgcaggacatgggcaagttttgcctcacatacgaggcctccatgacccggctcttccg

SEQ ID NO: 719448 - DNA, 101 bp, Homo sapiens
caaaggctttctcgcttgtcaccttgccatgtggaagaaactggggaaactgaacagccaagactcctataacaattttaccaacaacaaccctggcaacc

SEQ ID NO: 719449 - DNA, 76 bp, Homo sapiens
agaagagttaaatgccctcaagtcgacaggggatgggaccctaggtacactgaggaggggacggctccgtcttcac

SEQ ID NO: 719450 - DNA, 98 bp, Homo sapiens
ccgcctggtctctttcctgtggccagcccaggtactccaaagattcaggtttactcacgtcatccagcagagaatggaaagtcaaatttcctgaattg

SEQ ID NO: 719451 - DNA, 97 bp, Homo sapiens
taaacacctgggagctgagatggatcgtttacagccaggtgaggaagtggagatagctgagctcactacagatcccaccaaatattttggttgtgag

SEQ ID NO: 719452 - DNA, 100 bp, Homo sapiens
tgtgccctggaagggactagactcagcaggcttgcagccaatttactggagcagggatgacgtagcccagtggctcaagtgggctgaaaatgagttttct

SEQ ID NO: 719453 - DNA, 49 bp, Homo sapiens
gcgggacagcgcggcggggagcgacgaacgcaagatggctgtcctctct

SEQ ID NO: 719454 - DNA, 74 bp, Homo sapiens
tgttgctgccgccatacgcgctctccctgtttaggcaaccacacctccaaatcaaggaaggccagattctcctg

SEQ ID NO: 719455 - DNA, 137 bp, Homo sapiens
agcctggcggccaccccctcttccccacttccctgcactctcatcgctctcggcctcggcctcggcctccgacacggtgccttcagccgctacaagagcagaagcagtgggcattggatggagctgagtacaggacc

SEQ ID NO: 719456 - DNA, 75 bp, Homo sapiens
gtgatgacaaaccctttctatgtactgcgcctggatgtggccagatcctgataacttaagtgactctctcttttc

SEQ ID NO: 719457 - DNA, 74 bp, Homo sapiens
cgcggcgtgccctgcttgtcacaggtgggaggctggaactatcaggggatatcattttcaatgcccaataccca

SEQ ID NO: 719458 - DNA, 75 bp, Homo sapiens
ttcgatggacctgttgaaaaaaatctgggaggttgaacttattaatgtgagtgacacagcgtgggcatcagcaat

SEQ ID NO: 719459 - DNA, 98 bp, Homo sapiens
cttggtgctcaggtgccagatgcaaaggtctgaatttcctgctgctgttcacaaagatgctttttatctttaactttttgttttccccacttccgacc

SEQ ID NO: 719460 - DNA, 97 bp, Homo sapiens
gtctctgtgattgaagaagtcggctctgggctccagtgcgggaatcacacacatacctcaggtgtttgtaaaatgtatgaagaacatctgaaaagaa

SEQ ID NO: 719461 - DNA, 100 bp, Homo sapiens
cggttcaagaaaagaacatggaactgctttatatcaagtagatttgctagtgaagatctcttctgaaaagatatttgttcagtcgaatcaaggtgaagag

SEQ ID NO: 719462 - DNA, 100 bp, Homo sapiens
cctcatggggaaaatctccccggtgactttcaggacagctggcctgaagctcagagccggggcgtgcgccatggccccacactgggctgtctggctgctg

SEQ ID NO: 719463 - DNA, 83 bp, Homo sapiens
tgaatgccagccaccagccatgggaattctttggaccttctggatataagccccagtcgtctgtcggatatgttacagagaat

SEQ ID NO: 719464 - DNA, 90 bp, Homo sapiens
gaatcctgagcagagagctactgcaacacaacttttacagctcaaggagaaattgaagccatagtcgtgcctgtttgcttagcattccta

SEQ ID NO: 719465 - DNA, 83 bp, Homo sapiens
cctggagcctcagttggaagcagccgatccagcctgcggagcctgtggggcagcttccgtgaatgtgctggtgcagaactgca

SEQ ID NO: 719466 - DNA, 51 bp, Homo sapiens
ggaatcagccacttcagttcagtggccaatccgccatggtatagttgaaga

SEQ ID NO: 719467 - DNA, 95 bp, Homo sapiens
tccagtcaaccaggcttgtacacagtctccctttataccaagtttggagggtatctagaagagcagaagacagagaatggaaaagataaggaaca

SEQ ID NO: 719468 - DNA, 100 bp, Homo sapiens
atccacccgaggacaatgattgcggagcccgctcacttttacctgtttggattaatatgtctctgttcaggttctgttggtgcaactaatatgaacgaac

SEQ ID NO: 719469 - DNA, 88 bp, Homo sapiens
ccgacgcccgaggagaaggaggagtggattaagtgcattaagtcagttcaccgggacctggaggcccagattgcgatcgtgacggaga

SEQ ID NO: 719470 - DNA, 75 bp, Homo sapiens
gaggggcgactggagccatggcggagtcggcgcctgctcggcaagaagttgagaagtttacagacctagagaaac

SEQ ID NO: 719471 - DNA, 116 bp, Homo sapiens
caagagcagtggattcccagtgtccccacgagctgtgtggtccatgatgaggcagaatacttctatgaattcctgtccttgcgctccctggataaaggcatcatggcagatccaac

SEQ ID NO: 719472 - DNA, 75 bp, Homo sapiens
gtgcgacaagccagccccctacgaccagctcatcatcgacgggattttttatcaagcagaaatgcatcgaacaac

SEQ ID NO: 719473 - DNA, 75 bp, Homo sapiens
gagtgatgtggaggaaaacaacttcgagggcagagcaaacagttctgctattattgatcacatatttgccagtaa

SEQ ID NO: 719474 - DNA, 74 bp, Homo sapiens
gggctctgatccccccctgccggggagggcccagcgcatccgacaggtacatgtcccagagcaagcacacggag

SEQ ID NO: 719475 - DNA, 101 bp, Homo sapiens
ctttcggcttctgagacggcggcagcagcggcattcaggtctttcactaccattcctacagtgattggcaagataccgtttctacctcactctccatgtac

SEQ ID NO: 719476 - DNA, 75 bp, Homo sapiens
gaatatgatgaactcggcttcaggtaacagtgatgatgtcaaatgcttttgctgtgatggtggactcaggtgttg

SEQ ID NO: 719477 - DNA, 100 bp, Homo sapiens
ccgaggtccgtgtggccaacgagctcaacgccaggcgccgctcctttacaggtgctggctgccagctgctgcgccccccatgtagaaggtgcacctcctg

SEQ ID NO: 719478 - DNA, 100 bp, Homo sapiens
gcgcgccctggcgggtccggaccaagaagcctccccagctttctgaggatgatatctggctaaaaagcgagggagacaactatagtgccaccctcctgga

SEQ ID NO: 719479 - DNA, 74 bp, Homo sapiens
attttgcagatctgcgacctgatccgccaaggggacacacaatatgtgcagcgggggctacagcgagtggggct

SEQ ID NO: 719480 - DNA, 88 bp, Homo sapiens
aatatgttttacatccaagaactacaggctttacttttgtggtagaccgtctaagagaaggactgaagcttcaagatggctgaccagg

SEQ ID NO: 719481 - DNA, 100 bp, Homo sapiens
ggcgtgggaacccaggccccgccgaggcggccagagtgtgaacatggctacgcctcttcattcccgtccatgccgagcccccgactgcagcattcaaagc

SEQ ID NO: 719482 - DNA, 82 bp, Homo sapiens
cacggcctcgtgcccttcgccttcgtgcgcttcgaggacccccgatatgtaactggttcatcaatgcccggcggcggcttct

SEQ ID NO: 719483 - DNA, 74 bp, Homo sapiens
aacgcgttgtggtgatcagcagctcggaagactcagatgccgaaaactcgatagtcaaagaggttggtcaactg

SEQ ID NO: 719484 - DNA, 98 bp, Homo sapiens
agcaaggcagaaccaccccagtgcacctccctggcctggtctgctgatggccaggcgaaagctgcgctggcgacaagagcccgccggggcaggcttcg

SEQ ID NO: 719485 - DNA, 109 bp, Homo sapiens
ctccgtggccttagctgtgctcgcgctactctctctttctggcctggaggctatccagcttgatattcactgatggactccaaagaatcattaactcctggtagagaag

SEQ ID NO: 719486 - DNA, 98 bp, Homo sapiens
aaaaggtgaaggctgaaatctcgtttgtgctctgcaaggaccacgtgcgctctctgcagaaggaggggttttggagactgacaaactggaagatgaga

SEQ ID NO: 719487 - DNA, 101 bp, Homo sapiens
aaaagattgaaggaaggtgatacaatgatggggcagcaagtggccaagattgttaaaatgagtcttcggaagcaaacccctagtgacttcttaaagcaaat

SEQ ID NO: 719488 - DNA, 98 bp, Homo sapiens
aggatgacaaaaaagccttcataggaatagccaggtctggctgggtcggcacaacctgtttgagcctgaagacacaggccagagggtccctgtcagcc

SEQ ID NO: 719489 - DNA, 100 bp, Homo sapiens
gtgcccaccaagcccatgacgacgctgctggccagggtccagatgccgtgcgcgaaattcggaagtatgatgatgtgacggaaaaggtgaacctccagaa

SEQ ID NO: 719490 - DNA, 76 bp, Homo sapiens
agcagttcttcgggccagggacacggctcaccgtgctagtccagaatgacagggtccagaaactggcgagccacga

SEQ ID NO: 719491 - DNA, 50 bp, Homo sapiens
atccagccttagcaaaccagaggtatgatctcgtgaaatcttgagagaaa

SEQ ID NO: 719492 - DNA, 75 bp, Homo sapiens
caacgcctggctcggagcagcagcctctgaggctgaaggggatgctaagggagataaagcaaaggtgaaggacga

SEQ ID NO: 719493 - DNA, 146 bp, Homo sapiens
ctggatgtgtacaatgcagtgagtaccagtttccagagagtcgtacatgtgcaacaaaaggatgatgggtaaaagccccaaagctgtcatcagcattaaggacttgaatgccaccttccagacagagaagatagggcacccccatg

SEQ ID NO: 719494 - DNA, 96 bp, Homo sapiens
ctttactactaagcaccgttggtatcctcatggacggtggataattactgtaccttcctcatggaaaaagttttatttaaagtgttatttctcatt

SEQ ID NO: 719495 - DNA, 90 bp, Homo sapiens
ttactaatgaacctgtccagctcactccagatgacgagctgccaggatatcgcagatgaattcagagcacaggagattgatggacaggcc

SEQ ID NO: 719496 - DNA, 100 bp, Homo sapiens
acagggcccagctcagcagatgccaccacttccagtgaggagctgccaaagaaggaggctccgtacacgcttgtgtttcttgcagaacataaattattag

SEQ ID NO: 719497 - DNA, 111 bp, Homo sapiens
cggaatgctgcccgatggccctgggtcctcgctgtggggcaatccgggcttgcagacgaggtgctacagaatattttagaaacagaaaatgaatattctaaagaacttcag

SEQ ID NO: 719498 - DNA, 100 bp, Homo sapiens
aacgtgttcgctgcccagaagaagggaaggcgcgagtgaggaaaggaggtactgtaggcctctggctgtacctggcagggagcagcctgccctgtctcac

SEQ ID NO: 719499 - DNA, 75 bp, Homo sapiens
gcacggagaaccattaatcatctctaagaaaattgtgttaaggaatggtactgaggcatttgactcctgggagaa

SEQ ID NO: 719500 - DNA, 100 bp, Homo sapiens
tgacgatgacgatgaggaagatgccggcaaagcctgcgaccccgcagccaggcagttcaacaccctcatcccctggtgcctgccccacaccgggaaccgg

SEQ ID NO: 719501 - DNA, 75 bp, Homo sapiens
aaagccgccatgcagggtcgaacggactgcatccgagccctgatgctagcagggccatgaagcccccaggaggag

SEQ ID NO: 719502 - DNA, 85 bp, Homo sapiens
agaagtggatccatgccttagaagaaacaattcttcgacatactctccagcttcaaaaaggcctaaagaatgtatttgacgaagc

SEQ ID NO: 719503 - DNA, 50 bp, Homo sapiens
ggcctccccagccacgtgaaactattagcctgaggcctgctcagtcgttc

SEQ ID NO: 719504 - DNA, 73 bp, Homo sapiens
gaaggcagcggcggcccaggccagcattcccgcacttcgggctcagaatcaggttctgaaaaaaggtgttgtg

SEQ ID NO: 719505 - DNA, 96 bp, Homo sapiens
tagaatatggagactgttcaatcaccagggatttgaatttgttgaaatgagcagtcgtaaatcaaagagtaacagcttaattcacacagagtgcct

SEQ ID NO: 719506 - DNA, 75 bp, Homo sapiens
ggtgtcccttggcggcgcgagcaggaaggtttctgacgtagaagagcttacccctccagagcatctttctgatct

SEQ ID NO: 719507 - DNA, 75 bp, Homo sapiens
tggcaatgagagaagaagacaatcgcagtggaaaactgagtaatacctaaaggggcaggacctggatgctatctt

SEQ ID NO: 719508 - DNA, 100 bp, Homo sapiens
ttgaaggttaaaccactagcccatttcacagggtgcagcccggaatcccgaggatgtggaccgggagcggcgagaacacgaacgcgaggagaggatgggg

SEQ ID NO: 719509 - DNA, 90 bp, Homo sapiens
gtgactttgagttgaagacagctgagctcccacccttaaaaaatggagacaagcctgaggagccgacggcacatgcctttgtgagcaccc

SEQ ID NO: 719510 - DNA, 50 bp, Homo sapiens
aacatacccaagaggacaaatcccccagaacctgctgacatggccaagca

SEQ ID NO: 719511 - DNA, 51 bp, Homo sapiens
cgtctctgtccccatctggttttagtcaccgagacttggagccagaatctg

SEQ ID NO: 719512 - DNA, 100 bp, Homo sapiens
ctgtaatggcctttcttatactctagaatatacaaagacaaaaggagattctgatgaagaagttattcaagatgctgtggccagaagagctccgaagaga

SEQ ID NO: 719513 - DNA, 96 bp, Homo sapiens
aatcagaccatgactaccttcacctggaacatcaaccacgcccggctgatggcaaagaacagagcagttcaccatttgcattatatagaacgatat

SEQ ID NO: 719514 - DNA, 82 bp, Homo sapiens
cgcaccatgccgctcctaagcctgcacagccgcggcggcagcagcagtgagagcagcttgagcctgatcgagtgcggcccag

SEQ ID NO: 719515 - DNA, 95 bp, Homo sapiens
tttgtttctgtggctaaagagaagaaatactacctccaggagaataaacttaacacccttaaagacggacactccaccaagttctgtaccaacca

SEQ ID NO: 719516 - DNA, 83 bp, Homo sapiens
cggcggggggcagccgctcgcccggacccctcagttgggagctgaaagtgccgacagcattggtgccgtgttaaatagcaaag

SEQ ID NO: 719517 - DNA, 100 bp, Homo sapiens
tacatgacccaacttgtcagctcccagccagttccagccatgtcaaggaacccaggccttctccacagtaggcactcctgactacattgctcctgaggtg

SEQ ID NO: 719518 - DNA, 82 bp, Homo sapiens
gatgactgagtacctgaaccggcacctgcacacctggatccaggataacggaggctggactagacgcttgaagcaaagctgc

SEQ ID NO: 719519 - DNA, 51 bp, Homo sapiens
ttcgcagtggtcgcttcttctccttggattcactccttctccagttgcaca

SEQ ID NO: 719520 - DNA, 82 bp, Homo sapiens
ctttggggcaccacagagatgcggcatctgcaggggctgctgagagtaaatacttggcgcctccagctgctggccaaggaga

SEQ ID NO: 719521 - DNA, 50 bp, Homo sapiens
gatgtggactgcagtgctgcagtgccagtctggctcttgctgattgaatt

SEQ ID NO: 719522 - DNA, 83 bp, Homo sapiens
attacgaggattatggatgaacgtaacagacaggtcctggcattgatgtgcctgctccagacatgagcacaggtgagcgggag

SEQ ID NO: 719523 - DNA, 50 bp, Homo sapiens
tttaagacacgctgcaacaaagcagggaatgacagaggaagaggaagaca

SEQ ID NO: 719524 - DNA, 101 bp, Homo sapiens
aaaaactctggatatatatcacggaatttgctgattcccttggaattccgtttttggaaaccagtgctaagaatgcaacgaatgtagaacagtctttcatg

SEQ ID NO: 719525 - DNA, 100 bp, Homo sapiens
agcccgggcccaggccccggcagcgcctgggacaaggttgattccaaagatagttctcataactccacaaactctgaatttgcagctgaagctgagggtc

SEQ ID NO: 719526 - DNA, 50 bp, Homo sapiens
gcgcggacatggcctcaaacggctgtctgtccccagaccccagagcacgt

SEQ ID NO: 719527 - DNA, 88 bp, Homo sapiens
gggggtgcatgggccccatctggtccagttactatggaaactgccgttctctcctgaggaggaagaggacgtgctagccttcaacctg

SEQ ID NO: 719528 - DNA, 82 bp, Homo sapiens
ctccaggccggggaggtggtggatgtcatcgagaagaacgagagcggtactccaaagattcaggtttactcacgtcatccag

SEQ ID NO: 719529 - DNA, 74 bp, Homo sapiens
gccacagcctgacccgccgggagcgcaggcagaatcagaatgtacgtgagaacctgaagacactctacagactt

SEQ ID NO: 719530 - DNA, 82 bp, Homo sapiens
gctgaatggcaatggcacaaagttctctcgatcagggcatacatctttcttcgacaaagggagcccagcagccggggccgcc

SEQ ID NO: 719531 - DNA, 90 bp, Homo sapiens
tttccttcaagagttttcatggattctaatggaatcaggcagttttgtgtccatgtgaacaactacgaagcttcacaaaagatgtctaag

SEQ ID NO: 719532 - DNA, 99 bp, Homo sapiens
tctcaaggcccctagaaaggttggagctgccgccgcctgcagtcggtgaccgcgcgactcggcgcccgcccgcggttctttatagagttggaagcaaga

SEQ ID NO: 719533 - DNA, 75 bp, Homo sapiens
gtggcaagacaagctcagaactgagaagctgtcaccacaggcattaccacaggagtcttggttcgagaacacagc

SEQ ID NO: 719534 - DNA, 100 bp, Homo sapiens
acagctgcaaggagttactgaaggaagacagtgacccgcccattcatgaaagtctcagcatagaaaatacattgtgggcaagcaccattgttgcatcagg

SEQ ID NO: 719535 - DNA, 75 bp, Homo sapiens
cctgcctcagcctcctgaggagtggggattacaggcacgtgccaccacgccagagtttattaaccacttaacctc

SEQ ID NO: 719536 - DNA, 82 bp, Homo sapiens
ggggacgacaaggagggcatgatcaacctcgtcatgtcctacgcggcccagctgagagccagcctggaggttacccagcagc

SEQ ID NO: 719537 - DNA, 90 bp, Homo sapiens
aaatgaagctctcgaggctgctaagagactaagaatagcgggttttgcagcaattgttgcatatggattatataaactgaagagcagggg

SEQ ID NO: 719538 - DNA, 90 bp, Homo sapiens
cgaatccagtagaaaactggtcaaggaagctagaagcaaccacttcacaagaagattctgaagttggccatttttgatcccagaacagtt

SEQ ID NO: 719539 - DNA, 75 bp, Homo sapiens
agacttggccaaatggacgggactattaaggtactggctgtgatcgaacttctcaaccctcagagacttagatct

SEQ ID NO: 719540 - DNA, 75 bp, Homo sapiens
tggttataaattatgatctacctaccaatcgtgaaaactatattcacagaactcacctgtgagtgaatctctgat

SEQ ID NO: 719541 - DNA, 97 bp, Homo sapiens
cgtctgacaatagcagtgctatgttactgcaatggcatgaaaaggtatggagagtcggcttgactacactgtgtggagcaagttttaaagaagcaaa

SEQ ID NO: 719542 - DNA, 73 bp, Homo sapiens
gatgaagctgaagaaggtgtaaaggacagagaaaagtgacagtttcagctaggacgaacaggaggtgtcagac

SEQ ID NO: 719543 - DNA, 118 bp, Homo sapiens
gatggcattggacttggcacagggatggtcaggaggtcctgagtcactttgagaaggctgatgtttcagacaccgcaggaaatgggcttaatagtgatcgcggcccggcagaccgagg

SEQ ID NO: 719544 - DNA, 100 bp, Homo sapiens
ggtgccccacaggccactgtgcaggatctccactcggccctgacacaggcgtcctgcctctgcggctctgccccctgcatcctgtgcagctgctgccccg

SEQ ID NO: 719545 - DNA, 80 bp, Homo sapiens
agccgacactgggggcagtccgcgagccccgcactctctcgatgagtcggagaagtccctagagacggggtttcgccgtg

SEQ ID NO: 719546 - DNA, 80 bp, Homo sapiens
ggatgtggcgcggctgcgcgaggagcaggaaaaggtggatgaaaatactaggaaaagtttatttaagttacgttctacat

SEQ ID NO: 719547 - DNA, 98 bp, Homo sapiens
acagagctgtcatggctgccatctctacttccatccctgtaatttcacagccccaggatagctagcggccaggagaaatacagtggaaaatgcaaaac

SEQ ID NO: 719548 - DNA, 96 bp, Homo sapiens
ttaaatctgtcgtttgaatttaggaccacctcggtgaccaagaatatggcccaggtgaccaaagccctggacaaggccctgagcaccatggacctg

SEQ ID NO: 719549 - DNA, 100 bp, Homo sapiens
ctaccccatccggaggccctgctggctcagcaacccccaggtagcctttccagtaaatatatgactcagggaaaagcctcagcgaagaggacccagcagg

SEQ ID NO: 719550 - DNA, 100 bp, Homo sapiens
cggaatcggggagcgtccggagctagctggatcctctaggcaggctgctcaaacagcggaagatgccatgcagataatggaacagatgaccaaagagaag

SEQ ID NO: 719551 - DNA, 100 bp, Homo sapiens
catgtctctgtctcgctcagaggagatgcaccggctcacggaaaatgtctataaggtgaaaggtgtagcagtcactcggcctacacccacagcatcgacc

SEQ ID NO: 719552 - DNA, 90 bp, Homo sapiens
gtcggagctgggcgcggagcccctcacagtgcaggagcaccgggggctgctgaccatccgctaccccatggagcacggcgtggtgcgaga

SEQ ID NO: 719553 - DNA, 112 bp, Homo sapiens
gaaaagggtgctaaagaaattattcttgatgatgatgagtgtcctttacaaatcttcagggaatggccaagtgacaaagtcataccctaatgatcccagcaagataatgtcc

SEQ ID NO: 719554 - DNA, 100 bp, Homo sapiens
ccggtcaacacctccaagctgctcagggacgtgtatgccaaggatcatccagcagctcgtcaacggcatcatcacgcccgccaccatccccagcctgggc

SEQ ID NO: 719555 - DNA, 100 bp, Homo sapiens
agccaagaagccaacagcgaggctttcagttctttggaattccattcttttccttattcttctgatgtggatccagtctccaacctgtcccagtatttca

SEQ ID NO: 719556 - DNA, 75 bp, Homo sapiens
gcccagccttgtcaggccagctccagttcccagagaatatgctccattgggtgtgatattcctggctggtatttg

SEQ ID NO: 719557 - DNA, 50 bp, Homo sapiens
gccggtctctgttccgcaggatgataatatagttggatcaaacaaaaaca

SEQ ID NO: 719558 - DNA, 75 bp, Homo sapiens
cctcatttgcgccttgcagcactgctggaccaggcccaaggatgtgaccttctcttggattttcctgattattat

SEQ ID NO: 719559 - DNA, 82 bp, Homo sapiens
gaaaaacttcttgccaaccaaaaatgagtccctggaacgccagatgcgtgaaatggaagagaactttgccgttgaagctgct

SEQ ID NO: 719560 - DNA, 100 bp, Homo sapiens
ccgggtggtggttaaaccatgttaaggaggattttacagagggatttttcaagccacattcaattgataggatgaaaaaatttaagagaaggctatccct

SEQ ID NO: 719561 - DNA, 83 bp, Homo sapiens
tggggcccaagctactggtgccagaacacagagacagcagcccagtgcaatggcatcaagttatcagcagatgtcaaaccatt

SEQ ID NO: 719562 - DNA, 74 bp, Homo sapiens
cccggctctcgtcagcctcccgccggccgtctccttaacaccgaacacccaagagtgagccatggagctacgtg

SEQ ID NO: 719563 - DNA, 49 bp, Homo sapiens
cctcctgagtggctgggactacaggggtaactatctccttcctgctgta

SEQ ID NO: 719564 - DNA, 100 bp, Homo sapiens
agcatcatgtcttacgcgttgcaagatggcccactgcgtgaccttggttcagctgtccatttcctgtgaccatctcattgacaaggacatcggctccaag

SEQ ID NO: 719565 - DNA, 100 bp, Homo sapiens
gggaggggcgcttcccgacgccaaggttgatgcccagctacaggtagtaaggaaactggaagagaaggagcatctgttacagagcaacattggcacaggg

SEQ ID NO: 719566 - DNA, 100 bp, Homo sapiens
gattgaacgacatgccatgtactgcaatggtctgatggaggaagatacagggatggagccccccaaacagaaattatcaatgctcatacgaaggaaactc

SEQ ID NO: 719567 - DNA, 50 bp, Homo sapiens
ttttggcagcatgaaagttagcagtgagaattatgaagatgatgacctag

SEQ ID NO: 719568 - DNA, 83 bp, Homo sapiens
gggcggcctccggggctgccagagcagcagggatcttaagattgaaagtgatgttcaagaaccaactgaaccagaggatgacc

SEQ ID NO: 719569 - DNA, 100 bp, Homo sapiens
ccgcttggccaccttctgccatctgactgtcctgctggctggagcctggctcaacccgtcagtgattcaagtaagactcaaggtcctgtagccacagagc

SEQ ID NO: 719570 - DNA, 75 bp, Homo sapiens
cttcgagtgacccgggtgccgaggagcgggaagagttgctggggaagctcttcgtgggcggtcttgactggagca

SEQ ID NO: 719571 - DNA, 82 bp, Homo sapiens
agctgcagtcccaaaattaggggttctgacaaagagattgatgtgattgatgtgacccgccaggctgactgcaagatgaagc

SEQ ID NO: 719572 - DNA, 100 bp, Homo sapiens
aagaccacgaacttcaaaggggaaagcaaggccaaagacagggagaagtgaataccagggcctggtgaagcacacaggaggctgccactgtggagcagtt

SEQ ID NO: 719573 - DNA, 75 bp, Homo sapiens
gtgaggcctccctagccacgtggaactctggctatgctgaggactacaccacgggagccgtgatgaattttgcca

SEQ ID NO: 719574 - DNA, 100 bp, Homo sapiens
aacaagtccaaggatgaatcccagtccctgttacgggcctttggacaagcacacacaaaccacaagaaggtggctgctgacggagagagccgggaggaga

SEQ ID NO: 719575 - DNA, 95 bp, Homo sapiens
caagatagaccccagcgccttggtgcagaagctggagctggacgtgaggagtgtcacttccgtcaggagaggattatatctgtccaagatgcgag

SEQ ID NO: 719576 - DNA, 75 bp, Homo sapiens
ttgatcgtccaaaagctagaaatgagttatgatatgactctgacaaatgcttgtattgccttaagtcaaagatgg

SEQ ID NO: 719577 - DNA, 80 bp, Homo sapiens
gcagcgctgtgtttgcgagcgggagcgaggggcgccggctggggtgtgtgctcctgctgcaagctttcttcctggtggca

SEQ ID NO: 719578 - DNA, 99 bp, Homo sapiens
ggcaagatgtgcttccagactctgactgacggttgcacaccgatgctccagaattgtgagggagccatactctacagctattccaccgaggataatact

SEQ ID NO: 719579 - DNA, 100 bp, Homo sapiens
ggagagcgcgcggcggacgcgcccgggacgcgcggcggcaccgggaggccgggccgagcgacattcacggcatggtgtaactcccacctccggaaggcgg

SEQ ID NO: 719580 - DNA, 99 bp, Homo sapiens
cctcgttgcggccatcgccctgccggaccgcgcctcaggctcccccaggacactcatgaggaccatgatacttccactgagaatacagacgagtccaac

SEQ ID NO: 719581 - DNA, 75 bp, Homo sapiens
cgggaggtgaatttccatgtcaacatagtcctggaacaagagtttgttcagaaacaacagcaagaattagatggc

SEQ ID NO: 719582 - DNA, 89 bp, Homo sapiens
tcgaaggacatcatggttcatttcaagcagcattccatggcaatagattctggtttcaggaactctggcataacggtgggaaagagagg

SEQ ID NO: 719583 - DNA, 75 bp, Homo sapiens
tcagcagcgaggaaggaaacagcgctttctgaaacaaagactcattttgaagatgtttaacaaatcatttggaac

SEQ ID NO: 719584 - DNA, 100 bp, Homo sapiens
ttgacgccatgtcgggttattcgagtgaccgagaccgcggccgggaccgaggccctgaccctctattctgcaccctgtgagccaccgagactgaaccaaa

SEQ ID NO: 719585 - DNA, 75 bp, Homo sapiens
tcatcttcgtggggcgtgaggagtgtgagctcatgctacaggctgaaggggatgctaagggagataaagcaaagg

SEQ ID NO: 719586 - DNA, 96 bp, Homo sapiens
ttttcgtaaagggaagtcatttctactggacttcatgcttagatacatgtataacaaggctgtggaaaatctctgttctcacaaagtctccccaat

SEQ ID NO: 719587 - DNA, 75 bp, Homo sapiens
atgagaatgtgtctcttgccaaagcgaaggagtctccaagagcttttagattaccccggggaggatgtggaggag

SEQ ID NO: 719588 - DNA, 100 bp, Homo sapiens
atggatgggttcttcattgccaagttcaagaaattttccaattctatccctcagtcccagacaggttggatggcaagcatgtggtgtttggcaaagtgaa

SEQ ID NO: 719589 - DNA, 82 bp, Homo sapiens
acaggaattgagagtcacagaggaaggacagtggagtctggcatcttattgacttcccaagtaagaagcggaagaggagccg

SEQ ID NO: 719590 - DNA, 80 bp, Homo sapiens
tgcacatccccacatcaatgcactgccaatgtatgtctggatttggaatgaacaggaatcaggcatttggaatgaataac

SEQ ID NO: 719591 - DNA, 74 bp, Homo sapiens
aagatcctggtgtcgccatgggccgccgccccgcccgttgctacagagggccggagctggagatgtggtctctg

SEQ ID NO: 719592 - DNA, 89 bp, Homo sapiens
gagccctggaatgtgaagagacaggaggcagcagacggacatccagtgaatggacctgagtggaccctttgatcacatcagtaaacatg

SEQ ID NO: 719593 - DNA, 83 bp, Homo sapiens
ggcgaaggtgaagagttgtcccagctcggcccgcgggggagccccgggagccgcacgccaaaacaacttcccgacaagtggca

SEQ ID NO: 719594 - DNA, 75 bp, Homo sapiens
gaacacctcactattgatggtgtagcgctttaggggaagtttgcttgcctaaactggacttgaagcaatttaaac

SEQ ID NO: 719595 - DNA, 100 bp, Homo sapiens
atcaaacagaagtagttaaaataattgaaaaagatgttatggaaggtggtggacgatgtgagcaaccagacctcctgccgcctggccggcctgaaacccg

SEQ ID NO: 719596 - DNA, 75 bp, Homo sapiens
tgcgctggccctcaaccatcagtccctgctttaagatggaagaactggagcaaggcctgttgatgcagccatggg

SEQ ID NO: 719597 - DNA, 75 bp, Homo sapiens
atcacaaaagagttgattgaaattatctctggtgctgcagctctctttgttttccggaaagttcgaagcttgcta

SEQ ID NO: 719598 - DNA, 75 bp, Homo sapiens
tattatttttcattatccttttctgggtgctatgggtgatcattccaagagcctcctgtccctgcctgctctggg

SEQ ID NO: 719599 - DNA, 100 bp, Homo sapiens
ggcacctgcgcgaagctggccaaagcctgcccagacggctcacctgtgcgggatggaacaaaaggaggccaacggtcctgctgatggctacgcagccatt

SEQ ID NO: 719600 - DNA, 99 bp, Homo sapiens
gttgatgaacaatcatcagctggaactggcaaagcagctacacaaagagggtcatctcttctattgtacctgcagaacggggaagataaccgaagggtg

SEQ ID NO: 719601 - DNA, 87 bp, Homo sapiens
gtacgcccgggtggtgggatctgaatacacacgattccaactccacagagtgaccagagagaggacgtggctgaagacaccaaagat

SEQ ID NO: 719602 - DNA, 90 bp, Homo sapiens
cacagccattggtacatcatgctcagatattgcggagggtggcgacatgtctaagaatgtgagccagtcacagatggcaaaattgaacca

SEQ ID NO: 719603 - DNA, 75 bp, Homo sapiens
gttggacgctgccagtttgcacagcagcagtctctgctttctatccgtcaagatgataaagtcgtgtgcccgaga

SEQ ID NO: 719604 - DNA, 75 bp, Homo sapiens
aagataagaagagaaaaagagaagatgaagaaacccagcttgatatgttggtgaaacagtcgcaaatggaattcc

SEQ ID NO: 719605 - DNA, 75 bp, Homo sapiens
tgtttttctgttttgcctgaatacatgatttaaacaagagatttccacagaagagtcttgctgtgtcgcccaggc

SEQ ID NO: 719606 - DNA, 83 bp, Homo sapiens
cgccgaggcaccgaggcactcagaggaggcctgtggaaatcgaatcaagggtttctggagtggagtgattccagctgctttga

SEQ ID NO: 719607 - DNA, 100 bp, Homo sapiens
aaagagaggatagaaattgaacagaactatgcgaaacaattgaggtatgttagagcggaagttctggctggctttgtcaatggcctatttttgatcttca

SEQ ID NO: 719608 - DNA, 75 bp, Homo sapiens
ctgcacgagtcattgtttggatctgttgctgatgatcagaaacttatgatgaggatacgaagcgttttcggcttc

SEQ ID NO: 719609 - DNA, 75 bp, Homo sapiens
gtcgcgtctcggaaaccggtagcgcttgcagcatgttgaggctgtgaagctgggcagggtttcagctgagctgag

SEQ ID NO: 719610 - DNA, 50 bp, Homo sapiens
acatctgaaagccgggaaatgctaaaagatggcggcaaggcagcccaggc

SEQ ID NO: 719611 - DNA, 83 bp, Homo sapiens
ctgggcgtcgctgaagctgtgtctgcggggaggcagcggaaggcggcagcccagaaaattcatctgaacagccttcctacagc

SEQ ID NO: 719612 - DNA, 73 bp, Homo sapiens
cagactcttcaaaacgcactcattcagtttgctactagaaatgtagacaaccaatttcctgggcaagctgctc

SEQ ID NO: 719613 - DNA, 99 bp, Homo sapiens
taaaattcgaagaaaaaactgcccagcatgccgctatcgaaaatgtcttcaggctggaatgaacctggaagaacccagtgacttgattgtaaaaattta

SEQ ID NO: 719614 - DNA, 82 bp, Homo sapiens
tcctccgaaccccttcatgcccaaatcccggaaactccagcgtgtctccagccgtgatcggatcaacatcaagaggaaggga

SEQ ID NO: 719615 - DNA, 74 bp, Homo sapiens
atggaatgcttgacagagatgagtttgcagttctactgtttcagctcattattgactacttagctgagttcaat

SEQ ID NO: 719616 - DNA, 75 bp, Homo sapiens
ctgccggtcgggggaagagacctgacagtgttctaagaacggaagcatctgggctggatggaatttagcatcaag

SEQ ID NO: 719617 - DNA, 100 bp, Homo sapiens
ccttcacctgaatgacatctacctccatcaggaccccagatgtctgacagccctgtgtgacaccaagataagtaacgctgaagccgacgtagcttctctg

SEQ ID NO: 719618 - DNA, 100 bp, Homo sapiens
tgatgacagtctgcctctatcttacaggctttttggtggtgctggagttggcaagactgtactgatcatggagttaatcaacaatgtcgccaaagcccat

SEQ ID NO: 719619 - DNA, 96 bp, Homo sapiens
tcttaacccctagaccggtttttagtccattgactatgcagcctaatgcgcttctctgaagtagctttggaaagtagagaagaaaatccagtttgc

SEQ ID NO: 719620 - DNA, 76 bp, Homo sapiens
taatggaaattcgagtctttccagataaaggatattcatttgttcgaaaggacctaagtgtgaaataccccgaaga

SEQ ID NO: 719621 - DNA, 75 bp, Homo sapiens
ttatattcatctcaaaaacaaaattctgaactcaggacttggcaagtttctaagcatgaattgaggaacagaaga

SEQ ID NO: 719622 - DNA, 98 bp, Homo sapiens
aaacaccacatgttgtctcttagaagtgggagctgaacggttagcatggcctcattgaaagaactagatcaaagactctttgaaaattacatcgagtt

SEQ ID NO: 719623 - DNA, 100 bp, Homo sapiens
actgcctgttcgcagcgtggattttaaccgaggcacggacaacatcaccgtgaggcagggggacacagccatcctcaggagcttgctacaagtgccagaa

SEQ ID NO: 719624 - DNA, 90 bp, Homo sapiens
ggaaagcgagagggagacggacgttgagagaacgaggaggaaggagagaaaatggcgtccacggtcctgaatggcatggaatgctctact

SEQ ID NO: 719625 - DNA, 101 bp, Homo sapiens
tcaccgcggaaagcatgttgtggctgttccaatcgctcctgtttgtcttctgctttggcccaggagaatggtgttgaacgcgtgtgtcctgagagcctgct

SEQ ID NO: 719626 - DNA, 90 bp, Homo sapiens
tagctgcgctcccggggaaggagccccacagtccccaggtttattttaggacagtggaacttatagaagagcctataaaagggtctcctg

SEQ ID NO: 719627 - DNA, 99 bp, Homo sapiens
tcagcaggaacaaaggcatattgacggttctctcagcgtatgcattaaaaaagcactgccagtgaaagatgtagaagataaacctgaacaacaaaccag

SEQ ID NO: 719628 - DNA, 43 bp, Homo sapiens
gagggggcgctgagctgttgggatgaagaaactgagtctcaga

SEQ ID NO: 719629 - DNA, 100 bp, Homo sapiens
ctgctgacagagaggatccacctccgaaacccctcggcggcgttcttctgtgtggcccgcctgcagggctgggaagaaacggtggatgccgccatttccc

SEQ ID NO: 719630 - DNA, 75 bp, Homo sapiens
caaggtctcctcggatcgcctggagaggcactcggacctggatgctattctgaaatacaatgtggcatattctaa

SEQ ID NO: 719631 - DNA, 88 bp, Homo sapiens
gacctgcaggcagcaccggaggcccaggtctccgtgcagcccaacttccagcaggacaagggcgaccattgacgaggtggagacggac

SEQ ID NO: 719632 - DNA, 100 bp, Homo sapiens
atgactgtattattccaggtcctatctccaagaatatcaaacagcatttatgacattaacagagaacaggactatgtcaagaattctgagggtatacttg

SEQ ID NO: 719633 - DNA, 98 bp, Homo sapiens
gccagaggtggaggggaggattttgaggacacttgtggagagctcgaattccagaatgatgaaattgtcggaagtgaccgtggtggcttcaataaatt

SEQ ID NO: 719634 - DNA, 100 bp, Homo sapiens
tgaaatgcaaccgggagtacatgggtggctatggaccgccccctgcaggaagaggagcccccccgccacccccaccgttcacctcctacatcgtgtccac

SEQ ID NO: 719635 - DNA, 100 bp, Homo sapiens
cagcacaatattcctcagtaaatctcagacggacgaaccctggggttattagtaaaacgattggagaaaggtggtaaagctgaacatgaaaatctttttc

SEQ ID NO: 719636 - DNA, 75 bp, Homo sapiens
ggagcagaaccccaggactgcgcccccgggagcgggcgcccagaggtcaaaatgcagatcttcgtgaaaaccctt

SEQ ID NO: 719637 - DNA, 100 bp, Homo sapiens
actggaattgatttgggaacaactggtcgtcttcagttaatggcaagacttgcagaggcataccataaagtctccaaaggatggcacagtaaagaaagtg

SEQ ID NO: 719638 - DNA, 100 bp, Homo sapiens
gtcaaaataaaaactggagaatggttctatgaggaacgagccaagaaatttccaactggaggttaaccccaaagattggctttccttggagtgaaatcag

SEQ ID NO: 719639 - DNA, 103 bp, Homo sapiens
ctttcaacggcagaccgtctcctgagcgccccaggtagaatttcaaaattgttcagattccattctgtggggaaattgactgtgaggactggatcaaaaagac

SEQ ID NO: 719640 - DNA, 75 bp, Homo sapiens
ttcggcaccgtccgcgactgctatgaggatgccatggacaatattaccaggcagaaccaattctacgatacccaa

SEQ ID NO: 719641 - DNA, 100 bp, Homo sapiens
tgatttcaggatctttagataacattgttaagctgtgggatacaagaagatgtgggcgctatctccaactgtctttgcacttctgagtaagaatctgatg

SEQ ID NO: 719642 - DNA, 83 bp, Homo sapiens
tgaagtcctcccaactaggcagagaaatcgtgctgggattacaagcgtgagctaccacacccagcgaggaagccaagtttaac

SEQ ID NO: 719643 - DNA, 100 bp, Homo sapiens
ccaagttcagcatccccaagcagggggaggcaagagggcacattgggagattcagcttgcaagagtcctgaatctgatctagaagacttctccgatgaaa

SEQ ID NO: 719644 - DNA, 101 bp, Homo sapiens
cacagtgctcttcatagttcaaattcacattcttctaatccaagcaataacccaagcaaaacttcagatgcaaaaatggccacccagcagaaagcctctga

SEQ ID NO: 719645 - DNA, 100 bp, Homo sapiens
cttgtacccgcagacattatgaaagggaccgcagatgttcatggactgcagcccacaggccctgcccatcgcatcagaggacaccacggggcagcatgac

SEQ ID NO: 719646 - DNA, 95 bp, Homo sapiens
tgagagggacaggagtatctgaggatggagaactcagcatatgactatgaatatgatgaaaatggtgacagagtcgttttaggaaaaggcactta

SEQ ID NO: 719647 - DNA, 100 bp, Homo sapiens
gtacatcacctaccggctggtgcagtagctaccgcctgacagcatccgcagtgtcatgcagaagtacctggaggaccggggcgaggtgacctttgagaag

SEQ ID NO: 719648 - DNA, 100 bp, Homo sapiens
agaccagcctgatggagcgcttcaccgacgacaccttctgcgaggcctgcaagtccaccgtgggtgtcatggagaaactccagctgggcccagagattct

SEQ ID NO: 719649 - DNA, 129 bp, Homo sapiens
gcggcggagcgcaggcctcgtgccgttacggccatcacggcggccgcagtggcgtcctggagccctcctcaggatgtggtggatacccaccctggtctcacgttcctgaaagatgctccagaattccac

SEQ ID NO: 719650 - DNA, 95 bp, Homo sapiens
ggacacttggcgcttcctggaaaaccgggttaatgatgcaatgaacatgggccacactgccaagcaggtggagtggctgaaacttctcagcaggc

SEQ ID NO: 719651 - DNA, 98 bp, Homo sapiens
ctgggcccacgctaccgggagctggtcaagaactggttaaagatcgaggtccggaagccactaggagattttttaattggttttattggagcattaac

SEQ ID NO: 719652 - DNA, 74 bp, Homo sapiens
gagaactacagcaacttcatttcactagaagaagcctgagaagatgatgcacagatagagaggcaccaggactt

SEQ ID NO: 719653 - DNA, 100 bp, Homo sapiens
tccgcgacgcgcgcatgttgttcggcgcttcggccggggcgttgcactgcgtcggcgtcctctccggtatcccgctgggaacacagccaggacacagacg

SEQ ID NO: 719654 - DNA, 101 bp, Homo sapiens
ctgggtgtcatcatcattgtcctcatgtacagggtgagaactctgtctcagtcgacgggaagtgcagtgactccacgctactgagcaacttgttagaagag

SEQ ID NO: 719655 - DNA, 50 bp, Homo sapiens
gcggcggcccaggccagcattcccgcacggagaaggttccaggctgccgg

SEQ ID NO: 719656 - DNA, 75 bp, Homo sapiens
gtcgggactcgagcctagggaggcgaggttcccgcaccggatagaatggcatttacatgttcattttgtaaattt

SEQ ID NO: 719657 - DNA, 75 bp, Homo sapiens
cagaatatgacggtggctataccagggactctgttctgattagaaactaatctggattcactccctctggttgat

SEQ ID NO: 719658 - DNA, 100 bp, Homo sapiens
ctcttacttgcacccacccagccccgccgtcgccccgccgcgccgcgctccaaccgcctcctcctcctcagtaacgcggaagtcaatgaaaggattctat

SEQ ID NO: 719659 - DNA, 82 bp, Homo sapiens
ccaagaaagacaaagacccagtgaacaaatccgggggcaaggccaaaaagaaggtcaaagctcagattcacagttgcataag

SEQ ID NO: 719660 - DNA, 100 bp, Homo sapiens
ctggactcttttacactcaactaattggcatcatcacacagaagatggctgtgccacccacgtatgccgatcttggcaaatctgccagggatgtcttcac

SEQ ID NO: 719661 - DNA, 75 bp, Homo sapiens
tgggtcagcatgttgccaccttgaaagaacatgataattctgtcaaagaagaggaaagtacacaggaagatgcta

SEQ ID NO: 719662 - DNA, 75 bp, Homo sapiens
gaaaaaagtaatcctcttggaaagctggaaacatagtccggctttcatgagaaggacaagaagccatattgccga

SEQ ID NO: 719663 - DNA, 98 bp, Homo sapiens
cgggcccggagcagccgccgccgcagcgcgaacatggacgccgtcaacgccttcaaccaggagattgcttgtcttactcagctttgcaagtcctatcc

SEQ ID NO: 719664 - DNA, 100 bp, Homo sapiens
gtcaggggaatataatcctgaggtgtttgacaaaacataccaattcttgaatgacatccgagcgaaagagaaagaggcggagtctcactctgtcacccag

SEQ ID NO: 719665 - DNA, 87 bp, Homo sapiens
ctgctgtgacacacagatggagctccgggagtggttcgctacctttctgtttgtgcagaagatgctcatgaagcagcaggaccggct

SEQ ID NO: 719666 - DNA, 98 bp, Homo sapiens
gagctgccttctccccctgcacttcccatgtctctgagtgcaaagggccaacttaccaacatagcaatttcctgctgcagagagcattttaagaaagg

SEQ ID NO: 719667 - DNA, 90 bp, Homo sapiens
cttcagtggggctattggactgacttttcttatgctgggatgtgccttagaggattatgggcagtcgacaagtactttaagcttcctcat

SEQ ID NO: 719668 - DNA, 90 bp, Homo sapiens
cgtctggactctagggaccctgctgaatagctggggctacaggcgtgtgtcactgcgcccagagaaagcttcttgctatctacctccacc

SEQ ID NO: 719669 - DNA, 98 bp, Homo sapiens
tcggaccccagtaccaggcggtggtgcccgacttcgaccccggaagccttatcagttgtgagtgaggaccagtcgttgtttgagtgtgcctacggaac

SEQ ID NO: 719670 - DNA, 100 bp, Homo sapiens
tccgcagcagatcagggaccggctgctgcaggccatcgacccccagagcaacgtgtgttaccgagtggaatgggccaaattccaggaacgtgagaggaag

SEQ ID NO: 719671 - DNA, 100 bp, Homo sapiens
attgtttatcctaatcccaatgctgaagtaagattgtcttggaaatactaagttggataagccaatggacacgtcagtgttatctgaagaaggaggagag

SEQ ID NO: 719672 - DNA, 111 bp, Homo sapiens
tggagttgaggaaggaagtagagggagatgatgtgcctgaatctataatgctggagatgaaaggtgccgtgagcgatgtggagatgcaggaacactatgatgagttttttg

SEQ ID NO: 719673 - DNA, 73 bp, Homo sapiens
tacatctaaacctcctatctatcttcagcatcaaggtagacaagggcgtggtccccctggcagggacaaatgg

SEQ ID NO: 719674 - DNA, 113 bp, Homo sapiens
cgataacacagagaggctggaaaggtcatctcggagactagaggctggataccaaatagcagtggaaaccgtctaacaaagtgccagtggtgcagcaccctcaccatgtccac

SEQ ID NO: 719675 - DNA, 90 bp, Homo sapiens
ataggctgcgctaccggaatgtcatccagcgagtgattagggatttcagtcataatcggttgtctaactggaacatcagcttggaatcac

SEQ ID NO: 719676 - DNA, 83 bp, Homo sapiens
ccgctccggacgtgcgaagcgttcgcggtgcggatgaacttgcgtcctttctcttctccgccatggaattctgctccgtgctt

SEQ ID NO: 719677 - DNA, 74 bp, Homo sapiens
cgagtggtctaaggcgccagactcaagttgtcgagatgtccacagaaggaggatttggtggtactagcagcagt

SEQ ID NO: 719678 - DNA, 75 bp, Homo sapiens
caaaggtggaaagtcctgaagaaatccagtgggtgaattttgaagtcttcatcagtatatccatattaaaacgag

SEQ ID NO: 719679 - DNA, 90 bp, Homo sapiens
gcctgcaacagtagcagatgccactgctgttcgtaatggcgcaatgtccctgctcttctctcgatgcaactctatcgtcacagtcaagaa

SEQ ID NO: 719680 - DNA, 90 bp, Homo sapiens
caccagcaccgcagatgttgtcaaggtggcctaccaggaggccaggggtgtcgccatgctcctacagaagaagggaaaaaagagctgctg

SEQ ID NO: 719681 - DNA, 90 bp, Homo sapiens
agatagagacagataaaaatggatttttgcagtacgatggcagactccaggttaaaagcgcttaatgcaacattcagagtgaaaaaccca

SEQ ID NO: 719682 - DNA, 100 bp, Homo sapiens
ggagcaggagcttcaggttgtccgagcatctgggaagagctcactcctctacttgaaaaagaaagagatggattacggtgccgaggcaacagatcccctg

SEQ ID NO: 719683 - DNA, 100 bp, Homo sapiens
cttcttggaacaatttatgatagaggaatatacagatgttgccacaggaatctaatctgaaatcgtacaaatggaaatgacgctacaggaggatgtttgg

SEQ ID NO: 719684 - DNA, 89 bp, Homo sapiens
ggaggcgtcgcgcgcgcctgtagctcgcgggcctcgcagcttcatcctcatctgcgatttctgcacactccccatcagttattgtagct

SEQ ID NO: 719685 - DNA, 100 bp, Homo sapiens
cgctacacagcaatgcatcgaggagatatgtcagtattgaattctcccagacatcagagctgtataatgcatgttgatatggattgcttctttgtatcag

SEQ ID NO: 719686 - DNA, 82 bp, Homo sapiens
tgcactccgcacctcggggacattattgcgcgtggaacggctgcttttggaaggttagctttatacgtctacgaatatttac

SEQ ID NO: 719687 - DNA, 82 bp, Homo sapiens
tccgctacgctcgccggggctgcggccgcccgaggttttgggatttgagattgacgcggtgaactctgtccagttttcaaac

SEQ ID NO: 719688 - DNA, 90 bp, Homo sapiens
cagaaatcaaccaagttcatgctattgacctgaaaagtggttctggaaaagtgtaccaaggccctgcaaaaggtgctgctgatacaacaa

SEQ ID NO: 719689 - DNA, 75 bp, Homo sapiens
tgaaggccctacgggagaaaaccgggcgcaaggaatctggtggacagtaacaaactttggtgaaatttcaggaac

SEQ ID NO: 719690 - DNA, 83 bp, Homo sapiens
ggaaggggcagtacaagcttacgtctctgctcttcagtacaatcctcataccataaagtctccaaaggatggcacagtaaaga

SEQ ID NO: 719691 - DNA, 95 bp, Homo sapiens
agacccccgggtgaagccaccgtcatcatgtctgaccagatttctcgaatgctggcagccaaaaccgttttggctatccgttatgatgcttttgg

SEQ ID NO: 719692 - DNA, 75 bp, Homo sapiens
cgtgcgcgcacgcgccgacagacagcgccgttccagccctcgcccgatgcacggattgacgagatgcctgaggct

SEQ ID NO: 719693 - DNA, 100 bp, Homo sapiens
acgggaaccttaaagatagattttgttggagagctgaatgacaaaatgaaaggtttctatagaaatattgatgatgttaagaagttcaaaccgggttacc

SEQ ID NO: 719694 - DNA, 76 bp, Homo sapiens
ctcaccccctggcagccccccacctggggacccccgaatctttcaggtggtgactctcaaaaggaaataggatcat

SEQ ID NO: 719695 - DNA, 75 bp, Homo sapiens
gcagattccagaaaaattacagcacatctcagtgaatttgcaagtgagctgcttatcatccagactttccaacag

SEQ ID NO: 719696 - DNA, 100 bp, Homo sapiens
ggagctgaccccggaggaggagcaggtgcagctctgtcatttccactctgctctgctgcacagaaggcagaagccctggccgtcccctgctgtgttcttc

SEQ ID NO: 719697 - DNA, 82 bp, Homo sapiens
aatgaaaccaggcgggtaaacatggtggacagaaagtcagcctcttgtgtttggtgccctggttgtcagatgttggaaagca

SEQ ID NO: 719698 - DNA, 95 bp, Homo sapiens
acctttgatccagaacttgcagcaacaatagaattaaacaaccaccatgtcgagcaaaaaggcaaagaccaagaccaccaagaagcgccctcagc

SEQ ID NO: 719699 - DNA, 90 bp, Homo sapiens
ggaacacgagcgagattcctctggttctggtgggaacccagggggatcattccagaataacagtaaatactagaaatatttttattgaat

SEQ ID NO: 719700 - DNA, 83 bp, Homo sapiens
tggctgagcagaggacccggcgggcggcctcgcgggtcaggcataagggccatgtgttctgaaattattttgaggcaagaagt

SEQ ID NO: 719701 - DNA, 100 bp, Homo sapiens
agtgaagaaattattggtacctgcagaagctgcagtaaaggaagatgaagaagaagtttcagataagggcagtgattctgaagaagaagaaaccaataga

SEQ ID NO: 719702 - DNA, 125 bp, Homo sapiens
tacttttactactgtgccttgcttatgtttgttaggaccaaacctcaaagcatggctaagagtgttcagtagaaatggaaaatggtgtgaatggaacattaacttcaaatgtagcagactctccc

SEQ ID NO: 719703 - DNA, 75 bp, Homo sapiens
cgcggcgacggcggcggtggcggcttggacgactcggagagccgatgccttcaattaagttgcagagttctgatg

SEQ ID NO: 719704 - DNA, 100 bp, Homo sapiens
gtgaagccacacagtgtccagatacgagggtgttggagcgggccggagagaagtagagtgggctgcgaggagaaggaaacaggcctttcggaggctcctc

SEQ ID NO: 719705 - DNA, 82 bp, Homo sapiens
tttgcttggaaaaacgtgtgggtacgaccttggagtcagaaataccatcagaggaggggtactgtgactttaatagtaggcc

SEQ ID NO: 719706 - DNA, 75 bp, Homo sapiens
cctgggcctcccggtccgcaagcagcatcatcggctggttcgtgcgaagcttcaagtacttttacgggctccgct

SEQ ID NO: 719707 - DNA, 100 bp, Homo sapiens
ataggtaaactcgtgtcacgggaatttgttatacagattatttcatctcccaggtggatctcgagccagaggggaaagtatttgtggtaataacccttac

SEQ ID NO: 719708 - DNA, 96 bp, Homo sapiens
agtccggaccggagactttggggcctaactagaaaaggcgacggcggattgacagaagtatgattggagagcccacaaactttgtgcatacagctc

SEQ ID NO: 719709 - DNA, 75 bp, Homo sapiens
ccggctccgggccagcatccgagagcccggactggagggaggtggggaagacagggctccagctaccacaggacg

SEQ ID NO: 719710 - DNA, 82 bp, Homo sapiens
gaaatggctgccgaaaacaagccggaaggatcccatgacagattctgttgtcacgtctccttacagagtttgagcggtgctg

SEQ ID NO: 719711 - DNA, 100 bp, Homo sapiens
cgcgaagagccgttagtcatgccggtgtggtggcggcggcggagactgcgggcccgtagctgggctctgcgagacttggagctgatgtctgtgctgtcct

SEQ ID NO: 719712 - DNA, 82 bp, Homo sapiens
ggctctcggcgcgtccagcgcagcccgacgttccgctgctggggaaagatgaatgggagggctgattttcgagagccgaatg

SEQ ID NO: 719713 - DNA, 100 bp, Homo sapiens
tggacaagatcatgggcaaaggacagatccaggtcactatcatatgacaaaggctttgccgcagttcatcttcctccctgtgtactttccatttgccttc

SEQ ID NO: 719714 - DNA, 51 bp, Homo sapiens
cacggaagtactttgctacacggcttcaaggttactgactttttatgatgt

SEQ ID NO: 719715 - DNA, 96 bp, Homo sapiens
agcacatctcctgtcccctgctcatcctgcacgctgaggacgacccggtggtgcccttccagcttggcagaaaggcagcgcccggttaccacatgg

SEQ ID NO: 719716 - DNA, 100 bp, Homo sapiens
gtgaaatctggcatattagcgctagccctgcagacagaggtgtgctgacgacctgctacaacagaaatccggaacatggtggcggtgctggaagtcatct

SEQ ID NO: 719717 - DNA, 96 bp, Homo sapiens
gctggggaacctgggcgtattgggcatcacagcccctgacatgcgtcgggatgtccaggaaatttttcgcatgaccccccacgagaagcaggtcat

SEQ ID NO: 719718 - DNA, 100 bp, Homo sapiens
gtggccaaggctggcttggtggatgactttgagaagaagatgaatgagaacagccacatcatcctgtgtggtcaaatttctcagtacaacaaagatgtgc

SEQ ID NO: 719719 - DNA, 98 bp, Homo sapiens
tctcgatgagtcggagaagtcccaacaatgctaaagtagctgtgctaggggcctctggaggcatcgggcagccactttcacttctcctgaagaacagc

SEQ ID NO: 719720 - DNA, 83 bp, Homo sapiens
ggattatcggatgaaccagaagctgtgggaggtgtattccggacaatgcagatcttcgtgaagactctgactggtaagaccat

SEQ ID NO: 719721 - DNA, 100 bp, Homo sapiens
cggcagtcagagtcaaaacagagcttttggaatctgaacaagggttttaacagtgtatgccagggaacacacattctctttcgagaattcagcttcgtcc

SEQ ID NO: 719722 - DNA, 101 bp, Homo sapiens
gtccggagtaacttggccaggctggccccgagcggaactggagaaagctgagggagataccctcttggccatccgggccccatcaggcaccagcctggagg

SEQ ID NO: 719723 - DNA, 50 bp, Homo sapiens
acgctcacgggctccggcttccgcgtggcgagcagatcagccggcggcag

SEQ ID NO: 719724 - DNA, 75 bp, Homo sapiens
accagttcctacagctccactcgaggcatctcacagtttaaaattggtggtgaatggtggacatggatcgattat

SEQ ID NO: 719725 - DNA, 83 bp, Homo sapiens
tgaagaatccccccgaaaggaccccccagatgcctggaatgatgtcgtcagtaatgcctggaatgatgatgtctcatatgtct

SEQ ID NO: 719726 - DNA, 75 bp, Homo sapiens
gcagtgctatgttactgcaatggcatgaaaagtgcttagatgagtacgaagatgatgaagcagggcagaaagagc

SEQ ID NO: 719727 - DNA, 90 bp, Homo sapiens
cggaggcggcagcggcgggcctgaggcgaaggagcggccgggagcccgccgcgctggtagcgccactgaggcggctcccagctgcgttgg

SEQ ID NO: 719728 - DNA, 101 bp, Homo sapiens
gaatctggttatgatacaatcttgcgtgtcctgggctctaatgtcagagaatttctacagattactcaaagactgtcctggtttcgtgtttacccctcgat

SEQ ID NO: 719729 - DNA, 100 bp, Homo sapiens
gccttcgccgtccaccaggtccctctctctgtccccggccgccatggagcagccgccggcgcctaagaggacacattcagctaacgtattttagcaggtg

SEQ ID NO: 719730 - DNA, 100 bp, Homo sapiens
tgtgaatctgttccctgctggaacaaattcaagccctaccacttatgtcttggatgaagatgaacctcgattccttgaagaagttgattacagtgcagaa

SEQ ID NO: 719731 - DNA, 100 bp, Homo sapiens
ttgaggacaattttggcctattcagaagaggacacagccatgcagatgactccttttcccacccaggttcaaaccttgtactactcagctgatcacaagc

SEQ ID NO: 719732 - DNA, 51 bp, Homo sapiens
cccttggctgttaatttctcagagccaaaatgaagtttaatccctttgtga

SEQ ID NO: 719733 - DNA, 100 bp, Homo sapiens
ccaaaatatggcaaagaaacctattctgagaaagacctggtggaagaggaggctgaggaggctggagtggctttgagaagcacccagagcacactgcaag

SEQ ID NO: 719734 - DNA, 78 bp, Homo sapiens
gagaagccgcccaaagaactggtggaataacactcccatggatgaagcactgcactttggacaccatgatgtatttaa

SEQ ID NO: 719735 - DNA, 100 bp, Homo sapiens
cccatcttctgctgggactgaagctgacctccaacagaagccagggttctgcagcattccagaccttgagcactgaatcaggatgggaaaaagacgttgt

SEQ ID NO: 719736 - DNA, 83 bp, Homo sapiens
cgggcagctgtgcccgggcggcacggccaggagaactacgatgacccgcacaaaacccctgcctccccagttgtccacatcag

SEQ ID NO: 719737 - DNA, 90 bp, Homo sapiens
cgaggggaagcagttgatgaaggagaaattgctgaaaatctccctgaacaagaggacagtcattttgtttactcattcagccctgttgca

SEQ ID NO: 719738 - DNA, 90 bp, Homo sapiens
ggccgaccctcgaggcctcctgcactccgcccggacccccggccccgccgtggtcccatgagcgtgtaagcaagcgtctacatcagagat

SEQ ID NO: 719739 - DNA, 100 bp, Homo sapiens
actaaattggagcactctgtgtgtgcaaatggcagcagtacctgtccaaagatcgctttagttccaccttgctccacaagcagcacaaccacactggttg

SEQ ID NO: 719740 - DNA, 82 bp, Homo sapiens
gcttcctccacctgccgcggcgtctcgtggcccagctgcatctgctgcaggagaactgcgacacatcaccaagctgaagccc

SEQ ID NO: 719741 - DNA, 75 bp, Homo sapiens
cggggacacagggcagcccgcagaggacagcgaccacgctgttggagacacagttgcagaagatgaagtggtttg

SEQ ID NO: 719742 - DNA, 51 bp, Homo sapiens
caggaaaatggcattctacaaaggcatgtggagaccccaaggcaaaaccat

SEQ ID NO: 719743 - DNA, 75 bp, Homo sapiens
gttctcttcttcgattttatgaaaatggagaactctgtgatgtcacactcaagatggagtctcactctgttgccc

SEQ ID NO: 719744 - DNA, 100 bp, Homo sapiens
gaaagaatatgatcaactcctgaaagaacactctgaacttcaggctaaatttattgtgaagaaatcagaagatgaagaagacgccgctaaagatacttat

SEQ ID NO: 719745 - DNA, 75 bp, Homo sapiens
ttgaagttttgacctataaaaaggcagatactgatctgatgagctttgatccaaaccttctccacaacaatggac

SEQ ID NO: 719746 - DNA, 50 bp, Homo sapiens
agaaatgcatagttttatccagtctacgtaggagctggtatgaggatcac

SEQ ID NO: 719747 - DNA, 96 bp, Homo sapiens
gggtgctcacagctgcccattgcctaaagaaatgagccttcccagcgtccccgtcttcctagaggtttctggccagtttgatgttgagttccggct

SEQ ID NO: 719748 - DNA, 76 bp, Homo sapiens
aaggtgcccatttatgacttcaccacgcacagccggaagaaggactggaaaaccaccacaactccaggaaggaaac

SEQ ID NO: 719749 - DNA, 97 bp, Homo sapiens
gaaagacacacctaccaagaagccagtcaagcggccagagattgggtcttgctctaggatgcagtgcagtggcacgatctcagatcactgcagcctc

SEQ ID NO: 719750 - DNA, 100 bp, Homo sapiens
gcacgccatgaaggcctcgggcacgctacgagttccagggagctctgtcctggtgaccgtgcccgggttatgacgactaatcccaaaccgaataaggcat

SEQ ID NO: 719751 - DNA, 90 bp, Homo sapiens
gcaaaccgcagcccaggagctcctggaagatctccgcactctggagcataatgtaattcagaaggagctggcggacatcactttagaccc

SEQ ID NO: 719752 - DNA, 88 bp, Homo sapiens
cagctttacaaaccctgaatttataactgaaataacctccatctcctgggtcccagcgattctcctgcctcagcctcttcctatttca

SEQ ID NO: 719753 - DNA, 100 bp, Homo sapiens
cagcaagaaggaaatgattcagaggtccaaacgattgttgatccatttcagatacttgtggcagcaaacaaagcagttcacctctacaaactgggaaaaa

SEQ ID NO: 719754 - DNA, 75 bp, Homo sapiens
actacacctttgccaccgaccccaatagtgagtggaaagtcccttaagctcctaggatttttagatgttgaaaat

SEQ ID NO: 719755 - DNA, 75 bp, Homo sapiens
agccgatccagcctgcggagcctgtggggcagccttgcattgcatcctgaacgagtgttggtagcaacaggacaa

SEQ ID NO: 719756 - DNA, 90 bp, Homo sapiens
cttacagcaagatggttcatcttttgccctagagcaattgaagggtgccttcaccagggatggaagaggcaggctgcagcagagagatgc

SEQ ID NO: 719757 - DNA, 100 bp, Homo sapiens
tccaaggacacctacagccccgacgaacatttctgggtgacactcaacaggattcccggtacccactgatggtaatgctggcctgctggctgaaccccag

SEQ ID NO: 719758 - DNA, 83 bp, Homo sapiens
attgtttctctccctctgcccccccttccccacgcaaccccagatccatttacactttacaaaattggaatgggattaacagg

SEQ ID NO: 719759 - DNA, 83 bp, Homo sapiens
ctcatctcagcctccaaaagtgctggcattacagaagaggactgtcagaaggacgtagaaggcacggttttactgtgaggagc

SEQ ID NO: 719760 - DNA, 100 bp, Homo sapiens
ctgttgctgtagggaggccagggactcagccgatgcctcaatggccaactgcaggcactggtgagaaaaattgatgcctcagacaatatctacaccacag

SEQ ID NO: 719761 - DNA, 90 bp, Homo sapiens
caaaggaagacttgtaacctggagaagaggtaagaagagttcctgggtcaagtggtcaccttcataaaaccgaagacggggactgggagt

SEQ ID NO: 719762 - DNA, 101 bp, Homo sapiens
agcacagctggaatgcaagtcaaggtaatacctgcctggagaatggatctttcttactgaactttacaggctgtgcagtgtgcagtaagcgggattttatg

SEQ ID NO: 719763 - DNA, 100 bp, Homo sapiens
ccgggagcacttcgagaagctggagaagatgtcaatgccaatcgcatcatcccgaggagacgtggagagtgtccgccgctgcctggctcacagcctcttc

SEQ ID NO: 719764 - DNA, 98 bp, Homo sapiens
tttgtccccgcaggcactcacactcctgggagccggctccagacattcactactttcactgcctaagaatcctggaccttctcaaaggcacagaggcc

SEQ ID NO: 719765 - DNA, 75 bp, Homo sapiens
aagagcaagatcaccgtgacatccgaggtgcctttctccaaaaggaaaagggagcgatgttgatctcaggaagca

SEQ ID NO: 719766 - DNA, 99 bp, Homo sapiens
gttcaagcgcggcagaggctacaaatgcttggccggactgaacgggtgcggaactgctcaagccctgagttctccaagactctacagcttgagtaccgc

SEQ ID NO: 719767 - DNA, 100 bp, Homo sapiens
ccgagttcgctgccagccccaagaaggagaccctcatccagctgatgcccttcttcgtacaatgcagatcttcgtgaagactctgactggtaagaccatc

SEQ ID NO: 719768 - DNA, 76 bp, Homo sapiens
aatgaccacaacaagcaagcatgcagcttactgcttgaaaggactcatctgatgatgtgagaagagttcagaggag

SEQ ID NO: 719769 - DNA, 75 bp, Homo sapiens
cagcaactgaggcagcggcaggctcaggtgcagccgctgggattttatattggaagacatggatcttgctgccaa

SEQ ID NO: 719770 - DNA, 74 bp, Homo sapiens
cgagcagcggacgccggtctctgttccgcaggatggtatggacctgtctgccaatcaggacgaggagaccgacc

SEQ ID NO: 719771 - DNA, 75 bp, Homo sapiens
aaacaacagactatgctgggcttattataatgttaattcaagactctcgaagagaagcttcagtgcagatggatt

SEQ ID NO: 719772 - DNA, 51 bp, Homo sapiens
cgggagaacggaaaactcccaacttcctgcatcaacaacagcaacttgtga

SEQ ID NO: 719773 - DNA, 75 bp, Homo sapiens
ctcagaggtcgaggtcggggtaccccacgagatgatggtggtgctaccccagtacaggatgaacgggattcaggg

SEQ ID NO: 719774 - DNA, 96 bp, Homo sapiens
gtcaccaacccggccttcaccaaactcccttgggcatccccaccatcagatggtgcggggcagagggggactacaacgtcatggtgatggagctgc

SEQ ID NO: 719775 - DNA, 98 bp, Homo sapiens
tttatccaacttggttgctcttgaagctggtgagagccctgccaggatgtggagtggacttcctagcagagtgcgaaaatccaaagcagctgatgaga

SEQ ID NO: 719776 - DNA, 82 bp, Homo sapiens
gcatggcgcaggggaagcagaggggctggaagtcattcagggctgggagtaagcaggacagctggcctgaagctcagagccg

SEQ ID NO: 719777 - DNA, 100 bp, Homo sapiens
ccaccgaagccacgctccggatggaaaacgtggacgtgaaggaggaatggcaggacgaagatcttcccagttcctctgctggtctgggttctaattcggc

SEQ ID NO: 719778 - DNA, 98 bp, Homo sapiens
ttgcaaagtgccatggctctttttgcatgtaaaactctggacatgtcatgctgcccaaggacatagccaagctggtccctaaaacccatctgatgtct

SEQ ID NO: 719779 - DNA, 101 bp, Homo sapiens
acagagacaagctgagcttgccgcacaaaaagctagagagaatgagtccctggaacgccagatgcgtgaaatggaagagaactttgccgttgaagctgcta

SEQ ID NO: 719780 - DNA, 75 bp, Homo sapiens
ctgcgctactgcgagaacaagtttaacgacaagcacatcaccactctgcaggcttctccagtgacagtgatctgg

SEQ ID NO: 719781 - DNA, 75 bp, Homo sapiens
ggacggcaggactgtggccgtgggggacatcgtctggggtattttgaaggtggcgtctcatctgtctacctctgg

SEQ ID NO: 719782 - DNA, 90 bp, Homo sapiens
gaaaggagcaagagcaagatcaccgtgacatccgaggtgcctttctccaaaagcctggcagtctctgtgaagatgaatgtgctgctcttc

SEQ ID NO: 719783 - DNA, 100 bp, Homo sapiens
tggatcctctggccagctgactgcacttcttttttgagaaaggaaggaatatatcctgactgattgttagcactctacgtatatgaatatctgctccatg

SEQ ID NO: 719784 - DNA, 82 bp, Homo sapiens
tattttgcagcaatctcagctctcaaagtgacaatgcagatcttcgtgaagactctgactggtaagaccatcaccctcgagg

SEQ ID NO: 719785 - DNA, 100 bp, Homo sapiens
gtacccgcagacattatgaaaggcagtgctgagccctctcatagccatcgcactgaaaatatcccagattcatgagagaactggccggaggggacccact

SEQ ID NO: 719786 - DNA, 100 bp, Homo sapiens
tctggtgataaagtgaaaccagtgttgctcaactctaagttacctgtggatatccttggaagagtaccactgatgaaattatgaccaggtgggcccgagt

SEQ ID NO: 719787 - DNA, 90 bp, Homo sapiens
aagcagcaggaagataccacaatcagaccctccgctgggttgtatatgatggagaaaatttcactggtaatcaatacgtgttggaagaag

SEQ ID NO: 719788 - DNA, 97 bp, Homo sapiens
ggggaaaaggcaaaaatcccatctaccgcaactctcagttcgagagtaaagcaaaattcctgcctttctaaatgtggtggatattgctggccttgtg

SEQ ID NO: 719789 - DNA, 75 bp, Homo sapiens
gcggctcagcctccagccagctggacgagggcaagtgcgcttacatccgaggcaaggggagagccagttgcgcag

SEQ ID NO: 719790 - DNA, 100 bp, Homo sapiens
gagggaaagtgccgctttaaggagaactgcagatacttggcatatcgaaattttatgattgacacgtatcgtctaaacccccaagagtatttaactagca

SEQ ID NO: 719791 - DNA, 104 bp, Homo sapiens
cccggtgtgcctcggcagccttgcgctgctctaatggtccggacttccgtgtgccgccatggcatcagatgaaggcaaactttttgttggagggctgagttttg

SEQ ID NO: 719792 - DNA, 50 bp, Homo sapiens
tttaattgctatggtgttgctgtcatttctacccatggtgttggaatgaa

SEQ ID NO: 719793 - DNA, 82 bp, Homo sapiens
gccgctgggatgactccgtcacctacatcttccaccagcttctggccctgggcgctgcctatggcacagccaagagcggtac

SEQ ID NO: 719794 - DNA, 74 bp, Homo sapiens
gccacgtggagcccggcaatgccgccatccgggagaagctggcctgggccaagcgggacgaccctgggacagtc

SEQ ID NO: 719795 - DNA, 75 bp, Homo sapiens
aaagaaagaaaactacaggcggggacggcttctcgttaagcatgattgggacagaatgatagaagctgtacagaa

SEQ ID NO: 719796 - DNA, 100 bp, Homo sapiens
cagctcttctaccgggacactgagcaggtggacaactggatgagcaagcaggaggttattaacacggggatcaaagtctggtgtagaaataacagcggtg

SEQ ID NO: 719797 - DNA, 100 bp, Homo sapiens
caaaaacgtcaacaacagttttacgttttcggctttgtgagaaaccttaccatcaaacacgatggccagcaacgttaccaacaagacagatcctcgctcc

SEQ ID NO: 719798 - DNA, 87 bp, Homo sapiens
agcgatcgggagacagccgggcgctgcaaggcaaggggagagccagttgcgcagagccctgcaaccagcagtccagggagaagtggt

SEQ ID NO: 719799 - DNA, 90 bp, Homo sapiens
ctgggcctgagaactgaatcaggctttaaaggagatagatgaagttggggacctattgcagctgaagtattcccgtcatcggttggtacc

SEQ ID NO: 719800 - DNA, 87 bp, Homo sapiens
tgcgaacacagtagtggaagatgtaaagcaatatttcgagcagtttggcaaggtgcaatgattctggactgagacgcgcttgggcag

SEQ ID NO: 719801 - DNA, 98 bp, Homo sapiens
cgtggatccgctggagcggagccggccgtacgcggtgctgcgagggcagaacctggagtgcctggaagagctgggatgtctggttgagtcctatggca

SEQ ID NO: 719802 - DNA, 100 bp, Homo sapiens
taattttagggtcctttatatagaagggagagtagatcaccggcgtaatcaacccagcgttggacaaatactttccgtcagactctggagtgagaatcat

SEQ ID NO: 719803 - DNA, 75 bp, Homo sapiens
aaccctatcatcgtctcctgtggctgggacaagctggtcaaggtgccttattaagtggctggaggttcgtaaagt

SEQ ID NO: 719804 - DNA, 100 bp, Homo sapiens
tgcatccttggagcgagctgagagctcgagataaatactgcaacaactgtagctgacttaaagtcaataataaatgaatgctataactaccttgagttaa

SEQ ID NO: 719805 - DNA, 87 bp, Homo sapiens
agaagctgagcctttctggacagaccaacctgtcagtgctgcaatgactctgacagttggcagtgtgaacctagagatccacaatgg

SEQ ID NO: 719806 - DNA, 100 bp, Homo sapiens
aggaagcacaaaaagggacagtcgtcccagaaatcctggatagaaagcactttgaccaagagggaatgtgtatatattataccaagttccaaggaccctc

SEQ ID NO: 719807 - DNA, 100 bp, Homo sapiens
gaacccatgcctggagcctcaccgcttcaatgacacagagagtgctccaagctcccgaagccgaagtctcactttgctcccacatggaacacccaattct

SEQ ID NO: 719808 - DNA, 50 bp, Homo sapiens
cctcgaccgacgcccccgccattgaccgactcatcagtcacggggccgac

SEQ ID NO: 719809 - DNA, 100 bp, Homo sapiens
ctgaacggcggagcgggagcggccggaggagccatggactgcagcctcgtgcggacgctcgtgcacagatacctcatatgttagatttgatatcattcga

SEQ ID NO: 719810 - DNA, 96 bp, Homo sapiens
taccctgagaaaggtggacgtgatcattttacttctccagatgaatatgatgaccctactgtgctctatgaagccatagtatctcatgagaagaac

SEQ ID NO: 719811 - DNA, 74 bp, Homo sapiens
cgcagtggtcgcttcttctccttgggagaagaaatgggtgaccgttggtgacacatccctacgaatctacaaat

SEQ ID NO: 719812 - DNA, 100 bp, Homo sapiens
accgtatcaggaacacaaaactgcggcccttgtctgcaaacagtggtatcgacttatcaaagccaatggagatcttcgtggatgatgagacgaagttgac

SEQ ID NO: 719813 - DNA, 82 bp, Homo sapiens
tgctgaagtaatgcaatggtctcaatctctggaaaaacttcttgccaaccaaaaaacaaaaccatgggcagtgtatgctggg

SEQ ID NO: 719814 - DNA, 96 bp, Homo sapiens
gcagaattgggtaacctgctgactgttgaagagggaggtagatgacttctttgagcaagagaagaacttccttattaactattacaataggatcaa

SEQ ID NO: 719815 - DNA, 75 bp, Homo sapiens
caggacacccctgaagccgagaaatggtggaagttaaacgagctgagcctcgggacagcaagagccaagcgccgg

SEQ ID NO: 719816 - DNA, 75 bp, Homo sapiens
cacgaccatccaggacctgcgggacaaggtgacatttgctctgaactggatgatacgaatgatgtcagatttgga

SEQ ID NO: 719817 - DNA, 90 bp, Homo sapiens
cgggactttctgaaccgctgtctcgagatggatgtggagaagagaggttcagctaaagagctgctacagccgtcctgggccgccggacac

SEQ ID NO: 719818 - DNA, 113 bp, Homo sapiens
gcaaaagcaaagacccctcggggctgctcatctctgtgatcagggaaatcctcattgacgattcaatttgttgaaggccaatttgtggactcctacgatccaaccatagaaaa

SEQ ID NO: 719819 - DNA, 100 bp, Homo sapiens
gatacgctcctcagcggcggcgccagctcctgtggccaccagcttgggctccccacggagggcagcaagtgggacttggggaacccggctgtcaacctgt

SEQ ID NO: 719820 - DNA, 100 bp, Homo sapiens
ttcatcctcacctatgcaaagaaagggaagctattgctgggattttgaggagttgaagactgggatagtttccaagctattttggatcatacctacaaaa

SEQ ID NO: 719821 - DNA, 75 bp, Homo sapiens
atacacctgcatgaggtggctgaagactccagttggctagagatgaagatggacatgctgaaaattttccccagc

SEQ ID NO: 719822 - DNA, 109 bp, Homo sapiens
gtggagacaaatcatcaggaatccattatggtgtcattacatgtgaaggctgcaaggtgtggatgaggtcaccattgtcaacattttgaccaaccgcagcaatgcacag

SEQ ID NO: 719823 - DNA, 100 bp, Homo sapiens
gtttccacatcggtcagaaaaagattgacaaagcataaatcatggacaccagagaataaggtggacctcaggaatccggaaaagactgagaagcttacat

SEQ ID NO: 719824 - DNA, 85 bp, Homo sapiens
agaaggccgtgtgcgaggagtgcctcaaagtctacctgagcgcccagatcttcataaacaatgaatggcatgattcagtgagtgg

SEQ ID NO: 719825 - DNA, 73 bp, Homo sapiens
aggactgccaccagtaccaggagcaccaggaatgcctccaggtgctggagaatctggtaaaagcaccattgtg

SEQ ID NO: 719826 - DNA, 96 bp, Homo sapiens
gtggatggcagcgagccgaaactgagcaagaagtagctgaaggtaaattaaatgatcattttcctctcgtggtatggcagactggatcaggaactc

SEQ ID NO: 719827 - DNA, 97 bp, Homo sapiens
ctggtctcgaactccggacctcagcttcgcagaatcaagaacggctatgtgcgtttaaagatccgtatcagcaagaccttgggataggtgagagtag

SEQ ID NO: 719828 - DNA, 100 bp, Homo sapiens
gggtgttcgcggtcggccgccaccaggtcaccctggaagagtcgctggccgaagtggaggtgaagccggtgctgccaagagccatgcccagttccatggg

SEQ ID NO: 719829 - DNA, 98 bp, Homo sapiens
gcctgggctgctgactgcgcacttggaatagtagcaggcggcggcggcggaacgccaggcagactgccactctccgcccctacctgagtgccgtgcgg

SEQ ID NO: 719830 - DNA, 78 bp, Homo sapiens
caggccacacaggcacaggccggtgagggacctgcccagacctggaggtggggaacgccaagcacaacgtgcatgtca

SEQ ID NO: 719831 - DNA, 50 bp, Homo sapiens
ggcgggacctggcgccaccttgcaggactctggactgtcttcacactagg

SEQ ID NO: 719832 - DNA, 88 bp, Homo sapiens
cagcggcaggctcaggtgcagccgctgctcttctgttagaaatagtatctttgttttcctttgctgttcctcaatcccctactcttca

SEQ ID NO: 719833 - DNA, 82 bp, Homo sapiens
ccggctgctggatggaggggattttgtcagcttgtcgtcaaggttttgtagtgcatccctgagcatgagcacagaatgaagc

SEQ ID NO: 719834 - DNA, 90 bp, Homo sapiens
tcaacgcactgatggatttccaccaaaggtcagccatgtcatctgagcctcccccaccaccacagccccccacccatcaagcttcagtcg

SEQ ID NO: 719835 - DNA, 51 bp, Homo sapiens
atccatttctcctattgaggagtcaacgatgagattgtctgaaacgaagaa

SEQ ID NO: 719836 - DNA, 74 bp, Homo sapiens
tggataagacagtcccacagtccagtgatgggcccccgacatgaaactggcactcagaatgaagaatgcctttt

SEQ ID NO: 719837 - DNA, 100 bp, Homo sapiens
cacctccccccggagccaggctggtttcggaaatgcccttacagcagcaggcagcaatgaatgtggatcacgaggttaacctcttagtggaggaaattca

SEQ ID NO: 719838 - DNA, 75 bp, Homo sapiens
cacaccgcaggaacaagaaggacgtcaacctcagcaagactgagaagatgggtacagtgagaacacgggagagga

SEQ ID NO: 719839 - DNA, 88 bp, Homo sapiens
cttagctgtgctcgcgctactctctctttctggcctggaggctatccagctctgcgctcctcagaccaccggcaggtgaacagcctga

SEQ ID NO: 719840 - DNA, 100 bp, Homo sapiens
gaaagagtcaacagcagtggcaacaggtcacaatccaaggtccggctcctccgcgtcccagggccggacggagggatgaggcagggggggcccgggcagc

SEQ ID NO: 719841 - DNA, 102 bp, Homo sapiens
tgtaccaaagacctgggaaaattggatatgtcaagtgaccagatagctgccaatctgcaagcagttattaatgaagtttgtaggcacagaccgctgaatttg

SEQ ID NO: 719842 - DNA, 90 bp, Homo sapiens
gagtgaggcgagcagcacagagacggctgaaagctgagctaggaattcccttggaagaggcctgagacctgggaggaagctggagaaaag

SEQ ID NO: 719843 - DNA, 87 bp, Homo sapiens
aaagagaaacctgggtgaactttcacggacaacctcagaggacaacgaagtgttcggataaaagaatcagagtgtctcaacccttga

SEQ ID NO: 719844 - DNA, 75 bp, Homo sapiens
tgaatcttggtgtttggacataggagggctgaaaacacagttaaatcactttcaaagttaaaagactattaagaa

SEQ ID NO: 719845 - DNA, 100 bp, Homo sapiens
ggctacacatttccagcaggctgcagatacgagtggacaactgctgctggtggtgacaatgtcaaataacggcctagacattcaagacaaacccccagcc

SEQ ID NO: 719846 - DNA, 96 bp, Homo sapiens
gtggtgaggagcttcgccaagcacacgcagggctatggccgaggtgttggaaatcaatagctcttctagcctttgcattgtttaaatataatagtg

SEQ ID NO: 719847 - DNA, 100 bp, Homo sapiens
ccaggactcagaggccgccatcaaccgccagatcaacctggagctctacgcctcctacgtttacctgtccatgaaaccatatcattctacaggaaaatgc

SEQ ID NO: 719848 - DNA, 98 bp, Homo sapiens
tggaagcgaaagaaaaggagctacaagtggccaacgataaagccgacatggtgtggtatctgtgcgctttgaagaagatgaagacaggaacttgtgtc

SEQ ID NO: 719849 - DNA, 75 bp, Homo sapiens
tgagattgagctaatgaaggaccttggtgtaaagggggattcccgaagtcttccgttttctgagaatgtgagtgc

SEQ ID NO: 719850 - DNA, 80 bp, Homo sapiens
gattttttaactgaagatagtgcctttcagccctaccagatatatttttgccatcatggatcagtttggagatatattag

SEQ ID NO: 719851 - DNA, 76 bp, Homo sapiens
actcggtggtgaggggctgcgaccgcatcgtgcccgtggacatctacatcccagatgccttggttcaagggatgga

SEQ ID NO: 719852 - DNA, 75 bp, Homo sapiens
tgtaaccgctataatgaggatgatgcaaaggcagcaagagatgcacaggagcacaccaaatgaaaagctgttggg

SEQ ID NO: 719853 - DNA, 73 bp, Homo sapiens
tcctactcggagcgctgtcgcggccatgtctgccaggtggtcattgaaggtgctcgggtcttcggggcactgg

SEQ ID NO: 719854 - DNA, 75 bp, Homo sapiens
ctcaggctggaacttgccctgtctcctcgcagatgaggtctattctggataagcaggttttgtgaagacatttat

SEQ ID NO: 719855 - DNA, 90 bp, Homo sapiens
ttgttgcggaataattccatccaaaaccggcagctgttagccgagcaaattagagatggacaaccgaattgttatgtactaaagaataaa

SEQ ID NO: 719856 - DNA, 101 bp, Homo sapiens
aaggtctggggaaaataatccagagatttccacagaaggactgggatgatacaccttttccacagggaattgagttgaacgtgtactacacgagcagtcag

SEQ ID NO: 719857 - DNA, 90 bp, Homo sapiens
tttccagcatgcaggggctgctcagcaaaatgatgcttcaacacccaggccaggtctctgcctcggaagtgagtgcttctgccatcgtcc

SEQ ID NO: 719858 - DNA, 125 bp, Homo sapiens
cctccattcccgggaggggggagcggcgttggaggccaccgtttccagtgccggtggtggtgtgcacattgagccccggtatagacagttcccccagctgaccagatcccaggtgttccagagcg

SEQ ID NO: 719859 - DNA, 73 bp, Homo sapiens
ctgtccaggggctgaatggacacaggtgtcagcagggccacctggtaaaggtcaaaatgcagatcttcgtgaa

SEQ ID NO: 719860 - DNA, 75 bp, Homo sapiens
agagacctccatggtccatgaactcaaccgatcgtccagtgacttatctgtataacactctgcactattatgaaa

SEQ ID NO: 719861 - DNA, 100 bp, Homo sapiens
tgacaacggagtgagagttcaaagattctttgtagcagacactgcaaatgaagctctcgaggctgctaagagactaagattggagaatccatgttgacca

SEQ ID NO: 719862 - DNA, 90 bp, Homo sapiens
aaacatgaaattggaagctgtagacccctggtctccttttgggatctctcctgctacagttgttaagggagaaacaaaggcagcgctgcc

SEQ ID NO: 719863 - DNA, 98 bp, Homo sapiens
cagagaccatgtttgacaagacgcggctgccgtacgtggccctcgatgtgctctgcgtgttgctggatgccttcgtgaacagccaggaatggacgctg

SEQ ID NO: 719864 - DNA, 97 bp, Homo sapiens
gaagacaagggcatcgccgcctcagccgccgccgccgccgttttcgcctgcagctgctcaccggcaatggtggcttgctatccgggaaatggaacag

SEQ ID NO: 719865 - DNA, 100 bp, Homo sapiens
ctattcaaataattaccaaggcatcacatgagcatgaagataaaagtcctgaaacagttttgcagtcgactgcttttggcttctggatgccctcctccag

SEQ ID NO: 719866 - DNA, 76 bp, Homo sapiens
tggttaaagccatattggagtagcgaggaatctgattccaagcaaaaaccaggagttttgagagcaaaatgacaac

SEQ ID NO: 719867 - DNA, 98 bp, Homo sapiens
gtccgctcaggggcctttggacatctcttcaggcctgacaatttcatctttggggagatcgtggtgaaatggtttgaggctgtccagactggcctgcc

SEQ ID NO: 719868 - DNA, 50 bp, Homo sapiens
gggaccgcctgagctttctacaccggaagatgctcatgaagcagcaggac

SEQ ID NO: 719869 - DNA, 98 bp, Homo sapiens
acaatggacagaagttagtggttcctgggtccgagtggacagatgaattaaacacgtacagagtggaagcagcttggaaattgtcacagtgggatttg

SEQ ID NO: 719870 - DNA, 148 bp, Homo sapiens
ctctatgagatgttccagaacattcttgggatcaagaagttcgaacatcagctcctttacaatgcctgccaggagatattgatcaacaagagatgattccaagtaagaagaatgctgttcttgtggatggggttgtgctgaatggtcc

SEQ ID NO: 719871 - DNA, 78 bp, Homo sapiens
gcaaatatttcaataagtacccaaaagtttgcagctcaccttgtgaagatgaaatatccaagaatctgtattctagat

SEQ ID NO: 719872 - DNA, 101 bp, Homo sapiens
aagttcattgggcctgcacctccaggtactagatgacaagaatgtgcgtcgtcgctttcgggcaagtaactaccagagcaccacccgggtcaaacccttca

SEQ ID NO: 719873 - DNA, 100 bp, Homo sapiens
tgatgatgcctgagttcagccctcagcaggtttttagaacttcagccataaaaatgggcagaattttccttgatcatatcggtggtacccgtctgttttc

SEQ ID NO: 719874 - DNA, 101 bp, Homo sapiens
ggagatgtctatggaatttgcaccaaattgaaaacatctcccaatgaaggttgcatcataaatacaaaggactgaagttataaaagagaaaagagaagttt

SEQ ID NO: 719875 - DNA, 76 bp, Homo sapiens
gcggagggctcggtcaacggcttcatcagcaccttgggacaaagaaacagccttggtataatagcacgttagcatc

SEQ ID NO: 719876 - DNA, 90 bp, Homo sapiens
gaaattattttgggtcttcttcttaatcccatatctggacatctggaacatccatgtgcaagtggtgacccaggatgaaagagagcagct

SEQ ID NO: 719877 - DNA, 90 bp, Homo sapiens
tattccatcttctatagcttttttaacaacattggaaagtgccctggaaagtactacagccatcctccaacagaagtacggactgctccc

SEQ ID NO: 719878 - DNA, 75 bp, Homo sapiens
tttagaacgatgtgaacatcgaatcatggaatcccttgcatggctctcagttttcctttggaatatggataaata

SEQ ID NO: 719879 - DNA, 87 bp, Homo sapiens
ccggtacatctgaaagccgggaaatggtctggtgtcggcgcgcctgttatcggtgagatcgatggggagtatcgacatgacagtcga

SEQ ID NO: 719880 - DNA, 50 bp, Homo sapiens
cgcagctggctggcttcagtggaccatcttctcaagtcttaggattgcag

SEQ ID NO: 719881 - DNA, 100 bp, Homo sapiens
gaatgcggattcgatcattcacatcggatggaggatgaagctgtcctggacagaggggcttccttcctcaagcatgtgtgtgatgaagaagaagtagaag

SEQ ID NO: 719882 - DNA, 75 bp, Homo sapiens
ggggctggaacacctcgccaaagcagagaaatagtcattgaatctttgggaattattatttataaagcactggac

SEQ ID NO: 719883 - DNA, 81 bp, Homo sapiens
ggaaaaccagttattgaatatcaagaggaggagttgttggttggatggcaagcatgtggtgtttggcaaagtgaaagaagg

SEQ ID NO: 719884 - DNA, 89 bp, Homo sapiens
cattatacgaaggtttccagaggggaatacaggtgtcaaagtacagttgtgaatttggctccgcgaagtattatgcactgtgtggcttt

SEQ ID NO: 719885 - DNA, 75 bp, Homo sapiens
ggtaaaagtagagaaggatcaaggacggatgatgaagtagtacagagcacatcttcattacctccactagactgg

SEQ ID NO: 719886 - DNA, 83 bp, Homo sapiens
ctcttgggtttagcaaaagttcatctccttctgcatccttaactgagaatgagctacagcagcacctgcggagtcaccgggag

SEQ ID NO: 719887 - DNA, 75 bp, Homo sapiens
gagcgcccggattggggatgagtatgcggaggacagctctgatgaggaggccaagactaaggggctgcagagcgg

SEQ ID NO: 719888 - DNA, 83 bp, Homo sapiens
gtggatgatgttttctcacccagtcatgataacaacgaacttgatgcaagtgataggtttgccaaggtcagacctctcatcat

SEQ ID NO: 719889 - DNA, 100 bp, Homo sapiens
caggcccgccactacctcctggctgccgtgaataggcagcctaaaggctgggcttggagcccacaggaccctagaagtcctttaagaacatttaacgctg

SEQ ID NO: 719890 - DNA, 100 bp, Homo sapiens
agagccaaactgtccaaggctttggcagctatgtatgtcaaaaaggatgttcctttgtggcaaaaacatggacggaacttctgaaacatgtgagagaaac

SEQ ID NO: 719891 - DNA, 75 bp, Homo sapiens
ccggacttcctctcagaagaggaccgcggactgcctgctgaagatgaagtcttactacagaaattaagagaggaa

SEQ ID NO: 719892 - DNA, 75 bp, Homo sapiens
ctacaagtacattgaataccaaggcacaagtgcatacaccttgatagcaccaaatataaaccggagaaatgagat

SEQ ID NO: 719893 - DNA, 75 bp, Homo sapiens
agccttccaagtagctgggactacagacatgcgccagcacgcctggggactttctcattgttgaccccattgaag

SEQ ID NO: 719894 - DNA, 88 bp, Homo sapiens
aatgcgtgaccaacatcaccctggcaaatgtcatccgacagctgggcagcctgactttcagaaaaccaacgccaagatccctcccagc

SEQ ID NO: 719895 - DNA, 51 bp, Homo sapiens
agagactcaaaggatcacacagtttcagaacttcgagaaaccaagacctct

SEQ ID NO: 719896 - DNA, 75 bp, Homo sapiens
ccatctaccgcaactctcagttcgagagtaaagaactcccccactggaaaggattctgaaagaaatgaagtcagc

SEQ ID NO: 719897 - DNA, 90 bp, Homo sapiens
ctggatcccagctttgtggctgccgtcatcaccatcaccttcaatccgctctactggaatgtggcttcactgtataaataggagaggatg

SEQ ID NO: 719898 - DNA, 90 bp, Homo sapiens
ctggcagaaacagaggactaattttggcagttctaaatttgaatttgaggtcgaggtcaaggagacattctcatagacgttacactcgat

SEQ ID NO: 719899 - DNA, 129 bp, Homo sapiens
tagatcacttctgtatgtaacttttttacatacattcgatacattcagcagggactcgtgaaacagcaggatgatgtatggtggcatgagaggcatgaagggattggtctatgaaacatcagttcttga

SEQ ID NO: 719900 - DNA, 74 bp, Homo sapiens
acccagtgaacaaatccgggggcaaggccaaaaagaagaagactggagcgctcagcctgccacggaagactggt

SEQ ID NO: 719901 - DNA, 129 bp, Homo sapiens
ggggacactttgcgttcgggctgggagcgtgctttccacgacggtgacacgcttccctggattgggtttctagagaggaaggatctccccagctgtcttcagcaaggccgtctcctgcccagagaaata

SEQ ID NO: 719902 - DNA, 75 bp, Homo sapiens
agagaggtgttctgaacaagttcaagccaaactcaggctctgaattggttttgtctgaagatgaaaaaagtgaca

SEQ ID NO: 719903 - DNA, 95 bp, Homo sapiens
atgataccagatggaaacttggatctgaggaatggagaactccagaaatgcagcaagatgaagagcgacgtcggcagctgagagagagagctcgt

SEQ ID NO: 719904 - DNA, 83 bp, Homo sapiens
gtgacgggtctggagtgcgtgggggaccggctgttggcggatataattggtgattacaactttcctctataaattaactcttg

SEQ ID NO: 719905 - DNA, 100 bp, Homo sapiens
gtcttccgctgacgtggctcttgccctggcaagtgctgcctcccaaaatggtgccgtgagcgatgtggagatgcaggaacactatgatgagttttttgag

SEQ ID NO: 719906 - DNA, 90 bp, Homo sapiens
agctgggctccgttctctatcaccacaccaagaacagcgagcaggcgcgcagccacctggagaaggcgggcaaaataacatggcagccag

SEQ ID NO: 719907 - DNA, 101 bp, Homo sapiens
ctcttcgccaagcaggtgcagaagaagtttagcagggcccaggagaagttttgagtatccgaggagcccaggaggaggaacccacagacccccagctgatg

SEQ ID NO: 719908 - DNA, 100 bp, Homo sapiens
ccaccggatcattcagcaggactgccagaaaccaaatcatgcagcttttggataagtttcccattgaaggtggccagaaggaccccaagcaaaggatcat

SEQ ID NO: 719909 - DNA, 95 bp, Homo sapiens
aaattaccaaagaagaagaagcctgtcaggagctattgcggtccaaacttttacaaagccctggcttgaaaaacagtccaattgatgaaagtgag

SEQ ID NO: 719910 - DNA, 98 bp, Homo sapiens
gatgtgggaataaatagagttcacgatcctgtaactgccaaacccaagttggttggagatgtggattttgaaggagaagccctggagttgagcctggc

SEQ ID NO: 719911 - DNA, 100 bp, Homo sapiens
gaatccgggcttttgctgatatgcatgcatgtaccgaccttctgaacaaggccaacacctatgcagatgtccatgaaggaggtgggtgatggcttacagg

SEQ ID NO: 719912 - DNA, 100 bp, Homo sapiens
ttgggacatcaggtcgtcctaaaggcaaatcctgatcctaactgttgtcttggagtatttgggctgagcttgtacaccacagaaagagatctaagagaag

SEQ ID NO: 719913 - DNA, 82 bp, Homo sapiens
gggagttcaagaagaacactccagagcctcgatgacttacgagccctcaaggggaagcattttctcctggaccccttgatgc

SEQ ID NO: 719914 - DNA, 100 bp, Homo sapiens
aaaacgtgttatggtggatgccaatgaagttccaattcaaaagatgtttgaaaagctgggaagaaaaaatgctgggcatcttggtgcagcacaaagtccg

SEQ ID NO: 719915 - DNA, 100 bp, Homo sapiens
atcacggactcgaggctatgaccgtgacatagcattcatcatggatgacttccaacatgccatgtcagacagtgaaggatgaagatttgataaagtggaa

SEQ ID NO: 719916 - DNA, 90 bp, Homo sapiens
cgactcggtgattgaggacaagaccatcgagctcatggaatcccgttctgcttccagaagtggaagtgctcacggatcggggaaatctgc

SEQ ID NO: 719917 - DNA, 75 bp, Homo sapiens
ctactctgcctcggggacgaaagcaggggcctcctggacctgttggcctccctggtgagattggaatccgaggcc

SEQ ID NO: 719918 - DNA, 115 bp, Homo sapiens
gttttggttggaggaaaatctctgactacatatggactcagtgcatatagtggaaagttccatgccattgcagtgtcaactaggcctcagttacttttcagtttgcccaaattga

SEQ ID NO: 719919 - DNA, 82 bp, Homo sapiens
ccatcgagaaaaccatctccaaagccaaaggccagcggaagcctgccacctcctatgtgcggaccaccatcaacaagaatgc

SEQ ID NO: 719920 - DNA, 88 bp, Homo sapiens
cccatcgccgcttctagaccctactgcggtctcggatattgccgggtatcagccagttccaaagaaccagccatgtcaatgaattcag

SEQ ID NO: 719921 - DNA, 83 bp, Homo sapiens
gtcatgatagctattggatgggcccgagcttagcagtgtctgcaaaaacgaatcttttcctacaacctgttaactgactggac

SEQ ID NO: 719922 - DNA, 51 bp, Homo sapiens
agatgatcatctgatagaagaggtggagctgatcagaataatgttcagcat

SEQ ID NO: 719923 - DNA, 50 bp, Homo sapiens
gcgccgcggccgttagtcatgtcgggctctgacgcccgctctgcggcttc

SEQ ID NO: 719924 - DNA, 100 bp, Homo sapiens
gtctcaaacattcaagaaaacacacagactccaactgtacaagaggagagtgaagaggaagaggtccctttctagagataggagaagagagagatcgctg

SEQ ID NO: 719925 - DNA, 90 bp, Homo sapiens
ctcggaagtgtagaaaataccagtgggaaaaggaagtgctggagcaggacatcgagactttacatggctctgttcacgtcacgctgtgtg

SEQ ID NO: 719926 - DNA, 101 bp, Homo sapiens
gaaggtctccgcggcagccctcgctgtcatcctcattgctactgccctctgcgctcctgcatctgcctccccatcctgaggacaaagttctgggagatcgg

SEQ ID NO: 719927 - DNA, 102 bp, Homo sapiens
acggaatttacactgacagaagcagtggtcgaatccagtagaaaactggtcaaggaagctgccctggccaacgtcaacattgggagcctcatctgcaatgta

SEQ ID NO: 719928 - DNA, 100 bp, Homo sapiens
gtgatgttgtcagaaacattccaaatggtttacaagaatttttagaccctctgtgccagagaggaactggagaagatgatgactatgttgatgattttaa

SEQ ID NO: 719929 - DNA, 75 bp, Homo sapiens
agccgatccagcctgcggagcctgtggggcagagccttcaatagtgagcataagattccctatgtgcgactggag

SEQ ID NO: 719930 - DNA, 80 bp, Homo sapiens
cggtatctctgtctgatgggagccagcgttgaggcgctgaccacgatgagcggggctgacaccgttggggatgatgacga

SEQ ID NO: 719931 - DNA, 75 bp, Homo sapiens
tctgagccaggaagccctctattggatgatgcaaagaaggaccctctattgtcccaggcctgtgttggctgcctg

SEQ ID NO: 719932 - DNA, 105 bp, Homo sapiens
cgcgagcggagcggcgcgtgggtcggttgcggtcggccccggcaggtcaaaatgcagatcttcgtgaaaacccttaccggcaagaccatcacccttgaggtggag

SEQ ID NO: 719933 - DNA, 74 bp, Homo sapiens
ctccggagcgcggcgccgagcgcagggatacggcgcccagcggggtttgagaaatttctgtggttcattagctc

SEQ ID NO: 719934 - DNA, 74 bp, Homo sapiens
gctcctgcggctgctgcagtgctacccgcctccaggcgcttcctcccatcaacacagtcggcggagacaaggtt

SEQ ID NO: 719935 - DNA, 90 bp, Homo sapiens
ggatgggctagtgttggacacactggcagtaatacggactcttgtagataaccgaattaagaaagtggtttccatctacggaagcagcat

SEQ ID NO: 719936 - DNA, 82 bp, Homo sapiens
gaggaggatgggggctaaccagttagtggtgctcaacgtgtacgacatgattcccctcttcccgcggcctcgccatggcgac

SEQ ID NO: 719937 - DNA, 95 bp, Homo sapiens
aaattaatcaacagagtgggacctaatggtgagagtcctgccattgactctaccagaggagattcttcaagcttagttgctgaacttcaagaaaa

SEQ ID NO: 719938 - DNA, 100 bp, Homo sapiens
ggtgccagcacctttcggcttctgagacggcggcagcagcggcattcagaacacaccacagccatcagcactggaatgcaaagaccagaacaaacagaag

SEQ ID NO: 719939 - DNA, 88 bp, Homo sapiens
ctcttcgccctctgcctggccgcagcccgctgtctgcagagcccctagcagtcttcttgatgctttggaacaacatttagcttccttg

SEQ ID NO: 719940 - DNA, 75 bp, Homo sapiens
cacaaacttgcctacgtcagtaacagccaccaaggttcagtggtcacctcacaatgagactattttagcttccag

SEQ ID NO: 719941 - DNA, 100 bp, Homo sapiens
cgaaaggcaccccggagattgctttctggggaagaggtctctttattactatccacgatcgagggcatattgcttcagttctcaatgcatggccagaaga

SEQ ID NO: 719942 - DNA, 99 bp, Homo sapiens
gtttaaaaaaggaaaccccggagagcgagagcgcgaaggaaatctggccgccgccgccgcgagcgctcccgggaataaccagcaagtacctgtcaagaa

SEQ ID NO: 719943 - DNA, 75 bp, Homo sapiens
agtcaaatgatgttgacatctactactacatggatgagccagcaagggagtgaaagcacgatttgttgtgactga

SEQ ID NO: 719944 - DNA, 100 bp, Homo sapiens
cctcgcccttctgcctctcgcccatcagcgcggcgctggccgagagccgcggctccgtgtttctggaaagtgacagcagaaggaacccagccagccggcg

SEQ ID NO: 719945 - DNA, 100 bp, Homo sapiens
ggcagcctgcgcgagctgcgggcgcgcgagttcagccgcctggcaggttgtcttttggaaatgcaggtttaaggacaaattatctgcttaagctagaaga

SEQ ID NO: 719946 - DNA, 73 bp, Homo sapiens
aggggcacagagagatggagagagacctagttagcctattgaagagatgcgacacacgattgtagatattcta

SEQ ID NO: 719947 - DNA, 96 bp, Homo sapiens
tggaaaacatccttggagaggtcggagatgggtttaagcctgctataactgcggtagaggtggccacattgccaaggactgcaaggagcccaagag

SEQ ID NO: 719948 - DNA, 100 bp, Homo sapiens
ccgaaacctggaggcccggggggcccagctcccgtagggagccgtgggcgctcggtgcccgggccgggcaggtccgactgcagacacagccaccgagttt

SEQ ID NO: 719949 - DNA, 90 bp, Homo sapiens
ttcttgacagacttctggatggttacgataatcggcttagaccaggactgggagagatcatgatgcagccgtccttttggatttcttttt

SEQ ID NO: 719950 - DNA, 82 bp, Homo sapiens
agacctgcaagctctttgacacacagcagttcttgtcaggttgctgcttttgctcagaggacatccatgaccctaatggtct

SEQ ID NO: 719951 - DNA, 100 bp, Homo sapiens
tttgatatggctggacatcccttcttctatgagtatcctagaaggaaaacatcaccatggctacagaaattggttctcctcctcgttttttccatatgcc

SEQ ID NO: 719952 - DNA, 100 bp, Homo sapiens
gcaggggacgtggcttttgtgaagcacagcacggtactggagaacacggatggactgaccactgagcagatgctgagaaaagaccagaagactatctata

SEQ ID NO: 719953 - DNA, 149 bp, Homo sapiens
gcaagtttacgacaaggaggttcagtggacccttggagccatcctctacaggacccgctttctaccattaagctgtaaagatgtctgacaagaaccagatagctgccagagcttctcttattgagcaactgatgtccaaaaggaatttt

SEQ ID NO: 719954 - DNA, 100 bp, Homo sapiens
gaattgcctttgggactctgaaggctgaagtgtggaaaagccactggcagtgattcaagtggtgtcattgatctcacaatggatgatgaagagagtggag

SEQ ID NO: 719955 - DNA, 82 bp, Homo sapiens
gattgagcgccaccctgtggacatcagcgccatccccgagcagcggtggaagctgccgccagctgagggccattcgcagctt

SEQ ID NO: 719956 - DNA, 100 bp, Homo sapiens
gggcctgggccgccgctgctacctgcagcgccgtgtggcacgacacaaaaatcagagatggggacttgcttggggtcttgctgcccaggctggtcttgaa

SEQ ID NO: 719957 - DNA, 100 bp, Homo sapiens
agaatttgtatagagatgtgatgttggagaactacagaaacctggtctccctaggtgccagcgagatttcagattcctgtaaacctctaaagaaaaggag

SEQ ID NO: 719958 - DNA, 100 bp, Homo sapiens
ctcaggggatttggctgacgcctcacaaacctccacattgcatgcagtgacctggagttcagggaagtggcaaacagattgcgggactggttcaaggccc

SEQ ID NO: 719959 - DNA, 75 bp, Homo sapiens
gatggcagcaatgtggcaatgagggagtaactattcccagtcagaggcgctatgtgtattattatagctacctgt

SEQ ID NO: 719960 - DNA, 110 bp, Homo sapiens
ggaacctccacctcgactccagcggccccgacagcacggaagcagctggataaagaacagcctggagtactcgggtactttgagttcagtggctcaccccagcctcctgg

SEQ ID NO: 719961 - DNA, 75 bp, Homo sapiens
acgtgcacttcttccagggcctgcgcctcgggggccctcgcccgggcaccccccggccaatggaccacagctgca

SEQ ID NO: 719962 - DNA, 60 bp, Homo sapiens
gaagagaatccagaagctgtggcactcaggttggcttcttcaagcgtcagtacaaggaaa

SEQ ID NO: 719963 - DNA, 100 bp, Homo sapiens
gagccctgtcatcttctaaacagagcagcagcagcagagatgataacatgtttcaggaatacaggagtttccagaaaatataaaaaattgtaaagttttg

SEQ ID NO: 719964 - DNA, 100 bp, Homo sapiens
tacaatgacaagttctacaaggatgtgctggaggttggcgagctagcaaaacttggggtgaccagtcgccttcagatcgtcccctcagtcttgctgttca

SEQ ID NO: 719965 - DNA, 87 bp, Homo sapiens
tcaaaaggaggtggcgcaggttcgcaagcgcataacccaggtggaagttaaacgagctgagcctcgggacagcaagagccaagcgcc

SEQ ID NO: 719966 - DNA, 100 bp, Homo sapiens
ggggacgacttctttgtgtatgccgattaccacacgcactttctgtactgcgtacggaggaaggaagagtcagacaaaaattattttgaaggtacgggct

SEQ ID NO: 719967 - DNA, 82 bp, Homo sapiens
gcccgtgggcgagccgcccgcccgccgagcagccatgaggtttatgaaggcgagcgtgccatgacaaaggataacaacctgc

SEQ ID NO: 719968 - DNA, 75 bp, Homo sapiens
agcagtggcagtccatcgaggggaccaaactctccatcacccaggggaagccgtggcggacggagcagacggagg

SEQ ID NO: 719969 - DNA, 75 bp, Homo sapiens
cccggacggcgaatggagcaggggcgcgcagcggtctgtatggacccaggcttgtcaaactgtactatacacatc

SEQ ID NO: 719970 - DNA, 100 bp, Homo sapiens
gtatttgatgccacttttcatctgcgagggcgagagaaatttaatcatagatggtggggaggtcaaccggcagccttaagtgccttgaaacaattttctg

SEQ ID NO: 719971 - DNA, 75 bp, Homo sapiens
cggagctgcttcgccgctgcggaaagtctctgtacgtgaagaggttgcacgacaaaatgaagatgcagttaaacg

SEQ ID NO: 719972 - DNA, 75 bp, Homo sapiens
gctggctgccggctcctgtgacttcaagtgtcgcacgttcatcattgagaagcagcctcctcaggtcctgaagac

SEQ ID NO: 719973 - DNA, 75 bp, Homo sapiens
ggcgtggagagggagtgatgtcttccagactcggtgctgtacccgccgatgaagtaggtgttccaggtagcaatt

SEQ ID NO: 719974 - DNA, 75 bp, Homo sapiens
cagcttctagtgttgctttggatcttgtggaaagtcagaatccctgtttattgggaaggatatgttcgattctta

SEQ ID NO: 719975 - DNA, 75 bp, Homo sapiens
attccgccccttcattcgaaggctcccagagtttaaattttgttacccagcatgccacaatctgattgctgacct

SEQ ID NO: 719976 - DNA, 83 bp, Homo sapiens
gcagaacgtgagggtgtaacttacaaaaagacagcccacctgaggatattgaccataaggactcatatctcattacaagaagc

SEQ ID NO: 719977 - DNA, 74 bp, Homo sapiens
ccatcgtcgggcgccccagacaccagggctgcgacatcaacttcaaggaggtgctggaggacatgctgcgctcg

SEQ ID NO: 719978 - DNA, 90 bp, Homo sapiens
gccgcggggccgccccccgaagcccagggagagcaaggcgcgcggcgactccgttcctctgtgacgagggtgcaggtatctctggggact

SEQ ID NO: 719979 - DNA, 51 bp, Homo sapiens
gcacagcagaccttggtgatgtgctacagtgagtgatggattggaactgag

SEQ ID NO: 719980 - DNA, 73 bp, Homo sapiens
caaaacatgttcgagttctgggatatcacagttgaaaactttggtgcaacagaagtgaaagagctggttctaa

SEQ ID NO: 719981 - DNA, 82 bp, Homo sapiens
tgctgctccgtggagatcgtcccgcgcctgccgctggtcagtgagaaggtcggaggggccgaggggaccaagctggatgatg

SEQ ID NO: 719982 - DNA, 75 bp, Homo sapiens
atccggcaccagtcagaccgatatgtcaaaatcaagttcattcggctcctaaagaagtagcagtgtccaaggaac

SEQ ID NO: 719983 - DNA, 100 bp, Homo sapiens
caaggctcctcaacaaacaggactaaggaaaggaaaggcaccaccaaggatttgatgcctcctgacaaggtgatccgggcgggccccgcaggaattttat

SEQ ID NO: 719984 - DNA, 100 bp, Homo sapiens
atgggcacaatattttagatggactgaggacccagagactgaccttgaagggcttaaaagacaaccttcttgcttctgggacatccagcctgacagccac

SEQ ID NO: 719985 - DNA, 97 bp, Homo sapiens
gccgccatcgcgacggccaaaaggagcggcgcggtcttcgtggtgttcgtggcagtgtctcgactgcattgtgagagtgaatctttcaagatggatc

SEQ ID NO: 719986 - DNA, 83 bp, Homo sapiens
gttggaagcagccgatccagcctgcggagcctgtggggcagtggagaacatgcagctgaccctgaacctgcagacggagaaca

SEQ ID NO: 719987 - DNA, 75 bp, Homo sapiens
gagacatgtctgagactcctgctcagtgtagcattaagcaataagagctaactgccatcaagagccatcagtatg

SEQ ID NO: 719988 - DNA, 100 bp, Homo sapiens
cggccccggaggctctcggcgagcgcggcgcggtaacaagtgggcgaggatgccgtacgagatcatctaccctgatgggagagtctgcatttccatcctc

SEQ ID NO: 719989 - DNA, 100 bp, Homo sapiens
gctgcgcgccagcgtcgagaagggcgactactacgaggcgcaccagatgtaccggaccctgttcttcagggctgaaagaatcaggattcctgaaccttgg

SEQ ID NO: 719990 - DNA, 100 bp, Homo sapiens
aaagaagcttgcagcttacatctgatcctgggcttccccatctggtgcttttcccatggagaacacacaaccacatttaaatcaaacggtattgagatgg

SEQ ID NO: 719991 - DNA, 82 bp, Homo sapiens
gaggcgggcgcggaggcggctagaaggtgaccgcggatcccagcttcctgcagccagcaattctgtggtgttcttggtcaca

SEQ ID NO: 719992 - DNA, 90 bp, Homo sapiens
gcggcgaccaagatcaggaacctgccctggcattttccctgaagatgagatcccagagaaggcctgcaggcgcctgcttgaagggaggcg

SEQ ID NO: 719993 - DNA, 51 bp, Homo sapiens
ctgctgtccagcctctcccgctgctcagctgcttaagctggcccacaagta

SEQ ID NO: 719994 - DNA, 100 bp, Homo sapiens
gtggttccaacacccctgagcaagacgatctctctgagtttgtgcctgcagatgggaacgcagcctgcgtgaaggtgctccgggacattgagcctgggga

SEQ ID NO: 719995 - DNA, 99 bp, Homo sapiens
aaagagaagaaccagaatttcctgagccttccaaacagagaacttgcgcctgtcaggggctggatccagaaacctgtggtgcctccttctcttttggtt

SEQ ID NO: 719996 - DNA, 95 bp, Homo sapiens
tgacttcatgggatctttgtcctttgggatttctgaacttcagaaagccagtgttgatggctggcacttcaggtggcaagacagctccttcttca

SEQ ID NO: 719997 - DNA, 50 bp, Homo sapiens
tggaaggggagaggaaagaacaggggaaggctagcctaatcagggatatg

SEQ ID NO: 719998 - DNA, 83 bp, Homo sapiens
gtcatgagcgacagcggcgagcagaactacggcgagcggcgtctgcttctgcgctttgcctgggagaggccctggtggcctcg

SEQ ID NO: 719999 - DNA, 50 bp, Homo sapiens
cccggtgctgacggacccccgaacgcctgtgccgccactgtcccaaggac

SEQ ID NO: 720000 - DNA, 100 bp, Homo sapiens
tttaaaacataaaagtcaagtaatcaatgaaatgcagaaaaaagatcacaagcaactctggatgggattgcaaaatgctacagcagcacctgcggagtca

SEQ ID NO: 720001 - DNA, 90 bp, Homo sapiens
ggaatggtagcgattgttcaattaggaagtgtggaaggctgatgaccagatggagagagaccacagaaacccagacgagcaggcgaggca

SEQ ID NO: 720002 - DNA, 100 bp, Homo sapiens
gagaaatccccactcctccaagaaccaacccccaaattggctgggacagagaatggatcttggagaatgtctgaaagtccatgacctggctttaagagcg

SEQ ID NO: 720003 - DNA, 75 bp, Homo sapiens
cttcatacgactgaccctggagctgaaggccaggttttgcagtggtctgaggaagccagttgagggaagttctcc

SEQ ID NO: 720004 - DNA, 100 bp, Homo sapiens
cacggcgtacgccctcatggggaaaatctccccggtgactttcaggtcacgaaagatgcccagggccagcctggcctcgaaagagcccagcaggagctgg

SEQ ID NO: 720005 - DNA, 100 bp, Homo sapiens
acagattattagcaatattatatagtatcgtggacagcagagttgctccaacagcaaatattttttcccagctgcaggacaagttcgagcatcttaaaat

SEQ ID NO: 720006 - DNA, 100 bp, Homo sapiens
aaaattactctgaaaagagaacaagagagtgagaaaccaagccaagaaagtttgttgaccttggtcactacgaaggagttggaactctcctttctatagg

SEQ ID NO: 720007 - DNA, 50 bp, Homo sapiens
acctgaccaagtccagccccagcatggcactgcggcttgatgagacccag

SEQ ID NO: 720008 - DNA, 90 bp, Homo sapiens
gtcgcagacctcgaaatgatagacgatgcctgaggaaacccagacccaagaccaaccgatggaggaggaggaggttgagacgttcgcctt

SEQ ID NO: 720009 - DNA, 82 bp, Homo sapiens
gacatggtcatgagctttgtgaacctgggacacagaatttccaggtgttgtggtgcgaccaattggtgaatttcgtagttcc

SEQ ID NO: 720010 - DNA, 100 bp, Homo sapiens
ggagagcggcctcctggcatctgccggctgctccgcaccccggggtcccaggaagggcggcccagggctgaaatctctttaatgatggagggaagcaggc

SEQ ID NO: 720011 - DNA, 101 bp, Homo sapiens
aagcagagaatggagaagaaggttgattccaggatacttttgtggaactctatgggaacaatgcagcagccgagagccgaaagggccaggaacgcttcaac

SEQ ID NO: 720012 - DNA, 50 bp, Homo sapiens
tgtgcttgccaggcctggctccagactgaatgtgggcccagttggcgtca

SEQ ID NO: 720013 - DNA, 100 bp, Homo sapiens
ccaaggtgaagcgcgagcgcgacgagtataagcggaggtattttgaaggtggcgtctcatctgtctacctctgggatctggatcatggctttgctggagt

SEQ ID NO: 720014 - DNA, 96 bp, Homo sapiens
ccaggagagggagatacctccactgctggggctggagaaagcggaccttctggaactcatgccactctcagaggtgcccagtcccctggaaggcag

SEQ ID NO: 720015 - DNA, 75 bp, Homo sapiens
aatgaaatctcgaaggggacctcatgtccctgtgggacacaatgcccccaagccctcccgcctcctgcccacaat

SEQ ID NO: 720016 - DNA, 85 bp, Homo sapiens
cagggattgccaaaggagtgggcacccagaagattattggaagggtacatctagggaggaggtacaggagaactgtgtgcggtgg

SEQ ID NO: 720017 - DNA, 90 bp, Homo sapiens
ggctccgcaccagccgcgcttctgtccgcctgcagggtctcttgcaacgtgtgagctgcctcttgccaagagtgagtggcaaaagaaact

SEQ ID NO: 720018 - DNA, 100 bp, Homo sapiens
ctcgctgcagcatatgccagaagactggagaggtcccaggtcaagttcatggacctgagatgctcgcaagggggatggtgcctctggatccagttcagga

SEQ ID NO: 720019 - DNA, 100 bp, Homo sapiens
gccgtcatggcgccccgaaccctcctcctgctactctcgggggccctggccctgacccagacctgggcggctgctcctgctaaggccaagccggctgaag

SEQ ID NO: 720020 - DNA, 133 bp, Homo sapiens
aagcacccacaactggaagctgatttgtcagcagttagagagatatatgggccacatgcagtttctctcagagtgctgcagcagctcccagtccagtgctaggaaacattcccccaggagatggcatgccagt

SEQ ID NO: 720021 - DNA, 100 bp, Homo sapiens
tgatcattctgggcgggggcgtggtcaagcaccacattgccaatgccaacctcatgaaccccaaggagtggaccaagaaggtcatcaggaacatcgcctg

SEQ ID NO: 720022 - DNA, 75 bp, Homo sapiens
gacctggcagcaccccgggccagctctggggaaggtacttttacagcgggttgatgaactagagaagctattcaa

SEQ ID NO: 720023 - DNA, 83 bp, Homo sapiens
ggaggttttccgagacaacaacggcaccgcggtcagaagttgagtagcaggggcctaggagggctcgaagccttcacagcgat

SEQ ID NO: 720024 - DNA, 75 bp, Homo sapiens
tgattgaaaacagtagttggtctatgacttttgaggagccgttgccgagagatggatgagcagattagactgatg

SEQ ID NO: 720025 - DNA, 98 bp, Homo sapiens
gggcaggaggaggatgacgacgatgaggaagacgatgctgacgaggaggctcccaagaaataccaagctgtgctgaggagaaaggccctgttgatttt

SEQ ID NO: 720026 - DNA, 75 bp, Homo sapiens
gcgcagggcttccgccgactggaggactcaacgggacccaggtggagtctgtacagctcaaagtcaacatagccc

SEQ ID NO: 720027 - DNA, 98 bp, Homo sapiens
agaatttataatggaattggagtcagcagaactgaaatagattgtcagcagcctgctgcctccgtaccgccacagtgctcacaactagccgggaggca

SEQ ID NO: 720028 - DNA, 95 bp, Homo sapiens
cttaggaccacccaccatgcctatccagaactcagcctcctcccaagctccctgtgggtcctagccacaagctctccaacaattactattgcact

SEQ ID NO: 720029 - DNA, 83 bp, Homo sapiens
caggttatagatggagagacctataaagaactcccccactggaaaggattctgaaagaaatgaagtcagccctcagaaatgaa

SEQ ID NO: 720030 - DNA, 96 bp, Homo sapiens
gtccattgttctcttggagcagctggtcatcatggattatagctgagaaggtaaaggacgttctgtttatccgaccccggaagtatattcactgct

SEQ ID NO: 720031 - DNA, 74 bp, Homo sapiens
tgccaggtgtttgttaccttggccaacagagcacttatggcaaggcatctcgagggggtggcaatcaccaaaac

SEQ ID NO: 720032 - DNA, 100 bp, Homo sapiens
atcggagagcagtgcagcgtgtgtggggtcgagcttcctgataacgaggctgtggagcagcacaggtagggtgcagcctgaggcttgttcagcagaacag

SEQ ID NO: 720033 - DNA, 131 bp, Homo sapiens
aacatgcaggtcctctataccgcactgcagcacagctcagagctggcgcccaagattgtagatgtctttatggaatacaatctaattcagcagtgtactgcattcttgcttgatgctctgaagaataatcg

SEQ ID NO: 720034 - DNA, 100 bp, Homo sapiens
aaggccgaagccgagcagaggatctaaatacaagagtggcctattgtggccacagatgtctttaattccaaaaacctggccgttcaggcacaaaagaaga

SEQ ID NO: 720035 - DNA, 88 bp, Homo sapiens
gaggcccggccacctctgagaagggagacgacgctgctgggtccgctgagcggggcgacccgaggattggccatttgatgatggagct

SEQ ID NO: 720036 - DNA, 75 bp, Homo sapiens
gcatatcatggggagatagacgctgctgcctgcatcctagaatacgtttccacacgggtcttgtggatgcccacc

SEQ ID NO: 720037 - DNA, 99 bp, Homo sapiens
ttggacagacttaaaccagttataggggtaaacactgatccagaacgtgaacttggagaaattcccacactaaaaacactacaagtttttggaatcgtg

SEQ ID NO: 720038 - DNA, 83 bp, Homo sapiens
gctcagcatccatgaagccctcacaatctgcttcagcgcaacaagattgacctggctgaaaggagagaggtttcccagcagcg

SEQ ID NO: 720039 - DNA, 100 bp, Homo sapiens
atggaacccgagaccacagccaccactattctagcatccgtgaaggagcagctgcagaaccttggcctgaaaatgctacattatatcagcaattgaaagg

SEQ ID NO: 720040 - DNA, 100 bp, Homo sapiens
agcctggtggtggcagtggctaccccactggccactgtggccatcctgccactgtttctcctctacgctgggtttcagaatgaacggagaccagaattca

SEQ ID NO: 720041 - DNA, 90 bp, Homo sapiens
ttccgaggcgttaccatcaagagccctactgccaataaagggaaaataagagatgctcatcgacgaattatgcttttaaatcatcctgac

SEQ ID NO: 720042 - DNA, 75 bp, Homo sapiens
gcacagcttcctccttgccgctccgggaagtgggcagccagcccagacctgcaggctgggacaatgaaaagaaaa

SEQ ID NO: 720043 - DNA, 110 bp, Homo sapiens
aggagtaattccccgtttccttcaagagttttcatggattctaatggaatcaggcagttttgtgtccatgtgaacaactatattgatgatgttaagaagttcaaaccggg

SEQ ID NO: 720044 - DNA, 98 bp, Homo sapiens
aacaatcagtgccgagcaattgtgatgagatattctgctgagtggaaggtgtttggagcatctactaaacagattgatgtttaccgaagtgttgtttg

SEQ ID NO: 720045 - DNA, 100 bp, Homo sapiens
gccctgggagctgcccccagcggggcaagattcttgccaagagaattaatgtgcgtattgagcacattaagcactctaagagccgagatagcttcctgaa

SEQ ID NO: 720046 - DNA, 51 bp, Homo sapiens
cagctacaggccagcttatgaccagctttgcaatcagcttgacctgtgggg

SEQ ID NO: 720047 - DNA, 98 bp, Homo sapiens
tactacagtgccagtggttgatgtacgcatccctcaactagcacctccagctagtatctggagtccatctttcaccatcttctcctgagattgtactg

SEQ ID NO: 720048 - DNA, 100 bp, Homo sapiens
caactcagatcttaagtagtgatatttctcttttgtctgcccctattgtaagtgcagatggaacacaacagggaaatcctcattgacgattcaatttgtt

SEQ ID NO: 720049 - DNA, 100 bp, Homo sapiens
cacgttttctgttatatttgcctatgtagctgatgtcactcaggagcacgagcgaagtacagcttatggatggcatggagcagatccaactaaaaagaac

SEQ ID NO: 720050 - DNA, 100 bp, Homo sapiens
tgctcatggggatgaagaaccagctcgatgggggactcaaggagatttcaccaccacccatcctcggcctgtggtcaaagtgaaactcttcacagaaagc

SEQ ID NO: 720051 - DNA, 100 bp, Homo sapiens
caagagcaagatcaccgtgacatccgaggtgcctttctccaaaagccctgggcccctggccttgaaaattgctgggcgaattgcagaattcttccctgat

SEQ ID NO: 720052 - DNA, 85 bp, Homo sapiens
agcggacagtggacttaaaatacttgcttgtgatgacttggatgaagctgctagaatgctggtgaaactgcgtgctgtaagctgg

SEQ ID NO: 720053 - DNA, 100 bp, Homo sapiens
cctgggggaaaagggaggagcgctccggtggtctggcgcgctgggctcgctaggaccaggcagttaaatggcacttgtaccagctcggtggacatggagc

SEQ ID NO: 720054 - DNA, 90 bp, Homo sapiens
cagaggctaagaaggtggagaccggagaagctgtgaggtttgggccccatggtatccctgtgacagtatttcccaaaagggaatataagg

SEQ ID NO: 720055 - DNA, 98 bp, Homo sapiens
tccttgaccagcatcttggctgaccttgagtgcagctccccctataagcctcggcctccacagggacagcaccagactattctctgcgtgttgcactg

SEQ ID NO: 720056 - DNA, 50 bp, Homo sapiens
ccaatgttggtgctggcaaaaaggtggtttgtgatgaaaatggttccaag

SEQ ID NO: 720057 - DNA, 98 bp, Homo sapiens
cgaggatgccatggtgttctggatcaacaagcttgcaaaccatactgggtacatcaaagttgactggcaacgagtggagaaggacatgaagaaagcca

SEQ ID NO: 720058 - DNA, 97 bp, Homo sapiens
ggaaatagcgcggctgtgcaagtacctgccagagaacgacctgaaggtgcttcttaacctaccagtcctgccagagtttgatatatagaaggtgttt

SEQ ID NO: 720059 - DNA, 50 bp, Homo sapiens
ggacaaggtgtcaacaatgtgccggattaccttgactgcatcagggacca

SEQ ID NO: 720060 - DNA, 60 bp, Homo sapiens
tactaccaaggacagcttttttcctgcaaggtttttggattcaaagcataaaaaccatta

SEQ ID NO: 720061 - DNA, 51 bp, Homo sapiens
aaatcctataacaatgcagtgtataaaggctcccggggagctttctgtgaa

SEQ ID NO: 720062 - DNA, 100 bp, Homo sapiens
gatgacacccaggaggcatttgaagttccagctcacagaacatttcctgcctgttgctcacactctgttgtccacagcatacccgcaccctagatggctg

SEQ ID NO: 720063 - DNA, 83 bp, Homo sapiens
gagatttcttctggaaaactggaaacaagcttggacgaaccttgacaggatgggtgcagcgaactttccagagcacccaggca

SEQ ID NO: 720064 - DNA, 100 bp, Homo sapiens
cacatcacattggagtcacaatcaaagaactggatctttatctggcttactttgtccacactccggcatttaaatcaaacggtattgagatggattgggt

SEQ ID NO: 720065 - DNA, 100 bp, Homo sapiens
cttatatcaattcctggacacagaggctgatcttcagacaagttctcagcgtttaaatctttcagcctccaatgctgcagtggctgaacttaaaccggat

SEQ ID NO: 720066 - DNA, 83 bp, Homo sapiens
ctgccgtccttctccactttcgccagcccgtgccgcgagcgcggcctgcaggaggctccagcccccttttggacatcgttggc

SEQ ID NO: 720067 - DNA, 96 bp, Homo sapiens
ggactcttcttcgccttcgagggcccagatcattgatctgatgatgctggtcatcgatgtgaccaaggggatgcagacccagtcagcggaatgcct

SEQ ID NO: 720068 - DNA, 49 bp, Homo sapiens
ctcctttctctgaaggttattgacagtatgtccgtggttcagaccctgt

SEQ ID NO: 720069 - DNA, 83 bp, Homo sapiens
ccagcagatggcggatgccctgcagtacctgcagaaggtctctggagacatcttcagcagatggcatccgccacagactcgcg

SEQ ID NO: 720070 - DNA, 50 bp, Homo sapiens
tccagagcaacctctttaaaaagcaaggtactccaaagattcaggtttac

SEQ ID NO: 720071 - DNA, 83 bp, Homo sapiens
tcctctctctgggctgcttttttagcgtggcagagacgcttcacagcttaaagcttttcaagccaggccaagaagctgtgaag

SEQ ID NO: 720072 - DNA, 150 bp, Homo sapiens
ggtggttacaaccgcagcagtggtggctatgaacccagaggtcgtggaggtggccgtggaggcagaggtggcatggggttcagtgtatctttgcctgcctacatcaatctgcaagggagttgcagaaagcctcatgttcatcgagccgtg

SEQ ID NO: 720073 - DNA, 75 bp, Homo sapiens
acacctctgagataaaagggcccctttcgactagcctctgctgaaaggaatgatgacaggcacaatagaaacaac

SEQ ID NO: 720074 - DNA, 75 bp, Homo sapiens
gagaatctcctgcaggatctcagtgatggtctgctgagaacagacccagtccctgaggaaggagaagatgttgct

SEQ ID NO: 720075 - DNA, 75 bp, Homo sapiens
tctttggtctacaggtggggaaactgaggctcaaggaagggcttttacctttacagtcatcatccttttatggta

SEQ ID NO: 720076 - DNA, 82 bp, Homo sapiens
cctcagacgcagcgtctagtccctggccatagctccgccgctgcccgacctgcctagagctggaacgttacctccagagcga

SEQ ID NO: 720077 - DNA, 100 bp, Homo sapiens
gcaacatctgcaaggtccgcttcaccaggagctgtggcgcggggccttccaggagtctgagctatgagtggcccctgtggagagaagcctgtcctggaag

SEQ ID NO: 720078 - DNA, 129 bp, Homo sapiens
gaccttctgagtaccagactattccacttaataaaatagaagattttggtgtacactgcaaacagttatggcacacagcttgtgccagcgatgaaggagaagtaattgtttttggtggatgtgccaaca

SEQ ID NO: 720079 - DNA, 74 bp, Homo sapiens
gccgcgctccaaccgcctcctcctcctcagtaacgcggatattttggtaaaagacctcagtgggattgtagagg

SEQ ID NO: 720080 - DNA, 135 bp, Homo sapiens
cccgcatccccccggctgctggcggcggcctcggcggcctcgggcgccgcgaggtcgtgttcccgaacaggttgacatcatggacatatgtgagtccatcctggagaggaagcggcatgacagcgaaaggtctac

SEQ ID NO: 720081 - DNA, 50 bp, Homo sapiens
ggagtcagttggatgtgacacataaggagatgatgaataaggtatttgga

SEQ ID NO: 720082 - DNA, 112 bp, Homo sapiens
aagagattttggattctcaaaacttaaattcaagaaggagccctgtcccagaaatatggctacacacacctttctgcaggagagctgcttcgtgatgaaaggaagaacccag

SEQ ID NO: 720083 - DNA, 99 bp, Homo sapiens
gaagcagctgagtgatgggcagcccccaccacccgcccaggccagccccagcagcaacagcagcacaggtcatgactgtccaaagtatgataatcacat

SEQ ID NO: 720084 - DNA, 74 bp, Homo sapiens
cggagaaccagaagacgatgaggctcctgcaaaaggcaatccgatttacgacttttttctgggacgagagctca

SEQ ID NO: 720085 - DNA, 95 bp, Homo sapiens
cgtctcttacgtctgcggaagtgcagctgcctcagttcttagcgcaggggtcaccagtcgttggcacaccaagaagctgccccgcaagacccacc

SEQ ID NO: 720086 - DNA, 97 bp, Homo sapiens
cgatgctcttcttggaaaaccagatccagaaactggaggagtcccgctcgaagctagatgatgttgaatttgaagtatcatcggaccgacggactgg

SEQ ID NO: 720087 - DNA, 100 bp, Homo sapiens
gttctgggctatttgattattgaagaagattttaatattgcactaggagtttttgctttagctggactaacagatttgagccgagactgtctgaagctgg

SEQ ID NO: 720088 - DNA, 98 bp, Homo sapiens
ttgctgatgcctcaaaaagtgtgcactgtcttgtcgacggtctcactgatgcctcttctgcattcaaagttcctcgacccgggccagatacactccag

SEQ ID NO: 720089 - DNA, 90 bp, Homo sapiens
cgaggagaagcagcagcaggatcttctctgggtgctgctctgggccaccgtgttgggcttgctctgccagcgactggctgcacgtctggg

SEQ ID NO: 720090 - DNA, 100 bp, Homo sapiens
gaaggagagggggatgaagaaatctgccaggagggtgcctcccgccagtatctgatgaaggtaagaggtgtctgatgatttgtgagcctcaagtgactac

SEQ ID NO: 720091 - DNA, 73 bp, Homo sapiens
tgttgacgtgtcaagcactaactattgcttattctctggagaatactgtacaaaaaaactttatggtatcaag

SEQ ID NO: 720092 - DNA, 50 bp, Homo sapiens
tgacgaagcttggaagttgcagaagatctgaagaagacacttgaatcatg

SEQ ID NO: 720093 - DNA, 80 bp, Homo sapiens
tggaccagctagagaccctacagaccaggcactccgtcagtgagatggcctccaacaagtaatagttatgcacgagtgcg

SEQ ID NO: 720094 - DNA, 75 bp, Homo sapiens
tcgaggtggctgacgaggacaagcagtcccggctgcgctaccaggttttcgtaacaccccagggcctgtaaggtt

SEQ ID NO: 720095 - DNA, 75 bp, Homo sapiens
agctttctagcggcggactacaactcccagcatgctgagaggggtgaatgtgatgctgaggaagattgctgtggc

SEQ ID NO: 720096 - DNA, 100 bp, Homo sapiens
gtccgcatcgagaagatgagctcagaggtggtggattcgaatccctacagatctcttccctgaagaacaggctgaaaaaggtctccacaaccactgggga

SEQ ID NO: 720097 - DNA, 89 bp, Homo sapiens
cacggtcttgctgaaagccagggaaggagcaccatactggaccaacacagaaaagatggaaaagcggctccatgctgtgcctgcggcca

SEQ ID NO: 720098 - DNA, 100 bp, Homo sapiens
gtttccccggggagcggccaaccacgacctgacggacaccacccgggcgggtgctggagaatctggtaaaagcaccattgtgaagcagatgaggatcctg

SEQ ID NO: 720099 - DNA, 75 bp, Homo sapiens
cggtgaagaaggaagggggtgctctgaggcttattcaaacctccttagagctaacatggatgggctgaagaagag

SEQ ID NO: 720100 - DNA, 100 bp, Homo sapiens
cctgctgacttacgcttgtttgagggtatcactgggatacatcagattggatgccaagcgttcctctgccggacatacaagagttccccaactatgaggt

SEQ ID NO: 720101 - DNA, 100 bp, Homo sapiens
caaagtttgcagaaaagaatatgagtgagaagcgccaccttcaagtgaacgtcaccaacccagtacagtgcagcctgcacgggaagaagtgcaccgtctc

SEQ ID NO: 720102 - DNA, 98 bp, Homo sapiens
tcggcgctcacctaagccgcagggagatacacccaactgggaggaacttagagaagtactcaaggaacatgaatggatgtacacagaagctttagaat

SEQ ID NO: 720103 - DNA, 100 bp, Homo sapiens
ccagtatggcccggcacgtgttcctaacggggcccccagatgtggtgaagctgtagagaaaaacaagcgtctcatcacggcagaccagagggaatatcag

SEQ ID NO: 720104 - DNA, 100 bp, Homo sapiens
gcaggccaccgggcctccagctctgcttcggggtggcaccaagcccaccgtgaagggctggctgaccaaggcctgctgcgggtcatctcaggggttcttc

SEQ ID NO: 720105 - DNA, 83 bp, Homo sapiens
gtcacttgtacagcgccggtcaacatcgcggtcatcaagtacttgaaagaattcttagccaaagccaaagaagattttcttaa

SEQ ID NO: 720106 - DNA, 96 bp, Homo sapiens
aagcccaggaactgtctttatctgctgtcaaggatcttgtgtgctccatagtttatcaaaaggtttgtcctggttgtggtcaagactggatgatgt

SEQ ID NO: 720107 - DNA, 75 bp, Homo sapiens
cgaagaatcaaggctgggccggacccggtggcctggcaacagggcctccggtgtggctgtctctgatggtgtcat

SEQ ID NO: 720108 - DNA, 50 bp, Homo sapiens
tctactgaagtggaaaggcttttctgagaaccagggaaaatgtgtagagg

SEQ ID NO: 720109 - DNA, 74 bp, Homo sapiens
gctgaagccattgctccacaggttggcaatggcatcacgttgggtggtttccatttagaccgaggccggttcag

SEQ ID NO: 720110 - DNA, 83 bp, Homo sapiens
attttgataatgtcagtgtggtatctctacagattgccatttacatttgtaactaaggaagtagctgaagccacatgtaattg

SEQ ID NO: 720111 - DNA, 74 bp, Homo sapiens
cccatgcatcggctaatagcccggagacaagcactatctgttatagtccctgggtcaagacaacaatttttata

SEQ ID NO: 720112 - DNA, 83 bp, Homo sapiens
cttgcctgtgtcccacttgttcgcggcctataggttattggagtgatgagtaaagaatacataccaaagggcacacgttttgg

SEQ ID NO: 720113 - DNA, 100 bp, Homo sapiens
cagctcatgcggcattactgcctttgctgggcaaccaaaggaggaaatgagcttggtgcttcattggagatgggaagacccgcctcatcctgaaggctcg

SEQ ID NO: 720114 - DNA, 82 bp, Homo sapiens
ctcgcgctgcactgtctctccgacgcaagactgtcccggcccgggcttcaacggaccacaccaaaatgccatctcaaatgga

SEQ ID NO: 720115 - DNA, 75 bp, Homo sapiens
ccttccggagcttctcagaagacagagggttttcttttgagacggggtctccctcttatccaggctggagtgcag

SEQ ID NO: 720116 - DNA, 83 bp, Homo sapiens
cgcccatcagcgcggcgctggccgagagccgcggctccgtgtttctggaaagtgacagcagtctttcagaatccagcaggctg

SEQ ID NO: 720117 - DNA, 100 bp, Homo sapiens
cggtctttcacgatgcattaaaggtattgatgaagatgaccctactgctgatgataccagtgctgctgtaactgaagaaatgccaccccttgaaggagat

SEQ ID NO: 720118 - DNA, 82 bp, Homo sapiens
ctccttcggcagtccacccaccgccgccgcctcccaggaatgtaagaagcacttggcaggcttgggggctttggggctgggc

SEQ ID NO: 720119 - DNA, 96 bp, Homo sapiens
ggaacccctgctctggcctacctggcggctcttcgtcagattgggcagaggacgataagcactgcttcccgcaggcattttaaaaataaagttccg

SEQ ID NO: 720120 - DNA, 75 bp, Homo sapiens
cagaaggctagaagaatcagacgtgctccaggaggccagaaggaaataccgtgtccggagcggtgactggaaggg

SEQ ID NO: 720121 - DNA, 75 bp, Homo sapiens
taaatttccatgtcttcttggaatataatcaagatcgaaggggcagaactcaggcacctcgacactcaggtccag

SEQ ID NO: 720122 - DNA, 108 bp, Homo sapiens
ggatttgacggtggctggagcggcacgggcgacgcaaggcagccacagtacacgaacctggggctcctgaacagcatggaccagcagattcagaacggctcctcgtcc

SEQ ID NO: 720123 - DNA, 82 bp, Homo sapiens
cagcaagttgaatacagctccatcagaggcttcctcagcaagcacagctcagatgggaaagggctccttcaagtatgcctgg

SEQ ID NO: 720124 - DNA, 101 bp, Homo sapiens
ccgagctgctagccgagagattttactaccaagccctgtcagtagctcctcagattggccagaacacaaagcgtgaatccggaagaaaagttcaatctgga

SEQ ID NO: 720125 - DNA, 85 bp, Homo sapiens
cacaggagctgtagagaggaccccggtacatctgaaagccgggaaatggaaaatgaggacgaggcgggaactagagcccaagggc

SEQ ID NO: 720126 - DNA, 99 bp, Homo sapiens
cttccctgagccactctccaggctgctccagtactcaagggaacggttctagagccagtacaaaagcctcatgaaggtcctggagaaatggggaaacca

SEQ ID NO: 720127 - DNA, 112 bp, Homo sapiens
cagagatcatcacactacgatgaactgcttgctgcagaggccaggtcaaaatgcagatcttcgtgaaaacccttaccggcaagaccatcacccttgaggtggagcccagtga

SEQ ID NO: 720128 - DNA, 83 bp, Homo sapiens
tttcataaagaaccacatccgtttccccaaattcaacttctccaagccctgggcagtgacggggttcgggtgaccatggagag

SEQ ID NO: 720129 - DNA, 100 bp, Homo sapiens
ctacaaggccaatgtggccaaggctggcttggtggatgactttgagaagaaggtcatgtacgtagaagggactgcagttgtgatgggttttgaagatccc

SEQ ID NO: 720130 - DNA, 75 bp, Homo sapiens
tggccttcctgctctccttctacctaattttcaccaatgaggtgacaatctccaatagacttgtgtcttcacctt

SEQ ID NO: 720131 - DNA, 100 bp, Homo sapiens
tggagaactgtgctgtacggggaaagctgacgtcctccagcggttgtggggcacccaggatgtatcccaagacatccaggagatgaaagatgagagtgca

SEQ ID NO: 720132 - DNA, 75 bp, Homo sapiens
gaagcatgctctggaaatgttcccagaacattgcacgatgcctcctggactcaggacacccctgcacggcggccg

SEQ ID NO: 720133 - DNA, 75 bp, Homo sapiens
gtagctggcggtcccgggtgctgctggtcaaaatgcagatcttcgtgaaaacccttaccggcaagaccatcaccc

SEQ ID NO: 720134 - DNA, 100 bp, Homo sapiens
tagtcttgggggtagagtgactgcttgcgaaccagttcagcagtgcctcaggcgatgtaccaattttgacaactgaagacgacatggtttctcagccagc

SEQ ID NO: 720135 - DNA, 100 bp, Homo sapiens
tagatggcgtggtacagacctttaaagttactgtgctgggtaggccaggtttcagcatcgcagacaagaagcgcaggacaggctgcattggggccaaaca

SEQ ID NO: 720136 - DNA, 75 bp, Homo sapiens
gagcgcgtccaggcctgacagctctgcggctcgggccctgagagacacctatggctgccgatgaaggctcagcag

SEQ ID NO: 720137 - DNA, 100 bp, Homo sapiens
ttcttcagcagaatttgaccaacatcaccatgtcgcgggaggcagacctggactttgcaagagctgaactagagaaacatggttataagatggagacttc

SEQ ID NO: 720138 - DNA, 76 bp, Homo sapiens
cacctgcagaaggtccttaatcagtaggtcccattagtccaccacagccaccttcagtcagtgcatggaataagcc

SEQ ID NO: 720139 - DNA, 100 bp, Homo sapiens
ggctgagcccccatcattgggagaaatccccactcctccaagaaccaacccccaaattggctgggacaggtaacacaagtggcaagacagccgggaaccc

SEQ ID NO: 720140 - DNA, 100 bp, Homo sapiens
cgtccctgggcgcgtcagaacaggcgctgcggctgatcatctccatcttcctggacgccctcctgcaaaacggcccaactacgttaagcttggcactctg

SEQ ID NO: 720141 - DNA, 96 bp, Homo sapiens
tcacagggaaagtggaaaaggttctttcaaagcagcacaggattgtcttacctttctccaaccctctaacacctgaccaacaccccaaggtggtag

SEQ ID NO: 720142 - DNA, 115 bp, Homo sapiens
ccatcacccaccaacaacaccacaataatccacagccaaggcattaccacaggagtcttggttcgagaacacagcaacctctcaactctagagaaattctactttgcttttcctg

SEQ ID NO: 720143 - DNA, 50 bp, Homo sapiens
gccttagataacagccatcctattgaattccgccatggagtcatagttgc

SEQ ID NO: 720144 - DNA, 88 bp, Homo sapiens
ggcggcgcccccgcagcccgtcacccacctcatctttgacatggacggacttcttctggatttccgtgagggtggaagaaaatcatac

SEQ ID NO: 720145 - DNA, 83 bp, Homo sapiens
tgtctacggcagcctggggatatactgtttttggaaggaagaaagatggaaagcggtgcagttctgctggaatccaaatcctc

SEQ ID NO: 720146 - DNA, 75 bp, Homo sapiens
cgggtgtcggctccggcgggacgggcggttctgcgtacccctctccgtcctggggaccaaggtggacgcggagcg

SEQ ID NO: 720147 - DNA, 82 bp, Homo sapiens
tcaccaactaccttttagagtgggatgagggatttatcaaagatgttcatgaagactcccttacagttgtttttgaaaataa

SEQ ID NO: 720148 - DNA, 75 bp, Homo sapiens
ctcagccacccgctgggaatcgtgcagggattcttcggacaacgtctgacatgagccgagtgttctgctcacact

SEQ ID NO: 720149 - DNA, 75 bp, Homo sapiens
gtccggcccccgagcacgccggccccgcgcgcgcctcgaggccgagtcaagaagtcacctgcaccggtgcccgtg

SEQ ID NO: 720150 - DNA, 107 bp, Homo sapiens
cgctgacttctccactggttcctgggcaccgaaagagttcacccagggcatgatcttacctacaatgaatggagagtcagtagacccagtggggcagccagcactga

SEQ ID NO: 720151 - DNA, 100 bp, Homo sapiens
aggactcggggctctcacgctttctgctcaagtcctgtcctcttctgaccaaagagactaatggctgaaggataaatcaacatggcaactatgattccac

SEQ ID NO: 720152 - DNA, 100 bp, Homo sapiens
ctgatgagtctgtttgggatcccgctgtggtacttctcgcagtccccgcgcgtggtcatccaggtgagtggcatcaaggcgctgtacgagtcggagctgg

SEQ ID NO: 720153 - DNA, 102 bp, Homo sapiens
aagcacctttatgaagccagaaggaaaagccaggatgcgcgtgatgagtagtctgtgacactgcatacagatgtaggtgatattaaaattgaagtcttctgt

SEQ ID NO: 720154 - DNA, 82 bp, Homo sapiens
gagccaccagccaatgatcttttcaatgctgcgaaagctgccaaaagtgacatgcagggaagatggaagagttgagtcaggc

SEQ ID NO: 720155 - DNA, 98 bp, Homo sapiens
ggctggcgcttcctgcgcatcgtctgcaagaccgcgaggcgagacctcttagtgtgaacatggctacgcctcttcattcccgtccatgccgagccccc

SEQ ID NO: 720156 - DNA, 101 bp, Homo sapiens
gcggaggtggtggtggaggtggagtggctgcttcaacccccaactccactgctggtgcagccatgaactccttgacctctctcgggactctgcaaggactg

SEQ ID NO: 720157 - DNA, 82 bp, Homo sapiens
gctgacaatgatgaatctcacacatcatgcagcgaattcagaggcttcaggctgactgggtcttggaaatagacaccttctt

SEQ ID NO: 720158 - DNA, 80 bp, Homo sapiens
tgagttaacacctctgccgctgctaaaaggtagggtgtggagccataggctgtgaaatgttgaaaaattttgctttactt

SEQ ID NO: 720159 - DNA, 90 bp, Homo sapiens
taagatgcgtgatattttaaacatggaaaagacactgaaaggcctcaacaggcatccgcatgctggacggcgatgtcacagatgtggtcg

SEQ ID NO: 720160 - DNA, 115 bp, Homo sapiens
tcatatgacattaacagacaagacacttttcagaaagacaggtaaatctcacctggctatcgtgcagcgggtaaacaatgagggagaaggggatccattttatgaagttctggga

SEQ ID NO: 720161 - DNA, 101 bp, Homo sapiens
gacctctggttctacttcacactgcagaactgggttctggactttgggcgtcccattgccatgagtaccaagttcgatccatagcaagtcatgttcgtcct

SEQ ID NO: 720162 - DNA, 100 bp, Homo sapiens
aaacgagggttcccgggattggaccgacgcagccatgggtccttccctctgaagttgaagtattggagtccatctatctagatgaactacaggtgattaa

SEQ ID NO: 720163 - DNA, 76 bp, Homo sapiens
tgctgataatgatgacaacagtggctgtagtggggaaaataaagttggtttcatcgactacattgtccatccattg

SEQ ID NO: 720164 - DNA, 100 bp, Homo sapiens
cacaaacttgcctacgtcagtaacagccaccaagggacagcacaacacagaatgaggatttgggtgaagttgcaaccaccgagttccacataccagttta

SEQ ID NO: 720165 - DNA, 88 bp, Homo sapiens
gagaggccgtgcgggacgcgggcgccaggaccggccgaacgcagagctccagaacctgggtatcaacccagcaaacattggcttcagt

SEQ ID NO: 720166 - DNA, 100 bp, Homo sapiens
cctccacccgccggtggacgacccccagagcggggagctgccctcagagaggtggaaccccacgcagaacgtcagttacctggtgatgccgttcatgggc

SEQ ID NO: 720167 - DNA, 95 bp, Homo sapiens
ccgaagtcagttccttgtggagccggagctgggcgcggattcgccgaggcaccgaggcactcagaggagatacctgaaaaaagcggcagtctgca

SEQ ID NO: 720168 - DNA, 100 bp, Homo sapiens
gtgcccgtggaccacaggccctcgttgcccagatgaactgtggctgcaccatctgtcttcatcttcccgccatctgatgagcagttgaaatctggaactg

SEQ ID NO: 720169 - DNA, 89 bp, Homo sapiens
ggacttcactgctctgctgtctcctgcaagaactggctcaagaaatttgcctcgaaaaccaacccaggacccagggatctcccccagcc

SEQ ID NO: 720170 - DNA, 119 bp, Homo sapiens
gtgtttcacaagcaatccagaggtacgctacgaagtctgtgacattcctcagtgttcagaaggtcatcgtattgaggaagttcctgaacttcctttggtagttgaagataaagttgaag

SEQ ID NO: 720171 - DNA, 83 bp, Homo sapiens
ggcagggtggacctcaggagcctcctaaaaccacagggggatatgagactttctactcggaatatcctgagtgttgcgtggat

SEQ ID NO: 720172 - DNA, 100 bp, Homo sapiens
ttcaatcttccagcacaatgtagaaggttggaaaatcaattcctctttggtcctagagataagactatctgttatagtccctgggtcaagacaacaattt

SEQ ID NO: 720173 - DNA, 75 bp, Homo sapiens
cagatactttgaagtagaagaagctgatgttgaagaagtagttgtgactttgcagcttggaggtgacaaagagcc

SEQ ID NO: 720174 - DNA, 83 bp, Homo sapiens
cccccggcaagacctcaacgcccctgacctctatatccccagaactgtggctgcaccatctgtcttcatcttcccgccatctg

SEQ ID NO: 720175 - DNA, 100 bp, Homo sapiens
tgaatggcgggaagtgtgaagcggccaatggcacggaggcctgcgtggctttgttcgcgggggtcacagctctcatggctgcagctagcgtgaccccccc

SEQ ID NO: 720176 - DNA, 83 bp, Homo sapiens
ggaaagtggggtgagagactatagcaagcagatttgacctcctggtccgtacccagaattcctggacgcaagatgggatgaac

SEQ ID NO: 720177 - DNA, 96 bp, Homo sapiens
gacctgtcaaggccccaggaacattccacatggtgttggagcgggccggagagaagtagagtgggctgcgaggagaaggaaacaggcctttcggag

SEQ ID NO: 720178 - DNA, 101 bp, Homo sapiens
aaaaaagttactttccagacacctgaagcagctcctctcagaccatgagctcaccaagatctggctttgctgcccacgctggagtgtggtggtgtgatcac

SEQ ID NO: 720179 - DNA, 51 bp, Homo sapiens
ggattccaagtaactcttatttggtgtggtttgaccgaagaaccaattata

SEQ ID NO: 720180 - DNA, 100 bp, Homo sapiens
aggaaaggggccgtcggtcgccgccatgacagcgagcgaggcggagaaaccttccttccttccagttgtgtgtcagtagaattacagagtgtccacggaa

SEQ ID NO: 720181 - DNA, 82 bp, Homo sapiens
cgtcgcgggagcctttggggcaccacagagatgcggcatgatgccttcttctgtagagtgggcgctttgcagaatacgtgtt

SEQ ID NO: 720182 - DNA, 75 bp, Homo sapiens
ttttcttgctgcgaagaagattcctggaatctcatcaactgatggaattgtcagccacttgaagaagcaggcagg

SEQ ID NO: 720183 - DNA, 75 bp, Homo sapiens
gtggctatggtgggcaaactaagccgattttccggaaaaagattcttctttactgccaaccaggtaaagatttac

SEQ ID NO: 720184 - DNA, 83 bp, Homo sapiens
caagaccctggagggcgagttctcggtcaccatgtggtcctcaggttactataacaacagtaccaaggtggctgtgaaaaccc

SEQ ID NO: 720185 - DNA, 83 bp, Homo sapiens
gcaggcaggccctgagcacgctgctgtgtgagcagcaggatgaaacaggcgcctatttaatcgacagagaccccacctacttt

SEQ ID NO: 720186 - DNA, 50 bp, Homo sapiens
tttgatccctgtgtgctgaagagggaggagctgtgcagtgagaagcaaag

SEQ ID NO: 720187 - DNA, 90 bp, Homo sapiens
ttaccagtcagaggcggaaggactcctggaatgccacaaatgcaaatacttgtgcactgggagaggggaagaacacccacccgcaaagcc

SEQ ID NO: 720188 - DNA, 88 bp, Homo sapiens
ccgacccattgaaaacaaggacgatgcatttacagattctctacaggatgatgatgctgaagctatccttgctgcagacttcgaaatt

SEQ ID NO: 720189 - DNA, 100 bp, Homo sapiens
cagtccaatacagacctcagcttccccattatttcgaggaaggaagagcagtgaggagaatgaataccttccaagaccagagtggcagctccagtaatag

SEQ ID NO: 720190 - DNA, 96 bp, Homo sapiens
ggagcagggaaaagatccagaagcatgttagttcgacatcatcatcttttcttgaagaagttggtgaaccatctaaagaagagaaggctgtggcca

SEQ ID NO: 720191 - DNA, 96 bp, Homo sapiens
cgcgccgccagtggagcccccgcgcgcccggccggcccggagcaccgagctcgcggcacggtaggagatggggacccagagcctgctcttgggaac

SEQ ID NO: 720192 - DNA, 83 bp, Homo sapiens
caacgcgtttggcaacgctttcctcaacagtgatgctattgctgagattagagccatttgtattgaagaaattggagtatgga

SEQ ID NO: 720193 - DNA, 80 bp, Homo sapiens
tcgaagtgcgcaaacttgacactcaccctgaccgactgaaagagcatattccttttgtggaactattgaatacatggcac

SEQ ID NO: 720194 - DNA, 50 bp, Homo sapiens
cccacctgagaaccatgctcaccgaccctacacagcctcattctgctgcc

SEQ ID NO: 720195 - DNA, 100 bp, Homo sapiens
ctggcagctcgtgcaattgttgccattgaaaaccctgctgatgtcagtgttatatcctccaggaatactggccaggacaagatccagaagctttatgaac

SEQ ID NO: 720196 - DNA, 95 bp, Homo sapiens
cgagggagcctgtcacgcgctctggcgctctcctgacctcttaaggctctgtcagtcttagaatcatgtcaaccctgccatggacttcacgcaga

SEQ ID NO: 720197 - DNA, 74 bp, Homo sapiens
gcgacatgtcgacctgacgctctacacgcggcttctacgctccggcactctgagttcatcagcaaacgccctgg

SEQ ID NO: 720198 - DNA, 82 bp, Homo sapiens
tgggatggtcagcgacagctactgcagaatccagggcctgaaaacccagaatgaacttgtgtccatcccagagatcactgca

SEQ ID NO: 720199 - DNA, 75 bp, Homo sapiens
ctttctacaaggagggcaagtttgcttccaaggtgtatgaagcttatggtcaaacagaatgcacaggtggctgta

SEQ ID NO: 720200 - DNA, 100 bp, Homo sapiens
agacttctagcaaagattatttgccttatgttatgggctatttgtgtagcagaagggtacaagttgaattctatatgaatgaaaatacatttaaagaaag

SEQ ID NO: 720201 - DNA, 75 bp, Homo sapiens
ttcagggacgtagccatccagagggatacccacccaccatcccagggtctacaacatccacagccggaccgtcac

SEQ ID NO: 720202 - DNA, 82 bp, Homo sapiens
atttgcagccagtactctatatgaacaatccgtctggatcacggatgtaggaagtggtggagttggcatgaacttaacagca

SEQ ID NO: 720203 - DNA, 90 bp, Homo sapiens
cctgcatgtactgggggattcgcagggaggatgtcgggacaccccggaagctgggaaatggttgccgaggagcccaagtagaagaaatat

SEQ ID NO: 720204 - DNA, 101 bp, Homo sapiens
tcttccttcatctctttatttaaaaatcacagaccaggatggagataaaggaactcaaagaatttggaaactgattattgatgagaagaagtattacttat

SEQ ID NO: 720205 - DNA, 100 bp, Homo sapiens
gacttttatatgttttcagaactacttagtgactacattcgtcttattgctgcagtgaaaatagaagcagatttgggatatcctggaggtaaagcaagaa

SEQ ID NO: 720206 - DNA, 75 bp, Homo sapiens
gagaggtacctctccttttccctctccctttccctaaggcctgacctctcgggacacacccagccctgtggaccc

SEQ ID NO: 720207 - DNA, 82 bp, Homo sapiens
gcctgcggagcctgtggggcaggaacaagatcactcaaggtgaaggataatctactaataccagcactttgaatgaaaattt

SEQ ID NO: 720208 - DNA, 100 bp, Homo sapiens
atcgacatcaatggcatcatcgtgtttggcacccggatcctggatgaggaggtgtttgaggtcagttcaccgggacctggaggcccagattgcgatcgtg

SEQ ID NO: 720209 - DNA, 75 bp, Homo sapiens
cgtcacccgcctggtggtgtacgtttctcaggactgcacaggttaaagctgaagctcaacaaagatatagtgatc

SEQ ID NO: 720210 - DNA, 80 bp, Homo sapiens
tcaggctgaacgcaagattcgtatcattatggcagagcccctggacccagatgatgtggtaccagttggccaaagaagag

SEQ ID NO: 720211 - DNA, 100 bp, Homo sapiens
aatctccttggatttcctccagagttcgagtgtggaggtatcctgactggtccttacggttctattaagtctccggggtatcctggaaactatcccccag

SEQ ID NO: 720212 - DNA, 98 bp, Homo sapiens
cctttcctgcttttggtttccctggcaggggttgaactgtggagtgtgtggttcatcagagaagatatgaaatataaagatgctactaataaacacag

SEQ ID NO: 720213 - DNA, 90 bp, Homo sapiens
cgacccttggcgcctgcccctgcaacgggagcccccaaatacatcaagatgtttgtactggatgaagctgacgaaatgttaagccgtgga

SEQ ID NO: 720214 - DNA, 83 bp, Homo sapiens
gcacgttcttccaagaaaccaacattcccaacagccaccaccaccaccagatgtaaaatgtttattggaggcttgagctggga

SEQ ID NO: 720215 - DNA, 100 bp, Homo sapiens
tagaagccaaggagctgtcctttgttttggattacataaaccagtcacccaagtgcattgcctttggaaacgaggcaaatccagatcccaacacttgcct

SEQ ID NO: 720216 - DNA, 75 bp, Homo sapiens
ttcatctggaattactacccaatcaaggaatgctgatcaaagcagcccgacggccatggaggctgaagagacgat

SEQ ID NO: 720217 - DNA, 75 bp, Homo sapiens
gcccttcctggaaggtgtgaacggagactctgactacaatggctcaggacagagcgggatgccaccagcttgtcc

SEQ ID NO: 720218 - DNA, 47 bp, Homo sapiens
acaactgccccatctgccggctgcccttccgggcactgcttcagatc

SEQ ID NO: 720219 - DNA, 82 bp, Homo sapiens
atacaacgaactagcacaacgagggcatggagaagcatattgaagaagatgaggtcaggtcatcggcagaccttcggattcg

SEQ ID NO: 720220 - DNA, 96 bp, Homo sapiens
tcgccatgtgacacactggcatcaagtttggcaatgaggagcagcagctggcgtgggccaagcgggagagcgagaaggcggaacaggagaggctgg

SEQ ID NO: 720221 - DNA, 98 bp, Homo sapiens
aacatttcccacaggacacgaagtttgtcggcccttgccttggcagagctgagtgaagtacatgcgagaagccacgccctatgtgaagaaaggatccc

SEQ ID NO: 720222 - DNA, 74 bp, Homo sapiens
ctgaaaaggctaaatgtgaactctcctcatctgtgcagattaaaaggagcccaagccccatctcatcctagcac

SEQ ID NO: 720223 - DNA, 73 bp, Homo sapiens
accaaagatctttcggaatgaccgcttcctctgtcatctctgtcccaggatagcaaacttgtgtatattcagc

SEQ ID NO: 720224 - DNA, 75 bp, Homo sapiens
ctttcacggacaacctcagaggacaacgaagtgttcgcttaaagcctttatgccggtcttcccaaagtacggagc

SEQ ID NO: 720225 - DNA, 50 bp, Homo sapiens
aaggagcaggattaccaaagggagacagtgtttcacaaaatgattttcct

SEQ ID NO: 720226 - DNA, 50 bp, Homo sapiens
gtggtcacctagacagcgacgatgatagatgctgggtgcggagccccgtg

SEQ ID NO: 720227 - DNA, 90 bp, Homo sapiens
tgaaaacagagttcctacatgtgaagagtttcttgcagaacataaattattaggaaacattaaaaatgtggccaagacagctaacaagga

SEQ ID NO: 720228 - DNA, 100 bp, Homo sapiens
gttttgcaaaaaccatcagtgtttgggaatgattctgatgatgatgatgaggcactggtgaggtggattgatgatgaatcttctggcacacctggagcaa

SEQ ID NO: 720229 - DNA, 76 bp, Homo sapiens
caaactttactttgcctcatttgaggagtgggaacaggcttcggcgaacacaaagcttttggaaagaacaaacagt

SEQ ID NO: 720230 - DNA, 80 bp, Homo sapiens
gcctgcagagctgtggcttaccagggggtcctggtgttcctggaacaggctctcatccagtatgcccttcgcaccttggg

SEQ ID NO: 720231 - DNA, 100 bp, Homo sapiens
caacaagcagccttcactttgcatcatgtgatacacaacaggcgcccagacagcgcggagcgtctactgtcagcagaatttcgctaaggagtttgtgatc

SEQ ID NO: 720232 - DNA, 83 bp, Homo sapiens
ccaccgtgaacggacagtcccccccagcccgtggaccgggagcccgtggaccgggagccggtggtgtgccaccccgacctgga

SEQ ID NO: 720233 - DNA, 73 bp, Homo sapiens
ttctttccaacattgtcaaaccagtgcggaaagtgaccagaagaggtgtgcagtttccaggcctggcccatac

SEQ ID NO: 720234 - DNA, 83 bp, Homo sapiens
tagcattcgcctactccgtgaaggtgagccagccatgagagggtatcttgtggccatattcctgagtgctgtcttcctctatt

SEQ ID NO: 720235 - DNA, 78 bp, Homo sapiens
tcacccgtctgaaaagattcctcatttgttttgcacagtaataagttgactcacacagacttaaagcctgaaaacatc

SEQ ID NO: 720236 - DNA, 83 bp, Homo sapiens
aaggcattgaagatgactattttttggagaggcctgatgcccgaatttcagtattcaagtcaaacaacgttgaaatggattgg

SEQ ID NO: 720237 - DNA, 82 bp, Homo sapiens
caaggccaacctgtcccaagtggccggctccatggtccccttctcgatgcgcatcttgcacgcggagcttcagcagtacctg

SEQ ID NO: 720238 - DNA, 76 bp, Homo sapiens
ttccagattgcagggtgatttcaggacaccaagaggaatactcccccagttgcaagaggcgcaggaccgtggaaga

SEQ ID NO: 720239 - DNA, 100 bp, Homo sapiens
gaaaagaacagagccatcattcaagaagtttgcttcatgatattcaagagagtgagaatatagcatctctacacaaccagatcacagcctgtgatgctgt

SEQ ID NO: 720240 - DNA, 100 bp, Homo sapiens
ctttgttattggagaaacatgcagattatatcgcatcctatggctcaaagaaagatgattatagctcttgaatctgaacagaacatcaatatttcatagc

SEQ ID NO: 720241 - DNA, 100 bp, Homo sapiens
tgggccgccgagctggacccggaccggttttggggacactccggacgcaggcccggccaggagagttcgtctgcatcgagtgcggaaagagcttccacca

SEQ ID NO: 720242 - DNA, 100 bp, Homo sapiens
caagatagacattgaccccgaggagacgaagctgcagttcatcatctgctgtgatagttccacaaccagaggatccagacagagccaatacttcagaaag

SEQ ID NO: 720243 - DNA, 80 bp, Homo sapiens
cacagcaaccagcttagtgctatcattgacttggtctgttccactttggggatgaaggatagtggccaaagcctccaaga

SEQ ID NO: 720244 - DNA, 100 bp, Homo sapiens
ccggaacaacattttgtgttgcagttgactccctcaatggattggtttacataggtcaaggcatcaagttatcagcagatgtcaaaccatttgtccccag

SEQ ID NO: 720245 - DNA, 131 bp, Homo sapiens
cggcgtgctactgtgcgctcgatccagcaccatggggaagcgggacaatcgggtggtaaaagagaacctgctttcatgcaagatgctgctgcactgcaaacgggatgagcttcggaaactgtggattgaag

SEQ ID NO: 720246 - DNA, 83 bp, Homo sapiens
catcttcgaacttagacttccggaaggactttggcgagggttatctaccttgcctgctcctatgccacagtgtacctgatcta

SEQ ID NO: 720247 - DNA, 75 bp, Homo sapiens
gaaggaagttcctggccattcaggatcagctcagctactatttaataaaacaaaatctgtagaattcacgttttg

SEQ ID NO: 720248 - DNA, 87 bp, Homo sapiens
aagccagggggaggaaccagacttgggatgaacatgaggcctcgtcggacttcatcagtcagtgattcgcctttgccagtctcatct

SEQ ID NO: 720249 - DNA, 97 bp, Homo sapiens
tcaccgcagtctcgactttcctgggctcagggccatgaagcccccaggaggagaatcgagcaatctttttggaagtccagaagaagctactccttcc

SEQ ID NO: 720250 - DNA, 100 bp, Homo sapiens
cccggttccccggcccacagtgggggtgtgcaaacccgagagaactgggtttccacttgagcggcacagtgacagaacctgcaatacaatcggagccaga

SEQ ID NO: 720251 - DNA, 101 bp, Homo sapiens
ctccactaatcaccagaacaaaatgtgcaggtgactgctggctgctggcagccattgcctccctcaccttgaatgaagaaatcctggctcgagtcgtcccc

SEQ ID NO: 720252 - DNA, 83 bp, Homo sapiens
gggggaaccgccgtcccaacatcacaaaaaggaagtgggaaaactcttgcctttgccatcccaatgattcatgcggtgttgca

SEQ ID NO: 720253 - DNA, 100 bp, Homo sapiens
tgcccatcgaggtgcacttcaaaaacaagcattgctatggcaacaaaagaaaatatgacttcacagagaggaatgttgaagtcaattcacagcaaaatga

SEQ ID NO: 720254 - DNA, 83 bp, Homo sapiens
gagcgccggcaagagctcggtgctggagaacttcgtgggccggagagctcaaaggatggctactgacatgcagaggaagagaa

SEQ ID NO: 720255 - DNA, 75 bp, Homo sapiens
cttcaattcggtgctccgccagccccagcttggcgtcctgagaaatgaaactatgttccaacttcctgtcaacaa

SEQ ID NO: 720256 - DNA, 89 bp, Homo sapiens
cggcctgcagcttcaccaactctgacatgcagctggatgctgacaaatatgagaatgatccagaattagaaaagatccgaagagagagg

SEQ ID NO: 720257 - DNA, 100 bp, Homo sapiens
atcaaaagctgcacttcctgatttaactaaagtgattcaattgaagatggacttcactgcagtgaaatcttgtgctgagtgggtgtctctctcaaaggcc

SEQ ID NO: 720258 - DNA, 80 bp, Homo sapiens
ctgtcacagaaagagctgttaacacttcctagataacggtttgtcactcaagccctatcagaaggttggtttgaattggc

SEQ ID NO: 720259 - DNA, 74 bp, Homo sapiens
cccatggctgatgcagcaggcatcatccgctatgcaattgggataaatttccgctgtaagccgtccttccgtga

SEQ ID NO: 720260 - DNA, 100 bp, Homo sapiens
cggatcctgaggaggcagctgcggtggcagctgctgagttctcggtgaaggagcttactccacgggaacagcctctagataatctgagttgttgaaaata

SEQ ID NO: 720261 - DNA, 74 bp, Homo sapiens
tgaagagaggttttgaattcacgcttatggtagtggcactcctcaagactttgatccttggaaaccgtgtgtcc

SEQ ID NO: 720262 - DNA, 90 bp, Homo sapiens
agcgatggcctggaaatccggcggcgccagccactcggagctaatccacaatctccgcaatgctgatggaaagttaagcgtgaaatttgg

SEQ ID NO: 720263 - DNA, 80 bp, Homo sapiens
ggagtgcagaggcatcacctgaaaggcccttgggactgaaagaatccaagatctggatctcctctatagcgcccagaacc

SEQ ID NO: 720264 - DNA, 82 bp, Homo sapiens
ctttggaggccccctggaaggctttaggatccagttaccggtattgtaagaacaagccgtacccaaagtctcgcttctgccg

SEQ ID NO: 720265 - DNA, 96 bp, Homo sapiens
agggccgggagctcctggtcatcgagctgtccgacaaccctggcgtccatgagcctgcatccagtcctggatgagccaatagctgaagctgtctgt

SEQ ID NO: 720266 - DNA, 75 bp, Homo sapiens
cagagtcaaaacagagcttttggaatctgaacaagggtgtttctaagacctcagagaaatttggaatctatagac

SEQ ID NO: 720267 - DNA, 75 bp, Homo sapiens
aagagttaaaagcagagttagttcagacatctccagttacagcccgaacactggaaactctgattcgactggcca

SEQ ID NO: 720268 - DNA, 90 bp, Homo sapiens
gcccctgggggctcaggaatgcctccctggtcacctattacaccagaatgccagctgatgaagaccgagaggccgcgacccaacaccttt

SEQ ID NO: 720269 - DNA, 90 bp, Homo sapiens
ttccggggccctctcagcaagaacgggaacaaaactctgccctgctcctactctggaagaagtcaacgcctgggctcagtcatttgacaa

SEQ ID NO: 720270 - DNA, 100 bp, Homo sapiens
gcagaggggccactgctgggccctgaggctgcaccaagtggcgaaggagccggctccaaggttcgagaacttgtcttggacaattgcaaatcaaatgatg

SEQ ID NO: 720271 - DNA, 110 bp, Homo sapiens
taactcagaactgccgcctctcaccatcgacggaattccagtctctgtggacaaaatgacccagaggctgacccgcggctgattgagtccctctcccagatgctgtccat

SEQ ID NO: 720272 - DNA, 102 bp, Homo sapiens
gcttcgcgggccctgtcggtcccggtaagcgggcctgcgcttaccggaaagaggagcgtaagatgaaagagtctattgacctgaaaagtggttctggaaaag

SEQ ID NO: 720273 - DNA, 75 bp, Homo sapiens
catgctggtgccgctagccaagctgtcctgcctggtttctctacaataattggagttggtgttggagctggagcc

SEQ ID NO: 720274 - DNA, 83 bp, Homo sapiens
gcaaggagcacgtggcagcgcaggaaacaggagggtgtgaagacagagaatgaccacatcaacctgaaggtggccgggcagga

SEQ ID NO: 720275 - DNA, 100 bp, Homo sapiens
cgagagctaccgcgccagacaggaagcggggagaggtggtgagagatgacccctgttgaggatttcattggtgtctgccacaggccgccatggcatcaga

SEQ ID NO: 720276 - DNA, 75 bp, Homo sapiens
acccgcgaaatgatgggatagcgttgcaaatccttaaaagagtcttaacggttcgagaacttgtcttggacaatt

SEQ ID NO: 720277 - DNA, 50 bp, Homo sapiens
caacctcagaggacaacgaagtgttcggccctcgggaccaaggatcacgt

SEQ ID NO: 720278 - DNA, 75 bp, Homo sapiens
cacatcgctcagacaccatggggaaggtgaaggtcggagtcaacggtatgagcccagaggacctggtcggccctt

SEQ ID NO: 720279 - DNA, 82 bp, Homo sapiens
ttttcttatcactaaaacagcatacctggagtagaacagaaaaattattatgtctgtgttcccttgggactcattggaaatt

SEQ ID NO: 720280 - DNA, 97 bp, Homo sapiens
atacaaagacaaaaggagattctgatgaagaagttattcaagatggtctatgctccatcagcaagcactgccgactacaatagggactcgccaggct

SEQ ID NO: 720281 - DNA, 100 bp, Homo sapiens
ccaagcggattgagccaggacacaacaccgcggagccctgcaggcgacccaacatgagtgaagtttcctgcaagaaacgggacgactatttggaatggcc

SEQ ID NO: 720282 - DNA, 100 bp, Homo sapiens
aaaaatgccacctacggctacgttttagtattcaataggtgccggggacattgcttagaaagacaaaactacattgaagaccttcagaatggtcctatca

SEQ ID NO: 720283 - DNA, 87 bp, Homo sapiens
gaaactatccaagctgctaaaacttttgcacatttcagttggactgcgatgcagttcttcagctcttcattgaaacgctgctccaca

SEQ ID NO: 720284 - DNA, 100 bp, Homo sapiens
ctggacccgcctgccagaggccagaggatgaggaagtggaggctttcctgaagatgctggacgagaaccaccacctgatccagtgcatcctggagtacca

SEQ ID NO: 720285 - DNA, 96 bp, Homo sapiens
catattctacttcattcagaagatcaggtacacaaatgcacgcgacaggaaccagctgggctcaaaatgcagagaactcaaagatattcatttcgg

SEQ ID NO: 720286 - DNA, 100 bp, Homo sapiens
agggggatcattcacagtgaggacagacacaggagagattatttcattcaatattttttatgaattatttaccatttgtacttcaatagtagcagaagac

SEQ ID NO: 720287 - DNA, 50 bp, Homo sapiens
tcctgagggagtgggtggagagagagacaagagagacacctccaacttcg

SEQ ID NO: 720288 - DNA, 75 bp, Homo sapiens
gaggggcaggaaattctttgaaggtacccactgatggtaatgctggcctgctggctgaaccccagattgccatgt

SEQ ID NO: 720289 - DNA, 133 bp, Homo sapiens
gttccttcttcagtcctgctcgtcggaggacccggttgccatggtgaaggaaaaagacatccacgacagcgatggcagttccagcagcagccaccagagcctcaagagcacagccaaatgggcggcatccctg

SEQ ID NO: 720290 - DNA, 98 bp, Homo sapiens
ccagagtgaccaggctgaccagcaccagccctgatccagagtcagtgtgcggtttgggagaaaatgtgtcggatattttggggcggtcacgtgggcgg

SEQ ID NO: 720291 - DNA, 100 bp, Homo sapiens
gtccgcgctgcttccacccaacttcctgttaggtcatcatcagatttgaaatatttaaagtggatacaaaactatttcagcaatgcagacaattaagtgt

SEQ ID NO: 720292 - DNA, 100 bp, Homo sapiens
tcgctggatagactgcacaaggtgaagactgtctgcagcaagatgtccagctcgccgctgtccaagaaacgtcgcgtgtccgggcctgatccaaagccgg

SEQ ID NO: 720293 - DNA, 80 bp, Homo sapiens
gtgaaagacaagaaagatgagactctggtgtgggaggccttggtgaaaccaggcaagcaccggaagcaccccggcggccg

SEQ ID NO: 720294 - DNA, 75 bp, Homo sapiens
gattgaagtaacagcatggataggtccagatgttgctatcggagctccacaagaagatgacttgcaaggtgctat

SEQ ID NO: 720295 - DNA, 80 bp, Homo sapiens
tgataatccaccgcatcctggatcaactgccagtacagatgacggctttgtatataatttggatgcacgttcagataagc

SEQ ID NO: 720296 - DNA, 73 bp, Homo sapiens
cggaggcgttcagctgcttcaagatgaagattgaccctgctacgggaatggttatgaatctggctgatctcaa

SEQ ID NO: 720297 - DNA, 75 bp, Homo sapiens
gccgggcccgggcatggtggtctggggcaacgcggaagacctgtcatttactccatcctttatagtgatgctaca

SEQ ID NO: 720298 - DNA, 74 bp, Homo sapiens
gtttttcggatcatgtctggtggctccgcggattataacaggacatagaaaacatcagtcttgaacttctcttc

SEQ ID NO: 720299 - DNA, 98 bp, Homo sapiens
ctaaacaagacagtgactccaggatttctgaagactattgtggaagaagcatccattaagatctatgttagcgttcctggatccaagaaggtcatcct

SEQ ID NO: 720300 - DNA, 83 bp, Homo sapiens
gagaaattctcatgatagcttccaagggacaaggtgtcaacaatgtgccgacatgaagagtatttctggagaagaatcatccc

SEQ ID NO: 720301 - DNA, 83 bp, Homo sapiens
ccgcgctgcgccttccacactgtgcgctcccaagaagatgaaaggattgttcttgttgacaacaaatgtaagtgtgcccggat

SEQ ID NO: 720302 - DNA, 98 bp, Homo sapiens
cttacggagccgtctaccagatcaacgtcctccgggaccggagtcagaaccctccgcagagtaaagatttgaacatggaattcaatccttcagatcat

SEQ ID NO: 720303 - DNA, 80 bp, Homo sapiens
cttcgaaggattttgcaacaaattcgagctgtccgactctgagaatgggctaattgactataattttcattgcttccgga

SEQ ID NO: 720304 - DNA, 88 bp, Homo sapiens
aaagatagttgcttattcctctattgctgcaaaaaatgcagaactagaacaggagcttatgttccatgccattgcagtgtcaactagg

SEQ ID NO: 720305 - DNA, 100 bp, Homo sapiens
tgcctttcctgtggctgtcccactttatgatcacatttacgaacagtttcctgatgaagtaaataaggtagtgggcagcagtcagtgacaggtgtaacct

SEQ ID NO: 720306 - DNA, 75 bp, Homo sapiens
tttgtttattgctgtgatttttcttccacagctatagaactggtccagcgacgagtagaacagcccctctatggt

SEQ ID NO: 720307 - DNA, 97 bp, Homo sapiens
tggaaataaaccgcaaggatgaagaaataagtaatcttcaccaaagcgacctggccctgcgcaactgcctgctgacctctgacctgaccgtgcgcat

SEQ ID NO: 720308 - DNA, 100 bp, Homo sapiens
tcgcagttggaagcccatggggcaggtcatcatcagatttgaaatatttaaagtggatacaaaactatttcagcaatgcagacaattaagtgtgttgttg

SEQ ID NO: 720309 - DNA, 98 bp, Homo sapiens
tgacgtccatccatttcgtggttcacccgctgccgggcaccgaggaccagctcaatgacaggtataattgaaatcctcaaaggaatgcaagaattggg

SEQ ID NO: 720310 - DNA, 101 bp, Homo sapiens
cgcgcccgcgccctccgcgcgacgccagggtcctcactgagcagcgagtcgtcccccgtgtcctctccggccaccaaccacagctcccccgccagcacacc

SEQ ID NO: 720311 - DNA, 74 bp, Homo sapiens
ccggacagtcatcaccatgggccgggatcacattctgattcttttgttaggagtgataaacccaaactgttcag

SEQ ID NO: 720312 - DNA, 90 bp, Homo sapiens
caatgagataaaaaatggcactatccttcgattaaccacatctccaacttaattcagtgcacaaatgagatgaatgtgaacatcccacag

SEQ ID NO: 720313 - DNA, 95 bp, Homo sapiens
agaatatttgcaaattcgaccctcacacaactcacgactggttaagatttttgcacaggcaaaaataatgtgttcctcaatatgcaaatgtattg

SEQ ID NO: 720314 - DNA, 149 bp, Homo sapiens
aggcgagaaccgccgggaagcgacgccccggggcgggggcgatggcggcggcggcggccggagcttctctcagccggattctcaaagttggattggtggaaacaatgaaccattgacaggctttacatggcgaggtggctgtgaaagag

SEQ ID NO: 720315 - DNA, 76 bp, Homo sapiens
atggaagtaccagactatgaaatgcggggatctgatgagcttctttcttctggcatcattaacggaccttttacca

SEQ ID NO: 720316 - DNA, 75 bp, Homo sapiens
agctctccaagttcagcatccccaagcagggggaggaaggaaaatcacctcggcagtgtttgaaggaaggatact

SEQ ID NO: 720317 - DNA, 51 bp, Homo sapiens
ctcctgagtggctgggactacagtcttattgccagcagttttgaagatgac

SEQ ID NO: 720318 - DNA, 90 bp, Homo sapiens
ctgcatcctgatcctgggcctggacaatgctgggaagacgatgtgttcagagcaacattgttttgttgacacaagcatttagaagaaagt

SEQ ID NO: 720319 - DNA, 90 bp, Homo sapiens
gttgttgggcatatcactgaaggtgtgtgcaggcctctaaagatgtgcagagcagctagttcacaataacctcccaaccaccagtgtcat

SEQ ID NO: 720320 - DNA, 80 bp, Homo sapiens
ggcgcgggtctccagtgcttcagtaagactttgaccccgacgcaggcttcagtgattgccgcggatcagaagcctgagca

SEQ ID NO: 720321 - DNA, 100 bp, Homo sapiens
tgtcagataagagaccaaactatggggaaatccctgttcaagctatgccctttgccttctgtacgagagagaagcttccttggacagaatttgctgagtc

SEQ ID NO: 720322 - DNA, 98 bp, Homo sapiens
ttggtgatgagcctcggaaagtgctcctgcggctgtatggagcgattttgcagatgaccttacacataggaagctcacacctggctccgccaaatcca

SEQ ID NO: 720323 - DNA, 98 bp, Homo sapiens
cgaagacatgacacttacaagatggacagggatgataattgggcctccaagaagctcaagcgcccagctctgcccgaggagcccaggctgccccgtga

SEQ ID NO: 720324 - DNA, 98 bp, Homo sapiens
caaacttgggccaaaggacagttagaagacagtagctgggatctagcaattgggaggcagcagacttgggtaatgaagagagaaaacaaaagttcttg

SEQ ID NO: 720325 - DNA, 100 bp, Homo sapiens
ctggagcggcgcagccggagtggggccgtgagggccaagagggagcaggaggtgacggtgctgaagaaggccctggatgaagagacgcggtcccatgagg

SEQ ID NO: 720326 - DNA, 75 bp, Homo sapiens
atgtttgctgactacctcgcccacgagagtcggaggacctgcctcctgcctgcccctctcccgccagactgttag

SEQ ID NO: 720327 - DNA, 100 bp, Homo sapiens
tagaccctggagtgaaaccattaagcttgtgcgtcaagtcatggagcgatctctctttgagtcggcatggaagaaggagaaggacatcgtttccaaggag

SEQ ID NO: 720328 - DNA, 100 bp, Homo sapiens
ttcctccatgataaaggaatcatctatagcatttaaatcaaacggtattgagatggattgggttatgaaacataatggtccaaatgacgctagtgatggg

SEQ ID NO: 720329 - DNA, 96 bp, Homo sapiens
agtgccctctagaggtcaatgagtgcactggcaacctcaccaatgcagagaaccgggaactcaaccctatgtatgaaggatatctacagcatgatg

SEQ ID NO: 720330 - DNA, 50 bp, Homo sapiens
cgggtggagtgtaggtcatatcgccgcggaagctcttcgtgggcggtctt

SEQ ID NO: 720331 - DNA, 82 bp, Homo sapiens
atctgcccagagaagccatgacaggagactggtgattggtgcaagcgacgtgggatgaggaactgtggctgcaccatctgtc

SEQ ID NO: 720332 - DNA, 75 bp, Homo sapiens
gtggacccgcgtccggaacagtggaaggaaatagcaacagtggtgaaggaggttcaaaatggaagactgtttagg

SEQ ID NO: 720333 - DNA, 95 bp, Homo sapiens
ggatctacagcaggacttccagaacatccagtcctccatgaatgccatgggctccctttccgtcctgtcgccggaccgggtcctcccacagctca

SEQ ID NO: 720334 - DNA, 75 bp, Homo sapiens
caagcccgggagacacagtgtcagaattacaagacctgcgaccgcatcaagcagtccgccagcggaaccaagcgg

SEQ ID NO: 720335 - DNA, 87 bp, Homo sapiens
cggacctcgcttacctgcatgctggttcgatacaagaggctgttttcctagcgtggcttgctgcctttggtaagaacatgtcgtcca

SEQ ID NO: 720336 - DNA, 75 bp, Homo sapiens
ccagagacctacgtggcagctgtgaaaaaagccatttccgaagttactccacaggatccgctgaacataggatgt

SEQ ID NO: 720337 - DNA, 100 bp, Homo sapiens
gtgttgacatcaaggatctaccagcatacagtgaagttgttctctgaagttcctcatctgccttaagtctggacccaccaaagaagaaaacaatgaccac

SEQ ID NO: 720338 - DNA, 83 bp, Homo sapiens
cccggggccccgggatctcggctgtccttcctcccggccctccctatcctgaagacattagctgagagtctggcaccttttaa

SEQ ID NO: 720339 - DNA, 75 bp, Homo sapiens
ttctgcctggtgctctgcgtcctcatcgggcttatgttcgagcaaaagctggcaggctgacagaggcggcctcag

SEQ ID NO: 720340 - DNA, 75 bp, Homo sapiens
ggaggttgtcatagccttagctcaagcaatagggtaaatggatccttctatgagatcttgcaagtggactttgga

SEQ ID NO: 720341 - DNA, 100 bp, Homo sapiens
tacctgtggagcgaggtgtattccatggacatgttccacacgcgcttcaagcaggagggtgtcctgaacagcaaggatgacgtggaacgctgcaagcaga

SEQ ID NO: 720342 - DNA, 76 bp, Homo sapiens
cataagatcacctctacctttcatcaagagcttgatgcattagatgccaatgatgagttgactcctttgggacgaa

SEQ ID NO: 720343 - DNA, 90 bp, Homo sapiens
acctcgtcagcagcgaggaaggaaacagcggtatcgaaggatgatcgcagtgatgtggagagcagctcagaggaagaagatgtgaccacc

SEQ ID NO: 720344 - DNA, 96 bp, Homo sapiens
gatgggggtagtgaggaagtggtcctaactcctgcagagctcattgaaagattggagcagcccgtgatgctgatgagcgagagaagtggatccatg

SEQ ID NO: 720345 - DNA, 101 bp, Homo sapiens
agtggcaggtgcacgcttatctttatctgtggcatgcaactgtttcagacccaaagtttacgcctatcagacctacacagaaaatcgcatctttggagagg

SEQ ID NO: 720346 - DNA, 75 bp, Homo sapiens
gcttggagcacttcctattccactggattgggaaagaccatggcagatcccaccaaatattttggttgtgagctg

SEQ ID NO: 720347 - DNA, 90 bp, Homo sapiens
agaagttgaagtacacctcccccgattcaaacttgaaactaagttacagtctctagcttcgccatgtacatggcccttccgtgtacatgg

SEQ ID NO: 720348 - DNA, 75 bp, Homo sapiens
tcctatatcatgcagagaaaagagatggaaacttacttgaagaaggagcgcctggaccatgctgctgagcgccta

SEQ ID NO: 720349 - DNA, 95 bp, Homo sapiens
gctaaacacagactggcctgcgctggaggaccttgtcctgcaggactcagctgcagttgcagttgccaatacctatgcctgtaaggggctagaca

SEQ ID NO: 720350 - DNA, 104 bp, Homo sapiens
gtttgcagatcgggagcgcaaggtcgccctcaaggccatgatcaaaacatcgggctggtggtcatcctggcttccacggtggtggccatgtcggccgtggccca

SEQ ID NO: 720351 - DNA, 75 bp, Homo sapiens
cagccgctcgtcagactccagcagccaagatggtgaagcagatcgagagcaagcaaggaccagactggcttgagc

SEQ ID NO: 720352 - DNA, 82 bp, Homo sapiens
tgctctgcggggccgtggcgctcggctgcgcgctgctcctcgccctcaagttcacctgcaggctggagtgcaatggcgtgat

SEQ ID NO: 720353 - DNA, 100 bp, Homo sapiens
gcacgataaaggaactcaggcgcctcttcttagttgatgatttagttgattctctgaagattagaatatggctacatattcccgctgtcatgcagcacat

SEQ ID NO: 720354 - DNA, 51 bp, Homo sapiens
ctggaacacacatcagtcacggaagcgtgacagcaatgacagtgttttttc

SEQ ID NO: 720355 - DNA, 75 bp, Homo sapiens
gaaaacaagtgtctgcttatgtcgcaaagccttctagacaagctcagtggaatctgaagggcccaccccatggag

SEQ ID NO: 720356 - DNA, 100 bp, Homo sapiens
ttttctataaaagttgctgtttactgttgctgtccgtaaactggaacctctgttcactcaagttaaacaggtgttcaaggagctggagtttctgggttgg

SEQ ID NO: 720357 - DNA, 100 bp, Homo sapiens
tatgcaagatgcagaagtcagcaagagtgacataggagaagtgattcttgtgggtggcatgactaggatgcccaagccaccaattaccctagttatgggc

SEQ ID NO: 720358 - DNA, 75 bp, Homo sapiens
ttcatccttctcacctaacactgggaactggcccaaataaggaaggaggaaaaagagaagaaaagacgccgcctc

SEQ ID NO: 720359 - DNA, 130 bp, Homo sapiens
ggcgctatctctgccctcagtatcaacaatgattgctcaagacttctttgtggctttgctaaaggacagaactaaagatgactcagagccatctggagaagaaacagtagaaaggacaaggaagccaagt

SEQ ID NO: 720360 - DNA, 82 bp, Homo sapiens
gctaatggtcgtcgtcggcatcctcctggcctacctggcagctcggagcccaagatcctcttctcctacaaatgccaagtgg

SEQ ID NO: 720361 - DNA, 75 bp, Homo sapiens
ctgagcggagcccggtgacaggatgagaaactggtagtctgggtagattcaaagcatctttaagagaaaatgtct

SEQ ID NO: 720362 - DNA, 90 bp, Homo sapiens
caagtggatgaagaaattttctgaatcagaaacaaaagaatgtcctttcagagtcaacaaggaggagatgttaaagtaacccatcttgca

SEQ ID NO: 720363 - DNA, 100 bp, Homo sapiens
agtgaagaaaaataagaagtaattacaacagaaaaaccttcactgttacataaggtaagttctcttctacgctgtatgagactggtggctgtgatatgtc

SEQ ID NO: 720364 - DNA, 100 bp, Homo sapiens
accgtctttattctgtgggctctgattctccaatgggaataccaagggcagcctgtggtagctgttcctcttgttatgccagtttgtagaaggaaagagg

SEQ ID NO: 720365 - DNA, 83 bp, Homo sapiens
gtcagacgcagccgtagacaccagctccgaaatcaccaccaaggaagtactagccggacatcatgagtggctgtcgggtattc

SEQ ID NO: 720366 - DNA, 99 bp, Homo sapiens
cgccagagagagctgctggaacagcactatgcccagtatgatgccgacgatgacgagactcagattgatggacaacttttcttaattaagcaccttttg

SEQ ID NO: 720367 - DNA, 100 bp, Homo sapiens
tcagcaacgcacagctatcttgacccacccttgattgtctccagctttaagaccacgacatcgagagctgcctgccagctcgtgaaggagtacatcggcc

SEQ ID NO: 720368 - DNA, 75 bp, Homo sapiens
caagcggatggagatccaggaggccatcaaaaagcctctgacagacagagcgggatgccaccagcttgtccaaag

SEQ ID NO: 720369 - DNA, 100 bp, Homo sapiens
aggagtcctcgtttaggaagacgtttgaggattacctgcacaacgtggttttcgtccccagggtgttgattgcctttgctcagtatcttcagcagtgtcc

SEQ ID NO: 720370 - DNA, 75 bp, Homo sapiens
aaataccaactgattttaatctactacaagtcgacttcaatgttcctatgaagaacaaccagataacaaacaacc

SEQ ID NO: 720371 - DNA, 101 bp, Homo sapiens
aggcgaaatgtgcaaatgtttatgggtgtcatggagaaactccagctgggcccagagattctgcagcgggaaaatccaaggcttatttatgccaggctgag

SEQ ID NO: 720372 - DNA, 87 bp, Homo sapiens
ctggccttcccttctttactgatcagttctgtgcacccttacgaagtggccgaggtaattgcattgcctgtggaacaggggaacttt

SEQ ID NO: 720373 - DNA, 50 bp, Homo sapiens
ctctttacaagacgcacccacactgctacaggagctgagagaccctaccc

SEQ ID NO: 720374 - DNA, 100 bp, Homo sapiens
tcagaggatgaggacgatgaggatgacgaagatgatgaggatgacgatgacgatgaggaagatggattttttatcaagcagaaatgcatcgaacaacgag

SEQ ID NO: 720375 - DNA, 90 bp, Homo sapiens
gattcgcagtggtcgcttcttctccttgagctgggatgtttgtgtctaagttctttgggggctatgtgcctgagatggtgctcacccctg

SEQ ID NO: 720376 - DNA, 98 bp, Homo sapiens
gatctacattataccaataacgaggcctgatcaaccccgtataaccaaagatgtaatttgttttcatgctgaagatttcttagaagtagttcaacgaa

SEQ ID NO: 720377 - DNA, 137 bp, Homo sapiens
tcctttgtcaacgtcaagcggtggcttcacgaaatcaaccagaactgtgatgatgtgtgccgaatattaggcaaacactggagctgtgtgcagaagttcgccgctggtctgggccggtccctgcgagaggcccaagc

SEQ ID NO: 720378 - DNA, 90 bp, Homo sapiens
cgcgcgccccggcccggccccgcgaggggttcggtccgagcccggtgggaggctcccggagcgcagcctgggcccagcccaccccgcgcc

SEQ ID NO: 720379 - DNA, 100 bp, Homo sapiens
cttaaactgtacttcagggatttgccaattccactcattacatatgatgcctaccctaagtttatagaatctgccataagaaatccttacacgggccata

SEQ ID NO: 720380 - DNA, 100 bp, Homo sapiens
caggttattcaagaaaaagaaaagaaaggcaaagaaaatgatatggaaatggaaattaaatgggttccagaactgataaatttcaaacggaagagagtgg

SEQ ID NO: 720381 - DNA, 75 bp, Homo sapiens
tgaaaacactgcctcagtatctgaacacaagctaccagctcaggaagcacctgtcccaccttcggcatatgaagc

SEQ ID NO: 720382 - DNA, 74 bp, Homo sapiens
ctgatccccaagctttttcgacctgcagtgaatattacttcagtgtagaaaatttggaacgagacttctttctt

SEQ ID NO: 720383 - DNA, 75 bp, Homo sapiens
ttattgattgcttcctgatcaaaatggagaaggaacttagtgatttggcccgtgaccctccagcacaatgttctg

SEQ ID NO: 720384 - DNA, 100 bp, Homo sapiens
tgaaagtgcaatatttgagtatcactgcgagaggctgtgacaacactgaaaacagtattggatcagcagcagaccccttctaggttagcagtgacccgtg

SEQ ID NO: 720385 - DNA, 75 bp, Homo sapiens
agtggagctccttttcctccacctaccttcccgaaggcagttggtgtcaccagccagcgaccagtgttttgtcct

SEQ ID NO: 720386 - DNA, 100 bp, Homo sapiens
tgcagttgcttgcttcctgacacgaggggacctgtggattagttgggaagaaggaatgaagggtgtactctgtgtgaccgcgcctatccctcggactgtc

SEQ ID NO: 720387 - DNA, 83 bp, Homo sapiens
ctcctgtctcagcctcccaagcagctgggactacaggcatgcaccaccacacctgggtgtttcccattaaacactaccaggac

SEQ ID NO: 720388 - DNA, 83 bp, Homo sapiens
gtggttttgacaacatcgacatcaagtcggccggggatttaggcccactgctcagtggagcgtggaggacgaggaggaggccg

SEQ ID NO: 720389 - DNA, 98 bp, Homo sapiens
gagttgctgcccttccggagtccgccccgtgaggagaatggatcttagtaagagccctaagaccatgaaaaagctgctgcccaagcgcaaacctgaac

SEQ ID NO: 720390 - DNA, 100 bp, Homo sapiens
tgcggggacgggtccctgaggatcccgatgcctacgagccaagatgctcaggtccttcgagactgtgttcaatgccagtgggctgcaggccctagtggcc

SEQ ID NO: 720391 - DNA, 122 bp, Homo sapiens
cgcgcagggtctggagagtcaccgcggcggcgccgggtggtggttaaaccatgttaaggaggattttacagaggaagcggcaccatgtactacagacggctcatccctcccctttgtcagtg

SEQ ID NO: 720392 - DNA, 96 bp, Homo sapiens
gtccatcttgataatttcatactctggcttggcaaagactgaagggaagccatggtgaatgcacagcaacttctacggagtcttgctctgttgccc

SEQ ID NO: 720393 - DNA, 74 bp, Homo sapiens
atttctcctggggctcagagtactatgaagaaatcgggagtgcactttttgactgtagattgttcgaagacaca

SEQ ID NO: 720394 - DNA, 82 bp, Homo sapiens
gtactttttcaagtctatggatcaggatttcgggagcacgtgaattgcctctgcttacgttcaggccctgtcctaaacccag

SEQ ID NO: 720395 - DNA, 101 bp, Homo sapiens
agaagccaaagaactggctaggcaaataagctttaaggcctatggcatgtctgcgttacctttaaatctgataaaaggcactagaagcgctgcttatgaac

SEQ ID NO: 720396 - DNA, 100 bp, Homo sapiens
gtgagaggggcgggagcccgcgggggccgcgcccttctctcgcttcggactgcgcaacgctgcgctctgggctgacaggagcctcctcaacaagcccaag

SEQ ID NO: 720397 - DNA, 101 bp, Homo sapiens
agaaggatgacaccggagtttgacgaagaggtggtttttgaggcgtctgtagaggcttctggtgaaatcgcattatgcaagactggatttcctgaagatgt

SEQ ID NO: 720398 - DNA, 75 bp, Homo sapiens
ggaccacaggccctcgttgcccagatgtgggaggaggagctcgccaagcgcatgaaccttcagaccatggtggac

SEQ ID NO: 720399 - DNA, 100 bp, Homo sapiens
cccagaacgcagatcagaggtagtcggacctttcccgctggcgcgcagcctcagctagagggagaaccgaagattacaggaggccagcatgaggttggaa

SEQ ID NO: 720400 - DNA, 82 bp, Homo sapiens
agccagctcagccagctgcctccgcactccatcgaccagggaacaagatcactcaaggtgaaggataatctactaataccag

SEQ ID NO: 720401 - DNA, 50 bp, Homo sapiens
ccacagccccacaaccgcacggtatgcggtgctttgtggtcagctggctg

SEQ ID NO: 720402 - DNA, 100 bp, Homo sapiens
atacttcatatttggcttcaatgtcatattttggggccgttgctccagggagaactgcaaatatcttcatccacccccacatttaaaaacgcagttggag

SEQ ID NO: 720403 - DNA, 75 bp, Homo sapiens
ttgacagctgcattcaatcttttggaacaagctgaaagctggatacctaatgtcagtggagtcttctgagtgttt

SEQ ID NO: 720404 - DNA, 83 bp, Homo sapiens
tgagcgagctgtcagagcccggggacggcgaggccctcatgtaccacacgatgtagccatagctgtaacgtataaccatgatg

SEQ ID NO: 720405 - DNA, 100 bp, Homo sapiens
ttatccaaataaattgcaagcattctatccaaatgctcagagagtggcaacagtgtgaaaagactgaaaccggaccctgagccagatgacaagaatcaag

SEQ ID NO: 720406 - DNA, 100 bp, Homo sapiens
acgcgcagcatcttctgggagctccaggcctccggtgtggctgtctctgatggtgtcatcaaggtgttcaacgacatgaaggtgcgtaagtcttcaacgc

SEQ ID NO: 720407 - DNA, 98 bp, Homo sapiens
atccagcaactggctgagggactcacagctgatgacctgctgctcgtgctgatctcaggccccggaagaatcccctgttcatcatggacctggtgctg

SEQ ID NO: 720408 - DNA, 74 bp, Homo sapiens
agatgtacctgaaaagtcgtcactctttcaccaaggcccggtcataacggcgctcacgcccatgacgatccccg

SEQ ID NO: 720409 - DNA, 83 bp, Homo sapiens
ctgatcctggaagagactcggggccccccagcctccgccaacccagttttcggctttgtgagaaaccttaccatcaaacacga

SEQ ID NO: 720410 - DNA, 82 bp, Homo sapiens
atcccactgatgaggatcagcccatgagatgtggtatggtgtattcctgtgggcactggtgtcttctctcttctttcatgtc

SEQ ID NO: 720411 - DNA, 75 bp, Homo sapiens
aaatcttgcccaaagaaatgtagccttggaccgagacatgatgaagaaagggtcagccagcagccggcccggggt

SEQ ID NO: 720412 - DNA, 90 bp, Homo sapiens
ggcttctgcctctgtggataacacagccatcatatgggatgtcagcaaagaaaaggcaacagatggctccctgcaaagtgaggattggac

SEQ ID NO: 720413 - DNA, 100 bp, Homo sapiens
caagaagacgtccaatctgagcgtgctgcggacggcgctgcggtacatccaggacctgcaagcgcaggaccgagcccaccgcatcgggcagcagaacgag

SEQ ID NO: 720414 - DNA, 90 bp, Homo sapiens
cctgtgcgggatggaacaaaaggtgcatcatcccctgctcgaccagccactcctttggttccttgcagaagtaccactccacctccacct

SEQ ID NO: 720415 - DNA, 113 bp, Homo sapiens
tgtattcagctcaggaccaggcaccttctgtggaagtcgcagatatggccagtacactatgaaccaggaaagcaccaccatcaaagttatggagaagcctccatttgatcgat

SEQ ID NO: 720416 - DNA, 75 bp, Homo sapiens
cttcgccaccacgcactgggtcgtcacggaggacgggaaaatccagcagcaggagcttgaagaaatccgcaaatg

SEQ ID NO: 720417 - DNA, 100 bp, Homo sapiens
ggcgggactgccacgtccaagcaaaccgggaaaggagaggatcccggagccggctattgagggcacctacattgacaagaaatgccccttcactggtaat

SEQ ID NO: 720418 - DNA, 100 bp, Homo sapiens
cacaaagagcttgctccctacgatgagaactggttctacacgcgagctgggtttctcaataccaccttcctcctcatggggtgtgctcgtgaacataacc

SEQ ID NO: 720419 - DNA, 100 bp, Homo sapiens
ctcgtggacaagtttgcagatcgggagcgcaaggtcgccctcaaggccatgatcaaaacgcccaggaagtacacgagaagctccgaggatggctgaagtc

SEQ ID NO: 720420 - DNA, 83 bp, Homo sapiens
ctacaaaatcaatggccggacgaaagtcataagaccttcattccagaggcatcctgccctgtatccgggaagaaggaatgctg

SEQ ID NO: 720421 - DNA, 98 bp, Homo sapiens
tttggtttccctggcaggggttgaactgtggagtgtgtgggaaggatcgagatcgagaccgggatcgtgaagatcggtctaaagatcgagaccgagaa

SEQ ID NO: 720422 - DNA, 73 bp, Homo sapiens
tgaagcagtgcttcgtggtgactgaaaaagctatttccttcgtgctaccatcagccgccgcctcaatgatgtt

SEQ ID NO: 720423 - DNA, 50 bp, Homo sapiens
aaggattccaagtaactcttatttggttcccttttatgggccaggtggta

SEQ ID NO: 720424 - DNA, 73 bp, Homo sapiens
ttttcagaccacggaggcgcgaaccgtccctgcccaggccagggcagccactggcgaagcccctaacccagct

SEQ ID NO: 720425 - DNA, 75 bp, Homo sapiens
cctccagccagctggacgagggcaagtgcgcttacatccgagttttcggctttgtgagaaaccttaccatcaaac

SEQ ID NO: 720426 - DNA, 51 bp, Homo sapiens
aacacttctctcagaaacagaggagtccttcaataatgttaaacagtggct

SEQ ID NO: 720427 - DNA, 100 bp, Homo sapiens
ccctgctcggccccgcgcgccccaagcgcagtccccggaagtgcgcgccggggccccagcaaagtgttgctaacaaccacaagcagaatttgatgacggt

SEQ ID NO: 720428 - DNA, 51 bp, Homo sapiens
agctggacccggaccggttttggggcatttttctggctggtctccctgctc

SEQ ID NO: 720429 - DNA, 51 bp, Homo sapiens
gttcgagaccagcctggacaacatgggtctccgtctctccaccgggggctt

SEQ ID NO: 720430 - DNA, 95 bp, Homo sapiens
cggaggcgttggagcgcggaaatctggaaccgggatggcgacgtctacactgagtcggaggcgaaggtatcgagaaccttccctgcgaacttcag

SEQ ID NO: 720431 - DNA, 100 bp, Homo sapiens
tggtcgcctggaggaagccggaggcctgcgtggaggaggcgccccgcgcagctggctggcggagcatgagcgccccagatatgcacttatttggccatta

SEQ ID NO: 720432 - DNA, 75 bp, Homo sapiens
tacccccatcactgcttccctcagccataacaggttactccaaaattcttccaagtttgattagttctcttgact

SEQ ID NO: 720433 - DNA, 90 bp, Homo sapiens
ctctttgataagacggaggatgtcagcttcatgaagacatggccaacctgtctctccacgatcacgatggctccagtggcgcctctgacc

SEQ ID NO: 720434 - DNA, 83 bp, Homo sapiens
ccttagctgtgctcgcgctactctctctttctggcctggaggctatccagcgctgccccgggagacgctggccttcagggagg

SEQ ID NO: 720435 - DNA, 75 bp, Homo sapiens
gtgatattgaccatgatggaatgcttgacagagatgagtttgcagttagatgcttcctgggaattagaggaaaac

SEQ ID NO: 720436 - DNA, 82 bp, Homo sapiens
aagtttcagacagaccgtgagcagaccatggccaacctggagcgcaccttcatcgccatcaagccggacggcgtgcagcgcg

SEQ ID NO: 720437 - DNA, 82 bp, Homo sapiens
ccgttagctaattaaaacatttttcagggacgtagccatccagaggtccctgtgcgttttattgcgacctgccggtgggaac

SEQ ID NO: 720438 - DNA, 85 bp, Homo sapiens
cagacatggacaccaaacatttcctgccgctcgcttgcgcgatctctggcctcttcaactgcatcaccatccaccctctgaacat

SEQ ID NO: 720439 - DNA, 97 bp, Homo sapiens
cattctaacagccagccactgccctggaggaccagggggagagtttggagtgaagtttaatgttgccaatggagggtcttactctgccacccaggct

SEQ ID NO: 720440 - DNA, 80 bp, Homo sapiens
agcctcagttggaagcagccgatccagcctgcggagcctgtggggcagggtgagttctgcagtcagggtgtccgtgaggg

SEQ ID NO: 720441 - DNA, 100 bp, Homo sapiens
gcggctgttcgccgaggagatggagaatgaggacgagatgtcaggtcttcaaagcttcacctttctccaaaggcagatgtgaagaacttgatgtcttatg

SEQ ID NO: 720442 - DNA, 129 bp, Homo sapiens
cactcagccactgcgggcgaggagggcacaaggccaggttcccaagagctcaggttctgaagaaggccttccaggccacgctcaggtggctcctgagctcacccaagacccccggctgctctgatctcg

SEQ ID NO: 720443 - DNA, 100 bp, Homo sapiens
atttattaaaggaagcacacctaagtccacctggaaggccgctgtggtggaaggatgtttgactgcagagatgtggcattcactgtgggcgaaggagaag

SEQ ID NO: 720444 - DNA, 83 bp, Homo sapiens
cgagcacataacggggttcgggtgtctcgtgtgtgaacatcacaggcctttctggagcaatgcattctcaagtgtttcctcac

SEQ ID NO: 720445 - DNA, 100 bp, Homo sapiens
gctgcccagaaggcaaagccagttgctactgctcctattcctggtactccatgttggctgattgcaattctggcccaactcaaccctctctttggaccgc

SEQ ID NO: 720446 - DNA, 87 bp, Homo sapiens
aggttccaaatcatcaatgaagcaagtaagatttggagtccaggaatgagactaagcatttatctgtaggaaaagatattattcaaa

SEQ ID NO: 720447 - DNA, 101 bp, Homo sapiens
ccagcaggcattgagctccagcattgaggaggggctacgcatgcaggccatgcacagaaaccagcctggacaccaagtctgtgtcagaaggccacctcaag

SEQ ID NO: 720448 - DNA, 88 bp, Homo sapiens
tccatctctgcatccatgctccttgatgccgaactcttcaaggtggttgatgttataggtgagcaagaagaacccatcaggtgattgt

SEQ ID NO: 720449 - DNA, 90 bp, Homo sapiens
ggcggatcggctcacgcagcttcaggacgctgtgaattcggtgacttcatggtcatgacgattttcttcaatgtgagcaggcggtttggc

SEQ ID NO: 720450 - DNA, 75 bp, Homo sapiens
gccgcggcggcgcttggcagccaggagctctgcattgaaggcactgggccaagctacatcagtgatgtgggaccc

SEQ ID NO: 720451 - DNA, 90 bp, Homo sapiens
gaggagccttcatagggacagccgcccctggtgcacacaccctcgtattctcctgcccttccccaggttgaattgaccaaagcaatggtg

SEQ ID NO: 720452 - DNA, 100 bp, Homo sapiens
ccgggctctagacagcgacatgcagaccctggtctatgagaactacaacaagttcatctcagccacaggacagagcgggatgccaccagcttgtccaaag

SEQ ID NO: 720453 - DNA, 117 bp, Homo sapiens
tgggcgcaccgcggtgcggacccagcacgcctgggccgggggctgcagcatggaaagaccacagcaagattctttcattcgtctcctcctagcctgggggaccaggctcgaactgac

SEQ ID NO: 720454 - DNA, 100 bp, Homo sapiens
cttttgtaaggcaacactcagtgagaagcttggtggggcagaggttgcagtgacctgcatggtgttccaaacacaggtttatggtcaatgcaaagcaata

SEQ ID NO: 720455 - DNA, 95 bp, Homo sapiens
tactactccgccagtgaccctggacagtaacaaaacatataaagcccgagcccaaaccccgccaccatcataggagacacggggaagagacagag

SEQ ID NO: 720456 - DNA, 128 bp, Homo sapiens
ggggaaaaggcaaaaatcccatctaccgcaactctcagttcgagagtaaaggtatagtggaggattacaagccaccgttctacgatgtggttcccaatgacccaagttttgaagatatgaggaaggta

SEQ ID NO: 720457 - DNA, 75 bp, Homo sapiens
cccagctgcagttcaaagatgccttttgggtactccaaagattcaggtttactcacgtcatccagcagagaatgg

SEQ ID NO: 720458 - DNA, 100 bp, Homo sapiens
gaggaggtcggctcagccgggcagtttgaggagctgctgcgcctcaaagccaaattctgaaaaagagttccacgtcctcccttatcgagtctttgttccc

SEQ ID NO: 720459 - DNA, 97 bp, Homo sapiens
aatgtccatccagttgggagctatgagtcctctgaaatgaacagcatagatcatggggttgacagcagcattttccagaatcctaaaaagcttcatc

SEQ ID NO: 720460 - DNA, 98 bp, Homo sapiens
ggccagaaatgttcagcctggactcattcagaaaaggtacctgcacatgttgttctttgtcagtgctgtcaagtgtgtgccagggtgatccatggtca

SEQ ID NO: 720461 - DNA, 100 bp, Homo sapiens
gggagctggctctggaggctgcggaggcgacgccggagagaacgaagcctcggctgggagcggacatgtctcaggaaggctatggaactagatctcaacc

SEQ ID NO: 720462 - DNA, 81 bp, Homo sapiens
gatttgctctatgatcgtgataaaggtgtgatgaatgcagactctgctaccattttggctgtttggatcctcctttgaaaa

SEQ ID NO: 720463 - DNA, 100 bp, Homo sapiens
agctgcagtctttgtgggacaaggtggccctcatgacactgacgctcttcccggtccggctcctggttgccgctgccatgatgctgctggcctggcccct

SEQ ID NO: 720464 - DNA, 76 bp, Homo sapiens
aaacagtttacagtactcagcaaaagaacatggaatgcctgaaaagacttattcgtctaatggaagagatcatgag

SEQ ID NO: 720465 - DNA, 80 bp, Homo sapiens
cggacgccagcggacacgcgggcgagcagccattgtttgatgtcctgtgactgagaaaccaggctttaaactttatgcct

SEQ ID NO: 720466 - DNA, 78 bp, Homo sapiens
cgaaacatctgcaagtttttagtcttgctcatcccactcttccttttactagatatttggagttcttacaacatggca

SEQ ID NO: 720467 - DNA, 75 bp, Homo sapiens
tgggagggagccatgaagcattacgagacctcacattccaatcagcaaattagttgtttcagaatcctatgatac

SEQ ID NO: 720468 - DNA, 75 bp, Homo sapiens
aacgggaagccgctcggccgcgtggtgctggaggagctgtatgcggccggggagaaccgcctgggaacagacgag

SEQ ID NO: 720469 - DNA, 50 bp, Homo sapiens
gatgctgaagcgagtccctgagctcccggcatctgatctacagattgcgg

SEQ ID NO: 720470 - DNA, 50 bp, Homo sapiens
gattcgcagtggtcgcttcttctccttgatccttttatcctgccacacca

SEQ ID NO: 720471 - DNA, 96 bp, Homo sapiens
gaggatctggagacagccatggagttctacttagaggaactgtttgtggagaccattgcaaaagatgcctactgttgcgctcagcagggaaaaagg

SEQ ID NO: 720472 - DNA, 97 bp, Homo sapiens
gggatctaaaggcgggactgccacgtccaagcaaaccgggaaaggagaggatcccggagccggtaaaataccatgaagattttgaaaaaacaaaggg

SEQ ID NO: 720473 - DNA, 74 bp, Homo sapiens
gagagaaacccactgaagacgtctgcgtgagaatagagaccaccgaggtgatgatgaacagtctacacagatgg

SEQ ID NO: 720474 - DNA, 101 bp, Homo sapiens
aacccagatgtgcaacaaagtgcgatgacggcaatggacgtgatgcagttcagcaaggaggaagttcgggaagtgtcgaggctgcttgctggtatactgca

SEQ ID NO: 720475 - DNA, 100 bp, Homo sapiens
cattaccaaaccactcattttaggtggagcgcgtgtcgcacccgctgctgcagcagcagtatgagctgtaccgggagcgcctgctgcagcgatgcgagcg

SEQ ID NO: 720476 - DNA, 87 bp, Homo sapiens
tgatctggcctcatctgttccagggaggtgggattgacccccttacccaggaatggaacaacctccacaccatccttactatcagca

SEQ ID NO: 720477 - DNA, 101 bp, Homo sapiens
tttcaggttccttagaaaaatttggatgtgtaaaaagaactcttaacggcgatgcaggtcttccacagctaaggtcctcctgctagaagcagcagaacggc

SEQ ID NO: 720478 - DNA, 75 bp, Homo sapiens
agttcaagttcatgccaccaccgacttatactgagtgtctgctgcacagagctttacatccccgggagcctctac

SEQ ID NO: 720479 - DNA, 100 bp, Homo sapiens
gggaccttggcggcgcccggagccggcgtggcgctcatcgagggacgcccggcccaagtgggagaagaaatgggtgaccgttggtgacacatccctacga

SEQ ID NO: 720480 - DNA, 90 bp, Homo sapiens
cgacgatcctctagagcactgtgtgtctccccggacgcgagcccgctcccctgagagttgctctgaaacctaccgcatgccagtgatgga

SEQ ID NO: 720481 - DNA, 50 bp, Homo sapiens
gcggagtcggggctcctgacggaaatctggcattttttaaagtttgcgcc

SEQ ID NO: 720482 - DNA, 96 bp, Homo sapiens
ctgatggagcaggcttgcaatattaaagtggataatattaatgcagctgtgatggatttgaaaaaaaagaagatccgcagtctaagtgaagaggtc

SEQ ID NO: 720483 - DNA, 75 bp, Homo sapiens
cggcagcagcggcagcggcaagcaccgctttgtggatttgaccctccatgatcaggtccaccttctagaatgtgc

SEQ ID NO: 720484 - DNA, 75 bp, Homo sapiens
atggatctgaatcatctcttgaaaggtattgacctgatggacatggcttcggacatcctgcagcccaaaggagat

SEQ ID NO: 720485 - DNA, 103 bp, Homo sapiens
tgcagccacgcgggcgagcggctgtgtggatgtcggcgaagccgcgggcgaggttaaacccatccagagtaatggctgcggccttacccaggaccctggggga

SEQ ID NO: 720486 - DNA, 82 bp, Homo sapiens
tttactggagtaggtgttagtaaggtttggtgcacctcgatttggaggaagtagggcagggcccttatctggaaagaagttt

SEQ ID NO: 720487 - DNA, 97 bp, Homo sapiens
ctgttttctgggagcttcgaagagcaagtgcaccggcacctggaccaacacgaagtgagatacctgcagtttgccttccgctggatgaacaacctgc

SEQ ID NO: 720488 - DNA, 75 bp, Homo sapiens
gagaaggaaggatcttctcatgcacagaggcaacaaatggcaactttctgaaatttcgaggatgtcagatgtaaa

SEQ ID NO: 720489 - DNA, 75 bp, Homo sapiens
ccgagaaacaggcgataatttttcagatgtggcaattcagttcgtctaatgattgaaaatccttacgagacccgc

SEQ ID NO: 720490 - DNA, 100 bp, Homo sapiens
cccacgcacacattactccaacattgaggccaacgtgcagcggctgaaggagtaccgctccaaactcatcctcttccccaggaagccctcggcccccaag

SEQ ID NO: 720491 - DNA, 100 bp, Homo sapiens
gccaacatacaatgtggctgtcggcagagctggtagagaaactatgttccaacttcctgtcaacaatcttggcagtttaagaaaagcccggaaaactgtg

SEQ ID NO: 720492 - DNA, 98 bp, Homo sapiens
caccgcaccgagggcgagctccaggaaacatgccctgaactgtcacagaatgaaaccagcgctcttcagcgtcctgtgtgagatcaaagagaaaacag

SEQ ID NO: 720493 - DNA, 83 bp, Homo sapiens
tctgaacttccctggtcgaacagttttttctaatggctattcaaggtacagcagggaagaactggaaactcagagaaagaaac

SEQ ID NO: 720494 - DNA, 100 bp, Homo sapiens
tcttgatctccgccaccgtcttcaggccagaactctcttgatagagcccaagcagccaagaataaaggcaataaatattttaaagcaggaaaatatgaac

SEQ ID NO: 720495 - DNA, 90 bp, Homo sapiens
ccaggaggtgctgggccacgcggcccggctggcctcctccggtctcctcctgcagatgtgtgcaacagcaccgatcttccggaagtcgag

SEQ ID NO: 720496 - DNA, 100 bp, Homo sapiens
ggatgaacaacctgctgatgagggaggtgcccctgcgttgtaccatccgcctgtgggacacctaccagcggagctggagtttgttcagatcatcatcatc

SEQ ID NO: 720497 - DNA, 100 bp, Homo sapiens
ccagggctgccaacagtaccgcaaggaccccaaagagtgctgcaagttcatgtgtctggacccaggtgaaagaacttgtcctggacaacagtcggtcgaa

SEQ ID NO: 720498 - DNA, 83 bp, Homo sapiens
ccgatccagcctgcggagcctgtggggcaggtgcactttacaggtccccgatgaaccaagagaaccctccaccatatccaggc

SEQ ID NO: 720499 - DNA, 100 bp, Homo sapiens
gctactaccccgcagttcccggacatgatcctctccgcctctcgaggtacggactaaggggaactgtgtcaatctgacagaagcactgtcgctctatgaa

SEQ ID NO: 720500 - DNA, 100 bp, Homo sapiens
gctgcagcaagccgcacctggagaagctgaccctgggcatcacgcgcatcctaggttctgcttggattctgctagacagacccgacaaagactgtctatc

SEQ ID NO: 720501 - DNA, 74 bp, Homo sapiens
tcagcacacagaggatgatgctgactttgatgaaggttatgggagaagatatcccagaaaaaataaaagatgaa

SEQ ID NO: 720502 - DNA, 100 bp, Homo sapiens
ccaatgtaaaccagcaagacaacgagggctggacaccccttcatgcagcagcttcctgtggctatctcaacatagcagatttcatcaagaccaacttctc

SEQ ID NO: 720503 - DNA, 102 bp, Homo sapiens
aggtgatggcaacggccaacttcggcaagatccagatcgggatttacgtggagatcaagcgcagcgatggtttattcttcagtccaaggaagcaattcacag

SEQ ID NO: 720504 - DNA, 90 bp, Homo sapiens
gtgcacacatgtagagacctttgtatgtcttgtggatgagcagcagaaagttcggaccatcagtgctttggccattgctgccttggctga

SEQ ID NO: 720505 - DNA, 100 bp, Homo sapiens
tgcagtacaatccagtactgccaggccaacaggcatttttaaacaagatgcctgggaaccactcacctccttctgtgccatgaggccacctcagccctga

SEQ ID NO: 720506 - DNA, 90 bp, Homo sapiens
ccagaattgaccccttttgtgcttttcactggattcgagcctgtccaggttcaacagtatattaaggtggagtgcaactcaaaattggac

SEQ ID NO: 720507 - DNA, 101 bp, Homo sapiens
tagctatggcagtggcagaagattttaattaggaaggccaggagaatgtcgagatcctcccctctggggagcgaccgcaggccaaccagaagcgaatcacc

SEQ ID NO: 720508 - DNA, 75 bp, Homo sapiens
catggaggtttcatatacaccacttacagtgctggagaatctggtaaaagcaccattgtgaagcagatgaggatc

SEQ ID NO: 720509 - DNA, 100 bp, Homo sapiens
gacacatttgagaatggaaaagtgaattctgataccatgccaacaaacactgtgtcattaccttctggagacaatgaattcagcttagagaactatcaac

SEQ ID NO: 720510 - DNA, 100 bp, Homo sapiens
ctctggggctccgagcccggcgggaccatgttcaccagcaccggctccagtgggctctaatgcctgttattaaaccagacatagccaactgggagctctc

SEQ ID NO: 720511 - DNA, 74 bp, Homo sapiens
ttggaacaagaagtacagaaaacagcatggaccactgcggaagatattgatgatgttaagaagttcaaaccggg

SEQ ID NO: 720512 - DNA, 90 bp, Homo sapiens
cccaagatgattccagcagtggtcttgctcttactccttttggttgaacaagcaggcccttgatgagcctccctatttgacagtgggcac

SEQ ID NO: 720513 - DNA, 98 bp, Homo sapiens
gctgtccaagacctcgctggcccccatcattgtttacatcaagatcacctctcccaagttacatggacacagaacagtatgaagaagcagtacgagac

SEQ ID NO: 720514 - DNA, 86 bp, Homo sapiens
tgtgggtgctgggacttcccgtccgcggcgtggaggatgacgaagatgatcctgcagaagctgaaaaggagggaaatgaaatggag

SEQ ID NO: 720515 - DNA, 74 bp, Homo sapiens
gcgtgtcctcggagcgcggtccctgtattggtctcctgctcctagagggtttgccttcccggattgggcctaca

SEQ ID NO: 720516 - DNA, 100 bp, Homo sapiens
cggaacaccctggaagccgagaaatggacttaaccaccaccatgtcgagcaaaagaacaaagaccaagaccaagaagcgccctcagcgtgcaacatccaa

SEQ ID NO: 720517 - DNA, 98 bp, Homo sapiens
tgcagatggagaaggagaggctgcggctgaaacagcaagaactgcttcggcaggtcagagatgtcatcatcgctgcaagcgttgcaggaatgggcttg

SEQ ID NO: 720518 - DNA, 100 bp, Homo sapiens
ttggcatttggctttgcctttctggacacagaagtatttgtgacaggtactaccattaaagataccttcttctcagcaaatctatgataaaaaatataag

SEQ ID NO: 720519 - DNA, 75 bp, Homo sapiens
ctaatggtatatgaagatgtcgtccaaatagtatcaggattccaagagccagctctcccaggcgctgaacggact

SEQ ID NO: 720520 - DNA, 75 bp, Homo sapiens
aatgccatcctcttctgcctcctcatagagcaagctctggtaaagaacaagcacctttggagatgagtatgcatc

SEQ ID NO: 720521 - DNA, 88 bp, Homo sapiens
cgtgctgaagggcgacggcccagtgcagggcatcatcaatttcgagcagaagtgtggcaaaggagcagagaactttgacaagttcttc

SEQ ID NO: 720522 - DNA, 83 bp, Homo sapiens
ggaaaaacgtgtgggtacgaccttgattacctaggaacagtacgatttggggttatcacaaataaacatcttgcgaaactggt

SEQ ID NO: 720523 - DNA, 100 bp, Homo sapiens
tactgtcgtggagaaagattgaaaagtagttaatggcagtggtggtatgaaggagcaatttacagcaatgagggatttatacatgaaaaatggacaagga

SEQ ID NO: 720524 - DNA, 97 bp, Homo sapiens
gccagtcacctctcaactgtgtgccaaaggctaatcaagacaagccctgaactggctgagtcctgcacatggttccctgaatcttatgtgatttatc

SEQ ID NO: 720525 - DNA, 50 bp, Homo sapiens
cctaaacatgtggaatcccaatgccggctaacagagaccctgatgctgga

SEQ ID NO: 720526 - DNA, 97 bp, Homo sapiens
gtctcgggggccgctctgggatcccggccaccagcaattgtccggtttggtgcacctcgatttggaggaagtagggcagggcccttatctggaaaga

SEQ ID NO: 720527 - DNA, 90 bp, Homo sapiens
ctctgctgaggagtacgtgggcctgtgagagaagatgactgaggaggaggtggagaccgttctggcaggacacgaggacagcaacggctg

SEQ ID NO: 720528 - DNA, 98 bp, Homo sapiens
ccttctcctggagacgcaactcaaggtatgttgagtctaaaaaggacagagtcacagtagtcttcagcacagtgtttaaggatgacgacgatgtggtc

SEQ ID NO: 720529 - DNA, 99 bp, Homo sapiens
tcatccagatgactcagacgaggagaatgactttcggcaagatctgcagccaggagagcagcagtttgcagctgacggccctaaaggacagcaaggtgg

SEQ ID NO: 720530 - DNA, 74 bp, Homo sapiens
ggcagtcagcagccggcagcagcagcgggtctagatgttgatggaatatatcgagttagtggcaatctggcaac

SEQ ID NO: 720531 - DNA, 83 bp, Homo sapiens
ctgggatcccggccaccagcaattgtccgggactttgaacatgtcggggatcgccctcagcagactcgcccaggagaggaaag

SEQ ID NO: 720532 - DNA, 75 bp, Homo sapiens
ttgcaacagcgattttgggagcagtttcctggcaggtgtgactgaagaaatatcaaatgtttcctagtaagacag

SEQ ID NO: 720533 - DNA, 147 bp, Homo sapiens
acatttacttaacacatcatgaaggctagtttggatgtggaggggaatagactccatctatccatatgagtgtttgagcaacacacctccacttactgagtatttcctcaatgataagtatcaagaagaactgaattttgacaatcc

SEQ ID NO: 720534 - DNA, 100 bp, Homo sapiens
aaccttggacagcagattttggtttaatatctgattgggacaacattcagacccatttccagtcatgaggtataactccaccagggaatgctccgactgt

SEQ ID NO: 720535 - DNA, 100 bp, Homo sapiens
gccaacgtccgtatcatcaagaacagaacaggccctatggggcatacctatggctttattgacctcgactcccatgcgaagatgggtgtgaacctgacac

SEQ ID NO: 720536 - DNA, 75 bp, Homo sapiens
tcaaggtggaggtgcagcagcccatggccaccagcttgggctccccacggagggcagcaagtgggacttggggaa

SEQ ID NO: 720537 - DNA, 75 bp, Homo sapiens
gaccgatatagctcgccaggtggtcagcccaaggccaaccccactgtcactctgttcccgccctcctctgaggag

SEQ ID NO: 720538 - DNA, 50 bp, Homo sapiens
gtgacctcatccgtattctgagcaaggtggggtggaagacaacccgtgag

SEQ ID NO: 720539 - DNA, 98 bp, Homo sapiens
cagggaggcggcaggggcggcgggagccgctaggcggagagagaccaggaaagatactattcaagtccagtacatcataatgcagaattctgtatcag

SEQ ID NO: 720540 - DNA, 74 bp, Homo sapiens
agagatggggccctatgtacaagatgtcatgtggcctgtgttttggaccgtggttcgtacctatgctccttatg

SEQ ID NO: 720541 - DNA, 100 bp, Homo sapiens
aaggctttgagaaattttgagtcctcgagtgaatgggcggatctcatatcttcacttggcaaactcaacaagggccggagttaagatgagtccagcgaag

SEQ ID NO: 720542 - DNA, 98 bp, Homo sapiens
ccggcctgagccccagagtcagctcccctttctcgcccagcgcccccaggccgctcccggggctcacggtacttccgaagatcccagtttacagcgat

SEQ ID NO: 720543 - DNA, 97 bp, Homo sapiens
aaagtattgactgagtgctgtgctcagctcttccacagccagcatctcacttacttgacacaaaacatctatagcaggtgtgtggacccttctagcc

SEQ ID NO: 720544 - DNA, 100 bp, Homo sapiens
ccacccgcgtacccggcgcagccagagccaccagcgcagcgctgccatggagcccagcagcaagcaactggaacagatccagaaggagctaagtgttttg

SEQ ID NO: 720545 - DNA, 75 bp, Homo sapiens
cagctccacattgagagcaaaatctacaagatgatgcagggaggagctgccgcagcgggaaccgcaagagcttgg

SEQ ID NO: 720546 - DNA, 100 bp, Homo sapiens
gggagcagccagcccgtgggcgagccgcccgcccgccgagcagccatgaggaaacttccattttagaagaatacagtatcaattggactcagaagctggg

SEQ ID NO: 720547 - DNA, 101 bp, Homo sapiens
ccacaaaccgctgccagaaaagagcttgaagaaatccgcaaatgtgggatgaaaaacttccgtaacatccaggttgatgaagctaatttattgacttggca

SEQ ID NO: 720548 - DNA, 96 bp, Homo sapiens
caggaccctaacgacaggcgcctccggcccatttacgctgtcattctaatgatcataaagctgactaagccacaggacaccaagcttcacatggcc

SEQ ID NO: 720549 - DNA, 100 bp, Homo sapiens
ctgcaagcctcagatgattgtactggttactgaatgggttgacctctctctagtagatagacgtgcaatggacacataggctgaaagacacacagaagtc

SEQ ID NO: 720550 - DNA, 51 bp, Homo sapiens
catacagtgacgcttcacaggattaagtttgacagtgtggaggtgtgtgtc

SEQ ID NO: 720551 - DNA, 48 bp, Homo sapiens
agcactgactttcagctatggaatcggaagacaactgttagttttgtg

SEQ ID NO: 720552 - DNA, 100 bp, Homo sapiens
ggcgccgcgttggcgcttggacggcgggaaccggctccggagcgagaacgcgccttttcctccgcaaccatgtctgacaaacccgatatggctgagatcg

SEQ ID NO: 720553 - DNA, 75 bp, Homo sapiens
taaaaccttcctcaccgtgtactgccataaaattttgagtagaaaaatccagaaatttgaaaatcagtatcgtgg

SEQ ID NO: 720554 - DNA, 50 bp, Homo sapiens
tgcccgagaatagctccgtccagcaggtacaacaaataacactgtgactc

SEQ ID NO: 720555 - DNA, 50 bp, Homo sapiens
gaaaatcttcgaagacttttcagaattacatgaacgacagccttcgcacc

SEQ ID NO: 720556 - DNA, 100 bp, Homo sapiens
gacccggttccccggcccacagtgggggtgtgcaaacccgagagaactggttctgtcaggccaagcagaaggcagccttgctggagctgctgcatgaact

SEQ ID NO: 720557 - DNA, 100 bp, Homo sapiens
ctggatttaagcactgctgcactttatgagctgggagtgtccactcgccttccaccagcatggcaacgtcttcacagtaccgccagctgctcagtgacta

SEQ ID NO: 720558 - DNA, 74 bp, Homo sapiens
gagaactactcaaacaggtcgcagcattatcaaagggtctagtgacggagcccgcgcgcggcgccaccatgcgg

SEQ ID NO: 720559 - DNA, 99 bp, Homo sapiens
cgcggcaggagcgcgttgagggactgagaactacgatgacccgcacaaaacccctgcctccccagttgtccacatcaggggcctgattgacggtgtggt

SEQ ID NO: 720560 - DNA, 50 bp, Homo sapiens
aagaacccacacaatggacaagtgatattgctatatggagatttgccaaa

SEQ ID NO: 720561 - DNA, 100 bp, Homo sapiens
ggatctgaagagctatggtgaaacaccactgaagcattgccaagcaattctgtggtgttcttggtcacacatttatggagtttctgaagggcagtggaga

SEQ ID NO: 720562 - DNA, 76 bp, Homo sapiens
cgaacagatgtgagcgagaaagccgttgcctccagcaccacttctaatggccagaagcggactcctagaagagggg

SEQ ID NO: 720563 - DNA, 112 bp, Homo sapiens
cttcaatctgctcatgcattacccacccccctcgggagcagggcagcacccccagccgcagcccccgctgaagatggctgtgccacccacgtatgccgatcttggcaaatct

SEQ ID NO: 720564 - DNA, 90 bp, Homo sapiens
cggagtcggcgccgagaacatggtgagaaaccttaccactgtgactgggacggctgtggatggaaattcgcccgctcagatgaactgacc

SEQ ID NO: 720565 - DNA, 58 bp, Homo sapiens
gtgctttccgagcccgtctatgacaagagaagaaatgttggctatttggcgatgagag

SEQ ID NO: 720566 - DNA, 83 bp, Homo sapiens
cagaggccggaaaatgccctcaaacgcgccaacggagactccatcctctgccaatggcccttcccgggagggctctaggctgc

SEQ ID NO: 720567 - DNA, 100 bp, Homo sapiens
ctgggcagcacaagtaataaagggaaagaaagcaggacctcctggacccaatggccctccaggacccccaggacctccaggaccccagggacccccagga

SEQ ID NO: 720568 - DNA, 88 bp, Homo sapiens
gaaggaccaggtggggagctggttatccaacagaagcttctggtgcccaaagaatcttatgtgaaaatattttcagaacctggaagct

SEQ ID NO: 720569 - DNA, 80 bp, Homo sapiens
gccgcaacgccgagcgcaccgacatctgcctgctcaaaggcatctgcatctgggaccgacctcctgggctggctgatcaa

SEQ ID NO: 720570 - DNA, 80 bp, Homo sapiens
aagagattcagtatcactcgctcccttgatgatcttgagacaatgcagatcttcgtgaagactctgactggtaagaccat

SEQ ID NO: 720571 - DNA, 100 bp, Homo sapiens
ctcggcgtgctactgtgcgctcgatccagcaccatggggaagcgggacaatcgggtggtgccttagctggaccaattattgtggagccacatgtcacagc

SEQ ID NO: 720572 - DNA, 80 bp, Homo sapiens
ctccacggaaaaatcagaagctcaaacttcctggtaactcaaggctaccaagtgaagctggaggaaagcaggaatgttca

SEQ ID NO: 720573 - DNA, 83 bp, Homo sapiens
cttctggcatcattaacggaccttttaccatgaatagttctactccttctacagggccgcgatgggcctcttggaacattggt

SEQ ID NO: 720574 - DNA, 100 bp, Homo sapiens
tggtgggcgtcgtggccttcggcctggtctacgtgctgaaccacgctgaggggctgggagccgcgcacaccaccatcacaaatctcccacgagtctccgg

SEQ ID NO: 720575 - DNA, 100 bp, Homo sapiens
ggaacagggtaaatgaactgaaaagtctaaatatatcaactaaagtagctttgactcccaagacagctgggctgcgaccaatggaaacaaaggacattcc

SEQ ID NO: 720576 - DNA, 100 bp, Homo sapiens
gggaaacacaaagccggctacgcgctgcgaggtccctccttgtggtccatttctgggcaccatgggctccacagtgtgcacagatgaacgaagttatggc

SEQ ID NO: 720577 - DNA, 100 bp, Homo sapiens
ccgacctcgacgtcttgcctgtgtcccacttgttcgcggcctataggtaacaaacctgaatttggcaactggcatcataaacagaagcagtgcttcagct

SEQ ID NO: 720578 - DNA, 87 bp, Homo sapiens
agcttcagcctgctcaagaactgcagcattgcagccgccaagacgctactctgggcagttgaaaagtagaaagtcatacatgatacc

SEQ ID NO: 720579 - DNA, 100 bp, Homo sapiens
gtgtagtgagtctctacttttatggaatcctgcaaagtgatgcctcaggtgattttacaacgagatgctgctctccatagggatgctcatgctgtcagcc

SEQ ID NO: 720580 - DNA, 98 bp, Homo sapiens
atttgaggaagaattagtgtctccatcgtcatcagaaactgaaggcaactttgtctatcgcacaggacgctgtgcagagctgcaagtccgtatcactg

SEQ ID NO: 720581 - DNA, 75 bp, Homo sapiens
gacccttcctgtcgctgacggcgactgcgggaggccagctgcgggcgcttacctgccccccctgcagcaggtgtt

SEQ ID NO: 720582 - DNA, 130 bp, Homo sapiens
caccggccgacatggcggcagcggtggcggctgcgctggcgcggcttttggcggcctttctgctcctcgcggcccagcccgtggaccgggagcccgtggaccgggagccggtggtgtgccaccccgacct

SEQ ID NO: 720583 - DNA, 75 bp, Homo sapiens
gcctttgccgccaccatgcccaaaacggtcactgacaaggaacaggagtttgctgccagggctgcaaaacagctc

SEQ ID NO: 720584 - DNA, 100 bp, Homo sapiens
aggaagaggatgccatgcagaactgcacactcagtccctctgtgctccaggactccctcaataatcatgtttgggaaaataacaaccctttccaaattgt

SEQ ID NO: 720585 - DNA, 88 bp, Homo sapiens
atcgcctggccccggctctctggaccttgtctcgctcgggagcggaaacagcggcagccagaggttcattattatgaagatggtaatg

SEQ ID NO: 720586 - DNA, 74 bp, Homo sapiens
gtgacctgcagaacttagccaagagtctgggtctccgggccaacctgagggtgttggagagcacaatggctgaa

SEQ ID NO: 720587 - DNA, 100 bp, Homo sapiens
accaaatttgactacctgaaggaggagatcttctgtctacatggtggtctctcgccatctatagatacactggatcatatcagagcacttgatcgcctac

SEQ ID NO: 720588 - DNA, 114 bp, Homo sapiens
ctcagttggaagcagccgatccagcctgcggagcctgtggggcaggcagaatccagagaccacatttgaagtatatgttgaagtggcctatcccaggacaggtggcactctttc

SEQ ID NO: 720589 - DNA, 73 bp, Homo sapiens
ttctcttctccaacacagacaaatttgtcctaatgcagttccgatgcctcaaccgctcagccgccggaatcgc

SEQ ID NO: 720590 - DNA, 80 bp, Homo sapiens
agcatagacagtctgtgtaagaagtactccagggaaacctcccagcccgcggcgccatggctcacgtcggctcccgcaag

SEQ ID NO: 720591 - DNA, 74 bp, Homo sapiens
gaaaactgggtgcagagggttgtggagaagtttttgaagagcaagaagatccatcgcagagtcctaaagaagaa

SEQ ID NO: 720592 - DNA, 88 bp, Homo sapiens
tcaagcatatgaagattttgtagctggtcttggttgggagggtacagccaaagaccggagctttggagagatgaagtttaaacagtgt

SEQ ID NO: 720593 - DNA, 82 bp, Homo sapiens
gtgatgctgaaccaagagagaggttacagcttagcttccaggatgatgatatttgataggtacaagagttacagcccttatg

SEQ ID NO: 720594 - DNA, 100 bp, Homo sapiens
ccgcagtgacatcgtggactcgctggacgaggaccggctccggtggtctttgggaagaagcttcctgcctttgccaccatccccatccaccagctgcagc

SEQ ID NO: 720595 - DNA, 101 bp, Homo sapiens
ctgatgctgcccgagaaattgaggccgttgtacaaccatccagcagcttctaaccgaaaatcttcagttggcgtaaaaaagaatagcaagagcagaacgtt

SEQ ID NO: 720596 - DNA, 71 bp, Homo sapiens
agaagaatattaaccagctgaagagtgaggtccagtacatccaggaggctggagtgcaatggcgcgatctc

SEQ ID NO: 720597 - DNA, 90 bp, Homo sapiens
gtccggaggggctgccgcgggagatggatgatgatgacgacgacgatgacgtaggagatcatgacgatgaccaccctgggatggaggtgg

SEQ ID NO: 720598 - DNA, 98 bp, Homo sapiens
ccacgctgggccgggtgttgcgcctggcctacagcgaggctggtggggaccaaggcatactgaacacattttttagcagctgggcaacaacagatatc

SEQ ID NO: 720599 - DNA, 100 bp, Homo sapiens
cacagaattctggacaatcaaaacttaactcctggatacaggaactgcaagcacatgttgaccagataactgaaatggcagcagtaatgaggaaagccat

SEQ ID NO: 720600 - DNA, 83 bp, Homo sapiens
cgctgggctggaggcggcggagcgcgagagcttcgagcggactcaggggctttgaccacgacctttgaagagcttcattttga

SEQ ID NO: 720601 - DNA, 96 bp, Homo sapiens
cctctagtgaaaagaacaagaagtcttaccctcaggtcaaacatgtgcagtctttgccaacaaaaaaaattaccaagaaacctattccagatgagc

SEQ ID NO: 720602 - DNA, 100 bp, Homo sapiens
tccctgtggagattgatggggtggtccaccaggtctacctccatgccatcgtgcgagatgctcacggccggaagatgagcaagtctctaggcaatgtcat

SEQ ID NO: 720603 - DNA, 83 bp, Homo sapiens
tgcagcatattacctatcaggagaggaggtttttagaacttcagccataaaaatgggcagaattttccttgatcatatcggtg

SEQ ID NO: 720604 - DNA, 98 bp, Homo sapiens
ctcggcctcttcctgttgcaccaggttcttcgaaaactgaagcagatgttgaacaacaaggccctgggaggagcggggacactgaggacctctctcca

SEQ ID NO: 720605 - DNA, 88 bp, Homo sapiens
cttgccgggccggaaggaacagacccctgtagcggcatgttgacatagcggctttattgataaaatacaacacgtgtgtaaatgcaac

SEQ ID NO: 720606 - DNA, 90 bp, Homo sapiens
ctgtttttccagctcacccactgccagcagaggtgtgctgggcatcaaggtgaagatcatgctgccctgggacccaactggtaagattgg

SEQ ID NO: 720607 - DNA, 100 bp, Homo sapiens
accgagagcgcgaatatcgtcatcgttagaaggcttctccagtgacagtgatctggtatctcttactgttgatgtggattctcttgctgagttagatgat

SEQ ID NO: 720608 - DNA, 97 bp, Homo sapiens
tatcgacgtcgtgatccagaagtccagagctgaggactgcctgtttgcaggtatattcgaattgttgggactcacaacacagtgaacaagatttttc

SEQ ID NO: 720609 - DNA, 100 bp, Homo sapiens
cgccgccgccgccgccgccgcccctgttgcgatggcgcagaaaccccgttgacaaggcactgctttttcatgacgatggaagaactggagcaaggcctgt

SEQ ID NO: 720610 - DNA, 100 bp, Homo sapiens
ttcaagaaatggaaggactgaccagaattaaacaaccaccatgtcgagcaaaaaggcaaagaccaagaccaccaagaagcgccctcagcgtgcaacatcc

SEQ ID NO: 720611 - DNA, 46 bp, Homo sapiens
atcagaggagatgtaactatcgggaaatcctcattgacgattcaat

SEQ ID NO: 720612 - DNA, 50 bp, Homo sapiens
catcccgcagtacaagaactggagaggatagtggccaaagcctccaagaa

SEQ ID NO: 720613 - DNA, 83 bp, Homo sapiens
caagagggtgttcgactgctagagccgagcgaagcggacaagaatccttcaagaaacaggaaaaaactcctaaaacaccaaaa

SEQ ID NO: 720614 - DNA, 74 bp, Homo sapiens
ggaatttcttcactttttaacggaccagttcagggatgaattgtaaaagcaacatcagcttgaccagtataaaa

SEQ ID NO: 720615 - DNA, 98 bp, Homo sapiens
tgcaggtcacccaaaggagtctcgaagagtctcaagggaaaatagcccaactggagggaaaactttactgtaaaatggggaaaggagaaatttgaagg

SEQ ID NO: 720616 - DNA, 76 bp, Homo sapiens
ggatcatgtctggtggctccgcggattataacagtccagcagggtgggataatgataagaaaataggaatattaca

SEQ ID NO: 720617 - DNA, 100 bp, Homo sapiens
ggagcttctcagaagacagagggttttcttttgaggtgaatgaaaactttgccattgatttgatagcagagcagcccgtgagcgaggtggagactcgggt

SEQ ID NO: 720618 - DNA, 100 bp, Homo sapiens
tttaatcctcagacggtgggcgtgggacgcgcgcgcttcaccacctatgaggttcgcatgcggtctgtcattcgattgattgaagaagccaactctcggg

SEQ ID NO: 720619 - DNA, 76 bp, Homo sapiens
ctcgacttgaccggcgccaaacagaacacaggagtgtggctagtcaaggttggacgtgataagtatgagcctgcag

SEQ ID NO: 720620 - DNA, 98 bp, Homo sapiens
ataaggaattgcagtgtgattttctttccccctttaacttagaggaacgaggattatacagaaatttgaagggccagtgtcattcaaagatgtggctg

SEQ ID NO: 720621 - DNA, 90 bp, Homo sapiens
gcgccggcgtagaatctgagctgcagatgttttcagatcagttcctacaagaggagccacattttgttaagtggccttcgacttcattgt

SEQ ID NO: 720622 - DNA, 75 bp, Homo sapiens
ccggagctgaaacacgacgtgaaggtgcatcatttctggcatggcttcaggaagcattgtgctattttacaacga

SEQ ID NO: 720623 - DNA, 100 bp, Homo sapiens
cgacggcaaaggtgtcgtggtggtcattaagcggagatccggtgcggccggccggacggacctactacgactgcgcagacggtttatgagggaccaggag

SEQ ID NO: 720624 - DNA, 80 bp, Homo sapiens
gtatgcaggctaggcaaactgtatttgttactagcagtggaaagtacaatgaacttggatatccatttggttatttaaaa

SEQ ID NO: 720625 - DNA, 83 bp, Homo sapiens
ctcaattacacttcgactctcaaagcaataccaggatagctgttgtttcagagaaagatatgccatctctatggcccgaaaaa

SEQ ID NO: 720626 - DNA, 83 bp, Homo sapiens
atggccatgtccgtgagcgccgaggacgacgactatgaatcggagccggaccagatcttcgtgaagactctgactggtaagac

SEQ ID NO: 720627 - DNA, 95 bp, Homo sapiens
ttcaaggaggccttccagctgtttgaccgaacagggaagctgatggcattctgaaacctcttcccaagaaaagcattgacacagggatgggcctg

SEQ ID NO: 720628 - DNA, 83 bp, Homo sapiens
tgaaaaagtatcgtcgagaagcctatcatcggtccacagttttatgtgtgagcaagatggaggctgacctgtctggctttaac

SEQ ID NO: 720629 - DNA, 88 bp, Homo sapiens
accagcatcaagatgatttatggtaataagagtagtgagtcagtcaccctggacctgctgacctacacagacctggagtccctgcgga

SEQ ID NO: 720630 - DNA, 98 bp, Homo sapiens
ctagatttccatgcccatggaaggaaaatggctttgtaaagaagtttgaacctaaatctggctggatgacttttctagaagttacaggaaagatctgt

SEQ ID NO: 720631 - DNA, 52 bp, Homo sapiens
gccaggtgttcaccaccgagctaggccaggccaggatcagatgggaagtgga

SEQ ID NO: 720632 - DNA, 76 bp, Homo sapiens
caggacagtcagtctggtactaacaatgcaggttaccttgtatgaatgtcattcacaaggagaaatccggttgttg

SEQ ID NO: 720633 - DNA, 98 bp, Homo sapiens
gtcagagagagacagctcacgttccggaccattgacttcctgaacgacaacattcgaagaggaattgagaactactatgatgatctggacttcaaaaa

SEQ ID NO: 720634 - DNA, 82 bp, Homo sapiens
cggcggcgctggaggagcgaggcagctgtactaggactgggaacggaacatccagtcatggataaaaatgagctggttcaga

SEQ ID NO: 720635 - DNA, 100 bp, Homo sapiens
gtccatgccaggtgcccagggctgcttccacgacgtgggtcccctgccagatttgtgttgagccagatcgggagaaaggatttcatctggatgtagaaga

SEQ ID NO: 720636 - DNA, 100 bp, Homo sapiens
ctccagaagtaggagcagtttacggaagtgtaacgttgaggcccttcttgtgtatctggagaaaatagagatatctcttccaaatgcatgatgaaggagt

SEQ ID NO: 720637 - DNA, 74 bp, Homo sapiens
tgactaaaccgacttctgatccatggatgccatcagacgttccatcctcagagcagcctgaactgttcctaaag

SEQ ID NO: 720638 - DNA, 75 bp, Homo sapiens
gggcggccgggagggggcagtcctcgccggcgagttcagcgaagctcttcgtgggcggtcttgactggagcacga

SEQ ID NO: 720639 - DNA, 98 bp, Homo sapiens
acacatgccagagattgctcaggaagcaatggagcacttttcaggattagaagaggctgtgtatagaaacatacaagcttgcaaggagcttgcccaaa

SEQ ID NO: 720640 - DNA, 96 bp, Homo sapiens
cggcgagacgcgcagcgccggcgcccgggagacccaggaggagcccgcagggatccaggtccggcacgatcaagacccaggctacatgcatcacaa

SEQ ID NO: 720641 - DNA, 74 bp, Homo sapiens
gcaaacagtggttctgctggattgataaacccagctgctacagaaactccacttggagatgttggcagaccagc

SEQ ID NO: 720642 - DNA, 83 bp, Homo sapiens
gcggggaccgctgtgctctcggatcatccagcagctcgtcaacggcatcatcacgcccgccaccatccccagcctgggcccct

SEQ ID NO: 720643 - DNA, 90 bp, Homo sapiens
aaaattagaaggactcctctgcatactgcagtcaccaggagactaaagtccatcaaaaacatccagaaaattaccaagtctatgaaaatg

SEQ ID NO: 720644 - DNA, 100 bp, Homo sapiens
cgcgactcgagggtgacgctcgctccgctcgtcccgctcgtcatggcctacccgggatacggaggaggggacaacataacgatgcacggatgaaccttgc

SEQ ID NO: 720645 - DNA, 75 bp, Homo sapiens
gccgccggccctcggtgcgcccggccgcctgcacccccagccaggcccagacatgtccgtccttgtaagttaaaa

SEQ ID NO: 720646 - DNA, 101 bp, Homo sapiens
cgagcccacgaagaggtacgattccggagaatcgcgaggcagagcgggagcgcgcagccaggtgtctggtggcctgacatgcaccgcctggctgaccgcat

SEQ ID NO: 720647 - DNA, 80 bp, Homo sapiens
cgtgtaaaaagaactcttaacggccgatgcagctcttccaaagctaaggtcaaaatgcagatcttcgtgaaaacccttac

SEQ ID NO: 720648 - DNA, 74 bp, Homo sapiens
gagaagtggagcaccaggagactgcctatgtgttaatgtaccgcggtgaggctcttgaagatttcacaggcccg

SEQ ID NO: 720649 - DNA, 98 bp, Homo sapiens
ccgaaaacggaagcgcagggagaaggaagaggtgtttgaaaagacctagaggatcaagacataatgggagcatttttagacaagccaaagatggaaaa

SEQ ID NO: 720650 - DNA, 51 bp, Homo sapiens
tgcctctggtgcaaggccatggacatggatttgattgacatactttggagg

SEQ ID NO: 720651 - DNA, 90 bp, Homo sapiens
caccgtgtgggagcgggagctgcggaaagaaagcgtggatacccatcaacgaagttttgatattggaattcagattggctatcagcgacg

SEQ ID NO: 720652 - DNA, 100 bp, Homo sapiens
tgattggcaggatcctggtatccgctaacagattgtcactgctgttccaagggcacacgcagagggatttggaattcctggagagttgcctttgtgagaa

SEQ ID NO: 720653 - DNA, 114 bp, Homo sapiens
cgcgcgcagggcctgcagcgggagctggacggcgagcgcgagcggcgcgagaaagttacgggcaggacttgagtggcttcggacagggcttctcagaccccagccagcagcctc

SEQ ID NO: 720654 - DNA, 100 bp, Homo sapiens
caaaaccaacccgcagtggccgaccggagatagctaagatgccgcgcaggagtttgtgaagtgtggatatgcaggctctaactttccagaacacatcttc

SEQ ID NO: 720655 - DNA, 90 bp, Homo sapiens
ctggccttaaagatggagcaacatatggtctctctcaaggtctctggcccccctcccaactcccaaatcccccggcgtcggagatgaggc

SEQ ID NO: 720656 - DNA, 75 bp, Homo sapiens
tgtcgctcctggtcggcgcgtggctcaagctaggaaagattctgaagcttggcggagaggggtgtgtgagtggac

SEQ ID NO: 720657 - DNA, 99 bp, Homo sapiens
caagatcttcacagagaacttcttatgaatcaaaaaaggtctggagaaaatgatgtggaatataacaacatggaattagaagagggagaactcatggaa

SEQ ID NO: 720658 - DNA, 74 bp, Homo sapiens
cagcgctgccggagccgcctgaggtttcaagtgccccatttgctccaagtctgtggcttctgacgagatggaaa

SEQ ID NO: 720659 - DNA, 100 bp, Homo sapiens
cacagaaggagtttgggccaaccctggggaactgccaggtgactgccaacagccagcccaatgtcgaatccagaaatgcaccacggacttcgtgtccctg

SEQ ID NO: 720660 - DNA, 83 bp, Homo sapiens
gcggagctgacggtggaggttcgcggctctaacggggctttctacaagattgggaaaatgaggtacgttagtgttcgcgattt

SEQ ID NO: 720661 - DNA, 88 bp, Homo sapiens
ccgcccatgaagccagatttctcccaggatgggcaacactccagattcagcctcagacaacctcggtttccgctgtgctgcagacgca

SEQ ID NO: 720662 - DNA, 75 bp, Homo sapiens
tgacagtctccaaattcgcctccatctgtaccatggtgaaaggtgtagcagtcactcggcctacacccacagcat

SEQ ID NO: 720663 - DNA, 74 bp, Homo sapiens
agctaccagagacgagctgccctacacgttcgcaggtgttggggatgtcctttgcactgaccctgaactgccag

SEQ ID NO: 720664 - DNA, 100 bp, Homo sapiens
aaaagcatccccgaggaggaagacgaatcgttaaacatctgaaagggtcagggatcgcttacacctgagacgaactacagaacagcacgtaccagaggtg

SEQ ID NO: 720665 - DNA, 100 bp, Homo sapiens
ccaacccgcaagctcatgtatcaggagttcgattcctataccagtgccagtctatacagattgtatccagccttcagtcatcagacatgttcgttcttgg

SEQ ID NO: 720666 - DNA, 83 bp, Homo sapiens
aggatatcgacgtcgtgatccagaagtccagagctgaggactgcctgtttgcaggttgatgccggcccaggatggatcagacc

SEQ ID NO: 720667 - DNA, 73 bp, Homo sapiens
ccctgactacagctggagcgcccagaggcgagccctggtggaggaagaggggaacttacgttactggcttgaa

SEQ ID NO: 720668 - DNA, 75 bp, Homo sapiens
cgagaggtgcgggcgcggctggcggccacgcagaattaaacaaccaccatgtcgagcaaaaaggcaaagaccaag

SEQ ID NO: 720669 - DNA, 133 bp, Homo sapiens
cttagccatgtcgtccttgatcagaagggtgatcagcaccgcgaaagccccaggggccattggaccctacaggtgtcagcggtgcccactgtgctggccatgaagaatggggacgtggtggacaagtttgtgg

SEQ ID NO: 720670 - DNA, 75 bp, Homo sapiens
gtcttctttgcctgcactaatgcttaccacagtgcggagactcctttctgaaaaggccactcacgtgaacactag

SEQ ID NO: 720671 - DNA, 100 bp, Homo sapiens
ggccgtgcccgaggggctcagcgccttcacccaagcgcttcacatcgatcagacaacaacatggcaggaccccaggaaggccatgctgtcccagatgaac

SEQ ID NO: 720672 - DNA, 100 bp, Homo sapiens
gccggacgctgaagcccaggagagcgatggagacgtatgcggaggttgggaaggagggcaagttttcatgaacacggccatccccattgcagctgtcctc

SEQ ID NO: 720673 - DNA, 74 bp, Homo sapiens
ttacagacgctgccagcatcgccgccgccaggctcttgtcaggatggtgaagctgttcatcggaaacctgcccc

SEQ ID NO: 720674 - DNA, 100 bp, Homo sapiens
cagggactgaaacggggggagagaacaatgataaagaagaagaagagaagaaagatgaaacttcgagctcctctggaagttcatcagcagaggaaatggt

SEQ ID NO: 720675 - DNA, 100 bp, Homo sapiens
taagggtggaaaaatctacaaggttccttccactgaagcagaagccctggcatctacatttatgacattaacagagaacaggactatgtcaagaattctg

SEQ ID NO: 720676 - DNA, 82 bp, Homo sapiens
aggatatggtgcagaaggtgcacagccacagcgccgagatggagctggtaggtgagtgctgtcctcggctcactttcctcaa

SEQ ID NO: 720677 - DNA, 82 bp, Homo sapiens
gatccagagcgccgcgcacttcgtcatgttcttcgcgccctgggtctcccttgatctgagaatggctacctctcgatatgag

SEQ ID NO: 720678 - DNA, 74 bp, Homo sapiens
attgttgtatcagatccagaagatattacagatcggtcgcttggttatcggacagaatggaatcctctccaccc

SEQ ID NO: 720679 - DNA, 82 bp, Homo sapiens
gcagtgatggagaggtgcccacagctgtggccccggctcaggtctgaaggggcgtctcgattacctgagctctctgaaggtg

SEQ ID NO: 720680 - DNA, 100 bp, Homo sapiens
cctggactctgcagagtgaagagaaaatagcaaacgatccagacggcagggagtgcatcaaaggtgtgaacacagccaggtggaagagaccggagtggtg

SEQ ID NO: 720681 - DNA, 75 bp, Homo sapiens
gattggcccagacaacctgccttatgtccagatcttgaaggaatggaagttggatacactttgtgacttgtacga

SEQ ID NO: 720682 - DNA, 98 bp, Homo sapiens
ctcaaacctggatgtagttgggaaggatgttttcaaacagtctcagacctctgtgagtgaaagccttcagagggaagctgctaagaagcaggccatga

SEQ ID NO: 720683 - DNA, 100 bp, Homo sapiens
cccagagtgttgccaaggccaaatatgaatttttatttggcagatctgaagggaaagctccagatactagttcctgggtggagctacccatgaacagcag

SEQ ID NO: 720684 - DNA, 98 bp, Homo sapiens
gagaatacagagagaaaattgagacggagctaagagatatctgcaatgatgtactgatcccacccctggggaagcactactcccagcgctgggcccag

SEQ ID NO: 720685 - DNA, 71 bp, Homo sapiens
ctgccccttcagtgcccgccagtggcccgaggtccgggatttcaaacagaacactcctttcctcaactgga

SEQ ID NO: 720686 - DNA, 99 bp, Homo sapiens
gcagaaggtgttccaggacctgctctacctcatggactggatggaagagatgaagattgaagatctcaaacagacaaatcatggcttggaagaatatgt

SEQ ID NO: 720687 - DNA, 98 bp, Homo sapiens
tgcctacaaaccaccctctcctgaccctgaagaactgtgggtgtgagcaggagaaaaaagaagagatgagattgccctgagcccaaatccagaaagca

SEQ ID NO: 720688 - DNA, 90 bp, Homo sapiens
gttaaagagacccgttcagagtcctacagtggcagaaaactgtcgctgaaaagcaggagaagagaaatcaggatcgcttgaggaggagag

SEQ ID NO: 720689 - DNA, 75 bp, Homo sapiens
tcgacttagccctgctccaggaatgggacctcgagtcactgtggctttgggggaccagatactatttgtaaatcg

SEQ ID NO: 720690 - DNA, 75 bp, Homo sapiens
ggtacctgttgacttgggaagggccaggatcgcgatcaatggtacaccagaggatcgcttcctggcagaatttgg

SEQ ID NO: 720691 - DNA, 101 bp, Homo sapiens
ggggtgagaccctcacttcatccgtgagcagtgtccatccagcatccacgtttccagccatccaaggtgcctcactgcctgccctgaccacacagcccagc

SEQ ID NO: 720692 - DNA, 75 bp, Homo sapiens
attcagtcagaagaaggctgctattgaaagagagtatgcacagggaagcgtgacagcaatgacagtgttttttcc

SEQ ID NO: 720693 - DNA, 98 bp, Homo sapiens
tgacatttctagcccaggacttggatcaacacctttaacttcaagaagacaggtgactttgctgttctactaaaggctggcatgaccgttaagcaggc

SEQ ID NO: 720694 - DNA, 80 bp, Homo sapiens
cgcccgtccacacccgccgccaggaccaggaatcaccttcaagcctatgtcgtgaggctttggcagaaattaagaaggaa

SEQ ID NO: 720695 - DNA, 100 bp, Homo sapiens
gtcccggcgttcttccgctggctcagccgcaagtacccgtccatcatagtcaactgcgtggaagagaagtaatctatgccagcaattatgacaatgttag

SEQ ID NO: 720696 - DNA, 83 bp, Homo sapiens
gccggaagccctgagggcagctgttcccactggctctgctgaccttgtgccttggagccttcacgtaaatgggtccagtcatg

SEQ ID NO: 720697 - DNA, 100 bp, Homo sapiens
agccaatggagtggacggggatgggctaaacaagcccgccaagaagaagaagacgcccctaaagacgagcatccccccggtccttcagaatccaaacacg

SEQ ID NO: 720698 - DNA, 87 bp, Homo sapiens
gtgccacctgctgcacccacgaatctgcccacccctcctgtaacccagcctgtttcacttcttgatggagtgaaggtacctgagcgc

SEQ ID NO: 720699 - DNA, 75 bp, Homo sapiens
gcccaccctggagtaaccctcactggagaatccagaggagtcctggcaaaataagcatgcaggtagtaatggtag

SEQ ID NO: 720700 - DNA, 100 bp, Homo sapiens
ccagtcacaattatcaccgggtatttagatggcagaaacggtggacacaagcgaaatggtcaacggcgctacagaacaaaggacgagctctaaagagtcc

SEQ ID NO: 720701 - DNA, 100 bp, Homo sapiens
aaagggacacccactaggcgctacagctgtgaatggatacacttttggaagtctcccaggactctccatgtgtgctgaagacagagtaaaatggtacctt

SEQ ID NO: 720702 - DNA, 75 bp, Homo sapiens
ggctgccgcagtcagccggggacctcgtccgagcccacccgcctttggaggttggacacgagttgccgctggttg

SEQ ID NO: 720703 - DNA, 100 bp, Homo sapiens
gaacaacaatatcggcattctgtgctacgaaggttcttgatcaatatgaacgagaaggatttaacttcctagccaaggtgtttaattcttcacattcctt

SEQ ID NO: 720704 - DNA, 90 bp, Homo sapiens
accctggctgtcatccgccacttccgcgagcccatccgtctcaagactgtgaaaccaggaagctgttttaggttatgtgaaagagatgtt

SEQ ID NO: 720705 - DNA, 74 bp, Homo sapiens
gagccaaccagggctgcattggagaaactggcagacctttcacttcgtatccaacaaattgaaacaactctcaa

SEQ ID NO: 720706 - DNA, 100 bp, Homo sapiens
tggacaggtgtatgatgtggaggaggtggatgtgaaagatcctaactatgatgatgaccagtttggatttaggtggcgagtagaaaaagaagtaatttca

SEQ ID NO: 720707 - DNA, 100 bp, Homo sapiens
tggccttctgatgaatactttaaaaatgctgagccgattatcaggattagcaaatgttgttttgcatgaattatcaggagatgatgacactgatcagaat

SEQ ID NO: 720708 - DNA, 100 bp, Homo sapiens
tacgtggtgacacggtactaccgggcgcccgaagtcatcctgggtatgggctacaaagagaacgataagcgtgtggaaaattggcctctgatgcagtctc

SEQ ID NO: 720709 - DNA, 75 bp, Homo sapiens
ctgcatttggatttggggcccaggttccccctgactggcaggtgctgccagaccgcgacggaaagcgctgcatgt

SEQ ID NO: 720710 - DNA, 83 bp, Homo sapiens
ctcatctatatcctttggcagctcacagacctgcctagagctggaacgttacctccagagcgagccctgctatgtttcagcct

SEQ ID NO: 720711 - DNA, 75 bp, Homo sapiens
gtgtcccacttgttcgcggcctataggaagcaggtcctggggaccaaggtggacgcggagcgtgacggcgtgaag

SEQ ID NO: 720712 - DNA, 75 bp, Homo sapiens
acgccctttacctgcgtttcctggatgctcttaaaggtctaacttcaaacttgtggctgttaattcaaaactcta

SEQ ID NO: 720713 - DNA, 75 bp, Homo sapiens
gtggcgctgggcaatgacatctacgtgacggggtcctctctgcccagttggaccaggcccaggtggcccaggccc

SEQ ID NO: 720714 - DNA, 74 bp, Homo sapiens
cccattccattggagaacccaaaggaaaagcgaccaggaggccagatgctccagtgcctgatggcgaaagtgag

SEQ ID NO: 720715 - DNA, 82 bp, Homo sapiens
aggcgcgcagctgggcgcctccttcctgcaggccaggttttaaaatcaaagatgggaaaatcggagaaaattgcccttcccc

SEQ ID NO: 720716 - DNA, 80 bp, Homo sapiens
gatggaaactttggacttcaagaacttggattaaagaacttgacaggttgtggattcccagctggtgtgcatgatgaacg

SEQ ID NO: 720717 - DNA, 75 bp, Homo sapiens
ggcaaaaatcccatctaccgcaactctcagttcgagagtaaagaattcagaaggagctggcggacatcactttag

SEQ ID NO: 720718 - DNA, 100 bp, Homo sapiens
cgtccctctacgcgttttggttcccggttggtgcttcctgttcgcagctgcggcagtgagtcacagaattttccacactccttgacagaggtgcttaacc

SEQ ID NO: 720719 - DNA, 96 bp, Homo sapiens
gcaggaatgcttactgttgcgtggttcgttattaacagatgaggtttatataactttccaagacaaggaagttgtgcaaagcctcacagctactaa

SEQ ID NO: 720720 - DNA, 82 bp, Homo sapiens
tacaagttattttctcttcttctgaaaaagagatcttgtctgttatgttctgaacccacacatgttttcggaaggaccagat

SEQ ID NO: 720721 - DNA, 96 bp, Homo sapiens
ccgtcgaggtccgtgtgcagagtgattacccaaagaaggaggactacatcgtctacctgggtcgctcaaggcttaactccaacacgcaaggggaga

SEQ ID NO: 720722 - DNA, 85 bp, Homo sapiens
cagcctcactcccagtagtttctgcatttagtgagataaggtgtcagcttcctctggtgcaaccagcaagtcttccagtatgaat

SEQ ID NO: 720723 - DNA, 102 bp, Homo sapiens
gaccgggggtggaggtggtgcctctggcagtgacgaggacgaagtgtccgagaaatcctgcaggacggactggactggtgggccgggggcttttggggcgat

SEQ ID NO: 720724 - DNA, 90 bp, Homo sapiens
cgagactcctacccagatatctttagtggatgaagcatcaggagagggcaattcaagctgctggaacaagaccgagatataaaggagcca

SEQ ID NO: 720725 - DNA, 82 bp, Homo sapiens
gtctcttagcagcgcgcggagaagaacggggagccaggtattgatgtcaagctgaaccatcgtaggaagttgaaagccttag

SEQ ID NO: 720726 - DNA, 89 bp, Homo sapiens
atcaaatccgtgtcggagtccttacagatgccttcaattaagttgcagagttctgatggagagatatttgaagttgatgtggaaattgc

SEQ ID NO: 720727 - DNA, 119 bp, Homo sapiens
ccgacatgttcacgcacgggatccagagcgccgcgcacttcgtcatgttcttcgcgccctggttttaaaatcaaagatgggaaaatcggagaaaattgcccttccccatggccagcttg

SEQ ID NO: 720728 - DNA, 75 bp, Homo sapiens
tcaagattgacttctcggaatggaaggatgacgagtgagttattctccccacctcagaagtaccagcttttggtg

SEQ ID NO: 720729 - DNA, 100 bp, Homo sapiens
gagcgacctggaacgtgcagaggagcgggctgagctctcagaagggaatccctgaggactccaaggtagagggccctgcgttcacagatgccatccgcat

SEQ ID NO: 720730 - DNA, 75 bp, Homo sapiens
ccaggagacccggggacagcatcgcccaggcccctggtggttgtgtcaaaccgattggtgacatctccatgctgt

SEQ ID NO: 720731 - DNA, 90 bp, Homo sapiens
ttcacaacatgatagttgatctggataatgtggtcaaaaaggaatatcttatcaaattaggcaatacagaatgtcatcctgaacagtttt

SEQ ID NO: 720732 - DNA, 101 bp, Homo sapiens
ttcccctggcgcggactctggcaccaacaaaactatctctttgagcaatggctgccatccggaagaaactggtgattgttggtgatggagcctgtggaaag

SEQ ID NO: 720733 - DNA, 81 bp, Homo sapiens
cgctgatcgcctaacttctactgacgaagcttggaagttgcagaagatttggagcaagaggtggtggtggccttcccccga

SEQ ID NO: 720734 - DNA, 80 bp, Homo sapiens
ctagtgagtcggcggctgatttagaaggaggttcaggctacggtgagccgaaggaatcgggcgcctgattgctgagtgtc

SEQ ID NO: 720735 - DNA, 82 bp, Homo sapiens
cactgatcaaggtcatagaaagtgaagattatggccaacagttagaaatccaccgacgagagtgctggggaataaaaagggg

SEQ ID NO: 720736 - DNA, 83 bp, Homo sapiens
cctgctccggagtcataaagaggacgccgggacaccaagaagcagggaaatgcttccccgggcgctgcctggacaggcctgcc

SEQ ID NO: 720737 - DNA, 74 bp, Homo sapiens
cccaataaccaggtgcttggcaaaatcgagcgggccattgaggttgacggatatattcagacgttacgacacgg

SEQ ID NO: 720738 - DNA, 97 bp, Homo sapiens
cggggagcagagcagcaactcacccagcacacaaaatggatctcttacgaaaatcatttgactcctggggacacagatttgctgccacagaggctga

SEQ ID NO: 720739 - DNA, 100 bp, Homo sapiens
gttctcccgccctcttggtgagtgcacatgatctcacaaaatgggatctctttggtaattgctacagattattgaagactggaattgaacatggagccat

SEQ ID NO: 720740 - DNA, 87 bp, Homo sapiens
cccgtacttgaagccctacgccgtggacttccagcgcagattagaaatgatatttgccaaatttgatgaagtgcaaagttcaggcgg

SEQ ID NO: 720741 - DNA, 83 bp, Homo sapiens
cctactttgaccgtaatggacatcagcccacccagccgttcctactcatgaaggttacttctcttgtttggatatctggacgc

SEQ ID NO: 720742 - DNA, 83 bp, Homo sapiens
gcaaccaccgccctggccatctaccatgtggtatcatgatattagctggtttgacatcaagtcatttgtgagtcatcagatct

SEQ ID NO: 720743 - DNA, 75 bp, Homo sapiens
caggaaggaggaggaataatatttatggagcatatattatggaacacaatagggccagatttgagtgtgtgaatt

SEQ ID NO: 720744 - DNA, 75 bp, Homo sapiens
atttcgttttgcctccggttggggctgctgtttctcttcgccgacgaatcttttaatgggtctcctacaggaagc

SEQ ID NO: 720745 - DNA, 100 bp, Homo sapiens
agcctcccaagtagctgagattatagggtaactaaggaagtggatgctacatctaaagaggccaaatccttcttcaagcagaatgagaaagaaaaaccac

SEQ ID NO: 720746 - DNA, 98 bp, Homo sapiens
ccttcctctacttctcacagttcagttccctgtattgaacactgatatacaaggaatgaatagaagtcaagaaaaacagacctggtgggaaaaagcct

SEQ ID NO: 720747 - DNA, 83 bp, Homo sapiens
ttacctatgaggccagcaagcggaggtgctgggagcgagttggctgggatgtttcagcagcccctgagaaggaagaggaggaa

SEQ ID NO: 720748 - DNA, 100 bp, Homo sapiens
tgatgagaagaatacagacaactcagaggacagtcgagctgaagacaattttaacttggaaaaggtgcatcaccaaggccctgttcaatgcgcagttcgg

SEQ ID NO: 720749 - DNA, 98 bp, Homo sapiens
gagcagatcctggaggatgtgcggggtgcgccggcagaggatccagtgttcaccatcctggccccggaagagcccccctccatgcgcctgaaggcccg

SEQ ID NO: 720750 - DNA, 75 bp, Homo sapiens
cggggtctttaagggggagagtgacccagcctaccagcaataccaggatgccggcacagaaaactgaatctgtag

SEQ ID NO: 720751 - DNA, 75 bp, Homo sapiens
tccccttccaaaacgcagccaccgccgtcaccaatctctacaaagtgatccgggccaaggtggtggggaagaagc

SEQ ID NO: 720752 - DNA, 98 bp, Homo sapiens
gttggtctcctccttgctgcccttgttgctggtgtcgtctactggctgtacatgaagaagtcaaagggcaatttgaaattcgatatgcaccgtggttc

SEQ ID NO: 720753 - DNA, 75 bp, Homo sapiens
atatgatgttgaaatagtagaggaatacttcgctcgacaggaacacagccaggacacagacgcggatgatggggc

SEQ ID NO: 720754 - DNA, 97 bp, Homo sapiens
agagagcgagctgagtggttgtgtggtcgcgtctcggaaaccggtagcgcttgcagcatggttttgctgttactgctcagtgtagtcacaccttgaa

SEQ ID NO: 720755 - DNA, 101 bp, Homo sapiens
caggactgcccctgacccaggcgcgcccgctgctcggtggcaggagggccggcggagcgccatggcctgcatcctgaaggattcaagttcgaaatatggca

SEQ ID NO: 720756 - DNA, 100 bp, Homo sapiens
cggatccaacccagttagttacttcctgtctagagttgtagcttccacctgagtgtgaacatggctacgcctcttcattcccgtccatgccgagcccccg

SEQ ID NO: 720757 - DNA, 83 bp, Homo sapiens
atatgaacaggtgatgattgcagcactagactatggtcgggatgacttggcattgcattccttctgcagcacttgatttattg

SEQ ID NO: 720758 - DNA, 75 bp, Homo sapiens
tcttccggcctccccgggcctcccattgcagcatctgtgacaactgtgtggatttctctatgaatcatcatcaag

SEQ ID NO: 720759 - DNA, 98 bp, Homo sapiens
tacagtttgcctttctgttggggatagagttcctgctgacttacgcttgtttgagcatgctacaagtgaaaactgatgagaaactgaatgtgtctgat

SEQ ID NO: 720760 - DNA, 100 bp, Homo sapiens
gcactttcctccttctcaaattgcagcaggagctttttgcttagcactgaaaattctggataatggtgaatggggacaacaccttccatccacatatggg

SEQ ID NO: 720761 - DNA, 75 bp, Homo sapiens
gttcgggagaggctgctgccaaattgaaaaggaacttgaagaatccagacagaaatgcccaccatgctggtataa

SEQ ID NO: 720762 - DNA, 74 bp, Homo sapiens
agtggaggccgcctgggggcaggcgggctagaggagcagcctcttcgagcactactgctactcccggggcggca

SEQ ID NO: 720763 - DNA, 82 bp, Homo sapiens
atcccggaggtctccgccggctcccgggaaacatggtagaatggtgcttacctcaagatattgaccttgaaggtgttgagtt

SEQ ID NO: 720764 - DNA, 82 bp, Homo sapiens
actaacaaccatgtggtgaggaattcaagagctgaaggacaaacactggttcagttagttgaatccatggacatgaaaccca

SEQ ID NO: 720765 - DNA, 98 bp, Homo sapiens
cttgtcctctgctacccatgatgaggcggtgcaggtcctcaagaagacaggcaaggaggtggtgctggagggcaactgcgatgtctgtggactgtctt

SEQ ID NO: 720766 - DNA, 98 bp, Homo sapiens
ctggccaacaccaccggcacagtgacggcttcagaggagccagccccagtgcctgctgagccgtttgacaacactacctacaagaacctgcagcatca

SEQ ID NO: 720767 - DNA, 82 bp, Homo sapiens
gtaatcaagttgataaggaaagtactgtccaaatgaattatgtcagcaacgtatccaaggaaactctaaccagggaaaggga

SEQ ID NO: 720768 - DNA, 99 bp, Homo sapiens
cgggatcgtgaccgagaccgtgaccgagagcgtgaccgagagcgcgaatatcgtcatcgttagaagtctggagtgcaatggcacgatctcggctcactg

SEQ ID NO: 720769 - DNA, 98 bp, Homo sapiens
agacgatctcggagacgagtggtgggagaaccagccgactggagcaggcagcagcccaggttgagcaatgtttaaagcgtttgaaaaacatgaatttg

SEQ ID NO: 720770 - DNA, 50 bp, Homo sapiens
ccgagctggacccggaccggttttggaaaaatggctactggacaggatcg

SEQ ID NO: 720771 - DNA, 75 bp, Homo sapiens
aagaagacacaaggttatgcggccaccagcccctcgggttccaagatgcagctactggagacagagttctcacac

SEQ ID NO: 720772 - DNA, 90 bp, Homo sapiens
cgagcgcaaggacagcgcgaggtccgcgcagcccagcgcagccatgctttacaggaagtatggtgctggcatctgcttggcttctagaga

SEQ ID NO: 720773 - DNA, 78 bp, Homo sapiens
tcttccgcagtgattgaagctttgataaatgaaatcttcctaagtatagcggatctgaaaagaacaattgctgtcctt

SEQ ID NO: 720774 - DNA, 83 bp, Homo sapiens
atggtgatgaaattggaattgggtttacatgagattgctacaacagtgtgaaactctgaaagtccctcccaaaaagatggaag

SEQ ID NO: 720775 - DNA, 88 bp, Homo sapiens
gtttgcacctccgtggtctggggcttcgcgctcttcttcttcttccagggactcagcacctggcaggccatctggctgctgtgcacag

SEQ ID NO: 720776 - DNA, 90 bp, Homo sapiens
cctgagccatgcccatcgcagccgccccgaaggagccagggaagaggaagaacgtctgagaaataaaattcgagctgatcatgagaaggc

SEQ ID NO: 720777 - DNA, 98 bp, Homo sapiens
gttgtatttgtgacatctgtgggtttaatccaacagaagaaggtgctgactgggttacttttttaaacactaggaatggtaatttctactcttctgga

SEQ ID NO: 720778 - DNA, 90 bp, Homo sapiens
ccccgacatgattccttacttctccgccaacgcggtcatctcgcagaacgccatcaaccagctatacagaattcgttgttgggaaggact

SEQ ID NO: 720779 - DNA, 75 bp, Homo sapiens
cgcctgcttcccgtctgcgcgagtccacgcagctccccaggtagtggatgttgaactccatcgccattctctcgg

SEQ ID NO: 720780 - DNA, 100 bp, Homo sapiens
ttctatgcgatgcttctgtccttctggatcatcttctgtggcgagcacatgatggtttgaaacgcctcctaccctcttattttctttggatggattcagg

SEQ ID NO: 720781 - DNA, 83 bp, Homo sapiens
aggaacgaggcaaggagctaaagcagcgtgcgttcagccctgggcatatcccagtagaatacgggcttttccagggcaggaac

SEQ ID NO: 720782 - DNA, 98 bp, Homo sapiens
atgagaagactttttcagctactatcgtcattgaaactgtgtctgatgatttgtgagcctcaagtgactactctgtggaatcatctgtccttgccttt

SEQ ID NO: 720783 - DNA, 82 bp, Homo sapiens
atgatgactcctttgacgacgttgaccgcacactggatgaatggaagcgccgccatggcatcagatgaaggcaaactttttg

SEQ ID NO: 720784 - DNA, 88 bp, Homo sapiens
cttcagaagaaaaaagaaataattgaacaaatggagatgaaattggatactggcattgatagacggtatccaactgttgaaaaacgag

SEQ ID NO: 720785 - DNA, 74 bp, Homo sapiens
gagcccgactcggtgattgaggacaagaccatcgagctcatgctgactttggtgtgtctgccaagaatctgaag

SEQ ID NO: 720786 - DNA, 75 bp, Homo sapiens
gaggcactcagttggaagagtccagcaagccaacaagtcccaaatttggaaaagctgactcatatgaaaagctgg

SEQ ID NO: 720787 - DNA, 100 bp, Homo sapiens
aaagaagtaaaagtggtggctaatgctgaaggtgatgtggccgccctcaaccgacgcatccagctcgttgaggaggagttggacagggctcaggaacgac

SEQ ID NO: 720788 - DNA, 75 bp, Homo sapiens
gcccgcggccggggacctggacaacccccctaagaagttccgtgccagccgtgaagttgctctacaacagaagta

SEQ ID NO: 720789 - DNA, 82 bp, Homo sapiens
ctggactctctgcgggagaggctgcagcggaggcggaagcaggactcggggcacttggatgcctgaaaacttcatgcctcct

SEQ ID NO: 720790 - DNA, 100 bp, Homo sapiens
aaggggatccaggacctccagaacggaaaacagttcttccttcaaagcatgcagtacctgaagtaatagaagactttctctgcaatttcttgatcaaaat

SEQ ID NO: 720791 - DNA, 82 bp, Homo sapiens
agcagccaagatggtgaagcagatcgagagcaaggtattagaaaactactcggatgctccaatgacaccaaaacagattctg

SEQ ID NO: 720792 - DNA, 100 bp, Homo sapiens
acagaatccagctgctcatcatagtgccagagtcagtcctaggggaaaagaggatccctgctcatatgggaataactgggaacacaagtccatttggaca

SEQ ID NO: 720793 - DNA, 100 bp, Homo sapiens
ttaattttagggtcctttatatagaagggagagtaggggatggagaagtttatgtttgggatgtgaactcaaggaagtgccttaacagatttgttgatga

SEQ ID NO: 720794 - DNA, 100 bp, Homo sapiens
agttgctcatggaggtgcacggaaatgggaagaggcccagtccagagagttcactgagacttttttgacggagagggacaaacaatccaagtggagtgga

SEQ ID NO: 720795 - DNA, 87 bp, Homo sapiens
cttctgatatgttctggagatactttgcttttaattgaaggacaacttcctcctctggttgtggcagcactgcctgaaggtatgaga

SEQ ID NO: 720796 - DNA, 82 bp, Homo sapiens
tggagttcgaggagtgcgtcaaggactccccgcgcttcagggggcgacgcttcagagactgacaacctctgggctgatgggg

SEQ ID NO: 720797 - DNA, 75 bp, Homo sapiens
ggttgttggcgtgtccctgcagcgaaggatcctggctggtgtgtgacagctctgtgctgctgtgcctcaagaaga

SEQ ID NO: 720798 - DNA, 80 bp, Homo sapiens
cagctacagactttcctgagtcagattcatggaaacagctattctcataaagtggacatcttttctttaggcctgattct

SEQ ID NO: 720799 - DNA, 103 bp, Homo sapiens
gggtgcgtctgccgcagagtcggcacctgaaggacatggaggggagagaccattctaacacaggtaccgtccagacagtgcctctgagaaagggaacctaaag

SEQ ID NO: 720800 - DNA, 97 bp, Homo sapiens
tggtggaggagcagtacggccagatgtacatcaaggcctccggcagctatgcagataacatccctgaggacctcagagaccctttctacgttgacca

SEQ ID NO: 720801 - DNA, 82 bp, Homo sapiens
cttgatcctgatcctgccatccgacgtccagataatgaacagttggcgcgatcaggtacaaattgcttagaaaacttagtaa

SEQ ID NO: 720802 - DNA, 78 bp, Homo sapiens
tcacttgttccctccaagacaactgaatgagaatagtgacagtggtacaggaaagaaagaaaaagaaaagaaaaacag

SEQ ID NO: 720803 - DNA, 81 bp, Homo sapiens
cgccgcggcctcttcggctgcggaccctgccattccggaggagattgacctgcgttacgaagctcagaatctagaacactt

SEQ ID NO: 720804 - DNA, 75 bp, Homo sapiens
cgacgctgctgggtccgctgagcggggcgacccgagcgtggtaccatgcgacgacgctatgaagatgatggcatt

SEQ ID NO: 720805 - DNA, 100 bp, Homo sapiens
gtctcctttcccggccgcacagggatgaccagtgtcccagtgaaggaacgagtgaaggtgtctcagaactggagactggggcgctgccgagaggggattc

SEQ ID NO: 720806 - DNA, 83 bp, Homo sapiens
gtgggatcgatgtttcaatattggaagcgctttgatttacagcagctgcagcggggatctgacgagcttttctctacttgtgt

SEQ ID NO: 720807 - DNA, 83 bp, Homo sapiens
aagaaattggcattgaagttacatcctgataaaaacccgtgagacggtttaagcggaagcatcttactgccattgactgccag

SEQ ID NO: 720808 - DNA, 82 bp, Homo sapiens
ggttcgggcctagcggagccgggactggagaaaaggcgacggcggattgacagaagtatgattggagagcccacaaactttg

SEQ ID NO: 720809 - DNA, 82 bp, Homo sapiens
cagacgcagtggtggccctggagcagtatgccagcaagtggagccacatgttcctcctgatcgaggaccaaggtgcccaggg

SEQ ID NO: 720810 - DNA, 75 bp, Homo sapiens
ctgcggccgcccggctcttgggaaccaaggggtacttcggtccttggtggaagcatctagctcaggtgtgtcggt

SEQ ID NO: 720811 - DNA, 51 bp, Homo sapiens
aaagagaggtgttctgaacaagttcaagattcatcccagtagaacgcctgc

SEQ ID NO: 720812 - DNA, 100 bp, Homo sapiens
acacttttcttcagaagctggtcgccgccggcagatttgatggtagagtggtggcaaagcttccttttacccctctttcttacatccaaggactgtctca

SEQ ID NO: 720813 - DNA, 100 bp, Homo sapiens
gtcccgaaccctcctcctgctgttctcgggagccgtggccctgatccagacctgggcaggaatatattaaaggaatctgtgaacctgaactagaagaaag

SEQ ID NO: 720814 - DNA, 99 bp, Homo sapiens
gtgaggtccgccaggatcccaggagcccatcccgcttcctggtgttcttctacccggaggacggtaaactgtcttgagccccaccctcacctgcctgtg

SEQ ID NO: 720815 - DNA, 100 bp, Homo sapiens
aagaggatgttggacttcttacttggttttgctgttactgctcagtgtagtcacaccttgaataagaaatggaaaaccttgggatgttgataaagctaat

SEQ ID NO: 720816 - DNA, 111 bp, Homo sapiens
gtttctctccctctgcccccccttccccacgcaaccccagatccatttacactttacagcgccatgtcagaaccggctggggatgtccgtcagaacccatgcggcagcaag

SEQ ID NO: 720817 - DNA, 100 bp, Homo sapiens
ggtacaagcattcctcgtcagcaacatgctcctagcagaagcctatggatctggagactggattatggacagaacttggaaatattgagaataatttctt

SEQ ID NO: 720818 - DNA, 80 bp, Homo sapiens
aaaaccaactacagaatgtactcttatgtcacagaggaggggttactctggtggttgatgttaatcagtgtttggaagga

SEQ ID NO: 720819 - DNA, 90 bp, Homo sapiens
gtttccaaagctgtgtgctcaacctacttacagtcacgttactacaggggaagaagaggtgaaggtttcgaccatgccactgtcaacctc

SEQ ID NO: 720820 - DNA, 100 bp, Homo sapiens
ctacgatgagaactggttctacacgcgagctggaggaggaagccaagaatctggtgagcgaagccatcgcagctggcatcttcaacgacctgggctccgg

SEQ ID NO: 720821 - DNA, 100 bp, Homo sapiens
atgaactgaaagctgaagttgcaaatcacttggctgtcctagagaaacgcgtggaatgttgatgccggcccaggatggatcagacctgtgaactacccag

SEQ ID NO: 720822 - DNA, 82 bp, Homo sapiens
cgcaaatgactggtcacgcgggactgaacaccgcacaggcaggaggcatggccaagtccattgaagacttgaacaagtgggc

SEQ ID NO: 720823 - DNA, 100 bp, Homo sapiens
ggagcctccagagtagacaagccctcaaggatgcccggtccccatcaccggcacacattgtcatcctgataacttaagtgactctctcttttccggtgat

SEQ ID NO: 720824 - DNA, 95 bp, Homo sapiens
atttacagttgacagtcctgttcagcaggtgtgtttccattgtagaaaacctggtcatggaattgcagattgccccgccgcccttgaaaatcaag

SEQ ID NO: 720825 - DNA, 98 bp, Homo sapiens
aaccttgttgttttacagaccttaaggtgtttgttgacctcttacctgctacacagtgtacaaaagaagctgaatatggtgggcatgatcagatagat

SEQ ID NO: 720826 - DNA, 100 bp, Homo sapiens
gactactacagtattttttggtttgactgtgtatactctacaatctaagaaggatttcagcaaatttggagcagggagttttgtcaagcgcttcagcagc

SEQ ID NO: 720827 - DNA, 74 bp, Homo sapiens
ataaatggtggcagaaataccagaagcactgaacctaccagatgtatttgggttggtcgtcctcccattggaac

SEQ ID NO: 720828 - DNA, 75 bp, Homo sapiens
caagaagttgaaaaacgcttttcacgtcacctggagagatgcacagctgggacgatgccggagtgtgaaggagtt

SEQ ID NO: 720829 - DNA, 98 bp, Homo sapiens
gcaggcctcgtgccgttacggccatcacggcggccgcagtggcgtcctggagccctcctcaggtggaatgcaagctttaggacttcacctgacagatc

SEQ ID NO: 720830 - DNA, 90 bp, Homo sapiens
gggaccggaagatgcccacggactacatcaggaacggggtgctctacgtcacggagaaatgaggacggggacttggttgccttttccagt

SEQ ID NO: 720831 - DNA, 75 bp, Homo sapiens
agctttgaaggcaggccattgggtggtgttggatgagccctgcctgcctggcgctggaggcccatgacagaactc

SEQ ID NO: 720832 - DNA, 75 bp, Homo sapiens
agctgcgcatcgtggatctgattaaaggaatgggtaccacagaccatgtcatcgtcctggcgtccacgaaccgag

SEQ ID NO: 720833 - DNA, 98 bp, Homo sapiens
ttcagaaaacaagactatgaacaagcagtgtttcatttacagcagcttttagaacgtaagccaggctaaaagagatgctaagagaatgcctgcaaaag

SEQ ID NO: 720834 - DNA, 80 bp, Homo sapiens
gggagccatctgtgccatcatcgtggtagttattgtaaccgagccacatcgctcagacaccatggggaaggtgaaggtcg

SEQ ID NO: 720835 - DNA, 74 bp, Homo sapiens
cgctgcagccggagacccggagaaagggattgaatatgatgcatatcgcactgatttggaagaactgaatcttg

SEQ ID NO: 720836 - DNA, 121 bp, Homo sapiens
gtgcagaaaggaatcaaaagaatatttagaatgcaggatggagagttggcccagtcccgcggtgaaaggaaggttcaagtctcagctgccagatctcagtggccctcacagctacagtccg

SEQ ID NO: 720837 - DNA, 100 bp, Homo sapiens
ctttttggctgttctgaagagtgttactgtgaacattcatgcacaaatttttatgtggagctcctggagcctgtctgccatcagctgtttgagctctatc

SEQ ID NO: 720838 - DNA, 100 bp, Homo sapiens
ttgcccgccgggtgaacctcaccgaggcgagagtgcagtcattgaagtcaacaagagagacatagtcttcctggtggatggctcatctgcactgggactg

SEQ ID NO: 720839 - DNA, 100 bp, Homo sapiens
caaaagaagagaagcagaattatacctagaagtctactaatggacagttagtcacccacctacatgttgaggaaggggaacagtttgtgaagaaaatcgg

SEQ ID NO: 720840 - DNA, 75 bp, Homo sapiens
gccggagcccggaatcccgctcggagccagccagccgtcccgagctaccagcagaggcagaggaggtggacacgg

SEQ ID NO: 720841 - DNA, 73 bp, Homo sapiens
gggcggtaaggatttcaacatgcctctgacaatctctagtaattattctcctgctgttgacttcaggactatg

SEQ ID NO: 720842 - DNA, 82 bp, Homo sapiens
aaggccttcctttttcgtctgggctgccaacatgaggcagaagaggcctggaccttggcgcacacagacccaggaacagatg

SEQ ID NO: 720843 - DNA, 100 bp, Homo sapiens
atgctggatgttaaaatggaggacatcaaggtgggtgacatcaccatcctggtgaacaatgccgccgtggtccatgggaagagcctaatggacagtgatg

SEQ ID NO: 720844 - DNA, 98 bp, Homo sapiens
ctcccagtccctgaccccattcttctcaccaatagccatgatggactggatggtgagagaagtggatgggccctatacctccagccgtgaatgccaga

SEQ ID NO: 720845 - DNA, 88 bp, Homo sapiens
tgctcgcgctactctctctttctggcctggaggctatccagcagctgcctgagaactggacagacacgcgggagacgctgctggaggg

SEQ ID NO: 720846 - DNA, 126 bp, Homo sapiens
gcccatctaaaataatgggaaaggaaaacttggaagctctgcaaagacctacgctccttcatctaatccatggaaaggctattttggcattctgctggatatatgttcgtaaataccaaagtcggc

SEQ ID NO: 720847 - DNA, 88 bp, Homo sapiens
actgtgcatacaggacgggtccatccatcgcataagagcaaagaatactattgttgccacagggcagcaattccatttccgtgagggc

SEQ ID NO: 720848 - DNA, 100 bp, Homo sapiens
tggtggcctgcctgtacccacgagccctaacatccagccgtccccagctcacgcatggccgaaacagaagccctgtcgaagcttcgggaagacttcagga

SEQ ID NO: 720849 - DNA, 98 bp, Homo sapiens
aaagcgttggagaggtgttaccggaacggcggcgacaagggtgttcccgaactagagtggaaggtgacaaagtacaatttgaagaatttgcaaaagta

SEQ ID NO: 720850 - DNA, 100 bp, Homo sapiens
gcgagcggggacttcactgctctgctgtctcctgcaagaactggctcaagaaatttgcctcgaaaaccaagtgtcagttgtacccgaggcgttctcagca

SEQ ID NO: 720851 - DNA, 75 bp, Homo sapiens
ctggacggcgagcgcgagcggcgcgagaaagtctcctctgagcctccggcctccataagacccaaaacagatgac

SEQ ID NO: 720852 - DNA, 100 bp, Homo sapiens
cgcagtggtcgcttcttctccttgacaaccttttagtcctcacggtggccactaaggagaccgagggattccgtcgcttcaagcgctcagctcagttctt

SEQ ID NO: 720853 - DNA, 126 bp, Homo sapiens
tgactgaccacttctgcctgggccatgccgaaaaaaggagattgtgacatatcactgcattcaatacctagatgatctgttggagccagcagacctgactggagagaactggatgatgagctcatg

SEQ ID NO: 720854 - DNA, 97 bp, Homo sapiens
atctgtacatagattttggtggaaagtttcattgtgtatgtagaagaccagaagtggatggagacttcctggacaagatcgacgtgatcaagcaggc

SEQ ID NO: 720855 - DNA, 100 bp, Homo sapiens
caggcatgccccgctacgagctggctttaatcctgaaagccatgcagcggaatctccgccacctccctactctcggctgtctcctcgcgacgagtacaag

SEQ ID NO: 720856 - DNA, 90 bp, Homo sapiens
cgataaagacaggagtggagtgatatcagacaccgagcttcagcaagctctctccaacgacatatgtagagtgtgtcggtcagaaggaac

SEQ ID NO: 720857 - DNA, 100 bp, Homo sapiens
cagagaggaaatgtgttaaatttgaatggtgctggtgacccactcactccaggctatccagcaaaagctgagctgcccctcctggacctgatgaagctgt

SEQ ID NO: 720858 - DNA, 112 bp, Homo sapiens
ccgcgaagtaagaataatgaaggttttgaatcatcccaacatagttttaaccatgctgaccaacgaaactggctttgaaatcagttcttctgatgctacagtgaagattctc

SEQ ID NO: 720859 - DNA, 76 bp, Homo sapiens
attaatctcccaaaatattctagaaggggaaaagctacttcaagaacccaacgtcttcctcatcttcagccatgga

SEQ ID NO: 720860 - DNA, 110 bp, Homo sapiens
gaacggcgcgactgcaaagattacgtgagcatcttcgtctgcagtgattggcagctcctgcggtctgaagttgcagccggagtgaagaagagcggaccgctgcccagtgc

SEQ ID NO: 720861 - DNA, 100 bp, Homo sapiens
gttgtatgtgatcagaagctgcgtcccaacatccccaactggtggcagagttatgaggacagagcgggatgccaccagcttgtccaaagggaagttccag

SEQ ID NO: 720862 - DNA, 75 bp, Homo sapiens
attcagacgccgattcgcccaggtggaagccattatctactgatggaccgggtttctcagattcttcaagatcac

SEQ ID NO: 720863 - DNA, 75 bp, Homo sapiens
cggatggtctgggtggacctggagggtatgcagaagttggctagtcaatacctgaagagagattggcctggagta

SEQ ID NO: 720864 - DNA, 100 bp, Homo sapiens
aagcagcatgtgaaggagaccaaggaacctagaaagattgtacaatgaatggtgattctcgtgctgcggtggtgacctcaccacccccgaccacagcccc

SEQ ID NO: 720865 - DNA, 99 bp, Homo sapiens
ctgagagagatgcttaaaaatcaccagttactttaatgatttttcagaagaagtgaagtcaagatgaagaaccatttgcttttctggggagtcctggcg

SEQ ID NO: 720866 - DNA, 75 bp, Homo sapiens
cagactgtccgcctggagcgttacaaggccttctacattaccgtcaccaccaagtaagcgaagaaaattagagaa

SEQ ID NO: 720867 - DNA, 100 bp, Homo sapiens
gagcggaagaatggcagtgctcaaactcaccgaccagggttcaggataagtttgaggtgctgaattacacaagcattcctatctttctcccggaagtcac

SEQ ID NO: 720868 - DNA, 75 bp, Homo sapiens
aagcgcttcccccagcacaccatcatgttgctgatagtccaactccaccgccaccacctccaccagatgacattc

SEQ ID NO: 720869 - DNA, 50 bp, Homo sapiens
ggcgaatagctctgaccacccggcgaagggccgcgatgggcctcttggaa

SEQ ID NO: 720870 - DNA, 129 bp, Homo sapiens
ttgcatttgccgaagcttatatcccaccattgccacgggcattctccatctccttgcagttctggacatggcaagacatgtgccactctatcgggcactgctggaattgcttcgggccattgcttcttg

SEQ ID NO: 720871 - DNA, 74 bp, Homo sapiens
cgagctggacccggaccggttttggtcacagtcctttgagcggtcggtgcagctcctcgaccagatcccatcat

SEQ ID NO: 720872 - DNA, 127 bp, Homo sapiens
cgcccagaccccgggatcggtggaggaagatgctttgctctgtggacccgtgagcaagcataagctgccaaaccaagattctgaagcaagtaagccaaaagatgggcaggacgccattgcacagagc

SEQ ID NO: 720873 - DNA, 100 bp, Homo sapiens
tgcgacgagggagtcgatttacctggagaaaggagtgcctggctgttatggaaaggttcggccagtgggaaggacctgcagatcagaggatggaggaaag

SEQ ID NO: 720874 - DNA, 50 bp, Homo sapiens
cctctagaagtttctgaggaacaggataaaagaatcagagtgtctcaacc

SEQ ID NO: 720875 - DNA, 100 bp, Homo sapiens
gcgtcgggtcccagagccgggcgcggctggggcccgaggctagcatctctcgggagccgcaaggcgagagctgcaaagtgttccttgcctgtatctcccc

SEQ ID NO: 720876 - DNA, 75 bp, Homo sapiens
ctactggggccagggaaccctggtcaccgtctcctcaggcctggagctgctgaagactgctattgggaaagctgg

SEQ ID NO: 720877 - DNA, 97 bp, Homo sapiens
agacggcagggagtgcatcaaaggtgtgaacacaggctttttggaaaggatataaacaacggaaggagtatatgcacaggcggcaaacgttcattga

SEQ ID NO: 720878 - DNA, 75 bp, Homo sapiens
ttgtaatggaagggcatggcaagactccacctcctggtgaagaaagcaaacaatggtatgttacttacggtcatg

SEQ ID NO: 720879 - DNA, 100 bp, Homo sapiens
actaacagcagaagctattcagacacccctgaaatctgccaaaattggtcgcattatgtttcagctcttctcagacatatgtccaaaaacatgcaaaaac

SEQ ID NO: 720880 - DNA, 82 bp, Homo sapiens
gtcacagtgttgctgcaacatagagctgacattaactgtcaggatgctttcattggatttggaggaaatgtgatcaggcaac

SEQ ID NO: 720881 - DNA, 99 bp, Homo sapiens
gtcttagaatacattccagaaaatgtatcaagggagaagatgtcaaccggacactagaaggtggaaggaaacctcttcattatgcagcagattgtgggc

SEQ ID NO: 720882 - DNA, 100 bp, Homo sapiens
gaaaataagtatgaaaacgtggatttgctttgtaaacttgagaatacattttgttgccaacaaaaaggatttgtacacacagatatgacgaaagacttga

SEQ ID NO: 720883 - DNA, 100 bp, Homo sapiens
tactgttgcgtggttcgttattaacaggtcttagtggtgcaatggctagtataagcgtgcgttcgagtaccccaggctctcctacacatgtaagcagtgg

SEQ ID NO: 720884 - DNA, 90 bp, Homo sapiens
tccacgttggatgctgccttgtccggtaccctgtcagctctgaaatagaaaatgtctgcagacggcggaggcatccaggacacccaggac

SEQ ID NO: 720885 - DNA, 100 bp, Homo sapiens
agtaaagatcctatatcatctactgaaatctttaaaggagcaaacatgaacgttggagttgcccacagtgaagtgaatccaaatacccgtgtcatgaaca

SEQ ID NO: 720886 - DNA, 106 bp, Homo sapiens
ccggagaaggccgccgggcccgggcatggtggtctggggcaacgcggaagtttgtttcgacgccggaccgcgtaagagacgatgatgttgggcacggaaggtggag

SEQ ID NO: 720887 - DNA, 74 bp, Homo sapiens
aatgtcaactttactgagaattttccacctcctgacacaacaccactcagttcttatagaaaattggaacgata

SEQ ID NO: 720888 - DNA, 50 bp, Homo sapiens
caggtctggagctcgaccgggccagggccgttgctccagggagaactgca

SEQ ID NO: 720889 - DNA, 73 bp, Homo sapiens
cagctgtatcaggatccaaggaacgtttggggtttcctagctattgcattaatgaccacagcggtcatctcta

SEQ ID NO: 720890 - DNA, 100 bp, Homo sapiens
ttaaggattccaagtaactcttatttgtatctccagatgaaatggccactgcttgatgtccaggcagggagcctccagagtagacaagccctcaaggatg

SEQ ID NO: 720891 - DNA, 100 bp, Homo sapiens
gaagagtcttcggcatcgggcgacagcaggtcacagtggacgaggtgttggcggaagggtgagaatccttttgaaattcaagaccattctcaggatcagc

SEQ ID NO: 720892 - DNA, 118 bp, Homo sapiens
ggtccacgtcggctatctcgtgcttccagtgtttggctctgtgcgaaacagagacatcgatgagtgtgctgaagggcgccattactgtcgtgaaaatacaatgtgtgtcaacaccccg

SEQ ID NO: 720893 - DNA, 100 bp, Homo sapiens
tcatgacggtgtccttccacaaatacggaaattacttcttccctggcacagatgaggacggggacttggttgccttttccagtgacgaggaattgacaat

SEQ ID NO: 720894 - DNA, 82 bp, Homo sapiens
agaggagaggaaaaaggaagagagcactgcagccagtgaaaccactgagtcaggacagttcaacgaggacatgatccccacc

SEQ ID NO: 720895 - DNA, 50 bp, Homo sapiens
ggcgttcgaggagatcatcctgcagtgccaacatagccgaggtagaggtc

SEQ ID NO: 720896 - DNA, 82 bp, Homo sapiens
ggattcatgactttgtaatggaggtttggaattcacccagttgcaggccgaatgcctggtcagcttaatgtgctgctggctg

SEQ ID NO: 720897 - DNA, 101 bp, Homo sapiens
ttagagcgtctggccaagaatcagaggaagtgggggacggcaaaacagaacagaaaggcggagataaaaagaggggtgttaaaagaccacgagaagatcat

SEQ ID NO: 720898 - DNA, 74 bp, Homo sapiens
ccccaggtgatgcctgaagctcaagggactgtgtccaccctcagaagtcggccagagcagcatgtggatctcca

SEQ ID NO: 720899 - DNA, 82 bp, Homo sapiens
aaagatggcggcagggaccagcagttactgggaaggtgcacaaatggagtccagaggaggctgtaagagccatcgccaagat

SEQ ID NO: 720900 - DNA, 75 bp, Homo sapiens
ggagaatagaccctctgtccaggcagcattaaaacttaagcagagattggaaaggtgtatgagcattgtgacatc

SEQ ID NO: 720901 - DNA, 98 bp, Homo sapiens
gcgggagccatgggagctgcggctgcagctgaggatgtcaccttcctctaccacccctgtgcccatccctggctgaagctccagcttgccctcctggc

SEQ ID NO: 720902 - DNA, 74 bp, Homo sapiens
tatactgctgaccacccttctggtgattgatcgctgccgttttgcccttgggagtaggatgtggtgaaaggatg

SEQ ID NO: 720903 - DNA, 75 bp, Homo sapiens
ctatggatggagcaattgctgctgccttgctgatgtttggtgatgcagatccagctccaggtcccacaggggctc

SEQ ID NO: 720904 - DNA, 100 bp, Homo sapiens
ctagaatccgggagttcgtgccgccttttgggatcaaaggtcaagaggaagaagcccctccagatggtgctgttgccgaatacagaagagaaaagcaaaa

SEQ ID NO: 720905 - DNA, 75 bp, Homo sapiens
ctgcaaacctgccaaacccctacctaagatcttcataaacaatgaatggcatgattcagtgagtggcaagaaatt

SEQ ID NO: 720906 - DNA, 90 bp, Homo sapiens
cggatcccccggaccccccgaccgagtgtggccatctggggccgtgtggtatttgccactcaggagacatgtccctatgacatagcagtg

SEQ ID NO: 720907 - DNA, 100 bp, Homo sapiens
agtcgcccaatctgaaagccgtggatgcgcctgcgccctccatctcgtcaggcctgcacagctgaccacagttgggaaacgttgctgtctttggattcag

SEQ ID NO: 720908 - DNA, 100 bp, Homo sapiens
gcaccgccccgcccccgcgcggccggcgcccgagctcccctcccctctccagcacgcgagtgtcggtgactacacttgtcaacacaagcaacaaaggccc

SEQ ID NO: 720909 - DNA, 75 bp, Homo sapiens
gagccctgaagatccctcagggacaggatctggttctgctgccggagaaggcaaacccgctttgagtgaagagga

SEQ ID NO: 720910 - DNA, 51 bp, Homo sapiens
aggacaacagctacaaccgggggatgaaaactttcggaagagaaagttgcc

SEQ ID NO: 720911 - DNA, 85 bp, Homo sapiens
aggctcaagaaaaaggaagattggactatgctaagaaattggctcttcctcctgctggtcctgaggcactccatgttcatcctaa

SEQ ID NO: 720912 - DNA, 83 bp, Homo sapiens
gcgaggttcgggctggttgttccgttgcgagctgcagctgcgatctctgtggtaggcccagggcgtgatggtgggcatgggtc

SEQ ID NO: 720913 - DNA, 100 bp, Homo sapiens
ggagcccaacggcccgtcgctgcccagggatgaagggcccccgaccccaagctctgccacgaaggtgccaccggccaagactaaggggctgcagagcggg

SEQ ID NO: 720914 - DNA, 134 bp, Homo sapiens
caacagaggaagaaaggagagtcttcgcagaatgcaatgatgaaagcttctggttcagatattcaagtccagcatccagcggccaagtccatgatcgaaattagccggacccaggatgaagaggttggagatgg

SEQ ID NO: 720915 - DNA, 76 bp, Homo sapiens
aggagatattgtggctcgagatgaagtagacagggtgttgaaagcagcaggggcctagaagacattaaaccgatac

SEQ ID NO: 720916 - DNA, 101 bp, Homo sapiens
tgagctgggaggccactagcagccagttccggcccgaggacaccgactaccagcaggcttccctgattgtgactgaggagctgcacctgatcacctttgag

SEQ ID NO: 720917 - DNA, 83 bp, Homo sapiens
gtggaacggaagctggcccaccgcaagaccagcaagttccccgagaacccccgaggttaatttggagtggcccctggagtcag

SEQ ID NO: 720918 - DNA, 103 bp, Homo sapiens
gggaattccaccagaagtcctgaaactaatggcctcctctgtggagaccctgaggaaaactgtgcagcaatggctgccatccggaagaaactggtgattgttg

SEQ ID NO: 720919 - DNA, 75 bp, Homo sapiens
aggaggtggatgaggactttgacagcaagctgagcttccgggagatgtcgacgactgtgcagacagcccgtgctg

SEQ ID NO: 720920 - DNA, 75 bp, Homo sapiens
tacgcagcaaaccatccagaaggaatagccaggccagaagaaggaaggcctgtggtgagtgggacaggaaatgac

SEQ ID NO: 720921 - DNA, 82 bp, Homo sapiens
taaattgaaaatattggggccatttagtaacttctttgcaagggaaatcctcattgacgattcaatttgttgaaggccaatt

SEQ ID NO: 720922 - DNA, 75 bp, Homo sapiens
ggggaggtgaaaatatagaaatgtctttcagagatttgattgccttatgtgacaagcccaagatctgtgacagtt

SEQ ID NO: 720923 - DNA, 50 bp, Homo sapiens
caagaatgtgtgcccttaatgaagcagacatctggtccctgggcataaca

SEQ ID NO: 720924 - DNA, 100 bp, Homo sapiens
gctgcttccggatgactttaaggtccctatcactgttcagtccatcgtcattcagtctctaaataaaacgctcacccgacgggaggacactgatgtgctg

SEQ ID NO: 720925 - DNA, 98 bp, Homo sapiens
cagttcgctacacagcaatgcatcgagcacaacctccaagagggaaaacatttctccagattatccactcacccttctagaaggtctaacgaccatta

SEQ ID NO: 720926 - DNA, 111 bp, Homo sapiens
ctgccgtccttctccactttcgccagcccgtgccgcgagcgcggcctgcaggaggtaaaagtacacctgtaagccagcttggttccgcagactttcccgaggcccccgatc

SEQ ID NO: 720927 - DNA, 98 bp, Homo sapiens
aaaaatcccatctaccgcaactctcagttcgagagtaaagaagagaagctgaatttggacgacagccagtgggaggacatccacgttgtcaccggagc

SEQ ID NO: 720928 - DNA, 75 bp, Homo sapiens
tgcctcactgagcaaccaagatgagaaagatcagtctaaagaaaaggagaagaaagtgaaaaaaacaattccttc

SEQ ID NO: 720929 - DNA, 75 bp, Homo sapiens
gcggaagggggacagccgagcccggagcccggagcccgggcaagagctgggactcgctcagcagcagcctgaaaa

SEQ ID NO: 720930 - DNA, 100 bp, Homo sapiens
aaggcttcactggacccagctgtgaaacggccgaagtgattcaacagagccacattctccatcagaccttcttcccatgtctccaagtgtgtatgcggtg

SEQ ID NO: 720931 - DNA, 137 bp, Homo sapiens
aaacgcttatccactcactcacccttccgaactcttaacatcaatgggcaaatccccacaggagaaggactctggattaatcgaattacagctgctagccaggaacatggactgaagtatccagcgctcattgggaa

SEQ ID NO: 720932 - DNA, 83 bp, Homo sapiens
caaggagctaaagcagcgtgcgttcagccctggggtcgtcaaagtcctacattttagctttcagtgctgaacttccttctccc

SEQ ID NO: 720933 - DNA, 74 bp, Homo sapiens
gtgatgagcagattgccacatcattcggaaagccgacaggctatggagttactagtagagaaagcaatcagcag

SEQ ID NO: 720934 - DNA, 100 bp, Homo sapiens
cccgccactttccccggagctgggccgcgaacacctcactattgatggtgtagcgctttaggggaagaatcttgtggaagaagaatgaagttgctgatta

SEQ ID NO: 720935 - DNA, 96 bp, Homo sapiens
cctcgctccctctgctcttcctcccttcgctcgcaccatgtttgcccagctggtcgctatctataagacactgggaggagaaaagttccctctcat

SEQ ID NO: 720936 - DNA, 83 bp, Homo sapiens
aaaagattcacctttggatttcatcgcttagggagaactaatgccgacgtgatgaccgccctgtcccagggctacaggatgcc

SEQ ID NO: 720937 - DNA, 101 bp, Homo sapiens
tctataaagccagtatgatagcaatgatggcaggttcacaatggtccgtagtggaaaaaatggtgaccttcatcttaaacagattgcatattacaaacgaa

SEQ ID NO: 720938 - DNA, 83 bp, Homo sapiens
ggaaattcctgacgttcattgatctgggagaaatgcctgctgcctctccagttggctttggaatccaagaatgtgaagctggc

SEQ ID NO: 720939 - DNA, 75 bp, Homo sapiens
tgctgcgctgcgccgacggctccacctacaaggtggttggaggcaaagtaaagaagcccggtaaacgtggtcgga

SEQ ID NO: 720940 - DNA, 100 bp, Homo sapiens
ccgctgagccccctccaggagcgaaagggttaagaatgatcgtgagtgcatctccatccacgttggccaggctggtgtccagattggcaatgcctgctgg

SEQ ID NO: 720941 - DNA, 74 bp, Homo sapiens
tttgaggacctggattccctgctcagtgccctgagtctcaatgaagagaatgcacgttatgaaccaggatataa

SEQ ID NO: 720942 - DNA, 100 bp, Homo sapiens
ctcatgcagcagatgatccagcttttggctggaagtggaaactcacagatggtgaggccagaaccttcaatggctccattgaactctgcagagctgactc

SEQ ID NO: 720943 - DNA, 75 bp, Homo sapiens
ctggttccaaacccaccttcgagctctcagccgacgaggtggagctgggcctggcttagcagtgtctgcaaaaac

SEQ ID NO: 720944 - DNA, 90 bp, Homo sapiens
ccggacggcgcgggcgccggcgaggagagcccgcggctgcagtcctgacacagctctccctgaggagcagccacattccagctcccagtg

SEQ ID NO: 720945 - DNA, 101 bp, Homo sapiens
ccgggagccgcggcccggaatcggggcgcttcgccccgggccccccagcatgaagaccccggcggacacagatgtgaagttcatttccaatccgccctcca

SEQ ID NO: 720946 - DNA, 73 bp, Homo sapiens
ccacgtgagccacggccacggccgcatagatgttaactcattccagcaaactacaaagtggattgatgatgtc

SEQ ID NO: 720947 - DNA, 88 bp, Homo sapiens
tttctgactcacacgggggagtcgggggagtcgtaaacaaccctgaagagaacagccaggcctggccaagttactggaggagatggac

SEQ ID NO: 720948 - DNA, 80 bp, Homo sapiens
gacaccacgataacatttagcctggaacagagcggcactcggcctgagcgggtctatcagccacagtctctgcaagtttc

SEQ ID NO: 720949 - DNA, 75 bp, Homo sapiens
ataagaagtatgaagacatggaaggtgatgcaggttctgaatgctgatgccattgttgtgaagctgaactcaggc

SEQ ID NO: 720950 - DNA, 99 bp, Homo sapiens
aagaaaaactcggtctcctgttgctcactttcctgggtattgtagccgctgtgcttgtcaagctgcatcttcctcccgtgaggctggccgagctccacg

SEQ ID NO: 720951 - DNA, 83 bp, Homo sapiens
cataggtactttttctgccatgaatttgcattcaggactcagggagtacacacttaccagatttcagaagaaagtggtagctt

SEQ ID NO: 720952 - DNA, 83 bp, Homo sapiens
ggaggaccgaagcttccggacgacgaggaaccgcccaacatggcctcggagtgtccccaactcctgcccagccagtccacgcg

SEQ ID NO: 720953 - DNA, 97 bp, Homo sapiens
tggctgctgcagtgacccagaccctctcctttccctttgagaccgtgaagagaaagatgcaggggaacgcccttttgcttgtgactggcagggctgc

SEQ ID NO: 720954 - DNA, 75 bp, Homo sapiens
caggaagtggccgtagcggcttgttggataagaatcccacgtggcgaagtctcgattttggaattatgccagacc

SEQ ID NO: 720955 - DNA, 98 bp, Homo sapiens
ctcctggtgacctctcccgctaaggtccctcagccactctgccccaagatgggccgtgggtcatggctgagtacgggaccctcctgcaagacctgacc

SEQ ID NO: 720956 - DNA, 75 bp, Homo sapiens
caagttcgggcagccggctgcggtgccatgccctaagggatccgttgatgggtccagactgtttgcagactggcc

SEQ ID NO: 720957 - DNA, 103 bp, Homo sapiens
ctggggccttcactcctctgtggctctggaagagcccgatttcctcaggagagcagctgctggtcgggctgaaggacaaggacacggtcgtgcggtggtctgc

SEQ ID NO: 720958 - DNA, 100 bp, Homo sapiens
gtcttgataactgaatattcaaagcactgcgggaaacctgtgcctccagacactgctccctgtgaaattctgaaggtatgatctcgtgaaaccttgagag

SEQ ID NO: 720959 - DNA, 50 bp, Homo sapiens
tggcagcacagagctacattcgagacattgtatgacagcgtgtacctgac

SEQ ID NO: 720960 - DNA, 89 bp, Homo sapiens
ggcggcggcagcgggcggacggccggcgggggcggcgtgcggcctagcgtctcagaaaaagcttgtggtgaaggggggcaaaaaaaaga

SEQ ID NO: 720961 - DNA, 100 bp, Homo sapiens
gacgttgttgcttgggcgcttctccgctgcgtgtaggtgaagggggcttcctgaccgaggaaaaccagtagattcccagacatcgcgaagtgaatctgaa

SEQ ID NO: 720962 - DNA, 76 bp, Homo sapiens
gaatttgttcacataaacagattgaagattctagtgttccagaaactccagataatgaaagaaaagcaagtatatc

SEQ ID NO: 720963 - DNA, 78 bp, Homo sapiens
aaattcagggcttcaaatataatgccatcttcaaggtttttggattcaaagcataaaaaccattacaagatatacaat

SEQ ID NO: 720964 - DNA, 74 bp, Homo sapiens
tgaaggtggaggcgccgcaagcgctgagcaaatggttatgagccttagagtttctgaactccaagtactgttgg

SEQ ID NO: 720965 - DNA, 98 bp, Homo sapiens
ctgagcgactatattgagaaggaggtaaaggaactcgaatcatttatgacagaaagtttctgttggatcgtcgcaattctcccatggctcagacccca

SEQ ID NO: 720966 - DNA, 98 bp, Homo sapiens
ggacaacaagagaacctgcaaccgtttccgcctcctgctagagcggcgaaccgtgggcagtgaggggactcgggcaagggtgccgaagatagacaaga

SEQ ID NO: 720967 - DNA, 100 bp, Homo sapiens
ctttgttggagatggctttacaagaaaaccacctaaatatgaaagattcatcaggccaatgctgtctctgcttggaggtgccctgcccatgtttgagctg

SEQ ID NO: 720968 - DNA, 82 bp, Homo sapiens
gcacaaactaattaaaggagtcgagagacttatctccggacaacaaggattactattaatggagaaagcccaaaacatcggt

SEQ ID NO: 720969 - DNA, 101 bp, Homo sapiens
cggcggctgccctgggccactggctacgcagactgtcaaagctcgaaaaacagcagcagaggaaagaaaagaccagagctaagggaccttctgaatcaagc

SEQ ID NO: 720970 - DNA, 82 bp, Homo sapiens
cggcaaggggacccagtgcgcccgcatcgtcgaggttcctggacatcagtcagtttttatgaatgaaccaaggctgtcagac

SEQ ID NO: 720971 - DNA, 100 bp, Homo sapiens
gacagttggcaagaaaaccccgaggagccctgttccaaagcctcctggaccgtccaagaagaccatgcagtgctggaggccgagaggcagaagatgtcag

SEQ ID NO: 720972 - DNA, 100 bp, Homo sapiens
ttggtgttgaaagtgaaatgtcatgcctctgaaaatgaagcctgattacatcaaccccagagccgtgcagctgggctcccttctcgtccgcggcctcacc

SEQ ID NO: 720973 - DNA, 74 bp, Homo sapiens
tcttcaccgagtggtggacacatttcaggatcccctaacaacagtgagagagcaatgcgagcagttggagaaat

SEQ ID NO: 720974 - DNA, 88 bp, Homo sapiens
gctgacagtttaacaagccttaggaagttagctgaacagttcccacggcaagggaggagatatcaccaaacatgatggaacaggcgga

SEQ ID NO: 720975 - DNA, 100 bp, Homo sapiens
ttggacaacatgtcccaacattacatcccagttcgttaccgtgaacgcatcaccattcttcgagggaatcatgagagcagacagatcacacaagtttatg

SEQ ID NO: 720976 - DNA, 100 bp, Homo sapiens
agtgaggatcaggagatctgatcctgattgcagaaccttccctgattacagaatcttggaatgagtccctggaacgccagatgcgtgaaatggaagagaa

SEQ ID NO: 720977 - DNA, 50 bp, Homo sapiens
tttacccagaagtagtccatatgcttctccatatacaacctcaactccaa

SEQ ID NO: 720978 - DNA, 99 bp, Homo sapiens
ggaagtagccgctccgagtggaggcgactgggggctgaagagcgcgccgccctctcgtcccactttccaggttgaaatcacaaagattagacacctttt

SEQ ID NO: 720979 - DNA, 83 bp, Homo sapiens
ctacgatgatatatattttgattctgattccgaggatgaagacagagcagttggatgttgatggacagatagactctattcat

SEQ ID NO: 720980 - DNA, 83 bp, Homo sapiens
acctcattttagagtatcaagcagatccaggatgagaagactgataaaagaagaagctagctgaacagctgtaaaatgcccaa

SEQ ID NO: 720981 - DNA, 90 bp, Homo sapiens
tggataaatcaggaatagattctcttgaccatgtgacatctgatgctgtggaacttgcaaatcgaaggtacacgctgctctgcgggagcc

SEQ ID NO: 720982 - DNA, 75 bp, Homo sapiens
tgaatctgttcgcaataccatctgggcagatttgtccttcccattctgcaaccatggcaagcgttccaccatgaa

SEQ ID NO: 720983 - DNA, 80 bp, Homo sapiens
tgtgccgcctaccaggcagagcctgaggaagctgaagcagaggtttcccagcatcctggtggggaagaagttttaaggga

SEQ ID NO: 720984 - DNA, 82 bp, Homo sapiens
caagccgctggcagccgcggatctcaccgccgctcagggctgacttgacaggaattaagtggaaaaaatatgtatggcaagg

SEQ ID NO: 720985 - DNA, 75 bp, Homo sapiens
ggctgcaccaagtggcgaaggagccggctccaagaatctacctgttactcgtattttggacaatcttatggagat

SEQ ID NO: 720986 - DNA, 100 bp, Homo sapiens
ttggtgaagtcggccagcctgagcaagcggaggacctacgccggcctggggcgatgagggtggagagcgggtgctacagcagcgctggacctccttcctc

SEQ ID NO: 720987 - DNA, 100 bp, Homo sapiens
gagcggacctggacgccctctgccttcgtcatttcctgccggccggtcggtttccggatgaaacgaggagccagggccatgggtctggatttccaagaaa

SEQ ID NO: 720988 - DNA, 110 bp, Homo sapiens
ttcaaagggcaggagtgcggccaccaagacttcaccacagccaaaatcctgagcatgatggaagacaataagcagctcgcgctccgcatcgatggggcggtccagtcggc

SEQ ID NO: 720989 - DNA, 100 bp, Homo sapiens
tgaaaaggaagtattagaaatgagctgaagaccattcacagacttcagtgcctagcagcaagtcatctggtgaccttgttgatctgtttgatggcaccag

SEQ ID NO: 720990 - DNA, 100 bp, Homo sapiens
tttagagaagcttgatcttggaggcctcaccgtgagaccttacaaagccgggcaagtgtcaattgaggagggagagaggaaagccaaagagctgaatgtt

SEQ ID NO: 720991 - DNA, 83 bp, Homo sapiens
cccagaccctggagcctcagttggaagcagccgatccagcctgcggagcctgtggggcaggctttcgggtcacctccagcagc

SEQ ID NO: 720992 - DNA, 83 bp, Homo sapiens
caagagcgtgccctacttcaaggataagggtgacagcaacagctcggcgggctggaaggtcaaaatgcagatcttcgtgaaaa

SEQ ID NO: 720993 - DNA, 100 bp, Homo sapiens
tttgctgatatgcatgcatgtaccgaccttctgaacaaggccaacacctatgcaggcaaaatttcgaaagatttaagtatagctgttcaaatgatgaaaa

SEQ ID NO: 720994 - DNA, 75 bp, Homo sapiens
ccaccatctccatcacccaccaacaacaccacaataatccacagccaaggtttacccagggttgatgataaccgc

SEQ ID NO: 720995 - DNA, 100 bp, Homo sapiens
cgccaagagcgacgccgccgtgtgcccaacggtcggtgtccccggctgaggcagcgcggccgcagcagcccttacctgcagatgaaatggcccctcctcg

SEQ ID NO: 720996 - DNA, 100 bp, Homo sapiens
ctgaaagtacctgctatgaagtggcgctcctgaggatgtttggatctggccgagaacataactttacacgacccaatgagaaaggagagtatgaggtggc

SEQ ID NO: 720997 - DNA, 74 bp, Homo sapiens
ccaaccatgatgctgccatctttccaggaggctttggagcggctaaaaacctaactaaaattccagatggcaaa

SEQ ID NO: 720998 - DNA, 100 bp, Homo sapiens
ccgatagtagttctgctaaaagatctcagacaacgggtcatttggtcatctgcatgcccaaggtttgttggcatccaaagctgttggggttgatggtgct

SEQ ID NO: 720999 - DNA, 97 bp, Homo sapiens
tcaatgccactgtctttgcctatggtcagacgggctcagggaagacatacaccatgggggaggccagtgtgggggtttcccattaatcaaaacacgt

SEQ ID NO: 721000 - DNA, 88 bp, Homo sapiens
agtttgttgtagaaccaagtgaagccacaaacagatcaggtcaagaacccagtatggaagggagaagtgaaaagttgaagaaaaatcc

SEQ ID NO: 721001 - DNA, 80 bp, Homo sapiens
ggctctgctgaaggccatcgtgcaggggcaggaaacccctcctggagtttccccaaagccatggacagccctagtcttcg

SEQ ID NO: 721002 - DNA, 80 bp, Homo sapiens
ctggagggagcctggccttcggaacgctcctctgcattgccattgttctgaggacttgaaagaggagattgatattcgac

SEQ ID NO: 721003 - DNA, 100 bp, Homo sapiens
ctccggcttatactcccagcggggaggcgggcagctctgcccggcagaaacctgtcttagaagagaaggtgttcttagatcagaagatgccattgtatta

SEQ ID NO: 721004 - DNA, 51 bp, Homo sapiens
agctagtggacatcacggacatccagaagcaggtattaatctctggagaag

SEQ ID NO: 721005 - DNA, 50 bp, Homo sapiens
ggggcggcgaggcgcgaggagctagatgttctcagtgcagctgagtcttg

SEQ ID NO: 721006 - DNA, 75 bp, Homo sapiens
actacgacgtccctcaaaccttgcttctaggagataaaaaggtgctcttacagcctgttccaagtgtggcttaat

SEQ ID NO: 721007 - DNA, 99 bp, Homo sapiens
ccaggtggaccccaagaagaccattcagatgggatctttccggatcaatccagatggcagccagtcagtggtggagggactgttgacatttagggatgt

SEQ ID NO: 721008 - DNA, 98 bp, Homo sapiens
atttattcctgaagatgacccattatttccacctattgaacccaaacctttattgttcaaaggagatcacagatatccctcgtctaatcctgaaagcc

SEQ ID NO: 721009 - DNA, 97 bp, Homo sapiens
caaaggcaaacttggaaagagcaagatcggcagccctaaaggaatgaaagctactggttgattttaaagtgcctgggcctcacaggtttggagatgt

SEQ ID NO: 721010 - DNA, 100 bp, Homo sapiens
agccttggtctgagtggactgtcctgcagtgctcaaagatccagacagcaatccatacagcttacttgataatacagaatcagatcagactgcagacact

SEQ ID NO: 721011 - DNA, 95 bp, Homo sapiens
ttctctcattttctttccctgcaccaactagcagaatgtttcatccatttgtggaccaaaagatggagttggtttttatttttaaaaagataatg

SEQ ID NO: 721012 - DNA, 89 bp, Homo sapiens
aaaattcaggatttcttaaaggatagccaattgcagtttgaggctggcaggtgtttgtttgccagtggcagtccatttgggccagtgaa

SEQ ID NO: 721013 - DNA, 100 bp, Homo sapiens
gccagtggagctgctgaatcctgcccgcgtgaaccacatgcccagcacgggtagcacaggcggagtgcagcggaggcccctgccgctgccgtcatgccgt

SEQ ID NO: 721014 - DNA, 100 bp, Homo sapiens
gaagaactaagaatattattagcacaagagcaccatactttgagggttcgatacaagaggctgttttcctagcgtggcttgctgcctttggtaagaacat

SEQ ID NO: 721015 - DNA, 75 bp, Homo sapiens
cgggtcctgcttgtccaggtggatgtgtttgtgatggacgcctctgaccccacccagctctctgcatcctgtgtg

SEQ ID NO: 721016 - DNA, 100 bp, Homo sapiens
tgtattcgtggaagctcagagtgtgaccaactggaaccctcaagaggaccgagactccagggattagagctcgatctgcaaggcttcagtggttttgtga

SEQ ID NO: 721017 - DNA, 82 bp, Homo sapiens
cgctgtgtggttgcaacggagataaattcccggaaccgcgattcggcgtgtcaggtaattaataatgcttgtgctactcaag

SEQ ID NO: 721018 - DNA, 82 bp, Homo sapiens
ggacaccagcaagctgttcaatgaggaggtcaatcatgcgaggctgtgacaacatgtgtagctactgcattgttcctttcac

SEQ ID NO: 721019 - DNA, 51 bp, Homo sapiens
cagaaacacatcagaactcatacagcctgtgactcatactggacatcagtc

SEQ ID NO: 721020 - DNA, 75 bp, Homo sapiens
tgcaggaagaccgtgatgggagctgcagcacagtcgggggtgtaggttatggggtgccaaatctttggagtgttg

SEQ ID NO: 721021 - DNA, 90 bp, Homo sapiens
tgcagtgaaggctcggggctgcagcattgaagataatgatgatgacagcaaaatggcagatctcttgtcctacttccagcagcaactcac

SEQ ID NO: 721022 - DNA, 90 bp, Homo sapiens
ctctcgtctggtttgatcacaagacgggcaagactgcctctttaagctatgtcccatgaaccgctactctgcccaaaagcagttctggaa

SEQ ID NO: 721023 - DNA, 101 bp, Homo sapiens
ggagatgatccatgggtagaacatgccaagtggtttccaagtgtattggaacaacacaaactaacaaaagaacagtgggaagaaagaatacagaactggca

SEQ ID NO: 721024 - DNA, 100 bp, Homo sapiens
cccaaagatgagatttacctgtgagatgtttcatcccaacagtgacaatccttacccttccaaggaggacacccctaccagcagtctggactcactttcc

SEQ ID NO: 721025 - DNA, 74 bp, Homo sapiens
caaggtgacacatattctgtctgtccacgatagtgccaggcctatgttggaggcatgcttctgacggccaatga

SEQ ID NO: 721026 - DNA, 75 bp, Homo sapiens
ggccgcggtgaggagagccatgggacgggcagtcaaggaatgtatcctgtcaggtataatgtcagtgaatggcaa

SEQ ID NO: 721027 - DNA, 100 bp, Homo sapiens
gagcttcatgtggtggtcaaagaccatgagacgatggggaggaacagggtgcaactggaaactgacttgaagattgagaaggaatggaggcagactttgc

SEQ ID NO: 721028 - DNA, 116 bp, Homo sapiens
cggggaatggccgcggtgtggcagcaagtcttagcagtggacgcgaggaccctcactacgtccagcaggcgctgaccaacgtcttgctgatggacgccgtcgtgggcacactgcag

SEQ ID NO: 721029 - DNA, 100 bp, Homo sapiens
caggtattgggagatccacagctaagacgccaggacccactggaagcctagaaatggtttttcgttggaatatacgttgcacatttatggcgattctgag

SEQ ID NO: 721030 - DNA, 80 bp, Homo sapiens
tgcttcctgctgctggcactggtccttgtcccctcagcaacaaggcgtgcaggtattttgatgaaggacgtgggagctgc

SEQ ID NO: 721031 - DNA, 97 bp, Homo sapiens
tcgtagcgaacacggtgctactcaaggcccgggaaggtgctggagaatctggtaaaagcaccattgtgaagcagatgaggatcctgcatgttaatgg

SEQ ID NO: 721032 - DNA, 100 bp, Homo sapiens
agccccagttcattattccttcatcgaagctgccgcccatgctgtcgccaccctggctgaggccaccttacaaggtgggggacagatcgtcttgtctggg

SEQ ID NO: 721033 - DNA, 100 bp, Homo sapiens
ctttgcacatttcaacagtcatgcaggtgtgatgaatgcagactctgctaccattttggctgtttggatcctcctttgaaaaagtctcctaaacagacag

SEQ ID NO: 721034 - DNA, 82 bp, Homo sapiens
agagtttggagccctgcagactgtccgcctggagcgttacaaggccttctacattaccggagacagatcagttggaggaaga

SEQ ID NO: 721035 - DNA, 100 bp, Homo sapiens
gaggacccactggatgtcaagcattgtgcatagttttcttcgattgttgcaacatcccttgcgaggtgaagacattcagtgaagcttgcctgatggtaag

SEQ ID NO: 721036 - DNA, 50 bp, Homo sapiens
tttcttatcactaaaacagcagcgtcctgcctctgcggctctgccccctg

SEQ ID NO: 721037 - DNA, 83 bp, Homo sapiens
gcaaaaaaggaggccaaagactttgtatggcatttcaaatatagatacaaccattgaaggaacgtcagatgacctgactgttg

SEQ ID NO: 721038 - DNA, 100 bp, Homo sapiens
tccattgactatgcagcctaatgacttcatcacctgattcttccaatgagaattccgtagcaactcctcctccagaggaacaagggcaaggtgatgcccc

SEQ ID NO: 721039 - DNA, 75 bp, Homo sapiens
tcgcgccggctatggccgtgccctggggctgagccctcaggctgatcaccagttcctcttaggaaccggtgaacc

SEQ ID NO: 721040 - DNA, 51 bp, Homo sapiens
caagtggatggcatgaagtggagccagaagatgcttataagatcaggatcc

SEQ ID NO: 721041 - DNA, 75 bp, Homo sapiens
tttgaatttgacatctttacccgactctttcaggttcaaaccttgtactactcagctgatcacaagctgcttgat

SEQ ID NO: 721042 - DNA, 100 bp, Homo sapiens
cgagcttctcagtcagtcctgcctcatcccagccatgtcatcttatctacgaaatgattcaggatggctgacttcaggctgcggaaactgaaggcaataa

SEQ ID NO: 721043 - DNA, 76 bp, Homo sapiens
cacgggaagaacaaagacttagactcggggttcaactagatatagcttcacaatctctggatcaagaaattttatt

SEQ ID NO: 721044 - DNA, 89 bp, Homo sapiens
gggctcatgaaccgcgccgtgcaactgctcatcctggcctacgtcatcggtgttatagttttgccgctggactcttccctcccttcccc

SEQ ID NO: 721045 - DNA, 100 bp, Homo sapiens
gtgatgttggagaactatagcaatctggttttcttgggcactactgcagtcttcagttaagcaacaagtagaagctattgaaaaacagtacatttctgca

SEQ ID NO: 721046 - DNA, 100 bp, Homo sapiens
ctcagaaacccaaattacatctcatggctttgacaataccaaagagggtgttattgaagcaggagcatttcaaggccatgttggggccccgatgccgtgc

SEQ ID NO: 721047 - DNA, 101 bp, Homo sapiens
cacagcaagagcacctggctgatcctgcaccacaaggtgtacgatttgaccaaatttctggaagagcttatgttcctgaggaagaattgaaggcagcagaa

SEQ ID NO: 721048 - DNA, 98 bp, Homo sapiens
gctactggaaaacctcaggaacctagaatttctggccttatgtttgatcatcggccaaggtcctggcgagaactgcctctgcggctagctgattttgg

SEQ ID NO: 721049 - DNA, 100 bp, Homo sapiens
ctgtgcctcaggggatttcgcttctgtacaggtgacagagctgaatgaacctctctccaatgaagatcgaaatctcctctctgtggcctacaagaatgtg

SEQ ID NO: 721050 - DNA, 83 bp, Homo sapiens
cgctcccaccttctttcttcagccgaggccgccgccgcctctccttgctgcagccatggaggactggtgattgcagctggaag

SEQ ID NO: 721051 - DNA, 51 bp, Homo sapiens
cttacctctttgaatctgaaggtttagctgtcaataccagcaaatatgcag

SEQ ID NO: 721052 - DNA, 83 bp, Homo sapiens
aagaagagatgcctccccaggagctcacccggcgactggccacagtgatcactcatgtcggtctgccatcatggatgttctcg

SEQ ID NO: 721053 - DNA, 122 bp, Homo sapiens
gtacggatttgtgaatcacgccctggagttgctggtgatccgcaattacggccccgaggtgtgggaagacatcaagacccagatgatgtggtaccagttggccaaagaagagcctggtgttg

SEQ ID NO: 721054 - DNA, 100 bp, Homo sapiens
aggcagctctggagcaggctctggagaggaagaatgagctgatctcccaggactctgacagcgactccgacgatgaaatgctccacctgtaagaacagaa

SEQ ID NO: 721055 - DNA, 50 bp, Homo sapiens
gcacctggaggatacctgctacctgaaggcgacatgccaattcatgaact

SEQ ID NO: 721056 - DNA, 100 bp, Homo sapiens
aagaattcctcaatgcagtcttttatagaaaagagaccatttgtttgtgactatgaagggtgtggcaaggccttcatcagggactaccatctgagccgcc

SEQ ID NO: 721057 - DNA, 83 bp, Homo sapiens
catagtgtcattccaatgtgactgtccactacatttcactggccgcttctgtgaaaaagcaattctgtggtgttcttggtcac

SEQ ID NO: 721058 - DNA, 100 bp, Homo sapiens
ctacgagtgcaacatctgcaaggtccgcttcaccagacctgcctagagctggaacgttacctccagagcgagccctgctatgtttcagcctcagaaatca

SEQ ID NO: 721059 - DNA, 75 bp, Homo sapiens
cgacagcgaacatgtcgcggcctgtcagggcgcaccctacgacgcgcacaccaccggcatgaccggcgccatcag

SEQ ID NO: 721060 - DNA, 100 bp, Homo sapiens
gaaaaaggtgttgaaatagagggaccattgtctacagagaccaactgggatattgcccacatgatcaggacccttgaacatctgtgaagaaatgactatt

SEQ ID NO: 721061 - DNA, 75 bp, Homo sapiens
tggacaggatgtttgccctcgagttgcagaatgaagaagagtctggagaacctgaacaggctgcaggtgatgctc

SEQ ID NO: 721062 - DNA, 83 bp, Homo sapiens
ctcagttggaagcagccgatccagcctgcggagcctgtggggcaggaccggagtaggccctatgatacttttaacttgcactc

SEQ ID NO: 721063 - DNA, 50 bp, Homo sapiens
tggaggaggtggagttctgtgtggaaggtatcacctcttctgggctcaag

SEQ ID NO: 721064 - DNA, 90 bp, Homo sapiens
ctccagagagacgtgaaacatgtgaacactcaagtgaagcaaaagccttccatgattacctccagtgatccacaagctcagaaatacatc

SEQ ID NO: 721065 - DNA, 100 bp, Homo sapiens
gaggcggctaaggaaaggtgccacagcagagacgcgaaggagaggccctagaaccgctttggatctggctgccctctccacagaacattctcagtacaag

SEQ ID NO: 721066 - DNA, 83 bp, Homo sapiens
ggtgtcctagggctcacgttgttattctgcattgcacttgcagccagacctgcctagagctggaacgttacctccagagcgag

SEQ ID NO: 721067 - DNA, 126 bp, Homo sapiens
atttcttccctttcctcttgacactgcagctgcagtcaacctcttccccaatttcaatgcgaaaacctcggatcaattctcagctggtggcacaacaagtggcacaacagtatgccaccccaccac

SEQ ID NO: 721068 - DNA, 91 bp, Homo sapiens
gccacagcgggcccgaagcggatcagccttgtgggggggatatgagactttctactcggaatatcctgagtgttgcgtggatgtaaaaccc

SEQ ID NO: 721069 - DNA, 98 bp, Homo sapiens
tcctcacccgcgcctgcgacctcggtttggtgcacctcgatttggaggaagtagggcagggcccttatctggaaagaagtttggaaaccctggggaga

SEQ ID NO: 721070 - DNA, 100 bp, Homo sapiens
cgccaccctgtggacatcagcgccatccccgagcagcggtggaagctgcagaaaggacccaggagcgataacagtaaatcaaataagatatttgtcggtg

SEQ ID NO: 721071 - DNA, 100 bp, Homo sapiens
tgaagagcaagaggaggacatggagatgaagaagaagattaacctggagttaaggaacagatccccggaggagcttccccgggcgctgcctggacaggcc

SEQ ID NO: 721072 - DNA, 82 bp, Homo sapiens
gatcttgggacccaccgctgccctcagctccgagtccagggcgaggcttcagtttcacattcttggtacctcctggtggtgc

SEQ ID NO: 721073 - DNA, 100 bp, Homo sapiens
cggcgctggaggagcgaggcagctgtactaggactgggaacggggcgaagctgtgctcaggcccgggctggacgcagagccagagctgtccccagaggag

SEQ ID NO: 721074 - DNA, 96 bp, Homo sapiens
tgccggatggtgctggccacttgcttgggatcctttatcctggtcatcttctatttccaaagtctatggaaatgcaggacctagcaagtcctcata

SEQ ID NO: 721075 - DNA, 100 bp, Homo sapiens
aggagggaggagaaaacctggaccaggcacgggaagatgcccagatggctgcattacaaagtcctttctatggtgacaaaatgaatttatactcactgtg

SEQ ID NO: 721076 - DNA, 99 bp, Homo sapiens
agacttttgaagaaatctggaagttttccacctaccatgctctcgctcaaaagccaaaagtctctgagaacgactttgaagatctgttgtccaatcaag

SEQ ID NO: 721077 - DNA, 95 bp, Homo sapiens
attccttgatacctctcactattctactgctggaagctcaagtggtcaaagaatcaatggagacacactttggcagccatggccgaagggccata

SEQ ID NO: 721078 - DNA, 100 bp, Homo sapiens
atcgtgaccgagaccgtgaccgagagcgtgaccgagagcgcgaatatcgtcatcgttagaagtgttatagttttgccgctggactcttccctcccttccc

SEQ ID NO: 721079 - DNA, 100 bp, Homo sapiens
cctcttcaggaatttccacaccggcatctggtactcgtgcgaggaggagctcagcgggcttgttcgttcccacatgcagggcagcacaaggagaatgggc

SEQ ID NO: 721080 - DNA, 82 bp, Homo sapiens
gccgtggctcgacggagaccagctaggatcagtcgcatcgaatacattcattcaaagaacttcatccaccgggatgtgaagc

SEQ ID NO: 721081 - DNA, 74 bp, Homo sapiens
aaaagtggcacctgcaccagccagcaaatggaacgtgtttttccatggttcagtgtcaaaaagtccaggttttg

SEQ ID NO: 721082 - DNA, 100 bp, Homo sapiens
accccatcgcggtgctcatagacgaactccgcaatgaggacgttcagctgccgcagcgggaaccgcaagagcttggtggtaggaacgccctccccgaccc

SEQ ID NO: 721083 - DNA, 106 bp, Homo sapiens
gtgaattctggttgtgtttcaactgctgtattgcagaacagcctcagcctgccgaatacatcaagcaatggtaacatctttaaatgaagataatgaaagtgtaact

SEQ ID NO: 721084 - DNA, 100 bp, Homo sapiens
gatccccacctgggttctggtggacctctcggctttcctggtcagcagcgacttgcaaacggggattcagcgtccgatcctttggaacagggactcacgt

SEQ ID NO: 721085 - DNA, 100 bp, Homo sapiens
gcggcgggagcggcgccgagaggccgtgcgggacgcgggcgccaggaccggccgaacgcagagggggacttgatctcatcttcatgccaggccttgggtt

SEQ ID NO: 721086 - DNA, 100 bp, Homo sapiens
gccttagctgtgctcgcgctactctctctttctggcctggaggctatccagcggctttgttcgcgggggtcacagctctcatggctgcagctagcgtgac

SEQ ID NO: 721087 - DNA, 100 bp, Homo sapiens
ctgttactgctgctacttcctcgtttgacaccttcctgggcaggaatttgtggatgcttatgtgaattatgtcttccaaatctcagttcatgaatggtac

SEQ ID NO: 721088 - DNA, 75 bp, Homo sapiens
aagcagtctggaccgaaaagaaagtcagggcctttctacttacaaggaactttgttctctggcaagtgatcttag

SEQ ID NO: 721089 - DNA, 82 bp, Homo sapiens
agctggtgtcccacctcactgcccagctcaacgagctcaaggagcagttggaaaagtaccagcaaggagactttggttactg

SEQ ID NO: 721090 - DNA, 98 bp, Homo sapiens
gaataagaagaacaaactgacgcagagtaaggcccagccccagcccaggggaccccagacgtctccagtgccttggataagctgaaggagtttggaaa

SEQ ID NO: 721091 - DNA, 50 bp, Homo sapiens
ctgggctccaccttcaacctgcggagattttacccagtgagaacatgttt

SEQ ID NO: 721092 - DNA, 83 bp, Homo sapiens
gaacaactcttcttcatagttacgttatactgcccctgcattgttggtattgaaaaatcccctttctgcaggtctacagggag

SEQ ID NO: 721093 - DNA, 98 bp, Homo sapiens
cagagtgaagagaaaatagcaaacgatccagacggcagggagtgcatcaaaggtgtgaacacagaaccactcacgaattcttgtttggtgcccttgct

SEQ ID NO: 721094 - DNA, 50 bp, Homo sapiens
ctcagctctcggcctgctgatgcatgaacaggctgaacactttgccacga

SEQ ID NO: 721095 - DNA, 100 bp, Homo sapiens
cattgtaatggccatcgctggaaacaagtgcgacctctcagatattaggcttgcaaaacaacatttcaagcctgttctccatatctgaaactaaaggagg

SEQ ID NO: 721096 - DNA, 76 bp, Homo sapiens
caggaggttttccgagacaacaacggcaccgcggagaacgtgtctctggctgacatcctctccctgcgggaccgcg

SEQ ID NO: 721097 - DNA, 100 bp, Homo sapiens
gtggaattttacatcctgcagtgaacgccactttgtgtctctctgtcagaaatattcagagtctgcctgcaccagttccagtacatggggaagcgataca

SEQ ID NO: 721098 - DNA, 75 bp, Homo sapiens
acctgatcgaaaagatctacttggatatctcaatggtgaagcgtaaggcctttgagccctacttagagattttgg

SEQ ID NO: 721099 - DNA, 96 bp, Homo sapiens
ctaccgagagatcatccgtgacaacaacatggacttcactgacatcatcaagtttttcaatggtcagcaatctgaagatggtcttacggagcctag

SEQ ID NO: 721100 - DNA, 96 bp, Homo sapiens
gagaaactcccaccgacccacagaggaacgagctagagcgacagtttcttgaattgctgcagttcaacatcaatgttccttccagtgtctatgcca

SEQ ID NO: 721101 - DNA, 83 bp, Homo sapiens
gatggctgcagtccgtatgctgagaacctggagcaggaatgcggggaagctggtttgatatacgtttgatgaaagaaggtcgt

SEQ ID NO: 721102 - DNA, 90 bp, Homo sapiens
ggccagagtcacacacggtcctaagagctgggcaccaggaagcgaaggctgtttgctggaaaccatgtctcattatacagatgaacccag

SEQ ID NO: 721103 - DNA, 95 bp, Homo sapiens
cgagaactgatcctggacctggagaagaatgacaccaatgttgttatgaattattcagagatcgagtctaaggttcgagaggcaacgaacgatga

SEQ ID NO: 721104 - DNA, 74 bp, Homo sapiens
cctacctacatcctgagctacatggccccctggtttagggagggaaaaaccatatggcatagttgaaaagaagt

SEQ ID NO: 721105 - DNA, 100 bp, Homo sapiens
gagcgcctcctgagagccagccctgacgtgaactcattttatctgccacgacccagaaggtcctttcccataacctgtgcacggtgctgaaggttcctca

SEQ ID NO: 721106 - DNA, 75 bp, Homo sapiens
cgtgggcgtaggaccctccgagccagctgatgttctaatcatgtcagataaagatgatattgagactccactgct

SEQ ID NO: 721107 - DNA, 100 bp, Homo sapiens
actgaagaggagcgcaagcacttctgccaggagatacttgactttgccagccagccgtcagacagcccaggtcttgtggatgagcagcagaaagttcgga

SEQ ID NO: 721108 - DNA, 80 bp, Homo sapiens
aatgcagcatgccatcctgaacgtctctccctgtcctagctctgtaactgtttacagcagtatttggcagtcgtattcag

SEQ ID NO: 721109 - DNA, 82 bp, Homo sapiens
gtcaatacctgaagagagattggcctggagtaaaagctgatgatcggaatgattacaggaatcaaagatcaactcccactga

SEQ ID NO: 721110 - DNA, 101 bp, Homo sapiens
gcccgggggagtcaactcctgtgtctttgattccttgggcaaagccccactggaggggctggagggaaagtagggtcacttggagatcctggatgccagcc

SEQ ID NO: 721111 - DNA, 75 bp, Homo sapiens
tcttcttctcccaggtggtgacaatgcagacggctgcttctgatgcttggaagatatcctctcagccacaaagat

SEQ ID NO: 721112 - DNA, 89 bp, Homo sapiens
tcaactgtataataatagtgtggtctgttctttcttgccagaagttatctacaagtagcacgatacaaccgcaccagctacttctaccc

SEQ ID NO: 721113 - DNA, 111 bp, Homo sapiens
tgaagtagcaaaggcaagaaggcaacgacgttccatctgtggaaggacctaccaaccagacaatgcagatcttcgtgaagactctgactggtaagaccatcaccctcgagg

SEQ ID NO: 721114 - DNA, 98 bp, Homo sapiens
gcgcgagaggagccgggacacgcctagcgcgggctccagcgaactctagttggcctagtaagagacctgagagggatcgctttcgctttcaatgccaa

SEQ ID NO: 721115 - DNA, 74 bp, Homo sapiens
aattttcagggcggatttgtgaatctcacatttaccaagattagcctgaggcctgctcagtcgttcctaatgaa

SEQ ID NO: 721116 - DNA, 75 bp, Homo sapiens
ctggcagccgcggatctcaccgccgctcaggacagaggcagcagatggagatgtgacagattctctagtgggaag

SEQ ID NO: 721117 - DNA, 74 bp, Homo sapiens
cggcgttggaggccaccgtttccagactattgggaagaagttacctgcaactacagcaactccagactcatcaa

SEQ ID NO: 721118 - DNA, 90 bp, Homo sapiens
gcccgagagccgcgagccccagggcgccctggagcgccccccagatgcccccctcggaagcctggagaacgggacaggaccagaggacca

SEQ ID NO: 721119 - DNA, 75 bp, Homo sapiens
gggagatcgacttatcgccattggaggtggagccgccaccaaaatgcagattttcgtgaaaacccttacggggaa

SEQ ID NO: 721120 - DNA, 100 bp, Homo sapiens
gatggtcggcggcgcccggatgggcagctgaggtattcctggagtggagagccactctttttgacctgccctacatcagaagtcaccgagctcccagcct

SEQ ID NO: 721121 - DNA, 96 bp, Homo sapiens
agttcaccctcagaaggtgaccaagttcatgctgtgtgctggacgctggacagggggcaaaagcacctgctcgtttctccacagacactacccaaa

SEQ ID NO: 721122 - DNA, 83 bp, Homo sapiens
gacgccctgagaacgggaggtcaagagttggagcagacggccctgggaggagcggggacactgaggacctctctccaaattgg

SEQ ID NO: 721123 - DNA, 51 bp, Homo sapiens
gggcatcgccctctacagccgtgctggagaatctggtaaaagcaccattgt

SEQ ID NO: 721124 - DNA, 100 bp, Homo sapiens
cccagatgtgcatgcaccagtccacgtgtggcaggaccaagggaagtgtcttcacaaagatgaggaagttggtgaaccatctaaagaagagaaggctgtg

SEQ ID NO: 721125 - DNA, 90 bp, Homo sapiens
gagctcccagaaccttcagtgaaagtaaaagaaccttcagtacaagaggctacttctactaggacttggaccctctgtggaacacccgag

SEQ ID NO: 721126 - DNA, 101 bp, Homo sapiens
gaatggccgcctgagccggggaagatgcttcatctgcccctgcccagatccggaagaacggtgaatttcccccgcagatggagtctcactctgtcacccag

SEQ ID NO: 721127 - DNA, 82 bp, Homo sapiens
gagtccttcaactacgctgtgcacgagggtctcggcctcgcggtgcaggactctgtctactagtgacgatgtcgaagacagg

SEQ ID NO: 721128 - DNA, 100 bp, Homo sapiens
cggctcctgctcaagatctcagagaaggaggaggtgaccacgcgcgaggtggcgggacaggcttcattgggacagccctaacccagctgctgaatgccag

SEQ ID NO: 721129 - DNA, 100 bp, Homo sapiens
atttcaggagagcagtccactgaaggttctttccctttaagatatgtgcaggatcaagttgcggcaccttttcagcgttgttggtgtagcccaggccatc

SEQ ID NO: 721130 - DNA, 50 bp, Homo sapiens
ttctgcaaaagctcaggttaatccagcttgaaggatgccaatgatgtacc

SEQ ID NO: 721131 - DNA, 96 bp, Homo sapiens
ttctggacatcattttttccaaaagtcttggaaatgacagtcctcaaccactgaagaagaagcttgatgcttggctgtcagaagacatgaattacg

SEQ ID NO: 721132 - DNA, 87 bp, Homo sapiens
atgcaaaactcaggaatccatttgtaatcaatgacttgaatatgcagtatctcatacaagatagttatttatcagagagtctgatgc

SEQ ID NO: 721133 - DNA, 100 bp, Homo sapiens
gtgctgccgccgccagggtctgcagggcctgggccgccgctgctacctgcagcgccgtgtggcacgacacaaaaatcagagtacccaaaggcaagtggaa

SEQ ID NO: 721134 - DNA, 90 bp, Homo sapiens
gtcggatggggcaggatggctgcgttgacacgtcttatttaatccacatcatagctcctgtactcgtcggtggagaacatccagcgcgtg

SEQ ID NO: 721135 - DNA, 100 bp, Homo sapiens
cctggagtaaccctcactggagaatccagagggagcccccgggccacagcatcagccctgcacttcccctccacgtccatcatccagcagtcgagcccgt

SEQ ID NO: 721136 - DNA, 101 bp, Homo sapiens
gcggagcccgcccgccggcagcgccgctccccagggagggagtccgcagcctgagatgccttcaattaagttgcagagttctgatggagagatatttgaag

SEQ ID NO: 721137 - DNA, 100 bp, Homo sapiens
gggagggcaacgcagtcgccgttcgcctgtggctggacaacacggagaacgacctcaaccagggatccggaccatcgccatcatagctgaaggcatccct

SEQ ID NO: 721138 - DNA, 90 bp, Homo sapiens
agggaattggccaatatgatatacaagacaaggtgaagcctcggaagttccagaaagctgagtctgatctggattacattcaatacaggc

SEQ ID NO: 721139 - DNA, 80 bp, Homo sapiens
aggtgatccagcaaggtcggcagagcaaggggcttacgcagaaggacctggccacgatccagcacacggaagacatggag

SEQ ID NO: 721140 - DNA, 100 bp, Homo sapiens
aaaaccttatcaagaaatatgggacacatttcttgctatctgctactctgggagttggtacgccttattacatgtctccagagagaatacatgaaaatgg

SEQ ID NO: 721141 - DNA, 76 bp, Homo sapiens
gcaaggctactgaagcactgaagatcactcatgctaggtatggatctccttacccttggcctctgaatcatatttt

SEQ ID NO: 721142 - DNA, 99 bp, Homo sapiens
aaaaaagaaaactctagaagtctggatgtcggtgggcctctgagatatgccgtttacggcagccagactgccttccgggtcactgccatggaggagccg

SEQ ID NO: 721143 - DNA, 101 bp, Homo sapiens
aaccgattccatcaccccaataaaggagctcttcacagcacctgataaggaagcctgtgtgggtaccaacaatcaaagctacatctgtgacacaggacact

SEQ ID NO: 721144 - DNA, 83 bp, Homo sapiens
gcaacgcgagtgggagcaccaggatctcgggctcggaacgagactgcacgtcttatgatgtaatcagcgcgatttcacttcct

SEQ ID NO: 721145 - DNA, 100 bp, Homo sapiens
aaaccaattctgagtctccctctgtcacggagtccaaaactacttacctggaagaccttccaccaccccctgagtatgaattggccccgtccaagttaga

SEQ ID NO: 721146 - DNA, 98 bp, Homo sapiens
acgtgtctgcactcgctttcctcggattcccggatgtgggggacggcaaaacagaacagaaaggcggagataaaaagaggggtgttaaaagaccacga

SEQ ID NO: 721147 - DNA, 85 bp, Homo sapiens
gaagtgctgcaaggctgacgataaggagacctgctttgccgaggagattcatttatgagatagcaagaaggcatcccttcctgta

SEQ ID NO: 721148 - DNA, 83 bp, Homo sapiens
cccagccacagcctcccgcgcctcgctcagctccaacatggcagcggaggaggagaaagagatggacctcccggactcggcct

SEQ ID NO: 721149 - DNA, 100 bp, Homo sapiens
agatggctgtctggggcaacaagtagggccttgaaggccaggagacagagaaagagctggacccagatgggctgaagaaggagtcagagcgggatcgggc

SEQ ID NO: 721150 - DNA, 73 bp, Homo sapiens
cttgcggcgcctcggctcctcccaggtggcctcccgcgtgctggccatgaagatggaatttcactcttgttgc

SEQ ID NO: 721151 - DNA, 100 bp, Homo sapiens
cggcctcctgggccacctacaggccttcctcctggtccacctccaggaaagtgatgaagcattgggcccaacaatgatgagttggaatgcagttgaaaag

SEQ ID NO: 721152 - DNA, 96 bp, Homo sapiens
tgaaagaagctgccaagatagccaaagacaagacgcaggagaaaatcgagacctcaagtaatcattcccaaggctctctaaatacgtacagattct

SEQ ID NO: 721153 - DNA, 75 bp, Homo sapiens
cacttggaggtcatgatgaacgcaaagaacggtgcaaatagctatgggcaacttggcctcggccataaggaagat

SEQ ID NO: 721154 - DNA, 75 bp, Homo sapiens
cagcacttctggcattgagacaacatgtgcatcaaatatgctgaaagataagctgtcattggaaggaatagtggt

SEQ ID NO: 721155 - DNA, 90 bp, Homo sapiens
ccggctgcgaggtcctagtcaaaaggaaaaatcagccgtagaattgttgattagtcttgcagaaggctatagttctcgctgtcatccggt

SEQ ID NO: 721156 - DNA, 83 bp, Homo sapiens
gcaagagagacagttactggaacatagagattttatagggttgggacagcgtcttcgctgctgctggatagtcgtgttttcgg

SEQ ID NO: 721157 - DNA, 74 bp, Homo sapiens
gtagaaggagtctatgattacctgatgtatgtaggtttgatgctataagtgcagagctgttgaactggattttg

SEQ ID NO: 721158 - DNA, 87 bp, Homo sapiens
cagcgtggcctccgccaccgtgcacatccgaatggctgctctgttaaaagcgaaaatgaaacaattgcctgcggcaacagttcgact

SEQ ID NO: 721159 - DNA, 82 bp, Homo sapiens
gattgctggttcctgtgtgcctgcgccgcgctgcagaagagcaggcacctcctggaccagaacatccagtcatggataaaaa

SEQ ID NO: 721160 - DNA, 101 bp, Homo sapiens
ggctcagtctgcggccaagactccgtcctgcaagaaatttggagagcttgtaatgaccaaagaatcaaaggccttgatgggactctaccatggtcaggtcc

SEQ ID NO: 721161 - DNA, 75 bp, Homo sapiens
gcatttacagttgacagtcctgttcagcaggttatcaatactctggctgaccatcatcatcgtgggactgacttt

SEQ ID NO: 721162 - DNA, 113 bp, Homo sapiens
caacttcggcaagatccagatcgggatttacgtggagatcaagcgcagcgatgttgcagaatgaagaagagtctggagaacctgaacaggctgcaggtgatgctcctccacct

SEQ ID NO: 721163 - DNA, 119 bp, Homo sapiens
cttgcccgaggacagagatggcgagcgcccggattggggatgagtatgcggaggacagctctgatgaggaggacctgaaggagaagaaggagaaggtggaggagaaggcaagccggaaa

SEQ ID NO: 721164 - DNA, 100 bp, Homo sapiens
aggacaacgagtacacggctcgggaaggtatgggttcgaaggggtcatcctctccatctatggcttagaccgggaagatctgcactgtgacatcgacgag

SEQ ID NO: 721165 - DNA, 100 bp, Homo sapiens
cagtggaagaggtcaaatacatgaaaaatggggcagaagaagagcagaaaatagcagccaggaaccaagaaaacttgacaaatttacatgtattggagac

SEQ ID NO: 721166 - DNA, 54 bp, Homo sapiens
gtctgctcgggggtctacttcgaggaggatgtggatccctcagttggtcgattc

SEQ ID NO: 721167 - DNA, 75 bp, Homo sapiens
gctccggagggaccgggggagctcccaggcgcccgggtgcgcgcggagccatggttatcatgtcggagttcagcg

SEQ ID NO: 721168 - DNA, 100 bp, Homo sapiens
cagtccctgggggccacgctgcgtgagctgagcagtgccttccagagccctgtgctgtgcatcaaccagtccatttgacgtggaggacatgaccgcatcc

SEQ ID NO: 721169 - DNA, 82 bp, Homo sapiens
taatgtaatctgccaactaatagtaatggcccggaaccgtgaaggccggagctattgggagtggcggatcctcccaccccag

SEQ ID NO: 721170 - DNA, 100 bp, Homo sapiens
acctcctgcaaaagtggaagcgaagccgaaaaaggcagcagcgaaggcttttgatgaagccattgctgaacttgatacattaagtgaagagtcatacaaa

SEQ ID NO: 721171 - DNA, 75 bp, Homo sapiens
cacctggaggatacctgctacctgttttgggtcctgctcctcggtggtgttccttcttagacaacttgaccgaag

SEQ ID NO: 721172 - DNA, 80 bp, Homo sapiens
ggaacggagggctgcagcgcccaccctgcgccagagaccagataaatttaaggaagaaatctctaaacgttttaaatcac

SEQ ID NO: 721173 - DNA, 80 bp, Homo sapiens
ctggcttctgcatcaatcgcaaactggctttgaagatggctccgtgggccagatgtgttcagagcaacattgttttgttg

SEQ ID NO: 721174 - DNA, 97 bp, Homo sapiens
aaagagatcacatctttcgacttgaaaaaccttccttgaatccagaagctggcaaacagcatcagccatgcagacctattgggacaccttctggagt

SEQ ID NO: 721175 - DNA, 99 bp, Homo sapiens
tttacaaggccagagataagaacaccaaccaaattgtcgccattaagaaagtccctgactatggctccccagagcctgccttcatctaggatggctcct

SEQ ID NO: 721176 - DNA, 101 bp, Homo sapiens
ttgtgaggcctccccagccacttggaactgcaatgagaagcacgaccttcatgttacctcccagcagggcagcagtgaaccagttgtccaagacctggccc

SEQ ID NO: 721177 - DNA, 75 bp, Homo sapiens
gagcaaataaccgttttgaaattgaacgaatgcaggaatttgggaactgagctgtgcaagtgctgaagaaggaga

SEQ ID NO: 721178 - DNA, 87 bp, Homo sapiens
cagagaaaggccgtcctgcagcacccgccgctgtcgccgaccgcccgcacatccgtcggtttcaccagtgatcattaaagaatgggc

SEQ ID NO: 721179 - DNA, 98 bp, Homo sapiens
atgttggctgtcatgtatggtggagattctgtgtcaactggttctgtatttggaagaagcacgactctaaatatgcagacatctcagctaaatacccc

SEQ ID NO: 721180 - DNA, 98 bp, Homo sapiens
gttagtcacccacctacatgttgagtggtatgtgtgcaacagagagaaattatgcgaatcactccaggctgtctttgttcagagttaccttgatcaag

SEQ ID NO: 721181 - DNA, 108 bp, Homo sapiens
gcaccgactatgtcgcctgccaccgagccgggcccacctccccaccaaggaaggtgagaagccctaccactgcaactgggacggctgcggctggaagtttgcgcgctc

SEQ ID NO: 721182 - DNA, 83 bp, Homo sapiens
aatgaaggtgtttgatgtagtgaactttgacatgatcaacatgctgaaacttggatcacaaggtttacatctggcacaaacgt

SEQ ID NO: 721183 - DNA, 100 bp, Homo sapiens
agactccacctcctggtgaagaaagcaaacacttgcctacatgtagcctgtgttgtacagcagaaagatgccaggcaatggtttgctgagctttctgtgg

SEQ ID NO: 721184 - DNA, 80 bp, Homo sapiens
gaggtgccgacatggggcttaagatgtcctgcctgaaagaacatccagtcatggataaaaatgagctggttcagaaggcc

SEQ ID NO: 721185 - DNA, 80 bp, Homo sapiens
gcaccaagagcaacctcacacggtgtgggctgaatgaagagctgccagatcccacagcatgatctttcttcccaaaggtt

SEQ ID NO: 721186 - DNA, 80 bp, Homo sapiens
ccacaggccctcgttgcccagatgctgaaggtgatgtggccgccctcaaccgacgcatccagctcgttgaggaggagttg

SEQ ID NO: 721187 - DNA, 100 bp, Homo sapiens
atggaaatagcttgtgctgctgctgctgctgctgctgcatgtctaccaggagaggagggaactgcggagcggatctattcttacatacagccgaattgga

SEQ ID NO: 721188 - DNA, 100 bp, Homo sapiens
ctcccgcccgcctgcccagagagggccagagcgtcggggaggcaagatgatccaccagcggttccatcctacacttgggacaagaggaccctgccttggt

SEQ ID NO: 721189 - DNA, 73 bp, Homo sapiens
gaaaaagctggatgtgatgaaatttgggagaaaatatgtcaggctattcatgctcttatggaaaatgctgtgc

SEQ ID NO: 721190 - DNA, 100 bp, Homo sapiens
ccggctacgccttcgtggactaccccgaccagaactgggccatccgcgccatcgagaccctctcgggttccagcaacagatagaaatgctttaagttcac

SEQ ID NO: 721191 - DNA, 101 bp, Homo sapiens
aaagataggcggccatggtccaaccttgaaggttcttcttcacagggccgctgagtcacttcttctacttcttcatggaacattggatccctcctgaggtc

SEQ ID NO: 721192 - DNA, 51 bp, Homo sapiens
ccttcgacgaggaagcttataaaaatgtgacggagtctcgctctgtccccc

SEQ ID NO: 721193 - DNA, 90 bp, Homo sapiens
gattgagccagaaggaagacaatgctggcccctggccccaacatggcccgtcgctctcagagctcctcgcagggggacaacccactggca

SEQ ID NO: 721194 - DNA, 51 bp, Homo sapiens
ccgaagagaacaagacgtgtgaagactcagacttattctggactcttctgt

SEQ ID NO: 721195 - DNA, 75 bp, Homo sapiens
aacattctcaacaagctgcgggctcggcatgcccagtcaacaggtgaaaagaatggaaaactgtggtctccagat

SEQ ID NO: 721196 - DNA, 98 bp, Homo sapiens
gaggcaccgggatcgtgaccgagaccgtgaccgagagcgtgaccgagagcgcgaatatcgtcatcgttagaagaaataacatctgctttgctgccgag

SEQ ID NO: 721197 - DNA, 95 bp, Homo sapiens
aaaccttcacagaagaacaatgatggaaaggttgcatctttttccagatgagatcaacaacccctccccgtcgtaaacgctgaggaatgatgtgg

SEQ ID NO: 721198 - DNA, 100 bp, Homo sapiens
attcaatccggaccattttctggagaatggacagtttaagaaaagggaagcctttatgcctttctcaataggatgaatttcatcctttcatcgaagcact

SEQ ID NO: 721199 - DNA, 83 bp, Homo sapiens
cttccaggacatcaagcccatgcgggaccagatcatccgcgtgaagcgctgcatatctatgtgagactgaattttcctcttag

SEQ ID NO: 721200 - DNA, 83 bp, Homo sapiens
cctggctagccggcgacttgagtgacgagcagttgtgaaaaacttcaggacaaaaatgtttcatttaaggacttgtgctgcta

SEQ ID NO: 721201 - DNA, 89 bp, Homo sapiens
gcagctcctgcccctgtccgggggatgactgattctcctccgccagatcaggatcctcatgaccagccaaagagaagaagaattaggaa

SEQ ID NO: 721202 - DNA, 75 bp, Homo sapiens
aaagaacctctggtgttgaaaggagtagatcccataatagatcacgttcaagacagaaagacagacgtagatcta

SEQ ID NO: 721203 - DNA, 100 bp, Homo sapiens
ccgcagaccagcgcccgaaggccgacacgctggccctgaggcaacggctcatcagcaggttacgggcaggacttgagtggcttcggacagggcttctcag

SEQ ID NO: 721204 - DNA, 100 bp, Homo sapiens
agatccccatggacaacaaggagccaaagacagcagcattcccaagcgcaagagaaagcgggtctcggaaggaaattccgtctcctcttcctcctcgtct

SEQ ID NO: 721205 - DNA, 51 bp, Homo sapiens
ggcaggacctgggcggaggccgccaagacgaatcttgcctcctggaatcct

SEQ ID NO: 721206 - DNA, 100 bp, Homo sapiens
gctgaaggaagatggcggacggcgtggaccacatagacatttacgcggatgtcggcgaagagttcaaccaggtaaaccgtcctattggcagggtacagat

SEQ ID NO: 721207 - DNA, 50 bp, Homo sapiens
agggtgcaggatgagaacaacggtgtgtttgaccatcgaatgaagtgctg

SEQ ID NO: 721208 - DNA, 90 bp, Homo sapiens
ggaaaggcaaaaacttcgaaactcatgcaaggcatcgactgggcccccgagagtaaccgtattgtgacctgcggcacagaccgcaacgcc

SEQ ID NO: 721209 - DNA, 75 bp, Homo sapiens
ttgctggacagggagttgcttggaccaaaatgccagtatgtgaagcacgtcagctaactgttcagatgatgcaaa

SEQ ID NO: 721210 - DNA, 90 bp, Homo sapiens
tggaagaggtctgagcagtgggccaccatcgagcagctgtgcaatatcctgctggatgacattgtccttacccattctctcttcctcccg

SEQ ID NO: 721211 - DNA, 90 bp, Homo sapiens
gtcgacggaggccggggcctcaccaggaaagtggtaataatagacgtggatggaatacaactagccagagatattccaatgtcatccagc

SEQ ID NO: 721212 - DNA, 97 bp, Homo sapiens
ttgaagctgatgaggaaaattggcaaatctgttactgcagacagatgggaaaaatatttgatcaagtgccggtggtggtgtgcacattgagccccgg

SEQ ID NO: 721213 - DNA, 75 bp, Homo sapiens
cgggggcatcatgtcttttgccagctcagcaacagcctcaccaaggactccatgaatatcaaagcccatatccac

SEQ ID NO: 721214 - DNA, 100 bp, Homo sapiens
tggggaccgaactcagtccgagatgtagactaggcaataacgctaatctaatcccgattgctgctaaaattgattcaattcctcacttgaataattccac

SEQ ID NO: 721215 - DNA, 90 bp, Homo sapiens
agcgcctcgtcgacatgagtgatgtggaggaaaacaacttcgagggcagaggacagtatgatttggtgaaatgcctggctcctattcgag

SEQ ID NO: 721216 - DNA, 100 bp, Homo sapiens
gcttggagcacttcctattccactggattgggaaagaccatggcagggtgccattattatccatgaagtttatgaagaaggagcagcatgtaaagatgga

SEQ ID NO: 721217 - DNA, 100 bp, Homo sapiens
gttcgcttccgaggactcactggggtctgtgcagacttttgcagacaaatcaaaacaagaagctctgaagaatgacctggtggaggctttgaagagaaag

SEQ ID NO: 721218 - DNA, 100 bp, Homo sapiens
ctcggcgtcgcgctttggccaaccgctgcgtcgtccctgggcccgaataactgtcgcccgcttccctcagcgtgaggaattgaatgatctggcacgggac

SEQ ID NO: 721219 - DNA, 96 bp, Homo sapiens
tttgggtacgtgcaagagttcatacaagcagagctaaaggtatcatgaactgatcactaaatatgggaagttggagcctttggcagaagtggacct

SEQ ID NO: 721220 - DNA, 82 bp, Homo sapiens
cagttcctgccgtctgctcttctgcctcttgatctccgccaccgtcttcaggccaggctcagctggaagctcagaaagccac

SEQ ID NO: 721221 - DNA, 80 bp, Homo sapiens
gtgaggaacgcgggaccaggaggacgcaagagtgagccatggagctacgtgtggggaacaagtaccgcctgggacggaag

SEQ ID NO: 721222 - DNA, 75 bp, Homo sapiens
gcgacgacttctggaccatcccacccctgactcagccattcatgctggagaaagaataatcatgggccagactgg

SEQ ID NO: 721223 - DNA, 100 bp, Homo sapiens
cgcgtccccggctgctcctcctcgtgctggcggcggcggcggcggcggcggcggcgctgctcccgggggcgacggatgcgaattggactgcactctggat

SEQ ID NO: 721224 - DNA, 98 bp, Homo sapiens
attcgcttctcggtttttgcactcgctgtgcaccgagttactttcccggcccctcgttgacaccgtatccagctcacatagaagacattgactacgag

SEQ ID NO: 721225 - DNA, 100 bp, Homo sapiens
ctgagatccaaagagaaagtgatattgatgatgttaagaagttcaaaccgggttacctggaagctactcttaattggtttagattatataaggtaccaga

SEQ ID NO: 721226 - DNA, 82 bp, Homo sapiens
ctggtgctctgcgtcctcatcgggcttatgttcgaggcccgatgagagaaagggaaagttaaggatgctggagcagaacaat

SEQ ID NO: 721227 - DNA, 73 bp, Homo sapiens
cctaattaggatggtttttcaacaagttggagtaagcatgcaatcggaccctgatgctcccataagacagaaa

SEQ ID NO: 721228 - DNA, 98 bp, Homo sapiens
ttgacttttgtgtccttccacttagaagaagctgaaacctatcaacactcttcaaaatgcaatggaatgtaccacggactgtatctcgactggcacgc

SEQ ID NO: 721229 - DNA, 100 bp, Homo sapiens
ctctacctggagtgatggtggctcagttcgtcctagttactggctggttcttcacaatctcaccccacagctgagtcagtgctgattctctcaaatagag

SEQ ID NO: 721230 - DNA, 98 bp, Homo sapiens
atttatagctaagactccaggacacccctgaagccgagaaatggagtggaagctggacacactatgtgacttgtatgaaaccctgaccatcacccagg

SEQ ID NO: 721231 - DNA, 80 bp, Homo sapiens
gggagaaacctcgtggcctggtctccattatttgagatgagttacatcttggaggggagggatgctgtgcacactgtgga

SEQ ID NO: 721232 - DNA, 100 bp, Homo sapiens
attgaatatcttaagcagcaagtttctctacttaaggagaaagcaaatattgatgatgttaagaagttcaaaccgggttacctggaagctactcttaatt

SEQ ID NO: 721233 - DNA, 80 bp, Homo sapiens
gaagcccacaattactcagcgctgccattttatttcaggaccaaagcagtatccttacaataatctgtacctggaacgag

SEQ ID NO: 721234 - DNA, 92 bp, Homo sapiens
gaggaggaggaggcttgggcttgcgccgttgaaggagcatcagatccatgctgctgctgactcggagccccacagcttggcacaggctctct

SEQ ID NO: 721235 - DNA, 75 bp, Homo sapiens
tcggggtccagcacagatgatggcgacagcggagaagggaaggctggagagcagtggcatgatctcggctcactg

SEQ ID NO: 721236 - DNA, 80 bp, Homo sapiens
tcgcgtggagtgacggtcacaccgcggcgatatctcttccaaatgcttgatgaaaaaggtgggaggatcacttgagccag

SEQ ID NO: 721237 - DNA, 89 bp, Homo sapiens
caacaccacaataatccacagccaagacaaggcgcctctgtcgaagagccttctgctggtccccagtgccctctccctcctgctcgccc

SEQ ID NO: 721238 - DNA, 50 bp, Homo sapiens
ggacgagggggccaaggcttcctccggggatcacccagtatactccatac

SEQ ID NO: 721239 - DNA, 100 bp, Homo sapiens
cctagctcgtggcagggggaactcggctagcggccccacagcccctgctgactcaaaacaactctcatcgactatgggaagctgggagacactaacgaac

SEQ ID NO: 721240 - DNA, 82 bp, Homo sapiens
cgggatttgggtcgcagttcttgtttgtggatcgctgtgatcgtcacttgtctgcctgaaggggaccaaggtgcacatgaaa

SEQ ID NO: 721241 - DNA, 96 bp, Homo sapiens
gggaaagccacgtgtcgggaaccaccacgctcacggactgcctgcgacggtgctggcccagcagggggagtacagtgaggccatccccatcctgag

SEQ ID NO: 721242 - DNA, 109 bp, Homo sapiens
aggcgcgccactcctcccggaggcgacatggggcacccggtgtaccgcggcgagaagccccagctgcactacgcggataacaaagccattgacctttgccgattgtgtt

SEQ ID NO: 721243 - DNA, 50 bp, Homo sapiens
ctggaaacaactgggcatatggatgtgggcgctatctccaactgtctttg

SEQ ID NO: 721244 - DNA, 100 bp, Homo sapiens
tacatcctcgaccaacggctgcgggcccagaacatcccgggagacaaggcccgcaaagtctagggacaggaagatggttggcgacgtgaccggggcccag

SEQ ID NO: 721245 - DNA, 50 bp, Homo sapiens
gcagaaatgttggatttgaaaatgtgacagtgatgataacatgggtgcca

SEQ ID NO: 721246 - DNA, 99 bp, Homo sapiens
gtcacctctctcaggatgcgtgaggcggacacgttgaggccacctcagctgatggaagtttccggatcaccattaacaaggacaccaaggtacccaatg

SEQ ID NO: 721247 - DNA, 100 bp, Homo sapiens
acctgcagctgcccccgagtcagagggcgcagtccgcattcaaagggtcaaagaattgactgtagatccaactgctgctggtgatgttcgtccaataatg

SEQ ID NO: 721248 - DNA, 74 bp, Homo sapiens
aacagacttttgaagaaatgatgaattacattccagatgtaaaggataactcctttagccgatcacggagttca

SEQ ID NO: 721249 - DNA, 87 bp, Homo sapiens
ggaaccctggtcaccgtctcctcagggttttggccaaattgggcgagggcacaaaataaccacttaccccttctcaccgaggaagag

SEQ ID NO: 721250 - DNA, 100 bp, Homo sapiens
gtgtttgtccccgcaggcactcacactcctgggagccggctccagcctcctgttcaggtatacggtattgaaggtcgctatgccacagctctttattctg

SEQ ID NO: 721251 - DNA, 83 bp, Homo sapiens
cttcttccaccgccctctccggcttgggtcctgtgactgcggcgggagagaggagcaagatcatggaagggaagtggttgctg

SEQ ID NO: 721252 - DNA, 75 bp, Homo sapiens
aacaaggaaaatggctctgtcggtgtaaaaaaatatgaagatcaatgatgcagactgatggttttgatgaagctg

SEQ ID NO: 721253 - DNA, 83 bp, Homo sapiens
cccgccgacgcctcagccgcttggggcccgcacggaccctctacttcataatctcaggggcgatataatcaatgaggtggtcc

SEQ ID NO: 721254 - DNA, 74 bp, Homo sapiens
ctgaagagcacgccatgcccattgggagaatagcaggctggtgagattggagagatgaaggatggagtcccaga

SEQ ID NO: 721255 - DNA, 100 bp, Homo sapiens
gctggaggagactggcggagctggcggggagtcgcgggcgcctccgcctcagggagagtcccgtattctcagagtaaaagttgtttctggaattgatctc

SEQ ID NO: 721256 - DNA, 75 bp, Homo sapiens
gatcccaccgcggatttccatcaccagggccgagaacgacaggaacttgctactaccagcaccatgccctaccaa

SEQ ID NO: 721257 - DNA, 98 bp, Homo sapiens
tgcaaggggagtcgtggcgtcgtctgcgaccgctgccttctcggctgttgtgaacttggataattctgtggttgacctggagacccttcaagctctct

SEQ ID NO: 721258 - DNA, 90 bp, Homo sapiens
gaaaagcctctgggagcagaagggaggctccaagacctcatcaacaattaaggctgtgggtgagcgtggaggatgctcagatgcacaccg

SEQ ID NO: 721259 - DNA, 100 bp, Homo sapiens
gcgaagtgctgcattggaagaagtggctctccaatccagtgttgaatagaagtgatgatagtggacatctttattttgtccccaaattctggaagaagca

SEQ ID NO: 721260 - DNA, 100 bp, Homo sapiens
ggaggagctcgatggcgagccaacagtcactgcatccgtgtcattctggaccttactcccaactaccggggtgagaactcgtggttctccactcaggttg

SEQ ID NO: 721261 - DNA, 98 bp, Homo sapiens
gcgacgtctacactgagtcggaggcgaaggactttgcctcccgggccaaactggcagttcaaaaactagtacagaaagttggattttttggaattttg

SEQ ID NO: 721262 - DNA, 82 bp, Homo sapiens
agagcaaaatctacaagatgatgcagggaggaggtaacgtgaagcacctggttctcttcctccatgaggctgtcctggtgca

SEQ ID NO: 721263 - DNA, 100 bp, Homo sapiens
cagcacccgccaccgtcgccggccgcccgcacgtccgtccgattatatctgggtgttggcacccagccactattctgccaatgaagtacatcctggtcac

SEQ ID NO: 721264 - DNA, 75 bp, Homo sapiens
gtggaaataaactgaaagatatcagcaccttggaacctttgctctctatcaatatcagctcacatcattgaaaag

SEQ ID NO: 721265 - DNA, 98 bp, Homo sapiens
gtgtcccccacatcctcccctgagtccggagctaccaaaaccatcctcctgggtctccgtctctccaccgggggcttcatccttccagggaggagaag

SEQ ID NO: 721266 - DNA, 98 bp, Homo sapiens
cggtggcctgaggaggcccgagcggcggcggtggcggcgaaggccgaggcgtctgaagatgatgagaaactgaaaaagaggaaggagcgatttgggat

SEQ ID NO: 721267 - DNA, 100 bp, Homo sapiens
cacagaattacactgaagaagtagagtatttcaaccataaagacatcttaattgggcacgaaagaggagtcttttagtcctgctatacagctgcaccttg

SEQ ID NO: 721268 - DNA, 83 bp, Homo sapiens
ccaggagaagccgcccaaagaactgccgcaggtggctgcgatgggacggaagccatgaatggtgccggccctggccccgccgc

SEQ ID NO: 721269 - DNA, 100 bp, Homo sapiens
gcaggtcttctggccagagccccagtacaggtttgcagattccgccagcagcacagcaagctctacagatgagtggctctttggcatttggtgctgtggc

SEQ ID NO: 721270 - DNA, 50 bp, Homo sapiens
gtttcattgatctagaagagtatattgaggatctctgggaaagtttagaa

SEQ ID NO: 721271 - DNA, 95 bp, Homo sapiens
ctacttattcatcagtttgttgtgcttgtcaagatcagatgcagtcatcatttacatcttcagaacaagagctagagcgattaagaagcgaaaat

SEQ ID NO: 721272 - DNA, 50 bp, Homo sapiens
ccatccattccaggagccagctatctgagaatttcgctaaggagtttgtg

SEQ ID NO: 721273 - DNA, 74 bp, Homo sapiens
cagcaccagtccagaagcctccatccagtttacatagcaaacttctggagacagagcgccaactaggggaagct

SEQ ID NO: 721274 - DNA, 83 bp, Homo sapiens
caaagatggcggcagggaccagcagttactgggaagataacgaggaaatattctgaaatggatcccaaatatttcatcttaat

SEQ ID NO: 721275 - DNA, 100 bp, Homo sapiens
gatgaacaggttccgaaagtggctctacaaacccaaggccaacgtggaacctgttgtgccgtcagaggcttcagagccggtgcccagggtgctttctgga

SEQ ID NO: 721276 - DNA, 50 bp, Homo sapiens
ctggactccatcctcttcctttttgaaatgttcctcctgctgatcaagag

SEQ ID NO: 721277 - DNA, 102 bp, Homo sapiens
aagctgcagcggaggaaggcgagaatcagcagaatctgccaaaataggaggaataattactgtgtttttgatagcattggtcttgacaagcaccatagtgac

SEQ ID NO: 721278 - DNA, 90 bp, Homo sapiens
cgtggcggtcggtcagcggggcgttctcccacctgtagcgactcaggcagctcctttgggacccagatcatcgggggccgggaggtgatc

SEQ ID NO: 721279 - DNA, 82 bp, Homo sapiens
tcgtcctcacctcgctactcgcttgcctacccgccggcccgcgggtctacttcctcaaaggagtacgagagggcctccaaag

SEQ ID NO: 721280 - DNA, 73 bp, Homo sapiens
ctttgctctttgccaatgcaggcatgaaccaggaaggtgtcttgctgcaggtaactaatgaagaagtggtcaa

SEQ ID NO: 721281 - DNA, 100 bp, Homo sapiens
gaggagtccctgaagatctatgctcctctgtacttgggtcttgctacgtacgttgcccaggttggaatgcagtggcgtgatcatggctcactgtagcctc

SEQ ID NO: 721282 - DNA, 100 bp, Homo sapiens
gccagtgtgaagacctccgaaggaccatagcattactctactgactggcagagacaggagaggtagatgtccacgcccacagaccctggtgcgatgcccc

SEQ ID NO: 721283 - DNA, 75 bp, Homo sapiens
tccatggctccccatcgccagccccccacgcccaccagagctggccacggtagtacggcggttctcccagaccgg

SEQ ID NO: 721284 - DNA, 75 bp, Homo sapiens
ttccaggctacatgcaggacttggaggtggagcaggccctgactccaggtcccctgacaagcccaccaggccccc

SEQ ID NO: 721285 - DNA, 101 bp, Homo sapiens
ggaaccatgacaggcatgttgtataaatgtacagaactcgaaaattaatgctgaaaataaggcgaagatcaacatggcaggcgcaaagcgcgttcctacgg

SEQ ID NO: 721286 - DNA, 89 bp, Homo sapiens
atagtatcttggccagggaactcaaacagcagatgcagacgtaaaattcatcctgatcagaaaaatattaatgcctatgttgtgtttaa

SEQ ID NO: 721287 - DNA, 87 bp, Homo sapiens
gaggagtgggttaaattcctcaggagagttgctggcacaccctgtggagccaccattggttcaggcaatcttcagcggtgatccaga

SEQ ID NO: 721288 - DNA, 75 bp, Homo sapiens
gcacgaggtctatgagaacaagacggacgtcatcctgatcttggaactactctgctaacaccagatagtggaaag

SEQ ID NO: 721289 - DNA, 78 bp, Homo sapiens
aagtgtcacacctgtaggaactgaggacaaggcagacgtgcagtccatcatcggcctgcagcgcttcttcgagacgcg

SEQ ID NO: 721290 - DNA, 75 bp, Homo sapiens
agaacaccagccttgcacctgaagaccccacctttcctgggggcgacgatggccttctgaggggctgggacacca

SEQ ID NO: 721291 - DNA, 100 bp, Homo sapiens
aaaatggccagcattttccaagtactgtaaattcctgtgcagaaggcatcgtcgtcttccggacagactatggtcaggcacattgcaagcaacccgtgcc

SEQ ID NO: 721292 - DNA, 75 bp, Homo sapiens
ccgcgcccctcggctacgtgccggggctgggccggggggcctcggcttcacaggatggggctgccagtgtcctgg

SEQ ID NO: 721293 - DNA, 131 bp, Homo sapiens
atgctagaattacctggaacttcatcatcatctacttcacaggaattgccatttccacttctgccccaccaacgttgggccaaccaaaaggagtcagtgccagtcaagatcgaaagatacctcccccaatt

SEQ ID NO: 721294 - DNA, 98 bp, Homo sapiens
ccccgctgtaaacagtggatcaaggctagagtaccgtggcacaatctcagctcattgcaacctctgcttcctgggctcaagcactctgcccacctcag

SEQ ID NO: 721295 - DNA, 50 bp, Homo sapiens
ctcggacaccttcgagggttgggccaagaataaggagacgggtgctttgg

SEQ ID NO: 721296 - DNA, 125 bp, Homo sapiens
tgaagacagagatttattcgtaatgcgactcaaagctgcacggcagtctgtttatgagccagagactgctgctactttgaaacgtacgatagaggccctgatggacagaggagcaatagtgaggg

SEQ ID NO: 721297 - DNA, 98 bp, Homo sapiens
ctttattgcagcaggaatttggtactccttccaggatgaggaggacatgttcatggtggtggacctgctcctgggaggcgacctgcgctaccatctgc

SEQ ID NO: 721298 - DNA, 100 bp, Homo sapiens
cgcgcacatcactcccgagtggaggaagcaatacatccagtatgaggttatggaaacaaaggacatgctttacatcgtcactgaatttgctaaaaatgga

SEQ ID NO: 721299 - DNA, 101 bp, Homo sapiens
tggaagcctacgagagcgaccccaccgagtgggcaatgtacgccaagttcgaccagtacagggtgacggagctgctccccccgttccagagactcatccag

SEQ ID NO: 721300 - DNA, 51 bp, Homo sapiens
agcagcgcggcagagtcatggggatgctaatactggagaccgtggacagac

SEQ ID NO: 721301 - DNA, 98 bp, Homo sapiens
cgaagtgacctcagcagggcatccagtctgcgggccaggcatcgacatccgcaacgactatcagcagctgaagcgcctggagaactgcacggtgatcg

SEQ ID NO: 721302 - DNA, 90 bp, Homo sapiens
acagctgtttccacgtgcggtgctcgtcgggagtgatcacctaccctacaggaactaagcgtcttgtagaaggaactattaatccaggag

SEQ ID NO: 721303 - DNA, 88 bp, Homo sapiens
ttcagtcatgcggagattaagtgatggctggaccggcggaggaggcgggagcccattgtcccgagagcctgtggcctctgcctccgca

SEQ ID NO: 721304 - DNA, 100 bp, Homo sapiens
cccaaacttcttaacccctagaccggtttttagtccattgactatgcagcctaatgggtgttaaataccacattatttgaaagctgggagatcgttggac

SEQ ID NO: 721305 - DNA, 100 bp, Homo sapiens
gttacagtatgagattgcaaagtccgggaccatgtctggagaactaccaccaaacattaacatcaaggaacctcgatgggatcaaagcactttcattgga

SEQ ID NO: 721306 - DNA, 87 bp, Homo sapiens
ccaggatctcgggctcggaacgagactgcacgcggagctggagtttgttcagatcatcatcatcgtggtggtgatgatggtgatggt

SEQ ID NO: 721307 - DNA, 100 bp, Homo sapiens
cggtctacaaaggtctggacactgaaaccaccgtggaagtcgcctggtgtgaactgcaggctaatagctcgtcagcttgctaaaatccatgctattcatg

SEQ ID NO: 721308 - DNA, 83 bp, Homo sapiens
gtcttggaagttccaaagttgcaacgatttctaagaagatagtggtgagctggcaaagccaaagattggttttccagagacaa

SEQ ID NO: 721309 - DNA, 100 bp, Homo sapiens
cagaaggaagatggcggatctggaggagcagttgtctgatgaagagaagactgggctggcttagatgaagatgaagatgcacatgtctgggaggataatt

SEQ ID NO: 721310 - DNA, 98 bp, Homo sapiens
ctccggcgcggaccccgcgtgcgccttgctcgcccgcagccccgagaccgcagatggactcaccctgtcacccaggttggactgcactggcctcaacc

SEQ ID NO: 721311 - DNA, 83 bp, Homo sapiens
gccgggctggctgcggccgccctgggccgggccccaccggacggaatcccagtcagaagttccagcctgccactgttctctga

SEQ ID NO: 721312 - DNA, 50 bp, Homo sapiens
gtgtgcaaacccgagagaactggaacgacaccgtaactatccgcactaga

SEQ ID NO: 721313 - DNA, 83 bp, Homo sapiens
catttatgtctacaatgtgttctccttattctgttggcgttgttcaggatgaggaagatggagagaatgcccacccatataga

SEQ ID NO: 721314 - DNA, 83 bp, Homo sapiens
caccgatgatgtgcagatcaatgacatttccctgcagggatcgatttgcttagtggtataatacctgaactctgtcagaaata

SEQ ID NO: 721315 - DNA, 100 bp, Homo sapiens
cagccatgagggccgggcccagtcaccgaccaattgagaaagtgactgaccacctggaagccctcattgatccatttgacctggacgttttcacgccaca

SEQ ID NO: 721316 - DNA, 75 bp, Homo sapiens
gatgaagttgttcattgtttgtcaccacaaaaaggacaggatgctgctctgctgaatgctgtacttagtgctaat

SEQ ID NO: 721317 - DNA, 100 bp, Homo sapiens
agaagcactgagagatgcggccccctcgcaggttctcaaaagtctatggccctgtgttcactgtgtattttggcctgaagcccattgtggtgttgcatgg

SEQ ID NO: 721318 - DNA, 50 bp, Homo sapiens
acctagtgggcgttgcctttagacccagctggttctgaggacatggggac

SEQ ID NO: 721319 - DNA, 97 bp, Homo sapiens
acctgctctttagcctgggagctgtgtgtctggacagggctacttctacaagtccgaacagccagtccagcaaaatgaacagcattgtctaccagaa

SEQ ID NO: 721320 - DNA, 100 bp, Homo sapiens
ctttgaaacgagtgagttctcttgctggatttactgactgtcacagaacttccattcctgttcattcaaaacaagagatgaacgaaatcagtccatcatc

SEQ ID NO: 721321 - DNA, 80 bp, Homo sapiens
ggaacttcctgttctgatagcgtggaagacctctttattgtgcaaagctgccatccatgcaggaataattgctgatgaac

SEQ ID NO: 721322 - DNA, 83 bp, Homo sapiens
atgggaaatcccaggctgccgcggctcctgtgtgctttgaagattttgcaagaacgaggctcaaggatgtgagggacacagta

SEQ ID NO: 721323 - DNA, 75 bp, Homo sapiens
aggatttgcttttgtaacttttgatgatcatgatacagttgataaaattgttggagtcaaattgactttatcagc

SEQ ID NO: 721324 - DNA, 100 bp, Homo sapiens
atgttgtccaggctggtctctactcctgggctcaagcagtcctcctgcctcagtctcccaaagtgctggaattacagggacttcaaatctcaacctgagc

SEQ ID NO: 721325 - DNA, 88 bp, Homo sapiens
gcagaggctcccgggctggactcaggcttctcagggtttcatcaccttaaatggttttgaaccaatgaaggtgtattcccttaaaaag

SEQ ID NO: 721326 - DNA, 100 bp, Homo sapiens
cagtgtggcagtccatggcctggggactgagcttacaagaccctatgaaaaaattagttgagaaagaagagaagaagaaaatcaaccagcaggaaagtac

SEQ ID NO: 721327 - DNA, 78 bp, Homo sapiens
gaggtggcctgcaaagatcgcctgcaccttcaaggccaaactatgcagcttttgaagagggagaacagcagattgctc

SEQ ID NO: 721328 - DNA, 90 bp, Homo sapiens
ctctctgctgcggcgcggggaccgctgtgctctcggttaacattaggctgggaagatgacaaaacttgaagagcatctggagggaattgt

SEQ ID NO: 721329 - DNA, 87 bp, Homo sapiens
cagggtcaaaggagagcacaaccatcgcagttggaagcccatggggcaggctctacagattctcccctgcccctggagaaggaggag

SEQ ID NO: 721330 - DNA, 83 bp, Homo sapiens
tgcccagcagcacaagggcagtttgcagggctctctttacctatgaaggcaacagcaatgacatccgcgtggctggcacaggg

SEQ ID NO: 721331 - DNA, 75 bp, Homo sapiens
gcggcgcgtgggtcggttgcggtcggccccggcaggagatacaactcgtcaacgaatcaaattcagtgatgacag

SEQ ID NO: 721332 - DNA, 100 bp, Homo sapiens
agcctcctgctcatggcgctgctgcccatcttcttcggcgccctgcgctccgtacgctgcgcccgcggcaagtttttccagaaaggaggagtcaaggaag

SEQ ID NO: 721333 - DNA, 90 bp, Homo sapiens
ggcgaacgcggagagcacgccatgaaggcctcgggcacgcaaacggggattcagcgtccgatcctttggaacagggactcacgtgaagct

SEQ ID NO: 721334 - DNA, 82 bp, Homo sapiens
caacatttcaggaaaacagagaaagaagtgataggagggctctgtaggccggatcacctcaacagtcacgtcagacaagtgc

SEQ ID NO: 721335 - DNA, 90 bp, Homo sapiens
taacaccaccttcaaaaatttctgagccagatgaccaagatgctccagatgaacatgagtcgcctccacctgaagatgccccattgtacc

SEQ ID NO: 721336 - DNA, 75 bp, Homo sapiens
accaggaccttctgtgggactccagattatatcgccccagaggttactagtattggaatctactgctccatcagg

SEQ ID NO: 721337 - DNA, 82 bp, Homo sapiens
ttgcgccgtacattcgagagtttgaggttgcacataggcaaaggtgtgcagttggaatgtaaaggtgaaggtgatgtttggg

SEQ ID NO: 721338 - DNA, 129 bp, Homo sapiens
tggtggagaggaaggggcccggtatggcccatcgctcatgccaggagggaacaaagaagcgtggtggatagatacttctcaagacatcacacagcgtgagtcaatcaaggagggaagccacaagcagac

SEQ ID NO: 721339 - DNA, 82 bp, Homo sapiens
gcatcgtgagcaatggaagcctgatccgggagaggtggttccagaattatgaatccacattcatctcaatggaaggatcctg

SEQ ID NO: 721340 - DNA, 90 bp, Homo sapiens
gctcgctgggagagaggtacctctccttttccctctccctttccctaagtggacagaggactgcagaaaatcaacctatcctccttcagg

SEQ ID NO: 721341 - DNA, 75 bp, Homo sapiens
ctgatggtgatggagattttgatgtggatgatgccaaagttttattagaatatcctcgaacagaatcagagtggg

SEQ ID NO: 721342 - DNA, 100 bp, Homo sapiens
ttggcacacatggttaaggaacaggaggaaaccattcagaggtgctgatgtatggacagccgtatcgtgttaccttagagcttgagctgccagagtcccc

SEQ ID NO: 721343 - DNA, 75 bp, Homo sapiens
tatacctactgggttcccctggtcgacaaagatgctgaattagtggcccaatggaactattgtactctaagtcag

SEQ ID NO: 721344 - DNA, 51 bp, Homo sapiens
gtcatggcagaagacctccaggtggttctcttcccaaagtggaagccaaat

SEQ ID NO: 721345 - DNA, 82 bp, Homo sapiens
gggcgacggcggggtccgcgcggccaggtttggtgcacctcgatttggaggaagtagggcagggcccttatctggaaagaag

SEQ ID NO: 721346 - DNA, 98 bp, Homo sapiens
ctcttacagaaatgtgtcttgttgcatttggtaatttagcagaacttgacatatctgaagagatggattaagaatgctttggattaaggattgtggag

SEQ ID NO: 721347 - DNA, 98 bp, Homo sapiens
cggcgcagtgcgaagcgaaacaggtattgttgcagcatctggcagtgagactgaggatgaggacagcatggacattcccttggacctttcttcatccg

SEQ ID NO: 721348 - DNA, 105 bp, Homo sapiens
cccccggaacctggactcccggaccttcatcaccattggagacagacactgacgtcttcatctgcacaagccccatcaagatgttcaagtactgtccctatgaga

SEQ ID NO: 721349 - DNA, 98 bp, Homo sapiens
acaacggggttgagtttccgattggacagatctggtcgcctggtgacccctgtgagttatgcatctgccagcaatctgcacatcgtgctgccacacga

SEQ ID NO: 721350 - DNA, 101 bp, Homo sapiens
aggaccaaaattgtggaaaagtcactctgacatccacgacagcgatggcagttccagcagcagccaccagagcctcaagagcacagccaaatgggcggcat

SEQ ID NO: 721351 - DNA, 75 bp, Homo sapiens
aggactcctcgcctggctcggaagagggaagtctcaggttgccctgaagatcatccgcaacgtgggcaagtaccg

SEQ ID NO: 721352 - DNA, 100 bp, Homo sapiens
ctctttctctgctgcaacacccctactgttctccgtgtattggcttttctgggcagcaggtactggttttggattaggaattgttttctcacttaccttc

SEQ ID NO: 721353 - DNA, 101 bp, Homo sapiens
cgcccgccgccggccacgccgagtgtcgcccgcagccacgcggaggcggcggggagccgcgcgcggcagcctgcttgaatttcttgaaactgtgcaaaata

SEQ ID NO: 721354 - DNA, 75 bp, Homo sapiens
tccttaaattttggagcagttggagcactgagtggtgaccaagaatatggcccaggtgaccaaagccctggacaa

SEQ ID NO: 721355 - DNA, 100 bp, Homo sapiens
cagattcgcagtggtcgcttcttctccttgcccccccccagctgtcttcgcttcgtccagaccaacatctcccgcctcctgcaggagacctccgagcagc

SEQ ID NO: 721356 - DNA, 80 bp, Homo sapiens
agaagaaaggattcgttacagccagagattgctctttcgacgtgtagcagcagctttgccgggaatggaaagcacacagg

SEQ ID NO: 721357 - DNA, 89 bp, Homo sapiens
cgcgagtcggcgcgcgggacgaagctgctagtctatggggtccttacaaagacatttggcataaagtgggaaatgctctttggagaaga

SEQ ID NO: 721358 - DNA, 74 bp, Homo sapiens
atatttcagaagagacaagagtacttctgttaacaggaaagggaagtgttcgccagttactacatgaaaagata

SEQ ID NO: 721359 - DNA, 105 bp, Homo sapiens
ctgatagacatgggggcctcaaacgtggagatcaactcctctctgttaatggagtggaaagaccacagcaagattctttcattcgtctcctcctagcctggggga

SEQ ID NO: 721360 - DNA, 100 bp, Homo sapiens
accaggccaccttcgtgaacgcgctgcacctctacctgtggctctttctgctgggcctgcccttcaccctctacatgctcatgacactgagaggttcggt

SEQ ID NO: 721361 - DNA, 75 bp, Homo sapiens
gagagcgaagtcaaggccctgtgcgctaaggccagagaaatgatatcgccatggcaattacaaaatttgatcagt

SEQ ID NO: 721362 - DNA, 100 bp, Homo sapiens
agctctgcttagaatctgtaaagaacaaatatgaatgtgaaattcaagcttctcgccagcattgtgagcatgcagcagattggaataaatatgatgaccg

SEQ ID NO: 721363 - DNA, 78 bp, Homo sapiens
agatatatggagctctacacgtatcctcctgcctagcgcagctatatgttctcctttcagccaagacctttcaccagt

SEQ ID NO: 721364 - DNA, 75 bp, Homo sapiens
ctgcagcagacattacttcaggacaacctcttgggcaggttgcagtacctaccccagctaactggcagcagcatc

SEQ ID NO: 721365 - DNA, 75 bp, Homo sapiens
tggagaggagcagcggttgctgttggaggagatcactgtgtccactactatgatcttcgtaacactaaacagcca

SEQ ID NO: 721366 - DNA, 50 bp, Homo sapiens
caagaatctgtgggagcagatctgcaaggatgtctttggtggacttggga

SEQ ID NO: 721367 - DNA, 100 bp, Homo sapiens
ggaaaaagctacagggaatcctaaacaccccttcagtaaatttgggacagaatgtactcaagactgatcttctaagttcactggaaatgattttatcccc

SEQ ID NO: 721368 - DNA, 75 bp, Homo sapiens
aggagatcgccacctacagccgcttgctagaggttgaggacgctcagaagacataggccaaggagccagacttcc

SEQ ID NO: 721369 - DNA, 87 bp, Homo sapiens
tcaaaattgttttcagctaataaaccaaggtgtatgttggtaacctgggaactggcgctggcaaaggagagttagaaagggctttca

SEQ ID NO: 721370 - DNA, 80 bp, Homo sapiens
ccggccctgagctcccggcggcgcagagcattgcttttcaactagagccatgcattggaatcgcctgtgatttcacaaga

SEQ ID NO: 721371 - DNA, 100 bp, Homo sapiens
gcaggaggagcaggaggatcaggagccgcggccgcggcggcggcggccgggaaggagacatgcaagaaagcacttcagccaagcagaagggagccagctg

SEQ ID NO: 721372 - DNA, 80 bp, Homo sapiens
cggatttctgctatgatgacagaaactatccaactctggccaatattgaaaggaagaagaagttaaaacttgaaaaggag

SEQ ID NO: 721373 - DNA, 90 bp, Homo sapiens
gccggagggcgggaggaacatgacatcgcggagactggtcgaattgacaaatcttaccctacagtatgtggccacacaggaccagtgctg

SEQ ID NO: 721374 - DNA, 83 bp, Homo sapiens
tgcaggcctgggactgtcctgggccggcatgcttctggactatttccaggattttttatcaagcagaaatgcatcgaacaacg

SEQ ID NO: 721375 - DNA, 90 bp, Homo sapiens
taagtgagagagatgccatctacaaagaattctccttccacaattttaatcagttactccacaggatccgctgaacataggatgttgcca

SEQ ID NO: 721376 - DNA, 51 bp, Homo sapiens
cccacacacaagtcttctctctatatagcctacagcctggctcccgcgacg

SEQ ID NO: 721377 - DNA, 51 bp, Homo sapiens
gaatgagcgttccagcttctccggcttggcaactcttgtgaaatttcatag

SEQ ID NO: 721378 - DNA, 95 bp, Homo sapiens
agcccacatgcccgctcacctgcgctgtgatgcctgcagagctgtggcttaccagtgttctaagaacggaagcatctgggctggatggaatttag

SEQ ID NO: 721379 - DNA, 75 bp, Homo sapiens
ctgggtttcccgggagatcccaggcggtgacagagtggagccatggctagaggtccatccacatcgtggcgctgg

SEQ ID NO: 721380 - DNA, 75 bp, Homo sapiens
cagatggaaccagaaaagatacgaggctctaggagagaatgttggctcaattaagaaacatcagggagataaatt

SEQ ID NO: 721381 - DNA, 100 bp, Homo sapiens
cgcccctggcctcgcgggccgtgtctccggcatcatgtgtgatctattaatgagatgaagcggttggaagaaatgtcaaatatgtttcagagctctggag

SEQ ID NO: 721382 - DNA, 135 bp, Homo sapiens
cggcggattcgggaactgactgctgtagttcagaagaggtttggctttccagagggcagtgtagagacagatgtcatcaatgcttcttggtgggtcatgagcaacaagactcgggatgaactggaaagaagtttt

SEQ ID NO: 721383 - DNA, 100 bp, Homo sapiens
agaaagtggaaaaggcagaggtgaaggagagaacagaggaacctatggagacagagcccaaaggttcggagagtaccaggttccagtgggcgtcttcata

SEQ ID NO: 721384 - DNA, 74 bp, Homo sapiens
gtgtttggcacccggatcctggatgaggaggtgtttgagcctgtggacatctctacagcaatgagtgaacgggc

SEQ ID NO: 721385 - DNA, 90 bp, Homo sapiens
atcatggggcaggatggcaccagccttggtatttaaaccatgtcagagctgcctcaccacaggaccttgctggaggctatacttcttctc

SEQ ID NO: 721386 - DNA, 75 bp, Homo sapiens
gcatgaaacgttgttcttttttgtgggcttatgctgcacaattggcaggccataggaaaaggatacagagtagag

SEQ ID NO: 721387 - DNA, 74 bp, Homo sapiens
gaatttttgaaatgggctgggaaaagccatctcctattcagggtggcacttttacgatctccaatttaggaatg

SEQ ID NO: 721388 - DNA, 97 bp, Homo sapiens
gagaaggcggcggctctctggtccgcagcggcaacagtaacgaaaaacagggctctgtctgtggaagcccgtaaagagatgactagaaaggctatta

SEQ ID NO: 721389 - DNA, 75 bp, Homo sapiens
cggctcacctgtgcgggatggaacaaaagttccgccatggagtcatagttgcagctgactccagggctacagcgg

SEQ ID NO: 721390 - DNA, 100 bp, Homo sapiens
tgccgagaaggagttgtttcccattgcagcccaggtggataaggaacatctcttcccagcggctcagggcagctgcaatgactctccgcacggtattatt

SEQ ID NO: 721391 - DNA, 100 bp, Homo sapiens
cccttctgctccacgaggagcacagccgggccgctgcgaaggtttacctgaagaagatggatactcacggttgtctataagtggcacagggacttcgaca

SEQ ID NO: 721392 - DNA, 100 bp, Homo sapiens
tttcacggtggccttgtggagacaacgccttaacccaaggaagtgactcaaactgtgagaacttcaggcattcccatcaagagcaccatggacaacccca

SEQ ID NO: 721393 - DNA, 100 bp, Homo sapiens
caggaaggcagtctttgctacgtacagcaaaaggtgtactattgactggaagaaaggaaagaatgttactgtcaaaaccatcaagaaaaagcagaagcat

SEQ ID NO: 721394 - DNA, 101 bp, Homo sapiens
gagacgcggtgcgcacgcgcgtgagggatgtcgcgggcatcagtgtttttctgaccgaagttctcatttcctgacaatggaaatggaacaagaaaaaatga

SEQ ID NO: 721395 - DNA, 100 bp, Homo sapiens
cacctgagtttacgtctcttccatctgctgctcacctcagctgcctgggtccccgacgagagccaggccctgccctgggagaagccctgccacacgtcgt

SEQ ID NO: 721396 - DNA, 98 bp, Homo sapiens
tcggggtgaacgcatcaatcagctcatccgtcagctgaactagacccagcaggaggccactgtctgcagctcccgtgaagatgtccactccagaccca

SEQ ID NO: 721397 - DNA, 97 bp, Homo sapiens
ttacaacggctacagcgtggtttttgtggggactaagagtggcaagctgaaaaagggacctaccagggccagtgggtcggtggcatgcgccagggct

SEQ ID NO: 721398 - DNA, 98 bp, Homo sapiens
caagactggtgggacccagactgacttgttcacatgtggcaaatgtaaaaagaagaattgcacttacacacaggctgtccgttccttgctggagaatt

SEQ ID NO: 721399 - DNA, 100 bp, Homo sapiens
gagctgctggaggctcgcggcgccggctgctctagcgagcagttcgaggagcgatctgaagataaaggttggggacaggcacatcagtgctcacaagttt

SEQ ID NO: 721400 - DNA, 90 bp, Homo sapiens
gtctttggcttctcgactcggtcctgtttcgacagcgaacatgtcgcggcctgtcaggttgtgcagcctgactctgaagaagctggtggt

SEQ ID NO: 721401 - DNA, 74 bp, Homo sapiens
atgtattgagtacattgaagccacaggaaaatgtttataggaggccttagctgggacactacaaagaaagatct

SEQ ID NO: 721402 - DNA, 55 bp, Homo sapiens
ggatgccgaggattggttcttcagcaagacagaggagctgaaccgcgaggtggcc

SEQ ID NO: 721403 - DNA, 112 bp, Homo sapiens
tcttggcccttgttcccccaaatgtctgactctgactctcggactgagaaacgcaagggagaaacaaaggcagcgctgccctcgggggagcattggccctggcggaacgcag

SEQ ID NO: 721404 - DNA, 75 bp, Homo sapiens
ccagtcccaccaggaaaccagagccccagggcagttgggtgagaagcagcttccatcttcaacctcggatgatcg

SEQ ID NO: 721405 - DNA, 50 bp, Homo sapiens
ctgggctgccggcacttcgcggcagggatcatggcccaagttgcaatgtc

SEQ ID NO: 721406 - DNA, 90 bp, Homo sapiens
actgttcagaagtccatatacagaaacatgttggaaaaatatagaaacctggttttgctaggggccagtgtcattcaaagatgtggctgt

SEQ ID NO: 721407 - DNA, 83 bp, Homo sapiens
cgcgaggctcacggcagggccctggcgccgggcagggcgagcctcggaagccgcctggaggtggaggcaatgcccagagctgt

SEQ ID NO: 721408 - DNA, 100 bp, Homo sapiens
gtttgcttctgaggaagctggaagctgcagccacaatgtgcctttgcaggggagcctgagagccacaggcttgtctggagcgggaaagactactgtgagc

SEQ ID NO: 721409 - DNA, 75 bp, Homo sapiens
cttcggcagtccacccaccgccgccgcctcccaggaagcaggagctggccaacagctcggatgcgaccctcccag

SEQ ID NO: 721410 - DNA, 90 bp, Homo sapiens
attgccgccggtcctgaccaccgtgaacggacagtcccccccagggtgaggtggctttgaccccgggttgcccggccagcacgaccgagg

SEQ ID NO: 721411 - DNA, 90 bp, Homo sapiens
gcgatcccgggtcatctccagatgctagggttatggaactgtcaagtaatccacctctggctaccatccttattcctcctcatgctcgga

SEQ ID NO: 721412 - DNA, 50 bp, Homo sapiens
cgggagagaatacacagagccacaggggaaatgctgtctgtagctgagca

SEQ ID NO: 721413 - DNA, 80 bp, Homo sapiens
agctgacagcgcgcacttcacccgcagttgattctcattcagattgtggatgcctcgtcagtcatcacttgggatttcga

SEQ ID NO: 721414 - DNA, 75 bp, Homo sapiens
tcttccagcccaaggatgaggggggctacttctactttgtcaccaggagactaaagtccatcaaaaacatccaga

SEQ ID NO: 721415 - DNA, 49 bp, Homo sapiens
ggaacacaacctcaccttgatcaggaagtttcagctgatcctactgcca

SEQ ID NO: 721416 - DNA, 75 bp, Homo sapiens
tggagcagcatcgaggcccgggaggcagcggaggaggagaaagagatggacctcccggactcggcctcgagggtc

SEQ ID NO: 721417 - DNA, 97 bp, Homo sapiens
gatcctacaagcaagctgaatggaggccagatagtaccatgatagctgtatcatctgatgatttgaagaagagaagagagcctcacatctccacttt

SEQ ID NO: 721418 - DNA, 90 bp, Homo sapiens
cggggccgccccccgaagcccagggagagcaaggcgcgcggcgactccggtttgcaccttctgctccatctcctcaccacatcagccccc

SEQ ID NO: 721419 - DNA, 75 bp, Homo sapiens
tggaaatgcattttcgaacgcattcaggtggattttcggaaaagacatatgaatggagctcagaagaggaggagc

SEQ ID NO: 721420 - DNA, 100 bp, Homo sapiens
gacagaagagagagcagaggtgtttgtcagggcagggctgaacacagagctgccatcagtcatgctcttaaacggggactgcccagagagcctgaagaag

SEQ ID NO: 721421 - DNA, 75 bp, Homo sapiens
gggattgggaaaatctcttcagggttgggagccacgtgtaccagtgtgtgttgatcttggcttgattcagtctgc

SEQ ID NO: 721422 - DNA, 82 bp, Homo sapiens
catcaggccgcgtctcctcagggtatataatgtttacatggcagggaggcagctgtgttctaagcggtaccgggagtttgct

SEQ ID NO: 721423 - DNA, 83 bp, Homo sapiens
ggaaaatgcgctcgggctggaccagcagagtctcactgtcgcccaggctgcagtgcagtggtgccatcacgcgtcactgcaac

SEQ ID NO: 721424 - DNA, 82 bp, Homo sapiens
cacctaccaggtgtcggagtctgacagcagtggggagaccaaggtgtgaacgagtccccgatgatgacctggggggaggttg

SEQ ID NO: 721425 - DNA, 75 bp, Homo sapiens
ctcttctggtgtcaaagcttttggacattcctgggcctgtcttagaagtgatctgctcccgaatgcgctacatct

SEQ ID NO: 721426 - DNA, 51 bp, Homo sapiens
aatgggtatctgaaaaatggatcagctgcagaatcctactggatgtccact

SEQ ID NO: 721427 - DNA, 75 bp, Homo sapiens
tcagggatggagccctctggcggaagccatcagctatggagataggcagatgaatgctgaaattttcttctaagg

SEQ ID NO: 721428 - DNA, 101 bp, Homo sapiens
gggcgtccccgacagctgcccggtggtgctgcacagcttcacgcagctagaccccgacctgccgcgcccggaggaatactcccccagttgcaagaggcgca

SEQ ID NO: 721429 - DNA, 74 bp, Homo sapiens
tcgcatcctatggctcaaagaaagatgattatgctaaagtaaataatgccagcctgattggactgggttatact

SEQ ID NO: 721430 - DNA, 165 bp, Homo sapiens
atatctgatttctcctggaatcccaatgaaccttgggtgatttgttctgtatcagaagacaatatcatgcaagtgtggcaaatgatctttaggttcctgaaactggtggcaacatgacctgctaaaattttctgcttggacctctttggttctctcccctttcaa

SEQ ID NO: 721431 - DNA, 100 bp, Homo sapiens
ccaagacagcctggaagttgcgagcagtacatttttatccatcagtgtgtgcaactgatgtggatgaagaagaagcagcagttctgcatcagtgatgtca

SEQ ID NO: 721432 - DNA, 100 bp, Homo sapiens
cctgaacgtgattgagcgccaccctgtggacatcagcgccatccccgagcagcggtggaagctgtgtcggagatgtatgcagtgtgacgccaagtttgac

SEQ ID NO: 721433 - DNA, 75 bp, Homo sapiens
atcccccagccatgaagaatgcccatgccaaggcctcccgcacctcgtccaaatcgccacatcacagaatcgtat

SEQ ID NO: 721434 - DNA, 100 bp, Homo sapiens
ggagtactggccgagatggctaagaagtccatgccaggaggtcgtctgcagtcagcctccttctgaagaaataaaaacaggtgaggatgaagatgaggaa

SEQ ID NO: 721435 - DNA, 100 bp, Homo sapiens
cgactcttacatgatgaacaaagtactgatgacagtcttgttactacagctataattcaaagaggaactttaagaaaaggctctgttctggttgctggaa

SEQ ID NO: 721436 - DNA, 75 bp, Homo sapiens
gcttgggctcacttccacaaattgtcgcctctatgacctgcgggcagatagggaggttgccatctattccaaaga

SEQ ID NO: 721437 - DNA, 100 bp, Homo sapiens
gaagcgtggccggcagcgtcccggacgaggagatgaattccctctgctgacaaccaaacgtgtgttctggaagggtgttttggaggagttgctgtggttt

SEQ ID NO: 721438 - DNA, 100 bp, Homo sapiens
aattccaccagagccgcggcctgaccgcctgggtcagctccctcagcatgggcatcaccttgatagtggctggttatattctgggcactaaatgaaggcg

SEQ ID NO: 721439 - DNA, 96 bp, Homo sapiens
tgaaggacaataccaccctcttgacccaggtgcttctggcctccgtgctctgcttcacctcttctgtggacacaagataccaagtccagatagtgg

SEQ ID NO: 721440 - DNA, 100 bp, Homo sapiens
accgcccattcagtctacggctggggccgtcccagttcgcaatgagaaaggtctcacagatttcaagcctggctactggattggtgtccgctatgatgag

SEQ ID NO: 721441 - DNA, 74 bp, Homo sapiens
ttagacagtcgtggttcctgtgatctgtgtcctctttgcagaagggtaaccaggagccgacaacaactcctgac

SEQ ID NO: 721442 - DNA, 74 bp, Homo sapiens
ctctcactgcggagaggtgtttggtgcagaagttattcattttggacctggagaaagttcttcagaagatgctg

SEQ ID NO: 721443 - DNA, 100 bp, Homo sapiens
aaaacaacttcgagggcagagtatgtacaagctgtgaggacaacgcagaagccaatgggttttgtgtagagtgtgttgaatggctctgcaagacgtgtat

SEQ ID NO: 721444 - DNA, 82 bp, Homo sapiens
cttcgagtgacccgggtgccgaggagcgggaagagttgctgggccctgggcgctgcctatggcacagccaagagcggtaccg

SEQ ID NO: 721445 - DNA, 98 bp, Homo sapiens
caccagagcaccccctgggacagcgccacattcgccgggaagagagaagggcacagttacctaagtatcaacgtaatcttcctcggccaggacaggcc

SEQ ID NO: 721446 - DNA, 75 bp, Homo sapiens
tgtgatgttggagaactacagaaacctggtctccctaggtacaccaggggttggaaaaaccacactaggcaaaga

SEQ ID NO: 721447 - DNA, 80 bp, Homo sapiens
agctggtgtatcagtgaaaccatttcaagactcagtaatgttgaacggctttggcacagtggttaatgctcttggcaaac

SEQ ID NO: 721448 - DNA, 98 bp, Homo sapiens
ctcaaacaatttatgagattattgataattctcaaggattctacgtgtggataatattaatgcagctgtgatggatttgaaaaaaaagaagatccgca

SEQ ID NO: 721449 - DNA, 51 bp, Homo sapiens
agagctgcggaacaggacgccctctgattcccacagaacaacgagaagctt

SEQ ID NO: 721450 - DNA, 83 bp, Homo sapiens
acgcgggcgccaggaccggccgaacgcagagacctcctgccccccgaggtctgcagtctcctgaacccagcagccatctacgc

SEQ ID NO: 721451 - DNA, 100 bp, Homo sapiens
gtgattatggaggcccctctgtcttttctgtgacgggagcaatgctgacctcggtttcctggacccattccgactcaggaaacctcgacctgtctcccag

SEQ ID NO: 721452 - DNA, 88 bp, Homo sapiens
gaaaatcggtgaagagaggttttgaattcacgcttatggtagtggaaacaaatgccaggagagctgtagacagaggatatgtccaagt

SEQ ID NO: 721453 - DNA, 100 bp, Homo sapiens
tgagcacagaaccattggctctcactgaaacagatatcattaacggagctcaagaaaaatgtgtattgcctcctatggacggctaccctcactgtgaggg

SEQ ID NO: 721454 - DNA, 90 bp, Homo sapiens
tttaaacttaaggaagattgctttggaaggagcaaatgtaatttataaacgtgatgttggagaattggcagcaatgaaacagattctcgt

SEQ ID NO: 721455 - DNA, 80 bp, Homo sapiens
gtttcctacagatgatgagtcggtggcagagatcaatggaaccatgaacggatgagagtccaatgaaagcaaacttcctt

SEQ ID NO: 721456 - DNA, 100 bp, Homo sapiens
gggaccgagcaggaatccgtatctgggaacagtggttgcaggaatccagcaggctcacgcggaacagttggccaacatgagaatccaggatctgaaagtc

SEQ ID NO: 721457 - DNA, 75 bp, Homo sapiens
cgcgtgtacccggttgtcctcaggcgctgtcagggagttgaccacatttggccatttcccagaagggccccaccc

SEQ ID NO: 721458 - DNA, 100 bp, Homo sapiens
cggcggcctgtgtgtcaacgacctggcggtggggctgcggcgcctgggactgcaccgcaccgagggcgagctccagaccttcacggcatggtgcaactcc

SEQ ID NO: 721459 - DNA, 80 bp, Homo sapiens
tttctccgcctcagcccaacggggaggtgtcatccttgaaggatagaataaatcagctgtcgtgttctcagtgaaaagtg

SEQ ID NO: 721460 - DNA, 95 bp, Homo sapiens
gtcggctggcggagcggcttcctgcggtggaagcacacctcctccctgaaggtggccaacgagcccgtcttagccttcacgcagggcagccctga

SEQ ID NO: 721461 - DNA, 116 bp, Homo sapiens
ccggtgggggtgctgcatcctcttggccccacggggagcaccctgtcacccctaacagatgaagagaaggtctctcggccagaacacgtggatgcccacccaccactgagcctcat

SEQ ID NO: 721462 - DNA, 83 bp, Homo sapiens
cgagctgaccctgggagacatcgacgattctcattcagattgtggatgcctcgtcagtcatcacttgggatttcgacgtgtgc

SEQ ID NO: 721463 - DNA, 98 bp, Homo sapiens
cgggatcgagctgagaatagggacggccccaaggtgctggagaatctggtaaaagcaccattgtgaagcagatgaggatcctgcatgttaatgggttt

SEQ ID NO: 721464 - DNA, 82 bp, Homo sapiens
cgataacgcgcttttgctcctcctgaagtgtctttggtccaacgttgttccaggtgctggagaatctggtaaaagcaccatt

SEQ ID NO: 721465 - DNA, 51 bp, Homo sapiens
cgccgcgatggcgcaagtcatcgggtcagagtggtgctgggaacaactggg

SEQ ID NO: 721466 - DNA, 74 bp, Homo sapiens
gagcagggctgagatgggcaccgcggatctggggccgtcctcagcgccccatcatctccatctgctggggtcac

SEQ ID NO: 721467 - DNA, 100 bp, Homo sapiens
aaagaacttactgattcttgagggggtgcactatagccatctggagctgagccctggggagccagtgcaggagggggaccctcatttccgaagtgccctg

SEQ ID NO: 721468 - DNA, 98 bp, Homo sapiens
tgatgaccgtcaccaactggttcaaaggtttttcattagtcaatacagtgaaggctggcatgatcatcagcttcccatccaataatatctactcatca

SEQ ID NO: 721469 - DNA, 90 bp, Homo sapiens
gaaggcgcatcactcccagctgcgcaaagcttgcgaggtggcgttagacaacagcagttctgtagagagtttaaatatgaaggaatggca

SEQ ID NO: 721470 - DNA, 100 bp, Homo sapiens
gtctgagagagggaagtcgcctctgtgctcgtgagtgcatggggtataaggtatctacgagaccccagcaggcaccatcctttaccatgctcatttagac

SEQ ID NO: 721471 - DNA, 83 bp, Homo sapiens
ggaggtagcctggcccggtgggcactgtgatctcagacttccagccttcagaactgttcaattcccatgaaagtgcagcacat

SEQ ID NO: 721472 - DNA, 100 bp, Homo sapiens
ctactgcaccgtggagctgaggccaggaacagcaggagagcctgtcctgcctccagtccacctgtggccttgtccagtctgtagagttgaaggagaagct

SEQ ID NO: 721473 - DNA, 82 bp, Homo sapiens
gccgctctgggatcccggccaccagcaattgtccgattcagagcattcttcactccagaataatgagcaaccctctttggcc

SEQ ID NO: 721474 - DNA, 82 bp, Homo sapiens
tgaaaggctctccttgcagctgcttagacgctggatttttttcgggtagtggaaaaccagccgcttacaaacacgcagatgg

SEQ ID NO: 721475 - DNA, 100 bp, Homo sapiens
tgtagaccagctccaacaggattccatggtagctgggatgttagggctcagcatgttggcagataaattgaacatgactccagaagaagctgaaaggtgg

SEQ ID NO: 721476 - DNA, 90 bp, Homo sapiens
ggaggaggaggaggtggactctgccgacaccggagagaggtgtgttccagagaacaagccttcagacatttgctatattgacgctgagct

SEQ ID NO: 721477 - DNA, 88 bp, Homo sapiens
ggagagaatcaaacttacagggttgccaccaggacatgaccgataatagcaacaatcaactggtagtaagagcaaagtttaacttcca

SEQ ID NO: 721478 - DNA, 99 bp, Homo sapiens
agccggccgaggtgcaggggaagtacgtgaagaaggagacgtcgcctctgcttcggaggtcatcacactgaaacggtgttcaaccgggttttgccaggg

SEQ ID NO: 721479 - DNA, 76 bp, Homo sapiens
cgtagagcaattgggaattacacctgaaagctttgttaggaactctgcagatatctgtacaagcttcgagatttgc

SEQ ID NO: 721480 - DNA, 75 bp, Homo sapiens
ctcacttttcttccaaggataagttgcaagaggcataaacttggaggaggcagtggagagagcatcctggtatca

SEQ ID NO: 721481 - DNA, 85 bp, Homo sapiens
agtcctacgaagatgcctggggcggtgcagcagtttacgacgctgatccgaattagtgcactgaaaggctccaaaggaaaagact

SEQ ID NO: 721482 - DNA, 75 bp, Homo sapiens
atgaagaggcagagaggctgcagctagagattgaccagggcctgaccaaggactacggcaactcacccctgcacc

SEQ ID NO: 721483 - DNA, 100 bp, Homo sapiens
cacaacttcatggttcgaaattttcgagctggaaacaacttctggtggattcctgtagtgggccctttggttggtgctgtcattggaggcctcatctatg

SEQ ID NO: 721484 - DNA, 100 bp, Homo sapiens
caggcctgggcacgcccagcttcgcgccctacgaggccaacgtcgactttgagatccggacgtgatgcctgggccacggcaggagctgctctgtgccttc

SEQ ID NO: 721485 - DNA, 99 bp, Homo sapiens
gaaaacatgtactacagccagtcttctatgtttccacatcggtcagaaaaagatatgacaagagcacctcaaaggcagcagcctcaaggagcagccatg

SEQ ID NO: 721486 - DNA, 100 bp, Homo sapiens
tgacctgtgggacctggcgcagtccgccaacctcacggacaaggagctggaggcgttccgggtggccgtcgaggaccgagtcaggcagctgcatgaagcc

SEQ ID NO: 721487 - DNA, 74 bp, Homo sapiens
atcaagcaggtccggacccactggctgctggagcttgtcaccaccaggtggaccagatgttccagttcgcctcc

SEQ ID NO: 721488 - DNA, 75 bp, Homo sapiens
gatgaaacgtcaggaatttactacacaggaaggatctgagtctctccctgcggagacagccctgaagaactcctg

SEQ ID NO: 721489 - DNA, 51 bp, Homo sapiens
cgagcagcaagtcagggagcttaaggttatcaatactctggctgaccatca

SEQ ID NO: 721490 - DNA, 100 bp, Homo sapiens
cagatagcagagccatccttgggttccagggtcacccccgagaggacaacaggcatctggaagtgctctctcgccactctgggtgctttactgtctctgg

SEQ ID NO: 721491 - DNA, 140 bp, Homo sapiens
ggaagacatggccactccagtcggtgttgagcacggcgagcagtctcaggcctttagtgatgatggagaagctgtctttgctcggtgcttatcatctctgaaggatgagagaattcaagctagcaaaaagctgaagggtc

SEQ ID NO: 721492 - DNA, 75 bp, Homo sapiens
gctggcacagagactcagccggacctgcttccgccagtggagacaacagagcccacaggcggttttgtgagctgc

SEQ ID NO: 721493 - DNA, 100 bp, Homo sapiens
ctggtccgtgcacacctggactcagggcccagcactgccaaactggactactccaagtgggaatttcagattggaccttgtgaaggaatcagcatgggag

SEQ ID NO: 721494 - DNA, 100 bp, Homo sapiens
cacgtgtcccgtgtgcttagaggtgtacgagaagccggtacaggtgccctgcggacacgtgtatttataacagcaatgatgtagcagtatcgtttccaaa

SEQ ID NO: 721495 - DNA, 51 bp, Homo sapiens
ctcaagacctacctggtgtcggggaagaatgctgtggagctggaacttgcc

SEQ ID NO: 721496 - DNA, 82 bp, Homo sapiens
cacctgtgggacctgctggaagggaaggaaaaacctgtatgtggaaccacctttctccaacatcttcaaataaagaagtggt

SEQ ID NO: 721497 - DNA, 98 bp, Homo sapiens
ctggagggctgagcagtcaactcaaatgcaagtccaagaggaggaggaggcggaggtccaagcggaaaggctgacggagccagtgcagccggaaggaa

SEQ ID NO: 721498 - DNA, 80 bp, Homo sapiens
cctcaaggcccacctgagccgcgtctaccccgagcgtccggtgtggtggacacaggcctattcatcaacatggctgagag

SEQ ID NO: 721499 - DNA, 75 bp, Homo sapiens
aatagatgccaaatacaaaaagaagatcgagggaatggtcaggtatatcccgtgccttacctgactgggggctct

SEQ ID NO: 721500 - DNA, 83 bp, Homo sapiens
aaatgtctgactctgactctcggactgagaaacgcaagggttggggtgctggaggactgcttcaccttcctgggcatcttcct

SEQ ID NO: 721501 - DNA, 88 bp, Homo sapiens
ggattccaagtaactcttatttgattccttgacaaggatatcctagcggcgaaacaacaccgtactgggagtcagaacgtctgggttc

SEQ ID NO: 721502 - DNA, 100 bp, Homo sapiens
gactgacgcgagcagccaaggtgttggagcagctcacagggcagacccctgtgttttccaaagtgtgtgctgacttgataagaggcgcaaaagaaaagaa

SEQ ID NO: 721503 - DNA, 111 bp, Homo sapiens
gccgcaagtacccgtccatcatagtcaactgcgtggaagagaaggagctctgccagtgccggccgggagaaggcaattgctcctgctgtaaggagtgcatgctgtgtcttg

SEQ ID NO: 721504 - DNA, 75 bp, Homo sapiens
ctcatggctggtcgtctccagactccacactcctagcaagacacgaaacaggaggaggaggagagactggttctg

SEQ ID NO: 721505 - DNA, 75 bp, Homo sapiens
ctccgcaccccggggtcccaggaagggcggcccagatgctgtgtgctgtggacccacctggggttcatggagtgg

SEQ ID NO: 721506 - DNA, 74 bp, Homo sapiens
aagatggcggatctggaggagcagttgtctgatgaagagaaggaccatggccaacctggagcgcaccttcatcg

SEQ ID NO: 721507 - DNA, 98 bp, Homo sapiens
caaggaattaggtacagtaaattatcagaagatgtggaagatgtgaaatttgtcatcaattatgactaccctaactcctcagaggattatattcatcg

SEQ ID NO: 721508 - DNA, 100 bp, Homo sapiens
ctgcacgcaagtgttaaacttctgggcctgctatggtgtgctgcggttcatcatggagagtggggccaaaggctgcgaggttgtggtgtctgggaaactc

SEQ ID NO: 721509 - DNA, 100 bp, Homo sapiens
ccatggacggcagggctccctctggatgtggaattctccgtccctttccagggagggaacaaagcccacagcaccgaccgttccccagcacaccccaccc

SEQ ID NO: 721510 - DNA, 75 bp, Homo sapiens
ccagcacgagtggaaactctgtgttcgagctgactgtcactacagattgtgaaaactgctgagagagacttgcaa

SEQ ID NO: 721511 - DNA, 75 bp, Homo sapiens
tgctaagaaacttttatctgagctttctaaccctgaaatttctagctgtaggtaaaacttgcctactgatcagtt

SEQ ID NO: 721512 - DNA, 78 bp, Homo sapiens
gactgttgttggaggaacactttccagcgggacgaccctgggacagtctccactggggcagatccagctgaccatccg

SEQ ID NO: 721513 - DNA, 74 bp, Homo sapiens
actgaagaggaggtgcagatggcactttccaaagtggatgcctccggggagaaacgcttcgttaagggactcag

SEQ ID NO: 721514 - DNA, 100 bp, Homo sapiens
tcttggacaactgcacctgcacggagggcgtggagtagaacagaatcatcaggattttgtgtggatgagggctcggctacagcaagaagtagaggagcag

SEQ ID NO: 721515 - DNA, 98 bp, Homo sapiens
tggaagtgggggtagaggagaagttcatgaccatggtgctgggtaggataattgcggactgaaccctcgggctgcggtcatatatgagaacttgctcc

SEQ ID NO: 721516 - DNA, 100 bp, Homo sapiens
acaaaagcatctccatgagtgtggctgggtcacgacaaggtgtggtggctggaggtggccgaattgacaaacccatcttgaaggctggccgggcgtacca

SEQ ID NO: 721517 - DNA, 96 bp, Homo sapiens
agagactccactgaggtcacacagccggtggtcttcaagctgacagagaagctgacggaacagaaggagtggatgaagatataattgtgacccaaa

SEQ ID NO: 721518 - DNA, 98 bp, Homo sapiens
ggagatccgggagcggcagaagttacggcgacagctcctcgcgcagcaggggagccttagcatcatcaaatctaaaattccaacatactgctccatat

SEQ ID NO: 721519 - DNA, 98 bp, Homo sapiens
acgaggcgttcatcgaggagggcacattccttttcacctcagagtcggtcggggaaggccacccaggaactgtggctgcaccatctgtcttcatcttc

SEQ ID NO: 721520 - DNA, 100 bp, Homo sapiens
tgacaggcttactgaatatcctcttgtaattaatgcagtaaaacgcttccatatttatccagaggtgtttcatcagtacagacgcctcaccttcccacgc

SEQ ID NO: 721521 - DNA, 75 bp, Homo sapiens
agccgctggcagccgcggatctcaccgccgctcaggagttgctttaatgtgaagtattttcctggagtcacttcc

SEQ ID NO: 721522 - DNA, 101 bp, Homo sapiens
ctcgctccagaagcttcactttggtctgaagaactgttgcccaattcaacagtgccagcattccaactttgttaaacctaccaacatcttaaatggacttt

SEQ ID NO: 721523 - DNA, 121 bp, Homo sapiens
gcactctggagggattctggcatcagggaggctttcagccggagaagcgagtttcagctgttgtcatttacgtgctgaagcatattgacttgaggaaaacgccttccttggagtttggcat

SEQ ID NO: 721524 - DNA, 100 bp, Homo sapiens
tgcggcggagactgcatcaggctctcgataacgaaggaggcccaacttcattcaataaggagcctgacggatttatcccagacggtagaacaaaaggaag

SEQ ID NO: 721525 - DNA, 82 bp, Homo sapiens
ctgatcatcctgctgggcttcgtccagatcgggaaggccactgaggcggctcccagctgcgttggcgacatggccgacaccc

SEQ ID NO: 721526 - DNA, 96 bp, Homo sapiens
tggccatccaaggagtgaaggctagcctctatgtggccatgaatggtgaaggctatctctacagttcagatggagctatgacattgaagagaggaa

SEQ ID NO: 721527 - DNA, 96 bp, Homo sapiens
ggaaaaactggagagcttcatcaaaaatagtgatagctttgataagcatccagtaccctgctgactctgacatgcccccagcctcccccagctctg

SEQ ID NO: 721528 - DNA, 100 bp, Homo sapiens
aaacccccatcctgggaaaaatggggaagctgatgattttaaaccagcatctatagacacttcctgtgaaggagagcttcaagttggcaaaggagatgaa

SEQ ID NO: 721529 - DNA, 99 bp, Homo sapiens
gttaagcatgtccatgcatttattcacactcccactggaacacacttctgtgaagttgaacagctgagaagtgttctgtagaaaatattctcaaaacac

SEQ ID NO: 721530 - DNA, 100 bp, Homo sapiens
gtttaataatgatagaatgaagaccacaataaaagagacctctacttagctcagcaattcttaccttgaatccagaaccctggctgaaattgcaaaagca

SEQ ID NO: 721531 - DNA, 100 bp, Homo sapiens
aatgagattgaagaactgatccaggggacaaaagaggggaaactgagagttcccaattaataatgaagcaggttctgggaagttctggattgtttaataa

SEQ ID NO: 721532 - DNA, 100 bp, Homo sapiens
aacaatctaactgggcaaaagaagtacaaggaatttcagaacaggctgttgataatcaggtgtatgtggccacagcctctcctgcccgggatgacaaagc

SEQ ID NO: 721533 - DNA, 100 bp, Homo sapiens
tgccaccaccaatcagatcagtcttggctccctcagaagcatcgtgaaaagcctccttctggttccaaatggttcatcaagctctctctccagatcctcc

SEQ ID NO: 721534 - DNA, 75 bp, Homo sapiens
tgggcttggaacagggctgcacacctttctgctttatctggaattgaatgaccttcatatagaagcacttgcagt

SEQ ID NO: 721535 - DNA, 75 bp, Homo sapiens
ttcctcaatgactgccctctaaaggaagaggcacctgtatcaagtgcaacaaaggcatctatgggcagagcaatg

SEQ ID NO: 721536 - DNA, 100 bp, Homo sapiens
tcccctgtcctgccatctgctctgaggctttctcgcttgtctctcagcagacaccacccatcctttaaccaagcacagaaaaatagcctcttcttttcgc

SEQ ID NO: 721537 - DNA, 100 bp, Homo sapiens
gctggagaagatggtggccaggaagaacacgggcgccctgcgtccggcagaggaggcgagcatcccgctcaggtgatgaggaacccctcgcgcacccagc

SEQ ID NO: 721538 - DNA, 100 bp, Homo sapiens
gttgccttggaaaatgccaacgccgtgtctgaagggctgacgcgccactatgtagcgggtttcgggcgggccacgcgtgcgggacaggaacccaacccca

SEQ ID NO: 721539 - DNA, 75 bp, Homo sapiens
aaatttggagaagaaattgcaaggttacagatgtggaaatggaggcccagaaagatgaaatcatctgccccagct

SEQ ID NO: 721540 - DNA, 83 bp, Homo sapiens
cggaatgctgcccgatggccctgggtcctcgctgtggggcaatccgggcttgcagacgaggcgccatgtcagaaccggctggg

SEQ ID NO: 721541 - DNA, 90 bp, Homo sapiens
gacgggttcagttcgtcatggggctgtttggaaagacccaggagaagccgcccaaagaactggataaggaagcctgtgtgggtaccaaca

SEQ ID NO: 721542 - DNA, 100 bp, Homo sapiens
gtctatcttcttccttaggaaaccagacctagatgtgaaggctggtggaggctgtgtaatgaccattggagaaatgctacgatcttttctcacaaaactg

SEQ ID NO: 721543 - DNA, 101 bp, Homo sapiens
ggatgagcggagcaccttgctggacatgtcctccattttccaccagaaggccgaaaagaatcagacacaagtttggcagaaggaagtgtcagctgcttaga

SEQ ID NO: 721544 - DNA, 97 bp, Homo sapiens
ggcgaaaagggacattatgcttatgattgtcatcgttacagccggcgaagaagaagcagatatgccctgcgtccaagcccaatatagcccttcccct

SEQ ID NO: 721545 - DNA, 101 bp, Homo sapiens
cgcggagacccttcgagaaatctcgtctcgaccaagagctgaagctgatcggtcgcatatctgtgcctattgatttgcagaaagtggaccagtttgatcca

SEQ ID NO: 721546 - DNA, 75 bp, Homo sapiens
gcctgtgtcccacttgttcgcggcctataggttcaaaatcaaaggaagcccagaagggaggtcatttttacagtg

SEQ ID NO: 721547 - DNA, 100 bp, Homo sapiens
actcagccttgtcctcagggaagctggggctggtgcaactttcagaagtggtcccagctgaactgtcccaagcaataaacagtggtacattgttatcaaa

SEQ ID NO: 721548 - DNA, 98 bp, Homo sapiens
ctatgaccaggcccgccactacctcctggctgccgtgaataggcagcctaaagaatcttgtggaagaagaatgaagttgctgattatgaagctacaac

SEQ ID NO: 721549 - DNA, 75 bp, Homo sapiens
ctgaagcagcgacggcacagcgggaagaatggagaatctgataatcggaaccagcagaagatggagatgaaggtc

SEQ ID NO: 721550 - DNA, 50 bp, Homo sapiens
cgtcacactacgacagtgagaaaggaggacgtactcatagatcaaaccaa

SEQ ID NO: 721551 - DNA, 100 bp, Homo sapiens
tgacaaattatgctgcagcatattgtactggcctgctgctggcccgcagggagtgtcatgggccggcagacatgcctggagtgcagcttcgagatcccag

SEQ ID NO: 721552 - DNA, 82 bp, Homo sapiens
gctgctgcatgtctaccaggagaggagggaactgcggagcggatgatgaaccaggtggaagggcagcagaagaaccttgtgc

SEQ ID NO: 721553 - DNA, 96 bp, Homo sapiens
cagccaccgtaccccaggcagcccctgctcagttgtcaggaggaagaagacctagctttagcacaagcactgtcagccagtgaggcagaataccag

SEQ ID NO: 721554 - DNA, 83 bp, Homo sapiens
ctccagcccggcccggcagcgacatggaagatttgaaaaagggcgcatctatacgttcattggagaagtcgtcgtttctgtga

SEQ ID NO: 721555 - DNA, 75 bp, Homo sapiens
ccccggccacgcgagcgggaacagtctcctccactcggagcgtattacaatgactatggtgatattattaaggaa

SEQ ID NO: 721556 - DNA, 50 bp, Homo sapiens
gttggctcatctccagttggttcagtaccataacagcttgggggaaagac

SEQ ID NO: 721557 - DNA, 83 bp, Homo sapiens
ctctgctgacacccatcacccacatctcacagttgacatcatggacatatgtgagtccatcctggagaggaagcggcatgaca

SEQ ID NO: 721558 - DNA, 101 bp, Homo sapiens
gacaaaacttcaagccaaacatcaagcagaatgtgatttgcttgaagatatgagtttctttcaagatggcttgaaaacagctgataagttgaaacagtaca

SEQ ID NO: 721559 - DNA, 100 bp, Homo sapiens
gtggcatggaagatccatttgaagagaaatgtttatcactgcaacaaatgccggctgcagtttctctttgccaaggacaaaattgaacacaagcttcaac

SEQ ID NO: 721560 - DNA, 83 bp, Homo sapiens
gtagctgtcattggtggtggcttggtacaatgactcttcttgcttttcacctaagttgaataagcaccctgtgcactttaatc

SEQ ID NO: 721561 - DNA, 100 bp, Homo sapiens
gacctcatggcctatgacagaagagggagacctggagaccgttacgacggcatggtgatttgtctacagcaaccaagagcaaaacaagtgaagacatcag

SEQ ID NO: 721562 - DNA, 101 bp, Homo sapiens
cagtttatggcttccagtggaggcattttggggcagaatacagagatatggaatcagggcactgtttgaagaagcaaacatggtagcatcaagcattcctt

SEQ ID NO: 721563 - DNA, 100 bp, Homo sapiens
attctttgcagttctgataaaacagggttcccagtttgtcgagtgggcctcggcaggaaacctcaaaccggtgtgggcgagcaggggctgcccgcgggcc

SEQ ID NO: 721564 - DNA, 75 bp, Homo sapiens
agcacagcacggtactggagaacacggatggctcggacatcatcatgcagctggacgacgtggttagcagtactg

SEQ ID NO: 721565 - DNA, 100 bp, Homo sapiens
gttcgcgccaaggagaccaggaagcgagcactcagcagggtaaagcccacagcttgaagccaagcataaaggagaagctggcaggcagccccattcgtac

SEQ ID NO: 721566 - DNA, 100 bp, Homo sapiens
tcttgctcctctctccttggcctctcctgggatcggcccaaggccagttctccgcaggaatctcaccagtgacacgcgtttgtgaaaagctgtgaatatt

SEQ ID NO: 721567 - DNA, 98 bp, Homo sapiens
tcatcactaaagctgctattaaagctattaagtgctcaagtaaagctctttgtgacagggcttttcagcttaaatcaagatattcctgctttcaagga

SEQ ID NO: 721568 - DNA, 88 bp, Homo sapiens
aagggcccaactggaattccacttacgggataaggaagcctgtgtgggtaccaacaatcaaagctacatctgtgacacaggacactgc

SEQ ID NO: 721569 - DNA, 90 bp, Homo sapiens
cgccgccgccgcgcgtcgcggaggcacgtgtggagccccggcagcaggagcgtcgcagaattaaacaaccaccatgtcgagcaaaaaggc

SEQ ID NO: 721570 - DNA, 100 bp, Homo sapiens
aaactttccctctactccgtgtgcccgtcgctggtcgtgcgacccaagcccctgcattcctgtacggggcgaactttctgaccaagtatacaactaccca

SEQ ID NO: 721571 - DNA, 100 bp, Homo sapiens
tggagaaacacactcttgagaaagaggagttaagaaaagagctcttggaaaagcaccaaagggagcttcaggagggaagttttaacttctagtcatggcg

SEQ ID NO: 721572 - DNA, 98 bp, Homo sapiens
ccggaaatgtccggcaagatcgagaaagcagtgttcctttctgccgaaattctccattcatatagaaaccaagtatgaggacaacaaaggaagcaatg

SEQ ID NO: 721573 - DNA, 100 bp, Homo sapiens
acgtctctgttcgtcaggaacgtggccgacgacaccagaaggtagaagatagcaccatgccgattcgtcgaactgtgaattctacccgggaaactcctcc

SEQ ID NO: 721574 - DNA, 50 bp, Homo sapiens
ggcatccggtcctggtccctgctggttgagacaagaggagcagcagcggc

SEQ ID NO: 721575 - DNA, 75 bp, Homo sapiens
cagacgttctttctttgctgcgtctactgcgagactggtgtcgttcagtatttctacattgaagactggcaattc

SEQ ID NO: 721576 - DNA, 96 bp, Homo sapiens
cgaatatcgtcatcgttagaaggttcatcagttcagtaacaagtcaacagagatggctttaagagtggcatctcttgattaccttggaactgttgc

SEQ ID NO: 721577 - DNA, 100 bp, Homo sapiens
gagctggtttcttgggtaatgatgattatgctgtatatgtgagagagaatattcagatacttatatgaaattgccagaagacatccttacttttatgccc

SEQ ID NO: 721578 - DNA, 98 bp, Homo sapiens
tcaaattcaccacctcggactcctgcgaccgcatcaaagacgaatttcagctactgcaagctcagtaccacaggatgggtttccagatttccaggatt

SEQ ID NO: 721579 - DNA, 83 bp, Homo sapiens
gctgctgccgccccttgggctaaaagggggatatgagactttctactcggaatatcctgagtgttgcgtggatgtaaaaccca

SEQ ID NO: 721580 - DNA, 71 bp, Homo sapiens
tggggagcccttctgcgccacagtctctagtgatccctgaaaagttccagcatattttgcgagtactcaac

SEQ ID NO: 721581 - DNA, 75 bp, Homo sapiens
gaaggtggctcgggcgtacagcaaccttcgaaatgattctggggaccattctgaccacatgcattactatcaggt

SEQ ID NO: 721582 - DNA, 74 bp, Homo sapiens
ttcctgaaacccgcagaggaaaattcaggcaacgcctcgcgttgtgtttctaagacctcagagaaatttggaat

SEQ ID NO: 721583 - DNA, 78 bp, Homo sapiens
gagctgctccgtggccacgaggacgtcaccatgggcgtctctggccgagcctctttttgtggaaaacgacagcagcag

SEQ ID NO: 721584 - DNA, 75 bp, Homo sapiens
aacttcttgatattcttcataaagactcatcacttgggcttttatcttgagaacatggtgtctggagttaaaggt

SEQ ID NO: 721585 - DNA, 106 bp, Homo sapiens
tcaaatggaaagtttttccaaatattcatctgtacagattccttttggttccaagtccaatatggcaactctaaaggatcagctgatttataatcttctaaaggaa

SEQ ID NO: 721586 - DNA, 100 bp, Homo sapiens
gaattcgagaccatagttttgaaggcccttgtgaaggctgcctttcttggggacattgccctggacgaagaggacctgagggccttccaggtacagcagg

SEQ ID NO: 721587 - DNA, 75 bp, Homo sapiens
gcagggggtcatcaccatggatgggacgctgcaggccctggtcttcgccttgatcgtgttctcctgcatctatgg

SEQ ID NO: 721588 - DNA, 50 bp, Homo sapiens
ggagagaaaagtctctaagtttgtgattttgaacacagcacgaaaacatt

SEQ ID NO: 721589 - DNA, 98 bp, Homo sapiens
acagttgttgaacccgcgaccaagcgaggcggaccctgaagcggaccccgaggaagatgttccatttaagcagacctcttccatagctgtagctggag

SEQ ID NO: 721590 - DNA, 100 bp, Homo sapiens
ctctgagaaaccttggacagcagattttggtttaatatctgattgggacaacattcagacccatttccagtcatgacccgtgccccgcatcatggtgcag

SEQ ID NO: 721591 - DNA, 51 bp, Homo sapiens
caccgccaaccccttcgagcaagacgtggtttgtgaagtgtggatatgcag

SEQ ID NO: 721592 - DNA, 100 bp, Homo sapiens
tgtatttggaagttgcttagatacattttttggtcttactgccactggtttgcacagattagtgacaagagctggggttaggatccggttggactctgac

SEQ ID NO: 721593 - DNA, 82 bp, Homo sapiens
ctgctgtacaccctcaacaaacaccagcgctttgggggccaaaccagtgctcctgccacctctctggctgccccctagagcc

SEQ ID NO: 721594 - DNA, 95 bp, Homo sapiens
atatttgataaacaggaacttgagacgttatgacagtgttataaatcgactgtacactggtattcagtgttactcttgtggaatgaggtttacaa

SEQ ID NO: 721595 - DNA, 104 bp, Homo sapiens
gagaggttaaagagacccgttcagagtcctacagtggcagacgcaaacatgcagatctttgtgaagaccctcactggcaaaaccatcacccttgaggtcgagcc

SEQ ID NO: 721596 - DNA, 74 bp, Homo sapiens
ccattgtgaaagaaggttgggttcagaagaggggcctaagatctggcaaacttggtgaacagtgtgaagcagtt

SEQ ID NO: 721597 - DNA, 97 bp, Homo sapiens
gttgcccacctctgtgtcaatgcagcctgctcttaatgactccagctctctatggcaacatgaagatctacttatcaatagaccacaagccatgtca

SEQ ID NO: 721598 - DNA, 75 bp, Homo sapiens
acaggtttaacatcattaactgtgaaaagtccaacagtcagtttaattatgatctacacactgaaatgtttacag

SEQ ID NO: 721599 - DNA, 83 bp, Homo sapiens
gcgggagaggtaaacagaacaccaggacatcccagagtctgggaaatgcacttgcacctcctgcgccgccgccccccatccaa

SEQ ID NO: 721600 - DNA, 82 bp, Homo sapiens
gagagcgtgaccgagagcgcgaatatcgtcatcgttagaagaacctcatgcagttccatactgtgggcaccaagaccaagct

SEQ ID NO: 721601 - DNA, 83 bp, Homo sapiens
caggactccaaaatggcgtcagttggtttggtgcacctcgatttggaggaagtagggcagggcccttatctggaaagaagttt

SEQ ID NO: 721602 - DNA, 101 bp, Homo sapiens
aaaactggagagcttcatcaaaaatagtgatagctttgataagaacaccagcctcgctccggcctcttgcagtcctccctcatcaccctctacactatgta

SEQ ID NO: 721603 - DNA, 100 bp, Homo sapiens
ggttgtgtggtcgcgtctcggaaaccggtagcgcttgcagcatggtttttgtcatccattggagggacactgtatgaggttggaaagcctgaaatgcaac

SEQ ID NO: 721604 - DNA, 90 bp, Homo sapiens
aggagagcatcgactggaccaagatcgagcccagcgtcaacttcctcaagtcgcccaaagacagaaacagtctccgccagtcaagaaacc

SEQ ID NO: 721605 - DNA, 98 bp, Homo sapiens
gtgtttcttctatcattccaaactttcagatctctcaagattcagtagggaacagaaatgaatgctaagggagttatcctcaatgcatttgaacgtta

SEQ ID NO: 721606 - DNA, 82 bp, Homo sapiens
tttaggagctctgctcaaagccagacggtcaaaatgcagatcttcgtgaaaacccttaccggcaagaccatcacccttgagg

SEQ ID NO: 721607 - DNA, 51 bp, Homo sapiens
catgaaactcaaagatcgagaggactacaaagctgatgaagacccagcatt

SEQ ID NO: 721608 - DNA, 100 bp, Homo sapiens
ctaggcaagccagctgacgccgggggcacagaccaccctccactgagtgcggagcagccaagattttaggtgatgggcaagtcagaaagtcagatggata

SEQ ID NO: 721609 - DNA, 50 bp, Homo sapiens
gtcccgcggcagcaggatcacagatgtttcagaaagaacaagtggatcct

SEQ ID NO: 721610 - DNA, 100 bp, Homo sapiens
gctcactcagcctcagcctcctggagtcacgcaatcctcccacctcaacctcccatgtagctgggaccacaggtgtcgtgaaaactacccctaaaagcca

SEQ ID NO: 721611 - DNA, 90 bp, Homo sapiens
cctggagactgcagttctctatccttcacacaggtttggaattcacccagttgcaggccgaatgcctggtcagcttaatgtgctgctggc

SEQ ID NO: 721612 - DNA, 75 bp, Homo sapiens
gagggcgtcatcagcgtctccgaggacaggatagtggccaaagcctccaagaacctcatgtccacgcaaagcttg

SEQ ID NO: 721613 - DNA, 75 bp, Homo sapiens
tattggattcataacctgctccatgcttgaaaacatggggattggaattcgggagcccagattctacctctcctt

SEQ ID NO: 721614 - DNA, 50 bp, Homo sapiens
ccacccagaatctttaggtaaatgagaccattgccctcttgaacatttac

SEQ ID NO: 721615 - DNA, 96 bp, Homo sapiens
cgggtccacgttcgtgctacagaagaagggcatcgtgcgtgccaagcggcgaggatgagaagaaccaagttttaaccaccaacatttggctgcaaa

SEQ ID NO: 721616 - DNA, 126 bp, Homo sapiens
cccaggaagacgtggacagctggaaggcctcgttcctccgagctggcgtctaccccgagaaggaccagattactacaatgcagctagaacgtgaaaaggctcttgaacataagaatcgaatgtcac

SEQ ID NO: 721617 - DNA, 74 bp, Homo sapiens
cgcgctgctgggcacccacggagcctccggggctggatgcacatgatggggaagtcaacgctgtgcagttcagt

SEQ ID NO: 721618 - DNA, 74 bp, Homo sapiens
ccgccgtagccgcctccgagcccgccgccacatcctctgaggttcgttaccgtgaacgcatcaccattcttcga

SEQ ID NO: 721619 - DNA, 83 bp, Homo sapiens
gcagcaaatatggaatatatgttgctgccaaacaaggtgaatccgacccagagaggaaagaaacaaggcagaaagtagacgac

SEQ ID NO: 721620 - DNA, 98 bp, Homo sapiens
tcaggaatgtgtttcactgtgaaccggctaacattctctacatctgtgaaaaccagcccctgaagaagttggtgagagacaatcaagctttcgatgat

SEQ ID NO: 721621 - DNA, 83 bp, Homo sapiens
tcgtcagactccagcagccaagatggtgaagcagatcgagagcaagcacatggattaattgatgtatgttgagtttatggagc

SEQ ID NO: 721622 - DNA, 100 bp, Homo sapiens
gacaccctgttctcccactctgttccctcctcaggaagtccttttattaccaggagatttgataatgggctgcattaaaagtaaagaaaacaaaagtcca

SEQ ID NO: 721623 - DNA, 83 bp, Homo sapiens
cgaatcgttaaacatctgaaagggtcagatcatggaagggaagtggttgctgtgtatgttactggtgcttggaactgctattg

SEQ ID NO: 721624 - DNA, 82 bp, Homo sapiens
tggaccagctcatgggcacggctcgggacgtgagcaagaagaacccatcaggtgattgtcaggcctctgagcccaagctaag

SEQ ID NO: 721625 - DNA, 104 bp, Homo sapiens
caggcgattacaagacgattcacctgtccagcatccgaccaccgaggctggagggggagaacacccaggacttgattagagaccaaggatttcgtggtgatgga

SEQ ID NO: 721626 - DNA, 90 bp, Homo sapiens
actttacagagaacaatgaagctatacagacttccagatcttgaagttactacaggtcagcccggccagcagtcaggaaggaaagctgga

SEQ ID NO: 721627 - DNA, 88 bp, Homo sapiens
ggccttggaaaggaaagcagctgagatccagaggagtggaaggctcccccttgactaaagctggtgcacatatcattgtgaccccaga

SEQ ID NO: 721628 - DNA, 50 bp, Homo sapiens
actatggacttcatcgctttatagcgcagttgtgtagcagttgagtaatg

SEQ ID NO: 721629 - DNA, 88 bp, Homo sapiens
agatctctgaccactaaatctgtgtgcagtacgagctcaactggaggcagtcctgtgcggaaatctgaagaaaaaacagatacaaagc

SEQ ID NO: 721630 - DNA, 82 bp, Homo sapiens
cttccactgttcctgccacagcggcttcgagctctcctctgatggcaggacctgccaaggaagtactagccggacatcatga

SEQ ID NO: 721631 - DNA, 100 bp, Homo sapiens
gagaagaaaatcaagaagctgaatttccaggccttcgccgagctgtgcaggtacggacattgctgcaggagaagaggttgccatcaagcttgaatgtgtc

SEQ ID NO: 721632 - DNA, 100 bp, Homo sapiens
agccgttattggctgccgttaaggaccgttacgtttcccggctgccactgcagagccccgccatggaagacacgccgttggtgatatcgaagcagaagac

SEQ ID NO: 721633 - DNA, 60 bp, Homo sapiens
ctctgagctgttcctcccagctacgagctgccccaggttatatatgccgcaattttacag

SEQ ID NO: 721634 - DNA, 100 bp, Homo sapiens
ctgatcttcgatgagctctcggattccttatgcagagtggccgacttgggtgcccccgtgggtggccacatcctcagttacctcctggaaaagtcacgag

SEQ ID NO: 721635 - DNA, 50 bp, Homo sapiens
gttaaggattccaagtaactcttatttgggggcaatggcggcttcctgtg

SEQ ID NO: 721636 - DNA, 83 bp, Homo sapiens
cgcgcggcggacgcgcccgggacgcgcggcggcaccgggaggccgggccgagcgaacatccatgatagcagtcttctgtaaat

SEQ ID NO: 721637 - DNA, 50 bp, Homo sapiens
cggatacacattctagatatgcagcgtctatcccagactaccggggccct

SEQ ID NO: 721638 - DNA, 50 bp, Homo sapiens
gttccttgtcctccctctgcacaagatggagctaacacccattatggaga

SEQ ID NO: 721639 - DNA, 75 bp, Homo sapiens
gcaaaaatctcaagaaagaggtgggcaagatcctgtgcactgactgcgggaaactgaacagccaagactcctata

SEQ ID NO: 721640 - DNA, 98 bp, Homo sapiens
ggggaatagactccatctatccatatgaggcaaattctctgaagaccacgggtcctgttgtggagtaaactgttattattttaccatgcagaagaaag

SEQ ID NO: 721641 - DNA, 100 bp, Homo sapiens
cactgtcaaaactttacaagttaattgaagagtcttgtccacagctggcaaattcagtgcagatcagagttgatctctctaatgtattagatcttcatgc

SEQ ID NO: 721642 - DNA, 50 bp, Homo sapiens
ccaaggaagatgtatttgtacaccagaattaaacaaccaccatgtcgagc

SEQ ID NO: 721643 - DNA, 71 bp, Homo sapiens
ggaagcgtggccggcagcgtcccggacgaggaggccagatcagaaaagggagctcaggtaccttccagaga

SEQ ID NO: 721644 - DNA, 96 bp, Homo sapiens
cctggagttcccactggagcaggagttaagcccaaggctccaggacagaactgtaccgctctctttttggccagctccaccctcccgacgaaggcc

SEQ ID NO: 721645 - DNA, 78 bp, Homo sapiens
gagtacaaaaacggcccttggatgatggaggtgaccattgtgaggtagatattttgttctaattttccagatgaggaa

SEQ ID NO: 721646 - DNA, 75 bp, Homo sapiens
ttcaactgcacttaaaaaaaacctggagaaaattagcagacagtctagtatcagaagctttgagatcagcagggc

SEQ ID NO: 721647 - DNA, 90 bp, Homo sapiens
tcccaaagctcggataggagacctggacaaaaagaaatacctggtgccttctgatctcacagcacccagtcagcttgaagagtttcaaat

SEQ ID NO: 721648 - DNA, 83 bp, Homo sapiens
aggaatggacgctgagtcgatctgtcccggagctcaaagtgaactcccccactggaaaggattctgaaagaaatgaagtcagc

SEQ ID NO: 721649 - DNA, 83 bp, Homo sapiens
cacaggctagcaaaagtgatgcagaatcagcagtcttggacagtaaagcaccaaaaccagaagacattgatgaggaagatgat

SEQ ID NO: 721650 - DNA, 50 bp, Homo sapiens
ggcgggtgttgtgagcgggaaggatatgtcagcatatgtgaagaaaatcc

SEQ ID NO: 721651 - DNA, 83 bp, Homo sapiens
aacaggccctatggggcatacctatggctttattgacctcgactcccatgcggaaacagagcaaatgcagcgttacaatcaaa

SEQ ID NO: 721652 - DNA, 82 bp, Homo sapiens
gaagagtatctctgtatgaaaaccttactgcttctctcttcagctgcgcagttggacagcattggcttcagcataatcagga

SEQ ID NO: 721653 - DNA, 100 bp, Homo sapiens
atcaagctgctggctgccattctccacctggggaatgtggggttcatgggatacttatccgctttttccccttggagtcctggcagattggcaagatagg

SEQ ID NO: 721654 - DNA, 100 bp, Homo sapiens
gccctctcatccaccccaccttgtatgcaacgccccccttcacacacagtaagcgtacacagactttactaaaagagtacaaagaaagggataaatccaa

SEQ ID NO: 721655 - DNA, 100 bp, Homo sapiens
tgtcatcgcaggccagcggggctgagatgttcgacaagcagcaggcgaacaccatcttctggagcccccaaggacagttcgtggtgttggcgggcctgag

SEQ ID NO: 721656 - DNA, 75 bp, Homo sapiens
atggacattaagcttcgggaggctgcagaaggccttggggaggacagcacagtttggcaatgaggagcagcagct

SEQ ID NO: 721657 - DNA, 83 bp, Homo sapiens
ctcctttttacctttggttcacaacatcatcaaatggaagggaaaaggccgaggcatcagcgtgtgaagaccgcaaagacgat

SEQ ID NO: 721658 - DNA, 75 bp, Homo sapiens
acttctccctgagcctcctgcagatcatggacgtgcggggatctgatgagcttctttcttctggcatcattaacg

SEQ ID NO: 721659 - DNA, 50 bp, Homo sapiens
gcctgccccagccagtaccagcgccgtgctgtttgcagacaaggtcccaa

SEQ ID NO: 721660 - DNA, 100 bp, Homo sapiens
actaatgatcacttacaaggacgaccaggccaagcttaagaagctcatgggcctcctgagtgacccagaattaggtccagcagcagctgatggcttctct

SEQ ID NO: 721661 - DNA, 83 bp, Homo sapiens
gaagcagttgctgcaggcggcccactggcagttcgaggaaaatatgcccaggttaccaacaatcctgaaaatgatggatgtat

SEQ ID NO: 721662 - DNA, 88 bp, Homo sapiens
catctcggatcactggagccaaaacctgtcccagtttttccctgaggccatttctttcataggtatgatctcgtgaaaccttgagaga

SEQ ID NO: 721663 - DNA, 80 bp, Homo sapiens
tcgacccagggcccgcgggccaggagagcgctcggcgggtgagaagccctaccactgcaactgggacggctgcggctgga

SEQ ID NO: 721664 - DNA, 97 bp, Homo sapiens
cttgctcaaggagatcatactggtggatgatgccagcacagagggtaatgagaggccctaagatcccagaggatgccataagaggaaaagtcagggg

SEQ ID NO: 721665 - DNA, 50 bp, Homo sapiens
atttaggagctctgctcaaagccagacgaaataaacggtgactggcaaag

SEQ ID NO: 721666 - DNA, 100 bp, Homo sapiens
ccacctgcatgtgaagtctacagaacccaaagccgcccctcagcccatgccccttggtgtggccactgcaaggctctggcccctgagtatgccaaagccg

SEQ ID NO: 721667 - DNA, 90 bp, Homo sapiens
ggaagttcaggaaacatccaagaaaaatgtccttaaagcaattgagcaggctgatctactgcaggagatgaccatgctgactgtcataga

SEQ ID NO: 721668 - DNA, 100 bp, Homo sapiens
gtgtggcaaccagatcggtgccaagaaaccaccatcatgggttcgggtcccatagaccccaaagaacttctcaagggcctggacagcttccttaaccgag

SEQ ID NO: 721669 - DNA, 87 bp, Homo sapiens
tgcggcgcgcctgccgcgcggggcagatggagatggcgatggagatggagcaactggaaagaagaagaaaaagaagaagaagaagag

SEQ ID NO: 721670 - DNA, 100 bp, Homo sapiens
tccgacggggcggccgggggctcagagatccaagtgcgcgccctggcgggtccggaccaaggctacagcaactggacgaggagaacagtgaactccggtc

SEQ ID NO: 721671 - DNA, 82 bp, Homo sapiens
agagaaagaagtgataggagggctctgtaggaagggaaaaggccgaggcatcagcgtgtgaagaccgcaaagacgatcccga

SEQ ID NO: 721672 - DNA, 100 bp, Homo sapiens
gcgggattgatgtgcaacaagtgtctttggttataaattatgatctacctaccaatcgtgaaaactatattcacaggctactgatgcccgaagggctttt

SEQ ID NO: 721673 - DNA, 74 bp, Homo sapiens
gggtcgcttggaagaagccaaggtaaacatggaaactgcccggttcttcaaatctgactttgaagaaaatggct

SEQ ID NO: 721674 - DNA, 76 bp, Homo sapiens
gcagatatggtatcctctgagcgccacaaactgtacctggtgattatgggagtgctattgagacactggtaactgc

SEQ ID NO: 721675 - DNA, 100 bp, Homo sapiens
cgatattgaagtgtcaaaatccatagatggaaaagatggctgaactagaagcttttgaaaacagactgaagggtcgtcggaagaagaacaggaaaagaga

SEQ ID NO: 721676 - DNA, 83 bp, Homo sapiens
gccgtctctggaggagtactggcaacaggaccagtggctgtaggacaatttcaccggtcatttcgtcgagatagtttgtctcc

SEQ ID NO: 721677 - DNA, 88 bp, Homo sapiens
ggggccgaagcagcatgtgacaccgaccagacaaatgctgtgcttcatgaagttaaaagagaggggctccccgtggaacaaaggaatg

SEQ ID NO: 721678 - DNA, 98 bp, Homo sapiens
gctgtttgcctccatcgccacgatccagatgcagagccgaaacaagaagtgggctcaggtcaaaatgcagatcttcgtgaaaacccttaccggcaaga

SEQ ID NO: 721679 - DNA, 80 bp, Homo sapiens
tgcggtgtttgaccgagacataaactgcagaagagcagcctctatctggtggctggacccagagctgacctatggctgcg

SEQ ID NO: 721680 - DNA, 107 bp, Homo sapiens
ggcagaagccgagttcaacatcctcctggccaccgactcctacaaggacccagatgatgtggtaccagttggccaaagaagagcctggtgttggtgcatgtgctttg

SEQ ID NO: 721681 - DNA, 50 bp, Homo sapiens
cccatgtgactaatttgtccaaagagaggagtctcagcagtccaattttg

SEQ ID NO: 721682 - DNA, 100 bp, Homo sapiens
cgctgggctgtcggcctggaccttgcagccgcaatgtggtgccaccgaacatcgcagaactgaagaatttggaggtgctcaacttttttaataaccaaat

SEQ ID NO: 721683 - DNA, 102 bp, Homo sapiens
cctaaaaatacatctcagacggcagctattactacaaaggcaaaaatctccagccctacagagactgagcggtgcatcgagtccctgattgctgtcttccag

SEQ ID NO: 721684 - DNA, 96 bp, Homo sapiens
aatttatccaaagattaaaacttgaagcaacccttaatgtgcatgatggttgtgaacgggaggatgaaattgctactatggagtgcatcaacaatg

SEQ ID NO: 721685 - DNA, 97 bp, Homo sapiens
ccatccagaccttctgctaccagaaaaccttctccaccagaatccagctcacgctgtctgcagaactactgaattccaagctgcctcggtggcagga

SEQ ID NO: 721686 - DNA, 75 bp, Homo sapiens
tggaccacgtctcagaaaagatatgtgactggactgagtggtggaaagggaaaaatctggtccttcatcagaact

SEQ ID NO: 721687 - DNA, 100 bp, Homo sapiens
ctacagcgagctgaccacactgacgagccagtacatcaagttcatcagcgagactctgcggcgcatggaggaggaggagcagggttaggcttgctgaggg

SEQ ID NO: 721688 - DNA, 90 bp, Homo sapiens
gcagaaggtctctggagacatcttcagcaggagggagccatggatttgctgcgggagctgaaggccatgcctatcacgctgcacctgctc

SEQ ID NO: 721689 - DNA, 103 bp, Homo sapiens
gtgaagctgatcaaggaaatcaagaactacatccaaggcatcaacctcgtccagggtgaaaaggtggaggggctacaagctcaagccctatatccttggagag

SEQ ID NO: 721690 - DNA, 82 bp, Homo sapiens
caagcccaggcacagccgacgccgcgggactgcaaaattcaaaatggggctcaaggtattcgtttcatctacaccagagaag

SEQ ID NO: 721691 - DNA, 126 bp, Homo sapiens
ttagtccttctagttgcgcttttgctatggccttcgtctgtgccggcttatccgacaccagcagacgtttttgaatcaactgagagaaattacggggattaatgacacccagatactacagcaagc

SEQ ID NO: 721692 - DNA, 82 bp, Homo sapiens
ctatgcagctatcgtggacgtcactggccctggtggggattgacagccacgggaaggctgaaggggatgctaagggagataa

SEQ ID NO: 721693 - DNA, 88 bp, Homo sapiens
gcctgcagaccccagtgtggacggagtacgagtccatcctacgcagggccggctgtgtggtcaacaccttcatgtccttcatattccc

SEQ ID NO: 721694 - DNA, 98 bp, Homo sapiens
gtttctctgctgcaccgacctcgacgtcttgcctgtgtcccacttgttcgcggcctatagattctcagcgctgattttgagatgatgggcttgggaaa

SEQ ID NO: 721695 - DNA, 105 bp, Homo sapiens
gggattcctacacaatgcgttgcctggctccacgccctgctgggtcctacctgtcagagccccaagggccatccatcagtgctggtgagctgagctcagctgaca

SEQ ID NO: 721696 - DNA, 49 bp, Homo sapiens
tttacccagaagtagtccatatggaagaggagttgtacgcatgtcagag

SEQ ID NO: 721697 - DNA, 100 bp, Homo sapiens
atgcaggcaacttcgtgaaaggaacggtgggccgaatcacagcactgaacctaccagatgtatttgggttggtcgtcctcccattggaactgaaactacg

SEQ ID NO: 721698 - DNA, 90 bp, Homo sapiens
ccgagatgccgggggagcggggccttccacaccccctccgtgggtgtgtggttggcccagcacatcacctatgtgcaccagcacagccgg

SEQ ID NO: 721699 - DNA, 106 bp, Homo sapiens
aggagacgtcagaacgtggcttatgagtacctttgtcatttggaagaagcgaagaggtgactctcctattccatctgtttcttcgggatcatcttcacctctttca

SEQ ID NO: 721700 - DNA, 98 bp, Homo sapiens
tgctgggattataggcgtgagccaccgtgcctggctgaagccgtggtccttcagcatatctctgtgctgcagacaacacaccttcctgatggaggtgc

SEQ ID NO: 721701 - DNA, 100 bp, Homo sapiens
caacctccttcacactcttcgagggagattctggaagccctttgttgtgcgagggtgttttccgaggggtcacttcctttggccttgaaaataaatgcgg

SEQ ID NO: 721702 - DNA, 120 bp, Homo sapiens
atcggcatctagtctttccgcttcttgaatttctctctgtaaaggagcaacgcacctcttgctttttcctccaaagtatgttatgttaagtttcgtgatccatcaagtgttggcgtggcc

SEQ ID NO: 721703 - DNA, 95 bp, Homo sapiens
gccggccgcccatcttccacaccatgtcggacggcgagggcccctccgccggtctgccatcatggatgttctcgcagaagcaaatggcacctttg

SEQ ID NO: 721704 - DNA, 83 bp, Homo sapiens
gagaagcgagaaaagatgaaacggaccctggaagaggaagaacgtctgagaaataaaattcgagctgatcatgagaaggcctt

SEQ ID NO: 721705 - DNA, 121 bp, Homo sapiens
aataagtgtatagaagcaatcagaggactcttagatcaaaatggatttacagcagatgatatcaacaaggatatggaatattatcttgtaaaatggaaaggatggccagattctacaaata

SEQ ID NO: 721706 - DNA, 50 bp, Homo sapiens
cgtcaatcagagcgtcctgtgcggttttgagcaaaattttggactgtgaa

SEQ ID NO: 721707 - DNA, 50 bp, Homo sapiens
gtgctgcgtaacgccaccgggtgcctaagagtatttgatttctgacactg

SEQ ID NO: 721708 - DNA, 51 bp, Homo sapiens
ctatttacccagaagtagtccatatgctacttaaagagtttaaagatgaag

SEQ ID NO: 721709 - DNA, 100 bp, Homo sapiens
gccgtgtagagacacatgctacagcaacgccgttttctgttcgttccaccagtcataaaccagatgaaatctatggcatgattgaaagactatctcctgg

SEQ ID NO: 721710 - DNA, 100 bp, Homo sapiens
caaacaaccaaccctgatttcctgcttctccttttcatgagtgttcctgtggtctctgcacctcctttctaaaagaggcacagttagatgaagaaggaca

SEQ ID NO: 721711 - DNA, 74 bp, Homo sapiens
agtgccaagacttgattaaagtaattgaggattttccagcaaagatgtgtgaataagagtactcatgaattcaa

SEQ ID NO: 721712 - DNA, 110 bp, Homo sapiens
ccgcgccgcgctccaaccgcctcctcctcctcagtaacgcggggaaacagtgcttcttagtcctacgtcagcagcagtttaatgtccaggctcttgtggcggtgggagac

SEQ ID NO: 721713 - DNA, 90 bp, Homo sapiens
tcatcttctaccgagatggggtgcctgaaggccagctaccccaggacgagattgaggagctgcgggccgagatgctggagatgcgggacg

SEQ ID NO: 721714 - DNA, 90 bp, Homo sapiens
cagacaccggagactgggaaatgagactctccaacatgtgccttctgaccatacaaatgaaacttccaacagtactgtgaaaccaccaac

SEQ ID NO: 721715 - DNA, 90 bp, Homo sapiens
cagaagctcctaaacaacttgacctctatcaagatacgtgggacatacagtgagagaagtgctggaggaacatcccagttcacaaagccc

SEQ ID NO: 721716 - DNA, 101 bp, Homo sapiens
agagcatcctgccccatatccagaatgaaatccatgctcagagatgccaagaagaatctagacagacaggcctttctagctctggatgagggggatattgc

SEQ ID NO: 721717 - DNA, 97 bp, Homo sapiens
tcacctttgaattcagccagtggtcacagctggatgtttgcgacatcccagagagcttccagaacagtgatctgacacaaacacagctgaagcaaac

SEQ ID NO: 721718 - DNA, 75 bp, Homo sapiens
tggacgatgatgccaatggtgatgtggatgtggaagaaagtgatgaggtgtgggttgctgaccgaggaaataaaa

SEQ ID NO: 721719 - DNA, 75 bp, Homo sapiens
ctacggacttaaaatctccgcaccgcaccctccacctcaggattgtgcagactggtgcttaaaatggaagtcgat

SEQ ID NO: 721720 - DNA, 100 bp, Homo sapiens
gtcttcggtctcctggggtcggcgccgagtgggaggatggcggaacccttcctagggtgtggagagcgggccccgccctgaaggggcaccgtgggctggg

SEQ ID NO: 721721 - DNA, 134 bp, Homo sapiens
cagaatgcttctcagcagcaacatccccaaacagcggcgtttcacggtggcacatacatgaggaagaagcccctccagatggtgctgttgccgaatacagaagagaaaagcaaaagtatgaagctttgaggaag

SEQ ID NO: 721722 - DNA, 100 bp, Homo sapiens
gaatgtgatacagcctttcccacgacttggctgaggaactgctgttgtgaaccttttgccctggtgggattattacatggaaggtctttaatgtaacttt

SEQ ID NO: 721723 - DNA, 80 bp, Homo sapiens
gaagaaggccactgtttttctcaatcctgcagcttgcaaagggtctcaacaaatggcagctattacatcagacagtgacg

SEQ ID NO: 721724 - DNA, 50 bp, Homo sapiens
agaacaaagtgacaccactgcagaggcttctctacagtttagcctttaat

SEQ ID NO: 721725 - DNA, 51 bp, Homo sapiens
ttttacatgaagattttgttagcaataatgcatacggaatggacagccgac

SEQ ID NO: 721726 - DNA, 123 bp, Homo sapiens
caggcagtaattgatgccaatcttgtaccaatgataatacaccttttggataagaatatgatgctgtggctgagaaagctggtaaagtagaagctgaggttaaacgcttacacaataccatcg

SEQ ID NO: 721727 - DNA, 75 bp, Homo sapiens
tggcaagggcttattgttcctagagaagaagaaggaggttcctgctgtgccagaaacccttaagaaaaagcgaag

SEQ ID NO: 721728 - DNA, 50 bp, Homo sapiens
gccagcagcccgccagccgccgggaggttactataacaacagtaccaagg

SEQ ID NO: 721729 - DNA, 98 bp, Homo sapiens
gccggcagaggatccagtgttcaccatcctggccccggaagatctctgcactcgtcctaagagcccaggcctccgagatcttacttgaagagttacag

SEQ ID NO: 721730 - DNA, 113 bp, Homo sapiens
gcctagtaaacggggctgctggtgggccgcgtcgaagacatggaccagggctacggagttacagaatgtctgaaggggacagtgtgggagaatccgtccatgggaaaccttcg

SEQ ID NO: 721731 - DNA, 75 bp, Homo sapiens
gcaacaagaccctgcccatcgctttcaagcagccacattgccaaagagttcttcctttagtagatctggtccagg

SEQ ID NO: 721732 - DNA, 94 bp, Homo sapiens
ttggcagataatcattgggcaaaaacttgtgagggcgaaggtcgtattgaatggtgttgtagacggagtcttgctctgtcgcccaggctggagt

SEQ ID NO: 721733 - DNA, 82 bp, Homo sapiens
tccgcggcatccgtaaccacaaggaggacgaggctgaaggtgatgtggccgccctcaaccgacgcatccagctcgttgagga

SEQ ID NO: 721734 - DNA, 107 bp, Homo sapiens
accaagggtcgctttgctgtacatcgtattacacctgaggaggccaagtacaagttgtgcaaagtgaggaagattactgtgggagtgaagggaatccctcacctggt

SEQ ID NO: 721735 - DNA, 87 bp, Homo sapiens
tacacccccagtgtatggtcagcttctagctttatatttgctccataatgacatgatagagactcttaatggaacaatgattctgaa

SEQ ID NO: 721736 - DNA, 100 bp, Homo sapiens
aaacctgcattgataccaaggaaggcatcctgcagtattgccaagaagctgagggtaaaaagctgggattggtaggctgggtccagaacactgaccgggg

SEQ ID NO: 721737 - DNA, 90 bp, Homo sapiens
gagctggacccggaccggttttggcaagagtgagccatggagctacgtgtggggaacaagtaccgcctgggacggaagatcgggagcggg

SEQ ID NO: 721738 - DNA, 83 bp, Homo sapiens
cgctctccagcccgcttgaacggtgattgaattactcagatatgaagatcatcatctaggttttgtgtaaaaggccctggata

SEQ ID NO: 721739 - DNA, 82 bp, Homo sapiens
gctcgttggagcttgaacccattgtcacccctccgaaatgagccgtcagactgctacagcattacctaccggtacctcgaag

SEQ ID NO: 721740 - DNA, 78 bp, Homo sapiens
cgaacatgcgcttttgacacattggagtaatctatgccagcaattatgacaatgttagcagaccatgcagctcgtcag

SEQ ID NO: 721741 - DNA, 101 bp, Homo sapiens
ttgagaaagaaatgtaaagaaggttctctttgtgtgagtaagcaagaacctggtttctgggtgtctctggggagcccctgggccagattttcctctagact

SEQ ID NO: 721742 - DNA, 82 bp, Homo sapiens
acgcacgggatccagagcgccgcgcacttcgtcatgttcttcgcgccctgggagacataagacatcagtcagtacatgtgag

SEQ ID NO: 721743 - DNA, 120 bp, Homo sapiens
cagatcgaggtgctgcagcacgtggccaccaacctggggcgcaaaaccagcctggacaccaagtctgtgtcagaaggccacctcaagaggaacatcgtggtgaagaccgtggagatgcgg

SEQ ID NO: 721744 - DNA, 96 bp, Homo sapiens
cattgatctcttggagcagctggggatcatggcacctgcttgtgccagagcgagagacactgtttaacaccctagccaacaatcgggaaatcatca

SEQ ID NO: 721745 - DNA, 100 bp, Homo sapiens
ttggcttcgggctgagctagcagtgagcaccttttggcccaatgaatatcagggttacacatcattttggaatgactgtatatcatctggattacgtggc

SEQ ID NO: 721746 - DNA, 90 bp, Homo sapiens
ggtttgtcctcgccgatcaaagcctgagatactacagggattcagtggctgaggagcgtaaacagaggtggcatgactagaaaccgtggc

SEQ ID NO: 721747 - DNA, 75 bp, Homo sapiens
atccaattccataccattcagaggccaggttaaaggggacactacacagaaaatgagaactgctcactatcctac

SEQ ID NO: 721748 - DNA, 90 bp, Homo sapiens
ggagttcgtctcttacgtctgcggaagtgcagctgcctcagttcttagcgcaggtcacgagaagagaatgccttctagatgcaaaatcac

SEQ ID NO: 721749 - DNA, 75 bp, Homo sapiens
ggacttcctctcagaagaggaccgcggagctccttctcctgaaaaagccgaggaggagagtgagaggcttctgag

SEQ ID NO: 721750 - DNA, 50 bp, Homo sapiens
ccagcctccacatgtacatatcttacgaggaaatatttcagtaaaagcag

SEQ ID NO: 721751 - DNA, 89 bp, Homo sapiens
gcaggagaagatggcggtctccacaggaatttaaactttgggataatgagctgcagtatgtggaccaacttctgaaagaggatgtgaga

SEQ ID NO: 721752 - DNA, 82 bp, Homo sapiens
cgaccaagagggtgttcgactgctagagccgagcgaagcagagcgcctgctcgctgtgcccccgggttatgacgacccccaa

SEQ ID NO: 721753 - DNA, 75 bp, Homo sapiens
cttccgggtaacagtgaccagtgactcccccaagatggattaccgggccttggtgcatgagcgagatgaggcagc

SEQ ID NO: 721754 - DNA, 100 bp, Homo sapiens
cgggcctcatccgccgccggaggctgcagccgtcctgggccgccggacacccccgctggggccgatgcccaacagtgacatcgacttgagcaacctggag

SEQ ID NO: 721755 - DNA, 50 bp, Homo sapiens
ggtgctgaggcctgggagattggggtcaaaatgcagatcttcgtgaaaac

SEQ ID NO: 721756 - DNA, 74 bp, Homo sapiens
atgctccacttgccgagcctgatgatggggacgtgccgcccctttgcgggccagaacacaaagcgtgaatccgg

SEQ ID NO: 721757 - DNA, 90 bp, Homo sapiens
cccagccccgccccagaaggagcagccccccgcggagacccctacaggggatcctgctaaagcggagcggcaagtccctgaacaaggagt

SEQ ID NO: 721758 - DNA, 116 bp, Homo sapiens
aacaagatgtgggcacaaaaactaccattcgcctgatgaactctcagggaacctcagaacctgttctggatccacagcaaatccaagcatttgatcagctttgccgtctctaccga

SEQ ID NO: 721759 - DNA, 89 bp, Homo sapiens
aacggacctgctcagcagcctataagaccatcatcatgtggaaactgaccagggatgagaccaactatggaattccacagcgtgctctg

SEQ ID NO: 721760 - DNA, 74 bp, Homo sapiens
aagcctaactcaagccattggcacacagctgctgtattaaagtatgaaaataatgtgatgaatattcgacagtt

SEQ ID NO: 721761 - DNA, 100 bp, Homo sapiens
tgctggaagatttggagagggagcttgatgaacctagacagcagttcccatggagaatgttgcaacaattgctgattgtgccagtgtgattgaaggagtc

SEQ ID NO: 721762 - DNA, 83 bp, Homo sapiens
tattgctgtattctaacttattcatctcctatgggggatcggtggctcatttgctgagtaaatatggagccttcaaagaatca

SEQ ID NO: 721763 - DNA, 83 bp, Homo sapiens
cttttattttcctgtaatatatctgtatcatcggaggcgtcgaccagaagattatgatattcataacagcagaaagaaaccaa

SEQ ID NO: 721764 - DNA, 75 bp, Homo sapiens
cctcctgtggataagggctcagaatagcaccattgctggttacttcttgctgcagattctgcgcaggatcggagc

SEQ ID NO: 721765 - DNA, 75 bp, Homo sapiens
attacccccagtatctgcaagccaaggaaggtggacttttaaatattctccactgaagcaaatgctgcaacaatt

SEQ ID NO: 721766 - DNA, 50 bp, Homo sapiens
accaccttcatctccaccatcggaggaggaagccaagaatctggtgagcg

SEQ ID NO: 721767 - DNA, 75 bp, Homo sapiens
ggcaggtggcggcgcggcgcgggctggcggtggctccacggtatccgttacagcactgatgtgagtgtagatgaa

SEQ ID NO: 721768 - DNA, 93 bp, Homo sapiens
gggtaaagtcgagtatctggtgaagtggaaaggatggcccccaaagattttttatcaagcagaaatgcatcgaacaacgagaatcaagatcac

SEQ ID NO: 721769 - DNA, 99 bp, Homo sapiens
ccggcgggccgcgcctggtgatcggctccttaccagctcacctctcaccgcgcatgtttggagactgtgccctgtccacggtgcctcctgcatgtcctg

SEQ ID NO: 721770 - DNA, 74 bp, Homo sapiens
cccgcactcgacagccaccgccgcccccaacgtccatgcctgaaaggtgggtgcggctgctatttggacgagag

SEQ ID NO: 721771 - DNA, 50 bp, Homo sapiens
ttggcattctttccattattgcacagggatcgcttacacctgagacgaac

SEQ ID NO: 721772 - DNA, 100 bp, Homo sapiens
tttcagaaccagttacctggacaaggttttcattacttcagttgaagtggtttgtaaagaatgagtccctggaacgccagatgcgtgaaatggaagagaa

SEQ ID NO: 721773 - DNA, 101 bp, Homo sapiens
gaccatgtgttaaagaacaccatttctgtcaaggctgtctgtgactacaggcagatcgagcgtgaagcacatctcctgtcccctgctcatcctgcacgctg

SEQ ID NO: 721774 - DNA, 75 bp, Homo sapiens
tctcagcctcctgagtagctaaggactacaggtgttggagcgggccggagagaagtagagtgggctgcgaggaga

SEQ ID NO: 721775 - DNA, 75 bp, Homo sapiens
ctcctgtcctatgaggccctccccatggctttaggaagccagttgagggaagttctccatgaatgtacgtcacaa

SEQ ID NO: 721776 - DNA, 60 bp, Homo sapiens
gacaaggcactgctttttcatgacgaacaagttgaaatcatcgcagaaggataaagttcg

SEQ ID NO: 721777 - DNA, 90 bp, Homo sapiens
aaagaaggggttcctggtcatacaccagtactaccaaggacagcttttttcctgcaagcgatgaaatctacattgctccttcaggagtgc

SEQ ID NO: 721778 - DNA, 89 bp, Homo sapiens
atttgtttccacaaacatgtaaggattgaaaggcttgtaatccaaagttactttgcttcatcgcagtaggaatggcagccccatctatg

SEQ ID NO: 721779 - DNA, 80 bp, Homo sapiens
aggaccttctgtggcctgacattggcgtccccatcatgaatggtagataacgcagatcatctctggaaaggatattgatc

SEQ ID NO: 721780 - DNA, 100 bp, Homo sapiens
cgccgtgccgcatgagcatcgcggagcttgacccgtccatcgctgtggtactggtgtccctgggtgccagtgagaaactatccttgctctctctggggaa

SEQ ID NO: 721781 - DNA, 100 bp, Homo sapiens
gatatactactaactttgaaatggaataagggtctcattctgtcgcacaggttggcgtgcagtggtgtgatctcagctcattgcaacctctgcctcccgg

SEQ ID NO: 721782 - DNA, 98 bp, Homo sapiens
cggccagatgcaccgaggacacatgcctcctctgttcatggcccaggggaagacagggagcagctcaccccctggggggcccccgaagcccgggagcc

SEQ ID NO: 721783 - DNA, 49 bp, Homo sapiens
gaaaagcatgggtacaacatggaacagattgtagaaggcatgaaacaaa

SEQ ID NO: 721784 - DNA, 83 bp, Homo sapiens
ggcatgccaagaagatgagaccgggggaggcgacgctaagttgctgatcgtggcgatgttacagtggtttatcaaaatgggtt

SEQ ID NO: 721785 - DNA, 80 bp, Homo sapiens
cagatagaaaggcaggagcagcttctggatgaaatacatcgtgagaagagaggagtccaaaactacttacctggaagacc

SEQ ID NO: 721786 - DNA, 100 bp, Homo sapiens
tgacaatgtccctcacaccccttccagctacatcgaaacagtagcaaaagtggacggactatgcctaacattcttgatgacataattgcttcagttgttg

SEQ ID NO: 721787 - DNA, 100 bp, Homo sapiens
cgctccggctgtaaggagccgcggcggggggaaaatggagcccttcaccaatggctatggagttactagtagagaaagcaatcagcagtgcttctagccc

SEQ ID NO: 721788 - DNA, 100 bp, Homo sapiens
tgattttctggtgaatgagaaggatgcaagttgcaaaaggaatgcatttatgatgctaattcatgcagatcaggtggaagtagagcttttgtcccggcag

SEQ ID NO: 721789 - DNA, 101 bp, Homo sapiens
caggctctggccactgaactctaaactggaataagcaggatgtaatccctgttcattactacttaatacctccaccaacaaagactaagaatggcagcaaa

SEQ ID NO: 721790 - DNA, 95 bp, Homo sapiens
gggccgggcaatgcctcgcgggcgcaatgaatccgcggcagtattctaccttgtaaatactgttatttgtatatactgtaaatgatgacatcggt

SEQ ID NO: 721791 - DNA, 75 bp, Homo sapiens
cacagaggtgcctgaaggctggttggggtggtgaggcccgaggcagtgtgaaggaagaagtgttctggaggaact

SEQ ID NO: 721792 - DNA, 73 bp, Homo sapiens
gatcgaccagcaacagggacggtccagaggtgtccttctaaagctggtagaggtttcacgagtcatcagggac

SEQ ID NO: 721793 - DNA, 97 bp, Homo sapiens
cgcagcatgagcgaaagctacacgctggaggcaatggatcacttggagtcctttattgctgaatgtgatcggagaactgagctcgccaagaagcggc

SEQ ID NO: 721794 - DNA, 90 bp, Homo sapiens
gatttacttgaaatgaaaggagattccaacctacttcaggcaaatgaagaggattcttccagttctctagtgaaggatcacctttttcag

SEQ ID NO: 721795 - DNA, 90 bp, Homo sapiens
cctgaggacttcatccggtcaccatctacctattcttcaaatggtcggattgtttgtgctgaacgaactgtcctcttgcttcagaagccc

SEQ ID NO: 721796 - DNA, 51 bp, Homo sapiens
gccttccagctgtttgaccgaacaggtgattgcatactcggaacatcgtta

SEQ ID NO: 721797 - DNA, 75 bp, Homo sapiens
tgattctacatctcaagctcatattttgaagtgtttacgggctggctacagcaaacatcattcaagatgtccagc

SEQ ID NO: 721798 - DNA, 75 bp, Homo sapiens
ggaggttcgagcgctgttctcgctccggagccgctgcacatttcgaatggctgttgatggtgggtgtggggacac

SEQ ID NO: 721799 - DNA, 75 bp, Homo sapiens
tagtgttggacacactggcagtaatacggactcttgtagataactactcccgagcccggagaggacccacgcgtg

SEQ ID NO: 721800 - DNA, 100 bp, Homo sapiens
tgggtccagcaaactccgcttccgattgggctaccacgccattccgagtatgaggtattatgaagtggattcataaataccttggaaagaccaagtaggt

SEQ ID NO: 721801 - DNA, 100 bp, Homo sapiens
caggagctcctggaagatctccgcactctggagcataatgtgaggcaacgcacgggccacaggcatgttcctgcagtatacagtgccggggacggagggt

SEQ ID NO: 721802 - DNA, 100 bp, Homo sapiens
ctggacaaaggaacaggtatctcagggttatgtaccgaaggactctaccgtgtcagcgggaataaaactgaccaagacaatattcaaaagcagtttgatc

SEQ ID NO: 721803 - DNA, 110 bp, Homo sapiens
caaccattgacgccatgtcgggttattcgagtgaccgagaccgcggccgggaccgaggttggaatcgaagcctcttaaaatggcagatgacttggacttcgagacaggag

SEQ ID NO: 721804 - DNA, 100 bp, Homo sapiens
ggactgccacgtccaagcaaaccgggaaaggagaggatcccggagccggttgaaatcacaaagattagacacctttttagataggtgttcttcagcacca

SEQ ID NO: 721805 - DNA, 100 bp, Homo sapiens
ggataatgcaaaggaaaagaggactggagtggtttgtctgtgatggctggaagttcctctgtaccagattgtcaccatcagtgagaaaccgaacaagaag

SEQ ID NO: 721806 - DNA, 87 bp, Homo sapiens
ttcgtgctgctgggattcgcgctgctgggcacccacggagcctccggggctgcaaccatgtccaagggacctgcagttggtattgat

SEQ ID NO: 721807 - DNA, 74 bp, Homo sapiens
ggccgcggcgaccccactccggcggcgcgtcccccgagcttgtgtggacgaatgtggaacctcgctctgtggct

SEQ ID NO: 721808 - DNA, 98 bp, Homo sapiens
cagtgggaaaaatggaccaacttctttggcaagtggacattttactggctcaatggaacatgacaaggaattcttccacccacgctaccaccatcgag

SEQ ID NO: 721809 - DNA, 100 bp, Homo sapiens
ctgtggtagagagaaaaatcctggatctgtatgctttgagcaagtttcttaaacaattaggtctacatcctaactggcaattcgttgatgtatatggaat

SEQ ID NO: 721810 - DNA, 100 bp, Homo sapiens
ccgcggggcagacgtcggtgtatgccctggatgagaatggtggtcttttggtgccttaatgaagagtcggattttgaagcagccttcagcgtgggagcca

SEQ ID NO: 721811 - DNA, 90 bp, Homo sapiens
gagagggccgtggtggtggcctgggaaaggcggctgatggtggtgggcgatgcacccgagagcatccacacggatgataccatcggggac

SEQ ID NO: 721812 - DNA, 50 bp, Homo sapiens
acaggggccactcagagtcgcccgagaagctgatcagctgaccgaagaac

SEQ ID NO: 721813 - DNA, 74 bp, Homo sapiens
agcgggagaggagtctccaccaggactgaccgctgccgcccagcacgtccaggcaatgatgaagtaaaacgggg

SEQ ID NO: 721814 - DNA, 75 bp, Homo sapiens
ccagccttacaggttttacgtgaaatgaaagccattggaataggtcaccatcagaaaagctaagtttgctgtata

SEQ ID NO: 721815 - DNA, 90 bp, Homo sapiens
caggaagatactgcagagatattctactccatctcattcattgtacagacatatgtagagtgtgtcggtcagaaggaacacctgagaaac

SEQ ID NO: 721816 - DNA, 101 bp, Homo sapiens
ggcaacagtaacgaaaaacagggctgtcttcatcctccaggtccacctttagcaagacctattctcccccgagaacgaggtgctttggatagaattgttga

SEQ ID NO: 721817 - DNA, 50 bp, Homo sapiens
ggaggagtggattaagtgcattaagccctgggaggagcggggacactgag

SEQ ID NO: 721818 - DNA, 75 bp, Homo sapiens
agctctctcaatctctgtctgaactggatcataaatgacagtgttgttacagatcttataacagtcggtttaaag

SEQ ID NO: 721819 - DNA, 75 bp, Homo sapiens
cggcagagcaatggggcacgcctctctgtgacaggccacagaaacactattcagaatgggtgtagcaagaggaac

SEQ ID NO: 721820 - DNA, 80 bp, Homo sapiens
ctcggaggcgttcagctgcttcaagatgaagaatgttcgcatcttaccacatacagttctttacatggctgattcagaaa

SEQ ID NO: 721821 - DNA, 50 bp, Homo sapiens
agaggcccagctttggaggcaaacggccatcatgaggaagccacgagcag

SEQ ID NO: 721822 - DNA, 83 bp, Homo sapiens
caaggcactgctttttcatgacggttctgaagccagacacaagatgaaaaagctaactccaaaacagaaattttctgaagatt

SEQ ID NO: 721823 - DNA, 75 bp, Homo sapiens
cgcgcgtgcgcggacatggcctcaaacgatataattggtgattacaactttcctctataaattaactcttgacac

SEQ ID NO: 721824 - DNA, 113 bp, Homo sapiens
ccgggtcatccctggctccaggaccgccttctttggctacacagtgcagcagcacgacatcagtggcaataagtggacatttctagaatctgttggggttcctgagagagaga

SEQ ID NO: 721825 - DNA, 75 bp, Homo sapiens
gtttttcgttgctcacagctatggaggacttgcttttgttgaactgtaacaaatgtggcaattattttggatcta

SEQ ID NO: 721826 - DNA, 50 bp, Homo sapiens
gtccctgagccgcccctacacccacaggaaggaaaatcacctcggcagtg

SEQ ID NO: 721827 - DNA, 101 bp, Homo sapiens
gcggcagcttcaccgccgagtcctccaggcagcagtgaggatgccagagttcatgggtttctagaagacaagttttcaactgcagatacaaacatcaggac

SEQ ID NO: 721828 - DNA, 100 bp, Homo sapiens
aaaccaaagacagcatctgagcacagaaagggttgcaatattatctcatatctttggggctgcttagatttcttttttcaatgcttcattgttgcggaaa

SEQ ID NO: 721829 - DNA, 75 bp, Homo sapiens
acatcaggacaccgggagtgggagagattggactgggagactcagcaggaggccactgtctgcagctcccgtgaa

SEQ ID NO: 721830 - DNA, 101 bp, Homo sapiens
ggtggaggtctgcgttgctcttgcttttcctcgctggggtgtacggcagacatctggtccctgggcataacagctattgaacttgcaagaggggaaccacc

SEQ ID NO: 721831 - DNA, 100 bp, Homo sapiens
agtataaaacccagaagcagaacttgaaggttaaaccactagcccatttcacagcccgtggccacccaggagcccgatgtgcaaggcaggtgtgagtgcc

SEQ ID NO: 721832 - DNA, 50 bp, Homo sapiens
gctgaagtgtcttcaatgcctgctttcctggaatcaagatgtgagaccaa

SEQ ID NO: 721833 - DNA, 75 bp, Homo sapiens
ccgccttccggcagaagctggtcagtcaaatgactctccagaatccgatgctgagcgagagaaggataaaaaaga

SEQ ID NO: 721834 - DNA, 85 bp, Homo sapiens
caaagacgctaaacgtgccctactctgccccgggggagaggattttttatcaagcagaaatgcatcgaacaacgagaatcaagat

SEQ ID NO: 721835 - DNA, 100 bp, Homo sapiens
gcctaccaggaggccaggggtgtcgccatgcttaatcttctccatacagagctggctaaacagttggcagacacaatggttctacctatcatacaattcc

SEQ ID NO: 721836 - DNA, 95 bp, Homo sapiens
cgctgggcaatgacatctacgtgacggccctgggcgctgcctatggcacagccaagagcggtaccggcattgcggccatgtctgtcatgcggccg

SEQ ID NO: 721837 - DNA, 98 bp, Homo sapiens
gccatggcgttgtcgatgccgctgaatgggctgaaggaggaggacaaagagcccctcatcgagctcttcgtcaaggccatcgaagacggcaatttgga

SEQ ID NO: 721838 - DNA, 82 bp, Homo sapiens
cctccactccgtcccccgcgggtctgctctgtgtgccatggacggtgccagcgccacagcccttcaatcattttggttgcta

SEQ ID NO: 721839 - DNA, 83 bp, Homo sapiens
cttttttataaactggctgaagcccatccagactgtttgatgctgaacttcaccgttaagaattcttccatctctatgacaac

SEQ ID NO: 721840 - DNA, 100 bp, Homo sapiens
cggggaccccgaggccgcgctgcggatctacttccagctgcaccgggccctcaagatgattgtggatcccgtggagccacatggcgagatgaagtttcag

SEQ ID NO: 721841 - DNA, 88 bp, Homo sapiens
attttgctggtgaagaagtaaggaaaccacagcttctccagggagtctatgccatgggcttcaatcgaccctccaagatacaagagaa

SEQ ID NO: 721842 - DNA, 75 bp, Homo sapiens
tcctcctagaagtagttacttggaaagtccaagaggcccaaggaaaaatgaggaagctgtgagtaccagtggaag

SEQ ID NO: 721843 - DNA, 101 bp, Homo sapiens
cagccgctgttttgccggaggagcccctcaggccatgagatctcactctgatgcccaggctgaagtgcagtggtgcagtcatagctcactgcagcctcgaa

SEQ ID NO: 721844 - DNA, 75 bp, Homo sapiens
ccctcccgcccgcaactccgccgcccaccatggcttccgaggagctgtacgagttctggagaccagaaggccaaa

SEQ ID NO: 721845 - DNA, 88 bp, Homo sapiens
aaacgaagtcgtggaggtggcgaaacgaggaggagataacgcggccttgggctctgaaccccgagatgcccctgtccttcacaataag

SEQ ID NO: 721846 - DNA, 88 bp, Homo sapiens
tactcaatcgacagaagattcggagccttgatgtggcatggattccgtgaaggaacaacacctaaacccaagagggcagctgttgcag

SEQ ID NO: 721847 - DNA, 80 bp, Homo sapiens
gttttccaaaagtacaaattcctctgatgtttcagctaagtcagatgtcctaaacgatgctatatttgatgaagatcatg

SEQ ID NO: 721848 - DNA, 82 bp, Homo sapiens
ctccgggaaaactacactggccagcctggtggagttgacagaagagatcctgaagctgctgatggaactggtcttccgcctg

SEQ ID NO: 721849 - DNA, 90 bp, Homo sapiens
agtctgaaaggcactttattatgcaggtggtctgtgaagccacacagtgtccagatacgaggaaactggcgatggaatatgagaggagcc

SEQ ID NO: 721850 - DNA, 98 bp, Homo sapiens
gattctactcaacatgtcccttcagaaacaagtgaggaccctgaagttgaggtgactattgaagtgatcctgccatgaagcagtttctgctgtacttg

SEQ ID NO: 721851 - DNA, 88 bp, Homo sapiens
ctgcaggctggctgctgctgctgctgcttcgcggaggaggcaagatccaaactgagatggagactgttccagaagcaggaacacatga

SEQ ID NO: 721852 - DNA, 101 bp, Homo sapiens
tatctctgcattagccagattggacatatgtaaagggacatcagtatatctggatcatcaggtaagcagaattttgtacagtttctgtacagcattcaaac

SEQ ID NO: 721853 - DNA, 98 bp, Homo sapiens
cgcgcagggcctgcagcgggagctggacggcgagcgcgagcggcgcgagaaagaccatggccaacctggagcgcaccttcatcgccatcaagccggac

SEQ ID NO: 721854 - DNA, 106 bp, Homo sapiens
agctttccgagtgccaggcgccggccggctgcgaagacgcggtgggccgcccctccgtggcactatcacaacagagtgacataatggtgggataacatggacactt

SEQ ID NO: 721855 - DNA, 96 bp, Homo sapiens
cgcaaggccagcagcaacaccacaagacacttctacaagcccatgcttcgacggggcagcagcaagtggatggccaggacaggggtgttcctggcc

SEQ ID NO: 721856 - DNA, 100 bp, Homo sapiens
tttggctgggcctacagatgacatacagagtacagtcccccagttgttgacctcctgtactggagagacattaagaagactggagtggtgtttggtgcca

SEQ ID NO: 721857 - DNA, 100 bp, Homo sapiens
agtaccatgatagctgtatcattctgggaggtgatcagtgatgaacatggcatcgaccccaccggcacctaccacggggacagcgacctgcagctggacc

SEQ ID NO: 721858 - DNA, 74 bp, Homo sapiens
aacattcagacccatttccagtcatgaaagaaatatttgccattgctaaggaattgctaaaaacagaaattgat

SEQ ID NO: 721859 - DNA, 74 bp, Homo sapiens
gtggcagcagtacagcattactttatagcaaacgactgattggatttgaggctcctcccctccagggacaggct

SEQ ID NO: 721860 - DNA, 74 bp, Homo sapiens
caatgttcaaagtactcaagatgaatttgagcgatgaagaacgatacagatacagggaatatgcagaaagaggt

SEQ ID NO: 721861 - DNA, 100 bp, Homo sapiens
gggacttcccgtccgcggcgtggaggaaatggtggagtcaatgaagaaagtagcagggatggatgtggagctgacagttgaagaaagaaacctcctatct

SEQ ID NO: 721862 - DNA, 82 bp, Homo sapiens
tgggcttgtccttgctggtgcatgcgtcgtcggcctctgggcagcaggcactccagaggaaagaggaatccggaaatggaag

SEQ ID NO: 721863 - DNA, 50 bp, Homo sapiens
tgctggaacatgcagagtctgcacaagatgccaaccctgtggtaattgag

SEQ ID NO: 721864 - DNA, 90 bp, Homo sapiens
tcggcgccgcggctcttttctaaaagtggcaccatgccggtggaaaggatgcgcatgcgcccgtggctggaggagcagataaactccaac

SEQ ID NO: 721865 - DNA, 82 bp, Homo sapiens
caaccatcgcagttggaagcccatggggcagttacatcatgctgatgacagcttcctggtcctcaccacagatggaattaac

SEQ ID NO: 721866 - DNA, 95 bp, Homo sapiens
cgacggcggctgcgggaagacgtcgctgctgatggtcttcgccgatggggccttccccgaggactcgggacctggttcgggccggggtgctgaag

SEQ ID NO: 721867 - DNA, 83 bp, Homo sapiens
gcatggcggacccccagagctgatgtctttggtggacttgggaaagaggttgctagaagcagcaagaaaaggccaagatgatg

SEQ ID NO: 721868 - DNA, 90 bp, Homo sapiens
cgcgggagcccgccggcggtggcgcggcggagacccggctggcctatgtgcttcccaagctgtatgtgaagctacattactgtgtgagtt

SEQ ID NO: 721869 - DNA, 90 bp, Homo sapiens
gcattttggcattgacatttaattttagggtcctttatatagaagggagagtagatattcaagagaagcttatgtggagttagttcacca

SEQ ID NO: 721870 - DNA, 100 bp, Homo sapiens
gaccgggaagccttaaggaaggaagcagagcgccaggcattagcgcagctcgagaaggccaagataaaataccatgaggagtttgagaagagccgcatgg

SEQ ID NO: 721871 - DNA, 75 bp, Homo sapiens
ccgcggctgggcgttcatctaccacgctttcgtgctgtgggtgagcgtggaggatgctcagatgcacaccgtcac

SEQ ID NO: 721872 - DNA, 82 bp, Homo sapiens
cggcggagtagagcggagcctggcgggcgtgggaacccaggccccgccgaggcggccagcaacgaaggttttgggaacagta

SEQ ID NO: 721873 - DNA, 74 bp, Homo sapiens
ggcgtggtggcccagtactaccggcccctgcatctttctgaggaagagaaaattcagcgctacagcatcctctc

SEQ ID NO: 721874 - DNA, 100 bp, Homo sapiens
acgagtgggaggtgctgagccgctcaggttatttggaaatagcggtgcttgcagcgcttgcggacagtcgattcctgcgagtgaactcgtcatgagggcg

SEQ ID NO: 721875 - DNA, 49 bp, Homo sapiens
gatttctctttgggaaactaaaagcatccgggcatcgggccttatcctg

SEQ ID NO: 721876 - DNA, 90 bp, Homo sapiens
cacgagtcatgaatacaggatcacagtttgtgatggaaggagtgaagaacctggttttgaaacagcaattttagagacaaggtctgactg

SEQ ID NO: 721877 - DNA, 133 bp, Homo sapiens
acatgatagctttgatatgaaggacttgaatgctagtgtggtgaatattgatacttctacagaaatcaaagaaaatcctgagcgagcagctctgtactttgtttctggcgtgtgcatcgggctggtgctgacc

SEQ ID NO: 721878 - DNA, 101 bp, Homo sapiens
aaaactgaagattgtcatgattgtttatcctaatcccaatgctgaagtaagattgtcttggaaatactaagttggaatcccaaggactgcagcaaagccaa

SEQ ID NO: 721879 - DNA, 96 bp, Homo sapiens
tattgggaaaattcaacttcattcagggagtgttggtggtcttcaatggtgtggagagccaaaacgtttagaaactgaagcttctactgggcaaca

SEQ ID NO: 721880 - DNA, 83 bp, Homo sapiens
aggagagccaggattcatgctctacatccccatagaggcagaagctcctcctggggtagagacagatcttattgatgttggat

SEQ ID NO: 721881 - DNA, 100 bp, Homo sapiens
aaacaccagatgatgaccctgagcaaggaaaatctgaggttatgcagaaggggttaaaagataactttgctgatgtccaggtctctgtagttgattgccc

SEQ ID NO: 721882 - DNA, 87 bp, Homo sapiens
tagtatcttggccagggaactcaaacagcagatgcagggtgctggtcaagataaactaggaatctatgtgaagtcggttgtgaaagg

SEQ ID NO: 721883 - DNA, 99 bp, Homo sapiens
cttatggagattgttcaccacggagcatgaagacagagcgggtgactggaggtggctccccaggttctaagctggtctatgtccatcaccttcttggag

SEQ ID NO: 721884 - DNA, 100 bp, Homo sapiens
gcaagacaagaaggaaagaaagtattgggaataatgctgccctcccatcctcaagggccagtgggaactctaatattggctaaaacactgtcttatgaac

SEQ ID NO: 721885 - DNA, 83 bp, Homo sapiens
tttgaattggattatcccaaagcagacgcgtgccatgcctaccagatcattcaccgcaatgggattcctgacgaacagatcgt

SEQ ID NO: 721886 - DNA, 100 bp, Homo sapiens
tggactcatggaggctgagcatttattcaggttatgggagaagatatcccagaaaaaataaaagatgaagttcacccagaggtgaagtgtgttggctccg

SEQ ID NO: 721887 - DNA, 101 bp, Homo sapiens
aacattttttgaaatttttaagacacgctgcaacaaagcaggtgccatgtttcagaacagagtaagacccctggtaaagaagaactgaagatattatacag

SEQ ID NO: 721888 - DNA, 71 bp, Homo sapiens
cacgtgccctggagttacctcgtctttctaactagctatcctgtccgaaaatccatccagcaggacgtctt

SEQ ID NO: 721889 - DNA, 89 bp, Homo sapiens
gcctgacgcatctgtctgaggagcgggagttctgggaaatcgttcattcatttacagatgaacagaaaagactcttcttgcagtttaca

SEQ ID NO: 721890 - DNA, 75 bp, Homo sapiens
ggtcgcctgtgtcttctcaccatcgttggcctgattctccccaccagagcacagccatgacagtgcagatcctgc

SEQ ID NO: 721891 - DNA, 100 bp, Homo sapiens
aaagctttctttccaagatacctagcgtcttctctgccttccatacagcaaagtgcgagaaactacaaaaggagaaggaggagctggagaggcggttcga

SEQ ID NO: 721892 - DNA, 100 bp, Homo sapiens
gataaagcatggagttggctaatggatgctgaggggcgttcctgcaatgagtcctgatgctttaaaccagttcccagcagctcctattccaactttaagt

SEQ ID NO: 721893 - DNA, 89 bp, Homo sapiens
ggacatatagttgagttttctcaagaccagcatggttctagaaatggactcagaactcaaggaagaaattcctgtgcatgaggaattca

SEQ ID NO: 721894 - DNA, 78 bp, Homo sapiens
gcccgcgggcccgggtgcgggcccggcgccgcaccagcagaacggcatggaaagctcacctgatgggcccagccggct

SEQ ID NO: 721895 - DNA, 89 bp, Homo sapiens
gacaaaatcaatgaaggtgacctaattgcagaggtccttcagtcttggagactataagggagcctctgcacccagggaaaatgttaccc

SEQ ID NO: 721896 - DNA, 75 bp, Homo sapiens
ctcggtgctgtggtgcagagctagttcctctccagctcagccgcgttcatcctaagttccactataaacaggctc

SEQ ID NO: 721897 - DNA, 100 bp, Homo sapiens
ttaaagcgcataagaatgtcctggcagcattcagccagtattttagaataactgaagtgaagtgatggactccgatttggagagtagtaagacgtgaaag

SEQ ID NO: 721898 - DNA, 100 bp, Homo sapiens
cttcccgcagcgccgtagagatcgctcccactcaggtcacagctgccagctccaaaactagctcaggcgatgcctcctcactcagcatcgaggagactaa

SEQ ID NO: 721899 - DNA, 100 bp, Homo sapiens
ggactgggatgatacaccttttccacagggaattgagttgttggtagctggcagtgttgtgatggcttttgaagaagtatgcccggacagaatagatctg

SEQ ID NO: 721900 - DNA, 75 bp, Homo sapiens
cgtcgggctgcagcagtggcgggcgcaggagcccggccccggagccaccgaccaccgctgaaacttcacttctac

SEQ ID NO: 721901 - DNA, 96 bp, Homo sapiens
gtcgagtatctggtgaagtggaaaggatggcccccaaagtgatgtgtccaatctagatcccaacttctcatttgaaggcaccaaactggatgtggg

SEQ ID NO: 721902 - DNA, 77 bp, Homo sapiens
ggagcctcagttggaagcagccgatccagcctgcggagcctgtggggcagggatccatatggctttggagacagtcg

SEQ ID NO: 721903 - DNA, 100 bp, Homo sapiens
acccaaaaagtttgccccggtagttgctccaaaacctaagtacaacccatacaaacaacctggaggtgaggtgtcttgggacaaggtgcgcattcctggt

SEQ ID NO: 721904 - DNA, 120 bp, Homo sapiens
tggagatggaaaaggagttcgagcagatcgacaagtccgggagctgggcggccatttaccaggcagaggtggaggagacactgaagcgactgcagagccagaagggagtgcagggaatca

SEQ ID NO: 721905 - DNA, 100 bp, Homo sapiens
ctgagtgggaagaccaagacagtgcctggataccttcgaataggattcggaggaacctgagtgcctcagtcatcgccgtcaccatccaggggggagcgca

SEQ ID NO: 721906 - DNA, 100 bp, Homo sapiens
agtctcgggcaagtagtcctctaagaaaaatggctacaaacttcctagcacatgagaagatctggttcgacaagttcaaatatgacgacgcagaaaggag

SEQ ID NO: 721907 - DNA, 100 bp, Homo sapiens
cacaaacttcaggaaaggattttgcacttgtgcagaccgggcgagcagagtaagaagcagatcttagcaaagcaatgtctcaagatggtgcttctcagtt

SEQ ID NO: 721908 - DNA, 100 bp, Homo sapiens
aagagaaactcagcgctggggaagaaggccaaagaggtgctgaaaaaatatttggagtccaaggaggatgtggctgatgcacttctacagactgatcagt

SEQ ID NO: 721909 - DNA, 98 bp, Homo sapiens
aagccacccccaccctcaccaacaggcagccctgaagcagcttcctaggaacaaggtccccaacatggcggtgatgatcaagtccctgactcggagca

SEQ ID NO: 721910 - DNA, 89 bp, Homo sapiens
ctcaagagaagctgcaagagcaacatctttcctcaccccaagaacctcaagaaggcatgaagccagcccctgcagtgccgtccacccgc

SEQ ID NO: 721911 - DNA, 75 bp, Homo sapiens
cgagaggagccacaatggagacgccgccgctgcctcccgcacacgatgaggcgagtggtacgacagagcaagttt

SEQ ID NO: 721912 - DNA, 82 bp, Homo sapiens
catccccgggccgccgcggcccagggctgcacaaagatgttcagggataactcggccatgagaaaacatctgcacacccacg

SEQ ID NO: 721913 - DNA, 80 bp, Homo sapiens
aagtattgctgtgggtgctgggacttcccgtccgcggcgtggaggattggtttatcttggaagctaaagggcattgctca

SEQ ID NO: 721914 - DNA, 95 bp, Homo sapiens
aggctcctgtgaacactgcagaactaacagatctcttaattcaacagaaccatattgggagtgtgattaagaaactggcgatggaatatgagagg

SEQ ID NO: 721915 - DNA, 100 bp, Homo sapiens
gagttccgctaccgcccgccacccctgtactctgagcttttacttccccaattggtttgggctggagaagtgccaccgcttcgggctacgcaaggatttg

SEQ ID NO: 721916 - DNA, 75 bp, Homo sapiens
tataaaggaacaaggattccggcaggagttggtggtgggtctcacaaaggagctgaccctgaacattaacctaac

SEQ ID NO: 721917 - DNA, 97 bp, Homo sapiens
gtgttgccgccaccgggaagcggggctgcagatatgaagatcaatgatgcagactgatggttttgatgaagctgggcatttataactagattcatta

SEQ ID NO: 721918 - DNA, 75 bp, Homo sapiens
gtggcggcctcaagccttggacactgtgtgcaagcatctcttggcagtttacctgagtcaggttatgaggacctg

SEQ ID NO: 721919 - DNA, 98 bp, Homo sapiens
cgttggccttgttcactgctgtgtgccaagctgctgacagcatctggctatcgcaggaataactcaagtcacctgtactggaaatcagtttgctgaaa

SEQ ID NO: 721920 - DNA, 51 bp, Homo sapiens
gtttagctgagataccatattacaagaagaattcctatggtgtccacccct

SEQ ID NO: 721921 - DNA, 101 bp, Homo sapiens
accatgtctccatccccgaccgccctcttctgtcttgggttaaagtcctttcttgctttcaaatatgctatggagccacagttgaggacagtagtttcctg

SEQ ID NO: 721922 - DNA, 82 bp, Homo sapiens
gttgtatttagtgtgacgactgttgacctgaaaaggagtatgctgctgctgttccgctttgcgtcctcgctacaaacgcctg

SEQ ID NO: 721923 - DNA, 83 bp, Homo sapiens
atgagaagatattctgctgtcatggaggtggtaagttttcttcatacagttcttttgtgtgacaaactggatttcagcacggc

SEQ ID NO: 721924 - DNA, 100 bp, Homo sapiens
acgagatcttgtctgatgtggcatctagactttggtttacatacaggaaaaactttccagccattggaaagaccacagcaagattctttcattcgtctcc

SEQ ID NO: 721925 - DNA, 50 bp, Homo sapiens
gatcgtcagtagagatgctgcaggtggatatcatccagtgaaaattggag

SEQ ID NO: 721926 - DNA, 75 bp, Homo sapiens
caagttcttcaggaatggagacacggcttcccccaaggaatatacagaatcaggaaacccaggcccaacggcagg

SEQ ID NO: 721927 - DNA, 90 bp, Homo sapiens
cgcgagtccagcgtcgccgcagccccccaatgcggccgcgagaagcagcgggggggcaggcgatcgaagatgtattgctgtccttgaata

SEQ ID NO: 721928 - DNA, 117 bp, Homo sapiens
ccgggaggaaggaacgaggcaaggagctaaagcagcgtgcgttcagccctgggattgggctaatggatactacagacaacagagaaaacttgttgaagagattggctggtcctatac

SEQ ID NO: 721929 - DNA, 100 bp, Homo sapiens
gtacttgctgtagatgaaaatgattctggcatccacgtgagcccagtgatcccaatgagcgctgcgttgtgctaaattttcgtaaatcacccaaaagatg

SEQ ID NO: 721930 - DNA, 75 bp, Homo sapiens
ggatattcagttgcacatccccacatcaatgcactgccaatggagacccgtgtacagtatcatctcagttggagt

SEQ ID NO: 721931 - DNA, 82 bp, Homo sapiens
gattattagctttagtgaaatgggctaataatgctggcaaagtggaaaaatgtgcgattgaaaaggctgtggtgtctcagcg

SEQ ID NO: 721932 - DNA, 80 bp, Homo sapiens
gtctacagctctgcagcagtaccagaacccaaaaggatagcatttctcaagacctgacttatggagcacttgtaacctga

SEQ ID NO: 721933 - DNA, 78 bp, Homo sapiens
gaacattactcttccagaagagtttggaaattttagcattcaggtgccaggaatgcagatgggacagccagtgccaga

SEQ ID NO: 721934 - DNA, 83 bp, Homo sapiens
caggatccagaatccacggggtctggagcataagagtgggcccaacgacctacggcactttgaccccgagtttaccgaagagc

SEQ ID NO: 721935 - DNA, 83 bp, Homo sapiens
tactgcaagaagtatgagcagctcaagcaaacggggattcagcgtccgatcctttggaacagggactcacgtgaagcttccag

SEQ ID NO: 721936 - DNA, 100 bp, Homo sapiens
cttacgaagacataaggaaaagctggaagaaaaaatcatggatcaatacaagttctatgatcctcctccaaagaagtactccaaagattcaggtttactc

SEQ ID NO: 721937 - DNA, 98 bp, Homo sapiens
tcacaaggcagctcgctctgggagcctagaatgcatcagtgcccttgtggcgaatggggctcacgtcgaggcccttgctgtgtgtgagctagggggtg

SEQ ID NO: 721938 - DNA, 74 bp, Homo sapiens
gcggcccctggagatgattgagccgcgcacgctacagtacaagggctccaaggtgggcaaactgaccctcaaga

SEQ ID NO: 721939 - DNA, 82 bp, Homo sapiens
aacatttagcctggaacagagcggcactcggcctgagcggttgttataccacatttgcataagttagccttggtgaacaact

SEQ ID NO: 721940 - DNA, 100 bp, Homo sapiens
gccacacagatgcgcacgcacagcatcaacgcgctgctgatcatcggtggattcgagttcctccgtgtcacaaagcagtacctgccccacgtggcgcgcc

SEQ ID NO: 721941 - DNA, 100 bp, Homo sapiens
gatttcccaagagcagcggaaaatgatccagtcacaggccttctccacagtaggcactcctgactacattgctcctgaggtgttcatgcagaccgggtac

SEQ ID NO: 721942 - DNA, 75 bp, Homo sapiens
ccgcgcacttcgtcatgttcttcgcgccctgcttgccttgcgccatggactggcagccagacgagcagggcctgc

SEQ ID NO: 721943 - DNA, 75 bp, Homo sapiens
cccgaggcgaggaggagcgctggcggtttgatgaacttgtgaaaaaattcaaagtcgaatatcatgctggtggct

SEQ ID NO: 721944 - DNA, 100 bp, Homo sapiens
agcaaccagtctctccaatcctattgagatagacttccaaacctcaggaaaaccagtagattcccagacatcgcgaagtgaatctgaaattgtgccaaaa

SEQ ID NO: 721945 - DNA, 101 bp, Homo sapiens
ggtgtacaaatacccctttgaattaattatggctttactggggcttccggatgcagatgacgatgcgtttgaagagtacagtgctgacgtggaagaagagg

SEQ ID NO: 721946 - DNA, 75 bp, Homo sapiens
ggtaagaccatcaccctcgaggttgagcccagtgacaccatcgagaatgtcaagccaaggaagccaaggagaagg

SEQ ID NO: 721947 - DNA, 50 bp, Homo sapiens
tcttgatatgtctgatgatgaaggttcgatacaagaggctgttttcctag

SEQ ID NO: 721948 - DNA, 49 bp, Homo sapiens
tacatcagcttgtaggagacagagcttcagtactcggaggaagactgtg

SEQ ID NO: 721949 - DNA, 101 bp, Homo sapiens
tattgaacggctgggccagagcgtggttgctgaccagttgaaaggtaatttcatctgtgccaaagcctccagaggacaagccagaagatgtacatacaagt

SEQ ID NO: 721950 - DNA, 75 bp, Homo sapiens
gcacgtcgtcaccctgtacaatcgtgcataaggcaaatccaatacgcaagtaccagggtctggagataaagtcaa

SEQ ID NO: 721951 - DNA, 50 bp, Homo sapiens
ggagctggaatgactggcaacccagacctcaaaggaagaccttctgcagg

SEQ ID NO: 721952 - DNA, 100 bp, Homo sapiens
tcatagcataccatttatcgggctcggcgcaggcccgcggggagcgcagcccggcggagaaagctctgggtgtgcggcagtaccatgtggcctcagtcct

SEQ ID NO: 721953 - DNA, 100 bp, Homo sapiens
tttcattggaaaaagtgcagattggatttgccagggcatgtagctctccaggcttgcaagcgattaccagatcatggaagggaagtggttgctgtgtatg

SEQ ID NO: 721954 - DNA, 90 bp, Homo sapiens
atcaaggacatggcgcctggcaaggtggtgcccatgaactgctggggcgtgtaccaggctgtgaggtgtccctacctgcaccggacgacg

SEQ ID NO: 721955 - DNA, 75 bp, Homo sapiens
ccaaggtgtggctcctctgaagacctgcacgacgtggtgatggtggatgaggcacacgaaaggaccctacacaca

SEQ ID NO: 721956 - DNA, 83 bp, Homo sapiens
aaaatgcaaaaaaggaggccaaagactttggtgatttgtggctcccgagtgagggttgaactatcgacaggcatgcctcggag

SEQ ID NO: 721957 - DNA, 82 bp, Homo sapiens
ctacaatttcttcgagacactcatataaaggtaccatgtctaccctacctgtaggaacacatccgggattctaggattttct

SEQ ID NO: 721958 - DNA, 75 bp, Homo sapiens
tcagctccaaacacgcttctacactgataacaagaagaaaagagcactggttgccattggtacccatgatttgga

SEQ ID NO: 721959 - DNA, 100 bp, Homo sapiens
ttctttgctgtctattcttcgctatggtgccttatgcaatggactgctgagatgtcctctattcttgaagagcgtattcttggagctgatacctctgttg

SEQ ID NO: 721960 - DNA, 101 bp, Homo sapiens
accacctttaaaacagatgtgtaccttaagtcactcaaccctcagtggaactcggagtggtttaaatttgagaaaagcacttggttctgcttcgagatgga

SEQ ID NO: 721961 - DNA, 100 bp, Homo sapiens
tcctcaaggactacagtatgcacttaatgtccctggtgactgttggatctgtatggaactcatgtctacctcgtttgataagttttacaaatatgtatat

SEQ ID NO: 721962 - DNA, 89 bp, Homo sapiens
tgaataatgactttcctccaagagcacattgcctggtaagatggaacatcatttacagcgagcaatttcagcacagcaagtgtttagag

SEQ ID NO: 721963 - DNA, 82 bp, Homo sapiens
ctatgtgacgctgctggaggaaacacctcaggacacggcctacaacaccaagagcctgacatttaccccggtaactgctggg

SEQ ID NO: 721964 - DNA, 100 bp, Homo sapiens
ggctgtgctggtcacagccacactctgcaccgctaggccgtccccgaccttgcctgaacaagtgagacggtttaagcggaagcatcttactgccattgac

SEQ ID NO: 721965 - DNA, 109 bp, Homo sapiens
gactgaaagctagaggcattgaggagcctgaagattctcaggacccagatgatgtggtaccagttggccaaagaagagcctggtgttggtgcatgtgctttggactagc

SEQ ID NO: 721966 - DNA, 74 bp, Homo sapiens
tgtacagactgcttttccagcagcatggacacaagaagcatagtaaagggagaagatgaggaagagaacaattt

SEQ ID NO: 721967 - DNA, 100 bp, Homo sapiens
ggaggaggacgagcaggagaccgcttccaagatccgcatccgggacgggcgggccaagcccatcgacctgctggccaagtacatcagcgctgaggatgac

SEQ ID NO: 721968 - DNA, 100 bp, Homo sapiens
gaaaggagcaagagcaagatcaccgtgacatccgaggtgcctttctccaaaagttacagaatgtctgaaggggacagtgtgggagaatccgtccatggga

SEQ ID NO: 721969 - DNA, 96 bp, Homo sapiens
ctttatctggcttactttgtccacactccgggtgtcatggagaaactccagctgggcccagagattctgcagcgggaaaatccaaggcttatttat

SEQ ID NO: 721970 - DNA, 75 bp, Homo sapiens
ccatgaccactgtggagaacaaatccaagattagcacagatgaaggcttgactattgacctgaagaattttagaa

SEQ ID NO: 721971 - DNA, 101 bp, Homo sapiens
gcctgaagggagagtttcagttcttcattgacggatctagtgaaaagccatttgatgtatgcggtcagagaagaagtggaggtcctcaaagagcaaatcaa

SEQ ID NO: 721972 - DNA, 75 bp, Homo sapiens
gaaagggtgtgttactgaagtgaaatatcaagatcgcaacaatgcaaggcaaattcatgaaggtgcaagtttacc

SEQ ID NO: 721973 - DNA, 83 bp, Homo sapiens
ggcctgcagcgggagctggacggcgagcgcgagcggcgcgagaaaggtatctcccagagccccagctggtgtggccaggcccc

SEQ ID NO: 721974 - DNA, 83 bp, Homo sapiens
caggtccagttcagactcttgatcccacagccacttcttgagtgagaactgaaggcagaagctagtctaatggaccagatgag

SEQ ID NO: 721975 - DNA, 127 bp, Homo sapiens
caggacaattccatttggggaccagagatggacggtcactcagcctatggaggagtatgctgctgctgttccgctttgcgtcctcgctacaaacgcctggtggacaacatattccctgaagatccaa

SEQ ID NO: 721976 - DNA, 97 bp, Homo sapiens
acccaagaaaccacttatccaaatacttacatttttgacttgtttggaggtgttgatgtgttgggatggccaccaactgggggagcctcttgcagga

SEQ ID NO: 721977 - DNA, 82 bp, Homo sapiens
caccaccctcgtgtctgccaccatcttcgacttgagcgaagttttatgcaaggtcttctttgatgtgaggattggagacaaa

SEQ ID NO: 721978 - DNA, 127 bp, Homo sapiens
cacgcccgacgaggagagcatcgactggaccaagatcgagcccagcgtcaacttcctcaagtcgcccaaagacaatgcagatcttcgtgaagactctgactggtaagaccatcaccctcgaggttga

SEQ ID NO: 721979 - DNA, 75 bp, Homo sapiens
gaagactacagagaagcttcttcttgtgccgtgaacctcgttttgagattaagatttgtagccaaaccgtgcgcc

SEQ ID NO: 721980 - DNA, 100 bp, Homo sapiens
cagctgaccttgatcaggagaagtggtggacttgctttgtgaagagacagttcatgaacaagagtctttcaggacctggacagtgaagggagcccgggca

SEQ ID NO: 721981 - DNA, 101 bp, Homo sapiens
ttcactttttacacactcgtgatgtagttcatcttgatttgaaggcacgtgacacaagctgacctcaagagctccacgttttggcttcgagcaagttttgg

SEQ ID NO: 721982 - DNA, 100 bp, Homo sapiens
acctcaagcacacccaatggacagcatgcctcaccaagtcacatgacaagcaatgatcgttgccagcccaacagaaaatggacaggtacttcgtgtaatt

SEQ ID NO: 721983 - DNA, 80 bp, Homo sapiens
agagagagagcttggttaacttgggagaaagtttcatctgtggatggagtattggtggttggaggcaaagtaaagaagcc

SEQ ID NO: 721984 - DNA, 100 bp, Homo sapiens
ttcactagaacttctaaactggattctcgaattacttcttagacatgctgagggtaaaaagctgggattggtaggctgggtccagaacactgaccggggc

SEQ ID NO: 721985 - DNA, 101 bp, Homo sapiens
tcagattatgcgacggtatgggacaaggccaacaagctagtgacctccattgcagacaggctgaatgtggactttgccttgattcacaaagaacggaagaa

SEQ ID NO: 721986 - DNA, 87 bp, Homo sapiens
gtcgttgctgccgggattttggaggccggggccgcgctgagggcgcccagctgctgttcttccacctgtcccgggagcgtgtcttca

SEQ ID NO: 721987 - DNA, 73 bp, Homo sapiens
aggagcccgcgggcggccggtcgggcggggcggcggcgctgacaggctctgacgcccgctctgcggcttcggt

SEQ ID NO: 721988 - DNA, 71 bp, Homo sapiens
tgaccgtggggttcctcgcccagagcgtcttggcggatcttagtaagagccctaagaccatgaaaaagctg

SEQ ID NO: 721989 - DNA, 95 bp, Homo sapiens
acatttcgtgagatccagttgcaagcagtttgtgaccggagggaagaaggatctttccaattaaagatgtacccctggagactgatgaccttacc

SEQ ID NO: 721990 - DNA, 82 bp, Homo sapiens
atgaatggagcaaaatggcggatcatgtgcagataaactcaagccatggagggattactgcattacatcaaccctgcacacg

SEQ ID NO: 721991 - DNA, 100 bp, Homo sapiens
caacatcctgaccaagcccgatccaagaaccttctggactaatgatgatccaggacccagatgatgtggtaccagttggccaaagaagagcctggtgttg

SEQ ID NO: 721992 - DNA, 82 bp, Homo sapiens
cgccgccaaggcggcgcgcgagctggagcactcgccccgcggcgccatggctcacgtcggctcccgcaagcgctcgaggagt

SEQ ID NO: 721993 - DNA, 74 bp, Homo sapiens
gctggaggacgagggccagctgacggagatggtgcagaagatggaggaggaatacaaacagaagcttgcacgag

SEQ ID NO: 721994 - DNA, 75 bp, Homo sapiens
gtcccagcaagaccacaaatttattcaagtcaattaccatcctttaccaggcgttacagtgtttctgccacctct

SEQ ID NO: 721995 - DNA, 75 bp, Homo sapiens
aggaaaatacacctgttgttgagggtaaaatatttggagtaccttttaatgcactgccccattctgctgtaccag

SEQ ID NO: 721996 - DNA, 83 bp, Homo sapiens
ggcttcgtgataatgtaccttgtttaaaatgatgtgatgccagccacttactgtgaaattgatttagataaagaaaagagaga

SEQ ID NO: 721997 - DNA, 100 bp, Homo sapiens
cattggagacatccatcaggagatggacagggaggagctggagctggagatcagaatctctctcgccgtataccacatggctgtcgaccatttcagacac

SEQ ID NO: 721998 - DNA, 98 bp, Homo sapiens
agctgttttgcagattggactacaagttcaatcaggctgtcacccacagtggccagtgagttggcaatcagctaagctgccttggagtcacccttggc

SEQ ID NO: 721999 - DNA, 100 bp, Homo sapiens
caagttcctcctcagtcgggctggagagtcgagagcgggtcatgaaaaccatgagctgttttccaagagcttcatctccatggaagtgcctgtcatggta

SEQ ID NO: 722000 - DNA, 74 bp, Homo sapiens
attactcacttggatggtcacaagattgtgaataagtggaatacagctctcattggccttatgacatactttcg

SEQ ID NO: 722001 - DNA, 128 bp, Homo sapiens
atgttactttgccacttcttcacggaccagtttcagttcgccgatgggaaacccggagaccaaatccttggaaacttggatttaactggccagaagcaggtattcaaagcagagaacaatccctgggt

SEQ ID NO: 722002 - DNA, 100 bp, Homo sapiens
agatgcgctccttcggcatgaccccagtgctgcctgcattcgcggggcatgttcccgaggctgtcaccagacggggtttcaccatctgctgggacgggac

SEQ ID NO: 722003 - DNA, 90 bp, Homo sapiens
ggatgtgccttagaggattatggatgagctttgatccaaaccttctccacaacaatggacataatgggtaccctaatggtacttcagcag

SEQ ID NO: 722004 - DNA, 100 bp, Homo sapiens
actggaccagccagcagcctctaagagctcctagacggtgtcatggagaaactccagctgggcccagagattctgcagcgggaaaatccaaggcttattt

SEQ ID NO: 722005 - DNA, 100 bp, Homo sapiens
ctttggtctcctgggaccactcgttgctgacagtcagaaagtccacacacgttcctgttggggaggatcaagtccagcacatggaactagttcaggatct

SEQ ID NO: 722006 - DNA, 100 bp, Homo sapiens
tctcttctcgccctggcggggaagggactggtgattgcagctggaagtgcccatgaccgagctggcgtcctccgggggcgggtcccctgcgggggacggg

SEQ ID NO: 722007 - DNA, 97 bp, Homo sapiens
agcgtgaccgagagcgcgaatatcgtcatcgttagaagattcttcaaacacctaaatgaaagtgataaattcaaaactgatccttttagttcctcat

SEQ ID NO: 722008 - DNA, 75 bp, Homo sapiens
aggagtctcagtcagcaccagtccagaaaaatgactcagttgtttctgtgggtgattccaaatctaagaagtcag

SEQ ID NO: 722009 - DNA, 99 bp, Homo sapiens
ctctcaaccatcctcatatcatcagtatttatgaaggatgtgatcttcgtggtggaaagctaaattttaaaaccaccccaatggatgcagacagtgatg

SEQ ID NO: 722010 - DNA, 100 bp, Homo sapiens
gatgttttaattccaaaccggatgagtggtgaatgccaatccccacactgccctgggactagtgcagcatggaagaggagatggttcgtgttacgcagtg

SEQ ID NO: 722011 - DNA, 100 bp, Homo sapiens
gtctaaactacgaaatacaccttatcaggtggccccagaagaatttaaaaccagcattggccgtgtgaatgcatgtttgaaaaaggctctcccggtcaat

SEQ ID NO: 722012 - DNA, 75 bp, Homo sapiens
gcaacagtgagaccagcaagaatgacttctccctctccctcaaatggagtctcactctatcacccaggctggagg

SEQ ID NO: 722013 - DNA, 82 bp, Homo sapiens
tcattttgtcggttgccaccacagccgagattctgaacatacgccacaccatatcctggtggatttaaatgtttcacctgtg

SEQ ID NO: 722014 - DNA, 98 bp, Homo sapiens
ccagcatgtcgctgcctccggagaaagcctccgagctgaagcagctcatccaccagcagctgagcaaggttgggataattcttcactattccaccctt

SEQ ID NO: 722015 - DNA, 76 bp, Homo sapiens
gagttccccacctgcgattgcgtcggtttgtttgaagagactgtaccagagggccagggaggaggagaaaggaatt

SEQ ID NO: 722016 - DNA, 100 bp, Homo sapiens
agtcctgacaagaggtgatagttctggaagcagcaaaagcataggcaggctttcaaaaacagacatcaactagtcaggcagtcttccgtctccagtctgg

SEQ ID NO: 722017 - DNA, 100 bp, Homo sapiens
aatatccttgttgataatgacttccacattaaggttgacctgacagttcaagaaaaggagaaatatcttaatgtgtctcgctggttttgtcacattcagc

SEQ ID NO: 722018 - DNA, 75 bp, Homo sapiens
gtttcggaaatgcccttacagcagcaggacctttattgggcttgaggtcacttcagggcatgcccagttcctgga

SEQ ID NO: 722019 - DNA, 97 bp, Homo sapiens
cggcgaagacgcgaccgcggcgcgagtcaccatggtataaatgaccaaggattgtacagagttgtgggggtgagttcaaaggtccagagacttctga

SEQ ID NO: 722020 - DNA, 76 bp, Homo sapiens
tgagccgagaggagctcaaacaggcagaactgtcggaaaaggtaacagaagatggaactcgaaatcccaatgaaaa

SEQ ID NO: 722021 - DNA, 49 bp, Homo sapiens
aagcactccagagacgactaaatgggaggagagagcgatggcttttttc

SEQ ID NO: 722022 - DNA, 83 bp, Homo sapiens
caggagtggagtgatatcagacaccgagcttcagcaagctctctccaacgagaaaaaatgatccctatgctcttgcatccctg

SEQ ID NO: 722023 - DNA, 97 bp, Homo sapiens
cggcggagcgagcgagcggccggcaggttgggaggagcggccgaagtgttaagtccaaaagtgctgggcattgccatcgctcggtatgacttctgtg

SEQ ID NO: 722024 - DNA, 100 bp, Homo sapiens
ggaaccagatatcttgaaaagctgccagaaagctactgctcctcagcaggaagcggatgctgaggtgaacacagaaacactaaataagtcctcccagggg

SEQ ID NO: 722025 - DNA, 98 bp, Homo sapiens
gaaaggtggcggcgctttcggagggctaagtgctatttatggaggtacctatatgctgaataaacccattgaagaaatcattgtacagaatggaaaag

SEQ ID NO: 722026 - DNA, 75 bp, Homo sapiens
cctggatgagcagagagctgtgaaatatctttggcttgcagccaacaatggggtgcgtggagatgctgatcaagg

SEQ ID NO: 722027 - DNA, 50 bp, Homo sapiens
agaggtacctcttaccagaaaggatgttgtcttggagcttgaatttgaag

SEQ ID NO: 722028 - DNA, 83 bp, Homo sapiens
ataaacatcacgatgctgctcatgaaatcatcgagaccatccggttaaataggattgcgaatcaggtggccattcagcggaag

SEQ ID NO: 722029 - DNA, 75 bp, Homo sapiens
acgcaggcaacactgagccccagttcattattccttcatggaaatcctcattgacgattcaatttgttgaaggcc

SEQ ID NO: 722030 - DNA, 75 bp, Homo sapiens
aggaaatggctctcagaggcaaggatgcggtctgctgctaccatcttccgttgatgcaagtggagctgcccatca

SEQ ID NO: 722031 - DNA, 128 bp, Homo sapiens
atcgagccatcttgggatcagtggaaagaatgattgctatcctcacagaaaactatgggggcaaatgacaaggccaagctggctgaaagagcaaccagccacctctgcaatctgccacctcctgctgg

SEQ ID NO: 722032 - DNA, 96 bp, Homo sapiens
cccctggaagagggactccaatgggcatgccccctccgggaatgcggcctcctccccctgggatgcgagtctataggatcgggtgaaccaccaacc

SEQ ID NO: 722033 - DNA, 78 bp, Homo sapiens
ccgacccctggaagctgatgctgctggacgccactttccggggtgcacagcaagtgaaatcatgaccaccccaggaaa

SEQ ID NO: 722034 - DNA, 90 bp, Homo sapiens
atgcagccaagattccagctaagctgcaagctttcttcctggtggcagatgacatcatggattcatcccttacccgccggggacagatct

SEQ ID NO: 722035 - DNA, 95 bp, Homo sapiens
ctcatctgtcattcaaaggaaaaaagtagctgtcattggtggtggcttgcttgtcaaggtggctttggagaaaagtctggcaactgtggagaccc

SEQ ID NO: 722036 - DNA, 51 bp, Homo sapiens
ctcagggtgccagacctcatcgcctgtctcctccctcctacacatttccag

SEQ ID NO: 722037 - DNA, 50 bp, Homo sapiens
cactgaggttgcagttggcgtgaaggcagcttcggtcacctctctgtcca

SEQ ID NO: 722038 - DNA, 100 bp, Homo sapiens
tggaagtctgcagtgaaaacatctccactctgaagaagacactggagtctattatcctcccagtccacaacgctgaaccgtggctggacgaatgtttgag

SEQ ID NO: 722039 - DNA, 75 bp, Homo sapiens
acctgcagtgcagacgaggtggatgaggccgagggcggcgacaagaaccggaggcagttcccatgttatacgcag

SEQ ID NO: 722040 - DNA, 74 bp, Homo sapiens
caaggtgcccttccctcgccctggcgtggacttctacatcctggaccagggtggcttcaagatctatgtgtggc

SEQ ID NO: 722041 - DNA, 100 bp, Homo sapiens
ccctcaaaatgtgctacgtcactcggagtatggccttggccgaccctgagaacagaatcctgttacacctgggatttaggcactttcaatctgaaaaaat

SEQ ID NO: 722042 - DNA, 74 bp, Homo sapiens
tcgcatgatccgccactcaagagacaagaaaaatgaacccaatcctcagaggtaaagaacaagcacctttggag

SEQ ID NO: 722043 - DNA, 97 bp, Homo sapiens
cagctggagcaagaagaggacctgtgcagggcagagcaggaggccccccgaggttcttgggtgtctctggggagtccctgggccagaccttcctcca

SEQ ID NO: 722044 - DNA, 100 bp, Homo sapiens
ggcaccgggatcgtgaccgagaccgtgaccgagagcgtgaccgagagcgcgaatatcgtcatcgttagaaggcgatttgacagatctgttgagaaatggc

SEQ ID NO: 722045 - DNA, 100 bp, Homo sapiens
ccaacagtgacgtgttctccaaataccagctcgacaaagatggggttgtcctctttaagaaggtcgcaatggaagaagagatcgccgcgctggtcattga

SEQ ID NO: 722046 - DNA, 100 bp, Homo sapiens
atttaagaactgaatgtgcaacttgcaagggaactggagacaatgaaaatcttgtcagagagcgcctgctcgctgtgcccccgggttatgacgaccccca

SEQ ID NO: 722047 - DNA, 90 bp, Homo sapiens
tatcttctggataaatctaagcaactgttcaatgggttaagccgagtcgtccggaaatccattgcccgtgttctcacagttattaaccag

SEQ ID NO: 722048 - DNA, 100 bp, Homo sapiens
gtcaagatggaggagtacgcgcgagagccttgatcacattcaggcggccattgcccaactggacctgttaggtgctcttgaacataaggatgaccagctt

SEQ ID NO: 722049 - DNA, 100 bp, Homo sapiens
ctccctgctccgcagcgacatcaccaagctggaggtggacgccatcgtcaacgccgctctgatgctgttctttgacaagtttgcaaacatcgtgcccttt

SEQ ID NO: 722050 - DNA, 74 bp, Homo sapiens
aaagatctcgatacttgaggaaccttcaaaggcacttcgtggggtcacagatattgaagcacagattcgagaaa

SEQ ID NO: 722051 - DNA, 110 bp, Homo sapiens
gaaatcaggaacatctctttcaatgacaaaaagtttgtcattaaacccatcgacaagaaggcacctcaaaagacgatgccacattgtcaggaaaacgaatgcagtcactc

SEQ ID NO: 722052 - DNA, 95 bp, Homo sapiens
gaggaagaggaactctaacaaggggagcttttgttggggcgacagctgctcctggctacatagctccagataacgaaggaggcccaacttcattc

SEQ ID NO: 722053 - DNA, 82 bp, Homo sapiens
ttgaactttaggagagctgtgttctctgcagattctaagactggacctacagagacatctgggattttctgcgtcagctgtt

SEQ ID NO: 722054 - DNA, 83 bp, Homo sapiens
aagatatgaaggactgggttgaagccctgaaccaagccagcaagatcaccttcaaatctgaacatcaatgatgtactagggaa

SEQ ID NO: 722055 - DNA, 100 bp, Homo sapiens
acgtgaaactgaaggacaacgagaagaaccggaagctctttgaccttctggatgtccttgagttcaaccagacagaagcattaaaatgcgtggctcaggc

SEQ ID NO: 722056 - DNA, 88 bp, Homo sapiens
catctacaaccttcgatctcctgacgatcaccccaaaccagaaggcctggctgctgccaagaagctttgtgagaatcttttgcaaaca

SEQ ID NO: 722057 - DNA, 114 bp, Homo sapiens
caaggaaggaaatggcaccgtcatgggtgctgaaatccggcatgttcttgtcacactgggtgaagaagatccatgagaatgagaagcgcctggaggcaggagaccaccccgtgg

SEQ ID NO: 722058 - DNA, 82 bp, Homo sapiens
cagaaacgtcactatcaagaagtgctcaaagatccagacagcaatccatacagcttacttgataatacagaatcagatcaga

SEQ ID NO: 722059 - DNA, 51 bp, Homo sapiens
gaaaacaaagaatttgccagatgtttggagtatgctaccagtggttggaac

SEQ ID NO: 722060 - DNA, 83 bp, Homo sapiens
ttcctccccgcgccccctccccctcgccatgaaggtgtcttcaaaaacaaacatatttaaaagattttacttctcatctccag

SEQ ID NO: 722061 - DNA, 75 bp, Homo sapiens
ctatgcagtcaacatttggagtgaaaacgacccggcagatatgcttgtggttggtggcatcgaccgggtttatga

SEQ ID NO: 722062 - DNA, 82 bp, Homo sapiens
acatagtaaaaggaggcctaagagcgattccagttcccatcccatgtcacggatgtatctgaagaagcgaaggacctcatcc

SEQ ID NO: 722063 - DNA, 90 bp, Homo sapiens
agaaaacctgccaagtattcagcttattggtgcagcaagaacgaaaacatatgtgcaagaacattctgtagttgatcctgtagagaaaac

SEQ ID NO: 722064 - DNA, 97 bp, Homo sapiens
ctaccacagagccatcaaaatcacagtggatgggccccgagaacctcgaagtggttgcctatcactattgtcaagcagataatgcctacacttgctt

SEQ ID NO: 722065 - DNA, 98 bp, Homo sapiens
cctcctcctctccttctacctgctggggttgcttgtcagtagcgggcaagcacgacttcagcctggagaggacggcactcttctgggtggaggccgcc

SEQ ID NO: 722066 - DNA, 75 bp, Homo sapiens
tcctatccttacccgacctcagatgctcccttctgctcctggaaatcagggatcctcttatgcagtggcttggga

SEQ ID NO: 722067 - DNA, 83 bp, Homo sapiens
gaaggtgttagtgatgggcatcgtagacctcaacccagagaggtgagaaaccttaccactgtgactgggacggctgtggatgg

SEQ ID NO: 722068 - DNA, 50 bp, Homo sapiens
ggctgaggaaggggaagattaagtaagctcaagactgcagtgcagatgac

SEQ ID NO: 722069 - DNA, 82 bp, Homo sapiens
actgacgaagcttggaagttgcagaaggtgatgatgaacagtctacacagatggctgcaagttgggaagatgataaagttac

SEQ ID NO: 722070 - DNA, 101 bp, Homo sapiens
gcaaagaagagctcacgggcgtgcggttcaaggctcagctgaaggacccgcagggccccgggccagacaagttggatggcttgaggactggtactaaaagg

SEQ ID NO: 722071 - DNA, 75 bp, Homo sapiens
cttttgaaaggctccttcttcagcttttctgcaattagataaaaaaggaccacaaaaacatcactttgatcagcc

SEQ ID NO: 722072 - DNA, 115 bp, Homo sapiens
atcgtgaccgagaccgtgaccgagagcgtgaccgagagcgcgaatatcgtcatcgttagaaggagcatctttccttgaagaagtacattattgacattgtggttgaaagtacagc

SEQ ID NO: 722073 - DNA, 50 bp, Homo sapiens
gcaagaactggcgtcacgtttacaagagtccggcagcgtcttctcttgag

SEQ ID NO: 722074 - DNA, 83 bp, Homo sapiens
agggcaaaccgtgcattattataaagctcaaccgagttctaggcttcaaacctaagatctgcttggctttgaggaagagtggc

SEQ ID NO: 722075 - DNA, 101 bp, Homo sapiens
ccgatgaggaagtactgagcctgttggaggaactggcccggaaacaggaggacgctcttgtcaggatggtgaagctgttcatcggaaacctgccccgggag

SEQ ID NO: 722076 - DNA, 89 bp, Homo sapiens
aggagttcattcagaagcatgggaggggtatggagaagtccaagaactttgctgccacaatacctcggcccttctcagttcgctacgac

SEQ ID NO: 722077 - DNA, 100 bp, Homo sapiens
actgcggccccctggtgctggccctcagcagtcccggcctctggcagcacttgccccaaagaaaaactgcttaaggttgaaaagagaaatttaagaaatt

SEQ ID NO: 722078 - DNA, 82 bp, Homo sapiens
ccctaaaattgccaaggaactgggatttcaacctgaaagtggaggctgcgaaaatagatacttgccagaactaatacagctg

SEQ ID NO: 722079 - DNA, 100 bp, Homo sapiens
ggatgcggagtaggcttcccccagcgcttgccgccctgggcgcggccctgctcctgtcttccattgaggcagaagagacagagtttcaccatgttgccca

SEQ ID NO: 722080 - DNA, 97 bp, Homo sapiens
ggagactcctgctgtcacgtcacctggcccctcaccatcaccatcctcatctctcttggactggatacacgtctgtttaactacgcaaaaggtaatg

SEQ ID NO: 722081 - DNA, 82 bp, Homo sapiens
tgcagctgtggaccacgctggaacagatctggctgcaggctgtgcagagcagagcgggcggaggaccccgggcgcgggcgcg

SEQ ID NO: 722082 - DNA, 90 bp, Homo sapiens
aatcagcgagactccgtgggcgtaggaccctccgagccagatcccagggacctgcctgctcccagaggtgacagaggaagatcaaggaag

SEQ ID NO: 722083 - DNA, 90 bp, Homo sapiens
gcatcagtgcccttgtggcgaatggggctcacgtcgagctgtgtggttccggtgctggtgccgtggaagtggcaatggcagaagccctga

SEQ ID NO: 722084 - DNA, 97 bp, Homo sapiens
agtgttacagcttttttaaatgaccttcttgaaagaatggatattggtcctaaacagacacagtctgattccgtataagttgatgcatgattggaag

SEQ ID NO: 722085 - DNA, 75 bp, Homo sapiens
ggaggcccagggcctcatggcagggttggaatcgaagcctcttaaaatggcagatgacttggacttcgagacagg

SEQ ID NO: 722086 - DNA, 100 bp, Homo sapiens
gcagttcttgtttgtggatcgctgtgatcgtcacttgatgtgtatatctcatgattgatatggagaaactagtcatgggccaaaggtcaagatacttctc

SEQ ID NO: 722087 - DNA, 112 bp, Homo sapiens
ccgcgcatgcgtggattgtcgtcttctgtccaagttggtcgcttccctgcgccaaaggagctggaagctatcaaagctcgagtcagggagatggaggaagaagctgagaagc

SEQ ID NO: 722088 - DNA, 100 bp, Homo sapiens
ctcatcgctcgcatcgctgccgccaacggggaaagcgggcatgcctcggagaacagttggccaggactgagctgtttattttcttcacttcccttatgca

SEQ ID NO: 722089 - DNA, 101 bp, Homo sapiens
cgcgggtcctgcccccgcaggcagcgcgcgaacgtgggcgtggggatggccaccagtttccggacagcttcgtgctggaggagaattctgcctaagccaac

SEQ ID NO: 722090 - DNA, 97 bp, Homo sapiens
ggccggtgctcttgcaactgacgcagtcactgcagcactggtggaacttgaggccaaagccacagccagagccaagaagccaggattcaagaaatga

SEQ ID NO: 722091 - DNA, 100 bp, Homo sapiens
ctccctccgccgccgcgcaacgtgtgctggagaagagaaacgagttggcacacgcacagtgtttgttggcaatcatccagtttcggaaacagaagcttac

SEQ ID NO: 722092 - DNA, 100 bp, Homo sapiens
gtggccgtgaagcacctgcacatccacactccgctgctcgacaggttgcacgttttcaaaaaatacctaatggtgaaaatgagacaatgattcctgtatt

SEQ ID NO: 722093 - DNA, 100 bp, Homo sapiens
cgctctgggagcctagaatgcatcagtgcccttgtggcgaatggggctcacgtcgatgacgagtagcacagcccctctatggtttagatggcagtgctgc

SEQ ID NO: 722094 - DNA, 99 bp, Homo sapiens
ggagggaacccaggctctgtgaccatctttggagagtcagcgggaggagaaagtgtctctgttcttgtagaacacctgaaggagaagctcattagccag

SEQ ID NO: 722095 - DNA, 74 bp, Homo sapiens
tggcatgtcagagaacccctccgtctatgtgcctggagtggaggcagcacagacagtgaggacgaagaagagga

SEQ ID NO: 722096 - DNA, 100 bp, Homo sapiens
cgctgagcgaaagagaggcctcccggctcgacaagttcaagcagctgcttgccggccccaacacggaccttggtaactgcatcctgcccagcatgacggc

SEQ ID NO: 722097 - DNA, 100 bp, Homo sapiens
tggaattcctattgcagtaaaagacaatttcagcacttctggcattgagacaacatgtgcatcaaatatgctgaaagtgcctacaccaactaatgttaca

SEQ ID NO: 722098 - DNA, 100 bp, Homo sapiens
ggcggccctggctgggggaaccactatgatcagattccatatggctctcatatcattccattccatctctgccaagatttggataccgcaaaaatttgtg

SEQ ID NO: 722099 - DNA, 75 bp, Homo sapiens
agattggctaccacctgctctactacctgagggccaggtctatgttaacaatgaatgggcaaccagtgttgggga

SEQ ID NO: 722100 - DNA, 96 bp, Homo sapiens
gggttctgctgtcaatggtgttgtccaaaatctcctgcaaagaagctgagccatgcaattagtaaatctttggggtgtgtacccacgagagaaccc

SEQ ID NO: 722101 - DNA, 100 bp, Homo sapiens
gccagaaggaagatggcggatctggaggagcagttgtctgatgaagagaaggtgaaggagtacctcctggcaactatgggaactatggctatgctaatag

SEQ ID NO: 722102 - DNA, 101 bp, Homo sapiens
ctcggaggtggagtacctgaacgtgcgcctcagcctgcgggagcccccggccggatagaactggaggaacctccacttgttttggctgctgcaaatgtggt

SEQ ID NO: 722103 - DNA, 100 bp, Homo sapiens
ggccaccagaaaggaactggaagaaatgatagaaaatctagagccccacattgatgatccagatgttaaagggaagacatgtaaggaatttgcataagac

SEQ ID NO: 722104 - DNA, 100 bp, Homo sapiens
ttcttgcaaaacgcttctccggctgcaccctgaccgatgggaccctgacttcagctacgggacggacgagtacgacggagaggggaatgaggagcagaag

SEQ ID NO: 722105 - DNA, 74 bp, Homo sapiens
cgaggtggccggagccgtgtggaccaggaggagcgctctatttaatgaagttcaggaaaaggccattgaggagc

SEQ ID NO: 722106 - DNA, 127 bp, Homo sapiens
ggaccaacaggatgccaaacatatccttgagcacgtcttcttccaagtggtggagttcaagaaattgaaccagtgtttgaaagatgtatggtgatcttgaaacctccagacacaagaaaacttctag

SEQ ID NO: 722107 - DNA, 82 bp, Homo sapiens
gcgacttcaactactcctaccccaccaagcaagctgctctgaaaagaatgaagactattctcagcaatcagactgtcgacat

SEQ ID NO: 722108 - DNA, 98 bp, Homo sapiens
gccagtgcgggtggctggctttgccattagcgggggcctttcctgaggacggcgtacggagtgtggcttgcattcacaagagatgggctctgtggtct

SEQ ID NO: 722109 - DNA, 98 bp, Homo sapiens
cctgaaccccgaagacttttgggagattataggagaactgggcgacggagcctttgggaaagtgtacaagtaagcccagaggtctccaccccacggga

SEQ ID NO: 722110 - DNA, 100 bp, Homo sapiens
atatcactacgattcagtgctactcccttagtaactatgcagttttaatgttgcagcatgagaaagccgaactagaacagcatcttgaacaagagcagga

SEQ ID NO: 722111 - DNA, 100 bp, Homo sapiens
gaacgagctgatgctcaactccagcctcatgcggatcaccctgcggaacctggaggaggtggagttctgtgtggaaggggacggcaaaacagaacagaaa

SEQ ID NO: 722112 - DNA, 75 bp, Homo sapiens
cacgactggaggcacaaggaggacgccggcgtcttctgctcagggctgaagaagatgcagagcagcctgaagctg

SEQ ID NO: 722113 - DNA, 116 bp, Homo sapiens
tcatcttctccaacgggaacctggacccctgggcagggggcggggctggaccctggagagtttctgcacccccttcaggacccccacagttccccgctgtggtccctggaccatcg

SEQ ID NO: 722114 - DNA, 100 bp, Homo sapiens
aagtgaagcaacttgcccagctatgagagacagagccaggatttgaaaccagatattaataaggcagcggaaagaagaaatatgaatacggctccatcaa

SEQ ID NO: 722115 - DNA, 82 bp, Homo sapiens
ctggaagaagaagaagagcatgatcggcatgtccaccaagatgtgaagttcatttccaatccgccctccatggtggcagcgg

SEQ ID NO: 722116 - DNA, 51 bp, Homo sapiens
ccaccactgcggcgggctctggtgatgtcttggcattgcccattttcaagc

SEQ ID NO: 722117 - DNA, 100 bp, Homo sapiens
aattatgcagaagaatggagctggattacacacagcaagttcctgcttctgggacagctctactgacggatacatgtgctgcccttttgttctggacaaa

SEQ ID NO: 722118 - DNA, 83 bp, Homo sapiens
tggacaagcgcctcaaactcatacaaaaggatgccacggagaaagaaaaaagttaaagaagtctccgaatctcggaacctgga

SEQ ID NO: 722119 - DNA, 82 bp, Homo sapiens
cagccacgtcgctttgttttcccacgctaggagctaccacaacagcttgctcacttccgacagagaaaaacaaaaggtgaca

SEQ ID NO: 722120 - DNA, 75 bp, Homo sapiens
ctgagatggccctgatgcacaaagttccgggacaatgactcattcttcccaggacactggttcttgtggcattca

SEQ ID NO: 722121 - DNA, 89 bp, Homo sapiens
ctttgatggtggccctcttgatccccggcttgctgaagtcaaaggtgaggtggctttgaccccgggttgcccggccagcacgaccgagg

SEQ ID NO: 722122 - DNA, 74 bp, Homo sapiens
aactttttcagtccttcccccaagaccaggcgccagggcgaggtcagagtggtgctgggaacaactgggccaag

SEQ ID NO: 722123 - DNA, 83 bp, Homo sapiens
cctgctcacctaccgcggcggccaggcgggaccccgcggcctggcgctgctcaatggtgagaagccctaccactgcaactggg

SEQ ID NO: 722124 - DNA, 50 bp, Homo sapiens
gccgccgcgggcaggacgcgcgctgcagatatgggacttggccgatccag

SEQ ID NO: 722125 - DNA, 76 bp, Homo sapiens
gcggcggaggatgagcctgcagagcgcgcagtacctccggcctcccagtagcattggatgcaggaaaaaatacatt

SEQ ID NO: 722126 - DNA, 75 bp, Homo sapiens
actgtccatcaaacatcttccaccacagcttagagttcctaaggacggtctgaagagccaagagctatttgatga

SEQ ID NO: 722127 - DNA, 98 bp, Homo sapiens
ttgtaaagatccaaaaataaatgacgctacgcaagaaccagttaactgtacaaactacacagctcatgttggcctttaccagagtttgatccaagcca

SEQ ID NO: 722128 - DNA, 75 bp, Homo sapiens
tgcaaatgcagaggaagaatttttctatgagtgtcagagatggctttggattccccgttctgtgtgctgctgtct

SEQ ID NO: 722129 - DNA, 100 bp, Homo sapiens
aacgtggacagcctcatcacccggctgctggagggggtctctctttttggcatgtcggccctgttactccctgggaactttgagtcttatttggaacttg

SEQ ID NO: 722130 - DNA, 75 bp, Homo sapiens
gctgcaggcacagcccgagaaaccgcagcactacacggttggggtctgctaggtccccggaatgagttgtttgac

SEQ ID NO: 722131 - DNA, 153 bp, Homo sapiens
ctccgccgtgctggatgccgtgatctccagcgccggcctcctcagtgcgaagaagctgcagccgcacctggccaaggaaaccagcctggacaccaagtctgtgtcagaaggccacctcaagaggaacatcgtggtgaagaccgtggagatgcg

SEQ ID NO: 722132 - DNA, 50 bp, Homo sapiens
tgaaaacagaagctgtggctgaaggatttgatgccctggatccctttatt

SEQ ID NO: 722133 - DNA, 90 bp, Homo sapiens
ccgtgggcaatagagtcactgtatttgaccttaaaaaaaggacagaataacgggctcccagattcacaagccccaccaagaggatcaccc

SEQ ID NO: 722134 - DNA, 75 bp, Homo sapiens
agttccgcgcattggaaagaagcgaccgcggcggctgaaccttttgatggaacaaatacagccagagcagtgcac

SEQ ID NO: 722135 - DNA, 83 bp, Homo sapiens
gcctccactactgcaaagacaaggctaaggacttcatgcccgccagcaaagggaacggcaggagcagctgatgggatatcgga

SEQ ID NO: 722136 - DNA, 85 bp, Homo sapiens
aaaaggacacctcttctgctgacatatccagttcaatcacatggtggaaactatatgggtcagagcattcaccaagtaactgttg

SEQ ID NO: 722137 - DNA, 74 bp, Homo sapiens
gaagaggatgatgatgaagagaatcagagatcattgatttcttcctgggggcctctctcaaggatgaggttttg

SEQ ID NO: 722138 - DNA, 100 bp, Homo sapiens
tggctggaagacatggccactccagtcggtgttgagcacggcgagcagtctcaggcctttagtgatgatggttgctgcttttgctcagaggacatccatg

SEQ ID NO: 722139 - DNA, 90 bp, Homo sapiens
gggaaaacgctcataattaacctgccaggtagcaagaaaggatctcaggtgggaaagcagtgccactctccgcttcacagatgccccctg

SEQ ID NO: 722140 - DNA, 100 bp, Homo sapiens
cacctgctgcacccacgaatctgcccacccctcctgtaacccagcctgtttcacttcttggtggatccataaagaacccagccaacccgcagagggaggg

SEQ ID NO: 722141 - DNA, 98 bp, Homo sapiens
gtcagcgccgacggcagccggcacctgacggcgtgaccgacccgagccgtccacaagaatcggaatgtcagttaatgctattcgcaagcagagtacag

SEQ ID NO: 722142 - DNA, 95 bp, Homo sapiens
ttcgtgaaaagatctgctgcaaggaactgatagcttatggttctccattgtgatgaaagcacatggtacagtgaacagagtatctgccaagcccg

SEQ ID NO: 722143 - DNA, 98 bp, Homo sapiens
ccgcttcagtccgaaggaggaagggaaccaacccactttctcggcgccgcggctcttttctaaaagtgtgtgttctactccctcttctgggaatgaag

SEQ ID NO: 722144 - DNA, 100 bp, Homo sapiens
aaggaaatcttaagcaggaagatgggacctctctgaaagtggcagtgaagaccatgaagtcgcctgcctccagcaccctgaagatgctgtgtgatatgtc

SEQ ID NO: 722145 - DNA, 50 bp, Homo sapiens
ccggggtctgactcccttaaactgcggaaacaggaaattataaaagtgac

SEQ ID NO: 722146 - DNA, 90 bp, Homo sapiens
gcgcgagtacagctgcaccgtgcggctgctggacgacagcgagtacacctgcaccatccagttttcggctttgtgagaaaccttaccatc

SEQ ID NO: 722147 - DNA, 90 bp, Homo sapiens
gtggcggcggggaccgtccagcccagcgattctcagtcaggtgaaaggtgtagcagtcactcggcctacacccacagcatcgaccttgtg

SEQ ID NO: 722148 - DNA, 75 bp, Homo sapiens
acccggtaccaagaaggggagtgcccgcggcaggagtggggtttaatctggactgaattggaggaaaggaactgg

SEQ ID NO: 722149 - DNA, 83 bp, Homo sapiens
attatggtggcccacttttcctcctgccaggttgtggcagcactgcctgaaggtatgagaccagattctaatctttatggttt

SEQ ID NO: 722150 - DNA, 82 bp, Homo sapiens
ctgcaggtctctgtcgagcagcggacgccggtctctgttccgcaggatgaaacagtccaactcttacgatatgttcatgaga

SEQ ID NO: 722151 - DNA, 90 bp, Homo sapiens
accctgccatgttgcaagttcttctacagccccagttatgtggacgagctgttaaaccagtcatggctccgatcttcatcttgaagaaga

SEQ ID NO: 722152 - DNA, 75 bp, Homo sapiens
ctacctcaacaagtacatcctggacaagccaagtacatcgtgcaagtggatggtaagatagggctgttccgaggc

SEQ ID NO: 722153 - DNA, 82 bp, Homo sapiens
ggcgacagaacatgatgttgacacgggctgggcgcccccagaagcccgggaacaaacaaatggtggagtcaatgaagaaagt

SEQ ID NO: 722154 - DNA, 75 bp, Homo sapiens
gcaggagctcctgacttgggaccatggtgattcttcagcaggtctgaagacttgcggcgtgaatttggtcgttat

SEQ ID NO: 722155 - DNA, 96 bp, Homo sapiens
ccagctttgcctgtgagaggaacaagcgtccctgatccagaaggtggccatggttgcttgttatccgggcaatggaacgggttatgtacgtcatgt

SEQ ID NO: 722156 - DNA, 100 bp, Homo sapiens
cttggatcccctgctacttcagtgcctggaatgggtcaaaatgcagatcttcgtgaaaacccttaccggcaagaccatcacccttgaggtggagcccagt

SEQ ID NO: 722157 - DNA, 74 bp, Homo sapiens
tgactactggggccagggaaccctggtcaccgtctcctcagattcatgttacatgtaaagctgtcctcatttgt

SEQ ID NO: 722158 - DNA, 75 bp, Homo sapiens
aacaagcgctgcaaatacaatcactctaaaatgtgtgatagggtgtcttttatgaataatcaaaagcagcaaaag

SEQ ID NO: 722159 - DNA, 95 bp, Homo sapiens
gaactgtggacagtgaagagaggcctctcccaaagcacctgcgcaggttgctgcttttgctcagaggacatccatgaccctaatggtctttttgt

SEQ ID NO: 722160 - DNA, 98 bp, Homo sapiens
cggtgggctctagaaggctgaagtggagatgtagaaaaagccatggtgaagtaacacagaaggattattgcctaagtgtaatcttgaacatgggcggt

SEQ ID NO: 722161 - DNA, 88 bp, Homo sapiens
ttggagcctgaggtgcggagtttcgtgagtttttactgactcgaggttggaagctgtgtactgtgggtgttacccactttgtcctaaa

SEQ ID NO: 722162 - DNA, 75 bp, Homo sapiens
gaaagtttcatctgtggatggagtattggtgtttttggggaaaaaaatcacaatctggacgtgagaaaggacatg

SEQ ID NO: 722163 - DNA, 90 bp, Homo sapiens
cgacaatttaccaattcctgtggtgacgtcagaccaataagccaatggacacgtcagtgttatctgaagaaggaggagagccttttcaga

SEQ ID NO: 722164 - DNA, 100 bp, Homo sapiens
tagagattgtgaagaagaatttcgatctccgccctggggtcattgtcaggttggaagtgtatcctcccttcttattttttctagctgttggaggtgttta

SEQ ID NO: 722165 - DNA, 75 bp, Homo sapiens
cacgcaagtgttaaacttctgcaaccccaaggtccaggtggaggccatcgaagggggagccctgcagaagctgct

SEQ ID NO: 722166 - DNA, 100 bp, Homo sapiens
ttcagaagccagaagagaaaacaaaagaccaacccttgagggaagagaattatctctaagggtgtccgcaatgttgccagtgtctgtctgcagattggct

SEQ ID NO: 722167 - DNA, 74 bp, Homo sapiens
ccgaggtctccgcccgcaccatgcggctgggcaggtgaaatgacaatggatgctctgttggctcgattgaaact

SEQ ID NO: 722168 - DNA, 75 bp, Homo sapiens
cttccctcctggttttctgtgagatgcggccagtcctggagagcgaagacctggagaaacagaacgcggctctac

SEQ ID NO: 722169 - DNA, 98 bp, Homo sapiens
ccctttgacctcttcgatgtgcgagactttggaaaggcagcacaacaagattcgcagcgtggaggggagccagctgaaggcctacctttccttagaag

SEQ ID NO: 722170 - DNA, 100 bp, Homo sapiens
caagcctaactcaagccattggcacacaggggtcaccagtcgttggcacaccaagaagctgccccgcaagacccaccgaggcctgcgcaaggtggcctgt

SEQ ID NO: 722171 - DNA, 100 bp, Homo sapiens
gaagagttcaactttcccagaagttgttctaacgctgcctttgctttaaaacagtattacttgcgcagtcccaggaacaaatctgaaaatccaatggtgc

SEQ ID NO: 722172 - DNA, 76 bp, Homo sapiens
cctcttcatattggcgatcctgttgtgtgcacatccagaatgccacgctcgcaggaggggtggccgtgggtaccgc

SEQ ID NO: 722173 - DNA, 90 bp, Homo sapiens
agaagtaggagcagtttacggaagtgtaacgttgaggcccttcttgtgtatctggagaaaatagagactggtgaattttcagctcgtttc

SEQ ID NO: 722174 - DNA, 101 bp, Homo sapiens
gcccaaatatcctcggaagagcgctcccaggagaaacaaggcgacatggagtccaatgggaaatacatcaccaaatctggaacccgtgtggaccaccagac

SEQ ID NO: 722175 - DNA, 75 bp, Homo sapiens
cttctggccgcgggaaggagaggctttttctcctccgtgacagccagagtaatccaaaggcatttgtactcacac

SEQ ID NO: 722176 - DNA, 100 bp, Homo sapiens
aacgccatctcccaccccagagaacgaggaattggctattcatcatggctggagacttcctgaatataccctttcccaggagggaggacctgctcataag

SEQ ID NO: 722177 - DNA, 90 bp, Homo sapiens
gacgctttaaagagagataaagatgccatttatgggtgtctgcctgtatcccagtgttcaggctggctagacggcggaagaagatcctat

SEQ ID NO: 722178 - DNA, 98 bp, Homo sapiens
ataagccactgtgcctggccaaacctgccctgcagtagccgttctcaggaatcccctgcagatgctgttgggggccctgcagcccacccaggaggcac

SEQ ID NO: 722179 - DNA, 105 bp, Homo sapiens
cgcagactgcacctcgcagtctccccaggtccgcccagcagccgcgcttcagccagacaatgcagatcttcgtgaagactctgactggtaagaccatcaccctcg

SEQ ID NO: 722180 - DNA, 100 bp, Homo sapiens
gactccgaagctcggcccaggacccccaggtggtgatctttgtgaagtctgtgcagcggtgcattgccttggcccagctactagtggagcagaacttccc

SEQ ID NO: 722181 - DNA, 83 bp, Homo sapiens
agcaggctctgaaaggcctgtctgtggaattcgcgctgctcgccgacaaggctgcacaacagttttccaagagataacttcac

SEQ ID NO: 722182 - DNA, 100 bp, Homo sapiens
aggagctcaactccaaccacgacggggccgacgagacctcagttggaatcgaagcctcttaaaatggcagatgacttggacttcgagacaggagatgcag

SEQ ID NO: 722183 - DNA, 100 bp, Homo sapiens
gtattgggaattgttgctaatttaaaggagactggatatggagtgaagacacagtctattaatgtactgagtggagttactatactggcaattgctggag

SEQ ID NO: 722184 - DNA, 100 bp, Homo sapiens
tgttcaagactgggcttccaccgagcagatggagaacttaatgttctggatgatattttaactgaagtaccagaacaagatgatgaactgtataatccag

SEQ ID NO: 722185 - DNA, 75 bp, Homo sapiens
caagtgcattgcctttggaaacgagcgataagttcacacggttttgccagtggaagaatgtggagctcaacatcc

SEQ ID NO: 722186 - DNA, 85 bp, Homo sapiens
cgactacaaacggaacttgccgcgtcgaggactgtcggttttcggctttgtgagaaaccttaccatcaaacacgatggccagcaa

SEQ ID NO: 722187 - DNA, 98 bp, Homo sapiens
aaaatttcaggagaaagattacacaggagctgcagtgctgtactctaagaatggtcagtctgtagacgttgaagagacattgccatctgaaccagaaa

SEQ ID NO: 722188 - DNA, 100 bp, Homo sapiens
agcggattaaagctaaagacatagttcctggtgatattgtagaaattgctgtttggaccccaatgaccagaagtctctagaggggatgcagaagatggag

SEQ ID NO: 722189 - DNA, 75 bp, Homo sapiens
cttgatcccaacaatgttatcattgagtcatacagcagatggaacaaaaaaaattacaacaaggaattcctccat

SEQ ID NO: 722190 - DNA, 75 bp, Homo sapiens
gtgttcgccaagatgaagggctacccacactggccggcccgggcttgggcactgtttaaaggaaagttccgagaa

SEQ ID NO: 722191 - DNA, 98 bp, Homo sapiens
ggtagagtggcagcagtgggagtccctgcgcttcggcgaatatgcctttcagtgggatctacctgaataacaaggaagcaggaatgtatcattgcgtg

SEQ ID NO: 722192 - DNA, 100 bp, Homo sapiens
gatgcctacatcaagatacatgcatagatggagagatggctggctacctcatgaatgctgggggagctgatcaccttctattactattggaagaagaccc

SEQ ID NO: 722193 - DNA, 82 bp, Homo sapiens
tgagaaaatacaaggagctggacatcgagcctgagggaggggaaaggcgcagggaagctcttcgtgggcggtcttgactgga

SEQ ID NO: 722194 - DNA, 98 bp, Homo sapiens
cgaggctggggctgggtcagcaaccgaattccagtttcccccattcactggggagaatagaaagaaaacaattgacaaaatcctcaaatgtaaactca

SEQ ID NO: 722195 - DNA, 100 bp, Homo sapiens
aggacggagaggacctgttcaccagcactgtctccaccctagaggtaagaaataagacttgcatttgtgatatcaaaaatcacctgagaaatgaaaagca

SEQ ID NO: 722196 - DNA, 99 bp, Homo sapiens
aatgaccccaacgccaccgagagggcgcctggaatattgttcagattccattctgtggggaaattgactgtgaggactggatcaaaaagaccactgcca

SEQ ID NO: 722197 - DNA, 82 bp, Homo sapiens
gtcagggacaagatggtgccaccggtgcaggtctctccgctcatcaagacaatgcagatcttcgtgaagactctgactggta

SEQ ID NO: 722198 - DNA, 75 bp, Homo sapiens
ccaaaataaaaaaattgcaagagagagactattttcgttattacaaggttctaagctggtctatgtccatcacct

SEQ ID NO: 722199 - DNA, 100 bp, Homo sapiens
tcatgagttcgttgagaaactgcaggatatacagcagcgaggaggggaagagagtgttgctaaagattatgtgcgactgatgaagtatggcgactctctc

SEQ ID NO: 722200 - DNA, 74 bp, Homo sapiens
gggaatagactccatctatccatatgagccaccaaagtccttggcactgtcaaatggttcaacgtcagaaatgg

SEQ ID NO: 722201 - DNA, 74 bp, Homo sapiens
agcaatatctctgggctttcacaggcaccgtataaacttgagttcagacttcctgattactcctgatttctact

SEQ ID NO: 722202 - DNA, 100 bp, Homo sapiens
gtccccagcgcagccaatcggcttccgaagtagatgcctgaggaagtgcaccatggagaggaggaggtggagacttttgcctttcaggcagaaattgccc

SEQ ID NO: 722203 - DNA, 80 bp, Homo sapiens
cgctgccctcagctccgagtccagggcgaggtaatcattaccaaatgaggaggaaaggacgatgtcatcgaggctctgca

SEQ ID NO: 722204 - DNA, 90 bp, Homo sapiens
gtcattttaaactatggacgactccgaggaacattgagcccgcggcgccatggctcacgtcggctcccgcaagcgctcgaggagtcgcag

SEQ ID NO: 722205 - DNA, 98 bp, Homo sapiens
ctttggacgccggtggagacgcaggcgaggtcaaaatgcagatcttcgtgaaaacccttaccggcaagaccatcacccttgaggtggagcccagtgac

SEQ ID NO: 722206 - DNA, 90 bp, Homo sapiens
ccatgccgctcctaagcctgcacagccgcggcggcagcagcagtgagagctgcatcttcctcccgtgaggctggccgagctccacgctga

SEQ ID NO: 722207 - DNA, 80 bp, Homo sapiens
caactggcatcccacagcctcctcttccagaatgcctttgcgcaggtcccgcagcccccggaagccaatagactccctca

SEQ ID NO: 722208 - DNA, 100 bp, Homo sapiens
gctgggaattgcgcgtggctgctgggttctctcttatgattggggaaatcctcattgacgattcaatttgttgaaggccaatttgtggactcctacgatc

SEQ ID NO: 722209 - DNA, 82 bp, Homo sapiens
ggaatccttggaggaggaggaggcgctggaccctctgggcattatgcgctgtgattgggttattatacccctgcattgacag

SEQ ID NO: 722210 - DNA, 87 bp, Homo sapiens
ggcccggtgcctgggttccaggaggacacgctgcagttggccttcatcgacttgagacaacaatggctgccatccggaagaaactgg

SEQ ID NO: 722211 - DNA, 99 bp, Homo sapiens
cctgtttgaaataataacaagctccaggaccttctacgtacaggctgaactccagtgcacccagttagacttggagcggaaactcaagttgaatgaaaa

SEQ ID NO: 722212 - DNA, 80 bp, Homo sapiens
aaaaaggagcttgccttctgagctttgtaccaaagacctgggaaaattccctgtattgaacactgatatacaaggaatga

SEQ ID NO: 722213 - DNA, 100 bp, Homo sapiens
agctgcggccgccgcggcattcggggaatctgcagggcaggtcacagatgtgacattgatgtgtccactgaagccatgtatgctgcaaccagacgagaag

SEQ ID NO: 722214 - DNA, 100 bp, Homo sapiens
gctcttgcttttcctcgctggggtgtacggtgtccctggccagtgtccttccacctgtccacaagcatggggaacatcttcgccaacctcttcaagggcc

SEQ ID NO: 722215 - DNA, 74 bp, Homo sapiens
caaccgggccgtgccccagatgcccaccgggatggagaaggaggaggaatcgggcctgctttcttccccgggcg

SEQ ID NO: 722216 - DNA, 100 bp, Homo sapiens
ccgcccgccatggcccgggactacgaccacctcttcaagctgctcatcatcggcgacagcggtttctgaaggattgtcattcttgcatagcagtgtgaaa

SEQ ID NO: 722217 - DNA, 98 bp, Homo sapiens
cggaaggtccggcgcccagagctaacgggagtcccaggaagaggagttgtacgcatgtcagagaggttgcaggctgttttcaatttgtcagtttgtgg

SEQ ID NO: 722218 - DNA, 100 bp, Homo sapiens
ttgaacccggagaatgtcactgatgtctccttagggatctcttcaaatgagcaggaccaaggctatgagatcaccttcagtttactcaacccagacccca

SEQ ID NO: 722219 - DNA, 75 bp, Homo sapiens
agacaaccacttctggtggttgccactcacctgaggatgctgtgtttgatgtggacaagaagaaagggttgactc

SEQ ID NO: 722220 - DNA, 50 bp, Homo sapiens
cgagttcaaagagaccctcggaacgacagttcgtgtttggttaaagagag

SEQ ID NO: 722221 - DNA, 83 bp, Homo sapiens
gtgaccgagagcgtgaccgagagcgcgaatatcgtcatcgttagaagatatgtgtcacaaagatgtctacacggaactgccag

SEQ ID NO: 722222 - DNA, 75 bp, Homo sapiens
ctggaattttgccgatttcatgactaaccagtagcgagtgttctgtgctgagcgagaatctggagagaaggcggc

SEQ ID NO: 722223 - DNA, 80 bp, Homo sapiens
gcctccattcccgggaggggggagcggcgttggaggccaccgtttccagatgcaacaaggagacgcgcctttgccctggt

SEQ ID NO: 722224 - DNA, 75 bp, Homo sapiens
cggccaaccacgacctgacggacaccacccgggcggtgaaaatgcctcgtgtaaaagcagctcaagctggaagac

SEQ ID NO: 722225 - DNA, 90 bp, Homo sapiens
cttccataaaagtaccacaattaaaaatggagatatgatttctgctgttcaaaaaagtccctaaagacagggtctcgctctgttgtccag

SEQ ID NO: 722226 - DNA, 101 bp, Homo sapiens
gagaacccgagccctttccacagccccttccggttcgagatcagcttcgagtgcagtgaagccctggcggacgggttatgtaccgaaggactctaccgtgt

SEQ ID NO: 722227 - DNA, 100 bp, Homo sapiens
cgccgcgtccttggctggcgtgttgtcggggccaaagtggtaacgaacgcccgcagcccgggggctcgatgctatggattcgtcaccatgtcgacatctg

SEQ ID NO: 722228 - DNA, 96 bp, Homo sapiens
ctccggactcagccaagttccccaacggctccccgtcgtcctggtgctgcagcgtctgcgggccaggcatcgacatccgcaacgactatcagcagc

SEQ ID NO: 722229 - DNA, 100 bp, Homo sapiens
acccaagaaccacaacgagacaaacctgccaacgtccagccttattacctctatggatccaagacttaattcagtgcacaaatgagatgaatgtgaacat

SEQ ID NO: 722230 - DNA, 90 bp, Homo sapiens
cctgggaggagttcagccgcgctgccgagaagctttacctcgctgaccctatgaagatcacttttctccagagaatgcaaatgacacggc

SEQ ID NO: 722231 - DNA, 82 bp, Homo sapiens
cggagccatgtcagaaggagtggacttgattgatatatatgctgacgaggagttcaaccagataacaatgaagatggtgcca

SEQ ID NO: 722232 - DNA, 51 bp, Homo sapiens
agaaagaatgtacagacattgagagcaggaatgtctgatcacagatacggg

SEQ ID NO: 722233 - DNA, 83 bp, Homo sapiens
gcaagagtaacagcagcgccgtcccgtccgacagccaggcccgggagaacccagggccttgctgccgccatgactgaggaatc

SEQ ID NO: 722234 - DNA, 76 bp, Homo sapiens
tgcctgatgatcacgcagctggctggcttcagtggaccagcctgtggaaatcgaatcaagggtttctggagtggag

SEQ ID NO: 722235 - DNA, 100 bp, Homo sapiens
agtccagagagggaagtgtaaagctacagattgctcgctgtaagcagctcatctgtgaccccagctacgtaaaagatcgggtagaaaaagtgggccaggt

SEQ ID NO: 722236 - DNA, 75 bp, Homo sapiens
caggagattgtggttatcaccaccaaaggagaagcaatctgcatgggtagtgtgccagtatttgaaaaatcccaa

SEQ ID NO: 722237 - DNA, 100 bp, Homo sapiens
gacactttgttattggagaaacatgcagattatatcgcatcctatggctcaaagaaagatgattatgtgatttgaagatattaaagctagaaattggaac

SEQ ID NO: 722238 - DNA, 75 bp, Homo sapiens
gagatattctactccatctcattcattgtacaggacagtcattttgtttactcattcagccctgttgcaggtccc

SEQ ID NO: 722239 - DNA, 90 bp, Homo sapiens
ctcccatttggcccgtcctaccctaaagtcaccacctgctgcttttctggagcgcttaccaggagcctgcagcaccccaatgtcctccag

SEQ ID NO: 722240 - DNA, 100 bp, Homo sapiens
tttggagtatcgttctatttctctagctattgccttattttttctcatggatgttcttcttcgagtatttgtagaaggactccacaggcaaatactggac

SEQ ID NO: 722241 - DNA, 50 bp, Homo sapiens
ctggcaagtctcaaagtcgccacaggtaaaataccatgaagattttgaaa

SEQ ID NO: 722242 - DNA, 100 bp, Homo sapiens
ggccactgcgccgtggtggacggaaacttcctctacgtgtgggggggctacgtgaacctggagctggttgaaaaaggcttcagtaacttgaagaaacaaa

SEQ ID NO: 722243 - DNA, 90 bp, Homo sapiens
gcaaccccagatccatttacactttacagatgaatctggttatagatggacaagagacgatcattctgcaagcaggcaacctgaatacag

SEQ ID NO: 722244 - DNA, 90 bp, Homo sapiens
gtcactgaaaaatcttcaattggactatgttgacctctatcttattcattttccagtgtctgtaaagactaagaaaaatggctttgtcag

SEQ ID NO: 722245 - DNA, 100 bp, Homo sapiens
cctgcacggacggtgttggttgggacacttggagaccagaaagcttctttgacaaagtgaagaagaacagacaaaatggcatgcacacattatgtttact

SEQ ID NO: 722246 - DNA, 100 bp, Homo sapiens
gcccactgtggatcttttaggacttgttaatgttggagaagattgtccagtgtttgatggactctttgagttttgtcagctctcaactggcggttcagtt

SEQ ID NO: 722247 - DNA, 82 bp, Homo sapiens
tacaaacttggattttttccagtctgatccttttgttggcaaacattactactggatggaaatccattccgagttcctcgag

SEQ ID NO: 722248 - DNA, 98 bp, Homo sapiens
aagatggatggatgtgggttacaaatttaagaacagatgaacaaggccttattgttgaagacctagtagaagaggtgaagatgcaagtggaccaggag

SEQ ID NO: 722249 - DNA, 75 bp, Homo sapiens
tcccaagcagttgttgcacaggtaacagaactcaagtaacttcatgaatactacaaacttccagtctcttcggcc

SEQ ID NO: 722250 - DNA, 75 bp, Homo sapiens
ggaacccaggccccgccgaggcggccaggttaatttggagtggcccctggagtcagtttcctacaccatccgagg

SEQ ID NO: 722251 - DNA, 75 bp, Homo sapiens
ctcggaggcagcaaaggtggctgctaatgcaccaaaggaagcagaatctggtaatataagtcaaaagtctgatga

SEQ ID NO: 722252 - DNA, 100 bp, Homo sapiens
caggaccctcagggagagcgggcagccttccaggtggacaggcaagaaactatattcagtctttgactcagatgccgaagatgaactttgcgaatgtatt

SEQ ID NO: 722253 - DNA, 73 bp, Homo sapiens
accatggaaatatttgacattgagctgggaatggaggaagaagatgtgattgaagtttatcaggaacaaacgg

SEQ ID NO: 722254 - DNA, 82 bp, Homo sapiens
cagtatctcaggcggcaccctgtccccgaggaggggaccatgacacagattttttatcaagcagaaatgcatcgaacaacga

SEQ ID NO: 722255 - DNA, 75 bp, Homo sapiens
gcggaggatgagcctgcagagcgcgcagtacctccgatcagtgtgcgtgtgaccaccatggatgcagagctggag

SEQ ID NO: 722256 - DNA, 50 bp, Homo sapiens
gcagtgccttgtaactcacaatggtgttgcattgatgaatcatagctgtt

SEQ ID NO: 722257 - DNA, 100 bp, Homo sapiens
acagcggggcggctggcgccgggggccggggagcgccaggctgaggccgcggaaggagcagggcacatacgccctgtccctcatctatgggaagacggtg

SEQ ID NO: 722258 - DNA, 100 bp, Homo sapiens
acctctactcccatgaattcacctttgattccagtgtgaactgtcaatcataagtgccggtggtggtgtgcacattgagccccggtatagacagttcccc

SEQ ID NO: 722259 - DNA, 100 bp, Homo sapiens
aaacggggcaggatctgtgtcaaaagagcttctctccagagtagaaaggcctctaagaaatatgtctccaaagaacttgccaaagagattcgtgtcaaag

SEQ ID NO: 722260 - DNA, 74 bp, Homo sapiens
tggctggacttgacctggaaagctgactgcctgcatccacgggtctgcggcgatgctctaccccatgtactggc

SEQ ID NO: 722261 - DNA, 75 bp, Homo sapiens
gaagaagctgaggatgaagaagatgggtacaggcatccttcacctgctattgttgcaagaacagtcagaatttta

SEQ ID NO: 722262 - DNA, 100 bp, Homo sapiens
gccaagtccgacagctggaagaacaattaagaataatggatcagaccttgaaagcattaatggctgcagaggataagaaactggcgatggaatatgagag

SEQ ID NO: 722263 - DNA, 90 bp, Homo sapiens
atgatgatgacttactgaaggcccagatgatggttagcagtttttggcaatcacgtattttcaaagtggtaataagctgcagtcaacagg

SEQ ID NO: 722264 - DNA, 75 bp, Homo sapiens
aatatattgttcgatacaaaacaccagaagaggatgtcaaagaggcagagatcctacaagaatccaggatgatga

SEQ ID NO: 722265 - DNA, 87 bp, Homo sapiens
agccatgactcctccctacccgcagtttgagagagaaaaggaacagttccgtaagctctttattggtggcttaagctttgaaaccac

SEQ ID NO: 722266 - DNA, 100 bp, Homo sapiens
tcagagcctgaaaaaaatagtcaatagtgctcagactggtagcttcaaacagctcacagttaagaatccgaatcggaaggtgaggaaaattaaatggctc

SEQ ID NO: 722267 - DNA, 82 bp, Homo sapiens
cgacggtccctcagcccagccaccatgagcaccaagcagatcacttgcaggttgcgaggggcggtgttgaagaatgtgtggg

SEQ ID NO: 722268 - DNA, 74 bp, Homo sapiens
acagctaagacgccaggactccctggaagcctagaaatggaaggatgccaattctgcgcttctcagtaactacg

SEQ ID NO: 722269 - DNA, 100 bp, Homo sapiens
actgactggggttctgagactccctgtcccggaccgcaggaattgaatgatctggcacgggaccctccagcacagtgttcagcaggtcctgttggagatg

SEQ ID NO: 722270 - DNA, 98 bp, Homo sapiens
aggattccaagtaactcttatttgggtgtgactttgacagctgctattgggggtgctgacatgcccgtcgttatcactgtgctgaacagctactcagg

SEQ ID NO: 722271 - DNA, 78 bp, Homo sapiens
gcagctcttacagaaatgtgtcttgttgcatttggtaatttagcagaacttgaagagtcaagtaccattggccaggat

SEQ ID NO: 722272 - DNA, 100 bp, Homo sapiens
aggagggctctcctgtctgccaccatcctgggttgacaattctacacaaggaggccaagaagcttgagagaagaaaaatttcagaaaaattgtctcaatt

SEQ ID NO: 722273 - DNA, 82 bp, Homo sapiens
tttcttcgccgtgctggccgcggcccgcctcagcatctggtacagccgagtcatcatcagatttgaaatatttaaagtggat

SEQ ID NO: 722274 - DNA, 50 bp, Homo sapiens
gaccagctcgagtctcaagtggacaatgaattggcagagggggtcgattt

SEQ ID NO: 722275 - DNA, 100 bp, Homo sapiens
ccgaggcctagatcgatcattagaagagttccagttacagctatatcagagaatgagttaatctcctcagaaatcactaaatactactctgaggggctta

SEQ ID NO: 722276 - DNA, 74 bp, Homo sapiens
atgctgtggttggatatttagaggacattatcatgggacactgcccatctctaagataagaacctggaaagggg

SEQ ID NO: 722277 - DNA, 100 bp, Homo sapiens
ccattttcccaccgttaccagagattcaccaactcagcaggacctcctcccccaggctttaagtctgagttcacaggtgctggagaatctggtaaaagca

SEQ ID NO: 722278 - DNA, 116 bp, Homo sapiens
tgaggcgtctaccttcccaggtagggctgtacaaggagttctccagcatctccagggcagaaagcttaggtgctggagaatctggtaaaagcaccattgtgaagcagatgaggatc

SEQ ID NO: 722279 - DNA, 100 bp, Homo sapiens
aatctcttgaaaaatatgtggtattgtgtgagacctctggaagcaactactcctgattaacctcggtgaagttaaggaaaacttcgtggctgaagatgtg

SEQ ID NO: 722280 - DNA, 98 bp, Homo sapiens
tggaaccggcaccatgtggagcgggtggagatcatcatgaaagagaccgtggatgctgaagctacagcctccgcttggcgtcccgatgctctccacca

SEQ ID NO: 722281 - DNA, 80 bp, Homo sapiens
cgcaccgcggcttaaatgatgtattttgtgatcgcagcgatgaaaggtgaatgaaaactttgccattgatttgatagcag

SEQ ID NO: 722282 - DNA, 50 bp, Homo sapiens
ccccagcgcccagcacctggtgcaagcagacaccaactctacaacattac

SEQ ID NO: 722283 - DNA, 99 bp, Homo sapiens
tcccacacctccggaccgagggacgcgggctaggcagctggaagagaaagaccgagtgctaaagaagcaggatgcattctacaaagaacagctggctag

SEQ ID NO: 722284 - DNA, 100 bp, Homo sapiens
ccgccctcttgcttccgatttggaattcggaattagccttgcagggctcgtgcaatccgcttcagacaggatggtaacgaagccgtcggaggattcttct

SEQ ID NO: 722285 - DNA, 90 bp, Homo sapiens
cttggagactggcgcggcgttcgtgtccgaggttgtggcagcactgcctgaaggtatgagaccagattctaatctttatggttttccatg

SEQ ID NO: 722286 - DNA, 95 bp, Homo sapiens
catttcaactctagaggaaaaaattgaaagagaaaaggaattagcagaagacattatgtcagattcatgtgctcacagctccccaatcaggtcct

SEQ ID NO: 722287 - DNA, 82 bp, Homo sapiens
agccaagatggtgaagcagatcgagagcaagagagcgcctgctcgctgtgcccccgggttatgacgacccccaataaaggaa

SEQ ID NO: 722288 - DNA, 51 bp, Homo sapiens
gcccctacacgctgatcgattcttaggagagaagtttgctgaggaatgcct

SEQ ID NO: 722289 - DNA, 119 bp, Homo sapiens
ggaaccatgtctccatccccgaccgccctcttctgtcttgggatcgcttacacctgagacgaactacagaacagcacgtaccagaggtggaagtccaagtcaaacgcagaaggactgcc

SEQ ID NO: 722290 - DNA, 96 bp, Homo sapiens
acctcggggccggcctcgcaaggcgcttcccctttccagagagccagaaagaaatgaggacggggacttggttgccttttccagtgacgaggaatt

SEQ ID NO: 722291 - DNA, 74 bp, Homo sapiens
ggcgcctaaagtctgagagagggaagtcgcctctgtgctcagtccttagccaggatggaggctgttgtgaactt

SEQ ID NO: 722292 - DNA, 75 bp, Homo sapiens
cttcacgcagtcaagaacgacttccaggaatttagataatgggctgtgtgcaatgtaaggataaagaagcaacaa

SEQ ID NO: 722293 - DNA, 75 bp, Homo sapiens
ctcaggcttccatgcagcctgccttaccgtttttcggaggctggtacttctacattcaggcttataaagcactga

SEQ ID NO: 722294 - DNA, 100 bp, Homo sapiens
gaagaagtagaagcatcgaaagcgttggagaggtgttaccggaacggcggcgacaagggtgttcccgaactagagtgggtcccacacttacagggaaagc

SEQ ID NO: 722295 - DNA, 97 bp, Homo sapiens
atcaatatataataaaacgctttgatggaaagcatgcagcagattggaataaatatgatgaccgattgatgaaagcagcagaaaggggggatgtaga

SEQ ID NO: 722296 - DNA, 98 bp, Homo sapiens
tggaaacttgtctctagtgagaactttgacgattacatgaaagctctggattcatgatgttgctatcaaaagttgagaaattgtcagaagaaatcatg

SEQ ID NO: 722297 - DNA, 100 bp, Homo sapiens
ggacgtggggtccaccggtacagttagaaatcctgtgttctgtcaacattctccagtttatattcattgccttaagactggacaagatcatccactggcc

SEQ ID NO: 722298 - DNA, 88 bp, Homo sapiens
aacccccaatgctgaccaaggaggagcctgttccagaactgctggaagctgaggtaaatcgggtccttcctcgctccaacatggtcta

SEQ ID NO: 722299 - DNA, 100 bp, Homo sapiens
gtgaggcctccccacccacgcggaactgatgaccagtgtcccagtgaaggaacgagtgaaggtgtctcagaactggagactggggcgctgccgagagggg

SEQ ID NO: 722300 - DNA, 100 bp, Homo sapiens
cctccaagaccgtgctggtctttctcaacctcatcttctggctcttccaccaaagccacctaagccaatgacttcagcagttccaaatggaatgaaggac

SEQ ID NO: 722301 - DNA, 102 bp, Homo sapiens
ctccaagaccgtgctggtctttctcaacctcatcttctgggacctcagcagccatgtcgaagccccatagtgaagccgggactgccttcattcagacccagc

SEQ ID NO: 722302 - DNA, 90 bp, Homo sapiens
ggaaatgagagaaatgcttacacacagaaatggttgcttataatggtgatcctgaaggtgccctaatccaatttgcaacatacgaagaag

SEQ ID NO: 722303 - DNA, 82 bp, Homo sapiens
cttagctgtgctcgcgctactctctctttctggcctggaggctatccagcgagtgcgccggtctcggggaaatgcccggttc

SEQ ID NO: 722304 - DNA, 100 bp, Homo sapiens
tgaagaatcagattctggtgctactaagagtccactccacttagcttgaatggtagtgtctagaaagggtatgtcccttcaagagagaggtgccaatgtc

SEQ ID NO: 722305 - DNA, 82 bp, Homo sapiens
ctctgaggctagcagtgcgccagcagtcccaggggcagccactggcctcccagcccccggtcgtcgacccctacgacatgcc

SEQ ID NO: 722306 - DNA, 75 bp, Homo sapiens
gcagtatcaacggagtctccggggtggacttagtagttttaagcagaaccatgaaaacctctgtgacaactccct

SEQ ID NO: 722307 - DNA, 90 bp, Homo sapiens
gaaggggaggggttacagactgtggtgcctacccccatcactgcttccctcagccataacaggatgcgtatgggacagcttttaaagtgt

SEQ ID NO: 722308 - DNA, 96 bp, Homo sapiens
tagccaccacgcctacctgcatgaccagttctggagctactggaataggggatggtttagacaacagtgtagcttcacctggtacaggtgacgatg

SEQ ID NO: 722309 - DNA, 50 bp, Homo sapiens
catgaactagtgacctggaaaggggtgagcccctccagactccgaatagg

SEQ ID NO: 722310 - DNA, 75 bp, Homo sapiens
ctgctgcacgagtcattgtttggatctgttgctgatgatcagaaacttatgatgacacagagtctgggatctaat

SEQ ID NO: 722311 - DNA, 83 bp, Homo sapiens
agtgtatcttcatacatcaccacacctgaaagcagattctcgcttacaaggatgacttcatgtcagaaagggccgatcgggaa

SEQ ID NO: 722312 - DNA, 100 bp, Homo sapiens
gcagtgttcccattattcgattctttggcagttggtgaaaattactgatggctctccttccaaactgccactgcagagccccgccatggaagacacgccg

SEQ ID NO: 722313 - DNA, 75 bp, Homo sapiens
tggaggatttaatacacagcagcagcagcaaactagagaacttgcgcctgtcaggggctggatccagaaacctgt

SEQ ID NO: 722314 - DNA, 75 bp, Homo sapiens
gcccgccgctcgcatgagcacctcatacggctgcttctggagaagtgactgtgaagtgctgaccacactcacccc

SEQ ID NO: 722315 - DNA, 106 bp, Homo sapiens
gcccccgccgcagggatggaccgccgaggcggcggccggggcggcggaggcggaggcggccggcccgggtgagagcacagagccgggataagcagatagaagaaag

SEQ ID NO: 722316 - DNA, 80 bp, Homo sapiens
acacagacggggtggagcccatggaatcggtcctggaggacaggagaactatgccatttttgggtcaggactggagatct

SEQ ID NO: 722317 - DNA, 125 bp, Homo sapiens
gccaaccgcaaccattgacgccatgtcgggttattcgagtgaccgagaccgcggccgggaccgaggtgagggagactctgatgtggactcggagctggaggaccgtgttgacggggtcaagtcct

SEQ ID NO: 722318 - DNA, 75 bp, Homo sapiens
aaaagaatctgttcgtggccaagatattttcattatacagacaatacccaggactggacctacagagacatctgg

SEQ ID NO: 722319 - DNA, 75 bp, Homo sapiens
ggggcaacccagacgtgcaacaaagtgcgatgatcatggaagggaagtggttgctgtgtatgttactggtgcttg

SEQ ID NO: 722320 - DNA, 100 bp, Homo sapiens
cacctccctgccccccggagatacctccaaagccggtacgcctgttcccagagttcggtgaagacacacctgcaggcacaggcagcctcagaaattgctg

SEQ ID NO: 722321 - DNA, 75 bp, Homo sapiens
gtcaactttactgagaattttccacctcctgacacaacaccactcaaaccacctctgtgcagaaaagcaaccacc

SEQ ID NO: 722322 - DNA, 100 bp, Homo sapiens
cttcagagcgtcacggcgtacgccctcatggggaaaatctccccggtgactttcaggtgaatctggattgggaaagtcgacattaatcaactcattattc

SEQ ID NO: 722323 - DNA, 101 bp, Homo sapiens
ccagtttcctacaagcgaacaggattctttggaaactgaatttagatgtcagccaggccgatttcagtgtgggactggactctgtgctctaccagctttca

SEQ ID NO: 722324 - DNA, 74 bp, Homo sapiens
cccgctacgagctggctttaatcctgaaagccatgcagcggggacatgagagatggctttagaagaaaaagttt

SEQ ID NO: 722325 - DNA, 75 bp, Homo sapiens
aaaacatgaccgctgagcccatgagaggaaatatcattctgcaaaagaagcttatgaacaacttttgcagacaga

SEQ ID NO: 722326 - DNA, 75 bp, Homo sapiens
agaatgtaaagacttgaacatatttggatctaggcactccacagaaggatgttattatcaagtcagatgcaccgg

SEQ ID NO: 722327 - DNA, 90 bp, Homo sapiens
gatttaacgaatggggttgtgatggcccaggttcttcaaaagatgcacagccatcatcacagaagagcatgcagccatgtggactgacgg

SEQ ID NO: 722328 - DNA, 74 bp, Homo sapiens
agaaagtcgaagtccagccgagatgctaagagcaaggccaagaggaagcttgcacgagccaccgttcgtgatcc

SEQ ID NO: 722329 - DNA, 98 bp, Homo sapiens
cacgccgggttctttacctccgagccaggccgccgcaaagcaggaaccctaaggactctgcaatatgaataattccctagagaacaccatctcctttg

SEQ ID NO: 722330 - DNA, 100 bp, Homo sapiens
gttggaaatggtttaaacacattatcaggtgctggagaatctggtaaaagcaccattgtgaagcagatgaggatcctgcatgttaatgggtttaatggag

SEQ ID NO: 722331 - DNA, 75 bp, Homo sapiens
tgcgggtggtcaccgagaagtccccgaccgactggccaccagcttgggctccccacggagggcagcaagtgggac

SEQ ID NO: 722332 - DNA, 85 bp, Homo sapiens
acctccccgcgttccatgcgcacagggacagggacagcccacctgaggatattgaccataaggactcatatctcattacaagaag

SEQ ID NO: 722333 - DNA, 98 bp, Homo sapiens
cttctcattcccctgcgcctggggctcacggacatcaacgaggcctacgtggagacgctgaagactccacgggtattcaatacagggggtgcccctcg

SEQ ID NO: 722334 - DNA, 50 bp, Homo sapiens
ttgacagtcacaattttgtaataaggtttctgggtgtctctggggagccc

SEQ ID NO: 722335 - DNA, 75 bp, Homo sapiens
ctgaggctcacagaagatagccccagtccacaagaatcggaatgtcagttaatgctattcgcaagcagagtacag

SEQ ID NO: 722336 - DNA, 80 bp, Homo sapiens
ctcctctgctgactcggctggcccagcacctgaactcctggggggaccgtcagtcttcctcttccccccaaaacccaagg

SEQ ID NO: 722337 - DNA, 101 bp, Homo sapiens
aaaaaggaaaaacatcttgatctggagaaaaactggatgttggtagaaaaagcaagagtttgttatatagcaaggctgacccgcggctgattgagtccctc

SEQ ID NO: 722338 - DNA, 90 bp, Homo sapiens
cagcagatggcggatgccctgcagtacctgcagaaggtctctggagacatcttcagcagatagctgatcagcttccttgggttttgctga

SEQ ID NO: 722339 - DNA, 75 bp, Homo sapiens
gacatcaccggagtcaagaccgtgctcatctcccgactcaagcaggccgaggtctggtacgactggagtaccggc

SEQ ID NO: 722340 - DNA, 100 bp, Homo sapiens
ggaaaaagtggttctggaaaagcggggaaagatccaaaatacggagctggcatatacttcaccaagaacctcaaaaacctggcagagaaggccaagaaaa

SEQ ID NO: 722341 - DNA, 101 bp, Homo sapiens
ggtcctgggcatggggagcctgacgttttgaaggatgagcttcaactctatggagactttctgctgacccctctgtcacccactgccagtcagggcagtcc

SEQ ID NO: 722342 - DNA, 96 bp, Homo sapiens
caacagctacagccaattttgctaactttgcacatttcaacagtcatgcaggttattcttggacagtataattggctttcctatgaagatgtcttt

SEQ ID NO: 722343 - DNA, 49 bp, Homo sapiens
gcctccccagccatgtggaactgtggcacaagaatggctcaactctcca

SEQ ID NO: 722344 - DNA, 75 bp, Homo sapiens
ggaagcagccgatccagcctgcggagcctgtggggcaggttgtttttcaccattcagaacattgcctgaagcagg

SEQ ID NO: 722345 - DNA, 100 bp, Homo sapiens
gggtagattgggagcggaggtttgaccacatgcagcagcattcaggaattgctgacgcaggtgtgtggggatgtactctccacctgcgagcaccgcctct

SEQ ID NO: 722346 - DNA, 136 bp, Homo sapiens
cacagacagaacctgagccaaagcacattcccacagagaaagtcaaggctgtggataccacgactggtgaattttcagctcgtttccttttgaagctgcccgtagatttcagcaatatccccacataccttctcaa

SEQ ID NO: 722347 - DNA, 80 bp, Homo sapiens
gttaggaggcacagggcgtcggacctgcacgagctgtctgaggccaagaagatgaccacctttgagtatctcattaataa

SEQ ID NO: 722348 - DNA, 80 bp, Homo sapiens
agttattggagtggtttaatgacccgagcctcagggataaggaggaagaacgtgcaaaacgtgaggagctagagcgaata

SEQ ID NO: 722349 - DNA, 99 bp, Homo sapiens
cagacccctgtgtcatcctcaagatgcagtctcatgggcagtggtttgaggagattatttggtagcaattgaagagaaaaacaaagctacatttctacg

SEQ ID NO: 722350 - DNA, 100 bp, Homo sapiens
cctcggccccggagcccctcggcggcgccaccatgtactcgggagccggccccggagtatgctgctgctgttccgctttgcgtcctcgctacaaacgcct

SEQ ID NO: 722351 - DNA, 75 bp, Homo sapiens
cgagcggccgcgagcagagccgcccagccctgccagctgcgccgggacggtcaccttccgcaaccctgtcattga

SEQ ID NO: 722352 - DNA, 100 bp, Homo sapiens
tcattatctccatcccattgacagaaagtcccctccttctttacagatgctgagaggcgatctgtgttagatgctgcacagattgttggcctaaactgtt

SEQ ID NO: 722353 - DNA, 75 bp, Homo sapiens
caggcgaagctggccgagcaggctgagcgatacgacgacttcgacccccaccacttctggcagtggagcagcttc

SEQ ID NO: 722354 - DNA, 83 bp, Homo sapiens
tccgcagctgctcctcttttcccctggaaacctctaggttccgagtctgaggaagacataaccttgtgcctgcctgcccacct

SEQ ID NO: 722355 - DNA, 75 bp, Homo sapiens
cgcggatacacattctagatatgatcttctcttagaaatctacagaagtataggggagccagatagtttgtatgg

SEQ ID NO: 722356 - DNA, 51 bp, Homo sapiens
agaaacatctcaccaatttcaaatctggttccctctcccagcctgtgctga

SEQ ID NO: 722357 - DNA, 90 bp, Homo sapiens
taaaacgggtcagttggcagccatcaaagttatggatgtcactgagatatccttggaacagaagatcttattgtggaagtgacttccaat

SEQ ID NO: 722358 - DNA, 75 bp, Homo sapiens
ggcctgcagtcggcggctacacctggactggcgtcgcgttcctgcgcagggatgccatggacaatattaccaggc

SEQ ID NO: 722359 - DNA, 100 bp, Homo sapiens
cctggtcaaaaaggggatcaaggagccactgagatcatagactacaacggcaacctccacgaagccttacaggtatctgaacttaggactggagctgcag

SEQ ID NO: 722360 - DNA, 105 bp, Homo sapiens
gccaagaacgtccagaagcgactcaaccgcgcgcaggaaaagtttttggcattgggcacacattatggcaaggtttatttacttgatgtccaggggaacatcact

SEQ ID NO: 722361 - DNA, 83 bp, Homo sapiens
cttagccctctacttttcaagacaccaagtgagaggccaaccagcatcaagatggtgctcatgtggaccagtggtgacgcctt

SEQ ID NO: 722362 - DNA, 100 bp, Homo sapiens
ctgtgggcgctgctggcgctctggctgtgctgcgcgacccccgcgcatgtgctctggtgctactgattgctcaagagaaggaaagaaacatatttgacca

SEQ ID NO: 722363 - DNA, 98 bp, Homo sapiens
atttttcagaagttgaattatatgcttttggcaaaacgtcttcaggaggagaaggagaaagaacccgaaaacagtggccaaatgtcaggtaactccca

SEQ ID NO: 722364 - DNA, 101 bp, Homo sapiens
aaagtcttatttgtccgagtcttgtaattcctccgtggggcgaaagtacccatgggctggacttagatcagatcaattagccctaccattgaccatgccct

SEQ ID NO: 722365 - DNA, 73 bp, Homo sapiens
gctggaacacatccggcccaagctggaaagggctacccctgcaaaacatgtaagatagtgctgaactccatag

SEQ ID NO: 722366 - DNA, 100 bp, Homo sapiens
ccatagaggagagttttcagaggtttgacgcaatcctgaaggcagcgcagtcagccaatatttctgtgcggggtgatgatgatgatgattttgatgatga

SEQ ID NO: 722367 - DNA, 75 bp, Homo sapiens
aagttgtttggctaaattcttcaggttgtgaactaaaggccgacaaagattatcactttaaggtggataatgatg

SEQ ID NO: 722368 - DNA, 51 bp, Homo sapiens
ggcagatgctgatgggcaaactaggatggctgcagctcctccaagttactg

SEQ ID NO: 722369 - DNA, 98 bp, Homo sapiens
acaagttcctgatgatgaacagtttgtcccagattttcagtctgataaccatctgactgcagccatgagcagcaatgagtgcttcaagtgtggacgat

SEQ ID NO: 722370 - DNA, 82 bp, Homo sapiens
gaagcgggtctctgccagttccccaagtgagccctattcccagaggcaggtggtgctgaccctgtaacccaaaggaggaaac

SEQ ID NO: 722371 - DNA, 82 bp, Homo sapiens
tttctgtcagtcaccatgtgtctttcaggaactgtggctgcaccatctgtcttcatcttcccgccatctgatgagcagttga

SEQ ID NO: 722372 - DNA, 101 bp, Homo sapiens
ccgggctccaaggccgtcgccgaccgctacgctgtctactggaacagcagcaaccccagatttgaaaaagggcgcatctatacgttcattggagaagtcgt

SEQ ID NO: 722373 - DNA, 90 bp, Homo sapiens
caaggaacaaaatgtttgtaaattctccttttaccaagtgaacagcagagaatttcaaaggaccttgctaatatctgtaagacggcagct

SEQ ID NO: 722374 - DNA, 100 bp, Homo sapiens
ctgtgggctacaagtaggatggcagatctgatgcaggagacctttctgcatcatgccacggtgctggagaatctggtaaaagcaccattgtgaagcagat

SEQ ID NO: 722375 - DNA, 80 bp, Homo sapiens
atttggagtgtgcgtgcgcgccgagcgatcaagaaggggaaccgggaatgtgagcggatcctgcacgacgtggagctgct

SEQ ID NO: 722376 - DNA, 100 bp, Homo sapiens
ggcggatctggaggagcagttgtctgatgaagagaagattattggagaccttttacaattccaaggatctcacaagcatgaatttgactcccgatggaaa

SEQ ID NO: 722377 - DNA, 100 bp, Homo sapiens
caggactctgatgggggtagtgaggaagtggtcctaactcctgcagagctcattgaaagattggagcagacatgtcatgctgcccaaggacatagccaag

SEQ ID NO: 722378 - DNA, 82 bp, Homo sapiens
gaccagctgccctcgcccagccagctgcgggagaagatcatcatcaagacaatgcagatcttcgtgaagactctgactggta

SEQ ID NO: 722379 - DNA, 75 bp, Homo sapiens
ggagacgctccgtgcctgcgaggagtatctgcggcagcatgacaagtggtttgagtccagccaatgacactggag

SEQ ID NO: 722380 - DNA, 101 bp, Homo sapiens
agatgatacctttgatccagaacttgcagcaacaatagggccagctctcaatgttgcaagaaaaaatagaccatttggagcgtttgctagctgagaataat

SEQ ID NO: 722381 - DNA, 100 bp, Homo sapiens
cacaaccgtctccagccttggtctgagtggactgtcctgcaggcacaacgtgtttgattgctctgctatcagataaagacctcactgtggccaacgtggg

SEQ ID NO: 722382 - DNA, 80 bp, Homo sapiens
ataggcggaccatgataatttccccagagcgtcttgatccttttgcagatgcctttggaggtgagaagtggaaaacaaat

SEQ ID NO: 722383 - DNA, 83 bp, Homo sapiens
cccgcccgaccccgtcccgaccctggccgccccgagcggagcctggagacaggccgacggtcgcaaggtcctacggtcaagca

SEQ ID NO: 722384 - DNA, 98 bp, Homo sapiens
ccacaggtgctaaagagagcagtaccctgatggagtcccttgcagggtgttttgaatgctgtatcaaatgcctggggggcattccctatgcctctctg

SEQ ID NO: 722385 - DNA, 100 bp, Homo sapiens
gtcaagtttcggagtcagaagattctattacaaagcagattgaaagcctagagactgaaatggaattcaggtgtgggcaataatagtgaaggtggaagag

SEQ ID NO: 722386 - DNA, 82 bp, Homo sapiens
ccgccaaagaccccgtccggtagtgtactaatggtcacttgatgtgcgctggctgttttatccacctactagcagatgcccg

SEQ ID NO: 722387 - DNA, 98 bp, Homo sapiens
aaagagaaacctcaagatgtggatttaccttatcccctcaacaacttttcagtggcaagcttttgatattatgagagtgacacatggcagagaacaca

SEQ ID NO: 722388 - DNA, 100 bp, Homo sapiens
tttgcactacccagcaccagctgaccatgcacattcgccaggaggaaacaccaattggaagcctccgctcaactgtaagatttataactacctgaacagg

SEQ ID NO: 722389 - DNA, 97 bp, Homo sapiens
agtatcattcggaaggcggtacagacagccattaccatcctggttccaggaagagctaaggagcaaatccaagatctgtgccaatgtgttttgtgga

SEQ ID NO: 722390 - DNA, 100 bp, Homo sapiens
cctatgccctggcttttgcagaaagaggagcgttagttgttgtggccacagatgtctttaattccaaaaacctggccgttcaggcacaaaagaagatctt

SEQ ID NO: 722391 - DNA, 98 bp, Homo sapiens
ggtgtgggacaccgtgggctgcgtgtgggacgggtttagcggcagcctcttcgcccggaagcaggagatcattaagaccacggagcagctcatcgagg

SEQ ID NO: 722392 - DNA, 100 bp, Homo sapiens
cgacggccaggccgggcccgacgagggcgaggtggactcctgcctgcggcaatgcagctggggccttccggtggctggaaccctcagagcgacggctgca

SEQ ID NO: 722393 - DNA, 90 bp, Homo sapiens
cacaccggagacttttggggggaaactaggtcgatggtcggcggcgcccggatgggcagctgagagaaccatggagtctggcagtaccgc

SEQ ID NO: 722394 - DNA, 100 bp, Homo sapiens
ggatcagggggccacgggggcctcacagggcctcctggacaggaaagaggtgctgggagaaatttccatgcagtatcggcatgatggagcttgcccaaca

SEQ ID NO: 722395 - DNA, 82 bp, Homo sapiens
caaaattcgatttgcaaatcattcagtgaatcccaactgttatgccaaagtttttgaatcagagccgacaggcacttgaatt

SEQ ID NO: 722396 - DNA, 90 bp, Homo sapiens
cctggaatgtgaagagacaggaggcagcagacggacatccaggaatggcggcgctagatagtaaggcatcagggaagatgggaatgcgag

SEQ ID NO: 722397 - DNA, 108 bp, Homo sapiens
tgaaggaggaggacaaagagcccctcatcgagctcttcgtcaagtgaatggtagtgtctagaaagggtatgtcccttcaagagagaggtgccaatgtccaaccggcct

SEQ ID NO: 722398 - DNA, 101 bp, Homo sapiens
tggtacccggcacactgtgagttcctggacatcaagggctgtttcttactgatggaatgctggtcagggaaatgatggttgatccgttgttaacaaaatat

SEQ ID NO: 722399 - DNA, 90 bp, Homo sapiens
gccagaaggaagatggcggatctggaggagcagttgtctgatgaagagaaggtattggcatactccacacatctgtaccattcttgagtg

SEQ ID NO: 722400 - DNA, 98 bp, Homo sapiens
gtcgggcattaccagaagagtcttcatgtggacagtctcagggacaccatgtagagaattttggtctcgattcagatgaacgacaatctccttgagag

SEQ ID NO: 722401 - DNA, 100 bp, Homo sapiens
gaaagacatctcacatatattcaaaagatcttcaggatggagcttatgttcctgaggaagaattgaaggcagcagaaatagatgaagagcacgtggagga

SEQ ID NO: 722402 - DNA, 75 bp, Homo sapiens
aaaaccatcagaacatgattaagcagtttaaaggtttgcctgcaatgagatttcattctctacatttaaaggaca

SEQ ID NO: 722403 - DNA, 99 bp, Homo sapiens
aaaagaactgctctccatggagagagtaactctgtccttattatcggaccccgaggatcaggaaaaactatgcgcttctctgaagtagctttggaaagt

SEQ ID NO: 722404 - DNA, 75 bp, Homo sapiens
catccaatcagaacattcaagggatggtgatatggatgatagtcgagactgcaaaattcaaaatggggctcaagg

SEQ ID NO: 722405 - DNA, 75 bp, Homo sapiens
tgatcttgcggccaaaggggacctcggcgcagtaatgtcaacatgaataaaacatcagcttcgagttcacttgtc

SEQ ID NO: 722406 - DNA, 100 bp, Homo sapiens
atggctgtgatgaaccaccatgtatgccctgtggagaactgatcctgactgctgtcatggcgtgccctctggagaaggccctggatgtgatggtgtccac

SEQ ID NO: 722407 - DNA, 82 bp, Homo sapiens
cggacccgtggcagaagatggctgtggagagcccgtccgacagcgctgaggattctgtttcactgaggccatctatccgatt

SEQ ID NO: 722408 - DNA, 90 bp, Homo sapiens
gttgatgaccagtctttcccatatcagagcatcacttttcctgagttaagcaataaatctctagtgatccctgaaaagttccagcatatt

SEQ ID NO: 722409 - DNA, 100 bp, Homo sapiens
ggctggaaaagagggtggaaaaagcagggaggttatgaggcttaataaagaaggtctcctaaaaacccagaacagaagatcattaagagagtgattgctc

SEQ ID NO: 722410 - DNA, 50 bp, Homo sapiens
cagcacttcatccagcagtgcacagatgcgcctgcttcctctgcgccaga

SEQ ID NO: 722411 - DNA, 95 bp, Homo sapiens
ggaggaaactcagaaaagcgtaagcttgctcagatggatgagatcaaagggaaagaccgtgtgattctggccttggagaaggaacttggcgtgca

SEQ ID NO: 722412 - DNA, 100 bp, Homo sapiens
cgcgctcctccgcctgctgcccgggctgggaaagtatgtgatggtgatgggagtggttcaggcctgcagccctgagccctgcctgcaggctgtgaagatg

SEQ ID NO: 722413 - DNA, 50 bp, Homo sapiens
gtccagaatctacagacctgccaggtcagccaatcaaccctcaatgtcga

SEQ ID NO: 722414 - DNA, 82 bp, Homo sapiens
ttagatacttgggttcagccagcaattgcccaaacccaaagtgtggagatatgtgtcacaaagatgtctacacggaactgcc

SEQ ID NO: 722415 - DNA, 101 bp, Homo sapiens
ccatgttcaccagcaccggctccagtgggctcttactgtaagattgatgttaaaggcatggtgttcaccccacttcatcagcgtacataagttatctcttc

SEQ ID NO: 722416 - DNA, 88 bp, Homo sapiens
catgtcagttatcaagagactcaacagatgcagatgaaggacacagcattgttggttttgccatgtactattttacctatgacccgtg

SEQ ID NO: 722417 - DNA, 100 bp, Homo sapiens
acacagtcgaaaagaatactgtgaattatgcaagcacagatttgcttttacaccaatcactcaagactgcttgcaactgattgcagacagtgaaacacca

SEQ ID NO: 722418 - DNA, 100 bp, Homo sapiens
agcaagatagtctgggactttcaaatcttcagaagagccaaatccaggggaagtagcaggcttgcaatcttcaggtcagaaagcaacattgaatgcagaa

SEQ ID NO: 722419 - DNA, 98 bp, Homo sapiens
ctccccgaggccggccgcctggtcatggcgcagccgggcccggcttcccagcctgacggaagagtctgccgaaggtgaaggccatggacttcatcacc

SEQ ID NO: 722420 - DNA, 100 bp, Homo sapiens
ttctgggtgacactcaacaggattcccggtgcagtcagcctcagtttccaaagccggaaaaggatcctctagtagccacggtgtggcagctgctctgaac

SEQ ID NO: 722421 - DNA, 75 bp, Homo sapiens
gggagatgagggaagatgagaagcccctggtgctggagatgctgaagaaagttcaggagccctggaaaggagaag

SEQ ID NO: 722422 - DNA, 100 bp, Homo sapiens
atgtccacgggcttggtagaggaccagaccctgtggtcagaccccatccgcaccaaccagctggccctcatggagcacagcaactgctcgtcggagcccg

SEQ ID NO: 722423 - DNA, 143 bp, Homo sapiens
cacggccgcggaagcagataccaggttcggctgcagctgggcagtctgggcagtggaggcagaggggacgactggagtgagcactggcctgggagtctgaagattgtgccttcagacctacttcgtcacttactagctggcga

SEQ ID NO: 722424 - DNA, 75 bp, Homo sapiens
gagatatagcccacttagaaatcacagtccagatggctgtggaggccaagtttgtccaggacaccctgaaaggag

SEQ ID NO: 722425 - DNA, 83 bp, Homo sapiens
ctcgtggcctgcctctgcgtgcgttgaaagtaacggaagcctacagaaactgatccgcatccgaaatccctggggagaagtgg

SEQ ID NO: 722426 - DNA, 98 bp, Homo sapiens
tgagcatggaccatagaagggctcaatgtagaagatcctgtcttcagctgggtcagagaaaacttcttgactaaaactggtcagaactcatcacagaa

SEQ ID NO: 722427 - DNA, 98 bp, Homo sapiens
aaccgcctcacccagcgcatcatccccaggtcttgggcgtctttggtactggcttttttaggggtctgcctggggattacccttgctgtggatagaag

SEQ ID NO: 722428 - DNA, 76 bp, Homo sapiens
aaggaggagaacagggaaaagaatcactggtgcaatgtgtgaagaaaactttagaaactgttcctttggagaggaa

SEQ ID NO: 722429 - DNA, 83 bp, Homo sapiens
atttttctcataatgaatcctctcaggacattgtgtagcctatgttacagcaattggaacttgcacagatacagcatagagac

SEQ ID NO: 722430 - DNA, 74 bp, Homo sapiens
ctgttctcaaggcggattaattagcccaagaaacattatattcatatagtcgtgcaagcactgcagtgttccca

SEQ ID NO: 722431 - DNA, 101 bp, Homo sapiens
cgagcacccaggcgactgcctcatcttcaaggaaggaagcagccaccctcgccatggcctccccgcccgcctgcccctcggaggaggacgagagcctgaag

SEQ ID NO: 722432 - DNA, 89 bp, Homo sapiens
taagtgctagtatcggacatgatcctcatcttttatacactcttagtgctgtccaggccaacagagcacttatggcaaggcatctcgag

SEQ ID NO: 722433 - DNA, 73 bp, Homo sapiens
tcgacaggcgaacaggatatctgaagaataactgaagtgaagtgatggactccgatttggagagtagtaagac

SEQ ID NO: 722434 - DNA, 82 bp, Homo sapiens
cttcaacaagaggacccaggagaaattcgccctcaaaaggctgaggggatctggcggtggagcgctaggatcagacgccccc

SEQ ID NO: 722435 - DNA, 98 bp, Homo sapiens
cgttaccgggaagttgcaggcgggaggactcttccccatccagtcacctgacaggtttcataggcgcaacaggaactttgggacaagtggattcttca

SEQ ID NO: 722436 - DNA, 50 bp, Homo sapiens
gaggaagaggaggatgacccacttgcaatggtacaacagctccatgaacg

SEQ ID NO: 722437 - DNA, 95 bp, Homo sapiens
ggccaggaagcaattctggaagcgcagcaacagcaagctcccgggcagggcagagcggcttgggtaaatccaccttaatcaacaccctcttcaaa

SEQ ID NO: 722438 - DNA, 100 bp, Homo sapiens
gatagagcaacttcagatttctatgacagaactaaagcgggcaaagttagaccttccagaacctgaggctactctttaaagacaggcattttacttgcag

SEQ ID NO: 722439 - DNA, 74 bp, Homo sapiens
tctgaggtgctccgcctggtggacgccggctcagccgtgctgctcttcctggccatgccaatgctcaccattgg

SEQ ID NO: 722440 - DNA, 100 bp, Homo sapiens
ccgctgccgtcgccgccgccaccatgcccaagagaaaggactctccagtcctcagtcaccttggacaaagaagtgtggatcctcagattccatcttttcc

SEQ ID NO: 722441 - DNA, 75 bp, Homo sapiens
ccgccctggggacgaagagctgcagctcctcctgtgcggggcaactccaacaacattgccaccgtggacatctcc

SEQ ID NO: 722442 - DNA, 100 bp, Homo sapiens
ctccgattcgtgaccctcagcgccggtgcatgtcgatgcagaagctcctcctggggtagagacagatcttattgatgttggattcacagatgatgtgaag

SEQ ID NO: 722443 - DNA, 100 bp, Homo sapiens
gcccagcccccagaaaggattgtgacatatcgttggacccagaattgagggaagcagtttaagtgcacggtgtgtgactacacagcggcccagaagccac

SEQ ID NO: 722444 - DNA, 90 bp, Homo sapiens
tcaagcgaatgggccctattgtgctcacacattcagaacctgttacccaaggaattccctaaagatgctgttgcatgaaaaagcagaagc

SEQ ID NO: 722445 - DNA, 83 bp, Homo sapiens
gtcgcggaggcacgtgtggagccccggcagcaggagcgtcgcaggagccttcacgtaaatgggtccagtcatgcctcccagta

SEQ ID NO: 722446 - DNA, 98 bp, Homo sapiens
gaagaagaagaaacgggccgcgaaccgcagtatcatgctggccaagaagatcatcattaaggacggaggcacgaatttgttcctgttgaagagtggct

SEQ ID NO: 722447 - DNA, 90 bp, Homo sapiens
gcagcgagcagttccctcctgactatgaccagcaggtgtttgaaagtggactccaacgacagcctctacgggggagactccaagttcctg

SEQ ID NO: 722448 - DNA, 100 bp, Homo sapiens
ggggagcgcagatcggcgcccagcaatcacagaagccgacaaggcgttcaagcgaaaacatgaccgctgagcccatgagccacaatggtgcgcatgaatg

SEQ ID NO: 722449 - DNA, 83 bp, Homo sapiens
gcagacgctgtgctcgctggcaccccgaacgggttgcttcccccgctgcgaggaaattgggatggcggttcttgttaagctcc

SEQ ID NO: 722450 - DNA, 100 bp, Homo sapiens
tcagcctccagccagctggacgagggcaagtgcgcttacatccgagtgaagcgtgacattcaggaaaacgatgaagaggcagtgcaagtcaaagagcaga

SEQ ID NO: 722451 - DNA, 75 bp, Homo sapiens
aaaaatcaacagaaactttcctgtaaaccagcaggaatgctttgtgtggaaagcttcagtgtgagaatgtacaag

SEQ ID NO: 722452 - DNA, 75 bp, Homo sapiens
gcggacgccggtctctgttccgcaggatgattgtgttcaattagaccttcaggacctctccaagaagcctccgga

SEQ ID NO: 722453 - DNA, 100 bp, Homo sapiens
ctgaatgtcatgacctacctgactagcatccccaggattgacatctttaagtatgtgatctacggcatcgcagctgcgttctttgtgtatggcattttgc

SEQ ID NO: 722454 - DNA, 90 bp, Homo sapiens
caggcctttctccaccaaggaaaaaacgagaagaccccaaaaccaggttctagattctgagaaggacttgaaagtactcatgaaggagat

SEQ ID NO: 722455 - DNA, 100 bp, Homo sapiens
aagtgaagctgtgggacacgcggttcttctccagcgccctggcctccctcaccttggacacctcgcttggcttaaagcttttcaagccaggccaagaagc

SEQ ID NO: 722456 - DNA, 75 bp, Homo sapiens
acaaaattcgagcaattggcaagatggcaagagtcttctctgttctcagcctgcaggtcaggagtcatcttttcc

SEQ ID NO: 722457 - DNA, 98 bp, Homo sapiens
attttactgggataattatccaaataaattgcaagcattctatccaaatggatacattaattgtttggtcagaagcagagaactatgatttggctctg

SEQ ID NO: 722458 - DNA, 100 bp, Homo sapiens
aggcatacagcctgtccagaatatggctatcctactctcctactcagaaagaggcaatgagaagcacgaccttcatgttacctcccagcagggcagcagt

SEQ ID NO: 722459 - DNA, 98 bp, Homo sapiens
gctcattctgtgaaaatgatgctggcagggcaagaatcctttcgttccatcacaaggtcgtattacagaggtgcagcaggagctttactagtttacga

SEQ ID NO: 722460 - DNA, 96 bp, Homo sapiens
agtatggtagccacacccccagctgtcaccactgactaaagaagagaaaactgcggcagagcaattcaaatttcacatgccagatttatgaagaaa

SEQ ID NO: 722461 - DNA, 97 bp, Homo sapiens
gagtgtaggtcatatcgccgcggggggcatgtgctctgtgtacctgaaggacagtgagaaggttgtcagcatttccagtgagcacctggagcctatc

SEQ ID NO: 722462 - DNA, 75 bp, Homo sapiens
ccgaccagggacctgcccgcctgcggctgctccggggctatggttctgatggtctaaagttgttatcacatgaag

SEQ ID NO: 722463 - DNA, 75 bp, Homo sapiens
cactttcctgtctgatctgcgcagcaacctacagatgaattttgataagaggcaacatgaagcaagaatccagca

SEQ ID NO: 722464 - DNA, 75 bp, Homo sapiens
tcaagtgatgaaaaacacccacctgaaaatatcattgatgggtggtttttccccatcatcggccacatgggcatc

SEQ ID NO: 722465 - DNA, 82 bp, Homo sapiens
gccaccccgcgggatacgcctcagcgcggaattctgtggccacactgcgaggagatcggttctgggtcggaggctacaggaa

SEQ ID NO: 722466 - DNA, 83 bp, Homo sapiens
ggtacatcgcctcggtgcagggctccaccccgtcgcctcgacaggtgtcgtgaaaactacccctaaaagccaaaatgggaaag

SEQ ID NO: 722467 - DNA, 83 bp, Homo sapiens
gtccatatctttgctctcaaggatacccgcctcaaccgccgctccgcgttgactatagtcaatggggccaatggagccaagtg

SEQ ID NO: 722468 - DNA, 51 bp, Homo sapiens
acttcatggagtgagcaagggaaccaggtgtcagctgtgatgcatgtttaa

SEQ ID NO: 722469 - DNA, 98 bp, Homo sapiens
ctgcttctccttttcatgagtgttcctgtggtctctgcacctcctttctgtactatcttggtcgtcggatgtttattgttatttctgagccagacatg

SEQ ID NO: 722470 - DNA, 100 bp, Homo sapiens
acagcacttcctggcaatgatagatacatcagtgtgggaagccaagcagatacaatccccaaagctccagagatagatccagtagagtgtttggtggcag

SEQ ID NO: 722471 - DNA, 101 bp, Homo sapiens
gtcgtccagaccgagtgttctttactttttgtttggttgaggtttcacgctagaaggtggctcaggttttataggatcacattgacaaaagtaccatggag

SEQ ID NO: 722472 - DNA, 82 bp, Homo sapiens
gttaactacaacagaccatctgtttttgaaatcatgaatcctgtttatagtcctggatcttctggggttccctatgcaaatg

SEQ ID NO: 722473 - DNA, 100 bp, Homo sapiens
ccgggggcctggctaaggaaaccctattacctccaggtcagcccaaggccaaccccactgtcactctgttcccgccctcctctgaggagctccaagccaa

SEQ ID NO: 722474 - DNA, 100 bp, Homo sapiens
cccccttcaagcaagggcatgatgcctccactatttgagttcatgatcgagtccatcctgtatgcccgggatgcctggctgaaggaggacggggtcattt

SEQ ID NO: 722475 - DNA, 90 bp, Homo sapiens
tgcagtccgtatgctgagaacctggagcaggaatgcggggaagctgatatgaattgagaattcgttatttgccaaaaggatttctaaacc

SEQ ID NO: 722476 - DNA, 100 bp, Homo sapiens
gtgaggagccagacgacaagcacacactatggcgctgaaacggattaataagccggactactttagttctgtggccacagtggtgtatcttcgcaaagag

SEQ ID NO: 722477 - DNA, 83 bp, Homo sapiens
ggggatgaagtccgtgtccctggaggggcccaggaagggcgaggaaagcggagtggagatgccaagtttgtggaggaacggag

SEQ ID NO: 722478 - DNA, 75 bp, Homo sapiens
gcagcgaacctcgagaccaacgtggaggagctgtgggtggaagaaattacagaagacatccccgtgaagactttg

SEQ ID NO: 722479 - DNA, 80 bp, Homo sapiens
ggatcgaatccctcacgcgggcgcggatcgaccggagcagagagctggcgagcaagcaaaatgatgcttcaacacccagg

SEQ ID NO: 722480 - DNA, 90 bp, Homo sapiens
gaccctcgcagtgagtgttacagctcttaagttgacattttgctaaaggctgtgggagacactcctattatgaaaacaaagaagtgggca

SEQ ID NO: 722481 - DNA, 88 bp, Homo sapiens
gccgcgtgtcctcggagcgcggtccctgtattggtctcctgctcctagagcgtctgcttctgcgctttgcctgggagaggccctggtg

SEQ ID NO: 722482 - DNA, 90 bp, Homo sapiens
tagccagctccccagaaatgaacctgcccacggtgtccgcgctcagggcaattaagttggaatatgcaaggttggttaagttggcccaag

SEQ ID NO: 722483 - DNA, 50 bp, Homo sapiens
gacgggaaccacgcgagctgcagccagcaataagagctaactgccatcaa

SEQ ID NO: 722484 - DNA, 75 bp, Homo sapiens
agaactcattctcaccaataatagtctcgtggaactgtacgaattggagcaatgttggcttatacacctctggat

SEQ ID NO: 722485 - DNA, 100 bp, Homo sapiens
ctgcagattctgctgttcgactctggtctaaaaagggtccagaagctccatcaagtatgatggtgaaggatgaatatgtgcatgactttgagggacagcc

SEQ ID NO: 722486 - DNA, 83 bp, Homo sapiens
ctggactcggattcgttgcctgagatttttggaagtaccagcacagtgacgcttcctgaaaccttgttgtttgtgtcaacgct

SEQ ID NO: 722487 - DNA, 118 bp, Homo sapiens
tctgtatggatgggcgggctgacctcatcctgccttgtgctcacagcttttgtcagaagtgtattgataaatgggccggcagacattccaccgctttgacaagttcaactccaaatac

SEQ ID NO: 722488 - DNA, 100 bp, Homo sapiens
ggattccaagtaactcttatttggaagatgttggatccagggttgatgacgtgttccaagcaagctatgtttcttaaccttgtctacaaatctctgaaag

SEQ ID NO: 722489 - DNA, 100 bp, Homo sapiens
tttgcgccttgcagcactgctggaccaggatgtttcgtctgaactcactttctgctttggcagaactggctgtgggttctcgatggtaccatggaggatc

SEQ ID NO: 722490 - DNA, 82 bp, Homo sapiens
ctggggagccgtggccctttcgggggaccttcgagacaaggctgtcagcccctagatgtggacgagtgctcactagcagaaa

SEQ ID NO: 722491 - DNA, 98 bp, Homo sapiens
cctaaaatccccaaaattgagaccactcatccaccgttgcctccagcccacccacctccagatttggatcatacagcagatgtccagtgagtatagcg

SEQ ID NO: 722492 - DNA, 100 bp, Homo sapiens
gttccccgacggccagaagttcgactccagcccagagacacattggggctgacctgccgctgctgtcagtgggaggccagtggtgctggccaagaagtgt

SEQ ID NO: 722493 - DNA, 98 bp, Homo sapiens
agtgtaatgaagtcttccaggacgagacatcactggctacacatttccagcaggctgcagatacgagtggacaaaaaatgtggacacagacttgccag

SEQ ID NO: 722494 - DNA, 96 bp, Homo sapiens
aagtgaagagtcatacaaagacagcacgctaataatgcaattactgagagacaacttgacattggtgttggtattaggagatctgcacatcccaca

SEQ ID NO: 722495 - DNA, 97 bp, Homo sapiens
gtctcctccagtagacggtacagcgaaggcagagagttcaggcacttccgttccggcgcccctccggtcatcaacccgctgggcaccagcttcccgg

SEQ ID NO: 722496 - DNA, 82 bp, Homo sapiens
cgcgcgctgctgccgggttcacacgacgcgctgctgccgcgattacccggtatgtcgggcagtctaggctctgggagctggt

SEQ ID NO: 722497 - DNA, 100 bp, Homo sapiens
ctatcattggatgaagtggctccggagatgtgacgcatccaaagaagacattgacactgctatgaaattaggagccggttaccccatgggcccatttgag

SEQ ID NO: 722498 - DNA, 83 bp, Homo sapiens
gttagagaagaattttccaaatgaatttgcaaaacttactgtagagtcattcttatagaagagcatcagaggaagataaaaaa

SEQ ID NO: 722499 - DNA, 110 bp, Homo sapiens
ctcctcctagccgctccggaccccagaggcggaagtaaaagcgaactacagtggatgggtgcagttcagggtcaacatacctggcctaaggaggcaggattgagtgactc

SEQ ID NO: 722500 - DNA, 102 bp, Homo sapiens
ggatgcctgtgaaagggagttcaaggagtgcatggaatgccttgaaaagcccatggccccccagaacgacaagaatgagagtcttgctctgtcgccaggctg

SEQ ID NO: 722501 - DNA, 100 bp, Homo sapiens
gccaacttccaacaagatgtgggcacaaaaactaccattcgcctgatgaactctcagaatactctggagcagtgcaatgtgtgttccaagcccatcatgg

SEQ ID NO: 722502 - DNA, 75 bp, Homo sapiens
tcacccaagtgcattgcctttggaaacgaggaaacacttcaagttgaagaagatgatcgacctgagttaccatgg

SEQ ID NO: 722503 - DNA, 78 bp, Homo sapiens
aaactcttgccctttgagggaccaggcgcagaatccgcatttgctgtgatgagttgaatctcttagtgccgttctgca

SEQ ID NO: 722504 - DNA, 101 bp, Homo sapiens
tttgaaatcgacacacaaagaatagagttgagcctgtgggacacttcgggactgaccagggccaagtggcgctcggcgggcactacatggcggagggtgaa

SEQ ID NO: 722505 - DNA, 74 bp, Homo sapiens
gcaaaatcccaaagcaaaattaccaggcaatcagaaacggagactgttcatctgtttatcccagctctatcagt

SEQ ID NO: 722506 - DNA, 127 bp, Homo sapiens
gacggcgttggcggcgcggacgtggcttggcgtgtggggcgtgaggaccatgcaagcccgaggcttcggctcggatcagcctgctctctctttccgaaggccccaccggcttcccggatggagcccg

SEQ ID NO: 722507 - DNA, 75 bp, Homo sapiens
cagccactgcaagagtcaggttccgatgatcgcgctgcaggctccactttgaggctctgatgaacattccagtgc

SEQ ID NO: 722508 - DNA, 74 bp, Homo sapiens
cattccaacacataaaaattatttatccaacagctcctcccaggtatgaggatgagatcaataagcgtacagag

SEQ ID NO: 722509 - DNA, 100 bp, Homo sapiens
tttgggaagtgaagttgggcggatcacttgaggacagtcattttgtttactcattcagccctgttgcaggtcccaataaactcttcataaggttgacaga

SEQ ID NO: 722510 - DNA, 100 bp, Homo sapiens
attggactcatacaggtcggagaggtcagcaacagggacatcgtggagacggtgctcaacctgattttaccaaatgttgcaagaactctggagttcttat

SEQ ID NO: 722511 - DNA, 89 bp, Homo sapiens
gaggcgagtccggcccaagctccatgtgtttggtggaatccatgaagcgactgcatttgcctccagacttgtcagacacagtgagccgc

SEQ ID NO: 722512 - DNA, 100 bp, Homo sapiens
gaagacagacagctcagaagttccatagaacgggttattaacatatttcagagcaacctctttcaggctttaataggctggtgagattggagagatgaag

SEQ ID NO: 722513 - DNA, 100 bp, Homo sapiens
cggcggcaacatgtctgtggctttcgcggccccgaggcagcgaggcaagggggagatcactcccgctgcgattcagaagccatggttgggtgggtgaggc

SEQ ID NO: 722514 - DNA, 100 bp, Homo sapiens
acttcaggatgttcagctcacagagatcaaaccacttctaaatgataagctcagagtcaagatctccactgaagttggcatcacaaatgttgatctttcc

SEQ ID NO: 722515 - DNA, 96 bp, Homo sapiens
ggcggcggcggaagatggtgccgggggtcgctggctctgctgctgccgccggcgaaggaggaggcgttgccggatatcagttttagagaatgtggc

SEQ ID NO: 722516 - DNA, 82 bp, Homo sapiens
gccactgagatgaggaggcgtcgcgcgcgcctgtagctcgcgggcctcgcaggtctggccgtgggcctgggcttcggggcac

SEQ ID NO: 722517 - DNA, 137 bp, Homo sapiens
gaggaggaaatctggtccctcctgttcctggccgctgagcagctcctggaagacctccgcaacgtgagcaagaagaacccatcaggtgattgtcaggcctctgagcccaagctaagccatcatatgccctgtgacct

SEQ ID NO: 722518 - DNA, 98 bp, Homo sapiens
tggcccgggccctggtccagcagggactgaaggtggtgggctgcgcccgcactgtgggcaacatcgagggaaaagctttcagcagcaaagggaagcca

SEQ ID NO: 722519 - DNA, 100 bp, Homo sapiens
agagtcataggattagatgatccaagtcaccaagaaattactgtctcaagtgatacgagtaacccattagaatttaaccccgatgtcttgaagaagactg

SEQ ID NO: 722520 - DNA, 98 bp, Homo sapiens
aacaaatttgcaaatgatatacaacttctaagtgtttctaagacctcagagaaatttggaatctatagacccgcagtttacaatccggaggaaaatgg

SEQ ID NO: 722521 - DNA, 90 bp, Homo sapiens
tctcccacccaatggagatggctctaatgtgttttccaagcagtgaagcacttgccgtgttgaactgaatgcactactggagaatgttct

SEQ ID NO: 722522 - DNA, 50 bp, Homo sapiens
aacccgaagacagggaaatttaggtctcacttctccatttaagccagcta

SEQ ID NO: 722523 - DNA, 74 bp, Homo sapiens
gaaaacttctgcataccctggaaggtgtgatgttagctgttgatgctgtaattgctgaacttaaaaagcagtct

SEQ ID NO: 722524 - DNA, 101 bp, Homo sapiens
aactacttcttggagcaaggcattataccaaagctattggtcatctcgatgcactcctgaggggcttggttctgggaaaactaggaaaagcaggacataag

SEQ ID NO: 722525 - DNA, 98 bp, Homo sapiens
gaaattacctccgagggaaacaagaaaacatcaaagaggtctagcaaagaaatcctaagtaatgcactgaagagaggagagatcattgcaaagcaggg

SEQ ID NO: 722526 - DNA, 75 bp, Homo sapiens
tgacatttaattttagggtcctttatatagaagggagagtagccgctgtgattggaaccaggctgcatgctgctg

SEQ ID NO: 722527 - DNA, 100 bp, Homo sapiens
gattcgggccagagacgacaacccgggcctccgagatgccatggacaatattaccaggcagaaccaattctacgatacccaagtcatcaaacaagaaaac

SEQ ID NO: 722528 - DNA, 100 bp, Homo sapiens
tgagagccctgctggcgcgcctgcttctctgcgtcctggtcgtgagcgactccaaaatcaagcttcaggagtctccggaagacatgcctgcagggcagac

SEQ ID NO: 722529 - DNA, 82 bp, Homo sapiens
ccagtctcggcaaatattacacttctctccttgtacatgtgaagattttttggcagcttagcgtggaaaccattgatcaccc

SEQ ID NO: 722530 - DNA, 100 bp, Homo sapiens
caagcagctcacagcccactgctccagtgtcacggatttgattgtgcaggacggacaggaggcacccagaaaaatggctacaaacttcctagcacatgag

SEQ ID NO: 722531 - DNA, 74 bp, Homo sapiens
aagctacagactggatattaaaagaagactaattagcccatataagtgaccaaagacttgaccactcaaagtcc

SEQ ID NO: 722532 - DNA, 75 bp, Homo sapiens
tgcggccacgcctgaaaggcgactctcctggaacaacctatcttcagcactcgagctcatgtcttccaaattgac

SEQ ID NO: 722533 - DNA, 75 bp, Homo sapiens
gaagctgccatcagtaagctatactccaccatccggccctacctagaggacttcactgaggatgtcaactgtgct

SEQ ID NO: 722534 - DNA, 83 bp, Homo sapiens
aaccaccagggcgacctggacgtagccaagcgcatgatccgcatggccaagattgacgtgagtgaattcagatataactcaag

SEQ ID NO: 722535 - DNA, 90 bp, Homo sapiens
gcaaagccacaagtcatacgcaggcagtgcttcaaaaaactatggaacaaaacagatccttggagaagggtcccccaggccctcccggcc

SEQ ID NO: 722536 - DNA, 90 bp, Homo sapiens
gccgccgggcccgggcatggtggtctggggcaacgcggaagtgcacttgcaggaaagacatggtgaagatttcaatggatatctttgtga

SEQ ID NO: 722537 - DNA, 75 bp, Homo sapiens
caggtgtatggtggctgatgaagtatgggctacgtgagttcgtggtgattgcccctgctgcacacagtgacgctg

SEQ ID NO: 722538 - DNA, 75 bp, Homo sapiens
acctggcttcagaccaccttcccagcgagtttctactagtccagttgagttgatctctctaatgtattagatctt

SEQ ID NO: 722539 - DNA, 100 bp, Homo sapiens
tgggttgtgaaaatgttctatagttttcaggataagctaaacctctacctaatcatggagttcctgcctggagcaaaccagtccagctacgggggcccag

SEQ ID NO: 722540 - DNA, 98 bp, Homo sapiens
cgcaggcctcgtgccgttacggccatcacggcggccgcagtggcgtcctggagccctcctcagcggagctggagtttgttcagatcatcatcatcgtg

SEQ ID NO: 722541 - DNA, 90 bp, Homo sapiens
acatatttttggacctgaaacagaaattctggaacacctatatggtgaagacattcagtgaagcttgcctgatggtaaggaaaccagccc

SEQ ID NO: 722542 - DNA, 82 bp, Homo sapiens
cttcgagttcaaagagaccctcggaacaagctccaccatgaggcgaggtggatggaggaagcgagctgaaaatgatggctgg

SEQ ID NO: 722543 - DNA, 85 bp, Homo sapiens
ctgaggctacctgtgaacagtacgcagtgaatgttaaccttcaacaactagtactgcttcaaattatccagatgtgttaacaagg

SEQ ID NO: 722544 - DNA, 97 bp, Homo sapiens
gttgaaagttttccttcttacagagatgtgactctgtttgaggcatggaaagctcacctgatgggcccagccggctgcacgatgaacctgcgcaaga

SEQ ID NO: 722545 - DNA, 112 bp, Homo sapiens
cccactccggctgcagggaccctgtcccagcgagaccgcaggcatgtcatccgaaaagtcagatgccggtggccgtgggtccctacggacagtcccagccaagctgcttcga

SEQ ID NO: 722546 - DNA, 98 bp, Homo sapiens
tgagttgaaacgctgcctggaaaggaagtaccaggacttgcacaggctgctctttggcgtaaattgcaatcgattagggatcgtttctcagaatcaag

SEQ ID NO: 722547 - DNA, 100 bp, Homo sapiens
tgtgtacaatactgtgaacaaaattgatcagggtgctatcgacctactgcactatgtgacagagctgacagatcgaatcaaggcaaactcctcacctggt

SEQ ID NO: 722548 - DNA, 100 bp, Homo sapiens
gcggagaattggagatggggaccgccctggacatcaagattaaaagagcgaataaagtttatcacgccgggatggttccatgggaagatttccaaacagg

SEQ ID NO: 722549 - DNA, 82 bp, Homo sapiens
gactcagaatcgaatctcttctccctccccttcttggactccctggaggaaaagcggaagcggcagcggtctgaacgcctgg

SEQ ID NO: 722550 - DNA, 75 bp, Homo sapiens
tggaggaggaaccagaccgcggccagagcgttcaggaatggcatcaccagctgccggatgcggactgagagtgag

SEQ ID NO: 722551 - DNA, 114 bp, Homo sapiens
ttcaggaaaactcgtgtccatcaaaatccagatgctggatgacacccaggaggcatttgaagttccaaaatgagccgtcagactgctacagcattacctaccggtacctcgaag

SEQ ID NO: 722552 - DNA, 101 bp, Homo sapiens
tgcccaacaaacagaggacagtggtaagaaccttgatgctgtccatgatatcactgtggcgtatcctcacaacattcctcaatcagagaagcacctcctcc

SEQ ID NO: 722553 - DNA, 83 bp, Homo sapiens
gatgtcatgatggagaattatggaaacctggtctcactggaagtggtacaccatccccaaaacgaacatctgtaggctccagg

SEQ ID NO: 722554 - DNA, 100 bp, Homo sapiens
gggctcatccaaggatgagattttgccagagaaaggacgagcagcaagtcagggagcttaaggtatgatctcgtgaaaccttgagagaaactgaatgacg

SEQ ID NO: 722555 - DNA, 82 bp, Homo sapiens
gacaagccgctggcagccgcggatctcaccgccgctcagggcaccgggagcctggccgctgcagtggagacagcctcgggac

SEQ ID NO: 722556 - DNA, 82 bp, Homo sapiens
ccccgccgccctcgcaacctggcagccgccgccgtggaaggaactgtggctgcaccatctgtcttcatcttcccgccatctg

SEQ ID NO: 722557 - DNA, 101 bp, Homo sapiens
tattaataagcgtacacttctggaaacagaagtcataaagagctgtctctctcgatccaatgaacaacacttttcatccaaggatttcaaagtgctttaca

SEQ ID NO: 722558 - DNA, 100 bp, Homo sapiens
accgatttggtcacctgaagcctcttgtcccttcattgtcatctgcttttgagatgaagactcttaagatgacagaaggtgatttttctggtgatcgagg

SEQ ID NO: 722559 - DNA, 75 bp, Homo sapiens
acttggcctctgaaacagtgctgaacttggcttttgcgcaggtagatgacattaatgctgataagaatatctctt

SEQ ID NO: 722560 - DNA, 82 bp, Homo sapiens
aagacaatcaacagcaggcctattatctgttccgtggctttatcctgtggataaacgcagagtgaacgagtttggggagtcc

SEQ ID NO: 722561 - DNA, 75 bp, Homo sapiens
gggaagcgagccgcgacccgagctggggcaacaccctccactaaagagtcaagccagccggacgcattctcatct

SEQ ID NO: 722562 - DNA, 100 bp, Homo sapiens
ctgagcagcagattaccctgtgctgtggaagagcacccagtaggtgaggctctgggctacacgccaggccatgctgggccaggtgcacgaggttcccgag

SEQ ID NO: 722563 - DNA, 80 bp, Homo sapiens
ttactggtgttccagccctaagtttttcagaagaagtgaagtcaagatgaagaaccatttgcttttctggggagtcctgg

SEQ ID NO: 722564 - DNA, 74 bp, Homo sapiens
ctacaaatcttgattgaacaattaaaggcaaaccacagggaagctggaaaagaagcggccctggcagaagtggc

SEQ ID NO: 722565 - DNA, 75 bp, Homo sapiens
atcatctctggccggaaagaaaagtgtgaggctgccaaggaagctctggagggagatacttcaggggattaccgg

SEQ ID NO: 722566 - DNA, 100 bp, Homo sapiens
caggaatgcttactgttgcgtggttcgttattaacagactttgagagttttgacctgcctgaagagcaccagattgcgcacctccccttgagtggagtgc

SEQ ID NO: 722567 - DNA, 75 bp, Homo sapiens
ggcaaatgctgtaaggaatgcaaatacaagttggatggcttgaggactggtactaaaaggaaacgtgactgggag

SEQ ID NO: 722568 - DNA, 101 bp, Homo sapiens
acaccctgggccagcacatctccacctcatcaggaaacagctgagacaggtttcagatcgggtggagcggcggcttcaggaactggagagagagatgcgca

SEQ ID NO: 722569 - DNA, 76 bp, Homo sapiens
actcccttcctggttttgaaagcaagaaagaaacaaaagttcacctctgcgaagcacacagcaagaaggaggccat

SEQ ID NO: 722570 - DNA, 100 bp, Homo sapiens
ccgcgcccgccgggcacacaagaatggtcactcccatcatcttcgtttcggacagagcaaacagcaacaaggagctgggtgtggaccaggagtcagagga

SEQ ID NO: 722571 - DNA, 53 bp, Homo sapiens
cgcggagctggaatgactggcaacccaggctggtttacaacaaaacatccagg

SEQ ID NO: 722572 - DNA, 100 bp, Homo sapiens
caagcagtggcgaagggaatcgcaaggctcttccctgaccattttctactgtccctgcgcgagggagaagatgtcaaccggacactagaaggtggaagga

SEQ ID NO: 722573 - DNA, 113 bp, Homo sapiens
ggatcggtgggtttatctcaaggcctgagtagccggtaacaaacgagggttcccgggattggaccgacgcagccatgaaaatgtggacacagacttgccaggcagcctggggc

SEQ ID NO: 722574 - DNA, 101 bp, Homo sapiens
aagccacaatttccatcaaaaagtgattaagcagagaatggagaagaaggttgattccagatgttgatgttagtgaagattcacctcctcccctacctgaa

SEQ ID NO: 722575 - DNA, 117 bp, Homo sapiens
aaagaaacaagccgtggaataggtgtatcaagtaatggtgcaaagcctgaactgagatatggggagcctacactccggagggctgtacctttagcactggccctcatctctgtttca

SEQ ID NO: 722576 - DNA, 50 bp, Homo sapiens
accaagagcaaagatggcttcctagggcagataaacactgttgatgtgtt

SEQ ID NO: 722577 - DNA, 100 bp, Homo sapiens
gatacttgggcatacattgctgcagaaggtgatcaggaggttttagacagcgtgtgccaagcagatgagaattcagaatcctcactatggatgggctcat

SEQ ID NO: 722578 - DNA, 109 bp, Homo sapiens
ggctggagatgtagtctacgctgacatcaaaactgttcggacttccccgttagaactcgcgtttccacttcagagatctggccctcgggaccaaggatcacgtcatgac

SEQ ID NO: 722579 - DNA, 101 bp, Homo sapiens
gaacgaggcaaggagctaaagcagcgtgcgttcagccctgggagaaccatggagtctggcagtaccgccgccagtgaggaggcacgcagccttcgagaatg

SEQ ID NO: 722580 - DNA, 74 bp, Homo sapiens
gtgttttgcagtttggattttcagaatggggatacttgaatgggaaaactgaggctgccatcaaaaacttcagt

SEQ ID NO: 722581 - DNA, 74 bp, Homo sapiens
gaagcaagaaggccctggacacagcaatatctctgggctttcacagttgaaccaagactctgaggctgatatgc

SEQ ID NO: 722582 - DNA, 100 bp, Homo sapiens
ttttcttgaattagctagtagggagaagacagaagataaagataaaccccttatttataaaggctcagaagtgacaaaagagaattatcaggatggcagt

SEQ ID NO: 722583 - DNA, 96 bp, Homo sapiens
gagacatcggcctctgcaggcttgccgaagaagggagacaatgcagatcttcgtgaagactctgactggtaagaccatcaccctcgaggttgagcc

SEQ ID NO: 722584 - DNA, 82 bp, Homo sapiens
ctccattggatttaaaagacagtcctcgtcagcactgactttcagctatggaatcggccagaagcggactcctagaagaggg

SEQ ID NO: 722585 - DNA, 90 bp, Homo sapiens
gaaaggagattgcctcggattccgacagcaggtgtgaccaattcagtgaaaggaacgaatgcgattctctggacctgtttgggactgagc

SEQ ID NO: 722586 - DNA, 75 bp, Homo sapiens
acatttccagcaggctgcagatacgagtggacaaatgttttcacctcctgtgagcagtgggaaaaatggaccaac

SEQ ID NO: 722587 - DNA, 100 bp, Homo sapiens
gtgctacatggccaggaagaagaggaaacacacatcagtgagggttctgggaggtgatcagtgatgaacatggcatcgaccccaccggcacctaccacgg

SEQ ID NO: 722588 - DNA, 100 bp, Homo sapiens
atgacaatgacggtgtgaccgatgagaaggtggtgatctttgtgaagtctgtgcagcggtgcattgccttggcccagctactagtggagcagaacttccc

SEQ ID NO: 722589 - DNA, 82 bp, Homo sapiens
ggattccaagcaaagatcttccctgagagtaagcggaagggtacagccaatgcccgaatgccagagaaggtcacatggatga

SEQ ID NO: 722590 - DNA, 101 bp, Homo sapiens
ccctgatcttaatgagctttgcagccttcaatcagtacttgatatttggtgccgaagaagggatttataccctcaatcttaatgaacttcatgaaacatca

SEQ ID NO: 722591 - DNA, 83 bp, Homo sapiens
cgcctggtgaagctgccgttctttaatatgctggatgagctgctgaagcccaccgaattagggggatatgagactttctactc

SEQ ID NO: 722592 - DNA, 97 bp, Homo sapiens
caggaaggtatggggccatttcaggatttggtctctctctaattaaatggatcctgattgtcagggtcagaatggcggcagcggagcatcgtcattc

SEQ ID NO: 722593 - DNA, 116 bp, Homo sapiens
accgagagcgtgaccgagagcgcgaatatcgtcatcgttagaagtggttcagcactgagtcatgcttgcttctgctacgcactgatttgttctattccagttttcacgtacatcgt

SEQ ID NO: 722594 - DNA, 100 bp, Homo sapiens
aagaagctcatgactgtgcgcatcgtcaagcatgccttcgagatcatacacctgctcacaggcgagaaccctgtcccggaacctggtcaagaacgccaag

SEQ ID NO: 722595 - DNA, 76 bp, Homo sapiens
gcctggaaaatggagcagacctggacgagtcttcaggagacatatgaagcaaaaaggaatgaattcctgggagaac

SEQ ID NO: 722596 - DNA, 98 bp, Homo sapiens
ggaaccaccttgtccacaaattcgtcattggccacttaaagatgcctgaaaacttcatgcctcctgttcccatcacatcaccaatcatgaacccgttg

SEQ ID NO: 722597 - DNA, 96 bp, Homo sapiens
ctggccaggcgtctgcgaaatcatatggctgtagcattcgtgctatccctgggggttgcagctttgtataaggtaaaactctgctggcacaaaccc

SEQ ID NO: 722598 - DNA, 75 bp, Homo sapiens
gcagcctggcatggcttctggggacctttacgagttgccgaacaagcaaccggaaaagcttaataggcaatgggc

SEQ ID NO: 722599 - DNA, 101 bp, Homo sapiens
ttctcgaaaaaaaccttcaggcggcccatgggtttgttggcatccaaagctgttggggttgatggtgctgaaaaaaaggaagactacaatgaaacagctcc

SEQ ID NO: 722600 - DNA, 112 bp, Homo sapiens
ccggcatcggctgacactgctgcctccagctagttatttcgtcctcttccgttcttcacccctacaccttggaagctcgaaagagcattccagacacatatgcagagcacct

SEQ ID NO: 722601 - DNA, 87 bp, Homo sapiens
accaactctcagaggtggccaataagttcgccaaagcgacaggagctgtgactcgaaaagccctgtttcctggtgactctgagattg

SEQ ID NO: 722602 - DNA, 95 bp, Homo sapiens
gttgatttggccttcagtggcatcacgccttatgggtatttcttaatcagcgcttgcaaaggtctgagtgtacggtttgcagatatgcctggaaa

SEQ ID NO: 722603 - DNA, 128 bp, Homo sapiens
cgagggtctgaagttcacgactactagaaggggaggggagtggaaaggctctcagtgaaaaagataaactgtgtgacgttccctcacccagacacgatgccggaacagcagctgctgaaaccaaccga

SEQ ID NO: 722604 - DNA, 50 bp, Homo sapiens
cactgcgtcaagcaggtgccccgaataacttgtcactcagcccagtccat

SEQ ID NO: 722605 - DNA, 100 bp, Homo sapiens
gcggaggtggaggtagagccgtgcaagtttgccggccccagggcccaggtgtgggcagaagaaaaagctagtgatcaacagtggcaatggagctgtggag

SEQ ID NO: 722606 - DNA, 82 bp, Homo sapiens
ggattctgaggaccagcagatggccagtcacgagaacccaggtggcagtagagaagagcatcacagaagttgctcaggagct

SEQ ID NO: 722607 - DNA, 117 bp, Homo sapiens
gactggacctaaatggcgcagcatgactttgctccagcctggcttaatttccctactccaccatcatcaacaaagggttacacatcattttggaatgactgtatatcatctggatta

SEQ ID NO: 722608 - DNA, 96 bp, Homo sapiens
agatcaaggttccgacgcagatcatctgggggaaacaagaccagctccagaaacatgacaaggaggactttcctgcctcttggagatcagaggagg

SEQ ID NO: 722609 - DNA, 122 bp, Homo sapiens
ttttgacagtcgtagatacaaatttttggatgatgatggatccatttctcctattgaggagtcaacagaatgtaaagctgtacagttatggcgaccccaaagagaaagcatgaaagaacctt

SEQ ID NO: 722610 - DNA, 50 bp, Homo sapiens
tcactcctggtgaccagcattcaaggctaggtcctttcacaaaactgttc

SEQ ID NO: 722611 - DNA, 74 bp, Homo sapiens
tggccatgtgagatacaaggctacacagagacagatcaaagcagctcaactgataaatttcaaacggaagagag

SEQ ID NO: 722612 - DNA, 74 bp, Homo sapiens
aacaaacttcagctctgaaatagaagatcttgcaaggccgattcgaagacagtctcttacacctcctcctcaga

SEQ ID NO: 722613 - DNA, 96 bp, Homo sapiens
ggtacctctccttttccctctccctttccctaaggtggccgggacagggccgggcggcccctgcttctggtgtcaactacagagggggcctgggag

SEQ ID NO: 722614 - DNA, 83 bp, Homo sapiens
caccgacatggcccggaggcagcagaagtttggtgccctggttgtcagatgttggaaagcagtaggacggaacatactcttcg

SEQ ID NO: 722615 - DNA, 100 bp, Homo sapiens
gaagaagctttcagactacgtggggaagaatgaaaaaaccaaaattatcgccaagattcagcaagtgttcctccaagaaaagctggttatattgaagacc

SEQ ID NO: 722616 - DNA, 83 bp, Homo sapiens
tccccggcgcgaagaggctggactcggattcgttgcctgagcggttcctggctcagagtttgaggggcacaaacggatttctg

SEQ ID NO: 722617 - DNA, 100 bp, Homo sapiens
agccagtatctgtgtcgccgccgcccgcggcgtccccggtttggtgttgcggcgcccaccttcgggaggatcaggctccctggtcggccagagactctca

SEQ ID NO: 722618 - DNA, 100 bp, Homo sapiens
tcaccaacacctactgtctggtagcgatcggaggctcagagaacttctacaggctggctgaaggcggtgcaggtcctcatggtgctctccctcattctct

SEQ ID NO: 722619 - DNA, 73 bp, Homo sapiens
tggcgttccaccagcaaccatgagtggttccatgatgggaagtgacatggaacttagtgatttggcccgtgac

SEQ ID NO: 722620 - DNA, 73 bp, Homo sapiens
gaagatgcaaaaccagcgtggcggccgcgctctcttccaggacatcaaggtggttatggaggaggcggccctg

SEQ ID NO: 722621 - DNA, 100 bp, Homo sapiens
aagaaaccagccgaacttcagggtttccaccgttcgttcaagacatcaccctacagtggcttattcaacactcgaagtcacggagaagctgagactccag

SEQ ID NO: 722622 - DNA, 100 bp, Homo sapiens
accggtttttagtccattgactatgcagcctaatggtcaataacttctatccggagtgaactgattccatatttagtgagaaaacagttttcctcagctt

SEQ ID NO: 722623 - DNA, 96 bp, Homo sapiens
cacagccatctcacatttccaagtacattctcaggtggagacctattctggatgaaattgaagaacataacatcaaaatctatcacttacctgatg

SEQ ID NO: 722624 - DNA, 90 bp, Homo sapiens
tggccgtcggactggagctctgggctgcggcgcacgccttgcccgcccaggctgaaggtgatgtggccgccctcaaccgacgcatccagc

SEQ ID NO: 722625 - DNA, 75 bp, Homo sapiens
actggccctgagtctttgggggcagcctgcagaggctgcgcatttcttgagacttaaagtggcattctaaaggca

SEQ ID NO: 722626 - DNA, 90 bp, Homo sapiens
ttctttggacccaatgctgaaataagagaccatttgtttgtgactatgaagggtgtggcaaggccttcatcagggactaccatctgagcc

SEQ ID NO: 722627 - DNA, 101 bp, Homo sapiens
gtttgtttctgctgattacacccgtgcccaggagcttgacgccttagataacagccatcctattgaaggtctaaaattcccaggactccacagctttgcac

SEQ ID NO: 722628 - DNA, 83 bp, Homo sapiens
acaggatattcctcatgacattgctgtctgactttttaaaactgtggacttaaatgttctgcaaagtcttacacaaaagccca

SEQ ID NO: 722629 - DNA, 75 bp, Homo sapiens
aagaatcagctggggcagaagcgcgtggtcaagctgctggagccagttctgcttctcggcaaggagcgatttgct

SEQ ID NO: 722630 - DNA, 98 bp, Homo sapiens
ctcattcctaacagtggatttacttaagcatcaagtgtacctgatttgtgaacctatcttgcttcagttggtttcctcctaaatattaggcagatggg

SEQ ID NO: 722631 - DNA, 75 bp, Homo sapiens
agcaagtaaacgggcgtcccggagcctcgatggaggtagatgacattaatgctgataagaatatctcttctgcac

SEQ ID NO: 722632 - DNA, 73 bp, Homo sapiens
gtggacatgctttcgggccttcaggatcttctccagccagtggatgtctagagacggggtttcatcgtgttag

SEQ ID NO: 722633 - DNA, 96 bp, Homo sapiens
tcctttacaaatcttcagggaatggccaagtgacaaagctccgccgcatgcaagagatgattgcaaggatgcaggcgcagatgcagatgcagatgc

SEQ ID NO: 722634 - DNA, 75 bp, Homo sapiens
cttccccatggggctggcctgcggcgcctgggcgctctgagattgtcttcttacataatgatagatacattgaat

SEQ ID NO: 722635 - DNA, 90 bp, Homo sapiens
gcaggtgcagcgaagatgaaggtggtggaggagcccaacgcgtttggtgccggtggtggtgtgcacattgagccccggtatagacagttc

SEQ ID NO: 722636 - DNA, 74 bp, Homo sapiens
tctgagggccccggcccctggatgcacagccccggcgctggaggagccgaggaaggtctgcttcacctacgacc

SEQ ID NO: 722637 - DNA, 75 bp, Homo sapiens
ccaccgtcaaggccaacatcacgcccttcggcgccgaccagtgaaggagaacgacctgctcagaatgagaagagg

SEQ ID NO: 722638 - DNA, 75 bp, Homo sapiens
aacaggaaaatcatattatagatggagtaaaggcccagatagctaataaccgaacacctggaagatggacccagc

SEQ ID NO: 722639 - DNA, 100 bp, Homo sapiens
gggcatgatccataatcggtttcaagccctgcctgcctggcgctggaggcccatgacagaactctatgctgtgccttatgtgctgcctgaggatgaggac

SEQ ID NO: 722640 - DNA, 100 bp, Homo sapiens
acagctgaggaagtctgcatccacattgcacataaagttggtggggcagctgcagctctcccacaatctgagtttggtgatcctggtaccccagaacctg

SEQ ID NO: 722641 - DNA, 100 bp, Homo sapiens
taaagcaaagggggctccccctcgagatggaaaagatgttcagcctgttgcctatgaagagcctaaacattggtgttcaatagtctactatgaattaaac

SEQ ID NO: 722642 - DNA, 75 bp, Homo sapiens
agcaattatgaaagaagtcattccttttttgaaggctggagcattggatttgctaaaggagcttaagaatattcc

SEQ ID NO: 722643 - DNA, 100 bp, Homo sapiens
ttaaaagttacctgtttcggaatgcttttgtgctgctcacagtcaccgctgtcattgtggtttgcagacctgacagacgctgctgcccgcaacgcggagc

SEQ ID NO: 722644 - DNA, 83 bp, Homo sapiens
cggccgggcagcgccgccaccatgttcctgggcaccggggagccggccttggacacgtgttatagttttgccgctggactctt

SEQ ID NO: 722645 - DNA, 91 bp, Homo sapiens
gagaaacccactgaagacgtctgcgtgagaatagagaccaccgagattggcggcagtaagcacacaatgaatgatcacctgcatgtcggca

SEQ ID NO: 722646 - DNA, 74 bp, Homo sapiens
gtggctatgggggctctggtgatggactcatccccacaggcattgaatgccccagaggagcccgaaacctccca

SEQ ID NO: 722647 - DNA, 100 bp, Homo sapiens
ttatggataccaaggaagagaagaaggaacggaaacaaagttattttgctcgactcaccccacacagaccgcgtttctctccagtgtcgacctacacact

SEQ ID NO: 722648 - DNA, 90 bp, Homo sapiens
gccttatctttctgactctaagtggcattcaagggtgttcctgaaaagaaggtacttccaatcaccgtccccaagtcaccagcctttgca

SEQ ID NO: 722649 - DNA, 76 bp, Homo sapiens
ctgctacaaaaacaaggtcgtcggctggcggagcggcgtgagtagcccatcgaagccagagcagtgaaggagtcag

SEQ ID NO: 722650 - DNA, 100 bp, Homo sapiens
tccgctccccatacggcggccccagaattgagcccctgagtcctgagttggtggcagctgcatctgctgtggcagattctctcccttttgataagcaaac

SEQ ID NO: 722651 - DNA, 75 bp, Homo sapiens
aaggtggtctaccggcgcttcaccgagatctacgagttccatatgctgcctcgaactctgtcactgagaccccac

SEQ ID NO: 722652 - DNA, 98 bp, Homo sapiens
agatgcctggggagtgccctgaatgtctctgcaatgaaatgtggcctcttgccaatctccccggaggcgctttcccttggagaagtggcttatcatga

SEQ ID NO: 722653 - DNA, 98 bp, Homo sapiens
gcctcagcctctcgagtagctgggattacagcaggacgtccaggacgggaacaccacagtgcactacgccctcctcagcgcctcctgggctgtgctct

SEQ ID NO: 722654 - DNA, 101 bp, Homo sapiens
caagtgtttcatgtcaatgcctttggatttccacccactgagccctctagtactactaggctctttattgagaaactaccaaaacatcgagattacaaatc

SEQ ID NO: 722655 - DNA, 113 bp, Homo sapiens
tactgtctttttcttcaatgggcagcatatgaaagtggattatgggtgcaagtgaaagtgtaggaaaacatatgcttgaagcgtgcaacaataatctggaaatggcagtcact

SEQ ID NO: 722656 - DNA, 100 bp, Homo sapiens
gcggtggcagtcagcagccggcagcagcagcgggaggcaaaaccttcaactgaggacttgggggataagaaggaaggtgaatatattaaactcaaagtca

SEQ ID NO: 722657 - DNA, 83 bp, Homo sapiens
tctggcgggaccggtttggaagactttgccggcctgcagacaatgcagatcttcgtgaagactctgactggtaagaccatcac

SEQ ID NO: 722658 - DNA, 100 bp, Homo sapiens
gattttgcagttacctgggatccatggagtcctgctataaggtggatgggaagagagtcccaagggatgcagggcatcctctgtacccctttaatgaccc

SEQ ID NO: 722659 - DNA, 75 bp, Homo sapiens
cagcagccctccagctacttcctgcctgccatgccccaggttcagctctatgaagattttgctaagtctcgtgcc

SEQ ID NO: 722660 - DNA, 99 bp, Homo sapiens
gtctcagcagacccttcctgagggccgagcaacagtgtagtggcgtattccacatagcaaacaggtgtcatggagaaactccagctgggcccagagatt

SEQ ID NO: 722661 - DNA, 106 bp, Homo sapiens
caaaatggcgactgtcattcacaaccccctgaaagcacaagttggatggcttgaggactggtactaaaaggaaacgtgactgggaggccattgccagcagaatgga

SEQ ID NO: 722662 - DNA, 74 bp, Homo sapiens
ctcatctttggaaaaggaacccgtgtgactgtggaaccaaaatgatatggaacctagcaaagctgttccactga

SEQ ID NO: 722663 - DNA, 128 bp, Homo sapiens
agtgaatggatttggagaagagaacactctaatgcaggatctaaagccttttcgcattttaatcagtttactggacaaacctgagctagatcggtttgggcttggccagccaggaagaatacctggtt

SEQ ID NO: 722664 - DNA, 96 bp, Homo sapiens
cagtggaatatgaaagagacaaatgaagtagtggacagagaaagacttgacagtttgcttttaagggaaggaaactgaaaaggccaaggaacgata

SEQ ID NO: 722665 - DNA, 90 bp, Homo sapiens
ctctatatgaaaaggaactccctgacatccttgtgtctttctcgagaagcaggtggaaacatgagcattcagtttcttggtacagtggta

SEQ ID NO: 722666 - DNA, 73 bp, Homo sapiens
agagctacagatcacaaatgtgatggaggaaatatttgatgatgcgtcacctggaaagcaaaaggaaatccaa

SEQ ID NO: 722667 - DNA, 90 bp, Homo sapiens
agaagagatgtgagacttcccttggaagttgaaaaacagattggctgcaatgccgtcagctgggcccctgctgttgtacctggaagcctc

SEQ ID NO: 722668 - DNA, 100 bp, Homo sapiens
tgactgaacttcctcctggccccgaggacccagggaagcacctctttgagatcagcccaggaactctaatgaatcattgattgaccagcactattttacc

SEQ ID NO: 722669 - DNA, 74 bp, Homo sapiens
tgaaatctggcaactatacagtgttacaagttgtggaagcccttggatgttacatcctgtccactgcagacaac

SEQ ID NO: 722670 - DNA, 100 bp, Homo sapiens
cccgcgcccgcccaggggtcgctgtcgcctgctgctggctcctcactgcctaccgtatgtgaacgggagctgtgtgtgtttgcttttcaaaccctgggag

SEQ ID NO: 722671 - DNA, 100 bp, Homo sapiens
taatggatgtagtatatacctgggcaactggagctacatttgcccatatctgcaaaatgacagatgtctttgaaggttgtccttctattcaggccactct

SEQ ID NO: 722672 - DNA, 83 bp, Homo sapiens
tgcacacgccggacttcgcaggcccagacgacgcgcgcgcagtgtttcccattaaacactaccaggacaaaatcaggccttac

SEQ ID NO: 722673 - DNA, 98 bp, Homo sapiens
cctggcttgggccgtgggcttcgtgagctccatgggctcggggaaccccgcgcccgtgcaactgcagatagaagacctgactcgtaaactgcgcacag

SEQ ID NO: 722674 - DNA, 100 bp, Homo sapiens
ctgagcgcactctggagggattctggcatcagggaggctttcagccggagaagcgagtttcagctgtgaatctacagacctattttctcaggagctcagc

SEQ ID NO: 722675 - DNA, 75 bp, Homo sapiens
aagccagactgggcacacaccggcagccacagctccgaagctggcaagaaggaatcagagatcattgatttcttc

SEQ ID NO: 722676 - DNA, 137 bp, Homo sapiens
cagacagacagtgtgagattcatggccacgcagtgctttgcaacgctaattagactcatgccacttgaggttctgtccacggtgtgtccaggaaaagaggaagaagaagtaggaggagctgtgtgcccggatccgag

SEQ ID NO: 722677 - DNA, 82 bp, Homo sapiens
ctgggattacagtcagccactgcaccggaaatgttttcaaccgtgacccataaagaaaactgtcgctgaaaagcaggagaag

SEQ ID NO: 722678 - DNA, 90 bp, Homo sapiens
gctcagtttgatgcgtcacactacgacagtgagaaaggagggcacctgtgctggttgcacttgctttgattgaatgtggaatgaagtacg

SEQ ID NO: 722679 - DNA, 96 bp, Homo sapiens
catcgcacaggatgccctgcacatccccaggctcctggagccagaaggatgaggatgaagatgacgctgatctctcaaaatataatcttgatgcca

SEQ ID NO: 722680 - DNA, 78 bp, Homo sapiens
aactcagcgaattgtaatggaaagcatatggacaggtctacgccacatcacttagagttgaagtattgataacaccaa

SEQ ID NO: 722681 - DNA, 100 bp, Homo sapiens
gttgagccgggcagtgtgcggagatagagtttcaccatgttgtccagggtggtctcaaaactcctgagctcaagcgatctgcctgcctctgcttcccaaa

SEQ ID NO: 722682 - DNA, 74 bp, Homo sapiens
cttagaatataaatcaatggttgatgcaaggaactgctcgcagaaagaagaaggtggttcatagaacagccaca

SEQ ID NO: 722683 - DNA, 74 bp, Homo sapiens
ttaaggtgcccgagtccacgctgatggactgccgtagactggcccgaacctgtaacttgatcttgattgttctg

SEQ ID NO: 722684 - DNA, 100 bp, Homo sapiens
agagaccatgtgctatgcctacatgaagcaggatgtatatggaatgttactcaatttagaaaaacatcaaagtcacttgcaagccaaaagtctgctccca

SEQ ID NO: 722685 - DNA, 100 bp, Homo sapiens
caatgtagaggatgacttctctaatcagttacgaattgtattcctattgaagagcagcttcagttggtgttgggcaatgctggatacaagcaaatgactg

SEQ ID NO: 722686 - DNA, 100 bp, Homo sapiens
agcagaccgccttggaactggccaggagaggttgtggggatgttccatccctccgttcagttgtgaagacctctgctctgccctcagctgcaaccagagc

SEQ ID NO: 722687 - DNA, 101 bp, Homo sapiens
tgcagttcatcagccaccgattcccagaagatcatgatcccaccattggaagcaaaatgaaatttctgcaaaagaaatgaaatctctgattgtctccatcc

SEQ ID NO: 722688 - DNA, 98 bp, Homo sapiens
aacagtgccggcgctgggccttttagcgccacagttaatgtaaccaccaagaaaacgcgaaattccattcttcttctgacagccagacggttagagct

SEQ ID NO: 722689 - DNA, 100 bp, Homo sapiens
caatagctgaagtttttcatgtcccagaaggaggagcatattatttaatatctagaagtctagggccagaatttggtggtgcaattggtctaatcttcgc

SEQ ID NO: 722690 - DNA, 98 bp, Homo sapiens
ttgccccgctatgacgtgctgggggtcatcgacagctgcaaggaggccgtcaccttcaaggccgtcagacaagtgtcccagaagcttttgttgacaat

SEQ ID NO: 722691 - DNA, 75 bp, Homo sapiens
taccttggagaggctgtgagccacaatgcatcgctggaagtagccagatcagaattcaggctataaatgaaattg

SEQ ID NO: 722692 - DNA, 90 bp, Homo sapiens
tgaagttaatggttctatgaaacagtgtatcaaagtgtggactgagactctcagcgttctcatctctcttccttcaccatgaagctgatg

SEQ ID NO: 722693 - DNA, 100 bp, Homo sapiens
agggacagcttaggaccagaagcctttcgcggagaaaaggctgacatgcccgtcctatatgacagcatacacaagctgagggagaatgtctttcaagagc

SEQ ID NO: 722694 - DNA, 98 bp, Homo sapiens
taaaagtcctccaaaaatgagcaagtccatgtgaaatcttcatggaaaatgacaagcagtggatcacatatgtgtttatagcagatacaggagctggc

SEQ ID NO: 722695 - DNA, 75 bp, Homo sapiens
tcatcccagccatgtcatcttatctacgaaatgattcaggtaaatattgcagattttcaagagaatcagtgggtg

SEQ ID NO: 722696 - DNA, 75 bp, Homo sapiens
cccaactctaagtgcccacttctgaaggatgacctcgttttgatggacagcactgcctgctgggctgggacattt

SEQ ID NO: 722697 - DNA, 74 bp, Homo sapiens
gtctagatgtaaatgtcagtggaaaggagagctaccatcactaaggattctataaacctggagagtaatcctaa

SEQ ID NO: 722698 - DNA, 51 bp, Homo sapiens
atggaacatttgaagtcacgtaaagaagtattgactcggagacaaaaagag

SEQ ID NO: 722699 - DNA, 82 bp, Homo sapiens
tcagggatcgtgaaggacgccagcatcatacaccggctgttcgaggccttgactgtaggtactctctgaagatggcagaagc

SEQ ID NO: 722700 - DNA, 80 bp, Homo sapiens
atacaggtcggagaggtcagcaacagggacatcgtggagacggtgctcaacctggcgagaaccactgtctctgatcaacg

SEQ ID NO: 722701 - DNA, 100 bp, Homo sapiens
atttgaagatattagcctaacaagatggaagcaggtttaaaattttacataagaagttacctttttcagatgggaaagggctccttcaagtatgcctggg

SEQ ID NO: 722702 - DNA, 75 bp, Homo sapiens
cggggcgccagtccgggcaggggcagcgggagccggccggtcctcctgcatatgcccaagaggattgggagtgga

SEQ ID NO: 722703 - DNA, 83 bp, Homo sapiens
ctggacctgttcgagatcagccagccgaccgagcaattctgtggtgttcttggtcacacatttatggagtttctgaagggcag

SEQ ID NO: 722704 - DNA, 100 bp, Homo sapiens
ctgtccccagagcctcagtttgtgcaggacaccgacatggaacagggactcactggggcatcagcgagagctttctaactgtcaaaggtgctgccctttt

SEQ ID NO: 722705 - DNA, 80 bp, Homo sapiens
gctttccaaaatggcgcgggtgctgaaggctgcagccgcgaatgccgtaggtctgaaggggcgtctcgattacctgagct

SEQ ID NO: 722706 - DNA, 100 bp, Homo sapiens
cgcgcgcccaagctcggcggacggcagtgccccaggcagtgctggcactcctgtcacttttaatgaaaacggagatgctcctggacgttatgatatcttc

SEQ ID NO: 722707 - DNA, 82 bp, Homo sapiens
gagaaggtgctggagctggaggacgaggaattacatgaatgacagtcttcgaaccaatgtgtttgttcgatttcaaccagag

SEQ ID NO: 722708 - DNA, 100 bp, Homo sapiens
agcaggttttaaatcaagatttaacattccaacacataaaaattatttatccaacagctcctcccaggtccgtggcactcaggtagttggttctgacatg

SEQ ID NO: 722709 - DNA, 98 bp, Homo sapiens
accagtccacgtgtggcaggaccaagggaagtgtcttcacaaagatgagggctcattgtcatccccaagccaggccagttctccaggtggaactgtag

SEQ ID NO: 722710 - DNA, 76 bp, Homo sapiens
aagatcacaagatgttgatcagcttcgtgatatcaaagagtggttcccctctctcagcgaagtggtgttcttgaat

SEQ ID NO: 722711 - DNA, 90 bp, Homo sapiens
cgagccaaagaggagccggccgcgcgggccgggaggggacggccgccggagccgcgaggccaaatcatgatgctgccgccaccgccgcca

SEQ ID NO: 722712 - DNA, 100 bp, Homo sapiens
acacacatcaccacatggaatcagctcaatatgttggagcagcaataactaaaggtcaatatgatgaagaagagatgactatgcaacaagctaaaagaag

SEQ ID NO: 722713 - DNA, 83 bp, Homo sapiens
gtcagtgagaccaagaacccaccaattccggacacgttaatggaaacctcaggaacagacatgctgagtgattcagataatag

SEQ ID NO: 722714 - DNA, 87 bp, Homo sapiens
actactactacatggacgtctggggcaaagggaccacggtcaccgtctcctcaggtctcaccaacggctttgggggtgcgaggagcg

SEQ ID NO: 722715 - DNA, 117 bp, Homo sapiens
cggacagccgcgcgctgagggtctcggggcgggcgccgcgggacctctccgggccatgggaggcatacacggaatacctgaggagcatccactatatctcccaggtgttactagaag

SEQ ID NO: 722716 - DNA, 75 bp, Homo sapiens
cgcccagccctgccagctgcgccgggacgttaacaagcacaagccctggctggagcccacctaccacggcatagt

SEQ ID NO: 722717 - DNA, 76 bp, Homo sapiens
ttagctgctgtcatcaagccctttgccaccattccttcaaatgagaccattcctcaagaattttgtatccaaggcc

SEQ ID NO: 722718 - DNA, 98 bp, Homo sapiens
gcatgatccgtcttcaccctgatgggacagtgctgtatgggctcagctagagatgatcgctatggaaaatcctgcagacttgaagaagcagttgtatg

SEQ ID NO: 722719 - DNA, 100 bp, Homo sapiens
tggaatattggggggctcggctgcagacttggccaaatggacgggactattaagaaggacagaataacgggctcccagattcacaagccccaccaagagg

SEQ ID NO: 722720 - DNA, 75 bp, Homo sapiens
caggactggggacttccagctacacactaatgtaggagaattctgcctaagccaactcgaaaaagccgtacaaaa

SEQ ID NO: 722721 - DNA, 76 bp, Homo sapiens
tttgacaccaataattttcaaggaagaaaatcttaggatggtgtctgagctaaaagaccattttttgagacaccta

SEQ ID NO: 722722 - DNA, 75 bp, Homo sapiens
ctgcagcctgccatgggacgtggggtccaccggtacaggtctgtttctgtcgactgtggaccacttatgtgcgat

SEQ ID NO: 722723 - DNA, 75 bp, Homo sapiens
tgcactgctgttctagagcagggatcagcaaacttgctgtaaagagccagttaaacccctaaagggagaccatct

SEQ ID NO: 722724 - DNA, 90 bp, Homo sapiens
ctgaacttccctgtgtcccgcaatgccaacctcagcaccatcaagcagcacgagtacacgagacaggattgagaaaggagagattcaaat

SEQ ID NO: 722725 - DNA, 100 bp, Homo sapiens
agtccattgactatgcagcctaatgacaatgaatgattttgactatttgaaactactaggtaaaggcacttttgggaaagttattttggttcgagagaag

SEQ ID NO: 722726 - DNA, 100 bp, Homo sapiens
atctatgatgctgatggtgatggagattttgatgtggatgatgccaaagttttattaggtaaaagtgcagttttaaagtgtctcctggatattcacaaaa

SEQ ID NO: 722727 - DNA, 100 bp, Homo sapiens
tcagggccctccaggacccaagggcgccaaaggagaagtgggcccccccggaccaccaggtgcccagtcccctggaaggcagtgaaggggacggagacac

SEQ ID NO: 722728 - DNA, 75 bp, Homo sapiens
tccgtctggatcacggatgtaggaagtgcttactttgcaaagaaggaagatggttgtttccgaagtggacatcgc

SEQ ID NO: 722729 - DNA, 83 bp, Homo sapiens
gcacggaaagcagcgtcaggagccatagtacctacagcagcactccaggatcgaagtagaatgtatgacagtttgaatatgca

SEQ ID NO: 722730 - DNA, 98 bp, Homo sapiens
gaaaaggagttcgagcagatcgacaagtccgggagctgggcggccatttaccagtaattcgccaaaatgacgaacacaaagggaaagaggagaggcac

SEQ ID NO: 722731 - DNA, 83 bp, Homo sapiens
tgaagcgcgagcgcgacgagtataagcggaggaggagagacttcagcatgcaaaccttcatctgttcggcttgcaccgtcatt

SEQ ID NO: 722732 - DNA, 87 bp, Homo sapiens
gccaggacaatggggacccgggacgacgagtacgactacctattcaaaggagcatcagatccatgctgctgctgactcggagcccca

SEQ ID NO: 722733 - DNA, 90 bp, Homo sapiens
agacaaatcatcaggaatccattatggtgtcattacatgtgaaggctgcaagaaacttattggagaagtgtttaatattgtgagccaaca

SEQ ID NO: 722734 - DNA, 134 bp, Homo sapiens
cctgcgccgacacgctgcgctaccaggccaacaactgccccatctgccggctgcgatgctgaaaacgccattcaacagatgggtggccagtggcttggtggaagacaaatcagaactaactgggcaacccgaaa

SEQ ID NO: 722735 - DNA, 74 bp, Homo sapiens
gagcgccggaagcggtccgagaatgaagagtgatgagtatgagctaaaaattcaactagaagaacaaaaaagag

SEQ ID NO: 722736 - DNA, 75 bp, Homo sapiens
ccacacacgcactgtttggaagaggggaagcctcctgacaaggtgatccgggcgggccccgcaggaattttatcc

SEQ ID NO: 722737 - DNA, 88 bp, Homo sapiens
cagacccggcgcccagcggtagccctccttgcgcctccgattcccaggatatgctgcaggctgctagtcattatcgccaaaatagaaa

SEQ ID NO: 722738 - DNA, 90 bp, Homo sapiens
aggcaggaagcagcccccagcctcggacgccgtggcccttgggagagagttgtcgccgtgatcctgaaggcgctgacctacgacgagaag

SEQ ID NO: 722739 - DNA, 89 bp, Homo sapiens
ttttctctggaaatccttgtaatcttgaaggaatggacctcaaagtactggtagttaactctcaaggagaaatttcacggttgagcacc

SEQ ID NO: 722740 - DNA, 87 bp, Homo sapiens
caaaacataccaattcttgaatgacatccgagcgaaagagaaagagagtggaaggccgtctctgagactactttcagagaagatcct

SEQ ID NO: 722741 - DNA, 101 bp, Homo sapiens
tagaaggttggctttcacaagtacagtctacaaaaagacctgctagagccattattgccccaagcttgagtgcccaagggtttgataaatgtggaaaataa

SEQ ID NO: 722742 - DNA, 107 bp, Homo sapiens
gggaagacgcggggaagaggaggcggaaaaggacgcaaagttctccggcgagacaatgcagatcttcgtgaagactctgactggtaagaccatcaccctcgaggttg

SEQ ID NO: 722743 - DNA, 100 bp, Homo sapiens
tgatgttcactggaaggaaaatgggacattagttcaagtagcaactatatcagcacttttccagccattaactccaggctctcgagaatttgaagatgtt

SEQ ID NO: 722744 - DNA, 75 bp, Homo sapiens
gctccaagacctcatcaacaattaagaacggtgtgctgctgaggactgtcttggaccctgtcactggggatttgt

SEQ ID NO: 722745 - DNA, 51 bp, Homo sapiens
ggcaaggaccaccacgggaggacgattcttggtgccaccattgagaactcc

SEQ ID NO: 722746 - DNA, 112 bp, Homo sapiens
cagatgatgcggtggtgggggacctgccggcacgcgactccccccgggcccaaaggagtgcatccgccccaacccttttccccctcgtctcctgtgagaattccccgtcgga

SEQ ID NO: 722747 - DNA, 75 bp, Homo sapiens
gatgagctggtgtcagagttcaccaattcaaataaccatttggctgctgattcgatgctcctgccagcatttgtc

SEQ ID NO: 722748 - DNA, 85 bp, Homo sapiens
catgagcacctcatacggctgcttctggagaaggtttggagagaagatggcttttatccctcagaacctgtttttgttccagcac

SEQ ID NO: 722749 - DNA, 124 bp, Homo sapiens
ggtggcgctgctcatcgtttgcgacgttccctcagcctctgcccaaagaaagaaggaggcatcaacttctaactcatctcgccaggagaggcctccagtgaaacccttcattctcactcggaac

SEQ ID NO: 722750 - DNA, 98 bp, Homo sapiens
cgcgcgctcgattccccccacgcggcggcgccgcctgtttacgggcagctgtgcggagggtagtggcagccatgaaccggatggaccagaagaagcac

SEQ ID NO: 722751 - DNA, 48 bp, Homo sapiens
ggcaacctccgggactctgacggctgtattcatcaccaaagaaaaaac

SEQ ID NO: 722752 - DNA, 131 bp, Homo sapiens
ttcgaggccaaatatgtgcacttgcccatctggtcagatagctccttcctgtggctccagatccagtgaagaagctaagtctcagaaagataactcacccaagaggacacaaggataaacctgatacccat

SEQ ID NO: 722753 - DNA, 100 bp, Homo sapiens
gtcagtactggcatgtgccttatgaccctcgaccctgatgctcccataagacagaaaatgccccttgatgatctggatagagaagatgaagttagattac

SEQ ID NO: 722754 - DNA, 100 bp, Homo sapiens
acatttccatcaaaccctgagagctttattaccagacatgatctttcagatataaagatgaagcgcagctgtataaagaagagcacctgaggaatcggca

SEQ ID NO: 722755 - DNA, 101 bp, Homo sapiens
ctgggaacctactgtggggccgcggccggaccgagcgcctcgacctcggtctgaggcagcagtgaggatgccagagttcatgggtttctagaagacaagtt

SEQ ID NO: 722756 - DNA, 74 bp, Homo sapiens
ggggagtggaaaggctctcagtgaaaaagcttctcggacaaactatttagtggaaaaggcttacattttcagcc

SEQ ID NO: 722757 - DNA, 148 bp, Homo sapiens
ctagcttccagatggctggggagtggctaaagtatcaactatcaacttttcttgatgctggttctgtgaattggacagtatggaaattaccagcagtgaaaaagtacttacattccagtagccagtatctattagcagccatattgtc

SEQ ID NO: 722758 - DNA, 97 bp, Homo sapiens
ttcatatcaacactaccaaaaataatccagtgatgtcattgcaagatcagcttgaagtacaatcttgttgtgtgtttattccaaatgatagcctgcc

SEQ ID NO: 722759 - DNA, 78 bp, Homo sapiens
ggccctcggtgctctgaggcgctggcgcggcgggcgcggagtgatcagcagctggactgtgccttggacctaatgagg

SEQ ID NO: 722760 - DNA, 97 bp, Homo sapiens
tcagaagagccaaggaataaacatgcaatgaacccaaaaggttggattggatgctgctggcaagacaaccattctgtataaactgaagttaggggag

SEQ ID NO: 722761 - DNA, 50 bp, Homo sapiens
cagctgaaagcgtgaactgtatgtacattgaagatgtcagtttctacatg

SEQ ID NO: 722762 - DNA, 96 bp, Homo sapiens
gatgggaactccagatgtgcgcattgacaccaggctcaacaaagctgtctgggccaaaggaataagtttattaaccttgcaagaactcttcaggca

SEQ ID NO: 722763 - DNA, 98 bp, Homo sapiens
cccttgaatctgccgacttttgtaacaaatatttgcggtttcagcctcaacccagaggaatcgttactctttcagggacacggtattcctctctggcc

SEQ ID NO: 722764 - DNA, 90 bp, Homo sapiens
cccaagttctgcagccagtgcggagagaggctgcctcctgcagcccccatagcaggaatagccaggccagaagaaggaaggcctgtggtg

SEQ ID NO: 722765 - DNA, 83 bp, Homo sapiens
ccgctctgagggccccggcccctggatgcacagccccggcgctggccgactcgcgggccgctgcacccaccgccaaggacaaa

SEQ ID NO: 722766 - DNA, 100 bp, Homo sapiens
gtggtgggccgagggctgctcggccgccgcagcctcgccgcgctgggagccgcctgcgcccgccgaggcctcggaattgaatgatctggcacgggaccct

SEQ ID NO: 722767 - DNA, 75 bp, Homo sapiens
tcataggtggcactcatgtctcactgccccactcaggtctgtcgcacttagtagcagcatcatttacagaggata

SEQ ID NO: 722768 - DNA, 82 bp, Homo sapiens
ctcaaaaacaaaattctgaactcaggacttggcaagtgactttaggcagatcttttgccaagcatgccttagagaagaacct

SEQ ID NO: 722769 - DNA, 75 bp, Homo sapiens
aggaaacctcttagaaaaaagagtagatctgaataatgtggctgctacagcccgggtcctagttattggagctac

SEQ ID NO: 722770 - DNA, 98 bp, Homo sapiens
acttgccgcgtcgaggactgtcgggagctggaggagggaatgatattcagtggtgtttttctcaggtgaaaggagcagtagatgatgatgtagcagaa

SEQ ID NO: 722771 - DNA, 101 bp, Homo sapiens
gccgcgcagcagcaaaggatgagcggaaccttggaaaagatcctatagcaatggaactcagcgatgcaaatctgcaaacactaacagaatatttaaagaaa

SEQ ID NO: 722772 - DNA, 102 bp, Homo sapiens
agaatatgtggccacacgttggtacagggctccagaaattatgttgaattccaagctgtccgcaggcttgtccaaaaggaaacatcggaatgaccacttaac

SEQ ID NO: 722773 - DNA, 50 bp, Homo sapiens
gggaaaacaaggtggacccgggaagaggcaaccacacctccaaatcaagg

SEQ ID NO: 722774 - DNA, 98 bp, Homo sapiens
ggcgccatccgggaccggcggttgtctgtggccggaggctgatcagcatcctgaggttagcattacacttctcccagtggagcccatgacttctgatc

SEQ ID NO: 722775 - DNA, 80 bp, Homo sapiens
cgcagtccaagtcccggaagatcgcgatcctgggctaccggtctgtggtgggagctggtgaggtggccaacttcgctgcg

SEQ ID NO: 722776 - DNA, 100 bp, Homo sapiens
gccagagaggacgtttccaactcaaaaatcaagtcatttggaacagcaacttgaagaagctaatgctgtgaggcaagaactagatgatgcttttagacaa

SEQ ID NO: 722777 - DNA, 78 bp, Homo sapiens
tcactgggacccccaggaggtgaccctgcagatgctggcatcaccatctacatcaggtcagctgtctcagtttggggc

SEQ ID NO: 722778 - DNA, 100 bp, Homo sapiens
cctcgtgctggcggcggcggcggcggcggcggcggcgctgctcccgggggcgacggggaagaacagctttgcattggtcctgcaacaatggataccttga

SEQ ID NO: 722779 - DNA, 98 bp, Homo sapiens
aagagaaaaagaacattactgtcttgggtcaaagaattgactgtagatccaactgctgctggtgatgttcgtccaataatgcaccatccaccaaacca

SEQ ID NO: 722780 - DNA, 100 bp, Homo sapiens
ttctctgaatgatgaatacttttactactgtgacaacattaacggtccttccatagtgacgccccccaaggacatctggaatgtcactggtgcccaggtg

SEQ ID NO: 722781 - DNA, 75 bp, Homo sapiens
gtcggactcccgcggcgggaggagcctgttcccctgaggacaaacagaggatgtgcagatgctcctgcgctttgg

SEQ ID NO: 722782 - DNA, 74 bp, Homo sapiens
gtcagggggactgcaaaggccaatgttggtgctggcaaaaaggccatccgggatggtgtcattgaggccagcat

SEQ ID NO: 722783 - DNA, 90 bp, Homo sapiens
gcctgtacctgttttatacttgcttttgcttcagcgttctgtggttgtcaacagttgtgattccaaagaatccctatcctgcctccgatg

SEQ ID NO: 722784 - DNA, 99 bp, Homo sapiens
ggcggcggcaccccgggcgcgttaacaagcacaagccctggctggagcccacctaccacggcatagtcacagagaacgacaacaccgtgctcctcgacc

SEQ ID NO: 722785 - DNA, 50 bp, Homo sapiens
ccgcgctggtggacatcgtcagaattcctagaggacctgtgcaacaacct

SEQ ID NO: 722786 - DNA, 100 bp, Homo sapiens
aaggcaagatgggagccaacgtctgtcagaagcccagtggtatcctaaagtgaagtcactgcttttgctgtcttggatcaagaccagaaagaaattattg

SEQ ID NO: 722787 - DNA, 76 bp, Homo sapiens
ggggcaaccactgcgagtactgcttcaccagtcgtccagcatgctctgcccaccccacgccgaggtgcactgacca

SEQ ID NO: 722788 - DNA, 100 bp, Homo sapiens
aatgaactgatcaagcttgcctcaagtgaaccccgaatgcatctaggtaccaatggagccaactgtggtggaggtgctgatactcaaagaaggtttaagt

SEQ ID NO: 722789 - DNA, 100 bp, Homo sapiens
cggagccgcggaactcggcggccgccatggcgtccaacatggaccgggagatgatcctggcggattttcagaaagaagattggcccatgcacaagctgga

SEQ ID NO: 722790 - DNA, 95 bp, Homo sapiens
tcatggtagcacctgtctgatgacgttattacaagatggactcaccctgtcacccaggttggactgcactggcctcaacctcctgagttcaagtg

SEQ ID NO: 722791 - DNA, 100 bp, Homo sapiens
ccgtgctgcacggaagaatatcagctccaggaagatgttaccgagtacttcagtgaattccttagtgcaggggaacggagtcttgaattccagggatgcg

SEQ ID NO: 722792 - DNA, 75 bp, Homo sapiens
gaacgactgggttcgcctgcccagcaaatgcgaagcctcctcttaaaagaagaattggaccctttaaaggtcagc

SEQ ID NO: 722793 - DNA, 99 bp, Homo sapiens
gcggctctgcgctggccgggggcgcgggcggcggcgccggcaggaagtattctaccttgtaaatactgttatttgtatatactgtaaatgatgacatcg

SEQ ID NO: 722794 - DNA, 73 bp, Homo sapiens
aggtgtgtcacactgagctgctgctcagtcaggtttcccaaaagtgtgcaacttgctttggtgtttgctgttt

SEQ ID NO: 722795 - DNA, 90 bp, Homo sapiens
atgtggcaaaattactgtatatgcacatgctgggctaccctgctcactttggacagcctacaacacagcagtcccctcaggatgagcagg

SEQ ID NO: 722796 - DNA, 83 bp, Homo sapiens
cagcgttctgcgtcatgggggagtgctgatcaactaaaagaggcagagaatgactctaccctgcatgtacgaccaatgtaaac

SEQ ID NO: 722797 - DNA, 73 bp, Homo sapiens
tcctcagcttggaccccacgctgacctgtttcgcaaacacgttctgtgctgcgccccctccaacatcgccgtg

SEQ ID NO: 722798 - DNA, 101 bp, Homo sapiens
accgccgagcctgcagcctgccccgcggccaacatgagcttcttgttggctgtggcagtctgtccacatcgatgacctccggagatccaccctcatggttt

SEQ ID NO: 722799 - DNA, 90 bp, Homo sapiens
cctttacaccagagaagatcaaaggtggaatccacacagcagataccaagacagcaggaggagctgatcacgcagtacctggctgagctt

SEQ ID NO: 722800 - DNA, 100 bp, Homo sapiens
attgttcctaaaccagaagaggaggttgcccagaagaaaaaggtgcaatggatgagcttcatagtctggatccaagaaggcaagagttattggaagctag

SEQ ID NO: 722801 - DNA, 75 bp, Homo sapiens
catccagaacttccagctgcccccagtaagactttgaccccgacgcaggcttcagtgattgccgcggatcagaag

SEQ ID NO: 722802 - DNA, 83 bp, Homo sapiens
atcgtctctctcatcgaggcccaaaccgccaagcttcttggacacttaatgattgttggcaagaaatgtgctgctgatctggg

SEQ ID NO: 722803 - DNA, 49 bp, Homo sapiens
agaaacacctaggaagggagaactggcaagtgaaccggagcaaacgact

SEQ ID NO: 722804 - DNA, 83 bp, Homo sapiens
cctcctcggagtccttggggacggagcagcgcgtcgtggggcgagcggcaggtcttgggcgtctttggtactggcttttttag

SEQ ID NO: 722805 - DNA, 100 bp, Homo sapiens
gcctccctgtggccagtagcacagttctcatcccttcccagtcctctctccggccatgtcaacagtgagaggtgctgaacagcattttttttgagcttga

SEQ ID NO: 722806 - DNA, 83 bp, Homo sapiens
tgcccctgaaggcctcgctggagatcgagtaccaagtagttgatgtcacttggcgatattcctgcaaacatgaagaggtgatt

SEQ ID NO: 722807 - DNA, 100 bp, Homo sapiens
gatgatcagacaaggcaaagcgaaattggtcattctcgctaacaactgcccagctttgaggccaaggatccaccacaacacttcagaaacgctttgaacc

SEQ ID NO: 722808 - DNA, 95 bp, Homo sapiens
tcgtaacgtcaaagtaccaagataaaaaaagtttcctataactggagttttaaggtaatctatttaaagaagacaccagaagaagcctacagagc

SEQ ID NO: 722809 - DNA, 100 bp, Homo sapiens
tttctcttcatattttctcacatatacaacacgattcttctaatggatgggaacatgggtgggttgccagcgttgatgtggtggagaatgaagaggccag

SEQ ID NO: 722810 - DNA, 100 bp, Homo sapiens
gcggtgtcgaggctctccctgcacagcatcgcgcagaacaaagggatcaggtgtggaacccgccgtccccgctatggtccgaggaagtgtacagcactgc

SEQ ID NO: 722811 - DNA, 149 bp, Homo sapiens
gcggcggcggaagatggtgccgggggtcgctggctctgctgctgccgccggcgaaggaggaggcgttgccggaactctaagaaggagctgatgtggaggagcagctgagacagttcaagatgacgaccacagtagccacagactatgac

SEQ ID NO: 722812 - DNA, 89 bp, Homo sapiens
gaagcaagcagttcagaagagccaaggaataaacatgcaatgaacccaaaagggtgaccttgagtatctttgagctggcatctgctgca

SEQ ID NO: 722813 - DNA, 101 bp, Homo sapiens
gcgttgctcttgcttttcctcgctggggtgtacggtggagcgctttagtcaggaggtgcaggttccagaggctcgctgtttctatggctttcaaattctca

SEQ ID NO: 722814 - DNA, 50 bp, Homo sapiens
cagacggccaaggccgtccgggagaaggtgacaatctccaatagacttgt

SEQ ID NO: 722815 - DNA, 100 bp, Homo sapiens
ctgggcctggctccctggctggccagcctctgcttggcatccccttgctggacagtggctgtgttctctgggacctggtacgccatggccaagaaggacc

SEQ ID NO: 722816 - DNA, 82 bp, Homo sapiens
gctgaagcgactgagtccgcgatggaggatattaccttccaaatgatgatggagaattttatcagttctgttacgttaccca

SEQ ID NO: 722817 - DNA, 100 bp, Homo sapiens
aatcatcactggcgatctacaattggcatgcttcgagaatcaaggcttcttgctcatttgccaaaggaaatgacgatgacaactggggagagaccaccac

SEQ ID NO: 722818 - DNA, 75 bp, Homo sapiens
cgaaacatcgcctccatctgtaatatggttcgaggtgaattgctgcgggagagagtgcagcggatggaggcacag

SEQ ID NO: 722819 - DNA, 50 bp, Homo sapiens
ggaaaaggacgcaaagttctccggcgagcatttcctgtgttacatctgca

SEQ ID NO: 722820 - DNA, 80 bp, Homo sapiens
ggcagtccacccaccgccgccgcctcccagttgtaatttagattcgagaagtggtttatcctttgactggaaaagaaaag

SEQ ID NO: 722821 - DNA, 48 bp, Homo sapiens
agtatgttaagtcatctgcttgggaaattacttgctggacagaagaaa

SEQ ID NO: 722822 - DNA, 74 bp, Homo sapiens
ccatagtacctacagcagcactccaggtacatgtcccagagcaagcacacggaggcccgggagctcatgtactc

SEQ ID NO: 722823 - DNA, 75 bp, Homo sapiens
aggtgcctgccggggcagaggccatcccagagcccgtggtgaggtcggtgagctggtaaaggttacgaagattaa

SEQ ID NO: 722824 - DNA, 75 bp, Homo sapiens
ctggcaggagcacatgagagagatgacagtcatgtccctttccagggacctcaaggacgactttcacagtgacac

SEQ ID NO: 722825 - DNA, 75 bp, Homo sapiens
cgggtcttccagagcgtgaagatcaagatcgaaggacagaataacgggctcccagattcacaagccccaccaaga

SEQ ID NO: 722826 - DNA, 82 bp, Homo sapiens
attgacttcatcaaaaagtttcttaaacttgtggcctcagaacagttgtcgtggtcgtggtttgcagtttgttgttggtggt

SEQ ID NO: 722827 - DNA, 75 bp, Homo sapiens
atttatgaactgaaccctaataaggagccatggagaaaaatggatcttaggtgggctaccttgagaatggagcga

SEQ ID NO: 722828 - DNA, 75 bp, Homo sapiens
taaaatgcttcaagtagtcctgtgctcaacattgcttatcgaaagccaaacttggccctgctggcaacaaagtca

SEQ ID NO: 722829 - DNA, 100 bp, Homo sapiens
cccacacaggagatccaggtcaccagcatccactggagctacaagaatgcagaggccaggatgtgggcccagccctgtgccaggaggctggctggaataa

SEQ ID NO: 722830 - DNA, 83 bp, Homo sapiens
gtgcgctgctcaaggacacggtctacaccgacttcgacgatccagagacaatggccccgatgggatggagcccgaaggcgtca

SEQ ID NO: 722831 - DNA, 100 bp, Homo sapiens
catcgaggagacgctcgcgctcaagttcgagaacgcggccgccggggatgggcgtgttttgggcgtgctagaggtgtcacgctccattggggacgggcag

SEQ ID NO: 722832 - DNA, 100 bp, Homo sapiens
aggacatattcgatgccatcgtgatggcggatgagaggagtcagagtattcatcgaaaagaaagcacagctaacacttttaggaacagaaatggactatg

SEQ ID NO: 722833 - DNA, 87 bp, Homo sapiens
tgtggctcctccattcaaacatcgacgccatcgacaagcgatctcccttgagtttagaaatctggctgagaaataccaaacagtgat

SEQ ID NO: 722834 - DNA, 127 bp, Homo sapiens
gaagcagtcaggtcaaagaatatggccagaagagggcattctgcacagattgtggaaatttaatggagccaccatttcagaaccaaaagaaatttggaacaaacttcacaaagctggaaaagaaaac

SEQ ID NO: 722835 - DNA, 75 bp, Homo sapiens
agcttctctcattttctttccctgcaccaactagcaggtctccagtccccagatttctgtgcatcctctctcatg

SEQ ID NO: 722836 - DNA, 100 bp, Homo sapiens
ctgccgtctgcaccagccatggactgctacacggcgaactggaacccactcggggactctgccttttaccggttttatgctgggggctcagagagaagtg

SEQ ID NO: 722837 - DNA, 90 bp, Homo sapiens
cgcagtggtcgcttcttctccttggtacttaaagctttcaccaaaacacccagaatcaaatactgctggaatggacatctttgccaaatt

SEQ ID NO: 722838 - DNA, 87 bp, Homo sapiens
ctcagggatcaaagagcaaacagattcagtggcctgcattggtacagatttatgaattagaggaacataaaattgaaacatggaggg

SEQ ID NO: 722839 - DNA, 90 bp, Homo sapiens
ctggtgcagaagccattttttaaacttaggtatttaagtactgaaagacacatcatctcagagttggagcacctgacgtttgtcaacacg

SEQ ID NO: 722840 - DNA, 102 bp, Homo sapiens
ggatgtcatccccatggctgatgcagcaggcatcatccgctatgcaattgggcaggttcaggagaagtggcacctggtggaggacctgtcgcgactgctgcc

SEQ ID NO: 722841 - DNA, 75 bp, Homo sapiens
cagtggattcttggtctcgctgacttcaagaatgaagccacggactgtcgcggtttctgacgtagaagagcttac

SEQ ID NO: 722842 - DNA, 100 bp, Homo sapiens
agagcggcaactcgcgcactcaaagataacaattggtgtatatgatccctgtaacttagcccagtaccctggatggcctttgaggaattttttggtccta

SEQ ID NO: 722843 - DNA, 83 bp, Homo sapiens
gccatgtcgggttattcgagtgaccgagaccgcggccgggaccgaggcagcccctgtcaaagggaacaggaagcagtccacgg

SEQ ID NO: 722844 - DNA, 75 bp, Homo sapiens
gcaccgactatgtcgcctgccaccgagccgggcccacctccccaccaaggaagatcagtcgcatcgaatacattc

SEQ ID NO: 722845 - DNA, 96 bp, Homo sapiens
tgcaaaacttgaattcttctagacagtctgtagatcttttaccaccaatgtctcccctttcgtttgatcctgcctcagaagaagtgtatgcaaaga

SEQ ID NO: 722846 - DNA, 89 bp, Homo sapiens
ccatcacctgctctgctcttataaggatccgagtgaatcacaagcctttgagaacagcctgagccttcagccctcacagatgcccagcc

SEQ ID NO: 722847 - DNA, 100 bp, Homo sapiens
gcagagcctcgcctgggttctggaggctgcggggccatcgctccaggtgtcatggagaaactccagctgggcccagagattctgcagcgggaaaatccaa

SEQ ID NO: 722848 - DNA, 75 bp, Homo sapiens
gtcttccacttgcacgaaagctttcctaggccaaaaagagacatccccgattgaaagaaccagagaggctctgag

SEQ ID NO: 722849 - DNA, 87 bp, Homo sapiens
cctctcgcttgcttccctcggccgggccgtcctcggcggcagtgtcagggtgaggcaggcgactaatcagattgtgatgaattgtgc

SEQ ID NO: 722850 - DNA, 90 bp, Homo sapiens
cctgagatcaaatggcacttcattggccacctacagaaacaaaatgtcaacaaattgatggctccccagttaaagatctcagatgaccgg

SEQ ID NO: 722851 - DNA, 73 bp, Homo sapiens
caggagtgatgctgtgttcttcactgcatgatttcaaaagaatgccagctgatgaagaccgagaggccgcgac

SEQ ID NO: 722852 - DNA, 98 bp, Homo sapiens
tggaggagccgcagtgggtcccggacaaggagcgctgtgcttcgccgtgagccgctcgctgctgctgacgtgcctggtgccggccgcgctgctgggcc

SEQ ID NO: 722853 - DNA, 75 bp, Homo sapiens
gttttatactgcttccatatttacagatattagaaatggctactccccagtcaattttcatctttgcaatctgca

SEQ ID NO: 722854 - DNA, 50 bp, Homo sapiens
ccgcgcgcgcctcgaggccgagtcaaggttctgcttccttcggtgctgcg

SEQ ID NO: 722855 - DNA, 83 bp, Homo sapiens
agatgatccaccagcggttccatcctacacttggggttcaactccaccagtaactgttttcaaaggttcaaaaaaaccttact

SEQ ID NO: 722856 - DNA, 100 bp, Homo sapiens
ggaaaagaagctacagaatctggaagggaagaagcgagagcaggcagaaaggttgggcatgggcttggtatcccgaagagacggggtttcgccatgttgg

SEQ ID NO: 722857 - DNA, 75 bp, Homo sapiens
ctgaagttgcctcttctggtgtcaaagcttttggacattcctggggttttgctgttactgctcagtgtagtcaca

SEQ ID NO: 722858 - DNA, 100 bp, Homo sapiens
gtgaaggtggaacggggctcccaggacctccactaatcaccagaacaaaatgtgcagggctgatcccttatccaacatggttctaaccttcagtactaaa

SEQ ID NO: 722859 - DNA, 116 bp, Homo sapiens
cacaaaagagtctccgcggtggaggtctgcgttgctcttgcttttcctcgctggggtgtacggcatgctggaagatggactgccctccaatggtgtgccccgatctacagccccag

SEQ ID NO: 722860 - DNA, 83 bp, Homo sapiens
tcctcttgatgccaacactctggggaaggtggccagtggcatctgtgacaacttgcttgacatggatttgattgacatacttt

SEQ ID NO: 722861 - DNA, 100 bp, Homo sapiens
caagttctgagcttgatgctgtggagaaccagctcaagtgggcatcctgggagctccattccctaaggcactgtggccgccagatcccacccttggaccc

SEQ ID NO: 722862 - DNA, 100 bp, Homo sapiens
ggaaaatgtccttccagcgctgcgcccggacagacaaggcgggtgccacgtctatgtgggcttcgtgctgtgggctgctgaatgaagtcatgggaactgg

SEQ ID NO: 722863 - DNA, 83 bp, Homo sapiens
cccggcgcaggtgaccggcgcgcgggagcgctacggccccaacggaacctcggagagctgatagatcggtttgtggctgattt

SEQ ID NO: 722864 - DNA, 116 bp, Homo sapiens
gtagccgcagcaccgcagccttgggcctcgcgccggctatggccgtgccctggggctgagccctcagggtttccaggcctgaggtgcccgccctggccccaggagaatgaaccagc

SEQ ID NO: 722865 - DNA, 74 bp, Homo sapiens
ttgctgccgggattttggaggccggggccgcgctgagggcgcccagctggattggtagcttatgtcgatcttga

SEQ ID NO: 722866 - DNA, 100 bp, Homo sapiens
tgactcgtgatctgcccatcttgttactccctagcagtgtggtaagaagctccaccatgaggcgaggtggatggaggaagcgagctgaaaatgatggctg

SEQ ID NO: 722867 - DNA, 100 bp, Homo sapiens
gcacttgcccttagtggccgtcttttgcctctttctctcaggctttcctacaactcatgcccagcagcagcaagcaggtgagcgagtgctgtgctttcat

SEQ ID NO: 722868 - DNA, 82 bp, Homo sapiens
cgctggagcgactctgggattcagacaccgcaagctgctttcggaagggcttcaggaggggcgtgagtgcatctccatccac

SEQ ID NO: 722869 - DNA, 100 bp, Homo sapiens
gctaaagttcggatgatgaaaggagaagacaaagaggagctggatgaaaagatttcctacttcaaaacctacctggagaccaaaggggcagccttgagcc

SEQ ID NO: 722870 - DNA, 75 bp, Homo sapiens
tgttatccagaaagctcttgagtttattccttcagaccagcaggtaattggggtccctaaagatgaagtgttagc

SEQ ID NO: 722871 - DNA, 100 bp, Homo sapiens
aaacagaggctgaaagtgatccagtccttggaggacacggccaagaggagtgtggagggtgtgaagacagagaatgaccacatcaacctgaaggtggccg

SEQ ID NO: 722872 - DNA, 75 bp, Homo sapiens
ccgcgtttcagccctagggaagagctccagagattatattggggttgccattttgtgaagccatagacatgtggt

SEQ ID NO: 722873 - DNA, 100 bp, Homo sapiens
gttcgtctggtggccttttgtccctttgcctcatcccaggttgccttggaaaatgccaacgccgtgtctgaaggacagtgaggaggaatttggttctgag

SEQ ID NO: 722874 - DNA, 51 bp, Homo sapiens
aggagcgggactccggacctccaggaggcacctgaatggacagaagaggac

SEQ ID NO: 722875 - DNA, 100 bp, Homo sapiens
ggaacatcctcctggactcaatcatggcttgtagtgcctggtgaagaatgtgatgggatcactagcatgtctgcggagagcggccctgggacgagattga

SEQ ID NO: 722876 - DNA, 76 bp, Homo sapiens
ggatctggattctaaggcaacacttccttgaagaaacaagcttacagacatgtttgacaagaccaagtcaggccgc

SEQ ID NO: 722877 - DNA, 74 bp, Homo sapiens
ggaccttccacgtggattctccagacgagaggaatcccgttctgcttccagaagtggaagtgctcacggatcgg

SEQ ID NO: 722878 - DNA, 82 bp, Homo sapiens
ccctgtgcaggcctgctcctccgtttgcaagggcgaagctgtgctcaggcccgggctggacgcagagccagagctgtcccca

SEQ ID NO: 722879 - DNA, 75 bp, Homo sapiens
atgcttgcttctattaaaagtggtgatgaacttcaggatgagacagatttgaccagttttgggccatcaatcgga

SEQ ID NO: 722880 - DNA, 83 bp, Homo sapiens
agaagtcacaaaacagcagatttcccaagagcagcggaaaatgatccagtcacagcaacaatggtgtggttggtgaatatggc

SEQ ID NO: 722881 - DNA, 96 bp, Homo sapiens
tgaagagttagcctggcctggcataatggaaattcatgccgaagtccaacttaagaattatgggaaatttcttgaggagtatacctctcaactgag

SEQ ID NO: 722882 - DNA, 100 bp, Homo sapiens
atcgacacacaaagaatagagttgagcctgtgggacacttcgggctggcagtgatggtgaaagcataggaaactgccccttttcccagaggctcttcatg

SEQ ID NO: 722883 - DNA, 123 bp, Homo sapiens
atgtgaggcgatccgctggcgctagtctgaccctccgccaggcaaaaggaagtaagactttgaccccgacgcaggcttcagtgattgccgcggatcagaagcctgagcactttggctcgagac

SEQ ID NO: 722884 - DNA, 89 bp, Homo sapiens
gtcgcctctgtgctcgtgagtgcatggggtataagcttagaccatgctcagcctccaagcagccttgtcatcgacaaagaatctgaagt

SEQ ID NO: 722885 - DNA, 134 bp, Homo sapiens
atccggaacatggtggcggtgctggaagtcatctccagcctggagaaataccctattaccaaagaggcacttgagactttgagaatcactacaagaaaaactccttgtggtgaaggttctaagacgtgggatcg

SEQ ID NO: 722886 - DNA, 90 bp, Homo sapiens
tgaattgatttggttggaatgctcttttaccgatgctttaacatacagccactagaggtcctttgttctccaatgttgctgtcaacattc

SEQ ID NO: 722887 - DNA, 51 bp, Homo sapiens
ggaacatacgggcaagtttataaggatcacagaagaactgcagcttcctgg

SEQ ID NO: 722888 - DNA, 98 bp, Homo sapiens
tccattgaagctgtgcaagctatattctaaaacagtgagaattacctttggattcaactgcagaaataaagatcattatgggataatgatgtatcaca

SEQ ID NO: 722889 - DNA, 50 bp, Homo sapiens
ccatcactgtgaacttctggtataagaaacactttgtgctactctgtggg

SEQ ID NO: 722890 - DNA, 100 bp, Homo sapiens
caggacctcaagacacctgggcagacactgcaagtggaatcccccaaagaaggtaaagggagcaagccttccccactgtctgtgaagaacaccaagagga

SEQ ID NO: 722891 - DNA, 89 bp, Homo sapiens
agccccctgcaggaactctacaacccaatccagtctgttcggcacttgaagtactccttgtttaagaaatcactactgggcagtgtttc

SEQ ID NO: 722892 - DNA, 101 bp, Homo sapiens
ggctgtagctgccctttccgtttccagggttccgaccaggggctgataacatccggaaatactggagccgctactaccaaggatctcaaggggtaatattt

SEQ ID NO: 722893 - DNA, 80 bp, Homo sapiens
ccctctcgcgctgcactgtctctccgacgcaagactgtcccggcccggaacactctgctccagccaaggtggtgagggca

SEQ ID NO: 722894 - DNA, 100 bp, Homo sapiens
ggtttcacgctagaaggtggctcaggtagctacagcaagctgggtagcaggcagatccaaaggatatcatgaagtttccagggcctttggaaaaccagag

SEQ ID NO: 722895 - DNA, 76 bp, Homo sapiens
gaggaacaaaaacccccatcctgggaaaaatggggaagctgtgccagaaatcacatccaaagtcagttccagtttc

SEQ ID NO: 722896 - DNA, 100 bp, Homo sapiens
tggtcagatgcaggagcttcggagggttcgttctggagtcatgagtgaaaaggtacatcaggaacgtctctatcaagaatacaatttcagcaaggctgag

SEQ ID NO: 722897 - DNA, 105 bp, Homo sapiens
aagcaacctaaataaagaacgtggggactgtacctcccttcagagccaacatcacttagaaggttgttggtgtagcccaggccatcaacaagaaatcaggaaacg

SEQ ID NO: 722898 - DNA, 82 bp, Homo sapiens
gatctggtgtaccaggcgaagctggccgagcaggctgagcgatacgacggtcatgatgatgggcagcgcccgagtggcggag

SEQ ID NO: 722899 - DNA, 75 bp, Homo sapiens
cagcaggcccaaacccccacaggtgccaatgaactggctgtgcagaaagcaaaggcagaaatcaccaggctcata

SEQ ID NO: 722900 - DNA, 76 bp, Homo sapiens
ccgccgcgggagccgctgcccgaactcccggcccgaactccagttggtgaggtaacatacgtggagctcttaatgg

SEQ ID NO: 722901 - DNA, 100 bp, Homo sapiens
gccaaaatatggtgtgaaggttggcctgacaaattatgctgcagcatattgtactggcctgctgctggcccgcaggggtccacttcctaacacatgctgc

SEQ ID NO: 722902 - DNA, 100 bp, Homo sapiens
catgaagacaaagctgcagaggggcattatgcttcccagagcccctcctcaagtgtctggctgaaagatgccacccagggaagggaactcgggctagcta

SEQ ID NO: 722903 - DNA, 75 bp, Homo sapiens
tttcacccgagggtcggctctaccaagtagcacacgtcacatggagatgggcgtcaagaagttacctctcgtacc

SEQ ID NO: 722904 - DNA, 82 bp, Homo sapiens
cactaatgaagttgggaactcagaccgtaccttgcaacaagatccgctgttgtaccaggggtctaatcaggcctgtgtctgc

SEQ ID NO: 722905 - DNA, 80 bp, Homo sapiens
gcactagtgtggctctcctgttccagcaattgggaagctctggaggaatatgtgaaaaaagtaaactctattcagatggt

SEQ ID NO: 722906 - DNA, 130 bp, Homo sapiens
caacacaacaatcagatggcaccagggactggcagctccactgccgtcaactcctgttctcctcagagcctgaatggagatgtatgcatttcgattcttcatccgcctgtagatgacccacagagtggag

SEQ ID NO: 722907 - DNA, 100 bp, Homo sapiens
gcggatgccctgcagtacctgcagaaggtctctggagacatcttcagcagccttcatctcctcgtcctccaggcagcacaagccattgtggaatctccac

SEQ ID NO: 722908 - DNA, 74 bp, Homo sapiens
cattagggacaggaatggaacacacttggatgcaggagctcccagaagatgggccaaccaggaccctcaggaga

SEQ ID NO: 722909 - DNA, 96 bp, Homo sapiens
cttcatcttctctagtttcatcatgtatagatggagattccgatgcaggttgcatgcagggcatgattccatacttgcctgagcttattcctcacc

SEQ ID NO: 722910 - DNA, 90 bp, Homo sapiens
ttgtggtgaaattctttccgcctgaccacacacaactccaagaagaactcacaagatgggtagcctatgaaaatcctgacttcacaggag

SEQ ID NO: 722911 - DNA, 50 bp, Homo sapiens
gtgactgcgtcaggcatctcaatcatgatggactagaggcttttaccaga

SEQ ID NO: 722912 - DNA, 100 bp, Homo sapiens
gagaattatttcatgcgtgatagtggcagcaaggctgccaccgacgcccaggatgcgaaccagggaccgatgatgtggcgaccatcagttctgctgcttc

SEQ ID NO: 722913 - DNA, 74 bp, Homo sapiens
tagtgtatttatttggcgctgtgttacaggagaactgtgtttatgaaactgtagttttgcctttggatgaaagg

SEQ ID NO: 722914 - DNA, 100 bp, Homo sapiens
gctgcagaactcctctatgatgaagaagaccttgaaatgcatccgctggtcgctgccggaaatggccaggcttgaccactatgctatcatcaagtttccg

SEQ ID NO: 722915 - DNA, 100 bp, Homo sapiens
agatgtgtttcccaggcttttcaaggtcttgtgcaagaggagccctcgctcttctgttccttctcggcaccacctggatctttggggttctccatgttgt

SEQ ID NO: 722916 - DNA, 98 bp, Homo sapiens
aatcacttggctgtcctagagaaacgcgtggaattgaagatagtgatccggggagacaggaacacgggcaagacagcgctgtggcaccgcctgcaggg

SEQ ID NO: 722917 - DNA, 50 bp, Homo sapiens
ggcggtggccgctagctccaaggaagagcttttgtgctgccttgcaccag

SEQ ID NO: 722918 - DNA, 104 bp, Homo sapiens
cttctgccacctctgctccgacttcatctgggggctggccggcttcctgtgcgacggttacgggcaggacttgagtggcttcggacagggcttctcagacccca

SEQ ID NO: 722919 - DNA, 100 bp, Homo sapiens
gtgaccgagagcgtgaccgagagcgcgaatatcgtcatcgttagaagcaaaagtggtggatcttgatccctgtctttccaagaagcctctagaggaaaag

SEQ ID NO: 722920 - DNA, 96 bp, Homo sapiens
atggcttccgaggagctgtacgagcccccaggctccgctcttgccagagggacaggagccatggctcagaaaatggactgtggtgcgggcctcctc

SEQ ID NO: 722921 - DNA, 74 bp, Homo sapiens
agattgagcacgtgaccaagcgggccatcagcacccccgagagaatactcccccagttgcaagaggcgcaggac

SEQ ID NO: 722922 - DNA, 100 bp, Homo sapiens
ggagagtggacggtgtgagggggaccgggagaggcaccaaatctggcctgggggcccgagaagcttcctctcaggaaggaagcagccaccctcgccatgg

SEQ ID NO: 722923 - DNA, 75 bp, Homo sapiens
cccgagctgcccccgcaggcccacggtctcggcgtagacgggtcctggcggcagagaccacgtcccagcaggagc

SEQ ID NO: 722924 - DNA, 100 bp, Homo sapiens
caaatgcatgccaacattccagttttttaagaagggacaaaaggctgctctttggcgtaaattgcaatcgattagggatcgtttctcagaatcaagttag

SEQ ID NO: 722925 - DNA, 88 bp, Homo sapiens
gggtatctgtgcgtttcagcggcgacacgatattcttactgattctccgggctctgcagctcttgacccggctggtattgtctctaca

SEQ ID NO: 722926 - DNA, 75 bp, Homo sapiens
tctgatcatcctcactggacgccacaggggcaagactggacgtgtggacaagaatgcgcccacggtctgtggcca

SEQ ID NO: 722927 - DNA, 100 bp, Homo sapiens
gaacattccagatacctatcattactcgatgctgttgataacagcaagatggctttgaactcaggatttcccagatgacccaggcatgcagtgggacaca

SEQ ID NO: 722928 - DNA, 82 bp, Homo sapiens
gtttgtggatcgctgtgatcgtcacttgatgctgtgtgctgtggacccacctggggttcatggagtgggccacggggcccag

SEQ ID NO: 722929 - DNA, 100 bp, Homo sapiens
catccgtggagacttctgcatacaagttggcagatgaaacgactacaaagtgccatgacagaaggtggtgtggttctacgggaacctcagagaatctatg

SEQ ID NO: 722930 - DNA, 100 bp, Homo sapiens
atatttcaagagtgtgggtgatggcgttcacacaaactggtcagcgtttccctggagaggaagaggcaaggaacatcatcttcagcgggctatttcagca

SEQ ID NO: 722931 - DNA, 100 bp, Homo sapiens
aaaatgcggttaaaaaggtgatgggtatctttaagagcagcttattccaagctttgctagtacctggagtagaacagaaaaattattatgtctgtgttcc

SEQ ID NO: 722932 - DNA, 75 bp, Homo sapiens
caaccacaagacgactcaataggaggaagatcagccagcattactaacctgtcactggatagatctggttctcct

SEQ ID NO: 722933 - DNA, 98 bp, Homo sapiens
aaaccaaaatcctaatgaactccagtagagacaattcccacccatttgtaggcctggcttttaaactggagcctaaattatacagatctgtgattgaa

SEQ ID NO: 722934 - DNA, 98 bp, Homo sapiens
tgtacccccagtacacttactactatcctcattatctccaaaccaagtgatgaatcaccaacaccagcagcagatggcccccagtaccctgagccagc

SEQ ID NO: 722935 - DNA, 87 bp, Homo sapiens
acgccggcgccgagggacaccgcagtatgaggcagagctttctgaaacaaagactcattttgaagatgtttaacaaatcatttggaa

SEQ ID NO: 722936 - DNA, 90 bp, Homo sapiens
cggatcaatccagatggcagccagtcagtggtggaggcagtagaacgagtcctgtacccacacctgtccacctactggacaaacttgcag

SEQ ID NO: 722937 - DNA, 106 bp, Homo sapiens
cgaagctattacattgcttgaacaaaataattgggacttagtgcaataagagctaactgccatcaagagccatcagtatgtcttcaagctgcatgcccagaaagct

SEQ ID NO: 722938 - DNA, 83 bp, Homo sapiens
ctgggcgtggcccggccgcactatggctgtggtttgtgatgaaaatggttccaagggctatggatttgtacactttgagacgc

SEQ ID NO: 722939 - DNA, 98 bp, Homo sapiens
tgcagtttgaagaggaggacttttatggtttcaacatggtcatgtctcatccacacgctgtcaatgagattgcactaagcctgaacaacaagaatccc

SEQ ID NO: 722940 - DNA, 100 bp, Homo sapiens
tgtgtattgaaaatttcaaagtaaaggatattattagaattctgccatgcaatgagaaagatcagtctaaagaaaaggagaagaaagtgaaaaaaacaat

SEQ ID NO: 722941 - DNA, 98 bp, Homo sapiens
ggagcgccgctcgccgcagacttacttccccggctcagcagggaaaggtcgcaatggaagaagagatcgccgcgctggtcattgacaatggctccggc

SEQ ID NO: 722942 - DNA, 50 bp, Homo sapiens
ggtttcctcccgactcgcgatcaaaatggattcttctgatgtagagcgac

SEQ ID NO: 722943 - DNA, 96 bp, Homo sapiens
tctgaactttctggggaacagaccagttgtgtgtcatcctgtgaccaagagcaccagtctgccctggaggaagccaagcagcccaagaacgacaat

SEQ ID NO: 722944 - DNA, 90 bp, Homo sapiens
acatgagatggtagccaaacccccagtggatggcattcccaatgacagtagtgatagtgaaatggaggacaaaactacagctaatttggc

SEQ ID NO: 722945 - DNA, 107 bp, Homo sapiens
tcagaccgtggacaatgtgctctttgcccctattatggagaaaggtgttccctagatgattcagtccctcaaggcgttgattgaaaatgcagatgctgtatatgaaa

SEQ ID NO: 722946 - DNA, 75 bp, Homo sapiens
tgttcaggcataaggttgtttacaggctcctatggatattccaggtttaaacctgagtcaacaagaatactaccc

SEQ ID NO: 722947 - DNA, 100 bp, Homo sapiens
ctcacatcttcaggtgcctcattcacatacgtcaaggaaattgagctcgccctcccctacctgcggaagagtcaagggaatgtcatcaacatctccagcc

SEQ ID NO: 722948 - DNA, 95 bp, Homo sapiens
gcttcggcacaagggcccaactggaattccacttacgggggtattccctcagcggatactacacccatccatttcaaggctatgagcacagacag

SEQ ID NO: 722949 - DNA, 100 bp, Homo sapiens
gtcatggttcattccctgaagtctttacaacatatattagtctacttgctgacacaaagctggatctacatttaaagctcggagtgaggatgccaggtca

SEQ ID NO: 722950 - DNA, 75 bp, Homo sapiens
gcctaggcattttgctgtctcctcctaatacggattttaaaatacccagtaatacaacattaaaaactcctctgg

SEQ ID NO: 722951 - DNA, 110 bp, Homo sapiens
cggatggccccaggtgtaagcgcagaaagcaggcgaacccgcggcgcaataacggtacttggaaaaatggacaaggattgtgaaatgaaacgcaccacactggacagccc

SEQ ID NO: 722952 - DNA, 75 bp, Homo sapiens
gagatgccgtcgaggatgtaccgaatttgtttgtcaattcgttctgaagaggatttaagtgccctgtatgctcaa

SEQ ID NO: 722953 - DNA, 100 bp, Homo sapiens
gccatgtcggctgcagaggcggggggtgttttccacagagccaggggcaggaccctggccgcgtttcccgcaggtgggtcatgataactgggtacgtgga

SEQ ID NO: 722954 - DNA, 90 bp, Homo sapiens
cgcaattcttacgatgtcttctctttgctacggaaccagggaaaatgtgtagagggcatggtggagatcttcgacatgctgctggctaca

SEQ ID NO: 722955 - DNA, 100 bp, Homo sapiens
ctaaatgaagatgaccatcatcatgaaagtgcctaccgcatgtttacaaacaacacgtgtttgaagcacatgatcaccaaagtccggagggacacccacc

SEQ ID NO: 722956 - DNA, 104 bp, Homo sapiens
agtgggcggccagagcgccggcaagagctcggtgctggagaacttcgtgggccggtgagaagccctaccactgcaactgggacggctgcggctggaagtttgcg

SEQ ID NO: 722957 - DNA, 82 bp, Homo sapiens
gaatggagaactggagaatattaagcctaaggaggaagccagtgaaggtggaggaaatgatcgtgtgcggaacctgcaaagt

SEQ ID NO: 722958 - DNA, 75 bp, Homo sapiens
gcagagagggggctaaagagcgtcgtgtggcagaccttatgccagcctggaccatcttggaggcagtgtaggatc

SEQ ID NO: 722959 - DNA, 75 bp, Homo sapiens
caaaggatgcctccacacctaccactacccgtgtgccagcgatgcagagctccacgcaggagatcggtgaggagc

SEQ ID NO: 722960 - DNA, 75 bp, Homo sapiens
gacgccacggagtcagcacaagtctcatcaggctcttgtcaggatggtgaagctgttcatcggaaacctgccccg

SEQ ID NO: 722961 - DNA, 76 bp, Homo sapiens
gacgaaagaagaagaagagcaaagggccttctgcagccgccgccatgtctgcgcatctgcaatggatggtcgtgcg

SEQ ID NO: 722962 - DNA, 105 bp, Homo sapiens
aggaacgaggcaaggagctaaagcagcgtgcgttcagccctggggtgactgcttagaaaactgcacagcatctgatgaaattagcgaataagaacatcaaccatg

SEQ ID NO: 722963 - DNA, 100 bp, Homo sapiens
cagcaaggatgactcaatcatcactgttttaacagttttagaacggaaaatatctatgcgaaagccaagagaagagctggttaaaagaggggttctgttg

SEQ ID NO: 722964 - DNA, 83 bp, Homo sapiens
gagagataatcgagctgaaagaggacacaagaaaaattgttctgtgagaacagccagcaggaatatgtttatccagaagccag

SEQ ID NO: 722965 - DNA, 100 bp, Homo sapiens
tgaccagctggctgacctgtacaagtccttcatcaaggactacccagtggctgaaattggtgtcggtgcctatgggacagtgtacaaggcccgtgatccc

SEQ ID NO: 722966 - DNA, 100 bp, Homo sapiens
ctgcaagccccagcatcatcccccggctgagggccattcgccggacaggtgacattcagggatgtggctatagaattctctcaggaggagtggacatgcc

SEQ ID NO: 722967 - DNA, 76 bp, Homo sapiens
cctcttgccttacggcatggcaggttgcacgttttcaaaaaatacctaatggtgaaaatgagacaatgattcctgt

SEQ ID NO: 722968 - DNA, 100 bp, Homo sapiens
gtctggaattggcaacatctctgagaggaaccagcacctatgacagaagatctgctagaagagcagtctgaagttttagctaaattaggtacatcggcag

SEQ ID NO: 722969 - DNA, 100 bp, Homo sapiens
ctgcgaaaggccgagagaagctggtcctgctcacgagagaaaaaggagccaaaactggacaagccaaggcatctgtagccaaagtaaacaaatctacagg

SEQ ID NO: 722970 - DNA, 100 bp, Homo sapiens
ctcatccacgatggcctagcacgtggaattcgcgaagctgccaaagccttagacaagctctcttggctcctgctctggccatgtgatgtgcctgctccca

SEQ ID NO: 722971 - DNA, 75 bp, Homo sapiens
ggaatgtcatccagcgagtgattagccagccatacgtcgtgtgccggcagtgtcctgagtacagaaggcaggcgg

SEQ ID NO: 722972 - DNA, 100 bp, Homo sapiens
ccagccagccgctgtgtatgccatccaccaccagcagctgccccacggcttcaccaacatggcccatgttacccaggtgagctgctccccggtgtctgcc

SEQ ID NO: 722973 - DNA, 100 bp, Homo sapiens
cgcccaagtccctctactcgcgaggtgtcatggagaaactccagctgggcccagagattctgcagcgggaaaatccaaggcttatttatgccaggctgag

SEQ ID NO: 722974 - DNA, 75 bp, Homo sapiens
ggctgtcaagctggcgcgccagagcggcatcgaggttttaaaatcaaagatgggaaaatcggagaaaattgccct

SEQ ID NO: 722975 - DNA, 74 bp, Homo sapiens
cgcaggctgcggggcgcggagtcgggagcaattaccagctctggctgggtcgccacaacttgtttgacgacgaa

SEQ ID NO: 722976 - DNA, 83 bp, Homo sapiens
tcttgaaaccgctctcgtaatttgccacggtttccacttgagcggcacagtgacagaacctgcaatacaatcggagccagaaa

SEQ ID NO: 722977 - DNA, 100 bp, Homo sapiens
gaaatatggaaaggcaggcgaagtcttcattcataaggataaaggatttggctttatccgcttgaaacattattccatcatttgtgttgatggatatcca

SEQ ID NO: 722978 - DNA, 82 bp, Homo sapiens
caattctggacacattgggattaaagagatactggtgtaatggtaaaattatatccaaatatgactgcggtactgcttcata

SEQ ID NO: 722979 - DNA, 100 bp, Homo sapiens
gacagagcgggtgactggaggtggctccccaggtgactgctggctgctggcagccattgcctccctcaccttgaatgaagaaatcctggctcgagtcgtc

SEQ ID NO: 722980 - DNA, 100 bp, Homo sapiens
ttatacttgatagaaaattatcagacagtggtgattgttggtgaaacaggatgtgggaagagcacacagattcctcaggaggaggaggaagagcagccgc

SEQ ID NO: 722981 - DNA, 100 bp, Homo sapiens
ccattggatttaaaagacagtcctcgtcagcactgactttcagctatggaatcgaagaagctaggaaagctcatctggcctcctgttccagtgcttccag

SEQ ID NO: 722982 - DNA, 100 bp, Homo sapiens
ggatgaacggagaggaagaattctttgatgccgtcacagaatagctctccagacccccagctggccatgtggtgagttcagggcccaaatcaagtagtac

SEQ ID NO: 722983 - DNA, 100 bp, Homo sapiens
acatccatatcataagtggaattttggagatattcaaagcaggactctggactgtcttcacactaggtggtgtgggcagcaaagcggctgcctctccaga

SEQ ID NO: 722984 - DNA, 75 bp, Homo sapiens
gcctggtgctaatcctggagcatgacactgagtgagatcattggccgagacctgagtggcttccctgcacctcct

SEQ ID NO: 722985 - DNA, 100 bp, Homo sapiens
tcagtggcacagtggagcagctctgaagatgcaaaggtactatggatatagaggagagaaatcgccaaatgaaaattaacaaatacaaacaggtagccgg

SEQ ID NO: 722986 - DNA, 97 bp, Homo sapiens
tgcaacctggctgtacagctcctcaagtgcaacaagtcccacttccgaaaccacaagtttgccgatgaactcctggatatgatgattgctgaagagg

SEQ ID NO: 722987 - DNA, 100 bp, Homo sapiens
caccccacctgccaccgaggccccctcttcgcctcctccagtgccaccatggcaactgcaccatacaactactcttacatctttaaatatattattattg

SEQ ID NO: 722988 - DNA, 75 bp, Homo sapiens
gacataccacctccaggatcaggatgcagagtcctcctgcatatgcccaagaggattgggagtggaatggacacc

SEQ ID NO: 722989 - DNA, 100 bp, Homo sapiens
ggggcaacctgatctcggctgtcggagtgggtgtcctcaagaaagaaatctgacccggtcgtctcgtaccgcgagacggtcagtgaagagtcgaacgtgc

SEQ ID NO: 722990 - DNA, 74 bp, Homo sapiens
gaagatttacacagatggaaccagaaaagatacgaggctctaggagaggttcgagactataagaggcttacccc

SEQ ID NO: 722991 - DNA, 100 bp, Homo sapiens
cttctcttgactgcaaaaggcctttctctgctcgaaacacacatcttggcgcgttgcacgaatggtagataacgcagatcatctctggaaaggatattga

SEQ ID NO: 722992 - DNA, 80 bp, Homo sapiens
gcaggtattgggagatccacagctaagacgccaggacccactggaagcctagaaatgtttgacggtgagaacatgtatat

SEQ ID NO: 722993 - DNA, 90 bp, Homo sapiens
gccagatcacactcagcatgcagaaggccacatccacgtcctccgagcctacatcaagacccaagtgaacaaagagctggagcagctcca

SEQ ID NO: 722994 - DNA, 99 bp, Homo sapiens
cgtcagcgcagaggggggcaccagctgccaggctgctgatgtgtgggactggagacatcagtgtgtctgacttcaaagcccatgcagtagttgttggtg

SEQ ID NO: 722995 - DNA, 74 bp, Homo sapiens
cctgcctcaggtttatttgtacaaatagcacaggaggaccccagcaaaatacccagctggttgaaggtcaacaa

SEQ ID NO: 722996 - DNA, 100 bp, Homo sapiens
ggacaaagcaaggagctccagaggaagagactcttggagatgaccctgatgatctgcaatgtaagcggggagaacatgttgcgctggctaactggcagaa

SEQ ID NO: 722997 - DNA, 75 bp, Homo sapiens
gatgactaagcagcatcaaaccagattagataatgtttctccatcccagagagatgaagtaattcaatggctggc

SEQ ID NO: 722998 - DNA, 100 bp, Homo sapiens
agaatttccagtatctatgcacgagaggccctcattgagattgactacggtgatctgtgtgaggatctgaagctgtcacgaccggaggggggactcgcag

SEQ ID NO: 722999 - DNA, 75 bp, Homo sapiens
gggatatggacgagcatccgaggcccccgggactcagtggcctctgaggatgtggctgtgaacttcacacttgag

SEQ ID NO: 723000 - DNA, 100 bp, Homo sapiens
cctgccggcgggagcccccgaatgctgcacccagccacccagcagagcccgttcatggttgatctccacgagcagtgggtcctggccttcgagatcttca

SEQ ID NO: 723001 - DNA, 75 bp, Homo sapiens
agcaaagaatactattgttgccacaggagtattgggaaagggtcgttgtggtgcatagacccagagtatagacaa

SEQ ID NO: 723002 - DNA, 95 bp, Homo sapiens
gagcttttaagctaacccgggatgctattgagttaaatgcagccaattatacagtgtgatatgagaccttggtggggacaattgggaaaaagttt

SEQ ID NO: 723003 - DNA, 86 bp, Homo sapiens
cggcggccgcgctgccacctcagttttcggctttgtgagaaaccttaccatcaaacacgatggccagcaacgttaccaacaagaca

SEQ ID NO: 723004 - DNA, 100 bp, Homo sapiens
cgtaataagaaggtgggcgttatcttccgactgatccagctggtggtcctggtctacgtcatcgggtactaggttttgacaagcttgcatcatgcgtgag

SEQ ID NO: 723005 - DNA, 74 bp, Homo sapiens
gaaaagcatcttcaatgtctgtgggctgttgcaaggaattgcagagcctaatgggaggtgactggatcatggga

SEQ ID NO: 723006 - DNA, 90 bp, Homo sapiens
gcgagctgagtggttgtgtggtcgcgtctcggaaaccggtagcgcttgcagcatggccccgcagggtggagcccgtctgctcagggttgc

SEQ ID NO: 723007 - DNA, 83 bp, Homo sapiens
gaaagcggaagcggcctggcaggggaaggatcgagctgcatatctatgtgagactgaattttcctcttagacttcagctaaaa

SEQ ID NO: 723008 - DNA, 101 bp, Homo sapiens
ctggtcggccccttggtgaataaatttggcaggcatcgccgaatggaggctgtgcgactgcgaaaagagaaccagatctacagtgctgatgagaagagagc

SEQ ID NO: 723009 - DNA, 100 bp, Homo sapiens
ggtcattgaagataagaaaggaaatgagagttgttgacaggcaaataaggggatcgagctttggattacttaagtacttgcattgatcaagttcaaacat

SEQ ID NO: 723010 - DNA, 75 bp, Homo sapiens
gcggaacaggacgccctctgatgcccagcgcttgagaagtcggaggccaaggccgggccggtgcccaaggtgtca

SEQ ID NO: 723011 - DNA, 94 bp, Homo sapiens
tgatgaaggcgtggatagcctgaaggcagccattcagagtcttcctgcgagcaattaatcagtatgcagatatgctgaacaaaaaatttctgga

SEQ ID NO: 723012 - DNA, 51 bp, Homo sapiens
gtctctggagacatcttcagcagggtgcggaggcagcaaatgttacaggtc

SEQ ID NO: 723013 - DNA, 126 bp, Homo sapiens
accagcaccgagggccatggggccctctccatttctcctctcagcagaagtccaggttcccatgcaggtgacattgcattccggttccttaattatgttcagtcccagcatcagagaaaacagaag

SEQ ID NO: 723014 - DNA, 75 bp, Homo sapiens
caagaaaggtgacttggtcctcgcggacgccaggtggtaatatttcccagctcagacagccaggcgcaccctccg

SEQ ID NO: 723015 - DNA, 78 bp, Homo sapiens
ctggacagaaacaaccccagcaagcccctgcacgtcatcaagccgaacgaccctgtcaccaacatttgccaagcagcc

SEQ ID NO: 723016 - DNA, 82 bp, Homo sapiens
cgagcgcgagcggcgcgagaaagtgaagcaaatcatggaggaggctgtcaccaggaagtttgtgcatgaagacagcagccac

SEQ ID NO: 723017 - DNA, 90 bp, Homo sapiens
ggagcgcaaggtcgccctcaaggccatgatcaaaacaaggagatccggttggcagctaaaccgcgctgggaacaggggcctgagtcctgg

SEQ ID NO: 723018 - DNA, 90 bp, Homo sapiens
tgatacctttgatccagaacttgcagcaacaatagagccagccccagtgcctgctgagccgtttgacaacactacctacaagaacctgca

SEQ ID NO: 723019 - DNA, 100 bp, Homo sapiens
tgttatgggacactgcaggtcaggaggaatttgatgcaattacaaaggcctactatcgagattttggatttagtaaaggggacacattaccaggtagcct

SEQ ID NO: 723020 - DNA, 83 bp, Homo sapiens
agtacaccaacgcggtgcgcgaccgggagctggacctccggggtgtcgtgaaaactacccctaaaagccaaaatgggaaagga

SEQ ID NO: 723021 - DNA, 98 bp, Homo sapiens
gcggtgcctgagctgagtgaggccgaggccgggaggccgtgcccggaggaatgggaagcatgcccaatctgtccattcctcagccattgcctccagct

SEQ ID NO: 723022 - DNA, 101 bp, Homo sapiens
aacattttgatgttcctcccaggagacagctatatttgcccatgttattcaagcttctcaataggtttggcatggacaagatctatgaaggccaagtggag

SEQ ID NO: 723023 - DNA, 95 bp, Homo sapiens
gggagcgcttggaccccggcttctgggacgcgtcagctgctgatgcaaggaatcccctgggctcccgtccactccactgctgaccagcccattcg

SEQ ID NO: 723024 - DNA, 83 bp, Homo sapiens
cgaggcaaggagctaaagcagcgtgcgttcagccctgggggtggatgtgaacactgaccggaagatcagtgccaaggagatgc

SEQ ID NO: 723025 - DNA, 83 bp, Homo sapiens
aggatatcgacgtcgtgatccagaagtccagagctgaggactgcctgtttgcaggtccgcgggagagctgtggggcttggtga

SEQ ID NO: 723026 - DNA, 127 bp, Homo sapiens
tcatgaagagcccaaaacctattacgaactcaaaagtcaaccgctgaagagcaggacccagatgatgtggtaccagttggccaaagaagagcctggtgttggtgcatgtgctttggactagcattta

SEQ ID NO: 723027 - DNA, 90 bp, Homo sapiens
gaacggagtcgcttcccctactgcgtggtgtggacgcccatcccggtgctcacgatctatctggttcaatagatgacctccccatgggga

SEQ ID NO: 723028 - DNA, 83 bp, Homo sapiens
ccgagaatagctccgtccagcagccttatgccagcctggaccatcttggaggcagtgtaggatcatggaagaactttgaatta

SEQ ID NO: 723029 - DNA, 90 bp, Homo sapiens
atgactcagacctgggcacagcaaatgctgaggactcagaccagtctctgcaagaagcaacaagatatggatttggatatagaatttgat

SEQ ID NO: 723030 - DNA, 96 bp, Homo sapiens
tactgagggagagccggatcctttcccagaagaatgagaatgaggccaagctgcgtctggagatggagatggagcggatgagacagacccattcta

SEQ ID NO: 723031 - DNA, 73 bp, Homo sapiens
aggattttgataccaggatacttgagagatggacagagacgtatgtgcgttggtctcctaagggcacctacct

SEQ ID NO: 723032 - DNA, 96 bp, Homo sapiens
tacaccaaatgtgaaggtgatgaggttgaagatctctatgagcttttgaaacttgttaaggatcctcggttcaatgcagaagttgaccaaattaca

SEQ ID NO: 723033 - DNA, 76 bp, Homo sapiens
aaaatatgcaaggccaagccagtgatatttaaagcatccgcacttccactaatagccaagtagacaagctgaccct

SEQ ID NO: 723034 - DNA, 99 bp, Homo sapiens
ttatttgactttctcctcattgaagctatgcagtatttctttggcatcactgcagctagtaatttgccttctggattttgtgcagcctgtaatgcccac

SEQ ID NO: 723035 - DNA, 141 bp, Homo sapiens
cctactaattctaaagagaaagacttacaatagccacctagctgagagcactagccctgtgcagacagcctcgtcttacagcgtgactgcaaagaaaaagacttttgttttgcaaaagaaaagcagctcggtgactccgtc

SEQ ID NO: 723036 - DNA, 75 bp, Homo sapiens
tcgctactaatgctgcagtcactgtacttagagtggatcaggaaatggtgttcacactggccctgaatcaaggga

SEQ ID NO: 723037 - DNA, 100 bp, Homo sapiens
ccaaatcctgtagccataaatgtctggctaatggcatttacaggagctatgacagagactccactttcaatgtgtttgtgggaaaaggacagctgatcac

SEQ ID NO: 723038 - DNA, 100 bp, Homo sapiens
tggacattgtgcaggggcggcgtgtctggcggctgacggcactgtcatgaacaccttcgctcacaagtgccagctgccggaggacgtggacccgacgtcg

SEQ ID NO: 723039 - DNA, 75 bp, Homo sapiens
gcggattggggggtcctcacgccaggccggagctggacgccatgaccagggccaattcctgtccccccagcagca

SEQ ID NO: 723040 - DNA, 100 bp, Homo sapiens
gcattttcaggaggaagcgatggcttcagacagcatatttgagtcatttccttcgtacccacagtgcttcatgagaggatttgcagatttacagaatggc

SEQ ID NO: 723041 - DNA, 100 bp, Homo sapiens
gaaaaagagctaaagagaaaacaagatgacgctgaccaggacatgatgatggcagggatggttatcaggacaccccatgggagagacttcgatgactctt

SEQ ID NO: 723042 - DNA, 83 bp, Homo sapiens
tggcgaacgtgcaggtcgccgtgcgggtccggccgctcagcaagagcacttctcagaacttctggatgagttttcccagaacg

SEQ ID NO: 723043 - DNA, 75 bp, Homo sapiens
accgccggacttcaatgcccagtccccagctcgccagcgggttatggttttgtgaaattcacagatgaactggaa

SEQ ID NO: 723044 - DNA, 80 bp, Homo sapiens
tgacaattgaagacagaaaccgggtcaatgtgacggtggactacattagaccagccagcccagccacagagacagtgcct

SEQ ID NO: 723045 - DNA, 100 bp, Homo sapiens
gcgagcgcgagcggcgcgagaaactatgctaagaaggaatctgatcttaatggcgcccagatcaagcttcgagaatatgaagcagcactgaattcgaaag

SEQ ID NO: 723046 - DNA, 95 bp, Homo sapiens
ggtctcccaaggaacaggttcccctgttcctaaaattcatggaagtagttttgtaacatctactgtcaaggatgactcactggttgtgtggaagg

SEQ ID NO: 723047 - DNA, 101 bp, Homo sapiens
ggtctaccctacctggctccatgaagatgccacagggatcctaaaatctaaggcattactgtacactgcggtaaatcagttggctatgggaagcagttcag

SEQ ID NO: 723048 - DNA, 98 bp, Homo sapiens
cgcgacgagctatccgggaaagggccgaatgcgatcaaacctaatccgcgagacttgctaatgatcgaactgtgagaatttggaaggctcgcaatttg

SEQ ID NO: 723049 - DNA, 87 bp, Homo sapiens
ctgttcgtgctgctgggattcgcgctgctgggcacccacggagcctccggggctgtggtgctcatcggggactcaggcgtgggcaag

SEQ ID NO: 723050 - DNA, 75 bp, Homo sapiens
tggttgccggctcccctctcaggacaacccagatgtgcaacaaagtgcgatgacggccgaagccctgcagcccac

SEQ ID NO: 723051 - DNA, 82 bp, Homo sapiens
cgctggccctggtccggacccgcatgcaggcacaagttttcagcattgcaaataacaatctcagctactgggatgcccccct

SEQ ID NO: 723052 - DNA, 100 bp, Homo sapiens
gatggtgggccccaacttccgcgtcggcaagaagatcggctgcggcaacttcggggagctccgcctagcaagagtgagccatggagctacgtgtggggaa

SEQ ID NO: 723053 - DNA, 98 bp, Homo sapiens
tgggagatccacagctaagacgccgggactccctggaaacctagaaatgacagattatgagggacaagccaagaaactcctggaactgatggaaaaca

SEQ ID NO: 723054 - DNA, 100 bp, Homo sapiens
aaccaggcaatgctggatagataccgaattcttatcacaaaggtggaaatggatattgttgaaaaactggtgaaaatgataccttgtgagcatgaagacc

SEQ ID NO: 723055 - DNA, 73 bp, Homo sapiens
cgagccagcgcccggagcaagcggagctcccccaagagccggaaaggtactggttttggattaggaattgttt

SEQ ID NO: 723056 - DNA, 75 bp, Homo sapiens
tactactacatcccgcagtacaagaactggagagaacctgcacttgttgccaagtcttccatcttactagatgtg

SEQ ID NO: 723057 - DNA, 100 bp, Homo sapiens
gagtctgcgaaggccgggacccggttccccggcccacagtgggggtgtgcaaacccgagagaactggggaaacttcgtggcttgcatgacagctatttta

SEQ ID NO: 723058 - DNA, 96 bp, Homo sapiens
tgtccaggaaggaggaggaataatatttatggagcatatattatggaacacagttgccaatttggcctgttccatctccaacaatgaagaaggggt

SEQ ID NO: 723059 - DNA, 96 bp, Homo sapiens
ggcggctgaggaaagcaggaggaggtggcggcggcgggaagatgttaatttggagtggcccctggagtcagtttcctacaccatccgaggccccac

SEQ ID NO: 723060 - DNA, 99 bp, Homo sapiens
ggctgcggaccacggttggtgtcgacggatctctttacaagacgcacccacagagtttcaattactgaaaattacttggaaatagaaggaatggctaat

SEQ ID NO: 723061 - DNA, 75 bp, Homo sapiens
cttctaccagctgctggggggcgctggagagcagctcaaagagaacccaagtgagccttttggtgcctcggtgac

SEQ ID NO: 723062 - DNA, 75 bp, Homo sapiens
agaccgtgctggtctttctcaacctcatcttctggcccgtggccacccaggagcccgatgtgcaaggcaggtgtg

SEQ ID NO: 723063 - DNA, 100 bp, Homo sapiens
tgggcctgaagggagagtttcagttcttcattgacggtaatagcctgcagctggtgttttgagaagccctactgctgaaaacttaacaattttgtgtaat

SEQ ID NO: 723064 - DNA, 100 bp, Homo sapiens
atttcagatactctgactccacctttacttttacctacgttggcggccccagaaggacagtcattttgtttactcattcagccctgttgcaggtcccaat

SEQ ID NO: 723065 - DNA, 90 bp, Homo sapiens
cgtcaacaccaagtgcatcaccatccccagacctgaaagatgtctgaaaattccagtgacagtgattcatcttgtggttggactgtcatc

SEQ ID NO: 723066 - DNA, 75 bp, Homo sapiens
atttcagtgactgaattaaaaggtgtcaagaagctcagaatgatgctgagatgaatcgtcacctgtgtgtttggc

SEQ ID NO: 723067 - DNA, 75 bp, Homo sapiens
aagacctcagagtgttctcagcgtctgtagaggcttctggtgaaatcgcattatgcaagactggatttcctgaag

SEQ ID NO: 723068 - DNA, 98 bp, Homo sapiens
gaagtcgaaatggcagaagaagaggagaggacatgatgcatccactcaaagtggcttccagcttcttaaagtctgacaagaaccggatagggggaacc

SEQ ID NO: 723069 - DNA, 100 bp, Homo sapiens
tgtccctcccagttttagatgatcagataacaacgaacttgatgcaagtgataggtttgccaaggtcagacctctcatcatccggatgaactgcaatttc

SEQ ID NO: 723070 - DNA, 96 bp, Homo sapiens
ccattgaacttcccagcactcgaaagggaccgaaatggagagcaaaggttaatgttgaagaaggaaaatgcggaagtcgtcatttgacaagtttta

SEQ ID NO: 723071 - DNA, 100 bp, Homo sapiens
cttggcaaggcaagtagcggcggcgcttcaaggactacgcccaagcaaggtttgatgcctatttccaccagaagaggaagcttggggtgtgactgtgggg

SEQ ID NO: 723072 - DNA, 87 bp, Homo sapiens
ccggcctgcggaacgaaagtgaacaggagccgctcttaggcgacacacctggaagcaggtacaccaggggttggaaaaaccacacta

SEQ ID NO: 723073 - DNA, 50 bp, Homo sapiens
ggcttcagaatgcagtgttttcgcatcagacaacagtcagcgctttcgag

SEQ ID NO: 723074 - DNA, 108 bp, Homo sapiens
ctgcctcaggaaggtccagtgaaagagagccattctacaactactgaaaaagctaatattgctttatctgcagtataagccatgtagaactgaatgttatgatgcatt

SEQ ID NO: 723075 - DNA, 100 bp, Homo sapiens
cttccgcggtgtcattctgacctcgggcagctggtggaatttttgaagaaaatggaatctcgaggccccctttcgtgcgacacggttctgaagatcttct

SEQ ID NO: 723076 - DNA, 76 bp, Homo sapiens
ctggaatttaaacctgagccactatctgaagccttgttagatgacttggataaagaactaaacaactacattatgc

SEQ ID NO: 723077 - DNA, 88 bp, Homo sapiens
cctccgaatttgcaaagaggaggaaggagggacttcttggcttctcccagcatagccccagcttctgcagaaagccgtcattacacct

SEQ ID NO: 723078 - DNA, 104 bp, Homo sapiens
aggagcgggcacagggcaaggcggcggacggctgcgtcgcccgaggcgaggaggagcgctggcgccctgtatgatgagattcgtcagtttcgcaaggcctgtgg

SEQ ID NO: 723079 - DNA, 80 bp, Homo sapiens
caactccacttttatctccaccatagcggaaggagagttttacatggaagtggcttacagaaacttggcgctgaggtgca

SEQ ID NO: 723080 - DNA, 97 bp, Homo sapiens
ctgtgatgttttggggattccactctccagtgtaatgattattgacaacagggcagctgcaatgactctccgcacggtattattgtcattgcaagca

SEQ ID NO: 723081 - DNA, 85 bp, Homo sapiens
cagaaagaactcaatgtacttaaatcagaacaggtttttgaatctgaaaattcaagaaggtgaagctcacaacattttttgccct

SEQ ID NO: 723082 - DNA, 100 bp, Homo sapiens
gccgggggcggccacggtgatgagccgggcctggcggacgcggcgccatcgcagtcaggacctgaaggagaagaaggagaaggtggaggagaaggcaagc

SEQ ID NO: 723083 - DNA, 50 bp, Homo sapiens
aaatcatgactgatcttgtagctctccaacctgtcccagtatttcagccc

SEQ ID NO: 723084 - DNA, 74 bp, Homo sapiens
caaagtaaatgctgtcttttcccaaaagacaggctcttcacctgaaggttcaatgtatctatgcctgcctacct

SEQ ID NO: 723085 - DNA, 100 bp, Homo sapiens
ctccactcgaacagatgtgagcgagaaagccgttgcctccagcaccacttctaatggtaagccgtaactttgagctggttggacgggttaacttggatca

SEQ ID NO: 723086 - DNA, 82 bp, Homo sapiens
tggcgataccccttcaccaaggagactgctatttcatgcttgctggaagctctttgacatcctttggaacagaaacatcaaa

SEQ ID NO: 723087 - DNA, 75 bp, Homo sapiens
gtcccaggagccagtagtgaaggcaacagtctgcccacctgtggacaccagacacagcagcagattgctgtccag

SEQ ID NO: 723088 - DNA, 75 bp, Homo sapiens
catgaatgaggagtacgacgtgatcgtgctgggcaccggcctgacggtcagggaagtcaaagatgcatccctgag

SEQ ID NO: 723089 - DNA, 88 bp, Homo sapiens
cgcagtggtcgcttcttctccttggtctccagtgggggctgcagactaagcaaaatgaggcggttcctgaggccagggcatgaccctg

SEQ ID NO: 723090 - DNA, 97 bp, Homo sapiens
ccaggagttaagctgaggtcgtctgagccctgcgacagcctggacagcaactcagcacgcactcctggctttaaagtttatacttgcatttgccata

SEQ ID NO: 723091 - DNA, 75 bp, Homo sapiens
ccctgccctcctggttcggcctccccgcgcactagaacggtattggcatactccacacatctgtaccattcttga

SEQ ID NO: 723092 - DNA, 100 bp, Homo sapiens
cttgtcctggatgaaggagaatatacaccaggaacccttgtccaggttattgcagccgaaggagaaatgaatgcatccagggctctgaaagaagcctcca

SEQ ID NO: 723093 - DNA, 101 bp, Homo sapiens
gcaacggcggcgggagcatgaacgcccctccagccttcgagtcgttcttgctcttcgagggcgagaatgatgtaaattggagtcaaccaggtgaaaagaag

SEQ ID NO: 723094 - DNA, 89 bp, Homo sapiens
gttttaagaaagtggacaaagagaggagtcagctaatttgacaggacatgctgagaaggtgggaatagaaaattttgagctcctgaagg

SEQ ID NO: 723095 - DNA, 80 bp, Homo sapiens
gacaggtatatgctggtcactttcgaagagccgccctatgctatcaagttctttattggtgaaaacatgaatccagatgg

SEQ ID NO: 723096 - DNA, 75 bp, Homo sapiens
ccgcgccccaccccgccagctccagagccacctgcagatctgggacacggccggccaggagcggttccgcaccat

SEQ ID NO: 723097 - DNA, 98 bp, Homo sapiens
agctatgggtacggaggcaactcggcgacagcaggctacaacattgtgttggaggacacccagccgttctctcagcccatggttggctcccccaacgt

SEQ ID NO: 723098 - DNA, 100 bp, Homo sapiens
gacctgctggaagggaaggaaaaacctgtatgtggaaccacctgtctgagctctttctactcggagctgatgaaaggactgggtgcaggggggcgcctct

SEQ ID NO: 723099 - DNA, 75 bp, Homo sapiens
gtgacatccgaggtgcctttctccaaaagtataaccccgttttcacacgaatggccccttcacatatttgaagac

SEQ ID NO: 723100 - DNA, 75 bp, Homo sapiens
acctgtaccttaatcttgtggctgtgcgcagggacttctgtgggaggtatggctttcccaacgaaaggctaagaa

SEQ ID NO: 723101 - DNA, 82 bp, Homo sapiens
tgtggatcgctgtgatcgtcacttggtgtttcccattaaacactaccaggacaaaatcaggccttacatccagctgccatcg

SEQ ID NO: 723102 - DNA, 83 bp, Homo sapiens
ctcagctctcggcgcacggcccagattcacaatgacatcctttcaagaagtcccattgcagacttccaactttgcccatgtca

SEQ ID NO: 723103 - DNA, 100 bp, Homo sapiens
cgtgacatccgaggtgcctttctccaaaagtgccctgcaggagtcattaaatcaaaacttcatgctgatcatcacccaccgagaagtccagcgggagtac

SEQ ID NO: 723104 - DNA, 100 bp, Homo sapiens
tgggtatggaggaggacctggagaaaagatgactccacagggtgagtgttctgtagctgagaccttaaccccagaggaagagcatcatatgaagaggatg

SEQ ID NO: 723105 - DNA, 100 bp, Homo sapiens
gcccctgcccgggctccagttccctctccagcgcggccgcgaggccccggcgccgcccggaactgcagcgggtcggtgagctggtaaaggttacgaagat

SEQ ID NO: 723106 - DNA, 101 bp, Homo sapiens
caaccgaggtttcaatctgcgaaaccgaaccctcaccaaacagatctgcttgcacatccacttgcacgtagacctcagataagtgagatctgggacctgaa

SEQ ID NO: 723107 - DNA, 80 bp, Homo sapiens
ggagaagcgccgtgatgaggagctcatctaccacaaagtgacggcagccgagctgcagaggtaccaatcttgggaaaaag

SEQ ID NO: 723108 - DNA, 100 bp, Homo sapiens
gaattgtcctttccaacatccagagctgcatcattccttggggcaaaatgtggacaaggactttatattcagagcaccaatcaaattaagcaagcctggg

SEQ ID NO: 723109 - DNA, 100 bp, Homo sapiens
tacaaatttttggatgatgatggatccatttctcctattgaggagtcaacgcagactcagtgggatcctcctacttgggaaagcccaggagatgatgcca

SEQ ID NO: 723110 - DNA, 82 bp, Homo sapiens
gcccacctccacaagggcttcctggccctctaccaaaccgtggggatcatagacggtatttctatgtaaacgaacagtcggg

SEQ ID NO: 723111 - DNA, 75 bp, Homo sapiens
gttgcgcctggcctacagcgaggctggccccttcacagatgtagtcactacaaatcttaaattgcgaaatccatc

SEQ ID NO: 723112 - DNA, 83 bp, Homo sapiens
cttggaccccggcttctgggacgcgtcagacttcagctacgggacggacgagtacgacggagaggggaatgaggagcagaagg

SEQ ID NO: 723113 - DNA, 100 bp, Homo sapiens
accatgggtccaggaaaagtgtttggggaattggctattctttacaactgtacccggacagcgaccgtcaagagccttggatggtatactgtaaattcag

SEQ ID NO: 723114 - DNA, 75 bp, Homo sapiens
gagaattcggtttgtaggtcgtcagaaagagccgtgctggtatagaggactctaagaagtggggcatgctgtttc

SEQ ID NO: 723115 - DNA, 83 bp, Homo sapiens
aggggaacaatgaggcctacgcagagctcatcgtccttgtgcctccggagccagcgtggtggccatagacaacaagatcgaac

SEQ ID NO: 723116 - DNA, 100 bp, Homo sapiens
aaataaattgcagaagttacttattcttttaagaggtctgcctggttctgggaaaacaacattgtctcggtcagaagagatcaattctacagaaatttcc

SEQ ID NO: 723117 - DNA, 90 bp, Homo sapiens
agaagaataagagatgtcagttgcactccttagatacgcacaagccaaaacctttgggagctgtaggtaaaacttgcctactgatcagtt

SEQ ID NO: 723118 - DNA, 100 bp, Homo sapiens
ccgggctgcggcgtgtgcgcgcccgccagctgctccggagatacggatgtacagttacccagcacgtgtacctcctcctcctcctattgctcgggctgta

SEQ ID NO: 723119 - DNA, 100 bp, Homo sapiens
ctgatcagactcctggtgccactcccaaaaaactatcaagttgggatcaggcagaggaaaaagaccacatcagtgtcagatttgtaagaaagcgtttaaa

SEQ ID NO: 723120 - DNA, 80 bp, Homo sapiens
ggcccgcgaccgtccgccagtcgtcccgagctgcttccagctgccatggtgatgccaccccagcccgtggtcctgatgcc

SEQ ID NO: 723121 - DNA, 98 bp, Homo sapiens
gattctgctggtatacagctacatccaggagagaatgctgacagtcctgcaggcagtggagctactgctgtggttcaggcagccctatgcaaacccag

SEQ ID NO: 723122 - DNA, 100 bp, Homo sapiens
aagtcaagtgtccattttctttcaactatatttgagcatacccaggttaattatagaaaatgccaagtaggaaatttgccgatggtgaagtggtaagagg

SEQ ID NO: 723123 - DNA, 50 bp, Homo sapiens
gtcagtcaactttggttttagtaagggaaggtgtggctcattgactttaa

SEQ ID NO: 723124 - DNA, 82 bp, Homo sapiens
ccgtggcctcctctccgccctagcgctgaggtctcctccgggctggggctgagcaagccctcggagtgaccgtgggtgacag

SEQ ID NO: 723125 - DNA, 135 bp, Homo sapiens
cccagaacttgctgcaggtgcttcagaaggtccagctggacagctcccacaaacaggccatgatggagtacgtcatgtccattgacagcctccagctgggctatgcggaggatgggcactgcaaaggcgacatca

SEQ ID NO: 723126 - DNA, 75 bp, Homo sapiens
ccgatatgttacatcaaaaattcttcatctggctcagagtcaaggtgctggagaatctggtaaaagcaccattgt

SEQ ID NO: 723127 - DNA, 100 bp, Homo sapiens
gagggagatgtcaggtgggagaaagtttaattggttggggtcagataagaagaggagtgacaatcaagccaacagtagatgatgactgaagaataccagt

SEQ ID NO: 723128 - DNA, 51 bp, Homo sapiens
aagaacacaattccatgaatgaactgaagcttcccatcgacggtcagtgcg

SEQ ID NO: 723129 - DNA, 74 bp, Homo sapiens
tgaccttcactgcggcccacatgcacctcaggtgtgggcaagagcagtttactgttgcgttttgcagacaacac

SEQ ID NO: 723130 - DNA, 83 bp, Homo sapiens
tgaggaggtgcgggagctcgagggcaagaccggctccttatgccagcctggaccatcttggaggcagtgtaggatcatggaag

SEQ ID NO: 723131 - DNA, 50 bp, Homo sapiens
ctcgaattccagaatgatgaaattgtaactgttttaatcatggacaaaca

SEQ ID NO: 723132 - DNA, 82 bp, Homo sapiens
aagcagaatgtgatttgcttgaagatatgaggaagcttattttcgatacatggcagaaaacccaactgctggtgtggttcag

SEQ ID NO: 723133 - DNA, 89 bp, Homo sapiens
agctgccggagcccgagtggatcggggacggagagaacacgagcccatcagcggtggtcataatttttaaaaaggaaatggacccagtg

SEQ ID NO: 723134 - DNA, 90 bp, Homo sapiens
ccgggcgccgggcctcccagccgacatgtctctagtggcggaagccttcgtctcccagattgcaggcttactagaaagcagcacccgcct

SEQ ID NO: 723135 - DNA, 98 bp, Homo sapiens
agaaagcctcagtgatcttggtgccatagagagtctccgggtccctggaaaggatttaagtgccctgtatgctcaaaatttgtatcctcagatgaaat

SEQ ID NO: 723136 - DNA, 100 bp, Homo sapiens
atgcctgctaacatggataagcatgccctgaaaaagtatcgtcgagaagcctatcatcggtatccgttacagcactgatgtgagtgtagatgaagtaaaa

SEQ ID NO: 723137 - DNA, 101 bp, Homo sapiens
tgtggatgcccacctctactgtttgaaaaaatacatcgtggatttcctaatggaaaatggatactgaagtactctttcccagtgggactaagaaccagcag

SEQ ID NO: 723138 - DNA, 118 bp, Homo sapiens
gaaggagctgtttaccatgtcaccctcaaaagagtccagattcaacaggctgccaataaaggagcaagatggctagggaaagtctttatctcttgcaaggttcagtagtggcagatca

SEQ ID NO: 723139 - DNA, 100 bp, Homo sapiens
gtcttttcttaacctgggaagtggaaccggatatttaagtacaatggtgggcttaattttaggcagccttaagtgccttgaaacaattttctgaacaagg

SEQ ID NO: 723140 - DNA, 88 bp, Homo sapiens
aacactaccactgctggcgctgaccttcatcacagacaacagcctggtggcagcgactgaacctccattgaatactccagaaaacagg

SEQ ID NO: 723141 - DNA, 140 bp, Homo sapiens
tgggattcaagaaaactgtatgagaggagtaacatttgggctggaagcgaaaatacaagtaaacatatgtcaaatggttcacttccatccagtaaactgataagaattctccgaatgtctgatcctgaaagaggacaaac

SEQ ID NO: 723142 - DNA, 83 bp, Homo sapiens
ccgggtgacccacgcggaggccgtcaagactattgggaagaagttacctgcaactacagcaactccagactcatcaaaaacag

SEQ ID NO: 723143 - DNA, 99 bp, Homo sapiens
tgcctgaccatagtaaaagcgctcagaaagtattaactatcaccgccatccgggttgaaaaagacagggactgagaaacggaaatactaccatcctcca

SEQ ID NO: 723144 - DNA, 87 bp, Homo sapiens
tgaccctagccagactcagggatcaaagagcaaacagattcagtggcctgcattgggtgaatcgaaacgcatcaccctggtcctcca

SEQ ID NO: 723145 - DNA, 100 bp, Homo sapiens
gcttattttcccttcctttttaggccatgatttctggagagcttgacattctcaaagactggtgctatgaagctgttggtcttgaactcctgggctcaag

SEQ ID NO: 723146 - DNA, 76 bp, Homo sapiens
gctctcgtcagcctcccgccggccgtctccttaacaccgaacaccaatgttcgcatcttaccacatacagttcttt

SEQ ID NO: 723147 - DNA, 100 bp, Homo sapiens
ccccagaacgcagatcagaggtagtcggacctttcccgctggcgcgcagcctcagctaggcagcacaacaagattcgcagcgtggaggggagccagctga

SEQ ID NO: 723148 - DNA, 80 bp, Homo sapiens
atgtctgtctcaagatacaggacagctgtttgctcatcaacctcaactgtgtgattgcccacagtgagtatcaaaagtcc

SEQ ID NO: 723149 - DNA, 119 bp, Homo sapiens
ggagaggtccgggcagcgtgttacaacgtgggactgtgaccagggcaagcactctgacagttgttccttgcctgtatctccccttggttcaatagctaccagatttttggaagaggagg

SEQ ID NO: 723150 - DNA, 97 bp, Homo sapiens
tgcaaactggaggaaatgggctttacagatgtgggcccagaaaacaagccagtcaggagtaccttagatccacagaagatgctcttgtcatgggatg

SEQ ID NO: 723151 - DNA, 74 bp, Homo sapiens
tagccttttaacattcaaggattaggcaagaaactatattcagtctttgactcagatgccgaagatgaactttg

SEQ ID NO: 723152 - DNA, 90 bp, Homo sapiens
cttaaggacattgtggcaatcatcctgaatgaatttagagccaaactgtccaaggctttggcattcccagtgacctgacagcagaggagc

SEQ ID NO: 723153 - DNA, 100 bp, Homo sapiens
atgaggatttcgaggaggaacccacatcccccataggtcactgtgtggccatctaccactttgaaggtgggaggtgtcagagcccagctcatgcacatca

SEQ ID NO: 723154 - DNA, 75 bp, Homo sapiens
cgctggctctgctgctgccgccggcgaaggaggaggcgttgccgggttattcagcttctcaaggctggaaaagcg

SEQ ID NO: 723155 - DNA, 51 bp, Homo sapiens
ctagtgtctagaaggcactaaggcctctgaagagccaatccattcaggatg

SEQ ID NO: 723156 - DNA, 75 bp, Homo sapiens
tggatcgctgtgatcgtcacttgcttggatttacactgggcaacgtggttggaatgtatctggctcagaactatg

SEQ ID NO: 723157 - DNA, 73 bp, Homo sapiens
acaatggcaaaattactggaaacacctatttctattttcagcattgcaaataacaatctcagctactgggatg

SEQ ID NO: 723158 - DNA, 75 bp, Homo sapiens
caaccccgaacggggggagattctgctcacggaactgcagacacgaatgcagagtttgagtccagatcccaaagc

SEQ ID NO: 723159 - DNA, 87 bp, Homo sapiens
ggagacctacctgcggcgtcggcagctgctgctccgaggtcgcaatggaagaagagatcgccgcgctggtcattgacaatggctccg

SEQ ID NO: 723160 - DNA, 74 bp, Homo sapiens
atttagtccctctatcaagcaaggaggaggagaacggggctgaggaggaagaagaagaaactgccgaggatgga

SEQ ID NO: 723161 - DNA, 82 bp, Homo sapiens
gggacctctgcattgatcaggctgtggtcttcatcgaagatgctattcagggagcatcgagtacagctgtccggcctccaac

SEQ ID NO: 723162 - DNA, 90 bp, Homo sapiens
cgagcgcgctcgctccggcgccggcctcgcctcctcgcagcagcgccatggaaggaagcagccaccctcgccatggcctccccgcccgcc

SEQ ID NO: 723163 - DNA, 74 bp, Homo sapiens
caacatgtcttcaagtaaacagtttttcagttatgggacaaaaatattatatcaaaacactgaagctttgcaat

SEQ ID NO: 723164 - DNA, 82 bp, Homo sapiens
ccaagtacatcctgcgcgccggccagatggtcacgggcgtctctggccgagcctctttttgtggaaaacgacagcagcagca

SEQ ID NO: 723165 - DNA, 99 bp, Homo sapiens
atagctacaaccagcctaagggtttctctactatgtccactccatttatcttaaagaaattggacagcatatgaagacaggacatcacatatgaatgca

SEQ ID NO: 723166 - DNA, 74 bp, Homo sapiens
tagctcaaggaaacctttccaacacagatgtccaagctgccaacatgtgcaatgaattctcacagatatttcaa

SEQ ID NO: 723167 - DNA, 131 bp, Homo sapiens
gacaggacagaaagagtgtgcagcggattaaagctaaagacatagttcctggtgatattgtagaaattgctgacacgatgaggcgagtggtacgacagagcaagtttcggcatgtatttgggcaagcggtg

SEQ ID NO: 723168 - DNA, 75 bp, Homo sapiens
ctgagcccggcgcaggtgaccggcgcgcgggagcgctacggccccaacggcacgccagccccacgggcctgctcc

SEQ ID NO: 723169 - DNA, 119 bp, Homo sapiens
gagccctaactcagcgcaggaggaccggctgccgccgccgccgccgccagggaagaaatgatttcccttggggatggagacatcaggaccatgtgcccccttctgtctatgaaacctgg

SEQ ID NO: 723170 - DNA, 100 bp, Homo sapiens
tggggccactccggaggagcctctgttggacttcaaggtacttcatagacagcagtctcagccagccaaggagagttcccctcccagagaagaagcgcct

SEQ ID NO: 723171 - DNA, 50 bp, Homo sapiens
gtggaagatggcgcctgttgtgacaggttgatttggagcatatgcgaaca

SEQ ID NO: 723172 - DNA, 98 bp, Homo sapiens
gggcaccctgcagcgcgagctggaccacgagaggaagctgagggagaccctgtgttggggtggaagaggaggaggcgcccgacatcgacatataccac

SEQ ID NO: 723173 - DNA, 83 bp, Homo sapiens
tagcattcgaatgcctgctttcttcaatggtatatttggacacaagccttctccagaaaccaatagagccatggcgactccct

SEQ ID NO: 723174 - DNA, 88 bp, Homo sapiens
ccttgtgagaggtcagacaaagtgccggataacaagaacacccacacgttgctcctggctgggatctgctggaggaaggaaaggccac

SEQ ID NO: 723175 - DNA, 50 bp, Homo sapiens
gcgaatatcgtcatcgttagaagcatgtaaaagtcacatctgaggctctg

SEQ ID NO: 723176 - DNA, 99 bp, Homo sapiens
acccgacgaggaacgaatgggacaagatcccgtccatgaatcaggtaaaataccatgaagattttgaaaaaacaaaggggagaggctttactcccgtcg

SEQ ID NO: 723177 - DNA, 98 bp, Homo sapiens
gcaaaagctgacactctcaccctgaaggaacgggagcggctgaagaaaagggcctcagcaactgttgccattcccaaagaacaccatcgctttgttat

SEQ ID NO: 723178 - DNA, 90 bp, Homo sapiens
ctctacgacttcctctatggtggcgtcggccgaacagccccgcgggaatgtcgacgaggagctgagaggctgggaggcggcagaatgcag

SEQ ID NO: 723179 - DNA, 100 bp, Homo sapiens
tgccataccacttggtgtatttgctggctggtctggagttctggacttaattttaacaccagcgcatgtcagccaaaaatcatgaccaccccaggaaaag

SEQ ID NO: 723180 - DNA, 80 bp, Homo sapiens
cgcctccggagcgcctgtgtgggtgtcgtgaaaactacccctaaaagccaaaatgggaaaggaaaagactcatatcaaca

SEQ ID NO: 723181 - DNA, 75 bp, Homo sapiens
agtccatttggggaaatccttcggatggtgaactcattagaagtctctgtgccttgcggagaatcctgaaaaaac

SEQ ID NO: 723182 - DNA, 100 bp, Homo sapiens
tggacagatcctttgcctgtcagtgtcctgagggacacgtgctccgcagcgatgggaagacgtgtgcaagtactataagatctccgtggtgctcatgtgc

SEQ ID NO: 723183 - DNA, 100 bp, Homo sapiens
ggatggcgtggagatatggcgcaactgcggcgcggagtgcatccgccccaacccttttccccctcgtctcctgtgagaattccccgtcggatacgagcag

SEQ ID NO: 723184 - DNA, 97 bp, Homo sapiens
tccgcgccgggggccgcccgccgcagacacgggacccgcttcgaggccgctttggcgccaaatcctgagaagctccaccatgaggcgaggtggatgg

SEQ ID NO: 723185 - DNA, 100 bp, Homo sapiens
tgtctggaggtggcagcagaaatcctactccacccataggaagacccacgtccacacctactcctcctcagacatggctggattccgccaaagaaataaa

SEQ ID NO: 723186 - DNA, 82 bp, Homo sapiens
cctgaggccaaaccattgcctggaaagctaccaaaaggttagtccgttcattgatgacaacaccagaaggaagttcctcatt

SEQ ID NO: 723187 - DNA, 75 bp, Homo sapiens
aaggattgtgacatatcgttggacccagaattgagtctatcttcaatttacagaccttggcttttctaccccaat

SEQ ID NO: 723188 - DNA, 101 bp, Homo sapiens
gtacaaatacccctttgaattaattatggctgggccattaagtttaatgatggcctgagcttacaggaaagttgccgccttattgaagctctgtcctcatg

SEQ ID NO: 723189 - DNA, 80 bp, Homo sapiens
gcgagctgcaccggcgctccgtggaggagccgcggggtgtcttcatctgctgctggttcaccatcctttacctcccaagt

SEQ ID NO: 723190 - DNA, 87 bp, Homo sapiens
aacttatcagagattgagaatgtccatggatttgtttctcattctcatatttcaccaataaagtgagaagaggggatgtcctggcag

SEQ ID NO: 723191 - DNA, 100 bp, Homo sapiens
tgggcacccacggagcctccggggctggtgggctgggggccctgactggacctggcctggccagcttactggggagcagtgggcctccagggagcagctc

SEQ ID NO: 723192 - DNA, 100 bp, Homo sapiens
gatatccctagaacgttgagggcacgagtcgggtcctgagaccaggtacattacaggaatatcagaagagaatgaaaaaactagatcagcagtacaaaga

SEQ ID NO: 723193 - DNA, 96 bp, Homo sapiens
gtgtggccccgtgtcctgcaggtattgggagatccacagctaagacaccgggacctcctggaagccaaaaatggctccatctactctttgaagctt

SEQ ID NO: 723194 - DNA, 100 bp, Homo sapiens
ctcacgtctaccccgtggctgctaagacacagcttggccggtgcttccaggaaaccattgggtcacaggttttagctaaagaagatactgaggcagctat

SEQ ID NO: 723195 - DNA, 99 bp, Homo sapiens
tgaagatgaaccacagcttaaggcccattgctagaagactgggacataatcagccccaaagatgtcattggctccgacgtgttgctggctgagaaacgg

SEQ ID NO: 723196 - DNA, 100 bp, Homo sapiens
ggatgaacatcgacatcgccagcatcgacatggtttccgaagtcaacatgtgcctatgttgaaaaatatctactggagaagtccagactcgtttatcagg

SEQ ID NO: 723197 - DNA, 50 bp, Homo sapiens
ctggacggtaccagaggcactgtggatggttcagggttcctggaacttct

SEQ ID NO: 723198 - DNA, 75 bp, Homo sapiens
aatggaggccagtggctggtctcaggatattaccttccaaatgatgatggagaattttatcagttctgttacgtt

SEQ ID NO: 723199 - DNA, 89 bp, Homo sapiens
ccagaagcagaggaagcagcttgcaagattggtgttagactgggattcagtcagagccagggttaaagcacgaattgggagctctcagc

SEQ ID NO: 723200 - DNA, 74 bp, Homo sapiens
atgtgaaaactctgttactgaagactgggctggcttagatgaagatgaagatgcacatgtctgggaggataatt

SEQ ID NO: 723201 - DNA, 75 bp, Homo sapiens
cagacttgggatcagttataaactctagagtggacggagtaaccaagagcccagaaaagcgctcttctctcccaa

SEQ ID NO: 723202 - DNA, 84 bp, Homo sapiens
aagatcgtcgccacctggatgctggagacctcctgccccccgaggtctgcagtctcctgaacccagcagccatctacgccaaca

SEQ ID NO: 723203 - DNA, 76 bp, Homo sapiens
cttcaatactacctttatttccaccataggaagatgagaagtttttgtctgaagtttttgcacaattaacagatga

SEQ ID NO: 723204 - DNA, 117 bp, Homo sapiens
taccgctatgcccggagcctggaggagctgctgctggacgccaaccagctccgcgagctgcccgagagatgtggtactggatcttcctctgggctctcttctcttctctgtttgtcc

SEQ ID NO: 723205 - DNA, 95 bp, Homo sapiens
ggcccacgccgctccgaggcctcgcgaccgccgagcctgcagcctgccccgcggccaacatgagcttcttgttacctgcttttttaaaggctgca

SEQ ID NO: 723206 - DNA, 100 bp, Homo sapiens
agtacacttactactatcctcattatctccaaaccaagattgttgatccatttcagatacttgtggcagcaaacaaagcagttcacctctacaaactggg

SEQ ID NO: 723207 - DNA, 100 bp, Homo sapiens
ctttactccatgtgtgggacattcattgcggaataacatcggaggagaagacagagtatgctcgctatgagaatggacactactcttaccgcatccaccg

SEQ ID NO: 723208 - DNA, 82 bp, Homo sapiens
gaagccacccgagcggactcccgagaaaatatttacaccagcagctccagttcataccaataaagaagatcctgctacccaa

SEQ ID NO: 723209 - DNA, 100 bp, Homo sapiens
tgcagtgacagccggcggcggagcggccggtccacggaggagacccgcagctcacgccacactcagggagcccagcccgggctggcagaccaggcggcaa

SEQ ID NO: 723210 - DNA, 75 bp, Homo sapiens
ctcttctcaaactcagacaatgaaagatctataccatctcttgttgatgagaaaagaaaccttgtttattccctg

SEQ ID NO: 723211 - DNA, 82 bp, Homo sapiens
ccggccggcggcggcggcggcggcggcggcggcgcagattcaggaggaatcagatatgtggaaaataagagaactggaaaaa

SEQ ID NO: 723212 - DNA, 75 bp, Homo sapiens
tgctcaaggccaagatggacgccgagcaggatcccagtatgatgccgccaccacctatgggcatgatgccgccgc

SEQ ID NO: 723213 - DNA, 50 bp, Homo sapiens
tggcgctgaagaggattcagaaaacaattggtgtgacctttgcagccatg

SEQ ID NO: 723214 - DNA, 100 bp, Homo sapiens
ccggcactttgcctgcgaacagaacctgctgtcgcggccagatggctctgcttccttcctgcaaggcattgaacctggccacatcccaggtaccgtgaac

SEQ ID NO: 723215 - DNA, 50 bp, Homo sapiens
gcgggccgtcatgctcatccaggcagaaaacctggaatcagattactttg

SEQ ID NO: 723216 - DNA, 100 bp, Homo sapiens
cgtcgccccgccgcgccgcgctccaaccgcctcctcctcctcagtaacgcggggaagaaggagaaagggccaacccctgaagaagcaatacagaaactga

SEQ ID NO: 723217 - DNA, 99 bp, Homo sapiens
tatgttgttctcagctacttgggactcctctctcaagagaagctgcaagagcaacatctttcctcaccccaaggcctgcagggacttcttggaactagc

SEQ ID NO: 723218 - DNA, 75 bp, Homo sapiens
gcaagccaggctaaacagttggcagtctaccctgatgggagagtctgcatttccatcctccacgcgccaggcgat

SEQ ID NO: 723219 - DNA, 75 bp, Homo sapiens
ctgtgacaacgaccacgtctccaaaatgagtcgcatcttcaacccccatctcacttttccagccattaactccag

SEQ ID NO: 723220 - DNA, 90 bp, Homo sapiens
gccaggacgagaggatgcggagcccgcagaacctccacagtcaagaggacgcccttcagatatttcaacactcctctcagcatcctccac

SEQ ID NO: 723221 - DNA, 98 bp, Homo sapiens
atgcttttagatgaatttaccactaagcttttggcatcgtgttgcaaaatgacagatcttctagaagaaggtgtgagatgcacaatgcgaaacctagg

SEQ ID NO: 723222 - DNA, 75 bp, Homo sapiens
ccggggtgcaccgctccctgggcgtccatctgagcttcatcagggggctagagagctgaaggagagccagtttcc

SEQ ID NO: 723223 - DNA, 73 bp, Homo sapiens
tctaagaaatttgctgttaaagcaatggtggcttgctatccgggaaatggaacaggttatgttcgccacgtgg

SEQ ID NO: 723224 - DNA, 90 bp, Homo sapiens
acttttgtgtccaggcataagaaatttgacgctgacctgaataatgtcagattctcagcttataggactgccatgaaactccgaagactg

SEQ ID NO: 723225 - DNA, 50 bp, Homo sapiens
ctcttgtcctcctcagcctcgatggtcatcatgggccagtgctactacaa

SEQ ID NO: 723226 - DNA, 98 bp, Homo sapiens
gttgcatttcctcgtcgagcgcaacccaaggtccccgcggaagccgcggtgtcggcgccatggcggagctgacggctcttgagagtctcatcgagatg

SEQ ID NO: 723227 - DNA, 95 bp, Homo sapiens
gcctcccgagtagctgtgattacaggtactttaattatcggactaccaggttcctggctgaggaggggttttataaattccataactggtttgat

SEQ ID NO: 723228 - DNA, 100 bp, Homo sapiens
cctgcctgttcatggcagtgacccagaaagattcatcagtgggcggtagctacagcaagctgggtagcaggcagatccaaaggatatcatgaagtttcca

SEQ ID NO: 723229 - DNA, 75 bp, Homo sapiens
tctcggcgctgccgtctctggaggagtactggcaacaggaaccaagtgagaagaaggtacctctggacatgtcat

SEQ ID NO: 723230 - DNA, 90 bp, Homo sapiens
cccgcccgcctgctcggcgaccagagacacctatggctgccgatgaaggctcagcagagaaacaggcaggagaggcccacatggctgcgg

SEQ ID NO: 723231 - DNA, 75 bp, Homo sapiens
gccagatatggtacaggactgtcaacgaaacctggcacggctcttgcttccgacagagtgggaagctttggagct

SEQ ID NO: 723232 - DNA, 90 bp, Homo sapiens
attttctctagccttaggtaatgcatgaaagcacatgtttcagtgccactcacataagaagtgcccggtggtcactaactgccaagagag

SEQ ID NO: 723233 - DNA, 100 bp, Homo sapiens
ggagatatatttccacagcatctggcttttcttgttcctgttctgaagtaaatgtaactgctatcctctggagaacacctggagagtgcaagttctaact

SEQ ID NO: 723234 - DNA, 100 bp, Homo sapiens
tgtgaagctaaactcaatgctgctgtgtgggaagaagatttgtaaagaaaactcttagagctggcggagttgcctttgatacggttagacttctcatgca

SEQ ID NO: 723235 - DNA, 100 bp, Homo sapiens
cttaaatctgtcgtttgaatttaggaccacctcggtgttcaaactggatccaaacaataaagaaggccctgtattaatcctgggaaggagcatgcaacca

SEQ ID NO: 723236 - DNA, 100 bp, Homo sapiens
ccaaggatgagattttgccagagaaaggacgagcagcaagtcagggagcttaaggtgttggtggaaataacccagatgaagaaaagaatagcacagccaa

SEQ ID NO: 723237 - DNA, 100 bp, Homo sapiens
gcaggactgaggagctgccgctgggccgggagctgcggatttatcgaggtgtgagagtcggagggttgaaagagtctgcagtgcattctcagtataagag

SEQ ID NO: 723238 - DNA, 82 bp, Homo sapiens
tcggggcgggcgccgcgggacctctccgggccatgggcaccatgactcctgtgaggatgcagcactccctggcaggtcagac

SEQ ID NO: 723239 - DNA, 90 bp, Homo sapiens
agtggttcctgaacctgttgccagatggtgcaatgttcaaagtactcaagatgaatttgagcaacagcttgaagaagaggcagctaaacc

SEQ ID NO: 723240 - DNA, 89 bp, Homo sapiens
ttatctcaactttggtctcctgggaccactcgttgctgacagtcagaaagttgatgataattagaagcatgctttccactgaacttccc

SEQ ID NO: 723241 - DNA, 50 bp, Homo sapiens
ggcgaacccgcggcgcaataacggttacgggcaggacttgagtggcttcg

SEQ ID NO: 723242 - DNA, 75 bp, Homo sapiens
gggcgacgctggctgcagggacccggtgacagcgtgagaggacatggatttgattgacatactttggaggcaaga

SEQ ID NO: 723243 - DNA, 101 bp, Homo sapiens
atgacattgccaagatatcccattgccgaggtactgtctgaatgccgcctgctcgcctacatatcccaggtgcccacgcagatgtccttcctcttccgcct

SEQ ID NO: 723244 - DNA, 51 bp, Homo sapiens
gtcttctgaggccctgaaaccacatggaatacaaacagaagcttgcacgag

SEQ ID NO: 723245 - DNA, 100 bp, Homo sapiens
cggtgcttccctgaggctgaggcgcccggcctcccgcccgccgcgctccagatgaagtgtgagcactgcacgcgcaaggatgcagaaaatgcgattgtgc

SEQ ID NO: 723246 - DNA, 83 bp, Homo sapiens
gctggacggcgagcgcgagcggcgcgagaaagaatagcacatttcaaacctacaagaaagaagtgtgcctcccccgtcattcg

SEQ ID NO: 723247 - DNA, 100 bp, Homo sapiens
acgcagatgccgacgaaatcctccaggaggagatcaaggagtacaagtcttttcgtctgcagatgactatagagaacatgaaccatttgaaattcattcc

SEQ ID NO: 723248 - DNA, 83 bp, Homo sapiens
acgatgtgcgagaactgcgcagacctggtggaggtgttaaatgaaagaagcgcctcttggacgcgtgtgaccgatgcccagat

SEQ ID NO: 723249 - DNA, 98 bp, Homo sapiens
cgaactcgggaagcaacctccacccccgagatctccttggaagcagaacccatagaactcgtggaaactgtggccacagatgtctttaattccaaaaa

SEQ ID NO: 723250 - DNA, 75 bp, Homo sapiens
cacggaggcaccatgaagaagtcttactcaggtggacttagtagttttaagcagaaccatgaaaacctctgtgac

SEQ ID NO: 723251 - DNA, 88 bp, Homo sapiens
gaaggctatggaagagctcaaggagatcatacagaacctgcacttgttgccaagtcttccatcttactagatgtgaaaccttgggatg

SEQ ID NO: 723252 - DNA, 100 bp, Homo sapiens
cgagccgtgtcacacagggacagccgcaatccggacctggcggaaacttggatttaactggccagaagcaggtattcaaagcagagaacaatccctgggt

SEQ ID NO: 723253 - DNA, 90 bp, Homo sapiens
gcaggactctagtaacccgcgaaatgatgggatagcgttgcaaatccttaaaagagtcttaacggccgaaatagaactatttgtgaacag

SEQ ID NO: 723254 - DNA, 98 bp, Homo sapiens
agacaaacagcggaaaatctactgcgtggcttgtcaggaactcgactcagacgtggataaagataatcccgggtgtcaaattgagaaccaggtagatc

SEQ ID NO: 723255 - DNA, 98 bp, Homo sapiens
gcttttcattatatccagctgggaactgtctacaggaggccagatgctccagtgcctgatggcgaaagtgagaaaactgtagaagaaagttcagatag

SEQ ID NO: 723256 - DNA, 82 bp, Homo sapiens
ccgcggcggcagcagcagtgagaggagccagggagtaacgaagagatcaaagagttcgccgcgggctacaacgtcaaattcg

SEQ ID NO: 723257 - DNA, 90 bp, Homo sapiens
ggataaaaacactttgggagaagtcacaagagaagggcttctttcctgtcgttgttggctttattagaagagtgccagtccttggatccc

SEQ ID NO: 723258 - DNA, 100 bp, Homo sapiens
tgaccagtacagggagctgcagaggtacgccgaggaggttgggatcttcttcactgcctctggcatggatgaggtaacagttgacaaatgggaacctttg

SEQ ID NO: 723259 - DNA, 100 bp, Homo sapiens
ggctggagaacccgaagcacctcccggcgccgggacgcttcttctggcagctgcaatgactctccgcacggtattattgtcattgcaagcactattggca

SEQ ID NO: 723260 - DNA, 75 bp, Homo sapiens
cttggatgagaagcagtgtaagcagtgtgcaaacaagattgcccccgaggaattagcacttgttcacaacttgag

SEQ ID NO: 723261 - DNA, 85 bp, Homo sapiens
cagttggaagcagccgatccagcctgcggagcctgtggggcaggtggcagtagagaagagcatcacagaagttgctcaggagctg

SEQ ID NO: 723262 - DNA, 101 bp, Homo sapiens
cgctgccgagaagctttacctcgctgaccctatgaaggttggctgcaaccctaatgaagatgtggctatctttgctgttgactcattaaggcaactctcca

SEQ ID NO: 723263 - DNA, 75 bp, Homo sapiens
atgcatgaaaggcgtgatcaccgttttaacttctagtcatggcgaatgatcgcaggagagcacagactggaccct

SEQ ID NO: 723264 - DNA, 98 bp, Homo sapiens
acgcccctcaccccccgagagccggccagctttgctccaatggaggacaaactcaaccaggcacacctcgaggtccagcagctgaaggcctcagtgaa

SEQ ID NO: 723265 - DNA, 96 bp, Homo sapiens
ggactcctgtattaggtcactacaggaatcaggaatacttgacccacaggattattctacaggtgaaattccatgtctgtgacaagcttggaggcc

SEQ ID NO: 723266 - DNA, 100 bp, Homo sapiens
ctatggcagatttgaaaattcacccttgtagagtcattcctgcctttgagcggactcccttttaagggaagatggagagttggaagaaggtgaattggaa

SEQ ID NO: 723267 - DNA, 99 bp, Homo sapiens
gtgatgtcttccagactcggtgctgtacccgccggaactctaatgatccaggacaaagaagttaccctggagtatgtatcaagcctggatttttggtac

SEQ ID NO: 723268 - DNA, 82 bp, Homo sapiens
ccacaagcagatctactactcggacaagtacttcgacgaacactacgagtaccggccaaagaagcccaggatgacctggtga

SEQ ID NO: 723269 - DNA, 97 bp, Homo sapiens
gaagagcagacacagtttcttaaagagctggtggagcctgtgtcccgtttcttcgaggagcccaagaagaggccgaaaccgagaccatgccagggaa

SEQ ID NO: 723270 - DNA, 75 bp, Homo sapiens
agtctcagattattgtcatgctcactcagtgtaatgagaaaaggagggtcctggacccaagccagaagcctctgc

SEQ ID NO: 723271 - DNA, 100 bp, Homo sapiens
tctcaatacctatttgggaaaatatgtcaataacctgaacactgaccagctctcagttgcacttctcaaagatactagagtaaaaggatggtttcttctg

SEQ ID NO: 723272 - DNA, 82 bp, Homo sapiens
gccagagctcttcccttacgcaagagaaatacgaatgtgctttaaagcgagcaagtattaaaattgtgactcctgactgggt

SEQ ID NO: 723273 - DNA, 100 bp, Homo sapiens
ttccgccacaacatcgcctacttcccacagatcgtctcagtggctgcccgcatgctcaagaactccaacgtggagaacctacccccgcacatcatccgcc

SEQ ID NO: 723274 - DNA, 51 bp, Homo sapiens
cgcgcttcttccccactcccgagacaggaacgtgttcaaaaaagtttccct

SEQ ID NO: 723275 - DNA, 100 bp, Homo sapiens
ccatgaacaactcgggcgccgacgagatcgggtctcaagattctgccctccaagaaagtcttgccatgattggataggacccccagataaatattcaaac

SEQ ID NO: 723276 - DNA, 74 bp, Homo sapiens
gaagctgatcacctggagtgaagacctcacacttaattatcttcacccccaaatccctgttgcgccaccccgag

SEQ ID NO: 723277 - DNA, 83 bp, Homo sapiens
tggaggctgagtacgacagcctcaaacaggagctggagcagctcaaagaggcagataaaacgtcactgtgcagagccttttac

SEQ ID NO: 723278 - DNA, 100 bp, Homo sapiens
cgttgtggtccttgatccagtatgcttatacaggggatggcattcctactgtatttgtggcagtggcaggcagaagtaatggtttgggaccagtgatgtc

SEQ ID NO: 723279 - DNA, 90 bp, Homo sapiens
cactgccactacagggaagtgcatcacatgtcaggctggtgcagtggtgtcatcttggctcagtgcagcctcgacttcctgggatccagc

SEQ ID NO: 723280 - DNA, 80 bp, Homo sapiens
aaaatgcgctcgggctggaccagcagattcagagcattcttcactccagaataatgagcaaccctctttggccaccagct

SEQ ID NO: 723281 - DNA, 96 bp, Homo sapiens
cttgtggagccggagctgggcgcggattcgccgaggcaccgaggcactcagaggagacttcccaagtaagaagcggaagaggagccgctggaacca

SEQ ID NO: 723282 - DNA, 74 bp, Homo sapiens
gagcgctcccaggagaaacaaaaaaagcttgtggtgaaggggggcaaaaaaaagaagcaagttctgaagttcac

SEQ ID NO: 723283 - DNA, 83 bp, Homo sapiens
ccccaaagccgcgcgagcagtgggaggagcaatgagaggcaatcctgagaatggggtactaagagaaaagcacgaagctgtgg

SEQ ID NO: 723284 - DNA, 82 bp, Homo sapiens
gtggagatatggcgcaactgcggcgctggaagcatcagttcacagcagtaatgcacactgtacagataagacaattgaagct

SEQ ID NO: 723285 - DNA, 75 bp, Homo sapiens
accatccataaaatactcattcccctctcaggcagggcaagaatcctttcgttccatcacaaggtcgtattacag

SEQ ID NO: 723286 - DNA, 101 bp, Homo sapiens
gacagtgcctacgtggggatgagtgacggaaacccagagctcctgtcaaccagccaggtctacaaggaagtcttcacgaggagcagtgagaactcagcgtc

SEQ ID NO: 723287 - DNA, 51 bp, Homo sapiens
gctccggaaaggggacacctgaacgtgcgcatcgaccccagtagcctgtcc

SEQ ID NO: 723288 - DNA, 75 bp, Homo sapiens
agctgttcgaatcatctgatatttatactgaatgagttactctgtgagaaacgaccgaaacaagaagaagaagga

SEQ ID NO: 723289 - DNA, 75 bp, Homo sapiens
aggtggcctaccaggaggccaggggtgtcgccatggacttggatgttgtgggtgatggtatgcagtgtcctcctt

SEQ ID NO: 723290 - DNA, 100 bp, Homo sapiens
ctctttgtggccagatgggtttgtatggacaggcttgtccatctgtaacttcattaagtgagggccccaaggctgttgcagctcctcgacctgatcggtt

SEQ ID NO: 723291 - DNA, 82 bp, Homo sapiens
gacaggaacccctccgagacccagtccaaaagtacatcgacgccatcagcaacaagcagggcgagctggagaattacgtgtc

SEQ ID NO: 723292 - DNA, 101 bp, Homo sapiens
ggactcagaggccgccatcaaccgccagatcaacctggagctctacgcctcctacgtttacctgtccatgtgcatacatagagacgtgaagccagaaaata

SEQ ID NO: 723293 - DNA, 75 bp, Homo sapiens
atgaagccgcagaccctcgcggtgcagaccctgatagtcgtgatcatcgggatgctcgtgctcctgctggacttt

SEQ ID NO: 723294 - DNA, 90 bp, Homo sapiens
gttcactgctgtagtcagtggggacatgatttcagacctgaaagtattaatgaagcttagaaaacctagaattacagctacaatttggtc

SEQ ID NO: 723295 - DNA, 82 bp, Homo sapiens
tgagaaagaatttgagcctctgctgaattggatgaaagataaagcccttaaggacaaggaaggatttgatgccctggatccc

SEQ ID NO: 723296 - DNA, 75 bp, Homo sapiens
cggagagatacggctatgtcgatcgaaatcgaatcttcggagatttacaagaccagctagaggatatgatggaag

SEQ ID NO: 723297 - DNA, 82 bp, Homo sapiens
atcggaaaggtctgccttacaagggacaccatagcctctcaccctaaggaacagtcttctgaggccgcgctccggattcagt

SEQ ID NO: 723298 - DNA, 100 bp, Homo sapiens
ctcgacgaggccttccagcgctatcgtgacctgcttttcggttccgggtcttggccccgtccttacctcacagattattgtggatgatgatgacagtaag

SEQ ID NO: 723299 - DNA, 96 bp, Homo sapiens
gaagaaaatacctggaatttacgtcttatctttagagattgggaagaccctgatggagatagattctgttgctgttaacatttcaaacttggtgct

SEQ ID NO: 723300 - DNA, 83 bp, Homo sapiens
gtggtttttcggatcatgtctggtggctccgcggattataacagaggcatcccaacacgctgtcttttcgctgctcgctggcg

SEQ ID NO: 723301 - DNA, 97 bp, Homo sapiens
cacgagcagatcctggtcctcgatccgcccacagacctcaaattcaaagccctgggcgctgcctatggcacagccaagagcggtaccggcattgcgg

SEQ ID NO: 723302 - DNA, 100 bp, Homo sapiens
ttcagaaggatatcgacgtcgtgatccagaagtccagagctgaggactgcctgtttgcaggtgcacacatcttgaccaactcagcagcaaggtggatttt

SEQ ID NO: 723303 - DNA, 75 bp, Homo sapiens
ccgccgccccgaaactttcaccgcgagcgggatggggctggtaagtagcaaaaagccggacaaggaaaagccgat

SEQ ID NO: 723304 - DNA, 98 bp, Homo sapiens
ctgcctccctcggtgcgcgctgctgctcgcagccgccgcggccgccgaagaggagcccggggccagtcgtgccaagcggacctcgtgaaggacaacgg

SEQ ID NO: 723305 - DNA, 82 bp, Homo sapiens
atcagcatcatcgacacccccgggatcctgtctggagagaagcagcggatcagcagagtcaggatggctaaaggtgacccca

SEQ ID NO: 723306 - DNA, 90 bp, Homo sapiens
acgccctctccgccgtcatggcccggcatcggaatgttcgaggctataactacgatgaagaactggttagatcctgctaaagaaataaag

SEQ ID NO: 723307 - DNA, 98 bp, Homo sapiens
cctagcactttgggaggctgagagtcagaggttccggttgagatcaagttgggagacacacccttgttcattctccttgagaagcagctattatcaac

SEQ ID NO: 723308 - DNA, 90 bp, Homo sapiens
atagatgtacactgaaaactggacattataacattaagtcctgggaactccaacaagggagcaaatcagagaaatgaacccaaactacac

SEQ ID NO: 723309 - DNA, 100 bp, Homo sapiens
tcttcgattttatgaaaatggagaactctgtgatgtcacactcaagggtgataaaagaaaatgtggctgaagttacccgaagttcagcttgcagtgtaat

SEQ ID NO: 723310 - DNA, 75 bp, Homo sapiens
ccaaggtggatattgatgaccacacagacctcgccattgagtatgagctgtttgcagacaaggtcccaaagacag

SEQ ID NO: 723311 - DNA, 75 bp, Homo sapiens
gcggttcggccgcgccggccggcatttggctttatgtcccgagttgccctacaagcagagaagatgaatcatcac

SEQ ID NO: 723312 - DNA, 100 bp, Homo sapiens
cgcgcggcggacgcgcccgggacgcgcggcggcaccgggaggccgggccgagcggcatccccacgctcatcatgctggacccgcagggcgaggtgatcac

SEQ ID NO: 723313 - DNA, 100 bp, Homo sapiens
cgactttcagaaacaatcacatgaagactaaagcatctgtcagaaaatttaatcccatggaatcaatcaaattaaatcatcatgactacattgattcccc

SEQ ID NO: 723314 - DNA, 87 bp, Homo sapiens
gttgcttgcttgcctgtgcgcgcgtgcgcggacatggcctcaaacgggtttccaggcctgaggtgcccgccctggccccaggagaat

SEQ ID NO: 723315 - DNA, 50 bp, Homo sapiens
gaaacacaaagcagcccaaccaaaggatggagttttgctcttgtcaccca

SEQ ID NO: 723316 - DNA, 75 bp, Homo sapiens
acccagcagttgcggaagactttcggcctggatgtcagcgaggagatcattcaaaataggaaggttgttgattac

SEQ ID NO: 723317 - DNA, 75 bp, Homo sapiens
gacagggatcacttcatccgaaccctcagcctcaagccgctgctcttcggataagcacattgaagaagtgcggaa

SEQ ID NO: 723318 - DNA, 74 bp, Homo sapiens
aaatcccgaaaaggagaacttcttaagaagagtggtgcgaaattcatccacacttctctttagtgccttgatca

SEQ ID NO: 723319 - DNA, 100 bp, Homo sapiens
ctgagaccctccagcgctgcctggaggagaatcaagagctccgaggccctgtttgtgctcttcgtcctggcctacatccacatcgtcttctcccgctcgc

SEQ ID NO: 723320 - DNA, 90 bp, Homo sapiens
ccagcctgcacgcgctggctccgggtgacagccgcgcgcctcggccaggaactctcctgatgaatgcagtgtggccaaaggcgggaagat

SEQ ID NO: 723321 - DNA, 90 bp, Homo sapiens
ggaacccattgaggcagagcctgagggctcccctggctccagccctaaggtgctctcccagccgtccgacctggatctccaagacgtaga

SEQ ID NO: 723322 - DNA, 100 bp, Homo sapiens
acctcactgcggcctcaaactcctgggctcaagtgatcctcctgcctcagcctcccgagtacctgagattagcccaggacagtcattttgtttactcatt

SEQ ID NO: 723323 - DNA, 75 bp, Homo sapiens
gcagcactctagttccaacatggttatcatgctcattgggaataagagggtcatcacactgaaacggtgttcaac

SEQ ID NO: 723324 - DNA, 100 bp, Homo sapiens
aagcggagaggccgggcgtcttctgagagtcaggcaccgatgaagacgccattattagcgtccttgcctaccgcaacaccgcccagcgccaggagatcag

SEQ ID NO: 723325 - DNA, 50 bp, Homo sapiens
cggacagagcccgtggtcgcgcaggtgaaagaacttgtcctggacaacag

SEQ ID NO: 723326 - DNA, 98 bp, Homo sapiens
gtgaagctactcaatacgcgccacaacgtccgactgcactcacacgacgtgcgctatgggtcagcaaaccagtccagctacgggggcccagccagcca

SEQ ID NO: 723327 - DNA, 96 bp, Homo sapiens
ctgcccagtttgagctctgggaagaagaggagcaggccgggacgcccaccgtgccggtggtggtgtgcacattgagccccggtatagacagttccc

SEQ ID NO: 723328 - DNA, 51 bp, Homo sapiens
ctctgatagttgttccttgtgcagaagaggtctctttattactatccacga

SEQ ID NO: 723329 - DNA, 75 bp, Homo sapiens
ctgtggttcatgccacagccaaaggatctatttggaaagtcagacccatacctggaattccacaagcagacatct

SEQ ID NO: 723330 - DNA, 100 bp, Homo sapiens
ggcgcttcccctttccagagagccagaaagaacccgaagcagtcgtattcctcgaccaagtgtgagtcaaggatgcagccgggaagctagtcgggagagc

SEQ ID NO: 723331 - DNA, 50 bp, Homo sapiens
ctttgttacatttgcagatgatcagggtattttactggatgaagcctcag

SEQ ID NO: 723332 - DNA, 135 bp, Homo sapiens
cccggagcgccaccggagagcgaggacgacgtggaggcggagtggcgcccggcgaggtagcgccaggcgaggacgcgtgaccaaaaccaaagacggccatgaagtgagatcgtgcaaagtagcagataaaacggg

SEQ ID NO: 723333 - DNA, 105 bp, Homo sapiens
gccatggcgttgtcgatgccgctgaatgggctgaaggaggaggacaaagagcccctcatcgagctcttcgtcaagagttgcatgctgagaatttgaaaaatgaag

SEQ ID NO: 723334 - DNA, 90 bp, Homo sapiens
cgctctggggctcagccaggcctgcgcgggcccgaggccggaggaacccggactccggcgtagcggcactgaaaatgaagatgctggaag

SEQ ID NO: 723335 - DNA, 75 bp, Homo sapiens
tggaaggggaccctgaaagaatacgaggcatcatggccgccctcagaccccttgtgaagcccaagatcgtcaaaa

SEQ ID NO: 723336 - DNA, 100 bp, Homo sapiens
cgccgtcatgggcgcctcggccgccatggtcttcagcggtagctacagcaagctgggtagcaggcagatccaaaggatatcatgaagtttccagggcctt

SEQ ID NO: 723337 - DNA, 96 bp, Homo sapiens
aggaagatctgcatggtgggaaggacctgatgatacagaggacttgtttacactgggcatgtaaacgaaaccatggtcaggtggtctcttacctgt

SEQ ID NO: 723338 - DNA, 83 bp, Homo sapiens
cccagagcaacacgtggaggtggataaggtgcaggtgggaagcacacctcaggaccaaagaatcgtcgggtacatcgcctgca

SEQ ID NO: 723339 - DNA, 90 bp, Homo sapiens
gggcgcgggcggcggcgccggcaggaagcatactggagcatagtgaaagagtctattttgaagcttcaaacttagtgctgctgcagacca

SEQ ID NO: 723340 - DNA, 88 bp, Homo sapiens
gacagtacgcctacttctataaagtcatccagatcatgcaacagatgagtgaccaccgctacgacaaactcactgtgcctgatgacat

SEQ ID NO: 723341 - DNA, 135 bp, Homo sapiens
tacaacacggtggcaagcaagtttaatcagacctgctcacacttcagaatagagaagttttgcacagtaataagttgactcacacagacttaaagcctgaaaacatcttatttgtgcagtctgactacacagagg

SEQ ID NO: 723342 - DNA, 100 bp, Homo sapiens
gctcagggtccagctggcccagaaggagcaggagctagccagagccaaagaagccttgcagggcgtatttggaagtttaagttcagcaccagcaacctgc

SEQ ID NO: 723343 - DNA, 50 bp, Homo sapiens
agaaagtgaattttgtagaaggagaaggtttcttgagtacaggcgatcag

SEQ ID NO: 723344 - DNA, 100 bp, Homo sapiens
cagaaacacagcagcgggagcagcaacaccagcactgccaacagggagaccctgcagcgtcatggtgctggagctggtggcacccgcaacatctcaggca

SEQ ID NO: 723345 - DNA, 75 bp, Homo sapiens
cagtgatggaccgtgctagtgacctgactgatgccttcgtggaggttgtctgcattcaaaagagcattctattaa

SEQ ID NO: 723346 - DNA, 50 bp, Homo sapiens
caacagctcggcgggctggaagaaacctgctaatattttagttatgggtg

SEQ ID NO: 723347 - DNA, 76 bp, Homo sapiens
agctgttcccactggctctgctgaccttgtgccttgtatctagtcctcagactattgtggagttattcttccaaga

SEQ ID NO: 723348 - DNA, 96 bp, Homo sapiens
agcaagaggaccctgcggactactgcaaagccttcatctcctcgtcctccaggcagcacaagccattgtggaatctccaccaggtgtacagaacgg

SEQ ID NO: 723349 - DNA, 75 bp, Homo sapiens
cctttccagagagccagaaagaaaataatcatgggccagactgggaagaaatctgagaagggaccagtttgttgg

SEQ ID NO: 723350 - DNA, 75 bp, Homo sapiens
atatggactgtgggagagtttctctgatatggactgtgatgcgggagtatgctgctgctgttccgctttgcgtcc

SEQ ID NO: 723351 - DNA, 75 bp, Homo sapiens
cgaagagctgccgtcgctgcagagaccccgctatggctgtcaaaatgcagatcttcgtgaaaacccttaccggca

SEQ ID NO: 723352 - DNA, 97 bp, Homo sapiens
gccgtgtggacccgtaaaataaaatggaaaggacctaagtgtgaaataccccgaagacgtccccatcacccttccaaacctgttgaggttcattttg

SEQ ID NO: 723353 - DNA, 105 bp, Homo sapiens
gaccgtggagttcgaggagtgcgtcaaggactccccgcgcttcaggtgagaagccctaccactgcaactgggacggctgcggctggaagtttgcgcgctcagacg

SEQ ID NO: 723354 - DNA, 124 bp, Homo sapiens
cgcaaggagccgaaggcggcgggagccagagtcgccgccggcgtcggcgccggactacaaagctgatgaagacccagcattattccagtcagtcaagaccaagagaggccctttgggacccaac

SEQ ID NO: 723355 - DNA, 100 bp, Homo sapiens
tcggggctgaccctgcccaccaggaccgccatggggacacggcactgcatgctgctgcccgccagggcccagatgttgaacagacacggtagaagactcg

SEQ ID NO: 723356 - DNA, 100 bp, Homo sapiens
aagctgtgacttaccttaacatgttcttgaagtaccatggcgtggattaaaagaattctgcttggtcagaatcgtgatggcattgtgttcagcactgatg

SEQ ID NO: 723357 - DNA, 71 bp, Homo sapiens
acaccagctgcggaatttgcggctttggcaggtacaggtttgcagattccgccagcagcacagcaagctct

SEQ ID NO: 723358 - DNA, 100 bp, Homo sapiens
cgactccgtaggagcgcgggggcggctcctgctcttcctggactcctgagcagagggccgcgatgggcctcttggaacattggtgtgttcatctgcattc

SEQ ID NO: 723359 - DNA, 100 bp, Homo sapiens
tttcaggaaggagccattatttatgtcatcaagaagaatgacgatggctggatctgctatgccgagaagactcacggcagcttcatcctcccccacatca

SEQ ID NO: 723360 - DNA, 100 bp, Homo sapiens
taagaagtgcctttcgcctcccaccatgattctgagacctccccagcaatgtggaactgtcactggaaggactgagcgcattcaggagcctggaggaact

SEQ ID NO: 723361 - DNA, 100 bp, Homo sapiens
cggcgggtcagtcagctcctggatctgcactactgcagtcttcagttaagcaacaagtagaagctattgaaaaacagtacatttctgcaattgagaaaca

SEQ ID NO: 723362 - DNA, 75 bp, Homo sapiens
tggaatagaagagaatgacctagcaaaagttgatgatcttccccctgcaatggctgccatccggaagaaactggt

SEQ ID NO: 723363 - DNA, 75 bp, Homo sapiens
catgccccgctacgagctggctttaatcctgaaagccatgcagcggccatgaagtcggggggcacgcagctgaag

SEQ ID NO: 723364 - DNA, 75 bp, Homo sapiens
gcacaggccgtcgctatgagcgggaccaccctgggcacagcaggcatcggagtttgatgaaggccggaacaactt

SEQ ID NO: 723365 - DNA, 75 bp, Homo sapiens
aagaagaagcagaccaactacttgcgcacgctgatcaacgagctagtgaaaggccaccagcccctcgggttccaa

SEQ ID NO: 723366 - DNA, 110 bp, Homo sapiens
cagttgaaacatagggaactctttttgtcacgccagtatgaatctctgcccgcaacacatatcagtttagaagaagaatgtgaatcctctctttgcacatctgcgttaag

SEQ ID NO: 723367 - DNA, 83 bp, Homo sapiens
cggacttccccgttagaactcgcgtttccacttcagagatctggtgctttgtaacagagccagactggtttcctatctcccag

SEQ ID NO: 723368 - DNA, 98 bp, Homo sapiens
ttgtgacccctacggagccccagcttgcccacgcaccccactcggcgtcgcgcggcgtgccctgcttgtcacaggagtgaacaaccaaggcgatgggc

SEQ ID NO: 723369 - DNA, 83 bp, Homo sapiens
tttcagcttcagcctgctcaagaactgcagcattgcagccgccaagacgatgtgaagttcatttccaatccgccctccatggt

SEQ ID NO: 723370 - DNA, 75 bp, Homo sapiens
ctgtgggtaatcatgttgccaaattgctgcagtccattggccagatgagaatcaaatgttttgctgttccctttt

SEQ ID NO: 723371 - DNA, 82 bp, Homo sapiens
caggtggcgaggatttccacatctccttcagctagattttgactttgaaaaaattcctttggaaaaacatgatgaagagtat

SEQ ID NO: 723372 - DNA, 75 bp, Homo sapiens
aggaatgccagtgcatcttttgcacagctgtgtctgctttttcaacgtgggagaaggagttgcacaagatagttt

SEQ ID NO: 723373 - DNA, 100 bp, Homo sapiens
gcggctgctgtcgcccagcgccgccccgtcgtcgtctgccttcgcttcacggcgccgagccgcggtccgaatgctgagggttggaaaagcaaaagcagat

SEQ ID NO: 723374 - DNA, 74 bp, Homo sapiens
aaacaagccaatcccaggaggaaaaacggatacagttgatatattagttggatggcatatagatcatactcaga

SEQ ID NO: 723375 - DNA, 100 bp, Homo sapiens
aactaagaccaagtcctcgctggactgctcagggtgccagacctcatccatcaaagctaagccagaagatttatcacattttcatcatcagctacaggat

SEQ ID NO: 723376 - DNA, 101 bp, Homo sapiens
gtccagaccatcctatactgtgacttcttctacttgtacattacaaaagggacatatttggagaagactgtgtaagtgtaaaggatgactctattcttagc

SEQ ID NO: 723377 - DNA, 100 bp, Homo sapiens
atttagaacgatgtgaacatcgaatcatggaatcccttgcatggctctcagattttttatcaagcagaaatgcatcgaacaacgagaatcaagatcactg

SEQ ID NO: 723378 - DNA, 82 bp, Homo sapiens
gccttcttcctggacatgaccaactgatgcagagagaacttgtttatgcaagaggagatggccctggggcccctcgccccgg

SEQ ID NO: 723379 - DNA, 82 bp, Homo sapiens
caccctccttccacctggccaggaatcagatgacattccagactctccatctagcccgaaagttgcccttcttccacctgtc

SEQ ID NO: 723380 - DNA, 100 bp, Homo sapiens
cgcacgcggtgcagggtaacatggcggatgcggaaggatgatgatgagagggatgtggatgccagcccgacggcagggctgcaggaagcagcaacgctgg

SEQ ID NO: 723381 - DNA, 127 bp, Homo sapiens
catgaatgaaactgatttggcaggtccaatggttttttgccttgcttttggagccacattgctactgctgaggcaacttctcctagaatctcaatctcagctcgatgccgccaagagcgaagcccag

SEQ ID NO: 723382 - DNA, 100 bp, Homo sapiens
gctgttccaggcgcacactagtctacaaggccagagctttctggaagggggcagttatgatgtgattgctcaagcccaatctgggactgggaaaacggcc

SEQ ID NO: 723383 - DNA, 82 bp, Homo sapiens
cggctcgccaactcggctgctctgggggattcgtgcgcgaataccctctaccatctgctttggtcagggtgccgctcgagga

SEQ ID NO: 723384 - DNA, 82 bp, Homo sapiens
gtgaagagttgtcccagctcggcccgcgggggagccccgggagccgcacggattttttatcaagcagaaatgcatcgaacaa

SEQ ID NO: 723385 - DNA, 101 bp, Homo sapiens
ggtgtgtccaattttgctcaacttattgtgagagtgtctcaggatgatacataccggtttttaactttggtgtcatcaaatgcaattgcaatgtgactgtt

SEQ ID NO: 723386 - DNA, 75 bp, Homo sapiens
tcggccgggccgtcctcggcggcagtgtcagggagtgtggccatctggggccgtgtggtatttgccactcaggag

SEQ ID NO: 723387 - DNA, 74 bp, Homo sapiens
ttgccctcatcctggttctggaatcctcagttcaaggtgacggcaattgcctcatgcatgccacttctcagtac

SEQ ID NO: 723388 - DNA, 83 bp, Homo sapiens
cctcgggatcccattccttcacagggaccctagccagaaccgggagaagtacctgctgcccttcctgtccctgcaaatcatgg

SEQ ID NO: 723389 - DNA, 75 bp, Homo sapiens
cagaggtgggcggctttgaccgagaggctgctggagctcgtgtttggacgcaaatcatgagtggaggatctcaag

SEQ ID NO: 723390 - DNA, 83 bp, Homo sapiens
ctcttgtttgtgttgtgtgtggaaatggcgaactcggcaaatacaaacaccgtgggggatatgagactttctactcggaatat

SEQ ID NO: 723391 - DNA, 100 bp, Homo sapiens
ccacgccagcagtggggcagcacctgcacctacggcggttctcccatgggcaggtggtctctctggatgagctgcgccccttccaggacccagacctgag

SEQ ID NO: 723392 - DNA, 97 bp, Homo sapiens
gggattcccagccatggcagattcctccgggcagcagggtcgtcctctcagcatgggggtcccgcggcctcagccctgggcgctggggctcctgctc

SEQ ID NO: 723393 - DNA, 100 bp, Homo sapiens
ggccgtgcggcccatcacggagcgcagcctcctgcagggggacgatatgagatgtacaccatcgagcggaatgcagagcggaccgccaccgccgggaggc

SEQ ID NO: 723394 - DNA, 50 bp, Homo sapiens
ctactgcgaagacagctggcagatgctgaagttccgaacagtccatgggg

SEQ ID NO: 723395 - DNA, 98 bp, Homo sapiens
gtgattccgtgaaggcttcgaatactatactggcaattgctggagaagattttgcaattgttgcttctgatactcgattgagtgaagggttttcaatt

SEQ ID NO: 723396 - DNA, 74 bp, Homo sapiens
gatttgttaaggattccaagtaactcttatttgattcccctcttcccgcggcctcgccatggcgacccacggac

SEQ ID NO: 723397 - DNA, 58 bp, Homo sapiens
ggaggggcggccccacggcgagcatgggtgtcaaattgagaaccaggtagatccccac

SEQ ID NO: 723398 - DNA, 50 bp, Homo sapiens
acgacatcgacctgtccgccctgcgggctgaccggttccctgatgtgtta

SEQ ID NO: 723399 - DNA, 51 bp, Homo sapiens
gggctttcacaggcccgggagcggcgcggatagggccagatttgagtgtgt

SEQ ID NO: 723400 - DNA, 86 bp, Homo sapiens
aatgggatgcaggattcaaggaagaaattagaccagatgagaagtcaagtaacacaagtggcaagacagccgggaacccctacccc

SEQ ID NO: 723401 - DNA, 100 bp, Homo sapiens
agaatgtaccaagaggcatactgactccattgacagaaggttttgttttgacatagaagctgctgatcggtgctgactgggttacttttttaaacactag

SEQ ID NO: 723402 - DNA, 80 bp, Homo sapiens
cgccgctcatccccctctcccagcagcggggatctgacgagcttttctctacttgtgtcactaacggaccgtttatcatg

SEQ ID NO: 723403 - DNA, 50 bp, Homo sapiens
gcgctgcgaggtggcggcctgaggaagaattcctttggctaccggaagaa

SEQ ID NO: 723404 - DNA, 83 bp, Homo sapiens
gctcgagacttaccagagccacaagttgtcgagatgtccacagaaggaggatttggtggtactagcagcagtgatgcccagca

SEQ ID NO: 723405 - DNA, 98 bp, Homo sapiens
actggacgcccccccggcttcctgttacatcaggtattctctactgccgctgatggtcaaacgcaagtggaaattaaagtgtgtcagggtgaaagaga

SEQ ID NO: 723406 - DNA, 98 bp, Homo sapiens
ggaagactttgctattgccatgcagatgttcagtttagctcatcgtcctgtcagactaggtcctgtccctgctatcagtggggcactgaagaaagcag

SEQ ID NO: 723407 - DNA, 101 bp, Homo sapiens
ttgtttcttatctattatataagcacacagcaagcaccttctgagctatttgtcgtagatgtccagacaagccagatcaccaagatccccattctgaaaga

SEQ ID NO: 723408 - DNA, 97 bp, Homo sapiens
tgccaaggtggagagagggattacagaaaggagaacaccttatttcaggttggtttcagtgctgatgaaacttgggactctgcaatagatacatgga

SEQ ID NO: 723409 - DNA, 82 bp, Homo sapiens
ctccacagtccctggggccgagcacgagggatttgggagcagcttgtcttacacaaggacgaaggaaaaggtcagggatcga

SEQ ID NO: 723410 - DNA, 100 bp, Homo sapiens
tctcgctccgtggccttagctgtgctcgcgctactctctctttctggcctggaggctatccagccttccatgaggcaggctgaacctgcagatatgcgcc

SEQ ID NO: 723411 - DNA, 82 bp, Homo sapiens
catgtgggtagaggacgtgttagacaagttcatgagcatccgcacttccactaatagccaagtagacaagctgaccctgtca

SEQ ID NO: 723412 - DNA, 100 bp, Homo sapiens
gcgccaacatgcttctcatggctgccctgtggggcctctacatgtccctggttaatgtgggccatgtctgatttgaaaaatgtgtgagtgctaaggaagc

SEQ ID NO: 723413 - DNA, 99 bp, Homo sapiens
tctggtccttcggggtgaccctgtatgagctgctgacgcactgtgactccagccagagcccccccacggtgtgtcagcagcctgagtgtgggaaatgta

SEQ ID NO: 723414 - DNA, 100 bp, Homo sapiens
ggctccagcatcaagatccgtctgacagacggagtctcagtggcgtgatcctggttcactgcaacctctgggccccccccaacccactgcgagttcaagc

SEQ ID NO: 723415 - DNA, 83 bp, Homo sapiens
aagcataatatggtgaacggccgcctggcagctgtgagttctttggaattgtgaacattcttttgaaatatggagcccagata

SEQ ID NO: 723416 - DNA, 82 bp, Homo sapiens
cctacttcaaggataagggcgacagcaacagctctgccggctggaagcaaccatgtccaagggacctgcagttggtattgat

SEQ ID NO: 723417 - DNA, 100 bp, Homo sapiens
tcatggagttcacagaagagtcgaggaggtgtggatgaggtcaccattgtcaacattttgaccaaccgcagcaatgcacagagacaggatattgccttcg

SEQ ID NO: 723418 - DNA, 75 bp, Homo sapiens
ataccagcaagtggcatccgtgatgggagagacttcacagagaatgcagttgtcttgacttcaggtctgtctgtt

SEQ ID NO: 723419 - DNA, 100 bp, Homo sapiens
cttgggaaaaggccggagaaggtgaaattctgtgtgctccctccggcgagagactttgtcagctcccgcacagtaacaccactctggctcacatcatagc

SEQ ID NO: 723420 - DNA, 100 bp, Homo sapiens
aatcagtaccaaccaatggctggaaatgcaaaaatgggaatcctcaaaacccctactgtgatggcattgagggggtcatggaggcttattacaggagtct

SEQ ID NO: 723421 - DNA, 80 bp, Homo sapiens
gcttctcggcccagtagtgacaatgcagatctccctgatggctcggagatcccgctccctcctattctgctcggcaggct

SEQ ID NO: 723422 - DNA, 100 bp, Homo sapiens
ctggagtctgtcatgattgccaaccccaatgtccccgcttaccgctgtggactgtggcattcctgaatccattgagaatggtaaagttgaagacccagag

SEQ ID NO: 723423 - DNA, 75 bp, Homo sapiens
aggagcggaagaatggcagtgctcaaactcaccgaccaggtgcaatggatgagcttcatagtctggatccaagaa

SEQ ID NO: 723424 - DNA, 76 bp, Homo sapiens
ctaagacttggcgaagcgctgcgctcgcgcccggatccctcaggataaacatcacgatgctgctcatgaaatcatc

SEQ ID NO: 723425 - DNA, 75 bp, Homo sapiens
gtagcgcaggggagattacttttctggaagcctcttagcaaatatccggctgtgatcaatgatatttcattctgg

SEQ ID NO: 723426 - DNA, 88 bp, Homo sapiens
gcagctgagcgctgccgccgccgcagcaggtgcttttgaagatgatgatatcacgcacgttgaaggaagtgtagatcctattcgagat

SEQ ID NO: 723427 - DNA, 75 bp, Homo sapiens
gcggaataacatcggaggagaagatcgagcctgcgtgctgccgaagcagggcgccgagtccatgcgaactgccat

SEQ ID NO: 723428 - DNA, 100 bp, Homo sapiens
ctggtctggccacaacagcagcacagaccccgtgcggctgacacagctgtatgagcaggcccggtgggacctgctgctggaggagattgactgcaccgag

SEQ ID NO: 723429 - DNA, 82 bp, Homo sapiens
acagagcctcgcctttgccgatccgccgcccgtccacacccgccgccaggtcttccactttcgccttggtgcctgtcttcgc

SEQ ID NO: 723430 - DNA, 82 bp, Homo sapiens
gaagaggctgcagaatatgctaaacttttggccaagagaatgaaggaggaggcaaaacagattcagaatctgcagaaagcag

SEQ ID NO: 723431 - DNA, 76 bp, Homo sapiens
ggactgtccggggccgggctcaggagcagagtactatactggcaattgctggagaagattttgcaattgttgcttc

SEQ ID NO: 723432 - DNA, 142 bp, Homo sapiens
tttatttccaaagttgaagaagtcttgaatgactggaaactgattggaaactctttgggaaagccactcgaaaagacatcaactagtcaggcagtcttccgtctccagtctggcatctgccatctcttccgagaaactttaa

SEQ ID NO: 723433 - DNA, 60 bp, Homo sapiens
aacgcctggctcggagcagcagcctctgaggtcctaggcctacttacaagcctccagtct

SEQ ID NO: 723434 - DNA, 100 bp, Homo sapiens
ctttagccacattgtcatatgctagtgatctctataatggttccagtatagtctctagatgcctgtgaggagccaccaacatttgaagctatggagctca

SEQ ID NO: 723435 - DNA, 80 bp, Homo sapiens
tctttttctggaatgtcattatcagacacaatgggaagtgctcagcggctgcactggacgtcctcgccaatgtcttccgg

SEQ ID NO: 723436 - DNA, 90 bp, Homo sapiens
ttgtagcctcaaactcccaggctcaagcagtcctaccatgtcagccttcccagtagctgggaccacagcaagtcaagccagagatctgtt

SEQ ID NO: 723437 - DNA, 100 bp, Homo sapiens
caggcgccgcgggctccgcgcccggccggacccgggcccgagccggctcagttcggggaagctgcaggagttcggcgtgggtgatggcagcaagctgacc

SEQ ID NO: 723438 - DNA, 98 bp, Homo sapiens
tttacctgtttggattaatatgtctctgttcagatgcttgctttaaatcgagtaacagcatcgcacccatttatgactgccgtagatctaatggaagc

SEQ ID NO: 723439 - DNA, 50 bp, Homo sapiens
gcgtgggggaccggctgttggcggagaatagtgacagtggtacaggaaag

SEQ ID NO: 723440 - DNA, 90 bp, Homo sapiens
cacaggccggtctggtggtggctggttactaccatgccaatgcagctgtgaacgatcagaggtctgctcaccaggtggccagataccgcc

SEQ ID NO: 723441 - DNA, 98 bp, Homo sapiens
gtcgcgagtatctccgtttcctggatgtgaacacctgctcccctcaaaagcttcgtgccaacagagaggttcctgtttgaacccaggagagtggaaga

SEQ ID NO: 723442 - DNA, 75 bp, Homo sapiens
accaaattcgctattcctgacttcaaggtgaaagacccctgacaaaagacaatcatcttctgggtacatttgatc

SEQ ID NO: 723443 - DNA, 100 bp, Homo sapiens
gcttccgcctcttcccggttccgggctcagggctcgttctggtctgcctagtcctggaatgagaagactttgggacatttcatgagtcattcaagcaaca

SEQ ID NO: 723444 - DNA, 126 bp, Homo sapiens
gccgcggaaaccgatctgcccgttgtgtttgtgaaacagagaaagataggcggccatggtccaaccttgaagtcaccttcaggccattcagaggaggaaagagaggggaatatgaagtcagccaag

SEQ ID NO: 723445 - DNA, 75 bp, Homo sapiens
cagagaagaaggtggcatctgagctcccccaggatgtgccaggtgagtgttgtgcaagattctgtcaacatttct

SEQ ID NO: 723446 - DNA, 50 bp, Homo sapiens
cagcatttatcctggagaagagggcccaatgtaaaggctgttgctactgc

SEQ ID NO: 723447 - DNA, 127 bp, Homo sapiens
gctctggggctgacccgggaagtcggggtctccttcgccttctgtctttctgcgtcctactagcagactgatgaagtatttctggaagcccagattcagaatatgacaacctcacctatgtttatgg

SEQ ID NO: 723448 - DNA, 99 bp, Homo sapiens
gacagatcgccggggaggcagcgcgggatcccagcctcaggcgtgcgcggacggtgtgcgggtatagagcaccaagactcacagcattctttcttggca

SEQ ID NO: 723449 - DNA, 82 bp, Homo sapiens
tgattcacagagacctcaagtcaagaaacgtatcctgtggagcacccagacaaattcctgaagtttggcatgacaccttcca

SEQ ID NO: 723450 - DNA, 100 bp, Homo sapiens
ttccactgatatctcaaaaggtgatctggacaaaggaacaggtatctcaggaatgttttaaaggaagttgggctactcacaagttactacataagaaagc

SEQ ID NO: 723451 - DNA, 82 bp, Homo sapiens
cggggaggaggagcaggagctggaggaggagccgccgccgccaggtggagttggcatgaacttaacagcagcagatactgtg

SEQ ID NO: 723452 - DNA, 80 bp, Homo sapiens
gcccaggcacagccgacgccgcgggggcgaccattgacgaggtggagacggacgtggtggagattgaggccaaactggac

SEQ ID NO: 723453 - DNA, 83 bp, Homo sapiens
gaaccagatatcttgaaaagctgccagaaaggtgtggtggacacaggcctattcatcaacatggctgagagagtctactttgg

SEQ ID NO: 723454 - DNA, 100 bp, Homo sapiens
ggccgggggctcagagatccaagtgcgcgccctggcgggtccggaccaaggatcctcagtcttccacaatgaaccctgtttacagccccgtgcagcctgg

SEQ ID NO: 723455 - DNA, 82 bp, Homo sapiens
tcagaagaccgaagcgttcgtatctggaaggtcaatggccagcaaggaggggggtccgagccggcggcggcggcggcagtgg

SEQ ID NO: 723456 - DNA, 75 bp, Homo sapiens
agtccgccgctcaccccgcggccgcaccttcccgccttctcaggcaggacaagcgtttagaaagtttcttccact

SEQ ID NO: 723457 - DNA, 99 bp, Homo sapiens
gtgaatgatcccgctacagatgaaacaggctcccagccaacctctgataaaccctcccagcggccatcagagagcacaaattgtagccctacccggaaa

SEQ ID NO: 723458 - DNA, 74 bp, Homo sapiens
tggagtttgatgttgttgaaggagaaaaggtgtgcatgtggaagaggaagaaggagaaaaaacagaagatgaat

SEQ ID NO: 723459 - DNA, 102 bp, Homo sapiens
gccgcacggagttgcgtcccggggacttggggccgcagggagacaatgcagatcttcgtgaagactctgactggtaagaccatcaccctcgaggttgagccc

SEQ ID NO: 723460 - DNA, 74 bp, Homo sapiens
atatggacccaagagtcagcggtatattagttcagttaccactaccagaactgataaatttcaaacggaagaga

SEQ ID NO: 723461 - DNA, 100 bp, Homo sapiens
tggccagtaggcaatcacctgaaggatctgacttccagaagtgacaaccatgagtggaaaaaactaattatggttcagcactggcctgagacagtatgcg

SEQ ID NO: 723462 - DNA, 100 bp, Homo sapiens
cctgagccaggtgaagggccccgtaaattggaaggatgcacaagttccaaggttacgtttcagtgtccctggccagtgtccttccacctgtccacaagca

SEQ ID NO: 723463 - DNA, 113 bp, Homo sapiens
tggagttgtttgacttagtggaggaggtgcagctcaacttctaccagttcctcggggtgcagcaggccaaagaactgccaactctgaaagataatgatttcattaatgagggc

SEQ ID NO: 723464 - DNA, 100 bp, Homo sapiens
ccatagatggccagctttcccccgagggtcaacgagaaagagatcgatttatccacctatcaatgtgctgccctcactatcacggttaatgaagtctgct

SEQ ID NO: 723465 - DNA, 75 bp, Homo sapiens
aacatgtcagcgttattgtaatgcaacctggagtactcgggtactttgagttcagtggctcaccccagcctcctg

SEQ ID NO: 723466 - DNA, 74 bp, Homo sapiens
gcagccctggccgcgcactcgcctcagctgagcctggatcttgtgcctcaagcagccattgagtatggcaggat

SEQ ID NO: 723467 - DNA, 136 bp, Homo sapiens
aggtttgctgagctggttggccctgtgatccctcaagactggtccacggagtgtatgaccacaaacagccatcaagtttcaccagtgatcattaaagaatgggcagcttacaaaggaaagtctcctcaaaccccgg

SEQ ID NO: 723468 - DNA, 75 bp, Homo sapiens
ctctcgcgggcgggagaacggaaaactcccaacttcctgctgtggaacaactattttcatctggcagtggctttt

SEQ ID NO: 723469 - DNA, 101 bp, Homo sapiens
gcgggtgatgacagcactatagtgcaggtgttggaagtgaaaggccccttcacagatgtagtcactacaaatcttaaattgcgaaatccatcggatagaaa

SEQ ID NO: 723470 - DNA, 75 bp, Homo sapiens
aacatgcagattatatcgcatcctatggctcaaagaaagatgattatgccttcacagagcttcaagccaaagtta

SEQ ID NO: 723471 - DNA, 77 bp, Homo sapiens
gccagactattctcaaaccactgtctgaatcatcacaggacatggccccctcagccacctagctggggcccatctag

SEQ ID NO: 723472 - DNA, 49 bp, Homo sapiens
ttaaaaatcaccagttactttaatgaggtccttttgtacaagtggatga

SEQ ID NO: 723473 - DNA, 100 bp, Homo sapiens
gtgcatcatctataatgaggataatggtatcatcaaggccttcagaaacatccctgatagaggaaagggtcgccagagacaagccattttgggagaacac

SEQ ID NO: 723474 - DNA, 137 bp, Homo sapiens
ggaacacggctccatcatcacccaggcgcggagggaagacgccctggtgctcaccaagcaagctcctccaggtcccggggctctgcatcctgagctatccaacaccactgtactttgggacccgtgggcagtttcgc

SEQ ID NO: 723475 - DNA, 50 bp, Homo sapiens
aattgaaaggcttcaaagctagcaggagatatgtcagtattgaattctcc

SEQ ID NO: 723476 - DNA, 100 bp, Homo sapiens
cagaattaaatcctgagctagatgctttactaggccatgctttacaaggaccttttggagagcgagacgatcaacaggtgtttatccagaaagttgttcc

SEQ ID NO: 723477 - DNA, 50 bp, Homo sapiens
atcagcgaccgcgagatgcccgaagagtgctgatggcagagattggtgag

SEQ ID NO: 723478 - DNA, 90 bp, Homo sapiens
cgtgacttcccggacgctgggaaatgaatgaccgaagaagcatgccgaacacggagtcagaaacgagcgcttgaacgggacccaacagag

SEQ ID NO: 723479 - DNA, 98 bp, Homo sapiens
tcgagattattttccaccaggggatttcccaggtccaccacctgctccatttgcaagtgtcatggagaaactccagctgggcccagagattctgcagc

SEQ ID NO: 723480 - DNA, 75 bp, Homo sapiens
tccaagcctgtgttgttcaaggatgctgagatgaatcgtcacctgtgtgtttggctttttagacatccatctctt

SEQ ID NO: 723481 - DNA, 75 bp, Homo sapiens
agtgagagtacccacaacctaactttacctaagcagagtaaacatcagtctccaaagataactacatcccttctt

SEQ ID NO: 723482 - DNA, 100 bp, Homo sapiens
gctctgccagttgggttgctggttctttcaggaaggaagagggaatggtttaaaatagaagacgccataaaagtgctgcagtatcacaaacccgtgcagg

SEQ ID NO: 723483 - DNA, 74 bp, Homo sapiens
aaacttttgagatagatttggctctaattggatcattgctattccatggatgactcagaggatacatcctggga

SEQ ID NO: 723484 - DNA, 74 bp, Homo sapiens
atgcacctccctctgcggtggggtccgggacatggcagtcttccaccaagagcctgcggaccactatcggcgag

SEQ ID NO: 723485 - DNA, 97 bp, Homo sapiens
tcgccgctgcagccctagtgactgcggcctgcatcccgacattccgtccagctgctatgctgatagaacgatcgtccgactttgggaaaacctgggg

SEQ ID NO: 723486 - DNA, 78 bp, Homo sapiens
aggtcaggagagcgcttgattggaggaaaagaagccagaagcccccaagctgtccaagaagaagttgcgccgaatgaa

SEQ ID NO: 723487 - DNA, 100 bp, Homo sapiens
ggcaacggggcactgacctgggtgtgatgtcttggcattgcccattttcaagcaggaagattccagccttccattggatggtgaaacagagcacccaccc

SEQ ID NO: 723488 - DNA, 99 bp, Homo sapiens
cccctgcaggttaatacagctgaccacaggatctacagctatgttgtctcaagacctcaaccaagggttgcaaaagcttctcatttcagagagatgcca

SEQ ID NO: 723489 - DNA, 74 bp, Homo sapiens
ccatgatggaggcagaggtaaacttggagagtttcattgtactgacaacctcagctggcatcatggaccatgaa

SEQ ID NO: 723490 - DNA, 100 bp, Homo sapiens
aggcgattccctgagcgcctggagttggagacaattcctggttcagaatttaaacatctttctagcttcggaaccaaaaagaagcttcccagagccgggg

SEQ ID NO: 723491 - DNA, 96 bp, Homo sapiens
cgcagagaaattcagaacctcaagcttttcaggcatcctcatataattaaacttcctgccattgactctaccagaggagattcttcaagcttagtt

SEQ ID NO: 723492 - DNA, 90 bp, Homo sapiens
catcatataccgaaatgtttttgataagcttggaactgcagttggctttttgctaccaccagttttagtacccaacacacagaatgacac

SEQ ID NO: 723493 - DNA, 100 bp, Homo sapiens
ggttctgagtacacagtcagtgtggttgccttgcacgatgatatggagagccagcccctgattggaacccagtccacagtgaagctgtggtctaccaatc

SEQ ID NO: 723494 - DNA, 75 bp, Homo sapiens
ccccagcgccctgcgcttcctggccgaccatggttggatggcaagcatgtggtgtttggcaaagtgaaagaaggc

SEQ ID NO: 723495 - DNA, 100 bp, Homo sapiens
gtggaaccttatgtgacctgggggggaaatcagccttatggtcccacctgttacattatcaggacaaccggcagagaaaactcacatcaggaagcctcag

SEQ ID NO: 723496 - DNA, 98 bp, Homo sapiens
gaaatgctcagctatctgcccggaggcaccacaggactgcagctccccagcacgagggtacaccacccggactacaacaatgagttgacccagtttct

SEQ ID NO: 723497 - DNA, 100 bp, Homo sapiens
gagaactggagagaactgctggaaggagactggatgatagaattgttgtggcagcactgcctgaaggtatgagaccagattctaatctttatggttttcc

SEQ ID NO: 723498 - DNA, 100 bp, Homo sapiens
cccacggtggagcagatcctggaggatgtgcggggtgcgccggcagaggatccagtgttcaccatcctggccccggaagctcacctgttctccaggacca

SEQ ID NO: 723499 - DNA, 100 bp, Homo sapiens
gccgctctgccacggtctgcccacccaacgcgaagacggtaacccgtgtgactttgactgggttgaggaacaggttagcaccactgagagagtgtttcag

SEQ ID NO: 723500 - DNA, 82 bp, Homo sapiens
caaaacttgcagattttggggtagcaggtcaacttacaaattcaattcgtcataatctgtccctacacagcaagttcattcg

SEQ ID NO: 723501 - DNA, 75 bp, Homo sapiens
gtccgaaatggcggggactgttggtctcggccctgcggaagagttaatagagtggatacaaccttgctgaagatg

SEQ ID NO: 723502 - DNA, 83 bp, Homo sapiens
ccctgcgtcccgccaccggccgcttctgtcctcgagtttacagatgcttcctcagcaacggaaagccatagctaagttcaagg

SEQ ID NO: 723503 - DNA, 82 bp, Homo sapiens
ccgggggaggcgacgctaagttgctgatcgtggcggcaatagccctctggaacaagacaattcatgtgagataagaaagaag

SEQ ID NO: 723504 - DNA, 71 bp, Homo sapiens
atgctgtggaacttgcaaatcgaagaaatggtggagtcaatgaagaaagtagcagggatggatgtggagct

SEQ ID NO: 723505 - DNA, 100 bp, Homo sapiens
cttcgcgggaagacgcggcggcggcggcggaggatgagcctgcagagcgcgcagtacctccggctggcgcccatgcggctctacacgctctccaagcgcc

SEQ ID NO: 723506 - DNA, 90 bp, Homo sapiens
ccgcagccccccaacatcctgctcctgctcatggacgacgtctacgagccaggatgacagggacagcgaggacggtgaccagccttcccc

SEQ ID NO: 723507 - DNA, 90 bp, Homo sapiens
atttatagctaagactccaggacacccctgaagccgagaaatgcaatctgcagagcgctgtgtaagcacattgcttgatctaatccagac

SEQ ID NO: 723508 - DNA, 126 bp, Homo sapiens
actgttactgctacaatcaaaattcccaagtggagtggaaatacatatggtcaactatgcagcagcctgaaaaggtgatggcaaagcagatggagttcctttgcaaccaagctggctatgagagac

SEQ ID NO: 723509 - DNA, 75 bp, Homo sapiens
ttcttacagagatgtgactctgtttgaggacattggctccctggattatcaagagtttgtagttgacattgaatc

SEQ ID NO: 723510 - DNA, 100 bp, Homo sapiens
tcagaggaatagaaactttggaatctgtacccattattggtggtttttgggagactatctttggcaacaggccacttggtcattctggcattttatggta

SEQ ID NO: 723511 - DNA, 97 bp, Homo sapiens
ccacccccgccctcctcagcctgatcctggaagagactcggggccccccagcctccgccaacccaggagtcgttcacgcctactgaggagcatgtgt

SEQ ID NO: 723512 - DNA, 101 bp, Homo sapiens
ctttggacaggaggtcatacagctgatactacccacccccggttacgcctgtcacataaagcttattgcaggagtgaccaggacactacctcctagaagta

SEQ ID NO: 723513 - DNA, 82 bp, Homo sapiens
caaactcttcaagccttcctttgatgtgaaggtacaaattctgagctgtctaacccctctgaaacggaatctgagcgtaaag

SEQ ID NO: 723514 - DNA, 128 bp, Homo sapiens
aaccactttgcagtcgacatactcggataccagcgctcagcccacctgtgattatggtgctggagaatctggtaaaagcaccattgtgaagcagatgaggatcctgcatgttaatgggtttaatggag

SEQ ID NO: 723515 - DNA, 100 bp, Homo sapiens
cacatgaaactcaaggtccagggagtggagttgccccccagcggtcccggaaaaagcgctgtccctataccaagtaccagatccgcgaactggaacgcga

SEQ ID NO: 723516 - DNA, 100 bp, Homo sapiens
ggaaataagtggatgatgctcctccatcacccatgattttctggcatccttaaatcttgtgtcaaggattggttataatataaccagaaaccatgacggc

SEQ ID NO: 723517 - DNA, 89 bp, Homo sapiens
cggcggcagggcaagctgtgcgacgtgaccctcaaggcggaggtttgacctacagaacccatctcgaatggatcgtaatgtggaaatgt

SEQ ID NO: 723518 - DNA, 84 bp, Homo sapiens
gtgctgattcggcgcgatttgaggagctgctgctgcagtgggctcgggatgagtttgaaggcctcttcaagcagccagcagaaa

SEQ ID NO: 723519 - DNA, 75 bp, Homo sapiens
tgtaccagaatcagttgttggagaaaattaaagatgataacaccctatgcccattgtcctgatctgaaaattctt

SEQ ID NO: 723520 - DNA, 75 bp, Homo sapiens
accaattgttttacagtctgttccacatgatcattgtaataaggtctctaattaacagaagatggcaaagcccag

SEQ ID NO: 723521 - DNA, 75 bp, Homo sapiens
cgggacccgcctgctgagtggacccgggtatacacagtactgtttgacagttcatcacttcaccagccacggaag

SEQ ID NO: 723522 - DNA, 98 bp, Homo sapiens
atgaaggaaatcttactgaaggcagtgaagcgaagaaaaggatcccagaaagtttcaggtgctggaccagggactgagcgtcccccggagagggtccg

SEQ ID NO: 723523 - DNA, 83 bp, Homo sapiens
cgtagacaccagctccgaaatcaccaccaagaacaagcgggagcctgtgtcaggaaagcatgtcagagcagagctgccagatg

SEQ ID NO: 723524 - DNA, 75 bp, Homo sapiens
ggttttcttatgcttataagagtggaacaggtcagcccaaggccaaccccactgtcactctgttcccgccctcct

SEQ ID NO: 723525 - DNA, 82 bp, Homo sapiens
aattaaaacatttttcagggacgtagccatccagaggtaagaaggtgttttaccctgtggtgttcagtctttacaatcctgc

SEQ ID NO: 723526 - DNA, 95 bp, Homo sapiens
aggccgcggccggggcaggagcgcagggaagtcgagacaacatgagtgtgattttgatctgttttccaaatgcacccaaagtatcgccagaagca

SEQ ID NO: 723527 - DNA, 84 bp, Homo sapiens
cctgaaaaacggagacttggatgaggtgaaagactatgtggccaagctccctcgtgaaagatgcttctgttcctctgattgatg

SEQ ID NO: 723528 - DNA, 90 bp, Homo sapiens
agtccagcatgcctgatgtaccatatgaaccagatttggatatcgaaatagattttcccagagatgccgaatataccaactctcctttgg

SEQ ID NO: 723529 - DNA, 100 bp, Homo sapiens
ggacacctgcatggcggttggcttcttccagcgaggagtggccaacttccagctggcaagaaacgtgaagagggctggtgggtggtgattggagatgcca

SEQ ID NO: 723530 - DNA, 75 bp, Homo sapiens
tggtgatcggcggcgtccgcaaccagcagacccttggtatctctggagacaaagtagagatagaccctgttacga

SEQ ID NO: 723531 - DNA, 75 bp, Homo sapiens
acgatcctgtaactgccaaacccaagttggttggagatgtggattttgaaggccataaaattttgagtagaaaaa

SEQ ID NO: 723532 - DNA, 90 bp, Homo sapiens
ctgatagtctccagcgggcctggactgtgggctggtgtgtggaactgaggcggggtttcaccatgttgcccagactggtcttgaactcct

SEQ ID NO: 723533 - DNA, 76 bp, Homo sapiens
catggcttggagcacttcctattccactggattgggaaagaccatggcaggagtaaagaaaattgtgttgtggata

SEQ ID NO: 723534 - DNA, 50 bp, Homo sapiens
cctagagtggttcagccacaaggagtttgacaagtatgcgcccaagctgg

SEQ ID NO: 723535 - DNA, 82 bp, Homo sapiens
gccgcgccgagcggaggaggaggaggaggcgaggaggagagactgcgccatgtcagaaccggctggggatgtccgtcagaac

SEQ ID NO: 723536 - DNA, 100 bp, Homo sapiens
gggctggtgcagccccgggccaggccgcggccggggcaggagcgcaggtatgcttcagaagtgtccttctgttgatgacttcgtaagtgccctcgtttcc

SEQ ID NO: 723537 - DNA, 74 bp, Homo sapiens
ggagccgcaggcgcagacccacccgccatgaagccccccgcaggttgggtatctacagccattggttgctgttc

SEQ ID NO: 723538 - DNA, 90 bp, Homo sapiens
atctaaaaagccctcagtaccagagacagaagcagatggattcgtccttttaggctcagagactcaggtcccaggactggacatatctgc

SEQ ID NO: 723539 - DNA, 101 bp, Homo sapiens
gttagtcgcagacatggacaccaaacatttcctgccgctcggtctcggcgcggaagatggccggcggcgtggacggccccatcgggatcccgttccccgac

SEQ ID NO: 723540 - DNA, 100 bp, Homo sapiens
gctgcagaaattaaagaatccagatacagagcaggaattggaacctcagtgtatgggcgctgttcatcctctggtgctgaagcagccaagagacccaagt

SEQ ID NO: 723541 - DNA, 75 bp, Homo sapiens
tgacatttaattttagggtcctttatatagaagggagagtaggtgaagttttgggattactaggacacaatggag

SEQ ID NO: 723542 - DNA, 90 bp, Homo sapiens
caatggcaaggctaaagaaattaatgacaataatggatagtatgaatgatcaagtgtttggtgtataaaacagaccaagctcaagatgta

SEQ ID NO: 723543 - DNA, 74 bp, Homo sapiens
tttccacctcctgacacaacaccactcagtgcttttgaagatgatgatatcacgcacgttgaaggaagtgtaga

SEQ ID NO: 723544 - DNA, 82 bp, Homo sapiens
cgagggtggccctaggggcagcgagcaagacagcaagcaggaatgggcaaagaagtggggaatctgctactggaaaactcac

SEQ ID NO: 723545 - DNA, 82 bp, Homo sapiens
gactggagagacaagtaaactctcagagtaactgtcccctctgactaccatttctaagtccagaacacatattacataatgg

SEQ ID NO: 723546 - DNA, 82 bp, Homo sapiens
ttggacaacatgtcccaacattacatcccagtaaagtcagtgataaatcttttgtttgctgcatatactggagatgtgtctg

SEQ ID NO: 723547 - DNA, 100 bp, Homo sapiens
gagggccagctgacggagatggtgcagaagatggaggagtctgcctgaaggggaccaaggtgcacatgaaatgctttctggccttcacccagacgaagac

SEQ ID NO: 723548 - DNA, 51 bp, Homo sapiens
ccctgaccgagacctgggcggaaaaatgttcgttggtggcctgagctggga

SEQ ID NO: 723549 - DNA, 82 bp, Homo sapiens
tttcctgctcggaaccttgtttactaattgttatggaaacaaaggacatgctttacatcgtcactgaatttgctaaaaatgg

SEQ ID NO: 723550 - DNA, 90 bp, Homo sapiens
tgctgagccgggtggccgccctgttccccgcgctgcggcctggcggcttccaggcgcactaccgcgaaacccctcgcaggcttacacctg

SEQ ID NO: 723551 - DNA, 50 bp, Homo sapiens
gattgttggatatgcataagaggtgggccatgcacagacacagctcatgt

SEQ ID NO: 723552 - DNA, 50 bp, Homo sapiens
atataagatgtataagaagtcttaacggatggcaatggctatattagtgc

SEQ ID NO: 723553 - DNA, 100 bp, Homo sapiens
ttgatggagaggtcgattcacagcgcaagatacatttttgtagaaaacctgtatagaagagctgtaggtaaaacttgcctactgatcagttacacaacca

SEQ ID NO: 723554 - DNA, 98 bp, Homo sapiens
attttggtgaatatggccagcttcccagaggtggaagctataaaggccatgtggatattttggcacctactgttcaagagttggctgcccttgaaaag

SEQ ID NO: 723555 - DNA, 75 bp, Homo sapiens
ggaggagctgccagacattgccccacccctggtcactccggatgagcccaaaggagaccagtatgatgtctgtgc

SEQ ID NO: 723556 - DNA, 157 bp, Homo sapiens
ctccagatgaggtgatggcaacggccaacttcggcaagatccagatcgggatttacgtggagatcaagcgcagcgatgatcgcccaggaccacaccgcagcgtaactgcaggcctctcagcgaaaaagggggaaagcaaagacccgggtgtgcatcc

SEQ ID NO: 723557 - DNA, 82 bp, Homo sapiens
ctgtgggctcagcctccaggcagaagggcgctggaagattactactttgtaaccagggaggtgatgcagcgtgacatagcag

SEQ ID NO: 723558 - DNA, 100 bp, Homo sapiens
ctttggggcaccacagagatgcgggtgcttttgaagatgatgatatcacgcacgttgaaggaagtgtagatcctattcgagatatagaaataatacatga

SEQ ID NO: 723559 - DNA, 50 bp, Homo sapiens
tgaaatgtttgacgacactgatggtttgatggactcaccctgtcacccag

SEQ ID NO: 723560 - DNA, 100 bp, Homo sapiens
gacgtaaggaatcgggaattaaacttggaatattggaaatctactttcttcaatgtgttaaccaatagtcaggcttcagcagaaaacttcccgttctgca

SEQ ID NO: 723561 - DNA, 82 bp, Homo sapiens
gaaagaagatgttaactttcaggatgatgatgctgaagctatccttgctgcagacttcgaaattggtcactttttacgtgag

SEQ ID NO: 723562 - DNA, 100 bp, Homo sapiens
ggggccaccggctggagcggatcccacacctccggaccgagggacgcgggagtctgcactatggaaacaacctgtcaatccagctcaaggcacacatagc

SEQ ID NO: 723563 - DNA, 80 bp, Homo sapiens
gccgcgaggaggcgcgggaggtgttcgagaacgaccccgagacggcaagccgattttttcagttgatattcaccctgacg

SEQ ID NO: 723564 - DNA, 51 bp, Homo sapiens
atcaagtaatggtgcaaagcctgaacttcagcgagaacccagacctttccc

SEQ ID NO: 723565 - DNA, 50 bp, Homo sapiens
ctgccactgcgggggcaagacgaaggttcccagtagctgcagcagtgaaa

SEQ ID NO: 723566 - DNA, 50 bp, Homo sapiens
caggactgcgccgcgtcttcctcaagtgtcggagatgtatgcagtgtgac

SEQ ID NO: 723567 - DNA, 100 bp, Homo sapiens
tcacgaccattaagtgaagaacagctagatgggatcctcagtcctgaactagacaaaatggtcacagatgtgccatggtctccatgaactgatttttttg

SEQ ID NO: 723568 - DNA, 100 bp, Homo sapiens
ctggaccttcagcagaaaagtatagcgtggcaacccagctgttcattggaggtgtcactggatgtaggagtgactccaaatttgcatatactggaactga

SEQ ID NO: 723569 - DNA, 82 bp, Homo sapiens
tcgccagcccgtgccgcgagcgcggcctgcaggagggcctacttggaagtgcaccagcaggagcaagagaaactccaggggc

SEQ ID NO: 723570 - DNA, 96 bp, Homo sapiens
gagagctttacgtcatcttcgattagctaataaccaactgcaattcctacctccaggttccgccacacttcaccactggcagcagttggcccaacc

SEQ ID NO: 723571 - DNA, 75 bp, Homo sapiens
cctttagccatgtggatacctacggagcacgagaaatacggcgtggttacagaatgtctgaaggggacagtgtgg

SEQ ID NO: 723572 - DNA, 90 bp, Homo sapiens
cccaggacaggtggcactctttcaggctcgccagagctaaagacagcggaaatagagcccaaggcagatggcagctggagggaaggagac

SEQ ID NO: 723573 - DNA, 50 bp, Homo sapiens
cacttcgaccagcttcatcctcagacaggaacatcatttacagcgagcaa

SEQ ID NO: 723574 - DNA, 82 bp, Homo sapiens
ggacttctgcagagagagtgcgcagaaggattccgggagcacagttccgccgaatgatgaagaacgagagcttcaaatggat

SEQ ID NO: 723575 - DNA, 75 bp, Homo sapiens
ggggacgcggggtctcgcggcgcctggcagcagagaccaccagaagggggatgttggaaattactattatggaca

SEQ ID NO: 723576 - DNA, 101 bp, Homo sapiens
aaagagactgttcaaaccactgaggatcagattttgaagagagatatgccaccagcatttattaagcgggctggtccgagtctctgttttggaagctcaac

SEQ ID NO: 723577 - DNA, 51 bp, Homo sapiens
cagtcatgagtcgcttcaagtttatcggaaattcgaaatgagtcccatgac

SEQ ID NO: 723578 - DNA, 75 bp, Homo sapiens
gagcgacagagacaagctgagcttgccgcacaaaaagctagagaggcctgtgtggactgtgggagcagcacccaa

SEQ ID NO: 723579 - DNA, 101 bp, Homo sapiens
gaaagtcgggggctttcgcccgggtcctcctagaaattccccccgaagaagactcccccacatctggattcagaatggacagtttagaagaacctcagaaa

SEQ ID NO: 723580 - DNA, 96 bp, Homo sapiens
tggctcagtacatattcaccttgaagaggaagacggggcggaagaccaagatcatcgagatgtgcttagaagaaatgaaacgggaagccaggacta

SEQ ID NO: 723581 - DNA, 123 bp, Homo sapiens
acgccaactcttcgttcgattattagctttagtgaaatgggctaataatgctggcaaagtggaaaaatgtgcggtattcacttacaagcagagcacaattacccaccagaaggtgactgctat

SEQ ID NO: 723582 - DNA, 75 bp, Homo sapiens
tttgatacgtgaggatggtacagttctcctggccacggattctaaggtttggaacaaactctcccttcacttgtt

SEQ ID NO: 723583 - DNA, 75 bp, Homo sapiens
tgtggtttatcattgtaatcagcttcttaccaaatacagaaggtttaagaggctgactgatgcgcagaataacta

SEQ ID NO: 723584 - DNA, 82 bp, Homo sapiens
tcctcagcgactcttctgacctccgcgcgacgtacccgccgccgccgttggctggaggtgctggagaatctggtaaaagcac

SEQ ID NO: 723585 - DNA, 90 bp, Homo sapiens
ggagtggaaaggctctcagtgaaaaaggcctctaagaaatatgtctccaaagaacttgccaaagagattcgtgtcaaagcagaaccattt

SEQ ID NO: 723586 - DNA, 90 bp, Homo sapiens
aagcttggagataaagttgctttttactgtgactgaagcaaggctgtgtgacattccatgttggagaaaaaaagaaaaaaaaaagctgaa

SEQ ID NO: 723587 - DNA, 87 bp, Homo sapiens
cccgcaagcatgcccaccactgccacaaacgccgcaccaggtcttgtagcagcgcctcctcggagcttgaagaaatccgcaaatgtg

SEQ ID NO: 723588 - DNA, 98 bp, Homo sapiens
tgagcatcagtttaatattgacagcatggttcataaacatggtcatacagcagatggaacaaaaaaaattacaacaaggaattcctccatcagggcca

SEQ ID NO: 723589 - DNA, 100 bp, Homo sapiens
gagtgcccaattccaaatgtacagatagaagaagtcagagatgccatggaaaatgaaatgagaacccagcttcgccgacaggcagctgcccacactgatc

SEQ ID NO: 723590 - DNA, 75 bp, Homo sapiens
cggcgtacgccctcatggggaaaatctccccggtgactttcagatagcagaccccacgttagctgaaatgggaaa

SEQ ID NO: 723591 - DNA, 100 bp, Homo sapiens
gcatggcgctcctgctcctccaggcgctgcccagccccttgtcagccagggctgaacccccgcagccttgataaatttgctgaagttccttatgtcaaat

SEQ ID NO: 723592 - DNA, 75 bp, Homo sapiens
taagaagacttttcagatcaccaaacaagattattatgtagttggcagctgagaacaatacttagtggataccat

SEQ ID NO: 723593 - DNA, 75 bp, Homo sapiens
tggccggagcggcccgcgcctgggctgccggcacttcgcggcaggctttatcctgtggataaacgcagagtgaac

SEQ ID NO: 723594 - DNA, 71 bp, Homo sapiens
gggctctgtagaattcgacagtatgcgaatgacaacagagctgctcaaggcgggaactctgagctaagcag

SEQ ID NO: 723595 - DNA, 100 bp, Homo sapiens
cagcggtagaggcggcggcgaggactggcgacggcgaggagagagacaagagagacacctccaacttcgacaaagagttcaccagacagcctgtggaact

SEQ ID NO: 723596 - DNA, 100 bp, Homo sapiens
ctgcgcccttcggccgcctacttcggaagttccacctggtgccaagcatcaacaccatgagtggcagtcaggagctgcagtggatggtacagcctcattt

SEQ ID NO: 723597 - DNA, 50 bp, Homo sapiens
cggaccccaacaccccgatggaaggctgaaggggatgctaagggagataa

SEQ ID NO: 723598 - DNA, 80 bp, Homo sapiens
tttcactgaggcatggtttcaaatttaaagaggattatggcccagaaatgggcgaactttctgaccaagtatacaactac

SEQ ID NO: 723599 - DNA, 100 bp, Homo sapiens
tctcggggcctccctgctgagctcgcggctcacgctgagagggacacgcagtgacgagcggccgaagcagctttgcggtcatcatcagatttgaaatatt

SEQ ID NO: 723600 - DNA, 80 bp, Homo sapiens
ctggcctcgcttgttgctcttcggggactccatcacccagtgatatggagaatgcagaaaacattctcacagtgatgaga

SEQ ID NO: 723601 - DNA, 100 bp, Homo sapiens
tggtgaaagacatggtagaatacaaagacagatgtatggctgacaagacgctcccagagtgttcaaaattacctgttgcacactgggccacagaggatcc

SEQ ID NO: 723602 - DNA, 82 bp, Homo sapiens
ggaagatcaaagatcaaccctcccccatgggctcctgcctgcctgccaggagggtgtgaagacagagaatgaccacatcaac

SEQ ID NO: 723603 - DNA, 88 bp, Homo sapiens
gcggcggtgctgggaggcccggccagctcgatcgcaggcttccacctggcggccagagtgagctgagtcgacagaaacttcataccca

SEQ ID NO: 723604 - DNA, 100 bp, Homo sapiens
tcttcagaagaaattctgtgtggcttcaagagactgatcaaattgtgagaggaaaacagcctacccgatgatgttgaatttgaagtatcatcggaccgac

SEQ ID NO: 723605 - DNA, 100 bp, Homo sapiens
ctcccagctacagagggtaccgggatgcctgcaccattactgctactctcatgaactactctggtccctccttctgaccactggctgccctagttccaga

SEQ ID NO: 723606 - DNA, 130 bp, Homo sapiens
gaaattcctcggagctttcgtcacctgtccttctacattttcgatagagacgttttccggagggattccatcataggtaattggtacgcctcagagaccggcagcgtcaaacaccctggtggtaggaagc

SEQ ID NO: 723607 - DNA, 51 bp, Homo sapiens
aaatactcctgtaaatttgagtgtggtaattaataatgcttgtgctactca

SEQ ID NO: 723608 - DNA, 75 bp, Homo sapiens
agcgacggcgtcgggagagcgcgcctagccggctcgcgagtgatttgatgaaggctgctgcaggagagttcgcag

SEQ ID NO: 723609 - DNA, 50 bp, Homo sapiens
gtacgatttgaccaaatttctggaagagtgcggaaacatggctcgcgaag

SEQ ID NO: 723610 - DNA, 83 bp, Homo sapiens
ggaggggctccggctggtctgtggtgaggattttttatcaagcagaaatgcatcgaacaacgagaatcaagatcactgagcta

SEQ ID NO: 723611 - DNA, 117 bp, Homo sapiens
ctagcacccagaagatgagaccgcaattcgagaatcaaagggccgggagcgatggattactacagcatcccatttcccacacccactactccgctgactgggagggatggtagcctg

SEQ ID NO: 723612 - DNA, 50 bp, Homo sapiens
ctgcaaggctgagggacgagaacgagacctactccaatgaagtccattgt

SEQ ID NO: 723613 - DNA, 98 bp, Homo sapiens
cacgacattcatttgttgtctgtctccatgttgacctagagtcactagagataaaatgctctaatccccaggtggttgtgtcaaaccgattggtgaca

SEQ ID NO: 723614 - DNA, 90 bp, Homo sapiens
ggggaaggcgcctgaagaggacgaagcacttctgtttgggggtgacactaatcctgttcatcctaaacacataggaagtatcgatcccac

SEQ ID NO: 723615 - DNA, 98 bp, Homo sapiens
gcctttccagcccgtggtccttctccatattcgagggagtgcatccgccccaacccttttccccctcgtctcctgtgagaattccccgtcggatacga

SEQ ID NO: 723616 - DNA, 103 bp, Homo sapiens
gctttttctgctctgagccggacgccggaatggagtttgaggaagaggaaccacgtgaatgttgagggggcgacacacaagcaggtggtggacctgattcgag

SEQ ID NO: 723617 - DNA, 100 bp, Homo sapiens
tcgggatttacgtggagatcaagcgcagcgatgggctgatcccttatccaacatggttctaaccttcagtactaaagaagatgcagtttcctttgcagaa

SEQ ID NO: 723618 - DNA, 74 bp, Homo sapiens
atcaagttgcaagagattccaaccttccagccccttttgaaagtttccgttactatggcaatgacggcagggac

SEQ ID NO: 723619 - DNA, 100 bp, Homo sapiens
cctttaggtgcttttatattcatctcaaaaacaaaattctgaactcaggacttggcaagtttggatgcatctgctcagactacttctcatgaactcacca

SEQ ID NO: 723620 - DNA, 51 bp, Homo sapiens
ctccggaggcacattgggaaccctgagatctaattatcatggacctgcgac

SEQ ID NO: 723621 - DNA, 82 bp, Homo sapiens
aaggattctcgctgtgacagagacaacaccgagtatgagaaagcagcccgacggccatggaggctgaagagacgatggaatg

SEQ ID NO: 723622 - DNA, 87 bp, Homo sapiens
agaggcttctgctgcacgctgtctgccagtacatggacctcatctcggccagccgccatggcatcagatgaaggcaaactttttgtt

SEQ ID NO: 723623 - DNA, 113 bp, Homo sapiens
ggtttggctcaggacactacacagcctattgctacaacacagagggaggtgagccccaggtgtatcccagagggatccgggtgacttctctgcagactgtttgccatgacagc

SEQ ID NO: 723624 - DNA, 83 bp, Homo sapiens
agcaaagcaaatggagaatggcatgctggtgacggacagtgcagggaagcaactgcagagctatcatggtgaacttacttcag

SEQ ID NO: 723625 - DNA, 74 bp, Homo sapiens
caagtactgcgccgactgcgaggccaaagctgtccgtacctggcggtgaaaatcacccctgccatccctgcagt

SEQ ID NO: 723626 - DNA, 75 bp, Homo sapiens
cttgtgttcatccagtataacagggatgttctgtgtaataagctgcggatgggctttcctgccaccaccttccag

SEQ ID NO: 723627 - DNA, 82 bp, Homo sapiens
ccattggggtcacggtgtttgccgtggggaagaacgaatgcaggaatttgggaactgagctgtgcaagtgctgaagaaggag

SEQ ID NO: 723628 - DNA, 103 bp, Homo sapiens
gcggcctcggcctccccttggattcagacgccgattcgcccagcttgcccaacagaaggtggaaaaaatcactgaaagtaaaaataaactggcctatgaaaac

SEQ ID NO: 723629 - DNA, 75 bp, Homo sapiens
caacttgataaatcagcttcatgaggttcgttaccgtgaacgcatcaccattcttcgagggaatcatgagagcag

SEQ ID NO: 723630 - DNA, 71 bp, Homo sapiens
ttcatcggtttcaccgcgctcgttatcatgtggcagaagcactatggactggcccttggcagctctgcatc

SEQ ID NO: 723631 - DNA, 49 bp, Homo sapiens
ctgccatcggtactctgagctctggaattccgaaatgactttctagaac

SEQ ID NO: 723632 - DNA, 75 bp, Homo sapiens
ggcaggtcatcaaaggtgtgctgtttagcatggcgaggacaacatccttgctgcctccagctggcgggcgaccac

SEQ ID NO: 723633 - DNA, 75 bp, Homo sapiens
ttcggcattggccgccgcgatgtcagctcagtgctgtgcgggccaggtgacagagttagtccttgataattgcct

SEQ ID NO: 723634 - DNA, 90 bp, Homo sapiens
ggtcaccgtggagtttttcctggtgggacaagacaacgggccggtggaggtgtccacattgcaggagatctataaggacaggcagaaatt

SEQ ID NO: 723635 - DNA, 90 bp, Homo sapiens
agattcgcagtggtcgcttcttctccttggctgaagtttctctttggctcatcagccacccaggccttggacctagttgatcgacagtcc

SEQ ID NO: 723636 - DNA, 74 bp, Homo sapiens
cgcaaaccaaggatctggggatcttcgcactatcccaaggatgataatgaagataattcaaatgatgggaccca

SEQ ID NO: 723637 - DNA, 98 bp, Homo sapiens
ttgattaaccacgacgtggtggagcccctctacatcgagggtgtcttcaaaaacaaacatatttaaaagattttacttctcatctccaggaagaacca

SEQ ID NO: 723638 - DNA, 109 bp, Homo sapiens
ctggagctgggtcagtccgccgctcaccccgcggccgcaccttcccgccttctcagagtccggcagcgtcttctcttgagggagcaatttggagaagagctggaaccca

SEQ ID NO: 723639 - DNA, 100 bp, Homo sapiens
ctttaaccgccttaaccgagcaacagcatcagaagataattgctttacagaatgtgaaactggaacgccaagctgaagaagaacgaatacggaagcacaa

SEQ ID NO: 723640 - DNA, 80 bp, Homo sapiens
ccactcagtagagcctctaagggacccaaatccttcagaccttttggaggacagtcattttgtttactcattcagccctg

SEQ ID NO: 723641 - DNA, 75 bp, Homo sapiens
aaaaaccaattgtgaaacctaaggaaggatgtagatatgatggatcagaatggaatgacgcctttaatgtgggca

SEQ ID NO: 723642 - DNA, 98 bp, Homo sapiens
gtccatcatagtcaactgcgtggaagagaagtgtacttttcccaacactggtgctcgtatcatgatgttcattggtggtcctgctactcaggggcctg

SEQ ID NO: 723643 - DNA, 78 bp, Homo sapiens
atgtaccgcatgtgatcactctgggactcgtggggctgcagcaccgaagtgtcattgttgcagcaaaaaagtcagcag

SEQ ID NO: 723644 - DNA, 90 bp, Homo sapiens
ctataaaatgttagcgcatgagggtgaaggccatgccgcctcctgggaaagttccccgaaaggagaatctgtggctacagtgtgagtggg

SEQ ID NO: 723645 - DNA, 98 bp, Homo sapiens
agagagagaaagaggaggggaggaggaggaggattcagggaataggagctggggagcccttctgcgccacagatccctggttaattagaaaagaccac

SEQ ID NO: 723646 - DNA, 98 bp, Homo sapiens
ggtaaagcggcgacggcgtcctcaggagctgtggggtcccctgctagaagtgggggactcggcgggctaccaagtcaggattgttacccccaccacct

SEQ ID NO: 723647 - DNA, 50 bp, Homo sapiens
acctacgttggcggccccagaagagtactgatgaaatctccatctccagc

SEQ ID NO: 723648 - DNA, 100 bp, Homo sapiens
gattggtatactgtggtgaagaaagtgagcgaggagtcagaaactcagccactggttgccttggtaggcaataaaagtcagagatcagatctcgctgtca

SEQ ID NO: 723649 - DNA, 82 bp, Homo sapiens
gccgtgtctcagtccacccaaggtctcctcggatcgcctggagaggcactcggacctggtctacttccccagcaggacagca

SEQ ID NO: 723650 - DNA, 135 bp, Homo sapiens
accggccgcataccatcaccctgctcagcttcaccatcgtcagcctcatgtacttcgcctttaccagagagcagagctgacatctgataaagacatgtaccttgacaacagctccattgaagaagcttcaggagt

SEQ ID NO: 723651 - DNA, 90 bp, Homo sapiens
tcgggagaggatatgtagcgaggaggaacgcgctaaggcaaagcacctgaatcgcctaccagaggaatgacgatgatgaagaggaggcag

SEQ ID NO: 723652 - DNA, 95 bp, Homo sapiens
aggctcaagcaatcctaccatgtcagccttcccagtagctggaactacagggatcgccgtgtttggctactccatggccgtgtccatcgggggga

SEQ ID NO: 723653 - DNA, 98 bp, Homo sapiens
cagaagaaggctcctgccaagaaggccaacagcacgaccacggccggcagatttctccacccaggtgaactcctccctcacctccccgacggggcgag

SEQ ID NO: 723654 - DNA, 100 bp, Homo sapiens
atgtgattgaggtgcatggaaaacatgaagagcgccaggcctccggtgtggctgtctctgatggtgtcatcaaggtgttcaacgacatgaaggtgcgtaa

SEQ ID NO: 723655 - DNA, 74 bp, Homo sapiens
ttgaccacagcaccatcacttcctgggtgctgctagctgaggaggggatagctcctctttcttctgcaggacca

SEQ ID NO: 723656 - DNA, 75 bp, Homo sapiens
cagagaacttctttatccttcgaaggaagcctgtggaggtgattgcatactcggaacatcgttaccgtatctttg

SEQ ID NO: 723657 - DNA, 101 bp, Homo sapiens
ggctgatgaagtaatttgcagtgaaattttaagcgactgtgactctgctgcaagttccccagatcttgaggagaactcctggaagccccgtcttcctcctc

SEQ ID NO: 723658 - DNA, 50 bp, Homo sapiens
gccgcagccagcaactatttcaggttgtcttcaaccaccttactcctcca

SEQ ID NO: 723659 - DNA, 83 bp, Homo sapiens
gcggcgggaacgattgggctgagcagaggacgacatgttgcttttcgtggaggttcctgcacttggccatcatccatgaagaa

SEQ ID NO: 723660 - DNA, 82 bp, Homo sapiens
gtcgcagccgcaccaagcgctggccttttggcaagaagaacaaggatgatcggctgaatgtaacagaggaactaacgtccaa

SEQ ID NO: 723661 - DNA, 96 bp, Homo sapiens
ccccgccaaccgcaaccattgacgccatgtcgggttattcgagtgaccgagaccgcggccgggaccgagggtttgattactcaggagttggaagtt

SEQ ID NO: 723662 - DNA, 74 bp, Homo sapiens
ccgggagctattgggacctgcggtaccacagcagcctggcttcactgaatgggctggaagtccacctgaaagag

SEQ ID NO: 723663 - DNA, 51 bp, Homo sapiens
gatgaaacacttactgctctccagttactctttcaacctgatcagaacgca

SEQ ID NO: 723664 - DNA, 100 bp, Homo sapiens
cacgccggccccgcgcgcgcctcgaggccgagtcaagattgtctctggtcagaatgtgtgccccagtaatagcatgggaagcccgtgcattgaagtcgac

SEQ ID NO: 723665 - DNA, 100 bp, Homo sapiens
ctctcatgttctgcacctcaggagggaattcagcctcagtgatgtccatgaggtttttgactaaaggccagaatgcattggtagagctacagacacaaag

SEQ ID NO: 723666 - DNA, 83 bp, Homo sapiens
ctattcgcggctcttcccgcccgccttccgccgtctcttcgagttcttcgtgctgctcaaggggccaaaccagtgctcctgcc

SEQ ID NO: 723667 - DNA, 98 bp, Homo sapiens
cctcctgcagatcatggacgtggtggttttggaatgtatgcttaaaaaagacctcatttataataaggtcactccaacatttcaccactggaagattg

SEQ ID NO: 723668 - DNA, 50 bp, Homo sapiens
ccgagaaaccgcagcactacacgttgaaatcacaaagattagacaccttt

SEQ ID NO: 723669 - DNA, 90 bp, Homo sapiens
ggccaatttcatgaatttcaagagagtaccattgggggtcaggatggctaactggttggctccccacatggtgccctacgtctatatcac

SEQ ID NO: 723670 - DNA, 74 bp, Homo sapiens
acatttggaattttcgtatacgtggattctagaggggtgacagcgaaaccaagagcagtatgaaagtaccatcg

SEQ ID NO: 723671 - DNA, 135 bp, Homo sapiens
caagactctcctgagcccagaagcttcacagacctgctgctggatgatgggcaggacaataacactcagatcgagttgacgaaggatcagagattggtgtattcgggcagactgcttcccgatcatctgcagctg

SEQ ID NO: 723672 - DNA, 90 bp, Homo sapiens
aaaaatttgctggatattgatgcgccagtcactggcttaagcaggtaaagcagtcactgtgaagaaaataacattttaagaaacttttct

SEQ ID NO: 723673 - DNA, 100 bp, Homo sapiens
ggagtatctggcctccatcttcggcaccgagaaagacaaatgccggtgcagctgacgacagccctgcgtgtggtgggcaccagcctgtttgccctggcag

SEQ ID NO: 723674 - DNA, 82 bp, Homo sapiens
cgagaggctgctggagctcgtgtttggacgcttcagaggaatatccttgacttcccccagcatgtttccccctccaaggaca

SEQ ID NO: 723675 - DNA, 82 bp, Homo sapiens
cgggaaggtaccaaggattggagcacagaggctcagaagcaagtccaggtatgagggtgctggttgatgctcgagagaagct

SEQ ID NO: 723676 - DNA, 100 bp, Homo sapiens
tggaggttcgcggctctaacggggctttctacaaggtgtacaagggagaagaagccacattccaaatctcaggcctccagaccaacacagactacaggtt

SEQ ID NO: 723677 - DNA, 99 bp, Homo sapiens
tcaccgtggaggaccattattatgaaggccagaggcattgatgtgcagcaggtttctttagtcatcaactatgaccttcccaccaacagggaaaactat

SEQ ID NO: 723678 - DNA, 51 bp, Homo sapiens
gctgcggccgcacctggccaaggccacacgtgtctacacttagcctctatc

SEQ ID NO: 723679 - DNA, 75 bp, Homo sapiens
accagtttttagtcagtggctcaagtgatgaagctgcctacatatggaagcatagattccagcctcaaaatcctc

SEQ ID NO: 723680 - DNA, 100 bp, Homo sapiens
agattatatcgcatcctatggctcaaagaaagatgattatgaggttgtggggcgatgtatgaaattaaaattgaatcagaagaatttaaggagaagagaa

SEQ ID NO: 723681 - DNA, 101 bp, Homo sapiens
ccagctacgaaggatggaatcttcaatcaatcatatttcacaacgactgctggccctaataagcctgagagtggatttgcagaagacagtgctgctcgggg

SEQ ID NO: 723682 - DNA, 130 bp, Homo sapiens
cgggccgagatgtctcgctccgtggccttagctgtgctcgcgctactctctctttctggcctggaggctatccagcgcaccccccgagcccagctccacacaccgttcctggatctcctctccccaggcg

SEQ ID NO: 723683 - DNA, 76 bp, Homo sapiens
gatccagagaaagccaaagcgaaacatgacagctgccctacaggcagctctgaagaacccccctatcaacaccaag

SEQ ID NO: 723684 - DNA, 100 bp, Homo sapiens
gggcaccatggaggtgaatgcagttgtcgccgtgatcctgaaggcgctgacctacgacgagaagcggggtgcctgcagcgtgggcaccaacgtcagggac

SEQ ID NO: 723685 - DNA, 50 bp, Homo sapiens
aacgcttcgcccgttggtgctatattttagccttcatcctaataagaaac

SEQ ID NO: 723686 - DNA, 97 bp, Homo sapiens
tccacccaagatggagttcctcctggggaacccgttcagcacaccagtggggcagtgcctcgtactatactggcaattgctggagaagattttgcaa

SEQ ID NO: 723687 - DNA, 50 bp, Homo sapiens
aagaaagcaagaccccgagtggaaggttatggaggttttgatgactatgg

SEQ ID NO: 723688 - DNA, 100 bp, Homo sapiens
ggaggaagagaagcagaaacttattcagcaatacaaggaggcaatgagcaacaaggcctgcagaaaggcttttacatcaaatattgataatgataataat

SEQ ID NO: 723689 - DNA, 75 bp, Homo sapiens
aaaaaaagacgaaagaagaagaagagcaaagggccttctgcaggctgcctgctgtttcccggggagatcatgaaa

SEQ ID NO: 723690 - DNA, 74 bp, Homo sapiens
agcaggactgcgccgcgtcttcctcaaggaataactcaagtcacctgtactggaaatcagtttgctgaaattaa

SEQ ID NO: 723691 - DNA, 90 bp, Homo sapiens
gtcattcaacgggaattgaataggggcccattgtgctgggcagacgacaaaaagctttggggaagaaccgcagtgctgatttcaaccctg

SEQ ID NO: 723692 - DNA, 100 bp, Homo sapiens
gagggattcgtggtgaaggtccggggcttgccctggtcttgctcggccgatgaagtgcagaggtttttttctggagcgtagagtggcagccaaacagctg

SEQ ID NO: 723693 - DNA, 79 bp, Homo sapiens
cacgcggtgcagggtaacatggcggatgcggaagagatgcgctggcagctgagcgagcagctgcgctgcctggagctgc

SEQ ID NO: 723694 - DNA, 100 bp, Homo sapiens
gcgagagcagctcctcctggaaaaagcaagctgaagacatcaagaagatcttcgagttcaaagagaccctcggaacggtttgccttcccggattgggcct

SEQ ID NO: 723695 - DNA, 75 bp, Homo sapiens
taccttggtcccagagtcatcatgaaggggcagaggcctggcctccaggggtttgtcttaaatatgtcgggggag

SEQ ID NO: 723696 - DNA, 100 bp, Homo sapiens
cgtggcaatttcttagagatcaagaataaatttctagctcgaaggtttaaggaatgtcgttgtctgctgggtcttcccctcttcattcccccaagattac

SEQ ID NO: 723697 - DNA, 83 bp, Homo sapiens
cgaggaggttgggatcttcttcactgcctctggcatggatgaggaactgtggctgcaccatctgtcttcatcttcccgccatc

SEQ ID NO: 723698 - DNA, 148 bp, Homo sapiens
cggcagagctcttttggttcagcatgaaagcagtaatcagatgtttgccatgaaagaaataaggcttcccaaggtaaccatggagaaagagctgcggagcaccattcttttcaatgcctacaaaaaggagatatttaccaccaacaat

SEQ ID NO: 723699 - DNA, 50 bp, Homo sapiens
ggcagccaggctgaggcctaataacattctagtatgccagtagaaaaaaa

SEQ ID NO: 723700 - DNA, 95 bp, Homo sapiens
cgtgagaccagaaagctgggagccctgcgtggagcaattctgtggtgttcttggtcacacatttatggagtttctgaagggcagtggagattact

SEQ ID NO: 723701 - DNA, 100 bp, Homo sapiens
gtgggattcagatccatcagggaccaaaacctgcattgataccaaggaaggcatcctgcagtattgccaagaaaactaaagactgctgcagagtccggag

SEQ ID NO: 723702 - DNA, 76 bp, Homo sapiens
tcactggccggaaccgctccttggaaggtcgctgggaggtggcattcaaaggcattttccctgaagatgagatccc

SEQ ID NO: 723703 - DNA, 87 bp, Homo sapiens
gctgcggcaacttcggggagctccgcctagcggggatctgacgagcttttctctacttgtgtcactaacggaccgtttatcatgagc

SEQ ID NO: 723704 - DNA, 98 bp, Homo sapiens
agggcgagcgaggaggatggcggagtcggggctcctgacgcaataatgacgatgaggacctgacaccagagcagaaggcagagcgtgagaaggagcgg

SEQ ID NO: 723705 - DNA, 99 bp, Homo sapiens
agaagatgcctcgaactaaacaaattcatcccagaaatctaagagatcctggctctgcagagagaacagcccagaaaagaaagttccccagccctccac

SEQ ID NO: 723706 - DNA, 108 bp, Homo sapiens
cgagaccagaggccgaactcgggttctgacaagatggccgggctgccccgcaggatcatcaaggtgggtcatgataactgggtacgtggagttctgttccattctggg

SEQ ID NO: 723707 - DNA, 75 bp, Homo sapiens
ggtccggcagggggagagcgccaccctcaggctgcctgataggggctgtaaatctcaaatccagcaatcgaaccc

SEQ ID NO: 723708 - DNA, 100 bp, Homo sapiens
agaattcctagaggacctgtgcaacaacctcttgaggatcgaatcttcactcccgctgtctcagcagtctacagcacgccacagtcagagtggaagtgga

SEQ ID NO: 723709 - DNA, 98 bp, Homo sapiens
gaagatgataaagatgcagccaaggtcttagcagaagatgcctgaacacttgcctttgcagactcagttcaaagaaagagaagttggcaatcttcagc

SEQ ID NO: 723710 - DNA, 100 bp, Homo sapiens
ggagcagggccccttcgctttcagaagggccgtattgagtttgagaacgtgcacttcagctatgccgatggtctgaagaaagaagcttatgaagtggaag

SEQ ID NO: 723711 - DNA, 75 bp, Homo sapiens
aaaggtgcagaagtcattttaaactatggacgactccgaggaacattgagaccagagcagataatcagctcaaca

SEQ ID NO: 723712 - DNA, 75 bp, Homo sapiens
aaccagagtcacagaatatcagagccagaggaacatttggagtgtcctgggtcatgaaacttaatccacagcaag

SEQ ID NO: 723713 - DNA, 76 bp, Homo sapiens
ggaggcggaggcggccggcccggttgtcgagatgtccacagaaggaggatttggtggtactagcagcagtgatgcc

SEQ ID NO: 723714 - DNA, 75 bp, Homo sapiens
aaaaggacgtcctcctagtgctagcagcttagatgccatttctcctgttcagggcatttgcacgccaaaggcaaa

SEQ ID NO: 723715 - DNA, 82 bp, Homo sapiens
gcccatttgaggcctaaactgaaaggaaatcaagaaggcattttcagacctgcctagagctggaacgttacctccagagcga

SEQ ID NO: 723716 - DNA, 100 bp, Homo sapiens
gcagaaatgggtgccggaatctgtctcctgatcatcattcagaggttggaaagaaccatgactgtattcaggaaggcacatgaactgaagcttctgtcag

SEQ ID NO: 723717 - DNA, 51 bp, Homo sapiens
cttgcttctacatgaacgtgttaacaggggcaagtgtccgagtggtgaatc

SEQ ID NO: 723718 - DNA, 99 bp, Homo sapiens
tgcctgggggctgaggatgacaaaaaagccttcatagaactgggcacctccgggctgtgaaaagttagggaagtgtctgacacctccagaatccattcc

SEQ ID NO: 723719 - DNA, 74 bp, Homo sapiens
cgccttagaggagccatttttccagaattttgtagccaccttggctaatgggatgagcctccagccgcctcttg

SEQ ID NO: 723720 - DNA, 88 bp, Homo sapiens
ccgagctgctggagaactgaaggcggacagtctcctgcgaaaccaggcaatgggagtacgagagggcctccaaagtggaccagtttgt

SEQ ID NO: 723721 - DNA, 100 bp, Homo sapiens
agtggaggcagaagttcggcaccttatttctctgctgagtgtccagatcctccaaagacagatctggtaattatcagcaggaaattttctgagaagctgg

SEQ ID NO: 723722 - DNA, 75 bp, Homo sapiens
ggtacttctagtctaaaacaggatttgactctactaatccaggattggcagccaccatttgcatgtgatgttgat

SEQ ID NO: 723723 - DNA, 90 bp, Homo sapiens
aaaaaagcatcttaaagcaggctgcagatcttacacaggtgtaaattttgataccaccattgccgccttcccctcaaaaaaggtgagaac

SEQ ID NO: 723724 - DNA, 82 bp, Homo sapiens
gctgtcctgtcctcgtccgtctcatcaaagggcctcatcctgtaccaccagcaccagcacagctgctgtgagtcccctaccc

SEQ ID NO: 723725 - DNA, 82 bp, Homo sapiens
aggtggaagtccaagtcaaacgcagaaggactgcctcactgagcaaccaagagaaacttcatggtgttatggtcaacttgcc

SEQ ID NO: 723726 - DNA, 75 bp, Homo sapiens
tgtgagcagggctgagatgggcaccgcggatctggggccgtcctcaggtactccaaagattcaggtttactcacg

SEQ ID NO: 723727 - DNA, 82 bp, Homo sapiens
gacaggacagcggccaggcccgcccctcccctcggtgtgatgaatgcagactctgctaccattttggctgtttggatcctcc

SEQ ID NO: 723728 - DNA, 100 bp, Homo sapiens
ggctgggcaggtgattccgtgaaggcttcgaaatgtggcctcatggatgagctggtacacgacttagcctcagccttggagcagacatctgagcagaata

SEQ ID NO: 723729 - DNA, 121 bp, Homo sapiens
ttgactgtagaagaagggacagaaagagcccagaacattcccccaggaatcagagatcattgatttcttcctgggggcctctctcaaggatgaggttttgaagattatgccagtgcagaag

SEQ ID NO: 723730 - DNA, 100 bp, Homo sapiens
aaaaccacgctcctcggaccaagcctcgggagctaaggagccttttgtggcagatgaatatattgaacgtcttgtatggagaaccccaggaggaggctct

SEQ ID NO: 723731 - DNA, 74 bp, Homo sapiens
attcactcctgatgagaccctggatgacttcacggactttgactttctcattctccctgggtacatcgacttca

SEQ ID NO: 723732 - DNA, 75 bp, Homo sapiens
tcttcacccgcggtcgtattggagaccgtcaagcaggtactgcctccatcctgagctgccgtcctttgaagggag

SEQ ID NO: 723733 - DNA, 50 bp, Homo sapiens
aaaatattccctcttcattcacagatgtctccagtcagtctcagtcatcc

SEQ ID NO: 723734 - DNA, 101 bp, Homo sapiens
ggcggcaggagcgggtagtgccagctacggtccgcggctggggttccctcctccgtttctgtatccccacgaggtgactattatatggttaaaaagatttt

SEQ ID NO: 723735 - DNA, 50 bp, Homo sapiens
ctcgggacggaggacgcgctagtatcaatgtccgagttaccaccatggat

SEQ ID NO: 723736 - DNA, 97 bp, Homo sapiens
tcatcccgaaaggccggccccaggaatgggtaccacagaccatgtcatcgtcctggcgtccacgaaccgagctgacattttggacggtgctctgatg

SEQ ID NO: 723737 - DNA, 100 bp, Homo sapiens
tacaatgctaccctgctttttctggtgtcctgaacctggaagttgtgctttttaagacaccattcgcttttcacccaagatgatttgatgtcttataaaa

SEQ ID NO: 723738 - DNA, 85 bp, Homo sapiens
aggccccggcagcgcctgggacaagattttaggtgatgggcaagtcagaaagtcagatggatataactgatatcaacactccaaa

SEQ ID NO: 723739 - DNA, 100 bp, Homo sapiens
ctcaaatcaaccacaagctggagtccaagccttatgcatttgatcgggtgttccagtcaagcacatctcaagagcaagtgtataatgactgtgcaaagaa

SEQ ID NO: 723740 - DNA, 89 bp, Homo sapiens
ttggagtagtgacagttgaaaatcctaaattcagcaagatgacgattactttgccaccctgagggaactggaagctacccttcggacgc

SEQ ID NO: 723741 - DNA, 73 bp, Homo sapiens
tcatatatgagggaaaatcaacaaacttttgagtctgaactgcaagcacatgttgaccagataactgaaatgg

SEQ ID NO: 723742 - DNA, 74 bp, Homo sapiens
cggacagcaccaggaagcccggcagggttatcaatactctggctgaccatcatcatcgtgggactgactttggt

SEQ ID NO: 723743 - DNA, 93 bp, Homo sapiens
cgagaacgtgcgggaagagaagatcatcgagcatttcaaacgctgtcgcctggttgggcccggaaatgggacgtcgcgctttctcagggagcg

SEQ ID NO: 723744 - DNA, 75 bp, Homo sapiens
cggggtgtgtggacgccgctttgttgcctgagcactattcctgatcagagaactccagttgcttcaacacacagt

SEQ ID NO: 723745 - DNA, 75 bp, Homo sapiens
ggacagcctttccgcgcgggactccggggcgccacgggggccatgtaagcagacagaccatggattcttacagtg

SEQ ID NO: 723746 - DNA, 75 bp, Homo sapiens
ctggctcttgtagaagaaatcagaaacagaaaggatgtgaaggtgtttaatatgcctgtgaggagccaccaacat

SEQ ID NO: 723747 - DNA, 99 bp, Homo sapiens
gctttgcttctggaatcttccatcttcatgagctgccagagtttaacctcatccactccctgagatgtatcggcaagcagtgtaaacggaggacttggg

SEQ ID NO: 723748 - DNA, 50 bp, Homo sapiens
cttggatgccggctctagtcgagtattgcgcagcgatgcacggccatcaa

SEQ ID NO: 723749 - DNA, 97 bp, Homo sapiens
cgaagatgatgaagatgatgatgatgaagatgatgaggaggaggaagaagaggaggaggaaggagcgcctggccatcctggacagtcaggctgggca

SEQ ID NO: 723750 - DNA, 101 bp, Homo sapiens
caaaggcaagagtaacagcagcgccgtcccgtccgacagccaggcccgggagaaatgccatggacaatattaccaggcagaaccaattctacgatacccaa

SEQ ID NO: 723751 - DNA, 100 bp, Homo sapiens
gccatcctacacaactcatggcaccgtgcacgtggtcgtcaacaaccagtactactataattccttgacccagcagtacctttactgggatggggaaaaa

SEQ ID NO: 723752 - DNA, 50 bp, Homo sapiens
caagggtgcacagcccctggctacggttcggagtgaacttctcctattac

SEQ ID NO: 723753 - DNA, 76 bp, Homo sapiens
ctgagaccatggaaaacttgcctgctctctacactattttccaaggagaggtctcacatgagtacttcacaatggg

SEQ ID NO: 723754 - DNA, 96 bp, Homo sapiens
cccgggccccgggctagcagagcggaggcgctgccacgaaactcgtacctgcggctaagagcaggtcagaagagatcaattctacagaaatttcca

SEQ ID NO: 723755 - DNA, 100 bp, Homo sapiens
gaaacttatcccagagctttgctacattggaacagggccgcctctcaagattccaatggtattacatctttttgatactctgcatgctctttgcaatctt

SEQ ID NO: 723756 - DNA, 90 bp, Homo sapiens
ctggatggtgtaccggcatggcaaaaaccacaaggacatgcggaagcacgtggccatgaccctgctggacacagagcagtcgtatgtgga

SEQ ID NO: 723757 - DNA, 111 bp, Homo sapiens
cacactctgataatgaaagtcttggtggattttctattgaagatgtccaaaaggaaattaaaagaggcacgaagctgattttaacattatggcagggaggcatcagaatcg

SEQ ID NO: 723758 - DNA, 50 bp, Homo sapiens
gcctccagagtagctgggattacaggaagtgacctcacaatgactcaagc

SEQ ID NO: 723759 - DNA, 100 bp, Homo sapiens
tacaaggtgcagccctcctctatgagtactgtcagcaaaagggaatttcctacaagcagtgtggcaagatttgttcccgacaaggagttttctggttcag

SEQ ID NO: 723760 - DNA, 97 bp, Homo sapiens
ggctgggagcgtgctttccacgacggtgacacgcttccctggattggttccctgtattgaacactgatatacaaggaatgaatagaagtcaagaaaa

SEQ ID NO: 723761 - DNA, 100 bp, Homo sapiens
aggaagatgtgacaactaccggaggttgaagccatccttgtcaatatatttggtggtatcgtcaactgtgccatcattgccaatgggatcaccaaagcct

SEQ ID NO: 723762 - DNA, 100 bp, Homo sapiens
cttgatgggatgccggcagtcagagtcaaaacagagcttttggaatctgaacaagggatgcacgggaacaagcagcacctgcagaaggacttcttcctgt

SEQ ID NO: 723763 - DNA, 99 bp, Homo sapiens
cgaacacctcactattgatggtgtagcgctttaggggaagtgatggaatggggagaagatattaaagcagtttcaaaagatgaagcagtgatgttggtg

SEQ ID NO: 723764 - DNA, 82 bp, Homo sapiens
gaacaccactacaagggtagcagtcgtggacgttctaagagcttcgggcagtacatgaacaactggctgctctgtcccaggg

SEQ ID NO: 723765 - DNA, 100 bp, Homo sapiens
aaacatgcccaggactcagatccccgctctcctactcttggtattgcacggacacctatgaagaccagcagtggaggtctcagtgctgtgccccccccag

SEQ ID NO: 723766 - DNA, 76 bp, Homo sapiens
aacgaatcatccacgcacctgcagctctgctgagagagtgcaagccgtgggccctaccacttatgtcttggatgaa

SEQ ID NO: 723767 - DNA, 100 bp, Homo sapiens
ctactgccaggaggtgtttggaagggtctcccggttccaccggcggctcacctcctgcactccggtgctccgggaacgccttccgcggaatgaagcggcc

SEQ ID NO: 723768 - DNA, 83 bp, Homo sapiens
cctcgccaattaatcctcaacatatgacgatgttgaaccagctctatcagctgcagctgggttcagactaggcaatgtggtac

SEQ ID NO: 723769 - DNA, 97 bp, Homo sapiens
tgctgacgtcgcaaaaaaattggatagacagagcgggatgccaccagcttgtccaaagggaagttccaggagctcctggtgggcatcgttgtggaga

SEQ ID NO: 723770 - DNA, 100 bp, Homo sapiens
aagacacttatactatgaaagagggtatgttagagcccaccaaggaaccactgaaaccactttctgctgcagaaaaaatagcttccatcggtcagacagc

SEQ ID NO: 723771 - DNA, 50 bp, Homo sapiens
catcctgctgctccccggaattagatcaaaccattgctgaaactgaagag

SEQ ID NO: 723772 - DNA, 96 bp, Homo sapiens
tgttttggaagctggctcaggctctggtggaatgagcttatttttatccaaagcagagtcaacctatttgatttcttgacaagaccacaatctgat

SEQ ID NO: 723773 - DNA, 82 bp, Homo sapiens
gctgcccatggagggagtggacatcagccccaaacaggacgaaggcgtgctgaaggctaccggctctctgaccagttccacg

SEQ ID NO: 723774 - DNA, 89 bp, Homo sapiens
gcaggacgatggggaagacaccctgttctcggaacccaagtttgcacagatgcatggtcatggaggctatgattctgattttagtgatg

SEQ ID NO: 723775 - DNA, 101 bp, Homo sapiens
gcgaggagcccgcgggcggccggtcgggcggggcggcggcgctgacagagaccatttgtttgtgactatgaagggtgtggcaaggccttcatcagggacta

SEQ ID NO: 723776 - DNA, 75 bp, Homo sapiens
tgacaaaatgtggccacagcttttgtgtaaacaggaacatcgataagtagtgtaaaaacttgcacaatgaaatcc

SEQ ID NO: 723777 - DNA, 75 bp, Homo sapiens
atcatgtctgcgagccaggattcccggttatggaaacaaaggacatgctttacatcgtcactgaatttgctaaaa

SEQ ID NO: 723778 - DNA, 80 bp, Homo sapiens
cctgcactgaaaggaaatgacggattttaagcctcagtgtaaagtctgccgatcatgccctgtggtgcagtcgagccagc

SEQ ID NO: 723779 - DNA, 76 bp, Homo sapiens
agcactgaaaattctggataatggtgaatggccagtctcagttggagggctgatagtaaaccttattggtatctgt

SEQ ID NO: 723780 - DNA, 101 bp, Homo sapiens
attaatgtattccaccacctccgccagttaagaggaaaaagagtcctatcattgatcggcctgagtctaatagctttggggacaggaggcatcaaaccctg

SEQ ID NO: 723781 - DNA, 100 bp, Homo sapiens
cgtctgggcagcctacgctttccggctaggcagctggaagagaaagaccgagtgctaaagaagcaggatgcattctacaaagaacagctggctagactgg

SEQ ID NO: 723782 - DNA, 106 bp, Homo sapiens
cagcctcttaatcggatgtatcttgtattcatgtcgtgagatggagaataaagaaactctcaaagggttgcacaagatggatgatcgtccagaggaacgaatgatc

SEQ ID NO: 723783 - DNA, 99 bp, Homo sapiens
ccgaaagtgttaagcacatggtggagaggcaagcacggattccagactggattatggacagaacttggaaatattgagaataatttcttaaagccactt

SEQ ID NO: 723784 - DNA, 100 bp, Homo sapiens
ctggactgcatggaagagaagaaccaggccgtgtgccatgactacgacatccacttctaccccaccttccggatgaagatctccttcaacgacaaaagcc

SEQ ID NO: 723785 - DNA, 100 bp, Homo sapiens
ccggccttcaccaaactccctgtagagttggctttgtgggacacagctgggcaggaagattatgatcgcctgaggcccctctcctacccagataccgatg

SEQ ID NO: 723786 - DNA, 100 bp, Homo sapiens
tgagaacttcagtaactttaccaacagaatgattaacgtcttcaaggacccagttgctgatcccaacaaaaggtccaaaaagggccgattatctttacat

SEQ ID NO: 723787 - DNA, 82 bp, Homo sapiens
ccgccaagatgccggcctattttcagaggccggaaaatgccctcaaacgcgccaacggtacatggtgcagtggccgggagca

SEQ ID NO: 723788 - DNA, 82 bp, Homo sapiens
aagtgatgttggagaactacaggaacctggaggctgtggatatccctcctaaatgtacaatcaaggatttgctaccaaaaga

SEQ ID NO: 723789 - DNA, 51 bp, Homo sapiens
accgcaactctcagttcgagagtaaagttgatgcggatgaaattaaaaggc

SEQ ID NO: 723790 - DNA, 82 bp, Homo sapiens
ctgaggctgatatgcaatgtcacttacaacattaatcagatactgcatttaaggcttcacaggctgctcaagaagccgagat

SEQ ID NO: 723791 - DNA, 51 bp, Homo sapiens
cgagttcatcacctggagccagaggcttcgtgacggagttatcagagacat

SEQ ID NO: 723792 - DNA, 75 bp, Homo sapiens
gggacgtccggcttcggagcgggagtgttcgttgtgccagcgactaaaaagagttgctctaggtcgtaaccagcc

SEQ ID NO: 723793 - DNA, 98 bp, Homo sapiens
gcctggcgctgaagcatcggaatggaggtaccagcgtggctgccgatctttggctgcaaatctgcagctcctcactcagggtcagagtgagcagaagc

SEQ ID NO: 723794 - DNA, 83 bp, Homo sapiens
gagcggcggaaaggataagcctcgacttagaagctaccgagttaccctaagaaagactgttcgtgatatttcgtgtgttttag

SEQ ID NO: 723795 - DNA, 96 bp, Homo sapiens
aagaagcctgtgcccaagctcatcgagaagtgctggaccgaggacgaagtgatccacttcctcatgatactgtcttctaactgggcttacttaaag

SEQ ID NO: 723796 - DNA, 100 bp, Homo sapiens
gatctccactccgccaatcccctgtgcctggcgttgggcggtttcccgaggagcttgggccgccgcagctgggatctagcaattgggaggcagcagactt

SEQ ID NO: 723797 - DNA, 97 bp, Homo sapiens
cgggtgtcttccggcagctcctctgaggtctcctccatcaactccgacctggaggaataggaggccttcaagattttgtgctgaaatctgcaacact

SEQ ID NO: 723798 - DNA, 74 bp, Homo sapiens
gcacacctggtggtcctgaagacagatgaggcctgcctgtgttaatacacctagtgaggagtggagctgaattt

SEQ ID NO: 723799 - DNA, 74 bp, Homo sapiens
atgaaacagattctaactccaatggcccaaaagactcaagagtagccttcctcgaggacctgcctttcccattt

SEQ ID NO: 723800 - DNA, 80 bp, Homo sapiens
agatctactactcggacaagtacttcgacgaacactacgagtaccggtgcagcagtaccgcgtcgccatgactgccaagg

SEQ ID NO: 723801 - DNA, 100 bp, Homo sapiens
cagcagctccagcaggcgctggctcctgctcaggagaactacgatgacccgcacaaaacccctgcctccccagttgtccacatcaggggcctgattgacg

SEQ ID NO: 723802 - DNA, 75 bp, Homo sapiens
cctggagaaataccctattaccaaagaggcacttgagcttcagctttagctgcagctgcctctgttcagccactt

SEQ ID NO: 723803 - DNA, 82 bp, Homo sapiens
cgcccggtgcggcaagatcgtgtatcccacggagaaggtgaactgtctggataagatcttcgtgaagactctgactggtaag

SEQ ID NO: 723804 - DNA, 51 bp, Homo sapiens
gctttctgtacagcctgcagaactagtgtaggtcttcctgaaactctcaag

SEQ ID NO: 723805 - DNA, 75 bp, Homo sapiens
tccggactctgggtgttttgctaccgtgaccgtttaggaccatctaaagcaccaagtttctggtataaaatagat

SEQ ID NO: 723806 - DNA, 100 bp, Homo sapiens
attgtagcctcaaactcccaggctcaagcagtcctaccatgtcagccttcccagtagctgggaccacaggatgcagtgaccagcctttgctttggccggt

SEQ ID NO: 723807 - DNA, 75 bp, Homo sapiens
acacctggaatcctcctcccacatccctggatctgccctcgcagtcagcccaaggctgccccctcggtcactctg

SEQ ID NO: 723808 - DNA, 75 bp, Homo sapiens
aagtgagcgaggagtcagaaactcagccactggttgccttggtaggcaataaaaaaacgaaatcctgaagttcga

SEQ ID NO: 723809 - DNA, 74 bp, Homo sapiens
acgaaggccgctactccgaggcggtgttttattacaagctatttgcatgcaaagaacatcatccatagagacat

SEQ ID NO: 723810 - DNA, 87 bp, Homo sapiens
tgaatccatatttgagactcaaagttagacgtgaccatatcatagatgatgcacttgtccggatttgggccaggcttagtcatctat

SEQ ID NO: 723811 - DNA, 95 bp, Homo sapiens
cagattcgcagtggtcgcttcttctccttgctgtgtcagcgtgttatgatgccgtcccgtaccaacctggctactggaatccccagtagtaaagt

SEQ ID NO: 723812 - DNA, 86 bp, Homo sapiens
ttagaaagaacacgtcagcgaaacccatctgatcgacatgttattcctcccacatgtcatcagcaggatgggcaagctggagcagg

SEQ ID NO: 723813 - DNA, 75 bp, Homo sapiens
agatcatgacattgtagtacagtatccaagtggcaatagatggttcacaggcaccagccagaccccctaaaccac

SEQ ID NO: 723814 - DNA, 75 bp, Homo sapiens
cccgcagcaccgctactcggagggcgagcggacctccctggagaagcttccttcaaaatgtctactgttcacgaa

SEQ ID NO: 723815 - DNA, 98 bp, Homo sapiens
ctacagagatgcactgagatacaaacctttgacttcaagcctcgagccagcatggatactgtccatcacatgttactttttggatgcaatatgccttc

SEQ ID NO: 723816 - DNA, 100 bp, Homo sapiens
gctggtgggtgtacacactgctgtttaccttggcgaggcctttcaccaagtccatggtgaccaaaagccagccccactgtgagttgaactctttcgtgtt

SEQ ID NO: 723817 - DNA, 83 bp, Homo sapiens
agcacatcgagaccgcttaccgcatctggctggagccctgcattcgcggcgtgtgcaggtttggtgcacctcgatttggagga

SEQ ID NO: 723818 - DNA, 89 bp, Homo sapiens
gactcgcggaccggcgtccccggcgcgaagaggctggactcggattcgttgcctgaggtcatgcttcaccccttcctccatctgctgca

SEQ ID NO: 723819 - DNA, 97 bp, Homo sapiens
gaatttatcctcaagagtcagctggcaggatgataatgaagataattcaaatgatgggacccagccatccaaaaggaggcgaatgggctcaggagat

SEQ ID NO: 723820 - DNA, 97 bp, Homo sapiens
ctgagctggttggccctgtgatccctcaagactggtccacggagtgtatgaccacaaacagccatcaagaaacgtgttcagttgatcatcaaatact

SEQ ID NO: 723821 - DNA, 90 bp, Homo sapiens
aaagccatggagttgagctgcagcgaagcacctctttacgttcttgatagtccacaatgggtgaaccacagcaagtgagtgcacttccac

SEQ ID NO: 723822 - DNA, 109 bp, Homo sapiens
actgtatggcttagtggttcctggatgttcctggatgcctgacatcacattgatacatgctggaggtctggctcagcattttgaaagcgaagcagaagccgtagaatca

SEQ ID NO: 723823 - DNA, 100 bp, Homo sapiens
gcagctggagctgcgtctgcggactcgcctggagcaggaactcaaggccctgcgtgcacagcaggactgtgaggaatgtatccagctggagccgaccttc

SEQ ID NO: 723824 - DNA, 100 bp, Homo sapiens
cgtcaccgaagacttcagcgaggattccgagatggatttacatcactggcttccctggttctcaagcctttggattcagactgaattataccacaggcct

SEQ ID NO: 723825 - DNA, 100 bp, Homo sapiens
cgcgaagctggccaaagcctgcccagacggctcacctgtgcgggatggaacaaaagatgaggacggggacttggttgccttttccagtgacgaggaattg

SEQ ID NO: 723826 - DNA, 74 bp, Homo sapiens
cccggtttgctgatcgccccagggatcaggagattatcttagaagacctaggactccaaaaatgtttcccctga

SEQ ID NO: 723827 - DNA, 90 bp, Homo sapiens
gaaaccacacctctagctgaaaaccaagatgaagacccactagaagatccacatctcaaagaagtggggcttcaccaagttcaatgctga

SEQ ID NO: 723828 - DNA, 83 bp, Homo sapiens
ccagataggcagccacgaccccaaaggagtcagagtcagaagcaaaggtagatggagagactgcatcggacagtgagagccgg

SEQ ID NO: 723829 - DNA, 106 bp, Homo sapiens
ccagaccctggagcctcagttggaagcagccgatccagcctgcggagcctgtggggcagcatggcggacaccgacctgttcatggaatgtgaggaggaggagttgg

SEQ ID NO: 723830 - DNA, 98 bp, Homo sapiens
aacccaggaggagactctccctggaaaacttcccttccctttcggttggtcaaagaaaaagtgatgtatgaaaaagaggcaaaacaacaagaagaaaa

SEQ ID NO: 723831 - DNA, 74 bp, Homo sapiens
ccgcggggttagccactgctggctgcttccagtgttcgccgagagggcgccctgcgtccggcagaggaggcgag

SEQ ID NO: 723832 - DNA, 83 bp, Homo sapiens
tttgaaaggcttcgaggcagcggagataccttcccggatgcagatgctgatgaagacagtctggcaggcgagctggatgaggc

SEQ ID NO: 723833 - DNA, 98 bp, Homo sapiens
ttcaacttcatcttaaagagagaatggctgctttggaagataagttagtgtgactctggatccagatacagctcatcacgaactaattctctctgagg

SEQ ID NO: 723834 - DNA, 100 bp, Homo sapiens
cttaagtggggaatggagtacaagggctatctggtatctgtagatggctacatgaacatgcagacaatacctgaaattccaccaaagcgtggagaactca

SEQ ID NO: 723835 - DNA, 90 bp, Homo sapiens
ccgagatctacctgacgcggctgctctcagtcaaggcctgctctccctcctgtacctgccaacaggatttttctccctggcccgcggtgg

SEQ ID NO: 723836 - DNA, 100 bp, Homo sapiens
gggatatcttacaatatgccacatcagccgaatatacatcttccactatggaattctcactacggatttttctggcttaaagcttttcaagccaggccaa

SEQ ID NO: 723837 - DNA, 75 bp, Homo sapiens
ggatgtggtggtctactctgatgtcaatcttgagggctagatcaaatgaatgcttcaggaccaattaaagagaag

SEQ ID NO: 723838 - DNA, 50 bp, Homo sapiens
gtttgattcccgaaggaccttaactaggttcctacaaacttgatgacttt

SEQ ID NO: 723839 - DNA, 75 bp, Homo sapiens
gggcgcgtttgaaatctcgccgtcggaggtccagagtgtcaattcttgtcatagctgcgcttgtggcaattctaa

SEQ ID NO: 723840 - DNA, 80 bp, Homo sapiens
gaaagattcgggccagagacgacaacccgggcctccgagtacgctacttcctgaagaataaggtcagccctgatttgtgc

SEQ ID NO: 723841 - DNA, 87 bp, Homo sapiens
ggccgtcccggcctgcgcagcctgagaaaggcctaaagaatgtatttgacgaagcaatattggctgccctggagcctccagaaccga

SEQ ID NO: 723842 - DNA, 50 bp, Homo sapiens
catgtctatatatttccccattcactgtactatactggcaattgctggag

SEQ ID NO: 723843 - DNA, 100 bp, Homo sapiens
ccggagccagccccgcagcggatcaaagttttgacattccagacagaacttttcattctacaaatacaacttggcgactctcatcttttgaatctatgac

SEQ ID NO: 723844 - DNA, 90 bp, Homo sapiens
cattcctgaaatacatccaggaaagacatggagattctcttaaaaagattcaccagaccagagcacttgggcagcagcgccaagatcaag

SEQ ID NO: 723845 - DNA, 83 bp, Homo sapiens
aagacatcttaattgggcacgaaagagcagaaatgatggaagaattgcatagcctggacccacgacggcaggaattattggag

SEQ ID NO: 723846 - DNA, 51 bp, Homo sapiens
aggctgtctctagacagcagtcttgtggactgctctacatctggcctctgc

SEQ ID NO: 723847 - DNA, 75 bp, Homo sapiens
tccagggaatggctggcccagcagctgagatcacagcctctactcttcatggatcttttggatgaaagaacactc

SEQ ID NO: 723848 - DNA, 101 bp, Homo sapiens
actatcgtctatcattggatgaagtggctccggagatgttgcactagtcgggggttccatgctggggggcagaaggaatgctctctaccgtctgaaaccgt

SEQ ID NO: 723849 - DNA, 100 bp, Homo sapiens
ctcagcccacagacacctgagcagaaggaatgggctttccagactctgccagagcaggacagcgctctctggtttggtgcacctcgatttggaggaagta

SEQ ID NO: 723850 - DNA, 100 bp, Homo sapiens
ggaggagggtgacgaatttgagaaagcatctaaactaacaggacctgttcgatacaagaggctgttttcctagcgtggcttgctgcctttggtaagaaca

SEQ ID NO: 723851 - DNA, 100 bp, Homo sapiens
ggccgtggttgtggggaccataactgatgatgtgcgggttcaggaggtacccaaactgaagcagcaagaaggctgggaccccagccaagggcaaagtcgg

SEQ ID NO: 723852 - DNA, 90 bp, Homo sapiens
gatcaaatggcacttcattggccacctacagaaacaaaatgtcaacaaattgatggatgagcacaatgcctggactccccacccggccct

SEQ ID NO: 723853 - DNA, 146 bp, Homo sapiens
aaacctgaaacaaggtgatctggggaaccaaagactctgggactcttggtgccaacagagttactctgtccagtgggcttgttgctccagacctcatgccttctggacccagacatctctgcaatctcggaactggaatacaccac

SEQ ID NO: 723854 - DNA, 52 bp, Homo sapiens
ctaccctcctgtacttgttccaactcaaagacgaggtctcactatgttgccc

SEQ ID NO: 723855 - DNA, 85 bp, Homo sapiens
aagaaaacacaggagccggagcagaagcaaagagtgtttcatcattacgattagcctataaggatcttgaaattcaaatgaagaa

SEQ ID NO: 723856 - DNA, 101 bp, Homo sapiens
caaactctggagtaattggagccaagaaatgagtatagggaaacactactatgaagtatcctgtcatgaccaagggttatgcagggtcgggtggtctacca

SEQ ID NO: 723857 - DNA, 118 bp, Homo sapiens
tggcctttggcacgtcctgctccgtggtgctctatgaccccctgggtatcagcatggaagccatgagtgagaataaaatggtgccctctgagtttagcacaggacctgtggaaaaagc

SEQ ID NO: 723858 - DNA, 90 bp, Homo sapiens
cggaggcggaggcagaggtggaggcgctttgaaaggtgtggccgacgacgatgccctcgctgaggagcgcatgcggagaggccagaacgc

SEQ ID NO: 723859 - DNA, 101 bp, Homo sapiens
tagaagaccagaagtggatggagactgtgatgcagatccatccgccctagcaaaatatgttctggctttggtaaagaaagacaaaagtgaaaaagagttaa

SEQ ID NO: 723860 - DNA, 100 bp, Homo sapiens
ctggtgacaggacagcattgtgaccagtgcctgctcttagaacaagctctggtgattgaggaacagctgcgccgggctgcttacttgaacatgtcagaag

SEQ ID NO: 723861 - DNA, 98 bp, Homo sapiens
tcacctggtcaccatgatgcatatcagtgtgcgtgtgaccaccatggatgcagagctggagtttgccatccagcccaacaccaccgggaagcagctat

SEQ ID NO: 723862 - DNA, 81 bp, Homo sapiens
tggctgtggagaaggcgctccggggcgaagcaggctgagcggaaggaggagaaaaaggcggctgcccctgctcctgaggag

SEQ ID NO: 723863 - DNA, 80 bp, Homo sapiens
ttgggacgaggagaggatccaggaggaggagttgcagagttggttgaatctggcgatgtggaacccatggatatggaggg

SEQ ID NO: 723864 - DNA, 100 bp, Homo sapiens
ttcatctttcatgcagtgacatgttgataaaaaatgatgaaccgcatgcacgagtctctcatgctcttcgactccatctgtaacaacaagttcttcatcg

SEQ ID NO: 723865 - DNA, 90 bp, Homo sapiens
tctgattctccttcgctgtggcgggaagatggccggatttgaagccactgaggcggctcccagctgcgttggcgacatggccgacacccc

SEQ ID NO: 723866 - DNA, 74 bp, Homo sapiens
ggggcagcagaagctccagagcccagacttgcagagccaatgaagagattgctcaggttcgaacaaaagcaaag

SEQ ID NO: 723867 - DNA, 101 bp, Homo sapiens
cccgactgcaactgctggattgctgcaaggctgagggacgagaacgaggattttctgccgtctcttggcaaaaatggcaaataatgatgctgttctgaaga

SEQ ID NO: 723868 - DNA, 51 bp, Homo sapiens
gaccgctgccgcccagcacgtccaggtccttatgtcgtcagaagatcgaga

SEQ ID NO: 723869 - DNA, 83 bp, Homo sapiens
ctccagccgaaggagaaggggggtttccacttgagcggcacagtgacagaacctgcaatacaatcggagccagaaactgtttg

SEQ ID NO: 723870 - DNA, 98 bp, Homo sapiens
gggagctggacggcgagcgcgagcggcgcgagaaagccacggcatatgcctccaaggacggggtcctcactgaggccatgatggacgcctgtgtgcaa

SEQ ID NO: 723871 - DNA, 75 bp, Homo sapiens
acaggatgtgccaccagaacccaagaagattccgataagaaacacgttgggacagaaataacccagagccctgga

SEQ ID NO: 723872 - DNA, 88 bp, Homo sapiens
ctttccttactggatcctcaaaccagaagaaaacctgaatctctgaggctggagcattggatttgctaaaggagcttaagaatattcc

SEQ ID NO: 723873 - DNA, 100 bp, Homo sapiens
ggattcattaaaaaatttgttctctgtcctgaatgtgagaatcctgaaacagatttggctgaaaatctattgttagatgccgatatgaacattaaaatag

SEQ ID NO: 723874 - DNA, 83 bp, Homo sapiens
gttcaaacaagcagctttttgaattactttgttatgcagaaagtattgagaggatccagaatccagatctctggaatagctac

SEQ ID NO: 723875 - DNA, 90 bp, Homo sapiens
ctccggggacaagaaactagagcaaataaccgttttgaaattttccaggaccgtctgcagccctaacaacaatgcagctcttctccaagc

SEQ ID NO: 723876 - DNA, 82 bp, Homo sapiens
acgaactgcacgtgtacaacacggttaccggtattgtaagaacaagccgtacccaaagtctcgcttctgccgaggtgtccct

SEQ ID NO: 723877 - DNA, 100 bp, Homo sapiens
agagcaaaaggcggagctgtagccactgtagcagcaaggaatcagagatcattgatttcttcctgggggcctctctcaaggatgaggttttgaagattat

SEQ ID NO: 723878 - DNA, 98 bp, Homo sapiens
gaaaggagtgatgaatcagcccatggcttacgctgcacttccatcccacggtcaggattttgcctaccattttacagtatttgtcttctattttggag

SEQ ID NO: 723879 - DNA, 80 bp, Homo sapiens
ccttctccactttcgccagcccgtgccgcgagcgcggcctgcaggaggatacctacctggtttatattctaaatgaattg

SEQ ID NO: 723880 - DNA, 83 bp, Homo sapiens
cgatcctctagagcactgtgtgtctccccggacgcgagcccgctcccctgaggcgaactttctgaccaagtatacaactaccc

SEQ ID NO: 723881 - DNA, 98 bp, Homo sapiens
aggtgacaaagctaaggatggagttgcaggtgtccagcgatgatgtgctgactaaagacgcgggtgagtgtgtgatctgcctggaggagctgctgcag

SEQ ID NO: 723882 - DNA, 100 bp, Homo sapiens
gtaaaaacaatagctcaaggaaacctttccaacacagatgtccaagctgccaacccagcccctgtggaggtgaatctgaagctccgccggccatccttcc

SEQ ID NO: 723883 - DNA, 75 bp, Homo sapiens
tcggacagatgaagctccccaaggagctgcagactccagggattagagctcgatctgcaaggcttcagtggtttt

SEQ ID NO: 723884 - DNA, 100 bp, Homo sapiens
cccagcaacacgctcctgacttcccttcccaaggactcgacctgagaagggacaactgtgggaaggctgggaaggttaagaaacaacagaggtggacctc

SEQ ID NO: 723885 - DNA, 82 bp, Homo sapiens
cagcatccggggacagctgagctggcatcagaagacctacgccttcaggactggatggaggacctgaagacgtgaggtggag

SEQ ID NO: 723886 - DNA, 75 bp, Homo sapiens
ctgagtacgacagcctcaaacaggagctggagcagctcaaagagggacatgagagatggctttagaagaaaaagt

SEQ ID NO: 723887 - DNA, 83 bp, Homo sapiens
gggaggactcgaactggcgccaggaaactaaatatattttgccaactttggaaaaagaattattcttggcagagcacagtgac

SEQ ID NO: 723888 - DNA, 100 bp, Homo sapiens
cttctaagctgaataaagctgttttggaactgtcaggtacctcaaagcgaggattccctgggagcacccaccagctgagatctgcacatcagccacaatc

SEQ ID NO: 723889 - DNA, 75 bp, Homo sapiens
gcagcaaccaattatcagtttacaacctgcacccactaaaggtaaattggcaggatgaggagcagcaaatcaaaa

SEQ ID NO: 723890 - DNA, 50 bp, Homo sapiens
ttccggcctgacaacttcatctttgatcagaacactgaggctcagagaag

SEQ ID NO: 723891 - DNA, 89 bp, Homo sapiens
agaatatttaatggaaaatcgcttggttaaaacctgacacttttaacaggttctaagctggtctatgtccatcaccttcttggagaagg

SEQ ID NO: 723892 - DNA, 75 bp, Homo sapiens
accccctcctctgcctcgctccaacacaggagcaggccgggctctcgccatgggtcactgtcgcctctgccacgg

SEQ ID NO: 723893 - DNA, 75 bp, Homo sapiens
ggaacggaaaggagattacttggggaaaactgtccaagggtgtccgcaatgttgccagtgtctgtctgcagattg

SEQ ID NO: 723894 - DNA, 90 bp, Homo sapiens
cttagctgtgctcgcgctactctctctttctggcctggaggctatccagcatgatgaagaacgagagcttcaaatggatcctgcagacta

SEQ ID NO: 723895 - DNA, 97 bp, Homo sapiens
catcaagcaggtccggacccactggctgctggagcttgtcaccaccaggagtggctgtaaggtgaagaagcatgaaactcagtctctcgccctggat

SEQ ID NO: 723896 - DNA, 97 bp, Homo sapiens
cctgggagacctctcccacctcctcgccatcatcttgctactgctcaaaatctggaagtcccgctcgtgcgccgaggcggggtttcaccatgttgcc

SEQ ID NO: 723897 - DNA, 100 bp, Homo sapiens
gcgcctactggcggcctgggcccaatactggcggccgcttctacttcctctacggcttcgtctggatccagggatttcaaggaacagatcatccaccatg

SEQ ID NO: 723898 - DNA, 82 bp, Homo sapiens
gaggagctgtgcagccgcgaggaggcgcgggaggtgttcgagaacgaccccgagacgaaattttactgcaggataaaactcc

SEQ ID NO: 723899 - DNA, 100 bp, Homo sapiens
ggaggagatggacaagattccttatataaaatatgcaaggtctgtgcagacttttgcagacaaatcaaaacaagaagctctgaagaatgacctggtggag

SEQ ID NO: 723900 - DNA, 73 bp, Homo sapiens
ggaagaacaaatatgtctgtcagaccctgtattcagtggatcagctggcaccacccaaatagataaattggcc

SEQ ID NO: 723901 - DNA, 74 bp, Homo sapiens
cagctgaagagcgacaagccgctggcagccgcggatctcaccgccgctcaggaataataataacctggatgcct

SEQ ID NO: 723902 - DNA, 101 bp, Homo sapiens
gctcacctccggggatttgccaaccagatctggtggctggacccagagctgacctatggctgcgccaagcccttcgtcttcacccagggccactccgtgtg

SEQ ID NO: 723903 - DNA, 75 bp, Homo sapiens
gcaggttcttcatcttcaaaaatgaacagtttggaaagaccacagcaagattctttcattcgtctcctcctagcc

SEQ ID NO: 723904 - DNA, 80 bp, Homo sapiens
gaaggaacgaggcaaggagctaaagcagcgtgcgttcagccctgggaaaaggcgacggcggattgacagaagtatgattg

SEQ ID NO: 723905 - DNA, 75 bp, Homo sapiens
aagatttccttactgaaaccctctacaaaggcattagtcctatcttgtaaggtaaagcttgagagcaactttgcc

SEQ ID NO: 723906 - DNA, 87 bp, Homo sapiens
cggacctgctgatggcccgcagcttcggtgacaagctgatgactatcagccagttcgtctgctcagtaaacctggggaactgagaag

SEQ ID NO: 723907 - DNA, 100 bp, Homo sapiens
ctttatcctggtcatcttctatttccaaagtggtgatgatgtccagcaactctgtgaagcaggagaagaggagtttttggaaatcatggcactcgtgggc

SEQ ID NO: 723908 - DNA, 100 bp, Homo sapiens
caatcccttcgatcaggatgttgtcctgccattgactctaccagaggagattcttcaagcttagttgctgaacttcaagaaaagcttcaggaagaaaaag

SEQ ID NO: 723909 - DNA, 75 bp, Homo sapiens
gtatgataaacacctaggagaactaaatgggcagctgaaatattaccaggaaaaattccggaactgttggcttcg

SEQ ID NO: 723910 - DNA, 50 bp, Homo sapiens
ccttgggagactcacacctgggagagtttgagttcatgatcgagtccatc

SEQ ID NO: 723911 - DNA, 99 bp, Homo sapiens
gtggcggtggtgaaggtgcaggccgttggggcggctcagaggcaggtgacagcagggacatgtctcgggagatgcaggatgtagacctcgctgaggtga

SEQ ID NO: 723912 - DNA, 71 bp, Homo sapiens
cggtgccaggaccaagtatctggtcacctgtcactccctggacggcaagtgccagctgaaggtgagaagca

SEQ ID NO: 723913 - DNA, 83 bp, Homo sapiens
ttcatcaaaaatagtgatagctttgataagttgactatagtcaatggggccaatggagccaagtgtatggaaacccacaacag

SEQ ID NO: 723914 - DNA, 90 bp, Homo sapiens
cgcagaacctccacagtcaagaggacgatccagacatttaatgtggatgcaccatgccagaccgtggaagatttaacgaatggggttgtg

SEQ ID NO: 723915 - DNA, 100 bp, Homo sapiens
ctgtggaatgcaagtctgccgatgaagatgtcattaagggtcccgggattcttgagctgtgcccagctgacgagcttttgaagatggcacaataaccgtc

SEQ ID NO: 723916 - DNA, 100 bp, Homo sapiens
tgaaatacttcagaaggatgcagctagctgcatgacagtccatgacaagattatttgcatgggtgcaaaagaaaatggtttgccgctggagtatcaagag

SEQ ID NO: 723917 - DNA, 75 bp, Homo sapiens
cacatcagcgttctgcgtcatgggggagtgctgatcaactaaaagagggtcaacatatttcactggcacctattc

SEQ ID NO: 723918 - DNA, 82 bp, Homo sapiens
gggaagagatgcgaggatgacaagaaaggtggtggcgccctcctgcactcagtcaaggccaagacccaaccagccgtcaaga

SEQ ID NO: 723919 - DNA, 83 bp, Homo sapiens
ccagcaagcggaggtgctgggagcgagttggctgctcccgattctcctgaaggggacgtccgatgatgatgtcccgtgtccgg

SEQ ID NO: 723920 - DNA, 100 bp, Homo sapiens
gggagctgggcggccatttaccagagactctccaacatgtgccttctgaccatacaaatgaaacttccaacagtactgtgaaaccaccaacttcagttgc

SEQ ID NO: 723921 - DNA, 100 bp, Homo sapiens
gtttcccaagtttcctgacttcttccatcctctggaaatcagctgtgcatattcctctgcagacactattgaagttcatggtggatattgccctgggaat

SEQ ID NO: 723922 - DNA, 75 bp, Homo sapiens
taccttggcgaggcctttcaccaagtccatggatgacagtgatgggattccgtggtcagaagaacgggtggtacg

SEQ ID NO: 723923 - DNA, 80 bp, Homo sapiens
ctcttggcctcaagtgatcctcctgccttagcttccaagaatgctgaggttacagattgttcagattccattctgtgggg

SEQ ID NO: 723924 - DNA, 82 bp, Homo sapiens
gcgacggcgaccatagctctcatgatatcatcaagttgaatcgaaaggaagggaagaagcagaattttccaagactaaatag

SEQ ID NO: 723925 - DNA, 82 bp, Homo sapiens
cccagaaacgtcactatcaagaagtgcactatatgttgtggatctgaagaagtttaggaaaatagctgctggtgacagactc

SEQ ID NO: 723926 - DNA, 100 bp, Homo sapiens
tagagattacaatttgactgaagaacagaaggcgatcaaggccaagtatccgccagtcaataggaagtacgagtgaagaggagcaggacttggatggtga

SEQ ID NO: 723927 - DNA, 90 bp, Homo sapiens
atcagcgagactccgtgggcgtaggaccctccgagccagatgaccaaaataactgtcctgtgaaaccctgttacctcaatatcttggaag

SEQ ID NO: 723928 - DNA, 100 bp, Homo sapiens
cttcaaactacggcttttctgctgtctgcttgcagtgttgatggtggtggtgctggtcatcaatgttactcaggtagagaatgcaggctcaacagtacca

SEQ ID NO: 723929 - DNA, 75 bp, Homo sapiens
ggacaatctcaacgacagctctcagcagctacagccgcggcccatggagcccgccggcccggcccccggccgcct

SEQ ID NO: 723930 - DNA, 75 bp, Homo sapiens
ctgctcttcatctccctgctctggatcatcgaactgaatagttgatctctctaatgtattagatcttcatgcctt

SEQ ID NO: 723931 - DNA, 90 bp, Homo sapiens
gcagcaaaaacaagagtccctctaaagcagctcaaaaggtgctggacgtcattgctcctccttatacctctgacttcgtgcaacttttcc

SEQ ID NO: 723932 - DNA, 101 bp, Homo sapiens
gagcagtcaagaagaacatgccccaagttattcgtcagtgaggcggaaattgtggtgtacttgtattcatttggattcaaggttggctctcaacagtgcca

SEQ ID NO: 723933 - DNA, 140 bp, Homo sapiens
tgggaagaaatgcagcgtatggatgttcctacctcttgtatttactttgtttacttcagctggattgtggatagtcaggatgaagttaaaggaagtagatcgtacagccatgcaggcatggagccctgcccagaatcacc

SEQ ID NO: 723934 - DNA, 100 bp, Homo sapiens
gctcaaagtggtacagaccaagtatgtggaagccaaggactgtctgaacgtgctgaacaagagcaacgagggtagagctgaagtttcctgcaccaggcaa

SEQ ID NO: 723935 - DNA, 98 bp, Homo sapiens
caatgcagagctcttcagaatacacgtcttccggtgtgaaatacaagaagctagtaaccagagagcacagagaaatgctggtgaaactggccaaacag

SEQ ID NO: 723936 - DNA, 49 bp, Homo sapiens
gctgcgagggactaagagcagagggcagagttaccagggcaggttatct

SEQ ID NO: 723937 - DNA, 100 bp, Homo sapiens
gaaatagcttgtgctgctgctgctgctgctgctgcatgtctaccaggagaggagggaactgcggagcggatattcttactgattctccgggctctgcagc

SEQ ID NO: 723938 - DNA, 90 bp, Homo sapiens
aagttccccagtcagtgaccaactcagtgccaaaaccaggcttgtggaatatacccgtgctgatggcacagttggccgaagagtgaagcc

SEQ ID NO: 723939 - DNA, 82 bp, Homo sapiens
ggaacgaggcaaggagctaaagcagcgtgcgttcagccctggggaggccactgtctgcagctcccgtgaagatgtccactcc

SEQ ID NO: 723940 - DNA, 100 bp, Homo sapiens
agtggaaacgcttgtagggtttcaccagtttccatcttgctgctgcaaaaggacacgtggaatgcctcagggtcatgattacacatggtgtggatgtgac

SEQ ID NO: 723941 - DNA, 98 bp, Homo sapiens
ttcagaaaaagcatccccgaggaggaagacgaatcgttaaacatctgaaagggtcagatggcggctcagcggcagcgggcgctggccatcatgtgccg

SEQ ID NO: 723942 - DNA, 98 bp, Homo sapiens
ttgtagataagcaactggattttttaactgaagatagtgcctttcagccctaccagataagccaatggacacgtcagtgttatctgaagaaggaggag

SEQ ID NO: 723943 - DNA, 82 bp, Homo sapiens
acagagtataacaatcagtgccgagcaattgtgatgagatattctgctgagtggaaggatgtatgttgtgttcacagcgaag

SEQ ID NO: 723944 - DNA, 75 bp, Homo sapiens
ccaccgcctcctctcaccaagaaaacttgttcaagttgctcaaaagctttgggcactcccaataatgaagtgtgg

SEQ ID NO: 723945 - DNA, 100 bp, Homo sapiens
caatgcgaagacatagaaatgaagtgacagtggaactgcggaagtgattctaccagaaaggaatgaagaacagaaccttcaggaattgagtcacaatgca

SEQ ID NO: 723946 - DNA, 74 bp, Homo sapiens
ttccagctcacccactgccagcagagcaggatacagacgtccctcaccagtgccagcttggggtctgcagatga

SEQ ID NO: 723947 - DNA, 82 bp, Homo sapiens
ctttcttcagccgaggccgccgccgcctctccttgctgcagccatggagaaagggataaagtgatgcctctgattatccaag

SEQ ID NO: 723948 - DNA, 90 bp, Homo sapiens
gtttctttgtcatgtagccaagactggagaaacaattctttcccagggaactccgatgaagtgttccaacaaaatgagcgagtgaaccaa

SEQ ID NO: 723949 - DNA, 100 bp, Homo sapiens
atgatattcaggaaacatgtcagaagaatgccgcctctgccttgctcgttggaagaaaggatcttgtccaggataccagaaggccctattgatcaggggc

SEQ ID NO: 723950 - DNA, 75 bp, Homo sapiens
ggaaggtgcgcgagctggtggacaaagcgccaacctgagtgagcagcagatagtatccaacacgttagttcgagc

SEQ ID NO: 723951 - DNA, 101 bp, Homo sapiens
cacaaatgtacccccagtacacttactactatcctcattatctccaaaccaagtttcaccagtgatcattaaagaatgggcagcttacaaaggaaagtctc

SEQ ID NO: 723952 - DNA, 100 bp, Homo sapiens
aaaggatggattaaacgatgatgattttgaaccttacttgagtccacagtgacaaagcataaatcatggacaccagagaataaggtggacctcaggaatc

SEQ ID NO: 723953 - DNA, 74 bp, Homo sapiens
tgaaagtcagtttctgaggaatttcatcaggatgtgatcttcgtggtggaaagctaaattttaaaaccacccca

SEQ ID NO: 723954 - DNA, 83 bp, Homo sapiens
tactccgaggcggtgttttattacaagattttctggcatccttaaatcttgtgtcaaggattggttataatataaccagaaac

SEQ ID NO: 723955 - DNA, 100 bp, Homo sapiens
ctgcctgcgccgccggccgggcatgagttagtcgcagacatggacaccaaacatttcctgccgctcggtattgttgcagcatctggcagtgagactgagg

SEQ ID NO: 723956 - DNA, 82 bp, Homo sapiens
caaccaccgccctggccatctaccatgtggtattagaaaactactcggatgctccaatgacaccaaaacagattctgcaggt

SEQ ID NO: 723957 - DNA, 100 bp, Homo sapiens
ttgaacatgccttcatcctctataacaagtatatcacgtatggagagaaggggaaagccatccggatcgagaaggtcatctacacggggaaggagggaaa

SEQ ID NO: 723958 - DNA, 97 bp, Homo sapiens
ccaaactcagccctccgttaagatcctggttccatgccgcagtaggacagcaggcccaagtctgcacatcccaggagttgtaagacgttcatcgccg

SEQ ID NO: 723959 - DNA, 100 bp, Homo sapiens
gaccagcctgagctcctgctttgcacagctttgccacaaagcccagtctgtgtctcaaatcaaccacaagctggaggtctgggacctgcgccagaacaag

SEQ ID NO: 723960 - DNA, 88 bp, Homo sapiens
gaatatgtggctaatctccttaagtcggccttccctcacctacaagacctatgtgcttcccaagctgtatgtgaagctacattactgt

SEQ ID NO: 723961 - DNA, 90 bp, Homo sapiens
gagatcacacaactatttagaaaggacctagatgtgaaggctggtggaggctgtgtaatgaccattggagaaatgctacgatcttttctc

SEQ ID NO: 723962 - DNA, 75 bp, Homo sapiens
ccgccgtcagccgggcccggggctttcgacatgccccccaggtccctgtgcgttttattgcgacctgccggtggg

SEQ ID NO: 723963 - DNA, 83 bp, Homo sapiens
cgcggccagtgagctggggccgaccaccccctatgccagacatgatgtattgagtaaaaggaacttcggtacacaggccttta

SEQ ID NO: 723964 - DNA, 75 bp, Homo sapiens
agcccccaacccagaccacacccttgagcctgagcccgacattattcctgaggcctctggctgtacctggcaggg

SEQ ID NO: 723965 - DNA, 100 bp, Homo sapiens
gacccggccaacgacacatttgacattgatccgatggtggttactgttgaggagctcaagcttgggaaaatggtgtgcattccttgtatcgtcattccag

SEQ ID NO: 723966 - DNA, 98 bp, Homo sapiens
tgatcttggcctgcaggaacatggcaagggcgagtgaagcagtgtcacgcattttagaagaatgggagctgtacttcagcaccgtggacactttccag

SEQ ID NO: 723967 - DNA, 74 bp, Homo sapiens
caagtgatgagaagctgtcggagcttcccaagattttctctgtgggcagttctttttgttttgggaagacttct

SEQ ID NO: 723968 - DNA, 90 bp, Homo sapiens
gaatctgcaggacttggtccgcggcatccgtaaccacaaggaggacgagttcctctgtgacgagggtgcaggtatctctggggactacat

SEQ ID NO: 723969 - DNA, 80 bp, Homo sapiens
gtctggggcaactcagaagaacaaaccagcaaatatcctagtaatgggagaaggtcctgagagggggagagtcaaaatag

SEQ ID NO: 723970 - DNA, 97 bp, Homo sapiens
ttcagatctctcaagattcagtagggaacagacgccaaggacttattgttgtgctaacactgaagacttggagacagttattcaccatgtacacagc

SEQ ID NO: 723971 - DNA, 137 bp, Homo sapiens
gagctgggcatccaagaagaagcagcctcatttgttttctggtgtcatcgtaggtggccacctatggcttttggggccagaacacaaagcgtgaatccggaagaaaagttcaatctggaaacatcaatgctgccaag

SEQ ID NO: 723972 - DNA, 75 bp, Homo sapiens
cggatgtggcgcggctgcgcgaggagcaggaaaagcgtgagtgcatctccatccacgttggccaggctggtgtcc

SEQ ID NO: 723973 - DNA, 83 bp, Homo sapiens
agaggacgcgggctctgaggatgagctggaggagggggtaaaaatgttgtacatcagctctcagtaaccctagaagacttata

SEQ ID NO: 723974 - DNA, 100 bp, Homo sapiens
cgccggcggagggtgcatgtttgcgaggaagccgccgggcgccgcgcctttggagcaaaggcacaacaccacttgctccaccacctaaacctgttcgaag

SEQ ID NO: 723975 - DNA, 50 bp, Homo sapiens
aattaaacttgtccagataaaagctctattatcagtcaaacaggaaaaag

SEQ ID NO: 723976 - DNA, 98 bp, Homo sapiens
cgtgtcaccatccaggaactcacaggtattgctgtctctaagccagacctgatcacctgtctggaacaagggaaagagccctggaatatgaagcgaca

SEQ ID NO: 723977 - DNA, 51 bp, Homo sapiens
gttcgaagctgagtatgtgacaggcctctgagcccaagtctgcacgtattc

SEQ ID NO: 723978 - DNA, 100 bp, Homo sapiens
tttatgatttactggatgaactgataaaacccaccagtctaggttaaagatcgaggtccggaagccactaggagattttttaattggttttattggagca

SEQ ID NO: 723979 - DNA, 82 bp, Homo sapiens
ccccggccgcccagtgggcctggagcagctgcggcggctcggggtgctctactggaagcagcccctgtcaaagggaacagga

SEQ ID NO: 723980 - DNA, 97 bp, Homo sapiens
atcattctcctggctctcctgggtgccatgtcaggtggaatatgtgatcaagtgtgacatgtcagctctgcagaagattctgtatcgccatatgcaa

SEQ ID NO: 723981 - DNA, 101 bp, Homo sapiens
accgtttattaaaagagctgtggctaaccttctgataacttaagagagattctccaaaatgtggccagattgcagggagtatcaaatatgagaaagctagg

SEQ ID NO: 723982 - DNA, 95 bp, Homo sapiens
tccaagctctactgtgacttcagagacactgccaagcagccttagccctagtgtagaggtatttgtaggcaaaataccaagggatttatatgagg

SEQ ID NO: 723983 - DNA, 82 bp, Homo sapiens
gtgcatcagagtggatggcctccccagccccaaaagtttattgggcacttcctagcaccaggcactgcaataagaaatggag

SEQ ID NO: 723984 - DNA, 98 bp, Homo sapiens
aatccaaaggtgaatcttttggttggtgattttgatgatagccacaaagcaagcagggttcatatccagctttcagagtggcaccgtgcaatttttct

SEQ ID NO: 723985 - DNA, 90 bp, Homo sapiens
caaaaagctgctttccccccacctgaacagaaaactgcatttgacaaggcctgtttaaagaagaaaacccgtatgctagatttgaaaaca

SEQ ID NO: 723986 - DNA, 100 bp, Homo sapiens
tcctcgagtgaatgggcggatctcatatcttcacttggcaaactcaacaagggctatttaatctccgaggatcagatgtggagcacaatccagtattttt

SEQ ID NO: 723987 - DNA, 100 bp, Homo sapiens
cccacggaaccggcagagcgagagcccagaagctctgagaccagccgcatctacacgtgggcccgaggaagaggctggctttgctacagctgaccactcc

SEQ ID NO: 723988 - DNA, 100 bp, Homo sapiens
aatatcagaacatgactgtggatgaacaggaaatatagtggtcattatgattagctatccaaaaggaagagaaattttggagctggtgcaaaaaggaatt

SEQ ID NO: 723989 - DNA, 90 bp, Homo sapiens
atttacagtcggaggagtactcggtgaaatcctgtcctgaagactgtaagcctcgtcacgtgttcaatatgctaaagaagtatgtccgcg

SEQ ID NO: 723990 - DNA, 75 bp, Homo sapiens
cgcgcctctcccaggacccgcctggctgcgagatatggatctatttgtgatgactatatggcaactctttgctgt

SEQ ID NO: 723991 - DNA, 83 bp, Homo sapiens
catagttatggaaggatatctgttcaaacgagccagcaatgccttcaaaacttggaacaggttttagtgccaaagaaccctgc

SEQ ID NO: 723992 - DNA, 75 bp, Homo sapiens
ttgatatcacagaggaaactctgcattctcgcttcctggaggttatcagtgagctgaatggaaaaaacattgaag

SEQ ID NO: 723993 - DNA, 100 bp, Homo sapiens
ggcttcactgcttacctatatcccaaacagtgctgtctggtggcccttctatcacttctatgcagagaaagatgctggtttcgagttttggagatccttg

SEQ ID NO: 723994 - DNA, 97 bp, Homo sapiens
ggaggcccaggcaggctgggctgcccctggcgaggcgcgggctgtaatcacagacctggaggagcagctaaaccagctgaccgaggacaacgctgaa

SEQ ID NO: 723995 - DNA, 90 bp, Homo sapiens
tccttgggctccaggtccagcaggcggagcactgttcactggcaaaactcaaggctcagaaactgcagggcccccaaaaaagaaaaggaa

SEQ ID NO: 723996 - DNA, 49 bp, Homo sapiens
ccgagaaaccgcagcactacacggaactctaatgatccaggacaaagaa

SEQ ID NO: 723997 - DNA, 83 bp, Homo sapiens
tcctgccgtccttctccactttcgccagcccgtgccgcgagcgcggcctgcaggagggaagtgcggctccttcgaagacaaac

SEQ ID NO: 723998 - DNA, 100 bp, Homo sapiens
cattaaattcccgaactggggagatctgatggcatagtcaatccaacaataagaaaagatttgaaaactggaccgaaattctactgctgtccaattgaag

SEQ ID NO: 723999 - DNA, 96 bp, Homo sapiens
ttcaagaagatccggaggaaaagggagtttcgggctgatgctcgggaagcacaagcctatgcagacgacaacagtttgctgttcatggagacatca

SEQ ID NO: 724000 - DNA, 90 bp, Homo sapiens
gcaaaatggtgctgtccaacacatcaccgcagatcaccttcctgaagctgacgccacagaacctcatgcagttccatactgtgggcacca

SEQ ID NO: 724001 - DNA, 82 bp, Homo sapiens
cgccagcccgtgccgcgagcgcggcctgcaggagggaccttaaaccggaaaacattttgttaaatgaagatatgcacatcca

SEQ ID NO: 724002 - DNA, 75 bp, Homo sapiens
acgtacccgccgccgccgttggctggaggttgcctgggcttctggttcctcttcagattacattgggagatattt

SEQ ID NO: 724003 - DNA, 90 bp, Homo sapiens
tcttacatgcctacatcgtcgtgcaggtcgagaccccaggcacagagaccccatcctacaagggactggtgattgcagctggaagtgccc

SEQ ID NO: 724004 - DNA, 75 bp, Homo sapiens
gcatgaggctcccagcagtgagactgtggatattcataaggagaaagtggcacgaagagagattggtattttgac

SEQ ID NO: 724005 - DNA, 126 bp, Homo sapiens
ggagggccagtctgcacccaagaggtggaagaggacgggctttaggctggaagcgccttagaggagccatttttccaggacctcctctgtcagagagagcagctttgtggaaaagatgaagaaaac

SEQ ID NO: 724006 - DNA, 112 bp, Homo sapiens
agatggccgacttcgatgatcgtgtgtcggatgaggagaaggtcacaatccaaggtccggctcctccgcgtcccagggccggacggagggatgaggcagggggggcccgggc

SEQ ID NO: 724007 - DNA, 100 bp, Homo sapiens
ggagagaacccagaagcctacaatgaagaactgaagaagctggagttgctcagacagatggatggtgtatcgccaaatcatggacagctctgaatgtttt

SEQ ID NO: 724008 - DNA, 51 bp, Homo sapiens
gtggggtcctgtcactatttgatctaaagcgggaagccagtatctgtcata

SEQ ID NO: 724009 - DNA, 50 bp, Homo sapiens
tgcgccctctcagcttcccaagaaagtttgaaggatgacctctaggaaga

SEQ ID NO: 724010 - DNA, 97 bp, Homo sapiens
cctgtactggagtctgacttgtccagcagcacattgtcctcgtggtgaattctcttatcagtattgacttgaagctgaaagaaaagccttagttggc

SEQ ID NO: 724011 - DNA, 50 bp, Homo sapiens
cactcaaaccagagttgagtcgaagatggagtctcgctctgttgtccagg

SEQ ID NO: 724012 - DNA, 97 bp, Homo sapiens
aacaagaacttgaaaatgtaaagactcttaagacaaaattagaaactgttttggctgggcctacttcacctataccttctctgggaaatgtgagtga

SEQ ID NO: 724013 - DNA, 75 bp, Homo sapiens
atgcaaaattacaaaaatgtcatcagctaatgtctacctcgaatcaaagtctttctctaatacacagaattctag

SEQ ID NO: 724014 - DNA, 83 bp, Homo sapiens
cattaaagaaaataatgggaaggaagaagtatccaagggacagtatggaaattaccagcagtgaaaaagtacttacattccag

SEQ ID NO: 724015 - DNA, 89 bp, Homo sapiens
ctggtcggcctcaccttttgtacctgctacctggcttcttacctcacgaacaagacccaacatgagtgaagtttcctgcaagaaacggg

SEQ ID NO: 724016 - DNA, 100 bp, Homo sapiens
ggatgtgtctggtgtgggtttcccaagcaaggttccttggaagaagatgtctgcagaggtgtggaaaggagacgcatctatgacattgtaaatgtgctgg

SEQ ID NO: 724017 - DNA, 100 bp, Homo sapiens
gaggtctacgcagatgccgacgaaatcctccaggaggagatcaaggagtacaaggcacttccgttccggcgcccctccggtcatcaacccgctgggcacc

SEQ ID NO: 724018 - DNA, 98 bp, Homo sapiens
gttggaagtcagagctgcacaaagggaaaggactcgcagggcaatgacattaaagtcactgctgagagcactggtgaacatgcctcctcactaccgct

SEQ ID NO: 724019 - DNA, 51 bp, Homo sapiens
ccaagaacaatagcttgccctcataaaacccatcctcatgccaacaaacta

SEQ ID NO: 724020 - DNA, 100 bp, Homo sapiens
aatatttggtatactgggcacaatccatctggtggcagccccgaaactacctcaacaccctgtccacggctctgaacatcctggagaaatacggccgcaa

SEQ ID NO: 724021 - DNA, 83 bp, Homo sapiens
gccagaacccacccacagtcaacaactgcgcccaggaccgtgagagagtaaaggtgggattctatccaaagcttgtgattata

SEQ ID NO: 724022 - DNA, 89 bp, Homo sapiens
cgggaaggaggacccagacaacatgcctcacgtgggcggcaacacttgggctggcggaacaggggcgtgaggtcccaggaagtggccaa

SEQ ID NO: 724023 - DNA, 95 bp, Homo sapiens
gcatgtcatctttgccaggactgatgcagatgcccctcctccaccagaggactgggaggagcatgtcaacagaaagttgaagttgatggtagttt

SEQ ID NO: 724024 - DNA, 75 bp, Homo sapiens
ttggttccccctccctcagcttccgccccaaaagttactccacaggatccgctgaacataggatgttgccacaaa

SEQ ID NO: 724025 - DNA, 90 bp, Homo sapiens
gtgacctgaagatactgggaaatccatagctaagatgccaggaccccctgaaagcctagacatgcaattctgtggtgttcttggtcacac

SEQ ID NO: 724026 - DNA, 75 bp, Homo sapiens
gtgctctccgggcacgtcaaccccttcctcccgtatatcagaacgtgcgcatcgaccccagtagcctgtccttca

SEQ ID NO: 724027 - DNA, 90 bp, Homo sapiens
gacctaccccttgcacacctaccctaaggcagcaatggatttttgcatgaacatgaacacaaaagcaaacaggaagaagttggtacgggc

SEQ ID NO: 724028 - DNA, 111 bp, Homo sapiens
gagttcaacaaataccttgcatacatggagtctaaaggagcccatcgtgcgggtcttgcaaagttggaaaatggatataccttatttgattatgatgttggactgaatgat

SEQ ID NO: 724029 - DNA, 101 bp, Homo sapiens
caaagtcacagaaataatacctaaatatggcagtataaatggagcaacaaggctgactataagaggggaaggtgctgtacttctttgcagtatacaaggac

SEQ ID NO: 724030 - DNA, 100 bp, Homo sapiens
ctgctgttcagcaggagaaaatttcagagctgcaaaattatcaggatgagagccactcagagtgggtgtcttgtgtccgcttctcgcccaacagcagcaa

SEQ ID NO: 724031 - DNA, 96 bp, Homo sapiens
gggagcgcggcggagacgatgcctgagatcagagtcacgcccttgggtgacaccggctccgacacgccgctaaccggccgctcgtccccgcgccac

SEQ ID NO: 724032 - DNA, 100 bp, Homo sapiens
ctgtatcagaagacaatatcatgcaagtgtggcaaatgcttaaagcctttatgccggtcttcccaaagtacggagccaaagtataaaccactgggaaaac

SEQ ID NO: 724033 - DNA, 100 bp, Homo sapiens
cccccgcactgggctccaactgtgcagaagagcgcgacgcccacaacgggtctgtggggaaaggtcagggccctttgaagtacgagcagaccttgaggag

SEQ ID NO: 724034 - DNA, 98 bp, Homo sapiens
caagctttgtctccttcgacttggagtctttgtccaggacggacacagcattgttggttttgccatgtactattttacctatgacccgtggattggca

SEQ ID NO: 724035 - DNA, 87 bp, Homo sapiens
gggatgaacatgggcaggataaatggcataatcaccagcaacacccgggacaataatacgggggccacctacccccacctgaacttc

SEQ ID NO: 724036 - DNA, 100 bp, Homo sapiens
agctaaagatggctgaatttctagatgaccaggaaactcgactgtgtgacaactgtgcttagatgagtacgaagatgatgaagcagggcagaaagagcgg

SEQ ID NO: 724037 - DNA, 82 bp, Homo sapiens
cccggaggctccagaaacgggtcctgctgctcaccaaggtccccgttctccgtgtcctgctgtccgctgacctgaaggggtt

SEQ ID NO: 724038 - DNA, 103 bp, Homo sapiens
ccccgctctgctgtgggcgctgctggcgctctggctgtgctgcgcgacccccgcgcatggcgatcagtgggtgaccgcggctgcgagggactttgtcatccgt

SEQ ID NO: 724039 - DNA, 75 bp, Homo sapiens
cgggagatcccaggcggtgacagagtggagccatggctagagcgagggcggcactgctcacaggacggctaccca

SEQ ID NO: 724040 - DNA, 82 bp, Homo sapiens
ctcctcgccgccaccgcccaggaccgccggccgggggacgagctcggagcagcagccaggccgagacgcatccagagctttc

SEQ ID NO: 724041 - DNA, 50 bp, Homo sapiens
gtgtggttggaaacatggaggccaggcgctttgacttccgtccaaaacct

SEQ ID NO: 724042 - DNA, 89 bp, Homo sapiens
tctgcgcttccccatggggctggcctgcggcgcctgggcgctctgagtggctgtttggtggccattctccgtccctaggactgcccccc

SEQ ID NO: 724043 - DNA, 83 bp, Homo sapiens
gccatgatgccccacttggtgaatggagatgcagctcagcagccgctacatctgttacttttgttggtgttatgggaatgaga

SEQ ID NO: 724044 - DNA, 100 bp, Homo sapiens
gaaggtcatttaaccaacctcagctttacaaaccctgaatttataactgagttatacattggctcttcaaagacgttcacctcatcagagaaatccctga

SEQ ID NO: 724045 - DNA, 83 bp, Homo sapiens
cggaaacccgctcgcctgctgcagtacggagcctcaggcggacagatggactgtaaggttggagtgcagtggcgcaatcttgg

SEQ ID NO: 724046 - DNA, 97 bp, Homo sapiens
agtgcatcttgtactgcttctataagaacgtggtcctgtatattattgagtttcctttacagaaaactgcgtggtgggaatccaggccaatacagaa

SEQ ID NO: 724047 - DNA, 83 bp, Homo sapiens
cttggactgagtcctgcaggacacaggaatgtctgatcacagatacggggatggtggctctactttccagagcacaacaggac

SEQ ID NO: 724048 - DNA, 100 bp, Homo sapiens
cagaaactgaaggggtgaaagaaaacccaaggttttcctttggaatatggataaatacaccatgatacggaaactagaaggacatcaccatgatgtggta

SEQ ID NO: 724049 - DNA, 74 bp, Homo sapiens
cagcggtctgcgcctggcagcagatggaacagattaaacgtgcaaaccgcctttatactaatgactccatcttc

SEQ ID NO: 724050 - DNA, 74 bp, Homo sapiens
tttgataacactggagatcagcaccaaatcccacagaggcatctgagaactattatggagctgctaagatgata

SEQ ID NO: 724051 - DNA, 99 bp, Homo sapiens
acgggatattctcttctgtgctgtcaaggagttgtctgctggttctcagcttgaagaagattctgcagtccttattgatcctttttcttggcgttacca

SEQ ID NO: 724052 - DNA, 74 bp, Homo sapiens
caggggacctccctcacggggaggacacatggccctgctgttcgtggcatttgccctgtgtatgttttgcctgt

SEQ ID NO: 724053 - DNA, 100 bp, Homo sapiens
caaaaaatgcagaaaagctcaaggtgaagattgctgaccttggaaatgcttgttgggtggggtatagaacaggctatgcttacaggcatcctctcattcg

SEQ ID NO: 724054 - DNA, 83 bp, Homo sapiens
catgcattgccattatctgtgaactaggaattcgaatttagagtttaatttctcagagcattctctccaggaagaatttttac

SEQ ID NO: 724055 - DNA, 82 bp, Homo sapiens
tagcaagtcatttgcggatattaacctctacagctctggactgaagccaaggtctaatgtcatcagttatgtcactgtcaat

SEQ ID NO: 724056 - DNA, 80 bp, Homo sapiens
tcgaggtggagcgcgacaacctggccgaggacatcatgcgcctccgggagaagacgtcttcctcatctgcttctccctcg

SEQ ID NO: 724057 - DNA, 75 bp, Homo sapiens
aaatcgtgcacatccaggctggtcagtgtggcaaccagatcggtgccaagaaaataaacagagttgtctttgttg

SEQ ID NO: 724058 - DNA, 49 bp, Homo sapiens
gcagccaccccatctgggaaggatgtggtacgaagcagcagagttaata

SEQ ID NO: 724059 - DNA, 90 bp, Homo sapiens
ataaaccaaagacagcatctgagcacagaaagataaaatttgatgctgggactctccttcttagtacacaccgactgatttggagagatc

SEQ ID NO: 724060 - DNA, 117 bp, Homo sapiens
gatgtgttgagtcaagatgaactgcgcaaaaagctataccagacgtttaaggatcggggtatactggatacactcaagcttgaaaactatttttctagtctgaaaaacccaaaactc

SEQ ID NO: 724061 - DNA, 74 bp, Homo sapiens
gcttcgcaaggctactgaagcactgaagattgctcatttagaaagtggatgtgtgggataacatgtccaatgtg

SEQ ID NO: 724062 - DNA, 90 bp, Homo sapiens
gtttgggatcccgctgtggtacttctcgcagtccccgcgcgtggtcatccagatgagcaaggtgtggaacgacctgaggcccaagctcag

SEQ ID NO: 724063 - DNA, 75 bp, Homo sapiens
ttgggccaggccagtcatgctagaacgatgaagcctgctgggagcgtgaatgacatggccctggatgccttcgac

SEQ ID NO: 724064 - DNA, 75 bp, Homo sapiens
actttcgccagcccgtgccgcgagcgcggcctgcaggagggcgtctctggccgagcctctttttgtggaaaacga

SEQ ID NO: 724065 - DNA, 87 bp, Homo sapiens
aaatttgaacaactttccgaatctgcaaaagaagagtcagcaagccgcttacagatgattctgaatgagattcagcctcgagatact

SEQ ID NO: 724066 - DNA, 100 bp, Homo sapiens
cagcaacccatacctgatccggagaatcgaggagctcaacaaggccatcgaggagggcacgctggaggagatcgaagaggaggtccggcagaagaaatca

SEQ ID NO: 724067 - DNA, 99 bp, Homo sapiens
ccaccgtcatcgacaatttctacatctgcccgaccaacaagaggaagcaatttttccagctagtcaaattacgaaagcttggacttagtgataatgaaa

SEQ ID NO: 724068 - DNA, 98 bp, Homo sapiens
ctcaacttatatgtatattgcagcaatgctcctggatgtaatgccaaggttattctgggccggtaccaggaccgcctggcccggtgcaccatgcattg

SEQ ID NO: 724069 - DNA, 75 bp, Homo sapiens
ctggtatctttcagagtgtaaagtaatcttggaatataaagatagagccttactgggcccgtgcagattttccac

SEQ ID NO: 724070 - DNA, 90 bp, Homo sapiens
gcatggcggagaaggatgacaccggagtttgacgaagaggtggtttttgagagttttgccgaattgacaagcccctgtgtcacagtgagg

SEQ ID NO: 724071 - DNA, 50 bp, Homo sapiens
ctctgttccaaatgctttgctgttcccatggagaatgttgcaacaattgc

SEQ ID NO: 724072 - DNA, 131 bp, Homo sapiens
gaacagcggtcgcgccggcaagagcagcgggagcggcgcggggaagggggcggtgtccgcagagcagctggtcccagattcgctgctggagtgctggatggagcctttctctgccctctgtgacatttcca

SEQ ID NO: 724073 - DNA, 100 bp, Homo sapiens
atcaagtggggcgatgctggcgctgagtacgtcgtggagtccactggcgtcttcaccaccatggagaaggctgctggcaaaggggacgtcccaacgaaga

SEQ ID NO: 724074 - DNA, 100 bp, Homo sapiens
atgaggtgggcgcaccgggcatagtggttggagtttctgtagatggaaaagaagtctggtcagaaggaatactcccccagttgcaagaggcgcaggaccg

SEQ ID NO: 724075 - DNA, 100 bp, Homo sapiens
gcttatattgggaatatcctctcatgtgctcccggttactatggaaaccccttactcattggaagcacctgtaagaaatgtgactgcagtggaaattcag

SEQ ID NO: 724076 - DNA, 82 bp, Homo sapiens
atgtattcacttcctaatgcacccactctggcagacctggaggacgatacacatgaaggtttaccgacaagactgtgaaact

SEQ ID NO: 724077 - DNA, 82 bp, Homo sapiens
gaaggaccagctcatcaccaagtgcaatgtttaattggttggggtcagataagaagaggagtgacaatcaagccaacagtag

SEQ ID NO: 724078 - DNA, 76 bp, Homo sapiens
aagtcccagcttctgaagtttgtggagaagtgttctcccattgggaacccccagtcggatcttcaggcccaggata

SEQ ID NO: 724079 - DNA, 100 bp, Homo sapiens
ccagttattccctctttcagcactgctctttatgggaaacttctgaaactccccacatgctgaacccttaggagaaatcttgagagtggacagcaattgt

SEQ ID NO: 724080 - DNA, 100 bp, Homo sapiens
ggaatgggagctgccctgctgtcagaccctgacaagattgagaagttctttggggtgactttcaagatggactctactctaacagcaagtgaaatccggc

SEQ ID NO: 724081 - DNA, 100 bp, Homo sapiens
gtatggctctgccgtgccacctgctgcacccacgaatctgcccacccctcctgtaacccagcctgtttcacttcttggaaagaccacagcaagattcttt

SEQ ID NO: 724082 - DNA, 114 bp, Homo sapiens
tttcttggcccttgttcccccaaatgtctgactctgactctcggactgagaaacgcaaggaagcggggagaggtggtgagagatgacccctgttgaggatttcattggtgtctg

SEQ ID NO: 724083 - DNA, 100 bp, Homo sapiens
cctctccaagatgcagttttttgatgctgaggagctcctggtcgatgaagaggatgatgtttttggtgaagattactcttgtctctgctgctcctgggaa

SEQ ID NO: 724084 - DNA, 100 bp, Homo sapiens
cccctgacccggccccggacggagcgccggccgcaccaccgccctctggccgttgcctcaccggggcggcaaggagtacctgatgcgggcccacttcggc

SEQ ID NO: 724085 - DNA, 51 bp, Homo sapiens
cacttgaaaatatcttttggccagacagatccagttgagtatgtggaaaac

SEQ ID NO: 724086 - DNA, 102 bp, Homo sapiens
ggctgtggaggccggcgcaacacgcgccaaggaccacgggctggagcccatggaccaagcttctctcaaaaacagcgatgttcttgttctgacagggcttac

SEQ ID NO: 724087 - DNA, 90 bp, Homo sapiens
gagacggcccggctgcagcgagcgctggacggagaggaaagcgattgtgattgctagcattatgtgcagttacaataaaaatgactggac

SEQ ID NO: 724088 - DNA, 90 bp, Homo sapiens
cgaaaaaataagaaggaacccaaagaaccatctcccaaacaggatggactatcggacaaaacctttctgctgcagcgcttgtccattttc

SEQ ID NO: 724089 - DNA, 80 bp, Homo sapiens
gtatactctcgttctgcgacttataaaggaccagacaaatcaaattagtggttttggctcatccaaaatacttgagttgt

SEQ ID NO: 724090 - DNA, 110 bp, Homo sapiens
tcatggttctgcctgcacattgactcacctgtcttccgttgattgaattccttcaatctttgtaaaattctctgtggagctgtgaaagttgtgtagatttactgtttgtg

SEQ ID NO: 724091 - DNA, 83 bp, Homo sapiens
gaagtgtcaacaagtgcaacagatgaacttctatcacagtttaagactttatacacacatattgtgactgatatcaagaatat

SEQ ID NO: 724092 - DNA, 101 bp, Homo sapiens
caaaggaaaatcctggcagaggacaaggtgtccgcaatgttgccagtgtctgtctgcagattggctacccaactgttgcatcagtaccccattctatcatc

SEQ ID NO: 724093 - DNA, 100 bp, Homo sapiens
tcccccagcaccgaagactgcgatgttgtgtgacttcattgagacacattacctgaatgagcaggtgaaagccatcaaagaattgggtgaccacgtgacc

SEQ ID NO: 724094 - DNA, 82 bp, Homo sapiens
agcttcgacttagccctgctccaggaatgggacctcgagtcactgtggacatggatttgattgacatactttggaggcaaga

SEQ ID NO: 724095 - DNA, 100 bp, Homo sapiens
gtggccacacgttggtacagggctccagaaattatgttgaattccaaggatgttaaagtctttagtgaagatgggacaagcaaagtggtggagattctag

SEQ ID NO: 724096 - DNA, 83 bp, Homo sapiens
gaacgtggagatctggaagatcaagaagctcattaagagcttggaggcggcccgcggcaaaagactgttgaagtagagagcat

SEQ ID NO: 724097 - DNA, 82 bp, Homo sapiens
cctggttccagctgcagcacgtggacgctgactcggaagtgcagcaggagcattggtttgaaaaggccctacgagacaagaa

SEQ ID NO: 724098 - DNA, 100 bp, Homo sapiens
caagattgaccacattgatcacagtgcttttgaagatgatgatatcacgcacgttgaaggaagtgtagatcctattcgagatatagaaataatacatgaa

SEQ ID NO: 724099 - DNA, 90 bp, Homo sapiens
gtgaaattgtttcgaaatgaccagaattcttcaggagaacctgaatactcccagtttgtgaagtgtggatatgcaggctctaactttcca

SEQ ID NO: 724100 - DNA, 95 bp, Homo sapiens
gctttacgatgtcacttgggaagattttgtggaagtataatactttgtcattatgagatgtcgtctctcggtgcctcctttgtgcaaattaaatt

SEQ ID NO: 724101 - DNA, 82 bp, Homo sapiens
ttattcatcagtttgttgtgcttgtcaagatcaggtctcataacaacaaactgcagtctacagcttcttaaagttcagcgtg

SEQ ID NO: 724102 - DNA, 98 bp, Homo sapiens
gccgtacgtggccctcgatgtgctctgcgtgttgctgggtgaggccgcaggcggtgctctgggtccgggagcgctgtccccagcatgaacgcggccgg

SEQ ID NO: 724103 - DNA, 100 bp, Homo sapiens
ggttacatacagcttacatcttgcatcctcaagcgatattgctgtgggagctccgtttgaaggcttgggcaaagtgtacatctatcacagtagctctaag

SEQ ID NO: 724104 - DNA, 98 bp, Homo sapiens
ctcccgcccgcaactccgccgcccaccatggcttccgaggagctgtacgaggaatgaggggagaatcatacttcatcggaatgaggagcccagggcag

SEQ ID NO: 724105 - DNA, 74 bp, Homo sapiens
acccagcagtgccaacacggaggataaaatggaggtggacctgagtgaacgttctccccatgacaccacctgaa

SEQ ID NO: 724106 - DNA, 99 bp, Homo sapiens
cattgtttaccttggaagaactccgtgcccagatgctcataaggattgtcctctttctacaaaaggtggaaccgtcccaaaatgtcccttgctcagaag

SEQ ID NO: 724107 - DNA, 83 bp, Homo sapiens
ctggagaaggagaagtttccgcaggactacttccccgagtgcctccggagccagcgtggtggccatagacaacaagatcgaac

SEQ ID NO: 724108 - DNA, 80 bp, Homo sapiens
ggcgccatattgcggccctcagcggccgcgaccgagtcatggctgagacctacggggttgtgtccactgtggtccccgac

SEQ ID NO: 724109 - DNA, 50 bp, Homo sapiens
ttgcaattcatcactttgaaaagatagttatgaccagagtgcattacagg

SEQ ID NO: 724110 - DNA, 75 bp, Homo sapiens
aaaacctccactctgagcgttagcagctttttcaagcagtcctcgcagtccgcctgagagagtagagaagacccc

SEQ ID NO: 724111 - DNA, 102 bp, Homo sapiens
gcaaatggagaatggcatgctggtgacggacagtgcagggaagcaactgcagagatgaccacctaagaaaggaggaacagaaaagtactaacattgaagatc

SEQ ID NO: 724112 - DNA, 75 bp, Homo sapiens
gacagatctgagagatactgagttactaaaccaaggagatttaactgaaagacggacatgagcgtgggtgctgac

SEQ ID NO: 724113 - DNA, 75 bp, Homo sapiens
caccggaatggagaaggaagaggagtcgaaatcatgagtggaggatctcaagtccacattttttggggtgctcca

SEQ ID NO: 724114 - DNA, 100 bp, Homo sapiens
ttgaccccaaagttgcatttcctcgtcgagcgcaacccaaggtgatagctgtggtcatggacatgttcaccgacgtggacatcttcaaggacctgctgga

SEQ ID NO: 724115 - DNA, 83 bp, Homo sapiens
tggaggcgaaagccaacggcgaggactgcctcaaccaggtgtcgtgaaaactacccctaaaagccaaaatgggaaaggaaaag

SEQ ID NO: 724116 - DNA, 100 bp, Homo sapiens
gaggaggatgagaaaggcaacagcggaaggtggtaatcactcaaggaaaaggaattatcagagtaacaatagttcctgttactgacttgatatggtctct

SEQ ID NO: 724117 - DNA, 83 bp, Homo sapiens
cactgtttttcctgaagttggagctagtgtttggcccaaaaaagaatggaggatctttggttccataccaatgcaggcatgtc

SEQ ID NO: 724118 - DNA, 87 bp, Homo sapiens
gacggagctaagagatatctgcaatgatgtactgaataattctgtagctcgtgcagtaatgcagtcccaaaagccacccaaaaattg

SEQ ID NO: 724119 - DNA, 75 bp, Homo sapiens
gaagaatcgtttggtctcctgccgtgcccggctgctgatactttggctgtgaggcaaaaaaggagaatttatgat

SEQ ID NO: 724120 - DNA, 76 bp, Homo sapiens
aaacacgttctgattaaccaaggcttcaaggttactgactttttatgatgtttggtggctatgagactatagaagc

SEQ ID NO: 724121 - DNA, 87 bp, Homo sapiens
aaactgttggtgggacgacttacttctatacagacacaactccagcacctttgactggaatggcgcatcccggggaaatggtggggg

SEQ ID NO: 724122 - DNA, 82 bp, Homo sapiens
gatgaactgataaaacccaccagtctagtgtaaacaggaacatcgataagtagtgtaaaaacttgcacaatgaaatccgaag

SEQ ID NO: 724123 - DNA, 97 bp, Homo sapiens
gatcagaggtagtcggacctttcccgctggcgcgcagcctcagctaggcgtactttattgtcggcttccaaagattactaacttttatctgtatcac

SEQ ID NO: 724124 - DNA, 100 bp, Homo sapiens
agcagaggaatctatacaaagaagtgatgctggagaattacaggaatcttctctcattggatggcccactgcgtgaccttggttcagctgtccatttcct

SEQ ID NO: 724125 - DNA, 75 bp, Homo sapiens
ggatgaggaggtgtggacgtcggacgtgcagtaccaagtgtcggactggacctacagagacatctgggattttct

SEQ ID NO: 724126 - DNA, 75 bp, Homo sapiens
ttataaaaatgccagcagttctgacattttgccttctgattctaactgcaaagttctgggaagtcatcagtgatg

SEQ ID NO: 724127 - DNA, 82 bp, Homo sapiens
cgggagccggaagcccagcgcggagccggccgcggccccctgttgtgttgctgcggagagggacatgagagatggctttaga

SEQ ID NO: 724128 - DNA, 92 bp, Homo sapiens
cctccatctgaagagggctccaggcatccggtcctggtccctgctggttgatgtgaagttcatttccaatccgccctccatggtggcagcgg

SEQ ID NO: 724129 - DNA, 50 bp, Homo sapiens
cctgtcgagagatagagaatgggcggggtctgcggaagagggagctgctg

SEQ ID NO: 724130 - DNA, 75 bp, Homo sapiens
ggagaccttcgagcaccccaacgtggtcaggtgttggagagcacaatggctgaacaagtccttcctcaggctttg

SEQ ID NO: 724131 - DNA, 83 bp, Homo sapiens
atcaattcctctttggtcctagagataagtacctggagtagaacagaaaaattattatgtctgtgttcccttgggactcattg

SEQ ID NO: 724132 - DNA, 75 bp, Homo sapiens
catgagcatcattcgcatgtggctagagccatccaaaactctgtttgtcaaaggcctgtctgaggataccactga

SEQ ID NO: 724133 - DNA, 98 bp, Homo sapiens
taatgagtcgtctttctagcacatcatcattagcacgtggatgcaactagagagacaaatcgcctaggaagactgatcaatcacagcaaatgtgggaa

SEQ ID NO: 724134 - DNA, 74 bp, Homo sapiens
ctgtcacaggccatgctctggcaaaaacagccagtcttggtgctctgtgttcacctggttcatctgaggagctg

SEQ ID NO: 724135 - DNA, 96 bp, Homo sapiens
ttgcatgttggctagactagaaatcaaacaacttggaaatcgatcacaaccaggcattaagttcacactttaccgatttgttacaactcaagcaag

SEQ ID NO: 724136 - DNA, 71 bp, Homo sapiens
cgtcagcctcccaagtagctgggaccacagacgtgtactcatatgatgaggatgacatggtcctggacccc

SEQ ID NO: 724137 - DNA, 50 bp, Homo sapiens
cctacgccaaaacaattcgtagcaggacacagcattgttggttttgccat

SEQ ID NO: 724138 - DNA, 97 bp, Homo sapiens
gtcaaaggatgctgagtccggagcgcctagccctaccggactacgagtatctggctgccaaggggccaagggatgagctggggccctccttcccaat

SEQ ID NO: 724139 - DNA, 100 bp, Homo sapiens
gccacggtggataacgacaagaaaaacaatcgcttcaatgatgggaaggtggatcccgccgggaggtactttgctgctctggttgaagaagtgtattttg

SEQ ID NO: 724140 - DNA, 111 bp, Homo sapiens
catctgatgtggtgcttttgaaccactggaaagtgaggaattttgaagtacaccgtggtgacattgtatcattggtgtagaaatgagtcctctggaaaatgcaattgaagt

SEQ ID NO: 724141 - DNA, 90 bp, Homo sapiens
gctgcagctcctcctgtgcggacggtggagcatggcttcccgcaccagcccagcgccctcggctacagcccgtccctgcgcatcctggcc

SEQ ID NO: 724142 - DNA, 82 bp, Homo sapiens
gataacacctctgtttttggcagggtgatgcagatagaatcatttgctgtttcaaatagagaactgtgcgatgatgagaaag

SEQ ID NO: 724143 - DNA, 102 bp, Homo sapiens
aggaacgggcccgtcaagctgcgcctgacagggatggatgaatgagatttacaactatgatccagaaacctaccatgcgactttgacacattcagtctttgt

SEQ ID NO: 724144 - DNA, 79 bp, Homo sapiens
attttcctgcatggattgggagatactggtacttccagcggcaatgtaagcaacagaaaggatgagacaaatgctcgag

SEQ ID NO: 724145 - DNA, 74 bp, Homo sapiens
cttctattagcattcctaaacctggacaagacggggaaattgtgaccatgcagcaggtggccaggacagtggct

SEQ ID NO: 724146 - DNA, 75 bp, Homo sapiens
cggagccaggctggtttcggaaatgcccttacagcagcagaaaagagtctcatcgtggaaggcaagagggaaaag

SEQ ID NO: 724147 - DNA, 82 bp, Homo sapiens
cccagcctcaggcctgcacggacggtgttggttgggatgtgaagttcatttccaatccgccctccatggtggcagcggggag

SEQ ID NO: 724148 - DNA, 75 bp, Homo sapiens
agaatgggaattcatattcctgaaaagtcgggtcacaaatcttcgaagagtgacatatgttgttttagatgaagc

SEQ ID NO: 724149 - DNA, 75 bp, Homo sapiens
accgacaagctcatctttgggactgggaccagattacaagtctttccaactgcaagctttcttcctggtggcaga

SEQ ID NO: 724150 - DNA, 81 bp, Homo sapiens
ctctggctcaaccagcaaaagtgaaccactccccaggtgctactgaaattgttcagttactgcgtgaaggtgaaagtcaac

SEQ ID NO: 724151 - DNA, 75 bp, Homo sapiens
ttcttgctgaacttcttcatgtatgtgacactgcttttgaaacatcaaagagtttaccacctaggatgacttcag

SEQ ID NO: 724152 - DNA, 75 bp, Homo sapiens
aaaaattcttcatctggctcagagtcaagagctcttcagtatccccatcagccagtttccgaggtgctgagaagc

SEQ ID NO: 724153 - DNA, 75 bp, Homo sapiens
gatcaagaataaatttctagctcgaaggtttaaggactttgtgttttatgccccacgtctgagaatcaacaagcg

SEQ ID NO: 724154 - DNA, 50 bp, Homo sapiens
catctccagggctggatgccatggatcaagtcttccataccagggaccag

SEQ ID NO: 724155 - DNA, 50 bp, Homo sapiens
gctgtttaaaaagtatccctgtggttgcaacaaggacagtgtcagagcag

SEQ ID NO: 724156 - DNA, 50 bp, Homo sapiens
gaaatggcacaagcgcagtggaaacttacagcctatttagatcttaacct

SEQ ID NO: 724157 - DNA, 100 bp, Homo sapiens
ccggcccgcggcgcgcaccgttggcgctggacgcttcctccttggaagcgcctctccctcagtcctgacacagctctccctgaggagcagccacattcca

SEQ ID NO: 724158 - DNA, 50 bp, Homo sapiens
tcccctttccagagagccagaaagaattcaaaaggtgatgacctatcaac

SEQ ID NO: 724159 - DNA, 75 bp, Homo sapiens
ggaggggcgaaggcgggcggcagaggcgatcaggccttccttcggtggctgccatctctgagcccagattgcatc

SEQ ID NO: 724160 - DNA, 100 bp, Homo sapiens
agccaggcccggttcgcttcccggacaggaggcaagctcattatcaaattatagtgatttgaagaaagagtctgctgtgaacctaaatgctcctagaacc

SEQ ID NO: 724161 - DNA, 100 bp, Homo sapiens
gcggtggtgaagatggattactgaaagttttgaaattagagacgcagacaggctactgttgctgcatttgctgccagtgaaggacattctcatcctcgag

SEQ ID NO: 724162 - DNA, 107 bp, Homo sapiens
aggagtaggtgcgggtgaagatggcggcagccgaggccgcgaactgcatcatggaggtgagaagccctaccactgcaactgggacggctgcggctggaagtttgcgc

SEQ ID NO: 724163 - DNA, 75 bp, Homo sapiens
gccatgtcgggttattcgagtgaccgagaccgcggccgggaccgagggatattagaaatggctactccccagtca

SEQ ID NO: 724164 - DNA, 100 bp, Homo sapiens
gagggatccttcacccgtgtctgcttttcgctgtggcctgcagtttttaggcaacattgcctcacggaatgaagattcccagtctattgtttgggtgcat

SEQ ID NO: 724165 - DNA, 51 bp, Homo sapiens
actgcgtcaggcatctcaatcatggaatcaagtactggaaatgtttgatca

SEQ ID NO: 724166 - DNA, 90 bp, Homo sapiens
cgccggggaggcagcgcgggatcccagcctcaggcgtgcgcggacggtgtgcggcagcagctgaggcgactcaggagacagtggagtccc

SEQ ID NO: 724167 - DNA, 100 bp, Homo sapiens
ccaaggacacctacagccccgacgaacatttctgggtgacactcaacaggattcccggtgtgatgaatgcagactctgctaccattttggctgtttggat

SEQ ID NO: 724168 - DNA, 82 bp, Homo sapiens
ggcctgcacgatgcacacgccggacttcgcaggcccagacgacgcgcgcgcattccagggtctccctccactgctgtagtaa

SEQ ID NO: 724169 - DNA, 75 bp, Homo sapiens
aagtacttcgacgaacactacgagtaccggactggagactgatgcatgagggggctacggaggcgcaggagcggt

SEQ ID NO: 724170 - DNA, 73 bp, Homo sapiens
ggcgggtgctggccgggcagaccctggacatcaactagtcaggcagtcttccgtctccagtctggcatctgcc

SEQ ID NO: 724171 - DNA, 90 bp, Homo sapiens
cccaccgcaaggactggagaagggttgttattgatgccttcagattgatcaatgctaatatgatggtcttaggacatgaaccaagacaaa

SEQ ID NO: 724172 - DNA, 76 bp, Homo sapiens
ctgcccggctgccttccacctccagtgctggttaaatggaagctgatcggcgttcacatggaatcctcctcacgta

SEQ ID NO: 724173 - DNA, 100 bp, Homo sapiens
ctttgtcaccagaatgaatgaagtgcttcagatttaaatagctcctggatttggatttggaattgcaatatctggtggacgagataatcctcattttcag

SEQ ID NO: 724174 - DNA, 122 bp, Homo sapiens
ccgcgccccctctcgctctgcctctccctctgcctctgcctctgcctggccgcggctctgggaagtgcgcagtccggcagcagtgaggatgccagagttcatgggtttctagaagacaagtt

SEQ ID NO: 724175 - DNA, 90 bp, Homo sapiens
atagaacaagacgatgacatgctggaggctgccaaggcatcactgggcatctacttaacactgaccagaatcctgccgcctttgacttcc

SEQ ID NO: 724176 - DNA, 100 bp, Homo sapiens
actgcatcctggtggcaaggacggagaggtcatttgcaagaaatttcaggttccgtgtcctgtggaagctgctttgataattaacgaaacaataaacacc

SEQ ID NO: 724177 - DNA, 104 bp, Homo sapiens
tttacatgttgaatccttgcagcactaaaatttgtattgaatttgaccgggattgtgactattttgcgattgctggagttacaaagaagattaaagtctatgaa

SEQ ID NO: 724178 - DNA, 97 bp, Homo sapiens
ttgataactgtgttctatgtggatccagcattacaactgataagattcatgatgttgctatcaaaagttgagaaattgtcagaagaaatcatggaga

SEQ ID NO: 724179 - DNA, 100 bp, Homo sapiens
gtggaagcatttggcggcataccaccctgcactgtgaggtcagaaaaagagtgcacgccagtatcacgtacagttctttggtgacgccccagaaagagct

SEQ ID NO: 724180 - DNA, 100 bp, Homo sapiens
agtaagacttcagacaacattgagacaaggtgtccgtggtcgtcagtttaacagacagagaggtgtgtgatggatgatgacaatgaagtaagggaccgag

SEQ ID NO: 724181 - DNA, 75 bp, Homo sapiens
catgcctcaatactcatcatgttgacagatggcgatcccacagagggaccatcgacggtgttacctaccctggga

SEQ ID NO: 724182 - DNA, 89 bp, Homo sapiens
tggagccctagggtgaagtagatcgtggtgaaaagtgaagctctgggggaagaccgggtcgccactgggacactgtgaaccaggagtga

SEQ ID NO: 724183 - DNA, 82 bp, Homo sapiens
tttcacaataagagcagaggatggaacacttcagtgcattcaaggcaacagctgaagctaataatcttgctgcagtagcagg

SEQ ID NO: 724184 - DNA, 74 bp, Homo sapiens
ttctcctggtagacctcggtccaaacagatagtgtttttagaagaagcatctcaacaggaaaaactggccaaag

SEQ ID NO: 724185 - DNA, 73 bp, Homo sapiens
ctttccaacacagatgtccaagctgccaaagaaggatatgagaatttctttgataagctccaacaacatagca

SEQ ID NO: 724186 - DNA, 75 bp, Homo sapiens
gctgacacctaatattaatcatcgggatgtggagacgctggtagcggggccaggaaggctccggacggagcaggt

SEQ ID NO: 724187 - DNA, 142 bp, Homo sapiens
ttaatcctactcagaagaacttgtacagagatgtgatgttggagaactatagcaatctggttttcttggctcatgtgctcctcggtgcagaaggccttgtttgaggaggaggaccacgtcaagaaactgcagcagaaagtgg

SEQ ID NO: 724188 - DNA, 75 bp, Homo sapiens
cagctccacgggtttccacattcaggagaatgaagaaagccattacgaggtgaccaggcattgatgcacccccag

SEQ ID NO: 724189 - DNA, 74 bp, Homo sapiens
ttccgcagacagaagtggggagaagcggaggttaacacagaaatctgcctcctgggccatgccgcttctaaggc

SEQ ID NO: 724190 - DNA, 101 bp, Homo sapiens
gatcgggatttacgtggagatcaagcgcagcgatgtgaactttgaggcgctgatcatcaccatgtcggtagtcgggggaaccctcctcctgggcattgcca

SEQ ID NO: 724191 - DNA, 74 bp, Homo sapiens
gcttttacagtccaacccggtcctggaagggtctcactctctgacctcagctggagtacagtagccagatcaca

SEQ ID NO: 724192 - DNA, 106 bp, Homo sapiens
cggacggcgtggaccacatagacatttacgcggatgtcggcgaagagttcaaccaggttttaaaatcaaagatgggaaaatcggagaaaattgcccttccccatgg

SEQ ID NO: 724193 - DNA, 89 bp, Homo sapiens
gcccaacaggaaaaggaagcttaatatggattccaaagagcgtttggatcaggacggacgcttggatggagctatgacattgaagagag

SEQ ID NO: 724194 - DNA, 51 bp, Homo sapiens
cctgctttgattcattgaaagcacagtaaccttggtgcacgaccgaaaggg

SEQ ID NO: 724195 - DNA, 75 bp, Homo sapiens
cctgggttctgcccgcacggacccccatgtggagcgaatcaaggagcgtgtggaggagaaagagggaatcccccc

SEQ ID NO: 724196 - DNA, 100 bp, Homo sapiens
gggagacctcggtgggcagaaaggaaccgggttgtcttgggccgggcagggcggctgcactgggtgttcaacagccatcactccttggagcatctcctac

SEQ ID NO: 724197 - DNA, 75 bp, Homo sapiens
tttcaagaagaggaatagggtgaatgaatctcatcagaaaagcagaatagcctaacatggcagaccagagacagc

SEQ ID NO: 724198 - DNA, 75 bp, Homo sapiens
ctacaacatccctgccttcttcctttgcaaaactgcagttttgacagctttgatacaaccaagtcggatgggcag

SEQ ID NO: 724199 - DNA, 83 bp, Homo sapiens
gcaaaaaaggaggccaaagactttggggatatgagactttctactcggaatatcctgagtgttgcgtggatgtaaaacccatt

SEQ ID NO: 724200 - DNA, 73 bp, Homo sapiens
tggagaactacagaaacctggtctccctagatgacctgggccccttctcagagcttcagaaccggggttcccg

SEQ ID NO: 724201 - DNA, 100 bp, Homo sapiens
gcccagagctggggcccccacggctgcggcaggtgcggctgcaggaaggaggaatcttcgagtatgcggacggccccaacgcccaggtcatgaatgccga

SEQ ID NO: 724202 - DNA, 75 bp, Homo sapiens
ggcggcggcgcttgggctctagagtaatgccttctagctttttcctgctgttgcggtttttcttgagaattgatg

SEQ ID NO: 724203 - DNA, 52 bp, Homo sapiens
ctcacagagttagagagagggatggtgctgccactggtgacatgccaactta

SEQ ID NO: 724204 - DNA, 82 bp, Homo sapiens
tgcagacgaggtggatgaggccgagggcggcgacaagaaccgcgggctgacgcacgaggcacacaggaaggaggtggagcag

SEQ ID NO: 724205 - DNA, 75 bp, Homo sapiens
cagggtccctgaagagggaagacacgcggaaacaggtctgtttctgtcgactgtggaccacttatgtgcgatccg

SEQ ID NO: 724206 - DNA, 76 bp, Homo sapiens
aaaggatgtgcaaccctccaagtggaacaatggctgccatccggaagaaactggtgattgttggtgatggagcctg

SEQ ID NO: 724207 - DNA, 80 bp, Homo sapiens
ggacatctacgtgggctccattgagacagaccggggggtgcgagagcaggttcaatgaaagatcacccacagcagcagcc

SEQ ID NO: 724208 - DNA, 81 bp, Homo sapiens
aagaccttcaagcagcgccgcaccttcggttgtgaccgagattcccgacgagagagactgaggggaagagaggaaggaggg

SEQ ID NO: 724209 - DNA, 82 bp, Homo sapiens
ccactggctgctggagcttgtcaccaccaggagtgtggccatctggggccgtgtggtatttgccactcaggagacatgtccc

SEQ ID NO: 724210 - DNA, 100 bp, Homo sapiens
gcaaaaaacaaaaatgaagcttggtgtacaggtggtcattacagaccctgaaaaactggaccaaattagacagaggaacagcatatgccatatatgagct

SEQ ID NO: 724211 - DNA, 83 bp, Homo sapiens
ggccggagccgtgtggaccaggaggagcgctagtgttgcggagataggaacatgggagagaaacaatctgggtaacatgaaag

SEQ ID NO: 724212 - DNA, 83 bp, Homo sapiens
gcggccctcaggagcaaggcgacaatgcagatcttcgtgaagactctgactggtaagaccatcaccctcgaggttgagcccag

SEQ ID NO: 724213 - DNA, 96 bp, Homo sapiens
tttgtagcctattggaggaaaacacaccaaggctcctaactgggcaactcaagattctggcttctactgaagaaccataaagaaaagatgaaaaaa

SEQ ID NO: 724214 - DNA, 83 bp, Homo sapiens
aggagagtaaaccaagaagaaatccacagatttagttctgtttttcgttggaatatacgttgcacatttatggcgattctgag

SEQ ID NO: 724215 - DNA, 88 bp, Homo sapiens
ataccaatgaacctctattcaaaactggttagtactgcagaaaaaccacgacttaaagaaggccttatacatgaacaagacacagttg

SEQ ID NO: 724216 - DNA, 82 bp, Homo sapiens
ggtgcagaaataccagtccccagtgagggtgtacaaatacccctttgaattaattatggctattatgatgcatcattatcac

SEQ ID NO: 724217 - DNA, 88 bp, Homo sapiens
aacagacttcggagtacctgcgctatgaagacacgcttcttctggaagaccagccaacagacaatgcagatcttcgtgaagactctga

SEQ ID NO: 724218 - DNA, 75 bp, Homo sapiens
ccagcaatgcctccatgaacaatctcacccaattactctgctcagaccaagatcactccatggatgaaatgacag

SEQ ID NO: 724219 - DNA, 101 bp, Homo sapiens
ccaaggggattgcctggcaggacgtgaaggggaagaggcccaccctggagtaaccctcactggagaatccagagctctagaggacaaaatcccagtccttg

SEQ ID NO: 724220 - DNA, 100 bp, Homo sapiens
cgacagcacgacactgccttcattacttcagttgaaatcgtctccaggcgggtgccccggtgatgactggtgcgggagagagcaccaatcccgagaacag

SEQ ID NO: 724221 - DNA, 82 bp, Homo sapiens
tctcctccttcttcctcaactatctcgctgacacgcaggtctcggcgcggaagatggccggcggcgtggacggccccatcgg

SEQ ID NO: 724222 - DNA, 95 bp, Homo sapiens
agcagctctgtcagcatgaacaccttctccgacagcagcacacccattttaccaaatgttgcaagaactctggagttcttatggtagtaaaatgc

SEQ ID NO: 724223 - DNA, 115 bp, Homo sapiens
gccacatactatccgtttgttcaggaaccaccagtgacagagtagctacagcaagctgggtagcaggcagatccaaaggatatcatgaagtttccagggcctttggaaaaccaga

SEQ ID NO: 724224 - DNA, 98 bp, Homo sapiens
gtggagtgaaggtcgcaccgcggcggattcagtggtcctgagccttctgaagttaggcttctgcctggtggtggggatcctgacatcaaggatgggac

SEQ ID NO: 724225 - DNA, 85 bp, Homo sapiens
cgaatgggtgtataacaccttctgtatctatgcccagcctacagagtctgagaaggaaatttataatcaggtgaatgtagtatta

SEQ ID NO: 724226 - DNA, 82 bp, Homo sapiens
gggcaaagctgcttccctgttgctggagatcctgggcctcctgtgcaaaagcatgggcttccgagtggacctgccaatcaag

SEQ ID NO: 724227 - DNA, 80 bp, Homo sapiens
acagctgaaggctgcgagggactaagagcagaccttatgccagcctggaccatcttggaggcagtgtaggatcatggaag

SEQ ID NO: 724228 - DNA, 100 bp, Homo sapiens
aagagaagtttacaggccctctattgccaactgttaagattaggttattccagtccctgaagttctgtctgtgagaaaaagaagacaggagagtccagac

SEQ ID NO: 724229 - DNA, 100 bp, Homo sapiens
ctctgccttcctgttcacggtgaccttcgcttggtgtcctcctggcctcagcaacctgacaattctgtcgtgtcccggttgtgcattatgtgtgactctt

SEQ ID NO: 724230 - DNA, 100 bp, Homo sapiens
ctcatatcttcacttggcaaactcaacaaggttgctccttgagggcaggacagttcttatggctttatccgttgcgtaagcacagagaggtctgcgaggt

SEQ ID NO: 724231 - DNA, 98 bp, Homo sapiens
gaattgtcgtccctttcaacaagtccaggataatttcttgagaggagataactcccgtaaagttcagcaccagcagcagaggaaacccaggaaaaaaa

SEQ ID NO: 724232 - DNA, 75 bp, Homo sapiens
attttccttgatggtcaaaagattaaggttcatgcatgggagatctcagaccagttgttacagatccggcaggat

SEQ ID NO: 724233 - DNA, 76 bp, Homo sapiens
gccacctccccaggtgatgcctgaagctcaagggactgtgtccaccctcagtgaaagcccctcagggaaaaaacca

SEQ ID NO: 724234 - DNA, 74 bp, Homo sapiens
caggggaccaagctggagatcaaacttcccagtgacctgacagcagaggagcgtcaagaactggagaacatccg

SEQ ID NO: 724235 - DNA, 101 bp, Homo sapiens
ccgcagatcagtccaagttgacggacaggaggcgaaatgtgcaaatgtttatggtgccggtggtggtgtgcacattgagccccggtatagacagttccccc

SEQ ID NO: 724236 - DNA, 50 bp, Homo sapiens
atccggaagtgaaggctgatggttgctctaggtcgtaaccagcctttgaa

SEQ ID NO: 724237 - DNA, 100 bp, Homo sapiens
ctgctgcagctgctgcacagaaattaatgcgaacagacagacttgaggcaatgaatcgctccctggctaatgtgattcttggaggctatggcaccacttc

SEQ ID NO: 724238 - DNA, 78 bp, Homo sapiens
tgcgccatctgtcaggccgagttccgagagcctctgattctcctgtgccagaatgaaatgaatgatgtgcctttcttt

SEQ ID NO: 724239 - DNA, 98 bp, Homo sapiens
atcgactcctttgttactcactgtgttcgggatgaaaactttcggaagagaaagttgcctgtggtaagttcagttgttaaagtaaaaaaattcaatca

SEQ ID NO: 724240 - DNA, 98 bp, Homo sapiens
tcgcagtggtcgcttcttctccttggttcaagggcagcaggaaagacgagatcctgggcatcgccaacaaccgactgatccgcatcgacttggccgtg

SEQ ID NO: 724241 - DNA, 100 bp, Homo sapiens
atggaaacacatgaaagacttcctcaaggactacagtatgcacttaatgtccctggtgtttgccagcttcccagtaaaaatgatgaaaaagaatatccac

SEQ ID NO: 724242 - DNA, 100 bp, Homo sapiens
tgctgtggagacggtgacagattctagccgctactttgtaatccggatccaggatggtactggtgctggagaatctggtaaaagcaccattgtgaagcag

SEQ ID NO: 724243 - DNA, 100 bp, Homo sapiens
tcagcacgccaaagcccaagctcaagaatggaagttggatacactttgtgacttgtacgagacactgaccattacacaggctgttatttttctcaatacg

SEQ ID NO: 724244 - DNA, 75 bp, Homo sapiens
ctgtctgccgcgatggatgacagtaaggtcaaaatgcagatcttcgtgaaaacccttaccggcaagaccatcacc

SEQ ID NO: 724245 - DNA, 129 bp, Homo sapiens
gccgccatcaaccgccagatcaacctggagctctacgcctcctacgtttacctgtccatgggggccgaaggccagagaccaggatttggctacggaggcagagcgtccgactataaatcggctcacaag

SEQ ID NO: 724246 - DNA, 83 bp, Homo sapiens
atggacgagtaatcgcctgctttgattcattgaaagtgaagccatcagtgtctacagcttcagctattgcccgtgtgcagatg

SEQ ID NO: 724247 - DNA, 97 bp, Homo sapiens
atttctaaagcctcctaagaacccatctcctgtggtcctgggcctggatcctaagtcctgacctttcatgaggaatatattattcgagtgcaaagag

SEQ ID NO: 724248 - DNA, 100 bp, Homo sapiens
ccaggcgctctgaccactctccagcaccagcttccagttagtggatatagcacaccatccccagccaatcttcttcagcagtatcgttctgctgtgtgca

SEQ ID NO: 724249 - DNA, 50 bp, Homo sapiens
gaagaggcctgcagtgggagagcaggaatgttgtaccatctttgggtagg

SEQ ID NO: 724250 - DNA, 90 bp, Homo sapiens
tgagtgatattgaccatgatggaatgcttgacagagatgagtttgcagtttacataccgagcatcaaatattaaggcacccggagaacag

SEQ ID NO: 724251 - DNA, 101 bp, Homo sapiens
gaatgtatgaagaacagtcacaggacaggatacccagagttatattgacgaatgtcctgggaacggagttaggaagaaaatacataaggaccccacctgta

SEQ ID NO: 724252 - DNA, 100 bp, Homo sapiens
catcaccaacatgcacctcaggttgtttgagctggccaaggactacatgaatggaacaggtattgactttgccactcgtaaaatagccaagttgctgaag

SEQ ID NO: 724253 - DNA, 75 bp, Homo sapiens
cttaaataaggttcagactgcaaatgaagttaaggttaatgatgaaatggcaggtaattcacacttttggacaga

SEQ ID NO: 724254 - DNA, 75 bp, Homo sapiens
atcccaggttgccttggaaaatgccaacgccgtgtctgaagggccaagccacagacattgccatccaggcagagg

SEQ ID NO: 724255 - DNA, 90 bp, Homo sapiens
cagttatccaattgatgaactagtagatagagccaaacaatcttttcaaggtaaaatctactggtggagtcactccattattcttatctg

SEQ ID NO: 724256 - DNA, 75 bp, Homo sapiens
gttgaaggctgcagtgagccctgtttttgccaccacactccagcttgggctgagtatgcccatcgtggtttctcc

SEQ ID NO: 724257 - DNA, 74 bp, Homo sapiens
gctacacctatgtacctccttcatggacatgctgaaggacacagcattgttggttttgccatgtactattttac

SEQ ID NO: 724258 - DNA, 60 bp, Homo sapiens
cggtgagagacacagccacactcagcggccccaggaagggaaaaggccgaggcatcagcg

SEQ ID NO: 724259 - DNA, 98 bp, Homo sapiens
catcctggtctccattgcgggcaagaatgtcatgctggactgtggaatgcacatgggcttcaatgacgacgggcttggaagaattctgtggaagagtg

SEQ ID NO: 724260 - DNA, 74 bp, Homo sapiens
gattatcgaaccctcaccaactacaaggccttcagccagtttgtcaggtaaaattcccccagaaagtacactga

SEQ ID NO: 724261 - DNA, 114 bp, Homo sapiens
gagaaaccagcaaaccagaaggaacccaccacctgccacaccgtgaagctgcggggagccccgttcaatgtcacagaggctggagtgcaatggtgcaatctcggctcactgcaa

SEQ ID NO: 724262 - DNA, 50 bp, Homo sapiens
ggacgggtttagcggcagcctcttcgaatggaatgactcctctaatgcat

SEQ ID NO: 724263 - DNA, 80 bp, Homo sapiens
aatcagtgcagaccttaaaagatttcgcaaggaatatgtccaaccagtacaacttagaacatccatgatagcagtcttct

SEQ ID NO: 724264 - DNA, 98 bp, Homo sapiens
aagggagactacaaggacagcagcgactttggggcccgtcaccctcaggccactactacgtgcccctcctgagagcggaagagacttcttctccagtc

SEQ ID NO: 724265 - DNA, 75 bp, Homo sapiens
ctccaggcctgggaaagtgaaggagatttttcaagagcttgggatgttcttcttgaccatatacagtcagcagca

SEQ ID NO: 724266 - DNA, 99 bp, Homo sapiens
gatggaaactccctgtgtgacaccttccgagaccagtccacctacatcagaaaatgatgcatcctgttgccagcagtaatccagctttctgtgggcctg

SEQ ID NO: 724267 - DNA, 87 bp, Homo sapiens
actgcgattccaaggagggcaaagcgtcctgcgaagatgctcatgaagcagcaggaccggctggaggagcgagagcaggacattgag

SEQ ID NO: 724268 - DNA, 75 bp, Homo sapiens
gctgcgtcaccgccgcccccccagacaagatggacaccgcggaggaagggaaggtgaagaaggagctggaccctg

SEQ ID NO: 724269 - DNA, 83 bp, Homo sapiens
aacgagaaactggacaaccaacggctcaagaatttcaagaacaaaggccgcgacttggagaaaaagcttgtggtgaagggggg

SEQ ID NO: 724270 - DNA, 100 bp, Homo sapiens
tcaaaggaaggagtgggactctgggacattcgaaaacctcagagattggcggcagtaagcacacaatgaatgatcacctgcatgtcggcagccacgctca

SEQ ID NO: 724271 - DNA, 100 bp, Homo sapiens
gacaggagtggagtgatatcagacaccgagcttcagcaagctctctccaacggcaaaggcagctcgagcatctcatctgacgtgagttcaagtacagatc

SEQ ID NO: 724272 - DNA, 75 bp, Homo sapiens
gaagaaagtcagggggactgcaaaggccaatgttggtgctggcaaaaaggtttgactttacacataaaaaacaat

SEQ ID NO: 724273 - DNA, 99 bp, Homo sapiens
caatgtttgaacaaactcgaagaacagctgtggaaagaagttgcaaaacactgggacataccgagggattgcatatgttaaatggaaattttataaaga

SEQ ID NO: 724274 - DNA, 89 bp, Homo sapiens
ggcaagtcctccctcatcaactccctccggaggcagcacctcaggaaagccagtttcaagcgcccggtagtgatcctgggacccgtggc

SEQ ID NO: 724275 - DNA, 112 bp, Homo sapiens
attgctgtccactgcacagttcgaggggccaaggcagaagaaatcttggagaagggtctaaaggtggagccgccaccaaaatgcagattttcgtgaaaacccttacggggaa

SEQ ID NO: 724276 - DNA, 98 bp, Homo sapiens
ggtttggcactgctcctgctggccgcctggacggctcgggcgctggaggatgtgatggagctgcttgaagaagatctcacatgccctatttgttgtag

SEQ ID NO: 724277 - DNA, 75 bp, Homo sapiens
ctcccatgcatcggctaatagcccggagacaagcgctgtaacagaagacaagtacgaaatactgcaatctgtcga

SEQ ID NO: 724278 - DNA, 98 bp, Homo sapiens
cctccgccgccgcctgaggaggcgagctagccgggagttacaccgccaccgccagcattgcagtgtcgagatggctatgaaccctgtgtaaatgaagg

SEQ ID NO: 724279 - DNA, 75 bp, Homo sapiens
ctgattatggctcaggctaccccaatgggcctgcttccgcgaggccaacatcccaacccacttcgggagaagaac

SEQ ID NO: 724280 - DNA, 83 bp, Homo sapiens
tgcacagcttcacgcagctagaccccgacctgccgcgcccggagaactgcatgaacttgcccccagacaaggtccagctgctg

SEQ ID NO: 724281 - DNA, 100 bp, Homo sapiens
tcatcaaaaatagtgatagctttgataactgtcaaagctcgaaaaacagcagcagaggaaagaaaagaccagagctaagggaccttctgaatcaagcaag

SEQ ID NO: 724282 - DNA, 100 bp, Homo sapiens
tgaggagccgctgcccgcgcgcatctggctgcagctctgcggggcgcaggaggcggtgcacagcgccaaggactcacaccacccggcaagaactgctcac

SEQ ID NO: 724283 - DNA, 75 bp, Homo sapiens
atcacttcgaaaacttgctttcccacactaagggtcaacatatttcactggcacctattcacaagcttgaagaag

SEQ ID NO: 724284 - DNA, 90 bp, Homo sapiens
agctgcttccattggccagtatgaagtggtgaaggagtgtgtgcagcggtcttgggcgtctttggtactggcttttttaggggtctgcct

SEQ ID NO: 724285 - DNA, 75 bp, Homo sapiens
ggaccatgtgagtgggctccggagcctcagcgccgcgcagagtaaaaggccaagctatgatagcaactggtggag

SEQ ID NO: 724286 - DNA, 50 bp, Homo sapiens
cctaaacctggacaagacggggaaattggacccagtaccacaacagaaac

SEQ ID NO: 724287 - DNA, 100 bp, Homo sapiens
tgaagtcaagaaccttctggagaaaggcaagactgaacagcaggtaactagttctcccaactgtacagacatgagtaatgtttgtcaaccaacagagttc

SEQ ID NO: 724288 - DNA, 96 bp, Homo sapiens
gctcctcagagtgcactgagatcccaggaggatggccacatccccccgggctacatctcacagctgttcctgttccagctgctccgtggcctggcc

SEQ ID NO: 724289 - DNA, 83 bp, Homo sapiens
cggctcttgagtacttgcactcgcgggacgtggtataccgcgacatcaaggagtttaccagctacttccaaagacatgacgag

SEQ ID NO: 724290 - DNA, 98 bp, Homo sapiens
ctttccttggacatctccatcaggattcatgcttaacaagtctagcatcatcatcacttaaacaaattcttggagattctttttcaccaggatctgag

SEQ ID NO: 724291 - DNA, 101 bp, Homo sapiens
gtgcgagaggtggtgtgcatgacactcctggaaaacaggcctggttgcagtatgcctgaaatttgggatgtagaagatcctgccaatgctgggaaaactcc

SEQ ID NO: 724292 - DNA, 102 bp, Homo sapiens
gccgcgcgcccgcgccctccgcgcgacgccagggaaattcaactactgaggaggttacggcacaaaaatgtcatccagctggtggatgtgttatacaacgaa

SEQ ID NO: 724293 - DNA, 50 bp, Homo sapiens
gagagcctagatgagctcatacaggagaactacgatgacccgcacaaaac

SEQ ID NO: 724294 - DNA, 50 bp, Homo sapiens
ccccaagctgcatcgccgagtggggcagagcggcttgggtaaatccacct

SEQ ID NO: 724295 - DNA, 51 bp, Homo sapiens
caaccagcctttggtcatcaccaggcattaaagggcagtatttaaagtcag

SEQ ID NO: 724296 - DNA, 83 bp, Homo sapiens
tgtggcaaaattactgtatatgcacatgctgggctaccctgctcactttggacagatttccatggagaatgattatctgggac

SEQ ID NO: 724297 - DNA, 100 bp, Homo sapiens
gtactacgcccgctccgaggactacgtggagctggtgcagcggaagcgagtgtggagggaagctgtcacagcccgcaagaaactgaggcgccaaatgcgg

SEQ ID NO: 724298 - DNA, 51 bp, Homo sapiens
gtggctgcagagtcgagaagccaagaactccaagctggaggccgcggtggc

SEQ ID NO: 724299 - DNA, 100 bp, Homo sapiens
cagtttgaaatccttggcactacctatagtgagacttttggcaaagacatgcgcaaggtgagatcggactggaactgttcggctgcgaccagaaatttat

SEQ ID NO: 724300 - DNA, 100 bp, Homo sapiens
ggagctagaggctaccaggcaaaaccagagtactgttgctgtccacagccatgagccactcctcagaaacgtgcactgaggattttcatcatgtttgatg

SEQ ID NO: 724301 - DNA, 75 bp, Homo sapiens
gttcgaccacgccccggataagctcagcgtggtgaagaagcgtgtccggagcggtgactggaaggggtacacagg

SEQ ID NO: 724302 - DNA, 83 bp, Homo sapiens
ggccctgggggtcctcagcgtggtctgcctgctgcactgctttgggggatatgagactttctactcggaatatcctgagtgtt

SEQ ID NO: 724303 - DNA, 74 bp, Homo sapiens
tttattcagagccttttagtaaaaaatccagagcaggcattcaacaacatgttttgctgtaccttgcagtgttc

SEQ ID NO: 724304 - DNA, 100 bp, Homo sapiens
tctcaccagagtgtcagcaatgggaccttctcttcggatgaggagaccctggaagacaatctaaggaattttggagaaatccgatagagaggttgtaatg

SEQ ID NO: 724305 - DNA, 88 bp, Homo sapiens
cccgagcccaaaccccgccaccatcatagatatgaaactatccatgaagaacaatattatcaatacacagcagtcttttgtaaccatg

SEQ ID NO: 724306 - DNA, 82 bp, Homo sapiens
ttaatttttggaacaatttgatgagctaggaggtgagaagccctaccactgcaactgggacggctgcggctggaagtttgcg

SEQ ID NO: 724307 - DNA, 101 bp, Homo sapiens
caggtgtctgtcggtccaagctagaagaagaacatgtgatcatccaggccgagttctatctgaatcctgaccaatcaggcgagtttatgtttgactttgat

SEQ ID NO: 724308 - DNA, 98 bp, Homo sapiens
ggcggcggccgaacgatgtgcgagaactgcgcagacctggtggaggtgttaaatgaaaacatacttggcaagtgcaagacaaaatcgatgcaaacaat

SEQ ID NO: 724309 - DNA, 90 bp, Homo sapiens
gaaaagggcctgatgtctgctttgataacaatgtcttgattggttttcacagaattccatggactttaactgctgaaccaatgatgcact

SEQ ID NO: 724310 - DNA, 100 bp, Homo sapiens
aaaagatctggaacatcgaaaggaccaagtaacacagctttcacaagagatgtgtatatctcatgattgatatggagaaactagtcatgggccaaaggtc

SEQ ID NO: 724311 - DNA, 83 bp, Homo sapiens
tgcttttatattcatctcaaaaacaaaattctgaactcaggacttggcaatgagacggtttaagcggaagcatcttactgcca

SEQ ID NO: 724312 - DNA, 100 bp, Homo sapiens
ctgttgtagcacagatttatgtaatgtcaactttactgagaattttccacctcctgacacaacaccactcaaaccttattttggggagtaaagtcaattg

SEQ ID NO: 724313 - DNA, 97 bp, Homo sapiens
gggagcttccgggagggcggctcgcagctccaccgggggacggctacgtgcaggcggacgcccggggccccccggaccacgaggagcacctgtatgt

SEQ ID NO: 724314 - DNA, 90 bp, Homo sapiens
aaccaacgcctggctcggagcagcagcctctgagatatcagttttagagaatgtggcgtggagaaattctcaaggaaagagtaaaatgct

SEQ ID NO: 724315 - DNA, 82 bp, Homo sapiens
gttcttggtttcaggcccgcactcgacagccaccgccgcccccaacgtccatgcctgagaactgtggctgcaccatctgtct

SEQ ID NO: 724316 - DNA, 50 bp, Homo sapiens
ctccagggcagtttcttatacttgggccccagcgccttcacagaagccgt

SEQ ID NO: 724317 - DNA, 98 bp, Homo sapiens
atgcattgagcttgggtcaggacaattccatttggggaccagagatggacggtcactcagcctatggagactacacttgctgctttgaaggatgaagt

SEQ ID NO: 724318 - DNA, 75 bp, Homo sapiens
gggaagccatagctctgcatggaagggaggtgcagcagcatcctggcagtcagtggtgacatgcggagagcccac

SEQ ID NO: 724319 - DNA, 90 bp, Homo sapiens
gtcctgcctgtaggcctgaaggacttgccctaacagagcctcaacaactacctgggcaagtcattcatcaaagacgccttgaaatgtaag

SEQ ID NO: 724320 - DNA, 50 bp, Homo sapiens
caaacgagggccaagaggatcacagtctctggctgatgaacttgctcttg

SEQ ID NO: 724321 - DNA, 100 bp, Homo sapiens
cggccgagcgccggaaccggagcaggtacggacattgctgcaggagaagaggttgccatcaagcttgaatgtgtcaaaaccaaacaccctcagctccaca

SEQ ID NO: 724322 - DNA, 100 bp, Homo sapiens
aagggctcagaatagcaccattgctggcgttcgtggcattcagggatgtggctgtgtacttcacccaggaggagtggaggttgttgagccctgctcagag

SEQ ID NO: 724323 - DNA, 75 bp, Homo sapiens
aagctgtcctggctcagatggctcggtcatcacgggacctcagcaatggagaatatccccatcatcacaactgtc

SEQ ID NO: 724324 - DNA, 97 bp, Homo sapiens
taactatgctgactctggcgctggtcaagtcacaggacaccgaagaaaccatcacgtacacgaatatactgatgataatgctctgattcctaagaat

SEQ ID NO: 724325 - DNA, 75 bp, Homo sapiens
tgaaatagaattttctacagaagtcaaggcagtcaagctgcggcgagatagggggagcagtaccatcaggcttgg

SEQ ID NO: 724326 - DNA, 122 bp, Homo sapiens
gcatggcttggagcacttcctattccactggattgggaaagaccatggcaggcttattgtgtaacagaacctggagcaggctctgatgtagctggtataaagaccaaagcagaaaagaaagg

SEQ ID NO: 724327 - DNA, 100 bp, Homo sapiens
ggattgtactgtatggggactccaattgcttggatgacagtcaccgacagaaggattctgctgaagtgatccagtctcgagtgaacgaccaggagggccg

SEQ ID NO: 724328 - DNA, 89 bp, Homo sapiens
atggagtcgagtctagaattcacacagagccacctagacagcttatctcctgtgctgcacccttctgatttgatcctgactcgaggaac

SEQ ID NO: 724329 - DNA, 75 bp, Homo sapiens
acggagcagcgcgtcgtggggcgagcggcagcattactctactgactggcagagacaggagaggtagatgtccac

SEQ ID NO: 724330 - DNA, 90 bp, Homo sapiens
cctctcagcacctgggcggacggcactactgcagtcttcagttaagcaacaagtagaagctattgaaaaacagtacatttctgcaattga

SEQ ID NO: 724331 - DNA, 100 bp, Homo sapiens
caaagaagaagtatcagaaagcagggctgtattctgacgtttacaaaactacagaagtgtctctatgtattcccctgccagtggaactaccgtcccgatc

SEQ ID NO: 724332 - DNA, 75 bp, Homo sapiens
tgtacatcgtgcatggcgtccagaattatatccagatcgagagacagaagattctgaaagggttcaatgaaatga

SEQ ID NO: 724333 - DNA, 75 bp, Homo sapiens
ctctcaatctctgtctgaactggatcataaatgacagattcatgatgttgctatcaaaagttgagaaattgtcag

SEQ ID NO: 724334 - DNA, 100 bp, Homo sapiens
cttcttcatatgctcgagtctccagagtcactccgttctaaggatgacgatgtcgataccaagaagcagaagaccgacgaggatgactagacagcaaaaa

SEQ ID NO: 724335 - DNA, 83 bp, Homo sapiens
cagactcgggatctgaggatctgaggatctgaggtcacagatgctgtgtgctgtggacccacctggggttcatggagtgggcc

SEQ ID NO: 724336 - DNA, 100 bp, Homo sapiens
caacatttcctctcgggaagagatagatcatgcagagtattacctttacaagtcgttgaggacttccacatggagattggcacaggaccagactcaagac

SEQ ID NO: 724337 - DNA, 74 bp, Homo sapiens
gacctgagttctggtgcaggatttaatcaactgaggtacatgtcccttgctgtgtgtgaacttgaccagcccgg

SEQ ID NO: 724338 - DNA, 98 bp, Homo sapiens
cacaattgtctgtgacagtaacagtacttgggatcccccagttccaaagtgtcttaaaggaactaagcgtcttgtagaaggaactattaatccaggag

SEQ ID NO: 724339 - DNA, 100 bp, Homo sapiens
agaccgtgaccgagagcgtgaccgagagcgcgaatatcgtcatcgttagaaggactgggccaggcccctggccatctgtcgggcctcagtgtgccctgcc

SEQ ID NO: 724340 - DNA, 100 bp, Homo sapiens
ggaccgggctcgggggagcgtgagttgcagggtgcttcaaggatgaccgcatcgtcttctggacttggatgttctccacctacttcatggagaaatgggc

SEQ ID NO: 724341 - DNA, 100 bp, Homo sapiens
cagcccccgcctgagatggctggacacagcctagccagctcccacagaaactccagctaccggctctctgaccagttccacgacatcctcattcgaaagt

SEQ ID NO: 724342 - DNA, 100 bp, Homo sapiens
gctgccgctatggatgatcgagaggatctggtgtaccaggcgaagctggccgagcaggctgagcgatacgacggaggcaagtgaggcctatctggttggc

SEQ ID NO: 724343 - DNA, 133 bp, Homo sapiens
gagggtcaggagaaaagcggaggaagctgggtaggccctgaggggcctcggtaaggtgaccaccatgtcggtgaggttgcggttcctgtcccctggggacacaggggccgtgggggtcgtgggccggagcgcc

SEQ ID NO: 724344 - DNA, 100 bp, Homo sapiens
tttctgggctgccgggagctcgcggcgagcgccccagccaggcctgcgccggcatcctccgagcgggagatacagatgacccaccaagaattactcagaa

SEQ ID NO: 724345 - DNA, 90 bp, Homo sapiens
ccagcggctgcaggactgggcacagcatgagatccaaaggcagggcaaggaaactggccacaaaatgatctctgcctttcacaaagacca

SEQ ID NO: 724346 - DNA, 97 bp, Homo sapiens
atgaagacattctgtggcactccagaatatctggcaccagaggtgtgtggagaaatgcgctatcagctgaataaaaccaacatggagaaggatgagg

SEQ ID NO: 724347 - DNA, 100 bp, Homo sapiens
cgcgctccctccgccgccgccgccttgctgctgctcaaagctgctgccgccccttgggctaaaagggacatgagagatggctttagaagaaaaagtttct

SEQ ID NO: 724348 - DNA, 85 bp, Homo sapiens
cacagcgggcactgcctgtgcaaggcgggcgtgactgggcggcgctgtgaccgctgccagattcttggtgccaccattgagaact

SEQ ID NO: 724349 - DNA, 103 bp, Homo sapiens
tccggcgggaactcgactcttggcgccaccgcctcatgcactgtgtagatgccatggacaatattaccaggcagaaccaattctacgatacccaagtcatcaa

SEQ ID NO: 724350 - DNA, 74 bp, Homo sapiens
ggaaacgccgaggaacccggctgaggcggcaggaaaatcctgccttgcttcgttgggcctatgcaagaacaata

SEQ ID NO: 724351 - DNA, 75 bp, Homo sapiens
ccttcatttctctgaacatactgccttatgggacagatcaaatatggaatgtgcagatgtcccactattaactcc

SEQ ID NO: 724352 - DNA, 75 bp, Homo sapiens
gggaagaggaggcggaaaaggacgcaaagttctccggcgagagttcttcgtaagtacatcttaaagctgtcaaga

SEQ ID NO: 724353 - DNA, 100 bp, Homo sapiens
ctggactgctcccctgaccgcaacccctacccccgcccaccagtatggcccggcacgtgttcctaacggggcccccagaaatgcactcggtgatggaaag

SEQ ID NO: 724354 - DNA, 100 bp, Homo sapiens
cgtggatgtaatgttggagaactatagtaacttggtgtcactgggcagtttgaagagaacacatgaagaagaggatgattttggaaccatgcaagtggcg

SEQ ID NO: 724355 - DNA, 100 bp, Homo sapiens
gaagcggaggagcctggcggccaccccctcttcctcacttccctgtactctcatcgctctcggcctccgacacgcactattcctgatcagagaactccag

SEQ ID NO: 724356 - DNA, 49 bp, Homo sapiens
gaaagacatcacggtggaggacatattggctctaccagtgcacctggac

SEQ ID NO: 724357 - DNA, 100 bp, Homo sapiens
cggggcccccgtcgttgctgccgggattttggaggccggggccgcgctgagggcgcccagctggaccgtataatagacgctggccccaaaggaaactact

SEQ ID NO: 724358 - DNA, 96 bp, Homo sapiens
agtgcaaacgccggaagaagatgatctccacccagcagctgatgatcgaggccaaagccaactattaccaggaatactctgaagatagtaactccg

SEQ ID NO: 724359 - DNA, 75 bp, Homo sapiens
actcacaccgacagcatcaaaaaccgaaacttcattgccccttcaatgtgggaatccagccagaccctattcttg

SEQ ID NO: 724360 - DNA, 71 bp, Homo sapiens
cttcctatcacgggcactagtgtggctctcctgttccagcaattggtacaagccagctgccatgttgtgag

SEQ ID NO: 724361 - DNA, 100 bp, Homo sapiens
cagcggaggagccaccctcaacgccctgctggtggctgctgaacacctgagtgcccgggcaggcttcactccacaggtggaattaagaaatctggcaaaa

SEQ ID NO: 724362 - DNA, 98 bp, Homo sapiens
agcttcgttacctcccctgttagctgctgcagcaattgaggccctcaacatcatggaagagaatccagtaaaatgtttattggaggcttgagctggga

SEQ ID NO: 724363 - DNA, 96 bp, Homo sapiens
atccccaacgtggatgacaagaagacgtccaatctgagcgtgctgcggacggcgctgcggtacatccaggggaacgcccttttgcttgtgactggc

SEQ ID NO: 724364 - DNA, 82 bp, Homo sapiens
gaccctggactccaacaacaacacagtaattcgccaaaatgacgaacacaaagggaaagaggagaggcacccgatatatgtt

SEQ ID NO: 724365 - DNA, 75 bp, Homo sapiens
gctgcgagaccctagaggcctgcggcctgcgtgtggggctgccttccaggaggatgatgtcatcatgctcaatgg

SEQ ID NO: 724366 - DNA, 101 bp, Homo sapiens
atttgatgccacttttcatctgcgagggcgagagaaatttaatcatagatggtggggaggtcaaccgattgcagccttcttcgctgagtctctgcccagtg

SEQ ID NO: 724367 - DNA, 80 bp, Homo sapiens
ggccagtaccatcgacagagcataagtacctctggcttcccctctcttcaactacgtacacagactttactaaaagagta

SEQ ID NO: 724368 - DNA, 98 bp, Homo sapiens
ggccgccctccgagcatcgctcttcggcaacccgaagccacaggatggaggagggggatcccagcaaaggacatggatttgattgacatactttggag

SEQ ID NO: 724369 - DNA, 74 bp, Homo sapiens
atcgtcatgaccacccgagaggtggagaaaggccggggaagacaccctctctggacccccatcagaccaaagag

SEQ ID NO: 724370 - DNA, 82 bp, Homo sapiens
gtgggcggcagagagcggggcggcggcaggtctcggcgcggaagatggccggcggcgtggacggccccatcgggatcccgtt

SEQ ID NO: 724371 - DNA, 75 bp, Homo sapiens
caccctacatttagcgcatcatgtgatccggaatttctacagacagttcaaggaaattgctgcagttattgaaac

SEQ ID NO: 724372 - DNA, 100 bp, Homo sapiens
tcggccggaaccgccatcttccagggggaaatttgcagtggtgagaaaatgtataaagaaagattctgggaaagaatttgctgcaaagttcatgagaaaa

SEQ ID NO: 724373 - DNA, 100 bp, Homo sapiens
gttggcaagataaagaccaaatggatgacctgcgagctcgttgtccccccggcacgctccacagctggtgacccgacagttcctggctccttgttcagac

SEQ ID NO: 724374 - DNA, 96 bp, Homo sapiens
gaagattgcttctcttctctcctccaagacctgcgaccgcatcaagcagtccgccagcggaaccaagcggcgcgtgttcatcatcgagaccatggg

SEQ ID NO: 724375 - DNA, 109 bp, Homo sapiens
ctccgccgccgccgccttgctgctgctcaaagctgctgccgccccttgggctaaaagatgccatggacaatattaccaggcagaaccaattctacgatacccaagtcat

SEQ ID NO: 724376 - DNA, 101 bp, Homo sapiens
ccgtcgctgcagagaccccgctatggctgttctcctgcgctgcccaacagcatggtgtattttggaagctctcaggatgaggaggaagtcgaggaggaaga

SEQ ID NO: 724377 - DNA, 82 bp, Homo sapiens
atacaggccaaactacaattcccgagaggcatttccggagagttcttttgaagtcacttcagaaggatctacatgaggaaat

SEQ ID NO: 724378 - DNA, 97 bp, Homo sapiens
caatggggaggacaacttcgcccgggacttcatgacctaatctgggagcctgcaagtgacaacagcctttgcggtccttagacagcttggcctggag

SEQ ID NO: 724379 - DNA, 83 bp, Homo sapiens
tgcacctccgaagggcctacatgagtgtgtgggaggtgctgaaccttttctggccatgaaccattataaaatcccaacatata

SEQ ID NO: 724380 - DNA, 75 bp, Homo sapiens
gaagatcaaaaatacgcactaagtgtcatgatgaaggttactgatgccaaattttgcccaagaccttttaatgtc

SEQ ID NO: 724381 - DNA, 100 bp, Homo sapiens
gaaatggagatcttatacaaaaaggagaaggaagaagcagatcttcttttggagcagcagagactgctggtgctgccagaatactccatccatagcctct

SEQ ID NO: 724382 - DNA, 101 bp, Homo sapiens
gacctgctttgccctgggaaatagtaaccctgccaaatacatcagcttgtaggagacagagagagacaagagagacacctccaacttcgacaaagagttca

SEQ ID NO: 724383 - DNA, 100 bp, Homo sapiens
gatccagaacttgcagcaacaatagtgatgaatcaccaacaccagcagcagatggcccccagtaccctgagccagcagaaccaccccactcagaacccac

SEQ ID NO: 724384 - DNA, 75 bp, Homo sapiens
tgatctcgtcactcctttctttgtggtcttcatttgtgaatacataggatctcatagatcagaacatactggagc

SEQ ID NO: 724385 - DNA, 85 bp, Homo sapiens
accacctggggggagccaaacaggcccctacaaaggcttcagagtagatatctctgccaacatgaggacagaaggactggtgcga

SEQ ID NO: 724386 - DNA, 50 bp, Homo sapiens
cctgcctggacccctactattgcaacaagatagaagaatttcgaaggctg

SEQ ID NO: 724387 - DNA, 100 bp, Homo sapiens
cgggaacccttgccgctgctgtcctgcgaccccaagcaggccgccatggcatcagatgaaggcaaactttttgttggagggctgagttttgacaccaatg

SEQ ID NO: 724388 - DNA, 75 bp, Homo sapiens
cacataggcacctgcctgaggaagatatttcctggcctctctccagtgcaaggagatgagacaccatctacaaat

SEQ ID NO: 724389 - DNA, 82 bp, Homo sapiens
atcgattttaccttggataccctgctttggggccgcgatgggcctcttggaacattggtgtgttcatctgcattcgatgtgc

SEQ ID NO: 724390 - DNA, 82 bp, Homo sapiens
ccagctgcgctgtcctaaatgtggcgacttgtgcacacatgtagagacctttgtatgtgtgtcagcagcctgagtgtgggaa

SEQ ID NO: 724391 - DNA, 74 bp, Homo sapiens
agagataaaaataccagaaacatacccatttaatccccctaaggtaaaaatgcatttgcaaagggagaaaatga

SEQ ID NO: 724392 - DNA, 100 bp, Homo sapiens
gcgctggtcctgctcggctgcctcctggcctcgctcctgttctcaggacaagcagggcaagaaagactcctccccgtggacctgccccttccacccacca

SEQ ID NO: 724393 - DNA, 132 bp, Homo sapiens
tgtcactttatctcctttaccttgtggaaatgatttcctcaggactccagattatctacaacactgatgagaaagatcatacggtggtgaaacttcgacaagatcacagcccatcacgttcaggccttgaca

SEQ ID NO: 724394 - DNA, 74 bp, Homo sapiens
tctcaacctcccacgtggctgagactacaggcttctccccctgaagtacgtggagctacgaatctacgaccggc

SEQ ID NO: 724395 - DNA, 50 bp, Homo sapiens
ctcccgttccccctccccagagcaaggttcttgattattacagacctctt

SEQ ID NO: 724396 - DNA, 100 bp, Homo sapiens
gctttcctaccagaccctgaaattcacgcatcaggcgcgggaagcgctccatcaagtatgatggtgaaggatgaatatgtgcatgactttgagggacagc

SEQ ID NO: 724397 - DNA, 50 bp, Homo sapiens
ggagactttggggcctaactaggtcacgagaagagaatgccttctagatg

SEQ ID NO: 724398 - DNA, 110 bp, Homo sapiens
gaaagaaaccatgtgctgaaatgtttgacgacactgatggtttgtgccctctggtggtcagaagatgctgtgctgtctcgttaggatgaatggattaaaatgtacttttc

SEQ ID NO: 724399 - DNA, 82 bp, Homo sapiens
gacgcgcaagggctgcggagccgcgggccggcgagcgcgtcgccaccatgatgccttcaattaagttgcagagttctgatgg

SEQ ID NO: 724400 - DNA, 98 bp, Homo sapiens
tatatctctctaccgggggaattgcaggcccatacgatttgagccaccaatgctggatttccatgaacaatatttagcttcctgtggtatactgatga

SEQ ID NO: 724401 - DNA, 100 bp, Homo sapiens
cttctttcgatcagagatcggcggagaccctcgaagtgcgcaaacttgacactcaccctgaccgaattaaacaaccaccatgtcgagcaaaaaggcaaag

SEQ ID NO: 724402 - DNA, 100 bp, Homo sapiens
gcgctcgggggccgaactggccctggactacctctgcaggccaaacgtaccaagaaagtcgggatcgtcggtaaatacgggacccgctatggggcctccc

SEQ ID NO: 724403 - DNA, 100 bp, Homo sapiens
caagaattatgcatgggggcatgattcacaggcaagatcccttcccactggaggcatgtgatgagaggaaatcaccgaaaacgtggctgcttcaaggatc

SEQ ID NO: 724404 - DNA, 100 bp, Homo sapiens
gcgagcagtctcaggcctttagtgatgatgatcatggaagggaagtggttgctgtgtatgttactggtgcttggaactgctattgttgaggctcatgatg

SEQ ID NO: 724405 - DNA, 82 bp, Homo sapiens
agcctcagttggaagcagccgatccagcctgcggagcctgtggggcaggtaaataccagctgtcccctacagtgaatatgcc

SEQ ID NO: 724406 - DNA, 116 bp, Homo sapiens
atggcaaggagaaggccagtgttgattctgacagcaatcttctggctctcattcgagatgtcttacttccccaggtatttgaagtataccatacaactgttttgaaaatccagcgt

SEQ ID NO: 724407 - DNA, 90 bp, Homo sapiens
acccgtccctgcccccggctcgccggtcagcggctcgtcgccgttcgccacccaagaagtctggacagctgatcacctgaaagagaggag

SEQ ID NO: 724408 - DNA, 82 bp, Homo sapiens
gctgcaggaggccaaggacggcgttctggatctcaaagcggtgctgggtaggccaggtttcagcatcgcagacaagaagcgc

SEQ ID NO: 724409 - DNA, 96 bp, Homo sapiens
gaaaattggagatacagctggatgtatgaaccctgctctgaaaacactctttaacgattccagatcagatgttcttccacacggattatcgtcctc

SEQ ID NO: 724410 - DNA, 75 bp, Homo sapiens
tgggagcttcaggctcgctccgtgcgggattggcagccaccatttgcatgtgatgttgataaacttcattttacg

SEQ ID NO: 724411 - DNA, 83 bp, Homo sapiens
aacctgggaagtggaaccggatatttaagtacaatggtgggcttaattttagcctttctgagaaaagtctacagcattctttc

SEQ ID NO: 724412 - DNA, 90 bp, Homo sapiens
gagctatgctcaagtgcctgagtgaagggcagccccctccctcatacaactggacacgtaatccttcccctctaccaccggatatggctc

SEQ ID NO: 724413 - DNA, 105 bp, Homo sapiens
gaaatcttcaagaagatccggaggaaaagggagtttcgggctgatgctcggataacatccctgaggacctcagagaccctttctacgttgaccagtatgagcagg

SEQ ID NO: 724414 - DNA, 100 bp, Homo sapiens
atctttttcaacactcacaatgagccagtgcggcagttggctattttctgtccccatgtggcactccaaacaacggaacactttgtgattttccaaaaat

SEQ ID NO: 724415 - DNA, 85 bp, Homo sapiens
ctgtaaccacctcacagattccagcttcggaacaagagaccctgttttcggctttgtgagaaaccttaccatcaaacacgatggc

SEQ ID NO: 724416 - DNA, 100 bp, Homo sapiens
aaaaagagaacagtatgttgagagagataagaaaggaggtattcgaacttctggaaatgggagtgctcagtctgtgcaagtcagaatccttgaaactggg

SEQ ID NO: 724417 - DNA, 88 bp, Homo sapiens
ttgaaacagtggggcaatgagctcaactctcgtgctcattcccccatgatcgccgtaggaagtgatgacagtagccccaacgcaatgg

SEQ ID NO: 724418 - DNA, 115 bp, Homo sapiens
accgcgcgcagggcctgcagcgggagctggacggcgagcgcgagcggcgcgagaaaccggtggctgctggcagcggaatcccccagatcaagtgcttcctcaacggggtgaagat

SEQ ID NO: 724419 - DNA, 98 bp, Homo sapiens
ccccgcctgcctccgccggctacagcgggaagagcgggatcgactacaagaccaccaccatcctgctggacggccggcgcgtgaagctggagctctgg

SEQ ID NO: 724420 - DNA, 83 bp, Homo sapiens
gcggcgttagccggcgtcttcgtttgggacgaggagaggatccaggaggaggagttgcagagctggtgcaactattatctcag

SEQ ID NO: 724421 - DNA, 82 bp, Homo sapiens
ccaaattctacaacttctaaatgaaatgtttctttctcagcaaaatagaggagaagcttacccctcttccagaagataatag

SEQ ID NO: 724422 - DNA, 100 bp, Homo sapiens
gctggagcagatcctggtggctgagaaccggttatgaagacagtatggagtttccagaccatagtagacatttgctacagtgtctgagcgagcagagaca

SEQ ID NO: 724423 - DNA, 73 bp, Homo sapiens
cactgactttcagctatggaatcggtctgcacctgttcagcatttggcaggatggcaagcggaggagcagcag

SEQ ID NO: 724424 - DNA, 100 bp, Homo sapiens
caagaagattatgacagattacgccccctatcctatccgcaaacaacacgatgaggcgagtggtacgacagagcaagtttcggcatgtatttgggcaagc

SEQ ID NO: 724425 - DNA, 75 bp, Homo sapiens
ctggcggggagtcgcgggcgcctccgcctcaggtcttcggggacgaggaagccacagccccatgagaactccaga

SEQ ID NO: 724426 - DNA, 82 bp, Homo sapiens
caatggcttaaaggactgctggccttcctggtgaagcctctggcatgaacgctgctgtccgggctgtgacgcgcatgggcat

SEQ ID NO: 724427 - DNA, 90 bp, Homo sapiens
gcgcgagtgaggaaaggaggtactgtagcaaaactggttgaacagcggatgaagatatggaattcaaagctctaatggacctttttgaag

SEQ ID NO: 724428 - DNA, 90 bp, Homo sapiens
ctgggacttcccgtccgcggcgtggagggaaagaaccggaggctgaagcaggccaaagaagaagctcaggctgaaattgaacagtaccgc

SEQ ID NO: 724429 - DNA, 100 bp, Homo sapiens
cttatggcggcgctggagagggggcgctgagctgttgggctccttcgagaactcatagaacggaagaccagctccttggatcccaacgatcaggtggcca

SEQ ID NO: 724430 - DNA, 100 bp, Homo sapiens
gccgggacccggttccccggcccacagtgggggtgtgcaaacccgagagaactggaacctatgagaaccccaaagacattaaagattgctgaaatacagg

SEQ ID NO: 724431 - DNA, 83 bp, Homo sapiens
cgtggagggacgagacctgaccttgcagtacaacatctacaatgttggctcaagcagcgtcaccctttacaccagaaagctgg

SEQ ID NO: 724432 - DNA, 83 bp, Homo sapiens
ggaagacatgttttcactgttcgacgagagggaagtcttgccggaccatcacctttgagcagttccaggaggcgctggaggag

SEQ ID NO: 724433 - DNA, 100 bp, Homo sapiens
gcacagcagggatgattctttagatctcagccctcaagggctaaagaattacctccaaagccattgtcaagaccacagcagtcatctgcaccagtccagc

SEQ ID NO: 724434 - DNA, 87 bp, Homo sapiens
attgacaatcaaagaaggagatatagtcactctcatcaataaggtgaactgtcacccctacaactcagcttgcaaccagccctggcc

SEQ ID NO: 724435 - DNA, 100 bp, Homo sapiens
ctggacaagaatatgctgccaaaattatcaacaccaaaaagctttctgctagggacactctcgaaagcgatgggaacgctttgtccacagtgaaaatcag

SEQ ID NO: 724436 - DNA, 48 bp, Homo sapiens
gaacccaacctggtgcccggcccgcagagctgtccgaggttctgtggg

SEQ ID NO: 724437 - DNA, 75 bp, Homo sapiens
agtcaactgcgtggaagagaaggtttttcgttggaatatacgttgcacatttatggcgattctgagtgtgagggc

SEQ ID NO: 724438 - DNA, 101 bp, Homo sapiens
ctaatacaggtatcgggaaggagacagccaaagagctggctcagagagagagacaagagagacacctccaacttcgacaaagagttcaccagacagcctgt

SEQ ID NO: 724439 - DNA, 80 bp, Homo sapiens
gacgtgcagcggcaacatccagcggatcagccaagccagacaggaagatgtcacccaagcgcatagctaaaagaaggtcc

SEQ ID NO: 724440 - DNA, 100 bp, Homo sapiens
gcgggcctcaaagagctttaggacatgctccaaagaagagtgggagaaactacagatgaccacaagtgaaaggaggaaaatattctgctctgtcacattc

SEQ ID NO: 724441 - DNA, 75 bp, Homo sapiens
gggagccacgcagaggacgccggaacaccctggaagccgagaaatggagtgtcacagaagagaaagtcaatgaaa

SEQ ID NO: 724442 - DNA, 50 bp, Homo sapiens
cttccccaaggcgtgtacccaggacggactcagagggccttaccccgccc

SEQ ID NO: 724443 - DNA, 75 bp, Homo sapiens
atttggccaccaaactcctggacagttggaaagacctaaaggcagaggcaaggctggcagcaaaacgggctgccc

SEQ ID NO: 724444 - DNA, 75 bp, Homo sapiens
tttgtcttggtatactacatggcaaaatgggaaagctctaagcgaaagacatgaggcctcagcctgaaatgaggt

SEQ ID NO: 724445 - DNA, 90 bp, Homo sapiens
gcacggatggtcttgaaacacaaatggtttttggtttttcgttggaatatacgttgcacatttatggcgattctgagtgtgagggcagac

SEQ ID NO: 724446 - DNA, 95 bp, Homo sapiens
ggacgctccgtggatgaggctctgcggctggtccaggccttccagtacacagacgagcatggggaagaccacagcaccgggaagtccagtcagcg

SEQ ID NO: 724447 - DNA, 101 bp, Homo sapiens
caccagcattgcctcgaccacactcacctctctctgctcatgcaggacccagatgatgtggtaccagttggccaaagaagagcctggtgttggtgcatgtg

SEQ ID NO: 724448 - DNA, 82 bp, Homo sapiens
atgaccagcttagcttctgtcctaaagataacccaggaggctggagaattcatgatcactttcccatatggctaccatgctg

SEQ ID NO: 724449 - DNA, 82 bp, Homo sapiens
ctcaatgtcaaatgggaccggattgccccggagcagctccccgagtcagcctatatgcaccagctcttgggcctcaacctcc

SEQ ID NO: 724450 - DNA, 75 bp, Homo sapiens
ggaaatcctaatgacagtctccaaattcgcctccatctgtaccatgcttggctgaagaggaaataaaaacagaac

SEQ ID NO: 724451 - DNA, 100 bp, Homo sapiens
ttcttctgtggccttcagcactgataagaatctattattgtgatgtaaattggagtcaaccaggtgaaaagaagttaactgggggatctaactggcaacc

SEQ ID NO: 724452 - DNA, 100 bp, Homo sapiens
tgtgcagtcctgttggaatttcttcagtgcgatcaaagttctacgtgcgagagccgccgaatgccaaacctgactggctgaaagttgggttcaccttggg

SEQ ID NO: 724453 - DNA, 75 bp, Homo sapiens
tgggactatttctactccacataatctggtatctcattcagttgctaaacttatattagttaatttccactggca

SEQ ID NO: 724454 - DNA, 100 bp, Homo sapiens
cagcgagaaagcgcagccaggcggctgctcggcgttctctcaggtgactgctcggagttctcccaggaggagcaaaggccagtgcagatgatgtatcagg

SEQ ID NO: 724455 - DNA, 100 bp, Homo sapiens
cggctgaaccagggttcatggggacatggcaaaacgctgatactaacctcttattcagaatgtcccaacaggaagagagagaaaatccttcaaaacggag

SEQ ID NO: 724456 - DNA, 50 bp, Homo sapiens
gcgggaatgaagcgggcgctgggcaggtttgtgagccgtatctccgtggt

SEQ ID NO: 724457 - DNA, 100 bp, Homo sapiens
gaagaaacaagaggagagtgtacaggaaggaaaacaggcttcgttggctgcagacttctccatcactcaatttaagcatcttggccggttgcttatggtg

SEQ ID NO: 724458 - DNA, 75 bp, Homo sapiens
gtgactggtctattcaagttcaagtgaatattgattataccggaacagagccttccagtccctgtaataaatgtt

SEQ ID NO: 724459 - DNA, 75 bp, Homo sapiens
tacccccatcactgcttccctcagccataacagatatgatcattctgtttcaaatgacaaagccctgatggtgct

SEQ ID NO: 724460 - DNA, 50 bp, Homo sapiens
ttttcactgtgcagctgttacaccaagccgacgcgcagcctccaggttcc

SEQ ID NO: 724461 - DNA, 98 bp, Homo sapiens
cgccaccagggagaaggtggtcctggcatcaggcaacatcttcctcaacgtcatgggatttgtacacacagatatgacgaaagacttgaaagaagaac

SEQ ID NO: 724462 - DNA, 83 bp, Homo sapiens
gacttccacaagtgcatctataagggctgaaatctctttaatgatggagggaagcaggcagacgcgagtgtctcggccataca

SEQ ID NO: 724463 - DNA, 101 bp, Homo sapiens
aatcaaatccaaagagtgtctgacatttcttttgtgcaagatgagcctcaagtgcttctgcattacatgatatcagtatcaagataaaagtttggaatggg

SEQ ID NO: 724464 - DNA, 98 bp, Homo sapiens
ggaaatgaggcaagttatcctttggaaatgtgctcacactagagctattgcttaccttttcccaagtggtttgtttgagaaacgagccaggccagtaa

SEQ ID NO: 724465 - DNA, 100 bp, Homo sapiens
ctatacttgaattttctaaggtgtcattagatcctgaaggacacagccctgcagaaagtgaagcgtggccagagctgcctggagccctgcctgcgccagc

SEQ ID NO: 724466 - DNA, 100 bp, Homo sapiens
ttcgtccctgcatttaaaggctttcacttatattaatctggataaagcggttcttgaactatttgtcaatgaagattgtaaagccaaatgtgtaacaaag

SEQ ID NO: 724467 - DNA, 83 bp, Homo sapiens
ctcaagtcaccgtggagctccgccgccccgaaactttcaccgcgagcggccactgaggcggctcccagctgcgttggcgacat

SEQ ID NO: 724468 - DNA, 90 bp, Homo sapiens
gaagctggaggccggcaaagccaagggattaaagcctgtggtttccacagaagcaccacctatcatatttgccacaccaactaaactgac

SEQ ID NO: 724469 - DNA, 50 bp, Homo sapiens
actaaagagttggacctgtcaggggatgttcgtctaaccccagaagactt

SEQ ID NO: 724470 - DNA, 110 bp, Homo sapiens
ccccaagccattcagggcctttgcctttgttacatttgcagatgatcagttgtctgatatctctccaattggacgggatccctctgagtccagtttcagcagtgccaccc

SEQ ID NO: 724471 - DNA, 82 bp, Homo sapiens
cagagagagcgatcaacacgctgaacggcttgaggctccagtcaaaaaccattaagtttggtgccctggttgtcagatgttg

SEQ ID NO: 724472 - DNA, 75 bp, Homo sapiens
ttgcgtcaaaatcaggactgaaatacattaatgtgggtgatttagctcgagaagacaactgatcaatactgggtt

SEQ ID NO: 724473 - DNA, 101 bp, Homo sapiens
agcgagagcctctaggtgtaaggaaggtgatgtcgtaaagccgggagtgtcgtaaaccaggccccttcacagatgtagtcactacaaatcttaaattgcga

SEQ ID NO: 724474 - DNA, 90 bp, Homo sapiens
ggcttcctcatcgtggccgagatcaaagatgaggtctatcttaatctggtgctggactatgttccggaaacagtatacagagttgccaga

SEQ ID NO: 724475 - DNA, 83 bp, Homo sapiens
ctctgacatcactccagcagaagaaagggaaggaacacgctgcattactgcgtgctgaggcaacttctcctagaatctcaatc

SEQ ID NO: 724476 - DNA, 75 bp, Homo sapiens
cttagtgaagaattaggatacagacacttggcatttcacctgaagaaaaatttgttattacaacaacaagtagga

SEQ ID NO: 724477 - DNA, 80 bp, Homo sapiens
gggcgccagccatggacaatcagtgtggacgaatgtggaacctcgctctgtggctgtgttcccttggcactccttagtcc

SEQ ID NO: 724478 - DNA, 100 bp, Homo sapiens
ggcgacagagcgagcgcggcgcggggccaccatgggggcccagctcagcacgggatcgtgggactttaccagatcggtttgtaataacacctcgaagacg

SEQ ID NO: 724479 - DNA, 75 bp, Homo sapiens
aaggagagacacttgtgaacattcaagtgaagcaaaagcctttcatgattatgctacccacctttctgttctgag

SEQ ID NO: 724480 - DNA, 98 bp, Homo sapiens
agaagacggagatgcagcgccattatgtgatggatatggactgtttaatgttgacctttggggacattccacatcatgccccagtgcttttggcctgg

SEQ ID NO: 724481 - DNA, 136 bp, Homo sapiens
cgccgccccccagaggcgccggagcccggaatcccgctcggagccagccagccgtcccgagctaccagcaggtaaagtgttgagagaggagaaccagtgcattgctcctgtggtttccagccgcgtgagtccaggg

SEQ ID NO: 724482 - DNA, 50 bp, Homo sapiens
cgctgcaggcagccagaaggaagggctaagacagtgcctgtccctgaaaa

SEQ ID NO: 724483 - DNA, 50 bp, Homo sapiens
ctgccacccattgtgtcttctcaagaagagtggagactgctgcacggact

SEQ ID NO: 724484 - DNA, 96 bp, Homo sapiens
ggaggatggagcagaggacattctagagaaagtaagctttcccgccagagcgccacagagatcccgctgcccatgctgcctctggcggacaccgag

SEQ ID NO: 724485 - DNA, 100 bp, Homo sapiens
ccaagtttgatggctgatcttgaaggtttacacttgtcaacttcctcttcagtcatcagtgctatgtggaggagatatagagccaagaaatatttatgta

SEQ ID NO: 724486 - DNA, 100 bp, Homo sapiens
acaggatttggtctccacggtcaacgtggtatactcgcagacaacccaaccggtatacaatgtttatatcctggaacctggagatcctcctttgttacag

SEQ ID NO: 724487 - DNA, 97 bp, Homo sapiens
tttggattcacccacagcggggcggcggcggcggcggctgcggcccaatatagggcttcctactatgagatttcagttgatgatggtccatgggaaa

SEQ ID NO: 724488 - DNA, 80 bp, Homo sapiens
cgtcggattgcccatgcacttgttgcagaaacagccaagctcttcagtgggtcatctgtgtgtcacagcctcagaagacc

SEQ ID NO: 724489 - DNA, 100 bp, Homo sapiens
cgccgcgccgctccgggagccgggcccggggtcccgccaccaccgcgcgcggctagagttgggaagacatcactgattatgtctctggtcagtgaagaat

SEQ ID NO: 724490 - DNA, 100 bp, Homo sapiens
cgccccctgtgtcgcccgcacctcagccaaccgaggagaggctgccctcgagccccgtctatgaggctgtaggttccatgaggacaggccttgagtctgt

SEQ ID NO: 724491 - DNA, 87 bp, Homo sapiens
cgactgcaactgctggattgctgcaaggctgagggacgagaacgaggtattgtcaatatggactcgccatatggttctgtaacacct

SEQ ID NO: 724492 - DNA, 100 bp, Homo sapiens
atgatgacgatgatgatgaagaggatgatgatgaagagtcacgagaagagaatgccttctagatgcaaaatcacctccaaaccagaccacttttcttgac

SEQ ID NO: 724493 - DNA, 100 bp, Homo sapiens
acaacgcctcctcacttgctcctctacggtggaagttaaacgagctgagcctcgggacagcaagagccaagcgccgggacagccaggtgccagccagtgg

SEQ ID NO: 724494 - DNA, 90 bp, Homo sapiens
cctgtgggctggaaagtctggactggctccccgtgtggatcaggagaagtgggcccagcgttcattcagcgttctcagagttgctgaatg

SEQ ID NO: 724495 - DNA, 100 bp, Homo sapiens
ttgaatgtattggtaatgtgaaggtcatgtatccgtaccattctgatgttttgagacaatacagatgttttcccttgtggcagtcttcagcctcctctac

SEQ ID NO: 724496 - DNA, 94 bp, Homo sapiens
tcatgtggcagtggaaaatgcgctcgggctggaccagcagagtccctgcaggaagcatcacccaggctggcagatcatggtagcagcagcgggg

SEQ ID NO: 724497 - DNA, 97 bp, Homo sapiens
aaatcaaagattgtctcctgaccagtgtcagtttaacagacttatggagcaaggatgactgacacaaacacaaaaatcattctgcctgttgaatgaa

SEQ ID NO: 724498 - DNA, 75 bp, Homo sapiens
gctgcccacggcgtccccggtcgcggtttccctaggacttctgcatgcccatgccacacatatcctgtggccccc

SEQ ID NO: 724499 - DNA, 98 bp, Homo sapiens
aagaagctactggacctcgttcagcagtcatgtaactataagcagcttcggaaaggagccaatgaggtggagctgggcaagaagtaggaagatcatgt

SEQ ID NO: 724500 - DNA, 98 bp, Homo sapiens
ggattgtacaccttagaagtgcttaaggaagagtgatgaagaatgaactctggaagcccagccagggacaatgcaccttcacagagattctgcactaa

SEQ ID NO: 724501 - DNA, 82 bp, Homo sapiens
cttcttcaaaatcaaggagattaaatccccagaaatggcagaggtatgtctgattgacccgggctgcttccgagaaattgat

SEQ ID NO: 724502 - DNA, 97 bp, Homo sapiens
tcagtcactggctgcaacaggaccacagtcaagacgatcatagtcactgcactgaagataaaataccctcatcaacttgatcagaaagtcctggaga

SEQ ID NO: 724503 - DNA, 51 bp, Homo sapiens
gaaattttgtctgatgactactcaaagccaaaactgttacatcaggttgtg

SEQ ID NO: 724504 - DNA, 95 bp, Homo sapiens
atcccaactacacttggcctttcgacgacatcatcgtcttcgcctatgcctgccaggctgctgaatttatccagttggcgaaggactttgaggat

SEQ ID NO: 724505 - DNA, 75 bp, Homo sapiens
cgctgccgaaatgaagtataaggaattgcttacttaggaggtgtgtgcagtgctaagaggaagtgtgtgcttgcc

SEQ ID NO: 724506 - DNA, 90 bp, Homo sapiens
attaattcttccactgatatctcaaaaggtgatctggacaaaggaacaggtatctcagaaaggcctaaagaatgtatttgacgaagcaat

SEQ ID NO: 724507 - DNA, 82 bp, Homo sapiens
ttcacccagctcgccaccatggccgccttccccggggatctgacgagcttttctctacttgtgtcactaacggaccgtttat

SEQ ID NO: 724508 - DNA, 75 bp, Homo sapiens
ggagtctcagagctgtcagaaagaatctacctgttactcgtattttggacaatcttatggagatgaagtcaaacc

SEQ ID NO: 724509 - DNA, 100 bp, Homo sapiens
caacattcatcgcagctggtgggtgtacacactgctgtttaccttggcgaggcctttcaccaagtccatggttttctgtctcaactggtctctgacaagc

SEQ ID NO: 724510 - DNA, 73 bp, Homo sapiens
ttagagttatataaaccacttcccagagcaggaagtggcggtgcgagggctgctgcacagcgagcggagccgc

SEQ ID NO: 724511 - DNA, 100 bp, Homo sapiens
cagcaacccatacctgatccggagaatcgaggagctcaacaaggtggtctttgggaagaagcttcctgcctttgccaccatccccatccaccagctgcag

SEQ ID NO: 724512 - DNA, 97 bp, Homo sapiens
cagcagcaatgacgataacccctggatccaggcgggggccggccccagcccagactggaagatgagattgacttcctggcccaggagcttgcccgga

SEQ ID NO: 724513 - DNA, 101 bp, Homo sapiens
gccgtgtacccgaaaaactgattgactgggctggcgttaactgtgcggaggcagaaatcagggtgaaatggcccacacgtgccgtggaaccatcaacctgt

SEQ ID NO: 724514 - DNA, 50 bp, Homo sapiens
ctgacatttaaacaggacaaaacttgcttttaacctggagacttgccggc

SEQ ID NO: 724515 - DNA, 83 bp, Homo sapiens
acggacagactcatggggaagggccaggtccaggttttaaaatcaaagatgggaaaatcggagaaaattgcccttccccatgg

SEQ ID NO: 724516 - DNA, 74 bp, Homo sapiens
ttccctcctcaaactgactttgcagccacggagaggcaagcagcccaacaacagggacagctcccaggagccag

SEQ ID NO: 724517 - DNA, 75 bp, Homo sapiens
agtacttcttccttccaaggaccagcggtagctcccggggcatcatggaccgatctaaagaaaactgcatttcag

SEQ ID NO: 724518 - DNA, 75 bp, Homo sapiens
cagccctgttctaggtgctcagatggagttataaaactagcagcccgacggccatggaggctgaagagacgatgg

SEQ ID NO: 724519 - DNA, 82 bp, Homo sapiens
ttgaaagagctcatgatgaaagagtggacgcttctcttgtgagccagctggaggtcttacctctttgactgaaccacccaag

SEQ ID NO: 724520 - DNA, 74 bp, Homo sapiens
agatgtttgccatgaaagaaataaggcttcccaagaacaatttctcacttgctatgaaactactgaaggagctg

SEQ ID NO: 724521 - DNA, 100 bp, Homo sapiens
cgggggtaaaagagatcaccgacaagatcaccacggacgagatgatcaaacgcctgaaggagtccaaaactacttacctggaagaccttccaccaccccc

SEQ ID NO: 724522 - DNA, 75 bp, Homo sapiens
cgacaaccttcccagaaagtccaagctcgtggcatagaatgtcaagctaaccaggcgtccgctacttcagaagag

SEQ ID NO: 724523 - DNA, 95 bp, Homo sapiens
catggagaagcttagctccatcaaatctcaaacaatttatgagattattgataattctcaaggattctacgtggttttggccaaattgggcgagg

SEQ ID NO: 724524 - DNA, 75 bp, Homo sapiens
gtccagaacgtgccatggagacgcttaacggatcaaaatacttgctggatggtggactcagagaccaataaaaat

SEQ ID NO: 724525 - DNA, 83 bp, Homo sapiens
tggaaaggatggcccccaaaactgtgccctgtccacggtgcctcctgcatgtcctgctgccctgagctgtcccgagctaggtg

SEQ ID NO: 724526 - DNA, 90 bp, Homo sapiens
cagtttcaaatctccccaagctgcctaaattgaaaaaggttgcacagagcattgaggatcaccatcaggaagtgattggtttctgcagag

SEQ ID NO: 724527 - DNA, 78 bp, Homo sapiens
ccgcgagcagagccgcccagccctgccagctgcgccgggacgcaaacggggattcagcgtccgatcctttggaacagg

SEQ ID NO: 724528 - DNA, 100 bp, Homo sapiens
cgccgcctcttccgccgccgggctcggggcctccgcagcgacaacatggaggccgtgaagaccttcaatagcgagactccctgagaaatgtttcctcagc

SEQ ID NO: 724529 - DNA, 51 bp, Homo sapiens
gaggaactgagacgtttcgaattccagtttcccggaggaaatgacaattac

SEQ ID NO: 724530 - DNA, 96 bp, Homo sapiens
gccgccgcttgtgctgcagccatggaagatgttggatccagggttgatgacgtgttccaagcaagctatgtttcttaaccttgtctacaaatctct

SEQ ID NO: 724531 - DNA, 90 bp, Homo sapiens
gacagtttttgtttcaaaagaaacatgttggaagatcaaaggcacaggatgctgaaaacgccattcaacagatgggtggccagtggcttg

SEQ ID NO: 724532 - DNA, 75 bp, Homo sapiens
tgtgtctcttggtggccaatgttcctgatagttttaatgaagatggtggagccagggcaagatttactgcttgct

SEQ ID NO: 724533 - DNA, 51 bp, Homo sapiens
tcagcctccaaaagtgctggcattacaggtggtggtggtgctgcagcaggt

SEQ ID NO: 724534 - DNA, 123 bp, Homo sapiens
ggacccgcaagcatgcccaccactgccacaaacgccgcaccaggtcttgtagcagcgcctcctcggatcctcagtcttccacaatgaaccctgtttacagccccgtgcagcctggggctcctt

SEQ ID NO: 724535 - DNA, 50 bp, Homo sapiens
aaatatcaggagttaatggaacacataactttttagtaacagcatcttcc

SEQ ID NO: 724536 - DNA, 97 bp, Homo sapiens
atccaaaatttatcacgagtattttgaattccttgtgtggatatcagatccggatggaatctcgagcttgtgaatctaccaggttactctattgtac

SEQ ID NO: 724537 - DNA, 101 bp, Homo sapiens
gagctgaaggatgaccaggtcaaaaagcttagaccatgctcagcctccaagcagccttgtcatcgacaaagaatctgaagtttacaagatgcttcaggaga

SEQ ID NO: 724538 - DNA, 83 bp, Homo sapiens
cgaggccctcatgtaccacacggttcaagaagacgtggaagctgcgggctctgaaggaaggcaagacaagcatgcatccgccg

SEQ ID NO: 724539 - DNA, 80 bp, Homo sapiens
ccaggcaccttctccatgcattgcaagatacaaactggactctcaggacaaaacgacaccagccaaaccagcagcccctc

SEQ ID NO: 724540 - DNA, 75 bp, Homo sapiens
caaaaaagaagactaagaaaagagataccaaagtcgggactatcgatgatgggtttggagaacattgattaagga

SEQ ID NO: 724541 - DNA, 74 bp, Homo sapiens
agaggaccctgccttggtgtgagagtgagggaagaggaagctggaacgagaaagatgttgtgtccctcctggtg

SEQ ID NO: 724542 - DNA, 75 bp, Homo sapiens
cttcagtgtgctgctcaaaaacagatgccttcaattaagttgcagagttctgatggagagatatttgaagttgat

SEQ ID NO: 724543 - DNA, 75 bp, Homo sapiens
attcttttcagaatagaaaacactctgaaaagatggctaaattagggcttcgtgggacacatatgcaacatgcct

SEQ ID NO: 724544 - DNA, 75 bp, Homo sapiens
gctcacacagaagaagccgtttgcagccaaagtggaacaggtgaagttcgatgccacatccatgcatgtcaagcc

SEQ ID NO: 724545 - DNA, 100 bp, Homo sapiens
ctccggggtaggtgggtgacggcggtcggaggtgtaggagggagccgtggaggtccagacaggcatggtacattgtgatacagcagttggaacaccggat

SEQ ID NO: 724546 - DNA, 98 bp, Homo sapiens
ttcgacgtgcggcccgaatgccagcgcctcttctaccggggcaagcagatttcttcgcaagactatggaaaggaagtggacctctacgctttggggct

SEQ ID NO: 724547 - DNA, 108 bp, Homo sapiens
tacttgcagctggacagctagctgatgctttatctcagtttcatgctgccgtagataattctgaaataatcagcagaaacggaatggaatgccaagaatctgcattga

SEQ ID NO: 724548 - DNA, 78 bp, Homo sapiens
tcaaagtgaaaggaccagttcgaatgcctaccaaggtgaaatcttgtgctgagtgggtgtctctctcaaaggccagga

SEQ ID NO: 724549 - DNA, 50 bp, Homo sapiens
gtggacaaagtaaacttccacatgtttgacgtgggtggccagcgcgatga

SEQ ID NO: 724550 - DNA, 75 bp, Homo sapiens
gcccgctcacctgcgctgtgatgcctgcagagctgtggcttaccaggatgttgccttcctggagaaactgattaa

SEQ ID NO: 724551 - DNA, 78 bp, Homo sapiens
tcagacaagacggtggaggtcaagcccgggatgaagtcacgaagttccacctggtgccaagcatcaacaccatgagtg

SEQ ID NO: 724552 - DNA, 85 bp, Homo sapiens
acgctgcccgggtagcttcccgacttatcgacatgagcaggcaccaaggggcctacagcgtcagctccggcatccagctgatccg

SEQ ID NO: 724553 - DNA, 82 bp, Homo sapiens
tcacctttgtctccccgatctacggggctgacatcagcggctctttgtatgatgacaggctgggaggcggcagaatgcagcc

SEQ ID NO: 724554 - DNA, 100 bp, Homo sapiens
cggcaccacagctcacgctggtgctggccatcatgctgcagagtggccgggctgagtactaccagtgaaattcagttcatgaagataagaagtttcttga

SEQ ID NO: 724555 - DNA, 90 bp, Homo sapiens
ccaattccggacacataacaagcagcagtgaggacaccaaagctgacagctctgacaactctgatttggaagatgacatcatcttatctc

SEQ ID NO: 724556 - DNA, 75 bp, Homo sapiens
aataaagctctggagttgacagagtggccctcagattctcagcttgattctaaggaactttcagctggttctcaa

SEQ ID NO: 724557 - DNA, 111 bp, Homo sapiens
gacgcgcaagggctgcggagccgcgggccggcgagcgcgtcgccaccatggaaagaccacagcaagattctttcattcgtctcctcctagcctgggggaccaggctcgaac

SEQ ID NO: 724558 - DNA, 101 bp, Homo sapiens
gccgctatggatctattcgactttttcagagactgggacttggagcagcagtgtctgttaatgaccaaccaccctgcaccaaatttatttggaacaccaag

SEQ ID NO: 724559 - DNA, 100 bp, Homo sapiens
cagctgagcatcacagtgggcatcaaccaggacattttacaggtggaagatggtatcttgaagttgaggaatgctggcaatgaacaagacttaggaatcc

SEQ ID NO: 724560 - DNA, 74 bp, Homo sapiens
gtcagccgatgcaccgagtccagcccaggaaaatggagagaataaaatcttcatctatcggggaaaggagtatg

SEQ ID NO: 724561 - DNA, 100 bp, Homo sapiens
gtatgcaggtgccttgagagcttcaggggaaatggcttcagcgcagtatattactgcaggaaggagatggataaagcagatgtttattggggcattcctt

SEQ ID NO: 724562 - DNA, 80 bp, Homo sapiens
ctggaacttcatcatcatctacttcacaggaattgccatttgttcgagaacttgtcttggacaattgcaaatcaaatgat

SEQ ID NO: 724563 - DNA, 101 bp, Homo sapiens
cggaagtacgagtctgacgaagacagcctgggcagctctggacggctccagcagtacccgcggctacgggaggagatggagcgcatcgtgaccacccacat

SEQ ID NO: 724564 - DNA, 80 bp, Homo sapiens
gctgaactcgcccgtgtagctgtgattttagagctgccgacagctctaaggtgctggagaatctggtaaaagcaccattg

SEQ ID NO: 724565 - DNA, 49 bp, Homo sapiens
gtggacagaggctatttcagtatagaggattacattgcagtgaaggaga

SEQ ID NO: 724566 - DNA, 100 bp, Homo sapiens
gcggctgatcgcagtccggaggtgaggcggaactctgaggcaagaggaggaacgacgtagaagagaggaagagatgatgattcgtcaacgtgagatggaa

SEQ ID NO: 724567 - DNA, 75 bp, Homo sapiens
tagaaaaagttcttgggacaaacttcatttgattccaggagggcttcgtgtatggacctcaagcgttggaggtag

SEQ ID NO: 724568 - DNA, 95 bp, Homo sapiens
aaccctggcgggggttcgctggctgcggccccggctccggcccccgcaggagcaggaacaagtacttgttactcaacaaccaggagctgaatgaa

SEQ ID NO: 724569 - DNA, 100 bp, Homo sapiens
gggcgagacataccttcacgcaaggcgaggatgcatgagttttcctgtgaagcagaaatcctatgaacatatggctaaaataagaatcgcaagagaagca

SEQ ID NO: 724570 - DNA, 75 bp, Homo sapiens
ccggcctgccggcccccagaacaagatcttcgtgaagactctgactggtaagaccatcaccctcgaggttgagcc

SEQ ID NO: 724571 - DNA, 95 bp, Homo sapiens
cgctgctcagcgtcctcatgtggggggtaaaccactcggatatggctttagttgcccctgaagctccttcagaacaagccagaagagtttttcaa

SEQ ID NO: 724572 - DNA, 82 bp, Homo sapiens
aacgaccttcgcttcgtgggccgcagtgggcgagatcattgagaagcagccaggccacattcggagcagggttttcagggag

SEQ ID NO: 724573 - DNA, 100 bp, Homo sapiens
aaagaaaacgagcgcgagagggggaaaagcgagcgatcgagcgagcgcgcgcgcgaaaactccgggcagggtatttgaagtataccatacaactgttttg

SEQ ID NO: 724574 - DNA, 51 bp, Homo sapiens
gtcagccttcccagtagctggaactacagaagggagaattccacaagttgg

SEQ ID NO: 724575 - DNA, 75 bp, Homo sapiens
aaaacaatagctcaaggaaacctttccaacacagatgtccaagctgccaagagaagatggtataaactggtccat

SEQ ID NO: 724576 - DNA, 100 bp, Homo sapiens
ggaacaagtaccgcctgggacggaagatcgggagcgggtccttcggagatatctacctggccactgaggcggctcccagctgcgttggcgacatggccga

SEQ ID NO: 724577 - DNA, 98 bp, Homo sapiens
tccagcggggcgatgagtgtgggcatggggcagccgccagcccaaacaggcgtgtcacagtcctaatctgcagctgattgagggagatgcaaagcagc

SEQ ID NO: 724578 - DNA, 96 bp, Homo sapiens
caaggcttcagtgtggagtaattgacactttcgagggcctcggcttcacaggatggggctgccagtgtcctgggcccctcctgccctctgggttct

SEQ ID NO: 724579 - DNA, 50 bp, Homo sapiens
tctcggggagaggctactctggagaagaaatgggtgaccgttggtgacac

SEQ ID NO: 724580 - DNA, 100 bp, Homo sapiens
gtccaccaacctgaccatgacctttaacaaccagctgaccactgtccacaaccaggtctgatcaaaggatggcacccagtacatgtgctgaatgactgaa

SEQ ID NO: 724581 - DNA, 91 bp, Homo sapiens
gaccccgtcccgaccctggccgccccgagcggagcctggagggtcggcactcttcaccctcccgagccctgcccgtctcggccccatgccc

SEQ ID NO: 724582 - DNA, 74 bp, Homo sapiens
cagcacggaagcagctggataaagaacagatacagcaatgatgtgacttctttgccttttttgctggagatcct

SEQ ID NO: 724583 - DNA, 100 bp, Homo sapiens
ttcttcccccttgttgtcctcctgctcgccggcagcggcgggtccgggccccggggggtccaggccatggactttccccagcacagccagcatgtcttgg

SEQ ID NO: 724584 - DNA, 82 bp, Homo sapiens
cttgacattctcaaagactggtgctatgaagctcaaattgtggctactaatttgccccctgaagatcaagatggctctgggg

SEQ ID NO: 724585 - DNA, 100 bp, Homo sapiens
cgttaccatgcatcctgccgtcttcctatccttacccgacctcagatgctcccttctgctcctgttggttgaatctggcgatgtggaacccatggatatg

SEQ ID NO: 724586 - DNA, 74 bp, Homo sapiens
gacgggccggcccagagctcccgggtcgtctttcgtgtggccgcgaggaatcattgaccttcaaggacgtgttt

SEQ ID NO: 724587 - DNA, 75 bp, Homo sapiens
gagcgtttgggtcctctgaggccccttgaccaggaagcggctcagccccagggcagcacatcagagacaccatgg

SEQ ID NO: 724588 - DNA, 100 bp, Homo sapiens
tcacttcccagcgcggaagctatatgctgtgatagcatttggatgtgccagctgtccaaaattaacttgtgggcgagagggctgtggaacagagttttgc

SEQ ID NO: 724589 - DNA, 74 bp, Homo sapiens
ccacgcctgccccagggaaccgcacagacttcactgggacccatgctggagtaagaataaaaagtcccagagga

SEQ ID NO: 724590 - DNA, 100 bp, Homo sapiens
gccacaatttccatcaaaaagtgattaagcagagaatggagaagaaggttgattccagtaagaagactgttagaatgccctcggtaacacagaggctgag

SEQ ID NO: 724591 - DNA, 75 bp, Homo sapiens
gaccccggcttctgggacgcgtcagagtatggtgtttgcgaaaacttgcggaagctggagatcacaggcgtgtct

SEQ ID NO: 724592 - DNA, 74 bp, Homo sapiens
agttgcgctttcctgcctgcttctagcaagacacattcagctaacgtattttagcaggtggagtgaggttgaag

SEQ ID NO: 724593 - DNA, 100 bp, Homo sapiens
ccgggaaaggagaggatcccggagccgttggagaccttccccagacgcctccaggggctgtcccagacccctctcttgccagtacagactcttcagagcc

SEQ ID NO: 724594 - DNA, 101 bp, Homo sapiens
gcagaaggactgcctcactgagcaaccaagatatctttacgcgttcagtattgttcccatgaagctaatggatgcagcagaactggtaaaacagcctccgg

SEQ ID NO: 724595 - DNA, 112 bp, Homo sapiens
gcctggttacagctgtttccacgtgcggtgctcgtcgggagtgatcacctaccctacaggaatcattgtagtcaatcattttccagttctcagccgctcagttgtgatcaag

SEQ ID NO: 724596 - DNA, 90 bp, Homo sapiens
aagactggatttcagcttaggagaaggcccgccatgttcatagaggataaagcagtagacaccctggcttacctcagtgacggtgacgcc

SEQ ID NO: 724597 - DNA, 100 bp, Homo sapiens
aacgggaccatcattcctttccggaagcacacagtgcgcggggagcgttcctacaggtggacacctgcgcaggtgtgtgccctccggcccctgaagcatg

SEQ ID NO: 724598 - DNA, 82 bp, Homo sapiens
gagttccgcatggagaagttgaaccagctgtgggagaaggcccagcgagttcattttccagacactgaaagagcagaatggc

SEQ ID NO: 724599 - DNA, 98 bp, Homo sapiens
tatattgttcaaatgatcttctaggagatttgtttggcgtgccaagcttctctgtgaaagagcacagaacattactactggatggaaatccattccga

SEQ ID NO: 724600 - DNA, 75 bp, Homo sapiens
gcggggagctgaagctgctgcttttggcaagtgcagccgcggagccctgtacacaggcttttccatcctggtgac

SEQ ID NO: 724601 - DNA, 75 bp, Homo sapiens
gcagcagttactcgcacaaccccagttaagctgcgctccgggagcgcaaatctgtccaaggctgcctggggagca

SEQ ID NO: 724602 - DNA, 97 bp, Homo sapiens
accttcatggaccaacataactttagtccaagatgcactggagatattattgctgtcatgataacagaattgaggggtaaggatattttgagttatc

SEQ ID NO: 724603 - DNA, 100 bp, Homo sapiens
tgcttaaaaatcaccagttactttaatgagccactgtgagcatgcatttcaggttgttggcgcagctctgctccatgatgtcgatctgaaacccagattt

SEQ ID NO: 724604 - DNA, 83 bp, Homo sapiens
ggaagacacccagaagaaagccttcacgtgctggataaactcacagttggccaggtgagaaagatcagtctaaagaaaaggag

SEQ ID NO: 724605 - DNA, 100 bp, Homo sapiens
tttaaataacaatctgttacgggttttgccttatgaacttggtcggctcttccagctacaaactctaggtttgaaagctgttccatttcctccaagtcac

SEQ ID NO: 724606 - DNA, 96 bp, Homo sapiens
cacatactacatgctcttgtaaccacctaacaaattttgcagtactgatggcacatgtggaagttaaggaccagctgaagcagtgtttctcccggc

SEQ ID NO: 724607 - DNA, 75 bp, Homo sapiens
gggaaatggctgccgaaaacaagccggaaggagcgagaacccgagcagcgccatgagcaacactaccgtcgtccc

SEQ ID NO: 724608 - DNA, 87 bp, Homo sapiens
agcaccatggcgaccaccgtcagcactcagcgcgggccgagttgaagtattgataacaccaaggaactctatcacaatttgaaaaga

SEQ ID NO: 724609 - DNA, 50 bp, Homo sapiens
ccgagaagtccccgaccgactgacccaacatgagtgaagtttcctgcaag

SEQ ID NO: 724610 - DNA, 90 bp, Homo sapiens
aagaactgagagaaagagcaacaaagcggcgagtggtgtgagagggcagcacgcgctgtgggcatggctaatgtaaaagcagccccaaag

SEQ ID NO: 724611 - DNA, 82 bp, Homo sapiens
acagaacacaggagtgtggctagtcaagggatgctgagaacttgctggagtcacagccactgggatcctttctcatcagggt

SEQ ID NO: 724612 - DNA, 100 bp, Homo sapiens
ggatggaagggaggagactcctgaccctcagaatgtgagacctcgctacagtggtccagcacctcctcccaacagatttaatatctggcctggatatcgc

SEQ ID NO: 724613 - DNA, 100 bp, Homo sapiens
cggcagttgctgaccatctatttaagctgaagacaacatcatggtggattcaccaatgaacttgaagcatcctcatgacctagtcatattaatgagacaa

SEQ ID NO: 724614 - DNA, 76 bp, Homo sapiens
cggcggccggcgatagcccggcgctcatgacaggtgctggagaatctggtaaaagcaccattgtgaagcagatgag

SEQ ID NO: 724615 - DNA, 50 bp, Homo sapiens
ctgcttgacaatccacacaaagttcctggtagagttacacagttgtgccg

SEQ ID NO: 724616 - DNA, 100 bp, Homo sapiens
tgctcccctcgtcgcagtttccagcccgacgagcttgttttgtcccggactcgatagcagaccccacgttagctgaaatgggaaaaaacttgaaggaggc

SEQ ID NO: 724617 - DNA, 101 bp, Homo sapiens
ctctcagaagagtgagagagagctattagagattgtgaagaagaatttcgatctccgccctggggtcattgtcaggatgtgaaagcccagcgcagcctgcc

SEQ ID NO: 724618 - DNA, 75 bp, Homo sapiens
ctcctgggactccaggataccaggacagagcgggatgccaccagcttgtccaaagggaagttccaggagctcctg

SEQ ID NO: 724619 - DNA, 100 bp, Homo sapiens
gccagttacccgctggccctggtccggacccgcatgcaggcacaagctgaacagatgggtaaggatggcaggggttatgtcccagctaccatcaagatga

SEQ ID NO: 724620 - DNA, 100 bp, Homo sapiens
tgcagctgcctcagttcttagcgcaggttattcagcttctcaaggctggaaaagcgaaggaagtttcctacaatgcactagcctcacacataatctcaga

SEQ ID NO: 724621 - DNA, 82 bp, Homo sapiens
aatttgaagatccccgagatgcagctgatgcagtccgagagctagatggaaggttttaaaatcaaagatgggaaaatcggag

SEQ ID NO: 724622 - DNA, 83 bp, Homo sapiens
aggcatgccccgctacgagctggctttaatcctgaaagccatgcagcggcttccatgaggcaggctgaacctgcagatatgcg

SEQ ID NO: 724623 - DNA, 103 bp, Homo sapiens
acgcacgggatccagagcgccgcgcacttcgtcatgttcttcgcgccctggcccattacgcagtccaggcaagaagatcccggagcatcactaggaaaagaaa

SEQ ID NO: 724624 - DNA, 97 bp, Homo sapiens
ccccgacagcgccatggcccagattctgccaattcgttttcaggagcatctccaggctgaccggttccctgatgtgttacctgcttctgctactgat

SEQ ID NO: 724625 - DNA, 82 bp, Homo sapiens
gccagaatccggcccccacagctctcacggctgctgctcctctggactccccaagcaagagtgagccatggagctacgtgtg

SEQ ID NO: 724626 - DNA, 100 bp, Homo sapiens
acaagctggagagatacatgacctcaaggacatgttggatgtgaaggagcggaaggttaatgttcttcagaagaaggaaccagcagcacaaacactgttg

SEQ ID NO: 724627 - DNA, 83 bp, Homo sapiens
agggaccaggcggaggcgtcgcgggagcctttggggcaccacagagatgcggacgttggacctctcgaacaaccagctgagcg

SEQ ID NO: 724628 - DNA, 75 bp, Homo sapiens
ggcgacgctggctgcagggacccggtgacagcgtgagagactggtataggggatacctcataaagcacaaaatgt

SEQ ID NO: 724629 - DNA, 74 bp, Homo sapiens
gcacagcatcgggccacagagcgaagtctctcatcacttttgtgaacaagcacctgaacaagctgaatttggag

SEQ ID NO: 724630 - DNA, 90 bp, Homo sapiens
gtctcgtcttgtatctctaattggaagcaacctctcttctcgtcaacacccaagccaaaagctactttgagcctcctgcagctgggcctt

SEQ ID NO: 724631 - DNA, 98 bp, Homo sapiens
tctgcttccaaaggtccagagcattcagctgtctcaaatgcaggttgtctgcattcaaaagagcattctattaaagctaccttaatttggcgcttatt

SEQ ID NO: 724632 - DNA, 98 bp, Homo sapiens
gcgacaggactacatggatgccatggctgagaagccgcaggtggctgcgatgggacggaagccatgaatggtgccggccctggccccgccgcagccgc

SEQ ID NO: 724633 - DNA, 83 bp, Homo sapiens
tgatgacctctcttcaactttcgaacaatatgatgcgtttgtgaagtttacgcatgatcaaataatgcgacgatatggagaac

SEQ ID NO: 724634 - DNA, 100 bp, Homo sapiens
tgaaaatgctgatgaatccagcagcagcatcctaaaacctctcaggaatagcatttcaaggttcagtggaggagaaccccaagagcaccaaaatggaaag

SEQ ID NO: 724635 - DNA, 75 bp, Homo sapiens
gttctgccttctggacaatctttccggtgctgttccagaattcaaagaagagaaactgcagctgcaaccaaaacc

SEQ ID NO: 724636 - DNA, 97 bp, Homo sapiens
caaaaggtgatctggacaaaggaacaggtatctcagctcctattcagacatatgtgcttggtgctaataaccaggaaacagtaaaatatttccagga

SEQ ID NO: 724637 - DNA, 75 bp, Homo sapiens
caaggagtatatcatgaaaattctacttcaaagtatcagactactgtcccctgtgctcagcctgatactgttact

SEQ ID NO: 724638 - DNA, 100 bp, Homo sapiens
ggaagtgaagaaggcgcatcactcccagctgcgcaaagcttgcgaggtggcgttagggatttatttaatggggatgtgttcaaggcaagagcgaattcag

SEQ ID NO: 724639 - DNA, 75 bp, Homo sapiens
cctcggaagagcgctcccaggagaaacaacaatgtaacacacacccgtttgacaatgaggtaaaagataaggaat

SEQ ID NO: 724640 - DNA, 90 bp, Homo sapiens
aattagcccaagaaacattatattcattattctaccttgtaaatactgttatttgtatatactgtaaatgatgacatcggtgggcactaa

SEQ ID NO: 724641 - DNA, 101 bp, Homo sapiens
ttataaatgaagatctggacagtggcacacagataccgtttattaaaagagctgtggctattctgtttctggcgtctgcatacgcaagtccccaactcgct

SEQ ID NO: 724642 - DNA, 51 bp, Homo sapiens
aaagcccgaaagtgtctccaccaggcagcctggcatcctcgctacaacctc

SEQ ID NO: 724643 - DNA, 83 bp, Homo sapiens
gtcagactccagcagccaagatggtgaagcagatcgagagcaagaccctcaaactgacacaagacctacagagaaaacccttt

SEQ ID NO: 724644 - DNA, 82 bp, Homo sapiens
gagcttggtttcgggatctcggtgctgcagacggcgagacctcctgcacaggccagcagccggatgcccgggcccactgggc

SEQ ID NO: 724645 - DNA, 90 bp, Homo sapiens
cagaaaaattagaacttattatggatgaaatgaaacagattctaactccaatggcccaaaagtttgtgtgcagcttggtgtattatggcc

SEQ ID NO: 724646 - DNA, 100 bp, Homo sapiens
acatgtcggatgaagagaaacagcagaaaaagtcctacctggagcgaagcgttaaggaagctgaggacaacatccgggagatgctgatggcacgaagggc

SEQ ID NO: 724647 - DNA, 100 bp, Homo sapiens
ggaccttgatgcctttgcagaagagctggagaggcagagcttctttgaagggcagtctgcaccatgggactcggctaagaaagatgagaacagaatgaag

SEQ ID NO: 724648 - DNA, 100 bp, Homo sapiens
gtaagagtaactacaatggatgctgagctggaatttgccattcagcccaatacaactggcaaacaactttttgaccagcatgaagcgtgccagctctctg

SEQ ID NO: 724649 - DNA, 99 bp, Homo sapiens
cagattgccaacattgaccgtattacaaatggaatgcagtagccctctgggcctgggatattgtggttgataactgtgccatctgcaggaaccacatta

SEQ ID NO: 724650 - DNA, 100 bp, Homo sapiens
cttgctgctggctgccgccgccgccactggaaagctgaaatccttcgcccggaaattcatcaaaaaactctctgcagaggaattagagcgaaaacggcaa

SEQ ID NO: 724651 - DNA, 100 bp, Homo sapiens
ctcaggcaccctggtgcccagccgggaactccccatcgcgttttgccagcgataatacgcctcagatggcccactgcgtgaccttggttcagctgtccat

SEQ ID NO: 724652 - DNA, 82 bp, Homo sapiens
tcttccgaagatcctaatgaggacattgtggagagaaacatccgaattatgctccactttgaggctctgatgaacattccag

SEQ ID NO: 724653 - DNA, 100 bp, Homo sapiens
gcatttacaataagaagagaagatggacagtttcagtgcattacaggcttgtaatgagccagtgctgcgccgtgttgctgtggacaagtgtgcaaggaga

SEQ ID NO: 724654 - DNA, 90 bp, Homo sapiens
tggatacagtctaaattgcaggagattaaagtatggacagccaacccccaacaatttgtagaagatgaagatgatgatacattctcctat

SEQ ID NO: 724655 - DNA, 99 bp, Homo sapiens
aagtgagagagcaattgttgataccaatggaatcacggtttttggaacaaggattttggatgaagaagtttttgaggaattacatgaacgacagccttc

SEQ ID NO: 724656 - DNA, 75 bp, Homo sapiens
caaagatggtacaaaagagtctttggaggatgcggctttgatggagaatagtgacagtggtacaggaaagaaaga

SEQ ID NO: 724657 - DNA, 74 bp, Homo sapiens
cggaaccagaagcagattgccaacattgaccgtattacaaagagtctgatgacttttcacagtaccaactcaaa

SEQ ID NO: 724658 - DNA, 98 bp, Homo sapiens
ccacccattcctttaaatccggagggggaaaaaatcccaaggtctgcaaaggtggacgacatccttggagaaggcagcgacgacagcgacagcgagaa

SEQ ID NO: 724659 - DNA, 75 bp, Homo sapiens
caacgagggactcggcctcggaggcgacccagaccacacagagctgaagccatttattggtatcttggatggtta

SEQ ID NO: 724660 - DNA, 83 bp, Homo sapiens
gcgatgctggaccagttgatgggcacctcccgggacgaggctagtattactagcttgaaacaagctgccctggttaaagcgcc

SEQ ID NO: 724661 - DNA, 98 bp, Homo sapiens
cttgtgaaaggctccatggtcttgcctccttgcagttggatggatttattgctcgaaactgggccaatcaaagatcagctttgggaagtgctcttgat

SEQ ID NO: 724662 - DNA, 100 bp, Homo sapiens
tgaaagcgcgggaggcttttactacgtggagagtggcaagttgttctccgtaaccagaaacaggttcattcattgggcccagtaaatcctttagggccac

SEQ ID NO: 724663 - DNA, 50 bp, Homo sapiens
ggcgaagatcgccaagactcacgaaggtacttcatagacagcagtctcag

SEQ ID NO: 724664 - DNA, 96 bp, Homo sapiens
ccagtttgagctggaggacctgaacctgcggcctgacccagagccacttctcaccgagatgattcatgaagttctgtttggattctgcaaagcaga

SEQ ID NO: 724665 - DNA, 100 bp, Homo sapiens
agcgcttcatcgacaacctgagggacaggcccaggggcccccattgacaggagctgggagctctgcaccacgagcttcagtcaccccgagaggagaggag

SEQ ID NO: 724666 - DNA, 83 bp, Homo sapiens
ggtgctgggacttcccgtccgcggcgtggagggtgaaatgacaatggatgctctgttggctcgattgaaacttctgaatccag

SEQ ID NO: 724667 - DNA, 100 bp, Homo sapiens
agtggaataaatggcgtccaaagtcacagatgctatagtctggtatcaaaagaaggttgcttctagaactgctggagttactgtttgacaagtttaatgc

SEQ ID NO: 724668 - DNA, 75 bp, Homo sapiens
ctggacacaagctcctcttcagggaccggaaacttcgtgaggagaagatgaggaaggaagaggaagaggccaaga

SEQ ID NO: 724669 - DNA, 80 bp, Homo sapiens
gcagctcattcacatacagctggtattcatgggtagtttgaaatatccagatgagaatggatttgatgccttcctgaaga

SEQ ID NO: 724670 - DNA, 83 bp, Homo sapiens
gacaggaccaccttccaaagaaggacagtactgcttttaaagagacagtgttagggatcttggaagcacagccaacatgtgtg

SEQ ID NO: 724671 - DNA, 75 bp, Homo sapiens
atcaccactgtccaaattcagaagctcagaacgctggactctccctttgcagagtgaaccagaggaaatgcctcc

SEQ ID NO: 724672 - DNA, 75 bp, Homo sapiens
ctcgatctgctcttcgtctgcttcttcctcttcagtcaagactagacgcttgaagcaaagctgccatcccagaag

SEQ ID NO: 724673 - DNA, 100 bp, Homo sapiens
cgagtcactactgcctgcctgcctgcctgctacggctcttgcagccaatgccggaacaggatttgctgttgctgagcctcaaatcgcaatgttttgtggg

SEQ ID NO: 724674 - DNA, 90 bp, Homo sapiens
tccgcaactcctccagcccagccaccggggaggaccctgagggctcagacatcctgggagctcaggagggggaattgcactgaagatttg

SEQ ID NO: 724675 - DNA, 74 bp, Homo sapiens
tgggcttctgcggcctgaccgcgctctacttcctgatccgggcgtttagagacagatggtcagtctggaggatg

SEQ ID NO: 724676 - DNA, 100 bp, Homo sapiens
gtacgacagcctcaaacaggagctggagcagctcaaagaggatgtatcaggaatgccagctctgtgctctccaatttcccagggagggggtggttttgac

SEQ ID NO: 724677 - DNA, 100 bp, Homo sapiens
agcatggcttggagcacttcctattccactggattgggaaagaccatggcagcttctcaataggtttggcatggacaagatctatgaaggccaagtggag

SEQ ID NO: 724678 - DNA, 50 bp, Homo sapiens
gctcctgccctggactaccgaggatgctgaaatttctggaaaagacaatg

SEQ ID NO: 724679 - DNA, 100 bp, Homo sapiens
tcagaaacaggctccaggccctgcctgccctgtgcctctgcgtgctggtcctggcctgcattggggctatcatggtgaacttacttcagattgtgcggga

SEQ ID NO: 724680 - DNA, 51 bp, Homo sapiens
gggctcatctggattaataaaacgaggagaagaccttttcatgtgtatgga

SEQ ID NO: 724681 - DNA, 80 bp, Homo sapiens
gtaccaatgaagccagagagggcttggtggatgacaaggaggcctgagtagaccgcagacaaagtctcccgttgagagta

SEQ ID NO: 724682 - DNA, 73 bp, Homo sapiens
cggcgagcccggtccccgccggcaccatgggacctgtccatgatcctgtgtgaccccttcgccatcaacacgc

SEQ ID NO: 724683 - DNA, 75 bp, Homo sapiens
tagtacccagtgagacaaatttcctgcacttcacctggcatgcgaagtccaagctggagaatgctggaggagacc

SEQ ID NO: 724684 - DNA, 100 bp, Homo sapiens
gggatcgtgaccgagaccgtgaccgagagcgtgaccgagagcgcgaatatcgtcatcgttagaagcattcctctgaatattgatttgctgaatagcccag

SEQ ID NO: 724685 - DNA, 50 bp, Homo sapiens
gtgcatcaaaggtgtgaacacaggagaattctcaccaaatgttcccaaat

SEQ ID NO: 724686 - DNA, 74 bp, Homo sapiens
atcagatcctcaacagctacaagccacaggcaaggttatgcaatggtctctgcaagatggtttattcttgaatt

SEQ ID NO: 724687 - DNA, 75 bp, Homo sapiens
ctgaactcttcagataatcagagtggaggaagtacagccagcagtccaagaggctaaatgtgagaatccagaatt

SEQ ID NO: 724688 - DNA, 80 bp, Homo sapiens
ctgcttttccatggtgaaaatattgaagcactggacaagtggtggacttgctttgtgaagagacagttcatgaacaagag

SEQ ID NO: 724689 - DNA, 100 bp, Homo sapiens
gggattccgcagatccggcagctttccgaaaggttggcaaaagcagcttttgatgatgcaattgcagaactggatacgctgagtgaagaaagctataagg

SEQ ID NO: 724690 - DNA, 51 bp, Homo sapiens
cacagctactcggactgcttgtagaatggaaactgaaagtggaaatcagga

SEQ ID NO: 724691 - DNA, 80 bp, Homo sapiens
ctgttcgcggtgacggtggcgccgcccggggcgaggcagggccagcagcaggcgggagcatttgacattgtgcagcaaag

SEQ ID NO: 724692 - DNA, 73 bp, Homo sapiens
caacttcagagatttgtccaaggtggagccgccaccaaaatgcagattttcgtgaaaacccttacggggaaga

SEQ ID NO: 724693 - DNA, 119 bp, Homo sapiens
tcttcatccgccccgtcggtgtacagcgtgcaagccctctctctcctggcagagttcagagtcgtgacacttcaagaggtgggcagattattcatttgtgaatgaacagcatttatgag

SEQ ID NO: 724694 - DNA, 98 bp, Homo sapiens
ttattgcctgttcagtactgtgggtgatatttgcctttagtgcactcttctccttcacagtaaagtggctgatgcctgaggaagtgcaccatggagag

SEQ ID NO: 724695 - DNA, 74 bp, Homo sapiens
cgggaacaaggaccggagctggatccgcggtgcggctgtggatgatgaggagtctgatgaggaagctgtgaaga

SEQ ID NO: 724696 - DNA, 100 bp, Homo sapiens
cggtcttggggggatggttccatcatggcgtcaatgcagctgtgccgaagcgagtgccacttgtctgcagggccgtaccgcggaaccctctttgccgacc

SEQ ID NO: 724697 - DNA, 74 bp, Homo sapiens
gcgagatccaggccaagctaaaggtattctctactgccgctgatggtcaaacgcaagtggaaattaaagtgtgt

SEQ ID NO: 724698 - DNA, 83 bp, Homo sapiens
ccttaaatgccgcaccctacggcatcgaaagacaatgcagatcttcgtgaagactctgactggtaagaccatcaccctcgagg

SEQ ID NO: 724699 - DNA, 75 bp, Homo sapiens
ttattcatatttatgttgacaaaaattcagctcagccctctctgggagatggttcaggatggcattgacctcaag

SEQ ID NO: 724700 - DNA, 83 bp, Homo sapiens
accgaggctgaggatgatggtagattgccagggagcatttcctgaagacgtagtcatgcagcacgtcagcagctcccagagca

SEQ ID NO: 724701 - DNA, 71 bp, Homo sapiens
gcaaagatggtacaaaagagtctttggaggatgcggctttgatggtgggtaattccagaattgattggcca

SEQ ID NO: 724702 - DNA, 100 bp, Homo sapiens
cggatcctggtggagcccgaaggggacagcttcccgctgatggagatcagcacctgtgagctgcatatccccaccgtttgaatctcttttaccttgccaa

SEQ ID NO: 724703 - DNA, 98 bp, Homo sapiens
ggatgaagaggttggagatgggaccacatcagtaattattcttggcaggagctaacatgattgtgtctggcagtgctattatgaggagtgaagacccc

SEQ ID NO: 724704 - DNA, 131 bp, Homo sapiens
cggggccagcgcagccgccgaccgctgcccgtggcacgcacctccgaggatgtcgctgctcccccttcccgcacagatacatccagaaagtgcccagaagaaacttcctgctggaaaaaatgaaaaagcag

SEQ ID NO: 724705 - DNA, 51 bp, Homo sapiens
tggcattccagaatatctcagatgagcagggtttttaatgaccacaacaag

SEQ ID NO: 724706 - DNA, 80 bp, Homo sapiens
atggtaaaaaattggagacagcgatctgactgcagccatgagcagcaatgagtgcttcaagtgtggacgatctggccact

SEQ ID NO: 724707 - DNA, 90 bp, Homo sapiens
gccggaagcagctgagggaccagtactgctttgaatgtgactgtttccgttgccaaacccaggacaagtgcaatgtgccaccccaagccc

SEQ ID NO: 724708 - DNA, 90 bp, Homo sapiens
tttgccaccagcagccacaacagatcagggaagaaggagaaagggccaacccctgaagaagcaatacagaaactgaaggagacagagaag

SEQ ID NO: 724709 - DNA, 84 bp, Homo sapiens
cggcgagtttccgatttaaagctgagctgcgaggaaaatggcggcgggagcttaaagcttttcaagccaggccaagaagctgtg

SEQ ID NO: 724710 - DNA, 100 bp, Homo sapiens
cgtcagttggtgagtgtccggccccagatggagtcatcagaacccactgtgaggaagtgacttctccttgaggtcacccagacactccaaacagagcaga

SEQ ID NO: 724711 - DNA, 51 bp, Homo sapiens
caagcggctgggctgtcacggaggcggctgaatcggagtgatagtgacagc

SEQ ID NO: 724712 - DNA, 100 bp, Homo sapiens
ggccactcagagtcgcccgagaagttctgcggcatgaggaatttgaagaaggctgcaaagctgcctgtaatgggtatgataccttgtttcttaaaatctc

SEQ ID NO: 724713 - DNA, 100 bp, Homo sapiens
gtatcctctcgatcacatacagaagaggattgcacggaggagctctttgacttcttgcatgcgagggaccattgctgtccgatagacaccaggaagcaac

SEQ ID NO: 724714 - DNA, 100 bp, Homo sapiens
tgagcgagctgtcagagcccggggacggcgaggccctcatgtaccacacggaccgtagcctgacgggcaagctggaaccggtgtctccccccagcccccc

SEQ ID NO: 724715 - DNA, 90 bp, Homo sapiens
ccgggtcaatgtgtggaatattggggggctcggctgcagacttggccaaatggacgggactattaagcatcagaggctccttgaaatgct

SEQ ID NO: 724716 - DNA, 74 bp, Homo sapiens
ctttgatgttcctacaactgagtcagaaaggttacagtatgttcatgcggatgctcctaccaataaaacactgg

SEQ ID NO: 724717 - DNA, 75 bp, Homo sapiens
ccgattcctctcgggctcttgggcgctgctctgagatactgcctcatcacagttgggttttggggttctggaact

SEQ ID NO: 724718 - DNA, 90 bp, Homo sapiens
ccagcgtacatactgaatgatctctacatctcagactactgtgtgtggattcagaaagtcaacttcctggagaagagcccattggaagag

SEQ ID NO: 724719 - DNA, 83 bp, Homo sapiens
ggactacaaagaaggagacaagagcctacagctcagactggaggatgaaacggttcgatacaagaggctgttttcctagcgtg

SEQ ID NO: 724720 - DNA, 78 bp, Homo sapiens
tgtgtttcacttaccagaatactacgttcagctaaattaagggagttaaactcgaagaccaccttgaaatttgtgcac

SEQ ID NO: 724721 - DNA, 100 bp, Homo sapiens
gatggtgaatgtgtgcggacacactctaaacagcacttcttctcagtctcagacaagtactgcctccagaaaagccaattcaagcgttgggaagtggcag

SEQ ID NO: 724722 - DNA, 51 bp, Homo sapiens
tcttccttcagatcactattcagaagaaacgactaaatacgttgaacaagt

SEQ ID NO: 724723 - DNA, 74 bp, Homo sapiens
ggacctcaagccatcctcctgccgcagcctctcaagtatctaggactacagaatgccagaggattcaacatgag

SEQ ID NO: 724724 - DNA, 83 bp, Homo sapiens
tagacctggaatcgcccaagtccctctactcgcgagacacatgcctcactcctgtcagcagttccaccttttcatggttgagg

SEQ ID NO: 724725 - DNA, 82 bp, Homo sapiens
cgggacccggtgtctgctcctgtcgccttcgcctcctaatccctagccactatggtagtgaagcgcgcagtggcgagccagc

SEQ ID NO: 724726 - DNA, 100 bp, Homo sapiens
taaaataattgggcagaagagaagcagtgaaggagtgcagaggcatcacctgaaaggtgtgtcgtttggactggtgatgagcgggtcttcttttataatc

SEQ ID NO: 724727 - DNA, 100 bp, Homo sapiens
ctctacatcccatctcaatcagaattactagattttctctcaaactacgaggagggcctgaggctatggcaggaggagcaggagaggaaggtgcaagccc

SEQ ID NO: 724728 - DNA, 100 bp, Homo sapiens
tgcttgatatcacagaggaaactctgcattctcgcttcctggagccacctggtttccatcgggcctatagttccccactctacagcaaccagcagtacgc

SEQ ID NO: 724729 - DNA, 90 bp, Homo sapiens
ctgcagtctggagttggagcccttgtcccaaccagggctggataagaaggtgagccctattcccagaggcaggtggtgctgaccctgtaa

SEQ ID NO: 724730 - DNA, 98 bp, Homo sapiens
gaacccggccctcaccgccctcaccacccctatccagacggctgcccttcaagtaccagtgttacagcacatgaaggccgtgcaggcagatcaggagc

SEQ ID NO: 724731 - DNA, 101 bp, Homo sapiens
aaacgttatagcaacagcctctgattacgacatggctgagatcaccaatatccgacctagctttggtcaccaaggaagaaggattggccttggcccgagaa

SEQ ID NO: 724732 - DNA, 100 bp, Homo sapiens
agattatggctttgtccccacccagcactgatgatattataaaactgagaactatgagcagagaatacgtgaacaacaggaacagctgtcacttcaacag

SEQ ID NO: 724733 - DNA, 90 bp, Homo sapiens
taagacttcccagcattcctacagatataaatagatacactgcctctaggactgggacagatagccactgagtacctgcttcaaatcacc

SEQ ID NO: 724734 - DNA, 90 bp, Homo sapiens
gaatactacgttcagctaaattaagaacatacggtccctaatgagcacagagaagaccaagggcttctgccagctggtggtctcgtccag

SEQ ID NO: 724735 - DNA, 87 bp, Homo sapiens
ttgtaggagcatggcttggagcacttcctattccactggattgggaaagaccatggcaggcatcctagaatacgtttccacacgggt

SEQ ID NO: 724736 - DNA, 90 bp, Homo sapiens
ttcttctcatcccagggccaggagtacaccgtggtgttttgggatggaaaagaggagtccagcactggatttcctggaacaaattttgac

SEQ ID NO: 724737 - DNA, 74 bp, Homo sapiens
ggctccctgaggcccgcccagccgacactgtgccctgtccacggtgcctcctgcatgtcctgctgccctgagct

SEQ ID NO: 724738 - DNA, 50 bp, Homo sapiens
ggggccttgataacacagagtttcaagtcatctcagcaaaacttaaggaa

SEQ ID NO: 724739 - DNA, 51 bp, Homo sapiens
ggacaccccggaagctgggaaatgaagatggctgtgccacccacgtatgcc

SEQ ID NO: 724740 - DNA, 100 bp, Homo sapiens
attaatgtactgagtggagtatccggccagttattgaacaaacctttcctttttctaaagttccagaagccttcctgaaggtggaaagaggacacgcacg

SEQ ID NO: 724741 - DNA, 101 bp, Homo sapiens
aaagaatggagaactattaaccaccattcttcagtgggctgtgattttcagaggggaatactaagaacaccaaatcagatgaaagccaaggaagggaggaa

SEQ ID NO: 724742 - DNA, 75 bp, Homo sapiens
gtagagactgatttgcaacccttccgggaagccatagctctgcatggtcttatcgaatgttacttagcctccaac

SEQ ID NO: 724743 - DNA, 75 bp, Homo sapiens
caagacccatctttatgcaaagccagcgttacagtaatgttccaggttagagccacagctgaaacaactacaaac

SEQ ID NO: 724744 - DNA, 87 bp, Homo sapiens
gaagcgccttagaggagccatttttccaggctaccaagcagtttctcgaagagattaacaagtggacagttcagtacaatgtttccc

SEQ ID NO: 724745 - DNA, 82 bp, Homo sapiens
tatagctctgtatgagaaggacaacacctacttaggcctcctttcatgtactctgcccaacggttttgggggacaatctggg

SEQ ID NO: 724746 - DNA, 50 bp, Homo sapiens
ggttggcaccactgaagtgaccgaatgagacaaatttacatgtattggag

SEQ ID NO: 724747 - DNA, 100 bp, Homo sapiens
tccaccagcaaccatgagtggttccatgatgggaagtgacatggtaccaaccaagaagctgaagaaatatgagaaagaatatcagacaatgcgagagagt

SEQ ID NO: 724748 - DNA, 99 bp, Homo sapiens
ctgaaaacagctcttcagcatctacgggaggcaaacttgtaaaacctggaacagcagcatcattgtcaaaggctcagagcccctacctcccacacagtg

SEQ ID NO: 724749 - DNA, 50 bp, Homo sapiens
gctggacaaccactcctcggagttcaaatggtcagtaggacagaaggtaa

SEQ ID NO: 724750 - DNA, 82 bp, Homo sapiens
atgtccttcatcctcaacgccctcacctgaaactatgttccaacttcctgtcaacaatcttggcagtttaagaaaagcccgg

SEQ ID NO: 724751 - DNA, 82 bp, Homo sapiens
gagaattcctggggcgcaccgccaagagctgggagttttccgtctgatgaaggttggccatttgcaaagtatcttggagctt

SEQ ID NO: 724752 - DNA, 100 bp, Homo sapiens
tcttaggaaacttggagagaagatgacctggcccaggagatggaagatgtggactttgaggaagaagaggaggaagagggcaacgaagagggctgggttc

SEQ ID NO: 724753 - DNA, 98 bp, Homo sapiens
ggagaggacctgttcaccagcactgtctccaccctagagtcgtgagatggagaataaagaaactctcaaagggttgcacaagatggatgatcgtccag

SEQ ID NO: 724754 - DNA, 90 bp, Homo sapiens
cccagctggagtcatgggaggagcccttcatgcctgcttgggaagttgtgacttcagccatactgagagagctgtcgatgatgaaatcga

SEQ ID NO: 724755 - DNA, 75 bp, Homo sapiens
cgaactggaatctggatgagcagctcaagcaggtcaaagagccccctgaaatcaatttagttttgtaccctcaag

SEQ ID NO: 724756 - DNA, 90 bp, Homo sapiens
caagccggggcagtttcagtctccaccccaaatgcaggctcaggcagctgtccaaggacctgttggtacagatttcaaacccttaaatag

SEQ ID NO: 724757 - DNA, 75 bp, Homo sapiens
tcaccggggccccgccgggaactggggcccccctggggactacccagtggtgaaggttgtcgtattgaactgtga

SEQ ID NO: 724758 - DNA, 101 bp, Homo sapiens
ggcttctgaggagtaagcggcgcggtagcgaaggccgccgaacctgcctggctagccggcgacttgagtgacgattggaaaatggatataccttatttgat

SEQ ID NO: 724759 - DNA, 100 bp, Homo sapiens
ccgcaggatacccgccgagggtagggtcgcgctcgcccgggcggcagactctggccaggctgccgcacctctacaggaactttgccgcggagcagtatgc

SEQ ID NO: 724760 - DNA, 96 bp, Homo sapiens
cgctcttccccacctgcccggtgcccgaggaggcagccaagctcgtagcctgccactccgtgcataatcaggacacccggagcaacctggacataa

SEQ ID NO: 724761 - DNA, 74 bp, Homo sapiens
atgttgatgaacagtaccaggaagaggcagaagaggaggcttatcaggagggcagacttcaaaagctactaaaa

SEQ ID NO: 724762 - DNA, 75 bp, Homo sapiens
ccatgcagcaaaagaaggagggtcctctcagtgattaaggtttatgctaaaactatcgatgggcaacagactatt

SEQ ID NO: 724763 - DNA, 83 bp, Homo sapiens
cgcgggtctgtcatcatgtcgcgttacgggcggtacggaggagcaaaagctggcaggctgacagaggcggcctcaggacggac

SEQ ID NO: 724764 - DNA, 87 bp, Homo sapiens
atggcgcagtttcagctcccgcagcttccgacgttcagagaagccgaactgggattaccatgcagaaatacaagcttttggacatcg

SEQ ID NO: 724765 - DNA, 76 bp, Homo sapiens
gttcaagaagtggccggagagttctgcatgttgattctggccataaaatgcagtaaaaacaaatccagttcccaag

SEQ ID NO: 724766 - DNA, 100 bp, Homo sapiens
cacccctgccaggactcctctgggcttgcagtcgctcccccgtacctctcctggccccctcagttctcccaggaaagctccaaccatggccatggggctc

SEQ ID NO: 724767 - DNA, 100 bp, Homo sapiens
gggggacacgcaggatgagccccgcgaccactggcacattcttgctgacaggtatgaacgctgccgtccgtgccgtggtgcgcatgggtatctacgtggg

SEQ ID NO: 724768 - DNA, 99 bp, Homo sapiens
cccgagctgacgtggcttgaattgggaggggggcagctggagcctcaggcggcagcgcttctagaccatgtaaatggacactgcacaagtccaacttct

SEQ ID NO: 724769 - DNA, 75 bp, Homo sapiens
ccggagcaagcggagctcccccaagagccggaaagggtgagcttgtcggccacagactgctacattgtgcatgag

SEQ ID NO: 724770 - DNA, 51 bp, Homo sapiens
cttacaacatggcagacattgacaagaattgaaagatgttggccatcgtga

SEQ ID NO: 724771 - DNA, 51 bp, Homo sapiens
gacaagacacttttcagaaagacaggtactggaggcgcaaagaaggcatca

SEQ ID NO: 724772 - DNA, 83 bp, Homo sapiens
cttcggcatgtccttcgcctgccagtcgggcagaaccccttcgagctggccttctccctagaccagcccgaccacggagactc

SEQ ID NO: 724773 - DNA, 100 bp, Homo sapiens
gaagaaaatgtatgtactgacgggaaaaggaggataagcaagtcgaatttttgtcttacggtactggaggcgcaaagaaggcatcagaaggagaaatctg

SEQ ID NO: 724774 - DNA, 75 bp, Homo sapiens
tagacttaggaatgtgtcaaatgggagccatttgcaaggatggaaaagaatacttgagatccatttgtaaggaaa

SEQ ID NO: 724775 - DNA, 100 bp, Homo sapiens
ggtgctaatccagtggaaatcaggagaggcgtaacctgatgatggaaggtgcagcgtcaagtgctggagaacagctggttgatctgacttctcgggatgg

SEQ ID NO: 724776 - DNA, 100 bp, Homo sapiens
aacatcctcttcagtgctggctatgactacaaggggaacgcccttttgcttgtgactggcagggctgcgacaagaagttcgcccgctccgacgagctggc

SEQ ID NO: 724777 - DNA, 100 bp, Homo sapiens
tggagattgtcctgatactaaggacaagtattgctgtcaaagggaaaaccccccaagtaggtgacagagtattggttgaagctacttataatcctaatat

SEQ ID NO: 724778 - DNA, 83 bp, Homo sapiens
cgagcatgtgtcccgggcgctgtgcatccacactggacgcgagctgcgctgcaagacatgccttgaattggaacgctacctac

SEQ ID NO: 724779 - DNA, 100 bp, Homo sapiens
ctgggcgcagagggctcctccggcgccgccgagctgcgcccgctgccttcacaccccggacatccgcgccacacgccatctggctgctgtgcacaggcgc

SEQ ID NO: 724780 - DNA, 75 bp, Homo sapiens
tcctccaatcgagcgtatgattttctgtacggtaaactgtcttgagccccaccctcacctgcctgtgctggcaac

SEQ ID NO: 724781 - DNA, 98 bp, Homo sapiens
tcgcccgcagcgctcgccccacgggccgcgcgtggagggtcccgctccaattaaggaacagctatatcctgcttccttctgtaagcagcatcgacttg

SEQ ID NO: 724782 - DNA, 97 bp, Homo sapiens
tcagcttctttgtcaccataggagacatggacgaagccttcaaatccatcaagctcatcaaaaggctgtgattctaggattgaaaaagaggaaatga

SEQ ID NO: 724783 - DNA, 90 bp, Homo sapiens
caagtatttcatacacctactgtggcagccttaagtgccttgaaacaattttctgaacaaggactggatccaatcgatggagcaatgaat

SEQ ID NO: 724784 - DNA, 117 bp, Homo sapiens
cttatactcctcccagtgacgggtctggagtgcgtgggggaccggctgttggcggaacatgaaaggctcccggagcagcgctgactcctccaggaaacactgaggcagacgtgtcgg

SEQ ID NO: 724785 - DNA, 97 bp, Homo sapiens
cctagaatgcatcagtgcccttgtggcgaatggggctcacgtcgagccacgtgctgtacgccgacatcaagatggagaatgggaagtccaaggggtg

SEQ ID NO: 724786 - DNA, 98 bp, Homo sapiens
agcctgcctttccttccccctcggaaaatggttcccactgccgggcgagacacgatgaggcgagtggtacgacagagcaagtttcggcatgtatttgg

SEQ ID NO: 724787 - DNA, 85 bp, Homo sapiens
gtggacccggctactccacccctctggaggccatgaaagaattagacctttacgagaagcacagttttgtcttcagtttcctctc

SEQ ID NO: 724788 - DNA, 90 bp, Homo sapiens
atgggtttgtatggacaggcttgtccatctgtaacttcattaagaagccccagggccatcaaaagttaagacagggaagcctgaagaagc

SEQ ID NO: 724789 - DNA, 90 bp, Homo sapiens
gcacagattagaggaaggaagaggagactacctaggtggagaagcgtactgggccggcggcctgcacctctacaccccattacctttccg

SEQ ID NO: 724790 - DNA, 75 bp, Homo sapiens
ctctctcaagagaagctgcaagagcaacatctttcctcaccccaaggtgggttggtcacttctgtgcaaattaat

SEQ ID NO: 724791 - DNA, 90 bp, Homo sapiens
ttgaatgactggaaactgattggaaactctttgggaaagccactcgaaaagccagagactgctgctactttgaaacgtacgatagaggcc

SEQ ID NO: 724792 - DNA, 90 bp, Homo sapiens
aagagaactatggcaacatcaggtgactgtcccagaagtgaatcgcagggcaccagtgtcttgtcacctggactccacataggactaatt

SEQ ID NO: 724793 - DNA, 89 bp, Homo sapiens
cctcgcggcatggcgtcggaggggccgcgggagcccgaaagcgaggagtctccccaggacagtgctatcacccgggatattaaccgaac

SEQ ID NO: 724794 - DNA, 72 bp, Homo sapiens
cagattttgaagaagggccgtcgaggaaaagaccctgaaggatgccagtgacaatgcacgcaaggacttcca

SEQ ID NO: 724795 - DNA, 75 bp, Homo sapiens
gaggcgcgggaggtgttcgagaacgaccccgagacgcagcctcccgcgacgatgcccctcaacgttagcttcacc

SEQ ID NO: 724796 - DNA, 100 bp, Homo sapiens
cgccgagctggacccggaccggttttgggatgaaacaggcgcctatttaatcgacagagaccccacctactttgggcctgtgctgaactacctgagacac

SEQ ID NO: 724797 - DNA, 74 bp, Homo sapiens
ggcggacggggagctgaacgtggacagcctcatcacccggctgctggaggaagttccacctggtgccaagcatc

SEQ ID NO: 724798 - DNA, 96 bp, Homo sapiens
ggataagcgtggttcccacaaagagtataagcgagggaagtcgtgcacgaacaccaaggctgatttaaactgcaatattcaagatgatgctggggc

SEQ ID NO: 724799 - DNA, 82 bp, Homo sapiens
ctgggatcccggccaccagcaattgtccgggggaaatttgcagtggtgagaaaatgtataaagaaagattctgggaaagaat

SEQ ID NO: 724800 - DNA, 75 bp, Homo sapiens
ccaaagccatcaatttcaactttggctatgccaagctgaccatgaatgacttcagcgtgcatcgcatcattgggc

SEQ ID NO: 724801 - DNA, 73 bp, Homo sapiens
aaggcctcgcacattcagttggacaggcgcagttgtgtagcagttgagtaatgctggttagctgttaaggtgg

SEQ ID NO: 724802 - DNA, 100 bp, Homo sapiens
ccggtaacaaacgagggttcccgggattggaccgacgcagccatggctcagcttgtcaatcggaaacagaaattagagtctgtggaactttctagccaat

SEQ ID NO: 724803 - DNA, 100 bp, Homo sapiens
accttgaaggaccagagattttttttgaggatgaactggtgtgtatcctaaatatggaaggaagggaaatgtttcaacgtgcgcaagcgttgcggcggcg

SEQ ID NO: 724804 - DNA, 109 bp, Homo sapiens
attatgtcaactgattgatgttcttcaaaacatggtgaaaacatgcaactctgaagaatcaggggtttctgaaggattgtcattcttgcatagcagtgtgaaaatggtg

SEQ ID NO: 724805 - DNA, 125 bp, Homo sapiens
aaattgctgtccaagtgaataatggggatgctggaagggagatgccctgcccgttgccctgtgatgaagaaattgtatcacggactgattcaccgagcccaaccgtactcaactcacatatttct

SEQ ID NO: 724806 - DNA, 75 bp, Homo sapiens
aacaggccaaagccagactacagctggttcttgaagctgctggtatgtcgagagtaccaacgtggcaattgcaac

SEQ ID NO: 724807 - DNA, 93 bp, Homo sapiens
cctccttcttcctcaactatctcgctgacacgcaggtggtatggtcaggaaaaagactacaatgtactagtcatggatcttctgggacctagc

SEQ ID NO: 724808 - DNA, 100 bp, Homo sapiens
gctcctcgtgcctggcggcgtgggcccgggcgagcagccctgcctccggacgaggcggccttagcaacatgctgttccagtgctccctacctgacaccac

SEQ ID NO: 724809 - DNA, 149 bp, Homo sapiens
aaaacagcagatggctcgagaatacagagagaaaattgagacggagctaagagatatctgcaatgatgtactggtgattcgcaaggggtggctcaccatcagcaacattggcatcatgaaaggcggctcgaagggatactggttcgtcc

SEQ ID NO: 724810 - DNA, 74 bp, Homo sapiens
tcatggggcattcagaatgggaccacaaacgagggccaagaggatcacaggaggatgttgacaaggcagtgaag

SEQ ID NO: 724811 - DNA, 80 bp, Homo sapiens
gaaataaaggaggagcacgaatattccctggatttctggaggtgatgcagctaattgccccagtttggaaaacatggact

SEQ ID NO: 724812 - DNA, 75 bp, Homo sapiens
aacaagggcctcagcctgcaacacataggccggccccacagcggcattgatctgccttctggagactgcgccgtc

SEQ ID NO: 724813 - DNA, 83 bp, Homo sapiens
ctgtcttcggtggactccttcggcagtccacccaccgccgccgcctcccagaagtttgcctgcaatggtactgtaattgagca

SEQ ID NO: 724814 - DNA, 97 bp, Homo sapiens
ctgcccgatggtcttccgtaacctgcgggagaggtttggaattgatgatcaagatttccagattggcagtatggagttactcaggccttccctcaca

SEQ ID NO: 724815 - DNA, 78 bp, Homo sapiens
ggagtcggctgagggaaaagcgaggcaaggcaggcgggtgctggctgccagctgctgcgccccccatgtagaaggtgc

SEQ ID NO: 724816 - DNA, 100 bp, Homo sapiens
ggaacatgtctgagtcggagctcggcaggaagtgggaccggtgtctggcggatgcggtcgtgaagataggagacgcacaggatctacaagcagaagctgg

SEQ ID NO: 724817 - DNA, 82 bp, Homo sapiens
gaacgtgccatggagacgcttaacggtcaaaatgcagatcttcgtgaaaacccttaccggcaagaccatcacccttgaggtg

SEQ ID NO: 724818 - DNA, 75 bp, Homo sapiens
tacgtctgcggaagtgcagctgcctcagttcttagcgcagattctctaaccatggcacaggtagagaaacgtgga

SEQ ID NO: 724819 - DNA, 82 bp, Homo sapiens
ctcacttgcatgtatttggaacaaaaaaaggagatgcctggcagccccgctctctgcagtagatgatgagctggagatcaag

SEQ ID NO: 724820 - DNA, 100 bp, Homo sapiens
cacccagtgactggtccccatcctgggtcatgtggctggaattaccacggttttcctcctccaccaggcgctccacctccatctcttataccaacaatag

SEQ ID NO: 724821 - DNA, 75 bp, Homo sapiens
gcctgcccggctgttggggtggcggtgacgacaggcagcaaaagaccaggcacctcagatgtatccatatcctgt

SEQ ID NO: 724822 - DNA, 74 bp, Homo sapiens
agcgcagcaacagcaagctcccgggcaggtttctgagtcccttcaacatgatcctgggaggaatcgtggtggtg

SEQ ID NO: 724823 - DNA, 76 bp, Homo sapiens
gacaggcatttcccagaccctcttggtggtgagcttcattttctccaaattggaggaacctgtgatgatattgatg

SEQ ID NO: 724824 - DNA, 100 bp, Homo sapiens
gcagctgtttgtctgttcgacacaggcttggggccgacgggggagacggagccccagatggactcaccctgtcacccaggttggactgcactggcctcaa

SEQ ID NO: 724825 - DNA, 75 bp, Homo sapiens
ccactacagggaagtgcatcacatgtcagggttgagaatgcttgcaccaagcttgtccaggcagctcagatgctt

SEQ ID NO: 724826 - DNA, 90 bp, Homo sapiens
ctatctgccacacatccagcgtgaggtatgcgccaggggaacgaccatggcactcagtaccgctcggccatctacccgacctctgccaag

SEQ ID NO: 724827 - DNA, 74 bp, Homo sapiens
atattttggaaagcagtttttaagacaagtgggtgcctgaacctgcctttcaaagagggttttcttagaccgtg

SEQ ID NO: 724828 - DNA, 100 bp, Homo sapiens
cttccttctgggattggagctcaccaatccctgtttattgggaaggatatgttcgattcttaaatacgccatctgacaaatcagaagatggaaggctaat

SEQ ID NO: 724829 - DNA, 100 bp, Homo sapiens
tggcagcggcagcaccgggagtcagcagagtgaagaggaacttcctgaagtgctccgaagacaacccgctctttgccggcatcgactgtgaggtgttcga

SEQ ID NO: 724830 - DNA, 82 bp, Homo sapiens
caaaaggccacggcacctgaagccccgagccctcccagcgcagggcgccatgttttggaagtttgacctgcacacaagctcg

SEQ ID NO: 724831 - DNA, 90 bp, Homo sapiens
aaacgagcccctatcctaggattacctgaaggtgaaacagattgagccagaaggaagacaatgctggaaaagcttcctgcttaccttgcc

SEQ ID NO: 724832 - DNA, 75 bp, Homo sapiens
tggagccctctggcggaagccatcagctatggagataggcagatgacgagtaaccagctcataaatcacatcgaa

SEQ ID NO: 724833 - DNA, 74 bp, Homo sapiens
gaagaggagccctgggtgatggaggaagaaatgtttgggaggcactgtccaggagtccatagaggccactgtat

SEQ ID NO: 724834 - DNA, 76 bp, Homo sapiens
agtcagtattccggccagcttcacgaagtcagagaggaaatcataggtgggatgctggatatagaaccaagacttt

SEQ ID NO: 724835 - DNA, 100 bp, Homo sapiens
agtgcagatgggggattttgtgcgctaccactacaacggcacttttgaagatggcaagaagtttgattcaaggtaccccaagaagctagtgcagacttat

SEQ ID NO: 724836 - DNA, 76 bp, Homo sapiens
ggggaacaccaagcagagctctggccgagagttttctggatatgccgcagaaggatccgtgccagaagcaagcctg

SEQ ID NO: 724837 - DNA, 97 bp, Homo sapiens
ccgggaccgggatcgtgaccgtggaggggagcagattttaagagtaaaagaagatgagaatgttccatttctactggttggtaacaaatcagattta

SEQ ID NO: 724838 - DNA, 97 bp, Homo sapiens
ctacatgtacagcgaccacactgaggtggcagtgctccttttggacttttctctaggtttggcgctaaactcttcttgtgagctcactccacccctt

SEQ ID NO: 724839 - DNA, 100 bp, Homo sapiens
gcctccaggcccagtgccaggagaacccccatcaaaggaagacagtgtggagcagataaggacctgggatccagttggaggacggcggtgatggcaggga

SEQ ID NO: 724840 - DNA, 50 bp, Homo sapiens
gatctttgcagagtatttcaatacgtggaagttaaacgagctgagcctcg

SEQ ID NO: 724841 - DNA, 98 bp, Homo sapiens
tccctggctgtgctggcggaggctgcgccgatgaacctgactgaggctaaagaattacctccaaagccattgtcaagaccacagcagtcatctgcacc

SEQ ID NO: 724842 - DNA, 100 bp, Homo sapiens
tcgactacaaacggaacttgccgcgtcgaggactgtcgggtcacaacgccgacgacatggcggagaccgtgctcatgaacttcctacggggcgacgcggg

SEQ ID NO: 724843 - DNA, 100 bp, Homo sapiens
atcaggtttcctgatgtgagcaggtaaggtactcaactgtgtggggtactacataaatcctgaaagactacaataaagtggtgatgtctcgggaacccac

SEQ ID NO: 724844 - DNA, 82 bp, Homo sapiens
atagggacagccgcccctggtgcacacaccctcgtattctcctgcccttccccagaggctgacccgcggctgattgagtccc

SEQ ID NO: 724845 - DNA, 100 bp, Homo sapiens
aataagttatgctatgaggatgacaaactctggagtaattggagccaagaaatgagtatagatgtgaatttcttcggagtaagaaatcctcagaggaaat

SEQ ID NO: 724846 - DNA, 96 bp, Homo sapiens
gaacccccagcttggagcgcaagatcggtcgcttggttatcggacagaatggaatcctctccacccctgctgtatcctgcatcattagaaaaatca

SEQ ID NO: 724847 - DNA, 74 bp, Homo sapiens
tttgggaaaacacttcaaatgctgagatcatgatgctgcgattaatagatatagccgtttatcaaaaaaaagag

SEQ ID NO: 724848 - DNA, 50 bp, Homo sapiens
acagccgagccaagcagatgcccggaaaagaccagtgccctcagtctgag

SEQ ID NO: 724849 - DNA, 100 bp, Homo sapiens
gcaagatggcggacgagaaggacagggaagggcgccaatgcttcggcattagagaaagagattggtccagaacagtttccggtcaatgagcactattttg

SEQ ID NO: 724850 - DNA, 75 bp, Homo sapiens
gcagagtaaataaagctcatggcccaccagctagaaagatataatgaagatctggaacttgaagatgccattcat

SEQ ID NO: 724851 - DNA, 100 bp, Homo sapiens
cagaccctggagcctcagttggaagcagccgatccagcctgcggagcctgtggggcaggcccgatgagagaaagggaaagttaaggatgctggagcagaa

SEQ ID NO: 724852 - DNA, 96 bp, Homo sapiens
tccggactcagccaagttccccaacggctccccgtcgtcctggtgctgcagcggcgaaggcatgcaatccacagtagtgactcgacttcatcttcc

SEQ ID NO: 724853 - DNA, 100 bp, Homo sapiens
gctggaccagctcatgggcacggctcgggacgcttgctcctgagaccaaggctgtcattcattggattatggatattccttttgtgctttctgccaatct

SEQ ID NO: 724854 - DNA, 98 bp, Homo sapiens
atcagactcttgaaggtcatagtgatccctgccagaaccaccactgcaaacacggcaaggtgtgcgagctggatgagaacaacacccccatgtgcgtg

SEQ ID NO: 724855 - DNA, 75 bp, Homo sapiens
gaccagcttcctctggactatgccaaggggcaccaccacgaggcgatttgtgggccataccaaggatgtgctgag

SEQ ID NO: 724856 - DNA, 90 bp, Homo sapiens
tggactcatggaggctgagcatttattcagattcctgacattcagacaactgacttgtaactgacttataactgacttgtaatacactgc

SEQ ID NO: 724857 - DNA, 75 bp, Homo sapiens
gaaggacaggcagagctaaacaagttgctcttcaaaaaatggactcaatgctttcctcagaagctgcctgggtat

SEQ ID NO: 724858 - DNA, 100 bp, Homo sapiens
cggaggagtcagctgtgtgtccagaacgtgccatggagacgcttaacgagcatccaggatgtgaggagtgatgacgaggattatgaagaggaagaggaag

SEQ ID NO: 724859 - DNA, 98 bp, Homo sapiens
ctgcctgtgttgaccttattcacaaagatcaaaggtccatcatcaaaacaccaaagactcaagacacagaagatgatgagggagctcagtggaattgt

SEQ ID NO: 724860 - DNA, 100 bp, Homo sapiens
ggttagtgtgctctgagggagggtccgagccagccgctgttttgccggaggagcccctcaggccctcatgatggagcagtccaagaagtcctccctcatg

SEQ ID NO: 724861 - DNA, 89 bp, Homo sapiens
gaggagcgagcgctgcgaggtggcggcctgagcccccctcccaactcccaaatcccccggcgtcggagatgaggccccggatgctgcca

SEQ ID NO: 724862 - DNA, 98 bp, Homo sapiens
caaaattgtatctgtttttctcagaagagaattccacaaggtttatggctacaaatgatttgatgacggaactgcagaaagattccatcaagttggat

SEQ ID NO: 724863 - DNA, 101 bp, Homo sapiens
cggcacccccgcacaggcgcctctgccctgcacgtggctgctgccaagggctacattgaggtgatgaggtgctggagaatctggtaaaagcaccattgtga

SEQ ID NO: 724864 - DNA, 98 bp, Homo sapiens
attttcttcctgcccctcgttgatgagagcattcgaagtgacctcagcagggcatccaggtgtgatgaatgcagactctgctaccattttggctgttt

SEQ ID NO: 724865 - DNA, 100 bp, Homo sapiens
aagcacaaggattctcgctgtgacagagacaacaccgagtatgagaagtgcatgctccgagtccttgattcatttggtactgaacccgaatttaatcatg

SEQ ID NO: 724866 - DNA, 100 bp, Homo sapiens
ttgtttggatgatccaccgggtccatttgatagcctagaagaaagcaggttttctggatatgccgcagaaggatccgtgccagaagcaagcctgtgagat

SEQ ID NO: 724867 - DNA, 90 bp, Homo sapiens
ggacagttcgctacacagcaatgcatcgaggaaagaccacagcaagattctttcattcgtctcctcctagcctgggggaccaggctcgaa

SEQ ID NO: 724868 - DNA, 75 bp, Homo sapiens
ctgcagtcctttaacgagatcactgctatgcaaagccttctagacaagctcagtggaatctgaagggcccacccc

SEQ ID NO: 724869 - DNA, 82 bp, Homo sapiens
gctctctagaaactcgctctaaagacggaaccgccacagcactcaagagaacgtatttaccgggcagtcaaagatctattcc

SEQ ID NO: 724870 - DNA, 75 bp, Homo sapiens
gaacagaagaagaagaaccggaagaaactgtccgagaagcccaaagaaatctgaaatagagtactatgctatgtt

SEQ ID NO: 724871 - DNA, 43 bp, Homo sapiens
cgtcagcgctgactccatgcagcgcttctctgaagtagctttg

SEQ ID NO: 724872 - DNA, 100 bp, Homo sapiens
gcagatgaggcctagccgaggcggcgggacccccaagtttggaaagctcttttaacgcaagccaaattacagcagcagatggacctgcagaaaaatcaca

SEQ ID NO: 724873 - DNA, 75 bp, Homo sapiens
caaagcgctggaattatgggcgtgagccactgtgcccaggaagatgagaatgtgcctactgctcctgatcctcca

SEQ ID NO: 724874 - DNA, 90 bp, Homo sapiens
ctcagctcgccaggcggcgcaggatcggtcgcttggttatcggacagaatggaatcctctccacccctgctgtatcctgcatcattagaa

SEQ ID NO: 724875 - DNA, 82 bp, Homo sapiens
ccgaccgacaccgaccccgcctactgcggcgcggggacccttggtgatgtgtccaatctagatcccaacttctcatttgaag

SEQ ID NO: 724876 - DNA, 80 bp, Homo sapiens
cttgtgggagcaaaaccaacgcctggctcggagcagcagcctctgagatcttcgtgaagactctgactggtaagaccatc

SEQ ID NO: 724877 - DNA, 100 bp, Homo sapiens
ggcacggaaacacccgtaccttacccaactctactgctgcttccagaccaaggggaggaacaggaagagaagagtgtggcctcctagaaatctagcacgg

SEQ ID NO: 724878 - DNA, 75 bp, Homo sapiens
gccgggctggctgcggccgccctgggccgggccccaccggacgaacccagcgggtgccgcttctccacccgaggc

SEQ ID NO: 724879 - DNA, 82 bp, Homo sapiens
cgggcgtgggggcctcaagctgtcccaggacatggacacctgtgaggattttttatcaagcagaaatgcatcgaacaacgag

SEQ ID NO: 724880 - DNA, 90 bp, Homo sapiens
cgcatcttccggatctttgaggggacaaatgacattcttcggctgtttgtggctctgcagggctgtatgtaggtgagtcaacacaagatg

SEQ ID NO: 724881 - DNA, 100 bp, Homo sapiens
ctttaggatttgcagctccaggaagcgagatgtcgaagccgccacccaaaccagtcaaaccaggctggccagctaaactatgtggatccagctactggct

SEQ ID NO: 724882 - DNA, 100 bp, Homo sapiens
tgaggccccgctccccgaaacgtgaccatgtggattcaacagcttttaggactcagagacgtctcccacaacctgctccgggcgctggacgttgggctcc

SEQ ID NO: 724883 - DNA, 80 bp, Homo sapiens
ctgcctccaccagaggaaaatagtatgggaattcctattatggtatctcgggggagctttgtgccttgatggatcaagtt

SEQ ID NO: 724884 - DNA, 95 bp, Homo sapiens
tctggggaccagcgaagaccaccagcacttcacctgcaccatctggaggccccatggacgccagcgtggaggaggagggtgtgcggcgtgcactg

SEQ ID NO: 724885 - DNA, 100 bp, Homo sapiens
tttaacattcctagcaaacctccttggagcaagcattagtgccagcagtagttcccaagggctgtctcagccatccacccagacgactcagtatctgaga

SEQ ID NO: 724886 - DNA, 51 bp, Homo sapiens
gctatatggggtgctcgaccataggatgcatggcctgtatgagaagaaaaa

SEQ ID NO: 724887 - DNA, 49 bp, Homo sapiens
gagtggatggggacctgcctgctggtgtgaacttcaacccggagcactg

SEQ ID NO: 724888 - DNA, 100 bp, Homo sapiens
tctttgtgtatgtccaccacagttactttatcccttcatctgtggatgggcaggtctctcacaaacccaaatcactcactcatactcaagctgcctcttt

SEQ ID NO: 724889 - DNA, 75 bp, Homo sapiens
gctgggtccgctgagcggggcgacccgagctgacggcccagagggtgggtgccaattccaccagcagctgcaact

SEQ ID NO: 724890 - DNA, 75 bp, Homo sapiens
ctccgggaccggagtcagaaccctccgcagagtaaagacattcactactttcactgcctaagaatcctggacctt

SEQ ID NO: 724891 - DNA, 75 bp, Homo sapiens
tcttcctcttccctaacgccctttccaccagtgcggactgcaggttatcaatactctggctgaccatcatcatcg

SEQ ID NO: 724892 - DNA, 75 bp, Homo sapiens
tcctggtaacgtttttatccatggatgacttgcttggggctgaccagtttgagtatgtaatgtatggaaaagtgt

SEQ ID NO: 724893 - DNA, 100 bp, Homo sapiens
tgagcaggctacagtccactccagcatgaacttacccagattgaggatccaagagaacagtggaggcgagagcaagagcgcatgttgaaggaatatttaa

SEQ ID NO: 724894 - DNA, 116 bp, Homo sapiens
gaaaatagcaaacgatccagacggcagggagtgcatcaaaggtgtgaacacaggattgacttctaaggactcttggtacatgaggaagaaacccggaaggggaagaggaaagcaaa

SEQ ID NO: 724895 - DNA, 75 bp, Homo sapiens
ttgtccactgagctgatctcctctctggagcaccggggccaccaggagggagacattgatgagtgtggcacagag

SEQ ID NO: 724896 - DNA, 90 bp, Homo sapiens
gagcaaaaggtgacagtcacagcttagtagctttgaaatatcagtgatgtataatgaatctgacctgcatacactcgtgaaatcaagata

SEQ ID NO: 724897 - DNA, 75 bp, Homo sapiens
aacaaaaatattaatgaggctatgagtgaggactcagaagacaaagatgtgaagaccaagaaggatgattctcac

SEQ ID NO: 724898 - DNA, 100 bp, Homo sapiens
gacgtggttgaggaattcagcgatttatacaacgagagcagtcattatggcgaaccttggctgctggatgctggttctctttgtggccacatggagtgac

SEQ ID NO: 724899 - DNA, 108 bp, Homo sapiens
cgcccgggaggaaggaacgaggcaaggagctaaagcagcgtgcgttcagccctgggtcgagtaatcctgcctgtgtctgtagatgaggtaagtccttttactttctgg

SEQ ID NO: 724900 - DNA, 100 bp, Homo sapiens
cggtcgccgcagtcacggagcgcacaaaatgaattgtgacttgtcccggtctctcttatctagtggtaagcatccgtggcattcaagacgaagatccccc

SEQ ID NO: 724901 - DNA, 75 bp, Homo sapiens
atccggatgctcatccataaaactgaagatgtgaatactctgagcttgtggacaaatgtataggatcaagaattc

SEQ ID NO: 724902 - DNA, 75 bp, Homo sapiens
gttaaggattccaagtaactcttatttggaaagaatgagccttaagcaccaaaacagtgggaaatgggccaagtc

SEQ ID NO: 724903 - DNA, 80 bp, Homo sapiens
atgcctgatacattcaattcatggtttcttataaccctactccacgtctgcattggattcaaaggctaacaatttgtcca

SEQ ID NO: 724904 - DNA, 100 bp, Homo sapiens
caagcacacactatggcgctgaaacggattaataaggccacggaaaggtatgatatatttgatccaagacagtccattccagtccgggaatctacagtgg

SEQ ID NO: 724905 - DNA, 80 bp, Homo sapiens
caagtacactgaaattcatcctgagatgaggtgagaagccctaccactgcaactgggacggctgcggctggaagtttgcg

SEQ ID NO: 724906 - DNA, 74 bp, Homo sapiens
ccacacctccggaccgagggacgcggtcaagagaatccatcccattaaatgacctgaagtcagaagtatcacca

SEQ ID NO: 724907 - DNA, 90 bp, Homo sapiens
tactgaatgatctctacatctcagactactgtgtgtggattcagaaagtcaaagctgtaggtaaaacttgcctactgatcagttacacaa

SEQ ID NO: 724908 - DNA, 75 bp, Homo sapiens
cccatcgagaaaaccatctccaaagccaaaggctgaaggctatgctgagggtgacctcactctctatcaccgtac

SEQ ID NO: 724909 - DNA, 50 bp, Homo sapiens
aagtactcaagatgaatttgagaatagcattgaagaacttgatggtgtcc

SEQ ID NO: 724910 - DNA, 75 bp, Homo sapiens
aactacatcaccgctctgcaggctgttcctcctcggatgccttcaattaagttgcagagttctgatggagagata

SEQ ID NO: 724911 - DNA, 74 bp, Homo sapiens
ccaggatacagacagccccccttcagcccagcccagccagaaggaagcccggtgccagccagccttcctgaaag

SEQ ID NO: 724912 - DNA, 90 bp, Homo sapiens
gctcacacagaggtgggaccagggcccgagagctcgcccgtggtcgtccgcaccgacgaggatgggtgtccgcaatgttgccagtgtctg

SEQ ID NO: 724913 - DNA, 100 bp, Homo sapiens
cggacaaggagttccagaatgtcatgacctacctcaccagcatccccaggacatgaccgataatagcaacaatcaactggtagtaagagcaaagtttaac

SEQ ID NO: 724914 - DNA, 90 bp, Homo sapiens
tagaaaacggcgagagtgggcgagaacgtccactgcgggccggcgaaagctgccgcggcgagtcctttgcacatgttggcaacacacgca

SEQ ID NO: 724915 - DNA, 128 bp, Homo sapiens
gcgaagctggccaaagcctgcccagacggctcacctgtgcgggatggaacaaaagtgagagtagcatgtttgtctccaagagacgtttcattttgaagacatgtggtaccaccctcttgctgaaagca

SEQ ID NO: 724916 - DNA, 50 bp, Homo sapiens
ccggaaaatgccctcaaacgcgccaacggaaatatatcctggacaattcc

SEQ ID NO: 724917 - DNA, 100 bp, Homo sapiens
gacccttttgccagacctcgaggtcatggcaggaaagctctactgagatgaagaaagaaaaagaatacctgctcagctccagagacacgtaaagggacag

SEQ ID NO: 724918 - DNA, 75 bp, Homo sapiens
accacctgagtcaccagttaactatggtagcccacccagcattggaaaaccagtagattcccagacatcgcgaag

SEQ ID NO: 724919 - DNA, 100 bp, Homo sapiens
gggaaaaaaaggctgggccttccaggggacgaggtggataacaaagtgaaaggccgacgtggaaaggaaattatcacagatgattcttgacaagaaattt

SEQ ID NO: 724920 - DNA, 50 bp, Homo sapiens
gcgaggaccaactccacctccggccgttgctccagggagaactgcaaata

SEQ ID NO: 724921 - DNA, 75 bp, Homo sapiens
agtctgttccacatgatcattgtaataaggacagagcgggatgccaccagcttgtccaaagggaagttccaggag

SEQ ID NO: 724922 - DNA, 75 bp, Homo sapiens
tcctgaagcctcaaagtttcatggaacacatgattctgtgcagatttgcagaccagacagctgtccagctcccac

SEQ ID NO: 724923 - DNA, 82 bp, Homo sapiens
ctgtaatcaataaaaaacttcccaaagaactcctgttacgcctcccccactggcaggattgccatgagttgtggagtaagaa

SEQ ID NO: 724924 - DNA, 53 bp, Homo sapiens
ctgaggcctctccagccatgtggaactgctggagtgcagtggcgtgatctcgg

SEQ ID NO: 724925 - DNA, 100 bp, Homo sapiens
atatacagaacaagatacctgctcagacaaaggaaaatttctaccttgaaccgtatctgaaagaggttattcgggaaagaaaagaaagagaagaatgggc

SEQ ID NO: 724926 - DNA, 98 bp, Homo sapiens
gtgaacatatctatgagtttccccagctttcggaggatgtcaggccgcgatgggcctcttggaacattggtgtgttcatctgcattcgatgtgctgga

SEQ ID NO: 724927 - DNA, 75 bp, Homo sapiens
tcaacaagccagatatagatgcctgggaattgcgtaaagcggctgccggaaacaacatggaggacatctttgggg

SEQ ID NO: 724928 - DNA, 100 bp, Homo sapiens
ccacaccctggcccagactgccagccctgacgggacagagccagggcactcaccaggctgcaagaacagtgctgggatacagcttggatcgagcttcctg

SEQ ID NO: 724929 - DNA, 88 bp, Homo sapiens
cttttttgagaaaggaaggaatatatcctgactgattgccaccccagcagacatgtttgccaaggcctttcgggtcaagtccaacacg

SEQ ID NO: 724930 - DNA, 73 bp, Homo sapiens
tctgtggacattagtgggcttcagttagccttggccggggcttcaagaagcgtgcacctcgggcactcaaaga

SEQ ID NO: 724931 - DNA, 95 bp, Homo sapiens
aatcagggtcttgcagccattgaaaagtgtggagaagctgctttaaataccctggaagctgtcctgaatttcaaatactctggaggcccgggcca

SEQ ID NO: 724932 - DNA, 75 bp, Homo sapiens
tgcaggatgacttagacgactatactctggatgaatattttgaatatgatgcagaggagttcttggtctctttgg

SEQ ID NO: 724933 - DNA, 90 bp, Homo sapiens
ctccagtatgttgccatctctaacctaccagctgccactttccagtggcgagtaagaaaagaagctatgatgggtctggctcagctttat

SEQ ID NO: 724934 - DNA, 100 bp, Homo sapiens
cgacggcctcagcaggcggggaagatgaaaggttgttgacctcctgtactggagagacattaagaagactggagtggtgtttggtgccagcctattcctg

SEQ ID NO: 724935 - DNA, 80 bp, Homo sapiens
tacggaccttaaaatacccgcaacagccccttcgtcccaagaggagatgttaaagtaacccatcttgcaggacgacattg

SEQ ID NO: 724936 - DNA, 82 bp, Homo sapiens
ggacgacgacgatggggatatcggtatcatgatattagctggtttgacatcaagtcatttgtgagtcatcagatcttctcct

SEQ ID NO: 724937 - DNA, 98 bp, Homo sapiens
gtagatgataaagatgatgatatccttctcaaccttgtgggatgtgaaaactctgttactgaagttgctgtcccctttgacgatgatgacaagattgt

SEQ ID NO: 724938 - DNA, 82 bp, Homo sapiens
gagagatagaggcagcagaagccagggcagctgaaagacagagaccttcagtggaagatagatgataagcctgtaaaaattg

SEQ ID NO: 724939 - DNA, 95 bp, Homo sapiens
gatattcttctccgcttacactctctgaccaggccatggagaagtgtaaggatgcaggattggccaagtccattggggtgtcaaacttcaaccgc

SEQ ID NO: 724940 - DNA, 89 bp, Homo sapiens
cttttgtttctcaacgtggaaaggtttactcgacaaaggcagggcaagactggagagttaaatcagcttttaaatgcagttaaatcaat

SEQ ID NO: 724941 - DNA, 83 bp, Homo sapiens
cccaattcttcattctgtcctccaagggggacccgctcatctacaaagactgaacaagatcaccatgattgctgagcctcttg

SEQ ID NO: 724942 - DNA, 80 bp, Homo sapiens
gctctcacaagcaaaagccttggagaggaggagaatgtatcaagaagtccattggaatattaagcccaggagttgctttg

SEQ ID NO: 724943 - DNA, 90 bp, Homo sapiens
cttacatactagaggcaggaaagcaccgagctgacaagtcaactctaagtatgcaaccgaggatggacttatacacacaaatgaccaggc

SEQ ID NO: 724944 - DNA, 82 bp, Homo sapiens
aagcccgagcggaaaatgaagctagaggacttcatcaagaacctccgagatttctccacccaggtgaactcctccctcacct

SEQ ID NO: 724945 - DNA, 51 bp, Homo sapiens
gcggcgccgcgccctcggcctgcacgggagattatttggtagcaattgaag

SEQ ID NO: 724946 - DNA, 101 bp, Homo sapiens
cttttcctggtgcatgtgaagttatcaaaaacaggtaccctggctaaagccgggccggagccctctgccctctcatgcccgcagccagcctgggctgtgca

SEQ ID NO: 724947 - DNA, 100 bp, Homo sapiens
attcgcagaggcatcagggctacacttaaatgaaggcgatagatgatgaggaagatcgcttccatggtgtgcgcctgcagacttcgcccccaatggaacc

SEQ ID NO: 724948 - DNA, 73 bp, Homo sapiens
tggccaaagcctgcccagacggctcacctgtgcgggatggaacaaaaggtgaacctgccgctgctcaccctga

SEQ ID NO: 724949 - DNA, 99 bp, Homo sapiens
gttttcacctcctgtgagcagtgggaaaaatggaccaacttctttggcaagtggacattttactggctcaaataagattgaagatgagctggagatgac

SEQ ID NO: 724950 - DNA, 87 bp, Homo sapiens
ctccgtggaagtccgtttcgtgagcagcgccaagggccatcgatgcacccctcggagctaatagcggagatgagaaacagtgggttt

SEQ ID NO: 724951 - DNA, 101 bp, Homo sapiens
ctcataaagcgagtcgtcaaggagttgcagtcaccttcaggccattcagaggaggaaagagaggggaatatgaagtcagccaagccccaagtgaaccacag

SEQ ID NO: 724952 - DNA, 75 bp, Homo sapiens
tcgacgccgcctggcaggccctgcgcaccagaaagtcctacctccatctccgtgggccccagcaccagccgacgg

SEQ ID NO: 724953 - DNA, 80 bp, Homo sapiens
cgtcgcaggtcgcaggcctctttgtcagctggagttgcgcggtggcagtgctccttttggacttttctctaggtttggcg

SEQ ID NO: 724954 - DNA, 121 bp, Homo sapiens
gcctgggccatgccgaaaaaaggagattgtgacatatcactgcattcaatacctagatgatggcagcaattgaagagaggtatggcaaagatctgctcaacctctctaggaagaagccgtg

SEQ ID NO: 724955 - DNA, 74 bp, Homo sapiens
cgggcacacccggctccccggacgcctcggataacgtggaaagggcagatgctttacagctgtctgtggaagaa

SEQ ID NO: 724956 - DNA, 100 bp, Homo sapiens
ttcaagtcactctgccgagaagaaaaccagcctggacaccaagtctgtgtcagaaggccacctcaagaggaacatcgtggtgaagaccgtggagatgcgg

SEQ ID NO: 724957 - DNA, 95 bp, Homo sapiens
acccgaatcgcagggagtcgccgctggagaggggctcggcgcccggcggggactgcagactaatagggatgccaaaggaaaaatatgatcctcca

SEQ ID NO: 724958 - DNA, 96 bp, Homo sapiens
ctgggaagagagcagccaggggcggacgaaaccatcggtagactccacaaggatggcaatgattcagatgaattcatgtaaaaggagaaaaggaga

SEQ ID NO: 724959 - DNA, 100 bp, Homo sapiens
gaggaatcagaaacctgaagttagaaaggctcaacgagaacaagctatcaggtttgactttacacataaaaaacaatcaggtggtgcaggccagtatgga

SEQ ID NO: 724960 - DNA, 95 bp, Homo sapiens
ggatgagaagcgtcagctggcttaccaggtgacttcaggtggaacattcattggcattggacggaaaacaccagattgccaagggaacaccaagt

SEQ ID NO: 724961 - DNA, 82 bp, Homo sapiens
gtggtattcgccggcacgcgaagtggccgcatccgcaagggccgagaactactggtggcgtggccagaacacacggacgctg

SEQ ID NO: 724962 - DNA, 100 bp, Homo sapiens
acagaattggacgaaagtttcaaggagtttgggaaaaaccgcgaagtcatggggctctgtcgggaagaggcttcgtgacggagttatcagagacattgag

SEQ ID NO: 724963 - DNA, 100 bp, Homo sapiens
tgctcaaagccctgggtcgcttggaagaagccaaggtgataaatatgcgtaccattagaccaatggacatggaaaccatagaagccagtgtcatgaagac

SEQ ID NO: 724964 - DNA, 75 bp, Homo sapiens
gcaagaacagagagagaggtggacagatctgagagatactgagtttttggctttcacccccaaccagtgaccaaa

SEQ ID NO: 724965 - DNA, 97 bp, Homo sapiens
ggtcaggcgtgaagcatcacattgccagtgacatagcttcagacagaaattccagtgtagaagttggcataagtagccaggaaaagatgcaatctgt

SEQ ID NO: 724966 - DNA, 90 bp, Homo sapiens
tcctccccacttatgtttgtaaatgtgagtggaagccatgaggccaaaggcagttgtattggtcatgcttcaccccttcctccatctgct

SEQ ID NO: 724967 - DNA, 80 bp, Homo sapiens
ccggagctgggcgcggattcgccgaggcaccgaggcactcagaggagaggcctgtgggagcaaatctgtgtatgacggcc

SEQ ID NO: 724968 - DNA, 75 bp, Homo sapiens
cagatcgatctaagatggcgactgtcgaaccgcatatcccagtagaatacgggcttttccagggcaggaaccttt

SEQ ID NO: 724969 - DNA, 50 bp, Homo sapiens
ggcggcagcgacgggccccgagcttgaacagatggatttggaagtccgag

SEQ ID NO: 724970 - DNA, 83 bp, Homo sapiens
aatgagcaggaccctcctctgaagacttcccacggtaacctttggaaacatcagaagctactctccattgacctggacaaggt

SEQ ID NO: 724971 - DNA, 49 bp, Homo sapiens
gagcggccgcgtttcggcctcagaagtcctccagcagcctgacctgagt

SEQ ID NO: 724972 - DNA, 80 bp, Homo sapiens
ttcgcagtggtcgcttcttctccttggaatctttgtctgaagtggaagaaaaatacaagaaagccatggtttccaatgca

SEQ ID NO: 724973 - DNA, 100 bp, Homo sapiens
ctgagtctaagcactggatgaagaagatagtagaaaacagtctggatgctggtgccactaatgttgggttccccactgaaggacttggtccagctgtctg

SEQ ID NO: 724974 - DNA, 74 bp, Homo sapiens
aacgcattgaagactaagaatatgagaaacctgaatccagaagaaaaccttcaccccaaatatcatcagtcgga

SEQ ID NO: 724975 - DNA, 76 bp, Homo sapiens
gatttgcgtcctagagtgggaaaaaagcagaggccagggcgccggaaagtgactattttaccccacagggagaatt

SEQ ID NO: 724976 - DNA, 101 bp, Homo sapiens
ggggcttcgggaagcagggattccagtgccaaggtgatgcaactgtgacaatagctcacagatacacccccaaagagcaactgaagattcatacgcagctg

SEQ ID NO: 724977 - DNA, 75 bp, Homo sapiens
gaagatggcggatctggaggagcagttgtctgatgaagagaagattcatgatgttgctatcaaaagttgagaaat

SEQ ID NO: 724978 - DNA, 83 bp, Homo sapiens
gcagctactgctgcatcagaagaaatgcttgaaataactgtgaatgtcccagatgtaggatgcatagctgttgttgaacatga

SEQ ID NO: 724979 - DNA, 75 bp, Homo sapiens
tgggccccgggcggcggtcgccaggtctcagggccgggggtacccgaggttgaaatcacaaagattagacacctt

SEQ ID NO: 724980 - DNA, 90 bp, Homo sapiens
gcagcagaagctgcatatcaaactggtccgcccgtctgcgcccctcacaggaagccggagggtcgctctgatcccgaatctcccacaggc

SEQ ID NO: 724981 - DNA, 98 bp, Homo sapiens
cgaggtccccgcgcggcccgggcctggcgccctgaggggaagagcggcccggcccgagatcagtgctgctctggcaaaggggacatgagcgatgaaga

SEQ ID NO: 724982 - DNA, 100 bp, Homo sapiens
cgtccgactgcactcacacgacgtgcgctatgggtcagacgcaaacatgcagatctttgtgaagaccctcactggcaaaaccatcacccttgaggtcgag

SEQ ID NO: 724983 - DNA, 82 bp, Homo sapiens
tgaaggatgaattctgtaggtggtgcatccaaaacaggctccatctactctttgaagcttctgcccagcttgcattgtttct

SEQ ID NO: 724984 - DNA, 100 bp, Homo sapiens
tctgcttgatccattgtgctgttgagagcctctagtaaatttttcagatcctaagtgtgaacgtgaagtccccagccctgctgctgagccagttgctgcc

SEQ ID NO: 724985 - DNA, 82 bp, Homo sapiens
gctaccatgcaggatgctaccatcaaagtgcgcccacagcagcaaccttggagcaggcagaaactggcgatggaatatgaga

SEQ ID NO: 724986 - DNA, 100 bp, Homo sapiens
gccaaacatgcaggactctagtaacccgcgaaatgatgggatagcgttgcaaatccttaaaagagtcttaacggaaaatggcattcctatgaagaaagca

SEQ ID NO: 724987 - DNA, 80 bp, Homo sapiens
ccgggccacagcctggaggccgagcgcgagcagttcgacaagacccagcttcgagagctgtgcccaggagtgaacaacca

SEQ ID NO: 724988 - DNA, 100 bp, Homo sapiens
caggtgatgtgtctaaggattgtcctgagaagatcctgtattcttggggagagttgctaggaaaatgcattccatggcaatagattctggtttcaggaac

SEQ ID NO: 724989 - DNA, 99 bp, Homo sapiens
gcagatttgtggtgcgttctgagccgtctgtcctgcgccaaggtctcaagattctgccctccaagaaagtcttgccatgattggataggacccccagat

SEQ ID NO: 724990 - DNA, 51 bp, Homo sapiens
cattaaccagctggaagccctgttgctgacagtctccattctggagcagcg

SEQ ID NO: 724991 - DNA, 101 bp, Homo sapiens
gccacgacccacgagatcatggggcccaagaaaaagcacctggactttaatgtgttaagagccattgacatttgaagatcatcagaagtgaagataaaaca

SEQ ID NO: 724992 - DNA, 76 bp, Homo sapiens
ctctgccttcctggccgctcccaaatatagttttaaccatgctgaccaacgaaactggctttgaaatcagttcttc

SEQ ID NO: 724993 - DNA, 73 bp, Homo sapiens
tcatttctgggagaatgccgaagactgcatttcaacttcaagaatgccgtgtggttttgccatgttctgttca

SEQ ID NO: 724994 - DNA, 97 bp, Homo sapiens
aagaagaacaaactgacgcagagtaagcttgagatcttcttagcccagagagcagtggagttgagtgaggaggcagatgtcctgtctgtgagccagt

SEQ ID NO: 724995 - DNA, 100 bp, Homo sapiens
ccagctcacctctcaccgcgcatgtttggagctcctcagagaaattttgaaattgccttcaagatgtttgatttgaatggagatggagaagtagatatgg

SEQ ID NO: 724996 - DNA, 75 bp, Homo sapiens
aaaccgaagttggaagtgtctcttagcagcgcgcggagaagaacggggagccagagtaatcaagtcagaggatta

SEQ ID NO: 724997 - DNA, 50 bp, Homo sapiens
ttctggacaagatgaagtctttctgccagcatgcagccagtaaagatccc

SEQ ID NO: 724998 - DNA, 51 bp, Homo sapiens
ctcttcatattggcgatcctgttgtgtgcctgactgacagaagttcttgcc

SEQ ID NO: 724999 - DNA, 96 bp, Homo sapiens
cgtgggggccgggagtttgcggattttgaatataggggcactccacagaaggatgttattatcaagtcagatgcaccggacactttgttattggag

SEQ ID NO: 725000 - DNA, 76 bp, Homo sapiens
tttctgagaaacaggacatacctttcgtagagtctctgctcctgagtgtttggctttcaaaggaaaaggatatttt

SEQ ID NO: 725001 - DNA, 83 bp, Homo sapiens
aaacactagaaacatatcagcagctgttttaccttttacaggaacttggcattagaattcctcgaccactaggacagggacca

SEQ ID NO: 725002 - DNA, 101 bp, Homo sapiens
agttatttactttcccatcaggtttcctgatgtgagcaggaataaagatggctgctgaaccagtagaagacaattgcatcaactttgtggcaatgaaattt

SEQ ID NO: 725003 - DNA, 74 bp, Homo sapiens
agacgggcgcctatcagtacacaataaggcttcttggacacttaatgattgttggcaagaaatgtgctgctgat

SEQ ID NO: 725004 - DNA, 100 bp, Homo sapiens
caagccaatcccaggaggaaaaacgaaattccgggtagatatgcctggctcaggcagtgcattcatccccaccatcaacgccatcacgaccagccaggac

SEQ ID NO: 725005 - DNA, 100 bp, Homo sapiens
cccaggatgatgaagcagaagaggcaataccaagtttccaggcccgaagagcatcccagactattgggactcctctgccctgccagacccaggctttcag

SEQ ID NO: 725006 - DNA, 98 bp, Homo sapiens
tttcgtattcgttgttctcggcgggctgtggggcctccgcgccgcggccgttagtcatgtcggggcgccctgcgtccggcagaggaggcgagcatccc

SEQ ID NO: 725007 - DNA, 74 bp, Homo sapiens
tcccagcctgtgacctttgtgaccaactccacctacgcagcagacaaggggctccattccgacttagacaaggg

SEQ ID NO: 725008 - DNA, 83 bp, Homo sapiens
cctcgggtctcgggggccgctctgggatcccggccaccagcaattgtccgttggatgaaaaatctgacaaacagtatgctgaa

SEQ ID NO: 725009 - DNA, 88 bp, Homo sapiens
cagagctgagggagcaagaggtgtcggaggtctcatctttgaactactgccggagcttctgccagttgatattcactgatggactcca

SEQ ID NO: 725010 - DNA, 75 bp, Homo sapiens
cacataacggggttcgggtgtctcgtgtgtgaacatcacagggaataccttggcaagcagctccagtccgagcag

SEQ ID NO: 725011 - DNA, 96 bp, Homo sapiens
gcagaagtcgcgtgtctaggtgagtcgcggtgggtcctcgcttgcagttcagcgaccacgggcgtgatggtgggcatgggtcagaaggattcctat

SEQ ID NO: 725012 - DNA, 83 bp, Homo sapiens
ctcagtgacctcctggacttcagcatgtggtggtcctgctccatgatgtccgtgatgtgagcgtggaggaggagaaggtccgg

SEQ ID NO: 725013 - DNA, 74 bp, Homo sapiens
acacttttggccaggggaccaagctggagatcaaacgcaagttgctccctgagctgctccaaccttatacagaa

SEQ ID NO: 725014 - DNA, 98 bp, Homo sapiens
gtatgttgtaccttgtgacagaatatgccaaaaatggagaaatttttggtgacttcatggtcatgacgattttcttcaatgtgagcaggcggtttggc

SEQ ID NO: 725015 - DNA, 99 bp, Homo sapiens
ggagagtcgaagcagcagctctcgctccagaagcttcactttgggagaaagcccaggagctgtcggactggatccaccagctggagtctgagaagttcg

SEQ ID NO: 725016 - DNA, 75 bp, Homo sapiens
atggatagaaattttaaagactgttgtgaacagggatgtacctaatcttcgcctcaacagcatcaagaagctgtc

SEQ ID NO: 725017 - DNA, 75 bp, Homo sapiens
gccgatccagcctgcggagcctgtggggcagtgtgtactgtaagcacggtcacctgtgtcccatcgacaccggcc

SEQ ID NO: 725018 - DNA, 76 bp, Homo sapiens
gcttcagccttgatgacggccatcttcccccgttcgatcctttggtacagaagacagaccgacagatcgtccaata

SEQ ID NO: 725019 - DNA, 98 bp, Homo sapiens
tccccattatttcgaggaaggaactcaggcatttgaaaggatgatgagtccaactggttctaatcttaagtctaatcattctgatgaatgtactactg

SEQ ID NO: 725020 - DNA, 83 bp, Homo sapiens
atttgttaaggattccaagtaactcttatttggagcttactccacgggaacagcctctagataatctgagttgttgaaaatac

SEQ ID NO: 725021 - DNA, 115 bp, Homo sapiens
cggatggccccaggtgtaagcgcagaaagcaggcgaacccgcggcgcaataacggctctgcagatggcatggggaggaggttgcactcagcccatgatcctggtctctcaaagac

SEQ ID NO: 725022 - DNA, 51 bp, Homo sapiens
cctggtgccccattacaacccgtgacgaaatctcacaaaactgtcccttat

SEQ ID NO: 725023 - DNA, 84 bp, Homo sapiens
gcttcgacctggagctgggccaggccgtggaggggaaaagtcttcatcatacccagaatgatcacttccagaatgatggaattg

SEQ ID NO: 725024 - DNA, 50 bp, Homo sapiens
agaaaatcttcgaagacttttcaacacgttggtcgtcattgcctccgagc

SEQ ID NO: 725025 - DNA, 97 bp, Homo sapiens
aaaagcctggtggttcaacacaatgaacatgaagaccagcacagcctagatttggggcggcgactggcggcgcgatggacctgaccgggctcctgct

SEQ ID NO: 725026 - DNA, 94 bp, Homo sapiens
ctgggtcagtccgccgctcaccccgcggccgcaccttcccgccttctcagtgtactaatggtcacttgatgtgcgctggctgttttatccacct

SEQ ID NO: 725027 - DNA, 75 bp, Homo sapiens
tctcttgaccatgtgacatctgatgctgtggaacttgcaaatcgaaggtttacaaaggaggaaaacgacttcttc

SEQ ID NO: 725028 - DNA, 100 bp, Homo sapiens
ataggatcaaagacaaatggaaagttcctcaaaacccttgaagatcgtttgaaaattgaagcaaaaaatgggacattgagtgtatccgacaccaccgttg

SEQ ID NO: 725029 - DNA, 74 bp, Homo sapiens
cgggctccagactcgccgtggtcaagttcaccatgagaggacatggagactagaccacagagcaaggattcaac

SEQ ID NO: 725030 - DNA, 100 bp, Homo sapiens
tgcgcctggagctgctgcttgacacgtgggtttccaggaccagggaacagtgactttgaacagcttccggatgatgttgccatctcggccaacattgctg

SEQ ID NO: 725031 - DNA, 80 bp, Homo sapiens
ctgcgagccggcccgcaggggctacctctaccagcagctgtgctgcgtagcccccacgcacacattactccaacattgag

SEQ ID NO: 725032 - DNA, 100 bp, Homo sapiens
gggtgaacaacccgttcttgcctcaggccagtcgcctccaggccaagagggatccttcacccgtgtctggtggtcctcccccgggcggcggtgccccctg

SEQ ID NO: 725033 - DNA, 100 bp, Homo sapiens
agacactagaggcctgggtgatacatggtggaagagaagattccagaggcccgttcccgaagccggagtcccgacccgaaaccgtccccggccggctcgc

SEQ ID NO: 725034 - DNA, 100 bp, Homo sapiens
cttggtaacctcgtggaggggatggatttccataagttttactttgagaatcgagggcatcctggctgtttcacccgtggacttgaacttgccattggac

SEQ ID NO: 725035 - DNA, 100 bp, Homo sapiens
ggagtggaaggctcccccttgactaaagctgattaagttgtcatcattctgggaagaaaaaaaaaacattaatgaagaggccaataatatgaagggaatc

SEQ ID NO: 725036 - DNA, 80 bp, Homo sapiens
gtttcccgggagatcccaggcggtgacagagtggagccatggctagaggatgagacctgcacgcagtggctcacagcagc

SEQ ID NO: 725037 - DNA, 90 bp, Homo sapiens
gtgggtcataaatcctagtggtggactgatttcaaagggacacccactaggcgctacaggtgctggagaatctggtaaaagcaccattgt

SEQ ID NO: 725038 - DNA, 100 bp, Homo sapiens
tggagccgccggagtctgagaaggtgccctgacctgctccatggcaaactgtcagtatggctgtgatgttgttaaaggacaaatacggtgccagtgccca

SEQ ID NO: 725039 - DNA, 101 bp, Homo sapiens
cctgcgtcctttttcgtttttcggatgatgccttcaatactacctttatttccaccatagatccagacatttaatgtggatgcaccatgccagaccgtgga

SEQ ID NO: 725040 - DNA, 98 bp, Homo sapiens
cagaagagacatcacactcgattattttgtgctgataggacagaaaggttctctgtggacattgactcggagctggtggaggagctgccggccgaaat

SEQ ID NO: 725041 - DNA, 100 bp, Homo sapiens
gtccttgtatgccatagtattgtgcaagtatgggcactaggaaaagacttcttccatcaagcttaattgttttgttattcatttaatgactttccctgct

SEQ ID NO: 725042 - DNA, 80 bp, Homo sapiens
ctcgcctcctcgcagcagcgccatgatgaaggatttgggggcagagcacttggcaggtcatgaaggggtccaacttctcg

SEQ ID NO: 725043 - DNA, 101 bp, Homo sapiens
tgtgtaccatgctgctattgtcatcttccttgaattctttgcgtggggccttttgacaactccaatgttgactgatgttccagcataagaagataccttct

SEQ ID NO: 725044 - DNA, 100 bp, Homo sapiens
caccatgccgctcctaagcctgcacagccgcggcggcagcagcagtgagagatccagacatttaatgtggatgcaccatgccagaccgtggaagatttaa

SEQ ID NO: 725045 - DNA, 51 bp, Homo sapiens
tttgttcaggaaccaccagtgacagaagttcccgattttgaaatgctgggc

SEQ ID NO: 725046 - DNA, 74 bp, Homo sapiens
gcacagggcgtcggacctgcacgagctgtctggtgatgtgtccaatctagatcccaacttctcatttgaaggca

SEQ ID NO: 725047 - DNA, 82 bp, Homo sapiens
ctgtaaccacctcacagattccagcttcggaacaagagaccctgatggcaggatggtggctggcaaagtgttgatggcaaag

SEQ ID NO: 725048 - DNA, 73 bp, Homo sapiens
acgcagaaggacctggccacggtgactccccggacagctcaacaccaaagctttcgcgggcacagcggccgca

SEQ ID NO: 725049 - DNA, 100 bp, Homo sapiens
ttgtggatattgggcttgacagctgcaaggagttactgaaggaatgtatcctgtcaggtataatgtcagtgaatggcaagaaagttcttcatatggatcg

SEQ ID NO: 725050 - DNA, 75 bp, Homo sapiens
gattgttcctaaaccagaagaggaggttgcccagaagaaaaagggcattgagcaagtgcagcaaagtagaggcct

SEQ ID NO: 725051 - DNA, 73 bp, Homo sapiens
tataaaaggacttcatctcctcaacatggaaactaagattctgattctggatctgactcagattctgatcaag

SEQ ID NO: 725052 - DNA, 95 bp, Homo sapiens
gctgcaggacgccatcagcaagatggaccccaccgaactcccaggcatagtgcccctgcttcctctacctgccagaaggaaggctggaacttggg

SEQ ID NO: 725053 - DNA, 100 bp, Homo sapiens
gaggctggagtgggcgcggaggcgaccgccatggcgttcctcaaactccgtgaccagtgatatcagtatcaagataaaagtttggaatgggagaaaaatt

SEQ ID NO: 725054 - DNA, 87 bp, Homo sapiens
gtgttccttctgcaacagaaataataaaagcttccagcaaagatgccatcagatggcgatcagcctccattttctgagccgaaattc

SEQ ID NO: 725055 - DNA, 100 bp, Homo sapiens
ttggtatttcaaatgaccaccatgttgcaaaagattgcttccaagtatgatcatcaggcagaagaagatcttcgcaattggatagaagaggtgacaggca

SEQ ID NO: 725056 - DNA, 98 bp, Homo sapiens
ggagctggaatgactggcaacccagggatgatcatggtgattttactgctgcttgtggctatcgtggttgttgcagtctggccgaccaactgatggca

SEQ ID NO: 725057 - DNA, 101 bp, Homo sapiens
cgccgcgcccgggatgtattcgtccccgctctgcctcacccaggaagatgatccctatgatcttgaagatgtttctgcacagaaatgagggaaatacaaag

SEQ ID NO: 725058 - DNA, 97 bp, Homo sapiens
ggatttcttccgacagacgtgaccccagaaggctgccgagggagactttaggacaagaggcgttgtttttgatcttgctctgttgcccaggctggag

SEQ ID NO: 725059 - DNA, 75 bp, Homo sapiens
gatgaatccagcagcagcatcctaaaacctctcagtgctggagaatctggtaaaagcaccattgtgaagcagatg

SEQ ID NO: 725060 - DNA, 83 bp, Homo sapiens
ccgagaagtagctcagatctctggcacttggaggtgtcccaggaagtcagccattactccccagtggaatggatccaactcga

SEQ ID NO: 725061 - DNA, 98 bp, Homo sapiens
gcttcccaggttcaagtaactgcctcagccttctgagtagctgggattacaggtgtgcaccaccacgcccagatgttgaaagtgtgatgaacagtgtg

SEQ ID NO: 725062 - DNA, 51 bp, Homo sapiens
atgagctcctgtttagccactgcaggagctgacatggacccaaatcctcgg

SEQ ID NO: 725063 - DNA, 96 bp, Homo sapiens
gatgtggatgccctcaagtcctggctggccaagttactggagccgatgtctccaacatgctaccggtgatagtgggcccattagtaatgggctccc

SEQ ID NO: 725064 - DNA, 50 bp, Homo sapiens
taaatgccgagaaggccagtacgcaagaaaagcctaggcttctcgagcct

SEQ ID NO: 725065 - DNA, 100 bp, Homo sapiens
ctcctgccgggatgattctgagtgtatcacaaggctatgcagatggttgtccttgccatctcagtcagagcaggcagtgatgtccctgtccagttcggct

SEQ ID NO: 725066 - DNA, 50 bp, Homo sapiens
agaatacctgaaactggagtttatcaaggccgaggaggagctcatcaaag

SEQ ID NO: 725067 - DNA, 74 bp, Homo sapiens
ctttgaagaagaccagccttccagactcgcttggtgccctgacaggtcttgggcgtctttggtactggcttttt

SEQ ID NO: 725068 - DNA, 100 bp, Homo sapiens
tgcgagatctagggctccttacccaagtacatatcctgtaagaccagaattgcaaggccagtcggcatgtgcgtcaacaaatgaagagaaggcaaaaaat

SEQ ID NO: 725069 - DNA, 88 bp, Homo sapiens
cctcttttcattcctagtcattctctgtaaagaattaaacaaccaccatgtcgagcaaaaaggcaaagaccaagaccaccaagaagcg

SEQ ID NO: 725070 - DNA, 75 bp, Homo sapiens
gacaggatccggaggcgccagctcaaccgttaccagatgtggtggtttacccaacaacattgtggatgtctggga

SEQ ID NO: 725071 - DNA, 100 bp, Homo sapiens
tgaccccttacgtggtgacacggtactaccgggcgcccgaagtcatcctgggtatgggctacaaagagaacgatgacatcctgtggcccgagggggatga

SEQ ID NO: 725072 - DNA, 90 bp, Homo sapiens
cccagaaaggattgtgacatatcgttggacccagaattgagctgctggaggactggactgctactactactcctggctgtggcagtgaga

SEQ ID NO: 725073 - DNA, 100 bp, Homo sapiens
acaggtggcctccgaacccgggaaaagaggaactaaggcggaggaactgagacgtttcgaattccaggaattgaatgatctggcacgggaccctccagca

SEQ ID NO: 725074 - DNA, 75 bp, Homo sapiens
actggaaaaaaaagacttcttccaaggcctacagatataagtgagaaagatcagtctaaagaaaaggagaagaaa

SEQ ID NO: 725075 - DNA, 96 bp, Homo sapiens
ggctacccgctctttgccgtgacaacaccgttcccccagccgggctggtgagaagccctaccactgcaactgggacggctgcggctggaagtttgc

SEQ ID NO: 725076 - DNA, 100 bp, Homo sapiens
cacttcaaacattcgtctcggaaaccccgcctcttacagtcacgagatcatgctttacgattatggaatatccagacggacactctggtggcaatatttg

SEQ ID NO: 725077 - DNA, 74 bp, Homo sapiens
acagagtcagtgatttccataaattgaagcaaaatgcatggagtcatctcccacatttctctagccctgacctg

SEQ ID NO: 725078 - DNA, 100 bp, Homo sapiens
agaggctgctggccaagctgcaaagctgggagagactggaccagaccatgggcctgagcatcaggttcctgcagacagcagagatggtgaagccctccac

SEQ ID NO: 725079 - DNA, 100 bp, Homo sapiens
gggatggctctgggcaccggcggacagtcaaggcattgatctggagaacattgtgtactacaaggacgacacccactactttgtgatgacagccaagaag

SEQ ID NO: 725080 - DNA, 50 bp, Homo sapiens
cgggcagttgcagtgttggagctaaactgatgactatcagccagttcgtc

SEQ ID NO: 725081 - DNA, 50 bp, Homo sapiens
cgccgcacgagcaccagcctagagccagggtgaccatcgggatgaggagg

SEQ ID NO: 725082 - DNA, 90 bp, Homo sapiens
aaaaagcagccggggcctccgtattgaatgaaagacccagtgcaaagacatcaccatgaacactagcaagtgaccgtctccttatcaagg

SEQ ID NO: 725083 - DNA, 82 bp, Homo sapiens
cgattataagaagagaaactcagcgctggggaagaagaataccaagctgctattttacacttgaagagggagcacaaagaag

SEQ ID NO: 725084 - DNA, 75 bp, Homo sapiens
ggaatcttcagtcgcacgtgcagcgagtccactcagagaaaaatggctacaaacttcctagcacatgagaagatc

SEQ ID NO: 725085 - DNA, 100 bp, Homo sapiens
ttccagattcgtggttgagctgcagcagagggagcttgccttgaaggacaagaacagcgccgtcaccagcaggtacatgagaagctggggtcagagctgc

SEQ ID NO: 725086 - DNA, 100 bp, Homo sapiens
aggctgctttcaggaacattgctgtggattcccaggcacctgaatggacagaagaggacctcagccaactgacaagaagtatggttaagttcccaggagg

SEQ ID NO: 725087 - DNA, 100 bp, Homo sapiens
cgaaactcctgcacctgtatatagggccaagtcaattctggagacctgggtgtgggtcaagcaaccaggttttatgctgggggctcagagagaagtggac

SEQ ID NO: 725088 - DNA, 96 bp, Homo sapiens
ccctgagcccggcgagcaggagaggaggtcttccgggccgcggcctccgagcgcgcgggatttgcagaagaatcctgcaaaaatgtctctctatcc

SEQ ID NO: 725089 - DNA, 75 bp, Homo sapiens
ggaagagattcagccagcacactcctcgcgagcaagaattcaactagagggcagccttgtggatggccccgaagc

SEQ ID NO: 725090 - DNA, 111 bp, Homo sapiens
agcgagctgagtggttgtgtggtcgcgtctcggaaaccggtagcgcttgcagcatgggggatatgagactttctactcggaatatcctgagtgttgcgtggatgtaaaacc

SEQ ID NO: 725091 - DNA, 75 bp, Homo sapiens
cgaagacaatgttctccaaagataaggctaaagaattacctccaaagccattgtcaagaccacagcagtcatctg

SEQ ID NO: 725092 - DNA, 98 bp, Homo sapiens
gcagttggtgagtaatagaaggcagagaaacagaaaatcttgacagaagcaaggcagatttacaggacaggaagatgtcacccaagcgcatagctaaa

SEQ ID NO: 725093 - DNA, 99 bp, Homo sapiens
agagccctggatgtcatttggaaaaacactagagacagacggctggcagctttccaaggaatcccttcaatctgtggatgtcctccgagaggaagtgag

SEQ ID NO: 725094 - DNA, 90 bp, Homo sapiens
caaaaaccaaagtctcttctgctgggaaatcccagtacagatcggaaatcctcattgacgattcaatttgttgaaggccaatttgtggac

SEQ ID NO: 725095 - DNA, 73 bp, Homo sapiens
cggcctccggggctgccagagcagcaggggtaatactgaacaacctgtccaaactagcaagattggacttgga

SEQ ID NO: 725096 - DNA, 75 bp, Homo sapiens
cgctgctgctgctgccgctgctcgccgccgtggaaggcaatactgaacactgcgcagcttgcagaggtctcctgg

SEQ ID NO: 725097 - DNA, 96 bp, Homo sapiens
gtaaactcagtgcgcgatcttaagcgcgcatctgtggaaacaattaatctcagagaaagatgtcacatctgctaaagcactgtatgaacatttgac

SEQ ID NO: 725098 - DNA, 74 bp, Homo sapiens
cccatgctgcagcgggaaagagaacagagagtcctggggacagccccaccatggctgcaatccgaaagaagctg

SEQ ID NO: 725099 - DNA, 96 bp, Homo sapiens
ggagcttaccgtgtctccaatgacaaacgagatgtaaaagtgtcactgttgattgacataaaactggaaaagcctcaggagcaaccagtcagtgaa

SEQ ID NO: 725100 - DNA, 75 bp, Homo sapiens
aggttctctttgtgtgagtaagcaagaacctgaaaggagaatcacttgaacccaggaggaggaggttgtggtgag

SEQ ID NO: 725101 - DNA, 98 bp, Homo sapiens
gacgatctgcacttcgcattttggcattgacatttaattttagggtcctttatatagaagggagagtagtgatcgtaaacttgttgataaagaagata

SEQ ID NO: 725102 - DNA, 51 bp, Homo sapiens
tggagctctcagcataccgtgcaacagccctaccacttatgtcttggatga

SEQ ID NO: 725103 - DNA, 50 bp, Homo sapiens
acggaggatgatgacatcactaccggttctaatggcaagtctgtgtcatg

SEQ ID NO: 725104 - DNA, 113 bp, Homo sapiens
ctgacagctgctgcaggaaacatggccaagtttgccctgaatcagaacctgcccggtggacccaagtggagagattgtggaactggcgaaaggtgcatgtccctggaaggagc

SEQ ID NO: 725105 - DNA, 103 bp, Homo sapiens
aagaactctgaagatgattcagccttctgcatctggatctcttgttggaagagaaaatgagcttaattggcttagtgtcgacttcaataattggaaagactgg

SEQ ID NO: 725106 - DNA, 101 bp, Homo sapiens
ttcacgcatcaggcgcgggaagcggactcacaccacccggcaagaactgctcactacggctccctgccccagaagtcacacggccggacccaagatgaaaa

SEQ ID NO: 725107 - DNA, 90 bp, Homo sapiens
gcctccacgtctggaataatgggtactctttcctcgtggaatttgaagattctacagataaatcagggattcatccaaccatcatttctg

SEQ ID NO: 725108 - DNA, 98 bp, Homo sapiens
agttgtagacatgccaccaggaactggagatgtgcagttatcagtctcacagaatattcctataacagggttatgtaccgaaggactctaccgtgtca

SEQ ID NO: 725109 - DNA, 100 bp, Homo sapiens
agtcactgcagtagaattccttgtagataagcaactggattttttaactgaagatagtgcctttcagccctaccagcttggcttgtggagatgttgaagg

SEQ ID NO: 725110 - DNA, 50 bp, Homo sapiens
cgaggcgggacgtcatggaagtactccagcgggaggaagaagaggccttt

SEQ ID NO: 725111 - DNA, 75 bp, Homo sapiens
cctagggaggcgaggttcccgcaccggataggtgtctgcttttggggcagagttttcatcggaggcatgcagaga

SEQ ID NO: 725112 - DNA, 100 bp, Homo sapiens
gcctgagccaccaaagcacaaggcagaaaggagtggatgcagctgatgataggactgaaccgattgggtgctacggagtattaaatgtgatagtatctgc

SEQ ID NO: 725113 - DNA, 82 bp, Homo sapiens
cggagcccgagcagccgccgccatggcaaggctgaagctgccctcgaggacctggtctccaccattcgagtctgaagattct

SEQ ID NO: 725114 - DNA, 100 bp, Homo sapiens
ataatttctttctcgctgatcgcctaacttctactgacgaagcttggaagttgcagaagtgaaagatgtcatgtatatctgcccatttatgggagcagtg

SEQ ID NO: 725115 - DNA, 50 bp, Homo sapiens
cggcgttggaggccaccgtttccaggcggttttggtgaataacatcacca

SEQ ID NO: 725116 - DNA, 83 bp, Homo sapiens
gaggaactcaaagtggatgaggaaagacactcatgaggaccatgatacttccactgagaatacagacgagtccaaccatgacc

SEQ ID NO: 725117 - DNA, 100 bp, Homo sapiens
agtaatggtggatgaagttgttcattgtttgtcaccacaaaaaggacagcaaaagtactttgactcaggagactacaacatggccaaagccaagatgaag

SEQ ID NO: 725118 - DNA, 125 bp, Homo sapiens
taactggtggcaaagtcccagcattcagaatgggagagaatatcactgggtcacaatcactctggacttaagacaggtgctcagctttaagggctactgggaaaaactgaactccaacctagaat

SEQ ID NO: 725119 - DNA, 82 bp, Homo sapiens
gtgagctggagaccaccagcttctttgactcagatgaggatgactccaccagcagctgtccccgccctactccggaccgccc

SEQ ID NO: 725120 - DNA, 83 bp, Homo sapiens
ctccaaaggatctaaggaccaaagctgacagtttctttacttggtgagaagccctaccactgcaactgggacggctgcggctg

SEQ ID NO: 725121 - DNA, 75 bp, Homo sapiens
aggcaccctccctgacctgtctcggcctcccgactcctacagtggtaactaggatttctacctcaaccgcgagac

SEQ ID NO: 725122 - DNA, 95 bp, Homo sapiens
gaaattttgattttactgagacaaagtacctgctacaaagcttgttgaagatgcatatagactaccggaaagaaatgacttcttcttgcacttta

SEQ ID NO: 725123 - DNA, 75 bp, Homo sapiens
ctcgcgctactctctctttctggcctggaggctatccagcgtgatcgaggagttctacaaccagacatgggtcca

SEQ ID NO: 725124 - DNA, 75 bp, Homo sapiens
tcaaattggacttaagtctgaatttcggcagaatttaggatgaagcctgctgggagcgtgaatgacatggccctg

SEQ ID NO: 725125 - DNA, 97 bp, Homo sapiens
gaggattcagggaataggagctggggagcccttctgcgccacagaaagcatgctctgaattgccatcggatgaagcctgctctgttcagcgtgctct

SEQ ID NO: 725126 - DNA, 100 bp, Homo sapiens
cctcctgttcctatgtggaactccccaggctgcaggatttctctctgatcaaacggacagttcaggactcagaatctaaggatgaatgttcaccgtggca

SEQ ID NO: 725127 - DNA, 119 bp, Homo sapiens
ggaggaccaggtgccacctcaagagagaggccgtgggcggcgagccgcgggcgtttactcttagcagaagctcacctgaaggattacggccaggagatacaaccagcactttctgtggt

SEQ ID NO: 725128 - DNA, 91 bp, Homo sapiens
tgagctgggagaaagcggggcccgaggaggccaaggcgccagtgagaggcgtcaccttcaggccattcagaggaggaaagagaggggaata

SEQ ID NO: 725129 - DNA, 98 bp, Homo sapiens
cgagaccgggctggccatgatctatgatttggagcaagaggtggtggtggccttcccccgaagaaatttggtaatcctggggagcgtttgcgtaaaaa

SEQ ID NO: 725130 - DNA, 82 bp, Homo sapiens
cgaaccgcagtatcatgctggccaagaagatcatcattaaggacggaggcacggtggctattatcatggaaaactaattttt

SEQ ID NO: 725131 - DNA, 75 bp, Homo sapiens
gaacaacctcaaaaccaaaaccagacacagcacaagcagcggccacaggcaaaatcctgacagatgactttgcag

SEQ ID NO: 725132 - DNA, 100 bp, Homo sapiens
ggcggctgaggcggccgaggcggccagttgggtaccgggaggggcgaaggcgggcggcagaggcgatcaggtcccctgcctgtgcccttcaccaatgggg

SEQ ID NO: 725133 - DNA, 88 bp, Homo sapiens
ctgggaagaaggaggacctctacctgaagccaatccagagaaccacaccttcatcaagcggtccgaggtggaagaagtggattttgcc

SEQ ID NO: 725134 - DNA, 83 bp, Homo sapiens
atttgagtcatttccttcgtacccacagtgcttcatgagaggtggttgtgagacaacttcaacaagaagtggctgattccctt

SEQ ID NO: 725135 - DNA, 101 bp, Homo sapiens
agagccgagtgcagaagatctgggtgcccgtggaccacaggccctcgttgcccagatgtttttagaacttcagccataaaaatgggcagaattttccttga

SEQ ID NO: 725136 - DNA, 95 bp, Homo sapiens
cctataggggagagactgggctgggaccccaaacctggagaagcgcgtacttgctttgtaagtgatctgaagcgaggactaaaaatccaagcagc

SEQ ID NO: 725137 - DNA, 83 bp, Homo sapiens
tcatgtccatcctgaagcatctgctttgccccagcttcctgaatcaactgcgccaggcgagtagatctgctccggagttggtg

SEQ ID NO: 725138 - DNA, 100 bp, Homo sapiens
agaacacatttgcctgtcagagcttccttttgtcatgagagcaattggcttttacccatctgaagagaagtccgcaaccatccctctgttcatgcgaaac

SEQ ID NO: 725139 - DNA, 100 bp, Homo sapiens
gcgctcgagggaccatggccgatcctcgcgtgagacagatcaagatcaagaccggcgtggtgaagcgttgttgacctcctgtactggagagacattaaga

SEQ ID NO: 725140 - DNA, 75 bp, Homo sapiens
tcagctctgaaatagaagatcttgcaagggtcatactccctgtcacaaactccagctgaactaacttggaggagg

SEQ ID NO: 725141 - DNA, 100 bp, Homo sapiens
ggctatgggagaaggaaggcaggcagcaggcaggtgcagtagacattgttgcaatcatgatcggcaatctgaaaggcacaaaaattctgcaatctattca

SEQ ID NO: 725142 - DNA, 100 bp, Homo sapiens
gaattttttgaagatgacgccacattaaccctttcattttgtttggaagatggaccaaagcgatacagttgggataattcttcactattccacccttgcc

SEQ ID NO: 725143 - DNA, 100 bp, Homo sapiens
cgacaagaagctcacccaggaacaagtatctgacagtacgaattggagcaatgttggcttatacacctctggatgagaagagccttgctttattactcaa

SEQ ID NO: 725144 - DNA, 101 bp, Homo sapiens
cggcggcggcggtggtatcggcggcagctgtgagggggttccgggaagatggtgctgatcaaggaattgtcatgattgttgtgaaacagtgaaggtgcagc

SEQ ID NO: 725145 - DNA, 101 bp, Homo sapiens
cagtgcctggctgagtttcggacgtggttaagaaccaactggttgaggttcaatgcagacaagacggatgtgatgctgatggactagaggcttttaccaga

SEQ ID NO: 725146 - DNA, 74 bp, Homo sapiens
aacaagttgatctgtgtgaaagctttgaaaaccagcatgaacgtgcagggtgattatgagccaactgatgccac

SEQ ID NO: 725147 - DNA, 50 bp, Homo sapiens
tttgaatatgcggtgtcagaggaaaatgcggattttggagtatcagctaa

SEQ ID NO: 725148 - DNA, 90 bp, Homo sapiens
ctttagaccagacaactttgtatttgagaacggctgcctgccaacttctttaaattccagttccggaatgtggagtacagttccgggagg

SEQ ID NO: 725149 - DNA, 100 bp, Homo sapiens
cttttcgtaaagggaagtcatttctactggacttcatgcttagatacatgtataacaagacgctgaccggaaaggagattgagattgacattgaacctac

SEQ ID NO: 725150 - DNA, 76 bp, Homo sapiens
gcacaagccagcgtcacccatggagcacatggagatgtccagcctagggtgaatgtttccccctccaagaaggggc

SEQ ID NO: 725151 - DNA, 132 bp, Homo sapiens
caagtatccagcctatattgttacaattttttttcaagaactgccgtcttctttgcctgcactaatgtaaaagatgatgaatgcgagtcagatgcagaaaatgagcaaaaccatgatcctaatgttgaagag

SEQ ID NO: 725152 - DNA, 75 bp, Homo sapiens
tggctatattgtcgatgattcagtcagaggttgttgatcattatgaaaatcctagaaacgtggggtcccttgaca

SEQ ID NO: 725153 - DNA, 75 bp, Homo sapiens
ggagattggaaatgcatttggcattgcaacaaaccagtccagctacgggggcccagccagccagcagctgagtgg

SEQ ID NO: 725154 - DNA, 96 bp, Homo sapiens
acgtgaagtggaggcccaaggacagtgaggagctgggtggtcccagcctggagctgtgccagcctgacatggcgtgtccggagcggtgactggaag

SEQ ID NO: 725155 - DNA, 100 bp, Homo sapiens
ctcggctatggagtccccatgttggaacgactgaagctggtgactgttttgggtgctggccttctctgtggaactgctctggcagtcatcgtgcctgaag

SEQ ID NO: 725156 - DNA, 97 bp, Homo sapiens
gcggtcttcgtggtgttcgtggcagggctgattgttgtgacattggccgtatgctggatgcccaaccagattcggaggatcatggctgcggccaaac

SEQ ID NO: 725157 - DNA, 90 bp, Homo sapiens
atatgccaaaaatggagaaatttttggcacagatgaggagagcatcctgactctgttgacatcccgaagtaatgctcagcgccaggaaat

SEQ ID NO: 725158 - DNA, 75 bp, Homo sapiens
ctcggctgcgggaaatcgggctgaagcgactgagtccgcgatggagatgcatatgaaacagccaagatgctgtgt

SEQ ID NO: 725159 - DNA, 96 bp, Homo sapiens
agagttcaaggaggccttccagctgtttgaccgaacaggatggagccagcaccctcagaggttcgactcgccgtccgggaagccattcatgccctc

SEQ ID NO: 725160 - DNA, 74 bp, Homo sapiens
aaggttgatctcatagacaagtttgtacatccaaagcgctggttttcaatacagaataatcagttggtttacca

SEQ ID NO: 725161 - DNA, 75 bp, Homo sapiens
gacgacgaggaagaggaggtttctgaggtacagcagggaagaactggaaactcagagaaagaaactgcccttcca

SEQ ID NO: 725162 - DNA, 83 bp, Homo sapiens
ttcatctgtctgtgggaattgtaagcaagtgtaaacaggaacatcgataagtagtgtaaaaacttgcacaatgaaatccgaag

SEQ ID NO: 725163 - DNA, 100 bp, Homo sapiens
ccattctggtggcagtgacgggcatcctggtgcagctcctggtgcgtggcccagcctcagagttcaagggcagcaggaaagacgagatcctgggcatcgc

SEQ ID NO: 725164 - DNA, 97 bp, Homo sapiens
tgctgacatcagtgagttgttcgatgcgctcatgacgctggagatgcagctggtggagcagctggagactacagtggtagtggaggccgaagcggcg

SEQ ID NO: 725165 - DNA, 76 bp, Homo sapiens
atcagctggagaaggagaagtggagaagaaatcagtcagccgcaggtctctaattaacagaagatggcaaagccca

SEQ ID NO: 725166 - DNA, 90 bp, Homo sapiens
aaattcccgaactggggagatctgtatgggcactaggaaaagacttcttccatcaagcttaattgttttgttattcatttaatgactttc

SEQ ID NO: 725167 - DNA, 90 bp, Homo sapiens
agtggccctttagcaggcagggccggccaaagcaagatcagcagcaaaccctggggagttggtactggatcacattgtggagcgcaagcg

SEQ ID NO: 725168 - DNA, 140 bp, Homo sapiens
gaagaaggggacttgggcccagtttatggcttccagtggaggcattttggggcagaatacagagatatggaatcagagtgtgaacatggctacgcctcttcattcccgtccatgccgagcccccgactgcagcattcaaa

SEQ ID NO: 725169 - DNA, 75 bp, Homo sapiens
aacaaataattgagtgctttcgatcagccttttaggtgtccctattgcatatgataacatcaaagttgtgggaga

SEQ ID NO: 725170 - DNA, 74 bp, Homo sapiens
cttaattctgaacatgaatgaccacggctttgtgatcacgcgatggaagccggcagccctgtgagcacatcccc

SEQ ID NO: 725171 - DNA, 143 bp, Homo sapiens
tttaatggggcacccacagccaacttccaacaagatgtgggcacaaaaactaccattcgcctgatgaactctcaggccaggagacaagcttctcaagtctttacagccgagaagattccttgaagaatcaagcatttaagcat

SEQ ID NO: 725172 - DNA, 83 bp, Homo sapiens
tggactgagtcctgcaggacacagaatgtgaaaacctttgcatcttctgatagtctagccaaggtccaagaagtagcaagctg

SEQ ID NO: 725173 - DNA, 82 bp, Homo sapiens
ctttatagacgaatatgttgttctatggatggcaatgtgagaagcagttagagtgtttgctaacacactgcattaaggtgcc

SEQ ID NO: 725174 - DNA, 90 bp, Homo sapiens
gaagaaatgatgcggcgacagcaggaaggattcaagggaaccttccctgatgcgattgagtttgtgacgggcaccaaaaaaggcaccacg

SEQ ID NO: 725175 - DNA, 90 bp, Homo sapiens
catcaggaccccagatgtctgacagccctgtgtgacaccaagataagtaacggtcctggatatgcccacccaagaactgggcctccccgc

SEQ ID NO: 725176 - DNA, 97 bp, Homo sapiens
attattccacagaaccaagtcaatcgaaagtcagaaagtttcctacactactgaggtttaggggcactgtgaagcaaaagccacgcctcagaatccc

SEQ ID NO: 725177 - DNA, 109 bp, Homo sapiens
gtgccgcgtctccgcgttcccagcccgggtccccgcgttcacagccccagcgcaggcaggtgacagcagggacatgtctcgggagatgcaggatgtagacctcgctgag

SEQ ID NO: 725178 - DNA, 88 bp, Homo sapiens
gcaatcctcagcaacatcttaatgcacagccacaagttacaatgcaacagccatttccaaagcagccaggaacatcaggtgcttatcc

SEQ ID NO: 725179 - DNA, 100 bp, Homo sapiens
aaccacacagtcctgttacaggtttgtaccttgttgtccagtggagccccaaaatagaagcaagatgaatattccattccgcattggcaatgccaaagga

SEQ ID NO: 725180 - DNA, 83 bp, Homo sapiens
gccagggagccaagcgtcctgcccggccaaggaagaggcccagcagaagggactcgctgagccaccccccgccccactccatg

SEQ ID NO: 725181 - DNA, 73 bp, Homo sapiens
acaagacccatctttatgcaaagccagcgttacagtaatgttccagatgtgtcttgctgaatcagggctctct

SEQ ID NO: 725182 - DNA, 74 bp, Homo sapiens
tccgcggcggcgtctgcccagggcagggctcctaaggaaggacccgcctttagtgatcttccattgtttgaagc

SEQ ID NO: 725183 - DNA, 97 bp, Homo sapiens
gccacttctggaaatggagtgaatggagtggtcagaacttcaccacacttgaagctgatgccatggacaatattaccaggcagaaccaattctacga

SEQ ID NO: 725184 - DNA, 100 bp, Homo sapiens
ccgtcatgccgactctcatacaggcgggcgccagtgcatcttctaggcgtggtgtccctcgtggccgttcacccctccaccgtcaacccgctcgggaagc

SEQ ID NO: 725185 - DNA, 90 bp, Homo sapiens
atactctagaatatacaaagacaaaaggagattctgatgaagaagttattcaagatggttcagttccggaaggtgtcttagaggacatta

SEQ ID NO: 725186 - DNA, 98 bp, Homo sapiens
gttggagagaaggcgcaaagaagaagaggagaggagacgggcagaagaagaaaagaggagagttgaaagagaacaggactcacaccacccggcaagaa

SEQ ID NO: 725187 - DNA, 114 bp, Homo sapiens
gcccccgcctgcccgcccgggagctgtcggccccggcccgactctatcacaagaagacaatgcagatcttcgtgaagactctgactggtaagaccatcaccctcgaggttgagc

SEQ ID NO: 725188 - DNA, 76 bp, Homo sapiens
ctctgctctacctggaggtctccactctggtcagcaagtatccagacatcaggctttatcctgtggataaacgcag

SEQ ID NO: 725189 - DNA, 100 bp, Homo sapiens
gactagacggccagccagtcatcaaacgcaggatgtagccaatcaaatgtgcaccaagaccaaggaggagtgtgagaagcactatatgaagcatttcatc

SEQ ID NO: 725190 - DNA, 75 bp, Homo sapiens
accctcactggagaatccagagctatcatggtgaacttacttcagattgtgcgggaccactgggttcatgttctt

SEQ ID NO: 725191 - DNA, 100 bp, Homo sapiens
cggcaaactccctggtctctgttggtgtagaagccaaaatcagactatgtcttcagcagtggtgcagttatatgcagcagatcggaactgtatgtggtca

SEQ ID NO: 725192 - DNA, 75 bp, Homo sapiens
cggcgggaacgattgggctgagcagaggacgacatgttgcttttcgtggagagacggtgccgagacctcaaggcc

SEQ ID NO: 725193 - DNA, 87 bp, Homo sapiens
atgaaccatcttcctgcacacagccacgatttgcaaagacaggtgatttggcttctgcacagttaggaggagcaccaaaccgatggg

SEQ ID NO: 725194 - DNA, 83 bp, Homo sapiens
gtgaagagttgtcccagctcggcccgcgggggagccccgggagccgcacgatgatatcatcaagttgaatcgaaaggaaggga

SEQ ID NO: 725195 - DNA, 118 bp, Homo sapiens
aagaaaacaagcagcttctgcacgacgcactggcccaggacctgcacaagttggaggaaatgtggactggaaacagatagcaagtattcaggaatccattggagaaaccagttctcag

SEQ ID NO: 725196 - DNA, 82 bp, Homo sapiens
ggcggcttccaggcgcactaccgcgggcctgcacccagagagggtgagctacgtccttggggccacagggcacaacttcacc

SEQ ID NO: 725197 - DNA, 99 bp, Homo sapiens
ccgggctcgcgggggcgcggagaagaggatccaggaaagattctttggatgggaagagaccttgaaaggacctctagtttatcctgcaactccagtcaa

SEQ ID NO: 725198 - DNA, 98 bp, Homo sapiens
gcctgcgcagctccggccgcctggctccccatactagtcgccggtggccctggtacagtggacggaaagtgtgggcttaaccctggtgggccgagacc

SEQ ID NO: 725199 - DNA, 82 bp, Homo sapiens
cccaggtgtaagcgcagaaagcaggcgaacccgcggcgcaataacgcttgaaatccatggcccaaaatgactctaccagtgg

SEQ ID NO: 725200 - DNA, 82 bp, Homo sapiens
tgaagcgtgaggccggcatcgtctttccgtcctctgaggcgacggccgcggctgcacaggggacggcaaaacagaacagaaa

SEQ ID NO: 725201 - DNA, 51 bp, Homo sapiens
gttagcctttgcagtctcgacataagttgtaaacaggaacatcgataagta

SEQ ID NO: 725202 - DNA, 99 bp, Homo sapiens
cgcccgcctcgagccagcccgccagcatgccccagtccaaagtgttcacttggcaagaagagtgcttcaattagaaaaacaaaactcgctgattttaaa

SEQ ID NO: 725203 - DNA, 100 bp, Homo sapiens
ggaagatgcccacggactacatcaggaacggggtgctctacgtcacggagaagagagccggacagggcagcggccggcactaccgcgctgcgatttgcgc

SEQ ID NO: 725204 - DNA, 108 bp, Homo sapiens
aaagcacgggagaaagtgcccaaacttcacagcattagggacaggaatggaacacacttggatgcagatcagccagcattactaacctgtcactggatagatctggtt

SEQ ID NO: 725205 - DNA, 100 bp, Homo sapiens
agtgcgtcaatcagagcgtcctgtgcgaaagacctgagctgtcttccttggcactgcctatggaggtgacacccatctcctccatcatggccatcctgag

SEQ ID NO: 725206 - DNA, 100 bp, Homo sapiens
cttgcaacagtggccgcacgcataggcctgtatccggtgtccgaggcgaactcagtaagatgatgttaagaggaaacctgaagcaagtgcgcattgagaa

SEQ ID NO: 725207 - DNA, 101 bp, Homo sapiens
tggggccaccggtcgcccccgcctccgggacctgcggggagggcccgcgagagatttattcctgacgacattgaatgccaccactagtaccttccagtttg

SEQ ID NO: 725208 - DNA, 100 bp, Homo sapiens
ggcgacttcgcgggaccgtggcgcatgacaacaatatgcacaggttttggcccaacagcagaaagcagcactgtcttcccagcagcagcagcagttggca

SEQ ID NO: 725209 - DNA, 100 bp, Homo sapiens
tctcaaagttctgggattatagatcttagcaaagcaatgtctcaagatggtgcttctcagttccaagaagtcattcggcaagagctagaattatctgtga

SEQ ID NO: 725210 - DNA, 100 bp, Homo sapiens
gaacacagtggatgtcgagaacggtgcttctatggcaggatatgatgcctgaaatgtgcagatgccccgtgtcagaagagctgtccaactaatcttgata

SEQ ID NO: 725211 - DNA, 100 bp, Homo sapiens
ggtggatctgacagatgccagcgtagctgaatccagtaccaaaaacgtcaacaacagttttacggtaccattgttggatactggtgacatcatcattgac

SEQ ID NO: 725212 - DNA, 102 bp, Homo sapiens
gctgaagctgtctatggaggactccaagagccctccccccaaagagcatgtctgttcgatcctggcttccctcctgcggaacctgagagggcagcagcggac

SEQ ID NO: 725213 - DNA, 74 bp, Homo sapiens
aagttggaagaaagggtgtcatcacagtaaaggacttatcaaactggtttcaaagcacagagctcaagtaattt

SEQ ID NO: 725214 - DNA, 75 bp, Homo sapiens
tctccttctggtgtggggcccgagatgccttcaattaagttgcagagttctgatggagagatatttgaagttgat

SEQ ID NO: 725215 - DNA, 80 bp, Homo sapiens
taagagtcacccaaacaatcggctgagaatgagaagagtcctcctccgcctcctcctctctgcatgcgcgtcagagcccg

SEQ ID NO: 725216 - DNA, 90 bp, Homo sapiens
ctgcggagatcggtagcgcctgctgcccccaccaggtgtgccaagtgcaagaccgtcttccaccagagctgccaggctgtggtgaagaag

SEQ ID NO: 725217 - DNA, 100 bp, Homo sapiens
gcccccgggcacgacctctcggacacggtgcaggcaggatcaatgtgactctaagaacaaatggatgaatgaatatccatatgaagagaaaaacaataaa

SEQ ID NO: 725218 - DNA, 90 bp, Homo sapiens
gagccttcagacttctgtacagcagctgaaagaccagtcctggtacctgggctagcttggttcctttccaagtgtcaaataggacaccca

SEQ ID NO: 725219 - DNA, 75 bp, Homo sapiens
atttattaaatttaaatagattagtaactggcatagacaactatgggcagccactgccaaaaaatatggtgtctc

SEQ ID NO: 725220 - DNA, 76 bp, Homo sapiens
ctctctgccggcctcggcttcagacatgcgaggattcatgacagcgcatggacagccagaccagcctcgatctgcg

SEQ ID NO: 725221 - DNA, 82 bp, Homo sapiens
agaggaggaacatgactgtttcttggaagaggacgagcctgtggagtgggagacacctgacctttctcaagctgagattgag

SEQ ID NO: 725222 - DNA, 82 bp, Homo sapiens
aaggaattcccggcccctcagggccacggctttagcggtgtcttttgcgggttatgtaccgaaggactctaccgtgtcagcg

SEQ ID NO: 725223 - DNA, 82 bp, Homo sapiens
ccagccctagcgctggccgcgaccccggcggttaatttggagtggcccctggagtcagtttcctacaccatccgaggcccca

SEQ ID NO: 725224 - DNA, 82 bp, Homo sapiens
ggaattctaatttgaaccatgtttggattgaagccgcctctgtattacttaccagccttgccaacattccactaacccccga

SEQ ID NO: 725225 - DNA, 90 bp, Homo sapiens
ctcgtttctgaacctgggcagtggcactgggtatctcagctccatggtgggcctcattctaggaaagaaattgagccttttctgccacct

SEQ ID NO: 725226 - DNA, 95 bp, Homo sapiens
ctgcaacctgcagcacatcagcgaccgggagaacatagacgtacaaaactttttaccaacaaaaaaaagcaagtagttatactcaggaagaactt

SEQ ID NO: 725227 - DNA, 50 bp, Homo sapiens
cagaatttctcctcataaaaaaggtccagacatcatctggtctccctgaa

SEQ ID NO: 725228 - DNA, 80 bp, Homo sapiens
ctgtttacatggaactcagacatctgcaaatcatgacaaatttacatgtattggagaccagaccagaagcccttctgaat

SEQ ID NO: 725229 - DNA, 82 bp, Homo sapiens
gccctggaggcggcgggagggccgccggaggaaacgctgtcactgtggaaacgacaatgcagatcttcgtgaagactctgac

SEQ ID NO: 725230 - DNA, 50 bp, Homo sapiens
ggtgaacaatgacctgggagaggcgcagccccattgacaaaccttcagat

SEQ ID NO: 725231 - DNA, 85 bp, Homo sapiens
agccttgaactcctgggctaaggatcctcctacctgagcctcctgagtagctaggactggtctccctctgttgtccaaggctgga

SEQ ID NO: 725232 - DNA, 100 bp, Homo sapiens
caagccgcgtccccagagagcgccctgagagaacagggtggccgcttggtccagctctcgtggcattatccttcagtggggctattggactgacttttct

SEQ ID NO: 725233 - DNA, 80 bp, Homo sapiens
agcaactctggctgatcaaagaagagcagcccatgtctctgctggatgaaccgaatcctaacagtccagccaatagccag

SEQ ID NO: 725234 - DNA, 96 bp, Homo sapiens
cctgaatcttggtgtttggacataggagtgattcgcctttgccagtctcatctcgtgtctgctttgttaagttccatgatccagactcagcagttg

SEQ ID NO: 725235 - DNA, 95 bp, Homo sapiens
ggagcaattgaagctgactactaaggagaataaggtggttgtgtcaaaccgattggtgacatctccatgctgtattgtcacaagcacatatggct

SEQ ID NO: 725236 - DNA, 75 bp, Homo sapiens
ccctgctcggaggcggtggcggccgccatggcatcagatgaaggcaaactttttgttggagggctgagttttgac

SEQ ID NO: 725237 - DNA, 100 bp, Homo sapiens
aagagcttgaaagcgaagttcaggaagagtgacaggttgacggatatattcagacgttacgacacggatcaggacggctggattcaggtgtcgtacgaac

SEQ ID NO: 725238 - DNA, 100 bp, Homo sapiens
gcatcgattttaacacatgactcaagtattcggttaacatcagatcccagaaaacagtgttctaaagaagacggtggtggatggtggtataatagatgtc

SEQ ID NO: 725239 - DNA, 100 bp, Homo sapiens
caaaaacacagaagggagttaccagtgttcatgcccgaaaggctacattctgcaagaggatggaaggagctgcaaagggcagccccgagaaccacaggtg

SEQ ID NO: 725240 - DNA, 82 bp, Homo sapiens
ttacagctaaaaatgcagttcagcagttacacaaagagatggcccaacggatggaacaggtctacttccccagcaggacagc

SEQ ID NO: 725241 - DNA, 127 bp, Homo sapiens
ccgcagaagggaagcaccctggacaacagcctgcacaaggacctgctgggcgccatctccggcattgatagtggccagaactatagtgccagtagtaaaggtgaacgactaagtgccagactcagag

SEQ ID NO: 725242 - DNA, 82 bp, Homo sapiens
ctcccgagccagccactcctcggaacggccacctcccaggctgctctttggcgtaaattgcaatcgattagggatcgtttct

SEQ ID NO: 725243 - DNA, 96 bp, Homo sapiens
agaagataaagttgacagcagaggcagagggcactcttccacgccttgtagaccatgtctggcatcaccctgttcgaaggaataaattcaaatacc

SEQ ID NO: 725244 - DNA, 73 bp, Homo sapiens
ggcctgcagaccccctcctgcaagatccagaagctgagcctcctcagtttgtggatatccaccttgaagaaga

SEQ ID NO: 725245 - DNA, 97 bp, Homo sapiens
cacggcaagctcgtgctctggtcggggaaatcctcattgacgattcaatttgttgaaggccaatttgtggactcctacgatccaaccatagaaaaca

SEQ ID NO: 725246 - DNA, 100 bp, Homo sapiens
gctgtgaggcttcgggaagcagatagcatagctgctgtggctgaactacgacaacacattgctgagcttgaaatccagccaacaaatggaattttcttga

SEQ ID NO: 725247 - DNA, 83 bp, Homo sapiens
aagtggcctaaaacttcggcgttgggtaccccctgtaccggctgggtggcccacaacttcgggtgttccgaaccaacttcttc

SEQ ID NO: 725248 - DNA, 75 bp, Homo sapiens
atttcaaaaccgacctgaggtttcagagcgcagccatcggtgcgctgcagaaaacccgcctagtgccaagcaacc

SEQ ID NO: 725249 - DNA, 100 bp, Homo sapiens
ttgcagaacagagatgacatgccagcccagactttcatgttgaatcgctcctagctgacccctcacgtctcttatgatacgtacagaaagcaagagcagc

SEQ ID NO: 725250 - DNA, 75 bp, Homo sapiens
gaactcactctgggggcctcacaggccaccacgaaaccaaagccgcctttggcctctgcagagggcccagcggtg

SEQ ID NO: 725251 - DNA, 75 bp, Homo sapiens
ctgatcatcctgctgggcttcgtccagatcgggaaggaaaccaaggtgtatgttggtaacctgggaactggcgct

SEQ ID NO: 725252 - DNA, 100 bp, Homo sapiens
cgggagccgagcccagctaggaatgcagacctcctgaaaaccaagccgaggactgcggggtccggtgtccacgcagaactgtcttctgaagattgatgtc

SEQ ID NO: 725253 - DNA, 100 bp, Homo sapiens
gggacggcggcggtggcgccgtaggcagccgggacaggcctgaccgccgctgcctacagagtcacactcaatcctccgggcaccttccttgaaggagtgg

SEQ ID NO: 725254 - DNA, 75 bp, Homo sapiens
ctgtgatgcctgcagagctgtggcttaccagactccatcaagaatgctggaggaagggtgtttgtccactgccag

SEQ ID NO: 725255 - DNA, 50 bp, Homo sapiens
agtccggacatctgaaacttggtgatgcagaagatggggaagaatatgat

SEQ ID NO: 725256 - DNA, 50 bp, Homo sapiens
aaaccagtcctgctcgcctccgtggtgctggagaatctggtaaaagcacc

SEQ ID NO: 725257 - DNA, 75 bp, Homo sapiens
gttccacaagaagtgcagcttataatccaagctattactcagaaagcagaagccactggagaaaaacggccaaga

SEQ ID NO: 725258 - DNA, 100 bp, Homo sapiens
ggcgattggcatcctcagccgcttttctgccttcaggatcctccgctcccgagatgccctccaaatccttggttatggaatatttggctcatcccagtac

SEQ ID NO: 725259 - DNA, 75 bp, Homo sapiens
gcgacaatgttggcctgtctgcaagcttgtgcaggatgtggaattagaagaagctattagaagaagtcttgagga

SEQ ID NO: 725260 - DNA, 75 bp, Homo sapiens
ccagaacttgcagcaacaatagatcagaatctctctcgccgtataccacatggctgtcgaccatttcagacacag

SEQ ID NO: 725261 - DNA, 50 bp, Homo sapiens
ctgatcgggacccccccgcagaagaggatacatggtaatgggtgattctt

SEQ ID NO: 725262 - DNA, 75 bp, Homo sapiens
aaggatatgctgtattcagctcaggaccaggcaccttctgtggaagaggtgtggcgaaatcttgtttgagaaccc

SEQ ID NO: 725263 - DNA, 51 bp, Homo sapiens
ctcccaagtagctggaattacaggttaaagctgaagctcaacaaagatata

SEQ ID NO: 725264 - DNA, 75 bp, Homo sapiens
aaaacttcgaggcactcaagtcctggctcagcaagactctcgagcccatacagaaccaagttgtattgttagaca

SEQ ID NO: 725265 - DNA, 75 bp, Homo sapiens
cttttgtcagaagtgtattgataaatgtcactgcttcaaccacctgtgagaaattagaaaaagccaggaatgagt

SEQ ID NO: 725266 - DNA, 88 bp, Homo sapiens
cgagtcggaggaggacgaggacttggaaggctatgtcttgcccagccacgtgactgaggagatgctatgggagtgcaagcagcttggg

SEQ ID NO: 725267 - DNA, 77 bp, Homo sapiens
cgcccggcgcccctgagccggccgagcggcgacggaccgcgaggtactccaaagattcaggtttactcacgtcatcc

SEQ ID NO: 725268 - DNA, 83 bp, Homo sapiens
cttctcccggatcctggacaagagcctcccagctgacattctctatgaggaccagcagatactgagccttcataagggttgac

SEQ ID NO: 725269 - DNA, 74 bp, Homo sapiens
tccagagctaagactccacgacatcccggaagccgaaaaatggaatcattgcaatttagagatgtggctgtaga

SEQ ID NO: 725270 - DNA, 100 bp, Homo sapiens
acaggagccggagcagaagcaaagaggcatgttatttgaaagcaattgagacgcaaccgaactttgcagtagcttggagtaatcttggctgtgttttcaa

SEQ ID NO: 725271 - DNA, 100 bp, Homo sapiens
gtcaaactcaccaaaaacaacatctttccagaaagagccgactgcaagtacaagtttgagaactggggtgcgtgtgatgggggcacaggcaccaaagtcc

SEQ ID NO: 725272 - DNA, 83 bp, Homo sapiens
ggaccagcgtgtcccccacatcctcccctgagtccggagctaccaaaaccatcctcctgctcaaagcattcagcaaaccaggg

SEQ ID NO: 725273 - DNA, 82 bp, Homo sapiens
aatgaacctcatgaaagcagaaccaactcggatattgttgaggagtgtatctcgcagtcagcagtgaaaacaaagttcgaac

SEQ ID NO: 725274 - DNA, 94 bp, Homo sapiens
caaccatctcacacctttccaaaggacgcgaccataactctaaaagacctgcctagagctggaacgttacctccagagcgagccctgctatgtt

SEQ ID NO: 725275 - DNA, 82 bp, Homo sapiens
cgccaccatgcccaagagaaagagatccgagaggccttcaaggtgtttgaccgtgacggcaatggcttcatctccaagcagg

SEQ ID NO: 725276 - DNA, 82 bp, Homo sapiens
acagaattctctacatttgtgaaagtcagtttctgaggaatttcatcagaaatacatgctacaggatttaactatcagaatg

SEQ ID NO: 725277 - DNA, 100 bp, Homo sapiens
gcggcaaggtctccaagtcccagctcaagattccacatatggtatctgagactcacacagtgtggttggaagatagcacagtgacctcccaggcacagcc

SEQ ID NO: 725278 - DNA, 100 bp, Homo sapiens
cgggccgtcctcggcggcagtgtcagggccttcgtcaagatggttggacaccacgtcgccttcctggaagcagacgtgcttcaggctgagcgggaccatg

SEQ ID NO: 725279 - DNA, 75 bp, Homo sapiens
agaaggatgctcagaacagattggcacccattgggagtctatgctccatcagcaagcactgccgactacaatagg

SEQ ID NO: 725280 - DNA, 75 bp, Homo sapiens
attggggtgcagcagctgcaccccaccttgatccagcggacttacggggagaccctcacgcagggcttagagttc

SEQ ID NO: 725281 - DNA, 75 bp, Homo sapiens
gagagaaccaaatcacaataagtctttagctgcaggtgtgtggggttatggaggttttgatgactatggtggcta

SEQ ID NO: 725282 - DNA, 97 bp, Homo sapiens
gcttggcccttcatggaacctgtgaagagaacagaagctccaggatattatgaagttataaggttccccatggcttcttctcagcctgttgataacc

SEQ ID NO: 725283 - DNA, 100 bp, Homo sapiens
ccacattgctccaagccagatatggtacaggactgtcaacgaaacctggcacggctcttgcttccgcctccatccctgtgagatcactgccctgagccaa

SEQ ID NO: 725284 - DNA, 74 bp, Homo sapiens
cattctccactgccgtctactcggccactccggtcccgacacctagcctgcatcagacactcctctaatttaca

SEQ ID NO: 725285 - DNA, 88 bp, Homo sapiens
gtgcccgaggaggcagccaagctcgtagcctgccactccgtgcatttctccacccaggtgaactcctccctcacctccccgacggggc

SEQ ID NO: 725286 - DNA, 100 bp, Homo sapiens
tgctgatgaccctcgagggagacatcaggctggggaaaggaaaacctcttcagcgcaaggtgaaaccacctaagaagcaagaggaaaaggagaagaaggg

SEQ ID NO: 725287 - DNA, 75 bp, Homo sapiens
agccccaggtctaggatccatccaggactgagtgtgttaatgttcgtgaagaaattgaagagttttttccaagaa

SEQ ID NO: 725288 - DNA, 95 bp, Homo sapiens
gatctaggaatagcttgccaaaccaggttgcatttcctgaaggggaagagcaagatgcagtcagtggagctgtcccctttcctccaacccaacgg

SEQ ID NO: 725289 - DNA, 90 bp, Homo sapiens
gcagaggaaagcgggctggcaggcgagggagcccgcgtcggctgagagcccacaggcccccacagtattctaccttgtaaatactgttat

SEQ ID NO: 725290 - DNA, 127 bp, Homo sapiens
gccgccgcgccaccatctttcgggctgccgagggtgttcttgacgattaatcaacaggtttgtgtgctggagaggcaaatatttgacttccttggatatcagtgggcacctatcctggcaaattttg

SEQ ID NO: 725291 - DNA, 74 bp, Homo sapiens
ctggcccaagcacttgacctggagctgagcagggccaaaaaacaggcagaagtcaattcatctggaaagactat

SEQ ID NO: 725292 - DNA, 90 bp, Homo sapiens
taactggattgagtccagctcttgggatgactttgagaatcactacaagaaaaactccttgtggtgaaggttctaagacgtgggatcgtt

SEQ ID NO: 725293 - DNA, 85 bp, Homo sapiens
actaaaacattgccagatgatcatttctacagcagtataatcactacaaatccaatgtggagattttcaaattgcaaccaaataa

SEQ ID NO: 725294 - DNA, 97 bp, Homo sapiens
gaacaagttgtacagagcctcaatcagacctacaaaatggactacaactcctttcaagcagttactatcagatggtgccatgacaatggtgtgaact

SEQ ID NO: 725295 - DNA, 101 bp, Homo sapiens
tttaaactatggacgactccgaggaacattgaggtgaccaagaatatggcccaggtgaccaaagccctggacaaggccctgagcaccatggacctgcagaa

SEQ ID NO: 725296 - DNA, 83 bp, Homo sapiens
tattgattcatcagattttgcattggatattcgcatgcctggggttacacctaaacagcgtccagaggaccagaggttaattt

SEQ ID NO: 725297 - DNA, 88 bp, Homo sapiens
gcggccttcatgctgggctcgctgctgcggacgttcaagcagctacaagtgtattcatcagagtttggaggacaataatagatgtccc

SEQ ID NO: 725298 - DNA, 75 bp, Homo sapiens
tatttggctctgaccggatggagctgctggcgcacctgctgggaatggaagttggatacactttgtgacttgtac

SEQ ID NO: 725299 - DNA, 98 bp, Homo sapiens
cagagccccttacccgccgccgcggccaggccccccaacatggactgtctctgtatagtgacaaccaaggacggaagctcctgttttcttgtcagccg

SEQ ID NO: 725300 - DNA, 51 bp, Homo sapiens
gctcacctgtgcgggatggaacaaaagaaaactttagaaactgttcctttg

SEQ ID NO: 725301 - DNA, 74 bp, Homo sapiens
cgatgatcgtgtgtcggatgaggagaagctctattaccaggttttaaacttcgccatgatcgtgtcttctgcac

SEQ ID NO: 725302 - DNA, 100 bp, Homo sapiens
ctgagagaacgttttgcctatccaatgcctttctggagcgagctggacgccactgtggggctctgagagtcctgaattcttactgggttggtgaagattc

SEQ ID NO: 725303 - DNA, 124 bp, Homo sapiens
gttcaccgcgctctcagcgcgcacttccgggcacggtcagggcgtgacgtcgggaggagggcagatgatgattattctccaccgtctaagagaccaaaggccaatgagctaccgcagccaccag

SEQ ID NO: 725304 - DNA, 100 bp, Homo sapiens
cccacggttcattggattttgcattcagaaaggagcagactgtggagcaaagattcgggaactggagcctctcctctgtcacagtgacaatccatctcag

SEQ ID NO: 725305 - DNA, 100 bp, Homo sapiens
cgatcctcgcgtgagacagatcaagatcaagaccggcgtggtgaagcgtattcaagtcaaacaacgttgaaatggattgggtgttgaagcatactggtcc

SEQ ID NO: 725306 - DNA, 90 bp, Homo sapiens
gcgggggccaccacactggcccaaatatttcctgcaggtctggtcttctctcgtctgagccctgagtactacgacctggcaagagcccac

SEQ ID NO: 725307 - DNA, 100 bp, Homo sapiens
gaggagtccagggagcccagcacaggccttggacaagattcgctatgagagcctgacagacccttcgaagttggacagtggtaaagagctgaaaattgac

SEQ ID NO: 725308 - DNA, 73 bp, Homo sapiens
aaaagcgcctcaatgaccggattgagatgtggagttacgcagcaaagaccattcgtatatatcttctttggag

SEQ ID NO: 725309 - DNA, 89 bp, Homo sapiens
gctggaagcgaggaggctccacacggccgttgcagctaccgcagccagaaactgattattgatgagaagaagtattacttatttgggag

SEQ ID NO: 725310 - DNA, 89 bp, Homo sapiens
cagcgaggaagctacacttttcaccaaggaactggtgctgcagcgagaggaagatgatccctatgatcttgaagatgtttctgcacaga

SEQ ID NO: 725311 - DNA, 90 bp, Homo sapiens
catgatgggcagcaagatggcgtctgctagtagggtcgttcaggggttccaatttcatctgctgttgcaggcgtagcaataggattggtc

SEQ ID NO: 725312 - DNA, 100 bp, Homo sapiens
ttcgctcggccaaatcctccttcagcctcctggcgcccatccgcagcaaggacgtccgcagcaggggccagacccaagaggacgcagaggctgagcgcgg

SEQ ID NO: 725313 - DNA, 100 bp, Homo sapiens
cggtggactctttcctcgacctggccagtactatactggcaattgctggagaagattttgcaattgttgcttctgatactcgattgagtgaagggttttc

SEQ ID NO: 725314 - DNA, 75 bp, Homo sapiens
tgagacggtgtcccgccgaaagggaggtaccttcttccaaacccggtggcgggacaggcctggccggcctctgca

SEQ ID NO: 725315 - DNA, 74 bp, Homo sapiens
agcaagatatactactaactttgaaatggaataagtttggcaatgaggagcagcagctggcgtgggccaagcgg

SEQ ID NO: 725316 - DNA, 76 bp, Homo sapiens
ttcatcactcgtgacttcactcagcccaagggcaagtattttgtaaccttcccatatccatatatgaatggacgcc

SEQ ID NO: 725317 - DNA, 50 bp, Homo sapiens
tcaaggctggtgcctatgaccattctcagacaccatccacattgaacccc

SEQ ID NO: 725318 - DNA, 100 bp, Homo sapiens
attgatgacacatcagcatttgtttcccttagccagcccgagcaagtaaagattggaaatgaatggggtgctgaaaggaatgctctcagaatggttttcc

SEQ ID NO: 725319 - DNA, 80 bp, Homo sapiens
accagctgtagctgaacgtctggatggtggagaagagcaggtcgggtattcaatggatcgggaaaacccattgacagagg

SEQ ID NO: 725320 - DNA, 51 bp, Homo sapiens
tttgtcaccacaaaaaggacaggacttggcctttaccctggaagagagaca

SEQ ID NO: 725321 - DNA, 76 bp, Homo sapiens
aagtttctggtcactccccaggattatgcgcggcattttttactgtctacagaaacttattgtaattcatttttcc

SEQ ID NO: 725322 - DNA, 82 bp, Homo sapiens
gtttcccgggagatcccaggcggtgacagagtggagccatggctagagatcaatgtccgagttaccaccatggatgcagagc

SEQ ID NO: 725323 - DNA, 100 bp, Homo sapiens
gtttcgtgtgtttgacaaggaggggaacggcaaagtcatgggagcagagctcagacatgttctcaccacccttggtgggaaggatacgagcaagataaag

SEQ ID NO: 725324 - DNA, 83 bp, Homo sapiens
attgcaggaggagatgcttcagagagaggaagccgaaaacaccctgcaatctttcagacagaaaacctcggatcaattctcag

SEQ ID NO: 725325 - DNA, 51 bp, Homo sapiens
tgacaacgtggatcgttgttttgaaacacgagatgatgcctattggccaga

SEQ ID NO: 725326 - DNA, 100 bp, Homo sapiens
aggtggcgcaggcagtggagcgcgccaagcaggtcaccatgacggagctgaacgccatcatcggggtggccaccgagtactaaattcacttgggaataaa

SEQ ID NO: 725327 - DNA, 83 bp, Homo sapiens
attcagagcgcgtatggagtggaaacgcttgtagggtttcaccagggagtgcatccgccccaacccttttccccctcgtctcc

SEQ ID NO: 725328 - DNA, 75 bp, Homo sapiens
tggcggacggggagctgaacgtggacagcctcatcacccggctgctggaggagcaaggcttagatcacatagcag

SEQ ID NO: 725329 - DNA, 100 bp, Homo sapiens
tgggtatcctgcaggaggaggaggaagaagagaagctggacgctctgcaggggatcctctctgctttcctgtttcaggtttagctgtgcctcccagtgac

SEQ ID NO: 725330 - DNA, 74 bp, Homo sapiens
ttgaaatggacagtggagatgaagcctaagaatatgatcaggaatggttttagggaagactgttgccggatgac

SEQ ID NO: 725331 - DNA, 75 bp, Homo sapiens
ctgaccaccacttgctctgcgctgaggtgctgggacagccatggtttcagacgagaagtagctgattttcagctt

SEQ ID NO: 725332 - DNA, 75 bp, Homo sapiens
aaggattccaagtaactcttatttggagccatttcaggtgaaagtggcttcagaagcacttttaataatggattt

SEQ ID NO: 725333 - DNA, 98 bp, Homo sapiens
ggacggaggcatcggaggcggctgcgagagtggcagaggagctggcggagagcggcctgcgggcgatcgggccgaggcatagaatgtcaagctaacca

SEQ ID NO: 725334 - DNA, 83 bp, Homo sapiens
agcggcctcctgaaggaggggaagggacgtgggggcggccacggcaggtgaaagacccctgacaaaagacaatcatcttctgg

SEQ ID NO: 725335 - DNA, 98 bp, Homo sapiens
cgaggcctcccctggccagaagcggcccctgtggctgtgtaagatctgcagtgagcaaagagaggaagcggctcagccccagggcagcacatcagaga

SEQ ID NO: 725336 - DNA, 83 bp, Homo sapiens
ctcaaagctgctgccgccccttgggctaaaagaaaccaccatcatgggttcgggtcccatagaccccaaagaacttctcaagg

SEQ ID NO: 725337 - DNA, 75 bp, Homo sapiens
atttaattttagggtcctttatatagaagggagagtagaatactcctgagaatttacatgaaatggctaaacata

SEQ ID NO: 725338 - DNA, 90 bp, Homo sapiens
cccgacaaacaccacgagaattccgcagcccacacgacaatgcagatcttcgtgaagactctgactggtaagaccatcaccctcgaggtt

SEQ ID NO: 725339 - DNA, 100 bp, Homo sapiens
gggcttcagcaccgcgcccatggcagagccagaccgacagtcattttgtttactcattcagccctgttgcaggtcccaataaactcttcataaggttgac

SEQ ID NO: 725340 - DNA, 82 bp, Homo sapiens
caagctctcttaagagattatggttgtaaaggcatatgatcgtgtggagcaagaatgggttgccattaaaataataaagaac

SEQ ID NO: 725341 - DNA, 75 bp, Homo sapiens
tgcctcagcctccaaagtagctgagactacaggagtcgtaagaaagcagtgggagttgaagtcattgtcaagtgc

SEQ ID NO: 725342 - DNA, 100 bp, Homo sapiens
ggatctctagcctacaggatggcttggccttgcacataaggctttggcagctcaagtacatctgggtttaacttcagcaatcctggcatcacggcatcag

SEQ ID NO: 725343 - DNA, 101 bp, Homo sapiens
ccggagccggagaccctcccttgaaaccggcactgggacttctcgatctctggaggcacctgttgcaagtgacagtcactcaagactgcttgcaactgatt

SEQ ID NO: 725344 - DNA, 99 bp, Homo sapiens
ccgagtgttgcctcttcgtgccatacggttttttgttgagaatctcaaccatgatgcaattgtagttcgaaagggacggccgttgtcctacaagacatt

SEQ ID NO: 725345 - DNA, 75 bp, Homo sapiens
aatttccatgtcaacatagtccagctgaagaaatcaggggagaaacccctgcttggtggaagcctgatggaatat

SEQ ID NO: 725346 - DNA, 75 bp, Homo sapiens
caacaactcggattacgccatcgcacagtgcctccggagccagcgtggtggccatagacaacaagatcgaacagg

SEQ ID NO: 725347 - DNA, 87 bp, Homo sapiens
tacaccatctgtggtcatgtcaacagtagcacaagacttaattcagtgcacaaatgagatgaatgtgaacatcccacagttggcaga

SEQ ID NO: 725348 - DNA, 50 bp, Homo sapiens
cctgtgatggcatctttcatctaacaccagagaggggcagcaggatgaat

SEQ ID NO: 725349 - DNA, 75 bp, Homo sapiens
agatttacaaaagaaaaaaaatgaccttcggtatattgaaatgcagtgtccctgaatgagatttcattgctagtg

SEQ ID NO: 725350 - DNA, 100 bp, Homo sapiens
ctcgcgtcgcgcccgggaggaaggaacgaggcaaggagctaaagcagcgtgcgttcagccctggggaactgggcaggcaaaaggcttctcttcccctcca

SEQ ID NO: 725351 - DNA, 84 bp, Homo sapiens
acaccctcaacaaacaccagcgctttggctacccgtacagtgaggacgcccgccagggtgagcagtacatgaacacccggtgcc

SEQ ID NO: 725352 - DNA, 75 bp, Homo sapiens
cccaggtgctcctggagggacagaaggacggcttaccgaccgctcgggagctcgcccccgcctagcctcggctga

SEQ ID NO: 725353 - DNA, 94 bp, Homo sapiens
aggatatcgacgtcgtgatccagaagtccagagctgaggactgcctgtttgcagattgacgagatgcctgaggctgccgtgaaatcaacagcca

SEQ ID NO: 725354 - DNA, 83 bp, Homo sapiens
ggatgagctgaagtccttcatcctgcagaaaaaataatgttgagtttccatgaagaacaggaagtactgccagaaactttcct

SEQ ID NO: 725355 - DNA, 76 bp, Homo sapiens
cctacaagcaagctgaatggaggccagatagtaccatgatagctgtatcagtgatcagaggactgctgaaattttg

SEQ ID NO: 725356 - DNA, 80 bp, Homo sapiens
cgaggacgcaggaggaggagcccggagctgcagccaccggggagccagcagcatctggaatcaagagacccatggcatct

SEQ ID NO: 725357 - DNA, 82 bp, Homo sapiens
ggaaatactggtggaaccagaaccattatttggtgatgagttttgatcatcctgagaaaaatgggccttggcctgcagaccc

SEQ ID NO: 725358 - DNA, 83 bp, Homo sapiens
ctggggtcggcgccgagtgggaggatggcggaaaacatggtgatgagttttcgagtctccgaccttcagatgctcctgggttt

SEQ ID NO: 725359 - DNA, 75 bp, Homo sapiens
gagtgggagcaccaggatctcgggctcggaacgagactgcacggcacaaatcctgaagagcccgtgggcgtggac

SEQ ID NO: 725360 - DNA, 80 bp, Homo sapiens
tccaggaatctgatggaacccctgaaaacaaccctctggcaggatcagtgaatgcttgtgaaaagacctcatttatgttt

SEQ ID NO: 725361 - DNA, 96 bp, Homo sapiens
tgtgggagaggaagcggcggcggcggcgccgggcccgggggtggtgacagcaggtctgagcttgcaggcctctgggaagcaagccatcgtgtggca

SEQ ID NO: 725362 - DNA, 100 bp, Homo sapiens
ctttccactcggctcctgtcgtccgttctctcaggctcccgttcaggttgctccgactgtgtgttccaggagtggtggctctgaggtgtgaccctgccca

SEQ ID NO: 725363 - DNA, 90 bp, Homo sapiens
gcgccaagtatgtgccggagagaaacgtcgtgatttggagtattaagtctttcccggcagcctggcatcctcgctacaacctcattgttg

SEQ ID NO: 725364 - DNA, 100 bp, Homo sapiens
gtcctggctcagatggctcggtcatcacggatttgctgaccatgaaagaatatcactgtttgctgcaattactgtgtcctgatttcccgctggagctcac

SEQ ID NO: 725365 - DNA, 74 bp, Homo sapiens
ttcagttggtcgaagacagaggttcaggtatgatgaaatgagtattctcttcacagttttggttactgaaacta

SEQ ID NO: 725366 - DNA, 75 bp, Homo sapiens
gatttgtttggcgtgccaagcttctctgtgaaagagcacaggcgaacagctgcttggagaactacaagtgaagaa

SEQ ID NO: 725367 - DNA, 74 bp, Homo sapiens
aggagctggagcagctcaaagaggtggttggaggcaaagtaaagaagcccggtaaacgtggtcggaagccagcc

SEQ ID NO: 725368 - DNA, 87 bp, Homo sapiens
ggacttcctccccagcctttgggcttctatccgcagagaggtggattctgaagagccagtctttgaggctgtcatcaactgggtgaa

SEQ ID NO: 725369 - DNA, 50 bp, Homo sapiens
ggacgaggaaggcgatgactcagatgggtactcgcagaaggaagacagat

SEQ ID NO: 725370 - DNA, 100 bp, Homo sapiens
ctggaacttcatcatcatctacttcacaggaattgccatttgaaatgaaacacgatttccaaaatgaacttaatctttcatgagaaactgaggatagaga

SEQ ID NO: 725371 - DNA, 99 bp, Homo sapiens
aatgaaatgttcaagttcaatgaggagaactacggtgtgaagactacctatgatagcagtctttcttcttatacgtcccctcgggtggctattcttcca

SEQ ID NO: 725372 - DNA, 90 bp, Homo sapiens
ccacgtgcagacatctacaaccttcgatctcctgacgactctgcttatgataatgtcaacaaagttcgagtagctatcaagaaaatcagc

SEQ ID NO: 725373 - DNA, 100 bp, Homo sapiens
cagcctcccaagtagctgagattacagataagaccacttttttatctgagcttctgtgacctgctcctgggactttgctggctcacggagacacttctct

SEQ ID NO: 725374 - DNA, 100 bp, Homo sapiens
cgacagtgccctgagggccttcgagagctaccgcgccagacagccgcggcgagtcctttgcacatgttggcaacacacgcatccgcatcggcctccctgc

SEQ ID NO: 725375 - DNA, 82 bp, Homo sapiens
aatccactcggtccccgactcagagactcctgccctccacccccaagggaaatcctcattgacgattcaatttgttgaaggc

SEQ ID NO: 725376 - DNA, 77 bp, Homo sapiens
ccgccagcgccccatcctgagccgtactatactggcaattgctggagaagattttgcaattgttgcttctgatactc

SEQ ID NO: 725377 - DNA, 98 bp, Homo sapiens
gtgcatgatgagagctgacttgcgcattgctgcctgcctttctgccacaggtgtgtatttagcagctttaccaactcctggtggtattcagattgctg

SEQ ID NO: 725378 - DNA, 90 bp, Homo sapiens
ttcctttggaagttattccgtagcataagagctgaaacttcagagcaagttttcattgggcaaaatgggagacagggtcttgccatgttg

SEQ ID NO: 725379 - DNA, 100 bp, Homo sapiens
cttctcggaatggaaggatgacgaggttcctggtagagttacacagttgtgccgccagtatagcgacatgcctcctttgacgttagagggcatccaggac

SEQ ID NO: 725380 - DNA, 100 bp, Homo sapiens
gggactgtctgatccctgctcagaggggcctctacaaggatgtgatgatggggacctatgggaacctactctcattagtgaagttattgccagtggactg

SEQ ID NO: 725381 - DNA, 98 bp, Homo sapiens
tagcatcttccaactcatgatacacacccttgacccactcgccgaagacttaattcagtgcacaaatgagatgaatgtgaacatcccacagttggcag

SEQ ID NO: 725382 - DNA, 50 bp, Homo sapiens
gacttccctcttaggaaaacagaggcacagttgaatgctgttgatgcttt

SEQ ID NO: 725383 - DNA, 100 bp, Homo sapiens
ctgatatggaaaggcatcgcatcttgtttagatatgctggtcctgaagatgatgctgccattaccttgagtcatattaaatctgtagactcaggagaaac

SEQ ID NO: 725384 - DNA, 100 bp, Homo sapiens
gcgctagcttcggagtctcccgcgcgcacctcagccgcctcctagcggcgcggcgctcgctcctacgcaattctgtggtgttcttggtcacacatttatg

SEQ ID NO: 725385 - DNA, 108 bp, Homo sapiens
cagaacatctgggagaatatttaatggaaaatcgcttggttaaaacctgacacttttaacagggtgagcagggcagcatttccttctcccactgctgctgagatggca

SEQ ID NO: 725386 - DNA, 75 bp, Homo sapiens
ccagaccccacggtcatcaacaagcacataaggaaattagtggaggatgacgactcatttaatttacataacagc

SEQ ID NO: 725387 - DNA, 83 bp, Homo sapiens
atttggggatggctataatgggtatggaggaggacctggagacgcaaaatgatttcatggttatctgcaatgttgcaaaaatc

SEQ ID NO: 725388 - DNA, 108 bp, Homo sapiens
tgtcttgtgccagctttcatcctgagttgccaatcattatcacaggttcagaagatgaaaacatagctctgctggcagaaacagctctgagattcctggaattagtac

SEQ ID NO: 725389 - DNA, 78 bp, Homo sapiens
agtaccatcgacagagcataagtacctctggcttcccctctcttcaactaataaagtcagacctaaagccaaaaggaa

SEQ ID NO: 725390 - DNA, 76 bp, Homo sapiens
gtttcgacagcgaacatgtcgcggcctgtcaggactttccttatcccagttgattgtgcagaatacactgcctgtc

SEQ ID NO: 725391 - DNA, 82 bp, Homo sapiens
ccgaggccaagatggcggtgctgtcaggagaactacgatgacccgcacaaaacccctgcctccccagttgtccacatcaggg

SEQ ID NO: 725392 - DNA, 100 bp, Homo sapiens
ctgggtttctcagagcctacggtggtcacagcagcattgaactgtgtggggaagggcatggacaagaagaaggcagccgcaaaccagtccagctacgggg

SEQ ID NO: 725393 - DNA, 76 bp, Homo sapiens
tgtcctcaccatgcccttctgcttcaaacagtatgacgccgtgcccatccagtccagcgtggtgttatgttcctgc

SEQ ID NO: 725394 - DNA, 116 bp, Homo sapiens
ggctgcgctgctggcctttgtgagcctcagcctgcagttctgtagtgtcgcctgcctctggtgggaccctattcagcggttactcttctcaggagcatctgacaacagcatcatca

SEQ ID NO: 725395 - DNA, 97 bp, Homo sapiens
ttaaaacaaactcaagatacgaaatgagacttttgaagtgcctttgatttctggggtccccagccccaccccagccccaaaggaggctgttcgagag

SEQ ID NO: 725396 - DNA, 87 bp, Homo sapiens
gacttctaccgctgcggctactgcaagaacgagtcgggcagccgctccaatggtgaccattgtgaggtagatattttgttctaattt

SEQ ID NO: 725397 - DNA, 82 bp, Homo sapiens
gcgcgtgcgcggacatggcctcaaacgggcgaccattgacgaggtggagacggacgtggtggagattgaggccaaactggac

SEQ ID NO: 725398 - DNA, 74 bp, Homo sapiens
cattgatctagaagagtatattggcaatttctaaaccgggatgacattggcatcatcctcatcaaccagtacat

SEQ ID NO: 725399 - DNA, 83 bp, Homo sapiens
ccagcagatggcggatgccctgcagtacctgcagaaggtctctggagacatcttcagcaggcggctatgagaggttttcctcc

SEQ ID NO: 725400 - DNA, 80 bp, Homo sapiens
cttgtggccctgggctttaccatctttgtggctgtgcttgccaggcctggctccagtgtccctggccagtgtccttccac

SEQ ID NO: 725401 - DNA, 75 bp, Homo sapiens
ctgtacacaacaagacagtttatcttgtccatggggtgaccaagaatatggcccaggtgaccaaagccctggaca

SEQ ID NO: 725402 - DNA, 100 bp, Homo sapiens
ccgggaccctcctctccagatggatgtggcctccatcctacatctcaataggaaattcgtagacatgacattgccgagaatggctgcgcccccaccccag

SEQ ID NO: 725403 - DNA, 95 bp, Homo sapiens
aagaccatggaagacacgctcatgactgtgaaacagtatgaggctgccaggctggaagcccttgaatctcatcctaccgacgaactagagaggac

SEQ ID NO: 725404 - DNA, 100 bp, Homo sapiens
gatctaaagtcacccggcggccaaaggccagtgactaccaacgtttggaccagaagattgcagagggaatggcatacatcgagcggaagaactacattca

SEQ ID NO: 725405 - DNA, 82 bp, Homo sapiens
cttcaaaaaaccttttctgggttgagcctagatatgtgtatatctcatgattgatatggagaaactagtcatgggccaaagg

SEQ ID NO: 725406 - DNA, 90 bp, Homo sapiens
tctcttctaagctgaataaagctgttttggaactgtcaggtacctcaaagcgtgttggtgtctgtccagtcccttatattagtagctgag

SEQ ID NO: 725407 - DNA, 74 bp, Homo sapiens
cctcgcctcgggacccgcggtccccgctcttgctgagttttcttgaagtacaactaaggacaggtcaccactag

SEQ ID NO: 725408 - DNA, 83 bp, Homo sapiens
gccaattcggtggaacgaggacgcggactgcgaaggcagtcactcaagactgcttgcaactgattgcagacagtgaaacacca

SEQ ID NO: 725409 - DNA, 75 bp, Homo sapiens
ctcaaccagatgcagtatgagtacacggagctcaagaaacaggtgaaatctgtgactgttgctgaaggactcata

SEQ ID NO: 725410 - DNA, 72 bp, Homo sapiens
cacccagctatggaggcagctgcaggaacaacttgtgttaccgagtgagagtagcatgtttgtctccaagag

SEQ ID NO: 725411 - DNA, 75 bp, Homo sapiens
tcaatggcctaagcaagtgtctgcagtgccaaatgtgtgacccaggtctgtgcagacttttgcagacaaatcaaa

SEQ ID NO: 725412 - DNA, 75 bp, Homo sapiens
tggactacaccaccattgtgtttagtggcacaaatacaattatgcccacctccacctcagattcccaattctcac

SEQ ID NO: 725413 - DNA, 50 bp, Homo sapiens
aacatggagacctgtgcagaccagcactgaacctaccagatgtatttggg

SEQ ID NO: 725414 - DNA, 90 bp, Homo sapiens
gttcacgcggtggaaacagcagcagcggaaggaaaatcagtcgcctatatgccttatgctgaggtcaaacgtgctctagaacaggaagca

SEQ ID NO: 725415 - DNA, 75 bp, Homo sapiens
gtctccaaattcgcctccatctgtaccatgatgccatggacaatattaccaggcagaaccaattctacgataccc

SEQ ID NO: 725416 - DNA, 98 bp, Homo sapiens
tgagacgcaggaagcagctgaaagagctattgaaaaaatgaatggaatgctcctaaatgatcgcaaagtacaaactagatgccgactacatcaagaga

SEQ ID NO: 725417 - DNA, 100 bp, Homo sapiens
catctcacatttccaagtacattctcaggtggagacctatggaccaatcttacaaaccagatgaaaatgaagttcgaactctctttggtcttcatttaag

SEQ ID NO: 725418 - DNA, 100 bp, Homo sapiens
agttggagaagatggacaaataaaaatttggtcaaagactgggatgcttagatcaactttagctcagcaagagttatgcccagccaagtcttcagtatat

SEQ ID NO: 725419 - DNA, 108 bp, Homo sapiens
gccatgtcctcttccccgtgggagcctgcgaccctgcgccgggtgttcgtggtgggggttggcatgaccaaggtccatctgggaagcgggatttgggttgatgaggag

SEQ ID NO: 725420 - DNA, 99 bp, Homo sapiens
ctgagtggttgtgtggtcgcgtctcggaaaccggtagcgcttgcagcatgaactgtaagagtaaatgggtccagtaattggaatgactccagataagag

SEQ ID NO: 725421 - DNA, 83 bp, Homo sapiens
acccagtcccaggacgtggcgcgggtctccagtgcttcagtggcatggcagagagaaatgctaattttgaagcccttcctgag

SEQ ID NO: 725422 - DNA, 117 bp, Homo sapiens
caaccagcgagatgaatactgctgaggactggggcctcattttggatatctgtgataaagttggtcagtctcgcactggagtcgacttcaatgttcctatgaagaacaaccagataa

SEQ ID NO: 725423 - DNA, 75 bp, Homo sapiens
cttggccacaacagccaaccaacgattcagctcaccagcgccatcgtcaggtgggttttatcaacagcctcaagt

SEQ ID NO: 725424 - DNA, 100 bp, Homo sapiens
gtcagagccccttacccgccgccgcggccaggccccccaacatggactgtctctgtatagtgacaaccaagatgccatggacaatattaccaggcagaac

SEQ ID NO: 725425 - DNA, 82 bp, Homo sapiens
gaattcctgtaggagtgctacagaataaactcccagacctttccttagataacatgattgacggagtcttgctctgttgccc

SEQ ID NO: 725426 - DNA, 75 bp, Homo sapiens
gtgccagtgaatgataaagacgatatcctaagtgtgaacgtgaagtccccagccctgctgctgagccagttgctg

SEQ ID NO: 725427 - DNA, 75 bp, Homo sapiens
cgacaaacacgtcatgaggaaggagcagcgcaagctatccgtggtcctgaaccagttatgtgtgttgcatgagaa

SEQ ID NO: 725428 - DNA, 82 bp, Homo sapiens
aaaaggtgtcaagaagctcagaatgtcctcctgcatatgcccaagaggattgggagtggaatggacaccagcagaagcacca

SEQ ID NO: 725429 - DNA, 90 bp, Homo sapiens
attgagcaggctacagtccactccagcatgggtcctcagaagtggaatacagagcggaggtcggtcagaatgcctatctgccctgcttct

SEQ ID NO: 725430 - DNA, 100 bp, Homo sapiens
cccaacacccatgccatgggacctcagcaacaaggctgtgcctgagcccaaaggtgccgtgagcgatgtggagatgcaggaacactatgatgagtttttt

SEQ ID NO: 725431 - DNA, 83 bp, Homo sapiens
cgctgccctcagctccgagtccagggcgagggtccctcaggctccctatcagcccctccagctgcctcagttatctctgcacc

SEQ ID NO: 725432 - DNA, 98 bp, Homo sapiens
gaagcgcggacggcgcacgacgagtactggcatgcgcacgtggacaaggtgtggcctgaagtcactgatcctgagaagttcgtgtatgaagatgtggc

SEQ ID NO: 725433 - DNA, 75 bp, Homo sapiens
gcaaggaacaaaatgtttgtaaattctccttttaccaagtttgcagaaaaaacttcagcatgtgccaggaacaca

SEQ ID NO: 725434 - DNA, 102 bp, Homo sapiens
actgtgacactgaccaccaggccaacttaacatcagcagatatcctgtctcagatgaagaggctgagcacagggttgctccaggtgggcccaaatgctgaag

SEQ ID NO: 725435 - DNA, 83 bp, Homo sapiens
cctccctctgctccagcagtgccaagtggtcagtctctagtgatccctgaaaagttccagcatattttgcgagtactcaacac

SEQ ID NO: 725436 - DNA, 98 bp, Homo sapiens
ccctggcaggcgaggctccaggcctccagtttgacaactttaaacgggtcttcaaggtggtagaggaaatgcggggctccctggtggacaatattcag

SEQ ID NO: 725437 - DNA, 83 bp, Homo sapiens
ggaagagcacgcagtccgacttggccttcttcaggttcccgcgggaccctgccagacaatgcagatcttcgtgaagactctga

SEQ ID NO: 725438 - DNA, 100 bp, Homo sapiens
tcacgcccgccccgaggtgggcattcccgacggcccgcccctcaaggacaacctcggcctgagacaccggaggaccggtctctgctttctatccgtcaag

SEQ ID NO: 725439 - DNA, 82 bp, Homo sapiens
caaggaaaagcaccctggatggtgaagagagagctgacaaaaggcttgtgctcagggttctgaatgagtttattatgaaaaa

SEQ ID NO: 725440 - DNA, 82 bp, Homo sapiens
gagctgtgggctgggagccgctgtcctccccgccaccaccggtgccgggcaccaggccagaagcggactcctagaagagggg

SEQ ID NO: 725441 - DNA, 75 bp, Homo sapiens
ccgcttctcagaggacgccttcaacaccaccttcatctccaccatcgcgatgccctcctagctagccgtcacggg

SEQ ID NO: 725442 - DNA, 50 bp, Homo sapiens
aagcagttctacaaggcgagccagggatgagatttactgccagatctgca

SEQ ID NO: 725443 - DNA, 100 bp, Homo sapiens
tcctttgcggagagctgcaagccggtgcagcagccttcagcttttggcagcatgaaagttagcagagagacagcgtctggagaccatcctcagtctctgt

SEQ ID NO: 725444 - DNA, 100 bp, Homo sapiens
gagcaaagcaacagaagtttatcaaggctgtcacacatcaagttaaatttggtcaacaaaatccacgtcagggaagcagctcgagagtgtcgtagaaaga

SEQ ID NO: 725445 - DNA, 90 bp, Homo sapiens
caggcatcgtggggatcttggcagcgctgcaggattacttttgtggccagtattgtgaaacaagtggtgaggggtctttcagcttcattt

SEQ ID NO: 725446 - DNA, 78 bp, Homo sapiens
tgtcatttcatccaccacattacttaggtctcctcatttaccacatcccccaggttgaaccacgggaccttgacttca

SEQ ID NO: 725447 - DNA, 75 bp, Homo sapiens
caggtttctgcggatgcttctgcgactcgctgatgaggccgggatagaaaatcgtcagctggacacagtaaattt

SEQ ID NO: 725448 - DNA, 100 bp, Homo sapiens
atcaaatacacacattttcagcacagactgattggcagtatggagttactcaggccttccctcacacagaggaggaggtggaagttgattcacacgcgta

SEQ ID NO: 725449 - DNA, 100 bp, Homo sapiens
ctgatccacaacagctgtgtgtcagcaatgcaggaatacgaagagcagctgaaagaaaatgccagcgaggacacagctgtgatcagtccccaggatccca

SEQ ID NO: 725450 - DNA, 99 bp, Homo sapiens
gggagatcgtgggcgagctgggcgacggcgccttcggcaaggtttacaagttggctgattgcaattctggcccaactcaaccctctctttggaccgcaa

SEQ ID NO: 725451 - DNA, 96 bp, Homo sapiens
cgggtgctggagctgttccgggccgcgcagctgccgaacgacgtggtcctacagatcaggagaacctcagtctgacgacattgaagctagccgaat

SEQ ID NO: 725452 - DNA, 82 bp, Homo sapiens
cgagaccgtgaccgagagcgtgaccgagagcgcgaatatcgtcatcgttagaagaacccaaagattggatcttctgagaaca

SEQ ID NO: 725453 - DNA, 49 bp, Homo sapiens
cgcggaggatggcaaaacgctgcctgaagatcattaccattagaatatt

SEQ ID NO: 725454 - DNA, 83 bp, Homo sapiens
ccaggagctaatgattcaaaaacagtgggagtagctcaccgttacccaagtatgcttcatctcccaaaccaaacaacagctac

SEQ ID NO: 725455 - DNA, 100 bp, Homo sapiens
acttcaaaaattaccattttatgatttactggatgaactgataaaacccaccagtctagtttgtttcgacgccggaccgcgtaagagacgatgatgttgg

SEQ ID NO: 725456 - DNA, 78 bp, Homo sapiens
caccttgatgctggcgatgctgagctccctactggctgagggcagagactctcccgaagaacatgtgatcatccaggc

SEQ ID NO: 725457 - DNA, 100 bp, Homo sapiens
ttagttctggggagcgcctcgtcgacatgagtgatgtggaggaaaacaacttcgagggcagaaagccccatgtgccactcccctgatctgcagcttcggt

SEQ ID NO: 725458 - DNA, 101 bp, Homo sapiens
aggagcaaaagaaaaaagaatgggtcaaccaagaacgtcaaacactccaacgattgagagcatttaaagatgaatgtatacaaagactatcgcttccttga

SEQ ID NO: 725459 - DNA, 101 bp, Homo sapiens
cgctgccgctatggatgatcgagaggatctggtgtaccaggcgaagctggccgagcaggctgagcgatacgacggtagaacacctgaaggagaagctcatt

SEQ ID NO: 725460 - DNA, 105 bp, Homo sapiens
ggcaagggcaacttcgcggtggtcaagcgggccacgcacctcgtcaccaaggccaagaaaccaaggtgtatgttggtaacctgggaactggcgctggcaaaggag

SEQ ID NO: 725461 - DNA, 75 bp, Homo sapiens
cttcaggagcgaagagctgcttctgtatcttaaggacctcagcagccatgtcgaagccccatagtgaagccggga

SEQ ID NO: 725462 - DNA, 100 bp, Homo sapiens
tcctgggatattctttgttgagagccaaggccacctttgatgccatttctaagacctacagctacctgacccccgacctctggaaggagactgtattcac

SEQ ID NO: 725463 - DNA, 82 bp, Homo sapiens
tctcgctccggagccgctgcacatttcgtatgacatgatgggaagaaatcagactgctgtgagagaagagatgattctcctg

SEQ ID NO: 725464 - DNA, 75 bp, Homo sapiens
ggaagaactcacagctagtctatttgaggaactgatgaggagtttcaacagagacaggcggattttttgtgccat

SEQ ID NO: 725465 - DNA, 98 bp, Homo sapiens
aaaaggcctgacatatctgagggagaagcacaagatcatgcacagagggaatggatttgtaaactcaagagcttctccaaatttgattggagctactg

SEQ ID NO: 725466 - DNA, 75 bp, Homo sapiens
agacccctacagcctgaatatgtagcccttcccagtgaagagtgtaaggcaaacattggtgggcaccgatcttcc

SEQ ID NO: 725467 - DNA, 99 bp, Homo sapiens
attgccgtcgacggcgagcccttgggccgcgtctcctttgaggaccatggccaacctggagcgcaccttcatcgccatcaagccggacggcgtgcagcg

SEQ ID NO: 725468 - DNA, 90 bp, Homo sapiens
ggaagagccgggaaagggcgtcgccgctcatgtaggtgctggagaatctggtaaaagcaccattgtgaagcagatgaggatcctgcatgt

SEQ ID NO: 725469 - DNA, 75 bp, Homo sapiens
gctggagcctgtgatcgaaagtctgctgaagaggcattgcacagatcaaacaagagacggggttttgccatgttg

SEQ ID NO: 725470 - DNA, 100 bp, Homo sapiens
gtgagccaccgcgcccggccgtttgcagctcaccttgtgaagatgaaatatccaagaatctgtattctagatggtggcattaataaaataaagccaacag

SEQ ID NO: 725471 - DNA, 98 bp, Homo sapiens
ggctcgaaaggtggagcccccctttaaacctctgttgggagaaaactggttgtcctggatgtttgaaaagttggtcgttgtcatggtgtgttacttca

SEQ ID NO: 725472 - DNA, 82 bp, Homo sapiens
cagattcgcagtggtcgcttcttctccttgttttctgactcagaatgtgccaaaaaggctttggaacaacttaatggatttg

SEQ ID NO: 725473 - DNA, 90 bp, Homo sapiens
cttgggctggtgattctgctggaaatcctgatcagctgcttagcttttcagccgcaactttgttgagattgggagcaagttgatggcaag

SEQ ID NO: 725474 - DNA, 100 bp, Homo sapiens
caaggagaggcggcggcggcctcggctgaagaaagaaggtgggagcggagagcgcaggcgtggtggcgacctgcacatgacccagtttttccgaggcaat

SEQ ID NO: 725475 - DNA, 82 bp, Homo sapiens
caggaactggtgaacgcaggatgcgaccaggaccaagaatcgccttcagccctgtctggtgcatccttggcagaaagtgagg

SEQ ID NO: 725476 - DNA, 100 bp, Homo sapiens
tgagagacggcggcggccgaaagcggagagatgctgggcgtggcggccgggatgacccacagacaggtgatttggcttctgcacagttaggaggagcacc

SEQ ID NO: 725477 - DNA, 113 bp, Homo sapiens
ctctgtcagctctttccccgtcagcatcccagccgtgctcacggactttccttatcccagttgattgtgcagaatacactgcctgtcgcttgtcttctattcaccatggcttc

SEQ ID NO: 725478 - DNA, 75 bp, Homo sapiens
atctggacaaaggaacaggtatctcagaaatcatagcccactaatgagttttggagccagctttgtcagtttttt

SEQ ID NO: 725479 - DNA, 75 bp, Homo sapiens
aaaatgtggctgcactacttcagagactggcttcagggtgggctggatgacactttgcacacaattattgattat

SEQ ID NO: 725480 - DNA, 74 bp, Homo sapiens
cagagggatcctcctgcccagtgttctgcaggacctgtcggtgatgactttccacagaaacagacacttccagt

SEQ ID NO: 725481 - DNA, 100 bp, Homo sapiens
ctccaagtgtgagaggcaaagtctggagcttagccattggcaacgagttaaatatcacccacggccatctccccggttgttgtgcacagccacgaaacaa

SEQ ID NO: 725482 - DNA, 96 bp, Homo sapiens
ttccgcaaggaccctttggaaggccgggtgggccgaggttcctgggtggagctacccatgaacagcagcaatggcaatgataatggcaatgggaaa

SEQ ID NO: 725483 - DNA, 90 bp, Homo sapiens
cggagatcatttgggagatccaagagattcagtatcactcgctcccttgatgatcttgagggggtgatcgctgagctgaaggtgcgcagg

SEQ ID NO: 725484 - DNA, 90 bp, Homo sapiens
ccctgatggaggaagtgctcctgctgggcctcaaggaccgcgagggtttcgaaaaaacgatgaaatgaaagctatggatgttttaccaat

SEQ ID NO: 725485 - DNA, 100 bp, Homo sapiens
ccgcgccccgcggcatgagccggtgaccaagctcggggccgagcgggaggcagccgtggccgagtactatactggcaattgctggagaagattttgcaat

SEQ ID NO: 725486 - DNA, 100 bp, Homo sapiens
caagtccaagaggaggaggaggcggaggtccaagcggaaagcaaaagcacctggaaattgaaagaactaccaaatggctgaaaatgctgaaaggatggga

SEQ ID NO: 725487 - DNA, 75 bp, Homo sapiens
caaagttctctcgatcagggcatacatctttcttcgacaaagggcagctgagattctactacaaaatggagcaaa

SEQ ID NO: 725488 - DNA, 100 bp, Homo sapiens
gaagcagccgatccagcctgcggagcctgtggggcagggtgctttcttctgcgacctggtactcatctacctcatcaaaaagagagagttttaccgtgac

SEQ ID NO: 725489 - DNA, 100 bp, Homo sapiens
agacatggagattctcttaaaaaggcagttcaattaacctccagaagatggctgaacctgcaggaataccagagcaagaaactgatgtctgacaacggag

SEQ ID NO: 725490 - DNA, 100 bp, Homo sapiens
caatgtcgtcttgtgccttttcttgttcctactgtaaaggagatgggttagatgtttcgtccagcatgctctgcccaccccacgccgaggtgcactgacc

SEQ ID NO: 725491 - DNA, 50 bp, Homo sapiens
ggataggtagagctgggcttctttcaggtttattcagaaaacatgtccac

SEQ ID NO: 725492 - DNA, 99 bp, Homo sapiens
gaagcttttaagcctatactttctaccagaagcttgaagggtttggttaagaaagggttcaaagacaccagtcagtatgtagtaggagaattggcagca

SEQ ID NO: 725493 - DNA, 97 bp, Homo sapiens
aacacacgctacctctttctgggtgactatgtggacagaggctatttcagtatagagaaaatgatccacagtctatttctcataaactgttccggtg

SEQ ID NO: 725494 - DNA, 50 bp, Homo sapiens
gaagtggccaggcggatggtgagcaatgggttcagcggattcctacacaa

SEQ ID NO: 725495 - DNA, 75 bp, Homo sapiens
cccgagcgctgctgacattgagacctggtgtcagccttacagaactcccccactggaaaggattctgaaagaaat

SEQ ID NO: 725496 - DNA, 76 bp, Homo sapiens
agggtgatgtggctgcggcatcgccggcctcgctatgactctcttgagcctgagggatccattacagtttcaatgg

SEQ ID NO: 725497 - DNA, 82 bp, Homo sapiens
aaggattccaagtaactcttatttgatattaaggaacgattcacaaattatgtgcttttactgatagtgtgtctaagaaaca

SEQ ID NO: 725498 - DNA, 97 bp, Homo sapiens
actgtcctgtggacagacggggtgagcctcttcttgtgtctggagattctgaatgttcagagaattccaacttcttacaagaacagatatttataag

SEQ ID NO: 725499 - DNA, 74 bp, Homo sapiens
cgtgcccaggagcttgacgccttagataacagccatcctattgaaactgtgaatgaaagctggaatgccttagc

SEQ ID NO: 725500 - DNA, 75 bp, Homo sapiens
ctcgtggctttccaagaagaagtggccaagggggccagaagcaaactccagccctccccgtgtctactgctcgct

SEQ ID NO: 725501 - DNA, 75 bp, Homo sapiens
gggagttcgaggccctgcggagctgcttcgccgctgcgctggtcagtgagaaggtcggaggggccgaggggacca

SEQ ID NO: 725502 - DNA, 50 bp, Homo sapiens
ctcaaggccatgatcaaaacgaccctgatgcttggtgtgacctgagtaaa

SEQ ID NO: 725503 - DNA, 100 bp, Homo sapiens
aatgatgtagttattactgtcccgtttgattttggagaaaagcaaaaaaatgctcttggggaattcaagtttggaccaatgctaaggaatgctttagcaa

SEQ ID NO: 725504 - DNA, 100 bp, Homo sapiens
cagggtggtgctgtctacctctgtccttggggtgccagccccacacagtgcacccccattgaatttgacagcaaagtttccatggagaatggactggggc

SEQ ID NO: 725505 - DNA, 75 bp, Homo sapiens
cccttgttaactacaacagaccatctggtacacttgctgaaggaccagttggctgctgaggctgcggcgcggctg

SEQ ID NO: 725506 - DNA, 102 bp, Homo sapiens
ctcatcccctggatgggggaccacaagatcctcatcgacagatgtggacgagtgctcactagcagaaaaaacctgtgtgaggaaaaacgaaaactgctacaa

SEQ ID NO: 725507 - DNA, 75 bp, Homo sapiens
ctctcatcttgggaatctgcgtcagaagtcactcgcagtcccgtcagcccagatgcacgaaggagagagagtgag

SEQ ID NO: 725508 - DNA, 75 bp, Homo sapiens
caaacagcgacgagagatccgtgcaggcacagccttttacattgatcaggttttgacctgtagcagagaaccaat

SEQ ID NO: 725509 - DNA, 121 bp, Homo sapiens
ctcgctccgtggccttagctgtgctcgcgctactctctctttctggcctggaggctatccagccgggctgacgcacgaggcacacaggaaggaggtggagcaggtgtatctgcgctgtgcg

SEQ ID NO: 725510 - DNA, 85 bp, Homo sapiens
gcttgatgaaaaggctctccagtttggaatcggctacagtctcaaagggcaatgcttctgcagggcactgaaagcctgaaccggg

SEQ ID NO: 725511 - DNA, 76 bp, Homo sapiens
gctgccgaggctgttgctgttgatctgtgagaatctggacgaggctagagaacagaaagaaaagagtcctccagac

SEQ ID NO: 725512 - DNA, 83 bp, Homo sapiens
gttgcgaaggatccccaacggggaggccaacgtgaagaatacctggagtagaacagaaaaattattatgtctgtgttcccttg

SEQ ID NO: 725513 - DNA, 96 bp, Homo sapiens
ggacaaagtctgtgctcagtcaaataaaggatttgtcgtcattaatcaaaaggaagagagaagggcacagttacctaagtatcaacgtaatcttcc

SEQ ID NO: 725514 - DNA, 75 bp, Homo sapiens
cctgcaacacgtgcccctacgtgcacaacatcacccgcaagggcggcgactggcggcgcgatggacctgaccggg

SEQ ID NO: 725515 - DNA, 90 bp, Homo sapiens
tgcgaggctcggagaaacaggcgccgcgggctccgcgcccggccggacccgggcccgagagtgtgaacatggctacgcctcttcattccc

SEQ ID NO: 725516 - DNA, 83 bp, Homo sapiens
ctccgtctggatttccaaggaagaatttcctctgaagcaccggctcgctcgcctccgtgttcgtccggctcccttgcggtggt

SEQ ID NO: 725517 - DNA, 98 bp, Homo sapiens
accatccctaaccggctggctgcagacccgccaatggagatcttcgtggatgatgagacgaagttgacgctgcatgggttgcagcagtactacgtgaa

SEQ ID NO: 725518 - DNA, 51 bp, Homo sapiens
cctctgcaggcttgccgaagaagggagtgcaccgtccaggtgaggttagag

SEQ ID NO: 725519 - DNA, 51 bp, Homo sapiens
ccggcctcgcctcgcttctcatatgttggaagatttctctcacgaattgga

SEQ ID NO: 725520 - DNA, 74 bp, Homo sapiens
aggaaaggaaaaacccacaaacatgttcacaacgggcatggtgaattttgtggtatgccagcttgttgctctgt

SEQ ID NO: 725521 - DNA, 75 bp, Homo sapiens
ttgggacagggggatttggaaatgtcatccgatggcacaatcagaccattaaaaatctcaagtgacgactttggg

SEQ ID NO: 725522 - DNA, 97 bp, Homo sapiens
gttctttacagaaaacacctgtttggaaaggcaggaatacaagctctgctgtggaaatgccttgctgttagaggctctttcccagaagttggacgaa

SEQ ID NO: 725523 - DNA, 78 bp, Homo sapiens
gatgattagagacatactaatgtacatgcctgaaaaggtgatggcaaagcagatggagttcctttgcaaccaagctgg

SEQ ID NO: 725524 - DNA, 87 bp, Homo sapiens
acgagacgccgggatccgaggtgccgggtgacaaggccgccgaggaacagggtataaagatggctgtgaccacatcggggagcaccg

SEQ ID NO: 725525 - DNA, 100 bp, Homo sapiens
agcggctccgtggagaacgtgctgcaagtcgagttcctatcagactgagattgggcagaccctggacctcctcacagccccccagggcaatgtggatctt

SEQ ID NO: 725526 - DNA, 88 bp, Homo sapiens
cctggacaaggagaacaccggaagttggagaaggctgttttggagtcagcggaagatcaccaaggccagggagtggttccaccgcact

SEQ ID NO: 725527 - DNA, 98 bp, Homo sapiens
tgctgctggacccggcctgggagaagcagcagcgcaagaacgacaccgtaactatccgcactagaaagttcatgaccaaccgactacttcagaggaaa

SEQ ID NO: 725528 - DNA, 95 bp, Homo sapiens
gtagctatagtaatgctgcgggccattagagatttcttctggaaaactggaaacaagaaagagactccttcaaatccagtggccacagtgaaagc

SEQ ID NO: 725529 - DNA, 83 bp, Homo sapiens
ggaatagggtgaatgaatctcatcagaaaagcaggtttctgagtcccttcaacatgatcctgggaggaatcgtggtggtgctg

SEQ ID NO: 725530 - DNA, 90 bp, Homo sapiens
ggagaggagatgcacacggcactcgagtgtgaggtaagaagagttcctgggtcaagtggtcaccttcataaaaccgaagacggggactgg

SEQ ID NO: 725531 - DNA, 83 bp, Homo sapiens
tcaaactgccctgatgggcagtcaacagctaaaaccttcctcaccgtgtactgtgaaatgacaatggatgctctgttggctcg

SEQ ID NO: 725532 - DNA, 78 bp, Homo sapiens
aaacccaggaaatcgagactcatgactcccagagaggatggcatctagaaggtacctattgaaggttgctgagctatt

SEQ ID NO: 725533 - DNA, 75 bp, Homo sapiens
tccatgctgaatgactcggatgatgatgtgatttatgggtacccattcctggcccagtgggtaacaagagaatgg

SEQ ID NO: 725534 - DNA, 82 bp, Homo sapiens
ggaccccggagcccaaacccggggcaggcgggcagctgtgcccgggcggcacggccagaaaactttagaaactgttcctttg

SEQ ID NO: 725535 - DNA, 100 bp, Homo sapiens
tggaggagaaggtccgcttcaacacttcactacgcttagcagatgtcctctggaattcccagattcctcttttgatctgtaggacatatggactagttgg

SEQ ID NO: 725536 - DNA, 90 bp, Homo sapiens
caagaaagagattctactatttttcaaagaagaatggaagaaaccatgaagcttgctacgatggaagacacagtggagtactgcctgttc

SEQ ID NO: 725537 - DNA, 75 bp, Homo sapiens
ggaagctgacaaaaaccaaactcttggagaagctgttaagattctggacaatcaggaagtccaagccacaatgat

SEQ ID NO: 725538 - DNA, 71 bp, Homo sapiens
cattcagagtcaggaaaatcaagacttgtccagttactgatgatggccaaagagaagccaccgataactgt

SEQ ID NO: 725539 - DNA, 90 bp, Homo sapiens
cgcgcctcggccccatggacgccctgtgcggttccggggagctcggctccaagttctggctcggcttattccaggggtgtgtttcgtcga

SEQ ID NO: 725540 - DNA, 75 bp, Homo sapiens
ttgaaggctgcagtgagccctgtttttgccaccacactccagcttggaatttcagccaatgtttggaatccaagc

SEQ ID NO: 725541 - DNA, 75 bp, Homo sapiens
atgttggagccgtctgcaaagtgtccccggcaagaagacctgcctagagctggaacgttacctccagagcgagcc

SEQ ID NO: 725542 - DNA, 100 bp, Homo sapiens
tgatggagctcagccctccacctccacagctgcaggactcatgcacacgttcaatgcccacgccgccactgacatcacgggcttcgggattttgggccat

SEQ ID NO: 725543 - DNA, 98 bp, Homo sapiens
cggagcgcggcgccgagcgcagggatacggcgcccagcgggcaactagaagccatttgtgtcaaggtaacgtctggagaaacaaaaggtcaggaaagg

SEQ ID NO: 725544 - DNA, 100 bp, Homo sapiens
gggacgtgctggccggccccggcggcggcggcggccttgggccggtggacgtacccagcgctcgacacgttggtcgtcattgcctccgagcccactttag

SEQ ID NO: 725545 - DNA, 98 bp, Homo sapiens
gatgaaagcagccatcagtgagacggaagatatgccaatgtttaacactgagctgaaggttgaagtggagagcttgaaacgagaactccaggacaaga

SEQ ID NO: 725546 - DNA, 100 bp, Homo sapiens
gctctgggctacggactatgggcgaatagctctgaccacccggcgaagaaatccaagatctccaccttcgagaagatgtgggccttcatgagcagcaagc

SEQ ID NO: 725547 - DNA, 96 bp, Homo sapiens
tgaaatggaagcatatgttctagaagacattcttgagatgatattggtgcccatatgaatgtaggaagaacttataaaaatttaaatagaaccaaa

SEQ ID NO: 725548 - DNA, 80 bp, Homo sapiens
cttttcagggcccccaaactgtcacagaaagagctgttaacacttcctagataacgggtttggtgcacctcgatttggag

SEQ ID NO: 725549 - DNA, 90 bp, Homo sapiens
agcatgttcagataaatctgaatggaagagtgagaagaggcaattcggacataaagagaaacatcaagggcatgagtgcacagaggaaag

SEQ ID NO: 725550 - DNA, 50 bp, Homo sapiens
agacgttccttgaggaggtttgaaaaaagcccataggcagcatgtcatcc

SEQ ID NO: 725551 - DNA, 97 bp, Homo sapiens
gagctactcaaaattctacgttagagagactgaaaagacatctaatttcattgctcggcagttagagatgtttatgattacttccgagctgtcctgc

SEQ ID NO: 725552 - DNA, 82 bp, Homo sapiens
ccgctgccctcagctccgagtccagggcgagcaggaacgaatgcaggaatttgggaactgagctgtgcaagtgctgaagaag

SEQ ID NO: 725553 - DNA, 100 bp, Homo sapiens
cagaccgggcgagcagagtaagaagcagttccagaaagctgagtctgatctggattacattcaatacaggctggaatatgaaatcaagactaatcatcct

SEQ ID NO: 725554 - DNA, 75 bp, Homo sapiens
agtgctcaaactcaccgaccagtacaaaattggacagctgtacatgatcagcaaacacagccatgaacagagtga

SEQ ID NO: 725555 - DNA, 74 bp, Homo sapiens
tcacaccctggatccttgacctactagatatgctgcaggctgctagtcattatcgccaaaatagaaactctttg

SEQ ID NO: 725556 - DNA, 97 bp, Homo sapiens
ggtcgatggtggagtaggtcctgacactgtccataaatgtgcagaggttcgttaccgtgaacgcatcaccattcttcgagggaatcatgagagcaga

SEQ ID NO: 725557 - DNA, 101 bp, Homo sapiens
cttcaggagcatccatcccttgcctactggtttctgagtcccttcaacatgatcctgggaggaatcgtggtggtgctggtgttcacagggtttgtgtgggc

SEQ ID NO: 725558 - DNA, 90 bp, Homo sapiens
tgaggtgaatgtcggaatccattatctttcgggaaagctctctggggcaggatcctggccaatttggagcaaggcttagcagaagacggc

SEQ ID NO: 725559 - DNA, 82 bp, Homo sapiens
gaagatgagccactgtggaagaagtatatttctcagggaatgacagaggaagaggaagacaaacttctggcactgaaagact

SEQ ID NO: 725560 - DNA, 82 bp, Homo sapiens
cttggaagcacggcctacggcaggatgcacagcaggaggatttcggaatcttccagacaatgcagatcttcgtgaagactct

SEQ ID NO: 725561 - DNA, 100 bp, Homo sapiens
ggctgtgctcctgcttaaagaaatcagtccttcctttccgacttagtcctcgggaagaagtttcagactacaagactgggctggcttagatgaagatgaa

SEQ ID NO: 725562 - DNA, 51 bp, Homo sapiens
tgaagttgcagaaggcacagaccagcacagatcccaagacaaaagcgtggt

SEQ ID NO: 725563 - DNA, 75 bp, Homo sapiens
aagagacatgaagaattggtatttcaaatgaccaccatgttgcaaaagagaatgtaactggtcactacatttccc

SEQ ID NO: 725564 - DNA, 95 bp, Homo sapiens
tgcggtgctgctgagcttggcctcggcgtcctcggcccaagaagatgaaaggattgttcttgttgacaacaaatgtaagtgtgcccggattactt

SEQ ID NO: 725565 - DNA, 107 bp, Homo sapiens
ataaagcctaaatgtagcatatatcctaaaggagatggaagtgatgtaccatcatgggtagcctttgataaacaggtctgccatcatggatgttctcgcagaagcaa

SEQ ID NO: 725566 - DNA, 99 bp, Homo sapiens
gggctgccaagggaggaggaagatggcggcgggggcgaggtatgaaaatgaaagtcttcagaatggaaggaagtcaactgaatttccaagaaaaatacg

SEQ ID NO: 725567 - DNA, 99 bp, Homo sapiens
aattgaacagaactatgcgaaacaattgaggttatttggaaatagcggtgcttgcagcgcttgcggacagtcgattcctgcgagtgaactcgtcatgag

SEQ ID NO: 725568 - DNA, 96 bp, Homo sapiens
atggctgaccacccctaaaagcacctggccccgctacagcaaaccagatgtggacgagtgctcactagcagaaaaaacctgtgtgaggaaaaacga

SEQ ID NO: 725569 - DNA, 75 bp, Homo sapiens
cgcgcggctgactgcgactcgggagctccgggagcggcccgcgcagggattaaagcctgtggtttccacagaagc

SEQ ID NO: 725570 - DNA, 100 bp, Homo sapiens
gcagaagagaagaagaagcaggatgaactgaaacggattgccagagaattggcagaaggtggacccccaaaagtacaagggcatatttaacggattctca

SEQ ID NO: 725571 - DNA, 100 bp, Homo sapiens
gttcctcttggtcttctgattttgatccacaaagaagctgacacagtttacttctttatgggaagatgtcatggcacccccagtaccggagctccaagtt

SEQ ID NO: 725572 - DNA, 96 bp, Homo sapiens
gcaaagagacaagtcctaaatgccgactcagtggaacaatcttttgttggattgaaacagctaatctggtggtgaccgcggtggcttcaaaaattt

SEQ ID NO: 725573 - DNA, 100 bp, Homo sapiens
caggaggaagcgatggcttcagacagcatatttgagtcatttccttcgtacccacagtgcttcatgagaggtattctctactgccgctgatggtcaaacg

SEQ ID NO: 725574 - DNA, 50 bp, Homo sapiens
gctgagatgttgggagccatcaatcagttttaaccgtgattggagatacc

SEQ ID NO: 725575 - DNA, 83 bp, Homo sapiens
cgtctccctgtacgccgagggctccgtcaatggcttcatcagcactttgggccatcactggtgcaagctatatttaacggaga

SEQ ID NO: 725576 - DNA, 75 bp, Homo sapiens
caaggacagcttttttcctgcaagccggctcagttcggggaagctgcaggagttcggcgtgggtgatggcagcaa

SEQ ID NO: 725577 - DNA, 79 bp, Homo sapiens
ttgtgtatggcaaagtggatagcttctggaagggatgacttgtcaagctcgaacatcatatactgaagatgaagttctt

SEQ ID NO: 725578 - DNA, 88 bp, Homo sapiens
gaggatgccaacacatatattcacagagcaggtagaactgccagctcgtttgacagcaagtttgtttaccagcaaataggactcggac

SEQ ID NO: 725579 - DNA, 80 bp, Homo sapiens
cttggactgagtcctgcaggacacagctccttcgagaactcatagaacggaagaccagctccttggatcccaacgatcag

SEQ ID NO: 725580 - DNA, 88 bp, Homo sapiens
catacccgtgacctggggatcgctacggaccttaaaatacccgcaacagccccttcgtcccaagtgctgtctgaggtctgtgggcagg

SEQ ID NO: 725581 - DNA, 97 bp, Homo sapiens
ggcgcggagcccagagccggttcggcgcgtcgactgcccagagtccgcggccggggcgcgggagggacatctctacaccgttcccatccgggaacag

SEQ ID NO: 725582 - DNA, 98 bp, Homo sapiens
gcaggccgggcagtgcggcaaccaaatcggcgccaagaacggcctgcagagataatacttctgtctatcacataagtggaaagaaaaagacatttaag

SEQ ID NO: 725583 - DNA, 101 bp, Homo sapiens
ccaacctggacgcttgcaccggagtattaaatccagctagagaatggcatgtgcaaagatacagagagttggccaccctgttcaagggcttaggagaaagt

SEQ ID NO: 725584 - DNA, 75 bp, Homo sapiens
gaaacagattgtgcccaaaacagaggatatgatggttaccgcccttcattctctaacactccaaacagtggttat

SEQ ID NO: 725585 - DNA, 97 bp, Homo sapiens
tgttcaccatcctggccccggaagctagcatatttggcagcttattgcttcgaaacccagctggtcaccaaaagcttgatatgacagagaagaagaa

SEQ ID NO: 725586 - DNA, 101 bp, Homo sapiens
cagactgacaccccacatcgacaatttggaggtggcaaacagcttcgcagtcactaatgcttgattgttaaaatgagtcttcggaagcaaacccctagtga

SEQ ID NO: 725587 - DNA, 126 bp, Homo sapiens
gggaaacccaaattgtagctgacgaagcattttgcaacgcagttcggagttattatgaggtgtatgcaacagcgttattgcaacaggctaacgaaaacagacaaaattcaactggaaaagcatgtt

SEQ ID NO: 725588 - DNA, 75 bp, Homo sapiens
ctaaagagcaagcctaactcaagccattggcacacagttaattggccttggtcctcacagctccaaaaagaaaca

SEQ ID NO: 725589 - DNA, 75 bp, Homo sapiens
cgtgtgctccctgcctctcacgatttccatcgttgcatttacaactgctacaaaaatgccagcactccatcgaca

SEQ ID NO: 725590 - DNA, 90 bp, Homo sapiens
agcaggaggttgggccaagggccaggacttcccgtcacaatttcatttgttgatcccggcaccgccagatcaggcctttgtgacactaac

SEQ ID NO: 725591 - DNA, 75 bp, Homo sapiens
cctgaggagccattttgagcaatggggaacgctcacggactgtgtggtacttgaactggcaggaaatgcatcaaa

SEQ ID NO: 725592 - DNA, 96 bp, Homo sapiens
attaaacccatcgacaagaaggcacctattccagtgctgaatattcaaatgaaaatttttcctgcactttgtactgtagcagggaccatattttcc

SEQ ID NO: 725593 - DNA, 100 bp, Homo sapiens
ctgctacttcctcgtttgacaccttcctgggcatgctggaagatggactgccctccaatggtgtgccccgatctacagccccaggtggaatacccaaccc

SEQ ID NO: 725594 - DNA, 78 bp, Homo sapiens
acgcggacctccagtggccggctccggaggcttggtgactccagtggcccaggtactccaaagattcaggtttactca

SEQ ID NO: 725595 - DNA, 100 bp, Homo sapiens
gccgtctgcaaagtgtccccggcaagaaggctgctgacttgagtaaaccaatagataaaaggatatacaaaggaacacagcctacttgtcatgacttcaa

SEQ ID NO: 725596 - DNA, 75 bp, Homo sapiens
acatgaagaggaggatccacctggagctgaggaaccggaccccggcagctttttcggctttgtgagaaaccttac

SEQ ID NO: 725597 - DNA, 101 bp, Homo sapiens
ggtgatcgaggaagaagaaccaagtgaaaaatcagaggccacctacatgaccatggttgtctgcattcaaaagagcattctattaaagctaccttaatttg

SEQ ID NO: 725598 - DNA, 99 bp, Homo sapiens
cacctgcagcacatcagcgaccgcgagatgcccgaaggttacaataagctcttgtgacctcctggttgtaagtgttggccagatgtctatgtccagggc

SEQ ID NO: 725599 - DNA, 75 bp, Homo sapiens
ggatcaatccagatggcagccagtcagtggtggaggtggataggcatgtagacctgctagaagttgcccaggaaa

SEQ ID NO: 725600 - DNA, 83 bp, Homo sapiens
gcggacgtatgcagagccgctcactgctgccatggtggagttctacaccatgtctcagctatcagttgagggatttgcagttg

SEQ ID NO: 725601 - DNA, 75 bp, Homo sapiens
gtttgtacaagacatgcgcctcatcttccagaaccacagggcctcttacaaggaccggaacagggacctggccac

SEQ ID NO: 725602 - DNA, 101 bp, Homo sapiens
ataacccccgacagcgccatggcccagattctgccaattcgttttcaggagcatctccaggacccagatgatgtggtaccagttggccaaagaagagcctg

SEQ ID NO: 725603 - DNA, 75 bp, Homo sapiens
tccttcgggtaccagctggacctgcccaaggccaacctcctcttcaaagtttaattggttggggtcagataagaa

SEQ ID NO: 725604 - DNA, 92 bp, Homo sapiens
ctggaagacacagtgcttttccctgagggcgggggacagattttgaagatgtaactgagtttctggaagaggtcattgaagccttgatattg

SEQ ID NO: 725605 - DNA, 89 bp, Homo sapiens
gttcctggtcatacaccagtactaccaaggacagcttttttcctgcaagattctgacaatggagatattaattatgattatgttcatga

SEQ ID NO: 725606 - DNA, 82 bp, Homo sapiens
agggtttccaccgttcgttcaagcaaattgtggctactaatttgccccctgaagatcaagatggctctggggatgactctga

SEQ ID NO: 725607 - DNA, 79 bp, Homo sapiens
aacgagagaaggaaattagtgatgatgagatgggaaagggctccttcaagtatgcctgggtcttggataaactgaaagc

SEQ ID NO: 725608 - DNA, 90 bp, Homo sapiens
ccaaattgctcaactaagaccaagtcctcgctggactgctcagggtgccagacctcatcctatgtctccaatgggtctgtctactttgat

SEQ ID NO: 725609 - DNA, 82 bp, Homo sapiens
tcttgggacccaccgctgccctcagctccgagtccagggcgagggaaatcctcattgacgattcaatttgttgaaggccaat

SEQ ID NO: 725610 - DNA, 82 bp, Homo sapiens
tgactactgaggattctgtggcagtgcccagaatgtctacacaaggaagtacaggatttggcttttctagatgtcgtatcca

SEQ ID NO: 725611 - DNA, 100 bp, Homo sapiens
cagatggctcagcagcccccaaaagggcaggcccaggccagcaatggagcaggtactggctgtgatcgaacttctcaaccctcagagacttagatcttcc

SEQ ID NO: 725612 - DNA, 95 bp, Homo sapiens
cgcctgagcccagcccccagaaaggattgtgacatatcgttggacccagaattgaggaccacctgtagagctgcgccaaagaaaaaagccaaagt

SEQ ID NO: 725613 - DNA, 96 bp, Homo sapiens
aaattgactccgctgattctgatatgtaaaggcctatttgctaccagacaaaggcaaaatgggcaagaagaaaacactcgtagtgaagaaaacctt

SEQ ID NO: 725614 - DNA, 74 bp, Homo sapiens
ttcattcattcaagatggcatttgttaagcacctactagagttaattgttaaatccagtatggccacaggagga

SEQ ID NO: 725615 - DNA, 75 bp, Homo sapiens
gaggcaaggagctaaagcagcgtgcgttcagccctggggaagtactagccggacatcatgagtggctgtcgggta

SEQ ID NO: 725616 - DNA, 82 bp, Homo sapiens
ctcaaagtcatccatgagggttggaaccaacatcttccaaactcctgggtgcagttctacctcaagaaataagccaagtaaa

SEQ ID NO: 725617 - DNA, 99 bp, Homo sapiens
gaggtttggagccggagcggattattggagctacagactccagtggagagctcatgttcctgatgaaatgcctttaggaagagtgcgagagaaagagag

SEQ ID NO: 725618 - DNA, 100 bp, Homo sapiens
tgcccgtcttccttccagagcccgaccaggcctccactggcatcaccgacacactatgctccctccaaagccgccgactgcagcagtggcccagggcaaa

SEQ ID NO: 725619 - DNA, 82 bp, Homo sapiens
aaggagctaaagcagcgtgcgttcagccctggggaaccatcactgttgctggaggcacctgacaaatcctagcgaatttttg

SEQ ID NO: 725620 - DNA, 90 bp, Homo sapiens
tcctctggcctcggccctgcacgccgccggggcggagcctcccatcctttgggactatcctattaagtgtaatctcactgcttaatgagc

SEQ ID NO: 725621 - DNA, 78 bp, Homo sapiens
ttgccacgggcattctccatctccttgcaggtgcttttcagtgggaagaattggaagaagatatcaggaagaagttga

SEQ ID NO: 725622 - DNA, 100 bp, Homo sapiens
gacgacgtgaaggagcagatttacaaactggccaagaagggccttactccttcacagatcggtggaaccgtcccaaaatgtcccttgctcagaagaagga

SEQ ID NO: 725623 - DNA, 90 bp, Homo sapiens
cagaaactcagaggcaacagcactcttactgtcaggccagcctttgctctatctccaggttcagttccggaaggtgtcttagaggacatt

SEQ ID NO: 725624 - DNA, 83 bp, Homo sapiens
ggcggtgaccggatattcagttgcacatccccacatcaatgcactgccaatggtctcctttacagaaaggggcttggataagg

SEQ ID NO: 725625 - DNA, 100 bp, Homo sapiens
tcacgaatgcttgaagacagagatttattcgtaatgcgactcaaagctgcacggcagtctgtttatgagggtctttttggagttcctgagctgagtgccc

SEQ ID NO: 725626 - DNA, 98 bp, Homo sapiens
tgcagcggattaaagctaaagacatagttcctggtgatattgtagaaattgctgaaggtagaagatagcaccatgccgattcgtcgaactgtgaattc

SEQ ID NO: 725627 - DNA, 90 bp, Homo sapiens
tcaatccagatggcagccagtcagtggtggagatgatgaaactgaggcacaaactgcttaatgaacttgtccatggtaaagaagaaagga

SEQ ID NO: 725628 - DNA, 100 bp, Homo sapiens
aatcccttaccttgatgagcagctacagattgccaatgaagtaattggagaaatgaacttgaaaccagaggaggttttccttgcccaaggtactttacgg

SEQ ID NO: 725629 - DNA, 82 bp, Homo sapiens
tatcggaagaatgaggtgttcttggacgtcatcgagtctgtcaacctcttgccgcggcgagtcctttgcacatgttggcaac

SEQ ID NO: 725630 - DNA, 98 bp, Homo sapiens
ggggaacgagcaatgggaattcacgctgggagggctccccgaggactttctgaactccctggagaagatggaggacggcaagttgaaggtcaccctca

SEQ ID NO: 725631 - DNA, 82 bp, Homo sapiens
cgtcagcactgactttcagctatggaatcggtggacgacccaccggagcccgtgtacgcgaacatagagaggcagccccggg

SEQ ID NO: 725632 - DNA, 100 bp, Homo sapiens
cagccttgcgcggccacagcatgaccgctcgcggcctggcccttggcctcctcctgctgctactgtgtccagcgcagtctcaaaccatgaattatgtggg

SEQ ID NO: 725633 - DNA, 98 bp, Homo sapiens
gaggatccgcacacttctggagggaggcagcgtccatggagcaaaaggaatgccaggatcctgcacaggcagacgcgggccagcctcagcaccgacag

SEQ ID NO: 725634 - DNA, 100 bp, Homo sapiens
ccgcgtgctaatggtggaaacccacaacggtacaggtttgcagattccgccagcagcacagcaagctctacagatgagtggctctttggcatttggtgct

SEQ ID NO: 725635 - DNA, 82 bp, Homo sapiens
cgcatcctccacaccgacaccatctggaggaggcgttgccgtgagggatgaatttttagatgtgatctactggttccgacag

SEQ ID NO: 725636 - DNA, 75 bp, Homo sapiens
ccagaagtgaaacgccaggctctctggaggccaggagatggctgcagaagatgtcaatgttactttcgaagatca

SEQ ID NO: 725637 - DNA, 87 bp, Homo sapiens
tctgcaggttctgggagacgcacagctaagatgccaggacatcctggaagctgggaaaagggatcgcttacacctgagacgaactac

SEQ ID NO: 725638 - DNA, 100 bp, Homo sapiens
tgatcgtcatcacagtcaactatcgacttggagtactcggtattatagctgcaaatgtccttgtattctgtttatggagagtaccttctctgcagcggac

SEQ ID NO: 725639 - DNA, 75 bp, Homo sapiens
agttaatgcagggcttggcacgatacgtgttccagtcaggtggaattgagactggatctatcacagaaatgtttg

SEQ ID NO: 725640 - DNA, 83 bp, Homo sapiens
cagagccgcgtcacggagcaggacaaggccatcctgggtgctttcttctgcgacctggtactcatctacctcatcaaaaagag

SEQ ID NO: 725641 - DNA, 100 bp, Homo sapiens
gccttgcatcctgtgctgccaactccatcaatcagttcttggttcagctgatggtgttcctgatcagcttcataagctccgtgttctgtggccacctggg

SEQ ID NO: 725642 - DNA, 74 bp, Homo sapiens
aggttcacgccaacagtacctcattgctctttggcgactcttattgggtcccctcctcggccgccccccgcccg

SEQ ID NO: 725643 - DNA, 90 bp, Homo sapiens
gtcatcgacagctgcaaggaggccgtcaccttcaaggccgtcagacaagcttcattttaggatcttagattacacacttactggatgtta

SEQ ID NO: 725644 - DNA, 75 bp, Homo sapiens
ttcagatcttcacagcacagttcctgggaaggtggagccaccagcctctccttgtggagggaaacagcgatgagc

SEQ ID NO: 725645 - DNA, 59 bp, Homo sapiens
atgatcccaatttccagatgccttgttcaacaggcagacctgttatcctaaactaggtg

SEQ ID NO: 725646 - DNA, 100 bp, Homo sapiens
caagttccccaacggctccccgtcgtcctggtgctgcagcgtgttctcaggcgctgtggtctcaccttccactggggcaacaatgggccatttccagcag

SEQ ID NO: 725647 - DNA, 75 bp, Homo sapiens
ggaaaacaaaagctgctacttatggaagatacaaaggattgccaacactcctgatagctgaatgtgtgctggttt

SEQ ID NO: 725648 - DNA, 98 bp, Homo sapiens
accatcggagagcagtgcagcgtgtgtggggtcgagcttcctgataacgaggctgtggagcagcacaggaaaaaggcctgtgtcatatcaacacttat

SEQ ID NO: 725649 - DNA, 86 bp, Homo sapiens
catgtcgggttattcgagtgaccgagaccgcggccgggaccgagggtgtgaacccacatccctgcccccagggccacctgcaggac

SEQ ID NO: 725650 - DNA, 50 bp, Homo sapiens
ccacgagcccctgcattggagtcagagtatgaacgaggctcggccaccaa

SEQ ID NO: 725651 - DNA, 50 bp, Homo sapiens
gtgatgttcgcgtatttcttgacaggtgtccatctcttcacagtcatggc

SEQ ID NO: 725652 - DNA, 50 bp, Homo sapiens
ggaaattaactatctgtacttataagttacttagcttacagctgcaccag

SEQ ID NO: 725653 - DNA, 100 bp, Homo sapiens
ctcaccatttctggccaaaactacaaacaagacttcgcaggtgttggagagcacaatggctgaacaagtccttcctcaggctttgtatttgagcaatatg

SEQ ID NO: 725654 - DNA, 51 bp, Homo sapiens
ctacagaaacctcgtctccctgggagcgagaacccgagcagcgccatgagc

SEQ ID NO: 725655 - DNA, 101 bp, Homo sapiens
gaagtgatgtacttccaacccggggagccctttggctctgtggaagacgaccacatccccttcctccgcagagatctgactgcagccatgagcagcaatga

SEQ ID NO: 725656 - DNA, 75 bp, Homo sapiens
gaggaaattccatgtcattgtagcagagtgtgctcctttctgccagcaaaccagtccagctacgggggcccagcc

SEQ ID NO: 725657 - DNA, 80 bp, Homo sapiens
cgctgtacgccgagcacccaggcgactgcctcatcttcaaggtggaagttaaacgagctgagcctcgggacagcaagagc

SEQ ID NO: 725658 - DNA, 99 bp, Homo sapiens
ggaggcggagaggcagcatccaccagcccgctccccgcctccaggacagagcctcggtctgcatgggggtgacaggaaaatgtttcaacgtgcgcaaga

SEQ ID NO: 725659 - DNA, 98 bp, Homo sapiens
tttctcaacctcatcttctggaaggaagaatcctgctcaaaaatgaggtgaattaatacttgggcgctcaggaaccctggacagctacatgaggtgtt

SEQ ID NO: 725660 - DNA, 100 bp, Homo sapiens
cacaaagccttggtgtgtgcgagtctggcactgttcccgctgtttgtgccagcatctgctgtcaggtggctcagattgctttattcaccaagtgaaaaac

SEQ ID NO: 725661 - DNA, 82 bp, Homo sapiens
gagaatctgggcgtcgctctagagacaatgcagatcttcgtgaagactctgactggtaagaccatcaccctcgaggttgagc

SEQ ID NO: 725662 - DNA, 75 bp, Homo sapiens
gttctgggcaaatccaatgttccaaaacccaggtttgggtacccagaccccacctacctgacccgggtgcaagag

SEQ ID NO: 725663 - DNA, 98 bp, Homo sapiens
tgcgggccaggggtactcggaaggcgcgggcaggagcctggcgaggatgcaccttcccctgccttggaaagacgctgaccggaaaggagattgagatt

SEQ ID NO: 725664 - DNA, 93 bp, Homo sapiens
gctcttgcaactgacgcagtcactgcagcactggtggaacttgagccaaaagaatgcaatggtgtaaagattccagttgatgccagtaaacct

SEQ ID NO: 725665 - DNA, 100 bp, Homo sapiens
atcaggtaggctgcgttgaggatctttgctcttccatccgcctttgatcgtcttcctcttcagccatccagagtgtgaacatggctacgcctcttcattc

SEQ ID NO: 725666 - DNA, 88 bp, Homo sapiens
ttttgagccatacttaagtagccagacaaatcagaataaccatgtgcatggacagccatatacaggcccagcagcacatcacatgaac

SEQ ID NO: 725667 - DNA, 100 bp, Homo sapiens
caggaatcttgcagaagaccgcagtgggataaatctcaaagatctcgtacaagatccttctttagttcgaaatttgagcaacccagccaagaagttcaag

SEQ ID NO: 725668 - DNA, 95 bp, Homo sapiens
ggctcgagtctacctggatgaaaactacaaatcccaggagcacttcacgcttgctctgtcaccatcgccccggaatcctgcagagcccattgctg

SEQ ID NO: 725669 - DNA, 100 bp, Homo sapiens
aagagatcacagaaacgtgaggatcaagaagccggactacaaggtcgcctacgtgcagctgcgtacacagactttactaaaagagtacaaagaaagggat

SEQ ID NO: 725670 - DNA, 75 bp, Homo sapiens
tggacggagagcttggattagactctggccctataacaacatgctgtaccccaaggaagacaaggagaaccgcat

SEQ ID NO: 725671 - DNA, 100 bp, Homo sapiens
caaggctcttccctgaccattttctactgtccctgcgcgagggttatgtaccgaaggactctaccgtgtcagcgggaataaaactgaccaagacaatatt

SEQ ID NO: 725672 - DNA, 75 bp, Homo sapiens
gcagttggcactacccgtcttgaggaatctgaccctctggtgggcagcatcgccacacagtacatgaccaacaga

SEQ ID NO: 725673 - DNA, 105 bp, Homo sapiens
gcattgtcccagatatagccgttggtacaaagacaatgcagatcttcgtgaagactctgactggtaagaccatcaccctcgaggttgagcccagtgacaccatcg

SEQ ID NO: 725674 - DNA, 100 bp, Homo sapiens
caggaggccaggggtgtcgccatgaatggagatgtatgcatttcgattcttcatccgcctgtagatgacccacagagtggagaactgccttctgaaaggt

SEQ ID NO: 725675 - DNA, 90 bp, Homo sapiens
agccctggaatctgaagagacatgagatggtagacaaaaccccagacattgccatcttccccaactaccaccaagtcctctccatctgat

SEQ ID NO: 725676 - DNA, 87 bp, Homo sapiens
tggttaacttgggagaaagtttcatctgtggatggagtattggcagctatcaatggtgtaataccacaggaaaatggcattctacaa

SEQ ID NO: 725677 - DNA, 100 bp, Homo sapiens
atggttgagatgtttctggaatatcaaaatcgtgctaagtgtggtggctcacacctgtaatctcagctacttgggaggctgaggcagaagaatcacttga

SEQ ID NO: 725678 - DNA, 80 bp, Homo sapiens
atcctagaggtcaagatcagctctggctaggttaaagactcagtctctgagaaaacaattggactgatgcgaatgcagtt

SEQ ID NO: 725679 - DNA, 83 bp, Homo sapiens
gtttgaaatggcttcgatgttagccgggacccgactcagatcacgagctgctcaggcaagagctgaacacgcggtttctggtg

SEQ ID NO: 725680 - DNA, 98 bp, Homo sapiens
caaattgccatgctgagccagcttccacaaattccccagtttcagttgtggaatgcagtagccctctgggcctgggatattgtggttgataactgtgc

SEQ ID NO: 725681 - DNA, 75 bp, Homo sapiens
gaatgagacccaaactgctcatacagaattacgcatttccacttctaatgagaatgctctcatcactcagtcaag

SEQ ID NO: 725682 - DNA, 100 bp, Homo sapiens
agaatttatcctcaagagtcagctggcagtctctagtgatccctgaaaagttccagcatattttgcgagtactcaacaccaacatcgatgggcggcggaa

SEQ ID NO: 725683 - DNA, 75 bp, Homo sapiens
tgggcgaatagctctgaccacccggcgaagatgccaggatagaagaatttgtttatgagaaactggatagaaaag

SEQ ID NO: 725684 - DNA, 121 bp, Homo sapiens
tggaaggagcccggggccctcattccttctcctccactgggaactgagatctgagtgatgagacgtgtccccactgaggtgccccacagcagcaggtgttgagcatgggctgagaagctgg

SEQ ID NO: 725685 - DNA, 100 bp, Homo sapiens
aatgtgagagatgtaatatatgacattgccagtcaagcacacttgcacctaaagcatatggtttgtgaagaaggtgacaagctaacctactcaaaatatg

SEQ ID NO: 725686 - DNA, 82 bp, Homo sapiens
aaagcagcgtgcgttcagccctgggatcgcaccccctccctccctggcggagcccctgaaggagctgttcaggcagcaggag

SEQ ID NO: 725687 - DNA, 101 bp, Homo sapiens
gctccctctgctcttcctcccttcgctcgcaccatgacccaacatgagtgaagtttcctgcaagaaacgggacgactatttggaatggccagagtatttta

SEQ ID NO: 725688 - DNA, 80 bp, Homo sapiens
gggcagacggattcatttagagctgcggaacaggacgccctctgattgtatccaaagtgtgtacatcagtaagatcataa

SEQ ID NO: 725689 - DNA, 75 bp, Homo sapiens
caccacttccctgcagctcccgccaggtcagagcagcccaccatgggatggggagggggtggaggctgcaccccg

SEQ ID NO: 725690 - DNA, 82 bp, Homo sapiens
cattgctgggagcctgaaaactgtgaatgaaatgagccgtcagactgctacagcattacctaccggtacctcgaagtgtcca

SEQ ID NO: 725691 - DNA, 98 bp, Homo sapiens
ctggatgccctgaagatcagcatccgccagctcaagtggaaggagattggaaacctggaagattactaccatttttatcacagcaaaacctttaaaag

SEQ ID NO: 725692 - DNA, 100 bp, Homo sapiens
attggaccaactggcaacagaaaatgaaaagtagtgtggcacagataaaactggacacctgttctgctgttgtgtcctgccattctcctgaagaacagag

SEQ ID NO: 725693 - DNA, 50 bp, Homo sapiens
ggggcattcgtcttggtaaacttggtgttgactatagtcaatggggccaa

SEQ ID NO: 725694 - DNA, 100 bp, Homo sapiens
gttgtgcgttgcggccagtcgccactgctgtggaatgaatcttacttgttgaatatcttctggttactagttggattcatttgtgaaagaatcattttcc

SEQ ID NO: 725695 - DNA, 98 bp, Homo sapiens
atgaagatctggacagtggcacacagataccgtttattaaaagagctgtggctagccctatgagtttgtctctctggaatggctgcaaaagtggttgg

SEQ ID NO: 725696 - DNA, 100 bp, Homo sapiens
ttcttcttcaagtctatggacgacgatttcggaatacagttatggccacccaggtaatggggcagtcttctggaggaggagggctgtttaccagcagtgg

SEQ ID NO: 725697 - DNA, 90 bp, Homo sapiens
aagtgaaccaaacctatcaaacctgtttagaaaataaaccaggttctccagcatttggctcaaggccccaagggcacatgtgacaagaag

SEQ ID NO: 725698 - DNA, 90 bp, Homo sapiens
ggacagtcgccctgagatccagcgcctggacacatgccatggacaatattaccaggcagaaccaattctacgatacccaagtcatcaaac

SEQ ID NO: 725699 - DNA, 90 bp, Homo sapiens
agccttgtcaaagatgccagatgtgggagacacgccaaagctcccaaggattcactccttctccagttgcacagccacacccttcagctg

SEQ ID NO: 725700 - DNA, 100 bp, Homo sapiens
gatggggacaaaggcgcaagtcgagaggaaactgttgtgcctcttcatattggcgatcctgttgtccgaccgctgtaaggaggtacagcagatccgcgac

SEQ ID NO: 725701 - DNA, 143 bp, Homo sapiens
taacattttaccatgcagctactggatcactgccatttagaccctttgaagggcctcgtaggaataaagaagtgatagatggatttataaaagctattggtcctgctgatgttattcaaagacagttttctggagaaactttt

SEQ ID NO: 725702 - DNA, 96 bp, Homo sapiens
tgaggagcccctggcctgcccggacgagttcgatgacttcgtcacctatgaggtgtcatggagaaactccagctgggcccagagattctgcagcgg

SEQ ID NO: 725703 - DNA, 100 bp, Homo sapiens
tacattctggaaaactgcacagagaattccatcatggacctgacccaactgatacagccccaggagagaaccgactgtttctggaaaaggtaaacatcta

SEQ ID NO: 725704 - DNA, 100 bp, Homo sapiens
gcaaggtcaatatgcagaaaatgctcccagaaacgatactggagtatttgtgtcagacattgtcaaaggaggaattgcagatgccgatggaagactgatg

SEQ ID NO: 725705 - DNA, 109 bp, Homo sapiens
acttcgcggcttcttcatgctttttcttctcaccatttctggccaaaactacaaacaagacttcgcaggatatgatgtttcagcttctccgaggtctggactttcttca

SEQ ID NO: 725706 - DNA, 98 bp, Homo sapiens
agcctggaacctcacgtcatcatgtatattctctcttccatttctgaaggacttactgcacttgtctattatcctcccagtccacaacgctgaaccgt

SEQ ID NO: 725707 - DNA, 75 bp, Homo sapiens
tcgccatcgccagcatcgccaacccggactggatcaacaccggggagtctgcggatggcccactgcgtgaccttg

SEQ ID NO: 725708 - DNA, 50 bp, Homo sapiens
agcactagtgtctagaaggcactaagggtcactgcagccagaggggtcca

SEQ ID NO: 725709 - DNA, 82 bp, Homo sapiens
atcagatatgcccaagaggcagtctttggatctggaaagggtctccgtctctccaccgggggcttcatccttccagggagga

SEQ ID NO: 725710 - DNA, 80 bp, Homo sapiens
tgtaccaggttcagtacaacagttccgttgatgactccctcgtctacaggtcagggaagtcaaagatgcatccctgagtt

SEQ ID NO: 725711 - DNA, 98 bp, Homo sapiens
ggggcggcttcgaccccccgcccgcctaccacgaggtggtggacgcggaggaatccatgggaaagagctatgatgggagagcttatgtcatcactggc

SEQ ID NO: 725712 - DNA, 80 bp, Homo sapiens
agcacagacggcggaggaggcgcagccggacatttagccgctcatcttcgcccccaaatacatcaagatgtttgtactgg

SEQ ID NO: 725713 - DNA, 87 bp, Homo sapiens
gcggagtcggggctcctgacggtaaagaggatgaatatccaaagaagcccttggggcagcttccacctgaacttcagtcttggggcg

SEQ ID NO: 725714 - DNA, 90 bp, Homo sapiens
cacgtggttgcttcacattgcccaggagcgagatccctccaaaatcaagtggggcgatgctggcgctgagtacgtcgtggagtccactgg

SEQ ID NO: 725715 - DNA, 100 bp, Homo sapiens
cgcggaaaccgatctgcccgttgtgtttgtgaaacagagaaagataggcggccatggtccaaccttgaagtgggtaaacctcacaagtgcaactactgtg

SEQ ID NO: 725716 - DNA, 89 bp, Homo sapiens
ttaagaaaggagacagaaccacatcatgaacttgctcatccacctgcagacatggggcgcagaaagtcaaaacgaaagccgcctcccaa

SEQ ID NO: 725717 - DNA, 102 bp, Homo sapiens
ccgaggatggcatattccagggtcagagacactgcccgggcggggagggcatgttccgtggcctcgcccaggccgacggttcctaatgtggatctaccaccc

SEQ ID NO: 725718 - DNA, 90 bp, Homo sapiens
cctggccccggctgcccgcgccggctactccgaggagcgctgcagctggaggggcagggaacacagccgcacccgggtctgtgccagctg

SEQ ID NO: 725719 - DNA, 100 bp, Homo sapiens
cctgggacttctgtggcaagtcatcaagattgggttgtttgctgacattgaactcagcagaaatgaagactcagattgatggacaacttttcttaattaa

SEQ ID NO: 725720 - DNA, 140 bp, Homo sapiens
cctgcttctgcgtgtcaggtgttactcggggtgcgccagtggaagcgggaggcagttgcagctttcaggatctcatctggccaccgcgttctggaagaggcgagagggagagcgtgcgcgagaggagagagacggcgggg

SEQ ID NO: 725721 - DNA, 100 bp, Homo sapiens
aacgagcgctgcatcccctctgtgtggagatgcgacgaggacgatgactgcttagaccacagcgacgaggacgactgcccttactggaggttttggctct

SEQ ID NO: 725722 - DNA, 50 bp, Homo sapiens
ctgcaagcaggcaacctgaatacagaaaggagcgagtgggactgtgctgc

SEQ ID NO: 725723 - DNA, 75 bp, Homo sapiens
tcagaaccctccgcagagtaaaggcaaacgaatgcacgtgcagttgtccaccagccggcttaggactgcgcccgg

SEQ ID NO: 725724 - DNA, 97 bp, Homo sapiens
gcggccgggccctcgagacggggacgcctgttcgacatgggcggtgagtattactgcttcgcttccgacatcacctgctcctttcccgccaacggca

SEQ ID NO: 725725 - DNA, 101 bp, Homo sapiens
ccagacggccagaaagttccgccatgagctggggcacggagctgtggatggactagaggcttttaccagatttcttaaaactgaattcagtgaagaaaata

SEQ ID NO: 725726 - DNA, 75 bp, Homo sapiens
agtactccgtcatgatcaacaaggccacgccctacaactacccagtgggaagccgtgtccgccttttaagattgt

SEQ ID NO: 725727 - DNA, 75 bp, Homo sapiens
accgaattctcagcaggtgaaccaaatgaaatggtcaactgaaagccaaccaggatggagactcgctctgttgcc

SEQ ID NO: 725728 - DNA, 82 bp, Homo sapiens
ggcgagcggggctttggacgccggtggagacgcaggcgagaggcagaagaggcctggaccttggcgcacacagacccaggaa

SEQ ID NO: 725729 - DNA, 75 bp, Homo sapiens
catcatgtcgcgttacgggcggtacggaggaggctgaaggggatgctaagggagataaagcaaaggtgaaggacg

SEQ ID NO: 725730 - DNA, 82 bp, Homo sapiens
cttcggcagtccacccaccgccgccgcctcccaggttgtgaactaaaggccgacaaagattatcactttaaggtggataatg

SEQ ID NO: 725731 - DNA, 100 bp, Homo sapiens
gctttgaagccaccccggtcaaaggatgctgagtccggagcgcctagccctaccggactacgagtatctgggtttgcatcgccagcttctatatattacg

SEQ ID NO: 725732 - DNA, 100 bp, Homo sapiens
aaagctcagctggtggtgattgcacacgacgtggatcccatcgagacagtgaatgcaaagaagttagagaaggccgaggctcgacttaaggcaaagcagg

SEQ ID NO: 725733 - DNA, 101 bp, Homo sapiens
aggtggtggggctcttcagctgccccaactttcagattgcgaagagcgccgctgaggttggatggcaagcatgtggtgtttggcaaagtgaaagaaggcat

SEQ ID NO: 725734 - DNA, 100 bp, Homo sapiens
tacgcagcgaaatcgagcctggccttgagggtccacaccgcgagggaagatgcgtgcgcccattgaaccactcgttttgactattattttatcactcttt

SEQ ID NO: 725735 - DNA, 50 bp, Homo sapiens
gattctatttttactgaagaaggagagcctaccacagccgctgcgtggac

SEQ ID NO: 725736 - DNA, 75 bp, Homo sapiens
ccccgcctagcccttccggatcctgcgcgcagacaattctgtggtgttcttggtcacacatttatggagtttctg

SEQ ID NO: 725737 - DNA, 92 bp, Homo sapiens
gtacccggttgtcctcaggcgctgtcagcttcctgcctgacacagctcacttcaagaagtgcacaatgtcagaacgtggaattaagtgggct

SEQ ID NO: 725738 - DNA, 74 bp, Homo sapiens
tctcagtgttgccctgttcagtctgagttaaatgagggccacacattggacatggatcttgtttttctctttga

SEQ ID NO: 725739 - DNA, 126 bp, Homo sapiens
ggatgccggtggaggcgggagcggaaggcgaggaggacggcttcggggaagcagggacttcttgcctcgaggatctggcattgtcacccgacgtcccctggtcttgcagctggtcaatgcaaccac

SEQ ID NO: 725740 - DNA, 96 bp, Homo sapiens
acttcgaccagcttcatcctcagacagacaagttggatggcttgaggactggtactaaaaggaaacgtgactgggaggccattgccagcagaatgg

SEQ ID NO: 725741 - DNA, 50 bp, Homo sapiens
ccccgccctgcgggagctgggcagggtgttgaaagcagcaggggcctaga

SEQ ID NO: 725742 - DNA, 100 bp, Homo sapiens
ctggattcaggattatgaccatcatttttgggaagagtgttagagtaaggcatcagctcaaatctaatccaagtgaaaatgaagaaaaggaagcacagtc

SEQ ID NO: 725743 - DNA, 75 bp, Homo sapiens
tgtcccaagccctggtgccaggtgtccatccccgtgctgagtttgcttgcctaaactggacttgaagcaatttaa

SEQ ID NO: 725744 - DNA, 97 bp, Homo sapiens
gaccatggctttctcgcttttcatctttttggatggctgcttgtcgcaatattgtcttcttcgctttagacaagtctcctaaaaacccagaacagaa

SEQ ID NO: 725745 - DNA, 50 bp, Homo sapiens
gaagataaagccaggcaaggggcaatgaatcgctccctggctaatgtgat

SEQ ID NO: 725746 - DNA, 100 bp, Homo sapiens
gaaacctgggctcttgaagacgcatcactggagcagatggataatggagactggggctatatgtttccaggaatatggatctactggaacagcccatgct

SEQ ID NO: 725747 - DNA, 100 bp, Homo sapiens
aaagagctctcgtactggacagattagcaagcaatgtggcaaaacgaaaaagctcaatgcctcagaaattcattggaatgctgtctctgcaatttgagag

SEQ ID NO: 725748 - DNA, 83 bp, Homo sapiens
cgtggagatatggcgcaactgcggcgctacctggagtagaacagaaaaattattatgtctgtgttcccttgggactcattgga

SEQ ID NO: 725749 - DNA, 75 bp, Homo sapiens
agggctatcagaacagatccgggaattaagagagttttcggctttgtgagaaaccttaccatcaaacacgatggc

SEQ ID NO: 725750 - DNA, 100 bp, Homo sapiens
cccgggacccagattgcgggttcaggagggcctgaggctatggcaggaggagcaggagaggaaggtgcaagccctctcggagatggcatctgaacaactg

SEQ ID NO: 725751 - DNA, 91 bp, Homo sapiens
accagacttacctggtgtcagaacgcctagaaagggcactccacagaaggatgttattatcaagtcagatgcaccggacactttgttattg

SEQ ID NO: 725752 - DNA, 82 bp, Homo sapiens
ggagcctcagttggaagcagccgatccagcctgcggagcctgtggggcagcaagagtgagccatggagctacgtgtggggaa

SEQ ID NO: 725753 - DNA, 82 bp, Homo sapiens
ttggtggatctgaagtacaaaatattttccaggacttgacccaatgaaagaagcatatggcacttgtgaagataaatgttac

SEQ ID NO: 725754 - DNA, 87 bp, Homo sapiens
gcattcccgcccgtcccgcagcggcgcgcggagccagaatacagtcgctttgaatcgaagatacatgacttacgagaacaaatgatg

SEQ ID NO: 725755 - DNA, 99 bp, Homo sapiens
agtgggatggatcagctgtgaaaaactctttggatgattctgccaaaaagagattatggagaagtctggcgaggaaggaatgcctgatcttgcccatgt

SEQ ID NO: 725756 - DNA, 90 bp, Homo sapiens
gcgtccgcgacgcagctgttcacgcttaggtgggcgacgtgggcgcaggtgggcgcagaggagaaggcagagcccccccaggctatgaat

SEQ ID NO: 725757 - DNA, 82 bp, Homo sapiens
acccagccgcacgcccaggatttcttgcgtgcagtttgtgaagaaaaaattagggtatctcccagagccccagctggtgtgg

SEQ ID NO: 725758 - DNA, 50 bp, Homo sapiens
tcttgaatttctctctgtaaaggaggtacagagccagatggactccttcg

SEQ ID NO: 725759 - DNA, 75 bp, Homo sapiens
tccgcaaaggctttctcgcttgtcaccttgccatgtggaagaaactggtcattttttgagaccagtactgttata

SEQ ID NO: 725760 - DNA, 83 bp, Homo sapiens
ctcgcggaccggcgtccccggcgcgaagaggctggactcggattcgttgcctgaggatgagacctgcacgcagtggctcacag

SEQ ID NO: 725761 - DNA, 82 bp, Homo sapiens
tgttccacacgcgcttcaagcaggagggtgtcctgaacagcaaggtgacaccggaaactggtactcaagtgatgaggatgag

SEQ ID NO: 725762 - DNA, 98 bp, Homo sapiens
ctctagctattgccttattttttctcatggatgttcttcttcgagtatttgtagaagggtgataactaccccgtacagttcattccatcaacaatggc

SEQ ID NO: 725763 - DNA, 100 bp, Homo sapiens
ctcaagatcagaaatttcaaagagaacttatacagaatggttttacaaggaacttgcttgctagaaaacaaagtgcaaggcttgacaaacacaatgactt

SEQ ID NO: 725764 - DNA, 82 bp, Homo sapiens
caggatccgctgtatggttactttgctgctgtagctggacagatatgagggaaggcaccattggagatatggctatcctggg

SEQ ID NO: 725765 - DNA, 49 bp, Homo sapiens
tttcggtagccatggcacaagaatataccaaggccacctttgatgccat

SEQ ID NO: 725766 - DNA, 101 bp, Homo sapiens
atcaggtgactgtcccagaagtgaatcgcaggaaactaaatatattttgccaactttggaaaaagaattattcttggcagagcacagtgaccttgaagaag

SEQ ID NO: 725767 - DNA, 113 bp, Homo sapiens
caaatttggaatctgccttctactccatcgtgggactcagcagccttggtgctcaggtgccagatgcaaagcatccacccaacccaccagtatcaccaggaaaaactgtaaat

SEQ ID NO: 725768 - DNA, 75 bp, Homo sapiens
cgcccatatgggggttctggagagcggggtgtgggagctgagctcaatgtgcagcaatggatgacgacagcctgg

SEQ ID NO: 725769 - DNA, 97 bp, Homo sapiens
atctcagagaaattggccatggaagctttggagcagtgtatttttgagaaagatcagtctaaagaaaaggagaagaaagtgaaaaaaacaattcctt

SEQ ID NO: 725770 - DNA, 75 bp, Homo sapiens
ctatggccgtgccctggggctgagccctcagactgaggctgatgtgaatccaaaggcctatccccttgccgatgc

SEQ ID NO: 725771 - DNA, 75 bp, Homo sapiens
cggcgcgtcgactgcccagagtccgcggccggggcgcgggaggtaccaggatcatctatgaccggaaattcctga

SEQ ID NO: 725772 - DNA, 100 bp, Homo sapiens
attattatggatgctgatctctcacaccatacctctcgggaactgaagattgcaggagccattggtccatgcgtatctctgaatgtgaaaggaccgtgtg

SEQ ID NO: 725773 - DNA, 90 bp, Homo sapiens
ggagcggagccggccgtacgcggtgctgcgagggcagaacctggttggtgacaaagttcctgctgatataaggttaacttccatcaaatc

SEQ ID NO: 725774 - DNA, 100 bp, Homo sapiens
ccaagatgtctgacatggaggatgatttcatgtgcgatgatgaggaggactacgacctggaagacaactgttagttttgtggcttactgctgctccaccc

SEQ ID NO: 725775 - DNA, 98 bp, Homo sapiens
ctgggattcactttaatttggaagaatggcaagcaccggaagcaccccggcggccgcggtaatgctggtggtctgcatcaccaccggatcaacttcga

SEQ ID NO: 725776 - DNA, 98 bp, Homo sapiens
ctcaccgacctccaggtcaccatcgagggccctgctgtcggaaaaggtaacagaagatggaactcgaaatcccaatgaaaaacctacccagcaaagaa

SEQ ID NO: 725777 - DNA, 100 bp, Homo sapiens
tctctgaagtgaagatggatgcagaattccgacatgactcaggatatgaagttcatcatcaaaaattgccaagcccaagaaccaagctgaggcccagaag

SEQ ID NO: 725778 - DNA, 98 bp, Homo sapiens
tcggaccagccggcgcaagcgggcgaaggcaaatcctgatcctaactgttgtcttggagtatttgggctgagcttgtacaccacagaaagagatctaa

SEQ ID NO: 725779 - DNA, 75 bp, Homo sapiens
tagatctagaagtcactttggaagaagtatatgcaggaaattttgtggaacataccctttttggagacaaattat

SEQ ID NO: 725780 - DNA, 98 bp, Homo sapiens
ctcgatggaccgcggctggcaaggcgccaatgcttcggcattagagaaagagattggtccagaacagtttccggtcaatgagcactattttggattag

SEQ ID NO: 725781 - DNA, 114 bp, Homo sapiens
agaaagcagaggaactgctgttgttacctgggaaccctggaggggccttcctcatccgggagagccagaccaggagagatatttggagttcttacaacatggcagacattgaca

SEQ ID NO: 725782 - DNA, 75 bp, Homo sapiens
gggagaagcagctgagaaagcatttgaaggatctcctgccaggtagacgttacatccaagaggaaataatccagg

SEQ ID NO: 725783 - DNA, 75 bp, Homo sapiens
cctggacttagctttgtcatgcaaagctgtcatttgctgtcggttaattatagaaaatgccaagtaggaaatttg

SEQ ID NO: 725784 - DNA, 100 bp, Homo sapiens
ttcacagaattattccagggtttatgtgtcagggtgatgctggtttgactggacgcaaaatcattgtggacacttatggcggttggggtgctcatggagg

SEQ ID NO: 725785 - DNA, 75 bp, Homo sapiens
cgcttgttggactgctgctgcaaaacttttcttcatgtttataactactgtactagtgttcaccagtcaaaccaa

SEQ ID NO: 725786 - DNA, 90 bp, Homo sapiens
ggctgcgcccgtgggaccggtgaagttctggcgacccggtgtcaactctgcccgctcagttcctccttcctacccaccaccgcaggaccc

SEQ ID NO: 725787 - DNA, 75 bp, Homo sapiens
ctctgaagggggcatcacctgctgggaaaagatctgccccttgttctctggtgtgaaatctaagaatcccctgcc

SEQ ID NO: 725788 - DNA, 98 bp, Homo sapiens
cagtgcctcgagcgctcaggatggaggaagactcgatccgcctgcctgcgcacctgcgtatctctggagacaaagtagagatagaccctgttacgaat

SEQ ID NO: 725789 - DNA, 100 bp, Homo sapiens
aacagaaggcgatcaaggccaagtatccgccagtcaataggaagtacgagtactagacgcttgaagcaaagctgccatcccagaagacgacatgctctca

SEQ ID NO: 725790 - DNA, 75 bp, Homo sapiens
cctactctgtgaccggggccaagcaggagtacgaccccagcaaagcgacctttgtgaaggtggtgccaaccccca

SEQ ID NO: 725791 - DNA, 97 bp, Homo sapiens
gccaaggtggagttgctgtgtgccagcagtgtcctcactgccttccttgcagcctttgccctgggttatcaatactctggctgaccatcatcatcgt

SEQ ID NO: 725792 - DNA, 128 bp, Homo sapiens
gcttctccttttcatgagtgttcctgtggtctctgcacctcctttctcttataatggcaacccctgaagaaaacagcaatccccatgacagagcaacaccccagctgccagcacagctgcaggagctt

SEQ ID NO: 725793 - DNA, 90 bp, Homo sapiens
attcgcagtggtcgcttcttctccttgcactactgggttggggtctccacgaccgagctggtctcatcaagtggcgtccaacaaggggct

SEQ ID NO: 725794 - DNA, 100 bp, Homo sapiens
tgcgattagttgatgtggcctgcaaggacagagcgggatgccaccagcttgtccaaagggaagttccaggagctcctggtgggcatcgttgtggagaatg

SEQ ID NO: 725795 - DNA, 75 bp, Homo sapiens
cgtaaccaacacctggtccagacctcatgtggaacctggtgtgtgaggacgactggaaggccccactcacaatct

SEQ ID NO: 725796 - DNA, 100 bp, Homo sapiens
tagtttcggtcatctaaaggaggttttaaacagtataacagcacccagtcagcttgaagagtttcaaatggaccctaccactgagaaatcaagatggcag

SEQ ID NO: 725797 - DNA, 98 bp, Homo sapiens
tggcactgtggttcctgcatgaagacagtggctggcggtgcctggacgtacaagctgtggaaaatctctgttctcacaaagtctccccaatgctctac

SEQ ID NO: 725798 - DNA, 100 bp, Homo sapiens
gctccgtgtttctggaaagtgacagcaggtcagcagcaaggacaagatggagtaaaagtccagcaagctactatagctcctgtaactgtagcagttggag

SEQ ID NO: 725799 - DNA, 75 bp, Homo sapiens
aaccacggtgtgctgaagataaccatctgttgcccaccagaagtatgtccgacaagcctggcagaaggcagacat

SEQ ID NO: 725800 - DNA, 82 bp, Homo sapiens
agcgagtgacacgagagctcaaggacaggtagaaaaattcctcacatgggttaataaaccaatggatgaagaagcatcacag

SEQ ID NO: 725801 - DNA, 86 bp, Homo sapiens
atctactactgcaatggccatggcaagagtttcaccttgaccataaccgtcttcacaaatcctccccaagtagctacctatcacag

SEQ ID NO: 725802 - DNA, 100 bp, Homo sapiens
atacgcattctaatgaatttaaagagagtgcccttaccttagcttgttacaaaggttaatttggagtggcccctggagtcagtttcctacaccatccgag

SEQ ID NO: 725803 - DNA, 100 bp, Homo sapiens
ggatgacaagaatgcaacaaagctgaatgaactcattcaggttggatcgggcccgggacacccagacagatgagattgtcgcactgaagaaggtgcggat

SEQ ID NO: 725804 - DNA, 98 bp, Homo sapiens
ggagtgtccacttagaagcatcacatgacaatgcatctgctgtaggcggtagcagtttgcacgatgaacttgagaaagtctattcgtgtgaccaggag

SEQ ID NO: 725805 - DNA, 74 bp, Homo sapiens
tgtttcaagaaaatggatttaaacatatttccctgtggagggaggagatatcaccaaacatgatggaacaggcg

SEQ ID NO: 725806 - DNA, 101 bp, Homo sapiens
cctcatcgtgtctctgtatcccctgggaggcctctttggagcactgcttgcaggtcccttggccatcacgctgggaagggcttttttgaagaagaagaagg

SEQ ID NO: 725807 - DNA, 74 bp, Homo sapiens
acatcttctggacctttgtccagggaagctgccaaagaatgtcgacgtcgaaagaaagaatatgtaaaatgtct

SEQ ID NO: 725808 - DNA, 73 bp, Homo sapiens
gggggggcgggcgttgggacgtgctgctgcgggtgagaccaaggaccaggtagctaactcagcctttgtggaa

SEQ ID NO: 725809 - DNA, 82 bp, Homo sapiens
gccgcagctgcgggtccgggattcccagccatggcagattcctccgggcagcaggttttccaagagataacttcaccaagat

SEQ ID NO: 725810 - DNA, 75 bp, Homo sapiens
cgggcatctcctcccagcagctcatgcaacatctcctctggggaaatgcagaagcatgcttttcacttccactgc

SEQ ID NO: 725811 - DNA, 100 bp, Homo sapiens
gtctcgctccgtggccttagctgtgctcgcgctactctctctttctggcctggaggctatccagcaaaggcctaaagaatgtatttgacgaagcaatatt

SEQ ID NO: 725812 - DNA, 75 bp, Homo sapiens
cggggctgaggcggccgcggggcccgagcgcagcaggacagctggcctgaagctcagagccggggcgtgcgccat

SEQ ID NO: 725813 - DNA, 90 bp, Homo sapiens
gttctatactaaacaagatgtaattattacagcattagataatgtggaagccaggagatacgtagacagtgcaaggatgatgctgaaagg

SEQ ID NO: 725814 - DNA, 98 bp, Homo sapiens
ggacctcctcacgagcccaagacagagcgggatgccaccagcttgtccaaagggaagttccaggagctcctggtgggcatcgttgtggagaatgacgc

SEQ ID NO: 725815 - DNA, 100 bp, Homo sapiens
acatctactgggtcagcttcatcctcggcggcggtggccgctagctccaaggaaggcatcagcaggactcagacctctcagcagcgtgctctgacgctga

SEQ ID NO: 725816 - DNA, 83 bp, Homo sapiens
gcggtgacagagtggagccatggctagagacgccgcaccaggctgcaggccagcccttcaagttcactatcccggagtccctg

SEQ ID NO: 725817 - DNA, 100 bp, Homo sapiens
gttttctttactctggggtcccggctgccctgtggcctcgctcctcggagggctgaccggttccctgatgtgttacctgcttctgctactgatccaaact

SEQ ID NO: 725818 - DNA, 75 bp, Homo sapiens
gtgaagttccagctggaggacgacggcgagttctacatgatcggctccgagcttgaattagagtctgtcaaagcc

SEQ ID NO: 725819 - DNA, 100 bp, Homo sapiens
gtggatgatgccaaagttttattaggtcttgctatcacagatgaaattttgctgagtaaggcagagtggtccaaactttttgaagctccaaacttctttc

SEQ ID NO: 725820 - DNA, 55 bp, Homo sapiens
atggccttttcctacctccgagcaaaaggcatcgcaggcacagatgtagcaaagg

SEQ ID NO: 725821 - DNA, 82 bp, Homo sapiens
tgaaaacctctcaccccgtcgttgcctccacttggcccgtccatagagccaggcttgccgctgttccgtaacccagtgattc

SEQ ID NO: 725822 - DNA, 88 bp, Homo sapiens
tgaattgtgctgccttggccaaaagaggtaaaacagaaaggggctcatactcatcttatgggagagaatcaaacttacagggttgcca

SEQ ID NO: 725823 - DNA, 96 bp, Homo sapiens
gagaattcagctccagttcaaaagcctacaaaatctgagactgtcattgcttttataagaactctcttgatagagcccaagcagccaagaataaag

SEQ ID NO: 725824 - DNA, 100 bp, Homo sapiens
gtagatgataaagatgatgatatccttctcaaccttgtgggatgtgaaaactctgttactgaagggaaatgaggcaagttatcctttggaaatgtgctca

SEQ ID NO: 725825 - DNA, 71 bp, Homo sapiens
agtttccagaagatggcgtcgtgataacacagactttcaaggaccaaggtctaacataagaccagactatg

SEQ ID NO: 725826 - DNA, 100 bp, Homo sapiens
ggtttcaggctcatcgagaggtaccagaggctgggaggcggcagaatgcagccagaggagggcacaggctggctgctggagctgctgtccgaggtgcagc

SEQ ID NO: 725827 - DNA, 101 bp, Homo sapiens
ccacggggcattacttggcagcagaggtggataaattagatgcttcagaatcactgagaaaagaagaagaacaagctacagagacacaacccattgtttat

SEQ ID NO: 725828 - DNA, 75 bp, Homo sapiens
ctaaaagtcaccgccaatattgtgtttggatatgccacgagtccttcaataatgttaaacagtggctgcaggaaa

SEQ ID NO: 725829 - DNA, 83 bp, Homo sapiens
gtctcgggggccgctctgggatcccggccaccagcaattgtccggcagttgtgaaaaacttcaggacaaaaatgtttcattta

SEQ ID NO: 725830 - DNA, 100 bp, Homo sapiens
ctatgtgactatcattgatgccccaggacacagagactttatcaaaaacatgattacagggacatctcagcccaaagcagtgtccacaccagcaccagct

SEQ ID NO: 725831 - DNA, 143 bp, Homo sapiens
agtggcaaccagaacctcttgttcctcctgtcccaaaagaccatcctgctctcaactacaacatcgtttcagggctcaggccacagggtcaccacatacatcgcccacccatggaggcggccggccaatgcccatgccagtgc

SEQ ID NO: 725832 - DNA, 88 bp, Homo sapiens
tgggatctggccactaccgcaggctcgagacaacccagagctcttcagaaaccaggctgctttcaggaacattgctgtggattcccag

SEQ ID NO: 725833 - DNA, 100 bp, Homo sapiens
gcgcgtggaacggctgcttttggaaggcatatcacacctgaaaaattttatgtggaagcttgtgatgatggagcagatgacgtacttaccattgaccgtg

SEQ ID NO: 725834 - DNA, 99 bp, Homo sapiens
caccgcagccttgggcctcgcgccggctatggccgtgccctggggctgagccctcaggtcaaaatgcagatcttcgtgaaaacccttaccggcaagacc

SEQ ID NO: 725835 - DNA, 83 bp, Homo sapiens
ggtgcttcaagaacttcgacagtaccatggtcttcccatgcacaagatgattaatacagatcttagcagaatcttgaaaagcc

SEQ ID NO: 725836 - DNA, 97 bp, Homo sapiens
ggcgggggggggcgccccgatgagccccgagtgcgaggagccgccgccccccctcgcaggaagaaggtagataatgactataatgcccttcgagaaa

SEQ ID NO: 725837 - DNA, 83 bp, Homo sapiens
ctcggcgcgactcgcttctttcggttctacctgggagaatccaccgccatccgccaccatgtttgctggcctagacctgaact

SEQ ID NO: 725838 - DNA, 51 bp, Homo sapiens
caaagaacctctggtgttgaaaggacacagccagtgtgaagtcctctagta

SEQ ID NO: 725839 - DNA, 100 bp, Homo sapiens
agagcagacagaatctgggtcctagatgacttcattgcactgctgcaactgccttctccagacctcttgccagatcttggaagtccagaaggtatcgctg

SEQ ID NO: 725840 - DNA, 82 bp, Homo sapiens
ttgagggaggagattcagcccggcgatattgtcattattgatcagttcattgacagcctgcctagggtagttaaaagacgag

SEQ ID NO: 725841 - DNA, 100 bp, Homo sapiens
gcgcgagcaaggccgccagatgtgcagcctatggcgttggcctccttgtgacattcgtggcactggccctgatgcagcgtggccagcccgctctcctcta

SEQ ID NO: 725842 - DNA, 98 bp, Homo sapiens
ccagtcaccagcaggagcagccaaccagcagcagccatcatggagcactctcgagtggaccctgaggagctcttcaccaagctcgaccgcattggcaa

SEQ ID NO: 725843 - DNA, 97 bp, Homo sapiens
cctatggtttctgcattttgttaagaagcacctcatgcaagcgagggacctgggactgctcacagccagccataaggatgagtttaccattattcct

SEQ ID NO: 725844 - DNA, 101 bp, Homo sapiens
tgcagccgccgcctccgacctgggcgctcagcccccggatcagcctgcctctgggtgtggatgaggtcaccattgtcaacattttgaccaaccgcagcaat

SEQ ID NO: 725845 - DNA, 100 bp, Homo sapiens
taagagaagaattagctatcaaatccggccaggactatctcaagcaggtgctggacattgatcttcatgctcagatccattttggcagggtttttatgaa

SEQ ID NO: 725846 - DNA, 50 bp, Homo sapiens
gagggaagtcgtgcacgaacaccaagtgtccgagctgcaggaggagggaa

SEQ ID NO: 725847 - DNA, 100 bp, Homo sapiens
ctcgacgtcttgcctgtgtcccacttgttcgcggcctataggagtcggagaggatggcaggggccggaggccagcaccaccctccgggcgccgctggagg

SEQ ID NO: 725848 - DNA, 100 bp, Homo sapiens
gaatgtgtcagccgatgcaccgagtccagcccaggaaaatggagagtgcaaaatggcaactcttaaggaaaaactcattgcaccagttgcggaagaagag

SEQ ID NO: 725849 - DNA, 75 bp, Homo sapiens
ggctatcacaagctgcaccagcttctaaccgagaacagcatatgccatatatgagctggctgtggcttcatttcc

SEQ ID NO: 725850 - DNA, 97 bp, Homo sapiens
cagtgaacaagagacaaaccccctactatcatggtacttacatttttgtgggctggataataaacaaggtttctgagtcccttcaacatgatcctgg

SEQ ID NO: 725851 - DNA, 96 bp, Homo sapiens
gagagaggtacctctccttttccctctccctttccctaaggatgggaaggccattgtgactatgtggtgattacagttgtcttactactgagtttc

SEQ ID NO: 725852 - DNA, 100 bp, Homo sapiens
agaaagagtttggaccagtagttatagattatggcaaggctgtaacagaagacaagtacgaaatactgcaatctgtcgacgatgctgcgattgtgataaa

SEQ ID NO: 725853 - DNA, 75 bp, Homo sapiens
gcgggagaagcggcgctccaccggcgtggtcaacatccctgccgcagagtgtttgagcaacacacctccacttac

SEQ ID NO: 725854 - DNA, 83 bp, Homo sapiens
ctacggacctgtctgggtctcagccgccaaagaccccgtccggtagacccctttgctgatgcaagtaagggtgatgacctgct

SEQ ID NO: 725855 - DNA, 75 bp, Homo sapiens
gccgagtctgacggcgccggttcgctgcccggtccgcccgcggtgagaggttattcagcttctcaaggctggaaa

SEQ ID NO: 725856 - DNA, 80 bp, Homo sapiens
tggtcgggatgtgtcggctcagcagcctccaacttctcccgaatcccactggttttgagcaaaattttggactgtgaagc

SEQ ID NO: 725857 - DNA, 101 bp, Homo sapiens
aaagcctgaacaggcagggccagacccagaacgacaaatcctccacccctgggctcaagtccaacacaccaaccccaaggaacgacgccccaactccaggc

SEQ ID NO: 725858 - DNA, 49 bp, Homo sapiens
acgaggaagaggaggtttctgaggttttaaatgcacagagagcaggata

SEQ ID NO: 725859 - DNA, 75 bp, Homo sapiens
gcgctatgctgctgtaacacagtttgagtttggatttaggtggcgagtagaaaaagaagtaatttcaggaaaagg

SEQ ID NO: 725860 - DNA, 83 bp, Homo sapiens
tttggattttatgtgctacagtctgcggaacggagcagtatttcaatgtggagggtatacagggagctaccctgtgtttctga

SEQ ID NO: 725861 - DNA, 96 bp, Homo sapiens
ccgggacccggttccccggcccacagtgggggtgtgcaaacccgagagaactggatggtcagtaggacagaaggtaacattgatgactcgctcatt

SEQ ID NO: 725862 - DNA, 82 bp, Homo sapiens
tggctactatttcaccaatctgttactatgcgagtcagaagaaaacatttgaaattaatcccagacacccgctgatcagaga

SEQ ID NO: 725863 - DNA, 75 bp, Homo sapiens
cccgagccgccgccgctgtccggagccccacagaggatgtaggaagaagctggtctgctgactgtcatacttgtg

SEQ ID NO: 725864 - DNA, 100 bp, Homo sapiens
cagccggtggcagatgacacctgtttggagaagctcctggactggtttaaaacggtcactgaaggagcggacgcccgtggtttactgtgtgaggttagcc

SEQ ID NO: 725865 - DNA, 75 bp, Homo sapiens
aggattcattatgaacaaagaagtctcccaggtcatcctgtacagttctacagcatgaataggcctgcctctcgc

SEQ ID NO: 725866 - DNA, 51 bp, Homo sapiens
ccgccgctgccgcttccaccacaggtccggtttatcactaaaatatggcat

SEQ ID NO: 725867 - DNA, 75 bp, Homo sapiens
taggacggggaacgacaattacgcaaggaggacttcttgttaatttccatccttcaattctgacctgtctacttc

SEQ ID NO: 725868 - DNA, 90 bp, Homo sapiens
tgcgctacctggtggtcgccctgggctcttgcctgggaccagtggcagggaccccggaacctgaaggtgctgacaaagatgacctgctgc

SEQ ID NO: 725869 - DNA, 90 bp, Homo sapiens
gtcaatgatgatgatgaggaagcagatgatacccgctacacccagggaacaggtggtgatgaggctgtttgtactgatggcaagctcttc

SEQ ID NO: 725870 - DNA, 90 bp, Homo sapiens
ccggcagcggactcctttggctatgagggtctcaacgcagactacgtgaagggagagaacctggaagccgtggtatgtgaggaaccccaa

SEQ ID NO: 725871 - DNA, 100 bp, Homo sapiens
gatgccgcagtaccagacctgggaggagttcagccgcgctgccgagaagctttacctcgctgaccctatgaagaattctgcttggtcagaatcgtgatgg

SEQ ID NO: 725872 - DNA, 99 bp, Homo sapiens
gcacaaagatggttcggtcccacttgcagcagaaattcttgctggaggctgcgccctgagcctgtgcaattatttcgagagtcaaaatgtggatttccg

SEQ ID NO: 725873 - DNA, 51 bp, Homo sapiens
attaagaagtacaatagcattcgcgatagccttggataccagttactggac

SEQ ID NO: 725874 - DNA, 102 bp, Homo sapiens
accatgcattatgatgggcatgtccgcttcgaccttcccccacaaggtggatccataaagaacccagccaacccgcagagggaggggaggggctgagctgtg

SEQ ID NO: 725875 - DNA, 90 bp, Homo sapiens
cttcaacgagttcatgacctccaaacccaaaatccactgcttcaggagcctaaagcgtggggtaacctgtctggtcagagtgcagcttca

SEQ ID NO: 725876 - DNA, 100 bp, Homo sapiens
cagccctgacgggacagagccagggcactcaccaggctgcaagaacagtgctgggatcaacttccagccagacccagccaggcacaggctgggtccagtt

SEQ ID NO: 725877 - DNA, 50 bp, Homo sapiens
ctcgcagtgagtgttacagctcttaagcacagacgcagtcttcagcaagg

SEQ ID NO: 725878 - DNA, 110 bp, Homo sapiens
cctggaccagatgcgctccttcggcatgaccccagtgctgcctgcattcgcggggcatgttcccgaggctgtcaccaggacagagcgggatgccaccagcttgtccaaag

SEQ ID NO: 725879 - DNA, 50 bp, Homo sapiens
cgcaattctgactccacaaacacctttgagggtattgaaagtgccgagat

SEQ ID NO: 725880 - DNA, 105 bp, Homo sapiens
ttcaaagatgtgagagagaaaagtgagtttattctgaagagcatccagaccctcaaactgacacaagacctacagagaaaaccctttgccaaatctgctctcagc

SEQ ID NO: 725881 - DNA, 82 bp, Homo sapiens
cccacatgcccgctcacctgcgctgtgatgcctgcagagctgtggcttaccagaagcaatatccaaggcagtgtcatctgca

SEQ ID NO: 725882 - DNA, 75 bp, Homo sapiens
caacaaggtgttgatgccgccggacggaatgtatcctgtcaggtataatgtcagtgaatggcaagaaagttcttc

SEQ ID NO: 725883 - DNA, 100 bp, Homo sapiens
ctctttcatcatcaagcagacatactcaaggttttgtggcacttggatatcttccgacgtagctttaggcagcttacaactcacaagtgcatgggagatt

SEQ ID NO: 725884 - DNA, 85 bp, Homo sapiens
aggagaggcgagtgacagaactgaaggtgaacctatgggtcgtggaacaaaagttatcctacacctgaaagaagaccaaactgag

SEQ ID NO: 725885 - DNA, 83 bp, Homo sapiens
cgcaaccattgacgccatgtcgggttattcgagtgaccgagaccgcggccgggaccgaggcgagtaaccagctcataaatcac

SEQ ID NO: 725886 - DNA, 100 bp, Homo sapiens
ttcgctgctcagccagctcctgcgaccgccctgcgcttcgtgcaccggggcggtccgttgccaaagccaggcatttattgaaatggcaaccacagaggat

SEQ ID NO: 725887 - DNA, 80 bp, Homo sapiens
tctcccttcttgcctgatctcaagcccaacctcaactccttgcactcatcgccctctggaggagatgaccagtgccttgg

SEQ ID NO: 725888 - DNA, 100 bp, Homo sapiens
ttcaagagagtaccattggggtctgtcgcccaggctggcatgcaatggtgcaatgatggctcactgccgcatagacctcctgggctcaagtgatcctccc

SEQ ID NO: 725889 - DNA, 75 bp, Homo sapiens
gccaaggaataaacatgcaatgaacccaaaagggttgagcaatgtttaaagcgtttgaaaaacatgaatttggag

SEQ ID NO: 725890 - DNA, 100 bp, Homo sapiens
acagataaactggcatttggtacttgcaagcctgaagatccttctgtgccagttgcactcaacattggcaaattggctcagttcgaaccatctcagcgac

SEQ ID NO: 725891 - DNA, 82 bp, Homo sapiens
ggaaggtgaaggtcggagtcaacggtgtacaagtccccagagtatgagtcccttggttttgagcttactgtggagagattag

SEQ ID NO: 725892 - DNA, 100 bp, Homo sapiens
aaatacccctttgaattaattatggctcactattcctgatcagagaactccagttgcttcaacacacagtatcagtagtgcagccaccccagatcgaatc

SEQ ID NO: 725893 - DNA, 75 bp, Homo sapiens
ggcaattgaaaacactgcctcagtatctgaacacaaggatgaacgtgaagccagagaaaatgtgaagagagagca

SEQ ID NO: 725894 - DNA, 102 bp, Homo sapiens
cagaatctggcaatgggggcaggagctgttggagctttgcagctgacctacatctcgaagggcggcgactggcggcgcgatggacctgaccgggctcctgct

SEQ ID NO: 725895 - DNA, 100 bp, Homo sapiens
cgaagtgtcagaattggagacccgtctggaaaagattcactttataggaacagcttcagcttcagtgatgaaaaactgaattctccaacagactctaccc

SEQ ID NO: 725896 - DNA, 89 bp, Homo sapiens
cccaagaaggaagtcatcatgggccggcctggaacagacacatgcctcactcctgtcagcagttccaccttttcatggttgaggagcac

SEQ ID NO: 725897 - DNA, 83 bp, Homo sapiens
acgccgaccggcgccgggagatcctgggtgcagaccatgaattacgtggggcagttagccggccaggtgtttgtcaccgtgaa

SEQ ID NO: 725898 - DNA, 106 bp, Homo sapiens
tgaagaaggttccaacaaaagactttttaatgttgatcggcatgttggaatggggctatttttggagcattacaagatatacttgggagccgttctgtttcaaagg

SEQ ID NO: 725899 - DNA, 80 bp, Homo sapiens
agcctgcggagcctgtggggcaggtttctccaacaactaacagaagagaattttgagttaattagtaagttgtggactga

SEQ ID NO: 725900 - DNA, 100 bp, Homo sapiens
caggaccgcgacggcagcagagcagcagctgttgtgctgtgtatggacgtgggctttaccatgagtaactccattcctggtatagaatccccatttgaac

SEQ ID NO: 725901 - DNA, 110 bp, Homo sapiens
cacaaggattctcgctgtgacagagacaacaccgagtatgagaaacaatgcagatcttcgtgaagactctgactggtaagaccatcaccctcgaggttgagcccagtgac

SEQ ID NO: 725902 - DNA, 114 bp, Homo sapiens
agacaaggaagttgtgattgcccagaatgacaagcatactggcccagtgagagccttggatgtgaacattttccaggccaggtgtggtgtcttacacctgtaatcccagcactg

SEQ ID NO: 725903 - DNA, 50 bp, Homo sapiens
ggccatcctccgtgtcatccggttgagacgtctcagagaggctgtgcagc

SEQ ID NO: 725904 - DNA, 88 bp, Homo sapiens
tgccaaggaaaaactggagagcttcatcaaaaatagtgatagctttgataaggtcctgcagttctgagcttgggttccctttgcctgg

SEQ ID NO: 725905 - DNA, 107 bp, Homo sapiens
gttgcgtgccctacttcaaggataagggcgacagcaacagctctgccggctggaagaattcagaaggagctggcggacatcactttagaccctccacctaattgcag

SEQ ID NO: 725906 - DNA, 101 bp, Homo sapiens
tgcagtttgagccaggacccctgtgaaagtaagtgaacacagtctcctgccccttatgctggagcagtttccgtttctttatgtttctggcccaacactaa

SEQ ID NO: 725907 - DNA, 51 bp, Homo sapiens
cttgggatataaggactggcaaggtattttggcctctccccagtctgctcc

SEQ ID NO: 725908 - DNA, 100 bp, Homo sapiens
ccggtcttggggggatggttccatcatggcgtcaatgcagaaagaatcttcaagagggagacatagggaaaaggaagacataaaaatcactaaggaaaga

SEQ ID NO: 725909 - DNA, 100 bp, Homo sapiens
acttgcgtgcaacatcttaattcttacttagcaagagtgagccatggagctacgtgtggggaacaagtaccgcctgggacggaagatcgggagcgggtcc

SEQ ID NO: 725910 - DNA, 83 bp, Homo sapiens
cggaactgggaccaaggtcaccgtcctagttgagacgggagaagattgaccttgaaaatacattggaacaagaacaagaagca

SEQ ID NO: 725911 - DNA, 89 bp, Homo sapiens
cgagacgtggcctgtggcgctaaccacacgggtgaacgtggtgttcgtagaccgctcaggccagcggatcccagtgagtggcagagtcg

SEQ ID NO: 725912 - DNA, 75 bp, Homo sapiens
aaaacgtggatgattactacgacaccggcgaggaacttggcaggatgcttatagaattttatgagtcaccagatc

SEQ ID NO: 725913 - DNA, 135 bp, Homo sapiens
ctgccacgccctctcatccaccccaccttgtatgcaacgccccccttcacacacagtaaggctttctgtgaagaattggaatcaatgatacaggagcaatttaagaaggggaagaaccccacaggcctattggca

SEQ ID NO: 725914 - DNA, 75 bp, Homo sapiens
tcctacgtttacctgtccatgtgttgaagcatcacacagacatgagcagttcgagctacttggcagccacccacc

SEQ ID NO: 725915 - DNA, 100 bp, Homo sapiens
cagctacatcaggtgctcatcctgaggatttccacatggaagaggcactggattggcctggagtatacttgttaccaggccaggtttctggggtggctct

SEQ ID NO: 725916 - DNA, 98 bp, Homo sapiens
tccttccagcacgagatgtcccaagaaggcttcagcacagccctcacaatgaactggaagaagttcgggaactcagagtttgacccccccggacccaa

SEQ ID NO: 725917 - DNA, 100 bp, Homo sapiens
gagcgtcacggcgtacgccctcatggggaaaatctccccggtgactttcagggcggcaccttcctacttctgcccagccacagccctcccctcacagttg

SEQ ID NO: 725918 - DNA, 90 bp, Homo sapiens
tttggaacaggaacaggtctctttgggcagaccaatactggatttggtgctgttggttcggctcagatcaccatgaaagtaatccaaggc

SEQ ID NO: 725919 - DNA, 123 bp, Homo sapiens
caagcctctcagcttcggagaatggagtcttccatcaatcatatctcacaggggtcttgctcctcagaacaaaccagaattgcagaaggtgatggaaaaaagaaaacgagaccaagtaataaa

SEQ ID NO: 725920 - DNA, 90 bp, Homo sapiens
aaacgtgtggcgatgtcttagacaatcttaaaggagactgctatcagggttatgatcatagctactacttcattgcaacctttattactg

SEQ ID NO: 725921 - DNA, 71 bp, Homo sapiens
aaccctagcgcctattatagtgatggtgtgctgggtgcatcatgtaactggcatgtgggtgtaccctttcc

SEQ ID NO: 725922 - DNA, 98 bp, Homo sapiens
gaaactaatcctgatattaagccatcaaatgtggaacctatggaaaaggagatctataaggacaggcagaaattctcagaacaggttttcaaagtggc

SEQ ID NO: 725923 - DNA, 82 bp, Homo sapiens
gagaactctggtcccggctacagaaaactttagaaactgttcctttggagaggaaaaaggtactctgccagcaggtcacctc

SEQ ID NO: 725924 - DNA, 88 bp, Homo sapiens
tatggcagcctcactcccagtagtttctgcatttagtgagataagaaaggaatttatgatgaggcaataagcagcttctttagaaatg

SEQ ID NO: 725925 - DNA, 87 bp, Homo sapiens
aagacatatactgtgaacacactacagaccctcacaagtcagttactgaaaaggagcctgcattgattctaatgaagatggggactt

SEQ ID NO: 725926 - DNA, 75 bp, Homo sapiens
cttttcttctgtggggacacatagatttgtccaaaagaaaaggcgacggcggattgacagaagtatgattggaga

SEQ ID NO: 725927 - DNA, 89 bp, Homo sapiens
tcaagcatctcctactcagaaaaatagaataaaagagaatgtaacatcatgcttccgccacccacacagaatatgcctatgggtcctgg

SEQ ID NO: 725928 - DNA, 99 bp, Homo sapiens
gaggtgatgaactccaagctgggcctggacatcgagatcgccacctacaggcgcctgctggagggcgaggagcagagaatgctggaagccaagcttgca

SEQ ID NO: 725929 - DNA, 100 bp, Homo sapiens
gacctcctgatggagaagctagagcaggacttcgtctcccgggtgcgcgtggaattcatggacgacacgagccgatccatcatccgcaatgtaaaaggcc

SEQ ID NO: 725930 - DNA, 142 bp, Homo sapiens
ctcggggcctcggagcaaccacccgagcagacggagtacacggagcagcggccccggccccgccaacgctgccgccggcggccctgggagagcctcagctctgctatatcctggatgccatcctgtttctgtatggaattgt

SEQ ID NO: 725931 - DNA, 50 bp, Homo sapiens
catatgaaatcactatgaatggatgagagaagctgcaagaaaaatagaag

SEQ ID NO: 725932 - DNA, 59 bp, Homo sapiens
acgcagcggcgcaaggagatactggtggatgaggatcgcagtacggaacctgaccgatt

SEQ ID NO: 725933 - DNA, 100 bp, Homo sapiens
ctttgatgaatcaggtcccgaaagtgctaaaaagcctgaagcaggacattctaaatgaaaagactgaattggaagcaacacttaaggaagcggagttggt

SEQ ID NO: 725934 - DNA, 107 bp, Homo sapiens
cctcacccacccggggaacaagatcaacctcctcggcttcttgggccttgtccactgccttccctgcaaagaaattctgagcggagttattcggagtgtcaagaagg

SEQ ID NO: 725935 - DNA, 100 bp, Homo sapiens
gccgggcgggccgcgggagccgcacgcggcgatatggaagaggagggcaagaagggcaagaagaaaaatccagttacactcttaaaggaattgtcagtga

SEQ ID NO: 725936 - DNA, 75 bp, Homo sapiens
ggcgtgcgcggacggtgtgcgggttcatcctaagttccactataaacaggctcatgactcgggcacagacacttc

SEQ ID NO: 725937 - DNA, 83 bp, Homo sapiens
gcccgggcgggtcccggggtgcgagcagcgcacttccggctatgactttgcagccgtcctggagtggttcgcggagcgtgtgg

SEQ ID NO: 725938 - DNA, 100 bp, Homo sapiens
cctgctgggatttttgagctggtggaagtggttggaaatggcacctatggacaagtctataaggtgggccatgcacagacacagctcatgtctcattaat

SEQ ID NO: 725939 - DNA, 100 bp, Homo sapiens
acccccaaattggctgggacagatgatgttgaatttgaagtatcatcggaccgacggactgggaaacccattgctgttaaactggtgaagataaaacaag

SEQ ID NO: 725940 - DNA, 83 bp, Homo sapiens
gatccagatcgggatttacgtggagatcaagcgcagcgatgatctgcgagtgaagagggacgagggaaaagaaacaaagccac

SEQ ID NO: 725941 - DNA, 76 bp, Homo sapiens
gcaaggcccaatgacccaggcgttggttcgactatgcaatgagggcgcccggaagatggaaaggactgagatgatg

SEQ ID NO: 725942 - DNA, 95 bp, Homo sapiens
gggtgcccagagctccttgcaagaagtttaccacaaggttcctggtgcatcgatactctgtgctgcagcagcatgcagaggccaatggtgtggat

SEQ ID NO: 725943 - DNA, 100 bp, Homo sapiens
ccggactggagggagacaaagcagcgcccgtctgcttcgggcctctggaatttagcgctcgcccagctagccgcaggtataaatgaccaaggattgtaca

SEQ ID NO: 725944 - DNA, 97 bp, Homo sapiens
tttcggtgttgcccggcacaagggacatgaaccagaatctgtggatgttcttgctttcgtggtccacgccaaaggaggactttctggtttgtttgat

SEQ ID NO: 725945 - DNA, 75 bp, Homo sapiens
gccttcccagttatcataaccttgaatggcgactagatgtacaggtatgtcgagagtaccaacgtggcaattgca

SEQ ID NO: 725946 - DNA, 100 bp, Homo sapiens
aagccaagcttgtggagttcgatttcttgggagcactggacattcctgtggacatgttgagtgaaattaacattgctccccggattctcaccaatttcac

SEQ ID NO: 725947 - DNA, 80 bp, Homo sapiens
cgccatcaccgagcgcttgatgtgcgcggagagcaatcgccgggacagctgcaaggccgccatggcatcagatgaaggca

SEQ ID NO: 725948 - DNA, 73 bp, Homo sapiens
gtgggggcgtaaaggctggcagcctccccgggtgcctccgcggatcaccccttctgtgtcattctctgaggaa

SEQ ID NO: 725949 - DNA, 95 bp, Homo sapiens
gcacgagcggaggctgctgagaagctgcagcgagcccaggctgctgagaaactaggtgaaactgagaaacttagtataatgattgaagaatgtgg

SEQ ID NO: 725950 - DNA, 75 bp, Homo sapiens
ctcaaggaccccaacaacagcctcaccctctgggtcatcgaccaagggacttcagtactagtgctaataacatcc

SEQ ID NO: 725951 - DNA, 83 bp, Homo sapiens
gagtttccgatttaaagctgagctgcgaggaaaatggcggcgggagtcctgtgcctcctgattgctgagtgttcacctggacc

SEQ ID NO: 725952 - DNA, 78 bp, Homo sapiens
cgcgcacttcgtcatgttcttcgcgccctggtgcccgtggttgacacgagctgtgtccccagctgttcccgtctacaa

SEQ ID NO: 725953 - DNA, 100 bp, Homo sapiens
ttggacagatccttcttgttgacctatgtttggatgacttgtcatgcaatcaaaatgaagttgaagcatcagggggattcccgaagtcttccgttttctg

SEQ ID NO: 725954 - DNA, 98 bp, Homo sapiens
caggcttcaggtatcttatgaagagtatctctgtatgaaaaccttactgcttctctcttcagaccccaagactgcttctgagacagaaacagatatct

SEQ ID NO: 725955 - DNA, 74 bp, Homo sapiens
tggagagatcataatttggggttcaagattccagttcgatcctttggtacagaagacagaccgacagatcgtcc

SEQ ID NO: 725956 - DNA, 90 bp, Homo sapiens
agcgagctgagtggttgtgtggtcgcgtctcggaaaccggtagcgcttgcagcatgagccccccaagatgaacccagtggtggagccact

SEQ ID NO: 725957 - DNA, 144 bp, Homo sapiens
taaaagatgatgagaaataaggacaaaagccaagaggaggacagttcgctacacagcaatgcatcgagtttcaccagtgatcattaaagaatgggcagcttacaaaggaaagtctcctcaaaccccggaactggttgaagctct

SEQ ID NO: 725958 - DNA, 83 bp, Homo sapiens
cgagcactaatatttaagaaagaagatgttaactttcagttaagtgggcagaccaacatccacctcagcaaaaacttcttcct

SEQ ID NO: 725959 - DNA, 101 bp, Homo sapiens
cctaactgcaccagtagcttttctgagaatacttgctgaaaaggaagttttctggaatgggtggtactgtgaaggcaaggagcttgaaaattccccagata

SEQ ID NO: 725960 - DNA, 75 bp, Homo sapiens
ctaatgaggacattgtggagagaaacatccgaattatgcactgcctccttacctgtgaggaatgcaaaataaagc

SEQ ID NO: 725961 - DNA, 98 bp, Homo sapiens
gccaagaggaggacagttcgctacacagcaatgcatcgagagtcctgtgtatggaaactcacatgagtcagctcagtctagaagggtagtaatttctc

SEQ ID NO: 725962 - DNA, 75 bp, Homo sapiens
atgatgttgtaacagtgactggatctttaccttatatagtaaatctctgcccctcgacctggcctgtcgtatctg

SEQ ID NO: 725963 - DNA, 75 bp, Homo sapiens
gctgctgctgctgacgctgctgctgcccggcctcgggctggtggagctgtctaaggctcaagatatagaagcagg

SEQ ID NO: 725964 - DNA, 98 bp, Homo sapiens
agctattagagattgtgaagaagaatttcgatctccgccctggggtcattgtcagcaagctggctgcctctttccagagtatggaagtcaggaactct

SEQ ID NO: 725965 - DNA, 75 bp, Homo sapiens
acatgagatggtggatgaacccccagcagaaaggacccaggagcgataacagtaaatcaaataagatatttgtcg

SEQ ID NO: 725966 - DNA, 102 bp, Homo sapiens
aaacaacctgaaggtgtttccagatccctgggcctgccctttgcacccagtcagcttgaagagtttcaaatggaccctaccactgagaaatcaagatggcag

SEQ ID NO: 725967 - DNA, 83 bp, Homo sapiens
tggtgctgagccccgacgcccctgacagggccacgcacctgatcgccgcgcgagctgcttgatcctctcccagaaaaggtttt

SEQ ID NO: 725968 - DNA, 87 bp, Homo sapiens
gaagataccagtttgcgtcaggagacacaggtcacagatgtgacattgatgtgtccactgaagccatgtatgctgcaaccagacgag

SEQ ID NO: 725969 - DNA, 76 bp, Homo sapiens
ccaggcgaagctggccgagcaggctgagcgatacgacgctgggatagatgggcagcagaagatcatgtgcttcgtg

SEQ ID NO: 725970 - DNA, 100 bp, Homo sapiens
gatgaagtactggggcgtagcctcctttctccagaaaggaagctcaagtggtcctgtcgaagtatttatcactgagactccgagtcagcccaactcccac

SEQ ID NO: 725971 - DNA, 75 bp, Homo sapiens
catgttcctctctggcatggtggctcaaattgatgctaactggaacttcctggttctcactctgtcgcccaggct

SEQ ID NO: 725972 - DNA, 100 bp, Homo sapiens
accaggaggcgttggccaaggtgcctggaagcagcgagccctttatgacgcaaggacagatgcccaacagcagcatgcaggacatgtacaaccaaagtcc

SEQ ID NO: 725973 - DNA, 100 bp, Homo sapiens
cctcggcctcggcggcagcggctgcggagaaggcgagcgaagggagtggagcttggtttcgggatctcggtgctgcagacggcgagacctcctgcacagg

SEQ ID NO: 725974 - DNA, 100 bp, Homo sapiens
gggggaatggatgcccagctgaagatatggtcagctgaagatgctagctgcgtggtgaccttcaaaggtcacaaaggagatttggagcaagaggtggtgg

SEQ ID NO: 725975 - DNA, 90 bp, Homo sapiens
ggagcccggcggctactcggggccggacggacattctgagctgactgctgcccactttggaggaggcggtgggctccttcacaagaagac

SEQ ID NO: 725976 - DNA, 75 bp, Homo sapiens
ttgagctcagatatcgggctgaacggtcaaagacattcacaacatggatggtcttcctgaaggagacggagcggc

SEQ ID NO: 725977 - DNA, 90 bp, Homo sapiens
ctccgccgctgcctcaggagcggaacaacgtcggcgagcgggctacgagttccagggagctctgtcctggtgaccgtgcccgggttatga

SEQ ID NO: 725978 - DNA, 88 bp, Homo sapiens
ccctgcacgtggctgctgccaagggctacattgaggtgatgagtgccggtggtggtgtgcacattgagccccggtatagacagttccc

SEQ ID NO: 725979 - DNA, 73 bp, Homo sapiens
tgctctgcgcctcacggccagatcccagagctcctgaaattattcttgggttaccattttgtgaagctattga

SEQ ID NO: 725980 - DNA, 49 bp, Homo sapiens
tgagccaagtgaccttgggagaggctggagtgcggtggtgtgatctcgg

SEQ ID NO: 725981 - DNA, 85 bp, Homo sapiens
tgccctacttcaaggataagggcgacagcaacagctctgccggctggaagcacatggattaattgatgtatgttgagtttatgga

SEQ ID NO: 725982 - DNA, 89 bp, Homo sapiens
aaaacaattaggaatttcagcaaccatgttaaatgcttctagttctaaggtaatgagtatggtgtcaggatttacaccactaatttctg

SEQ ID NO: 725983 - DNA, 90 bp, Homo sapiens
cgctgggggaaatgacagcttggaccatgggcgcccgcggtctggacaagcgaggaagtttctttaagggcaccagaactagcacctctg

SEQ ID NO: 725984 - DNA, 100 bp, Homo sapiens
ccagaagatcaagactagtgtgagcaacaaacccctaagacttgcagccccaagcagtttgcctgcagagatcaaataacctgtatctcaaagggctggc

SEQ ID NO: 725985 - DNA, 90 bp, Homo sapiens
ctcccatccctgcagcatgaacaagcagccaacagagcagtcagcagagcagccacgatgatgattctagcaggttcctgagtcctcgag

SEQ ID NO: 725986 - DNA, 88 bp, Homo sapiens
atatgatgctgaattgttcaacatgcagccactattttcagctccatttatcttaaagaaattggacagcatatgaagacaggacatc

SEQ ID NO: 725987 - DNA, 75 bp, Homo sapiens
tatagtcaccccattaactgaattgattaatcagaggatcaaccattttccaggaatgggggagatctgtaggaa

SEQ ID NO: 725988 - DNA, 75 bp, Homo sapiens
atgaaaccaaatactgctattaagatcctcacagccaccgtggacaatgccaacatcctgctacagattgacaat

SEQ ID NO: 725989 - DNA, 120 bp, Homo sapiens
gaagtggctttttatcagttgcaacaggactgtgacctgagctgtcagatcaccattcccaaagattcacaatgacatcctttcaagaagtcccattgcagacttccaactttgcccatg

SEQ ID NO: 725990 - DNA, 75 bp, Homo sapiens
ccgacagaggatatgtgtctgactgaccaccagcacccagaggcctccattcaggctgttttttcagatgcccaa

SEQ ID NO: 725991 - DNA, 101 bp, Homo sapiens
gcaccatgccgctcctaagcctgcacagccgcggcggcagcagcagtgagagggactggtgattgcagctggaagtgcccatgaccgagctggcgtcctcc

SEQ ID NO: 725992 - DNA, 100 bp, Homo sapiens
gccccgggcggacgccgcagagcgccgaggaggctttcctgctggtggcaaccgcctacgagacactcaaggaattcattgaagagttgctgtctccccc

SEQ ID NO: 725993 - DNA, 100 bp, Homo sapiens
ggaagcagctggcttcactgctcagaagtacaatgctgattatgatctgtcagctcggcaaggggcagacaccctggccttcatgtctctcctggaggag

SEQ ID NO: 725994 - DNA, 75 bp, Homo sapiens
gcgaagccggggcggagcacgcgagctatgataacgaaggaggcccaacttcattcaataaggagcctgacggat

SEQ ID NO: 725995 - DNA, 100 bp, Homo sapiens
tgctgctttcaatgacctctggagacttgacctaaacagcaaagagtggatccgacctttggcttcagttcccatggagaatgttgcaacaattgctgat

SEQ ID NO: 725996 - DNA, 90 bp, Homo sapiens
gcggcttcctagtgagtcggcggctgatttagaaggaggttcaggctacggtgagccgaagttggtgtacatgggttttgatgcactcgt

SEQ ID NO: 725997 - DNA, 75 bp, Homo sapiens
cttctccggaaggaacagattttagctgtggccaggtgttgacagctcttctaccacaagcagtgcttctccaat

SEQ ID NO: 725998 - DNA, 83 bp, Homo sapiens
cctcgtcgacatgagtgatgtggaggaaaacaacttcgagggcagacaattctgtggtgttcttggtcacacatttatggagt

SEQ ID NO: 725999 - DNA, 82 bp, Homo sapiens
ggagaacgaccggctcctgctcaagatctcagagaaggaggaggtgaccacgcgcgaggctgatcagctgaccgaagaacag

SEQ ID NO: 726000 - DNA, 96 bp, Homo sapiens
cagttcccagaaggactcttctatgaggaactgggaagtaacagccctccacagagaaactggaagggaattgctattgctctgctggtgatttta

SEQ ID NO: 726001 - DNA, 98 bp, Homo sapiens
ccttactcacttctgtgggagatgctatagaggccataatcatcaccatgcatcaagaagacttttctggtgccggtggtggtgtgcacattgagccc

SEQ ID NO: 726002 - DNA, 98 bp, Homo sapiens
cggctggcgcggcggaatccagggccgacccgggccggaccgaccccaggcggcgagacccccctgaccttagccgctcagctggacgactctgtgga

SEQ ID NO: 726003 - DNA, 75 bp, Homo sapiens
cagaacttcagtgcagaggagttctctgacatctctgatcaccaaggtgatgctgctcaagggctggcgttgtgt

SEQ ID NO: 726004 - DNA, 90 bp, Homo sapiens
accagagattcatctttcatgcagtgacatgttgataaaaaatgatggtgctcagaattttgatgtcatacgactatcaacttacagaac

SEQ ID NO: 726005 - DNA, 75 bp, Homo sapiens
gcgcaaactttactctggggcgcagaccgacgtctgcgctcctcagaccaccggcaggtgaacagcctgatgcag

SEQ ID NO: 726006 - DNA, 75 bp, Homo sapiens
tgaggacactgaaattcagagaggggaagtgatttgcctcagcttgtactgaagctgaatatggtgggcatgatc

SEQ ID NO: 726007 - DNA, 127 bp, Homo sapiens
aaatctgagtttaaagcctgccaactcccctcatgtaaatatctctgcaaccttgtctccacaaggtctgcaaagaaagcagagttggaagaaaatcagcggagctataaacagaaaaagaaaaggc

SEQ ID NO: 726008 - DNA, 90 bp, Homo sapiens
gggctacaccgagtacaaagtaaccgcgcagggcagagcggcttgggtaaatccaccttaatcaacaccctcttcaaatccaaaatcagc

SEQ ID NO: 726009 - DNA, 90 bp, Homo sapiens
ttattcgagtgaccgagaccgcggccgggaccgaggggaaatcctcattgacgattcaatttgttgaaggccaatttgtggactcctacg

SEQ ID NO: 726010 - DNA, 106 bp, Homo sapiens
gaaaaagcatccccgaggaggaagacgaatcgttaaacatctgaaagggtcaggtgacttaagagattaaaattaatttggttgctgttggttctgaacaaataat

SEQ ID NO: 726011 - DNA, 98 bp, Homo sapiens
gaggggactgaagatactcccacaggggctcagcaggctgcagaagatgtcaatgttactttcgaagatcaacaaaagataaacaaatttgcacggaa

SEQ ID NO: 726012 - DNA, 98 bp, Homo sapiens
ctggtagatgggctggcttactgaaggacatgattcagactgtcccggacccagcagctcatatcaagtcgtgcagaacagatccctccttgcctgac

SEQ ID NO: 726013 - DNA, 60 bp, Homo sapiens
acctgacttgtttgcagaaaagctggaagtcgagtgtgctactcaactcaggagatttgg

SEQ ID NO: 726014 - DNA, 87 bp, Homo sapiens
tcaatgaattcaaaagcactgagatggaagttcatgaattgagtagacacttaacaagagcagcccgacggccatggaggctgaaga

SEQ ID NO: 726015 - DNA, 96 bp, Homo sapiens
gtcctctacaccatctgtggtcatgtcaacagtagcacaagatgaagaactggtggatgtttctgcatctgtcttaccagaattgaaaagagaaac

SEQ ID NO: 726016 - DNA, 88 bp, Homo sapiens
aggccgctttggcgccaaatcctgaggatgacgcggcatggcaagaactgcaccgcaggggccgtctacacctaccacgagaagaaga

SEQ ID NO: 726017 - DNA, 101 bp, Homo sapiens
cctttccagcatgcaggggctgctcagaatgatatggaacctagcaaagctgttccactgaatgcatctaagcaagatggacctatgccaaaaccacacag

SEQ ID NO: 726018 - DNA, 75 bp, Homo sapiens
ggaattttgaagtacaccgtggtgacattgtatcattggtgtcatactccctgtcacaaactccagctgaactaa

SEQ ID NO: 726019 - DNA, 75 bp, Homo sapiens
agcgagcgcggcgcggggccaccatgggggcccagctcagcacgtggttggcacttaccatggttccccagacca

SEQ ID NO: 726020 - DNA, 121 bp, Homo sapiens
gaagacgcggggaagaggaggcggaaaaggacgcaaagttctccggcgagatcaatgtccgagttaccaccatggatgcagagctggagtttgcaatccagccaaatacaactggaaaaca

SEQ ID NO: 726021 - DNA, 100 bp, Homo sapiens
tgctagacctgggatccagcccttctggtgtcacctcccagggtgactcaactccaggctttggtgaagcacgtgcagtctaaaggatacccaaatgaac

SEQ ID NO: 726022 - DNA, 98 bp, Homo sapiens
gcggacccactgggttgccaagctcgcgccggatgcggagcgcggtgctgccggtggagcttcagggcaggaagatcccaacagtttgcgccataaat

SEQ ID NO: 726023 - DNA, 82 bp, Homo sapiens
gggcaccatgagcgacgtggctattgtgaaggagggttggctgcacaaacgaggatgccggctccaggagcagcagtggagg

SEQ ID NO: 726024 - DNA, 82 bp, Homo sapiens
gagttgctggcacaccctgtggagaatgacatccttaactccaggctgcaggtactctgtacgtgtgtcacctcagatggcg

SEQ ID NO: 726025 - DNA, 75 bp, Homo sapiens
gggcattaagacagttgccatccacagtgatgttgatgctagttctgatctccccaataatatgatttaccaagt

SEQ ID NO: 726026 - DNA, 100 bp, Homo sapiens
tcgtctccgtgggtgtggcggagcgcgcggtgcatgaggctaagaatattgtacacaaagattcttgatgttcttgaggaaatccctaaaaatgcagcat

SEQ ID NO: 726027 - DNA, 83 bp, Homo sapiens
atgacgctggcagatttctgtgaccaacagctgcgcaaggaggaagagaatgcatcagatgtattcgtgtcaataaatttcag

SEQ ID NO: 726028 - DNA, 82 bp, Homo sapiens
tgtttgtggatcgctgtgatcgtcacttgtgcaccgtccaggtgaggttagagctggggcatcgcgcccaactgcgcaagaa

SEQ ID NO: 726029 - DNA, 74 bp, Homo sapiens
acgactcggtggaaacagtcacgtccatagaacagactatagggtatgaccccatcatttccccagaggtctcg

SEQ ID NO: 726030 - DNA, 89 bp, Homo sapiens
ccgtcccgaccctggccgccccgagcggagcctggaggtgtcgtgaaaactacccctaaaagccaaaatgggaaaggaaaagactcata

SEQ ID NO: 726031 - DNA, 90 bp, Homo sapiens
gcttaagaggctctgctgagcagggacctggggaagagagttgcatgctgagaatttgaaaaatgaagatgatgtagacactggactatt

SEQ ID NO: 726032 - DNA, 75 bp, Homo sapiens
cctcacggtcctcctggctgtgctcatatacacctgacctaatctgggagcctgcaagtgacaacagcctttgcg

SEQ ID NO: 726033 - DNA, 87 bp, Homo sapiens
gtggaagaatacaggaacagaaatttttatgaactgagccctcacatagaatgtccaagcacacagatgcagcagaagaggtgctat

SEQ ID NO: 726034 - DNA, 50 bp, Homo sapiens
tccaaggcatcaacctcgtccaggttttaaaatcaaagatgggaaaatcg

SEQ ID NO: 726035 - DNA, 74 bp, Homo sapiens
tgtggatgatgccaaagttttattaggtgagatcggactggaactgttcggctgcgaccagaaatttattttcc

SEQ ID NO: 726036 - DNA, 73 bp, Homo sapiens
ggctgctggacgacagcgagtacacctgcaccatccagattgatgaactcccagagggcgctgtgaagcctcc

SEQ ID NO: 726037 - DNA, 75 bp, Homo sapiens
tcagccctggacctggcagatccttcagcaaaagctgtccttacagataggaatgatgtcacaggtggaagaaga

SEQ ID NO: 726038 - DNA, 100 bp, Homo sapiens
ctaggccttttagaaaacatggatggcttctggaaacttacaccagaactgggacttatattaaatcttaatacaaatggtttgcacagctttcttaaac

SEQ ID NO: 726039 - DNA, 83 bp, Homo sapiens
catcgaccagaccatgctctccatcctgctcttcttccacagaaaccaaggtgtatgttggtaacctgggaactggcgctggc

SEQ ID NO: 726040 - DNA, 90 bp, Homo sapiens
atctggagaggaagattgagtcgctggaggaggagatccggttcttgaggaagatccacgaggagaatcgcttgaacccaggaggcagag

SEQ ID NO: 726041 - DNA, 90 bp, Homo sapiens
gttttaagaaagtggacaaagagaggagtcagctcttcagtgggtcatctgtgtgtcacagcctcagaagaccagcgagatggctgccaa

SEQ ID NO: 726042 - DNA, 100 bp, Homo sapiens
gtttcgagtggctgctgtgaatgtgcatggaactcgaggcttcactgcccccagcaaacacttccgttcttccaaagacagagaaacggaggcacagaga

SEQ ID NO: 726043 - DNA, 50 bp, Homo sapiens
tgacctctctgatgagatggatcggtggaggaagccttgactatcaaaaa

SEQ ID NO: 726044 - DNA, 50 bp, Homo sapiens
aaaggcatcagaggccgaaggccaatggagatcttcgtggatgatgagac

SEQ ID NO: 726045 - DNA, 83 bp, Homo sapiens
acacggacaaggatagttttggctgatgtaaagaagcttccggttctgaggtcctggaggtgccatttccctctctgttgaag

SEQ ID NO: 726046 - DNA, 74 bp, Homo sapiens
aaagaagcagttgacctcactcaatatattctgcagaaaaagcttgtggtgaaggggggcaaaaaaaagaagca

SEQ ID NO: 726047 - DNA, 51 bp, Homo sapiens
gtcttgggtcctccgagagcagcagcggtgccaagtcctgccctgccaact

SEQ ID NO: 726048 - DNA, 90 bp, Homo sapiens
gagttatgccaaaaggacgtcctcctagtgctagcagcttagatgccatttctcctgttcagcaaatgaagaaacacccctgccgccagt

SEQ ID NO: 726049 - DNA, 106 bp, Homo sapiens
ccaaatatgatacgttattaaaagctgtaaaagatgctactaacactggaataaaggttgttccattcagctagtggaagtacctcaaagcagcaatacgagtctg

SEQ ID NO: 726050 - DNA, 75 bp, Homo sapiens
gtttaatgaaaatagatgaaccaagcactccttaccatagatgctgcaatgtacaacaactctgaagccctgccc

SEQ ID NO: 726051 - DNA, 100 bp, Homo sapiens
ggatgctgtgatgcatcatctgctctgcggaggcctctacaagccgcgccgtagggcgttcgtggcattcagggatgtggctgtgtacttcacccaggag

SEQ ID NO: 726052 - DNA, 101 bp, Homo sapiens
agcatatatcctaaaggagatggaagtgatgtaccatcatgggtagcctttgataaacaggtgcacatcctcatgggctcctgttacaagaccaaaaaatt

SEQ ID NO: 726053 - DNA, 98 bp, Homo sapiens
tggcacttcattggccacctacagaaacaaaatgtcaacaaattgatgggtacctgcacatgttgttctttgtcagtgctgtcaagtgtgtgccaggg

SEQ ID NO: 726054 - DNA, 98 bp, Homo sapiens
tcgatgccgctgaatgggctgaaggaggaggacaaagagcccctcatcgagctcttcgtcaaggctggcaaaaccagacagccaggcagaccccacca

SEQ ID NO: 726055 - DNA, 90 bp, Homo sapiens
ctcatagaagatgctggagattacagagacactcaagatcatccaagcctagaaaacatggaacagatagagaaatttcaggaaaaggct

SEQ ID NO: 726056 - DNA, 115 bp, Homo sapiens
gccgccggcggagcagtctgagcccgacgatgaggccggggacgggagctgagcgtggaggcctcatgacagcacccaagaaaacctcatttggctcgctgaaggatgaagaccg

SEQ ID NO: 726057 - DNA, 74 bp, Homo sapiens
tgatactaacctcttattcagaatgtcccaacaggcctcccagtagcattggatgcaggaaaaaatacattgac

SEQ ID NO: 726058 - DNA, 82 bp, Homo sapiens
ccatctgggcttggcttccggctccccccatctggctggaacacacatcagtcacgctttcgggtcacctccagcagctccc

SEQ ID NO: 726059 - DNA, 100 bp, Homo sapiens
cctgagcccggcgagcaggagaggaggtcttccgggccgcggcctccgagcgcgcgggatttgcagtccacaagaatcggaatgtcagttaatgctattc

SEQ ID NO: 726060 - DNA, 100 bp, Homo sapiens
aacacagtggattttggccatgtaactgaggaatggcgtgacctgcaaagtgctgagaaggaagagaaaccactcaagaaggttattattgaagaaactg

SEQ ID NO: 726061 - DNA, 122 bp, Homo sapiens
gccaaggccatctccaagaacgtgctcttcgctcacctggatgacaacgagaggaggctgcactccccgaaagtgcggcagaggtgtcaccgatgtcgtcatcaccagggaggaagcggagc

SEQ ID NO: 726062 - DNA, 97 bp, Homo sapiens
tacggtcaagtaatcagttgccacgttcaaacaagcagctttttgaattactttgttatgcagaaagttttgtgaatagcacaatggaagaagctgg

SEQ ID NO: 726063 - DNA, 99 bp, Homo sapiens
gggaacccaggccccgccgaggcggccaggagggcgtgtgaagacctggaagcgccggtggttcatcctgaccgataactgcctctattactttgaata

SEQ ID NO: 726064 - DNA, 134 bp, Homo sapiens
ctgggaatgtgctttagtggcttgggaatccctgtgacacacagccctctcttccatcagaacagcgactgggaaactgccactagaaaaagatgactgtccaactaaaacctgcatacacagctacatccttc

SEQ ID NO: 726065 - DNA, 109 bp, Homo sapiens
tttgcttgcaattggcactaagctaccagagaatcaagctatccaaatgcgattagttgatgtggcctgcaagtggggtgctgacctacggactgaacatgaaaagtac

SEQ ID NO: 726066 - DNA, 100 bp, Homo sapiens
cctccagattccatacctgcaagacacatgaacatctgtcttatctgatacagaaggcaataataaaacagtgctaaaatataaatgccatacaatgaag

SEQ ID NO: 726067 - DNA, 51 bp, Homo sapiens
atgggaagaaatatgcatggcaaggtttgaaggttgaagtgactcattgtg

SEQ ID NO: 726068 - DNA, 155 bp, Homo sapiens
ccagatgaggtgatggcaacggccaacttcggcaagatccagatcgggatttacgtggagatcaagcgcagcgatgttccagggtctccctccactgctgtagtaacccgggtccggggcctcggtggtgctcctgatgcccctcacccacccct

SEQ ID NO: 726069 - DNA, 88 bp, Homo sapiens
agctctacgcctcctacgtttacctgtccatggccctgggctgcatcttgtacctgctgtgcttccggcagcacccttttgaggatgg

SEQ ID NO: 726070 - DNA, 80 bp, Homo sapiens
taacgacctctcacagaaactatatgccaccatggagaagcataaagaggcccgccaagctgccccctgtgtgctattct

SEQ ID NO: 726071 - DNA, 83 bp, Homo sapiens
ggaagccttcagcgacggagtctacgccatcgtggccacgcttctcatcctggacatctgatgtggacgagtgcagctccggg

SEQ ID NO: 726072 - DNA, 76 bp, Homo sapiens
ggaagaaaagaaggcgtttgctgaagcaaggagaaatatggaaacacaaagatggtgcagacccaggccctgcttt

SEQ ID NO: 726073 - DNA, 74 bp, Homo sapiens
cccaaatgccccaaggatgaagaacggagacggtatacaaaactaggatatgctggaaatacagaaccacagtt

SEQ ID NO: 726074 - DNA, 83 bp, Homo sapiens
cggcccgcttcctggaatggcaagcgcagcaacaacagagagcacgtggtccctggtgctgaaccgcctgcgtccagttgcca

SEQ ID NO: 726075 - DNA, 88 bp, Homo sapiens
tagcgcagctcgagaaggccaaggtccaccgggcatacttagtatctttggacaaataggaattcaatgaaaacgtattcttaaaggc

SEQ ID NO: 726076 - DNA, 100 bp, Homo sapiens
aagggccatcgtggtggatcctgttcatgggggaacgcccttttgcttgtgactggcagggctgcgacaagaagttcgcccgctccgacgagctggcccg

SEQ ID NO: 726077 - DNA, 100 bp, Homo sapiens
tcctccaagagcacattgcctggtaagatggtgactgtaatcaatgagagactgaagacagatcaacatacatcttacccatgctctttcaaagactgtg

SEQ ID NO: 726078 - DNA, 104 bp, Homo sapiens
gtgtctcccctcagtcctgctctgaagatcctgccctgccctggtgactactgtgaagactggccagaggcacagaggatctcagcctcgctcctggacagccg

SEQ ID NO: 726079 - DNA, 75 bp, Homo sapiens
gaatcccctgtttgagaaaaggcctaagaattttggcattggttcagaggtccaaagaggtgacattttatggat

SEQ ID NO: 726080 - DNA, 107 bp, Homo sapiens
caccatgccgctcctaagcctgcacagccgcggcggcagcagcagtgagaggtgcatctgcagacgcagcaggaggtgaagctgcgcatgacgggcatggcgctgcg

SEQ ID NO: 726081 - DNA, 97 bp, Homo sapiens
gagctgcagcccgagcgcggtggtgccctcagccccgtcctcttgtcctcctcagcctcgcatgtcagtgaaaaaaccagtgaatcgccttccaaac

SEQ ID NO: 726082 - DNA, 75 bp, Homo sapiens
tgaagagggaagacacgcggaaacagtccttgctgagaagcagattgagccagttgtgtgttgtcatggagactg

SEQ ID NO: 726083 - DNA, 83 bp, Homo sapiens
ttgcttgcttgagcttcagcggaattcgaaatggcacaaatcctgaagagcccgtgggcgtggactgctcatctgtaaagaaa

SEQ ID NO: 726084 - DNA, 75 bp, Homo sapiens
tggcgggagcgcggttcggggccgcagagattacaccaccaccttcactgtcagatccacttaaagagctttttc

SEQ ID NO: 726085 - DNA, 100 bp, Homo sapiens
caaaagtcatggcaacttctggatgtgcagcaatcagatttatcattcggatttgggaaggtctgaccttgaggtttcatcgggtgattgcccttgattt

SEQ ID NO: 726086 - DNA, 83 bp, Homo sapiens
cgcggacctagacctggaatcgcccaagtccctctactcgcgaggcttgcttccggcgtcatggctcaaagggccttcccgaa

SEQ ID NO: 726087 - DNA, 98 bp, Homo sapiens
ggcagttattggcaggctgccatgacaaccaggcaatgctggatagataccgaattcttatcacaaaggtgactctgacatcattagaagcatgccag

SEQ ID NO: 726088 - DNA, 82 bp, Homo sapiens
gggacagcggccccctggagggggcagtcccgggagaacctgcggcggccggagcgacccaacatgagtgaagtttcctgca

SEQ ID NO: 726089 - DNA, 80 bp, Homo sapiens
aacgccccggtggagaagctgagtgcagagcagagcgggcggaggaccccgggcgcgggcgcggacggcacgcggggcat

SEQ ID NO: 726090 - DNA, 100 bp, Homo sapiens
tgatgatgtcaggagggcagcagtagaatcacttgggttcattctattcagaatcgtccgcactaaagtcccctgcagcgtgaccatgtcgagaccccgg

SEQ ID NO: 726091 - DNA, 101 bp, Homo sapiens
gagaccttcgagcaccccaacgtggtcagacacctagctgttgggcagaagagggtgcagaaaagaggtcacatcagcgttctgcgtcatgggggagtgct

SEQ ID NO: 726092 - DNA, 100 bp, Homo sapiens
tgccatgcgtatctttaagaaattttatcttttgaaacacgttctgattaaccaagggacagagcgggatgccaccagcttgtccaaagggaagttccag

SEQ ID NO: 726093 - DNA, 88 bp, Homo sapiens
atcagcggctctttgtatgatgacgtgatggtaatgcccgaaggagcagacacggtgtccaggcccagtcccgactaccccatgttac

SEQ ID NO: 726094 - DNA, 85 bp, Homo sapiens
ccacacggctctcaaacgccacctgcgctcacatacagacttaattcagtgcacaaatgagatgaatgtgaacatcccacagttg

SEQ ID NO: 726095 - DNA, 87 bp, Homo sapiens
tgcagagcgcgcagtacctccgtttcttcagatggaggtactgagccctctgccttagtggatgacaacggtagtgaggaggacttc

SEQ ID NO: 726096 - DNA, 75 bp, Homo sapiens
cggtgccagcacctttcggcttctgagacggcggcagcagcggcattcagggcccaggagcttttttcctgttgg

SEQ ID NO: 726097 - DNA, 50 bp, Homo sapiens
ctgcagctagtaatttgccttctggattgggcactatgaacgaagaggag

SEQ ID NO: 726098 - DNA, 51 bp, Homo sapiens
atgccgcaccctacggcatcgaaaggagtcagagtcagaagcaaaggtaga

SEQ ID NO: 726099 - DNA, 82 bp, Homo sapiens
gactacttataggggccctgagaccaacccccggccaggcagtgccacgttccactaccggacgctgcacagtgacgacgag

SEQ ID NO: 726100 - DNA, 75 bp, Homo sapiens
cgcagctgggaaagctgctcaaggagcagaagtacgaccggcagctgaggtgattgtgtccaggggggggcgctt

SEQ ID NO: 726101 - DNA, 75 bp, Homo sapiens
catttctccgtcgattaaagagccatctgtggtgccaattgaagcaaattgtggctactaatttgccccctgaag

SEQ ID NO: 726102 - DNA, 97 bp, Homo sapiens
ttccctcaaagtaagaccagtagcactaattccaagtacaggtttgcagattccgccagcagcacagcaagctctacagatgagtggctctttggca

SEQ ID NO: 726103 - DNA, 101 bp, Homo sapiens
ccgatgatggcggacggcgccgcagctggcgctggcggcagcccatccttgagagagctgcgggcacggatgggtcctaggcctacttacaagcctccagt

SEQ ID NO: 726104 - DNA, 82 bp, Homo sapiens
ttttagacaagggagtatatgagccaacatgccatctcccagcagtatcaaaggtactgccagctttccgagagagccccag

SEQ ID NO: 726105 - DNA, 51 bp, Homo sapiens
ctccatctgcacagatgagacgcttggtgctaacagtggtttgcacatcat

SEQ ID NO: 726106 - DNA, 96 bp, Homo sapiens
aaagtggctgacatggccaccaacacacgtgggttctccaaaaaatgtggaatcctttgcatctatgctgagacattctcctcttacacagatggg

SEQ ID NO: 726107 - DNA, 100 bp, Homo sapiens
tccctgctacttaccacctgccgccggttgccggaggccatcgaggaagtgaagaaaactgctgtatgaggatgtgtttgctgtgtgggaggtgatctgg

SEQ ID NO: 726108 - DNA, 80 bp, Homo sapiens
gaatcacaaatgttcttaatggcatctagaatggtggataatattaatgcagctgtgatggatttgaaaaaaaagaagat

SEQ ID NO: 726109 - DNA, 98 bp, Homo sapiens
ggcgccggcctcgcctcctcgcagcagcgccatggagctcaaggacctgggcgtcaccgtgttcattgtcagcaccggccgaggcaacttcctggagc

SEQ ID NO: 726110 - DNA, 98 bp, Homo sapiens
gcgtggcaagaaaaatgggaagttctcggcgaggattaaatccaccacacagggtgaaatctatctccatgacaacattcacacaacaggaaattgaa

SEQ ID NO: 726111 - DNA, 105 bp, Homo sapiens
ctgctggctcgagaacgaagtaggccgtctcgctctgggtctccaggcccgcgaccgtccgccagtcgtcccgaggtcaaaatgcagatcttcgtgaaaaccctt

SEQ ID NO: 726112 - DNA, 151 bp, Homo sapiens
gttgagtcaagatgaactgcgcaaaaagctataccagacgtttaaggatcggggtatactggatacactcaaggaaaattctgtttgaagatttccggtcctggctttctgatatttctaaaattgacctggaatcaaccattgacatgtc

SEQ ID NO: 726113 - DNA, 100 bp, Homo sapiens
cttctttatgatccccacctgggttctggtggacctctcggctttcctggtcagcagcgacttggtacttgatgaagaagcagaagtttttatagtcaaa

SEQ ID NO: 726114 - DNA, 82 bp, Homo sapiens
aatcgtatcgtatgtccgctatccagaacctccactctttcgtgcagagcagagcgggcggaggaccccgggcgcgggcgcg

SEQ ID NO: 726115 - DNA, 96 bp, Homo sapiens
ctggacggcattcagtgttttgcctatccctcggccagatcctgtgcataataatgaagaaacacatgatcaagtgctgaaaaccagattggaaga

SEQ ID NO: 726116 - DNA, 100 bp, Homo sapiens
agaaacggtccagaactggattgaattacttagtggattcatactcatatgtaaggtccacagctcctgctgtagcttatgatagtaagcaatactacca

SEQ ID NO: 726117 - DNA, 100 bp, Homo sapiens
ccggcgcttgcgcggcggcggctatggcggcggaggaggaggaggtggactctgccgacaccggagagaggaactgagtatctaccaagatcaggaacaa

SEQ ID NO: 726118 - DNA, 75 bp, Homo sapiens
tgaacttgaagagacatatggacaatgaatctgcaaagaaaaccagtctatccaagaccaggcacctatgttgga

SEQ ID NO: 726119 - DNA, 83 bp, Homo sapiens
gtggcttcctttggtgccagctctttgtctagctctctatcaatatcagctcacatcattgaaaagataattttgaagacatg

SEQ ID NO: 726120 - DNA, 83 bp, Homo sapiens
cggacggtacttctgccactgctgctccgtggagatcgtcccgcgcctgccggtcttgaggaccggcccagctcaggctcctg

SEQ ID NO: 726121 - DNA, 100 bp, Homo sapiens
ccggctcgctgcaaaacgggcggcccgcgcggaggctcgcgagatccgcatgaaggagctggagcggcagcagaaggagagcacaatcattgtggagaag

SEQ ID NO: 726122 - DNA, 97 bp, Homo sapiens
tcagctccctgtccaacgcctccgagagggaccagcaccacctgggtgcattcatccctggagcgcccgtccagcctgtggttttacgatatccaaa

SEQ ID NO: 726123 - DNA, 50 bp, Homo sapiens
tgataacaccctgtaacagctgaacaaagatcattccactcagcctggga

SEQ ID NO: 726124 - DNA, 97 bp, Homo sapiens
taaggagtcctgcttatcacaatgaaagtggtggagagagagctggatgctcttttggaacagcaaaacaccattgaaagtaagatggtcactctcc

SEQ ID NO: 726125 - DNA, 88 bp, Homo sapiens
agaatttattcagcaattcaacaaccaggccttctcagtgggacaacagaaaaatatggtgttatccctaagaaatgcttccctgaat

SEQ ID NO: 726126 - DNA, 90 bp, Homo sapiens
cccgctacgagctggctttaatcctgaaagccatgcagcgggacagcctcgggggtaacagcaagaccgccatggtggctactgtgagtc

SEQ ID NO: 726127 - DNA, 100 bp, Homo sapiens
gggaatttcccaccaggatgagtatgattggctgtgattttaggtcgacaaagatgctgaattagtggcccaatggaactattgtactctaagtcaggaa

SEQ ID NO: 726128 - DNA, 101 bp, Homo sapiens
aacatccaggccgtgcttctgcctaagaagaccgagagtcaccacaaggccaagggcaagtgatttgacaggtttttcgttggaatatacgttgcacattt

SEQ ID NO: 726129 - DNA, 100 bp, Homo sapiens
ccccagcgcccggggctccggggacggcgagatgggcaagcccaggaacgtggcgctcatcaccggtatcacaggccagataccatgtttgtgtggaagt

SEQ ID NO: 726130 - DNA, 51 bp, Homo sapiens
atgtgttactccattgctgaggagtgaatatcctccgaatcctaaatctag

SEQ ID NO: 726131 - DNA, 100 bp, Homo sapiens
caatatgttatctccagatgccgcgcaactgtctgatctcagttcatgggtgaggacgcttgagcggaagttagaagcaaaaatgatcaaggaggaaagc

SEQ ID NO: 726132 - DNA, 100 bp, Homo sapiens
gctggtcagtgtggcaaccagatcggtgccaaggacagacgttgaaagataccacgtccagttcttcagcagactcaactatcatggacattcaggtccc

SEQ ID NO: 726133 - DNA, 80 bp, Homo sapiens
cccctccctcatacaactggacacggcggggagacaaccccttccccaagaatgctgatgggactatatgctacgactcc

SEQ ID NO: 726134 - DNA, 95 bp, Homo sapiens
ataacaccaccagtggtcttaaggttgaagtgtggttcagggccagtgcatattagtggacagcacttagtagcgttctaagaagggaggagagt

SEQ ID NO: 726135 - DNA, 98 bp, Homo sapiens
ctaccgcatccctccgcgggctaccaaccgtggctacagtgttctaagaacggaagcatctgggctggatggaatttagcatcaagcagagtcccctt

SEQ ID NO: 726136 - DNA, 117 bp, Homo sapiens
cgacaagccgctggcagccgcggatctcaccgccgctcagggttaaacccatccagagtaatggctgcggccttacccaggaccctgggggagttgcagctgtatagaatattacaa

SEQ ID NO: 726137 - DNA, 78 bp, Homo sapiens
tccattgattatgatagcagtgggcttttcacagtgggctttactgtgttgaggacagttcgtgtttggttaaagaga

SEQ ID NO: 726138 - DNA, 50 bp, Homo sapiens
cacagacatgactgagtcctccatgaagaaataccctctaccatctgctt

SEQ ID NO: 726139 - DNA, 75 bp, Homo sapiens
gcttgaacacaaggagatcgacggccgtcttaaggagtgtattgatgaagatgaccctactgctgatgataccag

SEQ ID NO: 726140 - DNA, 76 bp, Homo sapiens
taacgacccatacatgtcaaatggatctctttctccacccatcccgagaacaatcttggcatatacagaagggctg

SEQ ID NO: 726141 - DNA, 83 bp, Homo sapiens
cctctacaaggccaagttcatctcctccgtcaccagccacatctaccaggacagagcgggatgccaccagcttgtccaaaggg

SEQ ID NO: 726142 - DNA, 97 bp, Homo sapiens
gcaccacattggcgtggccgtcaaggagctggacctctacctggcctacttcgtgcgtgagcgagatgaagactggcccatttgcagagcactccaa

SEQ ID NO: 726143 - DNA, 101 bp, Homo sapiens
cttggtcgccgcgtccttggctggcgtgttagagcagccagcgggtacagaatggattttggaagagggagtcaccactggacctccaaggaagccacgtg

SEQ ID NO: 726144 - DNA, 75 bp, Homo sapiens
cgtctgcacttaccttggaagccaatatatcttcacagaaatggcctcggatcagttcttaagagcagccccggt

SEQ ID NO: 726145 - DNA, 75 bp, Homo sapiens
caaagaaatcaagaaaactgcgaataaaattcgagccaagttaaaggcaaggacacccaggcccattattttcct

SEQ ID NO: 726146 - DNA, 75 bp, Homo sapiens
cagagacgcaagagaaaaatccactgccttccaaagaaaaactgcatgaacttgcccccagacaaggtccagctg

SEQ ID NO: 726147 - DNA, 75 bp, Homo sapiens
aacgaatctctcaggctgcatcaggatgaatgatgacccaagtatggaatacgtagagaaatcgacactcttaat

SEQ ID NO: 726148 - DNA, 104 bp, Homo sapiens
aacgagatcttgggcaccgagagggactacgtgggcaccttgcgcttcttgcagtcgaaactggcgatggaatatgagaggagccctctggaaagaaaaggaca

SEQ ID NO: 726149 - DNA, 98 bp, Homo sapiens
aagaagatttctttcttcatgaccctgcccttgccagaatttcctgcgctgttccacctcattcaacttcagaaagaagatgctgatatgctacaaca

SEQ ID NO: 726150 - DNA, 100 bp, Homo sapiens
ggaaaagcgcactgacaatccagctaatccagaaccactttgtagatgaatatgatcccaccatagagacaagttttggtattgtcggctttcgccaaat

SEQ ID NO: 726151 - DNA, 75 bp, Homo sapiens
tacagagagccctgctacgcgtcgggtccaggtggcagaacatcctaggacctcagcagccatgtcgaagcccca

SEQ ID NO: 726152 - DNA, 90 bp, Homo sapiens
tgccctgcagtacctgcagaaggtctctggagacatcttcagcagctttcttcacagaagtcagtgccgtgggtacccattttaaaatcc

SEQ ID NO: 726153 - DNA, 75 bp, Homo sapiens
gagatgtctatgaagtctgcgtgctttagaatggatgaacaagagttaaccggagttcatgatcaagtgttgccc

SEQ ID NO: 726154 - DNA, 50 bp, Homo sapiens
agcccccgaggctgggcgcacagttggtgttggtattaggagatctgcac

SEQ ID NO: 726155 - DNA, 98 bp, Homo sapiens
aattcgaagcaataacatcaacacactgttcaaaatcatgcgagtggggacagcttcttcctaggcattatggctcctccacctggtatgagaccacc

SEQ ID NO: 726156 - DNA, 50 bp, Homo sapiens
ggacatcctggaagctgggaaatgatgtatcggcaagcagtgtaaacgga

SEQ ID NO: 726157 - DNA, 100 bp, Homo sapiens
ctcgccaagggttatgtctggaatggaggaagcaacccacaggtgcaaacagctgcacagcaagtggcagaggataaatttgtttttgacttacctgatt

SEQ ID NO: 726158 - DNA, 100 bp, Homo sapiens
ctctgatctgcaccccctgaggggcttccactgtccgcggggtgagaatgcccctggctgagatctgtatctgtggacctgaatgttgatccctcgcttc

SEQ ID NO: 726159 - DNA, 74 bp, Homo sapiens
gcgcgggcaggagcctggcgaggatgcaccttcccctgccttggaaagttcacaaagatgtccaaaactaatgg

SEQ ID NO: 726160 - DNA, 74 bp, Homo sapiens
ctgacatggaggatgatttcatgtgcgatgatgaggaggactacgacctggatgtacagttacccagcacgtgt

SEQ ID NO: 726161 - DNA, 133 bp, Homo sapiens
cagagattcaggccagagttgtgggccgccgtcggcagcaagaacagagagagaggtggacagatctgagagatactgagtgttctggacttggtgcctctttctgttatatgctttcctatttagttgggag

SEQ ID NO: 726162 - DNA, 109 bp, Homo sapiens
gttccaccagttgcacgatcctcaccgcaacattccttatccaatcccttaccggagaactgcgacacatcaccaagctgaagccctggagcctctttgatgtacttgt

SEQ ID NO: 726163 - DNA, 51 bp, Homo sapiens
attccaagtaactcttatttgcatcagaggctccttgaaatgctagataca

SEQ ID NO: 726164 - DNA, 100 bp, Homo sapiens
gtactactataatgggaaagcgggccgcaagcttcttatcattgggaccactagccgcaaagatgtccttcaggagatggaaatgcttaacgctttcagc

SEQ ID NO: 726165 - DNA, 101 bp, Homo sapiens
cctgtcagtggctctcttggccctcctgaaatggagcagatgtctcaagtattagatgccatgtttgaaaaattggtcaaagatggggagcatgtaattga

SEQ ID NO: 726166 - DNA, 96 bp, Homo sapiens
cgaggcctttcaccaagtccatggttgaaaggattgtagacaagaggaagaacaagaaaggaaaatgggagtatcttatccgatggaaaggctacg

SEQ ID NO: 726167 - DNA, 75 bp, Homo sapiens
ggtgcgccagtggaagcgggaggcagttgcagctttcaggggcatggtctagtggcccagtcaggacgcggaaac

SEQ ID NO: 726168 - DNA, 82 bp, Homo sapiens
gcagcggacaagaaggacatttgctaatgaagactgtggaagcaatggctgccatccggaagaaactggtgattgttggtga

SEQ ID NO: 726169 - DNA, 82 bp, Homo sapiens
gccgcctcttggtttgcgtcctgcactgaaaggaaatgacggattttaaagacgagaatccaggacttgaatcgtatcttcc

SEQ ID NO: 726170 - DNA, 100 bp, Homo sapiens
ggacgccaggccatatcttcaaagcccgtgagagatttttcaggccgagacgcatccagagctttcgtgaccggggactgttctgaagcaggcctcgtgg

SEQ ID NO: 726171 - DNA, 138 bp, Homo sapiens
accagaccatggctcctggaccccaagatccttaagttcgtcgtcttcatcgtcgcggttctgctgccgattccagatgacctgaggaagagactaaatatagaaatgcatgccgtagtcaggataactccagtggaa

SEQ ID NO: 726172 - DNA, 75 bp, Homo sapiens
accttcacagcagccctgcgagggatgatgcagtgtgtgattgcagtcgcggacaaagtattcgatgccttcctg

SEQ ID NO: 726173 - DNA, 83 bp, Homo sapiens
gcagcccctcccgcagccggtgtgacctgtcccttcagttgagccccatatgggggttggcaggcagcagagaggcccctttc

SEQ ID NO: 726174 - DNA, 83 bp, Homo sapiens
cgggagatcccaggcggtgacagagtggagccatggctagaggtagaacgtcatgacatgaataccttaagcctgcccctgaa

SEQ ID NO: 726175 - DNA, 75 bp, Homo sapiens
cactacacaatggaaatggcgatcgtaaagctgaaaattgaaatcatgaaagtagacaggactaaactgaagaag

SEQ ID NO: 726176 - DNA, 100 bp, Homo sapiens
gtcaaggcttcagtgtggagtaattgacactttcgaggtctacaaggaagtcttcacgaggagcagtgagaactcagcgtcgtcgacgttctaagtctcc

SEQ ID NO: 726177 - DNA, 75 bp, Homo sapiens
acattggccggcaacttgttccaggtaccaaccaagaagctgaagaaatatgagaaagaatatcagacaatgcga

SEQ ID NO: 726178 - DNA, 95 bp, Homo sapiens
ctttgcacaggagagctgctaaaaattactgcggtgaacagaatgtactcaagactgatcttctaagttcactggaaatgattttatccccaact

SEQ ID NO: 726179 - DNA, 83 bp, Homo sapiens
cagccttcagcttttggcagcatgaaagttagcaccatcactggtgcaagctatatttaacggagatcctgatgaagttcgag

SEQ ID NO: 726180 - DNA, 74 bp, Homo sapiens
tctcgaagagattgtagagaagctaaaaggagaacttgaaagttcggaccaggagatggtttccccagaccccc

SEQ ID NO: 726181 - DNA, 90 bp, Homo sapiens
tgctccaggaagccaccttactctgagggtcaagaattgccgcttccttttagttactatttgccaacattacaacaaaggagatggacc

SEQ ID NO: 726182 - DNA, 100 bp, Homo sapiens
gcccgcgacctggagctgctgatccagacggccacccgtacatcatgaccgtgggctgcgtggcgggcgacgaggagtcctacgaagtgttcaaggatct

SEQ ID NO: 726183 - DNA, 100 bp, Homo sapiens
ctttctggcctggaggctatccagcgacccagatgatgtggtaccagttggccaaagaagagcctggtgttggtgcatgtgctttggactagcatttatg

SEQ ID NO: 726184 - DNA, 51 bp, Homo sapiens
aaacaccatccggaccacgaccagaacttcagatggtggcaaagtggttgg

SEQ ID NO: 726185 - DNA, 83 bp, Homo sapiens
gggagagtctgccggcggagaatataagtgatgtcttggttcgtgtccccactgctttctggaattatgtctggaattttatt

SEQ ID NO: 726186 - DNA, 98 bp, Homo sapiens
aagtgaggaggaaaacacccccattagactatccttaaataacgacatatttgaggcgaactctgatagcgatcagcaaagtgagacaaaagaagata

SEQ ID NO: 726187 - DNA, 50 bp, Homo sapiens
gagagcttcacagtgcagcggcgaggaattacatgaacgacagccttcgc

SEQ ID NO: 726188 - DNA, 87 bp, Homo sapiens
gcgcgccgccctctcgtcccactttccaggaaaattcacgaattgtgagagtaagagttatagccggaataggccttgccaagaagg

SEQ ID NO: 726189 - DNA, 80 bp, Homo sapiens
ttgagagcgggatgaagtacgaggacgccatccagttcatccgccagaggcagtggagaaggtgacacagcacatccacg

SEQ ID NO: 726190 - DNA, 83 bp, Homo sapiens
cttgccgctgctgtcctgcgaccccaagcagcagcctcccgcgacgatgcccctcaacgttagcttcaccaacaggaactatg

SEQ ID NO: 726191 - DNA, 50 bp, Homo sapiens
atcgccaactccaccctctacatcagatagggtcttgctctgtcacccag

SEQ ID NO: 726192 - DNA, 75 bp, Homo sapiens
ctcctgttctcattagtcaaaaagttgagggcaagaactccatcatcctgaccttcagacagctgatggcagaag

SEQ ID NO: 726193 - DNA, 100 bp, Homo sapiens
cccattgttcaaggacaaaggtggcccagaattttccagtgccctgaaaaatagggtcaccagtcgttggcacaccaagaagctgccccgcaagacccac

SEQ ID NO: 726194 - DNA, 78 bp, Homo sapiens
tcagagttctaggagtggaagaggagggtcggtcagagctgacgatgaagttgatgtggatggtacagtagaagagga

SEQ ID NO: 726195 - DNA, 101 bp, Homo sapiens
aggaaagaaacggaaacggcctcatgtatttgagtctaatccatctatccggaagaggcaacaaacacgtttgcttcgaatcgagagctccagatcatgag

SEQ ID NO: 726196 - DNA, 83 bp, Homo sapiens
gccagctggccaggggggcccgtctgggccagccacctggtgtccgaagcagctttgaaatcctttaataaaaggaagcctct

SEQ ID NO: 726197 - DNA, 50 bp, Homo sapiens
gatggctcttttcatatcagagccttgtcttaaaagaagaagcatctgat

SEQ ID NO: 726198 - DNA, 100 bp, Homo sapiens
tgggagcaaagcgctgagggagctcggtacgccgccgcctcgcacccgcagcctcgcgcccgccgccgcccgtccccagttattttaccaagaaaatggt

SEQ ID NO: 726199 - DNA, 83 bp, Homo sapiens
agaccatggagaccctcacggagctgggcgacgagctgaccctgggagacatcgacgttgttgacctcctgtactggagagac

SEQ ID NO: 726200 - DNA, 75 bp, Homo sapiens
aaaaaggagcttgccttctgagctttgtaccaaagacctgggaaaactatgaagtcttacactccatatttcatt

SEQ ID NO: 726201 - DNA, 100 bp, Homo sapiens
tatggattttagatatctgccagatgaaaaagctccgccgcatgcaagagatgattgcaaggatgcaggcgcagatgcagatgcagatgcagggcgggga

SEQ ID NO: 726202 - DNA, 121 bp, Homo sapiens
cgcctccgccggctaccatgtccgcccaggcgcagatgcgggccctgctggaccagctcatgggcacggctcgggacgattttgcaagaacgaggctcaaggatgtgagggacacagtatt

SEQ ID NO: 726203 - DNA, 51 bp, Homo sapiens
gacgaggagcagggcctgactgcgcaggaagcatgagtgggaaaagcatgg

SEQ ID NO: 726204 - DNA, 82 bp, Homo sapiens
ctcagcgtcgctggcagccgctgtacttgagctccagagattatattggggttgccattttgtgaagccatagacatgtggt

SEQ ID NO: 726205 - DNA, 75 bp, Homo sapiens
aagcttggagataaagttgctttttactgcatacgtgagaaggctgttcgagagctgcttacccggcactgccag

SEQ ID NO: 726206 - DNA, 101 bp, Homo sapiens
aggagacccaaggaacagtgccaagttagatgccgattacccacttcgagtcctttattgtggaggtgttcctgatccaagcagaaccctgttatttgaag

SEQ ID NO: 726207 - DNA, 80 bp, Homo sapiens
tctgtcccagccgtctgtttccatagaaaaagatgtgaagttcatttccaatccgccctccatggtggcagcggggagcg

SEQ ID NO: 726208 - DNA, 83 bp, Homo sapiens
cctggatcatggctgccgcgccgccgctacgggaccgcctgagctttctacaccggtttggcaatgaggagcagcagctggcg

SEQ ID NO: 726209 - DNA, 50 bp, Homo sapiens
gatggtgaagcagatcgagagcaaggtaggtggagagttttcaaacactg

SEQ ID NO: 726210 - DNA, 100 bp, Homo sapiens
tggcacgtctagaaggggataaggagtccctcatattgcagaccacggtgtgaacacatgaacagaagacgaaaatttcttctagcctcagtacttgctc

SEQ ID NO: 726211 - DNA, 87 bp, Homo sapiens
agaagaccattcagatgggatctttccggatcaatccagatggcagccagtcagtggtggaggccctaaaggacagcaaggtggtgg

SEQ ID NO: 726212 - DNA, 50 bp, Homo sapiens
aaaacatacaggccggagcttatcaaaggaagtctgtttactgttaaaag

SEQ ID NO: 726213 - DNA, 100 bp, Homo sapiens
tccttgagagcatttgagaaaccccctcaggtacagacccaggctcttcgagactttgagaaggggttgagcattcatgatggtacctggaagtcagcaa

SEQ ID NO: 726214 - DNA, 101 bp, Homo sapiens
cgagaatatctccgccttttggatgctctctgccctgaatccttggattccggcagagttcctctatctcgtcttgttgctgattaaaggtgcccctgtct

SEQ ID NO: 726215 - DNA, 50 bp, Homo sapiens
ccttcctgggtggaaaggaatgagaaggaaaatcacctcggcagtgtttg

SEQ ID NO: 726216 - DNA, 112 bp, Homo sapiens
gcacagtttggaatccaccaaagaaaaaacgcttcactgtcaagactcaatgatgaggcacggcggctcattgctgatttggggagcacatctattactaatcttggtttta

SEQ ID NO: 726217 - DNA, 75 bp, Homo sapiens
cgcggggaccgctgtgctctcggaccctgatgctcccataagacagaaaatgccccttgatgatctggatagaga

SEQ ID NO: 726218 - DNA, 99 bp, Homo sapiens
taactttggaggaactacatcaacaggtgttgaagggaaggggcaagttcgcccaggatgtcagtcaacattaaagtatgtgtcctttgtggatgaatc

SEQ ID NO: 726219 - DNA, 98 bp, Homo sapiens
gccgaggtcccagccagcatcccggtcaacacgcggtacctgaacctgcaagagaacggcatccaggaccagatggcctttgaggatgtggctgtgta

SEQ ID NO: 726220 - DNA, 90 bp, Homo sapiens
catatgacaaggacaagagtgttctggctttcagaggaatccctgtacccattcctggcccagtgggtaacaagagaatggttcattttt

SEQ ID NO: 726221 - DNA, 75 bp, Homo sapiens
agacaacagaaacagaaacgattgtggaaacaggaatgtgtttctgatcatctgaatcttaatcatgtccaactg

SEQ ID NO: 726222 - DNA, 83 bp, Homo sapiens
tatccgatttcaaggaagccaaggggtggtgatgatgtccagcaactctgtgaagcaggagaagaggagtttttggaaatcat

SEQ ID NO: 726223 - DNA, 139 bp, Homo sapiens
gcgaagatggcagctgctgaggaggagccgaagcccaaaaagctgaaggtggaggcgccgcaagcgctgaggtcatcatcagatttgaaatatttaaagtggatacaaaactatttcagcaatgcagacaattaagtgt

SEQ ID NO: 726224 - DNA, 100 bp, Homo sapiens
ctgactgcaacctgttgccaaagttacacatagtacagacacctgaagaacatgaactggagactggaataaaatcaaaagaagctcggaagtacatttt

SEQ ID NO: 726225 - DNA, 100 bp, Homo sapiens
aaagctcaagggctccaatttgtactctcagctggaacggcaggcctgggaacctagaaagattgtacaatgaatggtgattctcgtgctgcggtggtga

SEQ ID NO: 726226 - DNA, 100 bp, Homo sapiens
gcggcggaaaatagcctttgccatcactgccattaaggtttcctgtggcataatgtgatggtcaattttctgcatcaacttgactgggctaagggatgct

SEQ ID NO: 726227 - DNA, 78 bp, Homo sapiens
actgctgggccctgaggctgcaccaagtggcgaaggagccggctccaaggcaccatgactcctgtgaggatgcagcac

SEQ ID NO: 726228 - DNA, 89 bp, Homo sapiens
ctgcgcgccgctgcccgcgccacagcatattaaagaagacatgtctccctctcagagagaggatgatattctctggaaaaggaagttgg

SEQ ID NO: 726229 - DNA, 74 bp, Homo sapiens
cattacctagcatttcagttttttgcagaagaatattatcccttctcagagatgaatgatttcggaatcaagaa

SEQ ID NO: 726230 - DNA, 83 bp, Homo sapiens
ctttctgctgctgaagtaatgcaatggtctcaatctctggaaaaacttcttgccaaccaaatacttggaccatgagactgttt

SEQ ID NO: 726231 - DNA, 76 bp, Homo sapiens
cggcagctccagcccggcccggcagcgacatggaagcttctgaaagttctgctgaagacagtgagcaggaagatga

SEQ ID NO: 726232 - DNA, 73 bp, Homo sapiens
atcctgaatggtttaacgtgtacaacaaggtggaccggtatcggttgaagaatgggcgccgcatcatcctgct

SEQ ID NO: 726233 - DNA, 50 bp, Homo sapiens
accaaccaaattgtcgccattaagaaagtcagtactcctgcatttgtacc

SEQ ID NO: 726234 - DNA, 75 bp, Homo sapiens
ccacaaagtgaccaagaacgtgagcaagcccaggcacagccgacgccgcgggacttaatgaacaagccagtgagg

SEQ ID NO: 726235 - DNA, 83 bp, Homo sapiens
cggggcctgggtccacgccgagggcaggacgaacttcaccagtcctattttgtaacggattatgatccaaccattgaagattc

SEQ ID NO: 726236 - DNA, 100 bp, Homo sapiens
gccttctgaactgagtgaaaatacagccaagatcttggcaaagcttctccctcagtatttagaccaggactttccttatcccagttgattgtgcagaata

SEQ ID NO: 726237 - DNA, 100 bp, Homo sapiens
cgccagcccgggccctcggcagggaggatgacggagctgcagtcggcactgctactgcgaagacagctggcagatcgcttgacaatatcttattgtcgga

SEQ ID NO: 726238 - DNA, 75 bp, Homo sapiens
cagagatcggcggagaccctcgaagtgcgcaaacttgacactcaccctgaccgaaatggctgagcaggagcgctt

SEQ ID NO: 726239 - DNA, 100 bp, Homo sapiens
cagccttcatttctctgaacatactgccttatgggacagatcaaaccgagacatgggtgcccggcaccgcgcccgagcccactccattcagatcatgaag

SEQ ID NO: 726240 - DNA, 101 bp, Homo sapiens
caactactttggattcacccacagcggggcggcggcggcggcggctgcggcccaatataggtcaaaatgcagatcttcgtgaaaacccttaccggcaagac

SEQ ID NO: 726241 - DNA, 90 bp, Homo sapiens
ctttccctaaggcagccatcaaaaggaaaaagcttgtggtgaaggggggcaaaaaaaagaagcaagttctgaagttcactcttgattgca

SEQ ID NO: 726242 - DNA, 100 bp, Homo sapiens
atttgtttgccacccgtcagtcctgccaatttacagtgagcttaaagagtttggaaggtttgcagttgctgctcttcagtccaaagtagaacagtatgag

SEQ ID NO: 726243 - DNA, 90 bp, Homo sapiens
ggagtgaccaatgatcaggttgacccttcagaaaaaaggggtgctggaaacattctccggaacagaaaccaacaagatttggccctatgt

SEQ ID NO: 726244 - DNA, 100 bp, Homo sapiens
cacagcgagggcaccaccgtcctgctcttccagttcgggatggcatgagtacagtaccagaagttatcgttgcacggcactgtggacttcgagtctttgg

SEQ ID NO: 726245 - DNA, 90 bp, Homo sapiens
gctggcgactttctccagtgactgggaaatccaggaagacagtagggacgagattgaggagctgcgggccgagatgctggagatgcggga

SEQ ID NO: 726246 - DNA, 98 bp, Homo sapiens
tgctacaggagaaagaaattgacaaccttgcaggggaatcccggaggcaagacacttgaggagaggcgctccagcctggacgctgagattgactcctt

SEQ ID NO: 726247 - DNA, 100 bp, Homo sapiens
ccccaagccctccttcgtgtcgtacgtacgccctgagggttctatggcctggatgagtctgacctcgacaaggtcttccacttgcccaccaccactttca

SEQ ID NO: 726248 - DNA, 100 bp, Homo sapiens
cattctttatggatacattaagtcaaatataagagtctgactacttgacacactggctcgacttcacagagaatgcagttgtcttgacttcaggtctgtc

SEQ ID NO: 726249 - DNA, 98 bp, Homo sapiens
gcttcctgacgctcctggcgcatctggtggtcgtcatcaccttattctggtcccggactccaagaatgaaaaggctctgggccgcaaaataaactcct

SEQ ID NO: 726250 - DNA, 100 bp, Homo sapiens
tgggccatgcccggtgaccacttttggaccaaaggcctgtgtgctgcagaacccccagaccatcatatctttgagatgatggacgccaaggcgaggcagg

SEQ ID NO: 726251 - DNA, 100 bp, Homo sapiens
gtggaacattacaaattcaactagcaaaagaaagctttctgcacagatcatggaagggaagtggttgctgtgtatgttactggtgcttggaactgctatt

SEQ ID NO: 726252 - DNA, 98 bp, Homo sapiens
tcggacctttcccgctggcgcgcagcctcagctagctgagtcagtgctgattctctcaaatagagcttgaaggataaatcttcatttttgtttcaaca

SEQ ID NO: 726253 - DNA, 100 bp, Homo sapiens
ataaactgctccaacattcgaatttatgaaaggattattgcatcgagcttttagtgtcttcttattcaacaccgaaaataagcttctgctacagcaaaga

SEQ ID NO: 726254 - DNA, 100 bp, Homo sapiens
agacggcaaatggcggacttcgacacctacgacgatcgggcctacagcagcttcggcggcggcagagggtgaacctgttctctgacccaccccagcccaa

SEQ ID NO: 726255 - DNA, 75 bp, Homo sapiens
aggaaatggggagaactggagggggacacctatgaccggggtcatcaccaggaaatatggtgtttggctgtaagc

SEQ ID NO: 726256 - DNA, 100 bp, Homo sapiens
cactcaggatcaccaaagaaacagtcatcatctgctgctatacataaaccctaccttcattttacaataagcagcgatcggagatggatgtctctctttg

SEQ ID NO: 726257 - DNA, 96 bp, Homo sapiens
actgtcttgggcagcatgcagtgctttctggggaagatcagttttcctgccatccaggctgctccctccttcagcaactcattcccacagatcttc

SEQ ID NO: 726258 - DNA, 75 bp, Homo sapiens
gcggggcggagagcgaagtggaaaggaggtgctccgaaaggcaggaagatgtccaagccccgcgcggtggaggcg

SEQ ID NO: 726259 - DNA, 100 bp, Homo sapiens
ggacgacccaagcccgctgagcaggatgagggtctatgctccatcagcaagcactgccgactacaatagggactcgccaggctatccttcctccaaacca

SEQ ID NO: 726260 - DNA, 100 bp, Homo sapiens
cggtgaaatcctgtcctgaagactgtaaggggaacacttaagaatctgtcctcaggaatatacatgctgcaccacagaaatggaagacaagttaagccaa

SEQ ID NO: 726261 - DNA, 75 bp, Homo sapiens
gtttgaaagtgcgattgtggaagctgctcggtaaatgaagcatttggaagacgagagaggcttgttcttgggagt

SEQ ID NO: 726262 - DNA, 80 bp, Homo sapiens
acaatgactttgagccctaccttactggacagtcaaatcagtaagactttgaccccgacgcaggcttcagtgattgccgc

SEQ ID NO: 726263 - DNA, 83 bp, Homo sapiens
gccagccgcaccatgccgctcctaagcctgcacagccgcggcggcagcagcagtgagaggtcccagagggtggaaggagccag

SEQ ID NO: 726264 - DNA, 75 bp, Homo sapiens
caagaagcgaaatgtgctcattggccattcctacgggaaatttccagaactctttgcacagttcaagtccttcct

SEQ ID NO: 726265 - DNA, 100 bp, Homo sapiens
aacaacaaatgtgaagtaattccagaaagcaccagtgcagtaacaaacattccacacgtgcagatggttgccatacaggagtgtaccaacacgtcaccgg

SEQ ID NO: 726266 - DNA, 80 bp, Homo sapiens
tgattctgccattgacactatatctccattgaatcagaaggacaggaagatgtcacccaagcgcatagctaaaagaaggt

SEQ ID NO: 726267 - DNA, 100 bp, Homo sapiens
agagttcaaagattctttgtagcagacactgcaaatgaagctctcgaggctgctaagagactaaaggagctctacggtgactttgaagacttggaaacag

SEQ ID NO: 726268 - DNA, 100 bp, Homo sapiens
ctggctctgtagtgggcagagtaacatgcagatgactgtgttacaggtaagaagagttcctgggtcaagtggtcaccttcataaaaccgaagacggggac

SEQ ID NO: 726269 - DNA, 82 bp, Homo sapiens
ttgctcgagggaacgtggtcggaggccgattcgacacagacaagcctgaactctttgcttccggaatccgggattgttgctg

SEQ ID NO: 726270 - DNA, 100 bp, Homo sapiens
ttccagactctgatcacacgccaggtaaaataccatgaagattttgaaaaaacaaaggggagaggctttactcccgtcgtggacgatcctgtgacagaga

SEQ ID NO: 726271 - DNA, 75 bp, Homo sapiens
ggagcatcctgaagcatccctttaatagaaactcaaatatcattaacggagctcaagaaaaatgtgtattgcctc

SEQ ID NO: 726272 - DNA, 75 bp, Homo sapiens
cttcgcttggtgtcctcctggcctcagcaacctgacaattctgtcgtgtcccggccttggacaagattcgctatg

SEQ ID NO: 726273 - DNA, 82 bp, Homo sapiens
ggacaagaaactagagcaaataaccgttttgaaattgaatacaaacagaagcttgcacgagtaacccaggtccgcaaggaac

SEQ ID NO: 726274 - DNA, 96 bp, Homo sapiens
ttcaccaaataatagctgtttgtattttggctgctgcaggagccattttaggtaccgctagagcgacatgatggtggaatctgcctcggagacaat

SEQ ID NO: 726275 - DNA, 100 bp, Homo sapiens
gcctgcaacaagttaagctgaagaccgaagcaagagctggttcaggagctgtggatgaggagggacgcatgcctttctatgcagaagaatgtgcctccat

SEQ ID NO: 726276 - DNA, 100 bp, Homo sapiens
ttcccacaggctctctccgctcgattttgtcaccgttatgtgggaagcgaatccagacactgccttaggaaaaccacgagaggtgtttcgacttcctaca

SEQ ID NO: 726277 - DNA, 101 bp, Homo sapiens
ctatgacctcttattctggaaaccagtgcaatgatcctaatttgacaggacatgctgagaaggtgggaatagaaaattttgagctcctgaaggtcctagga

SEQ ID NO: 726278 - DNA, 101 bp, Homo sapiens
cggagtacaacgagccgcatgagagccggacaaactcagacatcgtggagatgattcaacgagaagccgatgtaaaaaataaggtaactgctgtggcattg

SEQ ID NO: 726279 - DNA, 100 bp, Homo sapiens
acggacgtctcagaacacgctggacagcgataaggtttattacccagaactctttgtctgggtcagtcaagaaccatttccaaacaaggacatggaggga

SEQ ID NO: 726280 - DNA, 75 bp, Homo sapiens
tggtatcaattttgtcagtcctgttcgaaaccaaggtacggtggttgaggagagcaatggttctgatgagatgga

SEQ ID NO: 726281 - DNA, 82 bp, Homo sapiens
aatgccatcagtgtggaactgaaaaagaaggtaaaaccacctcagctaattgattatctgcagcagaagaaaacagaaggtt

SEQ ID NO: 726282 - DNA, 83 bp, Homo sapiens
gcttgacggcttggacgaagatggggagaaggaagcgagactcatacgcaacctcaatggcgcctgtgtctggcagagctggt

SEQ ID NO: 726283 - DNA, 74 bp, Homo sapiens
ccctgcagtacctgcagaaggtctctggagacatcttcagcaggtccagaggtgtccttctaaagctggtagag

SEQ ID NO: 726284 - DNA, 100 bp, Homo sapiens
agaaacctggaggctcccctcctggggcacccggcttctgctccaaccaggttacctacctgggcaaagtctccaccactggcatgcagtttttgtcagg

SEQ ID NO: 726285 - DNA, 100 bp, Homo sapiens
agctgccccagccgcttctgaccttccaggcctacgagcagattctcgggatcacctagatgcaaccactgcatgaagataatttctcacgagagaagac

SEQ ID NO: 726286 - DNA, 98 bp, Homo sapiens
gatgcccatgtggagttcatacacagtcccccagttggttgctccttgagggcaggacagttcttatggctttatccgttgcgtaagcacagagaggt

SEQ ID NO: 726287 - DNA, 101 bp, Homo sapiens
acctccaggctgctttctctcagtataagaaaggtacaccagaggatcgcttcctggcagaatttgggagctgtttattgcagcactgttgtgccctctga

SEQ ID NO: 726288 - DNA, 59 bp, Homo sapiens
ccgtggcgccgcagacctccatcctattcctggtgtttctgcggtaccagtgttactat

SEQ ID NO: 726289 - DNA, 75 bp, Homo sapiens
gctccaaacaggagcaggaccttctgcacaagacggcgcgcatcttcacgaatgggtaccacagaccatgtcatc

SEQ ID NO: 726290 - DNA, 74 bp, Homo sapiens
cgcgggaaacgtcaaactcgagtttaaaattggtggtgaatggtggacatggatcgattataaccgcttccagg

SEQ ID NO: 726291 - DNA, 100 bp, Homo sapiens
caaaatgcagtgcacttgaagaattaaatttagagaacaataacatttctactttaccagagaaatactttcagagctctttcattcatcctgacaatgg

SEQ ID NO: 726292 - DNA, 98 bp, Homo sapiens
aggtagcgaccgtcgccggcagcgccgcgaaggcggtgctcgggccagcccttctctgccgtccctgggagatcttgcttctgaaatatctacctggg

SEQ ID NO: 726293 - DNA, 88 bp, Homo sapiens
gctggtggggctcacggcgcctgccttggcgctggccggctacatcgagttgcagagctattttgctgcatgtgaggatgagatccct

SEQ ID NO: 726294 - DNA, 100 bp, Homo sapiens
tggcaccgtcatgggtgctgaaatccggcatgttcttgtcacactgggtgccgacgccaccgccgagcccatgatcctggaacagtacgtggtggtgtcc

SEQ ID NO: 726295 - DNA, 74 bp, Homo sapiens
ggaagctctacgctactgccatgataataacataattcacagggatgtgaagagcaaagatggtcgacctttgc

SEQ ID NO: 726296 - DNA, 85 bp, Homo sapiens
gttttcatcatggataactgtgaggagctaatccctgaatatctgagaatggaagttggatacactttgtgacttgtacgagaca

SEQ ID NO: 726297 - DNA, 75 bp, Homo sapiens
atcctcctatacgaaattgtcacctatgggaaaattccctacccaggaagtgagctcacaatgactcaagctgcc

SEQ ID NO: 726298 - DNA, 100 bp, Homo sapiens
ggagatgcttctgtggaagatgatgcttttatcaaggttggtgggacaagtgatgttgaagtgaatgaaaagaaagacagagttacagatgcccttaatg

SEQ ID NO: 726299 - DNA, 74 bp, Homo sapiens
ctcggagcctgagcgggaggtgcgaggatgaagatttgataaagtggaaggcactgtttgaggaagtccctgag

SEQ ID NO: 726300 - DNA, 75 bp, Homo sapiens
tgttttaagctcaccaggaagatgcccattattggtcgtaaggagttacttaaagatccactctacattggacta

SEQ ID NO: 726301 - DNA, 74 bp, Homo sapiens
gaccttggcaaagctgccagagatattttcaacaaaggatttggctaaagaattacctccaaagccattgtcaa

SEQ ID NO: 726302 - DNA, 120 bp, Homo sapiens
gggggctatgggcccatcgactacaaacggaacttgccgcgtcgaggactgtcgggttttccctgatgaatttcacctccagactttgaatccttttcttcgggcctgtgctgagttaca

SEQ ID NO: 726303 - DNA, 125 bp, Homo sapiens
tggagcctcagttggaagcagccgatccagcctgcggagcctgtggggcagcatattgagtatcagtgctgatattgaaacaattggagaaattctgaagaaaatcatccctaccttggaagagg

SEQ ID NO: 726304 - DNA, 75 bp, Homo sapiens
ggaacccttgccgctgctgtcctgcgaccccaagcaggggcctcacgggagctggatgctcggagcagcaaggcg

SEQ ID NO: 726305 - DNA, 75 bp, Homo sapiens
gagcctcgcctttgccgatccgccgcccgtccacacccgccgccagagtgtgaacatggctacgcctcttcattc

SEQ ID NO: 726306 - DNA, 75 bp, Homo sapiens
aacaagtactgcgccgactgcgaggccaaaggaggagagacttcagcatgcaaaccttcatctgttcggcttgca

SEQ ID NO: 726307 - DNA, 95 bp, Homo sapiens
agaagcaagaaggccctggacacagcaatatctctgggctttcacaggtttccgccagctgtggatgcctttgacattatgaccgcagaggattc

SEQ ID NO: 726308 - DNA, 76 bp, Homo sapiens
ctggcggcgtggacacctgagtcccggggtaggggtctcccgcgaggaacttctgcaatgtcccatcaacctctca

SEQ ID NO: 726309 - DNA, 100 bp, Homo sapiens
cccgaggagccctgttccaaagcctcctggaccgtccaagaattacagaatgtctgaaggggacagtgtgggagaatccgtccatgggaaaccttcggtg

SEQ ID NO: 726310 - DNA, 98 bp, Homo sapiens
ggagcctgtgtcccgtttcttcgaggaggttcgggaactccaggagcagctggcccgacagcaggtccatgtggagcttgacgtggccaagccagacc

SEQ ID NO: 726311 - DNA, 75 bp, Homo sapiens
cagaacagatagctgaagaaggtgacgataatttggctagtggttcgctttgaggtggtctgaagccaaggcctc

SEQ ID NO: 726312 - DNA, 98 bp, Homo sapiens
ttgaaaggggcagacggccatgttcgtgaacggcgcttcccttggtgcacctgtggccgccatgtttgagcgagtaagactttgaccccgacgcaggc

SEQ ID NO: 726313 - DNA, 95 bp, Homo sapiens
cacttcgcattttggcattgacatttaattttagggtcctttatatagaagggagagtagcttccaggtggttcacttatttttaacactctgca

SEQ ID NO: 726314 - DNA, 101 bp, Homo sapiens
agatggcggcggcggtgcaggagagcgcgcgaagtactaggttttgacaagcttgcatcatgcgtgagtataagctagtcgttcttggctcaggaggcgtt

SEQ ID NO: 726315 - DNA, 74 bp, Homo sapiens
gtttcatctcgtattcactgtggactgcccgtggccacccaggagcccgatgtgcaaggcaggtgtgagtgcca

SEQ ID NO: 726316 - DNA, 75 bp, Homo sapiens
tctgaaccaggacctggacccggacccaaagtgccatgtctttaatgagacttggggggactcttcgatcgcgac

SEQ ID NO: 726317 - DNA, 100 bp, Homo sapiens
tggggccctgggtgaagtgctccgtcgcccttgcctccaggaaattttatgctttggatccttcattcccaaggatgaatttgttaactcggactacaga

SEQ ID NO: 726318 - DNA, 51 bp, Homo sapiens
aacctacttacagtcacgttactacagggatcatagacggtatttctatgt

SEQ ID NO: 726319 - DNA, 100 bp, Homo sapiens
gaagcgtcgggattaggtgaaagttttcctttggaatatggataaatacaccatgatacggaaactagaaggacatcaccatgatgtggtagcttgtgac

SEQ ID NO: 726320 - DNA, 100 bp, Homo sapiens
gggctccctgtccggcagcctacccggctcactcagggaaagatgaatgggagggctgattttcgagagccgaatgcagaggttccaagaccaattcccc

SEQ ID NO: 726321 - DNA, 100 bp, Homo sapiens
cggacgtccgcggaggatctggggacatcttactggtccatgctactgagactgacaggaaagtgccatctccctcttctacgagctctcggagaatgac

SEQ ID NO: 726322 - DNA, 90 bp, Homo sapiens
gcaatcttcctgccttggcctcccagagggttggaattgcagatgtgaggctcaccagctggattccctcctgggggcttcattcccaaa

SEQ ID NO: 726323 - DNA, 74 bp, Homo sapiens
aaagcttccctacttccaggacctccagaagcatctgaagaattttataaacgagatcctgcgttcacttatga

SEQ ID NO: 726324 - DNA, 50 bp, Homo sapiens
ggacttccaggtcacggaggaggtgaaacaatggccaatgtacatggtgg

SEQ ID NO: 726325 - DNA, 73 bp, Homo sapiens
ttagagatccagaaacccgctgaacttgtctgtgtgtccagaggaggagtccatcatcatgtcctcattcgtc

SEQ ID NO: 726326 - DNA, 96 bp, Homo sapiens
ggtatattagttcagttaccactaccagtggagatctccgactcggctcccccagcgccgctggtaaaagaagtcaccaagaggttttccaccccg

SEQ ID NO: 726327 - DNA, 105 bp, Homo sapiens
aagaagtgttgtcctcctgatcttaattagggtcagaaacgtcacctccttcccaccaccaggtgctggagaatctggtaaaagcaccattgtgaagcagatgag

SEQ ID NO: 726328 - DNA, 80 bp, Homo sapiens
gaatttttggagcatctccacccaggaacctcgccatccagaagttttaaaatcaaagatgggaaaatcggagaaaattg

SEQ ID NO: 726329 - DNA, 100 bp, Homo sapiens
ccgcttactccagaaacatgggtggaagctgggccagggattgggaaaatctcttcaggatctctgacatctacattagtggagaatcaggggatatgtc

SEQ ID NO: 726330 - DNA, 90 bp, Homo sapiens
agcgccggcctcctccgtgcggagaagaagctgcggccgcacctggccaaggggctcgttttgatgatggtgctggaggtgacaatgaag

SEQ ID NO: 726331 - DNA, 83 bp, Homo sapiens
ggcagagtgctgatgtgaaaaataccacgacaaaaccaccctatgtttcaggagccgtagagccagatcgtcatcatgtctgc

SEQ ID NO: 726332 - DNA, 74 bp, Homo sapiens
agaaccacattttgggtttgaagaatcttctacatggtgagaattatgaagatgatgacctagtaaattctgat

SEQ ID NO: 726333 - DNA, 74 bp, Homo sapiens
agctcctcgcccaccagaagccccccaaggagaaggagacacagcaggtccccacagaggaagtgtccttggaa

SEQ ID NO: 726334 - DNA, 115 bp, Homo sapiens
cgtgattgcgttacaagctttgtctccttcgacttggagtctttgtccaggacggtgacttaagagattaaaattaatttggttgctgttggttctgaacaaataatgagttctt

SEQ ID NO: 726335 - DNA, 82 bp, Homo sapiens
ggtgcacacaccctcgtattctcctgcccttccccagatcctgataacttaagtgactctctcttttccggtgatgaagaaa

SEQ ID NO: 726336 - DNA, 101 bp, Homo sapiens
ctgctgagaacattaatgtgagctatcccgaatggctgagccctgaagaggacctgaactttgtaacagacactgccaagcgagcagctgatgcagctgta

SEQ ID NO: 726337 - DNA, 100 bp, Homo sapiens
ttttaaccgaggcacggacaacatcaccgtgaggcagggggacacagccatcctcagctgttccatttcctccaagtcaccggcttacagcaaaagaagt

SEQ ID NO: 726338 - DNA, 50 bp, Homo sapiens
tctccacccatcccgagaacatatttaggtcagttaacgtccataccagg

SEQ ID NO: 726339 - DNA, 98 bp, Homo sapiens
acctcggcaaattccgacgtcttgaagacttccgagtagatgctgcccaagcgccagaggtgacctatgaggcagaagagggctccttgtggacgttg

SEQ ID NO: 726340 - DNA, 98 bp, Homo sapiens
gcacttgggcccccctggccatggcggcgaaggtggacctgagcacctccaccgactggaaggaggcgaaataaattaaccctgcagcatgtgaacag

SEQ ID NO: 726341 - DNA, 100 bp, Homo sapiens
agtgaacagaaaaagaggatacctctgcgatcccgggtcatctccagatgctagggttatggtgtcttcgagagaactctgacgtgaagacgcacgggcc

SEQ ID NO: 726342 - DNA, 100 bp, Homo sapiens
cgggatttctgtagtaaccctgcttctggtgaacttgtctggccggcattcatttaaggcctaaggatgaaggcggtggttgaagatggatatgaatttt

SEQ ID NO: 726343 - DNA, 50 bp, Homo sapiens
cttcctgttcgcagctgcggcagtaaatattgcaacttcagcaacttcaa

SEQ ID NO: 726344 - DNA, 82 bp, Homo sapiens
gagcttccgggagggcggctcgcagttgagaagctgatgtctcctcgacttccaactggaaccttgaacccccacatttctg

SEQ ID NO: 726345 - DNA, 82 bp, Homo sapiens
gtttacagtacgatgatgaaaaaattatcagtggcctacgagataattctattaagttgctctaggtcgtaaccagcctttg

SEQ ID NO: 726346 - DNA, 100 bp, Homo sapiens
tgcccccaggcgtggactctttctatctcgagatcttcgatgagatcctcagacagattctaagcctcctgagggattgttaggattccacacagactgg

SEQ ID NO: 726347 - DNA, 89 bp, Homo sapiens
tttacagaaagagtcaacagcagtggcaacaggttctaagctggtctatgtccatcaccttcttggagaaggagcctttgcccaggtgt

SEQ ID NO: 726348 - DNA, 78 bp, Homo sapiens
tactgctttgcaacgcgcacctaactccagggagccagttgataatctgagtcctgaggagcgtgatgcccgcacagt

SEQ ID NO: 726349 - DNA, 75 bp, Homo sapiens
acatcactggctacacatttccagcaggctgcagatacgagtggacaagttttgagcaaaattttggactgtgaa

SEQ ID NO: 726350 - DNA, 50 bp, Homo sapiens
gtggaaaggaaccgttctggatcaggtccagtccaggtgcagcagcaagg

SEQ ID NO: 726351 - DNA, 50 bp, Homo sapiens
gtggctcacaagatgaaagagcactgctatgaagctggtcacctggagaa

SEQ ID NO: 726352 - DNA, 100 bp, Homo sapiens
attctacaccctacaagtcataaagtcagatcttgtgaatgaagaagcaactggacagttccatgtataccggcctgcttccgcgaggccaacatcccaa

SEQ ID NO: 726353 - DNA, 98 bp, Homo sapiens
cccgaccaccggagaattcctggggcgcaccgccaagagctgggaagtcacctgcaccggtgcccgtgacgtacgagctgcccacactgtataggacg

SEQ ID NO: 726354 - DNA, 50 bp, Homo sapiens
ccagaccagaagcccttctgaattaagggcgagagaggctggctgaggat

SEQ ID NO: 726355 - DNA, 90 bp, Homo sapiens
caccaggtgaaatttggcgccccacgcaggaaggaaactgacccactgaatgagccgggttccgagtctgaggaagacataaccttgtgc

SEQ ID NO: 726356 - DNA, 75 bp, Homo sapiens
ctggggccagggaaccctggtcaccgtctcctcaggcagcagcccagacgcggcacagagagggcctgggagctt

SEQ ID NO: 726357 - DNA, 98 bp, Homo sapiens
tgtgtggtgggcttcgacctggagctgggccaggccgtggagtttccctgaaacctgggctcttgaagacgcatcactggagcagatggataatggag

SEQ ID NO: 726358 - DNA, 139 bp, Homo sapiens
ttttacaaagttgatcacagtaaatggacaagaatatcatcttcaacttgtagacacagccgggcaaatcactctctatgaaggcaagcacttcacagggcagaagctggaggtcttcggggactgtgacaacttccag

SEQ ID NO: 726359 - DNA, 100 bp, Homo sapiens
ggagctgtggaagctgtgcacctccctcactttgtggctctccaagatttctgccatctcatacttcattgaatctgaagaatattctccttaatattaa

SEQ ID NO: 726360 - DNA, 83 bp, Homo sapiens
cgaatcacttataaatggcgccgaagcaggacccgaagcctaaattccaggagggtacttcgtactggatttcgaggctggca

SEQ ID NO: 726361 - DNA, 101 bp, Homo sapiens
tgctctttgaattccagtcccgtctatgaaacccacgtagtcgaacaccgtgatgcttctcctgcagggcgtgtgatgaggaggcgagcttggctttggag

SEQ ID NO: 726362 - DNA, 100 bp, Homo sapiens
cctcgtctcctggccgcttcaccaaggagaccacccagaagaatttcaacaatctctatggcaccaaagacacactttggctgatccccatcacattcct

SEQ ID NO: 726363 - DNA, 100 bp, Homo sapiens
atttgggaaaatatgtcaataacctgaacactgaccagctctcagttgcacttctcaaaggaagccagcagacctgcagaacttggctcccgggacccac

SEQ ID NO: 726364 - DNA, 50 bp, Homo sapiens
gttttgccgcttctttcacttcaggaggaaacatgatgaaagtattgagg

SEQ ID NO: 726365 - DNA, 98 bp, Homo sapiens
aaaaatttttacatttggatcttacagattaggagtgcatacaaaaggtgcttttgaagatgatgatatcacgcacgttgaaggaagtgtagatccta

SEQ ID NO: 726366 - DNA, 75 bp, Homo sapiens
gtggaatgaactgcttttgggaagcggcttttagcctgcctagggtagttaaaagacgagtgaatgctctcaaaa

SEQ ID NO: 726367 - DNA, 83 bp, Homo sapiens
caccgccgcagaccccttcaagttctagtcatgtttcagattggagaactggcaaataccctgacaagtaaattcgagtttct

SEQ ID NO: 726368 - DNA, 100 bp, Homo sapiens
ggattggaggtgtcagtgttaaaggaacctctacaacgaaggtgaagccacggaagataagcagagcatcctggccagaacaagccaaggagccaagacg

SEQ ID NO: 726369 - DNA, 100 bp, Homo sapiens
tgcaatgacgagggcctggagtgtgtgcccactgaggagtccaacatcaccatgcaggttcaaaccttgtactactcagctgatcacaagctgcttgatg

SEQ ID NO: 726370 - DNA, 75 bp, Homo sapiens
gtgctggtggaggggccttcctcgtcatccccctgcaccaggtgagacatggaatccattaaaattgcattatca

SEQ ID NO: 726371 - DNA, 74 bp, Homo sapiens
ccgcccacagacctcaaattcaaagatccaggatgagaagactgataaaagaagaagctagctgaacagctgta

SEQ ID NO: 726372 - DNA, 98 bp, Homo sapiens
tgaaagtacttcaccatggcctagcagtggctctccccagtcacccccttcacccccagtccagcagcccaaggaaacttacatgcttgctgtaactt

SEQ ID NO: 726373 - DNA, 97 bp, Homo sapiens
ggctgtgatgctcgggagggagactgttgttcccggagatgcggcgcgcagatcatgattctggaaggaggtggtgtaatgaatctcaaccccggca

SEQ ID NO: 726374 - DNA, 110 bp, Homo sapiens
attcagcatgacctcacatacaacctccgagaaggtcatgagagtgataagcctaaagaaactgttccaactcttgctccaaaaactctttcagtagcagcagcttttaa

SEQ ID NO: 726375 - DNA, 113 bp, Homo sapiens
tattgggagatccacagctaagacgccaggacccactggaagcctagaaatgcaaattcaacacccaacagcttccttaatagcaaaggtagcaacagcccaggatgatataa

SEQ ID NO: 726376 - DNA, 130 bp, Homo sapiens
tgaccctcaaacagcagtatgatgaactggaggctgagtacgacagcctcaaacaggagctggagcagctcaaagagattcctgacattcagacaactgacttgtaactgacttataactgacttgtaat

SEQ ID NO: 726377 - DNA, 100 bp, Homo sapiens
tcccattcacaaggcagctcgctctgggagcctagaatgcatcagtgcccttgtggcgaatggggctcacgtcgagttcctggaacatggtgaatataag

SEQ ID NO: 726378 - DNA, 74 bp, Homo sapiens
ccgcctcctcctcctcagtaacgcgggcaagaagttatgaaatggaatggatggggatataatgattctaaatt

SEQ ID NO: 726379 - DNA, 82 bp, Homo sapiens
ctgaagacccgaggccgtcggcacagagtgccttccagggaaccagcggggaaactgaggctcggggtggagcgcaggattg

SEQ ID NO: 726380 - DNA, 51 bp, Homo sapiens
agctggacccggaccggttttggctcagccagcaggagtgccagaaatctt

SEQ ID NO: 726381 - DNA, 101 bp, Homo sapiens
gactgattttatgggaaaattaagcagatgctccagtttgagaaacctggatctgcgatctgtttgtggttgctactggagatatagccactgaacaggta

SEQ ID NO: 726382 - DNA, 100 bp, Homo sapiens
gtcccgtcagccggaccccacctggacggctggggccacttgtggtcgccgggaggctgcagaagatgtcaatgttactttcgaagatcaacaaaagata

SEQ ID NO: 726383 - DNA, 100 bp, Homo sapiens
caccgtcacgctgctggaggagaagcagctgacacaggatgatgatactgatgcggttgagattgctatcgacaacacggcttttatggacgagttcttt

SEQ ID NO: 726384 - DNA, 88 bp, Homo sapiens
ctgaagaccgtgaagccactttcactttttgacagtaaggttattgacccagtggctccacgatatgttgcattactgaagaaagaag

SEQ ID NO: 726385 - DNA, 82 bp, Homo sapiens
cggaagtggatggcgtggagatatggcgcaactgcggcgcggaaatcctcattgacgattcaatttgttgaaggccaatttg

SEQ ID NO: 726386 - DNA, 75 bp, Homo sapiens
agttggaagcagccgatccagcctgcggagcctgtggggcaggtgcaaattgagcatgacccagaattagaaaaa

SEQ ID NO: 726387 - DNA, 100 bp, Homo sapiens
cgggaaaccaggcatctctgggtgggcaacttacccgagaacgtgcgggaagagaagatcatcgagcatttcaaacgatccacatgaagaccatgcccgc

SEQ ID NO: 726388 - DNA, 74 bp, Homo sapiens
gctcctgggagagccccacgcggacctcgccgtgagctgcagcaattctgtggtgttcttggtcacacatttat

SEQ ID NO: 726389 - DNA, 73 bp, Homo sapiens
tccagccttggtctgagtggactgtcctgcaggaaacttttgagaagaactttgaaagagaaacccataaaat

SEQ ID NO: 726390 - DNA, 75 bp, Homo sapiens
tgtgaccacacagttctccatgagttggacagataccaaagaggagacagggcctcactgtgtcacccagggtgg

SEQ ID NO: 726391 - DNA, 96 bp, Homo sapiens
gatcagagatcggcggagaccctcgaagtgcgcaaacttgacactcaccctgaccggtactccaaagattcaggtttactcacgtcatccagcaga

SEQ ID NO: 726392 - DNA, 76 bp, Homo sapiens
ccccctcacatctatgccatcacagacaccgcctacaggagtatgatgcaagtttgcctgagaatacagatcaacc

SEQ ID NO: 726393 - DNA, 100 bp, Homo sapiens
acagcgcgcacttcacccgcagttgggtcaacatatttcactggcacctattcacaagcttgaagaagctctgtatgaataccagccactgcagatagag

SEQ ID NO: 726394 - DNA, 101 bp, Homo sapiens
ctcttgagtagctgggactacagaagccccatgtgccactcccctgatctgcagcttcggtaggccggtggacctggagaaggacgactaccagaaggtgg

SEQ ID NO: 726395 - DNA, 100 bp, Homo sapiens
gaccatcaaacggctgcccaagctcaagtgtatcgcattaagttcaaggagagctttgctgagatgaacaggggctcgaacgagtggaagacggttgtgg

SEQ ID NO: 726396 - DNA, 102 bp, Homo sapiens
tttggaacaaaaaaaggagatgcctggcagccccgctctctgcataatctcaggggcgatataatcaatgaggtggtcctaaagttgctcaaggctggatgg

SEQ ID NO: 726397 - DNA, 75 bp, Homo sapiens
ctcagcagaattttttgcaggggaaaacatccagtgtggtggaaatggtattctgagagaagcctcacaaagtgt

SEQ ID NO: 726398 - DNA, 74 bp, Homo sapiens
aaagaaagcaaagcgcagaaatgttggatttgaagtcctggatgcctcatcccttagtttcaacaccagattga

SEQ ID NO: 726399 - DNA, 83 bp, Homo sapiens
ccgctatccagaacctccactctttcggtttatgctaaaactatcgatgggcaacagactattattgcatgtattgaaagcca

SEQ ID NO: 726400 - DNA, 101 bp, Homo sapiens
agttgctggtgttctatactggaagaggcatgccagaggtagagcagggaagaggaagaacgtctgagaaataaaattcgagctgatcatgagaaggcctt

SEQ ID NO: 726401 - DNA, 50 bp, Homo sapiens
tctggccagggtgcttttggaaacccaaatgaccctgtgactaacatctg

SEQ ID NO: 726402 - DNA, 75 bp, Homo sapiens
gcactggttgtttctggtgggatcgttggctatgtaaaaacaggaaaaggccaaagttgttgagcccctggacta

SEQ ID NO: 726403 - DNA, 50 bp, Homo sapiens
gtcagcatccccaacagccccttcagggcaagcacgaggagcggcaggac

SEQ ID NO: 726404 - DNA, 71 bp, Homo sapiens
cggtggcagctgctgagttctcggtgaagggcttcgtgggacacatatgcaacatgcctatgatttttaca

SEQ ID NO: 726405 - DNA, 98 bp, Homo sapiens
gaacttccaaaagaaaactggctaaagatgctgtgtcgacatgtagctaacaccatttgtaaagcagatgctgttattctcgttcaagttaatccagg

SEQ ID NO: 726406 - DNA, 75 bp, Homo sapiens
cagggccttgcctagtgggccttccttcccagatggccaccatgtctgggagatggaagcgaaaactgaccggga

SEQ ID NO: 726407 - DNA, 50 bp, Homo sapiens
gcagatcaagaaatccagctcaaataaccatgatgactacacagacttct

SEQ ID NO: 726408 - DNA, 74 bp, Homo sapiens
cgctagccctgcagacagaggtgtgctgacgacctgctacaacagaagtgacacccagggcagctacactcaga

SEQ ID NO: 726409 - DNA, 100 bp, Homo sapiens
cccgacgtggtccagaacatccaggacatctgcaacagcaagcacatgcagaagaatcccccagggcccagagctctagaggacaaaatcccagtccttg

SEQ ID NO: 726410 - DNA, 100 bp, Homo sapiens
accatcaatgaaaggtgaccctgttaactacattctgcaggtattggttggaagagaatctgagtacaaacagccgctgcagagggagcgtcgcgccggg

SEQ ID NO: 726411 - DNA, 75 bp, Homo sapiens
caaccatgctcaacttcggtgcctctctccagcagactgcgcctcctctattggcccaggaagcccacccagccc

SEQ ID NO: 726412 - DNA, 100 bp, Homo sapiens
aaaggcattcttggcggaaggacccgagacgtgaaaaaaacaggcgtattctggtaatttcgaggagatatgtgttgagacggattctccgccgagctgt

SEQ ID NO: 726413 - DNA, 100 bp, Homo sapiens
gtgggcaaatttcttggtgattctgcaaacctaagcattttgtctggtgttttccaagcagtgaagcacttgccgtgttgaactgaatgcactactggag

SEQ ID NO: 726414 - DNA, 75 bp, Homo sapiens
gacaagaccatgctggcaagtctgaaggtcaaaatcctcactatggatgggctcattgaggacattaagcatcgg

SEQ ID NO: 726415 - DNA, 101 bp, Homo sapiens
ctctatgactatgagtctaggacggagacagacctgtccttcaagaaaggcgagcggctccagattgtcaacaacacgaagagcaaccgaggtttcaatct

SEQ ID NO: 726416 - DNA, 58 bp, Homo sapiens
ggagctgctgtctggaattggcaacatctctgagagaaggtccagcttaaaaaatgtg

SEQ ID NO: 726417 - DNA, 100 bp, Homo sapiens
gggatctctactgtgcagctccagagagacgtgaaacatgtgaacactcaagtgaagcaaaagccttccatgattacgatgactttgacaacgatgtgga

SEQ ID NO: 726418 - DNA, 100 bp, Homo sapiens
ggcggagtcggggctcctgacggctccagacccagttcctggacctgccctggaaaagaagtatcccgtagagatgagctcactgcagttacttaattaa

SEQ ID NO: 726419 - DNA, 78 bp, Homo sapiens
ccaacccctcacctggccagcgggacagcaggttcaacttcccaggttttcgacgctggggaagtgtttgggatcatg

SEQ ID NO: 726420 - DNA, 100 bp, Homo sapiens
ggctgtgtgatggcctcggagcgcccggagccggagaacccagcagggacatgctcagcacagctcccaccgcaaggttgaatgagcaagaagaaactgg

SEQ ID NO: 726421 - DNA, 104 bp, Homo sapiens
acctctcgctgcttcaggaggacctgcaggaggacgcagacggataattaaacaaccaccatgtcgagcaaaaaggcaaagaccaagaccaccaagaagcgccc

SEQ ID NO: 726422 - DNA, 75 bp, Homo sapiens
cttcaactgtacaagaagctttacacaatttccttaagaggcaattaaaggcagatgctaaaaaagctattggaa

SEQ ID NO: 726423 - DNA, 100 bp, Homo sapiens
gtcctggatcatccccgtcttcgtgggcctgtcctgcttcggctccgtcaatgggtccctgttcacatcctccaggagacggggctcaaggtgaaccagc

SEQ ID NO: 726424 - DNA, 83 bp, Homo sapiens
ttgtcctggctcttgccctcatcctggttctggaatcctcagttcaagacagttgaatttctgaatgaaaagctggaaaaaag

SEQ ID NO: 726425 - DNA, 101 bp, Homo sapiens
ggctcaacgaggaactcaaagtggatgaggaaattccagggtctccctccactgctgtagtaacccgggtccggggcctcggtggtgctcctgatgcccct

SEQ ID NO: 726426 - DNA, 119 bp, Homo sapiens
tctctctgtgtggctgtaacttacgtgtactttaccaacgagctgaagcaggatcagaattcaggctataaatgaaattggagctggaccatttagtcagttcattaaagcaaaaactc

SEQ ID NO: 726427 - DNA, 90 bp, Homo sapiens
ttccgatcagaggtgaaaccaacagccagtgatatgctatacatggttttgataacattgtactggctgggaagaaaagcacaaagcaac

SEQ ID NO: 726428 - DNA, 113 bp, Homo sapiens
gacgcactgactcgcctcaagcacctgcgcatcgtcatcgggttatgtaccgaaggactctaccgtgtcagcgggaataaaactgaccaagacaatattcaaaagcagtttga

SEQ ID NO: 726429 - DNA, 73 bp, Homo sapiens
ggcccagaggatctcttctaacatccagaagatcacacagtgttaattaactcctgaggagagagcccaaaag

SEQ ID NO: 726430 - DNA, 98 bp, Homo sapiens
gtgatcttcacagtgctcctgcagtctctctgtgtggctgtaacttacgtgtactttaccaacgagctgaagcagctctacattaatcatactcctcc

SEQ ID NO: 726431 - DNA, 87 bp, Homo sapiens
ggtcaatgtgtggaatattggggggctcggctgcagacttggccaaatggacgggactattaagtgtgaagcctcagtttaggtcat

SEQ ID NO: 726432 - DNA, 90 bp, Homo sapiens
gtaaagtcgagtatctggtgaagtggaaaggatggcccccaaaatttggagcaagaggtggtggtggccttcccccgaagaaatttggta

SEQ ID NO: 726433 - DNA, 74 bp, Homo sapiens
tcacctttgtctcctcagcagacgcggaagagtaaagctaaaacattttgagaaatttcaggatacagcagaag

SEQ ID NO: 726434 - DNA, 99 bp, Homo sapiens
attcgcgcggctccgcctcctttcccgggctcttccagcggctcccggggcgcgtctgagatgccttcaattaagttgcagagttctgatggagagata

SEQ ID NO: 726435 - DNA, 82 bp, Homo sapiens
ttatttaaataataagaagaccatcgcagagggaaggcgaatccccataagtaagaatgtatttgctgcagttggaaggggt

SEQ ID NO: 726436 - DNA, 100 bp, Homo sapiens
atcaatcttaccagagggccctcagcagatataatttctacagtagaatttaatcattctggagaattactagcaacaggagataaaggtggtagagttg

SEQ ID NO: 726437 - DNA, 75 bp, Homo sapiens
cggcgctgcctacggaggtggcagccatctccttctcgagagaagaagaaggaggttcctgctgtgccagaaacc

SEQ ID NO: 726438 - DNA, 101 bp, Homo sapiens
ctttcactatggggtggagacgtggtactcagcaagctcgagttaaagttggatgtgctggaacagagacaaagcatggaggacacaagaatgggaggaaa

SEQ ID NO: 726439 - DNA, 83 bp, Homo sapiens
cgagacttttctcagatgttggatatttgcttggaaaaacgtgtgggtacgaccttgatttccacatggaagaggcactggat

SEQ ID NO: 726440 - DNA, 100 bp, Homo sapiens
ctggtgaggacagcctgccagagtctgagcccccctccatgcgcctgaaggcccgacccagcagccctggcttttccgtgcttacctgcagcgccttctc

SEQ ID NO: 726441 - DNA, 75 bp, Homo sapiens
cgggaagatggcggctgggttcaatcactctgagaggagtgataccaatgaaaaaaggtcagttgattccagtgc

SEQ ID NO: 726442 - DNA, 75 bp, Homo sapiens
atctacggggctgacatcagcggctctttgtatgatgacgacatgacttgggacatcaaatataagaccgtccgc

SEQ ID NO: 726443 - DNA, 115 bp, Homo sapiens
gcaggatggatcaccaccagccggggactgggcgctaccaggtgaacctaaaggcagacccagaagagctttttacaaaactagagaaaattgggaagggctcctttggagaggt

SEQ ID NO: 726444 - DNA, 50 bp, Homo sapiens
ccgtgggcagccagggtcggtgaagggttcagaatctcccatgatgattg

SEQ ID NO: 726445 - DNA, 51 bp, Homo sapiens
ggacgattacgagctgcaggaggtgatcgagacggggttttgccatgttgc

SEQ ID NO: 726446 - DNA, 75 bp, Homo sapiens
gcactccactctgactcccaggacgggcaccaggaaaatcctgccttgcttcgttgggcctatgcaagaacaata

SEQ ID NO: 726447 - DNA, 87 bp, Homo sapiens
aagactttgtgtggctacatgacactcttattgaaacaacagactatgctgggcttattgactatggcagccagggacgccacttca

SEQ ID NO: 726448 - DNA, 100 bp, Homo sapiens
gtagacaccagctccgaaatcaccaccaaggccaagctgaagtctttctcagccaagatcgtgcagctcctgaaggagtggaccgaggccttcccctatg

SEQ ID NO: 726449 - DNA, 75 bp, Homo sapiens
gaaagtggtgaatcccctgtttgagaaaaggcctaagaattttggcattggtgatgtacagttcattgattatga

SEQ ID NO: 726450 - DNA, 100 bp, Homo sapiens
agaaatcatggcattcacacagcccataaagcaagacaggaaagaccacagcaagattctttcattcgtctcctcctagcctgggggaccaggctcgaac

SEQ ID NO: 726451 - DNA, 90 bp, Homo sapiens
agacatcctgagaggacttggcaggtggtaaaggcatttatagtccttactccagcctactcctctcatgacccagaggcactaacgcgg

SEQ ID NO: 726452 - DNA, 100 bp, Homo sapiens
gatcatacagcagatgtccagtttgtggtaaatatgccagctctagaacacatgaatcagattttacacatcttgtttgtatttttaccctttctgtggg

SEQ ID NO: 726453 - DNA, 78 bp, Homo sapiens
acttacggttttcgtggagaagccttggggtcaatttgttgtatagctgagctcactgttaatgaagcggctgctcaa

SEQ ID NO: 726454 - DNA, 74 bp, Homo sapiens
cctccgttagctaattaaaacatttttcagggacgtagccatccagaggtcagcccaaggctgccccctcggtc

SEQ ID NO: 726455 - DNA, 74 bp, Homo sapiens
gcggggagaggaccatgtgagtgggctccggagcctcagcgccgcgcagtcaggatggctaaaggtgaccccaa

SEQ ID NO: 726456 - DNA, 85 bp, Homo sapiens
agggaggatgtcgggacaccccggaagctgggaaatgggctttgaagactgcttggtatttgatgagttaatggataaattcagt

SEQ ID NO: 726457 - DNA, 98 bp, Homo sapiens
ggacaggcggattggaagagcgggaaggtcctggcccagagcagtgtggaagacctccgtgtggatggccgtggctgtgaggactaccgatgtgtcga

SEQ ID NO: 726458 - DNA, 82 bp, Homo sapiens
aagaaaaccccgaggagccctgttccaaagcctcctggaccgtccaagaaggaacggcaggagcagctgatgggatatcgga

SEQ ID NO: 726459 - DNA, 100 bp, Homo sapiens
ggcagagaagaagcaagaccatggtggggaagatgtggcctgtgttgtggacactctgtgcagttttgagtatccgaggagcccaggaggaggaacccac

SEQ ID NO: 726460 - DNA, 100 bp, Homo sapiens
cttgaaaaccctgtactcctcaacaagttcctcctcttgacatttgcaaatgacccggacaaggagtacaacatgccgaaggacggcaccgtacacgagc

SEQ ID NO: 726461 - DNA, 50 bp, Homo sapiens
ttcatctgtggatggagtattgataaatttgcgcctcattttggtaagcg

SEQ ID NO: 726462 - DNA, 96 bp, Homo sapiens
tcctcctcctcctccccaccaccaccatctccatcacccaccaacaacaccacaataatccacagccaagaaatctctaccccaaatttgcgtcac

SEQ ID NO: 726463 - DNA, 117 bp, Homo sapiens
ggtggagtcgttgctgttgctgtttgtgagcctgtggcgcggcttctgtgggccggaaccttaaagcttatgtccctgatgccaaaaatgcacctactctttcctctaactctggtg

SEQ ID NO: 726464 - DNA, 82 bp, Homo sapiens
cttcggtttgcacagctagaggccgcgcagcagcaaaggatgagcggaaccttggaaaaggctggagtgcggtggtgcgatc

SEQ ID NO: 726465 - DNA, 98 bp, Homo sapiens
caggctgtggatgtgatcccgaaaccagcctggacaccaagtctgtgtcagaaggccacctcaagaggaacatcgtggtgaagaccgtggagatgcgg

SEQ ID NO: 726466 - DNA, 100 bp, Homo sapiens
caggaggattttgtaatggaagggcatggcaagactccacctcctggtgaagaaagcaaacaaaatgcactcggtgatggaaagagagccactattctga

SEQ ID NO: 726467 - DNA, 82 bp, Homo sapiens
ctcttctgcctcttgatctccgccaccgtcttcaggccaggtgtttcccattaaacactaccaggacaaaatcaggccttac

SEQ ID NO: 726468 - DNA, 90 bp, Homo sapiens
catttctattactacctgtggagatttctgcattttggctacaaaagctgatgaaaatcatcctcaggcttcttctcatatcggtaattc

SEQ ID NO: 726469 - DNA, 51 bp, Homo sapiens
gttttccagtgtgatcttacccttaaagctaaatctggttaagaagtactg

SEQ ID NO: 726470 - DNA, 82 bp, Homo sapiens
agcaaatctcctgcctcagcctcttgagtagcctgagtagctgggactaaagatgccagaggaacaagcattctgtgttttg

SEQ ID NO: 726471 - DNA, 74 bp, Homo sapiens
actggaccacttcaatgcagatgggtctgagggcaattgaaggaacagactaaaaatcgtgtcctggaaggaaa

SEQ ID NO: 726472 - DNA, 90 bp, Homo sapiens
gatgagtctagctgctctagtgaagaagatgaggaagatgactcggaatcagaagctgaaacagggaattgacataggggatagcttaac

SEQ ID NO: 726473 - DNA, 74 bp, Homo sapiens
aggagcaagagcaagatcaccgtgacatccgaggtgcctttctccaaaaggcccgggcgcgaatcggaggctgc

SEQ ID NO: 726474 - DNA, 100 bp, Homo sapiens
aacaagcagggcgacagcattctgtgccgctgagccgcgctgtccaggcggccggggacggtgcatcaagcagggggagaactggtacagtcccaccgag

SEQ ID NO: 726475 - DNA, 80 bp, Homo sapiens
ccttcaagtacttggcagatcactctcttagcagtgaggagctggtttcacctgaggacctgctggagtggctgcggcct

SEQ ID NO: 726476 - DNA, 90 bp, Homo sapiens
caaggatgcgctggggcctatgatgcttgaggatatggctttagttgcccctgaagctccttcagaacaagccagaagagtttttcaaac

SEQ ID NO: 726477 - DNA, 75 bp, Homo sapiens
atttgacgtggtgacgtgctgtggatacctcccccagatgaagatgtgtgtgtctttaagtgctcagtgtcccga

SEQ ID NO: 726478 - DNA, 100 bp, Homo sapiens
gccgtgccgcagatgcccaccggaatggagaaggaagaggagtcggtactacagtgcaaccattctgcagatgtctggtgttgaagatgatagacttgca

SEQ ID NO: 726479 - DNA, 100 bp, Homo sapiens
cgcccaagccgccctggatggagactcccaggtcttccaaaagcagccatgatcactcatcagcgcatatggtatggaactggcctcacttttgtaagcg

SEQ ID NO: 726480 - DNA, 51 bp, Homo sapiens
gcaatccttggctcactgaggaggtttggtcctcatgctgataccgccagt

SEQ ID NO: 726481 - DNA, 75 bp, Homo sapiens
acccgctgccgggcaccgaggaccagctcaatgacagaaagaagtggccctggagagacccccttcagatgtgag

SEQ ID NO: 726482 - DNA, 83 bp, Homo sapiens
gtcgtaaacaaccctgaagagaacagccaggcctggccgccgctgcccagcagatcccgatctcccttcacacatctctgcag

SEQ ID NO: 726483 - DNA, 82 bp, Homo sapiens
cgaccctggccgccccgagcggagcctggaggagggccctcctggacccgggagcggaccctggtggcggtgaagcccgatg

SEQ ID NO: 726484 - DNA, 100 bp, Homo sapiens
ggaactatacacctctgcatgaagctgctattaaagggaagatcgatgtgtgcattgcttcagtatcagacacagcacagcagccatctgaagagcaaag

SEQ ID NO: 726485 - DNA, 98 bp, Homo sapiens
ctctgggctcaacagaacacagggaataatccagaatggctactctgatctatgttgataaggaaaatggagaaccaggcacccgtgtggttgctaag

SEQ ID NO: 726486 - DNA, 100 bp, Homo sapiens
gggcccttcgcgggagagcgtcgtgcacgcgggccagaggcgaagacctatggagcattcatgatctagaagcaagataccaggaaagccaagctggaaa

SEQ ID NO: 726487 - DNA, 83 bp, Homo sapiens
cgacaaaatgcaaaaaaggaggccaaagactttgtaaatttcatctgatttccaagttaggaagagtggaaaaaagtgtagaa

SEQ ID NO: 726488 - DNA, 82 bp, Homo sapiens
ctctttccccgtcagcatcccagccgtgctcacggcggtgcgtctttctacgtgaataggattttgtggctggccagataca

SEQ ID NO: 726489 - DNA, 51 bp, Homo sapiens
caaagttatggatgtcactgaggatttgtttggtgtcagcatggttgtgcc

SEQ ID NO: 726490 - DNA, 100 bp, Homo sapiens
gagagcgcgaatatcgtcatcgttagaaggtcaatgtgacggtggactacattagaccagccagcccagccacagagacagtgcctgccttttcagagcg

SEQ ID NO: 726491 - DNA, 83 bp, Homo sapiens
ccggatcccataaacactgtcgatgttcacgtaaacataatttcccaacatccagtcctacccttcttattaagagcatgttt

SEQ ID NO: 726492 - DNA, 84 bp, Homo sapiens
cagagagggaagagattcagccagcacactcctcgcgagcaagcaaattgtggctactaatttgccccctgaagatcaagatgg

SEQ ID NO: 726493 - DNA, 49 bp, Homo sapiens
acagggatctgaccgccctatgcaagggagctaaaaaagttcatttggg

SEQ ID NO: 726494 - DNA, 101 bp, Homo sapiens
cctaggccggtgggtgagtgcaccgcgttctcgcacgcgtcatgctttctgtatgagcccaatagccaagggtacaagtactaccgacagaagctggagga

SEQ ID NO: 726495 - DNA, 90 bp, Homo sapiens
ggagcgtcaacagcagcaccatgggagactccatcctctgccaatggcccttcccgggagggctctaggctgccgcctgctagggaaggc

SEQ ID NO: 726496 - DNA, 100 bp, Homo sapiens
gccaccctggaaaccctgcattttgggaaactcgactttggagaaaccaccgtgctggaccgcttttacaatgcagttggtaaacctcacaaatgtggat

SEQ ID NO: 726497 - DNA, 98 bp, Homo sapiens
agaaaccaggaacggctgaaacgaagagaagagagagagagagaagaaagggagaagctgaggaggacagtcattttgtttactcattcagccctgtt

SEQ ID NO: 726498 - DNA, 100 bp, Homo sapiens
gcatgagctgcactttgttgagaaggctgcagcagcccctcggccctgctccgagagtgagttctcctgtgccaacggccgctgcatcgcggggcgctgg

SEQ ID NO: 726499 - DNA, 75 bp, Homo sapiens
gctggccgagcaggctgagcgatacgacgctgtcgcctggttgggcccggaaatgggacgtcgcgctttctcagg

SEQ ID NO: 726500 - DNA, 51 bp, Homo sapiens
ttggattgctatttaccagaggaagcagggaggagagagcgatggcttttt

SEQ ID NO: 726501 - DNA, 82 bp, Homo sapiens
cagagaacttgccggtgccagctgagaacctaaaggcagacccagaagagctttttacaaaactagagaaaattgggaaggg

SEQ ID NO: 726502 - DNA, 89 bp, Homo sapiens
gttcaccccacttcatcagcgtacataagttatctcttcttttggacccttattttatgccataatggcttacctatttctactccatg

SEQ ID NO: 726503 - DNA, 100 bp, Homo sapiens
ggagaaggaccggatttccgactggggagagctggtattgcactgcacaggccacattcacgtatatgataccaacagtaaccaacctcagtgtgggtat

SEQ ID NO: 726504 - DNA, 100 bp, Homo sapiens
agtgatgaactggaaaggactggaattgatttgggaacaactggtcgtcttcagttaatggcaagacttgcagaggggaactgctcgcagaaagaagaag

SEQ ID NO: 726505 - DNA, 89 bp, Homo sapiens
tcctgtcgctgcccgtgtgattactgagactcaggcctatatgaacccaatagcaatggcgagatcaaggggtccaatccagtcttcag

SEQ ID NO: 726506 - DNA, 83 bp, Homo sapiens
cgactccccccgggcccaaacaagagtgagccatggagctacgtgtggggaacaagtaccgcctgggacggaagatcgggagc

SEQ ID NO: 726507 - DNA, 75 bp, Homo sapiens
cgcagacagagctattccagcaccagcagagatgacgtccggttgtttgccttcgtgcgcttcaccaccggggat

SEQ ID NO: 726508 - DNA, 90 bp, Homo sapiens
gtcaccaatgccgtgggcatgggccgcgctgagcaggtcatctttgtccgaggacaaagaagtgaacttggagcaggtccaccggcgcat

SEQ ID NO: 726509 - DNA, 100 bp, Homo sapiens
tcaggcatccggcggaactggatcgaggctctgagaaagaccgtacgtccaacttcagccccagatgtcaccaactggagtacagtggcgcaatctcggc

SEQ ID NO: 726510 - DNA, 100 bp, Homo sapiens
ctggaaaacttcccttccctttcggcaattaagttggaatatgcaaggttggttaagttggcccaagaagacaccccaccagaaaccgattatcgtttac

SEQ ID NO: 726511 - DNA, 71 bp, Homo sapiens
acaggctgtggatgtgtcccccctgcgccgtgtgaaccaggccatccgggatggtgtcattgaggccagca

SEQ ID NO: 726512 - DNA, 100 bp, Homo sapiens
taaagtggaatcaggagagcccagaggtcctttgaatcatctctacagagaactgaaatttcttcttctctgtgcagtgtgcctagaagacttcaagcct

SEQ ID NO: 726513 - DNA, 89 bp, Homo sapiens
tcctccgggggacccgcggtccccaccgtgcagcggggcatcatcaagatgggtgccaaagcatgctttctgcgggacattcctttctc

SEQ ID NO: 726514 - DNA, 80 bp, Homo sapiens
cagtacaagcttacgtctctgctcttcagtacaatcctgcatcaacttctaactcatctcgccaggagaggcctccagtg

SEQ ID NO: 726515 - DNA, 87 bp, Homo sapiens
gggacccggtgacagcgtgagaggaacagcgccttttgatagtcctaagtaattgctgctatctagaacgtcacaccttcctaaata

SEQ ID NO: 726516 - DNA, 101 bp, Homo sapiens
ctaaattggagaaaagcattgatgacttagaagggtatatgagaaaatattgactcctatctggccttcatcaactgacctcgaaaagcctcatgagatgc

SEQ ID NO: 726517 - DNA, 98 bp, Homo sapiens
ccagataagatttcaggagctgatattaactccatctgtcaggagagctaaaaaagtccctgtacgccatcttctcccagtttggccagatcctggat

SEQ ID NO: 726518 - DNA, 71 bp, Homo sapiens
aggaagccagaagatgggagagacatttttgaagccagtactgatgcaggcactgcaggagccctgactcc

SEQ ID NO: 726519 - DNA, 75 bp, Homo sapiens
cggggctgggcgagcgcaaagatgtccgcgcccgctgccgggaggcgaggtcacaccgacaaatctgaagcgggt

SEQ ID NO: 726520 - DNA, 74 bp, Homo sapiens
aaattcccttatcgatattatgagagcagagcatgatcctcttaaggattcactggatgaaagaaagataaaag

SEQ ID NO: 726521 - DNA, 75 bp, Homo sapiens
gtagaggatgccgaggagaaaacagcaggcacccaagcgggcggcaggaatgggccttgacgaaggagaagtcgg

SEQ ID NO: 726522 - DNA, 83 bp, Homo sapiens
gccgtctgctcttctgcctcttgatctccgccaccgtcttcaggccaggaagggaatttgaaggagaagaagaatatctggag

SEQ ID NO: 726523 - DNA, 100 bp, Homo sapiens
tggaaatgggcgtgagaatgtggggatttataacctctccaaaggagtcaaccgattctgcctgtccaagcctggtggaatggagaatataaagcagcac

SEQ ID NO: 726524 - DNA, 75 bp, Homo sapiens
cagaaatgctaagacatcctaggatatcgggaaagcctatattggtacctggaatggccaaatatcaaggtgaag

SEQ ID NO: 726525 - DNA, 75 bp, Homo sapiens
taacctttggactatgtttcaagctgctcaaaaactgggaggatatgaaacagaatgtatcctgtcaggtataat

SEQ ID NO: 726526 - DNA, 76 bp, Homo sapiens
aataagaagaccatcgcagagggaaggcgaatccccataagtaaggtccatccacatcgtggcgctggggaacgag

SEQ ID NO: 726527 - DNA, 90 bp, Homo sapiens
ggctacctcgtggacaagtttgcagatcgggagcgcaaggtcgccctcaaggccatgatcaaaacgttgactatagtcaatggggccaat

SEQ ID NO: 726528 - DNA, 92 bp, Homo sapiens
ctggggccagggaaccctggtcaccgtctcctcagagacaagaggagcagcagcggcaccgcccctcaccctggagggtcctgtacaatctc

SEQ ID NO: 726529 - DNA, 51 bp, Homo sapiens
agccctgggtcgcttggaagaagccaagaccaaaatccacacccttatcac

SEQ ID NO: 726530 - DNA, 100 bp, Homo sapiens
cgcgagggttggagttttggcgagagtttgtggaagatggcgcctgttgtgacagggacctcagcagccatgtcgaagccccatagtgaagccgggactg

SEQ ID NO: 726531 - DNA, 76 bp, Homo sapiens
catggcccaggcagaccttgcagtcaaagtgaatctggattgggaaagtcgacattaatcaactcattattcctca

SEQ ID NO: 726532 - DNA, 89 bp, Homo sapiens
gagtacttcgccacttactttaatgagaagatctccattcctgaggaggagctgtcggaaaaggtaacagaagatggaactcgaaatcc

SEQ ID NO: 726533 - DNA, 87 bp, Homo sapiens
gacagtgaggaggaacaagaggagattcttctgctgatcgacattgagcagtcctacatcaacacgaaccatgaggacttcatcggg

SEQ ID NO: 726534 - DNA, 75 bp, Homo sapiens
gattgaggttctgcatggcctgcagctcaagatgagcatcttgcaagcagataaaatccccccatctctgtactc

SEQ ID NO: 726535 - DNA, 90 bp, Homo sapiens
aattctctgcaggtttttgaaacagcagcagcttcaatggattctgagcttcatcccttgttctcaaaagtctatggtcctgtgttcacc

SEQ ID NO: 726536 - DNA, 75 bp, Homo sapiens
gggcctgattgaggactgccagctggcgctgcaggacaaatatcagtggatgggttcatgcgctatctgagtgga

SEQ ID NO: 726537 - DNA, 97 bp, Homo sapiens
ctacttcctctgtatagagcaactgttgaactcagctgcctgtagtgccctgtgggacatcgagaccggccagcagacgaccacgtttaccggacac

SEQ ID NO: 726538 - DNA, 87 bp, Homo sapiens
gcccggcccggagcccccagcgcagcggccgcgaattgccaagaagatgcttttagaagaaattaaagccaatctttcctctgatga

SEQ ID NO: 726539 - DNA, 90 bp, Homo sapiens
agctggcagcagcatctcagcccaagagaaggaaaatgcttcagtctctgggcagaccagaagtccacatggccctggacgtggttctgg

SEQ ID NO: 726540 - DNA, 99 bp, Homo sapiens
ttcgagtgacccgggtgccgaggagcgggaagagttgctgggagatgccctgtatccaagcccaatatgggacaccagcaccgagtccgggaccccgtg

SEQ ID NO: 726541 - DNA, 97 bp, Homo sapiens
catgccgaaggtatctggaagtcgtgacacggtaaaataccatgaagattttgaaaaaacaaaggggagaggctttactcccgtcgtggacgatcct

SEQ ID NO: 726542 - DNA, 100 bp, Homo sapiens
ctgctgggcaccttcatctggaataagtatgtgggtgccccggtggcttatgtccagcagatatttgtgaagtcctcagtgtttccctggcacaagaacc

SEQ ID NO: 726543 - DNA, 82 bp, Homo sapiens
ctacacaggacctgagaatctgagaaactgcagtctcggagtcggagagcgcgcctcgcttccagagcccccggacccggcg

SEQ ID NO: 726544 - DNA, 74 bp, Homo sapiens
ggctgtcatataactcctgagaatagtggttcttaactcttactgagatgatgaggaacgtggagctggccccg

SEQ ID NO: 726545 - DNA, 101 bp, Homo sapiens
ccgagtgggaccatttgaagatctctattcctatgtgtctcagcttggggctggtgggactttccttctgtggggacctcggcccctgcagtgaggaggag

SEQ ID NO: 726546 - DNA, 90 bp, Homo sapiens
cggcgaggagagcccgcggctgcaggggatattacccaaaagggggtggtgaagtgattgttcgaatgtcaccagttaaacaattgaacc

SEQ ID NO: 726547 - DNA, 98 bp, Homo sapiens
aaaagatcacagcagacctcacaagcaccgagcgcggcatgcacagaatgaacagccttccctcgtttggtttgacagaggaaagttttatttgactt

SEQ ID NO: 726548 - DNA, 136 bp, Homo sapiens
agcgagatgaatactgctgaggactggggcctcattttggatatctgtgataaagttggtcagtctcgcactgggtgggaccagggagattggatctgctctcaccaggatgtgcatgaggcacagaagcattgaa

SEQ ID NO: 726549 - DNA, 88 bp, Homo sapiens
ggggctgtgaaccctggcgaccactgcttctccgtgggcagcattggcgaccagcgcttcacggaaaaagaagatgtccctgtggaaa

SEQ ID NO: 726550 - DNA, 83 bp, Homo sapiens
ctctgctgtgggcgctgctggcgctctggctgtgctgcgcgacccccgcgcatgtacctggagtagaacagaaaaattattat

SEQ ID NO: 726551 - DNA, 109 bp, Homo sapiens
taccaaatgcttattttctgcttccaaaggtccagagcattcagctgtctcaaatgcagattatctcaactttggtctcctgggaccactcgttgctgacagtcagaaa

SEQ ID NO: 726552 - DNA, 80 bp, Homo sapiens
actcgtgttccctgccactgtcttgttccgaggcggccccagaggtgctggagaatctggtaaaagcaccattgtgaagc

SEQ ID NO: 726553 - DNA, 75 bp, Homo sapiens
ctttgatcgtcttcctcttcagccatccagcacttttcaggattagaagaggctgtgtatagaaacatacaagct

SEQ ID NO: 726554 - DNA, 90 bp, Homo sapiens
attataaaaaatgcacagatttcaaaggacaagtataggtggatttacatgcctacatcttttgaggcctcccagtagcattggatgcag

SEQ ID NO: 726555 - DNA, 96 bp, Homo sapiens
tttggagaccgttgtggaaatcaaactgttcaaaggccctaaagacttaattcagtgcacaaatgagatgaatgtgaacatcccacagttggcaga

SEQ ID NO: 726556 - DNA, 75 bp, Homo sapiens
ctccgctttcgctacagcatggtggcctactggagacaggctggactcaggatttaaaaactggaacggtgaagg

SEQ ID NO: 726557 - DNA, 97 bp, Homo sapiens
tcggaagcaactgccgccgccgcctctttcatctcttctggggcaggggccagggccagtgtttgtccaacatgatgctgcccaactgtacctcaaa

SEQ ID NO: 726558 - DNA, 82 bp, Homo sapiens
ttccccacgcaaccccagatccatttacactttacaggcgtgatggtgggcatgggtcagaaggattcctatgtgggcgacg

SEQ ID NO: 726559 - DNA, 82 bp, Homo sapiens
ataacccttgatcctcctcctaattgcagcagcccctgtcaaagggaacaggaagcagtccacggagggtgacgccctagac

SEQ ID NO: 726560 - DNA, 80 bp, Homo sapiens
ttccccagttctggcagattctggaaactgtacattgaagcagagcagaaaaatatggctcaggagactaaccagacccc

SEQ ID NO: 726561 - DNA, 144 bp, Homo sapiens
aagagactgttcaaaccactgaggatcagattttgaagagagatatgccaccagcatttattaagttttctgtctcaactggtctctgacaagcctctgactgaatgtatccgtgctggccactatgcagcaagcatcataatt

SEQ ID NO: 726562 - DNA, 75 bp, Homo sapiens
attctccttcgctgtggcgggaagatggccggatttgaagagagatgcaggtcagctcctccagtaccacaactt

SEQ ID NO: 726563 - DNA, 97 bp, Homo sapiens
gcggccgggccgagggcgccagagggggccatgtcgtaccagggcaagaagagcatcccgcacatcacgcggtgcagaggggcaggatgccgccgac

SEQ ID NO: 726564 - DNA, 75 bp, Homo sapiens
ttggtcccagagtcatcatgaagatgtgggacctaggaaaaggcctgaagattccccagctataccagtctggag

SEQ ID NO: 726565 - DNA, 88 bp, Homo sapiens
cctcactcgtggctttccgaaggctgctgattttaggtgatgggcaagtcagaaagtcagatggatataactgatatcaacactccaa

SEQ ID NO: 726566 - DNA, 50 bp, Homo sapiens
ccgggacaaagtgacagccacgtgcaatcgactgttaaagtggtgtcctg

SEQ ID NO: 726567 - DNA, 90 bp, Homo sapiens
gtcgcagacatggacaccaaacatttcctgccgctcggaagaaacatattgccgagtggatgccgccgcgcagcgtgtttgcttgaggca

SEQ ID NO: 726568 - DNA, 78 bp, Homo sapiens
gggccaggagagcgctcggcgggccctgggctgcatcttgtacctgctgtgcttccggcagcacccttttgaggatgg

SEQ ID NO: 726569 - DNA, 75 bp, Homo sapiens
ggacaagtacatgtttgctacaaaggtggtgcttctgggctggctggctgagaaactacctactcttcgttccac

SEQ ID NO: 726570 - DNA, 100 bp, Homo sapiens
ggagcagacgctcaaccagcttctggtagaaatggatgggaagaaggagaaagggccaacccctgaagaagcaatacagaaactgaaggagacagagaag

SEQ ID NO: 726571 - DNA, 50 bp, Homo sapiens
ggcttcggaagcgctggagcttgagaggctggagtgcagtggcccgatct

SEQ ID NO: 726572 - DNA, 75 bp, Homo sapiens
cactgcctggttgcagaagtgccgaaagagcactggactccggaagactcacaacgacccagaaagcattctcaa

SEQ ID NO: 726573 - DNA, 75 bp, Homo sapiens
tggaggaggacccccagccaaacagagagaccttgaaggggcagtcagtagggaagatggctttatgctttattg

SEQ ID NO: 726574 - DNA, 107 bp, Homo sapiens
agaaataccgtgccctgaggttggacgtggggaatttctcctggggctcagagtggtgtccgcaatgttgccagtgtctgtctgcagattggctacccaactgttgc

SEQ ID NO: 726575 - DNA, 87 bp, Homo sapiens
cgctttgcgtcccgacgcccgcaggtcctcgcggtgcgcaccgtttgcgacttgacagcccacctgaggatattgaccataaggact

SEQ ID NO: 726576 - DNA, 83 bp, Homo sapiens
aaaaatgatcttacacgtgaagaaattgtggaattgatgcgtgatggagaacaaggagactggcatggagagtgtaatcgaag

SEQ ID NO: 726577 - DNA, 98 bp, Homo sapiens
ggcgacctcagctccggcctccaaggagcttcaggatggttcgtactaagacatggaccctgaagaagcactttgttggctatcctactaatagtgac

SEQ ID NO: 726578 - DNA, 100 bp, Homo sapiens
cagcatttgccatcttcaagtttgttcaggacattgcacttatcttaccaagctcttctgaaggttctatttctgaactggagcagctctccaattctct

SEQ ID NO: 726579 - DNA, 50 bp, Homo sapiens
cactgtattatacggttactatagtcctcgatgggcttcctggaatattg

SEQ ID NO: 726580 - DNA, 76 bp, Homo sapiens
cagagacctacgtggcagctgtgaaaaaagccatttccgaagatacaaactggactctcaggacaaaacgacacca

SEQ ID NO: 726581 - DNA, 74 bp, Homo sapiens
cgaccgctttccgggagactggagtcgaaggccgtgagcagtgtttggccagcgcttggatgagactgtggcct

SEQ ID NO: 726582 - DNA, 83 bp, Homo sapiens
agcagcctccacccaatgggagcccctcacaatctcctcaactgtttcatgatgacacccattcaagaatagaacaatatgcc

SEQ ID NO: 726583 - DNA, 100 bp, Homo sapiens
ttcatctgctgaatgttcaagtgatgatgaagactttgttgaatgtgagccgagtacaggtgtgtttggagcaggaaagagttacttgctggcagtggtg

SEQ ID NO: 726584 - DNA, 82 bp, Homo sapiens
tacagcatccggggacagctgagctggcatcagaagacctacgccttcagccgcggcgagtcctttgcacatgttggcaaca

SEQ ID NO: 726585 - DNA, 99 bp, Homo sapiens
gccccgattaaagactgtgttgcattatcaggacacattcagctaacgtattttagcaggtggagtgaggttgaagattcctgtgacagcgatgccata

SEQ ID NO: 726586 - DNA, 75 bp, Homo sapiens
cctacaacagtttggcgtgcaacatggggcttgagaaaggactctgtccctacctgtggttgtcatcgtccacgg

SEQ ID NO: 726587 - DNA, 100 bp, Homo sapiens
cagaaatggaagcaggaagtcctggtggtgaagcagtattttccaatttgaagattcatttgaaggtggctcctgccacctgctaatagcagttcaaact

SEQ ID NO: 726588 - DNA, 73 bp, Homo sapiens
cgcaacagccccttcgtcccaaaccatcttgattcaaaacatctatcgtaatccccaaaacagtgcacagacg

SEQ ID NO: 726589 - DNA, 85 bp, Homo sapiens
aggataagcctcgacttagaagctaccgagttaccctaagaaaggaaatctactttcttcaatgtgttaaccaatagtcaggctt

SEQ ID NO: 726590 - DNA, 82 bp, Homo sapiens
ttgatttagatgaaacgttctcctctgagaaggcacggctggctcagattaccaataagtatgacttcaaacctgcttctat

SEQ ID NO: 726591 - DNA, 100 bp, Homo sapiens
gctgcaggtgaccccaaaaaggagaagaaatctctagactcagatgagagtgaggatgaagaagatgactaccagacccccgccagcaactggccaccag

SEQ ID NO: 726592 - DNA, 75 bp, Homo sapiens
cttctctccgtgcaacgctggcaagtctcaaagtcgccacaggtaatcaaatgcaaagcagctgtgctatgggag

SEQ ID NO: 726593 - DNA, 100 bp, Homo sapiens
acgccatctggagggcctggtatatccagtctgactggaaataccggcatgcaggattgatggccttatctgccattggtgaagggtgccaccagcaaat

SEQ ID NO: 726594 - DNA, 100 bp, Homo sapiens
tgcccccgctgtgcgaccccaaggacgggcacctactcatggatggcggctacatcaacaatctgccagaaaacccgctacgagacctacgtgcagctgc

SEQ ID NO: 726595 - DNA, 100 bp, Homo sapiens
aaaatggcaactttaaagaagcagaagaagtctttgaaagaatatttggtgatccaaattctcatatggtcatgtttactggtgaaaatattcctgttca

SEQ ID NO: 726596 - DNA, 95 bp, Homo sapiens
tacagggtataactttacattagcagatatactattgtactatggacttcatcgctttatagcggttcaggaccatcatcctccatagccatagc

SEQ ID NO: 726597 - DNA, 99 bp, Homo sapiens
gagacagatcgcgagcggctgcggaccatttataaccgcgacttcaagatcagtgccggtggtggtgtgcacattgagccccggtatagacagttcccc

SEQ ID NO: 726598 - DNA, 74 bp, Homo sapiens
ccatgtccgcaccgggacgatcatcctggggacctggtacatggcccagattgccttcctgcagggagaaagga

SEQ ID NO: 726599 - DNA, 100 bp, Homo sapiens
ggttttaatatatctactcccagaggaattccagacctttggagtttaacccttctgccaatccagaggcaagcacaatattccagaggaactctcaaac

SEQ ID NO: 726600 - DNA, 50 bp, Homo sapiens
gcgcgcctttgtgcgcgcgccgagactgtggatattcataaggagaaagt

SEQ ID NO: 726601 - DNA, 74 bp, Homo sapiens
ggagaggttaaagagacccgttcagagtcctacagtggcagggtggagagattcaaccagttagcgtgaaagtt

SEQ ID NO: 726602 - DNA, 83 bp, Homo sapiens
cttgttgttgatccgtacccagtgggcagcgccgggagctggaccaagcggccgattcttctgatgtagagcgactggaaaga

SEQ ID NO: 726603 - DNA, 100 bp, Homo sapiens
gtgtgacagtccatatgtaaccaaatattatggatcctatctgaagatttggaggccaatcactgccaccttttatttccctgtgggtccaggaactgga

SEQ ID NO: 726604 - DNA, 100 bp, Homo sapiens
gcggatttctgctatgatgacagggaacggcctttaagagctggaagatgaaagctccgattccacacttgattctcttatacgctacttttactcagag

SEQ ID NO: 726605 - DNA, 100 bp, Homo sapiens
gctgaccgccgcgcgcccgaaccgggtgtccacatgagtgcctctcccagcagatccaggttaccagccagtcttgtctggtcaacagggattccaaggc

SEQ ID NO: 726606 - DNA, 90 bp, Homo sapiens
tcttcacctcgctggagtacggaccggtgccggagagccacgcatgcgcactgatacacatggtctacagtaagcggtcaggaaagcccc

SEQ ID NO: 726607 - DNA, 82 bp, Homo sapiens
cagcagcccccggggcaagagcaggagcccggcaccccccgccgacaaggagggtacatgtcccagagcaagcacacggagg

SEQ ID NO: 726608 - DNA, 97 bp, Homo sapiens
caccatgcaaaacagaaccttccaaatttccttttccaactaagctggatgaaaaagaaagtcggcgtctgttccaacagatcctttctggtgtgga

SEQ ID NO: 726609 - DNA, 75 bp, Homo sapiens
gtgaccggctgtacatcggtctggccgggctcgccactgacgtccagacagtatgtacagtgggagaaatcacag

SEQ ID NO: 726610 - DNA, 98 bp, Homo sapiens
tctcaacactgtcaccttctgtgacctggatccacaggaaagaaagaaacggaggtggagctgtacaacgaatttcctgaacctatcaaactggacaa

SEQ ID NO: 726611 - DNA, 60 bp, Homo sapiens
ccaagccaatgcccaagacattataaacgagccatgtgttcacatgtcatgtggaccagt

SEQ ID NO: 726612 - DNA, 83 bp, Homo sapiens
gcatcggaatctggagctggagcacaaggagctcggggagaggtgcaggtgggaagcacacctcaggaccaaagaatcgtcgg

SEQ ID NO: 726613 - DNA, 88 bp, Homo sapiens
ttgaaaacgacagcgaggagaagctcaagggcaccgtagaagtgcgaacggcaaatttccatcttgctgctgcaaaaggacacgtgga

SEQ ID NO: 726614 - DNA, 75 bp, Homo sapiens
aactagaacttactaatgagacttcagaaagtggatctcttcagcctgggaattatcttctttgagatgtcctat

SEQ ID NO: 726615 - DNA, 75 bp, Homo sapiens
aagccacacagtgtccagatacgaggatggtggatgcttccaaaagcatcgaagctgtccatgaggacatccgcg

SEQ ID NO: 726616 - DNA, 82 bp, Homo sapiens
ctttggatcagacttttgtgttgcagttcggaataccctctaccatctgctttggtcagggtgccgctcgaggatttaaaag

SEQ ID NO: 726617 - DNA, 75 bp, Homo sapiens
gttctttgagatgctggagaaaatgcagatccagtccttctgtggaacttctgaacatcttttattagtggaaat

SEQ ID NO: 726618 - DNA, 50 bp, Homo sapiens
caggcaacatttggacacatctcttagggggacgcttggaccagcttgcc

SEQ ID NO: 726619 - DNA, 75 bp, Homo sapiens
ccactcctgggccgtccctgaagaagaacatgtgatcatccaggccgagttctatctgaatcctgaccaatcagg

SEQ ID NO: 726620 - DNA, 100 bp, Homo sapiens
cgggaagcaagaggcaaagagaatcggttgcttcgggccttcctcacagacacactgctggaccagctgcccaacctggcccacttgcagagtttcctgg

SEQ ID NO: 726621 - DNA, 150 bp, Homo sapiens
gtggaaaagctttctcagaatccccttacctatcttctttcaacaaggatagaaatatcagcctccagtggcagcagatcccactcactccactccagccaccatcagagccaccagcctccccctccctgagctccactgagggaccgg

SEQ ID NO: 726622 - DNA, 98 bp, Homo sapiens
gggggccgaggcgagtcttctaagagggtgccttcaccagggatggaagaggcaggctgcagcagagagatgcagagttctttcacacgtcgtgactt

SEQ ID NO: 726623 - DNA, 100 bp, Homo sapiens
gagaagcagcgaagctggggcccgcgctgcagcgtggatgagcctcggggacactgtgccgaatgaaattgtcacggattctgcctctgtggagcgttta

SEQ ID NO: 726624 - DNA, 100 bp, Homo sapiens
tacatttgtgaaagtcagtttctgaggaatttcatcagggaacagaaagaacagcttcaaaagatgaaagacttcgggtctgagccacagatggctgacc

SEQ ID NO: 726625 - DNA, 100 bp, Homo sapiens
gctgaaacaatgggacccatgggttggcctgctggtgggtacccttgatgttgtgttggactccagcgcccgggtcgctccttaccgaatcttgtaccag

SEQ ID NO: 726626 - DNA, 50 bp, Homo sapiens
cagcctcctgagaagctgggattacaggaagcgagggatggaggttgtgc

SEQ ID NO: 726627 - DNA, 50 bp, Homo sapiens
gaataaacatgcaatgaacccaaaagggctcacgtgatggttctatggga

SEQ ID NO: 726628 - DNA, 100 bp, Homo sapiens
ttcacctttggatttcatcgcttaggattcactccttctccagttgcacagccacacccttcagctggccttaatgttgactttgaatctgtgtttggaa

SEQ ID NO: 726629 - DNA, 80 bp, Homo sapiens
gcaaagccattcgggttggagtaattggaagaagattgtgagaaagcattcttcaaaatggacaatgtgcttatagatga

SEQ ID NO: 726630 - DNA, 101 bp, Homo sapiens
atcttcgacgatcccatatattagagctcacctctgtcatttttccaatcgaggaagtaaagacgggtgtgaggagtctccccaggacagtgctatcaccc

SEQ ID NO: 726631 - DNA, 98 bp, Homo sapiens
taagaatgtgactttggagccagcctgctaggggctgaattctgactcagccatttactaactgtgtgaccttagagacgggatttcaccatgttggc

SEQ ID NO: 726632 - DNA, 90 bp, Homo sapiens
cttagctgctcacatatggatactttcacagttcagccacacccactcgcccgggtctatggccacggtcggagagtggtcctgtgtgcg

SEQ ID NO: 726633 - DNA, 82 bp, Homo sapiens
ctggacgaagccacccccaccctcaccaaaaaatgtggtgacctggaagaagaactcaagaatgttactaacaatctgaaat

SEQ ID NO: 726634 - DNA, 102 bp, Homo sapiens
gaacgaggcaaggagctaaagcagcgtgcgttcagccctgggacaggccgacggtcgcaaggtcctacggtcaagcatccgggagtttctatgcagcgaagc

SEQ ID NO: 726635 - DNA, 75 bp, Homo sapiens
aataccaccgtcggccgcatccgtttccacgactttctgggagactcgtctgcctcagccacctccctgacgctg

SEQ ID NO: 726636 - DNA, 76 bp, Homo sapiens
gtggccgtcaaggagctggacctctacctggcctacttcgtgcgtgagcgagggtgtgtccgcagccggccaggtg

SEQ ID NO: 726637 - DNA, 75 bp, Homo sapiens
agaagatgcccctgctgacactctacctgctcctcttctggctctcagatccgagtgaagcctgacaggaccggt

SEQ ID NO: 726638 - DNA, 75 bp, Homo sapiens
gggaagtgcgtctggatgactactaagggacactccggacgcaggcccggccaggagagttcgtctgcatcgagt

SEQ ID NO: 726639 - DNA, 100 bp, Homo sapiens
gaccaggccgtggggacgccggagaactgtgcccattacttctgcctggactgcattgtcgaatggtccaagctctggacatcctgagcccaagtccccc

SEQ ID NO: 726640 - DNA, 76 bp, Homo sapiens
ggataacgtcagtgtgcatgcctctctgccagggtgggaggtctgagagagactaagcatccatacacttttgtgt

SEQ ID NO: 726641 - DNA, 83 bp, Homo sapiens
ggcagaggcacttatgcttgtcagattgtcactgctgttccaagggcacacgcagagggatttggaattcctggagagttgcc

SEQ ID NO: 726642 - DNA, 82 bp, Homo sapiens
atgtagtaccatatccaatatctctgagatggaattctccagctgaagaagggtcaaggtagcaatgaagtgatgaggatac

SEQ ID NO: 726643 - DNA, 75 bp, Homo sapiens
aagaaaaatgccagccagaagaggcgttcgctgcgcgtgcacattccgcccggccgcaccacctgggtctccgcc

SEQ ID NO: 726644 - DNA, 97 bp, Homo sapiens
tgctgctggttagtgtgctctgagggagggtccgagccagccgctgttttgccggaggagcccctcaggccgtatatttgcttacttaaactaccat

SEQ ID NO: 726645 - DNA, 82 bp, Homo sapiens
gtgaccgagagcgcgaatatcgtcatcgttagaagttttgtttggctatgccaccacagtcatccccagggtctatacatac

SEQ ID NO: 726646 - DNA, 74 bp, Homo sapiens
agctgcagaggggcattatgcttcccagagtacacagataagctgtttctctccaagttctttctcctggcgtc

SEQ ID NO: 726647 - DNA, 75 bp, Homo sapiens
atcaacactgcttctgatggcaagaaagtcagaaacatggccctggatgatgtcgtgatcctgaatgtggacacc

SEQ ID NO: 726648 - DNA, 100 bp, Homo sapiens
ccggttttatgagtgggaaccatttgcagaagcatcagacaacagtcagcgctttcgagaaacctgttttgcatttgccttgacaccacaacaagtgcag

SEQ ID NO: 726649 - DNA, 100 bp, Homo sapiens
tgcggcatcacctcctccaagaccgtgctggtctttctcaacctcatcttctgggggactcattctcacagttccggtttgctgaggagaaagaatggga

SEQ ID NO: 726650 - DNA, 100 bp, Homo sapiens
agctcagccctccacctccacagatgtggaattagaagaagctattagaagaagtcttgaggaaatgtaattaaagatattaccacacaacatcaagtgg

SEQ ID NO: 726651 - DNA, 75 bp, Homo sapiens
cattcagtcagaagaaggctgctattgaaagagagtatgcacagttttcggctttgtgagaaaccttaccatcaa

SEQ ID NO: 726652 - DNA, 75 bp, Homo sapiens
ccatgtccaaaccaggaaatggacaggtggtctgtttttctggggggccaccaacacctcccgtgaatctaccat

SEQ ID NO: 726653 - DNA, 82 bp, Homo sapiens
gctgcaccaagtggcgaaggagccggctccaaggtgtcgtgaaaactacccctaaaagccaaaatgggaaaggaaaagactc

SEQ ID NO: 726654 - DNA, 50 bp, Homo sapiens
catcgggcagtggctccgctgggataagaaatgcactcggtgatggaaag

SEQ ID NO: 726655 - DNA, 101 bp, Homo sapiens
aagagcacgctatgagagatacagtggcaatcaggttctcttttgccgccccgggggaaggtgcggaggacgcagacagcgggcccgagagccgcagcggg

SEQ ID NO: 726656 - DNA, 100 bp, Homo sapiens
attgacctcgactcccatgcgatctggtaccaaaggagaatttggagagctggctaaattatttgaagaaagaattgccaacagtggtgttcagagcctc

SEQ ID NO: 726657 - DNA, 97 bp, Homo sapiens
tacttctggcggcaggactggtggcctgcttggcagcactgggcatccagtaccagacaaccctccaggggacccctctctcagccaccctctctct

SEQ ID NO: 726658 - DNA, 136 bp, Homo sapiens
acgagtgcaggagccataatgtcgacctgccggagtcgaggattccagggtcgaacactcgtgcaagaagaaacacacgctgctgtgccccgactttgcccgcaggggggcgtgtccccgcggcgcccagtgccag

SEQ ID NO: 726659 - DNA, 50 bp, Homo sapiens
ctaccaaggacagcttttttcctgcaagggatagctgggagtatggccac

SEQ ID NO: 726660 - DNA, 87 bp, Homo sapiens
tccttcttcaggagagcgccccagggcaagccccgctccggccaacaatataacaagaggattgcctgatccagccaagatgcagag

SEQ ID NO: 726661 - DNA, 75 bp, Homo sapiens
caaaacaaaagatttaaagaagaaatggctagaacagtttgaaatggcttttttctcagcaggttgtgtggcgct

SEQ ID NO: 726662 - DNA, 82 bp, Homo sapiens
gcttgttcgggctcagcggccgcgaggccgcagctcccgattttatcatgtgggcaacctgctgcaactggttctgcctgga

SEQ ID NO: 726663 - DNA, 74 bp, Homo sapiens
tgtggacatcagcgccatccccgagcagcggtggaagctgcctcttctgaaacagtctccctggagcaaccatc

SEQ ID NO: 726664 - DNA, 100 bp, Homo sapiens
ccgtgggattaggcttcgccggctacgattgcgagaacaccttctgcagtggggaccatgtgtcctggcacagccctttggataacagtgagtcaagaat

SEQ ID NO: 726665 - DNA, 101 bp, Homo sapiens
cccagcatgaggcaggaggagcgctacctgattgctctgggaacagttactaatgtggaagaagcagtgaagtggataagttacacttatctttatgtacg

SEQ ID NO: 726666 - DNA, 100 bp, Homo sapiens
caacgatgatgaacagtatgcttgggagtcttctgctggaggttccttcactgtgcgtgctgaccatggtggagccgccaccaaaatgcagattttcgtg

SEQ ID NO: 726667 - DNA, 100 bp, Homo sapiens
cgggactttgcagaaaggcttcactacccttatcccggagagctgacaatgatgaatctcaaggaatgtttgctgggggattgaaggagatggaacagga

SEQ ID NO: 726668 - DNA, 100 bp, Homo sapiens
gacacgccgcttcatcgagctgcctttacaggacgaaaggctgtggaaaatctctgttctcacaaagtctccccaatgctctacaagcaactgcgtcagg

SEQ ID NO: 726669 - DNA, 90 bp, Homo sapiens
gccaagctccagtgtcccacttgcatcaagctgggcatccagggctcgtacttctgctcgcagagaatgtaactggtcactacatttccc

SEQ ID NO: 726670 - DNA, 101 bp, Homo sapiens
ccaagcttccaggtgtcccagaaacccaggaaatcgagactcatgactcccagagaggatggcatctagaagaaaaggtcacggatcgcctacagtgacga

SEQ ID NO: 726671 - DNA, 100 bp, Homo sapiens
gtgagacaatggtctatcaccccaacattgacctcgagggcaacgtctgcctcaacatcctcaggttttaaaatcaaagatgggaaaatcggagaaaatt

SEQ ID NO: 726672 - DNA, 100 bp, Homo sapiens
accttgcccatgtctcacgcgggtgtaccaacagtaccgttattgccaccacaagtaaaccagtccctcacttctgtgccaccaatgaatccagctacta

SEQ ID NO: 726673 - DNA, 100 bp, Homo sapiens
gctggcccaacggtttccccagcagtagcctctgcgaccagctgtccccgccctactccggaccgccccaaagactccatgggatggacctgagtcagcc

SEQ ID NO: 726674 - DNA, 82 bp, Homo sapiens
gaacgaggcaaggagctaaagcagcgtgcgttcagccctggggtgtgaacccacatccctgcccccagggccacctgcagga

SEQ ID NO: 726675 - DNA, 75 bp, Homo sapiens
aaaagaagaatcttcatcttgagttggaagcactgtctgttcggcacttgaagtactccttgtttaagaaatcac

SEQ ID NO: 726676 - DNA, 97 bp, Homo sapiens
agcctcgttgcggccatcgccctgccggaccgcgcctcaggctcccccagggcgtgatggtgggcatgggtcagaaggattcctatgtgggcgacga

SEQ ID NO: 726677 - DNA, 75 bp, Homo sapiens
gtggcgatggtcttcctgctggggctcatgtttgaggtgaatccgccatactacatcccgctggttgagctggtc

SEQ ID NO: 726678 - DNA, 100 bp, Homo sapiens
gaagaagcacttaaatactcatctactaggcaagcatggagttggcaccccaaaagaaagataaaccgagaaaactggtgtacaatagagccatgccctg

SEQ ID NO: 726679 - DNA, 100 bp, Homo sapiens
ggggacaagtcggcgccccagagcggacgagattaagatgttctacgaggagcatttgcacttggacgatgagatccgctacatcctggatggcagtggg

SEQ ID NO: 726680 - DNA, 100 bp, Homo sapiens
caaaagaagacggtgggatcaggagatgtgaacagagtatctgccaagcccgggcttccgtgatggtctacgatgacaccagtaagaaatgggtaccaat

SEQ ID NO: 726681 - DNA, 50 bp, Homo sapiens
cctcccccgcatgacccccttgaagatgcagatgcctccagctattacga

SEQ ID NO: 726682 - DNA, 74 bp, Homo sapiens
acaaagcagtacctgaaacagaagatgtgcagggcgtgcaatggaattgagttttgccctggtaaatgggaata

SEQ ID NO: 726683 - DNA, 75 bp, Homo sapiens
gcgccggcctcctcagtgcgaagaagctgcagccgcacctggccaagggagctcctccattcctgagaccacctg

SEQ ID NO: 726684 - DNA, 50 bp, Homo sapiens
actccactagagtcatctctacattggcctttaccagagtttgatccaag

SEQ ID NO: 726685 - DNA, 90 bp, Homo sapiens
ctggctggtctctgccgcacactgctacatcgatgacagaggattcagggtcagcaaaggtctggctgcagtcaggtcctctgttcctcg

SEQ ID NO: 726686 - DNA, 100 bp, Homo sapiens
gacaaggccctgctctgcagcggcttcttggtgacctgtggcagaggctctcccattccaggaagaagctaatggagattttccacatcatcctgaacca

SEQ ID NO: 726687 - DNA, 87 bp, Homo sapiens
tgggaagtgctacgtggacatgtcaacagtggacgctgacaccgtcactgagctggcccaggacagtcattttgtttactcattcag

SEQ ID NO: 726688 - DNA, 111 bp, Homo sapiens
gtgtgcagaaggaggtcctgccgtccatgcggaagatcgtcgccacctggatgctggagctggtaggtgagtgctgtcctcggctcactttcctcaagctctccggctgcc

SEQ ID NO: 726689 - DNA, 75 bp, Homo sapiens
tgccccttggtgggctgaagcttcatggaggattcactccttctccagttgcacagccacacccttcagctggcc

SEQ ID NO: 726690 - DNA, 97 bp, Homo sapiens
ggctcttcccggcgctctcctggctcccttctgccccagctccgtctcggcggcggcggtctgtgctgagacctataaccctgatgaggaagaggaa

SEQ ID NO: 726691 - DNA, 85 bp, Homo sapiens
aagactttgaacgcactcctcagagtccgactctcccacctgctaaggattacggggcgctgaaagacatcgtgatcaacgcaaa

SEQ ID NO: 726692 - DNA, 100 bp, Homo sapiens
cctagtttcaacagacaacatttttctccccatccttggacaagcgcctcaaactcatggcacaagagactatagtccccggcagatggcagttcgcgag

SEQ ID NO: 726693 - DNA, 75 bp, Homo sapiens
gcgacccaagacacccagagagggacaggtgcgtgctctggaggaggccaacgccgacctggaagtgaagatccg

SEQ ID NO: 726694 - DNA, 99 bp, Homo sapiens
ttgtgtttgtgatcaggagagcagtcttctgaagaattgtggctcagttttcttggaaactacttgagttgctctgaaacctaccgcatgccagtgatg

SEQ ID NO: 726695 - DNA, 82 bp, Homo sapiens
caccaccgtcagctcggccaggtttgcagagcagtctctgatgaagaatgccataaaaacatcggaggagtcatggattgaa

SEQ ID NO: 726696 - DNA, 98 bp, Homo sapiens
cccggacgagaagcgcagcaacgtgcggtgggaccacgagagcaagtgtatgctgacttgtaaagtgaagaagccagtggtgctgcgggtgttctttt

SEQ ID NO: 726697 - DNA, 129 bp, Homo sapiens
acttggcaactttcctggcccttttgaagaggaaatgaagggtattgccgctgttactgatatacctttagggtctgcttggccactcagtgcagctgcgattaaccctaaaggctttaaggaacgggc

SEQ ID NO: 726698 - DNA, 75 bp, Homo sapiens
agaacatttccccagaggagctcaaaatggagttgccggagagacagcccaggtcaaaatgcagatcttcgtgaa

SEQ ID NO: 726699 - DNA, 87 bp, Homo sapiens
tgaccaggctgaccagcaccagccctgatccagcaggatacagacgtccctcaccagtgccagcttggggtctgcagatgagaactc

SEQ ID NO: 726700 - DNA, 100 bp, Homo sapiens
aaaagcaagaagaagatgaggcagaaggttcaacggggagagtgtcagactactatccaagggcagtttacaatatcatgaaggaagggctgttgaattg

SEQ ID NO: 726701 - DNA, 82 bp, Homo sapiens
tgaaagtgaagccgcacgtagaattaagacggagttcctagtgcaaatgcaaggttgccaagctgttctgcctttctggaat

SEQ ID NO: 726702 - DNA, 100 bp, Homo sapiens
gtggggaaacagcaagcggcgtggacgaccgttgctgagctggtgtggaacgtctgtgatcaggtcactggaaggactgagcgcattcaggagcctggag

SEQ ID NO: 726703 - DNA, 83 bp, Homo sapiens
tctctgatccgcaagcatgctcagaccttcattgctctgtgtgccaccggtccctgtgcgttttattgcgacctgccggtggg

SEQ ID NO: 726704 - DNA, 75 bp, Homo sapiens
tcgccctcaagttcacctgcaggagaacgtatttaccgggcagtcaaagatctattcctacatgagcccgaacaa

SEQ ID NO: 726705 - DNA, 100 bp, Homo sapiens
cttgctcccatccctgcagcatgaacaaggtcagcccaaggccaaccccactgtcactctgttcccgccctcctctgaggagctccaagccaacaaggcc

SEQ ID NO: 726706 - DNA, 75 bp, Homo sapiens
gctcggtgctgcagcagtgctacagcatgtacaaggcatgttatttgaaagcaattgagacgcaaccgaactttg

SEQ ID NO: 726707 - DNA, 50 bp, Homo sapiens
ctgagatgtgccggaagtgccgcacaggggccagcaccttctctctaaag

SEQ ID NO: 726708 - DNA, 88 bp, Homo sapiens
ctactctacacattgcagacaaagatccaatcccagaggagcagctgtggcttgatagttgtgtggttccacctttgtcccctccacc

SEQ ID NO: 726709 - DNA, 75 bp, Homo sapiens
cggagcagtatttcaatgtggagtattctaccttgtaaatactgttatttgtatatactgtaaatgatgacatcg

SEQ ID NO: 726710 - DNA, 80 bp, Homo sapiens
ccaccatcttcgacttgagcgaagttttatgcaagggcgccctgcgtccggcagaggaggcgagcatcccgctcaggtga

SEQ ID NO: 726711 - DNA, 75 bp, Homo sapiens
caagcagaccacctccttctatgccctgctcacctgcggtatcatcatcgaaagttcaggagccctggaaaggag

SEQ ID NO: 726712 - DNA, 100 bp, Homo sapiens
cccggatgtgaggcgatccgctggcgctagtctgaccctccgccaggcaaaaggaagaacttacgatttccaacggccccaaaaaccactcggtcaatga

SEQ ID NO: 726713 - DNA, 100 bp, Homo sapiens
agctaaaaatgattcgggaatatcggcaaatgggccatcactgtgcatgtccccatgccctcagcaggagtcgtggacatccccattgtggagaaggagg

SEQ ID NO: 726714 - DNA, 75 bp, Homo sapiens
ttatgaacaccctaaggaaattgagacgtcagatggacatcattgtgtctgaagacagtcattttgtttactcat

SEQ ID NO: 726715 - DNA, 90 bp, Homo sapiens
gtgacggtggcgccgcccggggcgaggcagggccagcagcaggcgggagatttgatggtagagtggtggcaaagcttccttttacccctc

SEQ ID NO: 726716 - DNA, 100 bp, Homo sapiens
gcaaatcatactctttccatcagtctcaacatagaagttatgatgtgattgctcaagcccaatctgggactgggaaaacggccacatttgccatatcgat

SEQ ID NO: 726717 - DNA, 100 bp, Homo sapiens
gaaacattctttgaattggattatcccaaaggacaggccttcagtatttggcatcacctttacatggagcacaaagatgatgatgatgatgatgtgtctt

SEQ ID NO: 726718 - DNA, 85 bp, Homo sapiens
aactacctccagctgaacacagagcacatatgtgactccatcatgaaggtgtcccaagatcagtgagcgctatggccccgtgttc

SEQ ID NO: 726719 - DNA, 100 bp, Homo sapiens
aaacaattttatttaaccacggtgcagttcagaatattgctcacctactaacctcactgtcctacaaaatggactagaggcttttaccagatttcttaaa

SEQ ID NO: 726720 - DNA, 100 bp, Homo sapiens
tggaggacgaagtggtccgctttgccaagaagatggacaagatggtgcagaagaagaacgcgctgaggagtacctgtcatttgcctttgagcattgtcac

SEQ ID NO: 726721 - DNA, 74 bp, Homo sapiens
tggtgcacccccagtgggtgctcacagctgcccattgcctaaagaacagcaatgcagagtccctggacaggctc

SEQ ID NO: 726722 - DNA, 96 bp, Homo sapiens
gcagtggtcgcttcttctccttgctatatgttctcctttcagccaagacctttcaccagtgcaggggatagaagattcattccacaaacttatact

SEQ ID NO: 726723 - DNA, 114 bp, Homo sapiens
aagctaccggccagggttttctttactctggggtcccggctgccctgtggcctcgctcctcggaggttcatggcccaggggaagacagggagcagctcaccccctggggggccc

SEQ ID NO: 726724 - DNA, 90 bp, Homo sapiens
cccatctgtggcttccatcaaggtgtcggcggagctgctcagagctgccttgaaggacggccactcagcatcaagcagctgcacgagcgg

SEQ ID NO: 726725 - DNA, 74 bp, Homo sapiens
gcagtggtcgcttcttctccttgacttatctaaaaacagactggttgaagttccaatggaattgtgccattttg

SEQ ID NO: 726726 - DNA, 98 bp, Homo sapiens
ctcagttggaagcagccgatccagcctgcggagcctgtggggcaggccataaaattttgagtagaaaaatccagaaatttgaaaatcagtatcgtggt

SEQ ID NO: 726727 - DNA, 90 bp, Homo sapiens
gaagaatggctcattttctgggttaagtctccttgaaagattggctgtcagaaatcccgatgatcttgaagcaaggtctcatatgcactt

SEQ ID NO: 726728 - DNA, 100 bp, Homo sapiens
accgagacaagttcaccccgaagtctgccgactgtgtcagggaaaagggaggcaaggtcctggtccactgtgaggctgggatctcccgttcacccaccat

SEQ ID NO: 726729 - DNA, 90 bp, Homo sapiens
gaagaagggaaggcgcgagtgaggaaaggaggtactgtagatatggtgtaagatacttcttcaagattggacagctggggaccttcttct

SEQ ID NO: 726730 - DNA, 100 bp, Homo sapiens
agcgatgaaatccaaaggtgaatcttttggttggtgattttgatgatagccacaaagcaagcaggtttgtctttgtcagcgccacgtgagacacctacaa

SEQ ID NO: 726731 - DNA, 100 bp, Homo sapiens
acgccgtcaacgccttcaaccaggagcccagaagaatcagtgcggtttctgtggcagagcgagttgcatttgaaagaggagaagagcctggaaaaagctg

SEQ ID NO: 726732 - DNA, 88 bp, Homo sapiens
ggtggtccacgactgtcccgtctggggggacttaggagccattgatgaaaaatacgacgtggctatatcatcctgttgtcatgcactg

SEQ ID NO: 726733 - DNA, 76 bp, Homo sapiens
cattaatggatgttccagtatttaaagctattcaaccagatataagaaggctgactgcacaatcacaatggctgac

SEQ ID NO: 726734 - DNA, 100 bp, Homo sapiens
atggcggcgccagacccgaggcgctagggaagatcgcaccgcggacgcccgctgagcttggcgcacgggccgaccagagagtcacaccccaaagcctctt

SEQ ID NO: 726735 - DNA, 101 bp, Homo sapiens
caacaacctggaattcaattggctcttgccttatgtgtgtagaccacactccaaaactgaaactgtggatggcagccatgaaggaagatcccacagtctca

SEQ ID NO: 726736 - DNA, 100 bp, Homo sapiens
cctggtcatcttctatttccaaatcactcttgcaggactgatcctttgaaatactccagccatgactaaaagagaagcagaggagctgatagaaattgag

SEQ ID NO: 726737 - DNA, 101 bp, Homo sapiens
ctttgggtcctgaatcttctgggagctgaggaaccagatatcttgaaaagctgccagaaagtaagactttgaccccgacgcaggcttcagtgattgccgcg

SEQ ID NO: 726738 - DNA, 73 bp, Homo sapiens
ggcatgattggttttgaaatgtgaggccgcagcgtttgatgacgagtggcggcgggagacctcccgattccgg

SEQ ID NO: 726739 - DNA, 75 bp, Homo sapiens
agttgattgactatggtctctccggctaccaggtgctggagaatctggtaaaagcaccattgtgaagcagatgag

SEQ ID NO: 726740 - DNA, 97 bp, Homo sapiens
aggacgtaatactccactgtgcgacaggcaaggtgcccggcgacgactgcccgctggtgtggggccagtgctcccactgcttccacatgcattgcat

SEQ ID NO: 726741 - DNA, 75 bp, Homo sapiens
cttgaacattccgaaactgtcaagattggcaaggacttgacacagcaagcaaaagacatacagaacataacagtc

SEQ ID NO: 726742 - DNA, 96 bp, Homo sapiens
aagagaagtcacaaaacagcagatttcccaagagcagcggaaaatgatccagtcacaggctgttgcttaccgtcagatgtctctgttgctccgccg

SEQ ID NO: 726743 - DNA, 100 bp, Homo sapiens
taggacggaaacgccgaggaacccggctgaggcggcaggaccctctttgcaagttcagtgcttaacctgaccgaactggctgcccttcggcctgaccttg

SEQ ID NO: 726744 - DNA, 90 bp, Homo sapiens
ccatcatagaaaagcctcctgctgaacgtcatatgatttcttcctgggaacaatgggtaattccagaattgattggccataccattgtca

SEQ ID NO: 726745 - DNA, 99 bp, Homo sapiens
tttcattctggaaccgggaaggtacacccaggcatgacaatagcttctctcctcacagaaatttaactgttcaacacaagatgagacacatgtgaatac

SEQ ID NO: 726746 - DNA, 75 bp, Homo sapiens
agagagacggcgaggcgcgctccctgcccggcagcgactcggagcaagttggaattgacagaggtgatataccag

SEQ ID NO: 726747 - DNA, 55 bp, Homo sapiens
gagaattataggaacctggtctccctgggaatctgtcttcctgacctgagtgtta

SEQ ID NO: 726748 - DNA, 80 bp, Homo sapiens
tctcctctgctatctgtgaaggagctaagagacatgggaatcactctgcatctgatgtacagttacccagcacgtgtacc

SEQ ID NO: 726749 - DNA, 75 bp, Homo sapiens
gaaagacttgatggtctggtagaaacaccaacaggatacattgaaaggttgttgaagattggaaattcatagccc

SEQ ID NO: 726750 - DNA, 97 bp, Homo sapiens
ggatagctgggagtatggccaccctgctccacgatgcggtaatgaatccagcagaagggctgaaaaactgggtggtagctgaagacgtggtgtttaa

SEQ ID NO: 726751 - DNA, 96 bp, Homo sapiens
atttagtaagaagaattccagtcttataaaccccatggctgggggttatggagtgatgggtgacgatggttctattgattatactgttcacgaagc

SEQ ID NO: 726752 - DNA, 75 bp, Homo sapiens
aaggcgtatacaggaacaatattgatgatgtagtaaggttaaacccatccagagtaatggctgcggccttaccca

SEQ ID NO: 726753 - DNA, 75 bp, Homo sapiens
aaagcagacggctcgcactgcgacccgaaggttttggctacgggcctccacctccaccgccagatcagtttgccc

SEQ ID NO: 726754 - DNA, 101 bp, Homo sapiens
gccctgggaaatagtaaccctgccaaatacatcagcttgtaggagacagagaaaatatttacaccagcagctccagttcataccaataaagaagatcctgc

SEQ ID NO: 726755 - DNA, 95 bp, Homo sapiens
ctgttgccccacagagaaagatgccactggatgacaattgagaggatccagaatccagatctctggaatagctaccaggcaaagaaaaaaactat

SEQ ID NO: 726756 - DNA, 75 bp, Homo sapiens
gctgttcccactggctctgctgaccttgtgccttgatgaggacggggacttggttgccttttccagtgacgagga

SEQ ID NO: 726757 - DNA, 100 bp, Homo sapiens
cgcgcaggacgaagctcgcggcgcgggacccggaggacggtatcccgagcccaccgtgctacgcagatgccatggacaatattaccaggcagaaccaatt

SEQ ID NO: 726758 - DNA, 90 bp, Homo sapiens
agaaattaaggatggcaaaatggttatggttgctcggcgctggggcatccagaagaaccggccagccatgaactatgacaagctgagccg

SEQ ID NO: 726759 - DNA, 100 bp, Homo sapiens
aagggaggtgcccctttcgtgctcagctcccttctgcaccaagaccccagcaccaaccagacctggtctgtgcagacttttgcagacaaatcaaaacaag

SEQ ID NO: 726760 - DNA, 76 bp, Homo sapiens
acttacccgagaacgtgcgggaagagaagatcatcgagcatttcaaacggtactccaaagattcaggtttactcac

SEQ ID NO: 726761 - DNA, 75 bp, Homo sapiens
agcgcttccattccgcggagctgttggattggatgctgctggcaagacaaccattctgtataaactgaagttagg

SEQ ID NO: 726762 - DNA, 98 bp, Homo sapiens
aatgaagaaaagagaagaaccagaatttcctgagccttccaaacagtgcctatggttcatgcttgaagttttaatgacaaagaatgaaaacaatagcc

SEQ ID NO: 726763 - DNA, 78 bp, Homo sapiens
aaacatagagaattctgggcttccacacaactccagtgctaactcaacagatgcttgcacataccacccaggtgttcc

SEQ ID NO: 726764 - DNA, 50 bp, Homo sapiens
gccctcaacagcgccattttaggtgccgtgagcgatgtggagatgcagga

SEQ ID NO: 726765 - DNA, 75 bp, Homo sapiens
caaattccctcattactttggaaagctcttggtacttaagtatgtacagaacaaagatgtttttatgaggtatca

SEQ ID NO: 726766 - DNA, 100 bp, Homo sapiens
ggacatgaataagtgggtccagagcatctgccagatctgtggcttcaatcaggctgaggagagcacaggtgtggatgaggtcaccattgtcaacattttg

SEQ ID NO: 726767 - DNA, 100 bp, Homo sapiens
agagatcgactacaaggagatcgaggtggaagaggagccagatgaccaggatgccccagatgagcatgagccctctccatcagaagatgccccattatat

SEQ ID NO: 726768 - DNA, 98 bp, Homo sapiens
tggtttttggttttcacttgaaaccaggaactggcccacagtgcaatttgagggctctttgggaaagcttaccgtttctagtgtgaataatccccgaa

SEQ ID NO: 726769 - DNA, 100 bp, Homo sapiens
ggatttttggcctaccctccaaagaaaaggttcttgatcaatatgaacgagaaggatttaacttcctagccaaggtgtttaattcttcacattccttctt

SEQ ID NO: 726770 - DNA, 51 bp, Homo sapiens
tggtcagacatgtcatcaactcagctgaggctgggaggcggcagaatgcag

SEQ ID NO: 726771 - DNA, 50 bp, Homo sapiens
gcgcgagtgaggaaaggaggtactgtagaacattgacatcaccaatttca

SEQ ID NO: 726772 - DNA, 90 bp, Homo sapiens
agaaaacctctgcggtcaactacatgagaaatgctgtctatgatttcttcattggccgtgaattaaaccctcgaattggtacttttgatc

SEQ ID NO: 726773 - DNA, 50 bp, Homo sapiens
aggccttccagctgtttgaccgaacagaggaggctgcggaggaggaggag

SEQ ID NO: 726774 - DNA, 98 bp, Homo sapiens
aggaagatgcaagcggtttgggaccttgaacaaggcaaatatggttttggaatactcccccagttgcaagaggcgcaggaccgtggaagacttcaaca

SEQ ID NO: 726775 - DNA, 80 bp, Homo sapiens
ccggctcacctggcggtgcccgaggagtagtcgctggagtccgcgcctccctgggtgttggggcgatgtttcctgactgt

SEQ ID NO: 726776 - DNA, 82 bp, Homo sapiens
gctcttctccgccgcggcactgatccccacagaaactatgttccaacttcctgtcaacaatcttggcagtttaagaaaagcc

SEQ ID NO: 726777 - DNA, 83 bp, Homo sapiens
ccttatcccggagagctgacaatgatgaatctcagttcaaggtgtttgcagactatgaagcctacatgcagtgccaggcacag

SEQ ID NO: 726778 - DNA, 100 bp, Homo sapiens
ccaggatgttggaaatgattgggaagtccttggtgttcaccacttagcagtgtctgcaaaaacgaatcttttcctacaacctgttaactgactggactgt

SEQ ID NO: 726779 - DNA, 80 bp, Homo sapiens
tctatgagaaccgcaccgacgtggtgctcatccttgagctgatctatctggttcaatagatgacctccccatggggacag

SEQ ID NO: 726780 - DNA, 75 bp, Homo sapiens
cgtggcagctgtgaaaaaagccatttccgaagtctagagcatgtttggaaaggattcaagaattagaggacttgc

SEQ ID NO: 726781 - DNA, 90 bp, Homo sapiens
gaggggccgcgccgccaccgtctgaactaggatgtcccgacatgaagggagagcgcgcggcggacgcgcccgggacgcgcggcggcaccg

SEQ ID NO: 726782 - DNA, 100 bp, Homo sapiens
gcgagcccagagctccgatccctgcgcgggctcgagagctcgccccgaacgggggtcttcctcctccgccgttgacagcccattgcagatgcaaaggctc

SEQ ID NO: 726783 - DNA, 74 bp, Homo sapiens
ccatcccctccgcatcatggggtctgtggaccaagggacgtaccaaggccagttcaccaacggcatgcgccatg

SEQ ID NO: 726784 - DNA, 133 bp, Homo sapiens
cccacatggtcacccacatgcctgaccagtacaagattgtagaaacgctcatccagcacgacccacgcagccacccagcctcagcactcatctgcgcagccatggaggccctgggacctgggggcgaccgcgc

SEQ ID NO: 726785 - DNA, 75 bp, Homo sapiens
attaagatgtgggatgtcagtactggcatgtgccttatgaccctcctttaccgatttgttacaactcaagcaagg

SEQ ID NO: 726786 - DNA, 83 bp, Homo sapiens
cgctcggggcacctgcgtccagcgagaggagcgcggcagggggccgggggcccaggtattgttgcagcatctggcagtgagac

SEQ ID NO: 726787 - DNA, 90 bp, Homo sapiens
gcggaacatctggaggctgggaaatggtctcctctgagcctccggcctccataagacccaaaacagatgacacctcttcccagtcccccg

SEQ ID NO: 726788 - DNA, 75 bp, Homo sapiens
atctaaatcagagacatcaatttgattatggagaatttgtgagaacgtttgtctgcctgatgagagccacttggg

SEQ ID NO: 726789 - DNA, 82 bp, Homo sapiens
aaaagacagtcctcgtcagcactgactttcagctatggaatcgggcagccgatgaagtgcaaccttcacatgaatgggaatg

SEQ ID NO: 726790 - DNA, 100 bp, Homo sapiens
tttgatgaagtccagaaatctggaaacatgatacaatctgcaaatgtttgggaagcagcatattgagaacctcttcagtgacctacaggatgggaggcgc

SEQ ID NO: 726791 - DNA, 100 bp, Homo sapiens
cagaggtgctgatggagaacttccgcagggccattgcaattaatggatgcctcgaagttgacgtacatatatattcagaaatgttttgccacctgagacc

SEQ ID NO: 726792 - DNA, 80 bp, Homo sapiens
atggacttgctacctcttgggtgaactctagcaattacaagggtcctgacttgtcctgggcaagccaagtccattgcttc

SEQ ID NO: 726793 - DNA, 146 bp, Homo sapiens
gcaagatgcagaagtcagcaagagtgacataggagaagtgattcttgtgggtggcatgactaggatgcccaagtggaatgcagtagccctctgggcctgggatattgtggttgataactgtgccatctgcaggaaccacattatgg

SEQ ID NO: 726794 - DNA, 82 bp, Homo sapiens
ccagccccggccccagtgtgccccgcctgcggctctcctaccgagagtgtgatgctggatcttgccaagcgcagtcgcagtg

SEQ ID NO: 726795 - DNA, 75 bp, Homo sapiens
gaacaggctaccaagtccgtgctgtttgtgtgtctgggctccatggtccccttctcgatgcgcatcttgcacgcg

SEQ ID NO: 726796 - DNA, 75 bp, Homo sapiens
caacagttcaccaccattaccgccattggatttaatgtagagacggtgacgtacaaaaaccttaaattccaagtc

SEQ ID NO: 726797 - DNA, 96 bp, Homo sapiens
cggcagtgaccgtgtgtcagaacaatcttgaatcatgaagctactaaccagagccggctctttctcgaacttcagtgaagatttcatacattggcc

SEQ ID NO: 726798 - DNA, 95 bp, Homo sapiens
tcgaaggcccgcggcgccccgtgctgcagatggtgatggaatttcctgataatgtgttaaatctcgatggacatcagaataatggtgcacagcta

SEQ ID NO: 726799 - DNA, 75 bp, Homo sapiens
gagaagagcagagcggagggagccccagacacgtgtatgggtttcgacagaccatgatgaaattgagaatgtggc

SEQ ID NO: 726800 - DNA, 99 bp, Homo sapiens
aacccgcagagacttctactggctgcgctcctttctggccggaggaatgggtaccacagaccatgtcatcgtcctggcgtccacgaaccgagctgacat

SEQ ID NO: 726801 - DNA, 100 bp, Homo sapiens
tctgaactaggatgtcccgacatgaaggacatggtctgctatacagctcagactctcgtccgaatcctctcacatggtggctttaggaagatccttggcc

SEQ ID NO: 726802 - DNA, 100 bp, Homo sapiens
ccgcagcactggggaaacgatccgctcccaaaacgacacctagctcccctgtttgacaaccctaagttggataaggagctgcgggcaatgctgagagaga

SEQ ID NO: 726803 - DNA, 50 bp, Homo sapiens
tctgtcaactagaattgtatgtagaagggcaagtgtccagagaatggctg

SEQ ID NO: 726804 - DNA, 88 bp, Homo sapiens
aggaattgttttggcctaggatcatccaggtggctcgaacatggcacaagttgataaaaacacggcaggaacaaggtgcagaaaatga

SEQ ID NO: 726805 - DNA, 100 bp, Homo sapiens
tcatctgagagcactcatccagaaggccctgaggaaggagccaaaaacctgtatatcatctccgtgaaggggatcaagggacggctgaacagacttcccg

SEQ ID NO: 726806 - DNA, 95 bp, Homo sapiens
ggaggccatgggcgacccagcccccgcccgcagcctggacgacatcgacctgtccgccctgcgggtggccagcgtgaggaagaccacggtcctgg

SEQ ID NO: 726807 - DNA, 75 bp, Homo sapiens
aaagagcaaaatccaccacctgcaaggtgaagctgaacccagatctacacatacagctaatcttaccaaaatgtg

SEQ ID NO: 726808 - DNA, 98 bp, Homo sapiens
ccggagaaggccgccgggcccgggcatggtggtctggggcaacgcggaaggttgcacgttttcaaaaaatacctaatggtgaaaatgagacaatgatt

SEQ ID NO: 726809 - DNA, 75 bp, Homo sapiens
ctaagactccaggacacccctgaagccgagaaatggccccttcacagatgtagtcactacaaatcttaaattgcg

SEQ ID NO: 726810 - DNA, 100 bp, Homo sapiens
cctgggcctcccggtccgcaagcagtgtaaggagaggatgaggcccgtgaaaaaggcactgaaacagctcgacaaacctgacaaggggctcaacgtgcaa

SEQ ID NO: 726811 - DNA, 82 bp, Homo sapiens
tggcaaataacttttccttggagagtcataacatatcactgactggtgtatcttccaacgtggtccccatgtacttagggga

SEQ ID NO: 726812 - DNA, 74 bp, Homo sapiens
catgaagctaagaaagctgcaaagcaggaacattaatcctgatgttctttttgaagtacacaactataatataa

SEQ ID NO: 726813 - DNA, 100 bp, Homo sapiens
ctaatttgaacttaatcaccacttcatctaattttagcaaggtctccagaaatgctttgggttcatctttcattgctgcaaggaacttccatgcctctaa

SEQ ID NO: 726814 - DNA, 75 bp, Homo sapiens
ggagcagaaggccaaagccctgaagggccagttcaactttgaccacccggaatgtaattatatctagtgctgcag

SEQ ID NO: 726815 - DNA, 100 bp, Homo sapiens
aaaagtttgggccttatgtgggagagcagaggtcaaacctgaaagaccccagttatggatgggagtgctgaagctgctgaaagatggcagaagaagtggt

SEQ ID NO: 726816 - DNA, 90 bp, Homo sapiens
gaatttcacccaggttctgacaggaaagtgcagatcaccttgcacatgaagtgagcttggcagtatttcagctggctggaggaattggag

SEQ ID NO: 726817 - DNA, 96 bp, Homo sapiens
cttgtgttgccaagtctacctgtgccatcaacaacaccctcattgctttcttcattttgactacgataaaaggctgaccggttccctgatgtgtta

SEQ ID NO: 726818 - DNA, 50 bp, Homo sapiens
gagccaccgtgcctggctgaagatttctcacattggcaaactgagagatt

SEQ ID NO: 726819 - DNA, 75 bp, Homo sapiens
gaggggaccaaactctccatcacccagggtttttcttcccccagtccctcagctgctgctgctgctcaggaggtc

SEQ ID NO: 726820 - DNA, 107 bp, Homo sapiens
tgctggcgactgggccagcattcattgtgaagaccggagggacacaccctgctgtctccctttatggcaagattgtcatgagttatggagtaaaaagcgaagaagac

SEQ ID NO: 726821 - DNA, 76 bp, Homo sapiens
attttaatttcagtgactgaattaaaaggtgtcaagaagctcagaatgggaaagaatatggcaaagctgatgcaag

SEQ ID NO: 726822 - DNA, 97 bp, Homo sapiens
ttccggctgtaaagatggcggcttcctagtgagtcggcggctgatttagaaggaggttcaggctacgaccactctgcttcatttttgggagaaaact

SEQ ID NO: 726823 - DNA, 90 bp, Homo sapiens
ccccgcggcgcccctcggcctcggagcaacgagcgcagcgccgggcgcaccctacgacgcgcacaccaccggcatgaccggcgccatcag

SEQ ID NO: 726824 - DNA, 100 bp, Homo sapiens
ccacagcatcctccagcacctcaggtgttggtgtctgtccagtcccttatattagtagctgagccttattttaatgaaccgggatatgaacggtctagag

SEQ ID NO: 726825 - DNA, 95 bp, Homo sapiens
aacccatcagacaagtccctgtatgatgagaccgagacatgggtgcccggcaccgcgcccgagcccactccattcagatcatgaaggtggaggag

SEQ ID NO: 726826 - DNA, 100 bp, Homo sapiens
tgctcgggaagaggaagtgacgtacgtccggtgtaatggcggcgcggtggagctctaggactaaaaacagcccttgtagaaagagatgatttctcatcag

SEQ ID NO: 726827 - DNA, 51 bp, Homo sapiens
gacgaagagacagctggatgaaggtgaaaaggaacagcctgtatttgcaat

SEQ ID NO: 726828 - DNA, 89 bp, Homo sapiens
tcttccagcctctgcctcccgaagtgctgtattacaggcatcaccaactctgaatttcatactggtcaagcagagaagattttgccagg

SEQ ID NO: 726829 - DNA, 74 bp, Homo sapiens
tcaaggtcacaacagtgtctttctgatcaagggagatgcacttatttacatggaaccagagaaacaagtgatgt

SEQ ID NO: 726830 - DNA, 75 bp, Homo sapiens
ctggaggacatctgggggccacaaatgctccttctcctggagacgcaactcaagctataagccgatagtagaata

SEQ ID NO: 726831 - DNA, 100 bp, Homo sapiens
cggggcccggacagaagatggtgcagaagaaaccagccgaacttcagggtttccaccgttcgttcaaggcatgtctaagaaaaccaaccggggctcccag

SEQ ID NO: 726832 - DNA, 74 bp, Homo sapiens
ctatcaaagccatcggatggatgagcagtcacacagactttgggtttccaggtagcctacgtggtgttccagaa

SEQ ID NO: 726833 - DNA, 100 bp, Homo sapiens
aatacattatgtatcgagggctgatcagtgtgactgtgaaatactatggaaaagcatctcattctgcttcttatccctgggaaggattaaatgcattaga

SEQ ID NO: 726834 - DNA, 50 bp, Homo sapiens
cctttctaagtctcctaaaggatgtggcatggagtcctgtggcatccacg

SEQ ID NO: 726835 - DNA, 99 bp, Homo sapiens
gactgactgagcaacatgttattcaggatcaagaattggttaaaatagttggaatacgatatgaagttgggccccctacactctgttgcctaaaactag

SEQ ID NO: 726836 - DNA, 100 bp, Homo sapiens
ggacgcgggaccgtgcagccgacagctcctgaaactctgatgagagccctggaacttttgaattacctggctgctttaaatgatgatggagatctgactg

SEQ ID NO: 726837 - DNA, 50 bp, Homo sapiens
taccccaatgatgagaccactgagccggcggcggcagcagcaagacctca

SEQ ID NO: 726838 - DNA, 50 bp, Homo sapiens
ttgggaatttttacgttaattgaggtgctgcactatctggcaatccagaa

SEQ ID NO: 726839 - DNA, 74 bp, Homo sapiens
ttcattggccacctacagaaacaaaatgtcaacaaattgatggggactcagaatattatgactatggacatggg

SEQ ID NO: 726840 - DNA, 83 bp, Homo sapiens
ggcagagataccgcgatatttgggagcggccccgagacgcgcctggcgcgggtcgatggccaggtggtcttcataaactatac

SEQ ID NO: 726841 - DNA, 83 bp, Homo sapiens
tgacactcgcagccccctcgggaggcccgacgcgactgggcccctcagaaactagatgatggccatttaaacaactctttgag

SEQ ID NO: 726842 - DNA, 75 bp, Homo sapiens
gaaaattacctaaatgcactctttcgaaagaaagctgtgtgccaaccacgatgcaaacatggtgaatgtatcggg

SEQ ID NO: 726843 - DNA, 100 bp, Homo sapiens
cacctacgacggcgacggctacaagaagcgggccgcatgcctgtgtttccgcagcgagagcgaggaggagccactgtagtctgcagatcaaagctctggc

SEQ ID NO: 726844 - DNA, 75 bp, Homo sapiens
cttctaccgaccagagacccagcaccggtgtttgagaagctgcagctgctcaaccctgaaatagaagcagaacaa

SEQ ID NO: 726845 - DNA, 100 bp, Homo sapiens
caaataagctatatactttggttacctatgtacctgttaccactttcaaaagcaccagtctgctgagtggcggtcgtgaatctgtacttgtagagtggcg

SEQ ID NO: 726846 - DNA, 83 bp, Homo sapiens
gaggacgaggagtcggaggagccgcgggcggcgcggcccagctcgttccaggaaaaaggcctgtgtcatatcaacacttatct

SEQ ID NO: 726847 - DNA, 100 bp, Homo sapiens
ttctcctccgaaccccttcatgcccaaatcccggaaactccagcgtgtctccagccgtgagctgaagaagcaggtggagagtgccgagctgaagaaccag

SEQ ID NO: 726848 - DNA, 96 bp, Homo sapiens
ggcctgtccagtttgaaattctcagtgatcagtcagtcaactttggttttagtaaattggtggaacgagaatgcctacacgcagccacaggaatcc

SEQ ID NO: 726849 - DNA, 50 bp, Homo sapiens
tggactgcagcctcggcggtcagcagcttcttccagaccagctggtcttg

SEQ ID NO: 726850 - DNA, 100 bp, Homo sapiens
tgaaccaggcccttttggatcttcatgccctgggttctgcccgcacggacccccattttggaaattttagcattcaggtgccaggaatgcagatgggaca

SEQ ID NO: 726851 - DNA, 100 bp, Homo sapiens
ttctcactgagttttgactagcggaagaaaagaaatacactttcgggaaatggcctctaaatcctggctgaattttttaaccttcctctgtggatcagca

SEQ ID NO: 726852 - DNA, 100 bp, Homo sapiens
gtgagagccacgtgtgccgcgctctgggcacagccttggaaagtcaggaccgcgacggcagcagagcataaagatgacggcgccttgaggtaagctacag

SEQ ID NO: 726853 - DNA, 50 bp, Homo sapiens
tctggcaagaagcgtgcggggaccgatggaggagaaatgtctgaagtaag

SEQ ID NO: 726854 - DNA, 100 bp, Homo sapiens
gggtgaggttgccggggccgtgcgcgctgagagatcaatgtcttattgtgatgagtctcgactgtcaaatcttcttcagaggatcacccgggaaaacgac

SEQ ID NO: 726855 - DNA, 101 bp, Homo sapiens
ccagatggcatcaaacagtgaaatacaggcctggctttcagacttggttcctcaagccaggacctacgcacctgttgtgagtggtgttatagttctgcagg

SEQ ID NO: 726856 - DNA, 89 bp, Homo sapiens
agaatgaatgggggtaccacggagagggcaataagagcctggtggtggcccacgcgcagatattctctaagccgctttcatcatgggag

SEQ ID NO: 726857 - DNA, 83 bp, Homo sapiens
gaagaagaaagaagacgccacagacagcagcgcagtaccaccttccagagatctgttctcatcatcaccttctgcattgtgac

SEQ ID NO: 726858 - DNA, 90 bp, Homo sapiens
gtccagcctctattgcatcttccagcagtactccctcctccaaatccaaagaacttagccttgaggagatgttaaagtaacccatcttgc

SEQ ID NO: 726859 - DNA, 101 bp, Homo sapiens
ctgctggtgggtgttccagctggaagtaaccccttccgggagcctagatcctgtgctttactctgaagactcgaggccagatgctccagtgcctgatggcg

SEQ ID NO: 726860 - DNA, 96 bp, Homo sapiens
aggtcctgagcctcgagccgcagcacgagctcaaattccgagtaccttgcagaagccggctggacagctgaaggaagagtggtaggagtgacccag

SEQ ID NO: 726861 - DNA, 51 bp, Homo sapiens
gccctgcctctccctgggctctgtttgtacatgagaaggaaattatggcag

SEQ ID NO: 726862 - DNA, 100 bp, Homo sapiens
agagaccctaccctcactttccgtctgcttggctcccccagggagccgatatgtggatttactcccttgatggaagcagctgctgctggccatgagataa

SEQ ID NO: 726863 - DNA, 82 bp, Homo sapiens
ttttcccggctatgccatcatggcggatggcgtgtcctgtgaaggccgggctctcgccatgggtcactgtcgcctctgccac

SEQ ID NO: 726864 - DNA, 100 bp, Homo sapiens
gagaccgtgaccgagagcgtgaccgagagcgcgaatatcgtcatcgttagaaggatgagctgacaactaccaagaggagttacgaggatcagttaagtat

SEQ ID NO: 726865 - DNA, 75 bp, Homo sapiens
agaaaagaggcaaagcaagcgagaagtcgcgggcccagcccacagcaggaacatccagtcatggataaaaatgag

SEQ ID NO: 726866 - DNA, 82 bp, Homo sapiens
aagctgcagcggaggaaggcgaggttttgaacgaagaatgtgatcagaactggtacaaggcagagcttaatggaaaagacgg

SEQ ID NO: 726867 - DNA, 75 bp, Homo sapiens
agtacgtcgtggagtccactggcgtcttcaccaccatggagaaggctgggaccctgtacacgtatcctgaaaact

SEQ ID NO: 726868 - DNA, 141 bp, Homo sapiens
gggcactggtgtcttctctcttctttcatgtccctgctggattactggccctcttcaccctcagacatcacaaatatgtgacttctgacagctctctccatggaaggaggcggcggccgcgatgagccttcagcctgccgg

SEQ ID NO: 726869 - DNA, 82 bp, Homo sapiens
ggaagatggactcaggtggactccaaagtctcctctggaccctgactcggctgcctgtggaggaaccgattgtgtccacaga

SEQ ID NO: 726870 - DNA, 50 bp, Homo sapiens
cagccttcccagtagctgggaccacagactggagacgggctgaaggccag

SEQ ID NO: 726871 - DNA, 74 bp, Homo sapiens
ggagaaaatcagaagtacagttttatctagccacatcttggagaaagtatgctgaggccttggattaccaccgt

SEQ ID NO: 726872 - DNA, 83 bp, Homo sapiens
cggctggagagaagccgggagcgagcccaggcggcaggtacagaaccctggtatttctatttaattaatggatttctgaattt

SEQ ID NO: 726873 - DNA, 101 bp, Homo sapiens
agtacctggaggtgcagtacgactgtgtcccctacaccaagtttggggccaatgccatcctgggcgtgtccttggccgtgtgtaaggcgggagcagctgag

SEQ ID NO: 726874 - DNA, 98 bp, Homo sapiens
actggcctggcgtgcactccgcacctcggggacattattgcgcgtggaacggctgcttttggaagactctaaaatagagctcaagcttgagaagagag

SEQ ID NO: 726875 - DNA, 112 bp, Homo sapiens
ccagaaggcagaacttatgctgactacgaatctgtgaatgaatgcatggaaggtgctggagaatctggtaaaagcaccattgtgaagcagatgaggatcctgcatgttaatg

SEQ ID NO: 726876 - DNA, 83 bp, Homo sapiens
ggcaggaggaggaggaggggctccggctggtctgtggtgaggctgggctgagggcaaccttgccccccacccaagaagccctg

SEQ ID NO: 726877 - DNA, 100 bp, Homo sapiens
tggtgggatcgttggctatgtaaaaacagtgcgccgcgtggctcctcgtttctccatccctcccagcagccaggaggtgatgccaggcggcagcgtgaac

SEQ ID NO: 726878 - DNA, 100 bp, Homo sapiens
tatgctagtgatctctataatggttccagtatagtctctagcaatcatttggggaagaatctacagttgctgatggacagagtggatgaaatgagccaag

SEQ ID NO: 726879 - DNA, 98 bp, Homo sapiens
cccagcagctgcagccgcagcctgtggctgtgcagggccccgagccggcccgggtcgagattgttagaagatacagtgactttgatttgcttaacaac

SEQ ID NO: 726880 - DNA, 136 bp, Homo sapiens
tagggatcgggtttactcagaagttcgatgtcttactccaacagattatgatgtttctgttgtgctgcctgaaaaggtaaaaaggaactccaggtctctctttttcaaacactggtgctgctaatgtttaatgagg

SEQ ID NO: 726881 - DNA, 92 bp, Homo sapiens
cgcagatcctgagacccggacagtggcagtgaaacagaccccaccaacaactgaacgctttggtcaggctgctacaatggaaggaattgggg

SEQ ID NO: 726882 - DNA, 50 bp, Homo sapiens
tctcaatttcatatggcaacaaactgtgaatctggattgggaaagtcgac

SEQ ID NO: 726883 - DNA, 100 bp, Homo sapiens
gctgcattctgcgggacgaaccctgctccgcgcgaggcccgatgagagaaagggaaagttaaggatgctggagcagaacaatggatttctctttctcttt

SEQ ID NO: 726884 - DNA, 75 bp, Homo sapiens
caagttttcacttatctcgaaagcctatcagcatagttaaggagggtgtgaagacagagaatgaccacatcaacc

SEQ ID NO: 726885 - DNA, 75 bp, Homo sapiens
tatgtgactcagagaaaggagacctcattccaagttccaggattaattctggactcagcccaggagagtgttatt

SEQ ID NO: 726886 - DNA, 100 bp, Homo sapiens
gggaaagcttacagactgtgtgggtaagggactgttctgaagaacctttccatttagtgatcaagatatggaagctgatttctgaaaatgctcagtgtgt

SEQ ID NO: 726887 - DNA, 75 bp, Homo sapiens
acttcaaacattcgtctcggaaaccccgcctcttacagtcacgagggggcaagcgcgatgaagagctggttctgc

SEQ ID NO: 726888 - DNA, 72 bp, Homo sapiens
cctcacccgctttgtgaaatggccccgctatatcagaggctgctggccaagctgcaaagctgggagagactg

SEQ ID NO: 726889 - DNA, 100 bp, Homo sapiens
gttcgagcactaatatttaagaaagaagatgttaactttcaggaattaagtagactggctggacagattcgaaggttgtatggttcaaacaaaaaagctg

SEQ ID NO: 726890 - DNA, 83 bp, Homo sapiens
ctccgggagagggggagtgcgcggcggccgcagctgccacaaaccagggcttaaaagacaaccttcttgcttctgggacatcc

SEQ ID NO: 726891 - DNA, 100 bp, Homo sapiens
gcgggagaggcccagcgggagtcgcggaacagcaggcccgagcccaccgcgccgggccccggacgccgcgcggaaaagggagtaactattcccagtcaga

SEQ ID NO: 726892 - DNA, 75 bp, Homo sapiens
cgaagccaccgcggccacggagaagggcgagaagaagaaggaggtatctccctgggataaaaaagaagaagctaa

SEQ ID NO: 726893 - DNA, 75 bp, Homo sapiens
atgaccattttcttcagcctccttgtcctaggtattacatcaaataccaataacggatctatggtggtccacagt

SEQ ID NO: 726894 - DNA, 82 bp, Homo sapiens
aaagagcactggactccggaaggaatgggtaccacagaccatgtcatcgtcctggcgtccacgaaccgagctgacattttgg

SEQ ID NO: 726895 - DNA, 98 bp, Homo sapiens
atttaaacaagagatttccacagaagaagctaaaccagccccagaaatatttgaaaatgaagtcatggccctgctgagagactttgctaaaaacaaaa

SEQ ID NO: 726896 - DNA, 74 bp, Homo sapiens
ttttttccagtctgatccttttgttggcaatactaatggaccatactaccaaggaccagtccacctgaaccaca

SEQ ID NO: 726897 - DNA, 83 bp, Homo sapiens
gccagaagaaactcaactggtgtcgagaagtccggaagcttgtggcgctgaaaacgaacggtgcggtggctactaaagttcga

SEQ ID NO: 726898 - DNA, 74 bp, Homo sapiens
ccttaaggtgttaagtgtaaggatcttcatgatgaaatttctgtaaatgttggttagtctgctgctaattggaa

SEQ ID NO: 726899 - DNA, 74 bp, Homo sapiens
aagtggcggtgcggatacgacccatgaaccggcgaggtgttggtaaatcatgcttattgctacagtttacagac

SEQ ID NO: 726900 - DNA, 97 bp, Homo sapiens
aggcgtcagcgggggaacagctagcggcaaggctgaagccgacgtagcttctctgaacagacgcatccagctggttgaggaagagttggatcgtgcc

SEQ ID NO: 726901 - DNA, 101 bp, Homo sapiens
agttttctcaaatccgatatgatgctgtgaagagtaaagcaattaagttggaatatgcaaggttggttaagttggcccaagaagacaccccaccagaaacc

SEQ ID NO: 726902 - DNA, 76 bp, Homo sapiens
aaagatctcaaaaactttcatgtagacctttgtcgtccatttgctgctcactggtgctcgcatttggcttttcgtt

SEQ ID NO: 726903 - DNA, 94 bp, Homo sapiens
ctcagcaacagccacccttgaataatcacatgatctcacagaatttacatagtacatgacgaagttaaggataaagcttttgaactagaactca

SEQ ID NO: 726904 - DNA, 100 bp, Homo sapiens
ctgttgaattagacccgtttcctatagatgagaaaccatacaagctgtgagtggagagatctacagaccaagtaatcaagccagtcaatgtaggagctct

SEQ ID NO: 726905 - DNA, 90 bp, Homo sapiens
agtttcagattaaggaatgtcatttaaatgctgccgaggcctgcctggagccccagatcaccccttcctactacaccacttctgacgctg

SEQ ID NO: 726906 - DNA, 83 bp, Homo sapiens
ctatgtattccctggggatggcgcatcacacaccaaagaaggaccctctattgtcccaggcctgtgttggctgcctggaggcc

SEQ ID NO: 726907 - DNA, 100 bp, Homo sapiens
gaccgaaggtctccggagagtcgccggcggtgccagatgtccagaaggcttcttgggggaatattgtcaacatcgagacccctgtgagaagaaccgctgc

SEQ ID NO: 726908 - DNA, 100 bp, Homo sapiens
gtcttctcttcctcctccaccgagtcgtgctctcgccccaacccgcgcgccaggtcaaaatgcagatcttcgtgaaaacccttaccggcaagaccatcac

SEQ ID NO: 726909 - DNA, 100 bp, Homo sapiens
gtgccaggtgccgcgagcgccgagttccgcgcattggaaagaagcgaccgcggcggctgctaaaagaaggtctcaagagccacagatgtcttggatattt

SEQ ID NO: 726910 - DNA, 80 bp, Homo sapiens
caacaagaagaacgctctcatccggaggcaggaccagctgcagctgctgaaacaaaccatcaggcctcccagaaagtatc

SEQ ID NO: 726911 - DNA, 100 bp, Homo sapiens
ggagctcccccaagagccggaaagctccagggcccacaacggcagtgtcctacatgtcggtgaaatgtgtggatgcccgtaagaaccatcacaagacaaa

SEQ ID NO: 726912 - DNA, 100 bp, Homo sapiens
gctgtgacgcaccttgatgaccagatcctgcagctcacaggcgtcaattccttccaagtctacatggcctataaggatgtctaccaaatgtccgacagcc

SEQ ID NO: 726913 - DNA, 75 bp, Homo sapiens
tgacccgctaccggaaggccatcgccaaggttttaaaatcaaagatgggaaaatcggagaaaattgcccttcccc

SEQ ID NO: 726914 - DNA, 83 bp, Homo sapiens
cataccaagaacatgaagctggcagatgatgtggacctggaacagaacttacgctggaaaaactccaacagcttcatatggac

SEQ ID NO: 726915 - DNA, 100 bp, Homo sapiens
ctgtggcctcgctcctcggagggacctatatccagactttgcctgacactgcagggtccaagagaattaaagaaatatggaatgacatgaagaagattag

SEQ ID NO: 726916 - DNA, 82 bp, Homo sapiens
gctcggacgccagcggacacgcgggcgaggctctgacgcccgctctgcggcttcggtgtttgaacaggccacagtccaggag

SEQ ID NO: 726917 - DNA, 74 bp, Homo sapiens
gaaatcacagcttcagatcactgacttaattcagtgcacaaatgagatgaatgtgaacatcccacagttggcag

SEQ ID NO: 726918 - DNA, 119 bp, Homo sapiens
tggcgtgcactccgcacctcggggacattattgcgcgtggaacggctgcttttggaagttttgtaccaatggctagaagcagatcgtcatggcaagagccaaggtgctgcaaatacgac

SEQ ID NO: 726919 - DNA, 75 bp, Homo sapiens
ctcagatgctgccagggtccctgaagagggaagacacgcggaaacagcttgccgaactaaagcaagaatgtcttg

SEQ ID NO: 726920 - DNA, 82 bp, Homo sapiens
cccaccgctgccctcagctccgagtccagggcgaggtgattacttcgggatcctcaaggaggcgagagtgaccgtgttcccc

SEQ ID NO: 726921 - DNA, 75 bp, Homo sapiens
ctctgcaccgctaggccgtccccgaccttgcctgaacaagtttcatgatcaacatgggagactcccacgtggaca

SEQ ID NO: 726922 - DNA, 51 bp, Homo sapiens
agggggaagggcctcaaagccagaagatggagtctcactctgtagcccagg

SEQ ID NO: 726923 - DNA, 75 bp, Homo sapiens
gcgttggaataccggctctcagcggctgagatcgggcgcatctccattgagatgaacgggaccctggaggaccag

SEQ ID NO: 726924 - DNA, 50 bp, Homo sapiens
gaaagaagttgcaaaacactgggatgcacaggaacaaacgagggaatatg

SEQ ID NO: 726925 - DNA, 90 bp, Homo sapiens
ggacaccaggaccgcgagccagacagctcccggaagccgcgccgccgccgccagctgttcatcaaagaaaaagggttcttttggtcaccc

SEQ ID NO: 726926 - DNA, 100 bp, Homo sapiens
ctcaaagagaccatgacagttacatttgcagaagatattgtcagcatgtgctttgtgaaactgttcgaactgccaaactgactccagtttctgcccagct

SEQ ID NO: 726927 - DNA, 83 bp, Homo sapiens
ctttccaacacagatgtccaagctgccaagtacatcgagtacatgtgtgacatggtggcggaggagcccatcacaccccacag

SEQ ID NO: 726928 - DNA, 100 bp, Homo sapiens
tatttgctaagtggaagccagaagaggaggaaaatgttttgccacgtggatgtgaagatttcctctaaaaggccctcgggaccaaggatcacgtcatgac

SEQ ID NO: 726929 - DNA, 100 bp, Homo sapiens
agactacagcagctcttcaaggggagccagtttgccattcgctggggctttatccctcttgtgatttacctggctctctgatgtaaaggatggagtaaat

SEQ ID NO: 726930 - DNA, 50 bp, Homo sapiens
caacaatctgtccagtggtactgcctactttggggataaaggattatttg

SEQ ID NO: 726931 - DNA, 144 bp, Homo sapiens
gaggttgggattcgtgtctggctctggaattgctactgctgcctctgtcactcctggtgaccagcattcaagaatcaaaggcatgggaggttgatacctgccggggccattacaacaatgtatcttgtgccgtcttccaccctc

SEQ ID NO: 726932 - DNA, 100 bp, Homo sapiens
tcgatgtgtctgagtctgtggaatgcaagtctgccgatgaagatgtcattaagggttgtggtctcctgaacagaagtctgtctccaaacacaaatcaagc

SEQ ID NO: 726933 - DNA, 97 bp, Homo sapiens
aatcctctaaggatcaccagcttctacctataagacttcaactcaagatgcagaatcaagctatagaagtggtctggagtcaccagcctgcattctt

SEQ ID NO: 726934 - DNA, 80 bp, Homo sapiens
tttcgtaaagggaagtcatttctactggacttcatgcttagatacatgtataacaagacatggagattaagtagcttgcc

SEQ ID NO: 726935 - DNA, 75 bp, Homo sapiens
agcgaggggaacacagccctaatcacagctgcacaggcaggtgagaattatgaagatgatgacctagtaaattct

SEQ ID NO: 726936 - DNA, 75 bp, Homo sapiens
acacggccactgtgtacaagatatgtgcctggatgcagctcacctccggtcagtatgggaatcctttaaataaat

SEQ ID NO: 726937 - DNA, 100 bp, Homo sapiens
atgtggaagaaaggtggtcgaaaatgaaatttacagtgaacagacacgggtgaatgctgctaaaaacaagactggggctgctcccatcattgatgtggtg

SEQ ID NO: 726938 - DNA, 100 bp, Homo sapiens
aagcaatgttagttgtcaataacagtgtcctagcatgttatttgaaagcaattgagacgcaaccgaactttgcagtagcttggagtaatcttggctgtgt

SEQ ID NO: 726939 - DNA, 95 bp, Homo sapiens
cgtactgcatgtgaagctcaccgagacggcgatccgggcgctcgagacttaccagagccacaaggtattatagctgcaaatgtccttgtattctg

SEQ ID NO: 726940 - DNA, 100 bp, Homo sapiens
tatgactatgccattgtgctattcaaggctcaaactgctttttctgcaaaccctgccaatccagcaattttgtcagaagcttctgctcctatccctcacg

SEQ ID NO: 726941 - DNA, 75 bp, Homo sapiens
ccacagtgatgttgatgctagttctgttgaactcccaccacctgatcttggaccaagttctgcactaaatcagac

SEQ ID NO: 726942 - DNA, 98 bp, Homo sapiens
cacaaaaccaagcgaggccaggccgctctggaccgtctcaaggtgtttgatgcgatcatgaatttcaagaaagaggagacagcaaaactgatagagaa

SEQ ID NO: 726943 - DNA, 75 bp, Homo sapiens
gacagcagcgcagtaccaccttccagagatgcagcaaagcacctgctctgagtggccatggggaagcgatacttc

SEQ ID NO: 726944 - DNA, 98 bp, Homo sapiens
agcaagtcacctgttatctccagttttagttactatccagcagaaaacttgatagagtacaaatggccacctgatgaaacaggagaatactatatgct

SEQ ID NO: 726945 - DNA, 98 bp, Homo sapiens
ccccggagcccggccccggggaactagggagcgtctccggctgcacagcgctcaggaatgggtaccacagaccatgtcatcgtcctggcgtccacgaa

SEQ ID NO: 726946 - DNA, 80 bp, Homo sapiens
ggggtgtcggcgcctcattcgggtggagctgagccggagacagatcaggatcctcatgaccagccaaagagaagaagaat

SEQ ID NO: 726947 - DNA, 90 bp, Homo sapiens
cccagtcccacttcaaacattcgtctcggaaaccccgcctcttacagtcacgagttgtatcacggactgattcaccgagcccaaccgtac

SEQ ID NO: 726948 - DNA, 140 bp, Homo sapiens
tttgatgaggtggatctgacagatgccagcgtagctgaatccagtaccaaaaacgtcaacaacagttttacgcactattcctgatcagagaactccagttgcttcaacacacagtatcagtagtgcagccaccccagatc

SEQ ID NO: 726949 - DNA, 96 bp, Homo sapiens
ttacaaatatgaagaggcattatttatgaccttttctatggaaagccatgtttcctgagagactgggagttgcaggtgcacttcaaaatccatgga

SEQ ID NO: 726950 - DNA, 90 bp, Homo sapiens
gggcggtaaacgcggttagtgcaagcatctgggccatcttcaatatttctcactatgtgcaatagacactttggcagtgttgtggcacaa

SEQ ID NO: 726951 - DNA, 75 bp, Homo sapiens
ctgcagaggacacgaggcggcgggctggagacatggaccgcggcgagcaaggttagcatggcctcattgaaagaa

SEQ ID NO: 726952 - DNA, 96 bp, Homo sapiens
atgaagatgaaaccaagcccttgctgtcaccactgactaaagaagagaaaactgcggcagagcaattcaaatttcacatgccagatttatgaagaa

SEQ ID NO: 726953 - DNA, 110 bp, Homo sapiens
cgtgaaggagaaattcgactatggcaacaagtacaagcggcgggtgccccggggggatatgagactttctactcggaatatcctgagtgttgcgtggatgtaaaacccat

SEQ ID NO: 726954 - DNA, 51 bp, Homo sapiens
ctccaggaggacccagccacccaagatggagtctgcacgcaaagcatggga

SEQ ID NO: 726955 - DNA, 100 bp, Homo sapiens
ttgctgctgctgctactgctgtttccaggggctgcagagcatggactgttaaatcttgcacttcttctgagtgaggtacaccaggggttggaaaaaccac

SEQ ID NO: 726956 - DNA, 75 bp, Homo sapiens
tacacgaagaactaagaatattattagcacaagagcaccatactttgaggatttctacctggacaaggactggta

SEQ ID NO: 726957 - DNA, 96 bp, Homo sapiens
tcaaaaatagtgatagctttgataagtgaggccagagacaggcagacagcagatgtattgcagggagctggatgacatggcccttggaacctgtgc

SEQ ID NO: 726958 - DNA, 100 bp, Homo sapiens
gccatcacctggatgcctacgtgggaagggacctcgaatgtgggaccccagcccctctccagctcgaaatcgtctcctggaacacggccgcaactggtcg

SEQ ID NO: 726959 - DNA, 98 bp, Homo sapiens
caagatttcgtcataagaccgcgaccagacaggcggcgccatcttcgaacttagacttccggaaggactttggcgaggagacaaagtcttgctgtgtt

SEQ ID NO: 726960 - DNA, 99 bp, Homo sapiens
agataatggcctgcattttattggtctacaaagacagcaggcagagcggcttgggtaaatccaccttaatcaacaccctcttcaaatccaaaatcagcc

SEQ ID NO: 726961 - DNA, 96 bp, Homo sapiens
gtcaaaggaggcaccaagtgcatcaaatacctgctgttcggatttaacttcatcttctggctggattataaagttggctggaagaaactgaaggaa

SEQ ID NO: 726962 - DNA, 89 bp, Homo sapiens
ggaaaaacagtgctcggaaagcatctattgtgaaaaacctaaaggataccttaggaaaaccaattctgtgtcctcggaggaccacagcc

SEQ ID NO: 726963 - DNA, 74 bp, Homo sapiens
tccgacagccaggcccgggagaacttcttctcagcctgttgataaccatgttagcccatcttccttcttgggcc

SEQ ID NO: 726964 - DNA, 90 bp, Homo sapiens
gtcggtggcggggctgaagaagcagttctacaaggcgagccagatcctctggaccttctccatctacctggagtcagtggccatcttgcc

SEQ ID NO: 726965 - DNA, 100 bp, Homo sapiens
tgggttcagccagcaattgcccaaacccaaagtgtggagggtatttgaagtataccatacaactgttttgaaaatccagcgtggacaatggctactcaag

SEQ ID NO: 726966 - DNA, 84 bp, Homo sapiens
aagttcatggatgctgtcaacaagaagagcagttcccaggatctgcataaaggagcttcctggacgatttaacaggtcctcaag

SEQ ID NO: 726967 - DNA, 75 bp, Homo sapiens
gcgttgatatcggtggtaacgacggcctcagcaggcggggaagatgaaaggcatcaaacacttggcttgttccag

SEQ ID NO: 726968 - DNA, 74 bp, Homo sapiens
cgaggtgtcggcgcgggagcagcacttccacagccaagtgcgggagtccacgatttctctatgaatcatcatca

SEQ ID NO: 726969 - DNA, 88 bp, Homo sapiens
gttttcctgttatttctgtgcttccacttaaggttttgcaaggttttgcgtgtgaagctgtgtggaaatgtgaaatactaccagtcac

SEQ ID NO: 726970 - DNA, 75 bp, Homo sapiens
cgtcgggaagaatcgtttggtctcctgccgtgcccggtttggtgcacctcgatttggaggaagtagggcagggcc

SEQ ID NO: 726971 - DNA, 82 bp, Homo sapiens
ccaccttcaagggagtcgaccccaacagcaggaatagctcccggttatggaaacaaaggacatgctttacatcgtcactgaa

SEQ ID NO: 726972 - DNA, 82 bp, Homo sapiens
cttccttgaagaaacaagcttacagggcagctgcaatgactctccgcacggtattattgtcattgcaagcactattggcagc

SEQ ID NO: 726973 - DNA, 100 bp, Homo sapiens
agccacatactatccgtttgttcaggaaccaccagtgacagaattcagcgtttgttggaagcacagtctctgatgccctgttcccctaagacaactgctg

SEQ ID NO: 726974 - DNA, 60 bp, Homo sapiens
gccagcacctgaagaattgatgaaggtctgaagaaaaccctgcgggatgagatcaatgcc

SEQ ID NO: 726975 - DNA, 75 bp, Homo sapiens
ttccagtcacttttcacagaaggactgaagagtctgacagattttatttggagagaagcaagcatctttgcctct

SEQ ID NO: 726976 - DNA, 82 bp, Homo sapiens
gatggagaaggaggaggaatcggtagttgatgtcacttggcgatattcctgcaaacatgaagaggtgattgccagaagaact

SEQ ID NO: 726977 - DNA, 100 bp, Homo sapiens
ccgagcgccgcgccttcgcccagaagatcagcagcggcaacctttggcactgcatccatgagcatgcccacaggattcggcactcctgctccctacagtc

SEQ ID NO: 726978 - DNA, 95 bp, Homo sapiens
ccggttgctaagacttggcgaagcgctgcgctcgcgcccggatccctcagcgcccgggggctggagaaggccaggcagcagctgcaggaggagct

SEQ ID NO: 726979 - DNA, 75 bp, Homo sapiens
agatgtcatcacaatggatcccaaagacaattgttcaaaagatgcaaatggctttcagtccagtgtaaagctgtt

SEQ ID NO: 726980 - DNA, 82 bp, Homo sapiens
ttttaagaaaaggcattgaggaactcaatcaaaccagtattcttttcacacaggttggtactaagaagtgcctttcctgacg

SEQ ID NO: 726981 - DNA, 83 bp, Homo sapiens
cgccaggcggtgatgaagaatccccccgaaaggaccccccagcttccatgaggcaggctgaacctgcagatatgcgcccagag

SEQ ID NO: 726982 - DNA, 83 bp, Homo sapiens
ataggatgcattcttattgaatactatcttgggtttaccgtatttccagtgctgagggtgtaaatggaggagaggagtctgta

SEQ ID NO: 726983 - DNA, 90 bp, Homo sapiens
cgcgtttcccgcaacccgataccatcggacaggatttctccgcctcagcccaacggggaggattttttatcaagcagaaatgcatcgaac

SEQ ID NO: 726984 - DNA, 100 bp, Homo sapiens
gaaccagcctgcacgcgctggctccgggtgacagccgcgcgcctcggccagtgccctcggctagcatgacccgcctgatgcggtcccgcacagcctctgg

SEQ ID NO: 726985 - DNA, 122 bp, Homo sapiens
ctctggctgtgcgcgctggcgctgagcctgcagccggccctgccggtactccaaagattcaggtttactcacgtcatccagcagagaatggaaagtcaaatttcctgaattgctatgtgtct

SEQ ID NO: 726986 - DNA, 90 bp, Homo sapiens
caaatacctaataaccagaacagaaagaaatgttgcagtatatgaaatgagccgtcagactgctacagcattacctaccggtacctcgaa

SEQ ID NO: 726987 - DNA, 74 bp, Homo sapiens
ctcttatcaaccagattacggccaaattcaagtttggatttaggtggcgagtagaaaaagaagtaatttcagga

SEQ ID NO: 726988 - DNA, 98 bp, Homo sapiens
ctccctcaatggattggtttacataggtcaaatttctgagggaaattcctatttgttaagtgaaaatttatcaagggctagaatttcagtccagctgt

SEQ ID NO: 726989 - DNA, 48 bp, Homo sapiens
tcatcgctctcggcctccgacacgtggctggatctctgctctggtggt

SEQ ID NO: 726990 - DNA, 101 bp, Homo sapiens
cggacccgggcggacgagcacgaacacacgcttctccagcagcgccagcactgtgtccaccactgcacccagctctgcccgcgggtgcagacgccatgcct

SEQ ID NO: 726991 - DNA, 100 bp, Homo sapiens
gcgatgatgaggaggactacgacctgtggtgggagcacaataacaggtgttgggaaaaacctgaattcagttagtgtcccgagaatggtcataaatgtgc

SEQ ID NO: 726992 - DNA, 100 bp, Homo sapiens
ttccaacggggtgacctcatccgtattctgagcaaggtcaaaaggctgagtttcaaattctggataatgtagactcaacgggagagttgatagtgagatt

SEQ ID NO: 726993 - DNA, 82 bp, Homo sapiens
gtctgcgagccaggattcccgtgttaatgtaccgcggtgaggctcttgaagatttcacaggcccggattgtcgttttgtgaa

SEQ ID NO: 726994 - DNA, 82 bp, Homo sapiens
aaccgggaacagatgcagaactttgacaaacttttcatgcaacacccaacacttataagcggaagaacacagaaacagctct

SEQ ID NO: 726995 - DNA, 82 bp, Homo sapiens
caggatggcttgcagaagacgctatttctggtaggtgagtgctgtcctcggctcactttcctcaagctctccggctgccacg

SEQ ID NO: 726996 - DNA, 100 bp, Homo sapiens
gtcctgcttttctggaaaaccttcttgctgtataaccaagggccagagtatcactacctccaccagatgttggggaatctccctggaaaaggagacatga

SEQ ID NO: 726997 - DNA, 48 bp, Homo sapiens
ctcccagagaggatggcatctagaagatttacactgactgggccaacc

SEQ ID NO: 726998 - DNA, 100 bp, Homo sapiens
tgccttctctactgatggcagtgttttagctgctgggcaacatttcatacaccatttagtcacctaggccaaagtccggaaggatgctcctcttacactt

SEQ ID NO: 726999 - DNA, 83 bp, Homo sapiens
cgtaattacattctctcggccagcgcctccgcgattctggatgaaattgaagaacataacatcaaaatctatcacttacctga

SEQ ID NO: 727000 - DNA, 95 bp, Homo sapiens
attatagcctcaaactcccaggctcaagcaatcctaccatgtcagccttcccagtagctggaactacaggtgaaggtaggcaatgaagttgctac

SEQ ID NO: 727001 - DNA, 100 bp, Homo sapiens
ctgaataaaatcaaccagatacttatggagaagtacctgaagctgcaggatacctgccgtactcagatagtgtgtgtaccatatcagtggcgtgtaacta

SEQ ID NO: 727002 - DNA, 76 bp, Homo sapiens
ccggggttcctcgaagcagttttcaggacttaaggctctgggagtactgggcctaatcgctacgtgcctctttggc

SEQ ID NO: 727003 - DNA, 83 bp, Homo sapiens
gatgcagcaaggaaataggatttaaccgctctctgcctcccaggcatggttgtaatccataagacaggacatattgctgctgg

SEQ ID NO: 727004 - DNA, 74 bp, Homo sapiens
aagggacctgatgaagcgaagatcaagattcatgatgttgctatcaaaagttgagaaattgtcagaagaaatca

SEQ ID NO: 727005 - DNA, 90 bp, Homo sapiens
gtgaatttgtccgtctccgacttctggagggtgaggtggctttgaccccgggttgcccggccagcacgaccgaggaggtggctggacagc

SEQ ID NO: 727006 - DNA, 82 bp, Homo sapiens
ccagctacccctgttggcaaaggaacggagaacacttttccttcaccgaaaggttctctttggtttccagcaagatgcatca

SEQ ID NO: 727007 - DNA, 90 bp, Homo sapiens
tgggcaggctgaaagatggcggcggcgtctgtctctgcggcttctggttctcacttgtcgttgaagatcctctttgtaacttccactccc

SEQ ID NO: 727008 - DNA, 96 bp, Homo sapiens
tcagcatcgtcacggacactcctgagctacagagactgaagaggactcaggagcaaatcagtaatgtcccctcttgctgttggctgcacatcagga

SEQ ID NO: 727009 - DNA, 100 bp, Homo sapiens
cgggagaggatatgtagcgaggaggaacgcgctaaggcaaagcacctgaactgaagcgctgcggcatggcgcgcgcctgcctccaggccgtcaagtacct

SEQ ID NO: 727010 - DNA, 74 bp, Homo sapiens
agcggggccgcttgatgcgacgcctgaatcattgatcagcgattcgagaaggtttcctactttgtatttggtga

SEQ ID NO: 727011 - DNA, 51 bp, Homo sapiens
tgggccggcgccctggggccccggagagaaggcggtcaccttctccttact

SEQ ID NO: 727012 - DNA, 99 bp, Homo sapiens
gttgtcctcaattgcgtaggaccagatttttttcccaggaagccatcccgtcagaggggttcaagtgatgaaagttggcaaactgcagctacatcaagg

SEQ ID NO: 727013 - DNA, 75 bp, Homo sapiens
tttctttccgcgccgatagcgctcacgcaagcatggttacattggcgaatttgaaatcattgatgaccacagagc

SEQ ID NO: 727014 - DNA, 100 bp, Homo sapiens
ggttcagtgtatcgacggataacagagttcacatattcaaacctgtatctgtgcaggcaatgtggagattcaataagtgtaattggcagaaacaacagca

SEQ ID NO: 727015 - DNA, 100 bp, Homo sapiens
cttggaagaactccgtgcccagatgctcataaggattgtcctctttctacaaaagttattctacctatggaaatccaggcagccaaggctatggacaagc

SEQ ID NO: 727016 - DNA, 75 bp, Homo sapiens
gcaaggtggcagagaaggaaggatggcctctggacatccgagtggaagtgtcggaggaaggcttccagattccag

SEQ ID NO: 727017 - DNA, 100 bp, Homo sapiens
ggcctcactcaaacagtaaacgaggcttcagtttcacattcttggtacctcctggtggtgcctgggagggagccactgctgtacagagatgccaattcca

SEQ ID NO: 727018 - DNA, 90 bp, Homo sapiens
gagcggccagctaggagcgctctgtggtgcctggggctgaacgcggctttctgctggactgtgctgctgccatctcggctcactgcaacc

SEQ ID NO: 727019 - DNA, 75 bp, Homo sapiens
gttaaggattccaagtaactcttatttggttttgacctgtagcagagaaccaattctggagaacagcctcacttc

SEQ ID NO: 727020 - DNA, 75 bp, Homo sapiens
ccggagtgagcggagtagcgagtcggcaacccggagccagagactgctgctactttgaaacgtacgatagaggcc

SEQ ID NO: 727021 - DNA, 100 bp, Homo sapiens
agaagcagttcctgccggcgctgctgagtttcttcatctacaacccgcgcttctggccgcgggaaggagagacaaatttacatgtattggagaccagacc

SEQ ID NO: 727022 - DNA, 75 bp, Homo sapiens
gatgtggaggaaaacaacttcgagggcagacggtcttgcgagtggctggttccctgcagaagagcacagaagtga

SEQ ID NO: 727023 - DNA, 100 bp, Homo sapiens
caaatgcatgcagaattcatggccatctatatgtcaataaagtagcagggaattttcacataacagtgggcaaggctacaggggaagaattgaaagtgaa

SEQ ID NO: 727024 - DNA, 100 bp, Homo sapiens
aaattgccggcaagagggagttaaggacattccaggcagaggcaagattctgtttctggcgtctgcatacgcaagtccccaactcgctgaggagagctgt

SEQ ID NO: 727025 - DNA, 80 bp, Homo sapiens
accaggctctgcagcggcaacccccagcggcttaagccatggcaaacaacgagttttcgtcgttcgaatcaggttgactg

SEQ ID NO: 727026 - DNA, 115 bp, Homo sapiens
cccaggtctctggaggttgcaggctcaggctctgctcagcggggttcctggacatcagtcagtttttatgaatgaaccaaggctgtcagacttcaagcaagttctcttacgggag

SEQ ID NO: 727027 - DNA, 125 bp, Homo sapiens
caatttccatcaaaaagtgattaagcagagaatggagaagaaggttgattccagtgtttgtcaggttcaactccagccatggtttcccagtggaggtcgattctgacaccagcatcttccagctc

SEQ ID NO: 727028 - DNA, 100 bp, Homo sapiens
gttacctcctggcagggggctgccagaaacgctccttctcgattattgaatcttgatatgtgggtgatgttaagccctcctgacccagcaagttgaaaac

SEQ ID NO: 727029 - DNA, 100 bp, Homo sapiens
ctctccctctgtttctgtactctgggtgactcagagagggaagagattcagccagcacactcctcgcgagcaagggggggccctcagcctcttggccttg

SEQ ID NO: 727030 - DNA, 82 bp, Homo sapiens
gggcgcggcagtatccttggggcactgtgcagggaaattcggcgccttcatcagtatgtgaaatttgctgtccaagatgtga

SEQ ID NO: 727031 - DNA, 75 bp, Homo sapiens
ttgttctctggcatggaaggggtcctcagagttactggggttctgctgaatgtcctgaccttgaaccggaacctg

SEQ ID NO: 727032 - DNA, 101 bp, Homo sapiens
tcacacctggccattcagtgcagttgctgaattaatagccctttggagtgaatcaacctggaccttatatcatgtatacaactgtagatgcaaatgggtat

SEQ ID NO: 727033 - DNA, 87 bp, Homo sapiens
gcccgactcggtgattgaggacaagaccatcgagctcatggaccgggactttgtagccaagcagaaggaggacctggagctggccat

SEQ ID NO: 727034 - DNA, 100 bp, Homo sapiens
ggaggtggaacgggccgaactgcaggacaaattattggattccagcacagtgactcacttattcaagataactgaaaacattggttgtgtgatgaccgga

SEQ ID NO: 727035 - DNA, 75 bp, Homo sapiens
cgcccagcagccgccccgtctgagaagtgtaccttccggtttcccagcacggccatcaagatccagttcacgtcg

SEQ ID NO: 727036 - DNA, 100 bp, Homo sapiens
accacttacaaggcttccaccagcaaggttagcatggcctcattgaaagaactagatcaaagactctttgaaaattacatcgagttgaaagcagatccca

SEQ ID NO: 727037 - DNA, 100 bp, Homo sapiens
caggcccagatgcgcgcgatgctggaccagttgatgggcacctcccgggacggtcagccaagatgggaagtcgctccttgacaagctccagcggcccttg

SEQ ID NO: 727038 - DNA, 51 bp, Homo sapiens
cacagatgtccaagctgccaatacagctattggaatcagatgcaaagatgg

SEQ ID NO: 727039 - DNA, 50 bp, Homo sapiens
cgggagacggatgtggccaagaaaattgctgggctttgacaaacttcctc

SEQ ID NO: 727040 - DNA, 51 bp, Homo sapiens
ttttgaagacaatcgtcacttatacagaaacctctgcgccatgagagccaa

SEQ ID NO: 727041 - DNA, 83 bp, Homo sapiens
atgaggctgagatagttgatgttgctctgggaatcctgattgagacggccgaagccctgcagcccacgctacagccggagatg

SEQ ID NO: 727042 - DNA, 99 bp, Homo sapiens
taagacaccgggacctcctggaagccaaaaatggtagcccagccatgacccataggaatctgacttcctccagtctgaatgacatttctgataaaccgg

SEQ ID NO: 727043 - DNA, 100 bp, Homo sapiens
agcgagcggaggagcaggcgccggagaccctcaaactgacacaagacctacagagaaaaccctttgccaaatctgctctcagcaagtggacagtgatacc

SEQ ID NO: 727044 - DNA, 100 bp, Homo sapiens
aagtgctggccagtgagcccatcccgttctctgatttgcagcagacacaacaaccgaccagcattgatgttaaagaagagatatcaagactgacagaaag

SEQ ID NO: 727045 - DNA, 100 bp, Homo sapiens
gtatttgtggtaataacccttaccgggagtttcactgaaggtctcctcctacctggatctcattacttgggccgttttcaggatcgtttaatgtggataa

SEQ ID NO: 727046 - DNA, 98 bp, Homo sapiens
cgtctgcggaagtgcagctgcctcagttcttagcgcagggcagagcggcttgggtaaatccaccttaatcaacaccctcttcaaatccaaaatcagcc

SEQ ID NO: 727047 - DNA, 90 bp, Homo sapiens
accagcagtgtggagagctggatgtctacaagtgctgggcctaaaggagataacatttatgaatggagatcaactatacttggtccaccg

SEQ ID NO: 727048 - DNA, 98 bp, Homo sapiens
gtcagtctaacagaatcctgtcggagttgtagccatgccctaggtgctggagaatctggtaaaagcaccattgtgaagcagatgaggatcctgcatgt

SEQ ID NO: 727049 - DNA, 82 bp, Homo sapiens
atctaaagcaccagtaaaatatggtgaactcattgtcttagggttatcaagttatacccaaccagcagcaaaactaccaagg

SEQ ID NO: 727050 - DNA, 80 bp, Homo sapiens
tgaaaagtcaaaagaagtttgtattaccattttcaatagcagtataaaagggagaggctgaaggctgggaagaagaaggg

SEQ ID NO: 727051 - DNA, 100 bp, Homo sapiens
tgattcagcagtcctgtcaagtataaatgtgtggtatctgtgcgctttgaagaagatgaagacaggaacttgtgtctaatagcatatccattgaaagggg

SEQ ID NO: 727052 - DNA, 100 bp, Homo sapiens
cttaaggaacaaagtgcttaaagaagatgtgctgattgcagccttactatttgaaacatccctcacattgaaatatgggcaaatccagacagaacctttg

SEQ ID NO: 727053 - DNA, 101 bp, Homo sapiens
atgtcatcctgttggcactgatgaagaacccttacaggacctagatgtgaaggctggtggaggctgtgtaatgaccattggagaaatgctacgatcttttc

SEQ ID NO: 727054 - DNA, 83 bp, Homo sapiens
cacacgacaagacctcaactttggccaaggtgttgacagctcttctaccacaagcagtgcttctccaatgcccaacagttatg

SEQ ID NO: 727055 - DNA, 100 bp, Homo sapiens
gatcccggtgcagaagaacatcctggcggcggccagcccgtacatcagatcaaagtggtcaaagcgttccatagttccctccacgaaagcattcagaaac

SEQ ID NO: 727056 - DNA, 87 bp, Homo sapiens
catggaccgggagcgagaagcaccgcttacaaacacgcagatggcaagaagattgatggcaggagggtccttgtggacgtggagagg

SEQ ID NO: 727057 - DNA, 50 bp, Homo sapiens
tccgagaggcgttccgtgtctttgacaagacctgtgaccgcatcaagcag

SEQ ID NO: 727058 - DNA, 100 bp, Homo sapiens
aactatgctctccgctgtgtccacagcgttcaaggttacctgtcctgctgccgattcctggatgacaatcagatcgtcaccagctctggagacaccacgt

SEQ ID NO: 727059 - DNA, 82 bp, Homo sapiens
aatggagcaggtgaaagtgcagatcgccgtggccaacgcgcaggagctgctgcaggtgagaagccctaccactgcaactggg

SEQ ID NO: 727060 - DNA, 98 bp, Homo sapiens
aggtaggctgcgttgaggatctttgctcttccatccgcctttgatcgtcttcctcttcagccatccagattgtaaaccatggctgtgtggatacaagc

SEQ ID NO: 727061 - DNA, 50 bp, Homo sapiens
cggcagtcgcgaagcagcaaccatgcagcctcccgcgacgatgcccctca

SEQ ID NO: 727062 - DNA, 76 bp, Homo sapiens
tactcacagagttagagagagggatggtggtacagcagggaagaactggaaactcagagaaagaaactgcccttcc

SEQ ID NO: 727063 - DNA, 100 bp, Homo sapiens
tcctcgtttgacaccttcctggcccatctgccaagcagcctatcagaatgactttggacaagtgtggcggtgggtgaaagaagacagcagctatgccaac

SEQ ID NO: 727064 - DNA, 50 bp, Homo sapiens
ctccgagggcaagctggtctcggacatcaacaatggctggcagcacttgg

SEQ ID NO: 727065 - DNA, 82 bp, Homo sapiens
caaccttccaggctcaagtgatgcttccgtctcagccttctgagtagctgggacaacagaagctggcagggcggagatgctg

SEQ ID NO: 727066 - DNA, 73 bp, Homo sapiens
gagggtcaacgagaaagagatcgggtgagcttgtcggccacagactgctacattgtgcatgagatctacaatg

SEQ ID NO: 727067 - DNA, 88 bp, Homo sapiens
accctcatcgagcctgcgcccagaccgtggctgagcatggagctgtccccccgcagtcctccggagatgctggaggagtcggattgcc

SEQ ID NO: 727068 - DNA, 75 bp, Homo sapiens
gtggattcctgcaaaggcttgagtgacatccaccacaggatgtacagttacccagcacgtgtacctcctcctcct

SEQ ID NO: 727069 - DNA, 75 bp, Homo sapiens
acaccatctgtggtcatgtcaacagtagcacaaggtatcatgaactgatcactaaatatgggaagttggagcctt

SEQ ID NO: 727070 - DNA, 89 bp, Homo sapiens
aggagtacatgccctttatgaagatattcttgaggagatctgaaactggacaatgtcctgttggaccacgagggtcactgtaaactggc

SEQ ID NO: 727071 - DNA, 74 bp, Homo sapiens
gagaagcagtggtgggttccatgtgatggtggagtaggaggcaggtctccgcgagtaccttcaagtttaaatct

SEQ ID NO: 727072 - DNA, 113 bp, Homo sapiens
cggggtgatggcggtggagactctgtccccggactgggagtttgaccgcgttgacgacggctcgcagaaaatgggcaagttcatgaaacctgggaaggtggtgcttgtcctgg

SEQ ID NO: 727073 - DNA, 101 bp, Homo sapiens
tcctgaggcctccccagccatgcagaacttttcattcattggctcccatgtactatcgaggctcagctgcagctgttatcgtgtatgatattaccaagcag

SEQ ID NO: 727074 - DNA, 100 bp, Homo sapiens
gggggcctgttccggaatatcaaatacaatttggacttctggccaaggccacctttgatgccatttctaagacctacagctacctgacccccgacctctg

SEQ ID NO: 727075 - DNA, 90 bp, Homo sapiens
agggcctgcagaccccctcctgcaagatccagaagctgagggctgtgggctgcatactggccgagctgctggcgcacaggcctcttctcc

SEQ ID NO: 727076 - DNA, 75 bp, Homo sapiens
ggcaaggtggttttggaccagacaggcgtgtctaactatcatggtgaacttacttcagattgtgcgggaccactg

SEQ ID NO: 727077 - DNA, 100 bp, Homo sapiens
gcggagcgccccttcgcgtcccctgcaccatgagctggggcaccgagctctgggcaccatgactcctgtgaggatgcagcactccctggcaggtcagacc

SEQ ID NO: 727078 - DNA, 100 bp, Homo sapiens
gggagcccgccgcgctggtagcggtcttgagtcaccacgtccgaatataattcttgggttagtaatctgccaaaaaatcaaacgtcccgcaaacagtgga

SEQ ID NO: 727079 - DNA, 98 bp, Homo sapiens
tgatgactttgcacattatgaaaagcgtcaagaagaggaggaagccatgcgtaggggaagtcgagacaacatgagtgtgattttgatctgttttccaa

SEQ ID NO: 727080 - DNA, 96 bp, Homo sapiens
tgcggatgctgaccgatctcccatatttctgcagtttgttgattgtgtttggcaaatgacaaggcagattactgaagatttcattgctacatatca

SEQ ID NO: 727081 - DNA, 75 bp, Homo sapiens
ccagcccatgcccctgaaggcctcgctggagatcgagtaccaaaaatgcaatggcacatcgtgattctgagatga

SEQ ID NO: 727082 - DNA, 48 bp, Homo sapiens
agcctccggagtagctgggattacagggtcatcacactgaaacggtgt

SEQ ID NO: 727083 - DNA, 75 bp, Homo sapiens
gtctacaccatcaaggaggaaggcctggttcttcaagggctttgcaccatttatctcgcctgagagacctggttg

SEQ ID NO: 727084 - DNA, 100 bp, Homo sapiens
ctcctgtcttctggcttcagtctggaagatccccagacacatgctaacaggatctacaggatgatcaaacttggtctggatgatgatgaagatgatgatg

SEQ ID NO: 727085 - DNA, 100 bp, Homo sapiens
cctctctgttagttttgaggacactgaagccacccaggtgtaccccaagctgtacttgtcacctcgaattgagcagctcccacatcaggacgagaaggag

SEQ ID NO: 727086 - DNA, 101 bp, Homo sapiens
tcaccgtggggggcaagcagtacctcctaggactctatgacacggccggacaggttctcaggaatcagatagctcgcagtcggccaagaaggacatgctgg

SEQ ID NO: 727087 - DNA, 100 bp, Homo sapiens
agtcataatagatttcgagacaacagtggccttctgatgaatactttaaaacaccaatcagggtcttcaggcctggaagattgaagacattccagccaac

SEQ ID NO: 727088 - DNA, 120 bp, Homo sapiens
tcccaggtatcattgaaggtgccaaggatgggaaaggtagaggtcgtcaagtcattgcaggttgcaaaagcttctcatttcagagagatgccaggatcctaagtgcctgccaaacttacc

SEQ ID NO: 727089 - DNA, 83 bp, Homo sapiens
gtctgcctgtgtccctgaccatggctccctgcagtaccctttaacggctcgtggtcccaagaagcatctgaagcgggtggcag

SEQ ID NO: 727090 - DNA, 100 bp, Homo sapiens
gctggcattgaatgatttatagctaagactccaggacacccctgaagccgagaaatggaaggagtcaagactgagaacaacgatcatattaatttgaagg

SEQ ID NO: 727091 - DNA, 75 bp, Homo sapiens
tcctcaagaatctcgtgctcaccggtttctcccacatcgacctggagtctactcttcatcttgtgttgagacttc

SEQ ID NO: 727092 - DNA, 100 bp, Homo sapiens
gattgtaatgtctgtgaggagagagcaaggcagttcttcaggggaggtgataacgtggtgctggaccagacctacctgtggcagggtgttcgagtggcgg

SEQ ID NO: 727093 - DNA, 82 bp, Homo sapiens
tgcatcctgccgtcttcctatccttacccgacctcagatgctcccttctgctcctggtgattgaattactcagatatgaaga

SEQ ID NO: 727094 - DNA, 50 bp, Homo sapiens
aaacaccactgaagcattgccaagcttaccctgaaagaagcagatcccag

SEQ ID NO: 727095 - DNA, 82 bp, Homo sapiens
gccgatccagcctgcggagcctgtggggcagtgggccccatgctgattgagtttaacatgcctgtggacctggagctcgtgg

SEQ ID NO: 727096 - DNA, 100 bp, Homo sapiens
caaggacaacccgtacatcaccgacggctaccgggcctacctgccgtccaggctgtgtatcaaaagtactaaggctcgtacgtctgcatcgattatctta

SEQ ID NO: 727097 - DNA, 76 bp, Homo sapiens
aatttgatgaagtccagaaatctggaaacatgatacaatctgcaaatggccgaagataaccagattggattttaag

SEQ ID NO: 727098 - DNA, 95 bp, Homo sapiens
ggacgggaaggcgggagacgagaagcctgaaaagtcgcagcgagctggagccgccggaggttcaaaatggaaagtatttattgaccaaattaaca

SEQ ID NO: 727099 - DNA, 50 bp, Homo sapiens
agctcacccactgccagcagaggatcaatgtgactctaagaacaaatgga

SEQ ID NO: 727100 - DNA, 75 bp, Homo sapiens
aactcggagatgcctggaatacagtaaggtttcgacacagccccaactgctggtacctgagaaactggactatcc

SEQ ID NO: 727101 - DNA, 90 bp, Homo sapiens
tttttggatcggcatctagtctttccgcttcttgaatttctctctgtaaaggagaaagcgtggatacccatcaacgaagttttgatattg

SEQ ID NO: 727102 - DNA, 90 bp, Homo sapiens
ctcagcgccggtgcatgtcgatgtctcggcgcggaagatggccggcggcgtggacggccccatcgggatcccgttccccgaccacagcag

SEQ ID NO: 727103 - DNA, 50 bp, Homo sapiens
gacactgaagatcacagacttctacctggacggcatgaagtcccgagagg

SEQ ID NO: 727104 - DNA, 75 bp, Homo sapiens
aggcagagccacagaagcaggtgcagccacaggagagggagctggagctgcagaaggaacagcggcggcaggagg

SEQ ID NO: 727105 - DNA, 73 bp, Homo sapiens
caatatgtacgacgcggatgaggaaaatgtgctggaaatcatattattcaaacacagttgatgaatgacttac

SEQ ID NO: 727106 - DNA, 82 bp, Homo sapiens
gctgattcatctcttgggtgagaagatcctgggcagcctccagcagggacctgtgacagcaattctgtggtgttcttggtca

SEQ ID NO: 727107 - DNA, 83 bp, Homo sapiens
cctgcaccatgagctggggcaccgagctctggcagcccctgtcaaagggaacaggaagcagtccacggagggtgacgccctag

SEQ ID NO: 727108 - DNA, 51 bp, Homo sapiens
caaatgcgtgctggttcttaaagagcttcagacagcaaagtcctgacatgt

SEQ ID NO: 727109 - DNA, 98 bp, Homo sapiens
gtcatctctctagaccataaaaataaaaaacatatccgagggtgtcctgttacttccaagtcatcaccagaaagttgagccccatatgggggttggca

SEQ ID NO: 727110 - DNA, 100 bp, Homo sapiens
ctcagacctgggcacagcaaatgctgaggactcagaccagtctctgcaagaaggaatacccacacaccgaagttgggtgaggaagattcgttttgctcct

SEQ ID NO: 727111 - DNA, 100 bp, Homo sapiens
cttgttcccattctagcgcctagaatttttggctccaataaatggacatgaacaagctgagtggaggcggcgggcgcaggactcgggtggaagggggcca

SEQ ID NO: 727112 - DNA, 98 bp, Homo sapiens
acaggttcacaggcatgcacaaagtattaaaggtggaagaaggtccatatctttttctgtgggtgcttcaagtgttgttggaagtggaggcagcagtg

SEQ ID NO: 727113 - DNA, 90 bp, Homo sapiens
acaagggcttcctggccctctaccaaaccgtggggaatcagggccctccaggacccaagggcgccaaaggagaagtgggcccccccggac

SEQ ID NO: 727114 - DNA, 75 bp, Homo sapiens
atcaaatagcctggatgattcaactgaagaagttcagtctatggatgtgagggatgatcagaattccagtttttc

SEQ ID NO: 727115 - DNA, 89 bp, Homo sapiens
gctagtgtccgctctgctcggccgcgggctcccggaggactgcaggtacatcgagtacatgtgtgacatggtggcggaggagcccatca

SEQ ID NO: 727116 - DNA, 90 bp, Homo sapiens
caaaattgaaaaaatggttgacctcacccagtgaacagcagagaatttcaaaggaccttgctaatatctgtaagacggcagctacagcag

SEQ ID NO: 727117 - DNA, 100 bp, Homo sapiens
tccaagtgcgcgccctggcgggtccggaccaagtatcctagaaggaaaacatcaccatggctacagaaattggttctcctcctcgttttttccatatgcc

SEQ ID NO: 727118 - DNA, 100 bp, Homo sapiens
tttgaaggtcccttgtggggactggaaagaggacggtcaatgtctggtctgggtccagtgttccttcccaaactgtgggaaatggaggcggctgtgtggg

SEQ ID NO: 727119 - DNA, 75 bp, Homo sapiens
tgctgtgggcgctgctggcgctctggctgtgctgcgcgacccccgcgcatggtgtggacactgccagcggctgca

SEQ ID NO: 727120 - DNA, 100 bp, Homo sapiens
tccaaccccgggctcggcggcggcggccaggtccctgctgaatcacacgccgccatccgggaggcccagggaagatatatgcaagttgccgaaagacgaa

SEQ ID NO: 727121 - DNA, 78 bp, Homo sapiens
cgacgattctccaccgagtatgagctgcagcaggctgtgctgcacatggagcagcggaagcagcagcagcagcagcag

SEQ ID NO: 727122 - DNA, 89 bp, Homo sapiens
gaaggccagcaatacaacatcactaggagtattgagctacgcatcaagaagcaacattttgcagatgttgtacttagtgaagaatttct

SEQ ID NO: 727123 - DNA, 108 bp, Homo sapiens
tcttactaaaaatgatgtagttggaacaacatatctacacctctctaaaattgctgcctctggtggggaagtggaagtccagaacacatattacataatggagccggg

SEQ ID NO: 727124 - DNA, 100 bp, Homo sapiens
accgtgtgcctgactttggtgtctgggaaagaggaagcaaatataataatggcagcacagagctacattcgagctaccaagatgaatgaactaatggaga

SEQ ID NO: 727125 - DNA, 96 bp, Homo sapiens
acgctggactggtgcgaggagaactactccgtgacctggtacatcgccgagttctgtccgggcagctccccctccacctacacagaatcaccgaag

SEQ ID NO: 727126 - DNA, 100 bp, Homo sapiens
tatccccagtggagccggagtgcgggcgcgccccaccaccgccctcaccatgagctgccaaatgctgttaaatcaactgagagaaatcacaggcattcag

SEQ ID NO: 727127 - DNA, 51 bp, Homo sapiens
acaatattgatgatgtagtaagggttatgtggtccgaatcagtggtgggaa

SEQ ID NO: 727128 - DNA, 100 bp, Homo sapiens
acgggcttctccctgatgacaagcttaccctcttctgcgagatttttggaagtaccagcacagtgacgcttcctgaaaccttgttgtttgtgtcaacgct

SEQ ID NO: 727129 - DNA, 100 bp, Homo sapiens
tgctttgcaaggctttctgctaaggatgtattgtggcttttgtttggattgcagcatgcagaattacaggaatgaatctgaagtctgctgcagtaaaaca

SEQ ID NO: 727130 - DNA, 75 bp, Homo sapiens
ctagtctcaaagcgcatattatgctacatgaaaaggaagaggaaaagcaggtgatattctcagtggagaccagga

SEQ ID NO: 727131 - DNA, 75 bp, Homo sapiens
gtttgttgtgcttgtcaagatcagaagctccaccatgaggcgaggtggatggaggaagcgagctgaaaatgatgg

SEQ ID NO: 727132 - DNA, 100 bp, Homo sapiens
aaaacagtgtttcaagaatgatattcacaaactggtcctagcagctttgaacaggggtgccactgcggtgcacattcagcttataatggaacggctgctg

SEQ ID NO: 727133 - DNA, 100 bp, Homo sapiens
cggaaatgtccggcaagatcgagaaagcaggtggaagagattagaaactcatgatgttgtgatcgagtgtgccaaaatctctctggatcccacagaagcc

SEQ ID NO: 727134 - DNA, 75 bp, Homo sapiens
cgctgttggccttgggcggcctggtgctgcttcggggatctgttccggtctactatgaagcccgtccagaaagtg

SEQ ID NO: 727135 - DNA, 100 bp, Homo sapiens
caggaattgggatcgtgtcgctgcggaaaatggctttgtaaagaagtttgaacctaaatctggctggatgacttttctagaagttacaggaaagatctgt

SEQ ID NO: 727136 - DNA, 102 bp, Homo sapiens
gcccgcgagaggcggagaaatgtggggtcgtccaggagggtcgacaaggcaaagaacctgaagacgacccaaaagggaactgtggaaggtgcatcagtgaag

SEQ ID NO: 727137 - DNA, 100 bp, Homo sapiens
tcatctcgctcggagcttcgctcggaagggtctttgttccctgcagccctcccacgatggcccactgcgtgaccttggttcagctgtccatttcctgtga

SEQ ID NO: 727138 - DNA, 101 bp, Homo sapiens
cgacaggagtcaaacctcacaagattttacttccagcggcaatgtaagcaacagaaaggatgagacaaatgctcgagatacttatgtttcatcctttcctc

SEQ ID NO: 727139 - DNA, 98 bp, Homo sapiens
cgcgcgcccgccccgctctgggaggaccgcgaggacagagcgggatgccaccagcttgtccaaagggaagttccaggagctcctggtgggcatcgttg

SEQ ID NO: 727140 - DNA, 109 bp, Homo sapiens
aaaagtaggatgaacctgcccaaggggccggacacgctctgcttcgacaaggacgagttcatgaaggactcgctcagcagcagcctgaaaacttgctacaagtatctca

SEQ ID NO: 727141 - DNA, 82 bp, Homo sapiens
gttcgctgcgcgtgcacattccgaccctctttcccagctgcccgctcctcagcacccgaagattcgcctgtacaacgcagag

SEQ ID NO: 727142 - DNA, 83 bp, Homo sapiens
tttgtctcattaatatgggaacaccagtttctagctgtcctgcggacaaggcaaaatctcagcaagttcggacctctagtaca

SEQ ID NO: 727143 - DNA, 100 bp, Homo sapiens
atttatctcagcagcaaaagtttgaagagaaccttagaaaggctcggaagacgttcctgaagcttgccttctgtgacatctgtcagaaattcctgctcaa

SEQ ID NO: 727144 - DNA, 50 bp, Homo sapiens
acacacaagatctaccacctgcagaggtcgtccacactggtgagaaaccc

SEQ ID NO: 727145 - DNA, 101 bp, Homo sapiens
tagctcagcaattcttaccttgttacagaatcagagtgtgcaccaatcccaaccacgggtattggaggtagagactactccaggatccttgagaaatggtc

SEQ ID NO: 727146 - DNA, 100 bp, Homo sapiens
ccagcgccaccgggcagcagcggcgccgtgctcgctccaggcttcaacggaccacaccaaaatgccatctcaaatggaacacgccatggaaaccatgatg

SEQ ID NO: 727147 - DNA, 98 bp, Homo sapiens
agcagatgtaccctcagtacgccacctactattacccccagtatctgcaagccaagatgctgagggttggaaaagcaaaagcagatgtgtggcccaaa

SEQ ID NO: 727148 - DNA, 100 bp, Homo sapiens
cgttccagccaatggccagactccaatccagagaaccatcaagccagatgtcagaagctacaccatcacaggtcaccaggcagcagggattggaaaccag

SEQ ID NO: 727149 - DNA, 100 bp, Homo sapiens
ttcttttgctacctcaacaccaaacaatatgggattagtgagaaatgaacttcaactggttgatcttccaacaggatctcaaagatttcatgagacaagc

SEQ ID NO: 727150 - DNA, 100 bp, Homo sapiens
agaagcctagaagaggaggaagaggaaagaaaaggagtcaggaatgcctcttaggactacaaagctgatgaagacccagcattattccagtcagtcaaga

SEQ ID NO: 727151 - DNA, 50 bp, Homo sapiens
ccagtacacagacgagcatggggaaggtcttgaggaccggcccagctcag

SEQ ID NO: 727152 - DNA, 74 bp, Homo sapiens
agccctttggttcgaagtcctcccgtgcggccgaacggtaaaactctgctggcacaaaccctagctaaatgcct

SEQ ID NO: 727153 - DNA, 100 bp, Homo sapiens
aaggtgaagctgtctcaaacattcaagaaaacacacagactccaactgtacaagaggagagtgaagaggaagaggtcgtggaggtggatctggcaatttt

SEQ ID NO: 727154 - DNA, 74 bp, Homo sapiens
agacttctggcaattgaggatattgaccctaccttggaggagcttgccatccaacagggtcaactggagacaac

SEQ ID NO: 727155 - DNA, 82 bp, Homo sapiens
tggcggatggccccaggtgtaagcgcagaaagcaggcgaacccgcggcgcaataacgatgcctgaggaaacccagacccaag

SEQ ID NO: 727156 - DNA, 101 bp, Homo sapiens
gcaggacttggtctgccttggaggcagtcgtgcccaggagcaggtggacatcttcaataaggagctactgctaatccccatccacctggaggtgcattggt

SEQ ID NO: 727157 - DNA, 87 bp, Homo sapiens
gtggcgggtaacgccggactcgaggggagtgcatccgccccaacccttttccccctcgtctcctgtgagaattccccgtcggatacg

SEQ ID NO: 727158 - DNA, 100 bp, Homo sapiens
ggtgatgaggcgagagttttgctgggacgcctactccaaagcggccgggagtcgcgcttcttccccactcccgagacagaggtgttatgaacataaacag

SEQ ID NO: 727159 - DNA, 75 bp, Homo sapiens
cggtcgacatgttccaggtcccggatagcgagggcggccgcgccggctccagtgttaaagaacccagtatgtaaa

SEQ ID NO: 727160 - DNA, 50 bp, Homo sapiens
agatgttcgcaacaaggagctcataggtgcatggctgcctcctaatccca

SEQ ID NO: 727161 - DNA, 80 bp, Homo sapiens
tgcttgcctgtgcgcgcgtgcgcggacatggcctcaaacgaataatgcatatactgccatgtcagattcctacttaccca

SEQ ID NO: 727162 - DNA, 99 bp, Homo sapiens
catcaactaaagaactcaaagagcacccagaggctcctgttcaaagaagacagaaaaagacaaggctacctcttggttaatgttcgtgaagaaattgaa

SEQ ID NO: 727163 - DNA, 87 bp, Homo sapiens
caattgtaaggccatcgattgttggtgccagttggaaagaaccttttccaaattatatccagatcgagagacagaagattctgaaag

SEQ ID NO: 727164 - DNA, 75 bp, Homo sapiens
tgcgcagctccggccgcctggctccccatactagtcgccgtgatacgggaacaacacctccagagagtggtattt

SEQ ID NO: 727165 - DNA, 100 bp, Homo sapiens
gacgaggctgccgaagacagtggtgaggagggcgcccctgaacctgcaccagcttatgttcctgaggaagaattgaaggcagcagaaatagatgaagagc

SEQ ID NO: 727166 - DNA, 82 bp, Homo sapiens
gacagatcctgtgtcacccggcaactcagaaacatcaggtccaagatagcctgggctggaagctcttctacgtcacaggctg

SEQ ID NO: 727167 - DNA, 100 bp, Homo sapiens
cggcggccgaggaggaggagggggaagcggcggcggcaaagggcaagagggcacattgggagattcagcttgcaagagtcctgaatctgatctagaagac

SEQ ID NO: 727168 - DNA, 74 bp, Homo sapiens
gaacactctgtattaagccagcaatgtatattgaagcaagtcaaagattacattaaacagtgtagcaaatgcca

SEQ ID NO: 727169 - DNA, 100 bp, Homo sapiens
agagcccgggaccgccaggccaccaccggccgcctcagccatggacgcgtccctggagaagggcaagaagtacaagcccctggacctgcggcctaagaag

SEQ ID NO: 727170 - DNA, 89 bp, Homo sapiens
gccgcgccgcgcctcagctctggtacccactgatggtaatgctggcctgctggctgaaccccagattgccatgttctgtggcagactga

SEQ ID NO: 727171 - DNA, 89 bp, Homo sapiens
caacgagcacaacaggagctacgaggagttgcaggacccagtgctccataaaggataatagtttccagtacactatccctcatgatgac

SEQ ID NO: 727172 - DNA, 50 bp, Homo sapiens
aattactgatggctctccttccaaaatgaagcccggggcaagaactgtgg

SEQ ID NO: 727173 - DNA, 75 bp, Homo sapiens
aagtggaagagtcctgtgccattaaaaacaacaaggaagctttcagtatcgagacatgtaagcagcatcatggag

SEQ ID NO: 727174 - DNA, 51 bp, Homo sapiens
ctttcaacgggactattatgataggtcaaaatgcagatcttcgtgaaaacc

SEQ ID NO: 727175 - DNA, 101 bp, Homo sapiens
caaatgtctggacaccatgattcaaaccgccaggttaccatgaggaggatttctggccttcgagatcctcagtcttccacaatgaaccctgtttacagccc

SEQ ID NO: 727176 - DNA, 98 bp, Homo sapiens
agggggcctctgtaaggcacatggaggtggacattgatattaagatccgatcttgtcgagggtcatgcagtagggctttagctcgtgaagtagatctg

SEQ ID NO: 727177 - DNA, 83 bp, Homo sapiens
agaaacgtgaggatcaagaagccggactacaaggtcgcctacgtgcagctgtctctgctttctatccgtcaagatgataaagt

SEQ ID NO: 727178 - DNA, 75 bp, Homo sapiens
caggcaaaggaagcaccgcacatttttcagggaaacatgcacaattcttggattacaacaggtgaagattctggg

SEQ ID NO: 727179 - DNA, 101 bp, Homo sapiens
gcaccccttcccagaccatgagctggaggacatgaagatgaagatctctgccctcaagagtgaaatccagaaggagggtctaaaattcccaggactccaca

SEQ ID NO: 727180 - DNA, 74 bp, Homo sapiens
gtgcggcccgaatgccagcgcctcttctaccggggcaagcaggtggtatcacggaaaacttgacagaacgatag

SEQ ID NO: 727181 - DNA, 50 bp, Homo sapiens
ttggccaaggagtgccccctttcacagggccgttgctccagggagaactg

SEQ ID NO: 727182 - DNA, 100 bp, Homo sapiens
gacggtctctgccagtataaatgcagtgacggtgatgacacaatgactggtgatgggggagaataccttaggcctgaggacctaaaagaactgggtgatg

SEQ ID NO: 727183 - DNA, 75 bp, Homo sapiens
atgcccactcattcgtcatcttctgttctccaagaaaattggtgacttaagagattaaaattaatttggttgctg

SEQ ID NO: 727184 - DNA, 50 bp, Homo sapiens
gcacttcatccagcagtgcacagtgttgctaacaaccacaagcagaattt

SEQ ID NO: 727185 - DNA, 76 bp, Homo sapiens
ggaccagtttcaactttatcagaggttaaaatttgaaagaggcaaggattactgcaaagtaatatttccatatgag

SEQ ID NO: 727186 - DNA, 90 bp, Homo sapiens
tgactcagctgaaatccagcctattgggaactgtgaaaagaatgggggtatgctacagccacctcttgtctcagagaaagatgtcacatc

SEQ ID NO: 727187 - DNA, 74 bp, Homo sapiens
cattttatatcctctgctttgtgggtgggtgttccacactgattctcgtgactttaaggaccagggatttgaag

SEQ ID NO: 727188 - DNA, 75 bp, Homo sapiens
ctcaggtacagaagggcgacctctgtgccatttctttggtggggaacagtttctggaactaatgcaactgaagta

SEQ ID NO: 727189 - DNA, 74 bp, Homo sapiens
ggtcaccttcgacccccgctcgggccccttcacagatgtagtcactacaaatcttaaattgcgaaatccatcgg

SEQ ID NO: 727190 - DNA, 100 bp, Homo sapiens
ctacctaccaatcgtgaaaactatattcacaggtgtgatgaatgcagactctgctaccattttggctgtttggatcctcctttgaaaaagtctcctaaac

SEQ ID NO: 727191 - DNA, 115 bp, Homo sapiens
gcagcctcaaagaaggcagttttggggccattggtgggggcggtggaccagggcaccagttcgacgcgctttttggacactgtcttcagccttttcttcaagtttttgaccgtgg

SEQ ID NO: 727192 - DNA, 100 bp, Homo sapiens
gcgcagaatgcttctcagcagcaacatccccaaacagcggcgtttcacggtggcacatacatggtccctgactatggctccccagagcctgccttcatct

SEQ ID NO: 727193 - DNA, 80 bp, Homo sapiens
cgggaagtgtgaagcggccaatggcacggaggcctgcgtgagctgaaaggcgggaaggcttattccaaggtaagaggggc

SEQ ID NO: 727194 - DNA, 76 bp, Homo sapiens
tccaagcctctcagcttcggagaatggagtcttccatcaatcatatctcacagctatatgttctcctttcagccaa

SEQ ID NO: 727195 - DNA, 50 bp, Homo sapiens
cttgagaactggctttgagaaagctcagcaaaacccagcagctcagattc

SEQ ID NO: 727196 - DNA, 99 bp, Homo sapiens
ctgcaattcataatggagctactgtactggctattggaaggaggagattctgaagataaggagacagccgctgtactgtgttaaggaaacaagatagtg

SEQ ID NO: 727197 - DNA, 89 bp, Homo sapiens
gaaactacaggctgaaaagcatgacgtaccaaacaggcacgagataaggaaattgacaatggcccttcagctatgctaggtctataatg

SEQ ID NO: 727198 - DNA, 108 bp, Homo sapiens
tgcggcgagtcctgagcggccaggacgacgaggagcagggcctgactgcgcagaacccttaggagaaatcttgagagtggacagcaattgtgaagatcgccagagagt

SEQ ID NO: 727199 - DNA, 87 bp, Homo sapiens
tggacagctctcagtccacactcccaaaagggaaagggagtgcatccgccccaacccttttccccctcgtctcctgtgagaattccc

SEQ ID NO: 727200 - DNA, 74 bp, Homo sapiens
cgggggagagcgcgccgctgctcccggaccgggccgcgcacgccgcctcagggatgattctctgaacgactgtc

SEQ ID NO: 727201 - DNA, 50 bp, Homo sapiens
ttttggacaagtgggtggagctgaggttgacttttgtgccctggtaattc

SEQ ID NO: 727202 - DNA, 74 bp, Homo sapiens
agaatggacaagcttaataaaataaccgtccccgccagtcagaagttgagttaaaagaagatggatgcacagtg

SEQ ID NO: 727203 - DNA, 103 bp, Homo sapiens
attttaatttcagtgactgaattaaaaggtgtcaagaagctcagaatggagctaatttcgttactcgaaaaattagccggtcagtagctaagatttaccttgg

SEQ ID NO: 727204 - DNA, 74 bp, Homo sapiens
ggctgccgttaaggaccgttacgtttcccggatctcacattcttgaaggtggcattgaagagcactaagatcgg

SEQ ID NO: 727205 - DNA, 100 bp, Homo sapiens
cccgggcgggcccccggagacgcgcaggatgccacacgaagagctgccgtcgctgcagagaccccgctatggctaattttctagaaaccgataatgaggg

SEQ ID NO: 727206 - DNA, 75 bp, Homo sapiens
agcacaagatcctggagactctctgcacgctgggcaaggccgagagcactgcagtttcctcctgaaggctggctc

SEQ ID NO: 727207 - DNA, 82 bp, Homo sapiens
cttggtttcgggatctcggtgctgcagacggcgagacctcctgcacagttcaaatctgaacatcaatgatgtactagggaac

SEQ ID NO: 727208 - DNA, 75 bp, Homo sapiens
agtcgtccggagccgctgcgcgcggtttccaacctagatgaggaaagccgatggacagtccactacactgccccg

SEQ ID NO: 727209 - DNA, 90 bp, Homo sapiens
tcctgagttgccaatcattatcacaggttcagaagatggcaaaagatgtgattgaagagcatggtccttcagaaaaggcaataaacggcc

SEQ ID NO: 727210 - DNA, 82 bp, Homo sapiens
gccccgcgcgccccggcccggccccgcgaggttcgtgctggccgtgggcagcgccgtctttgatgccatgttcaacggggga

SEQ ID NO: 727211 - DNA, 94 bp, Homo sapiens
ttagctgtgctcgcgctactctctctttctggcctggaggctatccagcgtgaccagaagtcagcagcttcccagaagccccgaagccggggca

SEQ ID NO: 727212 - DNA, 90 bp, Homo sapiens
ggaagaacagcctgaagaagggctccctcgtgaagaacctgaaggacacactaggtagacatagctgacattgagaatgaagagaaccgc

SEQ ID NO: 727213 - DNA, 75 bp, Homo sapiens
agccaatcagcgcgggcagcgaaccgggggagcgaggcacgggcgtgatggtgggcatgggtcagaaggattcct

SEQ ID NO: 727214 - DNA, 98 bp, Homo sapiens
ggagtttgcaaacaaattattgacggtcaaggtatttcatgccgaggaagatgagaatgtgcctactgctcctgatcctccaagtcaacatttacgtg

SEQ ID NO: 727215 - DNA, 75 bp, Homo sapiens
gccgcagcagccatggccgagcgccgcgccttcgcccagaagatcagcagctgagcttcagtcattgtctattcc

SEQ ID NO: 727216 - DNA, 75 bp, Homo sapiens
gcagtggcgccgagcagcccctcccgcagccggtgtgacctgtcccttcagggtgactatgaccagagcaggacc

SEQ ID NO: 727217 - DNA, 100 bp, Homo sapiens
gattttgatgtggatgatgccaaagttttattagctgtcggcagtactcagtggaagggtgatattatgacactgacactgctattttgaaacctggagg

SEQ ID NO: 727218 - DNA, 75 bp, Homo sapiens
ggcagcagcatctcagcccaagagaagtgcttagatgagtacgaagatgatgaagcagggcagaaagagcggaaa

SEQ ID NO: 727219 - DNA, 100 bp, Homo sapiens
ctcccaagagggcggcggcagcgggtcctacgaggagggctgtcagagcctcatggagtacggactatcggacaaaacctttctgctgcagcgcttgtcc

SEQ ID NO: 727220 - DNA, 75 bp, Homo sapiens
gcccggcgccgcaccagcagaacgctatccagtcagttcgctgctattcccatgggtcacaggagacagatgagg

SEQ ID NO: 727221 - DNA, 83 bp, Homo sapiens
gtctgctccagctcgcagcccgctgctggagctccacgcaggagatcggtgaggagctgatcaacggagtcatctactccatc

SEQ ID NO: 727222 - DNA, 100 bp, Homo sapiens
gcacgcacgcggtgcagggtaacatggcggatgcggaagctgcaagctttcttcctggtggcagatgacatcatggattcatcccttacccgccggggac

SEQ ID NO: 727223 - DNA, 98 bp, Homo sapiens
cacttagaaccgcagcagggacgtcggtttgctatcgggactcggcgaggacgagttttgccgaattgacaagcccctgtgtcacagtgaggatgaga

SEQ ID NO: 727224 - DNA, 75 bp, Homo sapiens
agcggcggcagcggcggcgcggaggcggctgaggtgcgagccgaggatgtactgagtaaagatgctggggaatgt

SEQ ID NO: 727225 - DNA, 98 bp, Homo sapiens
ctcctagtagaaaaagttcttgggacaaacttcatttggttcagattcagaacaagaaagtggacatctctaaggtctcctccaagtgtgggtctaag

SEQ ID NO: 727226 - DNA, 100 bp, Homo sapiens
tgatcagagtgagtcaaaaggccccgtgatacaagaaagttactgtggcccatgtcctaaaaactggatatgttacaaaaataactgctaccaatttttt

SEQ ID NO: 727227 - DNA, 50 bp, Homo sapiens
ttcaagacaggtgtttaagcatggagtttgacgagaaggacttacgacgg

SEQ ID NO: 727228 - DNA, 82 bp, Homo sapiens
ctgagagagagcaagcgtttcagcgcctacaattacagtggtcccaggctgcacccatggcagaaggaggagggcagaatca

SEQ ID NO: 727229 - DNA, 76 bp, Homo sapiens
ggggaaagtcaagtgaaaggtggtgaagagccaattgagattgcagagggaatggcatacatcgagcggaagaact

SEQ ID NO: 727230 - DNA, 83 bp, Homo sapiens
ctgacattagctcccactttcaagaagcaatagacttcattgagagacaagagagacacctccaacttcgacaaagagttcac

SEQ ID NO: 727231 - DNA, 100 bp, Homo sapiens
atctacccggagaagcaggagccctactcggcagccggcacagtcttcactaccgtagaagaccttggctccaagatactcctcacctgctccttgaatg

SEQ ID NO: 727232 - DNA, 49 bp, Homo sapiens
gacaagatcccgtccatgaatcaggtgggaccatccagttgcaggaaaa

SEQ ID NO: 727233 - DNA, 50 bp, Homo sapiens
atggaaagaaactaattttcaggcacctattcagtgggaggagcggaacg

SEQ ID NO: 727234 - DNA, 51 bp, Homo sapiens
cgccgccgcttgtgctgcagccatggtggaagttaaacgagctgagcctcg

SEQ ID NO: 727235 - DNA, 126 bp, Homo sapiens
gggaccgggacctgctcctggacccggcctgggagaagcagcagagaaaggaggagatgaccgccgggttctgctatggcacatggaacaagccatccactccagggtcaagcccatacagctgaa

SEQ ID NO: 727236 - DNA, 99 bp, Homo sapiens
ctcagcggccggaggacatgcgggagagagaatgagccagagggacacgctggtgcatctgtttgccggaggagagcagagctgacatctgataaagac

SEQ ID NO: 727237 - DNA, 82 bp, Homo sapiens
ggcgggccagtgcggcaaccagatcggcgccaaggttttaaaatcaaagatgggaaaatcggagaaaattgcccttccccat

SEQ ID NO: 727238 - DNA, 100 bp, Homo sapiens
gtgttaaatagcaatcctccccccatcataaaggatgtacgaagtaggtccaaagttgttgaccgtatttacagtctctacaaacttacagctcataaac

SEQ ID NO: 727239 - DNA, 100 bp, Homo sapiens
ccagtatccatattcgttatgaagatgatattgctaagaagcctcgaacgccaacctctggtccagtaatcacgaagctgatctttgcaaaaccaattaa

SEQ ID NO: 727240 - DNA, 100 bp, Homo sapiens
cgccgcttccgtttctcgagggaaaggctgctgcctcctgctctgtcctcatccccggcttaggatcataaaaggattcctctgtactagcacactcccc

SEQ ID NO: 727241 - DNA, 96 bp, Homo sapiens
cagtgggagagccgtacctatccttatcctggaaccccaatcactcagcgcttctcgcacagagtgccagcctggcccaggtgaaagccatgctcc

SEQ ID NO: 727242 - DNA, 75 bp, Homo sapiens
ggcgagcgcatcatggcgattgaagggccgcgatgggcctcttggaacattggtgtgttcatctgcattcgatgt

SEQ ID NO: 727243 - DNA, 76 bp, Homo sapiens
agagcgtgaccgagagcgcgaatatcgtcatcgttagaaggaatacggttggacagaatgaactgaagattacaag

SEQ ID NO: 727244 - DNA, 87 bp, Homo sapiens
gcaattccgcagtctctcccagattgtgcaagaaccatgggaggggcgtcaggtctacttccccagcaggacagcatcattctccta

SEQ ID NO: 727245 - DNA, 100 bp, Homo sapiens
atattgttgttggtacacccgggagagtgtttgatatgttaaacagaagataccttttaaatacaatcaagtggcatcttaaatttttgctggaagtgga

SEQ ID NO: 727246 - DNA, 113 bp, Homo sapiens
tcaggactattttcacgttttaatgccgagaggtctctgtgacgattttggttcaacagagtttggaaaagatttctaaactggagcaggaaaaagaacattggatgttggaa

SEQ ID NO: 727247 - DNA, 80 bp, Homo sapiens
aaaaaacctctgaccgtgaagagacatgagatgattgccaaacccccagtctgcagatgcctccaaggagtccgaaacca

SEQ ID NO: 727248 - DNA, 75 bp, Homo sapiens
cagagcgtcacggcgtacgccctcatggggaaaatctccccggtgactttcagggagtgcatccgccccaaccct

SEQ ID NO: 727249 - DNA, 82 bp, Homo sapiens
gccctccccaagtcgacgccgcaacccggggaaagcaggtgtggacactgccagcggctgcagccgacttggaatgacctgg

SEQ ID NO: 727250 - DNA, 90 bp, Homo sapiens
cgacgacgtgcggatctcctcccgggggaagctggctgaacgcgacatcgtccagttctgggaagtcatcagtgatgagcatggcatcga

SEQ ID NO: 727251 - DNA, 75 bp, Homo sapiens
acagaactcgtcagattcttgcctgcagacgcaaacatgcagatctttgtgaagaccctcactggcaaaaccatc

SEQ ID NO: 727252 - DNA, 75 bp, Homo sapiens
ggcggggccacgctgcgggcccgggccatggccgccgccgatgccgaggagaagatggtataaactggtccatca

SEQ ID NO: 727253 - DNA, 75 bp, Homo sapiens
aatgtttcctaaagttcgtgaatctcaacttattgaaaagtatggattcccacctgatcttaccctcacccctca

SEQ ID NO: 727254 - DNA, 100 bp, Homo sapiens
cagctgctaaagtggcatcctgggattttgttgaagccacacaaagaacaaattgcagttgtttgagttgcagaggaaagtggtcgcttatggtcagagg

SEQ ID NO: 727255 - DNA, 94 bp, Homo sapiens
caaaattccacagaattatcaaagacttcatgatccaaggaggtgacccaacagggacagtttgggcgcaccgaagtcatcgacaacacgctca

SEQ ID NO: 727256 - DNA, 98 bp, Homo sapiens
cgtcatcacagtcaactatcgacttggagtactcggacgaatgccttagtttccactttccagcctggatcccctcacactgaacccttcttcgttgc

SEQ ID NO: 727257 - DNA, 100 bp, Homo sapiens
ggagcccttgggtgaaattgttaggcgtggagagggagtgatgtcttccagactcggtgctgtacccgccatgggaaatttggaattaagccttcccaga

SEQ ID NO: 727258 - DNA, 75 bp, Homo sapiens
attgtttcccgcggtgcctcgactccttaacaggatctacgataagctgaaaatgagagccggaggcatgagtga

SEQ ID NO: 727259 - DNA, 50 bp, Homo sapiens
atgggcgtagttgcttcggggtgaaccggactgggccagtgccattcgcg

SEQ ID NO: 727260 - DNA, 100 bp, Homo sapiens
tgcgactcgcggaccggcgtccccggcgcgaagaggctggactcggattcgttgcctgaggagtacttgattcttcagaaaacctccaaagtagatgtgg

SEQ ID NO: 727261 - DNA, 90 bp, Homo sapiens
gggttgcgctccgtgcacctcttgcggctgagtcagtgctgattctctcaaatagagcttgaaggataaatcttcatttttgtttcaaca

SEQ ID NO: 727262 - DNA, 80 bp, Homo sapiens
ccacaacagggacacctggttccagctgcagcacgtggacgctgactcggaagtgcagatgcctgaggaaacccagaccc

SEQ ID NO: 727263 - DNA, 100 bp, Homo sapiens
gggtagagagaccaaagatcttgatgaggatgacgatgtcgataccaagaagcagaagaccgacgaggatgactagacagcaaaaaaggaaaagttaaac

SEQ ID NO: 727264 - DNA, 96 bp, Homo sapiens
ctcttcgctggctcccgggggctctcccgggttcctctcattgcaggctgaagggtttgtggcatcatcatcccctggaactatcccctgatgatg

SEQ ID NO: 727265 - DNA, 82 bp, Homo sapiens
cccggcccgcgcaggaggcgctcctccttcccaccggccaagaagcttgagagaagaaaaatttcagaaaaattgtctcaat

SEQ ID NO: 727266 - DNA, 82 bp, Homo sapiens
cgtaattacattctctcggccagcgcctccgcggggcactatgaacgaagaggagcagtttgtaaacattgatttgaatgat

SEQ ID NO: 727267 - DNA, 49 bp, Homo sapiens
cctacaggcactgagtatacctgcaagctcctgacccctgaggattacc

SEQ ID NO: 727268 - DNA, 100 bp, Homo sapiens
gcagccccgcggccggcccggcagcgcccggcccccggctcagcccccggagtgcggagccgaccaggtgtctggaaatgaagtatggaaatgaaatcat

SEQ ID NO: 727269 - DNA, 75 bp, Homo sapiens
gaaaatagcctttgccatcactgccattaagacatttctcttgggaagttgtgcatctgacaggaatatagtact

SEQ ID NO: 727270 - DNA, 100 bp, Homo sapiens
ggagtcgtccaggaggcctcctccaagccggccaattccccccgcaccaaattgcatcgtttcccaggcaaaagaatggaccccagcaggaaaagcaaag

SEQ ID NO: 727271 - DNA, 100 bp, Homo sapiens
gatgtgccatctctgtgcttggcagaactggtgaagacctattgcagcagacaatttgctcaggattttgtgatgcacacagatgtcagaacctgctcgt

SEQ ID NO: 727272 - DNA, 76 bp, Homo sapiens
ggcatttggatcagctcctcctttgtgccttttatatcatggcaaaggtggcagcaaatgcacacattcctccaga

SEQ ID NO: 727273 - DNA, 150 bp, Homo sapiens
tgagcttcattcagatgtggtggaatatgccaaggaaaaactggagagcttcatcaaaaatagtgatagctttgataagaattacatgaacgacagccttcgcaccgacgtcttcgtgcggttccagccagagagcatcgcctgtgcctg

SEQ ID NO: 727274 - DNA, 100 bp, Homo sapiens
tgtgaggcctccccagccatgtggaactgaatggctttctaaaggacatggggaatacagagaaatccctagtgaaagagacttttttcaagaagtcaag

SEQ ID NO: 727275 - DNA, 90 bp, Homo sapiens
agttgccaaatttgaagcagaacgatcaaaagccaagtggcaaacgcagtctctggtcccagcccaccccatggcccctcccagtcccag

SEQ ID NO: 727276 - DNA, 50 bp, Homo sapiens
gtcctggagtacaatgccattggaggttttaaaatcaaagatgggaaaat

SEQ ID NO: 727277 - DNA, 80 bp, Homo sapiens
ggtctgcgcagtgcaggcagataccgtttgacaccaccaatcttgcttctgaaatatctacctgggatggagtgatagta

SEQ ID NO: 727278 - DNA, 100 bp, Homo sapiens
ggacttcgtcgccaagctggccaacaacacgcaccagtggaacatgacaaggaattcttccacccacgctaccaccatcgagagttccggtttgatcttt

SEQ ID NO: 727279 - DNA, 100 bp, Homo sapiens
atccaggttcccatggttgccggctcccctctcaggacaacccagatgtgcaacaaagtgcgatgtgagatgaacccggtacctcagatggaaatgcaga

SEQ ID NO: 727280 - DNA, 83 bp, Homo sapiens
cgagggctatggctatggctatggctatggccaggataacaccaccaactatggcgtcgagggcgaggcccccagcagtgaga

SEQ ID NO: 727281 - DNA, 51 bp, Homo sapiens
tttatagaaggagattacaaaacaattgcttggaatgcagtagccctctgg

SEQ ID NO: 727282 - DNA, 107 bp, Homo sapiens
gagaataatttctttctcgctgatcgcctaacttctactgacgaagcttggaagttgcagaaggtgatgccacactcaatcagaaactatgctactgctgaagaggt

SEQ ID NO: 727283 - DNA, 82 bp, Homo sapiens
ggcctagcgtcctggaattacttcaatcaacttctcaataggtttggcatggacaagatctatgaaggccaagtggaggtga

SEQ ID NO: 727284 - DNA, 100 bp, Homo sapiens
caaaggtggctaaggacctcaacccaggagttaaaaaggatgactatgtcttagaagttcggcactttcagtgtcccaaatggcctaacccagatgcccc

SEQ ID NO: 727285 - DNA, 51 bp, Homo sapiens
tcgggacaccccggaagctgggaaatggtttggaaggcgctttgagtcccc

SEQ ID NO: 727286 - DNA, 83 bp, Homo sapiens
ctcggagtccttggggacggagcagcgcgtcgtggggcgagcggcagtacctggagtagaacagaaaaattattatgtctgtg

SEQ ID NO: 727287 - DNA, 92 bp, Homo sapiens
gaacgggactttgcagaaatgtgtgcagactacatggcatctaccatagggcccaagaagatgaaaggattgttcttgttgacaacaaatgt

SEQ ID NO: 727288 - DNA, 88 bp, Homo sapiens
aaatcccagagaagcaggagaaagagaaagaaatggctggtgctcagagccagagcccagaggtggagcagttagggagggttgtgga

SEQ ID NO: 727289 - DNA, 100 bp, Homo sapiens
aggatggtcggaattaagtgagagagatgccatctacaaagaattctccttccacaattttaatcagagttgctggagaatgtaaccctaatccataaac

SEQ ID NO: 727290 - DNA, 100 bp, Homo sapiens
aaaggcaagatcgacaccatgaaggttagcatggcctcattgaaagaactagatcaaagactctttgaaaattacatcgagttgaaagcagatcccatcg

SEQ ID NO: 727291 - DNA, 100 bp, Homo sapiens
caccagcaacaagtggtgcaggctgtggaacgggccaagcaggtgaccatggcagaactgaacgccatcattgggtctccacaaaccggaggactacccc

SEQ ID NO: 727292 - DNA, 83 bp, Homo sapiens
tttttagtctaaatgatgggcagtcatggtcccagaaacgtcactatcaagaaggctcttacagcactactttcagatgatag

SEQ ID NO: 727293 - DNA, 100 bp, Homo sapiens
tagtccgcggccctgctgagagggaaaaggacgccgcggtcttcccaggcgtcgcggagagcagacccaacatgagtgaagtttcctgcaagaaacggga

SEQ ID NO: 727294 - DNA, 100 bp, Homo sapiens
ctggagaaggccatcaccacgcagaacgtcaacaccaagtgcatcaccatccccagtgagaaggcaaccaaagtgcaggacatcaaaaacaacctgaaag

SEQ ID NO: 727295 - DNA, 82 bp, Homo sapiens
ttcgtcctacacttgcgcaaatgtctccggtgttggagagcacaatggctgaacaagtccttcctcaggctttgtatttgag

SEQ ID NO: 727296 - DNA, 75 bp, Homo sapiens
cacctatgaagatgacatctcggaaatcaggcctgacctctcgggacacacccagccctgtggacccagacaccg

SEQ ID NO: 727297 - DNA, 75 bp, Homo sapiens
tcgtagggaggacgccgggacacctggaagccgagaaatggtcaaaatgcagatcttcgtgaaaacccttaccgg

SEQ ID NO: 727298 - DNA, 73 bp, Homo sapiens
gatgcccctgataaaggatacgttggtcgggtcacaaatcttcgaagagtgacatatgttgttttagatgaag

SEQ ID NO: 727299 - DNA, 100 bp, Homo sapiens
ttcgagccacgcatccaataccagcagcctgtgggatttattattttgaagtaaaaattgtcagtaagggaagagatggtgcactgacaggcagaactca

SEQ ID NO: 727300 - DNA, 75 bp, Homo sapiens
tgacaacaccgatcacagaccaacaagtattgttggtgaggctgatgaaaatggagaagattactatctttggac

SEQ ID NO: 727301 - DNA, 75 bp, Homo sapiens
ggaggatgtcgggacaccccggaagctgggaaatgaagggacaatggagaacattgcagcccaggctctggagca

SEQ ID NO: 727302 - DNA, 142 bp, Homo sapiens
gcacactgtgggggtgtcctggtgcacccccagtgggtgctcacagctgcccattgcctaaagaagatcagggagcttccaaggcatttgatacctttttgatgggaagaagggctctgaggagctccaagataccccaacc

SEQ ID NO: 727303 - DNA, 73 bp, Homo sapiens
ttcgggtgtctcgtgtgtgaacatcacagagtgttgcggagataggaacatgggagagaaacaatctgggtaa

SEQ ID NO: 727304 - DNA, 49 bp, Homo sapiens
ccatattctctggaggttttagacacgagctccgagttgccacccagga

SEQ ID NO: 727305 - DNA, 87 bp, Homo sapiens
ggcctggggccccgcgccgtctgccgcggcggctcacggtgcagccctcgcgcccgccagctgtggccagaagagctccgaagagac

SEQ ID NO: 727306 - DNA, 75 bp, Homo sapiens
gcacccctacgggaacccacgaccattatatgctggaatggttccttggaaacctgtttgacttcttacgcttga

SEQ ID NO: 727307 - DNA, 75 bp, Homo sapiens
acaaaagtccagaaactcgccagttaatagtattgtgggctggttgatatgtgaagagccaacctgtcgcaatcg

SEQ ID NO: 727308 - DNA, 75 bp, Homo sapiens
ctggggccagggaaccctggtcaccgtctcctcagcttactaccagcccagtctgactgcggagtatgatgaaga

SEQ ID NO: 727309 - DNA, 153 bp, Homo sapiens
ctcgcacatttgacttggaagcaatgtttgaacaaactcgaagaacagctgtggaaagaagttgcaaaacactgggtgccagcgagatttcagattcctgtaaacctctaaagaaaaggagtcgcgcctcaactgatgtagaaatgactagtt

SEQ ID NO: 727310 - DNA, 82 bp, Homo sapiens
gacatatttttggacctgaaacagaaattctggaacacctatatggcataatcaccagcaacacccgggacaataatacggg

SEQ ID NO: 727311 - DNA, 100 bp, Homo sapiens
gctgtttggaaagacccaggagaagccgcccaaagaactggctgaccggttccctgatgtgttacctgcttctgctactgatccaaactgcagaacttct

SEQ ID NO: 727312 - DNA, 100 bp, Homo sapiens
acgtcccccctggatccgccgtcagccgggcccggggctttcgacatgccccccagagtgtgtggcaggccccaacatcgccgccatcgtcgggggcacc

SEQ ID NO: 727313 - DNA, 87 bp, Homo sapiens
tggccccgcgctgcgcccgccctcgcctcacctggcgcaggtcctgcagacattcgctttgtctgggagaagaatgggcgagctctg

SEQ ID NO: 727314 - DNA, 100 bp, Homo sapiens
cctcatctgggacactgctggtcaggaacggctgggatgaaagcagctccatcagtagtggactcagcgatgcctcagacaatctcagttcagaagaatt

SEQ ID NO: 727315 - DNA, 74 bp, Homo sapiens
acatcctggaagctgggaaatggcctgttacatgaacagaatatggcaaaaatgagactacttacttttatggg

SEQ ID NO: 727316 - DNA, 129 bp, Homo sapiens
ggcccaaaagaggggcgacagaacatgatgttgacacgggctgggcgcccccagaagcccgggaacaaacattctgtttctggcgtctgcatacgcaagtccccaactcgctgaggagagctgttcagc

SEQ ID NO: 727317 - DNA, 116 bp, Homo sapiens
ttcaaacctggatccttggatacaggaaaccaacagtcacacatgtacattacaggtatgccattttgaagactgagacgttggagttttatcctagaggataaaggaaatctttg

SEQ ID NO: 727318 - DNA, 50 bp, Homo sapiens
gccgagcaggctgagcgatacgacggagctgacatggacccaaatcctcg

SEQ ID NO: 727319 - DNA, 100 bp, Homo sapiens
cggaaagcagcgtcaggagccatagtacctacagcagcactccagcctcgccgctcctgctatttgccaaccgccgggacgtacggctggtggacgccgg

SEQ ID NO: 727320 - DNA, 75 bp, Homo sapiens
ttcttcatctgctttggcctgaccatcttcgttgggatcagaggtggttaaataaacttggatcggctgtaatcc

SEQ ID NO: 727321 - DNA, 51 bp, Homo sapiens
cctcgcgtccggagtccccgtggccaggtatttacttatgggatgtagaag

SEQ ID NO: 727322 - DNA, 50 bp, Homo sapiens
gtgtcaccatccaggaactcacaggaccaagaatcgccttcagccctgtc

SEQ ID NO: 727323 - DNA, 100 bp, Homo sapiens
caaaaaccagttgcgaaatggtctgaggcagagtgtggttcactcttgaatgtcgtctctcaactagccaaacggaatctgcgactgctggtcctaggcc

SEQ ID NO: 727324 - DNA, 100 bp, Homo sapiens
ccaaactgtgctaatgcgccatgaaaacatacttggtatccgttacagcactgatgtgagtgtagatgaagtaaaagctttggcttctctgatgacatac

SEQ ID NO: 727325 - DNA, 75 bp, Homo sapiens
ctggacacactggaggcgctgggacaatgcagatcttcgtgaagactctgactggtaagaccatcaccctcgagg

SEQ ID NO: 727326 - DNA, 75 bp, Homo sapiens
cccgagtgagcgcgggcgccgaggttgcacgatgggaacacaagacccgcaagctgagcagggccttcggatccc

SEQ ID NO: 727327 - DNA, 75 bp, Homo sapiens
taccgacctgagcccacaaactcaaggctcacagcctttgttctgaagacttttgcccaagctcgagcctacatc

SEQ ID NO: 727328 - DNA, 100 bp, Homo sapiens
gtgctggaaggggccagtctggagacagtcaagtcaccttcaggccattcagaggaggaaagagaggggaatatgaagtcagccaagccccaagtgaacc

SEQ ID NO: 727329 - DNA, 100 bp, Homo sapiens
cagcttgtgccctacatcatcgacctgcagtccatgcaccagtttcgccaggacacaggacagagcgggatgccaccagcttgtccaaagggaagttcca

SEQ ID NO: 727330 - DNA, 100 bp, Homo sapiens
cctggtgaccgagcacccgcctccgggcatcttcaactggacagtatggaaattaccagcagtgaaaaagtacttacattccagtagccagtatctatta

SEQ ID NO: 727331 - DNA, 75 bp, Homo sapiens
cagttatccacggactggaagatcaaaagaggaggcattcgacttacagcagtgtgcggccagccagcagagggg

SEQ ID NO: 727332 - DNA, 100 bp, Homo sapiens
atctctggacagaaaaccacattgtttacacaggcgcctacaaatcgaggacttcgaggctcgcatcgcgctgttgccactgttacaggcagaaaccgac

SEQ ID NO: 727333 - DNA, 83 bp, Homo sapiens
cctcggacccatcgccgcttctagaccctactgcggtctcggatattgccgggctgcccccaagtgtaactccagcactgtga

SEQ ID NO: 727334 - DNA, 75 bp, Homo sapiens
atcaggggacaatgtagtaaaggaactcgaatcatttatgacagaaagtttctgttggatcgtcgcaattctccc

SEQ ID NO: 727335 - DNA, 90 bp, Homo sapiens
gtgggaagataaatgaaggggtctagatgtaaatgtcagtggaaaggagagctaccatcactaaggcaccacacctgttggtgttcagat

SEQ ID NO: 727336 - DNA, 99 bp, Homo sapiens
gcggctccctccaggtattaagggagatatcccaaagattactttctatgaagacaaaaattttcaaggccgtcgctatgactgtgattgcgactgtgc

SEQ ID NO: 727337 - DNA, 100 bp, Homo sapiens
gatgaacccaacctagtgggtgtaatacatcatgaactgcagggtttattacccagaactctttgtctgggtcagtcaagaaccatttccaaacaaggac

SEQ ID NO: 727338 - DNA, 100 bp, Homo sapiens
cccagagttgtgacagccaatcggatgctgaagcagatgcttttcaggccttcacctaccaccatatccaggagatcatggtccagctgctgcggacagt

SEQ ID NO: 727339 - DNA, 90 bp, Homo sapiens
aaaagttcttgagacttatgggtgcaggaaaggaccctgtggttttggcatttgacattgagacgaccaaactgcccctcaagtttcctg

SEQ ID NO: 727340 - DNA, 100 bp, Homo sapiens
ctttgttgctgctgcacattaggttgcagtatgtggccagttatttgcctcagtaaaagagagaagaaactgaggcctggaatttgattaactcattcaa

SEQ ID NO: 727341 - DNA, 51 bp, Homo sapiens
accacagaccttcacagtccacaggctggagcattggatttgctaaaggag

SEQ ID NO: 727342 - DNA, 75 bp, Homo sapiens
gcctgcgagggttgaagattgtgaagcaatagcctaagtttaggtagaagcttaggctattgatttgaacccact

SEQ ID NO: 727343 - DNA, 97 bp, Homo sapiens
agccaacctgaccgggcacgaggagaagatacccagaaataatcgcttaatgtatattcatagctaccaaagctatgtgtggaataacatggtaagc

SEQ ID NO: 727344 - DNA, 51 bp, Homo sapiens
ttctttcccttcaatcctctaggttgcagtattttacagagctagcccaag

SEQ ID NO: 727345 - DNA, 100 bp, Homo sapiens
agaactcccccagtgtttctgcagggcagatcttgaaccttctggatgagctgagattggctaatgataccctcatctacttcacatcggaccagggagc

SEQ ID NO: 727346 - DNA, 75 bp, Homo sapiens
caagagagttggctgtgcagatccagaagggcccaggacacagtgagcatacaatagacattagctgctgtggtg

SEQ ID NO: 727347 - DNA, 82 bp, Homo sapiens
aaagatggatttttgcatgagacgcttctggacaggaactgtggctgcaccatctgtcttcatcttcccgccatctgatgag

SEQ ID NO: 727348 - DNA, 75 bp, Homo sapiens
ctgctcattttcagtgtcccgattgtctatgagaagtacaaggagatgaccaggatagtgaaaagtcaaaaccag

SEQ ID NO: 727349 - DNA, 98 bp, Homo sapiens
ctgggaggtggacgtggcggcccagctgggcgagtatctggaggaggcaagaaatgggaaattgccaagcccctgaaacacaagcaagtagatgaaga

SEQ ID NO: 727350 - DNA, 90 bp, Homo sapiens
cgctcgacgtgttgcagcacatcctcatccgagcctttgatttgagtggggagagcctggggatgtacaggagatgcctgctccagaatc

SEQ ID NO: 727351 - DNA, 100 bp, Homo sapiens
gataaatcagtgctgctttctttaggacgaaagttacggctagatgaggctcaagaagcagaatgccaggccttgaggctacagctccagcaggaaatgg

SEQ ID NO: 727352 - DNA, 83 bp, Homo sapiens
caaagcacaggaatctcactctgttaaagctggtctgttctaactgagggtttttaatgaccacaacaagcaagcatgcagct

SEQ ID NO: 727353 - DNA, 90 bp, Homo sapiens
tggctcttccaccagccaggccagagggaggggagggatggaagctggatgctgacaaatatgagaatgatccagaattagaaaagatcc

SEQ ID NO: 727354 - DNA, 50 bp, Homo sapiens
ggcgctccaggaggcactcacagagcttcttcgagacaccttcacttccc

SEQ ID NO: 727355 - DNA, 100 bp, Homo sapiens
ttgtggccaagagttcagaccgtggcgaagtggagagtgacatgcagttggatggcggtgactgcgtggtgaccttgggaaaggtgttgaaagtgatcgt

SEQ ID NO: 727356 - DNA, 100 bp, Homo sapiens
tgcaaactcagatgcgctgaagctagctaaagaagttgatcctcaaggaacttctacttgcagaaaagtgggctaaaatgaacaagctcccctttccaaa

SEQ ID NO: 727357 - DNA, 50 bp, Homo sapiens
gaaggccctcacctggaggaagtggagggaccctcacaatgatcccaatg

SEQ ID NO: 727358 - DNA, 98 bp, Homo sapiens
atcgaccggagcagagagctggcgagcaaggaccaagaatcgccttcagccctgtctggtgcatccttggcagaaagtgaggaggaaaacacccccat

SEQ ID NO: 727359 - DNA, 83 bp, Homo sapiens
gcgcccgggaggaaggaacgaggcaaggagctaaagcagcgtgcgttcagccctgggggaacaacctatcttcagcactcgag

SEQ ID NO: 727360 - DNA, 100 bp, Homo sapiens
cccagcgcttcctgcagaaggccgagaagctctacccactgccctcggcccgcggtggattgctcaggtaatgacctggagcagttacacatcaaagtga

SEQ ID NO: 727361 - DNA, 75 bp, Homo sapiens
attggaaggatgcacaagttccaaggttacgtttcaattcttgtagacactgtttgggctctgtcatacttgaca

SEQ ID NO: 727362 - DNA, 75 bp, Homo sapiens
tgtggaggggacggtgaacggcgtcaccctcaccagctctggaggactcggaggagagtgaaattgacatggaag

SEQ ID NO: 727363 - DNA, 75 bp, Homo sapiens
tcaacttctatttaaatttagtagtcgatatccttttgactctcctcaggcttaccttacaaatttgaagtacag

SEQ ID NO: 727364 - DNA, 74 bp, Homo sapiens
cattatagagctggaattaggcaaatatggacaggaagaggagttgtacgcatgtcagagaggttgcaggctgt

SEQ ID NO: 727365 - DNA, 100 bp, Homo sapiens
ggcgcagcaaggctgacgtggagcggtacatcgcctcggtgcagggctccaccccgtcgcctcgacagcatcctggtggggaagaagttttaagggaaca

SEQ ID NO: 727366 - DNA, 50 bp, Homo sapiens
ggagcctcacagctgtattcatgtggggagagcttatggatggagaccaa

SEQ ID NO: 727367 - DNA, 95 bp, Homo sapiens
gacctcttcgatgtgcgagactttggaaagtaagactttgaccccgacgcaggcttcagtgattgccgcggatcagaagcctgagcactttggct

SEQ ID NO: 727368 - DNA, 89 bp, Homo sapiens
atcaactgagagagatgcttaaaaatcaccagttactttaatgacaatggctgccatccggaagaaactggtgattgttggtgatggag

SEQ ID NO: 727369 - DNA, 86 bp, Homo sapiens
cacagcggcctcggcctccccttggattcagacgccgattcgcccagtggggccctcgtggaggtaaagtgcctgaatttcaggaa

SEQ ID NO: 727370 - DNA, 100 bp, Homo sapiens
ggaaaatggccgccgccgccgccgccgcgccgagcggaggaggaggaggaggcgaggaggagagactcctcaggcccagagccagcacgagacatccgct

SEQ ID NO: 727371 - DNA, 100 bp, Homo sapiens
ccatttgccgtggccaggctagagacaaggcgcctctgtcgaagagccttctgctggtccccagtgccctctccctcctgctcgccctcctcctgcctca

SEQ ID NO: 727372 - DNA, 108 bp, Homo sapiens
aatgataagagctgtcagttttctgtggatgaagttctttatagctccaagctctacagattcttcaaatatattgagaatagggatgttgcaaaaacagtgttaaag

SEQ ID NO: 727373 - DNA, 83 bp, Homo sapiens
gctccgaggccgagtggcggtccgacagagtcctccgtgtcctcccccgcatgacccccttgaaggaccctctattgtcccag

SEQ ID NO: 727374 - DNA, 91 bp, Homo sapiens
ccacgaggcaagtgtagtctctcacagcctggaccctctgtcagcagtccacatagcaggctggagtgcaatggcacaatctcggctcacc

SEQ ID NO: 727375 - DNA, 50 bp, Homo sapiens
atttgttcccttagcagaaattatgttctttcagaatggaaagtatacat

SEQ ID NO: 727376 - DNA, 100 bp, Homo sapiens
acccacgaccattatatgctggaatggttccttgatgaatttttagatgtgatctactggttccgacagatcattgctgtggtcctgggtgtcatttggg

SEQ ID NO: 727377 - DNA, 83 bp, Homo sapiens
tttggtccacctctgcccagtccccccgttttccagaagtatcctgtggagcacccagacaaattcctgaagtttggcatgac

SEQ ID NO: 727378 - DNA, 75 bp, Homo sapiens
cgagagtatcagccgcctcatgcagaactatgaaaagccgttcctgagcatgctgcccgcctgcagcgcttggcc

SEQ ID NO: 727379 - DNA, 105 bp, Homo sapiens
gaccctggagcctcagttggaagcagccgatccagcctgcggagcctgtggggcagaaccactcacgaattcttgtttggtgcccttgctgaactggttgataat

SEQ ID NO: 727380 - DNA, 97 bp, Homo sapiens
cccgacgaggaacgaatgggacaagatcccgtccatgaatcagaaaccagcctggacaccaagtctgtgtcagaaggccacctcaagaggaacatcg

SEQ ID NO: 727381 - DNA, 82 bp, Homo sapiens
gccatacccaataaccaggtgcttggcaaaatcgagcgggccattggcgtcgaccagaagattatgatattcataacagcag

SEQ ID NO: 727382 - DNA, 100 bp, Homo sapiens
aggagctcgaggtggactatgaggctatccgcagcgagatggagcagctcaaggagacaatgcagatcttcgtgaagactctgactggtaagaccatcac

SEQ ID NO: 727383 - DNA, 100 bp, Homo sapiens
cccgcagcctgcctttccttccccctcggaaaatggttcccactgccgggcgagttcaaatctgaacatcaatgatgtactagggaactactcattgact

SEQ ID NO: 727384 - DNA, 88 bp, Homo sapiens
ctcctggtctgcagtggaacagtggctggagcagttattcttggtggagtaactaggatgcctggtgtgcaggagtatatacaacagc

SEQ ID NO: 727385 - DNA, 100 bp, Homo sapiens
tttttatcaacaaaggcaaaggattcggatttattaagcttgtggagaaggaacgtgataaagaagtaagcgatgatgaggctgaagaaaaggaagacaa

SEQ ID NO: 727386 - DNA, 98 bp, Homo sapiens
gagcagatgacaaccatagcccagtgccaatgcatcttctgtactctgcagcaagatgaagagcgacgtcggcagctgagagagagagctcgtcagct

SEQ ID NO: 727387 - DNA, 50 bp, Homo sapiens
atggctgttcgatgtgcagtggccaaggtgaaaattgatttgcaagtgac

SEQ ID NO: 727388 - DNA, 76 bp, Homo sapiens
gcactacaacaggaaaatcatattatagatggagtaaagtctgcgggccaggcatcgacatccgcaacgactatca

SEQ ID NO: 727389 - DNA, 90 bp, Homo sapiens
cttgaaggcgtatacaggaacaatattgatgatgtagtaagtttccagagtgtggattctttggcatgtatgacaaaattcttctctttc

SEQ ID NO: 727390 - DNA, 80 bp, Homo sapiens
ccactgcgcagggcggctgggcagctatgtcatcaacgggcgcaccaaggagttgtatcccgcattttgtattcacaacg

SEQ ID NO: 727391 - DNA, 100 bp, Homo sapiens
cagctgggtccacctcaccatcaacgcctccggcacccacaggccctgaggctccagtgcccacaggcagagagggcgactgagtccagcccaggctgag

SEQ ID NO: 727392 - DNA, 100 bp, Homo sapiens
ctgagttacacaggcttcaggtatcttatgaagagtatctctgtatgaaaaccttactgcttctctcttcagccccccgaatccaagcccaacttcaccc

SEQ ID NO: 727393 - DNA, 98 bp, Homo sapiens
aggttacttcttcctcaacaccagcaccgcagatgttgtcaaggtggcctaccaggaggccaggggtgtcgccatgcactggatgtgtgtgagaagtg

SEQ ID NO: 727394 - DNA, 75 bp, Homo sapiens
ggggagcagacggttgacagtgttgagtttgattgaaggggtcggcgctttgcctgatgaccctacctctctgac

SEQ ID NO: 727395 - DNA, 89 bp, Homo sapiens
agattatttgcaacagctcacgggagcaagaacgaatcttatggcaagggccttatatgacaatgtcccagagtgtgccgaggaactgg

SEQ ID NO: 727396 - DNA, 80 bp, Homo sapiens
ctggagtcggggccccatcgagaaatggccgcgtcggcagcccccacaggtgccaagaggacccttgcggccagcggcag

SEQ ID NO: 727397 - DNA, 100 bp, Homo sapiens
cagcatgcaagcttaggtttgttcagaagaaatgcaatttcccttaagctcctaggatttttagatgttgaaaatactccctgcgcccggcattcaatat

SEQ ID NO: 727398 - DNA, 87 bp, Homo sapiens
ggcgcgtccgcgctctgcagcgggaggtcctcgtcgcctctcgtctccagccaggccttatgatgggaaatggagtaaaacaatggt

SEQ ID NO: 727399 - DNA, 50 bp, Homo sapiens
tctagaggaggaagcctgcagccttaaggaaattgagaggctgactgagc

SEQ ID NO: 727400 - DNA, 87 bp, Homo sapiens
gcaggagctggaggagcgcaggcagcttgctaatgcacaagctgagtgtggaagccccacccaaaatcctggtggagagatacctga

SEQ ID NO: 727401 - DNA, 50 bp, Homo sapiens
cagcgacgagaacctggatcagggtgcttttgagaggaagatgtcttacg

SEQ ID NO: 727402 - DNA, 83 bp, Homo sapiens
ctaccagagaccttacctgtcaccttggctctcccacccaatggagatggctctaatgcacagagatactcctgagaataacc

SEQ ID NO: 727403 - DNA, 98 bp, Homo sapiens
tcacctactccatcaaggtcatcgaggccaacaacccattccaggctgtgcaggaaggagcccaagaagaggccgaaaccgagaccatgccagggaag

SEQ ID NO: 727404 - DNA, 82 bp, Homo sapiens
cggacctatgcaattacatgggctccatatcaaatctcggttaatgaaaaaatggacacagaaagtaataggagagcaaatc

SEQ ID NO: 727405 - DNA, 100 bp, Homo sapiens
tggaacaggaatctctgttgacagctgctgtgacttactcgaagcctcgattggccacattttggtactacgccaaggttgagctggttcctcccacccc

SEQ ID NO: 727406 - DNA, 100 bp, Homo sapiens
agccactcccctcgcagaagctcgggctcggttttgtgtttcagcggcacatacccgggagatgttagacacggctctcactatgttgcccaggctcgtc

SEQ ID NO: 727407 - DNA, 82 bp, Homo sapiens
tgaagcttctgaaccatccacacatcataaagctttaccagttaaagtccttgggctatctatgtggacttgtgtcagagaa

SEQ ID NO: 727408 - DNA, 95 bp, Homo sapiens
gttaccagaattccaaaggttctgaatctgaattatccagaacagaaagttgtgactgttggacagttcaaaattggtctgatccatggacatca

SEQ ID NO: 727409 - DNA, 51 bp, Homo sapiens
atgagatggtggatgaacccacagccacttctgccccaccaacgttgggcc

SEQ ID NO: 727410 - DNA, 100 bp, Homo sapiens
tacgtgaagacgtctccattaaactggcgatggaatatgagaggagccctctggaaagaaaaggacagaccctgtgctttcatgaaagtgaagatctggc

SEQ ID NO: 727411 - DNA, 82 bp, Homo sapiens
aaggggaagccccacatcagagctgttcaggtcaccggattgaaactgtctcaggaccttgatgatcttgccattctctacc

SEQ ID NO: 727412 - DNA, 90 bp, Homo sapiens
caacaagctgcctggtgcaatttgttccttgacttgtggtggagcagatattggggcctcggcttcacaggatggggctgccagtgtcct

SEQ ID NO: 727413 - DNA, 83 bp, Homo sapiens
ccgcacgactgttacagaggtctccagagccttctctctcctgtttaaaattggtggtgaatggtggacatggatcgattata

SEQ ID NO: 727414 - DNA, 87 bp, Homo sapiens
tatcatggagttgataacaagaagaataaagggcagctcactaagtgaggaattttaaattggaacaagagcaagaaaaaaacaaaa

SEQ ID NO: 727415 - DNA, 100 bp, Homo sapiens
tgaatcacaggagatatttccagaactgataaatttcaaacggaagagagtggcagcatttagaaagaatctaattgaaatgtctgaactggaaataaaa

SEQ ID NO: 727416 - DNA, 51 bp, Homo sapiens
ggcagcaagagatgcacaggagtggcatgccctctcccgtgaagagcaggc

SEQ ID NO: 727417 - DNA, 50 bp, Homo sapiens
ctggggttgacgacctagctggcttgaccattggacacttctccagggtt

SEQ ID NO: 727418 - DNA, 81 bp, Homo sapiens
cccgaccctggccgccccgagcggagcctggagatccagagacaatggccccgatgggatggagcccgaaggcgtcatcga

SEQ ID NO: 727419 - DNA, 50 bp, Homo sapiens
gagagccttggatgtgaacattttccaggctgtgctcctgtgtctgctgg

SEQ ID NO: 727420 - DNA, 75 bp, Homo sapiens
agatcaagaaggctgaagagattgctaatgagatgattgaggcagccaagccatattttctgctcttaagaatct

SEQ ID NO: 727421 - DNA, 84 bp, Homo sapiens
ttgttgggtatattttggaagtgtgccagaattgatttgaaaaatgtgtgagtgctaaggaagctttggagactgatctttata

SEQ ID NO: 727422 - DNA, 74 bp, Homo sapiens
tgctctggaggtagcggccgcggaaaatcctgccttgcttcgttgggcctatgcaagaacaataaatgtctatc

SEQ ID NO: 727423 - DNA, 74 bp, Homo sapiens
gatgatcttctctccgagttccccgacaagtttggatcctgtgttcccctttgcctatctggggcgcctggctc

SEQ ID NO: 727424 - DNA, 75 bp, Homo sapiens
gatcgctcagctggagaacgcggctaaagttctgatggttcagccgtctgtatatctccccagatacctgaaact

SEQ ID NO: 727425 - DNA, 98 bp, Homo sapiens
agcatgcttagcattcgagagaacaaaattaaacaactacctgctgaaattgggttacacatcattttggaatgactgtatatcatctggattacgtg

SEQ ID NO: 727426 - DNA, 90 bp, Homo sapiens
ttcagccaaagaaacaagccgtggaataggtgtatcaagtaatggtgcaaagcctgaaggaccactgacatttatggatgtggccataga

SEQ ID NO: 727427 - DNA, 100 bp, Homo sapiens
cattcacaatttcaccactagctggagggacggcatggccttcaatgcactgatacacaaacaccggtatgttgagtctaaaaaggacagagtcacagta

SEQ ID NO: 727428 - DNA, 82 bp, Homo sapiens
agggaactcaaacagcagatgcagaaacattgcagcggcccgtgtggaacataaacagagaactaggcctgcctcatcctcc

SEQ ID NO: 727429 - DNA, 48 bp, Homo sapiens
ttcctgttgatggtgatgaagacaggaaaatgttggggcttttcagga

SEQ ID NO: 727430 - DNA, 90 bp, Homo sapiens
cgctggatctggaggacgtccggagctacagggcggagatttcatctcgaaacctggcggtctccgtgttggtcctcttcgccctggcct

SEQ ID NO: 727431 - DNA, 100 bp, Homo sapiens
cctgaggtcaaaacagacaaaatccactataggagtcatggtaacagcgtcccacaatcctgagcggcaacctttggcactgcatccatgagcatgccca

SEQ ID NO: 727432 - DNA, 100 bp, Homo sapiens
ctcggatcgcctggagaggcactcggacctgctcatgatggagcagtccaagaagtcctccctcatggtggcccgcagtattctcaacaacaagctcatc

SEQ ID NO: 727433 - DNA, 75 bp, Homo sapiens
ccaaccagagcttgtgtagcgtcagatccttgagtgataaaggagtagaggatgcagaaggctatcaacaggctg

SEQ ID NO: 727434 - DNA, 83 bp, Homo sapiens
cagcaggcccgagcccaccgcgccgggccccggacgccgcgcggaaaagaagaggactgtcagaaggacgtagaaggcacggt

SEQ ID NO: 727435 - DNA, 99 bp, Homo sapiens
ccggagcccgctggggcaggcagcgcgatccctctaccagctggtgactgggtcgctgtccccaggtgctggagaatctggtaaaagcaccattgtgaa

SEQ ID NO: 727436 - DNA, 130 bp, Homo sapiens
aaaaagctgtttctggaatcacccctagatctttcttgaagacttgaattagattacagcgatggggacacagaaggtacaggtttgcagattccgccagcagcacagcaagctctacagatgagtggct

SEQ ID NO: 727437 - DNA, 95 bp, Homo sapiens
catccaacttcgacgtggatgacgacgtgctgagaaacacggaattagtatccgataccaatcaacatgtcaaatcggctctagcttctgtaatt

SEQ ID NO: 727438 - DNA, 75 bp, Homo sapiens
ggtcgagaggcggcgcccgcgccgagcgccagccagaccctggcctatggggacatgaaccatgagtggattggg

SEQ ID NO: 727439 - DNA, 75 bp, Homo sapiens
attgccacacggtggggcccaacgaggcgctggtggtttcaggcgccatgtcagaaccggctggggatgtccgtc

SEQ ID NO: 727440 - DNA, 50 bp, Homo sapiens
tgtatcaagtaatggtgcaaagcctgaagctttgatcactcagactcgag

SEQ ID NO: 727441 - DNA, 76 bp, Homo sapiens
gctcttgtgccctagcaccccgagaaccgtcagtttgagccagatgggctgggttacgacccctacaaccctgagc

SEQ ID NO: 727442 - DNA, 51 bp, Homo sapiens
gttgattaactggacaaattcaggacactttcttcatgagcaacaaacccc

SEQ ID NO: 727443 - DNA, 75 bp, Homo sapiens
gggaggaggagcaggagctggaggaggagccgccgccgccaggctgtggaaaatctctgttctcacaaagtctcc

SEQ ID NO: 727444 - DNA, 90 bp, Homo sapiens
tccgcatcaacaagatgttgtcctgtgctggggctgacagacatcagactgcgggttcgggctgaatactgccagcatgagactgctctg

SEQ ID NO: 727445 - DNA, 73 bp, Homo sapiens
ctcccaagtagctgggactgcaggaagtcctggctgagcaaggttggaagccctagttctcgcattgaccgca

SEQ ID NO: 727446 - DNA, 100 bp, Homo sapiens
gcgggtgccgagggcccggacgaggcgcacgatgggatcgtgattaagatcgaggtacagaccaacgacgagggctcagaaagtttggagacacctgagc

SEQ ID NO: 727447 - DNA, 76 bp, Homo sapiens
gtttggtagtaacaaacggcggagtgttgacctaaccaatgaagaaacaactgattccaccacttctaaaatcagc

SEQ ID NO: 727448 - DNA, 82 bp, Homo sapiens
acagaccccagagcggccatgagctggtgtgcagccgcccaggagggacaccatcatccgagcagtattgatttttgcagaa

SEQ ID NO: 727449 - DNA, 101 bp, Homo sapiens
agggcatgaggacagcaatggttgtatcaactatgaaggtactaggttttgacaagcttgcatcatgcgtgagtataagctagtcgttcttggctcaggag

SEQ ID NO: 727450 - DNA, 83 bp, Homo sapiens
tccgccccgctccggctgcaggcggaggagctgggggtgagcccctccagactccgaataggagatcaagagtttgattcatt

SEQ ID NO: 727451 - DNA, 98 bp, Homo sapiens
ctgcttctgacccatgtggctgacgcctggggcgtggagctgcccaagcgtggctatccccctgaaacatggaaatggccagccagccaacatgccgg

SEQ ID NO: 727452 - DNA, 82 bp, Homo sapiens
ctggatttaagcactgctgcactttatgaggctctggctccgctactgcatcgtgtgcttctgtccaagaggcagagagact

SEQ ID NO: 727453 - DNA, 75 bp, Homo sapiens
cacattgctgctgggagtacgttgttcagtggaataaagatccagaggaaagaccacagcaagattctttcattc

SEQ ID NO: 727454 - DNA, 99 bp, Homo sapiens
ggatttacctgttttctgggagcttcgaaggctgagtcatcactagagagtgggaagggcagcagcagcagagaatccaaaccctaaagctgatatcac

SEQ ID NO: 727455 - DNA, 82 bp, Homo sapiens
tttagtccagagctctatgaaaacattgctgaatggattgtgggtccttctcccacacctgaggatgtctccatgaaggaag

SEQ ID NO: 727456 - DNA, 76 bp, Homo sapiens
gagaccgtgaccgagagcgtgaccgagagcgcgaatatcgtcatcgttagaagtaaacgcgaaattattttctaca

SEQ ID NO: 727457 - DNA, 99 bp, Homo sapiens
cgggatttacgtggagatcaagcgcagcgatggtgttgccacatctgcaaacttcctgggagagtaatggggattcgagtgcttcgattatctttggtg

SEQ ID NO: 727458 - DNA, 100 bp, Homo sapiens
atcgtcctgtggacgcgtatcgccagcacgatcccaccgcacgttcagaagtcggttactggctgaccaacaaagttcctatcaaaagacccagcacagg

SEQ ID NO: 727459 - DNA, 99 bp, Homo sapiens
tgaaattggatactggcattgataggactgcatcaaaacatgtaaacaaggacctcggtaatatggaagaaaacaaaaagttagaagaaaacaatcaca

SEQ ID NO: 727460 - DNA, 100 bp, Homo sapiens
ctgagccccagagtcagctcccctttctcgcccagcgcccccaggccgctcccggggctcacggtgctcctcagcaagtgatgactcaaatcatcagggg

SEQ ID NO: 727461 - DNA, 77 bp, Homo sapiens
aggcaccgggtccctcgcccaggtccccttggacaaatggggcgtctctggccgagcctctttttgtggaaaacgac

SEQ ID NO: 727462 - DNA, 83 bp, Homo sapiens
atcgcctctccttcagttgctgaggtcaattccctaggaaaacaggagttattcctgatgaagctaaagctttgtctctgttg

SEQ ID NO: 727463 - DNA, 96 bp, Homo sapiens
ccgaccgcgttcctatggacagacgcacagacacctgcaggggttgagcattcatgatggtacctggaagtcagcaatttatggttttggagatca

SEQ ID NO: 727464 - DNA, 100 bp, Homo sapiens
caaatgtttttctgttttgcctgaatacatgatttaaacaagagatttccacagaaggcctcccagaagttcctgccgaatcgtcttcgtcacccccggg

SEQ ID NO: 727465 - DNA, 100 bp, Homo sapiens
ttacaaaagcactttttctgtggaaattgttccaatatgcaagatgctgtgccacttttcctgaggcttctccattcaccccatcagaatgtctgtgagc

SEQ ID NO: 727466 - DNA, 60 bp, Homo sapiens
gtattactcatcacagatcggaacggaggcctgtggaatcagtgtctgtccctgaagggt

SEQ ID NO: 727467 - DNA, 50 bp, Homo sapiens
atcaaagtcaggccttgtgaaaccagtcagctacggtgaagctatctaaa

SEQ ID NO: 727468 - DNA, 100 bp, Homo sapiens
gctggacgagctggagaaggccatcaccacgcagaacgtcaacaccaagtgcatcaccatccccagatggatcctgagcttgaaaaaaaactgaaagaga

SEQ ID NO: 727469 - DNA, 91 bp, Homo sapiens
cttcctggcctgggcgctccggtggcggcggagatgtgaagttcatttccaatccgccctccatggtggcagcggggagcgtggtggccgc

SEQ ID NO: 727470 - DNA, 75 bp, Homo sapiens
aaaattcaagaagttgaaaaacgcttttcacgtcacctggagagatgcacaggtgaatcaggtctaggaaaatcg

SEQ ID NO: 727471 - DNA, 74 bp, Homo sapiens
ggccatcgccggctcggtggaggcggtggccagaaagtttcctacactactgaggtttaggggcactgtgaagc

SEQ ID NO: 727472 - DNA, 93 bp, Homo sapiens
cgctggccatttcgtcttagccacgcagaagtcgcgtgtctaggtttggtgcacctcgatttggaggaagtagggcagggcccttatctggaa

SEQ ID NO: 727473 - DNA, 98 bp, Homo sapiens
gatgttaatggatgacattcgctgcaaaagatacaccttgcgaaaagtgatgctttaccgatttgttacaactcaagcaagggccagcagaaattctc

SEQ ID NO: 727474 - DNA, 78 bp, Homo sapiens
cactgcctgtggaactccaggctatgtcgtggctgcttcaacccccaactccactgctggtgcagccatgaactcctt

SEQ ID NO: 727475 - DNA, 51 bp, Homo sapiens
caggcatctacatgggcagaccaactcagattcggaaacttcagatacgaa

SEQ ID NO: 727476 - DNA, 99 bp, Homo sapiens
ggtgacgctcgctccgctcgtcccgctcgtcatggcctacccgggatacggaggagggggttacgactcactgattaaaaagagggactttttcaaata

SEQ ID NO: 727477 - DNA, 50 bp, Homo sapiens
agaacaaagtgacaccactgcagagatgtattgctgtccttgaatattag

SEQ ID NO: 727478 - DNA, 128 bp, Homo sapiens
catcatcatcgtcaaagaagaagaaaacaaaggtagaacatggaggatcgtcaggctctaaacaaaattctgagacaaagcatggaggacacaagaatgggaggaaaggcggactctcaggaacttca

SEQ ID NO: 727479 - DNA, 98 bp, Homo sapiens
tacactccaaccacgtcccgctctccccagcatttccacagacctgtaatctatgccagcaattatgacaatgttagcagaccatgcagctcgtcagc

SEQ ID NO: 727480 - DNA, 82 bp, Homo sapiens
ggcaagtcggcgctcaccatccagttcatccaggtgcactttacaggtccccgatgaaccaagagaaccctccaccatatcc

SEQ ID NO: 727481 - DNA, 78 bp, Homo sapiens
ttccgtgtgccatgaactgtgtcaagggctccaagtgccaggtccctgagcgtgagcagcgtctcctcagtgtccagt

SEQ ID NO: 727482 - DNA, 99 bp, Homo sapiens
gacctgcagggttcgtggataataaactcaagcagcgagtcatccagtgctaggaaaagaatgtcagtgattgttcgcactccatctggaaagttacga

SEQ ID NO: 727483 - DNA, 82 bp, Homo sapiens
atcgccggcaccacgagagcccggcccgcctgtgtggacgaattcagaaggagctggcggacatcactttagaccctccacc

SEQ ID NO: 727484 - DNA, 75 bp, Homo sapiens
agcagggaaagagagcgccaggtgcttagcaggttggacgtgataagtatgagcctgcagctgtttcagaacaag

SEQ ID NO: 727485 - DNA, 90 bp, Homo sapiens
cagaacccgggagtaggagactcagaatcgaatctcttctccctccccttcttgggaaggacaccactggtaccagctgcgccaggctct

SEQ ID NO: 727486 - DNA, 100 bp, Homo sapiens
gctgactgctcaggaagtaaaatcgtttaattggttggggtcagataagaagaggagtgacaatcaagccaacagtagatgatgactgaagaataccagt

SEQ ID NO: 727487 - DNA, 99 bp, Homo sapiens
cgggagagcgcgcctagccggctcgcgaaggcgtagatcccccaccatgtgacgctgggacagaccaggactccaggtggaggttgcagtatgatgtct

SEQ ID NO: 727488 - DNA, 90 bp, Homo sapiens
caggaacgtgactgactgctgtgagggctatgaacagctcggcctctactgtgtcttgcgcctgctgcgggtcatctcaggggttcttca

SEQ ID NO: 727489 - DNA, 154 bp, Homo sapiens
cagggctggagcagggctgaagcagggccgcggaccccgcacgctcctgcgggccccgcggagccattgcggccgaggaatgggtaccacagaccatgtcatcgtcctggcgtccacgaaccgagctgacattttggacggtgctctgatgagg

SEQ ID NO: 727490 - DNA, 100 bp, Homo sapiens
agcttcgagagacacagggtattgagaagctggtgttgatcaacaaatcagggatctgtgccagttcagaagcaggcgagcctcttccctgatgaaaaag

SEQ ID NO: 727491 - DNA, 50 bp, Homo sapiens
aaatacgaaggtttctggctggtacctggagtagaacagaaaaattatta

SEQ ID NO: 727492 - DNA, 100 bp, Homo sapiens
tgttatatctgaggaagattttcaaaggcacctgtttcccccacctactccaatatttgctggaggagcaaatgaccggtgggtacgatctgtatctttt

SEQ ID NO: 727493 - DNA, 75 bp, Homo sapiens
aaggtgctaatccagtggaaatcaggagagagccagctgagagtctgtcaaggggagacccaaaaccagagaaac

SEQ ID NO: 727494 - DNA, 75 bp, Homo sapiens
gttggttccaatgctgggattggctgcttttcaagcctggaatggtcccccctccgccgggagaagaaagccaga

SEQ ID NO: 727495 - DNA, 100 bp, Homo sapiens
gcgaagctggccgagcaggctgagcgatacgacggaacaggcagaagctgaagggtgtcagaggaggaggctgctggttccagtgaatgacgctgactcc

SEQ ID NO: 727496 - DNA, 100 bp, Homo sapiens
cccagttcctccgccaagcgcggccgccgcccccgcctcagactgtgccctgtccacggtgcctcctgcatgtcctgctgccctgagctgtcccgagcta

SEQ ID NO: 727497 - DNA, 100 bp, Homo sapiens
tcgggtgaggagctggtggcgtcggcaggttcgaggcgattcgaggcatcgtcatgtgatcatcacctaagaactagaacatcagcaggccctagaagcc

SEQ ID NO: 727498 - DNA, 82 bp, Homo sapiens
caagtttgcagatcgggagcgcaaggtcgccctcaaggccatgatcaaaaccttataggctttatactgtggtgcctcgcct

SEQ ID NO: 727499 - DNA, 100 bp, Homo sapiens
ccactgtaagctcttcacagatggcgatgctgctttggaatttgcagacttctatgattttaggtgactctgacatcattagaagcatgccagaacagac

SEQ ID NO: 727500 - DNA, 82 bp, Homo sapiens
gtttcgggatctcggtgctgcagacggcgagacctcctgcacagggtgtcttttatgaataatcaaaagcagcaaaagccaa

SEQ ID NO: 727501 - DNA, 76 bp, Homo sapiens
ggtgtttccaggaagttcagagagaacaggtcgcaatgatgatgtcaaatgcttttgttgtgatggtggcttgagg

SEQ ID NO: 727502 - DNA, 100 bp, Homo sapiens
aggcgcctcttcttagttgatgatttagttgattctctgaaggagcactcactgtgggcctcgtgcgacagtgtcaaacaatccatggacgagaccggac

SEQ ID NO: 727503 - DNA, 75 bp, Homo sapiens
taattgaaaaccgggtggaatctgcagaaatagaagacttgtttacactgggcatgtaaacgaaaccatggtcag

SEQ ID NO: 727504 - DNA, 100 bp, Homo sapiens
cgggggcaaggccaaaaagaaggaatcagagatcattgatttcttcctgggggcctctctcaaggatgaggttttgaagattatgccagtgcagaagcag

SEQ ID NO: 727505 - DNA, 96 bp, Homo sapiens
ggctgcagtacctgctggagaagggagactacaaggacagcagcgactttggggcccgtcaccctcaggctcagttagctctagaggccattcttt

SEQ ID NO: 727506 - DNA, 100 bp, Homo sapiens
agccgccacccaaaccagtcaaaccaggtcatggaaaatggaagatttgcaaaatacaaatattttacccatgtcatgatcaataagacagatatgctaa

SEQ ID NO: 727507 - DNA, 50 bp, Homo sapiens
tgtatcaagtaatggtgcaaagcctgaacaggaggatgcattagcacaac

SEQ ID NO: 727508 - DNA, 82 bp, Homo sapiens
gcagcggagccccctgcccatttggttttggatcatggaagggaagtggttgctgtgtatgttactggtgcttggaactgct

SEQ ID NO: 727509 - DNA, 89 bp, Homo sapiens
gtgatggggaccctgactgccctgatgattcagacgagtctttagatacctagaagatggcgaattagaagatggtgaaatagacgatg

SEQ ID NO: 727510 - DNA, 101 bp, Homo sapiens
cacccgccaggcggattttgttcagactccaatcaccggcatttttggtggacacatcagatgggttgttgttgtcccagagtcgccaacgcattgtctgc

SEQ ID NO: 727511 - DNA, 75 bp, Homo sapiens
gctgtacaagttcaatggcagcccttctaaggttccatgcctctgcagcggtgcctcatgtttgctgtgtagttg

SEQ ID NO: 727512 - DNA, 148 bp, Homo sapiens
ggaagagggagtcaccactggacctccaaggaagccacgtgcagacatctacaaccttcgatctcctgacgagcaaccccgtggccaactggattcacgcccgctccacgaggaagaagcgctgcccctacaccaagtaccagacgct

SEQ ID NO: 727513 - DNA, 110 bp, Homo sapiens
agtagagccatgagccgatgtgttttggagcctcgccccccggggaagcggtggatgaaaattgtacaagctggagataaggaccttgatgggcagctagactttgaaga

SEQ ID NO: 727514 - DNA, 82 bp, Homo sapiens
agacgttttccggagggattccatcataggtgagaagccctaccactgcaactgggacggctgcggctggaagtttgcgcgc

SEQ ID NO: 727515 - DNA, 100 bp, Homo sapiens
ttgtctggataccagcattcctgagacaatccctgtgctcaagtacatgggcgactacccgtccaagaggacacgctccgtcaacgagctcaccgaccag

SEQ ID NO: 727516 - DNA, 89 bp, Homo sapiens
cggaagatggcggccggcgaaaggagctggtgcctgtgcaagttgttgagacgttggaacttgccaggaatccagcaatgatgcaggag

SEQ ID NO: 727517 - DNA, 75 bp, Homo sapiens
acgtagaccctccgttccataagagcaggtgctggcccagcagggggagtacagtgaggccatccccatcctgag

SEQ ID NO: 727518 - DNA, 83 bp, Homo sapiens
cgctcgggtggcgacttcctccccgcgccccctccccctcgccatgaaggagtacgagagggcctccaaagtggaccagtttg

SEQ ID NO: 727519 - DNA, 83 bp, Homo sapiens
ataagaacctggttcctaagcctgtaccacctccttccaagagccctaatttgtttagaactgtaatatgcacagttaaaaca

SEQ ID NO: 727520 - DNA, 82 bp, Homo sapiens
caagtggcccaaggcctcagaagactagaaggaagttcctggccattcagtgtacctcctttattcctgaagcccgggcagt

SEQ ID NO: 727521 - DNA, 80 bp, Homo sapiens
gtggctactctgcctcggggacgaaagcagcttcctggagaagagcccattggaagagtggaaccagtgggtaatgcacc

SEQ ID NO: 727522 - DNA, 131 bp, Homo sapiens
gatgatgaccctagtctggccatcactggggtccctgtggtgacttggccaaagaagactccaaagcatcttcatgatacagttaagaggaatcttgacagcgccacttcccctcagaatggcgatcaaca

SEQ ID NO: 727523 - DNA, 74 bp, Homo sapiens
taatgactttggtgccctcaacatctctcagagacgaaagattccagactccatcatttctcgtggtgttcagg

SEQ ID NO: 727524 - DNA, 96 bp, Homo sapiens
cgcagcaagatggcggacgagaaggacagggaaggtcagataccaggcccaggttccatgatgcccgggcagcacatgccaggccgcatgattccc

SEQ ID NO: 727525 - DNA, 80 bp, Homo sapiens
ggctgaggagcgccgctgcctcgcctcgctcaccatggatgatgatatcgccgcgctcgtcgtcgacaacggctccggca

SEQ ID NO: 727526 - DNA, 75 bp, Homo sapiens
ttaagaagtgcaccatagcgggagttgcttatgggagcgagaacccgagcagcgccatgagcaacactaccgtcg

SEQ ID NO: 727527 - DNA, 89 bp, Homo sapiens
ctggactgaagaccagagaaggtggagctccctgtggccttggtctcacctctcttcagaggtggggctggtgtccgagcacttctcgc

SEQ ID NO: 727528 - DNA, 100 bp, Homo sapiens
cataccaatcccattgtggaaaatggacagactcatccgtgtcagaaagtcatacaggaagctgatcccataatgcatcctcaagtggtcatcttaagcc

SEQ ID NO: 727529 - DNA, 75 bp, Homo sapiens
gacagcccatcgtgtgaactatagagtttgtggacagatttatattggttcctcagtggtgtgctgaatattgtc

SEQ ID NO: 727530 - DNA, 75 bp, Homo sapiens
gaggtggcccccgccccgtcgggcctcacgaggaaattcgtacaagtttcaagctggcaatagaatgaatgcaat

SEQ ID NO: 727531 - DNA, 100 bp, Homo sapiens
ctcggcctctcaaagtgctgggattacaggttgggctggtgtacatgtttaacctcatcgtgggcacgggcgcactcaccatgcccaaggcattcgccac

SEQ ID NO: 727532 - DNA, 88 bp, Homo sapiens
gatatcacagaggaaactctgcattctcgcttcctggaggctgttttggagtcagcggaagatcaccaaggccagggagtggttccac

SEQ ID NO: 727533 - DNA, 100 bp, Homo sapiens
gccaggaactgcgcagcctcttcgagcgccgcggacgcgtcatcgagtgtgacgtggtgaaagtaagactttgaccccgacgcaggcttcagtgattgcc

SEQ ID NO: 727534 - DNA, 97 bp, Homo sapiens
ttgaggaagaagccacccgagcggactcccgaggctggacgtaaagaaagaagtgatgcactcaattctgcaatagataaaatgaccaagaagacca

SEQ ID NO: 727535 - DNA, 98 bp, Homo sapiens
gatcccggagcccgagccgggagagggagccgccgcagccgccggcgctgtggaggttcactacaacattggcaaaaacctggctgataaaggcaacc

SEQ ID NO: 727536 - DNA, 99 bp, Homo sapiens
ggccagagatgaccctgctttcttggtcctgttaagtatctggctctgtggatgtaagcctgaacaacagatgatgtatgctggaagtaagaataagct

SEQ ID NO: 727537 - DNA, 82 bp, Homo sapiens
gcgccaaggactgtgtggaggcagccaagaaacgcattcaggagatcattgaggacctgccggtggctgctggcagcggaat

SEQ ID NO: 727538 - DNA, 82 bp, Homo sapiens
gacgccgaggccagagaagctggaatgggtaccacagaccatgtcatcgtcctggcgtccacgaaccgagctgacattttgg

SEQ ID NO: 727539 - DNA, 100 bp, Homo sapiens
gtgtggttctcaaatataggcattctgatgggaacttgtgtgttaaagtaacagatgatttagtttacctggttatggattattatgttggtggggattt

SEQ ID NO: 727540 - DNA, 83 bp, Homo sapiens
caaggcactgctttttcatgacggaaatgggtcctgatgaatatgaagagatggaagaagaggaggaggaggaagaggaggaa

SEQ ID NO: 727541 - DNA, 90 bp, Homo sapiens
ggaagacctattatcagatcaaccaccaaagtgggaaacattgaaatcaagccaccaccaaagatccctgacaagcagttagatgaaagg

SEQ ID NO: 727542 - DNA, 100 bp, Homo sapiens
ctcggctcacgtgacgaacatccgtttctcttatgatgacaagtatgtggtcagcactggaggagacgactgcaggcacgtctgagaatggtggatgtgg

SEQ ID NO: 727543 - DNA, 100 bp, Homo sapiens
gtggttcaacagctccggctggaggccggactcaaccgcgtaaaagtgtggatgaggtcaccattgtcaacattttgaccaaccgcagcaatgcacagag

SEQ ID NO: 727544 - DNA, 100 bp, Homo sapiens
acagatcgccggggaggcagcgcgggatcccagcctcaggcgtgcgcggacggtgtgcggattaaagagactggtgctaacctagcaatttgtcagtggg

SEQ ID NO: 727545 - DNA, 108 bp, Homo sapiens
aggtgctagtaattgagcctcaaaatgaagatggcacatggcccaggcagaccttgcagtcaaaatctttaatctcatgaagtacgacagctacagccgcttcttaaa

SEQ ID NO: 727546 - DNA, 83 bp, Homo sapiens
ccgtgggcccgaccgcggggaccccaaattcaacacccaacagcttccttaatagcaaaggtagcaacagcccaggatgatat

SEQ ID NO: 727547 - DNA, 100 bp, Homo sapiens
gccgaggtcgctccccatccactctcacaagttatagtgaagaaatacttggtcccatttcttttcgcctgggaggtatctttccactattagcaatgcg

SEQ ID NO: 727548 - DNA, 83 bp, Homo sapiens
gccccgtctgagaagtgaggagaccctctgcctggcaaccaccccgtctgagaaggacaagaatccttcaagaaacaggaaaa

SEQ ID NO: 727549 - DNA, 100 bp, Homo sapiens
acgtgcgtgacttcatcgacaacctggacaggttctagtaaataccgcttgctgtgttttgatgttggtggctaagctcatccagtgtattgtgtttggc

SEQ ID NO: 727550 - DNA, 100 bp, Homo sapiens
cgggcaacgatcggaactcggacacgcctctggacgagaccagccagatgagcgacctcccggtgaaggtgatccacgtggagagtgggaagatcctcac

SEQ ID NO: 727551 - DNA, 100 bp, Homo sapiens
tggaagttcgcaaacagcacaggccatcaaatgcagaattcacaagatccaatcccttgtccttaaaaggaggaacatatgcagcagaaaaaagaggagg

SEQ ID NO: 727552 - DNA, 100 bp, Homo sapiens
tacaggcatgcaccaccacacccaggtttctgggtggagcggacccctgtgcacgaggcagcccagcggggtgagagcctgcagctgcaacagctgatcg

SEQ ID NO: 727553 - DNA, 50 bp, Homo sapiens
caccttgcccaacaagcggcctttgaggaggaagaaggcacctacgatca

SEQ ID NO: 727554 - DNA, 101 bp, Homo sapiens
gtctgacatcgcgacgctgctcaaaacctcgctccggaaaggggacacctggttttaaagacgctagagtgccaaagaagactttgaagtgtgaaaacatt

SEQ ID NO: 727555 - DNA, 100 bp, Homo sapiens
tattattgtcccacaagatggaatttttagtcctacatcaaatctgcttcttttggaccttggtcatctaaagattcgagaaatgatggagtccttcgaa

SEQ ID NO: 727556 - DNA, 75 bp, Homo sapiens
cgggaccaaccccagcaatggagagaaactggcgatggaatatgagaggagccctctggaaagaaaaggacagac

SEQ ID NO: 727557 - DNA, 89 bp, Homo sapiens
gatgaacctatgggagaggaggagattaacccacaaactgaaccaccaaagcccccactaaataattttaaagtggggatgaaactgga

SEQ ID NO: 727558 - DNA, 100 bp, Homo sapiens
ctggctctgctgaccttgtgccttgaggctgggaggcggcagaatgcagccagaggagggcacaggctggctgctggagctgctgtccgaggtgcagctg

SEQ ID NO: 727559 - DNA, 98 bp, Homo sapiens
ggcgacagcctggattataaggatgtcatccccatggctgatgcagcaggcatcatccgctatgcaattggggagttcaaagaaggacgcagagccag

SEQ ID NO: 727560 - DNA, 83 bp, Homo sapiens
gaggtctgacattcaaggatatttatctaaaaattcttcttttgagtgccagtaaaggtcatgcaagacaagataatctgcct

SEQ ID NO: 727561 - DNA, 80 bp, Homo sapiens
tcctgccgtccttctccactttcgccagcccgtgccgcgagcgcggcctgcaggaggtggaaaaggagggagctgctctc

SEQ ID NO: 727562 - DNA, 50 bp, Homo sapiens
tcacatctttcgacttgaaaaagccttagaaaatttacgtgtatacctgt

SEQ ID NO: 727563 - DNA, 74 bp, Homo sapiens
atcactactcaggcacaggagagagcaggactggcatggctggcagatcaacaagttggagaaagctgttgctg

SEQ ID NO: 727564 - DNA, 83 bp, Homo sapiens
gttcgggtgtctcgtgtgtgaacatcacagacgcaaacatgcagatctttgtgaagaccctcactggcaaaaccatcaccctt

SEQ ID NO: 727565 - DNA, 75 bp, Homo sapiens
cagtgatggcaatttaaacgtggctcaagaggaatgctccaggaaaggaccaggagctgcattatctattctaga

SEQ ID NO: 727566 - DNA, 80 bp, Homo sapiens
aaaagcaatgaaggagcagatgatggatcctgagcttgaaaaaaaactgaaagagaataaaatatctttagagtcggaat

SEQ ID NO: 727567 - DNA, 75 bp, Homo sapiens
tggcggccaggatggttcttaggtctcggcgcggaagatggccggcggcgtggacggccccatcgggatcccgtt

SEQ ID NO: 727568 - DNA, 101 bp, Homo sapiens
cttcatctcctcaacatggaaactaaggtaattgctctagcagatgcagtggaggaaaaccaaggcaatctgttccagtcattcaccaggctgaagagtgc

SEQ ID NO: 727569 - DNA, 50 bp, Homo sapiens
tacaacatggcagacattgacaacctctacggcagacacatgcaggccaa

SEQ ID NO: 727570 - DNA, 83 bp, Homo sapiens
ctcagtccctctgtgctccaggactccctcaataattagaccaaattttggtacaattgaatcacactgcagcagaattcacc

SEQ ID NO: 727571 - DNA, 75 bp, Homo sapiens
acactggagatcagcaccaaatcccacagaggcatctgagacaccatgccacaaggagagtgatctcttcccctg

SEQ ID NO: 727572 - DNA, 75 bp, Homo sapiens
ccaagtggatagtagaacttatctactggatttccgtagtattgatgcattgccatttttgaaaaatacagtaat

SEQ ID NO: 727573 - DNA, 100 bp, Homo sapiens
aaaatgacccaccaatggaagcagctggcttcactgctcaggctcagcaacagcctcaccaaggactccatgaatatcaaagcccatatccacatgttgc

SEQ ID NO: 727574 - DNA, 84 bp, Homo sapiens
ccgcgccgaccgcgttcctatggacagacgcacagacacctgcagtactatactggcaattgctggagaagattttgcaattgt

SEQ ID NO: 727575 - DNA, 88 bp, Homo sapiens
ccagtcctcggtgcggcgcggccaggattttttatcaagcagaaatgcatcgaacaacgagaatcaagatcactgagctaaatcccca

SEQ ID NO: 727576 - DNA, 101 bp, Homo sapiens
ttttaagcccgtcggaaaagcgcagtattcagctccgacagttagttaatatgtgcatcaacccagatccagagaagcgaccagacgtcacctatgtttat

SEQ ID NO: 727577 - DNA, 75 bp, Homo sapiens
acgagacggaggcgctgcagcgcttcttcgaagagtaaaggtgggattctatccaaagcttgtgattatatccag

SEQ ID NO: 727578 - DNA, 98 bp, Homo sapiens
atctctgcccgcaacacatatcagggacattccagctacatcacacaccttgactggtccccagacaacaagtatataatgtctaactcgggagacta

SEQ ID NO: 727579 - DNA, 100 bp, Homo sapiens
tttggaactgtcaggtacctcaaagcgtaagtgttttattccaaacgtctatgctgctttgttcactgcagctcttgttcctttgacgtgcctcgtggtg

SEQ ID NO: 727580 - DNA, 98 bp, Homo sapiens
ctaccgacccggaccccgcggagcctcttgcctcgccaagaagtatgatgcgtttttggcctcagagtctctgatcaagcagattccacgaatcctcg

SEQ ID NO: 727581 - DNA, 100 bp, Homo sapiens
tatcctcaaggtggaattcaaaacgactagatctggtgtctcaggatgatacataccggtttttaactttggtgtcatcaaatgcaattgcaatgtgact

SEQ ID NO: 727582 - DNA, 89 bp, Homo sapiens
tcctcctctacatggtcccatgagattcccaccttctttatctgaaacaaacaagcttttgaacacttgcagcaattagaattaataaa

SEQ ID NO: 727583 - DNA, 98 bp, Homo sapiens
gaagataaagccaggcaagggtgtggaaccatcagagaatctacaatccctgatggagaagaatcagtccctggtagaggagaatgaaaaattaagtc

SEQ ID NO: 727584 - DNA, 129 bp, Homo sapiens
gatttgtactgtgttcgcagtgacctggggaacctgctcaaagccctgggtcgcttggaagaagccaaggaactggataaggcccaggaggacatactgaaacatcaggctagcattagtgaactcaag

SEQ ID NO: 727585 - DNA, 83 bp, Homo sapiens
cgcagggggacggggaccagcagctgtcgccgccgctctcaggtcaaaatgcagatcttcgtgaaaacccttaccggcaagac

SEQ ID NO: 727586 - DNA, 100 bp, Homo sapiens
tgggccgggaccgaaacctagccccggacgagaagcgcagcaacgtgcggtgggaccacgagagcgtttggtgcacctcgatttggaggaagtagggcag

SEQ ID NO: 727587 - DNA, 50 bp, Homo sapiens
cgagttcttcgtgctgctcaaggcctcgtgggctgtgcggctatcctgga

SEQ ID NO: 727588 - DNA, 100 bp, Homo sapiens
gtaagaccccgactcttcctggtgaagcatctgatgcacgttccatccggcgctcagctgggcttgagtattgcctaagtgtaatcttgaacatgggcgg

SEQ ID NO: 727589 - DNA, 100 bp, Homo sapiens
actctgcacagaaaaatgaacgcactggcaaacatcccagacgtgccagtgaagtacagaaagctctcccacccgtagacggtggcgcgaagtggaagag

SEQ ID NO: 727590 - DNA, 88 bp, Homo sapiens
ggaggcctgcgtggaggaggcgccccgcgcagctggctggcggagcatgagcgccccaggttaatgttcgtgaagaaattgaagagtt

SEQ ID NO: 727591 - DNA, 121 bp, Homo sapiens
ttgtacagagatgtgatgttggagaactatagcaatctggttttcttgggaaatggtgttcacactggccctgaatcaagggaacaccagttttcacatgctggcagaagcaatggccggg

SEQ ID NO: 727592 - DNA, 82 bp, Homo sapiens
gaatcaactgagagagatgcttaaaaatcaccagttactttaatgacagcccctgtcaaagggaacaggaagcagtccacgg

SEQ ID NO: 727593 - DNA, 106 bp, Homo sapiens
ccgcaaccattgacgccatgtcgggttattcgagtgaccgagaccgcggccgggaccgagggagcacgtgaattgcctctgcttacgttcaggccctgtcctaaac

SEQ ID NO: 727594 - DNA, 75 bp, Homo sapiens
atccgcagcatcggggagaggcctgtcctcaaaggaggccagcaagcgcatctccagccacatccctttgatcat

SEQ ID NO: 727595 - DNA, 83 bp, Homo sapiens
tacaaccatccatcatctttatagatgaaataggcagagatcctacaagaatccaggatgatgatcccagattgccagcgcag

SEQ ID NO: 727596 - DNA, 100 bp, Homo sapiens
aaatctttgatgtgcgcaatggagggcagatccttatcgccgacctcaggggaaaccaccatcatgggttcgggtcccatagaccccaaagaacttctca

SEQ ID NO: 727597 - DNA, 97 bp, Homo sapiens
ttcgttctgtgcctgaactcaaagatgcccttaaaagaatgatatggaacctagcaaagctgttccactgaatgcatctaagcaagatggacctatg

SEQ ID NO: 727598 - DNA, 75 bp, Homo sapiens
aatctaaaaagccctcagtaccagagacagaagcagatggattcgtccttttagctgcacatcattgactcctgg

SEQ ID NO: 727599 - DNA, 100 bp, Homo sapiens
cggcaagtaccaactgcagagccaggaaaactttgaagccttcatgaaggcaatcgcaatggctgccatccggaagaaactggtgattgttggtgatgga

SEQ ID NO: 727600 - DNA, 101 bp, Homo sapiens
ttgaaattcttaatgacatggtatggaagtataacattgttacactggacagattaattctctgcctgtttgggagagcccatggtgactgcgtgagtgga

SEQ ID NO: 727601 - DNA, 98 bp, Homo sapiens
tggactgagctggcagacctcaccagagatctattcgatcttttgctaatgatgatcgccatgttatggtgaaacattcaacaatctatccatctccg

SEQ ID NO: 727602 - DNA, 75 bp, Homo sapiens
caaacattcgtctcggaaaccccgcctcttacagtcacgagatgatgtctttctacctaaagatattgacctaga

SEQ ID NO: 727603 - DNA, 100 bp, Homo sapiens
tgctgatatagaaagtgaaccagtggtagaaagcacagaaactgaggggacataatcatcactcagtagggaactctaatgatccaggacaaagaagtta

SEQ ID NO: 727604 - DNA, 83 bp, Homo sapiens
caatatctgtcttcggtggactccttcggcagtccacccaccgccgccgcctcccaggtgggcatgacggctcccgggacccg

SEQ ID NO: 727605 - DNA, 100 bp, Homo sapiens
ctgtcgcctgcgctatgccctgctgtagtcacaggagctgtagagaggaccccggtacatctgaaagccgggaaatgatgagaaaccgtggaaagggcgg

SEQ ID NO: 727606 - DNA, 100 bp, Homo sapiens
cttgcctggcgactttggccggacttttgctaactgcggcgggcgagacgttctcaggtccttccatagtgacgccccccaaggacatctggaatgtcac

SEQ ID NO: 727607 - DNA, 75 bp, Homo sapiens
tcgctctcggcctccgacacgctgataccccaatgtccttctttgactttgtggttgatcctcattctttccccc

SEQ ID NO: 727608 - DNA, 122 bp, Homo sapiens
tccacgccagccgcaccatgccgctcctaagcctgcacagccgcggcggcagcagcagtgagaggccccttcccagctgcctgcctgccctagccagctcccaggtgaagagactctcggct

SEQ ID NO: 727609 - DNA, 83 bp, Homo sapiens
gtctgtgttgtgactgctttggacgtgggagtcacctgaaagccaggaaatggtcttgagtcaccacgtccgaatataattct

SEQ ID NO: 727610 - DNA, 50 bp, Homo sapiens
gctacgggaagcaggcctcgccacagtcactctgagaggagtgataccaa

SEQ ID NO: 727611 - DNA, 100 bp, Homo sapiens
atgaggcacatggagacccaggccaaggacctgagggaaactcaaggtcccatgagcccccttggtgatgagctctaccactgtctggaaggaaatcaca

SEQ ID NO: 727612 - DNA, 98 bp, Homo sapiens
cgcgagcgagcgaggcctgggccttgcctgaggtaccatgaccagcaggacgtaactagtaactttctgggtgccatgtggctcatctccatcacatt

SEQ ID NO: 727613 - DNA, 50 bp, Homo sapiens
gaccttaaacctgaaagtggtagcaaggatttgtacacacagatatgacg

SEQ ID NO: 727614 - DNA, 75 bp, Homo sapiens
aagagggagttaaggacattccaggcagaggcaaggatgtggagagcatcttgtgcgcaccatactggctagaga

SEQ ID NO: 727615 - DNA, 100 bp, Homo sapiens
ctggtgggcatggatgtcctcactctcgccatctggcagatcgtggaccctctgcaccggaccattgagtcacagttgcagattatatttctagagctga

SEQ ID NO: 727616 - DNA, 90 bp, Homo sapiens
agccggtgaccaagctcggggccgagcgggaggcagccgtggccgagatttgctgctgcttccaggagaagtggagcaggatgtaagcac

SEQ ID NO: 727617 - DNA, 52 bp, Homo sapiens
acgcctttcaggacgagaaccacctgcacttttcaggattagaagaggctgt

SEQ ID NO: 727618 - DNA, 133 bp, Homo sapiens
ccaagaacgtcagaatcgacaaagttcatctctttgtggatcaacagtggctggctgttaggtgcaatggatgagcttcatagtctggatccaagaaggcaagagttattggaagctagatttactggagttg

SEQ ID NO: 727619 - DNA, 100 bp, Homo sapiens
cgtccaccacggatgcccagctgaagagcctgctgatgtcagtgggacccattcaggttgtttttgagcacgttcactctcgcagtgtcagctggggctg

SEQ ID NO: 727620 - DNA, 90 bp, Homo sapiens
tggcactcaacatgaacaactacaaaggctatgaaaagaagccctattgtaatgccctctacggcagacacatgcaggccaacccagaac

SEQ ID NO: 727621 - DNA, 50 bp, Homo sapiens
cctctcggacacggtgcaggcagctggttggtggagaatttgaactggag

SEQ ID NO: 727622 - DNA, 75 bp, Homo sapiens
cggcgcaactccgcaccgcagagccggcgcctcctcggcaggtgcagagcattgtagaccaaggagccatggata

SEQ ID NO: 727623 - DNA, 50 bp, Homo sapiens
taggagcaattgtctactatgacgaaaagactgtatcttcaccattgacc

SEQ ID NO: 727624 - DNA, 120 bp, Homo sapiens
cttggggtttccggctgcagggcggtaaggatttcaacatgcctctgacaatctctagtgatcctggagcttcagcagaatggtgacatggacatcctgaagcacaaatggtggcctaag

SEQ ID NO: 727625 - DNA, 75 bp, Homo sapiens
accagatccattgacaagtagagctcaggaagcggctcagccccagggcagcacatcagagacaccatggaacac

SEQ ID NO: 727626 - DNA, 75 bp, Homo sapiens
tttgcaccacgagatgtcactccagagaggaaaaagagtttagctatgcttcagctgtatattaacaagttggat

SEQ ID NO: 727627 - DNA, 90 bp, Homo sapiens
gccaaggccggctgggttccccgcacctcctgcagagctgaagaagcaggtggagagtgccgagctgaagaaccagcggctcaaggaggt

SEQ ID NO: 727628 - DNA, 75 bp, Homo sapiens
ccaggccccgccgaggcggccagggtaactaaggaagtggatgctacatctaaagaggccaaatccttcttcaag

SEQ ID NO: 727629 - DNA, 82 bp, Homo sapiens
cgcggacctgcggactagcgaacccggagatgtggacgagtgctcactagcagaaaaaacctgtgtgaggaaaaacgaaaac

SEQ ID NO: 727630 - DNA, 100 bp, Homo sapiens
gtagtcaggacatcatgtgggccctgcacgagctcaaaggacactatgcaatcacccgaaagatcgtaaagctgaaaattgaaatcatgaaagtagacag

SEQ ID NO: 727631 - DNA, 75 bp, Homo sapiens
ttgtgtgggcactgaagggggactacaggttcgagaattcctcctgcatggaaaaactactttcaaaagattgga

SEQ ID NO: 727632 - DNA, 100 bp, Homo sapiens
gaaaaagcggccaaagaagtgaagctgctgctactcggccaccgaatcccttttggagtcatctttggtggaactgatgtaaatgaagatgccaaccagg

SEQ ID NO: 727633 - DNA, 88 bp, Homo sapiens
aggaacggaggaagaatccattcacactccccaaaccagaattctccactttaccaatacttacaggatctgggacacacagactttg

SEQ ID NO: 727634 - DNA, 101 bp, Homo sapiens
aaggagagcaattagtgagacagttgttcaagttggtttcccatgtcttggaaaacaggatggggtggcagcatttgaagtggatgtgattgttatgaatt

SEQ ID NO: 727635 - DNA, 82 bp, Homo sapiens
cctgatctctctcgctgtgagacatgtctgagactcctgctcagtgtagcattaaggtgtgagttcttgatacgaatgaaag

SEQ ID NO: 727636 - DNA, 100 bp, Homo sapiens
ggaggtagagtgtgaggagcagcgcttacggaaactgcatgctgttgtagaaactctagtcaaccataggaaaggacccgtgcatctcttccgactctcg

SEQ ID NO: 727637 - DNA, 100 bp, Homo sapiens
cctcctccgaggtggcgcggcacctggtgagcatgggtttatgcgtcttaggcattattgtgatggcgagcaccaattctctgatgtggaccttctttag

SEQ ID NO: 727638 - DNA, 100 bp, Homo sapiens
ctcttccttatattgatttaattgacccagctgagattgatctcctattaattagtcacaggatcttctaaggttatagaagatgtggcatttgcatgtg

SEQ ID NO: 727639 - DNA, 90 bp, Homo sapiens
ggtcctaccagaccccaccctcatcacccagcagctccagctcccggaagtccagcatgtgcagcactgaaagagccccagtgacccttc

SEQ ID NO: 727640 - DNA, 100 bp, Homo sapiens
taaatcagtgcttcggggcacttagcacagcgcctggcgcaaggcacgtgtggttctcaaatataggcattctgatgggaacttgtgtgttaaagtaaca

SEQ ID NO: 727641 - DNA, 74 bp, Homo sapiens
gggactgcacgtagcccggcgctcggcatggctctcctggtgctcgatcgaccttgccatcgatggtgctgatg

SEQ ID NO: 727642 - DNA, 51 bp, Homo sapiens
atttctctttgggaaactaaagtttgaagtgttgacattccttttgttgtg

SEQ ID NO: 727643 - DNA, 98 bp, Homo sapiens
tacaagatcacaagatgttgatcagcttcgtgatatcaaagagcaaccactgagaaaacggaaccgaatagtcaagaggacaagaatgatggtggaaa

SEQ ID NO: 727644 - DNA, 100 bp, Homo sapiens
agaaacgttgagaggagcaatagaagacatgggatttgatgctaccttgtcagaattgccaagaagatgcttttagaagaaattaaagccaatctttcct

SEQ ID NO: 727645 - DNA, 73 bp, Homo sapiens
tgaattaatgaaccttgacccacaccaagggagactcaggacctgccagcccgagccttctcactgaccccag

SEQ ID NO: 727646 - DNA, 100 bp, Homo sapiens
aggtgcatttcacagcactctgggcgaaaattggatgtgaaaatgaagccagaccgagatataatgaagatctggaacttgaagatgccattcatacagc

SEQ ID NO: 727647 - DNA, 90 bp, Homo sapiens
ctgttttggaactgtcaggtacctcaaagctaggtcccaccccctccaggacagagaccctggtggaggagaccgcagcagagtccagcg

SEQ ID NO: 727648 - DNA, 90 bp, Homo sapiens
gaaagccaggcatggaaggatgcagaaacgtgacgagcaatgatgaaaaatcaatgtggactgaacataaatcacctgatggaaggactt

SEQ ID NO: 727649 - DNA, 75 bp, Homo sapiens
gcagggggacacagccatcctcagggttatgtaccgaaggactctaccgtgtcagcgggaataaaactgaccaag

SEQ ID NO: 727650 - DNA, 74 bp, Homo sapiens
agagactgatttgcaacccttccgggaagccatagctctgcatgtaccaaaagaattggtggagctccatttga

SEQ ID NO: 727651 - DNA, 71 bp, Homo sapiens
ccgctgcacactgccctccgaagtcggggacgcgggctcgacaaagaaccggcgctgcaaactgctgcccc

SEQ ID NO: 727652 - DNA, 90 bp, Homo sapiens
tatgtatggaggcaaaaacattagttcacacacaaacattgttttcaggacacagcattgttggttttgccatgtactattttacctatg

SEQ ID NO: 727653 - DNA, 51 bp, Homo sapiens
ggatagctccctcctggaaaaggagtaaaccaagccaattcagcacttcct

SEQ ID NO: 727654 - DNA, 100 bp, Homo sapiens
ctgatgcttaacaagaaataaaaatagtcaccttaatcatcaaaaagacttcctagcatgggctgttgtgctggagagaacgagagctacgaagagacta

SEQ ID NO: 727655 - DNA, 100 bp, Homo sapiens
cagctggcccccagggccctgcaggccaccccagaggagaagctcaagctggaggacttctttgcccgcaactcctatgtggctggccagtacgatgatg

SEQ ID NO: 727656 - DNA, 100 bp, Homo sapiens
tggggactacgacgtccctcaaaccttgcttctaggagataaaaagtcttttctgaagcactcttcgagtacagtttttgatcttgtggaagagtatgaa

SEQ ID NO: 727657 - DNA, 151 bp, Homo sapiens
ttgatgtggatggtacagtagaagaggatctgggtaaaagtagagaaggatcaaggacggatgatgaagtagtacagagcctgagaaatgccagtggcctgacagcagcagacattgcacaaacccagggtttccaagagtgtgcccagtt

SEQ ID NO: 727658 - DNA, 101 bp, Homo sapiens
ctgccagctggagccgggagagaggctgcgagttatgaagggggccaaatcgggaaaaggtgcagtgaccagcgaggccctcaaggaccccgacgtatgca

SEQ ID NO: 727659 - DNA, 100 bp, Homo sapiens
gggaatcgggagccgggcgcggggagctgcgcgaagccggggcggagcacgcgagctatgtgtgtcccggcatggatatccggaacaacctcactaggtt

SEQ ID NO: 727660 - DNA, 83 bp, Homo sapiens
aacacctttgccagagactgagacagccgagctgcaagctacagcgactgcatccaatggatgggaccccaatgaaatgttca

SEQ ID NO: 727661 - DNA, 75 bp, Homo sapiens
cctgtggcttatctacgctttttagaattgcacttggaggacaagggagatgcacttatttacatggaaccagag

SEQ ID NO: 727662 - DNA, 100 bp, Homo sapiens
tctcttctcgccctggcggggaagctattgtggacgatgaaaggctctctgcagaggagatggatgagaggaggcggcagaacattgcttatgaatatct

SEQ ID NO: 727663 - DNA, 75 bp, Homo sapiens
gcagagggagcttgccttgaaggacaagaacagcgccgtcaccagcaggctgcaagatcaaggccctgcgggcca

SEQ ID NO: 727664 - DNA, 75 bp, Homo sapiens
ctcttggccgaagtgcccgctgccgggcgcgggcctcagagttacactgttagaccttatgatagccaagataac

SEQ ID NO: 727665 - DNA, 83 bp, Homo sapiens
atcatcattaaggacggaggcacggccactcttcacctccaccatgagcctggacatccagagcctggacatccagtgtgagg

SEQ ID NO: 727666 - DNA, 100 bp, Homo sapiens
gctgctccgcgcgcgcgcccggcggcgctccaggtgctgacagcgcgagagagcgcggccctcaggagcaaggcgggagatgcacttatttacatggaac

SEQ ID NO: 727667 - DNA, 80 bp, Homo sapiens
cttgggtttagcaaaagttcatctccttctgcatccttaactgagaatgagctgcaggacaagttcgagcatcttaaaat

SEQ ID NO: 727668 - DNA, 99 bp, Homo sapiens
ggtgtacttgggaacgaggggtgaagcggcccaggtgaggatgccatggacaatattaccaggcagaaccaattctacgatacccaagtcatcaaacaa

SEQ ID NO: 727669 - DNA, 83 bp, Homo sapiens
cgagatcttccgccactacgaatggagaaggaggagacaacccgggagctgctgctgcccaactggcagggtagtggctccca

SEQ ID NO: 727670 - DNA, 75 bp, Homo sapiens
tttggcaccttcctgttcaactcccctcaccagcgagtgaagcaaagcacgctggtggaagttaaaggccccaat

SEQ ID NO: 727671 - DNA, 75 bp, Homo sapiens
tgactaaagcttgaaatgctacatttccaagttccaggaagaggccgactcagtcagccagaccctggcgaagct

SEQ ID NO: 727672 - DNA, 75 bp, Homo sapiens
accacccagcagcagggcatcaagaggaggcctaccagaaactggccagcgagaccctggaggagctggactggt

SEQ ID NO: 727673 - DNA, 75 bp, Homo sapiens
gacgctgcagttggagcaacagtccaagctcaaagtaaagagaaatgtgtatgaccttacaagtatccccgttcg

SEQ ID NO: 727674 - DNA, 82 bp, Homo sapiens
gctctcatgttctgcacctcaggagggaattcagcctcagtgatgtccatgagactccatcaagaatgctggaggaagggtg

SEQ ID NO: 727675 - DNA, 83 bp, Homo sapiens
agtacagacagctcaggctgcccagatggtggctcccggagtccaggtcaaaatgcagatcttcgtgaaaacccttaccggca

SEQ ID NO: 727676 - DNA, 100 bp, Homo sapiens
tacacttgccactgtgtgctgccatacacagtttcctgttttccagcacccaacataacttgtaaggattccagtggcaatgaaacacattttactggga

SEQ ID NO: 727677 - DNA, 75 bp, Homo sapiens
tggtaaaaccgcaacagcaaagggaatccaaggaggtcacagtaatgaaaggcagtaatagaaataaggatcatt

SEQ ID NO: 727678 - DNA, 90 bp, Homo sapiens
tcctggtttacctggcactcctggacaggatggattgccagggcttcctggcccgaaaggagagcctaaagtattaatgaagcttagaaa

SEQ ID NO: 727679 - DNA, 100 bp, Homo sapiens
cacaaatgtttttctgttttgcctgaatacatgatttaaacaagagatttccacagaaggagctcttgtccctggcaaagcgaaagcgcagtgactctga

SEQ ID NO: 727680 - DNA, 99 bp, Homo sapiens
cggggccgccttcagccaagcggcctaaactctcatctccggccctctcggcgtccgccagcgatggcacagactggtcgaattgacaaatcttaccct

SEQ ID NO: 727681 - DNA, 75 bp, Homo sapiens
cacgacgacgtgcggacgcagcggcgggggccatgggtggtaaagtaccacctgctactcagaaagctaaatcag

SEQ ID NO: 727682 - DNA, 100 bp, Homo sapiens
agtagtgaccggacacgacggcgtcggcgagaggacagctaccatgtccgttctcgaagactgaaactgttgaggagcccatggaggaagaagaagcagc

SEQ ID NO: 727683 - DNA, 80 bp, Homo sapiens
gagaccttggctggtcagagggctgtgaagacgcacggtgccaggaccaagtatctgatctgctacaacatcctggttct

SEQ ID NO: 727684 - DNA, 82 bp, Homo sapiens
gtgtggaatattggggggctcggctgcagacttggccaaatggacgggactattaagccgaggtgctcggtggagtcatggc

SEQ ID NO: 727685 - DNA, 75 bp, Homo sapiens
ctcagcagtgatggggagagccatagcgattcagaatggacagtttagaagaacctcagaaaaaagtctttaagg

SEQ ID NO: 727686 - DNA, 80 bp, Homo sapiens
ccccccttccccacgcaaccccagatccatttacactttacaatgtgacaagccgaggcggtgagccgggcaggaggaag

SEQ ID NO: 727687 - DNA, 82 bp, Homo sapiens
tgctgctgaggaggccaccgaagctcggggacgcgaggagccggcgtggccctggaattcagaaggagctggcggacatcac

SEQ ID NO: 727688 - DNA, 97 bp, Homo sapiens
aattgtgtggccttagcgatctatattccctttccagaagatgattccaacgccaccaattccaacctgttggcccgccacaataaactgttgcagc

SEQ ID NO: 727689 - DNA, 82 bp, Homo sapiens
gctgcgggaggaggccatcctgcagatggaggcatctgcatctgggaccgacctcctgggctggctgatcaaagaggaagca

SEQ ID NO: 727690 - DNA, 75 bp, Homo sapiens
tagtgaactgagtgttgatagtgaggtggcatgctggttactagatccagattctcaggagccgactcttcatag

SEQ ID NO: 727691 - DNA, 83 bp, Homo sapiens
tgcagatcgagctgggcaagtgcaaggcggaacacgaccagctgctcctcaagggtcctactgggcaatagacaccaatccga

SEQ ID NO: 727692 - DNA, 90 bp, Homo sapiens
gggagacgcacagccaggacatcctggaacctgggaaagggccaaaagcaatagccgatttggataccatcaagacacctgaaaccttat

SEQ ID NO: 727693 - DNA, 83 bp, Homo sapiens
ccagtgggacgtctgagactttctccttcaagtacttggcagatcactctcttagcagcttcctgcctgacacagctcacttc

SEQ ID NO: 727694 - DNA, 122 bp, Homo sapiens
cagctccacattgagagcaaaatctacaagatgatgcagggaggagaccgcagcaggagggagtccaggagccaaggttgccgcggtgtctccgtcagcctcaccatgaacctggaaccgcc

SEQ ID NO: 727695 - DNA, 100 bp, Homo sapiens
gagctgaacacgtgtcgagacttgcacaccgagctcaaagccaaactggccgacaccaatgaactgaagattgctcttctagacatcgatatatgtgggc

SEQ ID NO: 727696 - DNA, 96 bp, Homo sapiens
ggaattgggatcgtgtcgctgcgagatccgtgctcagctcacagagcagatgaaatgcctggaccagcagtgtgagcttcgggtgcaactgttgca

SEQ ID NO: 727697 - DNA, 74 bp, Homo sapiens
accgaagtgcgcagactcggaggcatactccctttggttctggacatggcaagacatgtgccactctatcgggc

SEQ ID NO: 727698 - DNA, 82 bp, Homo sapiens
cgacaagccgctggcagccgcggatctcaccgccgctcagggccgggtgctcgtccactgccgggaaggttatagccgctcc

SEQ ID NO: 727699 - DNA, 99 bp, Homo sapiens
cggatctggacacccagcggtctgacatcgcgacgctgctcaaaacctcgctccggaaaggggacacctggctcaggagatatggacagtatttccaag

SEQ ID NO: 727700 - DNA, 80 bp, Homo sapiens
ttctgacctccgcgcgacgtacccgccgccgccgttggctggaggttgtggcagcactgcctgaaggtatgagaccagat

SEQ ID NO: 727701 - DNA, 100 bp, Homo sapiens
gaagaaacagaacaagaatcgcatctcttgggtcggagaagccgtcaagatctttgtggagttcacctctgtgtttgactgccagaaagccatgcagggc

SEQ ID NO: 727702 - DNA, 75 bp, Homo sapiens
ctgcagcttcccgagacatcaccttggtaactggatttttgaaatgctgtatctactttcttatgtcttgtttct

SEQ ID NO: 727703 - DNA, 100 bp, Homo sapiens
gcagagtgagattgcgtccatgctgtattcccgcatgaacatcaagtgctcgagatcctcaccatggagaaggaagtggcccagagccttctcaatgcga

SEQ ID NO: 727704 - DNA, 90 bp, Homo sapiens
gggagcgatgcggtgcagcgcgcatcaacaacagcaacttgtgattggcggtgaccggatattcagttgcacatccccacatcaatgcac

SEQ ID NO: 727705 - DNA, 78 bp, Homo sapiens
aacagatagaaaggcaggagcagcttctggatgaaatacatcgtgagaagagagctgcagaaccttggcctgaaaatg

SEQ ID NO: 727706 - DNA, 101 bp, Homo sapiens
tgaggcaaatgaggaacagggcaatagtatgatggtaaagatgagcccagcagctacacatgtacaacttgcaaacagccattcaccagtgcatggtttct

SEQ ID NO: 727707 - DNA, 101 bp, Homo sapiens
ttataaaggaatatcggattcctctgccaatgaccgtggaggagtaccgcatcgcccagctgtacatgatacagtgcctccggagccagcgtggtggccat

SEQ ID NO: 727708 - DNA, 75 bp, Homo sapiens
ttcgtgaggctgctcttcgagcggggaaatggtgtcctgctggagggagaactgatcgatgtatctcggcacagc

SEQ ID NO: 727709 - DNA, 74 bp, Homo sapiens
taaaaggctccttcagtgagcaaggcatcaacgagtttctcaggttacttttcacatagaaccatatagcaatc

SEQ ID NO: 727710 - DNA, 80 bp, Homo sapiens
cgtgcgcttcgaggacccccggatgctgaaaacgccattcaacagatgggtggccagtggcttggtggaagacaaatcag

SEQ ID NO: 727711 - DNA, 83 bp, Homo sapiens
gttcctgcgtgctacggccctgtgggcctgggagctgcctctgaggaacacgccgcaggatgaatttcatcctttcatcgaag

SEQ ID NO: 727712 - DNA, 83 bp, Homo sapiens
ccggaagggcggacacctccacatcgccttttgccacctttccctttatttccggagctgccttcctatttcaaggaaagacg

SEQ ID NO: 727713 - DNA, 96 bp, Homo sapiens
gagaaagctgcccaactaagacctatctccctaccaggagtttctagcactgaagagacttcaaggtggaagatatcagaggaatgcacgtcagtc

SEQ ID NO: 727714 - DNA, 98 bp, Homo sapiens
tgttcaagtgcagggagttcccgttacaatcactagtgttgcagttacagatgaggacacagtaaagaggtattttgccaagtttgaagagaagtttt

SEQ ID NO: 727715 - DNA, 75 bp, Homo sapiens
ttcagcacatgtttgatgaccttcggaccaaggagaagaacaagcgagtgagcatcaataaagatgagctgaagt

SEQ ID NO: 727716 - DNA, 99 bp, Homo sapiens
cgagaacccgctggtttattgcgacgggcacggctgcagcgtcgcggtgcatcaaggtgggatgctatggaatatgatgagaagctggcccgtttccgg

SEQ ID NO: 727717 - DNA, 95 bp, Homo sapiens
cgtgggtgagcggcgcagcggcggcagcggagagcgagagaggggagcagatcttcaacttgctgctgagcttgggaagacattactggatcgga

SEQ ID NO: 727718 - DNA, 82 bp, Homo sapiens
tttgggaagatcatccgcaaggaaataccagccaaaatcatttttgaggatgaccggattttctggcatccttaaatcttgt

SEQ ID NO: 727719 - DNA, 96 bp, Homo sapiens
cgggcagagaccatgtttgacaagacgcggctgccgtacgtggccctcgatgtgctctgcgtgttgctggagaaagagatgacttgatgtctgcac

SEQ ID NO: 727720 - DNA, 75 bp, Homo sapiens
ttgtggatcgctgtgatcgtcacttgtttccaacatggctagatccatcagaaactgaagccgtggagaacgctc

SEQ ID NO: 727721 - DNA, 75 bp, Homo sapiens
ctgctcggacagatgaagctccccaaggagctgcaggaagaaaggccaaggatattataaatgcagctcgggaaa

SEQ ID NO: 727722 - DNA, 74 bp, Homo sapiens
tgcccaccggaatggagaaggaagaggagtcggatccaaactactggatacaggtgcatcgcttggaacatgga

SEQ ID NO: 727723 - DNA, 83 bp, Homo sapiens
gtgaaaaataccacgacaaaaccaccctagttggtttcatcgactacattgtccatccattgtgggagacatgggcagatttg

SEQ ID NO: 727724 - DNA, 100 bp, Homo sapiens
gctgactttgtaggctccgccaagaggcgccgcaggaggtgaatccgccatactacatcccgctggttgagctggtcccccacccggagacggcccctac

SEQ ID NO: 727725 - DNA, 82 bp, Homo sapiens
aacaattgatttgctcttacgtatttgtgtgacttgactcttcaaacacaaaggtcaaaatgcagatcttcgtgaaaaccct

SEQ ID NO: 727726 - DNA, 100 bp, Homo sapiens
gccgcggcgtccccgcggccccagcccaggtcgccgccctggagaggcaggtgtttgacttcctgggctaccagtgggcgcccatcctggccaactttgt

SEQ ID NO: 727727 - DNA, 100 bp, Homo sapiens
agtttgcatatgagtgctgctgcagcttcccgagacatcaccttggatgtaaatgaagaccctggagaagatgtggccctcctctctgttagttttgagg

SEQ ID NO: 727728 - DNA, 74 bp, Homo sapiens
ttcaccgccaaccccttcgagcaagacgtgggtgaaaggtgtagcagtcactcggcctacacccacagcatcga

SEQ ID NO: 727729 - DNA, 100 bp, Homo sapiens
ctatttctctagctattgccttattttttctcatggatgttcttcttcgagtatttgtagaaggggtctcgctcacctctcccctggcctgttgtggagc

SEQ ID NO: 727730 - DNA, 100 bp, Homo sapiens
tgctcgcggacccagcgctcccggccggacgtcaccccccagtggtgctgggccgagttcccataattggggttggtggtgtgagcagcgggcaggacgc

SEQ ID NO: 727731 - DNA, 90 bp, Homo sapiens
gagatggtggatgaacccccaggtattggggcattgacttttgctcttctgatgtcagcaaggatggggatattccaagagactctctac

SEQ ID NO: 727732 - DNA, 110 bp, Homo sapiens
gtcatggtcctggatttgcaaggctgaatagaagagatggtatagaagttggtcctcagcctcaaggggttctgagagctgatatcttggatcaaatgagaaaaatgatt

SEQ ID NO: 727733 - DNA, 50 bp, Homo sapiens
cttcccagtagctgggaccacaggccatcaaccgtgctatgcagaaaccc

SEQ ID NO: 727734 - DNA, 75 bp, Homo sapiens
agcagccgtccggagccagccaacgagcggaaaaattccggaactgttggcttcgggcatggttgataacatgac

SEQ ID NO: 727735 - DNA, 75 bp, Homo sapiens
tggacccttattttatgccataatggctaaagatacttcaagtgaagaagttaacctgagtcacattgtaccatg

SEQ ID NO: 727736 - DNA, 75 bp, Homo sapiens
cgcctctgccctgcacgtggctgctgccaagggctacattgaggtgatgaggaggcaacatcatcctggcctgcc

SEQ ID NO: 727737 - DNA, 100 bp, Homo sapiens
ctgcggccgcccaccacgcagcagtgtgaggccaagtgcgacagcccaacccccggggacggccctgaagggcagcaaggagcgcttccactggcagagc

SEQ ID NO: 727738 - DNA, 100 bp, Homo sapiens
gtacttgggaacgaggggtgaagcggcccaggtgagggtgtcatggagaaactccagctgggcccagagattctgcagcgggaaaatccaaggcttattt

SEQ ID NO: 727739 - DNA, 100 bp, Homo sapiens
tcatgctcagatattgcggaggaatgtaaaaagggcagctctctggcatgttcctgactgaggatctcataacatttaacttgaggaacttcctcctttt

SEQ ID NO: 727740 - DNA, 90 bp, Homo sapiens
agctgaatgatgctgtgggattttctagagtcattcacgccattgctaattcgggaaaaggggtcgaggccggtcctgacctgttacaat

SEQ ID NO: 727741 - DNA, 98 bp, Homo sapiens
ggggctggtcctggccttgctgtcctccagctctgctgaggagtacgtgggcctgtgggtggaagttgggaaggatcaggagttcaccgttgatacca

SEQ ID NO: 727742 - DNA, 82 bp, Homo sapiens
ctgacctctctgatgagatggatcgtgaaggagtcttcaagtgccctgaggaccagcttcctctggactatgccaaggtgag

SEQ ID NO: 727743 - DNA, 73 bp, Homo sapiens
acagacaccgcctacaggagtatgatgcaaggtgctggagaatctggtaaaagcaccattgtgaagcagatga

SEQ ID NO: 727744 - DNA, 101 bp, Homo sapiens
gataagcatgccctgaaaaagtatcgtcgagaagcctatcatcggtacgagtggctgctttacagaatctggtgaagataatgtccttatattatcagtac

SEQ ID NO: 727745 - DNA, 100 bp, Homo sapiens
tcccacctcagcctccttagtaggcgtggctacaggttcagtgtatctttgcctgcctacatcaatctgcaagggagttgcagaaagcctcatgttcatc

SEQ ID NO: 727746 - DNA, 50 bp, Homo sapiens
ctccaatggcgctttctacaagactattgggaagaagttacctgcaacta

SEQ ID NO: 727747 - DNA, 83 bp, Homo sapiens
gtactacgtgtacttcggcaccgtccgcgactgctatgaggatgatcacggaagccttggcccaaggtgggatgcacataaga

SEQ ID NO: 727748 - DNA, 75 bp, Homo sapiens
agctgtcagtcaatgcccgtgcccgcattgtggctgaagagttccttaagaatgacatggatttgattgacatac

SEQ ID NO: 727749 - DNA, 98 bp, Homo sapiens
agtcctcgctggactgctcagggtgccagacctcatcaggatctctgggaaagtttagaaaatgctagtggtaaacctatagcagctgtgatgaatac

SEQ ID NO: 727750 - DNA, 83 bp, Homo sapiens
ggaagatgccatcggatgcatggaggccaaccaggtggaagagatcatgcagctggtgaatgcctacttggccaacccctccc

SEQ ID NO: 727751 - DNA, 98 bp, Homo sapiens
tttggtcactgaggaagagatcaatcttaccagagggccctcagatgctggagaatcagatggaagtgcggaagaaggagatcgaagagctccaaagc

SEQ ID NO: 727752 - DNA, 50 bp, Homo sapiens
gcccaagcgccttccctcacgacatttctactgcctccagcacctgcccc

SEQ ID NO: 727753 - DNA, 80 bp, Homo sapiens
cagcgaaacgccgcgcactcggagccggcacggctcggcgcgtctgcttctgcgctttgcctgggagaggccctggtggc

SEQ ID NO: 727754 - DNA, 94 bp, Homo sapiens
tggactccttcggcagtccacccaccgccgccgcctcccagtatacgctcaacggcaagaaagtggaagttgccgtcaaacagatcatcgctgg

SEQ ID NO: 727755 - DNA, 101 bp, Homo sapiens
gtaggcacgggcggctccgcagtgaccggactcgggggagcctcgtcacgtgttcaatatgctaaagaagtatgtccgcgcagaacagaaggacagacagc

SEQ ID NO: 727756 - DNA, 95 bp, Homo sapiens
caaagcagcgcccgtctgcttcgggcctctggaatttagcgctcgcccagctagccgcagtaagactttgaccccgacgcaggcttcagtgattg

SEQ ID NO: 727757 - DNA, 98 bp, Homo sapiens
gagctttgtggaagcatttggcggcataccaccctgcactgtgagaaattggcccctggttacgggagttcagagcgaagaatgctgtggatttctcg

SEQ ID NO: 727758 - DNA, 75 bp, Homo sapiens
cccacgtctgtctggtgataccaggggcagagggaccactctgacaggcagtttttcaggaactccaggcagtgt

SEQ ID NO: 727759 - DNA, 75 bp, Homo sapiens
cggtcgaaaaccgtgtatgagggattcatctcggctcagggttctgagcaaggttcaaccagtcaagaacaggcc

SEQ ID NO: 727760 - DNA, 100 bp, Homo sapiens
cttctctccccggacctttgctcaggaatctaccagcattaaacctttgagctaggctctgtgtgctccgggatggagcaggtgtgcagagggtgagaac

SEQ ID NO: 727761 - DNA, 90 bp, Homo sapiens
cttctcgtggcggcggggaccgtccagcccagcgattctcagtcaggtggaatgcatccttgggacatctttgcatagccccatctagga

SEQ ID NO: 727762 - DNA, 98 bp, Homo sapiens
gcctcgcggagcccgcgcgccgagccccactttgcagtgttgatgtgggtatttacctatgttggtgccttgtttaatggtctgacactactgatttt

SEQ ID NO: 727763 - DNA, 50 bp, Homo sapiens
cgcttgtgtgataaaactgggggcttaaaagacaaccttcttgcttctgg

SEQ ID NO: 727764 - DNA, 75 bp, Homo sapiens
ctagaatgcatcagtgcccttgtggcgaatggggctcacgtcgaccattatttggaaagcaggtctataaatgag

SEQ ID NO: 727765 - DNA, 86 bp, Homo sapiens
accgcgcgcagggcctgcagcgggagctggacggcgagcgcgagcggcgcgagaaagctgatcagctgaccgaagaacagattgct

SEQ ID NO: 727766 - DNA, 75 bp, Homo sapiens
tggggcagcgggctgcagctggcggccggaatccgcgcgcagcccggtgtgctcactgatccgcctccagggcca

SEQ ID NO: 727767 - DNA, 75 bp, Homo sapiens
tccctggctccgggagtctggttcttccgggccttctccagggacagctgagtcctccctgctgctgtgtggacg

SEQ ID NO: 727768 - DNA, 80 bp, Homo sapiens
gttgtgcctcttcatattggcgatcctgttgtcgggtccatatggaatatttgctggtagggatgcctccagaggactgg

SEQ ID NO: 727769 - DNA, 76 bp, Homo sapiens
gctcctactatccatttcaactacagatactttgaagtagaagaagctgatgagacaaggtctcactatgttgccc

SEQ ID NO: 727770 - DNA, 75 bp, Homo sapiens
gcgaaaacgtggttgtagagttccgtgactcccagaatcggcaaggttggaaaccagaagcgtgttgttggtgtg

SEQ ID NO: 727771 - DNA, 50 bp, Homo sapiens
ccgccgagtcccgctcgccatggatattaataaggcagcggaaagaagaa

SEQ ID NO: 727772 - DNA, 75 bp, Homo sapiens
tcctgaccaccgtgaacggacagtcccccccaggtccaggcgccgtcagcgaggtgagcaacggcacgtcgagga

SEQ ID NO: 727773 - DNA, 51 bp, Homo sapiens
cggacggcgacgcagcccgcggcagaagagacggggtttcatcatgttggc

SEQ ID NO: 727774 - DNA, 98 bp, Homo sapiens
ctccgtgtcctcccccgcatgacccccttggttaacgtccctaaaacccgccggactttctgtaagaagtgtggcaagcaccaaccccataaagtgac

SEQ ID NO: 727775 - DNA, 82 bp, Homo sapiens
cgcgagcaaggccgccagatgtgcagttcctgcggatggtggatgcctgtgccagcttcctcactgaagccttgaacccaga

SEQ ID NO: 727776 - DNA, 102 bp, Homo sapiens
aacgcgtggagcatgaaaaggcagggggcctcctctgagcgaaaacgagcgcggataccgtccgggaaggccggtttttctattgggaaagctactgatcgg

SEQ ID NO: 727777 - DNA, 99 bp, Homo sapiens
gagaaactcccaccgacccacagaggattactacagcatcccatttcccacacccactactccgctgactgggagggatggtagcctggccagcaaccc

SEQ ID NO: 727778 - DNA, 83 bp, Homo sapiens
caagccaacaacagtgacggaatgcctccatacatgaactgtggctgcaccatctgtcttcatcttcccgccatctgatgagc

SEQ ID NO: 727779 - DNA, 50 bp, Homo sapiens
cgccaccggccgcttctgtcctcgaaagtactgaaatcccaccttatgtg

SEQ ID NO: 727780 - DNA, 85 bp, Homo sapiens
cgcgaatatcgtcatcgttagaagaataccaagctgctattttacacttgaagagggagcacaaagaagaaattgaaaacctgca

SEQ ID NO: 727781 - DNA, 100 bp, Homo sapiens
tgccaagtgggacaactttctggcttttgaaaggctccttcttcaggtgtcacccacacatcatccggtgggcacaggagagcagagacagcatgcgcac

SEQ ID NO: 727782 - DNA, 88 bp, Homo sapiens
ccggacttcaatgcccagtccccagctcgccagcctggagagatttaccagcatgagaattaagaaggagaaggaaaagcccaattct

SEQ ID NO: 727783 - DNA, 100 bp, Homo sapiens
gccatgagtctgacttccagttccagcgtacgagcctccttttagaggactcagaagaagaagaaggtgacttatgtagaatttgtcaaatggcagctgc

SEQ ID NO: 727784 - DNA, 100 bp, Homo sapiens
aattaaagcaattatgaaagaagtcattccttttttgaaggactcagcccaaaaccatgtttgcccaagttgaatctgatgatgaggaagcaaagaatga

SEQ ID NO: 727785 - DNA, 82 bp, Homo sapiens
ctttcatccttgttaacttaccctcaggtccaacaatgcagggggatatgagactttctactcggaatatcctgagtgttgc

SEQ ID NO: 727786 - DNA, 50 bp, Homo sapiens
ggggagtttactggggattctcagcaagggtttgtgtttagtgaatcaga

SEQ ID NO: 727787 - DNA, 50 bp, Homo sapiens
cagaagctgttcccaccatgaagctggagcagttcaagaaggacaacgag

SEQ ID NO: 727788 - DNA, 109 bp, Homo sapiens
tcgcagggagatgctggcccacggtggaggcagggagcccatgctcatggttgaaggtgttggaaatcaatagctcttctagcctttgcattgtttaaatataatagtg

SEQ ID NO: 727789 - DNA, 82 bp, Homo sapiens
tttcatcaggaccatctgttcggaaccccagagcacgagtagtagtcttaagagtggactcagatgatctccccttgaatgt

SEQ ID NO: 727790 - DNA, 73 bp, Homo sapiens
ggtgggggccggcggggtccgtggccagacaccattcgcttttcacccaagatgatttgatgtcttataaaac

SEQ ID NO: 727791 - DNA, 82 bp, Homo sapiens
gtcattttactgtcaagacatttcttcggcattctgcaacagggactggtgattgcagctggaagtgcccatgaccgagctg

SEQ ID NO: 727792 - DNA, 82 bp, Homo sapiens
atcatcatctctggccggaaagaaaagtgtgaggctgccaaggaagctctggaggcatgttatttgaaagcaattgagacgc

SEQ ID NO: 727793 - DNA, 73 bp, Homo sapiens
caactcagaaacatcaggtccaagtattaaaggtggaagaaggtccatatctttttctgtgggtgcttcaagt

SEQ ID NO: 727794 - DNA, 50 bp, Homo sapiens
ggccgctagcgtcagcgccagccaggacatagttgacggcaaggaaaaag

SEQ ID NO: 727795 - DNA, 105 bp, Homo sapiens
aactgaatcctctaaaggccccatacaatgaagtagacattggtggaaacatttaacatatctgaagagatggattaagaatgctttggattaaggattgtggag

SEQ ID NO: 727796 - DNA, 99 bp, Homo sapiens
gcatatttaaagacacttaccaaggaagatatcatcaaattctacaagacacctcaacacagagcacgccctggatgaccggagtacagcccagtgccg

SEQ ID NO: 727797 - DNA, 75 bp, Homo sapiens
cagagtgaagaggaagccagaagatgggagagacatttttgaagccggaccagaatatggccaagggatgaaccc

SEQ ID NO: 727798 - DNA, 90 bp, Homo sapiens
gcccactcgctgcctctctcgcctgcctccacaaggcagcaaataggaaacaagctcacatcttcctgtgggaaaccttctagcaacagg

SEQ ID NO: 727799 - DNA, 100 bp, Homo sapiens
acttcatccactgcataaaagagaggccaaagagccagagcaacagggaatggcatttactttacaagaacgacaaatgcttggtcttcaaggacttcta

SEQ ID NO: 727800 - DNA, 100 bp, Homo sapiens
agatgcatgctgatggcgataagtcattaccacagaagagacggtccagcagacaggtgaagagaaagcgctacactgaagacctggagttcaagatttc

SEQ ID NO: 727801 - DNA, 83 bp, Homo sapiens
aagagctgtcctgaccaagaggaccagactttgttaatgaagtttggtgccctggttgtcagatgttggaaagcagtaggacg

SEQ ID NO: 727802 - DNA, 76 bp, Homo sapiens
tgatacagttgataaaattgttggttctaagctggtctatgtccatcaccttcttggagaaggagcctttgcccag

SEQ ID NO: 727803 - DNA, 90 bp, Homo sapiens
cccggagcgccactacacgcccttgccttctgcttccagggaactcaccagtcaccaagaaatgtctttcctccaggacccaagtttctt

SEQ ID NO: 727804 - DNA, 100 bp, Homo sapiens
tggtgcatttttaccttgtgatgcacctgggattaaccagcgaggatcaggagtacaagcgcaagctagccagagtttccctggtgcgcaaagaactcag

SEQ ID NO: 727805 - DNA, 50 bp, Homo sapiens
ggatctcttatccatcacatgggccgaaagatgatctatatcctttgctt

SEQ ID NO: 727806 - DNA, 75 bp, Homo sapiens
acggctcaacccaccgctgccgaaatgaagtataagaccactctgcttcatttttgggagaaaacttctcacact

SEQ ID NO: 727807 - DNA, 91 bp, Homo sapiens
gacaaaaggagattctgatgaagaagttattcaagatgttgttgacctcctgtactggagagacattaagaagactggagtggtgtttggt

SEQ ID NO: 727808 - DNA, 82 bp, Homo sapiens
tctttgccgacaaactttacaaatccatgaaggcgggcaccacggcaggggctgagctaccctcatggaagggagaggaccg

SEQ ID NO: 727809 - DNA, 75 bp, Homo sapiens
cggaaaaagtcggacgccaaggagcgcgcctcctgctcttcatggatgaagcagacgccttccttcggaagcgag

SEQ ID NO: 727810 - DNA, 100 bp, Homo sapiens
tccctccaaactagatgccgagaaacttgttggtagagattcagaatctgataattcagataacaacacaatctttgtgcaaggacttggggagggtgtg

SEQ ID NO: 727811 - DNA, 99 bp, Homo sapiens
caggagtcatgagcgacagcggcgagcagaactacggcgagcggaaccttctgataacttaagagagattctccaaaatgtggccagattgcagggagt

SEQ ID NO: 727812 - DNA, 99 bp, Homo sapiens
ttgggaaacatttcatgagtttccattggaaaagaagaagaagtttctctacattccattattgttccattgacctttccctcatcactgagtcctttg

SEQ ID NO: 727813 - DNA, 75 bp, Homo sapiens
attgaaatggacagtggagatgaagcctaagaatatgatcagcctgtggacatctctacagcaatgagtgaacgg

SEQ ID NO: 727814 - DNA, 73 bp, Homo sapiens
caggttgagctgcgcgcaggctgaatgttacgttcataacttactaaggattagtgtatattttccaaccttg

SEQ ID NO: 727815 - DNA, 101 bp, Homo sapiens
gctcaccctcccgagttgaaaaacatcgtcatcagacagtgaggaggacccagaagccttggagaagcagaagaaagtgcggcccatgtacctgaaggact

SEQ ID NO: 727816 - DNA, 80 bp, Homo sapiens
aggaagagagctcagccacaatctactgctccatacggaaacctcagccctctgcctttgaagagaaggccattgagaag

SEQ ID NO: 727817 - DNA, 50 bp, Homo sapiens
aaggcattgtggaaacaactgtgctgggcctaaaggagataacatttatg

SEQ ID NO: 727818 - DNA, 90 bp, Homo sapiens
gtgagaaagactccaacttccagaacccatttaaaatcgaccgcacagagtttcggagcaacatcccctgtcacctggttgatatctctt

SEQ ID NO: 727819 - DNA, 74 bp, Homo sapiens
cccggggaagaagctgctctctgagaaaaagctggtatccacaaattacccattatcaaaaacaaatagttcat

SEQ ID NO: 727820 - DNA, 80 bp, Homo sapiens
gaggccctgggacacacgggcaggatgaagtggccattctgcctgcccctcagaacctctctgtactctcaaccaacatg

SEQ ID NO: 727821 - DNA, 75 bp, Homo sapiens
ctcgagcagcgacaacccgtcctctcccgagtttttcatgctggcgccttcctctgttgggccagcggtacctgg

SEQ ID NO: 727822 - DNA, 97 bp, Homo sapiens
gagaaggttcagttggcaaaccagatatatgacttggtgctgcgacaagagactttggacaaaaattgacttgagtaggtgtaaggccattgtgccc

SEQ ID NO: 727823 - DNA, 80 bp, Homo sapiens
aaggaagcaagcagttcagaagagccaaggaataaacatgcaatgaacccaaaaggagagattctccctgagaaacaagc

SEQ ID NO: 727824 - DNA, 107 bp, Homo sapiens
tggagttggaatttgtgcaatgtttagccaacccaaattaccttaattatatgattctataacagactcttccagaaatgatatgaagaggaaatttgccctgacaa

SEQ ID NO: 727825 - DNA, 74 bp, Homo sapiens
cctcctgagtagttgggattacagaaaagaagagtcggggacctcctagccagttacattccagaggatgaggc

SEQ ID NO: 727826 - DNA, 100 bp, Homo sapiens
tactataccaaggaaagctctttgtatcagaaaactggatttgttttcattccaaagtctttggaaaagacacaaaggctattcaagatctctggcagtg

SEQ ID NO: 727827 - DNA, 95 bp, Homo sapiens
cccacttgtgtcaaaagcgaaatgggcccctggatggatagctactccggaccttacggggacatgcgtgctcagagcatgaaaattttctgctg

SEQ ID NO: 727828 - DNA, 75 bp, Homo sapiens
agaagaagaagttgcgaaggatccccaacggggaggccaacgtgaagaaaacactgatatttgcatttaatgggg

SEQ ID NO: 727829 - DNA, 75 bp, Homo sapiens
tccacccaccgccgccgcctcccagcgccactggcttcaccacgcggtcagacattgggcccgcccgtgatgcaa

SEQ ID NO: 727830 - DNA, 87 bp, Homo sapiens
agtacttgaccctgtattttgggagtcgaacggacctttccgctgtgcccattgccattactcctgcaacatatctggctctctgaa

SEQ ID NO: 727831 - DNA, 98 bp, Homo sapiens
tggtgtccagcgtggttgtctatcccgtctacctggccatcctctttctcttccggatgtcccggagcaagaaatacccgcagcccaaagggcagaag

SEQ ID NO: 727832 - DNA, 100 bp, Homo sapiens
tgctgatgccacctcatcaagaagcatgatggacaggatgtttgccctcgaggaattgtggtgcttggaataaacagagcttatggcaaaaattcactca

SEQ ID NO: 727833 - DNA, 100 bp, Homo sapiens
gcacgacctcagctcccagaggatcaccagcgtggatcgacgtaattaacacattccagacgggagcctcttttaagggagtcctaaggcgacagaacat

SEQ ID NO: 727834 - DNA, 98 bp, Homo sapiens
ttttcttcctgcccctcgttgatgagagcattcgaagtgacctcagcagggcatccagggaatccctgtgctgatcgtggggcatcatatcctgtatg

SEQ ID NO: 727835 - DNA, 100 bp, Homo sapiens
cgacctttgaacaatacaaaggatgggtgggtttggaggatttgggacaacatctacaactgcaggttctgcattcagcttttctgccccaactaacaca

SEQ ID NO: 727836 - DNA, 75 bp, Homo sapiens
ccggccttcatcgacatcagtgaagaagatcagcatcacaagaggcaacaccaggagccaacatgagctcgggga

SEQ ID NO: 727837 - DNA, 83 bp, Homo sapiens
cttcgactctcaaagcaataccaggatagctgttgtttcagagaaaggtggattcaccaatgaacttgaagcatcctcatgac

SEQ ID NO: 727838 - DNA, 100 bp, Homo sapiens
gcgctatgaggccatgagtagaatctactatcggggtgccaaggctgccatcgtctgctatggcccacccttcctccattctgagcacataaaaacccca

SEQ ID NO: 727839 - DNA, 83 bp, Homo sapiens
cttatggcggcgctggagagggggcgctgagctgttgggcaaaatgatgcttcaacacccaggccaggtctctgcctcggaag

SEQ ID NO: 727840 - DNA, 100 bp, Homo sapiens
tgaagttactgaaaaggaggtagaaatactcttcattcaagtcaatcagtttgcattgatgaaccagaaactcgagatgcatggtgggcagaaatcagac

SEQ ID NO: 727841 - DNA, 115 bp, Homo sapiens
gcagctgccactcaaaagaaagtagaaagaaaagcccctgatgctggaggctgtcttcacgctgacccagacctggactggagtccagagttgccaccagatgggatattcaaaa

SEQ ID NO: 727842 - DNA, 75 bp, Homo sapiens
cagatgctagttggtataccgtgggaaactttgagggaaattttgagtcactggaccttgcggaatttgctaaga

SEQ ID NO: 727843 - DNA, 83 bp, Homo sapiens
tgataacaccctgtaacagctgagtcttagaaaaataccccaatacacccatgagtcataaagaaattcttcaagttatccag

SEQ ID NO: 727844 - DNA, 80 bp, Homo sapiens
cggtgacacgcttccctggattgggttggcaaaagcagcttttgatgatgcaattgcagaactggatacgctgagtgaag

SEQ ID NO: 727845 - DNA, 83 bp, Homo sapiens
aaacaagtgtgtgcatctggctgttagaagaattcatgctcatccggctcagccctctcttcctgctatagccgagtgtacca

SEQ ID NO: 727846 - DNA, 75 bp, Homo sapiens
aatctcactctgttaaagctggtctgttctaactgaggatccagtggggatattgtgatgactcagtctccactc

SEQ ID NO: 727847 - DNA, 98 bp, Homo sapiens
tggcctttcttatactctagaatatacaaagacaaaaggagattctgatgaagaagttattcaagatgcatgattccacctttccactgatagactca

SEQ ID NO: 727848 - DNA, 90 bp, Homo sapiens
gctgctggcgctctggctgtgctgcgcgacccccgcgcatggatctcatctggccaccgcgttctggaagaggcgagagggagagcgtgc

SEQ ID NO: 727849 - DNA, 78 bp, Homo sapiens
accatgacggagctgaacgccatcatcggggaagacaactgttagttttgtggcttactgctgctccacccagtgtct

SEQ ID NO: 727850 - DNA, 90 bp, Homo sapiens
aaccacctaaatatgaaagattcatcaggccaatgactgacgacaacagtggagacttggacccaggagtcttgctgacagctcaaacta

SEQ ID NO: 727851 - DNA, 98 bp, Homo sapiens
tgccaccatcatggtcgtcagcgtcaccgcctccaccacccagggtttgacaagtatgcgcccaagctggacagcccctacttccgacattccagcgt

SEQ ID NO: 727852 - DNA, 83 bp, Homo sapiens
tacagcatcaactacctgcactttggggagcctaagtcctgcaaattgtggctactaatttgccccctgaagatcaagatggc

SEQ ID NO: 727853 - DNA, 75 bp, Homo sapiens
tgagaattcagagggctatcctctgctgctcaaagtgttacttcggttgactatagtcaatggggccaatggagc

SEQ ID NO: 727854 - DNA, 90 bp, Homo sapiens
tgaatacaaaaagcataggcggaccatgataatttccccagagcgtcttgatccttttgcagatggggttgctttgacagcagatactaa

SEQ ID NO: 727855 - DNA, 75 bp, Homo sapiens
ttgagatggcctgtctgataactgactctgatctcaacattttggctgaagatccatcagttacacaagtgacaa

SEQ ID NO: 727856 - DNA, 83 bp, Homo sapiens
ctggcggcttccaggcgcactaccgcgaggttgacggatatattcagacgttacgacacggatcaggacggctggattcaggt

SEQ ID NO: 727857 - DNA, 98 bp, Homo sapiens
agagatcccagactgcgtggagcaggcgacgttgtggacgtttaccagcgggagttcctggcgctgcgcgatcggttgcacgcagctgagcaggagag

SEQ ID NO: 727858 - DNA, 75 bp, Homo sapiens
agattctcttgaccatgtgacatctgatgctgtggaacttgcaaatcgaaggtgtgggcaataatagtgaaggtg

SEQ ID NO: 727859 - DNA, 82 bp, Homo sapiens
gaaagaggtcccagaagacgcctagtacaccacgaagggtcacacaagattgagaggatccagaatccagatctctggaata

SEQ ID NO: 727860 - DNA, 100 bp, Homo sapiens
ctggggttcttttgacctgagggctgctattgtatatcacactaaagagcatgtcctttgcaacctgatcacacaaatgatgaaaaagaatagaactttc

SEQ ID NO: 727861 - DNA, 141 bp, Homo sapiens
tagatggagcaggtgttattatggactttcaaacatctgaagatgacaatttattagatggtgacactgcagttggtacagcagggaagaactggaaactcagagaaagaaactgcccttccatctacaaaagctgagttt

SEQ ID NO: 727862 - DNA, 50 bp, Homo sapiens
ccgcgcctgggcctggaccgagctttcatgaagcagaggaggatgggtct

SEQ ID NO: 727863 - DNA, 75 bp, Homo sapiens
gacacatctttagaagacctaagtgtggcaaagggaagctggaagatggggatggcatcaacctgaatgacatcg

SEQ ID NO: 727864 - DNA, 100 bp, Homo sapiens
cgcagatgcccaccggaatggagaaggaagaggagtcggtcgagatttaatttgcatccagtctatggatgggatgctgatggtatttgagcaggagagc

SEQ ID NO: 727865 - DNA, 88 bp, Homo sapiens
cctcctacgtttacctgtccatggattacattgcagtgaaggagaagtatgccaagtacctgcctcacagtgcagggcggtatgccgc

SEQ ID NO: 727866 - DNA, 100 bp, Homo sapiens
gatcaaggcgcagcccgacgaccccgagtcgcagatggcctgccacgttttccgcgccacagaccccagccagggtgataaaagaaaatgtggctgaagt

SEQ ID NO: 727867 - DNA, 98 bp, Homo sapiens
agagaacatccaaggttccattaaatacatcatgcttaaccctagttcacgaatcaagcatgtatgctctatacaatccataacacttatgatgacat

SEQ ID NO: 727868 - DNA, 75 bp, Homo sapiens
ggcaaataacttttccttggagagtcataacatatcactgactggatgtacagttacccagcacgtgtacctcct

SEQ ID NO: 727869 - DNA, 100 bp, Homo sapiens
aagtcattcaacgggaattgaataggatgagaaatactggagccggcggtacaagaacaacgaggcagccaagcggtcccgtgacgcccggcggctcaag

SEQ ID NO: 727870 - DNA, 90 bp, Homo sapiens
gattctagccgctactttgtaatccggatccaggatggtactggatttcatcttccagaatctgcaagaagaatctgcttattttgtggg

SEQ ID NO: 727871 - DNA, 104 bp, Homo sapiens
ccggaggttgcgctgagcttggctgctcgctggattctcaaagttggattggtggaaacaatgaaccattgacaggctttacatggcgaggtggctgtgaaaga

SEQ ID NO: 727872 - DNA, 83 bp, Homo sapiens
tctcactggccattggcttctcatggatgccattgagacccagagcagcagttctgaagagatagtgcccagccctccctcgc

SEQ ID NO: 727873 - DNA, 87 bp, Homo sapiens
ggatctcaggtcctcgggggcggcggccacgccaaggacggaaattgcaggtgctgcagtgtctgaaatttccgggcctttctcaac

SEQ ID NO: 727874 - DNA, 83 bp, Homo sapiens
atgagctctcagcaagcaactttgagctgcacgttgcacaagcatccggtgaaagacagagatcacatttcaactagattctt

SEQ ID NO: 727875 - DNA, 74 bp, Homo sapiens
ctaagaatgtagtcatggtaaatcaaggacttacaaagcacatgtgtcaacctaagaaaaagtctacgccactg

SEQ ID NO: 727876 - DNA, 82 bp, Homo sapiens
agccgatccagcctgcggagcctgtggggcagattacaggagcttattaatcataagaaggctgaggacacagagaagaaag

SEQ ID NO: 727877 - DNA, 50 bp, Homo sapiens
caggagtagctgatcaaaccaaggatggtgaaactgcttttggttacaag

SEQ ID NO: 727878 - DNA, 100 bp, Homo sapiens
caagcacgctgggcagaagaaaacctaccgagcgctcaaattgaaattattccatgcaagatctgtggagacaaatcatcaggaatccattatggtgtca

SEQ ID NO: 727879 - DNA, 100 bp, Homo sapiens
tcatttgagaagtacccactctatgttttaaaggccatcatggagaaactggagatgtccaagttccagcccactctcctaacactaccccgcatcaaag

SEQ ID NO: 727880 - DNA, 98 bp, Homo sapiens
tagttcttgcattggatgcaatccattccatgggttttattcacagatttttgatgaaattgagtcatgaaactgtaaccattgaattgaagaacgga

SEQ ID NO: 727881 - DNA, 100 bp, Homo sapiens
cgacccgtactgggcctactctgagctgcggtgcaaccctgggcagtttgcgtgtcgcagcggcaccatccagtgcatccccctcccctggcagtgtgac

SEQ ID NO: 727882 - DNA, 83 bp, Homo sapiens
agagccgagtgcagaagatctgggtgcccgtggaccacaggccctcgttgcccagataacccagcttagactagaaagtctag

SEQ ID NO: 727883 - DNA, 100 bp, Homo sapiens
agcatgaaggaaccaaatccaatttctccacgatgtccccgagcagcggagcatggagtaccctaagctgtatgagccgggccagctgaaccttctcttc

SEQ ID NO: 727884 - DNA, 101 bp, Homo sapiens
agcgacttgacaatgtccctcacaccccttccagctacatcgaaacaagcaatatccaaggcagtgtcatctgcaacaatgctgtgatcgagaagggtgca

SEQ ID NO: 727885 - DNA, 74 bp, Homo sapiens
agccacgcaggatctcacagctgcagtctaatagtaacacagaggtgcccctgggcgctgggattgctctagcc

SEQ ID NO: 727886 - DNA, 74 bp, Homo sapiens
ggacgctgagcggagcagctgcgccacgtgtggacgaatgtggaacctcgctctgtggctgtgttcccttggca

SEQ ID NO: 727887 - DNA, 51 bp, Homo sapiens
ccaggattacatcatctgctggccacacggagaagatctgctccctgcgct

SEQ ID NO: 727888 - DNA, 75 bp, Homo sapiens
ggaagatcgcaccgcggacgcccgctgagcttggcgcacgggccgaccagtacctggagtagaacagaaaaatta

SEQ ID NO: 727889 - DNA, 96 bp, Homo sapiens
aaatgaaaactgaagatggcaaagtagaaaaacactatctcttctatgacggagaatccgtttcaggaaaggttctgccggagacttccatttggc

SEQ ID NO: 727890 - DNA, 75 bp, Homo sapiens
gtatttaatttttggaacaatttgatgagctaggagtgtggacgaatgtggaacctcgctctgtggctgtgttcc

SEQ ID NO: 727891 - DNA, 100 bp, Homo sapiens
caagattcaatgccatgctggcagcactgaccccttcgagattagctgtggctttccaagctatgggtgccatgaagattctactctaaaagtcaccagg

SEQ ID NO: 727892 - DNA, 75 bp, Homo sapiens
tgttcaggaaccaccagtgacagagatcaggtctcctgggcatggctaacattgacctggaaaagagcaggactg

SEQ ID NO: 727893 - DNA, 120 bp, Homo sapiens
agacgagaccagaggccgaactcgggttctgacaagatggccgggctgccccgcaggatcatcaaggcagaactcaaaagcttgatggacaatgcttcttcatcctttgaatttgctaaa

SEQ ID NO: 727894 - DNA, 83 bp, Homo sapiens
caacgtcaagtgcgtggggctgtccccggatggccgcctcgctatcatcgtcgatgaagattcccaacctgctgagcatccgc

SEQ ID NO: 727895 - DNA, 100 bp, Homo sapiens
aatgcacatctgtgaagatgctgtaaaaagattgaaagctgtttcagatcgggtggagcggcggcttcaggaactggagagagagatgcgcacagaaagg

SEQ ID NO: 727896 - DNA, 100 bp, Homo sapiens
agccgcctttcgggggctccgcgcccagcgagcgcttggagctgcacgtggacggtccagacatcatctgtcggtggtggacgtctgcaatcactgtggc

SEQ ID NO: 727897 - DNA, 50 bp, Homo sapiens
tgaagattgtcagcaaaggaagagatgggaccatgacttcttccagcatg

SEQ ID NO: 727898 - DNA, 73 bp, Homo sapiens
gccgtggaggcagaggtggcatgggctcatctctggtatcacgaattcttcaggaggcttggacagagggccg

SEQ ID NO: 727899 - DNA, 98 bp, Homo sapiens
cgaggctgaaggaagatggcggacggcgtggaccacatagacatttacgcggatgtcggcgaagagttcaaccaggtctcctaaaaacccagaacaga

SEQ ID NO: 727900 - DNA, 87 bp, Homo sapiens
ggagtttgcattgtcttggctgttgagtgaagaaaaagagcaggaagtcattacatggtcctatggcagcgtatacaaagctattca

SEQ ID NO: 727901 - DNA, 75 bp, Homo sapiens
cttcagaagaccgaagcgttcgtatctggaaggaggcatacacggaatacctgaggagcatccactatatctccc

SEQ ID NO: 727902 - DNA, 100 bp, Homo sapiens
gccatggccgcccagcacggcatggatgacgatggcacaggccagaaacaggtttcatggggaagggtatcgggaaggctatgaagaaggcagtagtttg

SEQ ID NO: 727903 - DNA, 83 bp, Homo sapiens
ccacgcacctgcagctctgctgagagagtgcaagccgtgggttctaggtctcgttccagatcatattctccagctcataacag

SEQ ID NO: 727904 - DNA, 83 bp, Homo sapiens
tgcgtcgcgatgtgtggcgactgtgtggagaaggaatatcccaaccggatttctagaagctctcaatcactttgagaaagcaa

SEQ ID NO: 727905 - DNA, 51 bp, Homo sapiens
tgttccattgccaaagaaatcgaggttggaaagaaccatgactgtattcag

SEQ ID NO: 727906 - DNA, 97 bp, Homo sapiens
acttgatgtcatcacgcagaaggggtgaaagagactcggtgacagatacaggttacaggaggttccagtggcatcgggaagtgcattgctatcgagt

SEQ ID NO: 727907 - DNA, 83 bp, Homo sapiens
aaacaagtggctgcggccgtcgcccaggagtcatcggacgccagaatctgcctggtggagttgacagaagagatcctgaagct

SEQ ID NO: 727908 - DNA, 97 bp, Homo sapiens
caacctgaccgggcacgaggagaagagcaacttttagtgaatttgcagccaagcatgctaaagattcaagattcaaagcaattgaaaagatgaaaga

SEQ ID NO: 727909 - DNA, 100 bp, Homo sapiens
cgagcgggtgcgtctgccgcagagtcggcacctgaaggacatggagctgaggagtacctgtcatttgcctttgagcattgtcaccgttctagtcagaaga

SEQ ID NO: 727910 - DNA, 100 bp, Homo sapiens
aaaatgtgttccaacacaagttaccagatccacaagaaggtgctgtggtggttctccctgcagactctcagcagcgtttggttcagcttgtatatttcct

SEQ ID NO: 727911 - DNA, 100 bp, Homo sapiens
ctagacttgctgcccgagaagctcataaccgaagatgtcagcctcccctgtcccgaacgcagtgtgtggaaagaaatgtgaacataatttgagcaagcca

SEQ ID NO: 727912 - DNA, 75 bp, Homo sapiens
tgctggtggagcgctccacgctcaaagtatacgctcaacggcaagaaagtggaagttgccgtcaaacagatcatc

SEQ ID NO: 727913 - DNA, 75 bp, Homo sapiens
agagtaaactcttagataaaatgacgacgtccttctggaagaggcgaaactggcagaggctggatttgatgcgag

SEQ ID NO: 727914 - DNA, 76 bp, Homo sapiens
ctggcccaggcgcacacggaagtgaacatgttcttcaagtatacatggaataactttttgcatacacaagtggaaa

SEQ ID NO: 727915 - DNA, 100 bp, Homo sapiens
gaaaatgtgtaagcaggatccgagcgttctgcacaccgaggaaatgcgcttcctgagggagtgggtggagagtacctccctgcacttggctattcaaaac

SEQ ID NO: 727916 - DNA, 100 bp, Homo sapiens
ggacgataatagaaggattcaaatgctagcagacacggtggctactctgcctcggggacgaaagcaggcataagatgcacatttttctgctctggagccg

SEQ ID NO: 727917 - DNA, 82 bp, Homo sapiens
tgcaacaaggagaagagccatggaaacaggaggaagaattcccaagccaaagctttccagagtgcctttcaggtggcagtgg

SEQ ID NO: 727918 - DNA, 76 bp, Homo sapiens
cattgtgaagaccggagggacacaccctgctggaccagtcctgcctctgttgtagaagacatgtggtgtatataaa

SEQ ID NO: 727919 - DNA, 100 bp, Homo sapiens
gccggattccagcccggccggggcctgcgggcgcccagagccgcgccgtccgcgccgcccgttctggaagtgaactgatgctggcttctctttgtcttat

SEQ ID NO: 727920 - DNA, 100 bp, Homo sapiens
ctgtggtgtggctgtgggacccgtgagcaagcagcgacgccagcggcggagaaccgacgaaagctaccagagattcactgactgctataagtgcttctac

SEQ ID NO: 727921 - DNA, 75 bp, Homo sapiens
tcgcatttgggaccctgcaggacttcccaagtaagaagcggaagaggagccgctggaaccaagacacaatggaac

SEQ ID NO: 727922 - DNA, 75 bp, Homo sapiens
agttggacagataccaaagagggacccccgcagcaaacacaagtttaagatccacacgtactccagccccacgtt

SEQ ID NO: 727923 - DNA, 83 bp, Homo sapiens
ccgacagtgccctgagggccttcgagagctaccgcgccagacagctgagctgactgctgcccactttggaggaggcggtgggc

SEQ ID NO: 727924 - DNA, 100 bp, Homo sapiens
aaaatgatgactaatttggttatggccaaggaccgcttacaacttctagccactgaggaagcacgaagacttgtttccactgaagatgcttgtggatgtg

SEQ ID NO: 727925 - DNA, 83 bp, Homo sapiens
agcgggccacgcacctcgtcaccaaggccaagtgggaatgtaagacggacttagatattgcatacaaatttggaaaaactgtg

SEQ ID NO: 727926 - DNA, 101 bp, Homo sapiens
gaaagaggctgctcttcatggctaatgaagcagacttggatgaagagctggtcattaagggatccatcctacagaacaccctcatcacatgtgtggattct

SEQ ID NO: 727927 - DNA, 96 bp, Homo sapiens
acaggaaaaaaatttgctggatattgatgcgccagtcactggtatgtgaggagcagcgctgtgaggaggaagtcttccccctggccatgaactacc

SEQ ID NO: 727928 - DNA, 50 bp, Homo sapiens
gctctcgtctggggcaactcagaagaacgagcctcacagtctactcagag

SEQ ID NO: 727929 - DNA, 51 bp, Homo sapiens
cctgtacttggtcatgcagctgaacttagtgatttggcccgtgaccctcca

SEQ ID NO: 727930 - DNA, 98 bp, Homo sapiens
ctgttttgcaccttcatagtatgaaaaggattgaactggatgacagagctaaagttgcagacaagatccagctcatcaataatatgctggacaaagtc

SEQ ID NO: 727931 - DNA, 100 bp, Homo sapiens
gtgacggtcatgatggaccccaactccacccagcgctaccggctggaagccctcaaggtgtggacactgccagcggctgcagccgacttggaatgacctg

SEQ ID NO: 727932 - DNA, 96 bp, Homo sapiens
acggggcctggcccccgggactccctgtgccttgcttggagctgacgccgacgggttatccggtgttggctcctgctgcttactatgaccaaactg

SEQ ID NO: 727933 - DNA, 90 bp, Homo sapiens
gttctggaatcagcttctctcattttctttccctgcaccaactagcagaactgatagtgcatcagctgacccaggtaatttaaaatattc

SEQ ID NO: 727934 - DNA, 100 bp, Homo sapiens
aaccgtggctgctcgataaatcagacagaacagttaatcctcaatttaagcctgatctaacccctagaaacagagagagcaggagattcggatgggtcag

SEQ ID NO: 727935 - DNA, 51 bp, Homo sapiens
cagaaacagaaacgattgtggaaacagttggagtcattcgttgcccagttt

SEQ ID NO: 727936 - DNA, 90 bp, Homo sapiens
tggtgatggagcacatggacatgaggcatctgagcaggacgttcttgcccaggatgcagctggggacaacctggagatgatggccccgag

SEQ ID NO: 727937 - DNA, 106 bp, Homo sapiens
tttttcttcctgtgcctgaacctctctttcgcttttgtggaactactctacggcatctggagcaactgagatccgtgctcagctcacagagcagatgaaatgcctg

SEQ ID NO: 727938 - DNA, 100 bp, Homo sapiens
gcacttcgcattttggcattgacatttaattttagggtcctttatatagaagggagagtagacgttggaacttgccaggaatccagcaatgatgcaggag

SEQ ID NO: 727939 - DNA, 100 bp, Homo sapiens
agaagaagccagaccccctgcaccagttggtcctgcacttcagccgcactgccctgacggaaaagagggtgaagagtctttgcaggttggtggtcaacag

SEQ ID NO: 727940 - DNA, 100 bp, Homo sapiens
ggagcttccccctgggcctggggaggtggacatctataccgtcaaggtggaagacctgaccttcacctccccgttctgcctgcaagtgaagcggaatgac

SEQ ID NO: 727941 - DNA, 100 bp, Homo sapiens
tccggctttcctgtttgctttgttaattattttcgtccccagaggaaggcggttgcacagagcattgaggatcaccatcaggaagtgattggtttctgca

SEQ ID NO: 727942 - DNA, 74 bp, Homo sapiens
tgagagtcaccacaaggccaaggtaccataacagcttgggggaaagaccatgaaaaagatgcttttgaacatat

SEQ ID NO: 727943 - DNA, 82 bp, Homo sapiens
gggcccccctgctgcggcggctgcagtccagcctgcagtctcagcgaagctcacagcaggtgtggaaacaggaagagaacta

SEQ ID NO: 727944 - DNA, 101 bp, Homo sapiens
ccctcctgctcgccctggccggtgctctgctcgcgccctgcgaggcccgaggtcaagttttgaagagactgaagcccttgtgaacactgctgcgaaaaacc

SEQ ID NO: 727945 - DNA, 90 bp, Homo sapiens
tggaagtggttggaaatggcacctatggacaagtctataaggtttattgttggccaaaaccaggctttgattgaaccaggatgaatgcgg

SEQ ID NO: 727946 - DNA, 100 bp, Homo sapiens
tgcctagatgggttcttgaacatatttccaaaagcaagataatgggatctagtttgaagcactaagaagaataagacatcagtttgaaaagaggctctat

SEQ ID NO: 727947 - DNA, 90 bp, Homo sapiens
catggcggcggcggccaagcccaacaacctttccctggtggtgcacggaccgggggacttgcgcctggtgctcctgacctctgataaagc

SEQ ID NO: 727948 - DNA, 50 bp, Homo sapiens
gtccagtaatgtcccggcggatatgagaatggggagaaggaacccccgac

SEQ ID NO: 727949 - DNA, 74 bp, Homo sapiens
tctcagcttctggtttctaagtccatgtgccaaaggctgccaggaaggaggtgaagatcatgacggagaaggaa

SEQ ID NO: 727950 - DNA, 82 bp, Homo sapiens
tgagtcatgtggcagtggaaaatgcgctcgggctggaccagcaggttcatgatcaagagggcccaaggacggaagcgctttg

SEQ ID NO: 727951 - DNA, 90 bp, Homo sapiens
gaagctggcggagcaggaggatgggcggtgttcctgatccaagcagaaccctgttatttgaagagcctgagaaatcttatcccgtttaca

SEQ ID NO: 727952 - DNA, 98 bp, Homo sapiens
cggaagattgcccgagagcaaaaagctctggacatcctgagcccaagtcccccacactcagtgcagtgatgagtgcggaagtgaaggtgacagggcag

SEQ ID NO: 727953 - DNA, 83 bp, Homo sapiens
ctcagcgccatgtcctggatgttcaagaggaattacatgaatgacagtcttcgaaccaatgtgtttgttcgatttcaaccaga

SEQ ID NO: 727954 - DNA, 82 bp, Homo sapiens
tagcaggctgagagtgtctaaaggacactaaaatatctttggaataattcagtagagacggggtttcgccgtgttagccagg

SEQ ID NO: 727955 - DNA, 100 bp, Homo sapiens
ttttggtctccgcgtcacgggataagactcttcgcatctgggacctgaataaacacggtgagggtcccgatgtcctggtgtacagcttggactttggtgg

SEQ ID NO: 727956 - DNA, 100 bp, Homo sapiens
agcaaaccgggaaaggagaggatcccggagccggtgaactccagtttgcttttgtgtgcttcctgctggggaatgtgtacgaggcatttgagcattggaa

SEQ ID NO: 727957 - DNA, 95 bp, Homo sapiens
cggcttcctagtgagtcggcggctgatttagaaggaggttcaggctacgctatcagttgagggatttgcagttgataaaatggctggagaggtta

SEQ ID NO: 727958 - DNA, 75 bp, Homo sapiens
ctcatggccgcagactgcaaacaggagaagatggggagccccgaggatgacctgattgggattccattcccggac

SEQ ID NO: 727959 - DNA, 119 bp, Homo sapiens
tcatgctgtgttaactgctaacttttctgtaaccaacctgacctcactctacggacagtgccacacatagaaagatgactctgtcacttgcagataggtgttcaaagacacagaagatt

SEQ ID NO: 727960 - DNA, 100 bp, Homo sapiens
aaccacccagtaccaaaggcaaatactcctgtaaatttgagtgtgacacagctccgaattgattccttctttagattagcacaacaggagaaagaagatg

SEQ ID NO: 727961 - DNA, 71 bp, Homo sapiens
gtgaaggttgtctgggtcaaacaggtgcgcggcccccgccatcccgccccgccgccctgcgccatggagga

SEQ ID NO: 727962 - DNA, 97 bp, Homo sapiens
cctcctgcctcactgccagaagctctttgtgtatgaccttcacgcagtcaagaacgacttccaggttcatgtgaaaatggcggatgaggctgtctgt

SEQ ID NO: 727963 - DNA, 75 bp, Homo sapiens
tcgcaggcgccgcacggagttgcgtcccggggacttggggccgcagggagcaaacggggattcagcgtccgatcc

SEQ ID NO: 727964 - DNA, 75 bp, Homo sapiens
aatgctggtggtctgcatcaccaccggatcaacttcgacaaataaattatacccatctaccaaaagcagatattt

SEQ ID NO: 727965 - DNA, 99 bp, Homo sapiens
gagaaccgtcagtttgagccagatgcctgcctgctccgcttcagcggactctcgctggtctacctgctcttcctgctgctgctgccctggttccccggc

SEQ ID NO: 727966 - DNA, 75 bp, Homo sapiens
cgcctgagcaccccaggacctgcgctcagggcgaccattgacgaggtggagacggacgtggtggagattgaggcc

SEQ ID NO: 727967 - DNA, 97 bp, Homo sapiens
aaagctgcgcagcaccaagccaaccaagctgcggtggccgcccaggcagccgcggccgcggccacagtcatggtggaagttgatgggtcgaaactaa

SEQ ID NO: 727968 - DNA, 75 bp, Homo sapiens
aattgggtcacaagctgtttggtcactctcatcttgcaaaccagattgggaaaatgaggtacgttagtgttcgcg

SEQ ID NO: 727969 - DNA, 98 bp, Homo sapiens
gacagcacttccggtcacgccatcgttgctgccttcttcgtcaaggagtgtacctcacagccttctaggatctccagagtggacaggaatctcacttg

SEQ ID NO: 727970 - DNA, 82 bp, Homo sapiens
cagggacagtgggcagtgctcccggaacacaagctgtgaaacactagcgagtgatagacagccaagcagagaaactgaagga

SEQ ID NO: 727971 - DNA, 100 bp, Homo sapiens
gaagatgcacatgtctgggaggataattgggatgatgacaatgtagaggatgacttctctaatcagttacgatgctgaagaataccagcctcctatatgg

SEQ ID NO: 727972 - DNA, 80 bp, Homo sapiens
atggcaatgggtccaagtgcgaccttaatgggaggccccgggaggccgaggttcggatttggagtcaaaatatggacctg

SEQ ID NO: 727973 - DNA, 90 bp, Homo sapiens
aatcaagaaattggcccaaagccctacagtctgcaaacgatataattgacactggcaaaacaatgcagactttgctttccttggtcaggc

SEQ ID NO: 727974 - DNA, 75 bp, Homo sapiens
gtggactgcagtgctgcagtgccaggcttcctttctgtctgaccagcctgagccttacctgccatttctttcacg

SEQ ID NO: 727975 - DNA, 90 bp, Homo sapiens
gaattgctaagaaaagtagtagtccctgggatccgtatgtccattaaacttcatcaggaccccaggagcaagcacaagttcaaaatccac

SEQ ID NO: 727976 - DNA, 75 bp, Homo sapiens
ctgacctgtaaatcatcctttaggttatgggtgctacatgtgtgctttcagagcagtagtgtgaggaagcttgga

SEQ ID NO: 727977 - DNA, 83 bp, Homo sapiens
aatttctgccatggttctcactaaaatgaaagaaaccgctgaggcttatttgggaaagaagagcacgaacttccaggagccgg

SEQ ID NO: 727978 - DNA, 103 bp, Homo sapiens
atttaaaagacagtcctcgtcagcactgactttcagctatggaatcgcgtccgtctccaagagagtatgaagagagtgcgtctgtagggcagggaagatggcg

SEQ ID NO: 727979 - DNA, 100 bp, Homo sapiens
cagcggcaggcctggggatggcctcgggaggtttggtgcacctcgatttggaggaagtagggcagggcccttatctggaaagaagtttggaaaccctggg

SEQ ID NO: 727980 - DNA, 100 bp, Homo sapiens
agcagatatgcgcgtcagcatactttggcggggaccacttgtacggtggctgaaagtgaattttagtgaagcatttattgcatggattcacgtgaaagca

SEQ ID NO: 727981 - DNA, 100 bp, Homo sapiens
ggtccccactttcccctgagcctcagcacctgcttgtttggaaggtgttgctctcttgccattcgtggatgagcgaaggctacgagctgccctagaagag

SEQ ID NO: 727982 - DNA, 100 bp, Homo sapiens
ccctacccttggcctcttcagcaactacagcaccgcaagtatatcgcgtcaacacagcgacctgacgggacctggcgcaagcagcggagggtgaaagaag

SEQ ID NO: 727983 - DNA, 124 bp, Homo sapiens
agacgctggccgtccaaaatccaccaaagaaagtgacctctgagaaagtgagccagaaacatgctgagcctttgacagctgttgcagctaattgcaaaatcccagttaacttcattgagtggcg

SEQ ID NO: 727984 - DNA, 100 bp, Homo sapiens
cgtcaccgccgcggacttcgctttgggccatgaccagataaacaatcagattctgtatggaagaagtcaccaaaatgcatctgccattattaagactgcc

SEQ ID NO: 727985 - DNA, 111 bp, Homo sapiens
gcagccttgggcctcgcgccggctatggccgtgccctggggctgagccctcagggggatatgagactttctactcggaatatcctgagtgttgcgtggatgtaaaacccat

SEQ ID NO: 727986 - DNA, 80 bp, Homo sapiens
ctgtttgaataaagagcgagtcgcaccctgtatattgtgtaaatgttgttggaacacaaaatgctcacaatctgattagc

SEQ ID NO: 727987 - DNA, 100 bp, Homo sapiens
agagagggattacagaaaggagaacaccttatttcaggtggaagaatcaacagccgtgatgtctggatttataactcacagttaaatatttggatcagag

SEQ ID NO: 727988 - DNA, 75 bp, Homo sapiens
cttttatgtgaagctgctacctctgacatggatattggaaagcgaaagagtactccaaagattcaggtttactca

SEQ ID NO: 727989 - DNA, 100 bp, Homo sapiens
cggagcccaaacccggggcaggcgggcagctgtgcccgggcggcacggccaggaatactcccccagttgcaagaggcgcaggaccgtggaagacttcaac

SEQ ID NO: 727990 - DNA, 100 bp, Homo sapiens
tcaacagaagagtgagagatggaacccgaagaagaaaggattcgttacagccagagattggtgtgatccctcacatccacaaatctctgattggaaagaa

SEQ ID NO: 727991 - DNA, 100 bp, Homo sapiens
tgctactcgctgctcggcgtggaactgtcagataatgttaattcaagactctcgaagagaagcttcagtgcagatggatttgagatgctacaaaacccag

SEQ ID NO: 727992 - DNA, 50 bp, Homo sapiens
ggaagaggcggcagacagcgggaaattccgggtagatatgcctggctcag

SEQ ID NO: 727993 - DNA, 98 bp, Homo sapiens
agcagaagagaaagccagttatccacggactggaagatcaaaagagggttttataggatcacattgacaaaagtaccatggagttttatgagtcagca

SEQ ID NO: 727994 - DNA, 100 bp, Homo sapiens
gtctgtggaagaggtggttcgagaccatcatctgcaaatagcataagcagcagcacatcttcaaatcatagcggccacactccagagcccccactcccac

SEQ ID NO: 727995 - DNA, 83 bp, Homo sapiens
ccaaagtacaggaaatgggcctgggaagccgtagaggcatattggcgttcctgtgctatgatgatgggctgtgtgatagagag

SEQ ID NO: 727996 - DNA, 100 bp, Homo sapiens
ctctataagattcttcaaggtggggttggcatcccccacatacgatgccttcaattaagttgcagagttctgatggagagatatttgaagttgatgtgga

SEQ ID NO: 727997 - DNA, 100 bp, Homo sapiens
ggccctgcggcacgccttcacctacaaggtctatgctgacaagaggctggacgcacaagagctgtgcccgcaacatagccccctggatgcgacgccccac

SEQ ID NO: 727998 - DNA, 100 bp, Homo sapiens
acgctgcgggcccgggccatggccgccgccgatgccgagatgttcctcctgctgatcaagagaagctttttatccagaagttacgtcagtgttgcgtcct

SEQ ID NO: 727999 - DNA, 100 bp, Homo sapiens
ggtgaccaacttattagaaaaggattccaacaatgtctcacccatcttggctgccacccaaaagcactggtgagcccctcggccatgtgcctgcacggat

SEQ ID NO: 728000 - DNA, 100 bp, Homo sapiens
atcacaaagagtgtgtaggccagccccggtcacagagtgcaccgtatcctgtcacttctggatgtgagaaatacactttcgggaaatggcctctaaatcc

SEQ ID NO: 728001 - DNA, 106 bp, Homo sapiens
caagagggactggacggctgagctgggcatccgacacgtactgctggccagcggaagcctgccacctcctatgtgcggaccaccatcaacaagaatgctcgcgcca

SEQ ID NO: 728002 - DNA, 100 bp, Homo sapiens
cacagagacagtgcctgccttttcagagcgtacctgtgccactgtcaccattggaggaatgacagtaataccccacttttattcgctataatttgcaaga

SEQ ID NO: 728003 - DNA, 83 bp, Homo sapiens
ccgacatgacggtcgcacccagcgacaggccgctgcaattgccaacctgcaggctgggacaatgaaaagaaaatagctatttt

SEQ ID NO: 728004 - DNA, 110 bp, Homo sapiens
ttccagaggatgaaatctggcagtcagaaccagagtctgtgctgtgcagcagatactgtgatgatggattgcaagtgcaaagagtaagacaaaactccagcacataaagg

SEQ ID NO: 728005 - DNA, 101 bp, Homo sapiens
gtcctttttcgtttttcggatgatgccttcaatactacctttatttccaccatagctatggacattttgaattatgtcgggagagctgatggaaaaagagg

SEQ ID NO: 728006 - DNA, 75 bp, Homo sapiens
aagatgtgtctgtggagcacggatgccattagcaaggatgtttttaataaggaaatgatgtatgtctggaatggt

SEQ ID NO: 728007 - DNA, 77 bp, Homo sapiens
ctttggttacctatgtacctgttaccactttcaaaagtcatactccctgtcacaaactccagctgaactaacttgga

SEQ ID NO: 728008 - DNA, 100 bp, Homo sapiens
acctgaaaactctaaaaagtaatgggatgaataaaattggactcagagtttccattgacactgatatgactcagaaccgtgctgcatactatcctcctag

SEQ ID NO: 728009 - DNA, 75 bp, Homo sapiens
ggagctcctgccgcccgccgctggcttcaagtgcaagatcgtaaagctgaaaattgaaatcatgaaagtagacag

SEQ ID NO: 728010 - DNA, 101 bp, Homo sapiens
aaaaacctcagcgacctgatcgacctggctgacagataaggcagtgaaggactattccgcttaccgttcttcccttctcttttgggccctcgtcgatctca

SEQ ID NO: 728011 - DNA, 100 bp, Homo sapiens
gaggaggacatcccatgcggctactcctgcccagcgtggtggggcagcagaagctccagagcccagacttgcagtttctctgcaggtggatattgttccc

SEQ ID NO: 728012 - DNA, 75 bp, Homo sapiens
ctgaggttgcagttggcgtgaaggtttgccagaacccaataaagatgccatcttccaaggcctgacgcaggacca

SEQ ID NO: 728013 - DNA, 74 bp, Homo sapiens
atatcttgaaaagctgccagaaagacctgtgaccgcatcaagcagtcagcagctggcaccaagcgtcgggtgtt

SEQ ID NO: 728014 - DNA, 97 bp, Homo sapiens
ctcggcccgcgggggagccccgggagccgcacggaggctgaaccgtctgagcccagaagtgctgaggtgacgaggaagcccaaggctgctgttcctt

SEQ ID NO: 728015 - DNA, 100 bp, Homo sapiens
ctcagcatggatatccaggtgctgagccaggagcagcagcctttctgggaaagcctcctgaagctgatggtgtggatagatcatttggcgagaaacgcta

SEQ ID NO: 728016 - DNA, 90 bp, Homo sapiens
cggcgggggcggcgtgggcaagtcggcgctcaccatccagttcatccaggcaattgctggctactttgatatatattttgagaagaattg

SEQ ID NO: 728017 - DNA, 96 bp, Homo sapiens
ctacggagcataggaggaaaattcatcatctgctctgcaagtgagtctggttctcaaagcacttgtgatccacttgtgactccaacagccctggct

SEQ ID NO: 728018 - DNA, 96 bp, Homo sapiens
tgaaagctgccgctgaagctgccgccgttgcctccgccgccaagagtgagcgagcggacccgcgatggattacatgcagcaaactggaggtcaagc

SEQ ID NO: 728019 - DNA, 100 bp, Homo sapiens
atcactggaccaccagaggctcagttcaagacatatctgaagagatggattaagaatgctttggattaaggattgtggagcacatttcaatcattttagg

SEQ ID NO: 728020 - DNA, 83 bp, Homo sapiens
cgaagcgctgcgctcgcgcccggatccctcagcggggatctgacgagcttttctctacttgtgtcactaacggaccgtttatc

SEQ ID NO: 728021 - DNA, 83 bp, Homo sapiens
ggaagaggaaaagggcccaagaagcagatacttggactaactcgtgcattccagaaattatcaccaccaaagatcccatattc

SEQ ID NO: 728022 - DNA, 122 bp, Homo sapiens
tttgtttgtcatccttgtacagcaatctcctcctccactgccactacagggaagtgcatcacatgtcagctggtgctcaagaccgaatcggctgggcttttggcctaggattagaaaggcta

SEQ ID NO: 728023 - DNA, 97 bp, Homo sapiens
ctgcatcatgatgtcaacaaccgtggctcacaagatgaaagagcacgtgaagatcccggatctgttttgtggcctagagattgtccccgcgttgctc

SEQ ID NO: 728024 - DNA, 74 bp, Homo sapiens
ttaagtgtaaggatcttcatgatgaaatttctgtaaatgatgtcagtattgaatatggtggtgaggcgtgaccc

SEQ ID NO: 728025 - DNA, 75 bp, Homo sapiens
cggccttcaccaaactccctattgatgtacagctatatattttgtcctttctttcacctcatgatctgtgtcagt

SEQ ID NO: 728026 - DNA, 50 bp, Homo sapiens
ctgactatggccttgaacacttggtggaaaacgaagctcattcccaacgt

SEQ ID NO: 728027 - DNA, 100 bp, Homo sapiens
cgcacttggaatagtagcaggcggcggcggcggaacgccaggcagggatatcatgataacacattttgaaccttccatctcctttgagggcctttgcaat

SEQ ID NO: 728028 - DNA, 75 bp, Homo sapiens
gttcagcagccgcagcaggttcaggcagccctgaagcagcttcctaggaacaaggtccccaacatggcggtgatg

SEQ ID NO: 728029 - DNA, 75 bp, Homo sapiens
cagtattccaaagaactcggagatgcctggaatacagtaaggtcagatgtaccaacagtaccagcaacaggccgg

SEQ ID NO: 728030 - DNA, 100 bp, Homo sapiens
aaagaagaccacacactgggaaacatcattaaatctcacagctacttggaaggctgagatgtgaagactacttgagctcagaagttccactgcactccag

SEQ ID NO: 728031 - DNA, 51 bp, Homo sapiens
cccggggtcccgccaccaccgcgcgcgggtaagaagtttgatagctgtagg

SEQ ID NO: 728032 - DNA, 100 bp, Homo sapiens
agttcttacatcttctcaggaatgtcaataagcagtggattacatttcagcactttagcttcctcaaacgcatgcaacaggcggaggtggcccacatgtc

SEQ ID NO: 728033 - DNA, 98 bp, Homo sapiens
ctgaagacatcaagaagatcttcgagttcaaagagaccctcggaactcatgcggaggaatccctttggtgtggacatctgctgccggaaggggtcccg

SEQ ID NO: 728034 - DNA, 75 bp, Homo sapiens
actcctgatgagaccctggatgacttcacggacttgctgcagtgcgcctggctaccttcctacctcgctggcttg

SEQ ID NO: 728035 - DNA, 75 bp, Homo sapiens
tgtcccagagtcaagtatcgaaaggggttgattttgaatcaagtgagattctgatagttggtggtggtgttgctg

SEQ ID NO: 728036 - DNA, 100 bp, Homo sapiens
ggcggaggggagcggagcccggagcgtcgtggaaaggtgctgggactctggtgcccccaaccctgggcatcctcaggctttgaggagaatacacaggatt

SEQ ID NO: 728037 - DNA, 75 bp, Homo sapiens
aaaaaacaaaaggactgtgggattccattaaaaggaatggaaattaagtccaatgaaagatgctgttcttttgat

SEQ ID NO: 728038 - DNA, 95 bp, Homo sapiens
ggcaggagctcatcgatctccggggaccgtgtcttcaataggccgtgtttaagaggcgtcttacactccctgttgccagtggctggaacacaatg

SEQ ID NO: 728039 - DNA, 83 bp, Homo sapiens
gttgcaatgaaccccaccaacacagtttttggtgattgtttgctctgccactttgcattctttcgatgtaaagaaactgtccg

SEQ ID NO: 728040 - DNA, 100 bp, Homo sapiens
atgttttccttcagcaaggacaaagaccccaccaacaactgaacgctttggtcaggctgctacaatggaaggaattggggcaattggtggaactcctcct

SEQ ID NO: 728041 - DNA, 90 bp, Homo sapiens
gtgatgcactagtcctgctctgggtacagtcctcccagggaatggtgtctgatgccagtgccaatgagttcagatattttggatggcagt

SEQ ID NO: 728042 - DNA, 90 bp, Homo sapiens
gaagccccctgcaggaactctacaacccaatccaggatgctgaaatttctggaaaagacaatggaaatcaggggcaggaagagaacagtg

SEQ ID NO: 728043 - DNA, 100 bp, Homo sapiens
tggaggtcctctcaggcatcaaactgttgtcggacaagtaaccgcaagagcttgattgtgacctctagcacatcacctacactaccacggccacactcac

SEQ ID NO: 728044 - DNA, 98 bp, Homo sapiens
cgcctgtggggactggaggcccagaaacggtcaccttccgcaaccctgtcattgagaggattcctcggctccgacggcagaagaaaattttctccaag

SEQ ID NO: 728045 - DNA, 51 bp, Homo sapiens
aaagtgctgggattacagacatgtcatcacaatggatcccaaagacaattg

SEQ ID NO: 728046 - DNA, 100 bp, Homo sapiens
gctagctgctaaaaccacctttgtcaccagaatgaatgaagtgcttcagatttaaataaccaacatcattggcatgggaagtaaagaagatgtctccggg

SEQ ID NO: 728047 - DNA, 98 bp, Homo sapiens
ctttaaatccggagggggaaaaaatcccaaggtctgcaaagttgttgacctcctgtactggagagacattaagaagactggagtggtgtttggtgcca

SEQ ID NO: 728048 - DNA, 98 bp, Homo sapiens
gatcggggacggagagaacacgagcccatcaggtggtgttagcaaagcatgtatatgagcaggttttacaaaccctggacaatctcgtgtacagtgaa

SEQ ID NO: 728049 - DNA, 101 bp, Homo sapiens
gctgaaatgtttgacgacactgatggtttggatctaagcctttcccacgttatggttataaaccctccccaccgaatggatgtggctctccactgtttggt

SEQ ID NO: 728050 - DNA, 50 bp, Homo sapiens
cctcatcacccggctgctggaggaaatggtggagtcaatgaagaaagtag

SEQ ID NO: 728051 - DNA, 82 bp, Homo sapiens
gcacctccgagcgcaaggacagcgcgaggtccgcgcagcccagcgcagccataagctccaccatgaggcgaggtggatggag

SEQ ID NO: 728052 - DNA, 75 bp, Homo sapiens
tttagaagacacagactaacaattttagatggtgatggaggcctttgagcaggccgagcggaagcccaaacccaa

SEQ ID NO: 728053 - DNA, 100 bp, Homo sapiens
cggaagcttcgaggcatgatggtcgactacaagaagagggcggagcggagacgggagtattatgaaaagatcctctcgtgctcattcccccatgatcgcc

SEQ ID NO: 728054 - DNA, 83 bp, Homo sapiens
cggagtatctggaaagctcgggacaggatggtgttggagagcacaatggctgaacaagtccttcctcaggctttgtatttgag

SEQ ID NO: 728055 - DNA, 106 bp, Homo sapiens
tccaggccggggaggtggtggatgtcatcgagaagaacgagagcggttgaatcgctcctagctgacccctcacgtctcttatgatacgtacagaaagcaagagcag

SEQ ID NO: 728056 - DNA, 89 bp, Homo sapiens
cgacgcaaccggcagcagcgctgccgccgcgtcctcagccaccgctccctcttcccacggtaccgggaagccagtgttgaagtgatgga

SEQ ID NO: 728057 - DNA, 100 bp, Homo sapiens
cccgatggctctgtgcaacggagactccaaggacagtggtgattatcctcttaccatgcctggacctcagtggaaaaaatttcgttcaaacttttgtgaa

SEQ ID NO: 728058 - DNA, 49 bp, Homo sapiens
atctagacagacaggcctttctaggtctgccatcatggatgttctcgca

SEQ ID NO: 728059 - DNA, 100 bp, Homo sapiens
cgatgaacagcgccgggatccaggtgtgatgaatgcagactctgctaccattttggctgtttggatcctcctttgaaaaagtctcctaaacagacaggct

SEQ ID NO: 728060 - DNA, 88 bp, Homo sapiens
ctgaagctgcgggaggcccccagccccgaggtgcgggagacgcggcggcggcacgagcggcgcctggtggaggtggacagcagccggc

SEQ ID NO: 728061 - DNA, 100 bp, Homo sapiens
ggagcacttcctattccactggattgggaaagaccatggcaggtaaagtgaatgccgaagacagaagatttggatgatacaccactgactttctttgttt

SEQ ID NO: 728062 - DNA, 74 bp, Homo sapiens
ctggagcagttgtatgtgtagaaagtgaaatcagaggagatgtaactatcggtccttcgattctatgcaatctg

SEQ ID NO: 728063 - DNA, 75 bp, Homo sapiens
agaagagttaaatgccctcaagtcgacaggggatgggaccctagctgagtccacctcaggacgaggccagtgcct

SEQ ID NO: 728064 - DNA, 100 bp, Homo sapiens
ctctccagggagtgctctgttcacggctccatcgctgttagagcagatgtctcaagtattagatgccatgtttgaaaaattggtcaaagatggggagcat

SEQ ID NO: 728065 - DNA, 101 bp, Homo sapiens
gttcacggctccatcgctgttaagggccaagatcagtcagggaaccaaggtcccggaagaaaagacgaccaacactgtctccaaatttgacaacaatggca

SEQ ID NO: 728066 - DNA, 87 bp, Homo sapiens
gaaactggcgctcgccatctttgtggtctgcgggactaggtcctccaagcgcatctccaagctggcctatcaccaaggcgtggtcat

SEQ ID NO: 728067 - DNA, 90 bp, Homo sapiens
ggtgatttttctggtgatcgaggacttccggggtaatgacagtgatgaaatgcaggggacctgttgcagcatttgcaagaagaagcagaa

SEQ ID NO: 728068 - DNA, 97 bp, Homo sapiens
ggaacttgtacaaacaggacctgcctaattaccttcaaacctggaatccctttgcccacgtccagctgaagccgacagtgaccaacgacaggtctgc

SEQ ID NO: 728069 - DNA, 100 bp, Homo sapiens
cgcgcccagagccccgcgtttcagccctagggaagctgttttcactcattagctcctgaggtaaacaaattgaaaaaatgagcgaactggaacagttgag

SEQ ID NO: 728070 - DNA, 78 bp, Homo sapiens
atcgagactatgaccgcaagagggacagaggaccaaaagatctcagattgctataactgaaggtatatttgaacttcc

SEQ ID NO: 728071 - DNA, 75 bp, Homo sapiens
cagctacgccctgctcacgtacatgattgcgcacatcacgggcctgaagccagctgaagatgagtggggtaaaac

SEQ ID NO: 728072 - DNA, 75 bp, Homo sapiens
tctgattctccaatgggaataccaaggggttaacacagaaatctgcctcctgggccatgccgcttctaaggcctg

SEQ ID NO: 728073 - DNA, 100 bp, Homo sapiens
actctgttttgatgggatagagatatggctcgtggacagcagaaaattcagtctcagcagaaaaatgccaaaaagcaagctggacaaaagaagaaacaag

SEQ ID NO: 728074 - DNA, 75 bp, Homo sapiens
cgggcagccggaaggacaccaagatgcggatccgggcctttccgctggacctgtgatctgcagaatgctgagtta

SEQ ID NO: 728075 - DNA, 100 bp, Homo sapiens
aggtcctgggatctttgaaatgctaagattcttggataccacagtatcataaaattcctctaaatgcaatttggagcaagaggtggtggtggccttcccc

SEQ ID NO: 728076 - DNA, 96 bp, Homo sapiens
attatcattctcttcactcgagagatgaggacactgaaattcagagaggggaagtgatttgcctcagcttgtactatcctgaggaggatgaagggg

SEQ ID NO: 728077 - DNA, 90 bp, Homo sapiens
atgtggggcagatgctgatgggcaaactagggatgccaaggcctgcgtgatccacggcaccgacctcaaggacttcacctccgagcaaat

SEQ ID NO: 728078 - DNA, 100 bp, Homo sapiens
actgttccatttttgccaaagtactctgctggattagaattacttagcagtggcaccctgtgctgcgcacactaaagaaccgcattgaagagaacactgg

SEQ ID NO: 728079 - DNA, 96 bp, Homo sapiens
caggatctgccccagagaaagtcctcgctcgtcaccagcaagcttgcggggttgcaatgaatgtgtatgagttatcatcagctgccggattacctt

SEQ ID NO: 728080 - DNA, 87 bp, Homo sapiens
ggcagcaatagcatctttgctccagtgcttttgccacattcaaagttttactacccttggatgctgctgttgacatggaaaagattg

SEQ ID NO: 728081 - DNA, 100 bp, Homo sapiens
gggggagcggcgctgcctgtggagatccgcggaggccgacaggattcgttggctgccgtccccgctgctgtgcattggctgctgatgcaaggaatcccct

SEQ ID NO: 728082 - DNA, 50 bp, Homo sapiens
tgacaatcagccatcctggattggacatgatggaatggggagaagatatt

SEQ ID NO: 728083 - DNA, 96 bp, Homo sapiens
tgttttgagctaaatattgagggtgtgatgaatgcagactctgctaccattttggctgtttggatcctcctttgaaaaagtctcctaaacagacag

SEQ ID NO: 728084 - DNA, 103 bp, Homo sapiens
cgctcctaagcctgcacagccgcggcggcagcagcagtgagaggcccagctgagagccagcctggaggttacccagcagcaggccacccaggccgaaggccag

SEQ ID NO: 728085 - DNA, 75 bp, Homo sapiens
agaagaagaagagaagaaagatgaaacttcgagctcctctggcaacaagattgacctggctgaaaggagagaggt

SEQ ID NO: 728086 - DNA, 75 bp, Homo sapiens
ggaaagatgctgaaatccagaagctgaaaaatgtaatcactcaatgggaggaaattgaacttagctcattaaggg

SEQ ID NO: 728087 - DNA, 82 bp, Homo sapiens
gaaactgcttcccgaggagcattggaaggttgactatagtcaatggggccaatggagccaagtgtatggaaacccacaacag

SEQ ID NO: 728088 - DNA, 87 bp, Homo sapiens
cttggacccgtggcagggccaggacccagctgaggggggccagggtgtagaatgagccaaggagactcaaacccagcagctattccg

SEQ ID NO: 728089 - DNA, 75 bp, Homo sapiens
ggagaggattcctaccgagagtggatacagcacaacaccccgatcccccaaggaggcagaggagccatccagttt

SEQ ID NO: 728090 - DNA, 50 bp, Homo sapiens
cttctccactggttcctgggcaccgaaagttaccgaagtgcatgtttggg

SEQ ID NO: 728091 - DNA, 83 bp, Homo sapiens
gagatcgaccggttccaggtgcccaccgcgcactcggagatgcagccgctggttaccatgaaaatggagtggtgaaggcagag

SEQ ID NO: 728092 - DNA, 74 bp, Homo sapiens
tttgaacttccgaggaagcatattgtcacacaaagaactgataaatttcaaacggaagagagtggcagcattta

SEQ ID NO: 728093 - DNA, 97 bp, Homo sapiens
gcagccgccagttgggatcaaatgtgagcctatggatcaagggtttttaagtaccggtgaccaggcagcaaaaggcaactatgggctcctggatcag

SEQ ID NO: 728094 - DNA, 83 bp, Homo sapiens
gagaggcacccgatatatgttctctaggccttttagaaaacatggagcttgaaattgtaattggagatgagcacatatctttt

SEQ ID NO: 728095 - DNA, 83 bp, Homo sapiens
gggaaatcgggctgaagcgactgagtccgcgatggagtttgcagttaacatgtttcgaacattaccaccttcctccaatccta

SEQ ID NO: 728096 - DNA, 100 bp, Homo sapiens
cctgggccagcctgacctccccaaggagatggcctctctgtgtttggtgcacctcgatttggaggaagtagggcagggcccttatctggaaagaagtttg

SEQ ID NO: 728097 - DNA, 100 bp, Homo sapiens
cccaaagtgctggaattacaggggttcacgcctacatcatcagctccctcaagaaagagatgcccaatgtctttggtaaagagagcaaaaagaaagagct

SEQ ID NO: 728098 - DNA, 100 bp, Homo sapiens
catatctgtttttttcttatgaagcttcttctggttggaaacttgtcaaatttcatcagcatcgattgttatctagacaagaagaacttaaggaaagagc

SEQ ID NO: 728099 - DNA, 75 bp, Homo sapiens
ggaggccaagcgaccacccaaagaagtgaacagcagagctgaaatggaaattggcaggtaccactggatgtaccc

SEQ ID NO: 728100 - DNA, 98 bp, Homo sapiens
ttcggatcatgtctggtggctccgcggattataacaggtgatcatggagctcagcttggtctccatggggctggtggtgatggaatacatgatgacac

SEQ ID NO: 728101 - DNA, 50 bp, Homo sapiens
cgggagttcaagaagaacactccagaggctggcctgccactcctcctgct

SEQ ID NO: 728102 - DNA, 100 bp, Homo sapiens
gaaggacaggagttggctgctgaagcctcaagatttcctttaggctcttaggattacttgtatggacaaactaccacatatctgacatataatgacttca

SEQ ID NO: 728103 - DNA, 100 bp, Homo sapiens
acactggagtgctcacagtctcctgggagaggagcaccaccccaggccgagacgcatccagagctttcgtgaccggggactgttctgaagcaggcctcgt

SEQ ID NO: 728104 - DNA, 82 bp, Homo sapiens
ttcctgttctccagggaggaggcggacacgctcaggttatgaagacagtatggagtttccagaccatagtagacatttgcta

SEQ ID NO: 728105 - DNA, 49 bp, Homo sapiens
cagatggcagccagtcagtggtggaggccatggatcatctgcagtcatt

SEQ ID NO: 728106 - DNA, 85 bp, Homo sapiens
tcggcttctcgcagccagccaagagctgacatggatgtgtgccttacaaactatggtcactgtaactacgtgtccgggaaacatg

SEQ ID NO: 728107 - DNA, 75 bp, Homo sapiens
tgttcgttttcactgcaggaccaggcacgaaatgagtgtgtccgcttgaaaccaactgacatacagcccgacatc

SEQ ID NO: 728108 - DNA, 101 bp, Homo sapiens
ccgcttctcagaggacgccttcaacaccaccttcatctccaccatcgccagtaaatgacctgcgacataactatttgcaaaacaaatggggaagaccaaga

SEQ ID NO: 728109 - DNA, 50 bp, Homo sapiens
gagaacatctctgttgacattcattgtgccaaaactggacaagccaaggc

SEQ ID NO: 728110 - DNA, 75 bp, Homo sapiens
aaaaacaaggtggaagattcttccaaggaaccagtgcgaagcaaagaatggccgagtggattctgaggaccggag

SEQ ID NO: 728111 - DNA, 142 bp, Homo sapiens
gccgtccagcagatggcggatgccctgcagtacctgcagaaggtctctggagacatcttcagcaggtttgcctacaaggacgagtatgagaagttcaagctctacctcaccatcatcctcatcctcatctccttcacttgcc

SEQ ID NO: 728112 - DNA, 98 bp, Homo sapiens
ccagccctgcctctccctgggctctgatatgtgtcctaaaaatgctagctattatggtaatcgagcagccaccttgatgatgcttggaaggttccggg

SEQ ID NO: 728113 - DNA, 82 bp, Homo sapiens
ggtgtatcaagtaatggtgcaaagcctgaagggacaactgtgaggtgaaagacccaaggcatggcaacttgtatgacctgaa

SEQ ID NO: 728114 - DNA, 100 bp, Homo sapiens
acggaaaaagtcgatctggagcttttcccctccccggttcagcggaccaggagaggagaaattgaaacatgctgctgctaccttttgcagtaaccaacct

SEQ ID NO: 728115 - DNA, 100 bp, Homo sapiens
tcttttgtgcaagatgagcctcaagtgcttctgcattacagataagtgcaagaaggctgcttccagctccaaagcacctaagaatggaggtaaagcgaag

SEQ ID NO: 728116 - DNA, 98 bp, Homo sapiens
aatcctaatgataacagaactagctccaatgcagataaaagcttgatccgtggccgttcacatggtttcaaggcacaatgagactcactggcccttgg

SEQ ID NO: 728117 - DNA, 98 bp, Homo sapiens
ccgggacccggttccccggcccacagtgggggtgtgcaaacccgagagaactgggacagaactgtaccgctctctttttggccagctccaccctcccg

SEQ ID NO: 728118 - DNA, 75 bp, Homo sapiens
tgagaagcaagaaggccctggacacagcaatatctctgggctttcacaggtgcaacagctgcagcccggaaagag

SEQ ID NO: 728119 - DNA, 100 bp, Homo sapiens
cgcgtccgaggctcgcgggcggcgggcccgggaaggaaaatcacctcggcagtgtttgaaggaaggatactgcaactctttgaagtacgcattttttgag

SEQ ID NO: 728120 - DNA, 100 bp, Homo sapiens
ctttgaacagcatagagccaatcacattttgcacaagggcagtcaccatgaaaggatttggtgctatggagaaatttttggtagaatataagagtgcagt

SEQ ID NO: 728121 - DNA, 100 bp, Homo sapiens
ctcccggtgcaccagcctcactctctggtttctgagggtttcacagtcaaagccatgatgaaaaactcagtcgccagtctatccatatggggatggggaa

SEQ ID NO: 728122 - DNA, 88 bp, Homo sapiens
actgcggccacgcctgaaaggcgactctcctgactttgtgttttatgccccacgtctgagaatcaacaagcggatcctgcagctctgc

SEQ ID NO: 728123 - DNA, 83 bp, Homo sapiens
ccttggtcgccgcgtccttggctggcgtctggccactgccccaacccaggcatttcactgggcgcagtgcggacaggcttccg

SEQ ID NO: 728124 - DNA, 100 bp, Homo sapiens
ctggaggaggtggagcagctcctccgggacctcgggatcctgccctccagccccaacaaagtttgaacaaaaaagtggtgcagtttttgatgaaattgta

SEQ ID NO: 728125 - DNA, 75 bp, Homo sapiens
cagcgcccagccccctgctatgacccttgcgattgacttaagcacccttccatggtcatgaggtttctggttgcc

SEQ ID NO: 728126 - DNA, 50 bp, Homo sapiens
aaaatggcggacctggcgaacgaaggtttggctcagaagaaggcggcccc

SEQ ID NO: 728127 - DNA, 75 bp, Homo sapiens
gagacatccacctaaaccagattgatgctgaggacccagagaaggaagaggcccagcagaagggactcgctgagc

SEQ ID NO: 728128 - DNA, 74 bp, Homo sapiens
ctgaaggcaactatggatgctgggaaactggatgatgagtttacacacctgtacacactgattgtgcggccaga

SEQ ID NO: 728129 - DNA, 95 bp, Homo sapiens
caaaacagcagatttcccaagagcagcggaaaatgatccagtcacaggcgtctggatgctaaccacatcagctatgtgcccccaagctgtttcag

SEQ ID NO: 728130 - DNA, 106 bp, Homo sapiens
gttgtgcctcttcatattggcgatcctgttgttggaatgcagtagccctctgggcctgggatattgtggttgataactgtgccatctgcaggaaccacattatgga

SEQ ID NO: 728131 - DNA, 83 bp, Homo sapiens
cagatggcagccagtcagtggtggaggaaaaaatggtaatccagtggcagagaatttccgaatggaagaagtctatttaccag

SEQ ID NO: 728132 - DNA, 101 bp, Homo sapiens
cttgtttcgccccacggccaagcccgccgcgggccggcgtgcgctggtcactgaggcccaggtcgccgccgcggcgcgtagaggcggggtttcaccgtgtt

SEQ ID NO: 728133 - DNA, 80 bp, Homo sapiens
gtcttccatgacaccaagttggatgccatgctggaggagttcaagaagggaactgtggctgcaccatctgtcttcatctt

SEQ ID NO: 728134 - DNA, 100 bp, Homo sapiens
ggaagatcctggaggtggatctgaagaacggcttacggttattccagaagtttgacacattccggattctggtttgtggcggggatggaagtgttggctg

SEQ ID NO: 728135 - DNA, 125 bp, Homo sapiens
gcttggtgtcgtttttccttgagctgaacgtcttgcaacagtggccgcacgcatagggaaatcctcattgacgattcaatttgttgaaggccaatttgtggactcctacgatccaaccatagaaa

SEQ ID NO: 728136 - DNA, 90 bp, Homo sapiens
gccagaatggcatccagagagaggctctttgaactttggatgctttattgtacaaagggtgaagttgaacaaattgctatgatgaaacca

SEQ ID NO: 728137 - DNA, 100 bp, Homo sapiens
ttccagttcatgctgcccacatctcatccaaacaggacacctcctacctgttcatcactggccctgatgttgtgaagtctgtcaccaatgaggatgttac

SEQ ID NO: 728138 - DNA, 83 bp, Homo sapiens
ctattgggattttcagccccaagagacggggttttgctatgttgccccggctggtcttgaactcctgagctcaagagatccac

SEQ ID NO: 728139 - DNA, 90 bp, Homo sapiens
gcgggaagaagccgtctgactacacgtggagcagcagcgctcccgccaagtgcttcgagtactacgaaaatcgggcccgggacacccaga

SEQ ID NO: 728140 - DNA, 100 bp, Homo sapiens
agtgtgtatcagcagagaccaccgaagactgcatcgccaagatcatggaaattggccttgcctctctgggtgcacctgatgaatacattgaaaagctcgc

SEQ ID NO: 728141 - DNA, 100 bp, Homo sapiens
atagtgaagaaatgaaagaagcctactatcaaactcttcatgatcgcttcatatctctaaatatagaagatggcaagctcatggtgagatacaaactgaa

SEQ ID NO: 728142 - DNA, 85 bp, Homo sapiens
cgtggctattgtgaaggagggttggctgcacaaacgaggattatatctgtccaagatgcgagtctggttttatcgaggagcttcc

SEQ ID NO: 728143 - DNA, 100 bp, Homo sapiens
ttagagaatgcaacatgggcaacctgatttgtgatgcaatggagtctcgctctcagtcaaaatctccaacgggaactcctgctcgtgtaaaatcggagag

SEQ ID NO: 728144 - DNA, 97 bp, Homo sapiens
ggaagaaggaggaagtgatccgaaaatctgggctaagtgctggcaagagcgatgtctactacttcaggacctatatccagactttgcctgacactgc

SEQ ID NO: 728145 - DNA, 100 bp, Homo sapiens
tgagggatcagaagaagataaagctcaaagattactcaaagcaaagaaacttaccagtgatgagcaacccagtgattccatggaaagcagaaagaaggac

SEQ ID NO: 728146 - DNA, 75 bp, Homo sapiens
cttagaggaatttctctcctgccatcgtattacaaagtctctggcatctctatcccctatgaggcaccacgtaag

SEQ ID NO: 728147 - DNA, 101 bp, Homo sapiens
cgcagcttcctcggcgcccccggccgctaccgctcaggtgctgcaggcacagcccgagaaaccgcagcactacacaccaactgccagagttttctctgggt

SEQ ID NO: 728148 - DNA, 100 bp, Homo sapiens
ccatcaccggcagaacacagcagggcggaggaaagtgcagagactctgacctgtttttgttggacacccgtgtagtatgggcctcagaagaaggctggct

SEQ ID NO: 728149 - DNA, 83 bp, Homo sapiens
ccaggagaggagcactttgaggacatggcctccgacgaggacatgaggagagacttcagcatgcaaaccttcatctgttcggc

SEQ ID NO: 728150 - DNA, 95 bp, Homo sapiens
ccgaaaatggcacagaaatggtatcaagaaaccccgatcacaaagatacgaatctcttaaggggggccaattcctgtccccccagcagcatggca

SEQ ID NO: 728151 - DNA, 74 bp, Homo sapiens
tggttcctgctgccctcaaggtcgtgcgtctgaagcctacaagaaagagctcaggccccggggcctccagcggc

SEQ ID NO: 728152 - DNA, 74 bp, Homo sapiens
gaaatgagctggagattcccgagcaccatgtggcggagcacactgctgagagctacatgctgcagtggcagcgt

SEQ ID NO: 728153 - DNA, 90 bp, Homo sapiens
cttgaagccctacgccgtggacttccagcgcaggaggaggaagccaagaatctggtgagcgaagccatcgcagctggcatcttcaacgac

SEQ ID NO: 728154 - DNA, 82 bp, Homo sapiens
cggcctatgcccccactaacggggacttcacctttgtctcctcagcagacgcggaagaattcagaaggagctggcggacatc

SEQ ID NO: 728155 - DNA, 74 bp, Homo sapiens
ccgtgaccgagagcgtgaccgagagcgcgaatatcgtcatcgttagaagcattggattcaaaggctaacaattt

SEQ ID NO: 728156 - DNA, 100 bp, Homo sapiens
gggagttgtcatgttgggaacatgctagacctcagtatccttgagtccttcagtgaatctacagacctattttctcaggagctcagcctggccttacttc

SEQ ID NO: 728157 - DNA, 99 bp, Homo sapiens
gcttctattatatcgatccacccaaaaattcaggtcttgtccaataagcatgtggctcctgatcatcttttgcaaatctgccagcgcatcggtcctatg

SEQ ID NO: 728158 - DNA, 75 bp, Homo sapiens
gtacaaacttgcagcccaagagaacaggcagctgcattcagcctcagcggaggacacgcctgtggtgcagttggc

SEQ ID NO: 728159 - DNA, 74 bp, Homo sapiens
caatttgcttgaagaacttaaaactcaaagttgtatggattgtatagaggtgaaaattagttctgctgtgctta

SEQ ID NO: 728160 - DNA, 50 bp, Homo sapiens
gccagaaacatgctgagcctttgacagcatgctacaagtgaaaactgatg

SEQ ID NO: 728161 - DNA, 75 bp, Homo sapiens
ccacacgttcctcacagaggaggttgcccgggagtaccaaaggttggaaagaaccatgactgtattcaggaaggc

SEQ ID NO: 728162 - DNA, 100 bp, Homo sapiens
gccaaccatgctcaacttcggtgcctctctccagcagactgcggtcatcatcagatttgaaatatttaaagtggatacaaaactatttcagcaatgcaga

SEQ ID NO: 728163 - DNA, 100 bp, Homo sapiens
ctcctcagcctccagttgcttctctgtgcatgcacatcagtcactgatctcacctactggatggatgcaaccttgaaagaactgacaagcttagtaaaag

SEQ ID NO: 728164 - DNA, 75 bp, Homo sapiens
ctttcttgacattaccttttcaccagactatccgtttaaaccccctaagaaaaggcgacggcggattgacagaag

SEQ ID NO: 728165 - DNA, 100 bp, Homo sapiens
agtgaagctgcataccttcgcggtgtcatttacaggaaaacaaggtgaaatgagagaaatgcaacagctttcaggtggacagaaatccttggtagccctt

SEQ ID NO: 728166 - DNA, 98 bp, Homo sapiens
agaaaggaatgaacatgtatttaaccaagttccaacaaaagaatgctgccgcaggaggtcccaaccacagcttcctcctatgtggacagtgctctgaa

SEQ ID NO: 728167 - DNA, 100 bp, Homo sapiens
ctcccagatgcatccgtgtcactggaggaaagcaggaatgttcagaggcaaatgaagattctgcagaataagcaagctcagattgtcaaagagaaagttc

SEQ ID NO: 728168 - DNA, 101 bp, Homo sapiens
atttggaattgtgggtaaattattatgtacgatggaatccacggatgagacctcagagccatgggaccacaccaccaccaccacaaccaataggccaggaa

SEQ ID NO: 728169 - DNA, 90 bp, Homo sapiens
tcagcctcccgagcagctgggactacagggtgactgacgaagtcttcaacttcctgctggtgtggtattactgcaccctgaccattcggg

SEQ ID NO: 728170 - DNA, 73 bp, Homo sapiens
actcatcttcatggaaacgtctgctaagactgcttccaatgtagaagagccggttgctgaaccaatccccatc

SEQ ID NO: 728171 - DNA, 96 bp, Homo sapiens
agttgaagcagttttctcagctgcctgctaacatagctgtttgcagttctaagaaggaagaatcctgctcaaaaatgaggtgaattaatacttggg

SEQ ID NO: 728172 - DNA, 100 bp, Homo sapiens
aggacccagaggaaacccagccgcttctggggcctcctggcggcaggttcttacatccccgcgtccccaggtttagcctgagcagggttgtggaaggccg

SEQ ID NO: 728173 - DNA, 83 bp, Homo sapiens
cttcaatgtgtcctacaccaggcagcccccaaatcccggcccaggtgtatgtggaatttgatgatcttgaatgggataaacga

SEQ ID NO: 728174 - DNA, 83 bp, Homo sapiens
agaaactagagcaaataaccgttttgaaattttgttgacctcctgtactggagagacattaagaagactggagtggtgtttgg

SEQ ID NO: 728175 - DNA, 100 bp, Homo sapiens
ctcattatagcctcaaactcccaggctcaagcaatcctaccatgtcagccttcccagtagctggaactacagcgagtgcagtggtgagatcctgaacaac

SEQ ID NO: 728176 - DNA, 85 bp, Homo sapiens
gcagtttgctgcatctattaacccattacctaggtattaagcccggactatttaagaaacaactgaggcatcagaccaactttcc

SEQ ID NO: 728177 - DNA, 82 bp, Homo sapiens
ggaaggtgcctgcctgcctgcctgccggcccttgaacttaaatcgtctgaagttgtatcttatgccttcattcatccggcat

SEQ ID NO: 728178 - DNA, 90 bp, Homo sapiens
cgtgaggcgtataatctctttgcagtgaacggcattctcttcaatcatgagagtcccagaagaggtcatggcaaaaccccaaaagatgcc

SEQ ID NO: 728179 - DNA, 82 bp, Homo sapiens
cacggagcactgcaggcgccgggtgtctgagatgctgccaccgcagaagaagccctgggagtccatggctaaggggctggtg

SEQ ID NO: 728180 - DNA, 50 bp, Homo sapiens
aatggatttctcctctaatgacaggtccgctctgcagtgtgtgcgtgaac

SEQ ID NO: 728181 - DNA, 75 bp, Homo sapiens
gcctggaagaactcgtcatgctctttgtagcgtggtgcttctgttgctcacagatgctagctaaacagttggaag

SEQ ID NO: 728182 - DNA, 82 bp, Homo sapiens
tctggagctggaaaaacccgggtatctttcagatgaaggcattgaagcttgcacaagctctccagacaaagtcaatgtaaat

SEQ ID NO: 728183 - DNA, 100 bp, Homo sapiens
ggagcgcagtggcggcgcaaccagccttctagggcggcggaggtcgtccttggtggaaggaaccatgaactggcatctccccctcttcctcttggcctct

SEQ ID NO: 728184 - DNA, 88 bp, Homo sapiens
gctcaaagaaagatgattattctcacagaaagttctccgctcccagacatgggtccctcggcttcctgcctcggaagcgcagcagcag

SEQ ID NO: 728185 - DNA, 90 bp, Homo sapiens
cgctgcgtcgaatgctccacttgccgagcctgatgatggggacgtgccgcccctttgcgggatgaaaggtgagaccccggtgaacagcac

SEQ ID NO: 728186 - DNA, 100 bp, Homo sapiens
cagaagagcagctgctacttcatcctgcagcggcgccgcgggcacggcgaggggggcggccgcctcaccgaagctccaccatgaggcgaggtggatggag

SEQ ID NO: 728187 - DNA, 75 bp, Homo sapiens
gagagtagatctggagaaaccaacagctgtgttgaagaaataatccgggaacggaaaacagttcttccttcaaag

SEQ ID NO: 728188 - DNA, 75 bp, Homo sapiens
gaaagctcgttctgccgatgatcaaggaacacattatgcaaatgcttcaaaatcatatcaatgatgtcaaacggc

SEQ ID NO: 728189 - DNA, 100 bp, Homo sapiens
cctccagaggaggaaaatgtcttccttgccccacagttggcacgggctgtgaaacctcatcaggtaaagcttgcatttccttcaacaagaaggattacag

SEQ ID NO: 728190 - DNA, 82 bp, Homo sapiens
gctcagaaagtgaagaagatgctgctttagctgctcacaggaggcaaagagtccgaaggtggagctgcacagccactcagag

SEQ ID NO: 728191 - DNA, 75 bp, Homo sapiens
caagcttaggaccacccaccatgcctatccagaaggcagacggtaacaagtactccttgctggattgaacttcat

SEQ ID NO: 728192 - DNA, 98 bp, Homo sapiens
aaagaaacaaggggccagggcagagggcacctgagcggctggagagcctgttggagaaacacaaagagggagagcttatggatggagaccaaacatcc

SEQ ID NO: 728193 - DNA, 82 bp, Homo sapiens
ctcatcgccctggccgacaagcacgcaaggactttgaacatgtcggggatcgccctcagcagactcgcccaggagaggaaag

SEQ ID NO: 728194 - DNA, 75 bp, Homo sapiens
cagcaaaagtcagaaaagtggcaacagcaccacctgctccagcatataaaggcaccagagaaggaggaattcctg

SEQ ID NO: 728195 - DNA, 100 bp, Homo sapiens
gccaagttcccactctgcatggtgttccacatcattgacttactgctttgtgagatccctgggtatcagtatgtgtcacctgaaggcaattgtatagaac

SEQ ID NO: 728196 - DNA, 88 bp, Homo sapiens
attgcacccttgcacttcctggaggtgaaactgggcaagaggccccagcccgtgaaaagtgaggcgatcagtgggtgaccgcggctgc

SEQ ID NO: 728197 - DNA, 58 bp, Homo sapiens
gttgaattctcaagaaacgtgctgggatggcaagttgtcgagatgtccacagaaggag

SEQ ID NO: 728198 - DNA, 75 bp, Homo sapiens
acagaagacagccatgcactgagctggggacatgcaacaataacagggatttgtcttggctgttactatgacacg

SEQ ID NO: 728199 - DNA, 100 bp, Homo sapiens
agggagataactttcgtatcacaaaagcagatgctgctgaattctggagaaagttttttggagacaagagctgagagaagataatatcattttaattgaa

SEQ ID NO: 728200 - DNA, 51 bp, Homo sapiens
ctcgtcggacttcatcagtcaggtcagcaatctgaagatggtcttacggag

SEQ ID NO: 728201 - DNA, 75 bp, Homo sapiens
atctctcaatgttgacggacagcctatttttgccaatatcacactgccagatatgtcttgtcgttcaagacttgc

SEQ ID NO: 728202 - DNA, 74 bp, Homo sapiens
gcgatgaggggagagcagaaagcaggtgcgggagtatgagttaagaaaaaacaacttctcagatactggaaact

SEQ ID NO: 728203 - DNA, 43 bp, Homo sapiens
atcagaaacctggactgtatagcagtcttatagctggatcagc

SEQ ID NO: 728204 - DNA, 89 bp, Homo sapiens
tggagaagctggcagaacgcttcctggccaagacatgcagcaccaaggaccagcaattcaagggcctttacaacaactaaacggacagg

SEQ ID NO: 728205 - DNA, 100 bp, Homo sapiens
tcaggctgccagatgtccgtcactccccagggcggcatcgtcgtctatgggggctactcgaaacaggctcatcagattcaagagatgtttccccaggttc

SEQ ID NO: 728206 - DNA, 98 bp, Homo sapiens
tgcagcagcccttggaattgcttttgtcgaggtggtggaagctacaatgattttgggaattacaacaatcagtcttcaaattttggacccatgaaggg

SEQ ID NO: 728207 - DNA, 99 bp, Homo sapiens
ccgagtgcagccactcggccctgcgccgcgacaagtacgtggccgagttcctcgagtggggtctgaatgctggtgctttttatgccttgtccactcttc

SEQ ID NO: 728208 - DNA, 78 bp, Homo sapiens
cgctcgccctctgcctgctggctgcacccgcctccgcgctcgtcaggtccagcaccatgtgctaggtcactcccagcg

SEQ ID NO: 728209 - DNA, 100 bp, Homo sapiens
aacctgaacactgaccagctctcagttgcacttctcaaaggatgaagctctgcccacggtcctggtcggcgtgttcatcgaacagcccacgccgtttgtg

SEQ ID NO: 728210 - DNA, 75 bp, Homo sapiens
gaggaagaaaaatctgaggttatcaatgacgaggtttgtccagaggggttgcgtttatccggtttgacaaacggt

SEQ ID NO: 728211 - DNA, 101 bp, Homo sapiens
gtagcatttagggcaaggtatcatctggtggataaagatcatgacagaaagtatgctgaggccttggattaccaccgtcaggcactggtgttgattcctca

SEQ ID NO: 728212 - DNA, 75 bp, Homo sapiens
aagactgagcaccatcactatgtgatcaatgtccgagttaccaccatggatgcagagctggagtttgcaatccag

SEQ ID NO: 728213 - DNA, 101 bp, Homo sapiens
attgggaagctggtccttgtgaacccttcgttccttctgccccgcttgcggaagcagcttgctgcaggaatgggtaccacagaccatgtcatcgtcctggc

SEQ ID NO: 728214 - DNA, 50 bp, Homo sapiens
cacaaaggagagctccgtggagagaaggctgccagagctgctgaggggga

SEQ ID NO: 728215 - DNA, 82 bp, Homo sapiens
acacttttcaccaaggaactggtgctgcagcgagagggcctcatctttgtggtggacagtaatgaccgggagcgggtccaag

SEQ ID NO: 728216 - DNA, 51 bp, Homo sapiens
cgggctgaagcgactgagtccgcgatggagaccctgtgtcaaggagagtgg

SEQ ID NO: 728217 - DNA, 51 bp, Homo sapiens
tcgttctggtaacatccctggaagaaacagagctgtcagtcagtgctgaat

SEQ ID NO: 728218 - DNA, 98 bp, Homo sapiens
tggctctgtggagagagtaaacaagttgatctgtgtgaaagctttgaaaaccaggcctagttccccgagagcgttcagacagtgggggctcaagctca

SEQ ID NO: 728219 - DNA, 74 bp, Homo sapiens
aagtccccagggaatgccacagcatcctccagcacctcagggcccagagaagcgaggaactccgcagctcgtcg

SEQ ID NO: 728220 - DNA, 74 bp, Homo sapiens
tttggttacctatgtacctgttaccactttcaaaaatctgcacattcattgcaaccttcttctggtgatgaaat

SEQ ID NO: 728221 - DNA, 98 bp, Homo sapiens
tctttacaagcttgtaaaatctcaggatgaccatgaaagctgtggttctaattctaccaaccgtagtactgctgagagcacaaaatcatcaatcaaac

SEQ ID NO: 728222 - DNA, 75 bp, Homo sapiens
gtgccaagggattcagcctggcggacatcccctaccaggagatcgcagacaaggcgcctctgtcgaagagccttc

SEQ ID NO: 728223 - DNA, 101 bp, Homo sapiens
gaaagtgagattaatgaaagaagtcatggaacactatgctgatcaagatgatctggttgtcatgtttactgaatgaactgtcaagtaatccacctctggct

SEQ ID NO: 728224 - DNA, 90 bp, Homo sapiens
ccgagtcatggctgagacctacgagctaaaaaagtccctgtacgccatcttctcccagtttggccagatcctggatatcctggtatcacg

SEQ ID NO: 728225 - DNA, 100 bp, Homo sapiens
tggacttcctcgcagaggtggacaagctggtgcagctgattgagtgccccatcttcacatggaccaagccggaacctcctgctcaacgggaagtcctacc

SEQ ID NO: 728226 - DNA, 96 bp, Homo sapiens
ggaaagcagacccatggctcagatgccctccaaatccttggttatggaatatttggctcatcccagtacactcggcttggctgttggagttgcttg

SEQ ID NO: 728227 - DNA, 75 bp, Homo sapiens
gcccagaagcttctcagagatggtgaactagtcatgatgctatggactcctactacgactacatatgggatgtta

SEQ ID NO: 728228 - DNA, 75 bp, Homo sapiens
actggactggaaccatcaaacaaggctgcagaggttgatgataattagaagcatgctttccactgaacttcccga

SEQ ID NO: 728229 - DNA, 99 bp, Homo sapiens
cagaggatcctggacaatacctcggagcctcagcccggggaggccaggctggcagccctcaccgcaggagacaggttgattcaggaagaaaaagaaaat

SEQ ID NO: 728230 - DNA, 100 bp, Homo sapiens
agaacaaagctgaggtccagatgaaagagaagtttctggtcactccccaggattatgcgcggacactcaatcacttgtcggaagtccctcaacccgtata

SEQ ID NO: 728231 - DNA, 48 bp, Homo sapiens
gtgccggccccgacaggacggtgaggttggtcaaagaaaaagtgatgt

SEQ ID NO: 728232 - DNA, 100 bp, Homo sapiens
ttccagcatgcaggggctgctcagtgccggtggtggtgtgcacattgagccccggtatagacagttcccccagctgaccagatcccaggtgttccagagc

SEQ ID NO: 728233 - DNA, 98 bp, Homo sapiens
ggaaacagctatatgggaacaacatacagtgacgcttcacaggacttcctttaataagtgttgcgctggttcaaggttgggcattgggtggaggagca

SEQ ID NO: 728234 - DNA, 98 bp, Homo sapiens
tcgagcagcgacaacccgtcctctcccgagtttttcatgaccaagaatcgccttcagccctgtctggtgcatccttggcagaaagtgaggaggaaaac

SEQ ID NO: 728235 - DNA, 74 bp, Homo sapiens
cccagctccagtgggcgggtggcagtttgctaatccagactttacacaacctatctcagaagttgtagatgaag

SEQ ID NO: 728236 - DNA, 121 bp, Homo sapiens
cgcattaagagggcactggacctgaacttgaagcatcagatcttgcctaaagagcagtggaccaaatatgaagaggatggagatgaagatgaggaagctgagtcagctacgggcaagcggg

SEQ ID NO: 728237 - DNA, 100 bp, Homo sapiens
accaacatgaagctgctcgcagcaactgtgctactcctcaccatctgcagccttgaaggcctaagtcaccccttcagcatcgacgtctttgaggattaca

SEQ ID NO: 728238 - DNA, 75 bp, Homo sapiens
gctactgggctgtgagctgaacggaaggaaaatcacctcggcagtgtttgaaggaaggatactgcaactctttga

SEQ ID NO: 728239 - DNA, 75 bp, Homo sapiens
gggctgcctgctggagctggccttcaaggtggctgcaggagagctcaagaggcggggtttcaccatgttgcccag

SEQ ID NO: 728240 - DNA, 100 bp, Homo sapiens
ttttactccattcaagagcagcattcataaatttccagatggacacgcccccactgatattgtttttaatgcagcgtgggaggggaggatatgacacgcg

SEQ ID NO: 728241 - DNA, 51 bp, Homo sapiens
cctgtcaccaacaaagatttcagggagctggtaagtcgcctacaggagcga

SEQ ID NO: 728242 - DNA, 75 bp, Homo sapiens
ggatagacggggacaatgaggaggagacggagcacgccaaagggattttttatcaagcagaaatgcatcgaacaa

SEQ ID NO: 728243 - DNA, 98 bp, Homo sapiens
gcagcaccgacgaacccccaatgctgaccaaggaggagcctgttccagaactgctggaagctgagccaagacaatgcaaactccagtgaacattcccg

SEQ ID NO: 728244 - DNA, 134 bp, Homo sapiens
acgagatccgtgcacgagactaggtttgaggcggccgtgaaggtgatccagagtttgccgaagaatgttcccagaaatgaatgctatgatcatgcgacggttcagtttgcctggagatgtagacagagctcgac

SEQ ID NO: 728245 - DNA, 82 bp, Homo sapiens
aaagatccaaaacaagtggctgcggccgtcgcccaggagtcatcggacgccagaatctggttgaagaagcctcagcggaggc

SEQ ID NO: 728246 - DNA, 90 bp, Homo sapiens
tgcctccttcctctcctctctcttcttgcttagcttcttgccttctggtacgctctgttaggattccacagattggagacaaatttgcta

SEQ ID NO: 728247 - DNA, 75 bp, Homo sapiens
cgtgagtgtggtctacgagctgtttctcatctttatactcttccagattatttactggcaagatgagcaggatta

SEQ ID NO: 728248 - DNA, 80 bp, Homo sapiens
ccgaaggagctccaggaagagcaaagccgagctgcagagatgcagaggatgctatttatggaagaaatggttatgattat

SEQ ID NO: 728249 - DNA, 83 bp, Homo sapiens
tcaccggggagtctgatacacagatcatggaagggaagtggttgctgtgtatgttactggtgcttggaactgctattgttgag

SEQ ID NO: 728250 - DNA, 83 bp, Homo sapiens
cagagatccgggccgtgcgggaagagtcaccctccaacttggccaccctgtgctacaagttttggcaagcgttctgcaggaag

SEQ ID NO: 728251 - DNA, 51 bp, Homo sapiens
accttccaccaatattcctgaaaatggtgctggagaatctggtaaaagcac

SEQ ID NO: 728252 - DNA, 50 bp, Homo sapiens
ggtgcggataagggacccgacactgatatagggccagatttgagtgtgtg

SEQ ID NO: 728253 - DNA, 75 bp, Homo sapiens
aaagcagcatgttggccaggatatattgttgagtggtgattttatgcaatggcttcaagccacagttcttcacca

SEQ ID NO: 728254 - DNA, 75 bp, Homo sapiens
tttgagccctatgagcagtggaacctaggcaccacccagctatgcagaagtggtaacagaggaacaaaggcggaa

SEQ ID NO: 728255 - DNA, 50 bp, Homo sapiens
atgggcttcggaggcctatagcccgcagatgccttcgtgaacagccagga

SEQ ID NO: 728256 - DNA, 75 bp, Homo sapiens
ggaccggctgcagagacaggcgttcgaggagatcatcctgcagtgaggcaaaaccttcaactgaggacttggggg

SEQ ID NO: 728257 - DNA, 98 bp, Homo sapiens
aggctgatggcggaggcttcgagtgacccgggtgccgaggagcgggaagagttgctgggatggagaaggaggagacaacccgggagctgctgctgccc

SEQ ID NO: 728258 - DNA, 51 bp, Homo sapiens
agacatgagatggtgaatgaacccccagtttgctgaggctaaacactatca

SEQ ID NO: 728259 - DNA, 98 bp, Homo sapiens
ttcaggtcctgggtgctgggaggagacagctgcctgcagagtggtgtgatgaatgcagactctgctaccattttggctgtttggatcctcctttgaaa

SEQ ID NO: 728260 - DNA, 82 bp, Homo sapiens
agcaatccttggctcactgaggaggtttggatttttcaagccacattcaattgataggatgaaaaaatttaagagaaggcta

SEQ ID NO: 728261 - DNA, 90 bp, Homo sapiens
gtttgtttacagctgttgtcctggtatctgcagtgctggacccaaaggagacaacatttatgaatggaggtcaactatattgggaccccc

SEQ ID NO: 728262 - DNA, 73 bp, Homo sapiens
ccaaatgctgcagcatcaagcccgaccgagcccaccactgcaggattggcctaatgaagaagttcaacctgga

SEQ ID NO: 728263 - DNA, 75 bp, Homo sapiens
gcgaccgagggactgggagtcgttagtgagaaaacccatatagacagctgccttgtaactgtcatggaagcatgc

SEQ ID NO: 728264 - DNA, 74 bp, Homo sapiens
tttttcggatcatgtctggtggctccgcggattataacagatggttggaatccattttcgtacccatacaaaaa

SEQ ID NO: 728265 - DNA, 98 bp, Homo sapiens
cgcagtcgccgtgaagatggcgtctaccagccggtccagagcctggtgcactgtgtgaactgtcacctgtcagtgcctcccatcctgtccaggccttg

SEQ ID NO: 728266 - DNA, 95 bp, Homo sapiens
ctgaacgtctaccatgcttttaaacaaatgttctaagaacggaagcatctgggctggatggaatttagcatcaagcagagtcccctttctgttca

SEQ ID NO: 728267 - DNA, 80 bp, Homo sapiens
gaccaggagctcttcagcctcaacgagggcgtccggctcttgattgcggggactaactcctccgaccttcagcagatcct

SEQ ID NO: 728268 - DNA, 88 bp, Homo sapiens
ggaggtgaaggcggccggggccgggacgccatgtccatggaggaccccttctttgtggtgaaagggtatgtgacgcattcccagactc

SEQ ID NO: 728269 - DNA, 83 bp, Homo sapiens
tgctcaccatgtggtttggggagtctgaggccaatgtcagagaaatctttgacaagattcttctgctgatcgacattgagcag

SEQ ID NO: 728270 - DNA, 101 bp, Homo sapiens
cggcagtcactgccccccattccagctcctgggaaatgacttaatcgtctttttggcagaccagaatgcaccctattttaaacccaaagtaaaggtatctt

SEQ ID NO: 728271 - DNA, 98 bp, Homo sapiens
gaaggattttgcctggctggaatcattctcaccttgtatgctttacattcttgtagacactgtttgggctctgtcatacttgacagatggaggtaatg

SEQ ID NO: 728272 - DNA, 75 bp, Homo sapiens
tggagaaccaaggtctccgctgggtccctaaggataagaacttgccaataagatatgcaaatgatctccttacct

SEQ ID NO: 728273 - DNA, 88 bp, Homo sapiens
gcgcctgatgggtcgaggcggacgcgcggctgcgtcagctagcttttgcacagcatcaggctgaagtcgccaagatggagccattaaa

SEQ ID NO: 728274 - DNA, 74 bp, Homo sapiens
atttctcgattaacagaagaactttcagcccttcaaatgggtggcaatcaaggtttgacagtagtaattcaagg

SEQ ID NO: 728275 - DNA, 50 bp, Homo sapiens
cggaaaaggacgcaaagttctccggcgagttgatattcactgatggactc

SEQ ID NO: 728276 - DNA, 71 bp, Homo sapiens
gatgcccctgccggagatccctcagccctggctggatctgcatctccaatggatactgaggggtttggtga

SEQ ID NO: 728277 - DNA, 100 bp, Homo sapiens
gatctcggataccatcatctctggcaccttccaccagtggagagagggcaccaccaaaagtgaggtcttctacccagagtgtgaacatggctacgcctct

SEQ ID NO: 728278 - DNA, 98 bp, Homo sapiens
ggaacactgccggggcccaaccacaagacgactcaataggaggaagtgagagtctgagaaaactgtgcgtcttcaagaaaattgagaggcattccatt

SEQ ID NO: 728279 - DNA, 75 bp, Homo sapiens
tgggccatgagctcttcaaattggcccagatctttttcaacggcttccattctaaagcaaattactctgcctgga

SEQ ID NO: 728280 - DNA, 90 bp, Homo sapiens
gaatttaatggcttctgcctctgtggataacacagccatcatatgggatgtcagcaaagattcagtgctcaagagtgaagaaaattctac

SEQ ID NO: 728281 - DNA, 75 bp, Homo sapiens
caattgcaggatgcacagattctggtacatgatgttgattgatggcacaaatgaagtttttatgattgatagaga

SEQ ID NO: 728282 - DNA, 120 bp, Homo sapiens
ggtgtgattagcttcgcagtctggaaagctttaggagttcacagtggaactgggaacagccaggtgccccaaagcaaatacgcggagctgctggccatcattgaagagctggggaaggag

SEQ ID NO: 728283 - DNA, 100 bp, Homo sapiens
catgccgctctctccaccccatcttgggacggccagctctaagaattcctgctacgacactgaattcaaccaggagaaagaatcttcaagagggagacat

SEQ ID NO: 728284 - DNA, 97 bp, Homo sapiens
cgcagtcggcaaggagagacgtcgctgaggggcttgcctgaagcgaggggtgctggagaatctggtaaaagcaccattgtgaagcagatgaggatcc

SEQ ID NO: 728285 - DNA, 85 bp, Homo sapiens
gggacctgttccagtttaacaagatttcagaagaaagtggtagcttcctttccaagaacagttctgagcacaggaatggataacc

SEQ ID NO: 728286 - DNA, 100 bp, Homo sapiens
ttttaatggtactagtcaagacaagaaaatcaacaggctttcagccttgaggcaacattggatattattgaggaggaataaacatggtgtgtctcgaaag

SEQ ID NO: 728287 - DNA, 100 bp, Homo sapiens
tggtcaccaggaaggggacgggacggacggtgatggtggtcgccgcggcggcgtgtgcgcccctcagggaaatcctcattgacgattcaatttgttgaag

SEQ ID NO: 728288 - DNA, 98 bp, Homo sapiens
gcagcgtgagcagccggaggatcgcggagtcccaatgaaacgggcagccatggccctccacagcccgcaggagtgctacctggagggtgaccagacga

SEQ ID NO: 728289 - DNA, 74 bp, Homo sapiens
agattcgcagtggtcgcttcttctccttggcttccagctggtctttttaccctttgctgatgataaaaggaaga

SEQ ID NO: 728290 - DNA, 124 bp, Homo sapiens
ggactattttcacgttttaatgccgagaggtctctgtgacgattttgtgagaaagatcagtctaaagaaaaggagaagaaagtgaaaaaaacaattccttcctgggctaccctttctgccagcc

SEQ ID NO: 728291 - DNA, 95 bp, Homo sapiens
cccaaagtgccatgtctttaatgacttggatgttgtgggtgatggtatgcagtgtcctccttcacctttgctttttgatccttcactaacccttg

SEQ ID NO: 728292 - DNA, 75 bp, Homo sapiens
agcgcaaggtcgccctcaaggccatgatcaaaacgtgcatggcggcctgctgcagatcttccctgagggccggcc

SEQ ID NO: 728293 - DNA, 124 bp, Homo sapiens
taactcttatttctccgttggcccaaccagtcccagcgctgtcgtgctcctctactcgatggactagaggcttttaccagatttcttaaaactgaattcagtgaagaaaatattgaattttgga

SEQ ID NO: 728294 - DNA, 100 bp, Homo sapiens
gattattgggaaggttcacgaaaagttcacgttgattgatggcatccgcgtggcaacaggctcctacaggactgaaatgcaactgcagaagcaacatgtg

SEQ ID NO: 728295 - DNA, 100 bp, Homo sapiens
caagaacagaacaggccctatggggcatacctatggctttattgacctcgactcccatgcggcgtaacctgatgatggaaggtgcagcgtcaagtgctgg

SEQ ID NO: 728296 - DNA, 82 bp, Homo sapiens
caaagttgaaaatgatgcaagaagttagtgaaaattttgagagtgttgcggagataggaacatgggagagaaacaatctggg

SEQ ID NO: 728297 - DNA, 149 bp, Homo sapiens
aagaggggaagatggacgagaatgaatgggggtaccacggagagggcaataagagcctggtggtggcccacgcgcaggcctttggacaagcacacacaaaccacaagaaggtggctgctgacggagagagccgggaggagagcctgatc

SEQ ID NO: 728298 - DNA, 100 bp, Homo sapiens
tgccaaaggaattggttatccagagccaaaatggaagagggtgcaagtcccctcctggggccccagacgccccctcctttcttgctgcctggagcagggg

SEQ ID NO: 728299 - DNA, 75 bp, Homo sapiens
tccattggcaagctacaataatggggccaaaacaccatctgattcagatcacaagaagaagaaaaagaaaaaaga

SEQ ID NO: 728300 - DNA, 101 bp, Homo sapiens
attgtggattgaggagccaacctcccctgatgacattctggggcacgccaccatttccaaggaagatgagaatgtgcctactgctcctgatcctccaagtc

SEQ ID NO: 728301 - DNA, 49 bp, Homo sapiens
cgcccgtccccctgccccgttcacaattttgcttgcctaaactggactt

SEQ ID NO: 728302 - DNA, 75 bp, Homo sapiens
gggcggagagaactcagcgaggattctgaggtcaattcagtgaagatatgatacccacagtgggcttcaacatga

SEQ ID NO: 728303 - DNA, 98 bp, Homo sapiens
ctgttggtgataaagccaaagatactacttcagcagttttgattcagcagactccagaggtgatcaaggtgctaactgccaaagaaaggaaaactcaa

SEQ ID NO: 728304 - DNA, 127 bp, Homo sapiens
tgagctgaaatggcagacgatctcggagacgagtggtgggagaaccagccgactggagcaggcagcagcccagttgtatcacggactgattcaccgagcccaaccgtactcaactcacatatttcta

SEQ ID NO: 728305 - DNA, 75 bp, Homo sapiens
ctcagaatagcaccattgctgcagcacagtcagcagcctccattcaagagttgattcattagaaaagtcaaatac

SEQ ID NO: 728306 - DNA, 78 bp, Homo sapiens
tagggtcctttatatagaagggagagtagagcaagctataccagagaatcagatagcaagccctccctcagaggccaa

SEQ ID NO: 728307 - DNA, 83 bp, Homo sapiens
gatcaacttgatgtctttttacaaaaagggaacttagcagagagcaaatgctatttgataacagttactccagtatatgctga

SEQ ID NO: 728308 - DNA, 100 bp, Homo sapiens
cagccatgagctccacgcagttcaacaagggcccctcgtacgggctgtcggccgaggtcaagaaccgggcttgggcactgtttaaaggaaagttccgaga

SEQ ID NO: 728309 - DNA, 100 bp, Homo sapiens
cctggattcaggggccttccagaggagcagctgcattggcatggaagaatcctatttcaagctggtttactgctatgctccactgttttggtggaggaat

SEQ ID NO: 728310 - DNA, 106 bp, Homo sapiens
gccccgtggaactccagcctgcgccaccacgtcacgcacacgctcggcgctgcgatccgcgcatataacgatcgtcagtatttaaacagatcacatcatgcgtgag

SEQ ID NO: 728311 - DNA, 107 bp, Homo sapiens
ggccaacttactgcttcctgaactgggcagtgccttctatgacatggccagctctcctgccacagctcctcaccccctgaaaatgttcgcctgctccaagtttgtct

SEQ ID NO: 728312 - DNA, 100 bp, Homo sapiens
gctgaaacgaaagggagccgccagcgcgtttggctgtgacctgacggagtatctggaaagctcgggacaggatgagcgatcgtcttctgatcaaaggagg

SEQ ID NO: 728313 - DNA, 83 bp, Homo sapiens
acaccggctacttctcagctttaccatccctggaggagacctggcagcagatggactttctggccgagaccagccagtggagc

SEQ ID NO: 728314 - DNA, 97 bp, Homo sapiens
cggatcggaggccgtccatcgcccctcgggccgacgccatgaagatcaaagatgccaagaaaccctgaattgaaagatgttggccatcgtgatcaga

SEQ ID NO: 728315 - DNA, 46 bp, Homo sapiens
acaaccgagcccctcctcgcagcgttttaaaatcaaagatgggaaa

SEQ ID NO: 728316 - DNA, 75 bp, Homo sapiens
gacaggaaaaacagctggcatggaagcaagagcctcctgatctagcagccaagactccccctgacctttggccat

SEQ ID NO: 728317 - DNA, 100 bp, Homo sapiens
tagggagctggcacagtccgattaattgtccttgggtcgaggtgtctcgtcggaccctttggggctcagtggaggtggggccatgagagcgctgtacgcc

SEQ ID NO: 728318 - DNA, 75 bp, Homo sapiens
agaatatgtggatgctgtattgggaaaaggacatcaatacttcggaattgaggtgctgctgcaggtcctgattat

SEQ ID NO: 728319 - DNA, 95 bp, Homo sapiens
ctccctgtatgcatggtgtggggttggtgtgattagcttcgcagtctggaaagctttaggagttcacagtacgaaggggaggaccaggctggcga

SEQ ID NO: 728320 - DNA, 80 bp, Homo sapiens
ttcttttgtaaatctctttcgttttaacaaagaccagtactaacacaagccaaacaaaaatttctgctcctgttgcctgg

SEQ ID NO: 728321 - DNA, 50 bp, Homo sapiens
atagatggcttttattacattaagggatcatggcacaagttgcagtttcc

SEQ ID NO: 728322 - DNA, 100 bp, Homo sapiens
gctacttctcgctctgcttcatcccactattattttggcacaacaggaagagcaaacgaggcccctgagagctccacctagttcacaggataaaatccca

SEQ ID NO: 728323 - DNA, 98 bp, Homo sapiens
ctgacccaggggctggagcgaatcccagaccagctcggctacctggtactgagtgaaggtgcagtgctggcgaacacagatatgtagaactcttcttg

SEQ ID NO: 728324 - DNA, 76 bp, Homo sapiens
gtggatgtggtcgagatgaaagagacgagttgtactgctgtcacaggaaatggacgctggattacaagcatggcag

SEQ ID NO: 728325 - DNA, 82 bp, Homo sapiens
ccggccgcccagacgctgcccgcgggcccggccacggcggagccaagggactttgaacatgtcggggatcgccctcagcaga

SEQ ID NO: 728326 - DNA, 78 bp, Homo sapiens
agaggagaaaatcatgtattcccatctagtcgactacttcccagaatatgatggagaaactcccatgtatggaatccc

SEQ ID NO: 728327 - DNA, 100 bp, Homo sapiens
ccagcttcctcaaccagatgttttcccattgttcaaggacaaaggtggcccagaattttccagtgccctgaaaaataatgaccgtcgtgatgtgagtagg

SEQ ID NO: 728328 - DNA, 100 bp, Homo sapiens
gaagaacagtttctctatactctgacagaataatgcatatactgccatgtcagattcctacttacccagttactacagtccctccattggcttctcctat

SEQ ID NO: 728329 - DNA, 75 bp, Homo sapiens
cattctcaactctgcctggacaggctgcagctggaggctattcataaggggacccaagtaacagggaggaaagca

SEQ ID NO: 728330 - DNA, 78 bp, Homo sapiens
ttttaccggcacagagaaagggaccgctgtttgccctgcaattgtaactccaaagggttaaagcacgaattgggagct

SEQ ID NO: 728331 - DNA, 51 bp, Homo sapiens
tgtaaattatgtgaaacctccaaatgtggtggcctatggttcctggtttac

SEQ ID NO: 728332 - DNA, 90 bp, Homo sapiens
ttccttgacctttaggtgcttttatattcatctcaaaaacaaaattctgaactcaggacttggcaagccctcttcaatgccatcatccca

SEQ ID NO: 728333 - DNA, 100 bp, Homo sapiens
tcagatgctcatcaatggaggagagacttatgcctggaggaacttggaaatcaaactcaatgtccctggtagatttgggaaagaagcttttagaagcggc

SEQ ID NO: 728334 - DNA, 83 bp, Homo sapiens
ccactgccaccacggtcgcctgccacaggtcaatatccaacacagccaacctaccctgtgcagcctcctgggaatccagtata

SEQ ID NO: 728335 - DNA, 103 bp, Homo sapiens
aatatctgtcttcggtggactccttcggcagtccacccaccgccgccgcctcccagaggagcaggagcggcttcgcttggagcaggagcgagagcaggaacag

SEQ ID NO: 728336 - DNA, 90 bp, Homo sapiens
cccagcctgccgctccggagagccgcccgccgaggatgcgacgcaccgcagaccagagtgaactccgagcaggaacacttcctcattgtc

SEQ ID NO: 728337 - DNA, 50 bp, Homo sapiens
gttgaatcaaagtatggacacaggcaggagtagggctgattggagccatt

SEQ ID NO: 728338 - DNA, 75 bp, Homo sapiens
accagagaagttgtcaacatagtcaaacatttacaggactgctgtgtaagctatggtggcatgtggtaccttaaa

SEQ ID NO: 728339 - DNA, 100 bp, Homo sapiens
tgatggtgtgtatgatggcctggcgacccattcaggcacttatggccatttcagccagcctccatgaagaagtggactattctgagaaactgaagttcag

SEQ ID NO: 728340 - DNA, 100 bp, Homo sapiens
ccaatatgagaatgccaacatgtggttcaagaaccttgacaagctcatccggctggtaaatgcgcagccaagacaatgcaaactccagtgaacattcccg

SEQ ID NO: 728341 - DNA, 85 bp, Homo sapiens
ttccctctgagggaattgggaggtcggcggccccaaaagccctgagcctgtgcaattatttcgagagtcaaaatgtggatttccg

SEQ ID NO: 728342 - DNA, 75 bp, Homo sapiens
gcctacgggcacatagggcggaatcttaaaatccttgcacgtttgatgactgccaaattcttgcatacagaaatt

SEQ ID NO: 728343 - DNA, 74 bp, Homo sapiens
cagctgccggcggcgcggcgagagagcggctgacagaggggatgcgagccttatgccagcctggaccatcttgg

SEQ ID NO: 728344 - DNA, 115 bp, Homo sapiens
cccagaccctggagcctcagttggaagcagccgatccagcctgcggagcctgtggggcagatcaacaggcggtccttcgggtcggagtggacatcggatggtggcctggaagaga

SEQ ID NO: 728345 - DNA, 100 bp, Homo sapiens
agcaaacagattcagtggcctgcattggtatggcgtgagtcccgagaacattatcctctatggtcagagcattgggactgtccccacggtagacttggcc

SEQ ID NO: 728346 - DNA, 100 bp, Homo sapiens
cagcatcactggattatgttataatgtggaacctggatgaatgtagagagaaagtacttcaaggttgaaaggattgttgacaaaaggaaaaataaaaaag

SEQ ID NO: 728347 - DNA, 75 bp, Homo sapiens
ctggatcctccttgcttaccacacacccccaggttctgaagaaagtctccaaatacattcaagagcagaatgaga

SEQ ID NO: 728348 - DNA, 101 bp, Homo sapiens
agaacttttggaactagtgccggcggctctccaccccccagacagcccacctgaggatattgaccataaggactcatatctcattacaagaagcatcatgg

SEQ ID NO: 728349 - DNA, 50 bp, Homo sapiens
ctactgccggagcttctgccaggcctccggtgtggctgtctctgatggtg

SEQ ID NO: 728350 - DNA, 75 bp, Homo sapiens
cctgcctcagccttccgagtagctgggattacaggtatcacatcggtatcctcgaattcaaagtatcaaagtaca

SEQ ID NO: 728351 - DNA, 100 bp, Homo sapiens
ttttcacgtcacctggagagatgcacaggtgctaagagatgccgtttgcaggcctcatctctgcttgagaatcgggggctccaggcactagaagagccgg

SEQ ID NO: 728352 - DNA, 82 bp, Homo sapiens
tggaaaggatggcccccaaagaagcggggagaggtggtgagagatgacccctgttgaggatttcattggtgtctgccacagg

SEQ ID NO: 728353 - DNA, 96 bp, Homo sapiens
cgcgaacgagcgacggcggaacccgtgggcctgtggactgcagcctcggcggtcagcagggcaagttaaagtcttcagagccctgtatacgtttga

SEQ ID NO: 728354 - DNA, 83 bp, Homo sapiens
gtaaacggggctgctggtgggccgcgtcgaagacatggaccagggctacggaggaagctcttcgtgggcggtcttgactggag

SEQ ID NO: 728355 - DNA, 87 bp, Homo sapiens
attcccccctcaacttcgaagtgtgtgccactgtttataccaggttcaaaccttgtactactcagctgatcacaagctgcttgatgg

SEQ ID NO: 728356 - DNA, 89 bp, Homo sapiens
ctttttctaactatttcaagatgatatttattcaccaaacaaggtggcgctgcaggaggcggctactcccaggtcattcctatggaaga

SEQ ID NO: 728357 - DNA, 75 bp, Homo sapiens
ttcaatttgaaaacaagtggaatagtgctgtcttccttgaatgtactcaagactgatcttctaagttcactggaa

SEQ ID NO: 728358 - DNA, 75 bp, Homo sapiens
aaggtgtcccttggcggcgcgagcaggaaggtgatgcaggttctgaatgctgatgccattgttgtgaagctgaac

SEQ ID NO: 728359 - DNA, 74 bp, Homo sapiens
acggacaaaacctccaccaccggcagcatcctgaatcttaacctggaaaggcctaaagaatgtatttgacgaag

SEQ ID NO: 728360 - DNA, 95 bp, Homo sapiens
tctttgtagcagacactgcaaatgaagctctcgaggctgctaagagactaagtcaaccaaatatgctgcaagtcttccagccctgctgcttgcca

SEQ ID NO: 728361 - DNA, 100 bp, Homo sapiens
gaatctctgagaactactctgacaaatcagatattgaaaatgctgatgaatccagcagcagcatcctaaaacctctcatgacagagagtcgagggattgt

SEQ ID NO: 728362 - DNA, 119 bp, Homo sapiens
ctccagctatcgagccttaccaaagagttaccagcagcccaagtgtacaggacggactcctctctgtaaagaggccagcagctagaatccctgggcctcctggcccccggggagcagag

SEQ ID NO: 728363 - DNA, 119 bp, Homo sapiens
ctgaccgtcttggggacctggccttgttactagagaccctgaatggcagccagatatgtcttgtcgttcaagacttgcaacactaaacgagaaattgacagcccttgaacggagaatag

SEQ ID NO: 728364 - DNA, 103 bp, Homo sapiens
caacagaatttatatagagatgtgatgttggagaactacagaaacctcgtctccctgggccccttcacagatgtagtcactacaaatcttaaattgcgaaatc

SEQ ID NO: 728365 - DNA, 75 bp, Homo sapiens
gggagaacctgcggcggccggagcgcaaaagatacagatattgtggatgaagccatctattacttcaaggccaat

SEQ ID NO: 728366 - DNA, 75 bp, Homo sapiens
ctccacctatgtatcaacttacttgaaaagcaaatagtagtgatagtgaagaactttcagctggtgaaagtataa

SEQ ID NO: 728367 - DNA, 83 bp, Homo sapiens
ctggctctggctgtgcgcgctggcgctgagcctgcagccggccctgccgagcgccgccctgtgctgggctgccgggagctcgt

SEQ ID NO: 728368 - DNA, 75 bp, Homo sapiens
tgatcgaaaccctgaccggatcccataaacactgtcggtgaaaggtgtagcagtcactcggcctacacccacagc

SEQ ID NO: 728369 - DNA, 103 bp, Homo sapiens
gagtgtgtatcagcagagaccaccgaagactgcatcgccaagatcatgggctgttgataatcaggtgtatgtggccacagcctctcctgcccgggatgacaaa

SEQ ID NO: 728370 - DNA, 98 bp, Homo sapiens
agaacctcgatgagatcttgcagcagcacaagctgaagatgattggctcacagtggttgattgatcaaccccattggacgttggttctgtggtacaaa

SEQ ID NO: 728371 - DNA, 100 bp, Homo sapiens
gaaaagtctggcctcggcgccaagatcccagtcacaattatcaccgggtatttaggaatgtctgatcacagatacggggatggtggctctactttccaga

SEQ ID NO: 728372 - DNA, 89 bp, Homo sapiens
cgaatgtgactgactagcagcttcattttgaacatcaaagctaagccagaagatttatcacattttcatcatcagctacaggattagaa

SEQ ID NO: 728373 - DNA, 50 bp, Homo sapiens
ggtcccaacagaggtgaagatccaaggtttatggagccgtacatctttgg

SEQ ID NO: 728374 - DNA, 75 bp, Homo sapiens
caaaggtgaacgtggcagtcctggtggacctggtgctactggtttccctggtgctgctggccgagtcggtcctcc

SEQ ID NO: 728375 - DNA, 50 bp, Homo sapiens
ggcaaagaacttactgattcttgaggagagatgaatggagagtatagagg

SEQ ID NO: 728376 - DNA, 101 bp, Homo sapiens
aagcacgagcagatcctggtcctcgatccgcccacagacctcaaattcaaaggtgttggggatgtcctttgcactgaccctgaactgccagattgacaaaa

SEQ ID NO: 728377 - DNA, 89 bp, Homo sapiens
ttggaaatgatacaattacctgcacgacacatggaaattggactaaattaccagaatgcaggggtgaatgcttgagatgcatgttctgg

SEQ ID NO: 728378 - DNA, 76 bp, Homo sapiens
ctcggacgccagcggacacgcgggcgaggtacaccaggggttggaaaaaccacactaggcaaagaacttgcgtcaa

SEQ ID NO: 728379 - DNA, 90 bp, Homo sapiens
agtagagcccgggaccgccaggccaccaccggccgcctcagccatggacgcgtccctggagaaggatgatgataaaagctttaggagagc

SEQ ID NO: 728380 - DNA, 90 bp, Homo sapiens
tgggtctcttgttgaaatccgaaatttcttgggtgaaaaatatatccgcagggttcggatgagaccagactgaaactgttgaggagccca

SEQ ID NO: 728381 - DNA, 88 bp, Homo sapiens
ccagcgccaggtgcccccggccacacgagagatggctgcccaaagattgtcaatctggggagctctaagacagacctcttctatgaac

SEQ ID NO: 728382 - DNA, 101 bp, Homo sapiens
tggagatgtccgagcccaaggcaattgatcccaagttgtcgacgaccgacagggtggtgaaaggaaatttggtgagcggcctccacctaaacgacttacta

SEQ ID NO: 728383 - DNA, 98 bp, Homo sapiens
taacttttgatgatcatgatacagttgataaaattgttgattgtagaaggcatgaaacaaaaaatgtggagtattgaaaatattgccttcggttctgg

SEQ ID NO: 728384 - DNA, 100 bp, Homo sapiens
cctgtgacctgtggagacacggccagatctgccctccaggaaaagatgccgttccaccatgtgaccgccggcttgttgtacaaggggaattacctcaacc

SEQ ID NO: 728385 - DNA, 101 bp, Homo sapiens
atttgaagttgatgtggaaattgccaaacaatctgtgactattaagaccatgttggaaggtagaaaaattcctcacatgggttaataaaccaatggatgaa

SEQ ID NO: 728386 - DNA, 83 bp, Homo sapiens
gcacatcgcattcacaccagaatcccaaagacgatccagagccccaaaggcttcctggagagctacgaggagatgctgagcta

SEQ ID NO: 728387 - DNA, 97 bp, Homo sapiens
accggagcccaagccgggtgctggcacatccgaggcgttctcccgactctggaccgacgtgatgggtatcctgggcccatttggaggccagcgctga

SEQ ID NO: 728388 - DNA, 96 bp, Homo sapiens
gtgtaccctcttgtggggtgtctccagcagtgaggaagtcgtcaaggccattttgggaggacctgtggacatctctacagcaatgagtgaacgggc

SEQ ID NO: 728389 - DNA, 75 bp, Homo sapiens
gaaaagaagatgtccacgcctgttgaagttttatgtaaggatgaggatatgttcatgaaatttgtaagtgaagat

SEQ ID NO: 728390 - DNA, 90 bp, Homo sapiens
aaagagaggtgcctttatctgatgatgatgaaagttacacagaatgatatggaacctagcaaagctgttccactgaatgcatctaagcaa

SEQ ID NO: 728391 - DNA, 50 bp, Homo sapiens
agggggaagttccacgcactttatcagcatatactttagaagaacagaag

SEQ ID NO: 728392 - DNA, 100 bp, Homo sapiens
tctcatcaagcccacgagtttagacatgcacatgatggtgtccaagccagaacagtgggtaaagccaatggctgtagcaggagccaatcagtacaccttt

SEQ ID NO: 728393 - DNA, 75 bp, Homo sapiens
agaaattccaggatctgggtgctgcttatgaggatggatgcaaccttgaaagaactgacaagcttagtaaaagaa

SEQ ID NO: 728394 - DNA, 75 bp, Homo sapiens
ccaggttcttcgaaaactgaagcagatgttgaacaacaagtttaaggaagaaatctctaaacgttttaaatcaca

SEQ ID NO: 728395 - DNA, 100 bp, Homo sapiens
gccgaagtcagttccttgtggagccggagctgggcgcggattcgccgaggcaccgaggcactcagaggagctggtactcctggttaatcaacagcttcgt

SEQ ID NO: 728396 - DNA, 101 bp, Homo sapiens
tgaccagttgggatggacaaaacccaccaagatccagattgaagctattcctttggccttacaagagataaaagcaacagtgtttgatgactgcaagaaag

SEQ ID NO: 728397 - DNA, 82 bp, Homo sapiens
aagaggaacaaagtcatcaagctagtggacatcacggacatccagaaggtgtcgtgaaaactacccctaaaagccaaaatgg

SEQ ID NO: 728398 - DNA, 49 bp, Homo sapiens
cgcgaatatcgtcatcgttagaagtctcttccagttgcgcctcttctcc

SEQ ID NO: 728399 - DNA, 98 bp, Homo sapiens
tccaggccttccagtacacagacgagcatggggaagcagttgcagacttgcaaaggatgtttcccactccaccatctttggaacagcatcctgcattt

SEQ ID NO: 728400 - DNA, 87 bp, Homo sapiens
gacctagacctggaatcgcccaagtccctctactcgcgagcaaagccttctagacaagctcagtggaatctgaagggcccaccccat

SEQ ID NO: 728401 - DNA, 75 bp, Homo sapiens
tggaaaatgttcatagtccctatgaatctactaggattaatgaaaatcaagttccatcctcagacaagaggtaaa

SEQ ID NO: 728402 - DNA, 98 bp, Homo sapiens
aaggtcgccctcaaggccatgatcaaaacaaccaaggctctggtgctggagctgctggcggccgtgtgcttggtgcggggaggacatgacatcatcct

SEQ ID NO: 728403 - DNA, 98 bp, Homo sapiens
gtaaaagacgtcactaaattggtttgttggagactgaaccgttgcaaggaacagacgaagatgcagtagccagtgctgacttctctagcatgctctct

SEQ ID NO: 728404 - DNA, 74 bp, Homo sapiens
aagaagttatgcttgttggaattggtgacaaaatcagaggcatactttataggggcataaggaaatggtggcag

SEQ ID NO: 728405 - DNA, 74 bp, Homo sapiens
atcactttccaggctaggctcatctcgaggtttactgggaattaagtagtgagtttgacattactgaagacttt

SEQ ID NO: 728406 - DNA, 75 bp, Homo sapiens
cgacgcaagactgtcccggcccggtcttgtgaaaatgccattgtgtgctggaaacctggcaagatggaagatgat

SEQ ID NO: 728407 - DNA, 76 bp, Homo sapiens
aactttctttccttctgggccatgaaatagcacatgcagtacttgggcatgctggtaaagcccacagcttgaagcc

SEQ ID NO: 728408 - DNA, 83 bp, Homo sapiens
gccagagagatgacgatcttagaccggaacatgaacattttgcagtactgcccctcttccgacatgtggacgctctttgaaac

SEQ ID NO: 728409 - DNA, 75 bp, Homo sapiens
ctgaccacccctaaaagcacctggccccgctacagcaaaccaggatggttcgtggagacccaagggccattgtgg

SEQ ID NO: 728410 - DNA, 75 bp, Homo sapiens
ccggcgcagcccggaaatgtccggcaagatcgagaaagcagggcaactccaacaacattgccaccgtggacatct

SEQ ID NO: 728411 - DNA, 100 bp, Homo sapiens
gtatgggagaggagaagacagagacttgacttggaggcctacctgtaccaccagtgcggacttgacccccagaagaagccactaaagcagttacagaaat

SEQ ID NO: 728412 - DNA, 75 bp, Homo sapiens
tgaccaaacgcggtgtgcacatcaaatcatcaggatataagatccttacaataaatgaggatggatcacttggtt

SEQ ID NO: 728413 - DNA, 100 bp, Homo sapiens
gaggatggggccctggatgagggggaagggcctcaaagccagaaggctgagtatgagtttatcagctctggtctctacctagtggtgttattgcacttgt

SEQ ID NO: 728414 - DNA, 80 bp, Homo sapiens
gaggatgccgtacgagatcaagatcctgaaggagctagacgagtgctacgagcgcttcagtcgcgagacagacggggcgc

SEQ ID NO: 728415 - DNA, 75 bp, Homo sapiens
gatgggaggcgaggagaagccgtgatgctccagtgagtgaactgtccctcgagctgcttctgcttcaggttgtct

SEQ ID NO: 728416 - DNA, 100 bp, Homo sapiens
gccgcgcacggacttcggcagaggtactactgagcgagtgtgcttgatccagggaacggttgaagcactgaatgcagttcatggattcattgcagaaaaa

SEQ ID NO: 728417 - DNA, 74 bp, Homo sapiens
gtgccaggtttatacaagatctttgatgaaattttggacatatctgaagagatggattaagaatgctttggatt

SEQ ID NO: 728418 - DNA, 75 bp, Homo sapiens
tgtcattgcatttccacattcccaggaaagcccaggtgctggagaatctggtaaaagcaccattgtgaagcagat

SEQ ID NO: 728419 - DNA, 82 bp, Homo sapiens
cgagattgcctgacccaggcctgctcggccctcacaggcaacgaaggttttgggaacagtaaaatggttcaatgtaaggaac

SEQ ID NO: 728420 - DNA, 99 bp, Homo sapiens
gagagccagagagatgtcggatttcgacagtaacccgtttgccgacccggatctcaacaatcccttcaagttggaatcgaagcctcttaaaatggcaga

SEQ ID NO: 728421 - DNA, 80 bp, Homo sapiens
caagaatcgccgcgggggaccgcccttcgccttcgttgagttcgaggacccgcgggggatatgagactttctactcggaa

SEQ ID NO: 728422 - DNA, 98 bp, Homo sapiens
gtggattcctgaaaacatcaagaagaaagaatgcgtgtattttgtggaaagttccaaactgtctgatgctgggaaactggagcacccatcctaactga

SEQ ID NO: 728423 - DNA, 101 bp, Homo sapiens
gaggaatagtctacaaaggaagacttgtaacctggagaagaggttctggctccttggcagcaatggctgtatttgaagataagtttaggccagacatggag

SEQ ID NO: 728424 - DNA, 100 bp, Homo sapiens
gccgctgaagctgccgccgttgcctccgccgccaagagtgagcgagcggacccgcgatggatctgtgactttggcctggcccgtgttgcagatccagacc

SEQ ID NO: 728425 - DNA, 100 bp, Homo sapiens
ggcgactgtatgatcgtggatgtcccggatgctgcgggaatccctttgcccacgtccagctgaagccgacagtgaccaacgacaggtctgcccccctcct

SEQ ID NO: 728426 - DNA, 90 bp, Homo sapiens
gtcagcccatcaaagaaagagcctggcccctgaacctgtgcagctcctggaatgaggccgcccatgggaggccatatgccaatgatgcct

SEQ ID NO: 728427 - DNA, 75 bp, Homo sapiens
agccgattccagttcctgtatgatgttcagggtcttagaaacattgatcatgggatgatggaaaagtcaaataac

SEQ ID NO: 728428 - DNA, 100 bp, Homo sapiens
cctggtactactgcttgctgtggcatttggacatgctttagagagagtatattcggtgctcttcgaactggtgcttatatggtgtacattttgatgacca

SEQ ID NO: 728429 - DNA, 80 bp, Homo sapiens
cagcatctgcgatgtgaggaaaggcacctccaccagacacgaatgcagagtttgagtccagatcccaaagcccagtacac

SEQ ID NO: 728430 - DNA, 100 bp, Homo sapiens
gggatcaaaactcattcgaaaagctaaagaggcaccattcgtacccgttggtgactattatatggttaaaaagattttggaggaaaacagttcaggtgac

SEQ ID NO: 728431 - DNA, 99 bp, Homo sapiens
gaaagggaacaaaccctgcaggttctaagaagactcttcccggttgatcgtggattatttgaggtactgaacgacacctgggtctccttcccttcctgg

SEQ ID NO: 728432 - DNA, 82 bp, Homo sapiens
ctcgatcttgggacccaccgctgccctcagctccgagtccagggcgagtatggtttgaagtggtgaacatggatttttctcg

SEQ ID NO: 728433 - DNA, 100 bp, Homo sapiens
ttccatgccatcatcagttcctcctcagaattcccccctcaacttcgaagtgtgtgccactgtttataccagactatcaagaaatccaagtggtaatggg

SEQ ID NO: 728434 - DNA, 87 bp, Homo sapiens
ctgctggtaaattcctcaggaaaggctcacagctttctgaaacaaagactcattttgaagatgtttaacaaatcatttggaacaccc

SEQ ID NO: 728435 - DNA, 71 bp, Homo sapiens
accggcacagaccagagctgattgagtatgacaagctgaggaagatctgcgatgagctgggagtgaagcgg

SEQ ID NO: 728436 - DNA, 82 bp, Homo sapiens
cgcagtctccactcggcaaccaccatcggaaataagttggagcaaaacgtcccactcactggaggcacctgaggacgacggg

SEQ ID NO: 728437 - DNA, 93 bp, Homo sapiens
tacctgagacacggcaagctggtgattaacaaagacctcgcggaggaagggactttgaacatgtcggggatcgccctcagcagactcgcccag

SEQ ID NO: 728438 - DNA, 78 bp, Homo sapiens
ggagcctgtgatcgaaagtctgctgaagaggcattgcacagatcaaacaagtagagacggggttttgccatgttggcc

SEQ ID NO: 728439 - DNA, 100 bp, Homo sapiens
cctttagcaacgccaaatggagatgttttgatccgagaccttaattttgaacatatgggtgattttggaagcattcatagacccggaattgttgttgact

SEQ ID NO: 728440 - DNA, 83 bp, Homo sapiens
gccaatcattgacaatattatggaactgtggctgcaccatctgtcttcatcttcccgccatctgatgagcagttgaaatctgg

SEQ ID NO: 728441 - DNA, 89 bp, Homo sapiens
ggtcacccaaccgagtcatctgcgtactttgaactcaagtaaacaaaagggaagattttctcgttgatactggagactgcacaacaatg

SEQ ID NO: 728442 - DNA, 101 bp, Homo sapiens
agatctgagctttcttcttggacacctaatacccagggtcctccaggtgagaagccctaccactgcaactgggacggctgcggctggaagtttgcgcgctc

SEQ ID NO: 728443 - DNA, 82 bp, Homo sapiens
tcaagatggcggacaaaacgccaggcggatctcagaaggccagttcaaagaaaaagatgctatggacgtatggtgcaatggt

SEQ ID NO: 728444 - DNA, 100 bp, Homo sapiens
gccgtccgcttgaccgagatgctgcgggcctgtcagttatcgggtgtgaccgccgccgcccagtgggttggcagctggagaagataatggacagagaggt

SEQ ID NO: 728445 - DNA, 101 bp, Homo sapiens
ctgcgactcgctcaaggggctctgccgcatcatgggcaacggcttcgtgggatgtgtgtgggctgaaattccgagctgcggttgtgcatgagaatacaccc

SEQ ID NO: 728446 - DNA, 76 bp, Homo sapiens
caggctaccaagtccgtgctgtttgtgtgtctggcctttctgagaaaagtctacagcattctttctctgcaggttc

SEQ ID NO: 728447 - DNA, 90 bp, Homo sapiens
gaccggggatgggctgcaggagcttgccgtggtctccctgaagggcgtgcacatcctgcagacacccaaggacaatgctgctactctaca

SEQ ID NO: 728448 - DNA, 100 bp, Homo sapiens
ctgcaacctggaacccctagtctcaagagatcctccagcctcagcctccctggaggatcagctgatttattcggaggatttgctgactttggctcagctg

SEQ ID NO: 728449 - DNA, 90 bp, Homo sapiens
ggaaactaggtcgatggtcggcggcgcccggatgggcagctgagtgcttttttaggaccaaaggatatatttccttactcagaaaataag

SEQ ID NO: 728450 - DNA, 83 bp, Homo sapiens
cctttccccagctctgcgcgtaccgcgctctttggaaacgaattagggaagtcttgccggaccatcacctttgagcagttcca

SEQ ID NO: 728451 - DNA, 118 bp, Homo sapiens
agagacgagccgccctgataatccagcagtacttccggggtcagcaaactgtgagcatactcatgtacccagacttatacctttaataacaagcaattgcacatcaaaatcagttccc

SEQ ID NO: 728452 - DNA, 75 bp, Homo sapiens
cttggaatcaaagataaatccaaatactgcatatcagaaacaacaggcctactgaacttgacgcactggtatttg

SEQ ID NO: 728453 - DNA, 101 bp, Homo sapiens
ctgtggccaacagcaacagagagagtccaggtgaagccaaaaaccttccctcttacccggggccgagcaagatgagggattgctactgcacggtgaacctg

SEQ ID NO: 728454 - DNA, 101 bp, Homo sapiens
gattttgagaaggttttctctattggaccaggcattggaggtgatccttttaatggaacagattttattgactgcctcgaaatctttttgaacgattctgc

SEQ ID NO: 728455 - DNA, 98 bp, Homo sapiens
tcagacaccgagcttcagcaagctctctccaacggctctacagattctcccctgcccctggagaaggaggagcaggtccgacttcaggctcggaagtg

SEQ ID NO: 728456 - DNA, 117 bp, Homo sapiens
gcggaagcatgaggctaacggcttggcttcagtgaacgcaccgggatgtgcaggccgggaggtggagctcatgaaggacttcagcatttgggtccttttggcaacatccccaacatc

SEQ ID NO: 728457 - DNA, 101 bp, Homo sapiens
gaaactgttttggatgatcttgaccccgaggcttcagggatgacttcttagggggcaggggaggtagtcgcccaggcgaccggcgaacaggcccccccatg

SEQ ID NO: 728458 - DNA, 100 bp, Homo sapiens
ttttcttctctgggaaggtgaacatttgtagcattgatttcccggatctggtaacatggcaaaagatgtaagaatgattgatgttggctgatattggagt

SEQ ID NO: 728459 - DNA, 100 bp, Homo sapiens
cttccggagccctcggggcggcggactggctcgcggtgcagatgatgactttgaccagtttgataagcctggcgcggaacggtcgtggagaagaagagct

SEQ ID NO: 728460 - DNA, 75 bp, Homo sapiens
ccctccattcattatgaacactttggaaaagaaagcctttttgaagggtgccttcaccagggatggaagaggcag

SEQ ID NO: 728461 - DNA, 83 bp, Homo sapiens
cctccagcagggacctgtgacagataacgaaggaggcccaacttcattcaataaggagcctgacggatttatcccagacggta

SEQ ID NO: 728462 - DNA, 95 bp, Homo sapiens
ttaggagacataagaccgttggttctgacgaggcacagcgtttcttgcaagaatgggagttcgtgccctcgtgaggctggcatgcaggatggcag

SEQ ID NO: 728463 - DNA, 101 bp, Homo sapiens
ctcacgttctttcgcttttttacctgccaatcaaactgctacaagacaacaccctgatctggcatggacatgactcacaccacccggcaagaactgctcac

SEQ ID NO: 728464 - DNA, 75 bp, Homo sapiens
cggcctttggcggagaaaaccggcatctgcaaaattcggccgcccaaggtgggctacaccattcgatttgaggac

SEQ ID NO: 728465 - DNA, 83 bp, Homo sapiens
ctgccctgaggagtccccgctgcttggttaattatagaaaatgccaagtaggaaatttgccgatggtgaagtggtaagaggtc

SEQ ID NO: 728466 - DNA, 100 bp, Homo sapiens
tttctctgccatgttgctattgcaggacggactcgccctcccctacctgcggaagagtcaagggaatgtcatcaacatctccagcctggtgggggcaatc

SEQ ID NO: 728467 - DNA, 109 bp, Homo sapiens
gaaaacgtggatgattactacgacaccggcgaggaacttggcaggctggacgtaaagaaagaagtgatgcactcaattctgcaatagataaaatgaccaagaagaccag

SEQ ID NO: 728468 - DNA, 88 bp, Homo sapiens
aggctctggaaagatgtggtgatggggcattcttgctaacaactgccggtggtggtgtgcacattgagccccggtatagacagttccc

SEQ ID NO: 728469 - DNA, 100 bp, Homo sapiens
ggaaggcatggaaagttccagccggttcgagagctaggtgtcatggagaaactccagctgggcccagagattctgcagcgggaaaatccaaggcttattt

SEQ ID NO: 728470 - DNA, 75 bp, Homo sapiens
cccatccgccaggagccctcttccttcagcccgaccctgcccgccctggactggcagctgccgtcccactcaggc

SEQ ID NO: 728471 - DNA, 82 bp, Homo sapiens
ctgaagacaatcttcgggccctcctcatttatgccatttcagctacagtgttcacaacagagcctgcagccaatgccccagg

SEQ ID NO: 728472 - DNA, 90 bp, Homo sapiens
cttcaggatattattaaagattgttatggcatcaccaaatggaaaagggagcgatgttgatctcaggaagcacaaagggaccttcctagc

SEQ ID NO: 728473 - DNA, 75 bp, Homo sapiens
ggacaatgaagactattactcgttgctgaacgtgcgcagggagggtctcctggcttccagctgaggtacatggtg

SEQ ID NO: 728474 - DNA, 98 bp, Homo sapiens
attctagccgaggagaacctgcccttcgccaaggagatcgtctctctcatcgaggcccaaaccgccaagaatgtttcatccatttgtggaccaaaaga

SEQ ID NO: 728475 - DNA, 74 bp, Homo sapiens
cacattcagactacaagtccagacccaggagagcaaggcccagaaagaggaaatggctagtgatgagctgaaag

SEQ ID NO: 728476 - DNA, 75 bp, Homo sapiens
aagaatgattcagattttgaagctaaagttaagcagctatttgtcgtagatgtccagacaagccagatcaccaag

SEQ ID NO: 728477 - DNA, 74 bp, Homo sapiens
ccgcggagatgtgacccggcagtacggcaaatatggcggagaattcaaagaagctttttcactatttgacaaag

SEQ ID NO: 728478 - DNA, 100 bp, Homo sapiens
agtggctgtccctagtaattttgatgacaggagttgcttttgtacagcgttacagtgtttctgccacctctgtacaaaagacaattttacttgtgtgaca

SEQ ID NO: 728479 - DNA, 101 bp, Homo sapiens
tgagatccggagcagccggggtcggagcggggttctcatgtatcagccatcttctgtaagggtgcccagtgtgacttcggttgatcctgctgctattccgc

SEQ ID NO: 728480 - DNA, 98 bp, Homo sapiens
cccgactcggtgattgaggacaagaccatcgagctcatgagacctttggccagagcaagacataaaagattcttttcaacaagtgatactgagaagac

SEQ ID NO: 728481 - DNA, 115 bp, Homo sapiens
ccagaactgaatgctgtgctccagctgtggcctcaccggtgctgaatagagaggaagagccaccttcatagcttacatatgtcatccgtgggtctttaagcctcaccaacctttc

SEQ ID NO: 728482 - DNA, 82 bp, Homo sapiens
gttttaactgtctgcctatagcagccattgtggatgagaagatcttctgttgtcatggagttggatcacaaggacgagtcat

SEQ ID NO: 728483 - DNA, 82 bp, Homo sapiens
cttcaactcttggcctcaagtgatcctcctgccttagcttccaagaatgctgaggttacagatgacgggacagggcccgaga

SEQ ID NO: 728484 - DNA, 78 bp, Homo sapiens
gggccttggaccccgcggcgcccctcggcctcggagcaacgagcgcagcgccgggcgccctgcgtccggcagaggagg

SEQ ID NO: 728485 - DNA, 101 bp, Homo sapiens
caacgtcgagcggcgacggctggtttatcaacttatgaggaaatgctgggaattccaaccatccaatcggacaagctttcagaaccttattgaaggatttg

SEQ ID NO: 728486 - DNA, 99 bp, Homo sapiens
tatgcaatatgatgaggatgatgatgaaatcaccccggatttgtggcaagaagcatgctggattgtaatcaggttttttgcatgtctgacacccatgac

SEQ ID NO: 728487 - DNA, 101 bp, Homo sapiens
ggatctgaagagctatggtgaaacaccactgaagcattgccaagacaagttggatggcttgaggactggtactaaaaggaaacgtgactgggaggccattg

SEQ ID NO: 728488 - DNA, 100 bp, Homo sapiens
gaaggtctctggagacatcttcagcaggagagcgacttgcagttgtggaggtacagtgtgaacggctgaggatgctctaccgggactgtgctcggccccc

SEQ ID NO: 728489 - DNA, 74 bp, Homo sapiens
acggctacacatctattatttatcgactctcatcaaaaagaaacctgggatggcttctggaaacttacaccaga

SEQ ID NO: 728490 - DNA, 83 bp, Homo sapiens
tggagctgatcttagaaacctctgcacagaagtcctgaaaatccttggttggttcaagcttatgtttcagcagctaaacaccc

SEQ ID NO: 728491 - DNA, 74 bp, Homo sapiens
cgcagtggtcgcttcttctccttgtattaagggacatcagcgagagaggcagggatcttgagcagattttatct

SEQ ID NO: 728492 - DNA, 73 bp, Homo sapiens
ggcggaggctcaaccagctgctcctgcccctgctgcagccgtttccctggggagatggtaaccatactctatt

SEQ ID NO: 728493 - DNA, 90 bp, Homo sapiens
aaagatggagatgaacctctaacacagtggaaaggaaccgttctggatcaggcaattaagttggaatatgcaaggttggttaagttggcc

SEQ ID NO: 728494 - DNA, 90 bp, Homo sapiens
cacagatttgcttttacaccaaaattccttgtgtggatatcagatccggatggaatctcgagcttgtgaatctaccaggttactctattg

SEQ ID NO: 728495 - DNA, 100 bp, Homo sapiens
ctcttagtcagcatccttcaccacacagttggaatcgagggaatccgagcccgcattttagagactttggtcatgcttcttcttcttgcgttactcattc

SEQ ID NO: 728496 - DNA, 50 bp, Homo sapiens
ctccacttagtgagcggaagaatgggcagatgattctggaccagatgaag

SEQ ID NO: 728497 - DNA, 80 bp, Homo sapiens
aaatgtgaatctcaggagagagcagccagagtggaacgtcaaggtcgtgggaaataaaaggcagttctacacagactgca

SEQ ID NO: 728498 - DNA, 89 bp, Homo sapiens
accagaatattctacccaaatgtcaggaccaagattttctaccaaaatatcaggctgaccggttccctgatgtgttacctgcttctgct

SEQ ID NO: 728499 - DNA, 99 bp, Homo sapiens
tgaagtgttcttcgttccctcagcaatatgattctgataccccaatgtccttctttgactttgtggttgatcctcattctttcccccgtacagtggaaa

SEQ ID NO: 728500 - DNA, 100 bp, Homo sapiens
gcctgtcttcagatcttcacagcacagttcctgggaaggtggagccaccagcctctccctggaatcacccttcggtcatcgtgcagcctgggaagagacc

SEQ ID NO: 728501 - DNA, 100 bp, Homo sapiens
ggctggctcaccccggggccgggcagaattgggctccagaacatccagtcatggataaaaatgagctggttcagaaggccaaactggccgagcaggctga

SEQ ID NO: 728502 - DNA, 89 bp, Homo sapiens
cagtggaaaatgcgctcgggctggaccagcagggcacggccgagcagatgaggactgtgtggacgaccgggccagacaccgggaggaac

SEQ ID NO: 728503 - DNA, 83 bp, Homo sapiens
gaaggatatcgacgtcgtgatccagaagtccagagctgaggactgcctgtttgcagctggagcagttcaacatgatggagaac

SEQ ID NO: 728504 - DNA, 100 bp, Homo sapiens
attccactctccagtgtaatgattattgacaacaggcatctccttggaaacaatgccatctttgaatgtgagagataaacctagtttcagcatgtctgca

SEQ ID NO: 728505 - DNA, 82 bp, Homo sapiens
ggggccggcggcggcgcgcggactccgcatcccgcaccccgatggtagccgaggagctgggttttggccaaattgggcgagg

SEQ ID NO: 728506 - DNA, 75 bp, Homo sapiens
ggctctttagctgaaatacttctgaagaagtggtccaaaggcaaagttcgggacaagctcaataacttagtcttg

SEQ ID NO: 728507 - DNA, 100 bp, Homo sapiens
gtcttgggtgacaagtgggacggcgaaggctcgatgtcggtcctcggtaacaccagcggcctgtggtccaccactccattcagcagctccatttggtcca

SEQ ID NO: 728508 - DNA, 75 bp, Homo sapiens
gcaacccgcgcccgcttcggagagagaaatgctggggactcgctcagcagcagcctgaaaacttgctacaagtat

SEQ ID NO: 728509 - DNA, 89 bp, Homo sapiens
aaaactgaagatggcaaagtagaaaaacactatctcttctatgacggagaatccgtttcaggaaagatcctgtttgaccaaactcagag

SEQ ID NO: 728510 - DNA, 90 bp, Homo sapiens
tgaagtgcgggcgcagctggcggagctggagctggagctctcggaggattctccctgactctgctcatctggaccttttctgtgtgtctg

SEQ ID NO: 728511 - DNA, 98 bp, Homo sapiens
tgcatagcaagaaggaagtgcctatccaccgtgttgcagatatatctgggctgaagaaaaggtgactggtctcatgagccctgaagaatgaactcaga

SEQ ID NO: 728512 - DNA, 100 bp, Homo sapiens
aaaggcagccaccccaggccttcacggaaacccgttgactcgtcaacgcaaaatcatgctgccgtgttccgtgtgggaagcttgttgcaagaaggttgtg

SEQ ID NO: 728513 - DNA, 100 bp, Homo sapiens
atcccggagcagtcattagaattctcgcttgttctgcaaatccttattccccaaatccaccagctgaagtaagacagatttgaccagttttgggccatca

SEQ ID NO: 728514 - DNA, 72 bp, Homo sapiens
ctgctcgtggccagcggcgccgccgaagtaatagttatgcacgagtgcgagctgtggtgatgacccgagatg

SEQ ID NO: 728515 - DNA, 98 bp, Homo sapiens
accgagggtatctgctggaacttttgctgaccaagatttgctatattactcggaaatcagcatcttggatggagaagagttcctgggaaatacatgag

SEQ ID NO: 728516 - DNA, 75 bp, Homo sapiens
cagcgggaccggcggctctaagatcccacccctggggaagcactactcccagcgctgggcccaggaggacctgct

SEQ ID NO: 728517 - DNA, 129 bp, Homo sapiens
tcttttaaagtatatgtatgacttttaaaagagagagcttgtgaaactgagggaataggtactccaaagattcaggtttactcacgtcatccagcagagaatggaaagtcaaatttcctgaattgctat

SEQ ID NO: 728518 - DNA, 75 bp, Homo sapiens
ctttcttatatggctatggcggcttcaacatatccatcacacccaactacaggaaagaccacagcaagattcttt

SEQ ID NO: 728519 - DNA, 50 bp, Homo sapiens
ccctgagccgcccctacacccacagggccgcgatgggcctcttggaacat

SEQ ID NO: 728520 - DNA, 100 bp, Homo sapiens
cccaaaaattcagcagcagaaattccagtgactagtaatggagaagttgatgactctcgtgaacatagctttaataggatagctgatcagcttccttggg

SEQ ID NO: 728521 - DNA, 83 bp, Homo sapiens
cagacgcaagatggcggacagtgcggaactaaagatgatgataattccgaagaaggcttccacactattcattcaggaaggca

SEQ ID NO: 728522 - DNA, 100 bp, Homo sapiens
ccagccttgggcacagctccacccatcaccccagaacaccccgcagaaagtgcctgtgcatcagatctacgcagaccccaccaagaggctggagctgtac

SEQ ID NO: 728523 - DNA, 74 bp, Homo sapiens
agccccaagaaggagaccctcatccagctgatgcccttcttcgtgttatttcttatgagggtcatggatatccc

SEQ ID NO: 728524 - DNA, 96 bp, Homo sapiens
aaaagctgcttcctgttggggcatgagtccggcgcgtgtcgggttttgagctgccgcggtcccgggactgaggaagctcttcgtgggcggtcttga

SEQ ID NO: 728525 - DNA, 76 bp, Homo sapiens
ggagcccccggcccaagggcgacttctccagccgggcccgcgaagtggatgacgctgtcagtatagaaagtggtac

SEQ ID NO: 728526 - DNA, 90 bp, Homo sapiens
gaagagggcagagccgtgcatggggctgctccccaggacctgagcaggaacctggagttttcagacccgaccgcatgtctgtcatggacc

SEQ ID NO: 728527 - DNA, 97 bp, Homo sapiens
gctcatggcccaccagctagaaaggtatggatggcagaacagaaaatatcatatgataagaagaaacaagaagaattgatgcagcaatatcttaaag

SEQ ID NO: 728528 - DNA, 83 bp, Homo sapiens
cttttcatgagtgttcctgtggtctctgcacctcctttctggtttggaaatcccttgtctccaggttgctgggattgacttct

SEQ ID NO: 728529 - DNA, 82 bp, Homo sapiens
cggacgctgagcggagcagctgcgccacgggtggcccagttgaaatccttcccttcctctaccttggaagtgcctaccatgc

SEQ ID NO: 728530 - DNA, 100 bp, Homo sapiens
gatggcatcatttttgccctcaaaagaaatggcagaatgccagctgatgaagaccgagaggccgcgacccaacacctttgtcatacgctgcctgcagtgg

SEQ ID NO: 728531 - DNA, 75 bp, Homo sapiens
tttcacagctgattcctgggagcacatccatttcattggcaaggactcgctgattcttgagaagagtcaaaactg

SEQ ID NO: 728532 - DNA, 75 bp, Homo sapiens
tagccctgcagacagaggtgtgctgacgacctgctacaacagaaatattgatgatgttaagaagttcaaaccggg

SEQ ID NO: 728533 - DNA, 101 bp, Homo sapiens
gtcgagcaggtgccatcaggcacatgaacggtggagtcttcaaagaggctgaggggatctggcggtggagcgctaggatcagacgcccccgcgatgaccag

SEQ ID NO: 728534 - DNA, 51 bp, Homo sapiens
cggcctcgcaactcttataaatgtgatgacttcaaacctgcttctattgac

SEQ ID NO: 728535 - DNA, 98 bp, Homo sapiens
ttgtattcatcaataatgaaatgctgactaaggaacaagctctggcaggctgccctgagcacgctcaaccccaaccccacggacagctgtcccctcta

SEQ ID NO: 728536 - DNA, 74 bp, Homo sapiens
tgtactggctattggaaggaggagattctgaagataaggagacattgtggatatcaagcctgccaatatggaag

SEQ ID NO: 728537 - DNA, 100 bp, Homo sapiens
cagggacagttgagagttcttgggcaagaggggaatctgctgctgcatcggtcttcaaagcttcacctttctccaaaggcagatgtgaagaacttgatgt

SEQ ID NO: 728538 - DNA, 100 bp, Homo sapiens
cactgcctgcgcagctccggccgcctggctccccatactagtcgccggatcaagcaccccaacattgtagccctggatgacatctatgagagtgggggcc

SEQ ID NO: 728539 - DNA, 75 bp, Homo sapiens
agtatccgccagtcaataggaagtacgagtgaagccagcagacctgcagaacttggctcccgggacccacccacc

SEQ ID NO: 728540 - DNA, 95 bp, Homo sapiens
gagagcggctgctgtctgcgcttgaggacttggaggtcctgtctagtgaaacctgggaagaatgtgctcaaagggaaacctgggaagaagcagct

SEQ ID NO: 728541 - DNA, 75 bp, Homo sapiens
ctctggtgtggttctggggaggggttggaccttggaagagtggaatatttgacaacgtctggagacagtgtctgg

SEQ ID NO: 728542 - DNA, 100 bp, Homo sapiens
ccagtgcctcgagcgctcaggatggaggaagactcgatccgcctgcctgcgcacctgcatgcttctgatgagcagaattcacagtcctcgatggaacatt

SEQ ID NO: 728543 - DNA, 82 bp, Homo sapiens
tttgggaaacaaggcttccagtgccaaggcatgcatgtagggaataccggattcataaagagctggatcatcccagaatagt

SEQ ID NO: 728544 - DNA, 75 bp, Homo sapiens
cactgccgcttcggtcactagaatctgggcgtgaaaccccatcttctactcaggcatccagtgtcaacgggacgg

SEQ ID NO: 728545 - DNA, 100 bp, Homo sapiens
cacgccgtgaagtcaactgtttggttggtggctactgggataagtcctgtagcacagtgactcagctgaaggaaggtctcaaccgaatcctctgcctgat

SEQ ID NO: 728546 - DNA, 82 bp, Homo sapiens
gccaagaagatgagaccgggggaggcgacgctaagttgctgatcgtggcggtgacagagctgaatgaacctctctccaatga

SEQ ID NO: 728547 - DNA, 75 bp, Homo sapiens
cttctttcttggagctgaccatggtgacacttggacagaaacactggcctatgtgctcttctggggagttgcaag

SEQ ID NO: 728548 - DNA, 89 bp, Homo sapiens
cccatctggactaccaaggagaagctatagactacttctactccaccaggaaggagctggtgagcaggctgctgcacctgcacttcaag

SEQ ID NO: 728549 - DNA, 100 bp, Homo sapiens
aaatattatggaacgaaagatcctgttccaggctattctgttccagcagcagaacacaggttcatcctaagttccactataaacaggctcatgactcggg

SEQ ID NO: 728550 - DNA, 82 bp, Homo sapiens
agaagagcgagaatgaagcaaaatgcttctttcagcaattttccagattattcaaagtatcaggatgggcatgtgaagtgac

SEQ ID NO: 728551 - DNA, 100 bp, Homo sapiens
ctcagctcctcgacatttccacacccagacccaaagtttgcaacaatcagtcaggtggtcgtcggttttctgagggtacttcagctgacagagagattca

SEQ ID NO: 728552 - DNA, 100 bp, Homo sapiens
atcgggctgaagcgactgagtccgcgatggagtttgcagctcaccttgtgaagatgaaatatccaagaatctgtattctagatggtggcattaataaaat

SEQ ID NO: 728553 - DNA, 99 bp, Homo sapiens
actgctctggatgatgcagaagaggagtcctttaggaagatcaacgttcttctgcaagccttcatctcacagctgaaattggagggctttgcactgatg

SEQ ID NO: 728554 - DNA, 98 bp, Homo sapiens
ccgagtggtctaaggcgccagactcaagggacaatggtgacagatccaggcaccgagctccacgcaatgcccggatgtctgcaccttcgcttggacgc

SEQ ID NO: 728555 - DNA, 50 bp, Homo sapiens
aggatattcctcatgacattgctgtctggagtccaatgtgctgattgctg

SEQ ID NO: 728556 - DNA, 100 bp, Homo sapiens
tcggcagactggtgacttcacttttgagtgcaactgccttccagcttttctgcaattagataaaaaaggaccacaaaaacatcactttgatcagccttca

SEQ ID NO: 728557 - DNA, 83 bp, Homo sapiens
gtttttccaaatattcatctgtacagatttggactgagcaacaaatttgaatctgaattcccttcttcattaactggaaaagt

SEQ ID NO: 728558 - DNA, 100 bp, Homo sapiens
gacatctttgtttccatgagcaagaacgattatgaaaagtttaaaaacaatccacaaattaatttgattatcttagaagacctaggactccaaaaatgtt

SEQ ID NO: 728559 - DNA, 137 bp, Homo sapiens
cgagcatgtcatgaagttgcgccaggcagccctgaaatcagctcgagacatgtgggctgattacatcctggttcatgttgctgaggaggcagagggctgagttcttccatccatcgccttcaagtgtcaggcggctt

SEQ ID NO: 728560 - DNA, 101 bp, Homo sapiens
cctggactctgcagagtgaagagaaaatagcaaacgatccagacggcagggagtgcatcaaaggtgtgaacacagatgtatttccactacacaaaattttc

SEQ ID NO: 728561 - DNA, 83 bp, Homo sapiens
tgggcgaaaattggatgtgaaaatgaagccagaccgaggtttgaggaaccactggccaacctgttaaatgaacaacatcggac

SEQ ID NO: 728562 - DNA, 75 bp, Homo sapiens
accaggaacttcagggttactacgacaatgccgacaagctccacaaggataaaagaatcagagtgtctcaaccct

SEQ ID NO: 728563 - DNA, 88 bp, Homo sapiens
cacggctcgcaggccgggggcaaggggcggccgggcgcggccgaggagcaggagcggcttcgcttggagcaggagcgagagcaggaac

SEQ ID NO: 728564 - DNA, 88 bp, Homo sapiens
agggaaggagggcgtccgagtcaacaaccgcttcgagctgccatcccgacatgcatgctgtgggatcgtggctcttcaggaatctgtg

SEQ ID NO: 728565 - DNA, 100 bp, Homo sapiens
ggagcgattccgtcgccaaacagttgtattccctgaatgactataaaccacccatttcgaaagcgaaaatgacccaaattactaaggcagccatcaaagc

SEQ ID NO: 728566 - DNA, 100 bp, Homo sapiens
actttatttggttgatttggctgggagcgaaaaggtcaatgtgacggtggactacattagaccagccagcccagccacagagacagtgcctgccttttca

SEQ ID NO: 728567 - DNA, 82 bp, Homo sapiens
ttctgttttcctgagggctacaccgttttcttttgaaagaggaccacctttcactcacctgaggactccacagaagatggta

SEQ ID NO: 728568 - DNA, 82 bp, Homo sapiens
cagtttctcacgacgggccgagcctgccactgtgacttaagagattaaaattaatttggttgctgttggttctgaacaaata

SEQ ID NO: 728569 - DNA, 75 bp, Homo sapiens
ctgggaccagattacaagtctttccaactcgatgcattctatttctcatcatttggctcataactggaggaaggc

SEQ ID NO: 728570 - DNA, 83 bp, Homo sapiens
tgcacatccaggctggtcagtgtggcaaccagatcggtgccaaggtagacgaagttcctgatggagctgtaaagccacccaca

SEQ ID NO: 728571 - DNA, 100 bp, Homo sapiens
ccagaggccccagccctcaggcaaggttctccgggtctcctctgagcctccggcctccataagacccaaaacagatgacacctcttcccagtcccccgcg

SEQ ID NO: 728572 - DNA, 75 bp, Homo sapiens
tttcaagacaacagatgaattgtgaaagagagcagctaaggcaacctcaagcccagcagcgaagagtcacccccg

SEQ ID NO: 728573 - DNA, 100 bp, Homo sapiens
gtttgagtacgaagggtgcaaagtgggacgcggcacctacggtcacgtctacaaggcgaggcggaaagatggtttttttgaagaagcaggatgctgatct

SEQ ID NO: 728574 - DNA, 100 bp, Homo sapiens
gagtcgcttaagtgcgaggacctcaaagtgggacaatatcctctgtggagaacacccccccatggaggcgagctccctggaattcccatgccaccaccac

SEQ ID NO: 728575 - DNA, 100 bp, Homo sapiens
gggctgaagagcgcgccgccctctcgtcccactttccaggaattagcttaccgaaaggagatggtgagagctgacctaattaacaaaaaagttggaatca

SEQ ID NO: 728576 - DNA, 50 bp, Homo sapiens
ctggattttacagaacttgactgagaaatgattctggggaccattctgac

SEQ ID NO: 728577 - DNA, 100 bp, Homo sapiens
gctttgtggcctcaagcctgatccaggagccctcacagcaagatctgcacaaagtcccagttcacccaatcgtgcagccagtattgcaggaaggaggtgg

SEQ ID NO: 728578 - DNA, 83 bp, Homo sapiens
gtactcagcccacatgcccgctcacctgcgctgtgatgcctgcagagctgtggcttaccagatttaagtaagtcttccccaac

SEQ ID NO: 728579 - DNA, 83 bp, Homo sapiens
gtggcttatgaaagtgtgatgttcgcgtatttcttgacaggcaggggaaatggaaggtgatgcagtcgaagccattgtggagg

SEQ ID NO: 728580 - DNA, 83 bp, Homo sapiens
atcaactcagccccacaacagattgaactccttccgcttccagccgttcgagtcctatgactccaggccctgcctgccggagc

SEQ ID NO: 728581 - DNA, 100 bp, Homo sapiens
cggcgccgctgcctgccgaggtgcgggagagcctggctgagctggagctggagctgtcggaagtggatccaaacttctacagcaaaaacttacttctttt

SEQ ID NO: 728582 - DNA, 90 bp, Homo sapiens
agggcctgggagcttgctgcagcttcaggtcgcctgcgaggccgctggccaggcctgagcctctgccaccatggccattgtgcagactct

SEQ ID NO: 728583 - DNA, 100 bp, Homo sapiens
agctgaccattgtggatgccgtgggctttggggatcagatcaataaggatgagagacatgagcaccagcctccaggaaggccaggaggacgggccggcag

SEQ ID NO: 728584 - DNA, 79 bp, Homo sapiens
ccgtcgtggaagcaggactgcgccgcgtcttcctcaaggccaggtcagagcagcccaccatgggatggggagggggtgg

SEQ ID NO: 728585 - DNA, 80 bp, Homo sapiens
gagaccgtctagtataagacagagcacgaaaggcatttttactgctggaaagaaaccttgactggttccccaggatgaga

SEQ ID NO: 728586 - DNA, 82 bp, Homo sapiens
gatcatgtctgcgagccaggattcccggttcaagggcagcaggaaagacgagatcctgggcatcgccaacaaccgactgatc

SEQ ID NO: 728587 - DNA, 97 bp, Homo sapiens
aaaggaaatgcatctttatgtcagaaacacaaagcagcccaaccaaagggatgtttcgtctgaactcactttctgctttggcagaactggctgtggg

SEQ ID NO: 728588 - DNA, 75 bp, Homo sapiens
agacattcaacatgattgcatttgaagctagcttgtcactttctgcaaaggtttccctcagggagcctcctgctg

SEQ ID NO: 728589 - DNA, 98 bp, Homo sapiens
tgctgaactgggtgctttatataggggaaatctgcttcgccactgaaggtactctgcaccccagaaggaatacgacttcagtgtttcatgaagtattt

SEQ ID NO: 728590 - DNA, 90 bp, Homo sapiens
acagctgatgacctgctgctcgtgctgatctcagcctcctgacaaggtgatccgggcgggccccgcaggaattttatcccctcaccggcc

SEQ ID NO: 728591 - DNA, 90 bp, Homo sapiens
gcagcaccaaatccaagatggcggccagcaggaggctgatgaaggagctggtacatacactacctcttctttgagcacaaaatctacaac

SEQ ID NO: 728592 - DNA, 95 bp, Homo sapiens
aaaatctgtggcgttgaggacgcggtgtcagaaatctcaccagcgactggaaccagcaactctgtcagggattgtaggatttatccttagtcttt

SEQ ID NO: 728593 - DNA, 100 bp, Homo sapiens
agatttcttttggatagtgatgggaaaagtcctgcacttcttcctcgatagccgctggggcgcaagccgagagcggctggctatcagcaaggaccagcga

SEQ ID NO: 728594 - DNA, 75 bp, Homo sapiens
gccatctactcgtccgttaccggggtcaccgggagcaagaagtccaccaagaggaccaaatccatcaacggctcc

SEQ ID NO: 728595 - DNA, 98 bp, Homo sapiens
tccccgacgagggcttctcaggcctggtctccatccatgtcagcctgctggagtacatggcccaggtcatccaccggctgcccatgcccaacctgaag

SEQ ID NO: 728596 - DNA, 90 bp, Homo sapiens
ctgggaggccggccggtgccagcacctttcggcttctgagacggcggcagcagcggcattcaggtgccatgtttcagaacagagtaagac

SEQ ID NO: 728597 - DNA, 127 bp, Homo sapiens
ggcagatgatgcagaggagcgagctgagcgcctccagcgagaagttgagggagaaaggcgggcccgggaacaggattctagtataattgacttctatcctgaagattttgctattgatttgaatggg

SEQ ID NO: 728598 - DNA, 71 bp, Homo sapiens
catcaccaagctggaggtggacgccatcgtcaacgccggaccatggccaacctggagcgcaccttcatcgc

SEQ ID NO: 728599 - DNA, 75 bp, Homo sapiens
gctgaagcgactgagtccgcgatggaggaatcagagatcattgatttcttcctgggggcctctctcaaggatgag

SEQ ID NO: 728600 - DNA, 75 bp, Homo sapiens
ggtgagctgagatagaggccctgcactccagccaggggactggtgattgcagctggaagtgcccatgaccgagct

SEQ ID NO: 728601 - DNA, 88 bp, Homo sapiens
tcactgggatgatgcgctgcagccagctggcccccagggccctgcagtgtactaatggtcacttgatgtgcgctggctgttttatcca

SEQ ID NO: 728602 - DNA, 50 bp, Homo sapiens
tgaaagaacactctgaacttcaggtggcttcttctcaacctgtatcttct

SEQ ID NO: 728603 - DNA, 75 bp, Homo sapiens
ggcagaggagctggcggagagcggcctgcgggcgatcgggccgagattggtgctgaagacatggacggcttccag

SEQ ID NO: 728604 - DNA, 75 bp, Homo sapiens
caatcttcctgctaaggccattggacacagaatccgagtgatatgaagcaacagcatgtcatagaaaccttgatt

SEQ ID NO: 728605 - DNA, 100 bp, Homo sapiens
tgtaaagccacccacaaacaaactacccattttcttttttggaactcatgagacgctcaggaggcagcagggacagggcagccagctcttggacaccgac

SEQ ID NO: 728606 - DNA, 75 bp, Homo sapiens
tctggacctgggacccactgcagctctctattggaggcatcatcattctgaaggataccagtgaagacattgagg

SEQ ID NO: 728607 - DNA, 100 bp, Homo sapiens
gtcgaagacatggaccagggctacggagcccgagcgggaagaagttccgcagcaagccgcagctggcgcgctacctgggcggctccatggacctgagcac

SEQ ID NO: 728608 - DNA, 75 bp, Homo sapiens
taatgttgtaactcgaagatttagcaaagctgacacaataggaaacaataatttaggtggctcagtctcagcacc

SEQ ID NO: 728609 - DNA, 100 bp, Homo sapiens
agaaatggcccagtccagcccgggtgacagaacatcggcggccttgagatatgattctataacagactcttccagaaatgatatgaagaggaaatttgcc

SEQ ID NO: 728610 - DNA, 90 bp, Homo sapiens
acagagtcctccgtgtcctcccccgcatgacccccttggcatgtaatgaatttactacacatgtgatgaaccttctccgagaacagagta

SEQ ID NO: 728611 - DNA, 100 bp, Homo sapiens
agaagagccaaggaataaacatgcaatgaacccaaaagggtttgatggtgatgagctcaccacagatgaaaggatacggtccctggctcagcggtggcag

SEQ ID NO: 728612 - DNA, 99 bp, Homo sapiens
cagggcaaggaaccttctggaaaaggagaccgcagtcactaaaatcttaaggtccttatgtcgtcagaagatcgagaagctcaggaggatgaattgctg

SEQ ID NO: 728613 - DNA, 100 bp, Homo sapiens
tcaagtacccactggaccgtggttttgcaggaaatgtgaatctcaggagagagcagccagagtgatgcagagagaacttgtttatgcaagaggagatggc

SEQ ID NO: 728614 - DNA, 116 bp, Homo sapiens
gtcgcgcccgggaggaaggaacgaggcaaggagctaaagcagcgtgcgttcagccctgggggggatatgagactttctactcggaatatcctgagtgttgcgtggatgtaaaaccc

SEQ ID NO: 728615 - DNA, 100 bp, Homo sapiens
caaaggccaatgttggtgctggcaaaaagaaaaagcttgtggtgaaggggggcaaaaaaaagaagcaagttctgaagttcactcttgattgcacccaccc

SEQ ID NO: 728616 - DNA, 100 bp, Homo sapiens
cacaattctatctcttgggcaatcttcacggggctggctgctctgtgtctcttccaagctctagccggcccggtccttggactgaaagaatgcaccaggg

SEQ ID NO: 728617 - DNA, 50 bp, Homo sapiens
ttgctcttgaaggagatattgtcagtgtatgcagagaatatttccaaaat

SEQ ID NO: 728618 - DNA, 122 bp, Homo sapiens
aagtcccctcgccgctggccaccagccttccagcccttacggcccacgccgtaatcctggtgaccgagaagatttgtgacacagactatatccagtacccaaactactgttccttcaaaagc

SEQ ID NO: 728619 - DNA, 95 bp, Homo sapiens
gctctcactgcggagaggtgtttggtgcagaagaacatgttcttcaagtatacatggaataactttttgcatacacaagtggaaatttgtattgc

SEQ ID NO: 728620 - DNA, 112 bp, Homo sapiens
gggagaagagccatgggtcctcgacctgcagggagcagaggggacagaggcaccaaggacctccaagacaggtgtcatggagaaactccagctgggcccagagattctgcag

SEQ ID NO: 728621 - DNA, 75 bp, Homo sapiens
ccgggtgccgaggagcgggaagagttgctggggtacatccagacactgaaggaccacaggccccggatggtgtgg

SEQ ID NO: 728622 - DNA, 95 bp, Homo sapiens
ctcgggcgggggctggcccggggttccaggacagtcattttgtttactcattcagccctgttgcaggtcccaataaactcttcataaggttgaca

SEQ ID NO: 728623 - DNA, 90 bp, Homo sapiens
gtttgccaatgttggagccgtctgcaaagtgtccccggcaagaaggtgccctcaccaccaatggcatcaaccctgacaccagtactgaga

SEQ ID NO: 728624 - DNA, 100 bp, Homo sapiens
agcctcccgggtagctgggactacagactggatgatgagaggcacagctgagtccggagcagactgagccacctaagaggggaggaaccgctgcagagaa

SEQ ID NO: 728625 - DNA, 75 bp, Homo sapiens
tttgctggatttaagcactgctgcactttatgagtgccggtggtggtgtgcacattgagccccggtatagacagt

SEQ ID NO: 728626 - DNA, 100 bp, Homo sapiens
gtgagctgcggaggctgcggcccccagaatccttgttgcctgatgactatgtggttccccttgactggaagacactaaagatgatctacttgcaatggaa

SEQ ID NO: 728627 - DNA, 90 bp, Homo sapiens
gcccggcggcgctccaggtgctgacagcgcgagagagcgcggccctcaggagcaaggcggaaaatgtttataggaggccttagctgggac

SEQ ID NO: 728628 - DNA, 74 bp, Homo sapiens
tcgactcaatttacggggcttgttatctaaagcaaaggttattgaagaaattgaagaaatgatgcaggaatcac

SEQ ID NO: 728629 - DNA, 76 bp, Homo sapiens
ggccctggagccctcagaatatggatggagaatgtatgtccctgggaagctgcatgatgtggaacacgtgctcatc

SEQ ID NO: 728630 - DNA, 90 bp, Homo sapiens
tccgaaaatacagtgaacctttggaggaacacggcaacttccttattacaggtgctggagaatctggtaaaagcaccattgtgaagcaga

SEQ ID NO: 728631 - DNA, 51 bp, Homo sapiens
agcgactgagtccgcgatggaggtgccaagtcctgccctgccaacttcttg

SEQ ID NO: 728632 - DNA, 100 bp, Homo sapiens
cagatgttcattcatctggatcttcagatgcacatgttgaaacaaatgctaaatgaacttatgcgccagcaaaatcagcatccagaaaaacctggaggca

SEQ ID NO: 728633 - DNA, 98 bp, Homo sapiens
ggatttggcatgataacatgcagtttcttcaagacaaaaacatttttgaacatacatattttgggattttctattgcagcagaccatgctacgagtga

SEQ ID NO: 728634 - DNA, 87 bp, Homo sapiens
tgaagttaacatttctagcaattcggtggcatgagaatgtatttacatctgtaagacggtctggaaaatcccgaagcagaagcccgt

SEQ ID NO: 728635 - DNA, 99 bp, Homo sapiens
atctttccggatcaatccagatggcagccagtcagtggtggagagccattggaacatccgttaatcagcagcccttcctttttttccaaacatgcaaat

SEQ ID NO: 728636 - DNA, 73 bp, Homo sapiens
gaggacatgaggaaaatgtccttccagcgctgcgcccggacagacaaggatggaggcagcagaactggatgag

SEQ ID NO: 728637 - DNA, 138 bp, Homo sapiens
tttgggaaggcgttcgcttggtgggttaggcctgtgtgttgcttagccgaaagaggcatcgttttctctttaggtcaaaatgcagatcttcgtgaaaacccttaccggcaagaccatcacccttgaggtggagcccag

SEQ ID NO: 728638 - DNA, 100 bp, Homo sapiens
gccacaagaacatgtctgtacacctgtccccctgcttcaggccaacgtgcagcggctgaaggagtaccgctccaaactcatcctcttccccaggaagccc

SEQ ID NO: 728639 - DNA, 100 bp, Homo sapiens
tggcggacatcactttagaccctccacctaattgcagcaattgaaacacagagcaccagctctgaggaactcgtcccaagccccccatctccacttcctc

SEQ ID NO: 728640 - DNA, 119 bp, Homo sapiens
cggacccggggaagcccttctggggtccgaggccgcgctgcggggccgcccacgctgcgctccaggctgaccggttccctgatgtgttacctgcttctgctactgatccaaactgcaga

SEQ ID NO: 728641 - DNA, 82 bp, Homo sapiens
gctcccccgggcggggttgagtcggcgctcagctgcttctctttcaaccaggactgcacatagacttgttgaaacaagggga

SEQ ID NO: 728642 - DNA, 75 bp, Homo sapiens
cgatgttggactcatagtcactgccagaaagacttcccaagtaagaagcggaagaggagccgctggaaccaagac

SEQ ID NO: 728643 - DNA, 101 bp, Homo sapiens
ctcagcctcctgaggagctgggattacagcaggtagttccaatttgccagcagaatgagtacagaaagagactcagaaacgacatttgacgaggattctca

SEQ ID NO: 728644 - DNA, 100 bp, Homo sapiens
ttcgcggagcggcgccgcgtagcttccatccgccagctgccatgagcgagcgcctccgtcccaggcagcagcggctcccctgttgtatggacattctgca

SEQ ID NO: 728645 - DNA, 75 bp, Homo sapiens
caggcctgctcggccctcacaggaattggctgtgaaaggactgaggcagccatctgggggtagcgggcactctta

SEQ ID NO: 728646 - DNA, 88 bp, Homo sapiens
tcctgcacgtgcaactgcaaacgctctttgttccagagcatggagatcagggtctaatgtgatggaagagcaggacctgcgggacatc

SEQ ID NO: 728647 - DNA, 90 bp, Homo sapiens
acccgcatgctgcagcttatgaccatcaatatgtttgcagtacacaactcccagctgaaaggtgcagtggaggcttgcctcttgcatcag

SEQ ID NO: 728648 - DNA, 106 bp, Homo sapiens
ccaccccctgcccctgcccagccccctgaacccgaggccctgcctactatctatgttgttacccccacctatgccaggttctagagccttctttccgccaggcctt

SEQ ID NO: 728649 - DNA, 74 bp, Homo sapiens
tttaggtctttcgtggtcagtaaattccgggaaattcaacaggagctttccagcttttcctccgcaaccatgtc

SEQ ID NO: 728650 - DNA, 83 bp, Homo sapiens
agctaatgcagggaagtttctgggaacattcgaccagcgtttgtattggtggccagcatcgaaatgttcagccttttagtgat

SEQ ID NO: 728651 - DNA, 96 bp, Homo sapiens
cttgtctagtcacaggacatccacgtccacagcttgatgattccctgaatcagatccgtaagctccagaggtctctggatgaagagaaagaaagaa

SEQ ID NO: 728652 - DNA, 100 bp, Homo sapiens
gggaaagatggcgacggctccgcgacgttgaggccgcgttgggcggttcagactcagggtgaggtgctgatactcaaagaaggtttaagttgtctgatct

SEQ ID NO: 728653 - DNA, 117 bp, Homo sapiens
ccaccaccaccatctccatcacccaccaacaacaccacaataatccacagccaagggtgataaaagaaaatgtggctgaagttacccgaagttcagcttgcagtgtaattcagaaga

SEQ ID NO: 728654 - DNA, 100 bp, Homo sapiens
gctgccggaaggggtcccgaagccccctgcaggaactctacaacccaatccagaacattcctgatgtagatgaagaaggctacagtattaaaccagaaac

SEQ ID NO: 728655 - DNA, 75 bp, Homo sapiens
gatgaaggcagagagcagagacatcccgatctggggaagaagctcttcgtgggcggtcttgactggagcacgacc

SEQ ID NO: 728656 - DNA, 95 bp, Homo sapiens
cgccgaggaggttgggatcttcttcactgcctctggcatggatgaggacttgaaagaggagattgatattcgactctccagggttcaggatatca

SEQ ID NO: 728657 - DNA, 89 bp, Homo sapiens
gacgaataaatggctagataagaaaaatggctacaaacttcctagcacatgagaagatctggttcgacaagttcaaatatgacgacgca

SEQ ID NO: 728658 - DNA, 75 bp, Homo sapiens
aagaaatcccactgggcagagcttgaaataagtggtgccgtgagcgatgtggagatgcaggaacactatgatgag

SEQ ID NO: 728659 - DNA, 100 bp, Homo sapiens
cggcgttcttccgctggctcagccgcaagtacccgtccatcatagtcaactgcgtggaagagaaggtcaaaatgcagatcttcgtgaaaacccttaccgg

SEQ ID NO: 728660 - DNA, 100 bp, Homo sapiens
cagagttttctagtccctcttacttgaagcatgtctttcagagcccggcaccacccatcttgagtatctggatagtgaagtttttattactgataaaaag

SEQ ID NO: 728661 - DNA, 101 bp, Homo sapiens
caggggttctcagagaggaaattcaggaaactttgacttcggagtatttccagatttgcaagtcaattgaccctggccagcagttcacttgggaacattca

SEQ ID NO: 728662 - DNA, 90 bp, Homo sapiens
gttctacaacaacctgttggagcacatgcagtcccatgcaggtatctctggagacaaagtagagatagaccctgttacgaatcagaaagc

SEQ ID NO: 728663 - DNA, 75 bp, Homo sapiens
gatgttggagaactacagaaacctggtctccctagtgcttttttaggaccaaaggatatatttccttactcagaa

SEQ ID NO: 728664 - DNA, 83 bp, Homo sapiens
cccagtgcgcccgcatcgtcgagcaagagtgagccatggagctacgtgtggggaacaagtaccgcctgggacggaagatcggg

SEQ ID NO: 728665 - DNA, 96 bp, Homo sapiens
gtcttcgacctcagttacttcatcgtctccatcctctacctcaagtatgagccagacttcccaagtaagaagcggaagaggagccgctggaaccaa

SEQ ID NO: 728666 - DNA, 83 bp, Homo sapiens
gcagagcggagggagccccagacacggaaagccgtggagagctgctccgacgtcacccgcctggtggtgtacgtttctcagga

SEQ ID NO: 728667 - DNA, 73 bp, Homo sapiens
cagaaggcacagattagaggaaggaagaggtgctaaaatgatgtattttctggacaagtcaaggcaggagaaa

SEQ ID NO: 728668 - DNA, 100 bp, Homo sapiens
ccagagccatccttcgggagaggatatgtagcgaggaggaacgcgctaaggcaaagcacctggcctcaggagtgcaagtagctgatgaagtatgtcgcat

SEQ ID NO: 728669 - DNA, 96 bp, Homo sapiens
gaaattttcaccagaaagtgttgcagcgtttatagcagtccttggcattctttccattattgcacagctcccctcccacccggtcactccgtccag

SEQ ID NO: 728670 - DNA, 96 bp, Homo sapiens
tccccagctctgcagccacatactatccgtttgttcaggaaccaccagtgacagatttttgaagagccggaagatccaagcaacagatcatttttc

SEQ ID NO: 728671 - DNA, 100 bp, Homo sapiens
agaccgacttctttctctttaccctcattggcgcttctctcctgcagtccgcctctgggccctgccggaagtactagccggacatcatgagtggctgtcg

SEQ ID NO: 728672 - DNA, 90 bp, Homo sapiens
gaaaaggatccagcttccttctgaaaaggcgatcttcctgtttgtggataagacagtcccacagtccagatggcggactgtggcggcctc

SEQ ID NO: 728673 - DNA, 76 bp, Homo sapiens
gaggtcaggaggatgcaagtcctgacagattcagcaacacttcttactactttgaccgcgatgatgtggctttgaa

SEQ ID NO: 728674 - DNA, 90 bp, Homo sapiens
tgtgcacagaggaatcatcacctccaaatactggtcccacgctgtcggaaaaggtaacagaagatggaactcgaaatcccaatgaaaaac

SEQ ID NO: 728675 - DNA, 98 bp, Homo sapiens
acaaattctcagtaagatcccagatgagatcaatgacagagtgaggtttctgcagacaatcaagttttgagactctgggatattcaacaccagctgtc

SEQ ID NO: 728676 - DNA, 98 bp, Homo sapiens
cctcacaggcaatggccttacctccctgccgcccaatttggccgtcgcagaacacacagaagttgggcctcattgggcctccaccacctccactgtca

SEQ ID NO: 728677 - DNA, 75 bp, Homo sapiens
ggccacggtgatgagccgggcctggcggacgcggcgccatcgcagtcaggaaacttcctcctggccaaccctgtg

SEQ ID NO: 728678 - DNA, 75 bp, Homo sapiens
cagagtttccccgcaagtctttcttgttataagcctcagagtttgaagaccccttagttggtgaagatacagaac

SEQ ID NO: 728679 - DNA, 97 bp, Homo sapiens
agcgcgtcgaaagcctgaggaaaaagcggccgcttcatccatgagctcggatttcccacattacaacttcaggatgcctaatattggattccagaat

SEQ ID NO: 728680 - DNA, 100 bp, Homo sapiens
ggactccaaggacagccacacgtctgtcaccatggaagactcggtgaaatacctggagtgctcagctctcacccagagaggcctgaaaaccgtgttcgac

SEQ ID NO: 728681 - DNA, 100 bp, Homo sapiens
ctgagctacccgagcggcggcggcggcagcagcggcagcggcaagcaccgtgtcatggagaaactccagctgggcccagagattctgcagcgggaaaatc

SEQ ID NO: 728682 - DNA, 75 bp, Homo sapiens
attggcctctttggggtcatcgtcgcaattcttcaggtctgctcaccaggtggccagataccgcccacgtgcccc

SEQ ID NO: 728683 - DNA, 100 bp, Homo sapiens
gcgcctaaagtctgagagagggaagtcgcctctgtgctcgtgagtgcatggggtataaggtcagcgccaacggcaatgtcctgcgcagcgagatcgtggg

SEQ ID NO: 728684 - DNA, 100 bp, Homo sapiens
cccgcgaccactggcacattcttgctgacagccgccctggagggagggccagcgtggacaccaaggaggctgagggcgccccccaggtggaagccggcaa

SEQ ID NO: 728685 - DNA, 98 bp, Homo sapiens
acagaatacattgctgattatctcatgcagctgatgttctaatcatgtcagataaagatgatattgagactccactgctaactgaagcagcccccatc

SEQ ID NO: 728686 - DNA, 100 bp, Homo sapiens
ctcaccatcatcaagacggaaaaagtcgatctggagcttttcccctccccggtcttcccaagggattgttgaagaaacttctgaagagggaaactctgta

SEQ ID NO: 728687 - DNA, 87 bp, Homo sapiens
ccatcatcatgtcctcattcgtcagtatcctctcctctctgaatctcaaacaaggtaaggttgataacggcaaaacaaaggatctat

SEQ ID NO: 728688 - DNA, 98 bp, Homo sapiens
aggacatcactttagatgatgccctggtacctgacagtgtaaagaaggagctcctacaaagaataagaacattccttgctcagcatgccagcctttaa

SEQ ID NO: 728689 - DNA, 98 bp, Homo sapiens
gccaaggatggagaggaggagagtctacagactgctttcaaaaaattaagagtggatgcatcagggtgctggagaatctggtaaaagcaccattgtga

SEQ ID NO: 728690 - DNA, 98 bp, Homo sapiens
gacaggactttgggtctgggtgagccttctcgtggcggcggggaccgtccagcccagcgattctcagtcaggtgagcacctgcggatctgtccccagg

SEQ ID NO: 728691 - DNA, 90 bp, Homo sapiens
tggtcaaggagaagctggctggcccagcgtgtgaggcggccgataccagggtcagatcagaccacaacgatgagtgggggggaaggagag

SEQ ID NO: 728692 - DNA, 75 bp, Homo sapiens
aagggctggaggccccggcggctaggccaactgcattgactccacagcctcagccgaggccgtgtttgcctccga

SEQ ID NO: 728693 - DNA, 74 bp, Homo sapiens
gtggcgctggatccggcagcagctggcgatgcaaaaactttctggatggagctagaagatgatggaaaagtgga

SEQ ID NO: 728694 - DNA, 100 bp, Homo sapiens
cgaagccacgctccggatggaaaacgtggacgtgaaggaggaatggcaggacgaagatcttcccagggttggggtctgctaggtccccggaatgagttgt

SEQ ID NO: 728695 - DNA, 100 bp, Homo sapiens
gtaactgcacaagtgaaatcactgacacaaaaagttcaagctggtgcctatcctacagaaaagttacagctcttttgaggaagcttaagcagcaatccag

SEQ ID NO: 728696 - DNA, 82 bp, Homo sapiens
gccgcagagcgccgaggaggctttcctgctggtggcaaccgcctacgagacactcaaggttgggcccgaaggcatcctgcag

SEQ ID NO: 728697 - DNA, 100 bp, Homo sapiens
cgcatacaagtgggtccatcagccgccggaggacacccatgaagctaatgaagacggtgatgactgtcttagggtaaagtcgagtatctggtgaagtgga

SEQ ID NO: 728698 - DNA, 100 bp, Homo sapiens
actatggggcctttatcaaaatcccaggctgtcggaagcaagtaatccagtccctcatagcactggtgaatgacccccagcctgagcacccgcttcgggc

SEQ ID NO: 728699 - DNA, 82 bp, Homo sapiens
accaagcctctacaggggcctcccgcgccccccgggacccccacgccgccgccaggtgagaagccctaccactgcaactggg

SEQ ID NO: 728700 - DNA, 51 bp, Homo sapiens
ggccagggacacggctcaccgtgctaggcagaagctcctcctggggtagag

SEQ ID NO: 728701 - DNA, 82 bp, Homo sapiens
gcaagtattgctgtgggtgctgggacttcccgtccgcggcgtggagggtgtccctggccagtgtccttccacctgtccacaa

SEQ ID NO: 728702 - DNA, 74 bp, Homo sapiens
gatttgttaaggattccaagtaactcttatttgtcgtggcattcctggtggctttccatcagaacaagcagctc

SEQ ID NO: 728703 - DNA, 100 bp, Homo sapiens
gctgcctcggcggagcagaggaaccacacgctgatcatgcttcctgcagatttcacaaaactgcatcttactgacagtctccacccacaggtgacccacg

SEQ ID NO: 728704 - DNA, 100 bp, Homo sapiens
gtcttccaagaacagaagaaaatgatccaggcccaggagaactgtgtttatgaaactgtagttttgcctttggatgaaagggcatttgagaagactttaa

SEQ ID NO: 728705 - DNA, 101 bp, Homo sapiens
agaggtacctctccttttccctctccctttccctaagaaagtgttgtgaagagcgaagacttttcgctcccagcttatatggatcggcgtgaccacccctt

SEQ ID NO: 728706 - DNA, 100 bp, Homo sapiens
ctcccaccagcacgtgaagatcacctaccgtgatggccgcactggcgaactgggctaccttaaccctggggtattcctagtcgtaaaataaacaacacag

SEQ ID NO: 728707 - DNA, 83 bp, Homo sapiens
ttaacctgggaagtggaaccggatatttaagtacaatggtgggcttaattttagattaatactgaggaacacgtggatgcagc

SEQ ID NO: 728708 - DNA, 75 bp, Homo sapiens
gagtgctgtcccttggaacaggaggagtaagattgagagccatccagaaatgggcttggtgacgacccctgtcag

SEQ ID NO: 728709 - DNA, 75 bp, Homo sapiens
atctagaatcaactgagagagatgcttaaaaatcaccagttactttaatgatattgcctaagtgtaatcttgaac

SEQ ID NO: 728710 - DNA, 50 bp, Homo sapiens
ctcattcaaggttacccagttggttggtgaaaaccctgtgtccttggaga

SEQ ID NO: 728711 - DNA, 51 bp, Homo sapiens
gatttcagaaatgcatagttttatccagatgatggatgcaataaaaggaac

SEQ ID NO: 728712 - DNA, 51 bp, Homo sapiens
gaaggtgatccagagtttgccgaagaatgatggttcagaattttcaagatg

SEQ ID NO: 728713 - DNA, 100 bp, Homo sapiens
ttgcattgcctgcaagctctgcgaggccatctgccccgcccagagctcaggccccggggcctccagcggcaccagcggagaccacggtgagctcgtcgtc

SEQ ID NO: 728714 - DNA, 101 bp, Homo sapiens
gaaaatgttgcttcatatgagttcttcacacacccccattcggcgtagtacccagagagctcaagatgtgtggcagttttcggatggaagctcgagagccc

SEQ ID NO: 728715 - DNA, 96 bp, Homo sapiens
ttcctcgtcatccccctgcaccaggaaactctgctcttaaagacaaagaagatcagtttgggagaacaccacttatgtattgcgtgttggctgaca

SEQ ID NO: 728716 - DNA, 100 bp, Homo sapiens
gagactacttctggcatcctttaagaatgagggtgccgaaccagatctaatcagctgtatgcaggagctattcttgaagtttgtggatgaaaattgggaa

SEQ ID NO: 728717 - DNA, 90 bp, Homo sapiens
caggcctggaagaaattgacagagctttgggcattcctgaacttgtcaatcaggaccctgatgctcccataagacagaaaatgccccttg

SEQ ID NO: 728718 - DNA, 75 bp, Homo sapiens
gagtcaacagactgagcgcgtccaggcctgacagctctgcggctcgggccctgagccttggtcatctataatttc

SEQ ID NO: 728719 - DNA, 82 bp, Homo sapiens
taaagcaattatgaaagaagtcattccttttttgaagtgggtaattccagaattgattggccataccattgtcactgtatta

SEQ ID NO: 728720 - DNA, 101 bp, Homo sapiens
cctttttcgtttttcggatgatgccttcaatactacctttatttccaccataggtgatgatgaacagtctacacagatggctgcaagttgggaagatgata

SEQ ID NO: 728721 - DNA, 74 bp, Homo sapiens
tctgccaccacctccaaagttgcttgcacagcaggacatccaggcctgctcggccgcctggaaggctgacggcg

SEQ ID NO: 728722 - DNA, 90 bp, Homo sapiens
atcagtaccagagcttgaagaacaggattccacccaggcaaccacacaacaagcccagcagcagcagcagcagcagcagcagcagcagca

SEQ ID NO: 728723 - DNA, 100 bp, Homo sapiens
gagaggcaccgggatcgtgaccgagaccgtgaccgagagcgtgaccgagagcgcgaatatcgtcatcgttagaaggtcatcttatgcagatatgctacat

SEQ ID NO: 728724 - DNA, 74 bp, Homo sapiens
ccgagcgcagagcattggcaggaggggcaaggtggaacaggctggtcgtctgatgataaggaaattagttgcag

SEQ ID NO: 728725 - DNA, 97 bp, Homo sapiens
tgtggagatggcgactagtggacaacagaacaatattggaatggtgatgtcagaaaaggttgactggttacaaagccaaaatggagtatgcaaagtt

SEQ ID NO: 728726 - DNA, 90 bp, Homo sapiens
cgccagatcaacctggagctctacgcctcctacgtttacctgtccatgggctcctcgcacctaccccagcaactcaaattcaccacctcg

SEQ ID NO: 728727 - DNA, 100 bp, Homo sapiens
gaaatgggaatgtacacgataattaaagagtaaagttgtgctcaacgatacgaaaaccggtgaggtccaaacattgtggtgtgtgcaaccgctgtatagc

SEQ ID NO: 728728 - DNA, 100 bp, Homo sapiens
gaaaaattcaagaagttgaaaaacgcttttcacgtcacctggagagatgcacaggtgaggggaagtggcttcgaaacattgactattaccgtttagatgg

SEQ ID NO: 728729 - DNA, 82 bp, Homo sapiens
ggacagaagatggtgcagaagaaaccagccgaacttcagggtttccaccgttcgttcaagcgctggccgcgcgccgaacccg

SEQ ID NO: 728730 - DNA, 99 bp, Homo sapiens
tctgggaacagccgagctttgcaagatgcatatcaaatgagtacagacacttgcagcattcagataaaagaatcagagtgtctcaacccttgacaagag

SEQ ID NO: 728731 - DNA, 100 bp, Homo sapiens
acgacagacagggccagcccgtggagatcgagaggacagcgtttgtggggttcgtggagaaggaaaaatctgtgaatttctggtacgtgctggtgatgaa

SEQ ID NO: 728732 - DNA, 98 bp, Homo sapiens
gaagatggcgaaggtctcagagctttacgatgtcacttgggaaggtcagttcaccgggacctggaggcccagattgcgatcgtgacggagaaccaggc

SEQ ID NO: 728733 - DNA, 83 bp, Homo sapiens
tgcttcagagagaggaagccgaaaacaccctgcaatctttcagacaggctttcttcgagagtcacccagctccttcagctgag

SEQ ID NO: 728734 - DNA, 78 bp, Homo sapiens
gaacggaagtgaggatcacctacagtctgcgctcctcagaccaccggcaggtgaacagcctgatgcagaccgaggagt

SEQ ID NO: 728735 - DNA, 100 bp, Homo sapiens
cctcctgagtggctgggactacaggcgaacagttgtctccaaacgtggtgttgccgtcagtggtcccaccaagaggaggggaatggcagattcactggag

SEQ ID NO: 728736 - DNA, 49 bp, Homo sapiens
aggctgaggagaaagcggcgcgcggaggctgctctttggcgtaaattgc

SEQ ID NO: 728737 - DNA, 75 bp, Homo sapiens
ccggcatcgtggagagtgttggagaaggggtgactacagtcaaaccagggatgaaggtggctggagaagaggacc

SEQ ID NO: 728738 - DNA, 98 bp, Homo sapiens
ccgaggcccatggcaggatccactgaccagattgcacatttacggccgcagactcgccccagtgtgttttactgggacctgatcatgctgctgctgat

SEQ ID NO: 728739 - DNA, 100 bp, Homo sapiens
ctctccacagccatcactcatgtccataaggagggtctaaaattcccaggactccacagctttgcaccagataagcctggaggaatactaatgatggatc

SEQ ID NO: 728740 - DNA, 100 bp, Homo sapiens
cgccacgatgccggggatcgacaagctgcccatcgaggagacgctggaggacagcccgcagggactgttgacatttagggatgtggccatagaattctct

SEQ ID NO: 728741 - DNA, 99 bp, Homo sapiens
gcgcagggcctgcagcgggagctggacggcgagcgcgagcggcgcgagaaagaaaaccaattctgtgtcctcggaggaccacagcccagttgggcccca

SEQ ID NO: 728742 - DNA, 49 bp, Homo sapiens
ttgagatcgagaacctgcagaccaggacccgtgcatctcttccgactct

SEQ ID NO: 728743 - DNA, 100 bp, Homo sapiens
caaccatctgaggaaggaccaggaaggaaagttgggacagaacaagtcaactggcaagtccattgctcagcttgttgaaatactctgcacagaatgcaag

SEQ ID NO: 728744 - DNA, 71 bp, Homo sapiens
gtgaacactctgaaagacggaagtcatccgtccttggctcaggatttggagagcttgcaccaccaaaaatg

SEQ ID NO: 728745 - DNA, 100 bp, Homo sapiens
caaccgggaccctggcccggtatggctgaagtcagcatcgaccagtccaagctgcctggagtcaaggaagctattgacctgaaaagtggttctggaaaag

SEQ ID NO: 728746 - DNA, 83 bp, Homo sapiens
cgcagccgtagacaccagctccgaaatcaccaccaagcccagagcctgaccacctgcgaggtctgcggtgcctgctttgagac

SEQ ID NO: 728747 - DNA, 98 bp, Homo sapiens
caaggagcgtcgggtcttcctgctcaacgacatgcttgtctgtgccaacatcaacttcaagtttgttaacactttgcataaagatgtcaacatctccc

SEQ ID NO: 728748 - DNA, 73 bp, Homo sapiens
tgcaaggagcgtgcgtgcgtctgtggcctgattccaccaagagaaggcccaggaggaagaagagaaaaagatg

SEQ ID NO: 728749 - DNA, 88 bp, Homo sapiens
cgagaccgcgtgcgaggaccggtcagccagagcagcctccccatgctgtcctcgccgtcaccgggccagcaggtgcagaccccgcagt

SEQ ID NO: 728750 - DNA, 100 bp, Homo sapiens
gggatctaaaggcgggactgccacgtccaagcaaaccgggaaaggagaggatcccggagccggtggacgccctgcttcatctggcccgccagaatcgggc

SEQ ID NO: 728751 - DNA, 80 bp, Homo sapiens
attcgaactgaagggcttaggcccagctgtcttggagcaaaacatctgttgtggggttctagctgtcaacattcttggtc

SEQ ID NO: 728752 - DNA, 75 bp, Homo sapiens
tctagagcagggatcagcaaacttgctgtaaagagccaggatcgaaacatgattctgggcaagcatgggttcttt

SEQ ID NO: 728753 - DNA, 74 bp, Homo sapiens
agagcgcctggaggctcgagcggaggcatgttggcagataaattgaacatgactccagaagaagctgaaaggtg

SEQ ID NO: 728754 - DNA, 96 bp, Homo sapiens
ccgccgcgctccagcctcgctctccgccgcccgcaccgccgcccgcgccctcaccagactgtgagccacaacaccaagaggttccgctttgccctg

SEQ ID NO: 728755 - DNA, 100 bp, Homo sapiens
ccacggcccgggcatgggctgcaagggagacgcgagcggtgcgtgtgccgcgggtgcgctgccggtgacagtgccgcagaatggaattcggcattgttcc

SEQ ID NO: 728756 - DNA, 100 bp, Homo sapiens
ctgaggtccagatgaaagagaagtttctggtcactccccaggattatgcgcggttgtccttctattcaggccactcttcgttttccatgtactgcatgct

SEQ ID NO: 728757 - DNA, 80 bp, Homo sapiens
gttggaagcagccgatccagcctgcggagcctgtggggcagaaacatgatcaggggcaagtcttgttggatgtcgtcttc

SEQ ID NO: 728758 - DNA, 76 bp, Homo sapiens
ctccagcactaactatttcaaaagggcaagtgtccagagaatggctgggatgaaagtacacttgaactctttttac

SEQ ID NO: 728759 - DNA, 96 bp, Homo sapiens
ctctgctgcaccgacctcgacgtcttgcctgtgtcccacttgttcgcggcctataggccatggaaatagcatctcaaaggaccaaggaagaacggt

SEQ ID NO: 728760 - DNA, 127 bp, Homo sapiens
gtcaagatgaagaaccatttgcttttctggggagtcctggcggtttttattaaggctgttcatgtgaaagtttccaaggcaggaaaggtaaagagacaaagaaagtgccttgtacagatgcaaacgg

SEQ ID NO: 728761 - DNA, 75 bp, Homo sapiens
cgtacatccggcgagtagctggcggtcccgggtgctgctgttttcggctttgtgagaaaccttaccatcaaacac

SEQ ID NO: 728762 - DNA, 102 bp, Homo sapiens
gaatattttgcaccctatcaagcagagcggtttcgaagacttgggttgggtgctgattgaccggagcggccgtcactttggtacaatcctcaattacctgcg

SEQ ID NO: 728763 - DNA, 100 bp, Homo sapiens
atcagttgaaaacagtacccagtgaagccattcgagggctgagtgctttgcagtctttttcatggatcctcactctccttggtttccagcacatcgtcag

SEQ ID NO: 728764 - DNA, 82 bp, Homo sapiens
cctggagcagtacgtggtggccaagaaccccaagctgatgctgcgcagctgcctgtggaggaaccgattgtgtccacagatg

SEQ ID NO: 728765 - DNA, 97 bp, Homo sapiens
cgctccccgaggccggccgcctggtcatggcgcagccgggcccggcttcccagcctgacgagaacagcccatcttcaccacccgagcgcatgtcttc

SEQ ID NO: 728766 - DNA, 71 bp, Homo sapiens
gacggggcggacggcgacgcagcccgcggcagaagatgatcatcgagcccaccagcccttgccttctccca

SEQ ID NO: 728767 - DNA, 75 bp, Homo sapiens
caccacttagtaaactaatgaaagcctattgtgaacgacaggcatttcagaagatggacacaaagaagaaggagg

SEQ ID NO: 728768 - DNA, 90 bp, Homo sapiens
caaacacaagaaaagcctccagaagctcgtgtccgactggaacacactcaagagcaggttgttcgccgcaggacccagcggaggaagtcc

SEQ ID NO: 728769 - DNA, 100 bp, Homo sapiens
gttggccacaacttcattgctgggaaaagctcaacatgaactctgctcctacattcatgcattttcctccaaaaggcagacctaagagagctgatacttt

SEQ ID NO: 728770 - DNA, 97 bp, Homo sapiens
aatgtgactgccatggagtgaagggacaaaagtcaggtcaattcagtgaagatatgatacccacagtgggcttcaacatgaggaaggtaactaaagg

SEQ ID NO: 728771 - DNA, 83 bp, Homo sapiens
agcacctggtgcctcgggactgctccgatgcccgacaatgcagatcttcgtgaagactctgactggtaagaccatcaccctcg

SEQ ID NO: 728772 - DNA, 75 bp, Homo sapiens
ctgacaaatgcttgctgacctgggccagagctcttcccttacgcaagactatggcagccagggacgccacttcag

SEQ ID NO: 728773 - DNA, 137 bp, Homo sapiens
gcgcgcgggaggggcggggccacgctgcgggcccgggccatggccgccgccgatgccgaggtgtcttcccggaccagcggtgcagtcccgccaaaggaagaggagctccgggcggcggtggaggttctgaggggcca

SEQ ID NO: 728774 - DNA, 100 bp, Homo sapiens
cctagaccaagtgataaactgaaccctaaaacaattaatccggttggtttgttggaccttgaactcaatcggctgacgaaagcgctatttttggctttag

SEQ ID NO: 728775 - DNA, 75 bp, Homo sapiens
aagaagcacctggatgagacatttgctacagcatcccacattaagtcaacgatcgaccttcagaagatgcccttg

SEQ ID NO: 728776 - DNA, 82 bp, Homo sapiens
gagcagcggcgcagaaaggtggaggccgggaggacgaagatgagcagcaccagcagtaagagggctccgaccacggcaaccc

SEQ ID NO: 728777 - DNA, 96 bp, Homo sapiens
ggcagccgcaggggcccccgctcccgggctcggcggcgcgggtgaacgtgagcgtgaagagtgaatctaccaagaacgttggcaatgaaaattgag

SEQ ID NO: 728778 - DNA, 51 bp, Homo sapiens
gcgtttccctggagaggaagaggcaagatatggtttggagtgcctttttcg

SEQ ID NO: 728779 - DNA, 80 bp, Homo sapiens
gctgggcttcgtccagatcgggaagggaaataatgcaaaaggtgtcccaaggctcctgaccagtgaacaaagatttgaga

SEQ ID NO: 728780 - DNA, 90 bp, Homo sapiens
cagaaggatttgattcagcaaatgggatcaatatttcacctgatgataagctgcctctaagaatcaaacttcactcttgggagaaccacc

SEQ ID NO: 728781 - DNA, 101 bp, Homo sapiens
caaataaattgcaagcattctatccaaatggctgtgcgtttgtcacattttctacaagggcaatggcacagaatgcaatcaaagccatgcatcagtctcag

SEQ ID NO: 728782 - DNA, 50 bp, Homo sapiens
cgctgcgggcccgctccgacgcggaagggtgcagttctacctcaagaaat

SEQ ID NO: 728783 - DNA, 98 bp, Homo sapiens
caccatcaagttcttcaggaatggagacacggcttcccccaaggaatatacaggtggtcctgacaaccaagtccactttgaagggtaccaggtgtcca

SEQ ID NO: 728784 - DNA, 100 bp, Homo sapiens
caggaagtgtcacacagcagtcaagtatgtcccaaacgtctgccaatggaagcactgttgtgaagaacttatgaaaattgagattatgtcaccacggaaa

SEQ ID NO: 728785 - DNA, 51 bp, Homo sapiens
agtggcagagagtatgcattaaaggtcaaaatgcagatcttcgtgaaaacc

SEQ ID NO: 728786 - DNA, 74 bp, Homo sapiens
tggccgttttacattggctgttttcctcacattcctcaagcaggaactctagccaagaaccacggcctacactc

SEQ ID NO: 728787 - DNA, 82 bp, Homo sapiens
cttcagtggcttcaaaaaggaacagcggcgcctgggcattccaaagagttatggaggttttgatgactatggtggctataat

SEQ ID NO: 728788 - DNA, 83 bp, Homo sapiens
ttcgccgccttctggcagcggtacccgaatccctatagagcggaacctgaatcccaaagcagcctgtttgaaacggcgagaag

SEQ ID NO: 728789 - DNA, 51 bp, Homo sapiens
ggagtttcttggtaaatccagaatcagattgtgaataagtggaatacagct

SEQ ID NO: 728790 - DNA, 110 bp, Homo sapiens
ccaattatggctcattgtagcctcaaactcccaggctcaagcagtcctaccatgtcagccttcccagtagctgggaccacagtttgagttcctgagatctagttggtgag

SEQ ID NO: 728791 - DNA, 50 bp, Homo sapiens
ctaaatttacctggaattagatcagaggagatgttaaagtaacccatctt

SEQ ID NO: 728792 - DNA, 83 bp, Homo sapiens
ctcaacaagaagatagaccgtctgcaaggcaccaccatcaggtatggctgatggcaagcattgtacttttccacatctgcctg

SEQ ID NO: 728793 - DNA, 82 bp, Homo sapiens
ccggaattctgagcaccaaaaggagcctgttcctctcacgccctcacctggctgagccgcagtagttcttcagtggcaagct

SEQ ID NO: 728794 - DNA, 101 bp, Homo sapiens
taagagaagaaaaactacctgtggtaggaattggaaagcatctgtgtggtatggcaacagaaatggaaacactttcagttttcagaagttatgaaccgggt

SEQ ID NO: 728795 - DNA, 82 bp, Homo sapiens
caacccactcaggcacttccggagtgtggccatctggggccgtgtggtatttgccactcaggagacatgtccctatgacata

SEQ ID NO: 728796 - DNA, 83 bp, Homo sapiens
tccccctgccccgttcacaatgtatgctccagaatcactgacagagagcaagttttctgtggcctcagatgtttggagctttg

SEQ ID NO: 728797 - DNA, 75 bp, Homo sapiens
aggtcgccctcaaggccatgatcaaaacgtcacaagaggaccagattaaaaatgctattgataaactttttgtgt

SEQ ID NO: 728798 - DNA, 100 bp, Homo sapiens
gcactgaaaattctggataatggtgaatgggtacgagtggctgctttacagaatctggtgaagataatgtccttatattatcagtacatggagacatata

SEQ ID NO: 728799 - DNA, 100 bp, Homo sapiens
atttgacttggaagcaatgtttgaacaaactcgaagaacagctgtggaaagaagttgcaaaacactgggaaaagaatttcctccctgcgccattgaggtc

SEQ ID NO: 728800 - DNA, 98 bp, Homo sapiens
ggacttgcaggcccaggacctgctggatacagtacagccagaccgctccaaatgagaagatgaagcaagtgttaaagaagactatagaagaagccaaa

SEQ ID NO: 728801 - DNA, 75 bp, Homo sapiens
ttcctgccggccggtcggtttccggatgaaacgaggagccagaatcttgcctcctggaatccttcaaatcctgaa

SEQ ID NO: 728802 - DNA, 75 bp, Homo sapiens
gctacctgcattaagtcaggactgaggttgcagtgagagcagatgctggcaagaagcacttaccagacaagcagg

SEQ ID NO: 728803 - DNA, 80 bp, Homo sapiens
tctttgaactactgccggagcttctgccaggaacctagaaagattgtacaatgaatggtgattctcgtgctgcggtggtg

SEQ ID NO: 728804 - DNA, 82 bp, Homo sapiens
agggacagcgacttccttgcagcctcttctccgggtgccgtgagcgatgtggagatgcaggaacactatgatgagttttttg

SEQ ID NO: 728805 - DNA, 58 bp, Homo sapiens
cgtccgttctctcaggctcccgttcagatccagagacaatggccccgatgggatggag

SEQ ID NO: 728806 - DNA, 100 bp, Homo sapiens
ccaggccttggtcctagcacccactcgagaattggctcagcaggaaatgcaacctcaccacaagtacaaagaccatctttcatggactactttgataagc

SEQ ID NO: 728807 - DNA, 100 bp, Homo sapiens
gatgatgaaataacatggggaaatgatgagttgccaatagagagaacaaaccatgaagattctgataaaggccaggtgtggtgtcttacacctgtaatcc

SEQ ID NO: 728808 - DNA, 75 bp, Homo sapiens
tggcccgccacagcgacgccggcgccgagggacaccgcagtatgaggcagaggtcagcgccaacggcaatgtcct

SEQ ID NO: 728809 - DNA, 82 bp, Homo sapiens
cgaggcgtccaataagcacggccatgcgagggcgctctacgtacttgtggtctacgacaaagatcattccactcagcctggg

SEQ ID NO: 728810 - DNA, 100 bp, Homo sapiens
accatccctaaccggctggctgcagacccggtgaagtcccgcttggcttttgggaagcccctggtggagcagggcacagtgctggcggacatcgcgcagt

SEQ ID NO: 728811 - DNA, 100 bp, Homo sapiens
gcagcaagcccaggcggcggtggaaaggtacggttcctggagcagcagaacaagatgctggagaccaagtggagcctcctgcagcagcagaagacggctc

SEQ ID NO: 728812 - DNA, 75 bp, Homo sapiens
tgtaaagaaagaagatggaactttctatgaatttggagaagagctgcatgctgtttcccttgaacaacatcttct

SEQ ID NO: 728813 - DNA, 75 bp, Homo sapiens
atcccgcggcgatccgagcatgagcctggagcgcgagcttcgccaacaacgcttcttcggtgaagttcttttgta

SEQ ID NO: 728814 - DNA, 90 bp, Homo sapiens
agaaaaggtcgagaggcacattcagcgccaggtaactaaatgaccatggaatctggagccgagaaccagcagagtggagatgcagctgta

SEQ ID NO: 728815 - DNA, 74 bp, Homo sapiens
ccgagccgggatctcaggtcctcgggggcggcggccacgccaaggacggaatatggctcaagcctggaagatga

SEQ ID NO: 728816 - DNA, 99 bp, Homo sapiens
ctgttcattggaggtgtcactggatggctggaagtgatggagagagtattggaaactgtcccttttgccaacgccttttcatgatcctctggcttaaag

SEQ ID NO: 728817 - DNA, 87 bp, Homo sapiens
ccgcgagccccgagccccgagcccggcgcctggctgagtagcagtggagctactgctgtggttcaggcagccctatgcaaacccagg

SEQ ID NO: 728818 - DNA, 76 bp, Homo sapiens
cagcaactcacccagcacacaaaatggatctcttacggcctgcactgcccaaagtcttggaaacttgctggatatg

SEQ ID NO: 728819 - DNA, 75 bp, Homo sapiens
tccatttggtacaatcactagtgcaaagggagcctgccccgctggaggctgcctggtggccctgacctgtgacta

SEQ ID NO: 728820 - DNA, 98 bp, Homo sapiens
tgtcaagacaacagtgatgaggaaagctgtgaaagttctcaagaacagtccactttggaaagtgaagaatggaatccttgggaaggagatgaaaaaaa

SEQ ID NO: 728821 - DNA, 100 bp, Homo sapiens
tggggagggaagggtgtccagccctctcttttgggtggtgagatgctgaggcctgagggtttctagaatatgtggatcgagagaaccatatatacaactg

SEQ ID NO: 728822 - DNA, 75 bp, Homo sapiens
tcatagacgaactccgcaatgaggacgttcaggctacagcatgctggccatagggattggaaccctgatctacgg

SEQ ID NO: 728823 - DNA, 75 bp, Homo sapiens
tcttccactcagcctgtgggagtctctatgctgcagtatacctgaaaaaagcggcagtctgcaacccagaagagg

SEQ ID NO: 728824 - DNA, 75 bp, Homo sapiens
agaacgaggttccggtgtgtccaattttgctcaacttattgtgagagatggcgggtgaaaaagttgagaagccag

SEQ ID NO: 728825 - DNA, 50 bp, Homo sapiens
ccaagccccgctccccgcagccgccaaggctccataaaaatacagactca

SEQ ID NO: 728826 - DNA, 74 bp, Homo sapiens
actaagaccaagtcctcgctggactgctcagggtgccagacctcatcgaggaggagggggccagtgggggagca

SEQ ID NO: 728827 - DNA, 90 bp, Homo sapiens
gtcatccttgtacagcaatctcctcctccactgccactacagggaagtgcatcacatgtcagccaaatttgtatcctactgtggggcttc

SEQ ID NO: 728828 - DNA, 154 bp, Homo sapiens
atgatggtcgtcctcctgggcgcgacgaccctagtgctcgtcgccgtggcgccatgggtgttgtccgcagccgcagtttttgggccatcctcatcataacacacttctgtttttctcctttccattgtcggatgagaatgatgtttttgacaag

SEQ ID NO: 728829 - DNA, 100 bp, Homo sapiens
cttttgtgaaaacaacaccagaagaaattgccaacccttgcagacccaacatgagtgaagtttcctgcaagaaacgggacgactatttggaatggccaga

SEQ ID NO: 728830 - DNA, 90 bp, Homo sapiens
cggaggcagaggtggaggcgctttgaaagcctgacatttaccccggtaactgctgggcatttaaaggctcccaggggtacctggtggtga

SEQ ID NO: 728831 - DNA, 82 bp, Homo sapiens
cttcgtcatgttcttcgcgccctgatggtcagtaggacagaaggtaacattgatgactcgctcattggtggaaatgcctccg

SEQ ID NO: 728832 - DNA, 98 bp, Homo sapiens
tgggcgaagcacgctactacctggtgcagggcctgattgaggactgccagctggcgctgcagatttcttataggaaagacgtgcaggacacccacacg

SEQ ID NO: 728833 - DNA, 82 bp, Homo sapiens
ctcagctctcggcgcacggcccaggtgtcgtgaaaactacccctaaaagccaaaatgggaaaggaaaagactcatatcaaca

SEQ ID NO: 728834 - DNA, 90 bp, Homo sapiens
ccggcactgctacctctgacccaaagcagcacaacaccccgatcccccaaggaggcagaggagccatccagtttgtcacgcattatcagc

SEQ ID NO: 728835 - DNA, 101 bp, Homo sapiens
aggacaggtgaccttcctttctattcacccatctggcaagttggccctgtcggttggtacagataaaactttaagctttagcgtcacctccctcactgggc

SEQ ID NO: 728836 - DNA, 100 bp, Homo sapiens
ctcctcacaagatttatcttttgttcagccaccatgaggatgcacaagatttttcggcggctatgtgactacgtttgtgacctcctcttagaagagtcaa

SEQ ID NO: 728837 - DNA, 100 bp, Homo sapiens
agaacttacctgcctcttcatgcagttctccatcgtgccaggcctgacacatttagggaagggcacccttaccctctgcccctaccacagcgaccggcag

SEQ ID NO: 728838 - DNA, 75 bp, Homo sapiens
cttcaaagagaaaaggcaacatcctgtcacaggccatgctctggcaaaaacagaatggggagaaggaacccccga

SEQ ID NO: 728839 - DNA, 100 bp, Homo sapiens
taaagagaaaaatctggagcagtataatgtgttcactgttggcagaatttgtgccagccgtaccagaatttatcataaactgaaacattttaaattcaaa

SEQ ID NO: 728840 - DNA, 75 bp, Homo sapiens
gaaggaaaaactctaaacgggattacactgggattcctaccggaagcaggtggtcattgatggggagacgtgcct

SEQ ID NO: 728841 - DNA, 50 bp, Homo sapiens
cgaaactttcaccgcgagcgggttttaaaatcaaagatgggaaaatcgga

SEQ ID NO: 728842 - DNA, 82 bp, Homo sapiens
gtatcatgctggccaagaagatcatcattaaggacggaggcacgggtcccctggaagtgacgctgactcagccagtgaggag

SEQ ID NO: 728843 - DNA, 100 bp, Homo sapiens
ggaatgctcctggctggtgcggacacaacccaatagtgagggagataaatctgcaggacatcaaggaagatttagaattggatccagaggaaaacagcac

SEQ ID NO: 728844 - DNA, 75 bp, Homo sapiens
aagcagccgcgctgcgccttccacactgtgcgctatggcctgatatgaaggagtcacgcctcccgcctcccggag

SEQ ID NO: 728845 - DNA, 83 bp, Homo sapiens
cagcgtccgccgcgcctcggccaaggtcccgcagcccccggaagccaatagactccctcagggactctcggtccctcagctac

SEQ ID NO: 728846 - DNA, 100 bp, Homo sapiens
cctttgcctacagatggtgttcacagtgttggtgtggagtcacagcttgacttttgaagcgagatgagcgcagtgtgaagagcacagctgtgcgggtggt

SEQ ID NO: 728847 - DNA, 51 bp, Homo sapiens
gtgaagttctcacggacgacctcattgactacaaggctttggccgaccaag

SEQ ID NO: 728848 - DNA, 98 bp, Homo sapiens
cgtggtgaaggtccggggcttgccctggtcttgctcggccgatgaagtgcagaggtttttttctgcggagtttaagagagctgtgaaagtagcaacag

SEQ ID NO: 728849 - DNA, 100 bp, Homo sapiens
tcgacacacaaagaatagagttgagcctgtgggacacttcggcggagctggagtttgttcagatcatcatcatcgtggtggtgatgatggtgatggtggt

SEQ ID NO: 728850 - DNA, 100 bp, Homo sapiens
caggccccggcagcgcctgggacaaggtgaatgaaaactttgccattgatttgatagcagagcagcccgtgagcgaggtggagactcgggtgatagcgtg

SEQ ID NO: 728851 - DNA, 100 bp, Homo sapiens
ttggaattttattgttctcttatgcagacaaaatggggtatttacctcctgagtgttttgtagttggaaaagagccaccaaagatttccaacaaggttga

SEQ ID NO: 728852 - DNA, 105 bp, Homo sapiens
ccgccgccgccattacggagctcccagtgttcctgccgcatgggaggcatggccccggggtcctggtggccactcgtgcctggtggagagcgagggcagcctgac

SEQ ID NO: 728853 - DNA, 100 bp, Homo sapiens
cgcgaaccgcagtatcatgctggccaagaagatcatcattaaggacggaggcacgggcacacgtgtttcacgttgacaggtttgcttgggacgctagtaa

SEQ ID NO: 728854 - DNA, 100 bp, Homo sapiens
agcagctggcagaagaagcaacacgcaaacgagagctgaggctaatgaaaaacagcttcagcgcctgctcctggtcatcactaaccagatttacttggag

SEQ ID NO: 728855 - DNA, 145 bp, Homo sapiens
cccggtgaaagccaacgcaatgttcggtgcgggggacgaggacgacaccgatttcctctcgccgagcggcggcttgtcatcatggctgggacagtgctgcttgcctactacttcgaatgcactgacacttttcaggtgcatatcc

SEQ ID NO: 728856 - DNA, 100 bp, Homo sapiens
gtgggaggaataacccagactaggaatgccagcatctgccaagcaagcttactcacatagcatattggtatatcaaaatgaaatgcaaggaaccaaaaat

SEQ ID NO: 728857 - DNA, 75 bp, Homo sapiens
ttcatattttggaaagcagtttttaagacaagatgaatttcatcctttcatcgaagcacttctgccccacgtccg

SEQ ID NO: 728858 - DNA, 50 bp, Homo sapiens
cggataagtgtccccgtagagtcaaccggccgaatccgggtgcatggtat

SEQ ID NO: 728859 - DNA, 83 bp, Homo sapiens
gcgagctccaacccgcggccccggcgccaagccgccgtcatcttcttcctgtgccagaccatggtgaatccgggcagcagctc

SEQ ID NO: 728860 - DNA, 74 bp, Homo sapiens
ctgaaagcccctcctaaaccatgtgctggcaatcaagggacccagatcacggtgtcatggagaaactccagctg

SEQ ID NO: 728861 - DNA, 80 bp, Homo sapiens
ggccttcctcgtggccgcctccttcttcctcatcgtggcagctctggtgccttcgtgcatcgctgcggtcgcacagctcg

SEQ ID NO: 728862 - DNA, 83 bp, Homo sapiens
ctgaaggcggacagtctcctgcgaaaccaggcaatgggaacccaagacagaccaggatgaggagcattgccggaaagtcaacg

SEQ ID NO: 728863 - DNA, 82 bp, Homo sapiens
tcacggtgagctgcggcgagcggagcttcgcggggatcctgctggactgcacgaaaaagcttgccgctgttccgtaacccag

SEQ ID NO: 728864 - DNA, 75 bp, Homo sapiens
gcagcaggaagatcttttgagggtattggtggcatggatggaacacaacagcagatttttaaaatgttagcagag

SEQ ID NO: 728865 - DNA, 73 bp, Homo sapiens
aagaaggccttgactacggaggggttgccaggaaccagtgaccttccgggatgtggctgtggactttacccag

SEQ ID NO: 728866 - DNA, 83 bp, Homo sapiens
ccgagaagtgccagaaactgttcctggacttcttggaggaatctattccagaggggagcttcaccacttcattgacggcttta

SEQ ID NO: 728867 - DNA, 75 bp, Homo sapiens
tgggacaacattcagacccatttccagtcatgaccaatcctgaggcaaaagaaacattttaattcactgcacatt

SEQ ID NO: 728868 - DNA, 114 bp, Homo sapiens
gccccggcactgcctggctgcgagcacatgatggcgatacgggagctcaaagtgtgccttctcgggcctgaaaactggttttttaaaatggaagccagattatgacagtgccgc

SEQ ID NO: 728869 - DNA, 98 bp, Homo sapiens
caaactcctgcacaaccacctcaagaattccagtaacaccagtgtggaactgtggctgcaccatctgtcttcatcttcccgccatctgatgagcagtt

SEQ ID NO: 728870 - DNA, 50 bp, Homo sapiens
cagcacctggaggatacctgctacctcttcgagagctgtgcccaggagtg

SEQ ID NO: 728871 - DNA, 102 bp, Homo sapiens
catgagcgtccctgactgcctcagcatcatgacctatgtgtcccagtattacaaccacttctgcagtcctggccaaggtgaccctgagagtgtggctgggga

SEQ ID NO: 728872 - DNA, 75 bp, Homo sapiens
ctcaaatctgaatttaatgagcctgattgttcagttcaagggaatgaagaattcagaataattttggtaaatgga

SEQ ID NO: 728873 - DNA, 100 bp, Homo sapiens
agtggtttgtgcagctctattaccacgggaagcattggttatagtcatgggaaaggaaggtgtccacggaggcacacttaacaagaaagcatatgaactc

SEQ ID NO: 728874 - DNA, 75 bp, Homo sapiens
tcctcttcgacaaccttctcgtctactgcaagcggaaatccaggatcaaaatacttgctggatggtggactcaga

SEQ ID NO: 728875 - DNA, 100 bp, Homo sapiens
tccaaggtttgaaaagcagctggcctgcaaggcaatcgaaaatatcgacaccttaaccaacctggagagtttgtttttggggaaaaacaaaattactaaa

SEQ ID NO: 728876 - DNA, 122 bp, Homo sapiens
ccagctggaaggaaattgctacaagcaactcttcggctaacttcaaaggttacttacagcaagaaaacctcatttctacctgccagacttttattttggaaagttcagatttaaaagaatat

SEQ ID NO: 728877 - DNA, 83 bp, Homo sapiens
gaacaaaaaagtggtgcagtttttgatgaaattgtagagaactatggcgggtgaaaaagttgagaagccagatactaaagaga

SEQ ID NO: 728878 - DNA, 100 bp, Homo sapiens
caccaacaagctgacagtcatagctgagcaaatccaacatttgcaagaacaagccaggaaggtacaaacacaagtgcgccttgcaaaaaaaaactttgac

SEQ ID NO: 728879 - DNA, 96 bp, Homo sapiens
cggttgtcaaggattcagagcagatgtgatctgcgctaggtggcatctcctctcacggatgcctcgacacgagacgacttcctgggccaggtggac

SEQ ID NO: 728880 - DNA, 95 bp, Homo sapiens
gtttactgttgctgtccgtaaactggaacctctgttcactcaagattttgggaaccagtaggacattgacatacatccgagaacattctgtggtg

SEQ ID NO: 728881 - DNA, 88 bp, Homo sapiens
tcttcctgacccgcttcaagaagcctgctgagttcaccacagttgaaaacaccacacactgtgagtttgcctacctgcgggaccttct

SEQ ID NO: 728882 - DNA, 100 bp, Homo sapiens
gtggcggtattgacctgcgtgagttcccgggggacctgcctgagcacaccaaccacctatctctgcagcgtggggatgtacttgtgatgctgaagcagac

SEQ ID NO: 728883 - DNA, 74 bp, Homo sapiens
ggagaagagctatggacacagagaatttttccaagttacagctacctaggtcgacactacccctaaagcaagaa

SEQ ID NO: 728884 - DNA, 90 bp, Homo sapiens
aacttctgtttacatggaactcagacatctgcaaatcatggatgaatctggttatagatggacaagagacgatcattctgcaagcaggca

SEQ ID NO: 728885 - DNA, 83 bp, Homo sapiens
aggtgcttttatattcatctcaaaaacaaaattctgaactcaggacttggcaagagttaaacatagatgtagctgatgtggag

SEQ ID NO: 728886 - DNA, 82 bp, Homo sapiens
tgcaattggatactttaagaaacagaaagatgttgtgtccctcctggtgagcgctgtcccagtgcacccgataatggcgaag

SEQ ID NO: 728887 - DNA, 90 bp, Homo sapiens
catccacctcctgagcagcctgctcctgaggtacagccccgtggtggaggccggctcggacatggtcttccggtggaccatcaacgacaa

SEQ ID NO: 728888 - DNA, 100 bp, Homo sapiens
catttacccatattcttcctcacaagacgatggtacaccaggggttggaaaaaccacactaggcaaagaacttgcgtcaaaatcaggactgaaatacatt

SEQ ID NO: 728889 - DNA, 80 bp, Homo sapiens
cttccggtcacgccatcgttgctgccttcttcgtcaagacctgcctagagctggaacgttacctccagagcgagccctgc

SEQ ID NO: 728890 - DNA, 98 bp, Homo sapiens
gcgtgagcggaaatgaggaggagatggtggaggaggctgaagcttcctaaccaagcgaagccggcaggtctgtgctgaccccagtgaggagtgggtcc

SEQ ID NO: 728891 - DNA, 82 bp, Homo sapiens
aacgtgaaccagatcgggagtggcaccatggacctgcccttccaggctttatcctgtggataaacgcagagtgaacgagttt

SEQ ID NO: 728892 - DNA, 75 bp, Homo sapiens
ggataccaaatagcagtggaaaccgcatgttggcagataaattgaacatgactccagaagaagctgaaaggtgga

SEQ ID NO: 728893 - DNA, 74 bp, Homo sapiens
tatcgtaatccccaaaacagtgcacagacggctgacggctcacactcgctatgatggggacatcactgacctgg

SEQ ID NO: 728894 - DNA, 100 bp, Homo sapiens
gacttagtggattatataaccacacattataaggggccaagaatagtgcttgctgctgctggaggcagtacttaattttcctaaatattgtgaacccgtg

SEQ ID NO: 728895 - DNA, 83 bp, Homo sapiens
ggaaattcgttgatgttctggtggattatggatcagatccaaatcagtggctaccccaggcagccaaactataatgccttgcc

SEQ ID NO: 728896 - DNA, 104 bp, Homo sapiens
ccagatgacattagacactcctgagatacgagaagcatcacttccttcagacagagtcggtttttggattcaaagcataaaaaccattacaagatatacaatct

SEQ ID NO: 728897 - DNA, 75 bp, Homo sapiens
caggaaaagataactttcgacacacctgtagacgttcgccaggtaaagctcacctgttctccaggaccagccctg

SEQ ID NO: 728898 - DNA, 100 bp, Homo sapiens
tttagggtcctttatatagaagggagagtagaaaaccgcctgattcccactgagttacgccgagaggctctggccttacaggggtccctggagtttgatg

SEQ ID NO: 728899 - DNA, 75 bp, Homo sapiens
ggccagttaaacctgtcgggtagaaacctcagtgaaggagtgattggggcagatgtgagagggcacggcctcatc

SEQ ID NO: 728900 - DNA, 83 bp, Homo sapiens
tcggttcgggtgcgctgctcaaggacacggtctacaccgacttcgacggcagcagcccagacgcggcacagagagggcctggg

SEQ ID NO: 728901 - DNA, 96 bp, Homo sapiens
ggaggcgtcgctgattccagagagctaaagccgatggacctagaagaatcccttaggatgaagctgagtcttaccaaggtagttaatggctgtcgc

SEQ ID NO: 728902 - DNA, 97 bp, Homo sapiens
atcagaaccacattttgggtttgaagaatcttctacatgcctacaacacagcagtcccctcaggatgagcaggaaaagctcttggatgaagccatac

SEQ ID NO: 728903 - DNA, 75 bp, Homo sapiens
cccaggaggagcgggactgccacctgaagaccattagcagcctgaagcaggaggataatgaagcgccggactctg

SEQ ID NO: 728904 - DNA, 75 bp, Homo sapiens
ttcttacaacatggcagacattgacaatgtgaccgcaacaagggaaaacatggcttatactgtggaatgcctgcg

SEQ ID NO: 728905 - DNA, 100 bp, Homo sapiens
caagaaaatcaatctaaacatttgtgggaagttgtattcatcaataatgaaatgctgactaaggaacaagggtgtccgcaatgttgccagtgtctgtctg

SEQ ID NO: 728906 - DNA, 100 bp, Homo sapiens
aagaaattgttcagttcttctcagatctctttcactgggcctgcctcaatgaacgtgctgcccagctaccccgaaacacggcacctgccggctatcagtg

SEQ ID NO: 728907 - DNA, 98 bp, Homo sapiens
ggaagactcccactccctgaaatctggagtgaagaacgccgccatccagccaccattccaaggctggatcaggtgataattcacgtaggagcactgag

SEQ ID NO: 728908 - DNA, 100 bp, Homo sapiens
caacttacccgagaacgtgcgggaagagaagatcatcgagcatttcaaacggaaggtggacttttaaatattctccactgaagcaaatgctgcaacaatt

SEQ ID NO: 728909 - DNA, 136 bp, Homo sapiens
atctgctcttcttgcccattacctgctgggtttaccatggcaatggggatttatactgggcaatgtttttggaacagtgccagtggttgcttctgcacagacacagcctgcttcatcaagtgtgcctgctccattt

SEQ ID NO: 728910 - DNA, 75 bp, Homo sapiens
acggtcatcggcggcgggctgatgggcgccggcattgcccaggacactcatgaggaccatgatacttccactgag

SEQ ID NO: 728911 - DNA, 50 bp, Homo sapiens
acaacctgcttctcacctacctgatagaggagaggagacgccgtgagcgg

SEQ ID NO: 728912 - DNA, 100 bp, Homo sapiens
tggatggggtcaagtcctggctgaagccacggctgggacaggaagccacaagctagcaacatggaccacagatatactggtgactccgctctcctctggc

SEQ ID NO: 728913 - DNA, 83 bp, Homo sapiens
cgagcgcgagcggcgcgagaaaatattgaaatggattccaggcgtgtgcctcgagacaagctggcctgcatcaccaagtgcag

SEQ ID NO: 728914 - DNA, 97 bp, Homo sapiens
ttaccttgttttgtggggactggagagacaagtaaactctcagagtaactgtcccctctgactaccatttctaagaaaaaggtgcactgcctcaaca

SEQ ID NO: 728915 - DNA, 89 bp, Homo sapiens
ggggcctctgtgcagctggtgtttggctttgaggactggagtccagagttgccaccagatgggatattcaaaaatacgccagagaggcc

SEQ ID NO: 728916 - DNA, 100 bp, Homo sapiens
ccggtccctggggaatatgcggcgcgcgtggatcctgctcaccttgggcttggtggcctgcgtgtcggcggagtcggggatcatggaagctgataaagat

SEQ ID NO: 728917 - DNA, 75 bp, Homo sapiens
gtggaggcattttggggcagaatacagagatatggaatcaggtggcacggtgcacgccaagatggctgtgtccac

SEQ ID NO: 728918 - DNA, 101 bp, Homo sapiens
ctgacgtcccgtggacttttggaaaaagacttccaaaaagtagcccactttattcacagaggctctctaggaaacaccagaattatcagtgaagaatatat

SEQ ID NO: 728919 - DNA, 100 bp, Homo sapiens
caacaccctgatctggcatggacatggtacatccccagttacttagacaaggacgagctctgtgtagtgtgtggtgacaaagccaccgggtatcactacc

SEQ ID NO: 728920 - DNA, 111 bp, Homo sapiens
gggcggtgcgcactgcgggcgcatccctgccccggcgccgtccgtgcccgcgggacctgacagccgggtcagagctggagatggagctgaagatgctgaagtctcagtcca

SEQ ID NO: 728921 - DNA, 98 bp, Homo sapiens
gagcgccgttgctgagccctgcaaatagcagtgtttcctgaggttataggcgggtgtttgaggagtacatgcgggttattagccagcggtacccagac

SEQ ID NO: 728922 - DNA, 83 bp, Homo sapiens
tctctattcaggattatgaagtttttcgatgcgaagccatcactggtgcaagctatatttaacggagatcctgatgaagttcg

SEQ ID NO: 728923 - DNA, 100 bp, Homo sapiens
tcgtctcatctccgttaaaaccaaatccactggatctgccacagcttcagcatcgagctgctgttatcccaccaatgcattacaacacctccttgcttgc

SEQ ID NO: 728924 - DNA, 71 bp, Homo sapiens
tcatactgtagaaaaatattcctttgaagagaagcctaaagaaactgttccaactcttgctccaaaaactc

SEQ ID NO: 728925 - DNA, 80 bp, Homo sapiens
ctgaggaagcgcgggcggacgacagaggatgccgaaccactccagatggtgaagtggatgctgaagaacttcagagatgt

SEQ ID NO: 728926 - DNA, 83 bp, Homo sapiens
cgccgcgcgaggaaatggccgaggagccggagccgcaggccatgtagggcaggaccgggtggactttggccagactgagccgc

SEQ ID NO: 728927 - DNA, 83 bp, Homo sapiens
tgccagtcccagccgccctaccgccgtgggaacgggcgtctctggccgagcctctttttgtggaaaacgacagcagcagcagt

SEQ ID NO: 728928 - DNA, 100 bp, Homo sapiens
atgtttgccttcctgctgtgtgttcgcatcatgatgaacgagggcaaaatcaaccaggcctcagcaatctggcccctcgaaccctagccctgagggagcg

SEQ ID NO: 728929 - DNA, 74 bp, Homo sapiens
cccgggcacgacctctcggacacggtgcaggcagcttcaccagcctccaccaagacgggacaagcagggagttt

SEQ ID NO: 728930 - DNA, 101 bp, Homo sapiens
aaccctggctggggaaaagggaagtgaaaagagatctgttttcaggaataaaggttggggagactacacctgacaaacttttcactcttatagaagtggaa

SEQ ID NO: 728931 - DNA, 75 bp, Homo sapiens
agtggatttgtggacggcagattgaaatacagtttgcccagggggatcgaaagatggagacggagtttcaccgtg

SEQ ID NO: 728932 - DNA, 96 bp, Homo sapiens
ttttggctctgcgtgagtgtggtctacgagctgtttctcatctttatactcttccagacctggaatggccaaatatcaaggtgaagttcaaagttt

SEQ ID NO: 728933 - DNA, 100 bp, Homo sapiens
gagagaggaacatacagaggaccaaggtgagatggaagattttcgaggtatagcagaagaatcatttccaagctttctcaccaattcattatttggtaac

SEQ ID NO: 728934 - DNA, 100 bp, Homo sapiens
ctggggagcgcctcgtcgacatgagtgatgtggaggaaaacaacttcgagggcagagttagtctgaatgattcccacaatcagatggtggtgcactgggc

SEQ ID NO: 728935 - DNA, 51 bp, Homo sapiens
agtagcccccgggcccccgtcaggctttatcctgtggataaacgcagagtg

SEQ ID NO: 728936 - DNA, 75 bp, Homo sapiens
cactggcctagtgggaggtcctgactttgcccactgtctgctggtgcatgtgagggaaccctggcttgttcaacc

SEQ ID NO: 728937 - DNA, 75 bp, Homo sapiens
ctcagcctccggccttgtgtgtccgactcggcagcagtgcacttctcagaacttctggatgagttttcccagaac

SEQ ID NO: 728938 - DNA, 100 bp, Homo sapiens
atcgtcaagtctcccagcgaccccaagcaataccgggcagcacaactacttatgtgctggaagaaatgactgcatcgttgataaaatccgcagaaaaaac

SEQ ID NO: 728939 - DNA, 90 bp, Homo sapiens
actccagaattcctaatagaacatctctagtgatccctgaaaagttccagcatattttgcgagtactcaacaccaacatcgatgggcggc

SEQ ID NO: 728940 - DNA, 76 bp, Homo sapiens
aaaaggtgatctggacaaaggaacaggtatctcagaaatcaatgtggactgaacataaatcacctgatggaaggac

SEQ ID NO: 728941 - DNA, 100 bp, Homo sapiens
gtgacatcctgttatttccctatcgattttacccctgcctctgagcccaagtctgcacgtattcatccagatggcctgaagtaactgaagattcacaaaa

SEQ ID NO: 728942 - DNA, 87 bp, Homo sapiens
cgccaccgcaaggaggtggactacagcgactcactgacggagaagcagtggctcaaggtgttccatgtacccctggaggagagaaaa

SEQ ID NO: 728943 - DNA, 83 bp, Homo sapiens
ggccgggcgacctgggcaccagcaggacccgaggccaggagccaggggcccagaaggccccccaaagatggcggacaaggtgg

SEQ ID NO: 728944 - DNA, 80 bp, Homo sapiens
gcagagacaggcgttcgaggagatcatcctgcagtgttttgctgttactgctcagtgtagtcacaccttgaataagaaat

SEQ ID NO: 728945 - DNA, 100 bp, Homo sapiens
gtttggtttgatcttgttgactatgaggaagttctaggtaaaataccatgaagattttgaaaaaacaaaggggagaggctttactcccgtcgtggacgat

SEQ ID NO: 728946 - DNA, 74 bp, Homo sapiens
gccaaggtcaacaccctgattcggtggcacaagaatggctcaactctccaaatagagagaatttctatcagttg

SEQ ID NO: 728947 - DNA, 100 bp, Homo sapiens
tcttcaaaatatcggagaataatttctttctcgctgatcgcctaacttctactgacgaagcttggaagttgcagaaggtgaagtattacagacacttagc

SEQ ID NO: 728948 - DNA, 97 bp, Homo sapiens
aaaaactggagagcttcatcaaaaatagtgatagctttgataagcgcattctacattctaaaggggagctcagtgaagatagacataaacagtatga

SEQ ID NO: 728949 - DNA, 100 bp, Homo sapiens
agaggcagacgacgacagaaccctgtacaatttgatagtcattcgtaatcagcaggccaaagactcagaggcagttatttggcagaaaagcagagtatca

SEQ ID NO: 728950 - DNA, 95 bp, Homo sapiens
ccagcgccctcagccgacggaggaaaagggtggaaagcaagtcctggaagaatctgcatttgaagaaatggaaagagattttcagggagttctcc

SEQ ID NO: 728951 - DNA, 82 bp, Homo sapiens
aagctgtctctgatccgcaagcatgctcagaccttcattgctctgtgtgccaccgggggattcccgaagtcttccgttttct

SEQ ID NO: 728952 - DNA, 100 bp, Homo sapiens
tggaccttctgctacaggagaagatggcccatgtggaggaactccgactgatccacgctgacatcaatgtgggcttggactgtggtcctgaaagcagcaa

SEQ ID NO: 728953 - DNA, 90 bp, Homo sapiens
tctgggtttccattacccctgccatcgtcagggccaaagaagccctcgaaaatactgaagttcctgttggctgtcttatggtctacaaca

SEQ ID NO: 728954 - DNA, 80 bp, Homo sapiens
gaaccatccttggaaatcctgccgcggacttctctgcacagcatccctgtgacagaccgttccccagcacaccccacccc

SEQ ID NO: 728955 - DNA, 96 bp, Homo sapiens
acaacagcaggcagaggggcagtgggcgcggggaaggaaacttggatttaactggccagaagcaggtattcaaagcagagaacaatccctgggtga

SEQ ID NO: 728956 - DNA, 127 bp, Homo sapiens
cggtggcgtcgttgtcgccccctcctcgtcgggaagaatcgtttggtctcctgccgtgcccggtcaaaatgcagatcttcgtgaaaacccttaccggcaagaccatcacccttgaggtggagcccag

SEQ ID NO: 728957 - DNA, 100 bp, Homo sapiens
tccatgagctgaagcagccaagagggaaggagatcacgttgctgatgcagacattgaatactctgagtaccccagaggagaagctggctgctctgtgcaa

SEQ ID NO: 728958 - DNA, 75 bp, Homo sapiens
cagattcgcagtggtcgcttcttctccttgatccagtccttctgtggaacttctgaacatcttttattagtggaa

SEQ ID NO: 728959 - DNA, 74 bp, Homo sapiens
atcgaatcatggaatcccttgcatggctctcacttctcaataggtttggcatggacaagatctatgaaggccaa

SEQ ID NO: 728960 - DNA, 98 bp, Homo sapiens
cctctgggacgccttcctctacttctcacagttcagtgcggaaacaggaaattataaaagtgacagagcagctgattgaagccataagcaatggagat

SEQ ID NO: 728961 - DNA, 75 bp, Homo sapiens
ccggtgtaccgcggcgagaagccccagctgcactacgcgtttgcatttatgtcggatcctcagtgaaaataaaag

SEQ ID NO: 728962 - DNA, 83 bp, Homo sapiens
cagtaataaagtctcccttaaaatgcaccctccttccacctggccaggaatcaggtgaaagtgggagatacattggatcttct

SEQ ID NO: 728963 - DNA, 82 bp, Homo sapiens
caacaacctggttcctattggcaagccagcctcagagcgtcgagggcgaggcccccagcagtgagactggcacatccctgga

SEQ ID NO: 728964 - DNA, 116 bp, Homo sapiens
gcacttccggtcacgccatcgttgctgccttcttcgtcaagaggcggggtttcaccatgttgcccagactggtcttgaactcctgagcttaagcaatccacctgcctcggcctccc

SEQ ID NO: 728965 - DNA, 100 bp, Homo sapiens
cttcagaagaaggacttcggaatgcactacaacaggaaaatcatattatagatggagtaaagagtaatcaagtcagaggattatatgacttttatctgcc

SEQ ID NO: 728966 - DNA, 100 bp, Homo sapiens
gaacgctgccgtccgtgccgtggtgcgcatgggtatctacgtgggggccaaggtgtacttcatctacgagatatctcccggggccaattcagcatctcta

SEQ ID NO: 728967 - DNA, 75 bp, Homo sapiens
aggccccagaactatcttttcgggtcttcctgagagctatcaacaagtttgcagaaaccatgaaccagaagttcc

SEQ ID NO: 728968 - DNA, 75 bp, Homo sapiens
ccttccctctcttcacatggatcctcttcaagcttaaacctgggaaagaccacagcaagattctttcattcgtct

SEQ ID NO: 728969 - DNA, 50 bp, Homo sapiens
gaagcaagggggacaaaggagaacagctggtgggccagccggccgtacac

SEQ ID NO: 728970 - DNA, 100 bp, Homo sapiens
ttcaaagaatgatatttccaaagtttgcagaaaagaatatgaggaacaagagtttgttcagaaacaacagcaagaattagatggctctctgaaaaagatc

SEQ ID NO: 728971 - DNA, 89 bp, Homo sapiens
ggtcgcgcggcagcggcggcggcgcgcgggtgagcggcgcccgggggctggagaaggccaggcagcagctgcaggaggagctccggcag

SEQ ID NO: 728972 - DNA, 98 bp, Homo sapiens
tctaagctcttcaggatcaaacacttttccagccattaactccaggctctcgagaatttgaagatgttgtaaatattctccattcttcttaccttgaa

SEQ ID NO: 728973 - DNA, 85 bp, Homo sapiens
gctggtgttcgcccacgaccatgaccagagtctcactgtcgcccaggctgcagtgcagtggtgccatcacgcgtcactgcaacct

SEQ ID NO: 728974 - DNA, 82 bp, Homo sapiens
ctgggagcgtgctttccacgacggtgacacgcttccctggattgggatgtccttacggacctgtcagcggagagtgaggtgc

SEQ ID NO: 728975 - DNA, 100 bp, Homo sapiens
tgtggcccagcacccgcctgccaggcgctcgggggccgaactggccctggactacctctgcagtgacatattcgatgccatgttccctgtcactcacatc

SEQ ID NO: 728976 - DNA, 100 bp, Homo sapiens
ggaagaccgcgcgcagggcctgcagcgggagctggacggcgagcgcgagcggcgcgagaaacgggagatacagatgacccaccaagaattactcagaacc

SEQ ID NO: 728977 - DNA, 101 bp, Homo sapiens
tttcccttttgcaaggagaaaattttggtggagaattatccaacaagaaaaagacctgtggctattaagataggctgattttgtgaaaatcgctcaccctg

SEQ ID NO: 728978 - DNA, 100 bp, Homo sapiens
cagccccgcgccggacgaggacgccgaggcggcgggcgccgagcagatgaacacaatgacgtacagaagaaaacctttaccaaatggataaatgctcgat

SEQ ID NO: 728979 - DNA, 100 bp, Homo sapiens
ctggaaatgcgaatcctaaagcgtttcctcgcttgcattcagctcctctgtgtttgccgcctgggatgttgacaatgcgtctctggcacgtcttgacctt

SEQ ID NO: 728980 - DNA, 100 bp, Homo sapiens
acagcctggatctcctccatcctgctggccatgctctacgggacaggttacgggcaggacttgagtggcttcggacagggcttctcagaccccagccagc

SEQ ID NO: 728981 - DNA, 75 bp, Homo sapiens
tgcactgtgccttaacagaaggtcttgagattctaagtgggaatcatttcagatgtttctttctcagcaaaatag

SEQ ID NO: 728982 - DNA, 75 bp, Homo sapiens
tccttcttctggataacactgtacaagctttcaaagtcaataaaagagtctcatcgtggaaggcaagagggaaaa

SEQ ID NO: 728983 - DNA, 98 bp, Homo sapiens
tataacctccttgaaaaactgggatacatggatctggcctcaagactggtggatgtatatacaaagacgatatctttatggtcgtatatcaatagcca

SEQ ID NO: 728984 - DNA, 75 bp, Homo sapiens
aaggattgtgacatatcgttggacccagaattgagtcatccgtccttggctcaggatttggagagcttgcaccac

SEQ ID NO: 728985 - DNA, 107 bp, Homo sapiens
taaactggttgggcggcaccgcgatcatcaggtggcagctttgagtgagcgctatgacaaattgaagggttcttgaagcttttgagattaacaatggcaggaaaatc

SEQ ID NO: 728986 - DNA, 50 bp, Homo sapiens
gttcgaagctgagtatgtgacagcgtgaccgaattacaagttttagaaaa

SEQ ID NO: 728987 - DNA, 96 bp, Homo sapiens
cctcagctggacacggccatcgggcagtggctccgctgggataagggggaagcgagtagcattatctgatgatgagacaaaggaaactgaaaacat

SEQ ID NO: 728988 - DNA, 90 bp, Homo sapiens
tagttccgtcatatccctctccacgacctcggtcgagcatgttcaccagggcccagtatgaaatgcttcatgtcacacctccaatgagcc

SEQ ID NO: 728989 - DNA, 96 bp, Homo sapiens
gagcgcgttggagcggcactcggagcttctacagaaggtggagcccctacagaaggtggagcccgggcggggttacttgattagctgtgtttggaa

SEQ ID NO: 728990 - DNA, 83 bp, Homo sapiens
aaaatggcggacctggcgaacgaaggggcataaggaaatggtggcaggcacttcctcctaacaagaaggaagtagttaaagaa

SEQ ID NO: 728991 - DNA, 75 bp, Homo sapiens
caggagatcgccacctacagccgcttgctagaggttgaggacgctcacaaaatgatgcttcaacacccaggccag

SEQ ID NO: 728992 - DNA, 51 bp, Homo sapiens
tgcgtcaatcagagcgtcctgtgcgcatgatgccttcttctgtagagtggg

SEQ ID NO: 728993 - DNA, 75 bp, Homo sapiens
agactgaaatgggggcgaccattcttaggaagttggtgaaccatctaaagaagagaaggctgtggccaagtatct

SEQ ID NO: 728994 - DNA, 82 bp, Homo sapiens
cctcccgcgccccccgggacccccacgccgccgccaggtgtcgtgaaaactacccctaaaagccaaaatgggaaaggaaaag

SEQ ID NO: 728995 - DNA, 80 bp, Homo sapiens
caccgctgccctcagctccgagtccagggcgagggacgactggagtgagcactggcctgggagtctgaagattgtgcctt

SEQ ID NO: 728996 - DNA, 99 bp, Homo sapiens
ggggcagcgagacggccatcatcgtgtccatcgtcatctgcagcgtcctgctgctgctctccgtggtgggtcgggatcaagaaccagagatcgcaggag

SEQ ID NO: 728997 - DNA, 100 bp, Homo sapiens
ctgtgaacagtacgcagtgaatgttgtttgaagatgccgcatttggattggatgaattccaaattctgcttgcttgctttttaatattgatatgcttata

SEQ ID NO: 728998 - DNA, 90 bp, Homo sapiens
gtgagacttcgagagccctgtcatcttctaaacagagcagcagcagcagagatgataacatgtttcagggagtaccctgacttctaccgg

SEQ ID NO: 728999 - DNA, 74 bp, Homo sapiens
ccattcaagagcagcattcataaatttccagcccgccggggtcagcttggtcagcgtccattccagccccaacg

SEQ ID NO: 729000 - DNA, 90 bp, Homo sapiens
cagggccggcgccgggcagggaggcgtccgagacgcgctggacaagcaggaattgaaagatgttggccatcgtgatcagatggctgcagc

SEQ ID NO: 729001 - DNA, 74 bp, Homo sapiens
tcatcgagtgctacattgctgagcagaacatggtgaacttcacggtagaccagatccgcgccatcatggacaag

SEQ ID NO: 729002 - DNA, 90 bp, Homo sapiens
gggctaaaaaccccggagtcttcctgatccatggacccgatgaacatagacacaggtccaggtcaagacctcgtctccgttctcatagtc

SEQ ID NO: 729003 - DNA, 51 bp, Homo sapiens
ggaggaagctggaggtcaggacacaggtcatctttctgtccaagggcaagg

SEQ ID NO: 729004 - DNA, 75 bp, Homo sapiens
attggagaccagaccagaagcccttctgaattaagacatctcgagatctggcgtgttttatacagtttgaaaatg

SEQ ID NO: 729005 - DNA, 100 bp, Homo sapiens
gcggccgcctcgccgcagaagtatctccgaatggagccatcccccttcggcgacgtctcctcccgcctcaccacagacagtgctacaacaagtaattgaa

SEQ ID NO: 729006 - DNA, 98 bp, Homo sapiens
aaacacgaggtgcagaagatgaccttaacacagtagcagctggaaccatgacaggcatgttgtataaatgtacagccaccaaaaccctcaacaggggc

SEQ ID NO: 729007 - DNA, 82 bp, Homo sapiens
cggcaagcctctgccttgtggttccttagccatccagtccaatggatcagatgggcaagatgagacctcagccatatggcgg

SEQ ID NO: 729008 - DNA, 100 bp, Homo sapiens
tcttctctgcatcccagccatcacctggatttacctgttttctgggagcttcgaaggtgtacatcggtgagctcccgcaggacttcctccgcatcacgcc

SEQ ID NO: 729009 - DNA, 99 bp, Homo sapiens
aaagagaaactttggtttgttcctgctaaggtggaggattcaggacattactattgcgtgctggttgtcttcttgcctgccctgtgtcgtaaaatgggg

SEQ ID NO: 729010 - DNA, 100 bp, Homo sapiens
tgccagttccctgctgctgcagagcctcctgctgtccctctctgagctgaagacatttcgggcttcctgaggctgcggtggtcacgcttcgcccgtgtcc

SEQ ID NO: 729011 - DNA, 80 bp, Homo sapiens
tctgcgggatcttcaaccacctcgagcggctgctggacgaagaattctctggtggttgagatcccgccatttcggaatca

SEQ ID NO: 729012 - DNA, 74 bp, Homo sapiens
cggtcacagagtgcaccgtatcctgtcacttctggatgtgagacctcaaaggaagaccttctgcaggctgattt

SEQ ID NO: 729013 - DNA, 101 bp, Homo sapiens
ttctgcagcataagaaagtggatgaatacacagacactgacctgtacacagctcattctcaatgcaagatcctccgctgcaatgctgagtacgtatcgtcc

SEQ ID NO: 729014 - DNA, 97 bp, Homo sapiens
taaatcaagcttggaatgatcatcaaacagctatggtgatgattagagacatactaatgtacatggctccgtatgtggatgtgatctgtttgaacag

SEQ ID NO: 729015 - DNA, 97 bp, Homo sapiens
gtttcccgggagatcccaggcggtgacagagtggagccatggctagagctccaccgggggacggctacgtgcaggcggacgcccggggccccccgga

SEQ ID NO: 729016 - DNA, 50 bp, Homo sapiens
cagacccctcagcgtctggcatctgcaacacccaggacacctactgtgtg

SEQ ID NO: 729017 - DNA, 83 bp, Homo sapiens
tctgttgaggcatctggacaccacacacatcatcagtctggagttgatccccctcatattgtgtacagcatgtctacatcctg

SEQ ID NO: 729018 - DNA, 73 bp, Homo sapiens
tgcctttggtgtaagacaatgatccctgggtatcagtatgtgtcacctgaaggcaattgtatagaacatgttc

SEQ ID NO: 729019 - DNA, 101 bp, Homo sapiens
ggctggttctggggctgggattggaactgtgtttgggagcctcatcattggttatgccagagtgatattcccacagcccagaggaaacggtttactagagt

SEQ ID NO: 729020 - DNA, 76 bp, Homo sapiens
cagagaccttgagggatatctttcttcactcctcttcacttcttcagccctttctggttactgtggctttatggca

SEQ ID NO: 729021 - DNA, 98 bp, Homo sapiens
cggcgagaagcggccgagccagcagcaggctaggaagtgatgatacccattttgaggttagcatggccaacaacggatgtgaagtgcatcgttttgat

SEQ ID NO: 729022 - DNA, 99 bp, Homo sapiens
cgcgtacgacctcacgggaggaggtggatgaggcggccagcaccctgacgcggctgccgccttatgtttgatcatcggccaaggtcctggcgagaactg

SEQ ID NO: 729023 - DNA, 100 bp, Homo sapiens
gttcgtggccacgctgctgatcgtcctgctgctgatggtgtgcgagctggagataagatgggtagactgctacttcccttttacacatccttcctttgag

SEQ ID NO: 729024 - DNA, 88 bp, Homo sapiens
tcagccctgcagatcctgccctacacactggcctccctctaccaccgggagaagcagatgcctgtgaggagccaccaacatttgaagc

SEQ ID NO: 729025 - DNA, 75 bp, Homo sapiens
gagacatgctgaaacatcgaagaaactatgttccaacttcctgtcaacaatcttggcagtttaagaaaagcccgg

SEQ ID NO: 729026 - DNA, 100 bp, Homo sapiens
ctcgaagcgatgcggtggattcctgaggaagctcagcttgcgaggctgcattggtgttggggattcctccttgaaagcctgttcatccgagcagtgcggg

SEQ ID NO: 729027 - DNA, 75 bp, Homo sapiens
ggggattcaacgagtggaaaatgcacgatctggtaccaaaggagaatttggagagctggctaaattatttgaaga

SEQ ID NO: 729028 - DNA, 128 bp, Homo sapiens
ctgggagcctagaatgcatcagtgcccttgtggcgaatggggctcacgtcgagtgtgatgaatgcagactctgctaccattttggctgtttggatcctcctttgaaaaagtctcctaaacagacaggc

SEQ ID NO: 729029 - DNA, 75 bp, Homo sapiens
cctgggctgggaacccgcggtggagcgggacacgaacgtggtgtcgtgaaaactacccctaaaagccaaaatggg

SEQ ID NO: 729030 - DNA, 75 bp, Homo sapiens
tctggcggccatgctcgtggtgccgcaggcagggtggatgcgagctgtcaggaagcatgccaagggcctgcacat

SEQ ID NO: 729031 - DNA, 74 bp, Homo sapiens
cctcagctttatgtcctacgacgaaattagccagctccgcctgtaatctcaggggcgatataatcaatgaggtg

SEQ ID NO: 729032 - DNA, 100 bp, Homo sapiens
gaacaagaacgcgctcctccgcctgctgcccgggctggtttcaggaccacgtcaagacttgtggcaagtgtcgagtcccttgcagattccacgccatcgg

SEQ ID NO: 729033 - DNA, 100 bp, Homo sapiens
tgagcccccatcattgggagaaatccccactcctccaagaaccaacccccaaattggctgggacagccacaacaagttgttcagaagaagcctgctcagg

SEQ ID NO: 729034 - DNA, 74 bp, Homo sapiens
tgtgcagcccaagctctgggcccgctacggatcatggttttggcaggagacacactgcccattgaggtatactg

SEQ ID NO: 729035 - DNA, 82 bp, Homo sapiens
aacatcgtggccctgtacgacttccagaaggatatggccctgaagccacatgagcggaaggagaagtgggagcgtcgtctca

SEQ ID NO: 729036 - DNA, 75 bp, Homo sapiens
gggactggctctgagctcccgcaaaaacttgtgtattcaccctgagctgacagcagccatggcgagcggcagtgg

SEQ ID NO: 729037 - DNA, 100 bp, Homo sapiens
ctgcgacgccaaatacgtctgggcagccacggccgggggcgtctttcagagcattacgatggcccactgcgtgaccttggttcagctgtccatttcctgt

SEQ ID NO: 729038 - DNA, 140 bp, Homo sapiens
ctggctactgcatcttatgatactcgagtatatatctgggatccacataatggagacattctgatggaatttgggtacaggtttgcagattccgccagcagcacagcaagctctacagatgagtggctctttggcatttg

SEQ ID NO: 729039 - DNA, 80 bp, Homo sapiens
ccggaacccgagctggagctgaagcgcaggctgcggggcgcggagtcgggagttctggtcctccccgctttgcagtttgt

SEQ ID NO: 729040 - DNA, 95 bp, Homo sapiens
gggaagacactcaaggatggggattcaaggatggaatttttcataactccatatggcttggaaaaatgccagctgtgggacaaggagtgcaggcc

SEQ ID NO: 729041 - DNA, 90 bp, Homo sapiens
gaccgccccgcaagtactcaggatcgctacctggaacgggcaggaaagaaaaatgcagataagaaaattaaaaccacagactcctgggca

SEQ ID NO: 729042 - DNA, 75 bp, Homo sapiens
tcccccaaatgtctgactctgactctcggactgagaaacgcaaggaacccaagacagaccaggatgaggagcatt

SEQ ID NO: 729043 - DNA, 100 bp, Homo sapiens
acactcttctggtggcactaacttagacagattatttgcatgggtgcaaaagaaaatggtttgccgctggagtatcaagagaagttaaaagcaatagaac

SEQ ID NO: 729044 - DNA, 88 bp, Homo sapiens
caaaaaaataaaaaaaaagccaaaaagataaaagcccggatgaacttcagcgatctagggcagccctgcagaggtacctgttctactg

SEQ ID NO: 729045 - DNA, 80 bp, Homo sapiens
ctgatagatgtacactgaaaactggacattataacattaaaaaccagggtggttatgaccgctactcaggaggaaattac

SEQ ID NO: 729046 - DNA, 90 bp, Homo sapiens
ggatttggcacctatgcgcctgcagagagctgtaggtaaaacttgcctactgatcagttacacaaccaatgcatttcctggagaatatat

SEQ ID NO: 729047 - DNA, 82 bp, Homo sapiens
catgaaagaaaggaaaacgccgatagaacgaataccctatttaggttttaaacagagaactacttccagtagcaatacaatg

SEQ ID NO: 729048 - DNA, 100 bp, Homo sapiens
catcaggtcgtctgcatcaacaacataaatttccagagaaaatctgttgtggctttcaaggatatgctgtattcagctcaggaccaggcaccttctgtgg

SEQ ID NO: 729049 - DNA, 75 bp, Homo sapiens
tggagtccggacatctgaaacttgtgctggtgtgggcagaacaggcacctatattgtaatagacagcatgctgca

SEQ ID NO: 729050 - DNA, 75 bp, Homo sapiens
ccggctcccctctcaggacaacccagatgtgcaacaaagtgcgatggtattaatctctggagaagacacatccac

SEQ ID NO: 729051 - DNA, 75 bp, Homo sapiens
ggctccggctggtctgtggtgagaactacaggatctcatgcacatctcacgggcccggaagccagcgttcatcct

SEQ ID NO: 729052 - DNA, 98 bp, Homo sapiens
aaatgcagaaatcacccgtattcggccatcttggctcctccccccatttttgaaacgttggggttgttggagtggttggattttccctggaattgagt

SEQ ID NO: 729053 - DNA, 75 bp, Homo sapiens
gacaggcagagtgctgatgtgaaaaataccacgacaaaaccaccctaggaagtcccacctggccatcgtgcagaa

SEQ ID NO: 729054 - DNA, 96 bp, Homo sapiens
cctgaatgcaggttcctatgcgtcactaggaagtgggacccatggcagccgagacctcccagtcaacagaatcatcgatgtggatcttgtaactgg

SEQ ID NO: 729055 - DNA, 138 bp, Homo sapiens
cccggtagagcccagctcagcgcccggcagccttcgacgcgatgttccgccggagcttgaatcgttttctccagaacctgggtatcaacccagcaaacattggcttcagtaccctgactatggagtctgacaaattca

SEQ ID NO: 729056 - DNA, 90 bp, Homo sapiens
ggcactagcagatgtggttggaatccttgctgtgctgaatcctggctgtgtgaccccaagttgctatcaagatcatagataagacccagc

SEQ ID NO: 729057 - DNA, 100 bp, Homo sapiens
ctggtgacatgcagttgtccaaaagtgaaattttacgaactcagggctgctcttcacctatcgtggtgaagtttgctgacactcagaaggacaaagagca

SEQ ID NO: 729058 - DNA, 101 bp, Homo sapiens
ctctcccgcttggctccttgcggcctcctcttcccttcgctccggcccggtgaaactgaacttataatcgtcactggattacgccctgctggcattgaaga

SEQ ID NO: 729059 - DNA, 75 bp, Homo sapiens
gcaggcaatacggccgtgggcgatctgggggccagagtttgaagcagcccgaaagcgagcaaagaaggccaagca

SEQ ID NO: 729060 - DNA, 100 bp, Homo sapiens
caaccataaagacatcttaattgggcacgaaagagtgcagaatacagaaactgcagccatgaccacgcacgtcaccctggaagatgccctgtccaacgtg

SEQ ID NO: 729061 - DNA, 101 bp, Homo sapiens
tgggaatcgggagccgggcgcggggagctgcgcgaagccggggcggagcacgcgagctatggctgcgatggatagtgctcggcttagtgctgccaaatctt

SEQ ID NO: 729062 - DNA, 90 bp, Homo sapiens
gctttggaacaacatttagcttccttggaaggaaagaaaatcaaagattctacagctgcaagcagggacaaaagtggctctcaatccagc

SEQ ID NO: 729063 - DNA, 82 bp, Homo sapiens
aggctgcagcctgggcacttagatatattgcaagacataatgcagctctagccggcccggtccttggactgaaagaatgcac

SEQ ID NO: 729064 - DNA, 100 bp, Homo sapiens
ctacaccaagctcaccctccagcctggtgtcaccaccgtcatcgacaatttctacatctgcccgaccaacaagaggaagaccctgtattcagtggatcag

SEQ ID NO: 729065 - DNA, 75 bp, Homo sapiens
ggagctgtgggtccaggctcagtacatcacagacgcagaagaagcgaggaaaagccacagccccgtgaagcgtcc

SEQ ID NO: 729066 - DNA, 88 bp, Homo sapiens
gtgcgtgttttgggggagcagacggttgacagtgttgagtttgattgaaggtgaatgagtggcaggatgactggccgacctttttcgc

SEQ ID NO: 729067 - DNA, 75 bp, Homo sapiens
ctatagtcaactccttcaagcatataagtggtcaaacaaggtaacttgggtttttactcctgtaacaactgaaat

SEQ ID NO: 729068 - DNA, 100 bp, Homo sapiens
atgaaaggaatgggtctgggaccttaacagggagccatgatatggctgtatcagaacttaattaaacacagctctctgtttgtcaagcagttggatggat

SEQ ID NO: 729069 - DNA, 121 bp, Homo sapiens
ctgaagaagaccgccactgccggagccatctcggagctcacggagagccgcctgaggagcggcacagacacgatgaggcgagtggtacgacagagcaagtttcggcatgtatttgggcaag

SEQ ID NO: 729070 - DNA, 75 bp, Homo sapiens
tcctagatatctccaacacaccagagtctagcattaactatggaggtattatagctgcaaatgtccttgtattct

SEQ ID NO: 729071 - DNA, 50 bp, Homo sapiens
gcaagccacaattatgggacctgtagctacagcaagctgggtagcaggca

SEQ ID NO: 729072 - DNA, 51 bp, Homo sapiens
ttcctgtacagcctgcagaactggcgtgattgactacattttctattccaa

SEQ ID NO: 729073 - DNA, 50 bp, Homo sapiens
ggcgtgtgctatcagcattctgggaaagtgttaagtccaaaagtgctggg

SEQ ID NO: 729074 - DNA, 98 bp, Homo sapiens
gtgaaccggagaccccgaaaacggaagcgcagggagaaggaagaggtgtttgaaaagggtcttactgaagtaacacaaagcttaaaaatggaaaatga

SEQ ID NO: 729075 - DNA, 75 bp, Homo sapiens
cccagcatttcatccctcgtcgaaaggattggattggcatctttagaggcatccgtttccgaggctttagtatcc

SEQ ID NO: 729076 - DNA, 100 bp, Homo sapiens
gcagctgcaaggagggcggcgggactgcactcgagtgtccagacctgctcgatgtgccggtggtggtgtgcacattgagccccggtatagacagttcccc

SEQ ID NO: 729077 - DNA, 75 bp, Homo sapiens
cgacctgggcgctcagcccccggatcagcctgcctctgggcctaaagatccctcctggctgtgagctggtggtcg

SEQ ID NO: 729078 - DNA, 90 bp, Homo sapiens
ggggacagcgacgacgcggaggcagagaagggaacgcccggcccagccccgttgtggcagcactgcctgaaggtatgagaccagattcta

SEQ ID NO: 729079 - DNA, 155 bp, Homo sapiens
ctggatgatggggcggactgtgaagcagtggtgtttcacgcttccatccccagaccatcaattattgacacgcccaagtatgccaccacgggctgttccctgaccctgcaccatacggagaaaccagaacatgaagacatatgtgaataccgtcc

SEQ ID NO: 729080 - DNA, 82 bp, Homo sapiens
cacgtcttcaccttcggcagccggctgtacgcacacaccatcgcaggaacccaagacagaccaggatgaggagcattgccgg

SEQ ID NO: 729081 - DNA, 100 bp, Homo sapiens
cacctccgctgtgaaaagctaactttcaacaaccccacagaggactttaggagaaagttgctgaaggcaggagggccgattacacctcaacaagaaggca

SEQ ID NO: 729082 - DNA, 75 bp, Homo sapiens
tgcgaccccagtcggtgctccggggaggtcacctgacgaggagatgtgtcttgctgaatcagggctctcttatcc

SEQ ID NO: 729083 - DNA, 90 bp, Homo sapiens
caaactactttgttcggccagatctgggccccaagatgtataatgcttatgtatgaagtgaaggctcctgttccttctgcctgtttcagg

SEQ ID NO: 729084 - DNA, 98 bp, Homo sapiens
ccgggaggaggctgtgctgcaccagcacctcttgctccacatctccagagagcccagatcaatgaactgagccatgttcaaatccctgttatgttgat

SEQ ID NO: 729085 - DNA, 100 bp, Homo sapiens
tgttatgaaaaacgcaaccgatccagatctagattttaggtcttgtccaataagcatgtggctcctgatcatcttttgcaaatctgccagcgcatcggtc

SEQ ID NO: 729086 - DNA, 75 bp, Homo sapiens
ggatggttaggatagctgaaggagaacatcccaaagacattcgggtgaagatggagctggaaaaacaagcttaat

SEQ ID NO: 729087 - DNA, 75 bp, Homo sapiens
ggccttgataacacagagtttcaagcagagtcacctgatatgaaaaaggagcaagacccccctgccaagtgccac

SEQ ID NO: 729088 - DNA, 82 bp, Homo sapiens
cctacactgtgaagtgcatccagatccgccggaagctgcgcatcgagaagcgccagcagtgcagagcagagcgggcggagga

SEQ ID NO: 729089 - DNA, 90 bp, Homo sapiens
tgacattcagaaacttatcaagaggttctactctttggatagagaccaaaatcatactttgaaattctggacaatcaggaagtccaagcc

SEQ ID NO: 729090 - DNA, 100 bp, Homo sapiens
ccatttctgtgcctcaagaaataaaagcgttgcagctgtggaaggagatagaaactcgacatcctggatcagtgtactgttacccggacatacctattcc

SEQ ID NO: 729091 - DNA, 80 bp, Homo sapiens
ggcaaaggcaagagtaacagcagcgccgtcccgtccgacagccaggcccgggagaacttcggaaccaaaaagaagcttcc

SEQ ID NO: 729092 - DNA, 90 bp, Homo sapiens
ctctttcccgattccgtctgctgactggctccttagaagctgtgcaagttcaggtggacaatcttcagtggaagcatcagttcacagcag

SEQ ID NO: 729093 - DNA, 82 bp, Homo sapiens
gggcggcggcggctgggcgggagccccagagatctgaaattcagagtgtagctctgagacttgcttccaaagtcatttccca

SEQ ID NO: 729094 - DNA, 119 bp, Homo sapiens
ccaagttgcgttacatgagccgagatgacttcagggtcttgaccgcgtgaacgttgtgtcaatgttacaggaattttgggaaagcaagcagcagcagaaggctgcattcccaagtgaag

SEQ ID NO: 729095 - DNA, 82 bp, Homo sapiens
cccgggaggaaggaacgaggcaaggagctaaagcagcgtgcgttcagccctgggctgatgcagctgtacagtgcgcgccagc

SEQ ID NO: 729096 - DNA, 100 bp, Homo sapiens
ctacattctgggtgacacgctgggggtcggcaccttcggcaaagtgaaggaaaaattgtatggcgacttcttgagctggaagctagaggaaacccttgcc

SEQ ID NO: 729097 - DNA, 96 bp, Homo sapiens
agaaggcgcccgaggggaggcgccggacagatcgcgtttcggaggcggcgcagacgaagttatacggaagcgtctcctcattgatggagatggtgc

SEQ ID NO: 729098 - DNA, 98 bp, Homo sapiens
ttttctttactctggggtcccggctgccctgtggcctcgctcctcggagggctcagcaacagcctcaccaaggactccatgaatatcaaagcccatat

SEQ ID NO: 729099 - DNA, 50 bp, Homo sapiens
atcctgctggtcagcactgcggctggatgtctcagtggtacgaacttcag

SEQ ID NO: 729100 - DNA, 82 bp, Homo sapiens
ctctattcaaatctggttcagattttacagctctgggttttgggttggtgaaactggatgtgaaaacaaagtcttgcagtgg

SEQ ID NO: 729101 - DNA, 76 bp, Homo sapiens
gcaccatgatcgttatgaatgatcagatcccaccaaatattttggttgtgagctgggagcacagacccagtttgat

SEQ ID NO: 729102 - DNA, 83 bp, Homo sapiens
ccagaccctggagcctcagttggaagcagccgatccagcctgcggagcctgtggggcaggaggagacatcacagctttcccag

SEQ ID NO: 729103 - DNA, 100 bp, Homo sapiens
ggagctgcttcccaataaggaaacaagtgatagattcgtgtggcctttcaaatgattgtgaagtggtggaaatggatccaaaataataagtgacttctct

SEQ ID NO: 729104 - DNA, 90 bp, Homo sapiens
tgaaggacatgaaagtgctgtacaccaaccgagcccaggaattagaaggtgacgaggagggagaagacgaggatgatgcggaaattaacc

SEQ ID NO: 729105 - DNA, 100 bp, Homo sapiens
tagcctgctgccttgctgatattttcaggatttatgctcctgaagctccttacacatcccctgataaactaaagaatagctctccagacccccagctggc

SEQ ID NO: 729106 - DNA, 82 bp, Homo sapiens
ggggcctggctaaggaaaccctattacctccagatgtgtcttgctgaatcagggctctcttatccctgccatcgacttacag

SEQ ID NO: 729107 - DNA, 100 bp, Homo sapiens
cttgaccataaagaacatcactaagcagacccagtcccggcgttcaatgtcatcaatggcggttctcatgctggcaacaagctggccatgcaggagttca

SEQ ID NO: 729108 - DNA, 100 bp, Homo sapiens
gcagcctgccccgcggccaacatgagcttcttgttgtagctacagcaagctgggtagcaggcagatccaaaggatatcatgaagtttccagggcctttgg

SEQ ID NO: 729109 - DNA, 100 bp, Homo sapiens
cggagagaacacgagcccatcagacctggaatggccaaatatcaaggtgaagttcaaagtttgaaactggatgatgattcagttatagaaggagtaagcg

SEQ ID NO: 729110 - DNA, 82 bp, Homo sapiens
agttttacaggaaaactccagtgattttcaatcaaacattgcataggcgaggcggctttgcacaaggtggacattcccaggg

SEQ ID NO: 729111 - DNA, 75 bp, Homo sapiens
gcggcgccgcgacctggccggggctttgttcgcgggggtcacagctctcatggctgcagctagcgtgaccccccc

SEQ ID NO: 729112 - DNA, 89 bp, Homo sapiens
ctgcgtgagtgtggtctacgagctgtttctcatctttatactcttccaggaagcaatgaggctccccaagaacacacctgaggaaaagg

SEQ ID NO: 729113 - DNA, 83 bp, Homo sapiens
ctcactaaaatgaaagaaaccgctgaggcttatttgggaaagaaggatgctgggcagttttatgctaaatataaagaaacaag

SEQ ID NO: 729114 - DNA, 100 bp, Homo sapiens
gcaccaccgtgcgctgcatgcatctgctgctggaggccgtgcccgccgtggcgccgcagacctccatcctcgtctcccttctctcctggacagaaggccg

SEQ ID NO: 729115 - DNA, 50 bp, Homo sapiens
gtagtgcaaaaaccattcttaagtctctaattaacagaagatggcaaagc

SEQ ID NO: 729116 - DNA, 82 bp, Homo sapiens
gaagtttactgggaaaactgccaggtgtctcgtgcctctgctggaccctgactctgggctcctggtcctggcaggaaaggtg

SEQ ID NO: 729117 - DNA, 50 bp, Homo sapiens
cccaccgcacgttcagaagtcggtgttgacctaaccaatgaagaaacaac

SEQ ID NO: 729118 - DNA, 100 bp, Homo sapiens
cacagggagccacctccgggcgcagaggcctacatcccacagagatacccagacaacaggatcgtctcgtccaagccaccagctgaacaggccaaagcca

SEQ ID NO: 729119 - DNA, 74 bp, Homo sapiens
ccagctccgaaatcaccaccaagaaaggacccaggagcgataacagtaaatcaaataagatatttgtcggtgga

SEQ ID NO: 729120 - DNA, 82 bp, Homo sapiens
gtggaattttggagatattcaaagggtcctgcagttctgagcttgggttccctttgcctggacaccaaccaagcccccaact

SEQ ID NO: 729121 - DNA, 75 bp, Homo sapiens
gtttttcggatcatgtctggtggctccgcggattataacaggcctgctggtgggtacccttgatgttgtgttgga

SEQ ID NO: 729122 - DNA, 74 bp, Homo sapiens
cagagactgctgagcccgtccgtccgccgccaccacccactccggacacagaataccgtagcagtaggcaggac

SEQ ID NO: 729123 - DNA, 87 bp, Homo sapiens
gactcagagaccaataaaaataaactgcttgaacatcctttgactggttagccaggagatgacctggcttccaccactttctgctat

SEQ ID NO: 729124 - DNA, 75 bp, Homo sapiens
tgctgaagttcttctcaataatgaaattgattggcttaaaagaattaggggtgcagtactagccgctgtgtcaag

SEQ ID NO: 729125 - DNA, 79 bp, Homo sapiens
ctgctgggccctgaggctgcaccaagtggcgaaggagccggctccaaggtggccaaggtggaatacgtcaggaagaagc

SEQ ID NO: 729126 - DNA, 100 bp, Homo sapiens
ccgccgccgccggcgcggaaggacgaggctgaggcgagaaacgagaaccacgaagctgccctgagacgctcactcacgctgtggggatgtcagagagccc

SEQ ID NO: 729127 - DNA, 83 bp, Homo sapiens
gctgcagaacccccagaccatcatcccagctcaacattggcaatgtgctccctgtgggcaccatgcctgagggtacaatcgtg

SEQ ID NO: 729128 - DNA, 97 bp, Homo sapiens
gcgctgagtggtttttcggatcatgtctggtggctccgcggattataacaggcgtgcaatggaattgagttttgccctggtaaatgggaataatatc

SEQ ID NO: 729129 - DNA, 110 bp, Homo sapiens
ggatggcttcctcttggaaactaatgctgtttctgtcagtcaccatgtgtctttcaggttttaaaatcaaagatgggaaaatcggagaaaattgcccttccccatggcca

SEQ ID NO: 729130 - DNA, 100 bp, Homo sapiens
ccgcctgcggcctcctcgcaaaacaagatcagctggacatcatctccatggcggagacaaccatgatgccagaggagattgagctggagatggcaaaaat

SEQ ID NO: 729131 - DNA, 75 bp, Homo sapiens
gggatctttccggatcaatccagatggcagccagtcagtggtggagtgggtgaatttgtaagtgatgtcctgcta

SEQ ID NO: 729132 - DNA, 75 bp, Homo sapiens
ccgggaccccctggagcccccatgatccctaagaagacagcttgaacctagaagttcagttctgcaagcaagtat

SEQ ID NO: 729133 - DNA, 97 bp, Homo sapiens
gatccagcttcctggacttgggggatctgaacgagtcggacttcctcaacaatgcgatttaggcctattaaaggaaggcaggaagaactaaaggaag

SEQ ID NO: 729134 - DNA, 76 bp, Homo sapiens
tcctaaggaattgatttcccttcacattaaagaagatttgtgcaggtcgaacaagtaaaattacttgaccgattca

SEQ ID NO: 729135 - DNA, 82 bp, Homo sapiens
tttctggagggaagcaaaccctgcaaagcgcacatggattaattgatgtatgttgagtttatggagctgccttttggtggct

SEQ ID NO: 729136 - DNA, 50 bp, Homo sapiens
catgaacggaggcccacacctcgggctttggaactgcgacataactagcg

SEQ ID NO: 729137 - DNA, 100 bp, Homo sapiens
tcacctggtcagccatgtccaatgaacctgaattcagatattcctatactcttcagtctacaacgtgtcctgctcattcttggccttttcttcactggcc

SEQ ID NO: 729138 - DNA, 100 bp, Homo sapiens
gtcagagacagcacctcaacctggttcagcagttcagggagctcacatttctcatattgctcaacaggtctcggcgcggaagatggccggcggcgtggac

SEQ ID NO: 729139 - DNA, 80 bp, Homo sapiens
cttcctttacacatgttcgtgtcttcttaggatgaggtgctggagaatctggtaaaagcaccattgtgaagcagatgagg

SEQ ID NO: 729140 - DNA, 82 bp, Homo sapiens
taaaataaccgtccccgccagtcagaagttgaggtattctctgaaaccaaatgaccaaatcttggctgaagacaaacacaag

SEQ ID NO: 729141 - DNA, 100 bp, Homo sapiens
agacagagagctgaaggaactgatattccaacagtaaaacctctcaaaccgagggtagtgggcagcagtcagtgacaggtgtaacctctgtggatgacag

SEQ ID NO: 729142 - DNA, 74 bp, Homo sapiens
ggagagcgccttggaacgccgacctgaaaccatctctgagcccaagacctagagtggcaaaattctattcagaa

SEQ ID NO: 729143 - DNA, 90 bp, Homo sapiens
gccggaggctgggagccgcggcggcctggggaaattcagtgaacattatcactccttgtgtaaagcagtgcatcacctagcaactgttga

SEQ ID NO: 729144 - DNA, 82 bp, Homo sapiens
gccgagcgggcggcttcctggcctgggcgctccggtggcggcggagatctcacttccctgctaaccggtgggcggcccgccg

SEQ ID NO: 729145 - DNA, 83 bp, Homo sapiens
cctggatctccaagacgtagaggaagtggagatcggcagagacaccttctggcccgctgccttttcaggccaaccacaagcgg

SEQ ID NO: 729146 - DNA, 100 bp, Homo sapiens
ttatcctaatcccaatgctgaagtaagattgtcttggaaatactaagttgggtgattccttcaacacccagaatgagccagaagacatgatgaaaaaaga

SEQ ID NO: 729147 - DNA, 75 bp, Homo sapiens
ccagacagctgggccggagcagccgcgggcgcccgaggggccgagcgagaacatccatgatagcagtcttctgta

SEQ ID NO: 729148 - DNA, 83 bp, Homo sapiens
aaagaagcttccatctgctgtgattgctttgcagaggagtttcagaactgaaggcagaagctagtctaatggaccagatgagt

SEQ ID NO: 729149 - DNA, 101 bp, Homo sapiens
agctgaggacttcccctccgtggtgacagcctctgggtcctcggtcggtacagtctctgcacctcgcgccccagcagctccagtaataaaccgattcacaa

SEQ ID NO: 729150 - DNA, 100 bp, Homo sapiens
ggtgcctggggcaacctccaccttgacggttccagattctcgctgaagtctgttaattctactttttgagtacttatgaataaccacgtgtcttcaaaac

SEQ ID NO: 729151 - DNA, 100 bp, Homo sapiens
atagcagcagaagagaagaagaagcaggatgaactgaaacggattgccagagaattggcagaagggcttcgtgggacacatatgcaacatgcctatgatt

SEQ ID NO: 729152 - DNA, 90 bp, Homo sapiens
gtggaatttctaatctcattcctggactttcctgcaggtggttaccctaacagctaatgataagacaagtgtttccttctcctccctccc

SEQ ID NO: 729153 - DNA, 100 bp, Homo sapiens
attgggaggtgtatctgagggagactgcaaatgctattgtcagtcagcaaactccacaaaggtgaccaagaatatggcccaggtgaccaaagccctggac

SEQ ID NO: 729154 - DNA, 75 bp, Homo sapiens
tcttcatttgatgcagatatttgcacaatgacttaaacaggcacaatcaaaaccatctcagtcagaagtcagagc

SEQ ID NO: 729155 - DNA, 90 bp, Homo sapiens
cacgagcaccagccctgtggagcctgtggtgaccaccgaaggcagttcgggtgcagcagggatccggaagaccacggccagccaggtgta

SEQ ID NO: 729156 - DNA, 100 bp, Homo sapiens
cgatgacgtcaccgtcaccaccggcgtgaagcgagacagtggtgagggcttctggaactctattttaagaacctctcaaaacgaaacaagcaaatcatgg

SEQ ID NO: 729157 - DNA, 83 bp, Homo sapiens
gcaaggcaaaccccagcacttaagcaaacgggaattctcgcggtggtgaaggaggagatctttgatgacaatgccaagcttcc

SEQ ID NO: 729158 - DNA, 100 bp, Homo sapiens
attttctatctaaatgaagaaatggaggcatggaagattttgtggaagtataatactttgtcattatgagatgtcgtctctcggtgcctcctttgtgcaa

SEQ ID NO: 729159 - DNA, 82 bp, Homo sapiens
cgggagactccagccggcgggcgagcaggccgccaccggcacggccaggccagcatggtggaccacttacttccagtggacg

SEQ ID NO: 729160 - DNA, 74 bp, Homo sapiens
atcttcatggtgcggctcatcttcgagaggtgcttttgaagatgatgatatcacgcacgttgaaggaagtgtag

SEQ ID NO: 729161 - DNA, 101 bp, Homo sapiens
acggcggccacctgagtggcgcggcggtgtcaggctgttgaagctcaaatccgaagttttggacagactccttctcaactactcatagagccccatcctcc

SEQ ID NO: 729162 - DNA, 112 bp, Homo sapiens
ctgtacacggccgacatgttcacgcacgggatccagagcgccgcgcacttcgtcatgttcttcgcgccctggaagctcttcgtgggcggtcttgactggagcacgacccaag

SEQ ID NO: 729163 - DNA, 101 bp, Homo sapiens
cgtatctctcctggaactgctgcacatatatgttggcattgagtcaaaccatcttctcccaaggtttttgcagccactatggaaggaggggtcaggattac

SEQ ID NO: 729164 - DNA, 50 bp, Homo sapiens
aagctaacccctttcaccattcaggtcgctattaaagcatgaagactttc

SEQ ID NO: 729165 - DNA, 100 bp, Homo sapiens
cccggagaactctaccctggaggagattctggggcagtatcaacggagtctccgggagagattggaacaattatcaggtcattaggatgctgtcctacgg

SEQ ID NO: 729166 - DNA, 102 bp, Homo sapiens
ctgtcctaaatagctgacattgcatcttcaagactgtgctggacgtaaagaaagaagtgatgcactcaattctgcaatagataaaatgaccaagaagaccag

SEQ ID NO: 729167 - DNA, 101 bp, Homo sapiens
tcgcgggctgaatgtcgcatgaggtcccctccgcccgtggggactggctgctgccgtcgcaggtttttcgttggaatatacgttgcacatttatggcgatt

SEQ ID NO: 729168 - DNA, 100 bp, Homo sapiens
acatcatttgaggaatcagaacgcaagcaaaatgcgttaggaaaatgtgatgcatgtctcagtggattatattccatcacaacaagatattctgcttgcc

SEQ ID NO: 729169 - DNA, 100 bp, Homo sapiens
cagaaacattaccgtcatattccacccattactaagagctcagagttctacagagtcaccactgaacaatatcagaaagctgctgaagaggtggaagcaa

SEQ ID NO: 729170 - DNA, 83 bp, Homo sapiens
cgagcacccaggcgactgcctcatcttcaaggaagcatgagtgggaaaagcatgggacctgcgccgcccaggtggatgcgctc

SEQ ID NO: 729171 - DNA, 82 bp, Homo sapiens
catgttggatagtgctgctatgataacagtacatactccaaggagaggattaatagacctggacatcgattattgtgagcct

SEQ ID NO: 729172 - DNA, 130 bp, Homo sapiens
gaaccctcggatacgatagaaaatgtaaaggccaagatccaggataaggaagttcctattatccttgccgtaaataaatgtgacaaagctgaggctgatcctgagaaagtgaaaaaagagctgctggctt

SEQ ID NO: 729173 - DNA, 82 bp, Homo sapiens
gcaaacttgacactcaccctgaccgcctagtgtgttaattgtaacctacaaggagcctgcaaaatcatctactcagtttgga

SEQ ID NO: 729174 - DNA, 75 bp, Homo sapiens
ccaagggacaaggtgtcaacaatgtgccgagcttgcatcgagagccactgcgagtagctgctgttatgacatggc

SEQ ID NO: 729175 - DNA, 75 bp, Homo sapiens
ccacataatggagacattctgatggaatttgggtgtggactggaccctgggcacctcacatgaacagtgtgcata

SEQ ID NO: 729176 - DNA, 90 bp, Homo sapiens
agttgctgtgcgaccaggtggtcggtgcgcccatcgcggtctcggccttctacgccgttggctacatgtctgctatcttacccagaattc

SEQ ID NO: 729177 - DNA, 75 bp, Homo sapiens
gtaaaggccaagatccaggataaggaaggatgtttggaccaggaagagagtacaacttcactcggcccaatgaga

SEQ ID NO: 729178 - DNA, 83 bp, Homo sapiens
ggcgggctggagacatggaccgcggcgagcaagatggggcgcctacccttcttcagcaagatgggaacagctgagtctgaagg

SEQ ID NO: 729179 - DNA, 100 bp, Homo sapiens
aataagtgttttaagaaagtggacaaagagaggagtcagcgtgacgacagcatgtacgatccctgaatgggcccgtgggcatatttagtcattcattttt

SEQ ID NO: 729180 - DNA, 82 bp, Homo sapiens
ccccgacctctcctcactctcgctcgccgtttccaggagcacagcaaacggggattcagcgtccgatcctttggaacaggga

SEQ ID NO: 729181 - DNA, 82 bp, Homo sapiens
cgagcgcggaggaccgggaggctcccgggcttgcgtgggtgtggacactgccagcggctgcagccgacttggaatgacctgg

SEQ ID NO: 729182 - DNA, 153 bp, Homo sapiens
ggaagcgtttttgaagactgttgcccaaaactacagttctgtcactcacttacacagtattgggaaatctgtgaaaggagattacctggggcaattgatgttatcggtcagactataactatcagccgagtagaaggcaggcgacgggcaaat

SEQ ID NO: 729183 - DNA, 75 bp, Homo sapiens
cataggattagatgatccaagtcaccaagaaattactgtctcaagtgatacggacttccaatagtagtcagacat

SEQ ID NO: 729184 - DNA, 50 bp, Homo sapiens
ggaacatctcttcccagcggctcagctccctcgtgaaagatgcttctgtt

SEQ ID NO: 729185 - DNA, 75 bp, Homo sapiens
cttagaagctaccgagttaccctaagaaaggtcatgcctcagctcctaaactacctgaaggctgacagactgggc

SEQ ID NO: 729186 - DNA, 100 bp, Homo sapiens
tcggaagaggaaggaacaaaaggtcccggaccccccggatctgacggggcgggacctggcgccaccttgcagaccgaccaagaccatcactatgaccgat

SEQ ID NO: 729187 - DNA, 75 bp, Homo sapiens
cgagtttccgatttaaagctgagctgcgaggaaaatggcggcgggagatgacttcaaacctgcttctattgacac

SEQ ID NO: 729188 - DNA, 78 bp, Homo sapiens
cactacgttatttagaaacaagacgagaatgtaactccgttgaagcagatgtggagaaagtttgggacctcaagagaa

SEQ ID NO: 729189 - DNA, 101 bp, Homo sapiens
attgcaattccaaaatgtgtaagacgggatattctcttctgtgctgtcaaggttacggctagatgaggctcaagaagcagaatgccaggccttgaggctac

SEQ ID NO: 729190 - DNA, 75 bp, Homo sapiens
ggaaacaatggcatttacagaaagagtcaacagcagtggcaacagattgatatcagtaaatgccattatttagtg

SEQ ID NO: 729191 - DNA, 100 bp, Homo sapiens
agctgatctatctactggaacatggacaggaactgtggacagtgaagagaggcctctcccaaagcacctgcgcaggtaagagcttctgttcgtgtgcagg

SEQ ID NO: 729192 - DNA, 100 bp, Homo sapiens
agcagatttacaaactggccaagaagggccttactccttcacagatcgttttcggctttgtgagaaaccttaccatcaaacacgatggccagcaacgtta

SEQ ID NO: 729193 - DNA, 100 bp, Homo sapiens
tggggaatctggcctcataccttgtccacacagagttcctgtacaaggttcctgacctgtgtattggtaaaggttttcaaggtgtcatgaaaagatgggg

SEQ ID NO: 729194 - DNA, 75 bp, Homo sapiens
tatctactgaaattattttcaacctttccccaaataacaattggcaacatgaagatctacttatcaatagaccac

SEQ ID NO: 729195 - DNA, 97 bp, Homo sapiens
cccatggccagttctatgacctcctcaacatattcgagctcaacggtttaccctcggagaccaacccctatcttcctgtccacttccaacgaagcgg

SEQ ID NO: 729196 - DNA, 83 bp, Homo sapiens
acttctgttgctgtgttctgtcatgagttgcctcatgaattaggtaaatcagaagactgaagcacggcatatactcaccttag

SEQ ID NO: 729197 - DNA, 75 bp, Homo sapiens
aaatgaagtctgtgtcaaggatgagaaacatgctcgacgaggtgggatgtgtgtgggctgaaattccgagctgcg

SEQ ID NO: 729198 - DNA, 97 bp, Homo sapiens
ctgcccagcccgcgcctgagaaggtcaaggtggaggtgaagaagtttgtgaagatcggccgcccgggctacaaagcccgagggcaacatccttcgag

SEQ ID NO: 729199 - DNA, 75 bp, Homo sapiens
aaacgtgactgtgacaaacacctccagttttaacctgtttcctagagaaggtgtggccagactccactgatgata

SEQ ID NO: 729200 - DNA, 90 bp, Homo sapiens
ctgtacctactgatggtgctgtaaccacctcacagattccagcttcggaacaagagaccctggttacagtccctggacatgatccacaca

SEQ ID NO: 729201 - DNA, 51 bp, Homo sapiens
ggacatcctggaagctgggaaatgattgatgactacagcatggttcgattt

SEQ ID NO: 729202 - DNA, 101 bp, Homo sapiens
caggtagagtacctgttgttgcagagttattttctgagtcagtttcaggtactaggttttgacaagcttgcatcatgcgtgagtataagctagtcgttctt

SEQ ID NO: 729203 - DNA, 144 bp, Homo sapiens
agatgcgaagacccttcctggagcgcagagacctcatcatccagcatatcccaggcttctgggtcaaagcattacctaatggtgtcctcagttgtgggcttctatagctctccactcttccggagcctgcggcccagatggcac

SEQ ID NO: 729204 - DNA, 100 bp, Homo sapiens
ttattcaaaaaaaaagaagcctctcactttcagtccaagctaattacacctcctcctccaccaccctcaccagaaaggctccttcctcagagaagcttcc

SEQ ID NO: 729205 - DNA, 100 bp, Homo sapiens
ctcaacgcacgtctgctcggagatcatttgggagatccaagagattcagtatcactcgctcccttgatgatcttgaggagaacccatacgtcatgcgccg

SEQ ID NO: 729206 - DNA, 100 bp, Homo sapiens
atgctctctatttttagatctaaatatcatggctacccatacagggacatgagagatggctttagaagaaaaagtttctactcttcccattatgcgagag

SEQ ID NO: 729207 - DNA, 51 bp, Homo sapiens
tatgttttcatcacttctctccagaagaaccaatttagaacttgaattgat

SEQ ID NO: 729208 - DNA, 50 bp, Homo sapiens
aaccttcgatctcctgacgagaattgaatgatctggcacgggaccctcca

SEQ ID NO: 729209 - DNA, 106 bp, Homo sapiens
agtgtgtgcccactgaggagtccaacatcaccatgcagcacttggagagtgaaaaagaaggagttattggttgcctggatcttatcttaaagtggcttaccctgag

SEQ ID NO: 729210 - DNA, 82 bp, Homo sapiens
gcggcgacggcggcggtggcggcttggacgactcggagagccgatagcctgggctggaagctcttctacgtcacaggctgcc

SEQ ID NO: 729211 - DNA, 99 bp, Homo sapiens
aactccatggaatggattcagactcttcctctcaaaaagcttggaactgcagttggctttttgctaccaccagttttagtacccaacacacagaatgac

SEQ ID NO: 729212 - DNA, 100 bp, Homo sapiens
tggtggaccccgccctgcactccgaggaggagctcgcactgccagtgaaagatgtagaagataaacctgaacaacaaaccagaacaagagagactgacaa

SEQ ID NO: 729213 - DNA, 100 bp, Homo sapiens
gagccgagatcctgaagaagagagcactcctggacaaggatctgcaaattgaagtgcagtttggtcagatgaagactgggtggagaagtttgctgggaag

SEQ ID NO: 729214 - DNA, 97 bp, Homo sapiens
cggcgggagagggaagctgcagcgagagcgcgcggatctcagcgcgggagcagtgcttctgcggcagatgatgttgaatttgaagtatcatcggacc

SEQ ID NO: 729215 - DNA, 75 bp, Homo sapiens
ccacacgccccccctccttcacgccacacacacgggacaccgtggtgtttaaggatggccagtactggatccgag

SEQ ID NO: 729216 - DNA, 75 bp, Homo sapiens
ggatgacatatttttggacctgaaacagaaattctggaacacctatatggaggagagcattcccattgctttatc

SEQ ID NO: 729217 - DNA, 75 bp, Homo sapiens
aaaagacagtcctcgtcagcactgactttcagctatggaatcggaccgtataatagacgctggccccaaaggaaa

SEQ ID NO: 729218 - DNA, 100 bp, Homo sapiens
cctcaaaccaccacacggaaattggaggaacgtcaaggtcgtgggaaataaaaggcagttctacacagactgcagcaacggttgcatctgcatatcctaa

SEQ ID NO: 729219 - DNA, 75 bp, Homo sapiens
acgcagggctttggggaggagtccagggagcccagcacaggttatcaatactctggctgaccatcatcatcgtgg

SEQ ID NO: 729220 - DNA, 50 bp, Homo sapiens
agcgcgggccgcggaggaggtctcagggtcctggctataagtcaccatgg

SEQ ID NO: 729221 - DNA, 78 bp, Homo sapiens
cgttttctccggtacaggttgaggctactaagggtcaacatatttcactggcacctattcacaagcttgaagaagctc

SEQ ID NO: 729222 - DNA, 75 bp, Homo sapiens
caaggacagttggctcctaagggagggactaaatatcgccacatcacagaatcgtatctatctcacagctgacaa

SEQ ID NO: 729223 - DNA, 100 bp, Homo sapiens
gtaccttcttcaagagaaatggagcccttctccaagttgctgatcatctgggctgtgatccacaaacccggttctttgtccctcctaatatcaaacagtg

SEQ ID NO: 729224 - DNA, 74 bp, Homo sapiens
gcggagccaagatgcgaatgggattttaccaaatgttgcaagaactctggagttcttatggtagtaaaatgccg

SEQ ID NO: 729225 - DNA, 90 bp, Homo sapiens
ctcccacgccctgtcccaggtgccttcccccctctggatcatgggtgaggacgcttgagcggaagttagaagcaaaaatgatcaaggagg

SEQ ID NO: 729226 - DNA, 86 bp, Homo sapiens
gttgtctcctgtgcccagccactggatggtggcgttgctgctgctgctctcaggaactgtggctgcaccatctgtcttcatcttcc

SEQ ID NO: 729227 - DNA, 90 bp, Homo sapiens
tgacgagctcacattcatcgagggagaagtgattatcgtcacaggggaagaggaccaggagtggtggggacatggatgaagctggaaacc

SEQ ID NO: 729228 - DNA, 75 bp, Homo sapiens
gctccagtttgagaaacctggatctgcgatctgtttgtggaaatcttacctgtattccttaacgccaatagaaac

SEQ ID NO: 729229 - DNA, 50 bp, Homo sapiens
gggtgttcccgaactagagtggaatgagtccctggaacgccagatgcgtg

SEQ ID NO: 729230 - DNA, 75 bp, Homo sapiens
ggattcgccgaggcaccgaggcactcagaggagcgtatctggtgcaggccgtgagagcagcgggcaagtgcgatg

SEQ ID NO: 729231 - DNA, 108 bp, Homo sapiens
tgctcgagcaaccagaaccggagcatggaggcgcacaacatcctcagttacagaatgtctgaaggggacagtgtgggagaatccgtccatgggaaaccttcggtggtg

SEQ ID NO: 729232 - DNA, 50 bp, Homo sapiens
ggaaaatcatattatagatggagtaaaggaggaaacacaattattactag

SEQ ID NO: 729233 - DNA, 96 bp, Homo sapiens
gagttgttgctcccgcctgagcccagcccccagaaaggattgtgacatatcgttggacccagaattgagctgcaggtggagctggagcaagaatac

SEQ ID NO: 729234 - DNA, 100 bp, Homo sapiens
ctcggcgtcgcgcggcgtgccctgcttgtcacaggtctgtttatgatggtgaagaacatggacgtttcatggagaagcttgaaactcgtatccgtaatca

SEQ ID NO: 729235 - DNA, 133 bp, Homo sapiens
tcgaaggagggctctcctgtctgccaccatcctgggttgacaattctacacaaggaggtactccaaagattcaggtttactcacgtcatccagcagagaatggaaagtcaaatttcctgaattgctatgtgtc

SEQ ID NO: 729236 - DNA, 75 bp, Homo sapiens
gggagcagaagggaggctccaagacctcatcaacaattaaggcggcttacagggagaacacagttggcctccacc

SEQ ID NO: 729237 - DNA, 50 bp, Homo sapiens
aaagtgctgggattacaagcggtcgagctgtgcagttttagcgggtacaa

SEQ ID NO: 729238 - DNA, 83 bp, Homo sapiens
gctcgcgctactctctctttctggcctggaggctatccagccagagaggggcagcaggatgaatgtgggcacagcgcacagcg

SEQ ID NO: 729239 - DNA, 100 bp, Homo sapiens
caggcagagcccggagaaaagccacatggaccacggaggggtgatcgtgaacatcactgccaccctggggaaccgggggcaggcgctccaggtgcatgca

SEQ ID NO: 729240 - DNA, 75 bp, Homo sapiens
gaggcctccccagccatgcagaactctgttaggcaattttcttcagtggtatggcattttctcaaataaaactct

SEQ ID NO: 729241 - DNA, 75 bp, Homo sapiens
atctaaggatgaccctggaaagcactattcctgatcagagaactccagttgcttcaacacacagtatcagtagtg

SEQ ID NO: 729242 - DNA, 90 bp, Homo sapiens
tacaatatgcaataatagtgacatctttcagaaagagatgttgagaatgggaattcatattcctgaaaattcattcggctcctaaagaag

SEQ ID NO: 729243 - DNA, 75 bp, Homo sapiens
accttgaagaggaagacggggcggaagaccaagatcatcgagatgatacagatccacgggttttagaaaaacaag

SEQ ID NO: 729244 - DNA, 75 bp, Homo sapiens
ccgcctacgtatcagctccatccaggccaccactgcggcgggctctggagagaagaagaaggaggttcctgctgt

SEQ ID NO: 729245 - DNA, 75 bp, Homo sapiens
gcgaacagaacctgctgtcgcggccagatggctctgcttccttcctgcaaggcatccagggcattgtggatgcct

SEQ ID NO: 729246 - DNA, 101 bp, Homo sapiens
tctgaggagaagctggagcaggtgctgagttccatgaaggagaacaaagtggccatcattggtgtaccttcagttgaatttttagaatctcccattacggc

SEQ ID NO: 729247 - DNA, 83 bp, Homo sapiens
ttgcagctgcttagacgctggatttttttcgggtagtggaaaaccagaacccagtgacttgattgtaaaaatttacagagcgg

SEQ ID NO: 729248 - DNA, 100 bp, Homo sapiens
ggattcacccacagcggggcggcggcggcggcggctgcggcccaatatagaatggaatcactagttccccttgtacagagtttgaaaaaacggatggaag

SEQ ID NO: 729249 - DNA, 98 bp, Homo sapiens
agcggaccgcggagtcgagacctacccgaacgacgcgggcgagcggggctttggacgccggtggagacgcaggcgagattgtctaaagccccaggaaa

SEQ ID NO: 729250 - DNA, 50 bp, Homo sapiens
ggaggccaggggtgtcgccatgactttggacaaagtttaccaaatgaaaa

SEQ ID NO: 729251 - DNA, 75 bp, Homo sapiens
cggcagtccacccaccgccgccgcctcccaggttatgaagacagtatggagtttccagaccatagtagacatttg

SEQ ID NO: 729252 - DNA, 75 bp, Homo sapiens
gtcattaaacccatcgacaagaaggcacctgtccttgaatgggcaagagggcacatgaagtacggcgtcctccac

SEQ ID NO: 729253 - DNA, 75 bp, Homo sapiens
tgctgagcccgtccgtccgccgccaccacccactccggacacaggactggagactgatgcatgagggggctacgg

SEQ ID NO: 729254 - DNA, 73 bp, Homo sapiens
cgacatcgacccatctaccatcacgtggcagagaggttctacatgaaacattttctcaacacacattcctcat

SEQ ID NO: 729255 - DNA, 51 bp, Homo sapiens
agcttataattattatacaaaagccataggaaggcgatgcactgggcgcca

SEQ ID NO: 729256 - DNA, 51 bp, Homo sapiens
aatcaccagttactttaatgacattttgaaagcgaagcagaagccgtagaa

SEQ ID NO: 729257 - DNA, 75 bp, Homo sapiens
cctccctcagcttccgccccaaaagtgctcctgcgggaagaagtgtcgcggctccaggaggaagttcaccttctc

SEQ ID NO: 729258 - DNA, 75 bp, Homo sapiens
gccattgtctcatgaaccatcctgatttagcaaaagacttaacaggccgctttgtagttcagaatgtttctgcac

SEQ ID NO: 729259 - DNA, 75 bp, Homo sapiens
tcctctcgtgcttggtccactgacgcgcggccccgccgcgaggaaatggctagtgatgagctgaaagagatgcgg

SEQ ID NO: 729260 - DNA, 101 bp, Homo sapiens
gaagatgactgtggatttcgaggagtgtctgaaggactcgccccgcttcagacagggatgacgttgaatgagcggtttgggatcctgaaggaacaaagagc

SEQ ID NO: 729261 - DNA, 51 bp, Homo sapiens
caagaaagactccacctactatggaggacaaattattggattccagcacag

SEQ ID NO: 729262 - DNA, 75 bp, Homo sapiens
aacaatagctcaaggaaacctttccaacacagatgtccaagctgccaagttcctgattatgtcactgtaataaag

SEQ ID NO: 729263 - DNA, 75 bp, Homo sapiens
ctggccgagcaggctgagcgatacgacgcatggcggacaccgacctgttcatggaatgtgaggaggaggagttgg

SEQ ID NO: 729264 - DNA, 75 bp, Homo sapiens
ttccacccaaacttgctggtcactgggagtctgttatgttctgaacccacacatgttttcggaaggaccagatgg

SEQ ID NO: 729265 - DNA, 75 bp, Homo sapiens
ctcacagagctctcacggtttcctctttcctgacaaaaagatactttcattcagaaaaccaagaagctctacatt

SEQ ID NO: 729266 - DNA, 100 bp, Homo sapiens
cgagcgggccgccgccgccgccatgaaccccgaatagcttcccaggtggcttcccctcttcccctgggggctgatttccactgagcagccaaccgcagcc

SEQ ID NO: 729267 - DNA, 101 bp, Homo sapiens
ctcgaccatttaaaaagagtgaaagatttaaagaagagacgtcgggcccagggggaacaggcacgagctgaactcttgcaccctggaggagaagaggttct

SEQ ID NO: 729268 - DNA, 100 bp, Homo sapiens
gaccgggctcggggagccggtctatggactttccgaagacgaggacctgaaggagaagaaggagaaggtggaggagaaggcaagccggaaagagcgaaag

SEQ ID NO: 729269 - DNA, 100 bp, Homo sapiens
tcctcgtgctggcggcggcggcggcggcggcggcggcgctgctcccgggggcgacgggtttaagaattgtttaagctgcatcaatggagcacatacaggg

SEQ ID NO: 729270 - DNA, 89 bp, Homo sapiens
cttctgctgctgtggctgctgccagagagtttgaggagacaatggatgcactccaggctgacatcgaccagctggaggcagagaaggca

SEQ ID NO: 729271 - DNA, 100 bp, Homo sapiens
aatgaacttgctcacaacatccgccgccactgtgacttgcagtcatcatccattaccacaaaattagaccaagatcactccatggatgaaatgacagctg

SEQ ID NO: 729272 - DNA, 97 bp, Homo sapiens
tgagttgtttgaatttataagagtggagttgctcaatgaactacagaaatttctggaaactgaaaaagatgaattaattttggaagttatgaaccca

SEQ ID NO: 729273 - DNA, 75 bp, Homo sapiens
agttcttgggcacgttcatcttgattgcagggcaagaatcctttcgttccatcacaaggtcgtattacagaggtg

SEQ ID NO: 729274 - DNA, 112 bp, Homo sapiens
agacaaacagcccgcccgaccccgtcccgaccctggccgccccgagcggagcctggaggtcacaccgacaaatctgaagcgggtttgccaggggagtgtacccgtctcccca

SEQ ID NO: 729275 - DNA, 100 bp, Homo sapiens
atgctccagcgccagcgcttgcagtttgcattttatgtggttgaacaatttcttgcagaacataaattattaggaaacattaaaaatgtggccaagacag

SEQ ID NO: 729276 - DNA, 107 bp, Homo sapiens
tcatgctgccgacaccctgacggccacgaacttccgagtgggtactaggttttgacaagcttgcatcatgcgtgagtataagctagtcgttcttggctcaggaggcg

SEQ ID NO: 729277 - DNA, 75 bp, Homo sapiens
cgctgggacaaccttcagaggcgggtcacagccgtcctgcggagactcaggacctttccagctcacccccagggc

SEQ ID NO: 729278 - DNA, 100 bp, Homo sapiens
tccagaggcttctgaagcaagctgagaagcagataggtgaaaatggtgatcccaaagccttcttaatagagatttcctggacagaaacatatccccaaac

SEQ ID NO: 729279 - DNA, 75 bp, Homo sapiens
cccaaacaacatctcctgctattccttgggctgcctttcctgcagatgagctgcttcagaaagagcaaaactatt

SEQ ID NO: 729280 - DNA, 51 bp, Homo sapiens
ctcagaagacagagggttttcttttgagccgaggcctgcctggagccccag

SEQ ID NO: 729281 - DNA, 75 bp, Homo sapiens
ggcgggagacgagaagcctgaaaagtcgcagcgagctggagccgccggagtttgaaagctgaatggctctatagt

SEQ ID NO: 729282 - DNA, 82 bp, Homo sapiens
gccggttcttggtgggatctgagcagggccggagccagttcttggaggagactctgcacagggcatggatcactgtggtgcc

SEQ ID NO: 729283 - DNA, 100 bp, Homo sapiens
gggcctcggtgtgcctttcaacatcgccagctacgccctgctcacgtacatgattgcgcacatcacgggcctgaaggacgacttcaaagagggctacctg

SEQ ID NO: 729284 - DNA, 75 bp, Homo sapiens
cagttcagaagagccaaggaataaacatgcaatgaacccaaaaggattatggatgattggccagggtatgacttg

SEQ ID NO: 729285 - DNA, 100 bp, Homo sapiens
ccggttcaagaccaccctcatgaacacactcatggacgtccttcgccacaggccaggatgggtggaagtgaaggaggaactactggagaccacgtgccgc

SEQ ID NO: 729286 - DNA, 89 bp, Homo sapiens
gctgcccagaagaagggaaggcgcgagtgaggaaaggaggtactgtagtacagtgctgtggataccaatccactttctctgtatgtcat

SEQ ID NO: 729287 - DNA, 97 bp, Homo sapiens
gggggctttcgcccgggtcctcctagaaattccccccgaagaagactcccccacatctggggacttccttccccgcggttcaggaatcgtcacccgg

SEQ ID NO: 729288 - DNA, 100 bp, Homo sapiens
ccgctgcggaggcagacgagagcccagcgccctcgagcgagcggaggagatggctggcacctgggaacgctatggattgtgattgctagcattatgtgca

SEQ ID NO: 729289 - DNA, 100 bp, Homo sapiens
gtgcagttcatctctcatcagacatcaaagagttcacactgaagagcaaccctgaaaaattactgaatgtgaagaaatagacggggtttcatcgtgttag

SEQ ID NO: 729290 - DNA, 101 bp, Homo sapiens
aaagtcaagaacaggaatttaaagcacattgtcgaaagtcaatgaaaggattctattttgcaaagctgtattatgaagctaaagaatatgatcttgctaaa

SEQ ID NO: 729291 - DNA, 83 bp, Homo sapiens
cttaaaaacgcagagagtaatgctgaacttaagggttatgtggtccgaatcagtggtgggaacgacaaacaaggtttccccat

SEQ ID NO: 729292 - DNA, 88 bp, Homo sapiens
aagagaatggctgtgctgacttttttatccgtggagagcgactcagggacaaaatgacacatcaactggatcattctgctcattacct

SEQ ID NO: 729293 - DNA, 50 bp, Homo sapiens
agcctcccacagtgctgggattacagagacggggttttaccatgttggcc

SEQ ID NO: 729294 - DNA, 74 bp, Homo sapiens
ctggctcctgattacgatgctttggatgttgccaacaaagaagcagtgtggttcctctccaacatcactgcagg

SEQ ID NO: 729295 - DNA, 83 bp, Homo sapiens
ctcagaacttactcctagtgagagccttgctactactgatgatgtttacaaaggaggaaaacgacttcttctagatttttttt

SEQ ID NO: 729296 - DNA, 101 bp, Homo sapiens
ggaaaagactcaggacggacaagcacagtcttcggaagtgtaatgtgtacaattctggccaacggcggaagctattgctgttcaagaccttctctcggaaa

SEQ ID NO: 729297 - DNA, 100 bp, Homo sapiens
ctgacccgcttcaagaagcctgctgagttcaccacaggatctgtgccagttcagaagcaggcgagcctcttccctgatgaaaaagaagataacttgctgg

SEQ ID NO: 729298 - DNA, 100 bp, Homo sapiens
gcataacattggcagtgtggtgcagcacagtgaggggctgcccaacatgttcggcgaccttcggtccacgtttattgccttgatgattgggtcctacgcc

SEQ ID NO: 729299 - DNA, 98 bp, Homo sapiens
cttctctgcatcccagccatcacctggatttacctgttttctgggagcttcgaagggtgtggtggagcacgtggaggcagcgactaggacaggtccgt

SEQ ID NO: 729300 - DNA, 100 bp, Homo sapiens
cagattggaaattaattgctatcaatgcgaatgatcctgaagcctcaaagtttcatgtgctcatcatcactgtaggggacctttgaaagagctgccggag

SEQ ID NO: 729301 - DNA, 145 bp, Homo sapiens
gtttaataatgatagaatgaagaccacaataaaagagacctctacttagctcagcaattcttacctttgattctaccagaaaggaatgaagaacagaaccttcaggaattgagtcacaatgcagacaaatatcaaatgggagatt

SEQ ID NO: 729302 - DNA, 101 bp, Homo sapiens
tttgtacctgcaggcctcctacacctacctctctctggcatggagtcctgtggcatccacgaaactaccttcaactccatcatgaagtgtgacgtggacat

SEQ ID NO: 729303 - DNA, 75 bp, Homo sapiens
atctgctggagcagctgtaactgcaagacctggacaagagcacaaagttatcattgttgggctggataatgcagg

SEQ ID NO: 729304 - DNA, 75 bp, Homo sapiens
gcttggagcagaatcaccaagcatcgccagcaccagaaatcaatgtggactgaacataaatcacctgatggaagg

SEQ ID NO: 729305 - DNA, 73 bp, Homo sapiens
ctcctctgggttgaaacccgggcgccgccaagatgccgaaacattgaatgaggaggataaagcaaagattgct

SEQ ID NO: 729306 - DNA, 82 bp, Homo sapiens
aaaagatgactacaaacataggatgttttggcgagagatgtattcagtggaggaagctgcttcagtatcagacacagcacag

SEQ ID NO: 729307 - DNA, 51 bp, Homo sapiens
tttcactcaagaagatattgacgtttgatctgtggatgaaatgaatcatga

SEQ ID NO: 729308 - DNA, 90 bp, Homo sapiens
cagacaaacagcccgcccgaccccgtcccgaccctggccgccccgagcggagcctggagattgtaaaccatggctgtgtggatacaagct

SEQ ID NO: 729309 - DNA, 100 bp, Homo sapiens
gcggggccttccacaccccctccgtgggtgtgtgagtggagcctttcaggctggcatggagagcttaaggggcaactgaaggagacacactggccaagcg

SEQ ID NO: 729310 - DNA, 87 bp, Homo sapiens
cgccgcctggcaggccctgcgcaccagcgtttgctgccaattgatggggcaaatgatctcttttttcagccacctccactgactcct

SEQ ID NO: 729311 - DNA, 100 bp, Homo sapiens
cttgttggcctaactgtgctgagccaagtgccaatggatggcaggaatgcgcgcagggaccatgtcggcggagaccgcgagcggccccacagaggaccag

SEQ ID NO: 729312 - DNA, 101 bp, Homo sapiens
acccagaggagagttctccaaacatgatcgtttactgcaaagcagaggtggaggagacactgaagcgactgcagagccagaagggagtgcagggaatcatc

SEQ ID NO: 729313 - DNA, 82 bp, Homo sapiens
atccagcctgcggagcctgtggggcagggtgagaaggactggcagaaatacgagactgctcggcggctgaaaaaatgtgtgg

SEQ ID NO: 729314 - DNA, 100 bp, Homo sapiens
cagccgccgaggagccatcagcttcagctccagctccgctctcttcggctgccccaatccccggcagctctctcagctgtcccctttcctccaacccaac

SEQ ID NO: 729315 - DNA, 75 bp, Homo sapiens
cagagtaaactcttagataaaatgacgacgtccttctggaagaggcgaaactggaaagaccacagcaagattctt

SEQ ID NO: 729316 - DNA, 82 bp, Homo sapiens
gcgtccaccaccgcagcgtcaagtaagactttgaccccgacgcaggcttcagtgattgccgcggatcagaagcctgagcact

SEQ ID NO: 729317 - DNA, 106 bp, Homo sapiens
gcagtcaaaaagatgcttgtggaagccacccgggagtttgaggaggttgtgttcaaatctgaacatcaatgatgtactagggaactactcattgactcttgttgat

SEQ ID NO: 729318 - DNA, 101 bp, Homo sapiens
tgtatggggcaagaacatccgagggtgcctgggaatcggtcgcctggaggaccagtatttcccatggagggttctgggccggagaaggggcgacgttcggg

SEQ ID NO: 729319 - DNA, 75 bp, Homo sapiens
tctacagagatggccaagcgctggggtcgtggctgcgtcctctaggccagcggatgtgatgctggtacaacccag

SEQ ID NO: 729320 - DNA, 95 bp, Homo sapiens
ggaggtaggagttggcgagtagtagcgaggagacgaagattgaggaaattgagcgagagatcatcaagcaggaggagaatgtggaccctgactac

SEQ ID NO: 729321 - DNA, 82 bp, Homo sapiens
ttggaacttcgttgcttgcttgcctgtgcgcgcgtgcgcggacatggcctcaaacggttctggaggacacgtgccggcggca

SEQ ID NO: 729322 - DNA, 90 bp, Homo sapiens
aatcatggaagttgattactcagtctctaaaaagctaagggtgtatgccatgtacaattccgtaaagggatcctgctccgagcctgttag

SEQ ID NO: 729323 - DNA, 100 bp, Homo sapiens
cccagctggtggctggagcgaccccttgttctttggtggcgctggcaatggtcgagacagttaacaacctccttcagccacaagctttgaatgcatggag

SEQ ID NO: 729324 - DNA, 75 bp, Homo sapiens
tctaccgcctggtgcagtcttttgcagtggtgctgttcgagttggggtgactcagtgggaacgccatctgagcgg

SEQ ID NO: 729325 - DNA, 50 bp, Homo sapiens
tccagaaaagctgccttatatgcggagccttttcataagctgctggccca

SEQ ID NO: 729326 - DNA, 75 bp, Homo sapiens
catccccatcccagaccctccacccaaggatgatgaggacagttttagaagacgacagaaagaaaaaagaaagag

SEQ ID NO: 729327 - DNA, 101 bp, Homo sapiens
gggtggatcctgaaaggtggtccagccgcctggccctgcgtgggaccctccacctggcagcaggtcaggaaaagcccaccgaagggccaagaaacacctgc

SEQ ID NO: 729328 - DNA, 104 bp, Homo sapiens
ccggcagccgagcagcctggcaacggcggtggcgcccggagcccgagagagatggaaccatgtaaccaccacgaccaagaggccagtaaccaccagagctccag

SEQ ID NO: 729329 - DNA, 100 bp, Homo sapiens
ggtttggcttctacaaaccaagaacaatgcatctaaacttttgctggccattatggaaagcagacatgacagtgagaatgcagaaagaattctttttaac

SEQ ID NO: 729330 - DNA, 50 bp, Homo sapiens
attacctttgccttggaatacaggagctgaataccactagaaacatacct

SEQ ID NO: 729331 - DNA, 100 bp, Homo sapiens
cggggtgtcgggccagatgcatggagtcgtgttttggaaaacaggccaaggaatttgctgattcccttggaattccgtttttggaaaccagtgctaagaa

SEQ ID NO: 729332 - DNA, 82 bp, Homo sapiens
ccgatcccgccagccactcgcccctggcctcgcgggccgtgtctccggcatcatgtgtggggacggggcttgcgtcttgctg

SEQ ID NO: 729333 - DNA, 97 bp, Homo sapiens
attggaccctcctcccaactgtagatacagtttatgtaacttgatggaagaaaatggaattactccaaaaagacaagtgctcaagcagcaaaatcct

SEQ ID NO: 729334 - DNA, 100 bp, Homo sapiens
ggcttgcccagaaagagaagacagccatggaaggcctgtgtgtggagtggctggtatcccgtcctcgcagagcggagcccagcaccacgggcagcacccg

SEQ ID NO: 729335 - DNA, 101 bp, Homo sapiens
ggccgaggccgcggacgctcccccgggcggggttgagtcggcgctcagctgcttctctttcaaccaggactgcacgtctatgttaacaatgaatgggcaac

SEQ ID NO: 729336 - DNA, 90 bp, Homo sapiens
gcgggagcttggtggagcaggagcggctgggcatcctcctgagactccggggtcagacgcccactccagacatcgggctggggagtgact

SEQ ID NO: 729337 - DNA, 83 bp, Homo sapiens
cccgaccctggccgccccgagcggagcctggagctgcagcagaaggccgtggctagtgagatcttcaagggcaagaaggataa

SEQ ID NO: 729338 - DNA, 100 bp, Homo sapiens
gaagatccctgtggtagagagaaaaatcctggatctgtatgctttgagcaagggatacctcagacaatggcagcttttggattgaaatatttgctgaatg

SEQ ID NO: 729339 - DNA, 98 bp, Homo sapiens
gggtgcacctcagcactatcccaagactgctggcaacagggctcaccagcatttcagcttcaggatggttgtgagtacgtgtttatctggagaactgt

SEQ ID NO: 729340 - DNA, 98 bp, Homo sapiens
agcggcaccgccagacggccagaaagttccgccatgagctggggcacggagctgtggatccgcatttgctaccagcggcggccgcggcggagccaggc

SEQ ID NO: 729341 - DNA, 90 bp, Homo sapiens
catcgggaagccattgtgaacagctgtgtgtttgttcatcagactcttcaccaggtgacaatctccaatagacttgtgtcttcaccttgc

SEQ ID NO: 729342 - DNA, 100 bp, Homo sapiens
tctgctgtctcctgcaagaactggctcaagaaatttgcctcgaaaaccaagctggacgtaaagaaagaagtgatgcactcaattctgcaatagataaaat

SEQ ID NO: 729343 - DNA, 100 bp, Homo sapiens
ggtgaaacttctaagagaagcaatgggaatttacatcagcaccctcaaaacagaaacctcaagccgaagaggttaaaatctcagacaaaaataattcctg

SEQ ID NO: 729344 - DNA, 80 bp, Homo sapiens
ggcccgcgggccaggagagcgctcggcggcctcttctgaaacagtctccctggagcaaccatcagagcagtggctggggc

SEQ ID NO: 729345 - DNA, 75 bp, Homo sapiens
tggttgttccgttgcgagctgcagctgcgatctctgtggtaggcccaggtggaaaacgaagctcattcccaacgt

SEQ ID NO: 729346 - DNA, 75 bp, Homo sapiens
tgtagaacagctttatgaaacagcttgcttcctacaggcgatagatgatgaggaagatcgcttccatggtgtgcg

SEQ ID NO: 729347 - DNA, 100 bp, Homo sapiens
tgattcttctgccctcacacatgtatgatactaccaactacaaaagctattggttaggcgtgagccactgcatccagcctaaactcactagggagatttt

SEQ ID NO: 729348 - DNA, 100 bp, Homo sapiens
gcgggcctcaggggctgctctgaggaccgatgactcggaaagcgctcagaagaacgcttcgcccgttggtgctatgtaaaagtcttgcagtgaaaaaccc

SEQ ID NO: 729349 - DNA, 98 bp, Homo sapiens
gtggtctggaaaggcggtagccggtgtgttggtggtcccggaacctctcgtaaaccaggctgtcccttactccagagaatttaagcagaaatatgact

SEQ ID NO: 729350 - DNA, 50 bp, Homo sapiens
aggaaccggaccccggcagctattttgcaagaacgaggctcaaggatgtg

SEQ ID NO: 729351 - DNA, 100 bp, Homo sapiens
cagcaacagctaaaatctcaaagacaagaggagacactgagggaacaaacacttctggatgcatccacactttttcaaaaatggcaatggtatcagaatt

SEQ ID NO: 729352 - DNA, 97 bp, Homo sapiens
tcaggccccctcaccatcctagaggtcaagatcagctctggctaggcacctacaaaggcagcacctaagcaaaagattgtgaagcctgtgaaagttt

SEQ ID NO: 729353 - DNA, 50 bp, Homo sapiens
cacggagcagcagttccatcccgaggttggattagcttttcaaaacagaa

SEQ ID NO: 729354 - DNA, 50 bp, Homo sapiens
gaattggagtcagcagaactgaaatagaactacagttcctgaggaagaac

SEQ ID NO: 729355 - DNA, 82 bp, Homo sapiens
gaatctggattgtcacctttgctgcaaaaaattacgggtgctggagaatctggtaaaagcaccattgtgaagcagatgagga

SEQ ID NO: 729356 - DNA, 82 bp, Homo sapiens
ctgaggtgcagccacgtgaccctggaaccaggggccaaccagataacattcaggactcagattgggaaaatgaggtacgtta

SEQ ID NO: 729357 - DNA, 80 bp, Homo sapiens
ctggacggcgagcgcgagcggcgcgagaaataatctcaggggcgatataatcaatgaggtggtcctaaagttgctcaagg

SEQ ID NO: 729358 - DNA, 100 bp, Homo sapiens
attaatgatgtggacactgcattgagtttttaccatatggctggagcatctcttgataaagggtgaaaatcctatttataagagtgccgtaacaactgtg

SEQ ID NO: 729359 - DNA, 100 bp, Homo sapiens
ctaaaatgacgacacgccccacaggtcttgggaggattaagtgaggggacatgagtgtgctggaattgatgttcgtctgtgtgatgttggtgaggccatc

SEQ ID NO: 729360 - DNA, 90 bp, Homo sapiens
ccatgacgtccatccatttcgtggttcacccgctgccgggcaccgaggaccagctcaatgacagaatgctgcctttttatatggtcttgg

SEQ ID NO: 729361 - DNA, 102 bp, Homo sapiens
aagagtcaccgggatccctacgcgacctccgtgggccacctcataggtcatcatcagatttgaaatatttaaagtggatacaaaactatttcagcaatgcag

SEQ ID NO: 729362 - DNA, 49 bp, Homo sapiens
gaccagacaaatcaaattagtggttttgaatgacagcccatatcaaggc

SEQ ID NO: 729363 - DNA, 75 bp, Homo sapiens
cctgctcctacaccatccacgcagagggagacgagagggggaccaagctgtcgcctggttgggcccggaaatggg

SEQ ID NO: 729364 - DNA, 75 bp, Homo sapiens
ttcttggttccttcagtggtgttggtagtaaaatggtgctggagaatctggtaaaagcaccattgtgaagcagat

SEQ ID NO: 729365 - DNA, 90 bp, Homo sapiens
caggaagggagaatgggttgctcttaatccattaaggaaatgtcagagtcctaggcctacttacaagcctccagtctcaaattatccagg

SEQ ID NO: 729366 - DNA, 101 bp, Homo sapiens
agtgttggcggatggaagggaggagactcctgaccctcagaatgtttcttgcagaacataaattattaggaaacattaaaaatgtggccaagacagctaac

SEQ ID NO: 729367 - DNA, 100 bp, Homo sapiens
gaatcatattcatcatggacgtgatgttggtgtgttcacatttgatcatggcatgccgccgccgctccactgtcactctccaaggccagcgccacctctc

SEQ ID NO: 729368 - DNA, 75 bp, Homo sapiens
aaaatagtgatagctttgataaaaccactcacgaattcttgtttggtgcccttgctgaactggttgataatgcaa

SEQ ID NO: 729369 - DNA, 101 bp, Homo sapiens
cggtggaatgtgaaaaggaaggctgtgcaaccatattgcttctgggaaaaaatgtcaatatgttggaaactgttcctttgctcatagtcctgaggaaagag

SEQ ID NO: 729370 - DNA, 82 bp, Homo sapiens
ctcgagaattatagccaatgtagaagaaattgccttttacagaggacataagggagtttggccgctggaaagtaaataacct

SEQ ID NO: 729371 - DNA, 100 bp, Homo sapiens
gtgtgaaacaagcgccttctatgtgcctggggtcgcgcctatcaacttccaccagaacgatcccgtagaaatcaagggtgttcctgaaaagaaggtactt

SEQ ID NO: 729372 - DNA, 88 bp, Homo sapiens
ccagacccaatggaacatcagcaatgcttctgttcctccgtgtcacaaagcagtacctgccccacgtggcgcgcctctgtctgatcag

SEQ ID NO: 729373 - DNA, 100 bp, Homo sapiens
ggcgtggaggaagaggcattgaggactttccttacctgtttttccagctcacccactgccagcagaggtgtgtagctgggacggtgctggtctgagctgg

SEQ ID NO: 729374 - DNA, 100 bp, Homo sapiens
agagtcttcctgcccaacaaacagaggacagtggagatcatgaatcagacagataaaaatcaacaagaaatcccatcataccttaatgatgaaccaccag

SEQ ID NO: 729375 - DNA, 98 bp, Homo sapiens
acgaccctgacctggtcatggcgtccagctccggcctggcgtgaggaccccccaatccgcgtgaggatgagctgacaactaccaagaggagttacgag

SEQ ID NO: 729376 - DNA, 83 bp, Homo sapiens
ggaaactaggtcgatggtcggcggcgcccggatgggcagctgaggtcagcccaaggccaaccccactgtcactctgttcccgc

SEQ ID NO: 729377 - DNA, 99 bp, Homo sapiens
aacgtgactgtgaaggcacgagtgtggaacagcaccttcatcgagctggtgtcctcagataatccccaacccgagatggcccctccagtccatgagcct

SEQ ID NO: 729378 - DNA, 100 bp, Homo sapiens
accctgtcctgccacctaccggcagggccccagccctggacgctatgtccagcaaaggctccgtggttctggcctacagtggcggcctggacacctcgtg

SEQ ID NO: 729379 - DNA, 50 bp, Homo sapiens
cctagcatctaagcctgttccctgttcagcatacatcaagagagtgatcg

SEQ ID NO: 729380 - DNA, 83 bp, Homo sapiens
tttggagttcttacaacatggcagacattgacaagtctgctgagaacagacccagtccctgaggaaggagaagatgttgctgc

SEQ ID NO: 729381 - DNA, 50 bp, Homo sapiens
tactccttgtctttgcaaacaaacagaaactggcagacctttcacttcgt

SEQ ID NO: 729382 - DNA, 100 bp, Homo sapiens
cggcggcagacgcaggttcgggaccatgagctgccgtgctggtatagaggactctaagaagtggggcatgctgtttctggtgaaccagctgtttaaaatc

SEQ ID NO: 729383 - DNA, 129 bp, Homo sapiens
cgcgaagctggccaaagcctgcccagacggctcacctgtgcgggatggaacaaaagttgatcatggccttgccaggttggtgacagtatattgtgagcatggtcataaagctgccaaaatcaaccccct

SEQ ID NO: 729384 - DNA, 83 bp, Homo sapiens
cacaagatccggcccatagccgagcagactggcatctgtaaggtgcggccgccgccgaataccgtagcagtaggcaggacagt

SEQ ID NO: 729385 - DNA, 50 bp, Homo sapiens
attgtcatcgccatcctcttgttcaaaagaaggtggcccggaccatcggc

SEQ ID NO: 729386 - DNA, 85 bp, Homo sapiens
cggcggggagcacacggagcactgcaggcgccggggtggagagattcaaccagttagcgtgaaagttggagataaagttcttctc

SEQ ID NO: 729387 - DNA, 100 bp, Homo sapiens
gaacagaggtgtttaccatgacgataagcaaccagcatttagagctgtttatgaagcactgagaaatgggctgataacatccggaaatactggagccgct

SEQ ID NO: 729388 - DNA, 82 bp, Homo sapiens
ctctcagcaagaacgggaacaaaactctgtgggtaattccagaattgattggccataccattgtcactgtattactgctcat

SEQ ID NO: 729389 - DNA, 95 bp, Homo sapiens
tgttggagaactacagaaacctggtctccctaggttttcacaaactcagcatcatcaaatacagttcttccatatcagagacatcctgccccagc

SEQ ID NO: 729390 - DNA, 51 bp, Homo sapiens
gctgataaagagcttggggaagcaaagcggaaggagagttttacatggaag

SEQ ID NO: 729391 - DNA, 90 bp, Homo sapiens
gaaggtccggggcttgccctggtcttgctcggccgatgaagtgcagaggtttttttctggttgaagaagaggatgaacttgaatctggag

SEQ ID NO: 729392 - DNA, 75 bp, Homo sapiens
gccatcccccttcggcgacgtctcctcccgcctcaccacaggaagattcttacctctgaagacaatgttaggacc

SEQ ID NO: 729393 - DNA, 99 bp, Homo sapiens
acttgtgctgtccagatgggcacatgcagcatgctgtgctcacagcccgccggcacggcagccaagctgctcttctcctccagcttcctcatcttcctg

SEQ ID NO: 729394 - DNA, 83 bp, Homo sapiens
cgagctgtttctcatctttatactcttccaggtgtgggctaagctggtggccccggctttagactggaccccacaatgtttgc

SEQ ID NO: 729395 - DNA, 74 bp, Homo sapiens
ggacggcagattgaaatacagtttgcccagggggatcgaaagacctactcagcaggaagacaatgaggatgaag

SEQ ID NO: 729396 - DNA, 100 bp, Homo sapiens
ccgctattcagcagagagctattattccctgtattaaaggctaaagaacgtgccaatggaatggagcttgatgggcgtaggatcagagttgatttctcta

SEQ ID NO: 729397 - DNA, 82 bp, Homo sapiens
atctctaccgatgggaagtccttattattggccctccagatacactttagttggcaaaagcagcttttgatgatgcaattgc

SEQ ID NO: 729398 - DNA, 99 bp, Homo sapiens
ggatgtacacagaagctttagaatctctaaaagtgtttgcagaagaccaaggattaaagcaaggagagccaatcatgactggcaaaacacagaccagca

SEQ ID NO: 729399 - DNA, 51 bp, Homo sapiens
aagagcaagatgcagtcagtggaggtgaacatgtcaaaccttttaagccag

SEQ ID NO: 729400 - DNA, 80 bp, Homo sapiens
aggaccacagaagcaaaagttctcactcaaactgggatagtgccgcaggaggcgcctgttggaaactcactttccgagct

SEQ ID NO: 729401 - DNA, 75 bp, Homo sapiens
gtggtgatgacagaatcagcttttagcctggcagagagcaggtgtgtgatacacgtcgtcaggtgactgaccgag

SEQ ID NO: 729402 - DNA, 100 bp, Homo sapiens
cagagtctctgcgttacaaactcctaggagggcttgctgtgcggaggccttgaaaagaggatagaccaggctgtggaggagtggaatattgagaaggctg

SEQ ID NO: 729403 - DNA, 114 bp, Homo sapiens
cgcctcttgagtgctttggacgatcttcagctggccaacagcaccatcattgcatttacctcggatcatgtaccgggaccctctggtgataatggcatcagtgttacaatgatc

SEQ ID NO: 729404 - DNA, 98 bp, Homo sapiens
agaaatgcccggcgaagccacagaaaccgtccctgctacagagcaggagttgccgcagccccaggctgagacagggcatcatggtgggaggcttgaag

SEQ ID NO: 729405 - DNA, 83 bp, Homo sapiens
ggcgctggagaaatacaacatagagaaggacattgcggctcatatcaagaagttgtgttgcttgatacaacaactgtactggg

SEQ ID NO: 729406 - DNA, 74 bp, Homo sapiens
cggaggtggcagccatctccttctcgagcaccaaaagtggtctgaagtcagagaagttggtggaacagctcact

SEQ ID NO: 729407 - DNA, 75 bp, Homo sapiens
ccaaagtgcccggacccaaaacaggaactgataccccaatgtccttctttgactttgtggttgatcctcattctt

SEQ ID NO: 729408 - DNA, 50 bp, Homo sapiens
gctgatgtctcagcagaagaaaagaaccccatcatcacccagttcttccc

SEQ ID NO: 729409 - DNA, 75 bp, Homo sapiens
gcaagagagctctgcatcaatgcgccggccataggaacaacttgatacagagacaagtacaactcaatcagaaac

SEQ ID NO: 729410 - DNA, 80 bp, Homo sapiens
cgcccaccctgcgccagagaccagataaaaaggaagaggcccagcagaagggactcgctgagccaccccccgccccactc

SEQ ID NO: 729411 - DNA, 100 bp, Homo sapiens
gcggagaccctcgaagtgcgcaaacttgacactcaccctgaccggtaattaataatgcttgtgctactcaagccatagtgagtgtgttactgaactgtac

SEQ ID NO: 729412 - DNA, 100 bp, Homo sapiens
cttggttaaaacctgacacttttaacaggctcccagccaacctctgataaaccctcccagcggccatcagagagcacaaattgtagccctacccggaaaa

SEQ ID NO: 729413 - DNA, 75 bp, Homo sapiens
aggagctcaactccaaccacgacggggccgacgagacctcagattttgcaagaacgaggctcaaggatgtgaggg

SEQ ID NO: 729414 - DNA, 87 bp, Homo sapiens
acacttcaccctctcgcctcgggtctcgggggccgctctgggatcccggccaccagcaattgtccgagctccttaataagcatttat

SEQ ID NO: 729415 - DNA, 75 bp, Homo sapiens
aatattgacccttatttatccagaagattgatcatcatatgggttattctcctgagaatgatattcctatggaga

SEQ ID NO: 729416 - DNA, 75 bp, Homo sapiens
atgggttttaactacagacccagtctctgccaagtgtgatccctcacatccacaaatctctgattggaaagaagg

SEQ ID NO: 729417 - DNA, 75 bp, Homo sapiens
aaggagtgcagaggcatcacctgaaaggaagccacagatgatggacataacaacaaccttcttcctcagattatt

SEQ ID NO: 729418 - DNA, 98 bp, Homo sapiens
cgaatcctaaagcgtttcctcgcttgcattcagctcctctgtgtttgccgcctgggctactgctttacaaaaccagaactgatcttcacattggaaca

SEQ ID NO: 729419 - DNA, 50 bp, Homo sapiens
gattcaagacattactgctatggtttaccgacaagactgtgaaactttcg

SEQ ID NO: 729420 - DNA, 100 bp, Homo sapiens
ctacatcagacacagatggcaaattgagaggatccagaatccagatctctggaatagctaccaggcaaagaaaaaaactatggatgccaagaatggccag

SEQ ID NO: 729421 - DNA, 100 bp, Homo sapiens
cacagcctgcatgtgtcattacagcaagcagaagacttcatcctcccagacactacagagacagctcctctcctacatcaccaaggacaagcagacagag

SEQ ID NO: 729422 - DNA, 74 bp, Homo sapiens
agctattgctgcagcatttgccaaggagacatccctcttagaaccaattacagtggaagtggcttttagaaacc

SEQ ID NO: 729423 - DNA, 98 bp, Homo sapiens
ttggagctgccagtggttgccaatcctgatactgttgctgggcacaggctctggaatgggcactctccttatcagcaagatccgagaagaataccctg

SEQ ID NO: 729424 - DNA, 110 bp, Homo sapiens
ttcttagaagcccactcaactgatgaatttaaagatgtttctgcaacagaaccacgaacatcatcttcagcgggctatttcagcacagcaggtgtatggcgagaagaggg

SEQ ID NO: 729425 - DNA, 90 bp, Homo sapiens
ccagccacacggtgtgttctttcggacttggatgttgtgggtgatggtatgcagtgtcctccttcacctttgctttttgatccttcacta

SEQ ID NO: 729426 - DNA, 100 bp, Homo sapiens
catgaactcacccgtggaccctggcgctaggcaggcgttgaggaagaagccacccgagcggactcccgagtgccttgctttccatgacatttcccctcaa

SEQ ID NO: 729427 - DNA, 97 bp, Homo sapiens
accaccaaactttgttcttgctcttgttttgccctcaattgtaattctgggaaattcagttcatgaagataagaagtttcttgacaaatacatgccc

SEQ ID NO: 729428 - DNA, 100 bp, Homo sapiens
tggcacacgtcttagtccactagagctgggacacttggcattcagggacgtggccatagaattccctcaggaggagtggaaatgtctggaccctgctcag

SEQ ID NO: 729429 - DNA, 75 bp, Homo sapiens
tgaaggtgccaaggatgggaaaggtagaggtcgtcaagtcattgcaggctatggtgaactaaacggtaatgctgg

SEQ ID NO: 729430 - DNA, 100 bp, Homo sapiens
cgggagcctgggcggcgagccgggtgtgagctgcctgaaaatgcactcggatgccgccgctgtcatactatactggcaattgctggagaagattttgcaa

SEQ ID NO: 729431 - DNA, 75 bp, Homo sapiens
acggggccgctgctcaagttccagatttgctggatagaacttatactggcttgcagactcttggagcagagacgg

SEQ ID NO: 729432 - DNA, 100 bp, Homo sapiens
ctagtagccacggtgtggcagctgctctgaaccaggacctggacccggacccaaagtgccatgtctttaataataatccagaatggctactctgatctat

SEQ ID NO: 729433 - DNA, 75 bp, Homo sapiens
gtcacatcgccctgctgggctttgagaagcgcttcgtacccagccagcactatccaagtacatcgtgcaagtgga

SEQ ID NO: 729434 - DNA, 82 bp, Homo sapiens
cggcgcgcgggagcgctacggccccaacgaacactctgctccagccaaggtggtgagggcagctgttcctaaacagcgcaaa

SEQ ID NO: 729435 - DNA, 50 bp, Homo sapiens
ctcagctgacccttgagccataacccataaattgcatctgatggtctcaa

SEQ ID NO: 729436 - DNA, 74 bp, Homo sapiens
ctttgttggagttttgcccacgcgttgtaattaagcctcgcacaatatggacatggatttgattgacatacttt

SEQ ID NO: 729437 - DNA, 75 bp, Homo sapiens
cctgaggaacttggctaggctggccccgagcggaaccagagaatgctgagggaaaccacccctactcctaatccc

SEQ ID NO: 729438 - DNA, 51 bp, Homo sapiens
gtggtctaaggcgccagactcaagctggattttcgtacacccccaggtttt

SEQ ID NO: 729439 - DNA, 96 bp, Homo sapiens
ctgctttttttctggctagaccgaagtgtactagccaaggagttgaagtttgtgactttggatgtgtttcacatggtagttgaagtaccacgctgg

SEQ ID NO: 729440 - DNA, 100 bp, Homo sapiens
acctgaggggagagggaacgcagctgaaagcgtgaactgtgttctcctgaaaagaaagctgaacattcatctataaatcaagaaaatggcactgcaaacc

SEQ ID NO: 729441 - DNA, 100 bp, Homo sapiens
caagagcaagcccgcacgtgtgaaggcatccactgatgaatacgttgccagcttgcatctgccatcatttgatgcccaccttacagagctgacagatgac

SEQ ID NO: 729442 - DNA, 120 bp, Homo sapiens
ctggctgttccatgggagagtattttagagacaatggcaaacatgctttgatcatctatgacgacttatccaaacaggcatgcgaggtgcctttggaaagccccagggcactgtggccag

SEQ ID NO: 729443 - DNA, 50 bp, Homo sapiens
ggaggacctgcaggaggacgcagacggatatttgaaagaagccaacacta

SEQ ID NO: 729444 - DNA, 100 bp, Homo sapiens
ggaaccttctctctttcgctctttggactaatgggagttgcttttggaatgaatttggaatcttcccttgaagaggatcactactcttggaatcaaagat

SEQ ID NO: 729445 - DNA, 98 bp, Homo sapiens
ccgggtcagcggggtcacccctcagcacatggtgggggccacaccatttgccgtggccaggctagagcctaccgtatgtgaacgggagctgtgtgtgt

SEQ ID NO: 729446 - DNA, 82 bp, Homo sapiens
ctccttcggcagtccacccaccgccgccgcctcccagaatcaagccagggaggacttcaaccaggacatcggctggtgtgtc

SEQ ID NO: 729447 - DNA, 75 bp, Homo sapiens
tgatctcccaccttagcctcccaagtctaacataagaccagactatgcagactccaatttccacgacttcaagat

SEQ ID NO: 729448 - DNA, 101 bp, Homo sapiens
atatatcctaaaggagatggaagtgatgtaccatcatgggtagcctttgataaacagataactggattcactttacaatttgcaaaacggctgcaggtcaa

SEQ ID NO: 729449 - DNA, 98 bp, Homo sapiens
tgaaggcactactgttatagaagtcggccttgatcctagcaacaacatgacactggcgtgcaccctgaagaccacaaattaaataaatatcatgactg

SEQ ID NO: 729450 - DNA, 100 bp, Homo sapiens
cctgcggaagcagcgatgcctggcggagcctgcgtgctggtgatcgcgctgatgttcctggcctggggggaagctagtggcggttggcaggaacctgaaa

SEQ ID NO: 729451 - DNA, 50 bp, Homo sapiens
gcgtcatcagcgtctccgaggacagaatcgcctaccatttggtgcaagca

SEQ ID NO: 729452 - DNA, 83 bp, Homo sapiens
gttaaggaacagatccccggaggagcaaaagctggcaggctgacagaggcggcctcaggacggaccttctggctactgaccgt

SEQ ID NO: 729453 - DNA, 83 bp, Homo sapiens
ggaagaggctgaccgcaaatacgaggagacaatgcagatcttcgtgaagactctgactggtaagaccatcaccctcgaggttg

SEQ ID NO: 729454 - DNA, 100 bp, Homo sapiens
tgaagatttgcataaagccaacattcgcaccgtcatggtcacagcgaaagggactctcagtgaagacacgatcagagtgtttctgcatcagattgctgct

SEQ ID NO: 729455 - DNA, 87 bp, Homo sapiens
gcaaagagtcacctaaagttaggcggcactccagccccagctcgggtagtggtggtgcacgaagatccgcactacttgacagcgacg

SEQ ID NO: 729456 - DNA, 83 bp, Homo sapiens
ggagccgtggccgctgggggttgcggcggcgctgagccagcggggccgatgatatcatcaagttgaatcgaaaggaagggaag

SEQ ID NO: 729457 - DNA, 50 bp, Homo sapiens
ctgcccatccactgagacataaaaacatcctgggatggcacgggtccaag

SEQ ID NO: 729458 - DNA, 75 bp, Homo sapiens
ggagctaaagcagcgtgcgttcagccctgggcggaaggagagttttacatggaagtggcttacagaaacttggcg

SEQ ID NO: 729459 - DNA, 85 bp, Homo sapiens
gccagatccgctgatctagtgcttctcgaaaaaaaccttcaggcggcccatgggtccgagtggacagtggcatccaaccaggaag

SEQ ID NO: 729460 - DNA, 82 bp, Homo sapiens
gggagaagctgagagtacacaaggccaggtgctttactccatgaactgtctaatgacggtgctcataagcagtttgatcact

SEQ ID NO: 729461 - DNA, 142 bp, Homo sapiens
atgcttatggtacatacaaaacaaatggagagattgagtctcacggattcttcgcctgagccaccagcaaagggaaatcctcattgacgattcaatttgttgaaggccaatttgtggactcctacgatccaaccatagaaaa

SEQ ID NO: 729462 - DNA, 100 bp, Homo sapiens
cgccacagctgaaggctgcgagggactaagagcagaccaataggagctctgaacccaaaaagagcagcattcttcgctgagcgttatgaatcatgggaag

SEQ ID NO: 729463 - DNA, 100 bp, Homo sapiens
gaagcggccaatggcacggaggcctgcgtgatggaggcgtcctgcctagagctggcgctggagggcgagcgtctgtgcaaggcgggcgacttcaagacag

SEQ ID NO: 729464 - DNA, 83 bp, Homo sapiens
gccaagatggtgaagcagatcgagagcaaggtttaaacttacacgaatcgctttctggaggaggaggggacccgctgcgcgat

SEQ ID NO: 729465 - DNA, 83 bp, Homo sapiens
agaagacttacaagagaacctcctaagagtcacccaaacaatcggctgagaatgagaagaggctggagtgcggtggcgtgatc

SEQ ID NO: 729466 - DNA, 90 bp, Homo sapiens
ctactccatggggtgtgtgggaaataatcaagcgaactggggcggagaaactcatcatccacctgcggaaacatggcatcccctttgcac

SEQ ID NO: 729467 - DNA, 100 bp, Homo sapiens
ccccggtgcagtcgggcctgcccggcatgcaggttgcatgatggaatttgaacattacttcaagaggttttgtattttggattagttaattgggtttgtc

SEQ ID NO: 729468 - DNA, 83 bp, Homo sapiens
ccgcaagtacccgtccatcatagtcaactgcgtggaagagaagttgactatattgtggagtatgactatgatgctgtacatga

SEQ ID NO: 729469 - DNA, 101 bp, Homo sapiens
gccacgggagatggaaccaaggagaaaccatttaaaacaggtctaaagacagtgatgtgtgttctgaaattgtgaaccatgagtctagtacttaatgatct

SEQ ID NO: 729470 - DNA, 82 bp, Homo sapiens
agaagtccagagctgaggactgcctgtttgcaggaaggtgggagtcaatcattttgacaagtctcctgaaaggaacagctag

SEQ ID NO: 729471 - DNA, 97 bp, Homo sapiens
agaagggctgcgggttagggggccggcgcccgcggttcaggctggcctgctgtctgccttgggctccctgatattgatgatttggctgatggcaaca

SEQ ID NO: 729472 - DNA, 100 bp, Homo sapiens
aaagaacaaagactacgaagagaaagccagtaccaagagaaccgcggcagtttggtagtaacaaacggcggaggtcagtcatatgaaattcggatgctgg

SEQ ID NO: 729473 - DNA, 96 bp, Homo sapiens
accaggtggagagtgataagcttcgaatggacagagccatccctgacacccggcatgaccaataaactgccagggagaagaatgagaagacaggag

SEQ ID NO: 729474 - DNA, 75 bp, Homo sapiens
cagtgcatgaagccaggggacatccgccatgctccaaacaacttggcctcagcctgaacacaccacctggaacta

SEQ ID NO: 729475 - DNA, 50 bp, Homo sapiens
gtaaattgaaagaatcacttgtttgtctaggttccaaactgcagctgacc

SEQ ID NO: 729476 - DNA, 91 bp, Homo sapiens
ccttctggaagctactactacgtggtgcttggaaaggggcggaccgcggaacccgaggccatgtcccatgaaaagagttttttggtgtctg

SEQ ID NO: 729477 - DNA, 75 bp, Homo sapiens
attatgcaggtggtctgtgaagccacacagtgtccagatacgaggttcctccgtgtcacaaagcagtacctgccc

SEQ ID NO: 729478 - DNA, 74 bp, Homo sapiens
caaaagtactctccgaagaggaattgacatagaaatcgagctatagcagattatcttcgttcaaatggctatga

SEQ ID NO: 729479 - DNA, 73 bp, Homo sapiens
ggaccttgaagacgacttcgaccctgcccagcacgaccagctcatgcaggaaacagagcaaatgcagcgttac

SEQ ID NO: 729480 - DNA, 74 bp, Homo sapiens
ctttttcagagagaaactttcggtaatgtgagtctcgctctcagtcaaaatctccaacgggaactcctgctcgt

SEQ ID NO: 729481 - DNA, 100 bp, Homo sapiens
atctatggccacaaatatgactttacgtccagtcggcatacagtggtgcaattccatgcaagcatgttttttgctatgactgtgctattttacatgaaaa

SEQ ID NO: 729482 - DNA, 76 bp, Homo sapiens
cgctcctgcccccggggtgacgcgcagctcccagccgcctttgggaccgcttctcgtcgtcgtccacctcctcttc

SEQ ID NO: 729483 - DNA, 74 bp, Homo sapiens
gcggaggccttagttggccaagtactagtgaaaccatacatagacgagactccaaccgggaagactttgaccca

SEQ ID NO: 729484 - DNA, 100 bp, Homo sapiens
ggacttcttcttcaccgccaggacctccttcttcaggagagcgccccagggcaagccccgctccggccaacaagtcagcccaagactaccccgtcggtca

SEQ ID NO: 729485 - DNA, 102 bp, Homo sapiens
aaggatggcaaacagtgccctgatctccgttggctgcttggccatatttgtcactgtgatctccctcttggtgtacaaggtctcactctgtcactcaggctg

SEQ ID NO: 729486 - DNA, 75 bp, Homo sapiens
ttgaagtatatgttgaagtggcctatcccaggacaggtggcactctttcagtgtcaacctaagaaaaagtctacg

SEQ ID NO: 729487 - DNA, 100 bp, Homo sapiens
tgaagaaatttgccctaaatcataaaactttgtaagtggcagaacaaggatttgaagctggcagtctggttccagtgaagttattgccagtggactgtga

SEQ ID NO: 729488 - DNA, 100 bp, Homo sapiens
gaagtaccggctcgtggtggtcggcgggggcggcgtgggcaagtcggcgctcaccatccagttcatccagggtatttgaagtataccatacaactgtttt

SEQ ID NO: 729489 - DNA, 90 bp, Homo sapiens
gtccaatcttgaaaaacagtttaccgatctcaaagatcagtttcagatcgggtggagcggcggcttcaggaactggagagagagatgcgc

SEQ ID NO: 729490 - DNA, 97 bp, Homo sapiens
ttcaccaggatactttcaatcagcttcataaagtccagacaaactttccagaaatgatgaatagatataagcagctattgacctatattcggagtgc

SEQ ID NO: 729491 - DNA, 100 bp, Homo sapiens
gtcggcgcctgttctcgggctgtttggcgggtgtacgtgaacggagagtgggtgaccaacatcagcgagggaggcagcttcggggagctggcgctcatct

SEQ ID NO: 729492 - DNA, 51 bp, Homo sapiens
cacgcacctcgtcaccaaggccaagatctgggacatgagcgatgatgagac

SEQ ID NO: 729493 - DNA, 119 bp, Homo sapiens
gaggtgtcagtgttaaaggaacctctacaacgaaggtgaagccacggaagataaggtgtctgacttccagcaactgctggcctgtgccagggtgcaagctgagcactggagtggagttt

SEQ ID NO: 729494 - DNA, 100 bp, Homo sapiens
cagacatgtggcccatctctgtagccatcactgagaaatctggattttcaagatggacgacctcagtgggaggtagaagggaagataatcagggaaaaat

SEQ ID NO: 729495 - DNA, 74 bp, Homo sapiens
gtccccactttcccctgagcctcagcacctgcttgtttggaagtgtccactataggatttggctttgtgctgga

SEQ ID NO: 729496 - DNA, 100 bp, Homo sapiens
gcctctcccccagcatggtctgcctggcggccgactccaaggaccaggctccctgcaagaaatcttcccaaggctgcagacaccgacggatttgctttgg

SEQ ID NO: 729497 - DNA, 101 bp, Homo sapiens
cctcctcccagggccaggcgccgctcagaacgatctttccctagatcattctgacctagttgcagagttgttgaaggagctgtctaaccataatgagcgtg

SEQ ID NO: 729498 - DNA, 100 bp, Homo sapiens
tgacaatgcctcttgggaacaaaatacaaatcatggagccgctggggtcccttttgcctcagatactattttgaaggcaatttgaatcaacccatagaag

SEQ ID NO: 729499 - DNA, 50 bp, Homo sapiens
gaggagggttgctagtggagaaggttacctgtcctgctgccgattcctgg

SEQ ID NO: 729500 - DNA, 120 bp, Homo sapiens
ctgcgggccaggggtactcggaaggcgcgggcaggagcctggcgaggatgcaccttcccctgccttggaaaggtggttggaggcaaagtaaagaagcccggtaaacgtggtcggaagcca

SEQ ID NO: 729501 - DNA, 98 bp, Homo sapiens
tgagccttctgcctaactgtcccaaagtgctgagattacaggcaagagccacagtgcctggccgtttgtgttgctagttaagctagcttgtattgttg

SEQ ID NO: 729502 - DNA, 75 bp, Homo sapiens
ctgtggtagagagaaaaatcctggatctgtatgctttgagcaagaggctgggaggcggcagaatgcagccagagg

SEQ ID NO: 729503 - DNA, 101 bp, Homo sapiens
caaacagctatggtgatgattagagacatactaatgtacatgagcaatgttgatcccagggatgatgtatttggatatcctcaacaatttgaagataaacc

SEQ ID NO: 729504 - DNA, 74 bp, Homo sapiens
ttaaaatgggcaagagtgctatgcagcaagtgaattcatggtattttacttttttgggaaatactggaaatgaa

SEQ ID NO: 729505 - DNA, 82 bp, Homo sapiens
gagaacctgaatcgggagctgaccagcaggggtatgttagagcccaccaaggaaccactgaaaccactttctgctgcagaaa

SEQ ID NO: 729506 - DNA, 75 bp, Homo sapiens
attctggacacattgtattggtttgatgctcctacctggaacaggtcctaggcctacttacaagcctccagtctc

SEQ ID NO: 729507 - DNA, 101 bp, Homo sapiens
accaaactcatcggaaacatggcactgttgcctatcagaagtcaattcaaaggacctgcccccagagagagtgatctgtgaaaatggttcgctattcactt

SEQ ID NO: 729508 - DNA, 100 bp, Homo sapiens
gccagcgagggccgggcggcccgcggcgtttgggacagtgaaggaggacagcggcagtattgaatttgaccgggattgtgactattttgcgattgctgga

SEQ ID NO: 729509 - DNA, 75 bp, Homo sapiens
tagccctggcaaacctaaccacttgcaaccctgctaatgcaaagtgctggagaatctggtaaaagcaccattgtg

SEQ ID NO: 729510 - DNA, 75 bp, Homo sapiens
caccaactcagcaggacctcctcccccaggctttaagtctgagttcacagagcatgaagactttttaacagttgc

SEQ ID NO: 729511 - DNA, 100 bp, Homo sapiens
cacttttcaccaaggaactggtgctgcagcgagagggagcatcgagtacagctgtccggcctccaacgagtgtgagatcaccaagcggagacgcaaggcc

SEQ ID NO: 729512 - DNA, 80 bp, Homo sapiens
ccaaagacgctaaacgtgccctactctgccccgggggagagatccaaggattaatgtcgtgcttgctggtggccacgttg

SEQ ID NO: 729513 - DNA, 100 bp, Homo sapiens
gtcacagagggagatgtcaggtgggagaaagccttgttcgggagtctagcagttctcgctcaccaaccccaaagcagaagaagaagaaaaagaagaaaga

SEQ ID NO: 729514 - DNA, 83 bp, Homo sapiens
cgtgacacccgtggcatcttccgagtccatcagtttgagaaggccaacagagcacttatggcaaggcatctcgagggggtggc

SEQ ID NO: 729515 - DNA, 98 bp, Homo sapiens
taaaacctaaacaactagaaggattgcctcctggaacaaaacatcccagccatcactcttccacctgctccttagagaagggaagatgagtgagtcga

SEQ ID NO: 729516 - DNA, 50 bp, Homo sapiens
actggcccctctggtatattgtttaattggttggggtcagataagaagag

SEQ ID NO: 729517 - DNA, 74 bp, Homo sapiens
caaaacaacttattggatatgtattcgctgctgaaggatgccaaggcctgcgtagtacacggcagtgatctaaa

SEQ ID NO: 729518 - DNA, 100 bp, Homo sapiens
cgggagtgttcgttgtgccagcgactaaaaagagtgcagaaataccataccatcaatggtcataatgcagaagtaagaaaggctttgtctagacaagaaa

SEQ ID NO: 729519 - DNA, 76 bp, Homo sapiens
ctcggaccaggaccgggatccccaccggctcaactcgcatctcaaggtttcggtctaagtaccacccagatgaggt

SEQ ID NO: 729520 - DNA, 83 bp, Homo sapiens
aggaagaactagtttcccaaacagatgttaagacattcttggaagccttaccgcatgattccacctttccactgatagactca

SEQ ID NO: 729521 - DNA, 75 bp, Homo sapiens
ttaagattcggagagagaggtgctagtggctggacttgacctggaaagattctcagcgctgattttgagatgatg

SEQ ID NO: 729522 - DNA, 74 bp, Homo sapiens
ctctcctgggaccctccaagagcactagtgtctagaaggcactaagggacccctcgtccagtcattgtggaacc

SEQ ID NO: 729523 - DNA, 82 bp, Homo sapiens
cgcggatctcaccgccgctcaggctgcggttggatttctcacgatgtccagtgttatctccatgtctgcccctttcttcctg

SEQ ID NO: 729524 - DNA, 75 bp, Homo sapiens
acacttttcaccaaggaactggtgctgcagcgagagctccccgcagccaccgccacccattggaatggccaacag

SEQ ID NO: 729525 - DNA, 80 bp, Homo sapiens
ctattgtggttggcttctgttacgctaggaatatggcaaacggcagcacattccccctgttcccaggtgggtccagagat

SEQ ID NO: 729526 - DNA, 83 bp, Homo sapiens
aaaagaggctcttcctcctcctcccgcgacgattccctataaggagcccctgctggtgcaccagaactaccgggggccatctg

SEQ ID NO: 729527 - DNA, 96 bp, Homo sapiens
taggtgtcaacaacctggaattcaattggctcttgccttataaagcttatagcttcattgcaccatgtgtggcatttgggcgctgtttggcagtga

SEQ ID NO: 729528 - DNA, 100 bp, Homo sapiens
tccgggccactccagtgacgagggtaggatccgcagccccttcgcgaagcccgagcgagaccgggcgacaggcaggttcggctttccagtttggcagcag

SEQ ID NO: 729529 - DNA, 83 bp, Homo sapiens
gcctgcccgcccgggagctgtcggccccggcccgactctatcacaagaagaacccagtgacttgattgtaaaaatttacagag

SEQ ID NO: 729530 - DNA, 100 bp, Homo sapiens
agcagatgcaggaaaatttcgatattgaagtgtcaaaatccatagatggaaaagatgcgggtccatatggaatatttgctggtagggatgcctccagagg

SEQ ID NO: 729531 - DNA, 100 bp, Homo sapiens
atgtggatcaagcaggttttaaatcaagatttaacattccaacacataaaaattatttatccaacagctcctcccagatcgatgctatagaagacaaaca

SEQ ID NO: 729532 - DNA, 75 bp, Homo sapiens
ctcgaaaacccatagcttgaaaggcctggccaggggaggagcacagatctgtgtcttgtaaagagcatattgctg

SEQ ID NO: 729533 - DNA, 82 bp, Homo sapiens
ccgtgcgcgtgcgcctgggggcaccgctgccgttccgaggagcaggccgggctctcgccatgggtcactgtcgcctctgcca

SEQ ID NO: 729534 - DNA, 75 bp, Homo sapiens
ggactgcagcctcggcggtcagcaggtaagaatgattgatgttggctgatattggagtgctcattcacatgaagt

SEQ ID NO: 729535 - DNA, 75 bp, Homo sapiens
ggagcgccagatggtggaggaatacacttatttatgaagaccctctttgcaagttcagtgcttaacctgaccgaa

SEQ ID NO: 729536 - DNA, 75 bp, Homo sapiens
tgatcacgaaccggagagcaaggttgaggatttcttcaagaagttcttatatgagccattgccagtagaatctca

SEQ ID NO: 729537 - DNA, 90 bp, Homo sapiens
gatacttgaggaaccttcaaaggcacttcgtggggtcacagatatggagtctggagaacggttaccatcctcagcagcctcctctactac

SEQ ID NO: 729538 - DNA, 75 bp, Homo sapiens
acctagaaaagctggtgcggaggcttttgaagcaaacagatgagtgtattcgagatctgactgcagccatgagca

SEQ ID NO: 729539 - DNA, 75 bp, Homo sapiens
agaagatggaaaaaacttgtttaatgggagtcagaaataccatcagaggaggggtactgtgactttaatagtagg

SEQ ID NO: 729540 - DNA, 74 bp, Homo sapiens
cttgatggtttctatagagcctggcaccaagtggaatattacagggtctgaatccagggaaagctattgcagag

SEQ ID NO: 729541 - DNA, 100 bp, Homo sapiens
aacgttattttgttttgcagttcggggccaagctggagggaaggactttgcctcccgggccaaactggcagttcaaaaactagtacagaaagttggattt

SEQ ID NO: 729542 - DNA, 75 bp, Homo sapiens
accgggccaaggagatcaggctctcggcagcctggcatcctcgctacaacctcattgttgtgggccgatacccag

SEQ ID NO: 729543 - DNA, 51 bp, Homo sapiens
gcaaagcacccagctttcttcactcttccgaattgcggcgagcagtaagaa

SEQ ID NO: 729544 - DNA, 82 bp, Homo sapiens
ctgcagccttctggtataccatcgtcaccatgacaacactaggttttacagctcccagcacagtaggaaagagaaatttgag

SEQ ID NO: 729545 - DNA, 101 bp, Homo sapiens
gccgccctgcaccttcagcggatttggggattaggctcttttagacaatgcagatcttcgtgaagactctgactggtaagaccatcaccctcgaggttgag

SEQ ID NO: 729546 - DNA, 82 bp, Homo sapiens
gtggcgaggacagctggccgccgatattcaccaagcgcttcgctacaagcagcagcagttgcaagctcagcatctttctcat

SEQ ID NO: 729547 - DNA, 98 bp, Homo sapiens
gcggggcacagccgggggccggcggcggcgcgcggactccgcatcccgcaccccgatggtagccgaggagctggctgaagccgacgtagcttctctga

SEQ ID NO: 729548 - DNA, 88 bp, Homo sapiens
gctaatagcccggagacaagcaggcggggtttcaccatgttgcccagactggtcttgaactcctgagcttaagcaatccacctgcctc

SEQ ID NO: 729549 - DNA, 100 bp, Homo sapiens
gatcactgttatcatcctaataaccttaattgaagccatccggttgtatctgggctacgtgggtaacctacaggagaagaatctcgctctgtcacccagg

SEQ ID NO: 729550 - DNA, 100 bp, Homo sapiens
gagcccgacccccaggcagctcgccgctccctagcaccttctccagtcgacactctcgcgcccggagatcatgcaacagatgagtgaccaccgctacgac

SEQ ID NO: 729551 - DNA, 75 bp, Homo sapiens
ggacaacagggatctacagaaattcctgcaagattgtcaagagtttcagcctcagtgtcaggtgtgcgctgaatg

SEQ ID NO: 729552 - DNA, 50 bp, Homo sapiens
ttcggaaatgcccttacagcagcagcaacaattgagtcacttcaaaagga

SEQ ID NO: 729553 - DNA, 75 bp, Homo sapiens
gaagggaggagactcctgaccctcagaatgtggctttgaagcgtatgttgaatttcaatgtgcctcatattaaaa

SEQ ID NO: 729554 - DNA, 88 bp, Homo sapiens
gaaagtttcatctgtggatggagtattggacctgcaggaccgcaacgatgagctgcaagctgagctggaaggcctgtgggcgcggctg

SEQ ID NO: 729555 - DNA, 74 bp, Homo sapiens
cagaggtggaggcgctttgaaagggaagaggaagaacgtctgagaaataaaattcgagctgatcatgagaaggc

SEQ ID NO: 729556 - DNA, 90 bp, Homo sapiens
aacatgcaatgaacccaaaagggatgtcatccaagtctccaagaagttcctgccaggcatggccattggctactctagctcgaagctgac

SEQ ID NO: 729557 - DNA, 103 bp, Homo sapiens
aagaacatccacagaatagacctgaagacaaaaatccagaagtacaagcagtctgggggatatgagactttctactcggaatatcctgagtgttgcgtggatg

SEQ ID NO: 729558 - DNA, 75 bp, Homo sapiens
tggaagaggcgagtccggtctcaaaatggagtttcactgttacatgccttgaagtgatgaggaggtttctgttac

SEQ ID NO: 729559 - DNA, 75 bp, Homo sapiens
cttgaatggcttagggctcaagtgaggcatctatactagctaccttctctgtaacagaagggaagaaaaaagttc

SEQ ID NO: 729560 - DNA, 88 bp, Homo sapiens
ggagttgccatctatgttaatggatacacaggtgatttgaagatattaaagctagaaattggaactagaaaatcaaaagaattcaagg

SEQ ID NO: 729561 - DNA, 100 bp, Homo sapiens
caccatcccaccaaagggggctgctgaccgagagagctcactcagccagctggtattccctctcgagtggtttccactcaacaagcccagtgttggggac

SEQ ID NO: 729562 - DNA, 74 bp, Homo sapiens
gggagaggagctgtggataacgggaggtgaatttccatgtcaacatagtcctgcctcctgcttgcccgatggga

SEQ ID NO: 729563 - DNA, 90 bp, Homo sapiens
aaggcccgcggaacagcggaggacgaagagcgggacccgagccctgttttaccgggcagaagttgaagccctccattcttcgggtatgac

SEQ ID NO: 729564 - DNA, 100 bp, Homo sapiens
gttggccttgttcactgctgtgtgccaagctgctgacagcatctggctatcgcagaatcccacgtggcgaagtctcgattttggaattatgccagaccgt

SEQ ID NO: 729565 - DNA, 100 bp, Homo sapiens
atcgtaataacatttgcagagcgctttcacaggataacaaagccattgacctttgccgattgtgttggggacgaacttcctttaggatgggaaaccgtat

SEQ ID NO: 729566 - DNA, 51 bp, Homo sapiens
tggtgcagtgcgagacgctagagggtggagccgccaccaaaatgcagattt

SEQ ID NO: 729567 - DNA, 50 bp, Homo sapiens
agaagacagagggttttcttttgagagcttgtcaggaagatcggaggtgc

SEQ ID NO: 729568 - DNA, 75 bp, Homo sapiens
cagcagcctggccacgctcaccaagtaccctgactccagatgttggagtccggggtgacctggtctcagtgaaga

SEQ ID NO: 729569 - DNA, 50 bp, Homo sapiens
cttggtgaatggagatgcagctcagcagacagatgcaccatcaggaatgg

SEQ ID NO: 729570 - DNA, 75 bp, Homo sapiens
ctcctgagtagctgggataacagggtatacctcagttaccatgtgccaaagcattatacaactatgaaggaaaag

SEQ ID NO: 729571 - DNA, 74 bp, Homo sapiens
tctaagtgatgagatgaatgaagacttcagatctggttcttttcctccgcaaccatgtctgacaaacccgatat

SEQ ID NO: 729572 - DNA, 98 bp, Homo sapiens
ccagaagtcagaaaacaaggtgtctgcaggaccaacctctcctctggatgctctaggtgctggagaatctggtaaaagcaccattgtgaagcagatga

SEQ ID NO: 729573 - DNA, 83 bp, Homo sapiens
ctgaacttccctggtcgaacagttttttctaatggctattcaagtgatcagggccaaagcggtcagtgagaaggaagtggact

SEQ ID NO: 729574 - DNA, 100 bp, Homo sapiens
gaaccaactcggatattgttgaggaagacaactgttagttttgtggcttactgctgctccacccagtgtctgcagacttttgacctgctgagttgataaa

SEQ ID NO: 729575 - DNA, 124 bp, Homo sapiens
agaaggcactgaagccctacgagattcacaccgtcttcggtctcctggggtcggcgccgagtgggaggatggcggaagaaagccatcaccaagtcgggcctccagcacctggccccccctccgc

SEQ ID NO: 729576 - DNA, 92 bp, Homo sapiens
ttcgcctccttcaccgccgcagaccccttcaagttctagtcatgtctcacaccattttgctggtacagcctaccaagaggccagaaggcaga

SEQ ID NO: 729577 - DNA, 98 bp, Homo sapiens
aaacgccgaggaacccggctgaggcggcagagaattcagcctcagcccccagatgaagatggggatcacagtgacaaagaagatgaacagcctcaagt

SEQ ID NO: 729578 - DNA, 82 bp, Homo sapiens
ccttcgcgagcgtctgggcgggtggtagacgcaaacatgcagatctttgtgaagaccctcactggcaaaaccatcacccttg

SEQ ID NO: 729579 - DNA, 98 bp, Homo sapiens
tacagaaaatcggtgaagagaggttttgaattcacgcttatggtagtggacaagttggatggcttgaggactggtactaaaaggaaacgtgactggga

SEQ ID NO: 729580 - DNA, 98 bp, Homo sapiens
tcagcatgctgtgtctagctcaagattattcttggagaaaccctgtctgtttactgtaaccttttgcactcaaattcctttatcaggaataactacat

SEQ ID NO: 729581 - DNA, 100 bp, Homo sapiens
aaaaccttaatattgttggcaatatatcccatcacaccacatttcttcagatggaggtactgagccctctgccttagtggatgacaacggtagtgaggag

SEQ ID NO: 729582 - DNA, 78 bp, Homo sapiens
ccgctgcttgcattcttatttagagggccaacagagcacttatggcaaggcatctcgagggggtggcaatcaccaaaa

SEQ ID NO: 729583 - DNA, 100 bp, Homo sapiens
acagccacaggattggcccactttccccattcacattggttgaatctggcgatgtggaacccatggatatggagggctgactatatacaccatgtttttt

SEQ ID NO: 729584 - DNA, 80 bp, Homo sapiens
aagtgattttttgcctttgttgattaactggacaaattcagtggaagatagatgataagcctgtaaaaattgacaagtgg

SEQ ID NO: 729585 - DNA, 75 bp, Homo sapiens
ggacaggaaagtgtaacatcagttacagaatgtacagaaaggtgttcttacatgaagaagggtgtgaaggctgaa

SEQ ID NO: 729586 - DNA, 75 bp, Homo sapiens
ctggactgcaaaccgagctcccgtctgccttgcagtcattcaatgacaagcgtaaaaagagcttcatcttttcac

SEQ ID NO: 729587 - DNA, 82 bp, Homo sapiens
catctgcaaccgcaacatcgaccagaccatgctctccatcctgctcttcttccacagttaagtgggcagaccaacatccacc

SEQ ID NO: 729588 - DNA, 82 bp, Homo sapiens
tagacttgaggatgcattcattgtgatatccgatagtgatggagaggttgcaaaagcttctcatttcagagagatgccagga

SEQ ID NO: 729589 - DNA, 75 bp, Homo sapiens
cctcagtaccagagacagaagcagatggattcgtccttttagtatatgactctcaacccttctactaagaggaag

SEQ ID NO: 729590 - DNA, 107 bp, Homo sapiens
ccgagagtcttaaaatcctgctctggccggattccagactcgtgggggaaaggctgccaaaactgttacatcaggttgtggagcagttacaaaaggttcattttatc

SEQ ID NO: 729591 - DNA, 75 bp, Homo sapiens
tggggaatctatagttaatcttggcgacattgacaatgatggctttgaaggtgactctcctattccatctgtttc

SEQ ID NO: 729592 - DNA, 123 bp, Homo sapiens
cagggcctgcagcgggagctggacggcgagcgcgagcggcgcgagaaaattcttcgctgctgctgccttaccgccgagaaccaccacccgccaggcgtcttgcggccacacccctggcgggtt

SEQ ID NO: 729593 - DNA, 100 bp, Homo sapiens
gcaacccagtgggcagtgccagtgatgagccctgcacagggccctgtgtttgtaagggtgaagaacctgatgaagatgatgcatatcaggtattgtcaac

SEQ ID NO: 729594 - DNA, 75 bp, Homo sapiens
atcgacaccgaggcatccatcagggaaatcaagttcagagaagccgaactgggattaccatgcagaaatacaagc

SEQ ID NO: 729595 - DNA, 76 bp, Homo sapiens
tccacgtcatccgcatcaacaagatgttgtcctgtgctggggctgacaggttttgcacactagggaccaagaagcc

SEQ ID NO: 729596 - DNA, 98 bp, Homo sapiens
gggagatgatcctggcggattttcagagacgaggtcttgctacattgtccaggatggagaagtaggaattcttaaggatattgttatggagggaaaaa

SEQ ID NO: 729597 - DNA, 75 bp, Homo sapiens
cccaagtcgcggcccctcctctgagagccacagtcagagatggtttcagcatgttggccagtctggtctcagact

SEQ ID NO: 729598 - DNA, 99 bp, Homo sapiens
gggagacaaagcagcgcccgtctgcttcgggcctctggaatttagcgctcgcccagctagccgcagcccgagcgggaagaagttccgcagcaagccgca

SEQ ID NO: 729599 - DNA, 100 bp, Homo sapiens
gagaaacagcctttcaaagacctgggtctccttgtgttgcccgggctggtctcgaactcctgacctcaagtgatctgcctgcctcggcctctgaaagtgt

SEQ ID NO: 729600 - DNA, 83 bp, Homo sapiens
gtctgcaggatttacgcgcacgttggaaccgaagagagctctgttgttgcactcattcttggaatcccagaacaggccttaag

SEQ ID NO: 729601 - DNA, 82 bp, Homo sapiens
cacacggagggctcgcccgcggaggagccgcctgcgcatgctccatcgcctggggagtgcatccgccccaacccttttcccc

SEQ ID NO: 729602 - DNA, 74 bp, Homo sapiens
gccgccatgaacaactcgggcgccgacgagatcgggtcagctggccgccggcacctgtgagattgtgaccttgg

SEQ ID NO: 729603 - DNA, 100 bp, Homo sapiens
agacgggttcagttcgtcatggggctgtttggaaagacccaggagaagccgcccaaagaactggctcgacaacctggtgtttcatccagaagagccagag

SEQ ID NO: 729604 - DNA, 80 bp, Homo sapiens
gctatactccatccaaatatgcagtggaaggtttcaatgacagcttaagccaagacaatgcaaactccagtgaacattcc

SEQ ID NO: 729605 - DNA, 82 bp, Homo sapiens
gggagagtgagcgagccttcacctacagcatcgtgggcgccggctcccagtttggatgtgaagttcatttccaatccgccct

SEQ ID NO: 729606 - DNA, 82 bp, Homo sapiens
ctgcggccgagctcactctcttgtgttgactgacagggaaggaggactcctagaagtaccccaccccacccctgctccttgg

SEQ ID NO: 729607 - DNA, 97 bp, Homo sapiens
tggcagctttgagtgagcgctatgacaaattgaagagtgatcagcagctggactgtgccttggacctaatgaggcgcctgcctccccagcaaatcga

SEQ ID NO: 729608 - DNA, 50 bp, Homo sapiens
agaacggagagctccctcctagaaaagatggtagtgtcgaaccaagtgga

SEQ ID NO: 729609 - DNA, 90 bp, Homo sapiens
ttcgccgcgccccacttgctcgtgcactttacacacatgagggcaaagtatgtttagtccagcaagtatcggtcagccacgaaagacgac

SEQ ID NO: 729610 - DNA, 99 bp, Homo sapiens
gaaaatgcatcttctaagtttttggcaccatatactactttttccagaattcatacaaagagtggcccagcactagaagatttcagtcatctgccacca

SEQ ID NO: 729611 - DNA, 75 bp, Homo sapiens
gcggggatgtatttggaacattatctggacactgccccagagcacatcagctatgtgccccagctctcaaacgac

SEQ ID NO: 729612 - DNA, 50 bp, Homo sapiens
cttggccaaatggacgggactattaaggctcgaatacggatggtcctcgc

SEQ ID NO: 729613 - DNA, 71 bp, Homo sapiens
gcagtcatggtcccagaaacgtcactatcaagaagaaaatgtttcgatgaaagatcctccggacttattgg

SEQ ID NO: 729614 - DNA, 75 bp, Homo sapiens
tccgagcagcccggggatccagcacgcaggcgccatgtcagaaccggctggggatgtccgtcagaacccatgcgg

SEQ ID NO: 729615 - DNA, 78 bp, Homo sapiens
acagctgcagtctgacgagagggcaatggctgccatccggaagaaactggtgattgttggtgatggagcctgtggaaa

SEQ ID NO: 729616 - DNA, 75 bp, Homo sapiens
gccgcctcagccgccgccgccgccgttttcgcctgcagctgctcaccgtacaaaattggacagctgtacatgatc

SEQ ID NO: 729617 - DNA, 74 bp, Homo sapiens
caacgaccttcgcttcgtgggccgcagtgggcgagtcatcttggccaagtatggtctggacggaaagaaggacg

SEQ ID NO: 729618 - DNA, 74 bp, Homo sapiens
cgtgaccgagagcgcgaatatcgtcatcgttagaaggggctgtttcacagtattctggagtaccttttgagtat

SEQ ID NO: 729619 - DNA, 87 bp, Homo sapiens
tttcattcgaggtttcgggccggttatcaatactctggctgaccatcatcatcgtgggactgactttggtggaagtccttggttaca

SEQ ID NO: 729620 - DNA, 120 bp, Homo sapiens
tctgagctcagacctgccaatttaccagagataattgataacaccctgtaacagctgaacaatgcagatcttcgtgaagactctgactggtaagaccatcaccctcgaggttgagcccag

SEQ ID NO: 729621 - DNA, 50 bp, Homo sapiens
atcacctgccagctcatcacaaagtatgatgatgtcaaacgtgatgctga

SEQ ID NO: 729622 - DNA, 100 bp, Homo sapiens
ctcggcggctgaggaaagcaggaggaggtggcggcggcgggaagatgaggagcagcccccacaacatcgatccaagagggggggctcagtgggcggcgtg

SEQ ID NO: 729623 - DNA, 100 bp, Homo sapiens
gggtaatgttgcatctgtggagctaaaaactcagcagtaggccttgcctcagatccaaggtcactcggaagaggccatgtctaccctcaatgacactcat

SEQ ID NO: 729624 - DNA, 78 bp, Homo sapiens
agtaacagattgtgttatttcagatgaggagaacaatccccttgagacagaatatggcctttctgtctacaaggatca

SEQ ID NO: 729625 - DNA, 75 bp, Homo sapiens
caaccacctcgagcggctgctggacgaaggcaaagccatgactacagtagtggtacatgtggactccaaagctga

SEQ ID NO: 729626 - DNA, 82 bp, Homo sapiens
cgggacagctaccggcgcatccttatgaggttgacggatatattcagacgttacgacacggatcaggacggctggattcagg

SEQ ID NO: 729627 - DNA, 90 bp, Homo sapiens
gacatcgagaagcataatgacattgtggacagtgacagcgatgctgaggatcgaggaacgttgtctgtctgcgctcctcagaccaccggc

SEQ ID NO: 729628 - DNA, 75 bp, Homo sapiens
ttattttgggtcttcttcttaatcccatatctggacatctggaacatccatgttccatgccattgcagtgtcaac

SEQ ID NO: 729629 - DNA, 82 bp, Homo sapiens
ggttttttgtggcttccttcgttattggagccaggcctacaccccaggtagatgacattaatgctgataagaatatctcttc

SEQ ID NO: 729630 - DNA, 98 bp, Homo sapiens
cgggcacgtcaaccccttcctcccgtatatcaggtgggccttcctggagctgggcacaagtggccaatacaatgacagcttgcaggcctatgcagccg

SEQ ID NO: 729631 - DNA, 115 bp, Homo sapiens
gacgtcgtccgagagtcttaaaatcctgctctggccggattccagactcgtgggggaaaggctgagcccccctccatgcgcctgaaggcccgacccagcagccctggcttttccg

SEQ ID NO: 729632 - DNA, 89 bp, Homo sapiens
ctgtgacctggccgatgaggaagtactgagcctgttggaggaactggcccggaaacaggaggacagagcgcctgctcgctgtgcccccg

SEQ ID NO: 729633 - DNA, 100 bp, Homo sapiens
gttctatttctctagctattgccttattttttctcatggatgttcttcttcgagtatttgtagaagggcactggtgaggtggattgatgatgaatcttct

SEQ ID NO: 729634 - DNA, 78 bp, Homo sapiens
aagaggtgctgatatcaacacggtcaacgtggacggcttgacagccctgcaccagagatccagttgtcatcggtatcc

SEQ ID NO: 729635 - DNA, 75 bp, Homo sapiens
cacaagagccttggggaagacagttggaagctcagacatgggagtggagcttggtttcgggatctcggtgctgca

SEQ ID NO: 729636 - DNA, 127 bp, Homo sapiens
gtgaaaaatgcgtacccagcggaggtgcagtgtttaaaaaggatgatattggacgaaggaatgggcaaggtggtgttcccactgatgaagagcaggcgactgggttggagagggagatcatgctggc

SEQ ID NO: 729637 - DNA, 83 bp, Homo sapiens
ttctttggaattccattcttttccttattcttctgatgtggatccagacctgcctagagctggaacgttacctccagagcgag

SEQ ID NO: 729638 - DNA, 98 bp, Homo sapiens
gcagcagccgctctgagggcgcctgctcaggttaatgattttgttcgggacaaatttaccagaagagatggctctgttccacttccagcagaagttct

SEQ ID NO: 729639 - DNA, 87 bp, Homo sapiens
agcgaccggcggcgggagaggcgccggggccgcacagtgagggagataaatctgcaggacatcaaggaagatttagaattggatcca

SEQ ID NO: 729640 - DNA, 50 bp, Homo sapiens
cggggaggtcacctgacgaggaggatgctcgtcagaagttccgctctgtt

SEQ ID NO: 729641 - DNA, 100 bp, Homo sapiens
gccgctgccgctatggatgatcgagaggatctggtgtaccaggcgaagctggccgagcaggctgagcgatacgacggggctatctgatgggttagagtgc

SEQ ID NO: 729642 - DNA, 83 bp, Homo sapiens
tattgatcgcctggactgtgcagtatttccagtctgtctcaggaactgtggctgcaccatctgtcttcatcttcccgccatct

SEQ ID NO: 729643 - DNA, 101 bp, Homo sapiens
aagtgcgaggaaatggaggaaggctacactcagtgctcccaatttctttatggtctggctctgggagaggagtggacagcagctggttgagatacatcccc

SEQ ID NO: 729644 - DNA, 75 bp, Homo sapiens
tggaatcgtccagggattaaagggggatcaggagaacgtacaccgttacgaagtgacagtgctggtgcgggactc

SEQ ID NO: 729645 - DNA, 98 bp, Homo sapiens
atgatagcacagtcagtcaaccaaacctcaagtatacaattaaatgcaattaccagctctggctgggtcgccacaacttgtttgacgacgaaaacaca

SEQ ID NO: 729646 - DNA, 82 bp, Homo sapiens
ttggaagcagccgatccagcctgcggagcctgtggggcagacaaagaaacagccttggtataatagcacgttagcatcaaga

SEQ ID NO: 729647 - DNA, 98 bp, Homo sapiens
cagatgagaaggttcagttggcaaaccagatatatgacttggctttaaaagaagattttcctttaagccatgtgatctccccattcaccaatcaagag

SEQ ID NO: 729648 - DNA, 82 bp, Homo sapiens
gcccacgcagctgcctggacaagtaattttttctgcaggatgaattaagagaagagacacttgctcatcaggcatggagagc

SEQ ID NO: 729649 - DNA, 100 bp, Homo sapiens
cagagttcctgaccagctgtgatggtgtggatgccaaccagaaaagtgtgctggggcggaatttcaagatggatcggggggaaactcggccgatatcctc

SEQ ID NO: 729650 - DNA, 75 bp, Homo sapiens
cttcacaaagtgccaaccatacacatggcaccacctcacacagggaaacgatcctccaggtcctattgacaatac

SEQ ID NO: 729651 - DNA, 100 bp, Homo sapiens
tgcggagaagcacgcagatggaatgatagtcagaatggcggcagtggagcatcgtcattcttcaggattgccctactggccctacctcacagctgaaact

SEQ ID NO: 729652 - DNA, 87 bp, Homo sapiens
agggcggcctgagcccggcgcaggtgaccggcgcgcgggagcgctacggccccaacgggtgaggtggctttgaccccgggttgcccg

SEQ ID NO: 729653 - DNA, 90 bp, Homo sapiens
ctccagcttcacccgtacaggtagccccgccgccgcgcacctgccttcgctcccgcaccgggaggtggggaagacagggctccagctacc

SEQ ID NO: 729654 - DNA, 100 bp, Homo sapiens
catatcttcacttggcaaactcaacaagctctattatcaagtcctaaattttggaatgattgtctcatcggcactaatgatctggaaggggttaatggta

SEQ ID NO: 729655 - DNA, 75 bp, Homo sapiens
cagggctccgggcaccaggagcatatcaaatgtttctttctcagcaaaatagaggagaagcttacccctcttcca

SEQ ID NO: 729656 - DNA, 88 bp, Homo sapiens
aagaagaaaagaaagatgcagaggaagaggaaagcgaactggtcttagtggtgcaatggctagtataagcgtgcgttcgagtacccca

SEQ ID NO: 729657 - DNA, 50 bp, Homo sapiens
ccaaagattgtctctggcaaaggggatctgaaacttgtggaaaagccgtc

SEQ ID NO: 729658 - DNA, 83 bp, Homo sapiens
ggttattcgagtgaccgagaccgcggccgggaccgaggtttgctggcctagacctgaactcttcagataatcagagtggagga

SEQ ID NO: 729659 - DNA, 75 bp, Homo sapiens
cgcagtggtcgcttcttctccttgaacccccagacctgactccggaggagcggatggagctggagaacatccggc

SEQ ID NO: 729660 - DNA, 82 bp, Homo sapiens
gcgccgagtgggaggatggcggaaagtacaaggccagctatgtccgcagtcgctccatccgctcagtggccatcgaggtgga

SEQ ID NO: 729661 - DNA, 74 bp, Homo sapiens
ggagaccgggctgtgtgcggctcctacagatggggcattctcttctcccaccctcgggactttaccccagtgtg

SEQ ID NO: 729662 - DNA, 73 bp, Homo sapiens
ctagagtggctgtttatttcccaagagcagccaaaaatcaccaagtcctggagatggacagagacgtatgtgc

SEQ ID NO: 729663 - DNA, 100 bp, Homo sapiens
gcagctaggggcctggccaatccagagcctgccccagagcccaaggccccagaggtgatccgaatgcaggataacaacccattcagtttccagtcggatg

SEQ ID NO: 729664 - DNA, 100 bp, Homo sapiens
attcacctgaggcacccgaagaagagaccatccatatttccagcgaatgacaacagagctgctcaaggcgggaactctgagctaagcagtggaggtttct

SEQ ID NO: 729665 - DNA, 76 bp, Homo sapiens
tggtgggatattctcagaaaattgattttttatcaagcagaaatgcatcgaacaacgagaatcaagatcactgagc

SEQ ID NO: 729666 - DNA, 100 bp, Homo sapiens
attcacaaaatgggtaaatgcacaattttctaagggctggttgatatgtgaagagccaacctgtcgcaatcgaactcgtcaccttccccttcaattctcc

SEQ ID NO: 729667 - DNA, 100 bp, Homo sapiens
aagagattaaagatgcagtacgccacggggccgctgctcaagttccagatttgtgcatctgggggaggtgttgtagccattgacaacaaaatagaacaag

SEQ ID NO: 729668 - DNA, 75 bp, Homo sapiens
tgaatcttttctgggaacattatatggtacggaaaaaggaccagatcaatattgaaacaaagaataaaactgttc

SEQ ID NO: 729669 - DNA, 98 bp, Homo sapiens
gaagattctagacttgtgtgcagcacctggagggaaaacaacacacattgcagcactaatgcatgatcaggacccagtgctccataaaggataatagt

SEQ ID NO: 729670 - DNA, 100 bp, Homo sapiens
agctgccatccatgacgttgatcatcctggagtctccaatcagtttctcatcaacacaagtggtcataatgtcacaatctccttgcagtccaggactggg

SEQ ID NO: 729671 - DNA, 74 bp, Homo sapiens
gccggcacaggggctcttctgcgagaggaacaagaccaatttcttcaacgaggaggacttcatccaacccagca

SEQ ID NO: 729672 - DNA, 51 bp, Homo sapiens
ggattccaagtaactcttatttggcagaaagtgaaactcttcactgctcac

SEQ ID NO: 729673 - DNA, 100 bp, Homo sapiens
agccttggcctgcaagaaactgaaggatggacaaccggaaattttctacacattttggaattcagttactcaggcactttcttctcaatttcatatggca

SEQ ID NO: 729674 - DNA, 82 bp, Homo sapiens
ggacggggagctgaacgtggacagcctcatcacccggctgctggaggagcttgtcaggaagatcggaggtgccaagtagcag

SEQ ID NO: 729675 - DNA, 83 bp, Homo sapiens
gtattgggagatccacagctaagacgccaggacccactggaagcctagaaatgtgatgattcctgcgtattccaagaaccggg

SEQ ID NO: 729676 - DNA, 83 bp, Homo sapiens
cagaccctggagcctcagttggaagcagccgatccagcctgcggagcctgtggggcagagggcagctgtgtacaggatgaatc

SEQ ID NO: 729677 - DNA, 100 bp, Homo sapiens
caaacaatccaggtggcagggagtgcatcaaaggtgtgaacgcagtcagagcaccataacatggtgtgggaagtgaagacaaatcagatgcctaatgcag

SEQ ID NO: 729678 - DNA, 75 bp, Homo sapiens
cttcaccacaaaagcgaaatgggcacaccacaggatcagtgaggaggaggacctgcacctggggacatcgttttc

SEQ ID NO: 729679 - DNA, 100 bp, Homo sapiens
gaatgagtgtctgcaggaggtgtatgagcccgattggcccggcagggatgaggcaaacaagatcgcagagatacttcgttgaaagttgccaccctgatgt

SEQ ID NO: 729680 - DNA, 75 bp, Homo sapiens
cggaagccctgagggcagctgttcccactggctctgctgaccttgtgccttggtgattgaaatctctgaatatcg

SEQ ID NO: 729681 - DNA, 100 bp, Homo sapiens
ctggtggaccagaacatcttctccttctacctgagcaggggactgggggcacctttgcagatgtgtgcaatatcacccacactctcagaggattccagac

SEQ ID NO: 729682 - DNA, 74 bp, Homo sapiens
tttgctcttccatccgcctttgatcgtcttcctcttcagccatccagccaggcccagacatgtccgtccttgta

SEQ ID NO: 729683 - DNA, 90 bp, Homo sapiens
cgtccctcccgctggtcaccactccggcaccaggggaaggggaggagttacagcccggccagttggagttgtagtaccacgagggacgcc

SEQ ID NO: 729684 - DNA, 100 bp, Homo sapiens
tctgaccgttttagtagtcgcagacctcgaaatgatagacgggcggcattgacacccgggttcggggtgtggaggtcctgggccctaagcccacattctg

SEQ ID NO: 729685 - DNA, 76 bp, Homo sapiens
ttttaagcttcccttaacgccagtctttgaagggcttgccttcaaatgcttgctctgtcaaggcacagcctattgt

SEQ ID NO: 729686 - DNA, 100 bp, Homo sapiens
ccggccgtggacatcggggcagctgacctcgcccacgcccagcagcagcagcaacagattaaagagtctattgttggggaaatcagacgggaaattgtaa

SEQ ID NO: 729687 - DNA, 92 bp, Homo sapiens
caggatcctcccagtggccgccagctactccgctgtgaccagggcaggacacgtcctcacagaaaattgaagacttgatggaaatggtgcaa

SEQ ID NO: 729688 - DNA, 100 bp, Homo sapiens
taaagacttttctggagacatgtgcaagctcaaatgggtggagatttctaatgagggaaacattgtccgagaactgaaagcacaaaaggcagacaagaac

SEQ ID NO: 729689 - DNA, 83 bp, Homo sapiens
agccatggtgcagttccaccggcaccatggccaggagggctccatcctggagccggtgaaacctgaagaaggcagagatatgg

SEQ ID NO: 729690 - DNA, 90 bp, Homo sapiens
ggaagaggcccaccctggagtaaccctcactggagaatccagagctgataccccaatgtccttctttgactttgtggttgatcctcattc

SEQ ID NO: 729691 - DNA, 100 bp, Homo sapiens
aggcggccgccgcagcccaggcgcgggggcgacgacagaatttccccccaaagtagagatgctaagccaaatccagaagaacccatagatgaagatgaag

SEQ ID NO: 729692 - DNA, 101 bp, Homo sapiens
gcaagccctactgagcgtgctcccctctgagactggagtgagagggtcttctgagccagctctcccaggcgctgaacggactgtcagacagggccaaagaa

SEQ ID NO: 729693 - DNA, 82 bp, Homo sapiens
ggggaagagacaatggaatttaaggcttgatatcaatattgacttccgcactcgagaatctacagccaagaagattaaagca

SEQ ID NO: 729694 - DNA, 110 bp, Homo sapiens
gcgggactcacggcagaagtgagctggaaggtcttggagcgaagagctcggaccaagcgctcagcagcgtgcagggtcaaagacagccggccccccatgtcagtggtcta

SEQ ID NO: 729695 - DNA, 100 bp, Homo sapiens
taatatgttggcttcgctttcagggtttttaatgaccacaacaagcaagcatgcagcttactgcttgaaaggggcgttcgtggtctgctggacaccaggc

SEQ ID NO: 729696 - DNA, 88 bp, Homo sapiens
gcagctggctagtggcttattacttgtgactggccaaggctgcaggtgatgatgaggccatgttcatagatgaaaacttctgtactgc

SEQ ID NO: 729697 - DNA, 75 bp, Homo sapiens
aagcgagcgaagctagggtcgccgccactgccgcaggaggcgtgagagacttttcttggtctcctggtggtaaca

SEQ ID NO: 729698 - DNA, 90 bp, Homo sapiens
ggcggcgacagcagagcgcccactgcctccagcagggcgtctctggccgagcctctttttgtggaaaacgacagcagcagcagtggcctg

SEQ ID NO: 729699 - DNA, 90 bp, Homo sapiens
ccggcctcggcggctgaggaaagcaggaggaggtggcggcggcgggaagataacattgatgatggcacctcagatcgcccctacagccat

SEQ ID NO: 729700 - DNA, 100 bp, Homo sapiens
aagcggtcatgtctcgctacacgaggccccccaacacctccctgttcatcaggaacgtcgcggacgccaccaggagctcttgtccctggcaaagcgaaag

SEQ ID NO: 729701 - DNA, 88 bp, Homo sapiens
ttggcggccgcgcccgctggcgtcctcttgttctcttccagggtcagttaaatgaaagcatggaccatgggggagttggaccatatga

SEQ ID NO: 729702 - DNA, 80 bp, Homo sapiens
aacctgaacagctactattcccagcaggccaccagcttgggctccccacggagggcagcaagtgggacttggggaacccg

SEQ ID NO: 729703 - DNA, 109 bp, Homo sapiens
cgggcccaagggcagtacatgtacgatgaacagggggcagaatacatcgattgcatcagcaatgtggcgcacgggttccgagtctgaggaagacataaccttgtgcctg

SEQ ID NO: 729704 - DNA, 82 bp, Homo sapiens
ggttcggtaaagtttctgttctctgcagcctcccgcgacgatgcccctcaacgttagcttcaccaacaggaactatgacctc

SEQ ID NO: 729705 - DNA, 74 bp, Homo sapiens
gccggtggccccagcgccctcagccgacggaggaactcgaatcatttatgacagaaagtttctgttggatcgtc

SEQ ID NO: 729706 - DNA, 75 bp, Homo sapiens
atttctcagtcatctactgacagctacagctcagacattccacttcttccatctattacatctctgagtctaaat

SEQ ID NO: 729707 - DNA, 100 bp, Homo sapiens
ggaaactgaggcctggagaggttaaagagacccgttcagagtcctacagtggcagagcagtgtgacctttgaagacgtggctgtaaacttttccctggag

SEQ ID NO: 729708 - DNA, 100 bp, Homo sapiens
gaaagtctctgccgcccttctgtgcctgctgctcatagcagccaccttcattccccaagggctcgctcagccaggtgtggatgaggtcaccattgtcaac

SEQ ID NO: 729709 - DNA, 75 bp, Homo sapiens
ccagagacttcatttgaagaaaacgacagggtctcactgtattgcccaggttggtctcgaactcctggcttcaag

SEQ ID NO: 729710 - DNA, 100 bp, Homo sapiens
atcgacctgctgcgcacctctgtcactgtgaaggtggtcatcatcccgccttttgaggacggcactccccggagcaggatggcccaatggaatcagctac

SEQ ID NO: 729711 - DNA, 97 bp, Homo sapiens
agggttgatggcatagcttggagcccagagactagacttgattcattgcctccagtaatcaagtgactctgacatcattagaagcatgccagaacag

SEQ ID NO: 729712 - DNA, 83 bp, Homo sapiens
cctgcaggtctagtcagagcctcctgcatagtaatggatacaactatttggattggtaccagcaacttcaaggtttctgccag

SEQ ID NO: 729713 - DNA, 75 bp, Homo sapiens
tcagcctcccgagtggctgggattacaggtgagtgtcccagcccggggcgcggtagcgccgccaagcggaagaag

SEQ ID NO: 729714 - DNA, 87 bp, Homo sapiens
aaagatgaagatgaagccagagaagcccagtcttccgaaatgcggtgctcagaaaataaacagagttgtctttgttggaaacttttt

SEQ ID NO: 729715 - DNA, 98 bp, Homo sapiens
tggactgacatcctctataatgttatgaagacagtatggagtttccagaccatagtagacatttgctacagtgtctgagcgagcagagacaccagggt

SEQ ID NO: 729716 - DNA, 76 bp, Homo sapiens
agcctcaggcgtgcgcggacggtgtgcgggtaatcattaccaaatgaggaggaaaggacgatgtcatcgaggctct

SEQ ID NO: 729717 - DNA, 100 bp, Homo sapiens
ctcctgagtggctgggactacagggacttcactgtgactttgcttgcctgatgttccaatacttagtaaataagccttcagaagaaagggtcagggagat

SEQ ID NO: 729718 - DNA, 73 bp, Homo sapiens
tcaattgcagaattgatcaaagatgtcactaccaggtgtgaagtctggcaacaagaggtcttcatctcactct

SEQ ID NO: 729719 - DNA, 100 bp, Homo sapiens
aaaataagagactggatttggatgctgcaaaaacgagactaaaaaaggcaaaagctgcagaaactagaaattcaaatcaggaaacccaggcccaacggca

SEQ ID NO: 729720 - DNA, 50 bp, Homo sapiens
acttgatccaaagacaatgaaggcctcctgtgtcacctggatgacgcctg

SEQ ID NO: 729721 - DNA, 75 bp, Homo sapiens
acaatttattagatggtgacactgcagttggtgagactgctgctcctcgggccattttgaccggccatgactatg

SEQ ID NO: 729722 - DNA, 74 bp, Homo sapiens
cacaaccaattcatagaatagactcccctggatttaagccagcctctcaacagtatggcatgcagctgtaccag

SEQ ID NO: 729723 - DNA, 100 bp, Homo sapiens
acatggctttgacttgcttacagagatgaaaacaaccagcctatctcagtcctaatctgcagctgattgagggagatgcaaagcagctggctggaatgat

SEQ ID NO: 729724 - DNA, 100 bp, Homo sapiens
cagtattgtggcccaggtggaccagaccggctccaagtccagtaacctcctggatctgaaaaaccccttctttagcctacgaggacaagcagaaactcaa

SEQ ID NO: 729725 - DNA, 90 bp, Homo sapiens
gttcggcgccgcttctgtggccacggcaggtgctggagaatctggtaaaagcaccattgtgaagcagatgaggatcctgcatgttaatgg

SEQ ID NO: 729726 - DNA, 74 bp, Homo sapiens
aaattgaattatgaaggacttcccataggaaagaatacagattctgttcatcttgctctgaaattaaataattc

SEQ ID NO: 729727 - DNA, 90 bp, Homo sapiens
ccgcggagcagcttccccccgcgcctctcttcgcctcgcctcgggacccgcggtccccgctcttgctgagtcaagtaaagaacagtttgc

SEQ ID NO: 729728 - DNA, 100 bp, Homo sapiens
atagagcgctccaatctcagccgtcagttcctcttcaggtcccaggacgttggtgaggccccgagttcctgaagacgcccctggggggcagcttcctggt

SEQ ID NO: 729729 - DNA, 76 bp, Homo sapiens
ccagagttagtggaatccacatatctcctctaccagaggttggaaagaaccatgactgtattcaggaaggcacatg

SEQ ID NO: 729730 - DNA, 82 bp, Homo sapiens
cccgccctctctgtttctccccaaaataaccattctccagatccaggaagctcttcgtgggcggtcttgactggagcacgac

SEQ ID NO: 729731 - DNA, 75 bp, Homo sapiens
taaagttgtcatccgtggagcaggaaaccaggttggttttatgactggacccagacctatgatattgcattttat

SEQ ID NO: 729732 - DNA, 89 bp, Homo sapiens
ataaagatgatgatatccttctcaaccttgtgggatgtgaaaactctgttactgaaggccctcgggaccaaggatcacgtcatgactcc

SEQ ID NO: 729733 - DNA, 75 bp, Homo sapiens
gaaatgccatgaacatgcaagaaacatatactgcttacctcattgaaacaagcagcctcccgcgacgatgcccct

SEQ ID NO: 729734 - DNA, 82 bp, Homo sapiens
gacttttctcaaaactggaaggcgctgcaagagattatggattggatatgtctacttctggatgcaaattttactgttgttg

SEQ ID NO: 729735 - DNA, 80 bp, Homo sapiens
cggaggtcgataagctggaactgatgtttttcagaagaagtgaagtcaagatgaagaaccatttgcttttctggggagtc

SEQ ID NO: 729736 - DNA, 75 bp, Homo sapiens
aacaaactaacagcagaagctattcagacacccctgaaatctgccaaaaatgagacgtgcaggtaccatcaggaa

SEQ ID NO: 729737 - DNA, 51 bp, Homo sapiens
cttcactcgacatcagagaattcacacagaacatccatgatagcagtcttc

SEQ ID NO: 729738 - DNA, 95 bp, Homo sapiens
acacaactgaggccccctttcaaggggatcagaggtccctggagtttctgcttcctccagagccagattttgaagatgtaactgagtttctggaa

SEQ ID NO: 729739 - DNA, 100 bp, Homo sapiens
aggccagagagggcctcgggaagagatgcgaggatgacaagacctttccagctcacccccagggccttatggtcaagaaatgtatgcgtttcgatctgag

SEQ ID NO: 729740 - DNA, 100 bp, Homo sapiens
ggctcagtgaagagtctggagtttatctggagtgaggtggccggttcttggtgggatctgagcaggattttttatcaagcagaaatgcatcgaacaacga

SEQ ID NO: 729741 - DNA, 90 bp, Homo sapiens
ggcgcggggtccgccgggggaggcggtttacaggagagccgaccattttcagttgactttttcaggaaaatgattcagtttgaaaaggag

SEQ ID NO: 729742 - DNA, 50 bp, Homo sapiens
agccatccaatggatgcaggaaaactgctgcagaaccttggcctgaaaat

SEQ ID NO: 729743 - DNA, 82 bp, Homo sapiens
ccagtgcggcaaccagatcggcgccaagacctgcctagagctggaacgttacctccagagcgagccctgctatgtttcagcc

SEQ ID NO: 729744 - DNA, 100 bp, Homo sapiens
aaactgggatgaacagtttgacaaggagaacaccgaggagagactgtttaaagtcagcaaggtcacccgtgtgaacagaaagtgagaggttgtagcacat

SEQ ID NO: 729745 - DNA, 82 bp, Homo sapiens
tcatctcgctcggctgcgggaaatcgggctgaagcgactgagtccgcgatggaggtggtctacatagcctgctccttcacca

SEQ ID NO: 729746 - DNA, 50 bp, Homo sapiens
ggaaaaggacgcaaagttctccggcgaggacagagcgggatgccaccagc

SEQ ID NO: 729747 - DNA, 90 bp, Homo sapiens
tgcttggccatatttgtcactgtgatctccctcttggtgtacaagggcaccaccacgaggcgatttgtgggccataccaaggatgtgctg

SEQ ID NO: 729748 - DNA, 75 bp, Homo sapiens
accttgaagcagaggagcagcaggaccagcaggttcaggagaagtggcacctggtggaggacctgtcgcgactgc

SEQ ID NO: 729749 - DNA, 97 bp, Homo sapiens
tcaggcaggaagcagcccccagcctcggacgccgtggcccttgggagagaggtgtggtatctgtgcgctttgaagaagatgaagacaggaacttgtg

SEQ ID NO: 729750 - DNA, 97 bp, Homo sapiens
cagatcttaagtagtgatatttctcttttgtctgcccctattgtaagtgcagatggaacacaacaggagtgtttctcaggagctatcagaaactatc

SEQ ID NO: 729751 - DNA, 100 bp, Homo sapiens
gttcgaactatgtggaggagatgtactgtgcttggctggaaaaccccaaaagtgtacataagggaggagtctgctactagtcttatcagctcttaaaaac

SEQ ID NO: 729752 - DNA, 83 bp, Homo sapiens
aacaaacagatcatccgcaaacacgcgcagaccttcgttgccctctgtgccacagcacggggtcactctggtgcccattgagg

SEQ ID NO: 729753 - DNA, 74 bp, Homo sapiens
aggggctgactgagagcgtctgcttggatgaggaagtacagacaattggtcagatagaactgtgcctcactaag

SEQ ID NO: 729754 - DNA, 80 bp, Homo sapiens
ggagacaccgattataagaagagaaactcagcgctggggaagaaggactctccttcagcaactccagaagcttcagactt

SEQ ID NO: 729755 - DNA, 75 bp, Homo sapiens
ttttggagctgtgtgctaaatcttcagtgggacaatgggttcagacaaaagtgaagcagccgacacgagtcgttg

SEQ ID NO: 729756 - DNA, 90 bp, Homo sapiens
ccaggaaggggtggtcggcagcatggagggccccgacgatagcgaggtcacctttgcattgcactcaggggccctcctcgccaaagacag

SEQ ID NO: 729757 - DNA, 101 bp, Homo sapiens
cttcctgtcgctgacggcgactgcgggaggccaggcgcatattaaatttcctattgactacccctattcaccacctaccttcagattcttgaccaaaatgt

SEQ ID NO: 729758 - DNA, 76 bp, Homo sapiens
gattgatgaacaatgaagcagctcagtggctgagaggactactaactagtagacagagttttaacatcatatttgg

SEQ ID NO: 729759 - DNA, 100 bp, Homo sapiens
aagcgagcctcttctgataactcaggatttacttgaaacaaaaggagaccctaatcttcagaccatggcaaaagttataaccaccgtactgaagttccct

SEQ ID NO: 729760 - DNA, 100 bp, Homo sapiens
cagtatttggagaactcactgatgaacacacgacggttctgccctttatattaatcgagatgaggacatcgcaccatcagtatcccagcaggagcagcgg

SEQ ID NO: 729761 - DNA, 50 bp, Homo sapiens
tcacccacgctctgacctctggcatttccggagagttcttttgaagtcac

SEQ ID NO: 729762 - DNA, 97 bp, Homo sapiens
aaacagaaatttcatgttgcaccctttataggtgggcatttattccagaagtggacacagagggccctgccttcctgtcggatgtagaggagaatca

SEQ ID NO: 729763 - DNA, 101 bp, Homo sapiens
gtggacgtcagcaggaacctcagcttcatggcgagattctcggagctgcaggtgctgcccataaactcgtgtgttatttcaccaactgggcacacagtcgg

SEQ ID NO: 729764 - DNA, 75 bp, Homo sapiens
tacgtcgttcccgctgcgctaggggaagcgggcagggcagcacgctgaggaaacgcaagatgtacgaggagttcc

SEQ ID NO: 729765 - DNA, 75 bp, Homo sapiens
actgcaccgcaccgagggcgagctccagtattggtaaaggttttcaaggtgtcatgaaaagatggggatttaaag

SEQ ID NO: 729766 - DNA, 100 bp, Homo sapiens
cccgcctagcccttccggatcctgcgcgcagaggcgatgccagtccctccactccagaggagaacgaaaccacgacaaccagcgccttcaccatccagga

SEQ ID NO: 729767 - DNA, 80 bp, Homo sapiens
ccctgctcatccattctcctgccacccccagacctcctcagctccaggtgagaagccctaccactgcaactgggacggct

SEQ ID NO: 729768 - DNA, 51 bp, Homo sapiens
tgatgtggatgatgccaaagttttattagataacaacgaacttgatgcaag

SEQ ID NO: 729769 - DNA, 75 bp, Homo sapiens
agtttggcgctattctggcccagggcatactggatgcaggtttgaaatatctccattcagctggcattttacatc

SEQ ID NO: 729770 - DNA, 75 bp, Homo sapiens
catcttccagggtcggatcaaagaaggaagtccccacgagaagaagaagaagaggcggtcccggtcgcggaccaa

SEQ ID NO: 729771 - DNA, 100 bp, Homo sapiens
tgagcctgatacacactgagaaacagcacctgtgcttgtcattatgtgcgtcgaggataagccaacctttatagattcacaatgacatcctttcaagaag

SEQ ID NO: 729772 - DNA, 111 bp, Homo sapiens
aaaagtcaaagttattgttatgctgacagaactgaaacatggagaccaggccagcaggagatggaaccttccagaagtgggcagctgtggtggtgccttctggacaagagc

SEQ ID NO: 729773 - DNA, 100 bp, Homo sapiens
cggcgccagacccgaggcgctagggaagatcgcaccgcggacgcccgctgagcttggcgcacgggccgaccaggtcgcctgcgaggccgctggccaggcc

SEQ ID NO: 729774 - DNA, 100 bp, Homo sapiens
atcatctttcggccgtcagcgaaagcatccctgcccttggatggatagctgtgagctcgtccgcatggtgctgaatggctgaggaccttcccagtctccc

SEQ ID NO: 729775 - DNA, 75 bp, Homo sapiens
gttagaggaagacgacgagtttgaagagttccctgccgaagaccagcatctcagacatgtcgaaaaagatgtttt

SEQ ID NO: 729776 - DNA, 75 bp, Homo sapiens
attttttctcatggatgttcttcttcgagtatttgtagaaggacgcaaacatgcagatctttgtgaagaccctca

SEQ ID NO: 729777 - DNA, 75 bp, Homo sapiens
ggagtgatgtcttccagactcggtgctgtacccgccgtacttgagctggatacactggtggataatttatctatt

SEQ ID NO: 729778 - DNA, 90 bp, Homo sapiens
gccggaggctgggagccgcggcggcctggggatatggctttagttgcccctgaagctccttcagaacaagccagaagagtttttcaaacc

SEQ ID NO: 729779 - DNA, 88 bp, Homo sapiens
gatcgctgtcctgacagaagaggctgtgtttgatgtggacaagaagaaagggttgactctgattgagctctgggaaggcctgacagtg

SEQ ID NO: 729780 - DNA, 100 bp, Homo sapiens
gaaggaacttggttccccctccctcagcttccgccccaaaagggaggttcccctgaaggatgctaaggaatacgctgaatccataggtgccatcgtggtt

SEQ ID NO: 729781 - DNA, 100 bp, Homo sapiens
gtacgtgtacatcatttacggcatgtacttctgcatgaacatctccagccaggatgacagcctgggcttactggagctggaccagcggacccacttcccc

SEQ ID NO: 729782 - DNA, 102 bp, Homo sapiens
ccgcaccccaggatggatcccccagaggtgattgaagtgggaaaaaatgatgacctggaggactctaagtccttaagtgatgataccgatgtagaggttacc

SEQ ID NO: 729783 - DNA, 100 bp, Homo sapiens
ttcgccttctgccgtgattgtcagtttcctgaggcctccccagccacgctttctgtacagcctgcagaactggatctctggacaggacaagactccgaag

SEQ ID NO: 729784 - DNA, 82 bp, Homo sapiens
acctcgtggacaagtttgcagatcgggagcgcaaggtcgccctcaaggccatgatcaaaacatcaagggaatgaaggaccgc

SEQ ID NO: 729785 - DNA, 100 bp, Homo sapiens
tgaggtttctgcagacaatcaaggccgttgctccagggagaactgcaaatatcttcatccacccccacatttaaaaacgcagttggagataaatggacgc

SEQ ID NO: 729786 - DNA, 135 bp, Homo sapiens
ccgcagtttgcgtagacttgaatttcctattcctcggacgatccatgtggaatccgttaaacccatccagagtaatggctgcggccttacccaggaccctgggggagttgcagctgtatagaatattacaaaaag

SEQ ID NO: 729787 - DNA, 82 bp, Homo sapiens
gtgtcctgctgctgctgctgctactacttacaagtgacgggggaagtgacagatccatcaggaaaagtccactttgctcttc

SEQ ID NO: 729788 - DNA, 101 bp, Homo sapiens
aatcaggggacaatgtagtaaaggaacctgttttgttcactggaacaatgaggaaaaacctggatccctttaatgagcacacggatgaggaactgtggaat

SEQ ID NO: 729789 - DNA, 75 bp, Homo sapiens
ggcaaagtagaaaaacactatctcttctatgacggagaatccgtttcaggaaagcatggcctgtatgagaagaaa

SEQ ID NO: 729790 - DNA, 50 bp, Homo sapiens
cgtacacacactggagatcaacagatgaaggatttgggggcagagcactt

SEQ ID NO: 729791 - DNA, 97 bp, Homo sapiens
agcaaccagcaccagatgaaggagcattcctcttgggtgggtttggaggatttgggacaacatctacaactgcaggttctgcattcagcttttctgc

SEQ ID NO: 729792 - DNA, 75 bp, Homo sapiens
aaggactgatttttagaactccacatttgagacccagtcatggcagcctccagcatcagttcaccatggggaaag

SEQ ID NO: 729793 - DNA, 51 bp, Homo sapiens
gttaaggattccaagtaactcttatttggctcgtggtcccaagaagcatct

SEQ ID NO: 729794 - DNA, 100 bp, Homo sapiens
gctccaggagggcgcaggagcgggactgagagcgcctggaggctcgagcggaggtccaatatcagatggaaatgatgcggagccttcgccatgtaaacat

SEQ ID NO: 729795 - DNA, 98 bp, Homo sapiens
tcatgcccaaatcccggaaactccagcgtgtctccagccgtgagtttttggtcatgaagaggaagagaggcaggcctaaggggtccacgaagaagtcc

SEQ ID NO: 729796 - DNA, 101 bp, Homo sapiens
ggggagggtggttaccgctgaggagctgcagtctctgtcaaggaactttatattgctgttggaatatctggagccatccaacatttagctgggatgaaaga

SEQ ID NO: 729797 - DNA, 100 bp, Homo sapiens
agagggaagatggctctttcagtgcttttgggaattatgacccttctgggagcacttgagaacttgggtttttagatcaactaaggatcacacacaacac

SEQ ID NO: 729798 - DNA, 100 bp, Homo sapiens
gtggagatcaactcctctctgttaatggagtgaggtccagttccggccgtaccgcacagacgacttcatcacgcgcctgtactatgagacgcccaggttc

SEQ ID NO: 729799 - DNA, 75 bp, Homo sapiens
atcagatcaaccaccaaagtgggaaacattgaaatcaagactcatgatagtaaagagcacctggcaatgatggaa

SEQ ID NO: 729800 - DNA, 82 bp, Homo sapiens
gcttgaacccattgtcacccctccgattatggtgacaagctgaacatggagctgagtgagaaatacaagctggacaaagaga

SEQ ID NO: 729801 - DNA, 75 bp, Homo sapiens
ggggcggaagaaaatacaaatcacacgcataatggatgaaaggaaccgacaggacaaatgatgcgaaggttggta

SEQ ID NO: 729802 - DNA, 100 bp, Homo sapiens
accgaagtgcagcaagattgtcattgactttgattcaattaacagcagaccgagtcaaaagcttcagcctagccgcccgtgactctcacactgtctcctg

SEQ ID NO: 729803 - DNA, 100 bp, Homo sapiens
tgagtagggtgtgacctccgcagccgcagaggaggagcgcagcccggcctcggaggaagcctttttgagtcaaacctggagaatgaaggaagcatttctg

SEQ ID NO: 729804 - DNA, 130 bp, Homo sapiens
atctcgagccagaggggaaagtatttgtggtaataacccttaccgggagtttcactgaaggataagttctgaacgtcgaaaagaaaagtctcgagatgcagccagatctcggcgaagtaaagaatctgaa

SEQ ID NO: 729805 - DNA, 50 bp, Homo sapiens
agttgatctctaatgcttctgatgcattggacaaaatccggtatgaaagc

SEQ ID NO: 729806 - DNA, 82 bp, Homo sapiens
ctgatgaattacatagcccaagtagtcccagtgcttatgaggtgatcaaactcaaaggctacacatcctgggctattggact

SEQ ID NO: 729807 - DNA, 96 bp, Homo sapiens
ccggcttgttgtcttcaattaaaaaatttattaaaggaagcacacctaagcgaccacgaaactaccctacagcaaagtacacctgcagactctgtg

SEQ ID NO: 729808 - DNA, 100 bp, Homo sapiens
tgataaaccactacgcccgggctggctcctttaccacaaaggaccgctcaggaagtggcagcgaagaagactgagccccgacattccagtctcgaccccg

SEQ ID NO: 729809 - DNA, 96 bp, Homo sapiens
ctgaaactcatcattttgccattaattatatccagcatgattacagatctctgggagttctatctaccctatttatattcctgtatatcattgatg

SEQ ID NO: 729810 - DNA, 49 bp, Homo sapiens
tccaagtgatggagcagcattttcaggttactataacaacagtaccaag

SEQ ID NO: 729811 - DNA, 83 bp, Homo sapiens
ctgtgggcgctgctggcgctctggctgtgctgcgcgacccccgcgcatggaccaagaatcgccttcagccctgtctggtgcat

SEQ ID NO: 729812 - DNA, 76 bp, Homo sapiens
ccaaggacagcttttttcctgcaaggatgtaatccctgttcattactacttaatacctccaccaacaaagactaag

SEQ ID NO: 729813 - DNA, 95 bp, Homo sapiens
tcttcttcttcgagaattacaccggggtccagaataaaagccgccctcattctaggggagaatataatgtttacagcacctttcaaagtcatgaa

SEQ ID NO: 729814 - DNA, 111 bp, Homo sapiens
ggctccctaacaggcccgcctgtctgctcgtggccagcggcgccgccgaagacaatgcagatcttcgtgaagactctgactggtaagaccatcaccctcgaggttgagccc

SEQ ID NO: 729815 - DNA, 100 bp, Homo sapiens
ggcgaggtggatttattcgcatatttcctacatctgagacatgggaaatatatggacaagttggatggcttgaggactggtactaaaaggaaacgtgact

SEQ ID NO: 729816 - DNA, 100 bp, Homo sapiens
cggctgcttggagcgtccgccatgaggagaaggttaaagatcgaggtccggaagccactaggagattttttaattggttttattggagcattaacctggg

SEQ ID NO: 729817 - DNA, 75 bp, Homo sapiens
gtgacatttatttagcagctagtaacttcacttatttcagggaatttcagggaagagccaggtcctgtttgctgt

SEQ ID NO: 729818 - DNA, 82 bp, Homo sapiens
tggtgtcatccagccttagcaaaccagaggtggcacgcactacccttcttcctggcctcctgaagaccatagcagcaaatcg

SEQ ID NO: 729819 - DNA, 100 bp, Homo sapiens
cgctgggcgtgaggggggccttagagggcctccccaggccgcctccgcccgtgaaggtgaggtcgcaggagctggtgcagccagtgtcatgtccgccctg

SEQ ID NO: 729820 - DNA, 82 bp, Homo sapiens
gggcccccagaggcgggcgatgtgaagatgtcagtgggctgtgcctgtcctgatctctgttgaggagctggcgcggaatctg

SEQ ID NO: 729821 - DNA, 98 bp, Homo sapiens
tggaagctctttgcggtggcgttggtgctgtttgcggatgctgatgcagaaacatgccaaaggccaggatttgtttgatcagattgtgtaccacttgg

SEQ ID NO: 729822 - DNA, 75 bp, Homo sapiens
tgccatcaacctgcgtgaggtcaacctgcgcccccagatgtcccaggttcgagaacttgtcttggacaattgcaa

SEQ ID NO: 729823 - DNA, 85 bp, Homo sapiens
catttctaccttgtatgcctcaatttgctggatttaagcactgctgcactttatgagttctcaaaagtctatggtcctgtgttca

SEQ ID NO: 729824 - DNA, 75 bp, Homo sapiens
agccctacaatgtgaagatacataagatcgtagccagacccccagatcttatctagtaagctgcctcagaggggc

SEQ ID NO: 729825 - DNA, 95 bp, Homo sapiens
tgacaaccaggcaatgctggatagataccgaattcttatcacaaagtgcttagatgagtacgaagatgatgaagcagggcagaaagagcggaaac

SEQ ID NO: 729826 - DNA, 97 bp, Homo sapiens
tcctcccagaagacactccccagggcagaaatagcgaccatggcgagagaaaaaatgatccctatgctcttgcatccctggtgtcctttgaagttaa

SEQ ID NO: 729827 - DNA, 90 bp, Homo sapiens
ggagtgtgggagctgaaagggtcttcgctggcggccggatgagagggccttaccaaaaggagatttcttccctcctgagcgtccacaaca

SEQ ID NO: 729828 - DNA, 100 bp, Homo sapiens
aatggagacgccattggatgttttgtccagggcagcatctctggtgcatgctgatgacgaaaaacgtgcactttacaggtccccgatgaaccaagagaac

SEQ ID NO: 729829 - DNA, 52 bp, Homo sapiens
ctcccgagtagctgggattccaggcagctatttttgctatgataatcctgct

SEQ ID NO: 729830 - DNA, 96 bp, Homo sapiens
accagagctgttcctattcggccatcttggctcctccctcgatcggggtactgtgcaaaaagtggttgttcttcctactaacaactctgtcagtgg

SEQ ID NO: 729831 - DNA, 100 bp, Homo sapiens
cacagactccaactgtacaagaggagagtgaagaggaagaggatgtctgagctggagaaggccatggtggccctcatcgacgttttccaccaatattctg

SEQ ID NO: 729832 - DNA, 75 bp, Homo sapiens
tgctcagcgcggacctagacctggaatcgcccaagtccctctactcgcgagatgccatggacaatattaccaggc

SEQ ID NO: 729833 - DNA, 73 bp, Homo sapiens
gagctgcgccggcgagaagcggccgagccagcagcaggagtggaaacaaaatgtcagtcagtgtgcatgagaa

SEQ ID NO: 729834 - DNA, 51 bp, Homo sapiens
ctaccgaaacgctctgaaaatcgagccggattaccgagaggatgggatgga

SEQ ID NO: 729835 - DNA, 100 bp, Homo sapiens
ggacctgtggccagtgttgtcatggacaaggacaagggtacaggacagccagcgtcatcattgctttgactgatggagaactccatgaagatctcttttt

SEQ ID NO: 729836 - DNA, 90 bp, Homo sapiens
ttggggccactgcgaggccgttttaggctgaacctcctcagaagagcaactggagatagaagcatgaatcttttatccatacgttccgcc

SEQ ID NO: 729837 - DNA, 80 bp, Homo sapiens
agccgatccagcctgcggagcctgtggggcaggaaacatgccctgaactgtcacagaatgaaaccagcgctcttcagcgt

SEQ ID NO: 729838 - DNA, 90 bp, Homo sapiens
tggatgtaactcaggattataatgagactgactggtcccaagaattcatctctgaagttacaggttcttcacacacccccattcggcgta

SEQ ID NO: 729839 - DNA, 100 bp, Homo sapiens
ctgtcccagccgatgggttgtccgactgggagcagaggaagccttgaggacctactcacagataggaattgaaggttcctgatgaaaagttatgatcagg

SEQ ID NO: 729840 - DNA, 100 bp, Homo sapiens
tctcggtagaaggccagagtcacacacggtcctaagagctgggcaccaggaagcgaaggctgtgcaaggatgatgctgaaaggaataacaaggcttatct

SEQ ID NO: 729841 - DNA, 50 bp, Homo sapiens
ctgggcctgcccttcaccctctacatggccttgaaccggggcattgctgc

SEQ ID NO: 729842 - DNA, 75 bp, Homo sapiens
gctcgagctgctgctggattgaactcagagaagccggggaggaaatcagtggtgcttcaggatattgtgaatttg

SEQ ID NO: 729843 - DNA, 75 bp, Homo sapiens
ccccaagtagtccgatggctgcggctgcgccgaggcgccctactcaggtctatgctccatcagcaagcactgccg

SEQ ID NO: 729844 - DNA, 99 bp, Homo sapiens
tggttggagtggcacagactggatctgggaaaacattgtcttgaatggcattactgaggaagctgatcccaccatttactctggcaaagtaattcgccc

SEQ ID NO: 729845 - DNA, 83 bp, Homo sapiens
ggggatcagaggtccctggagtttctgcttcctccagagccaggtctatcagccacagtctctgcaagtttccaagagcagca

SEQ ID NO: 729846 - DNA, 50 bp, Homo sapiens
gggggaatcaccgacatgctcacaggaagccgctctgtgacccacctctg

SEQ ID NO: 729847 - DNA, 106 bp, Homo sapiens
cttttgcagagctgtgatgttttggggattccactctccagtgtaatgattattgacaacagggtgaggacgcttgagcggaagttagaagcaaaaatgatcaagg

SEQ ID NO: 729848 - DNA, 75 bp, Homo sapiens
ccagtgctaccctgagaaaggtggacgtaatgttggctcaattaagaaacatcagggagataaattcaacccagt

SEQ ID NO: 729849 - DNA, 83 bp, Homo sapiens
ctgtagctttcatgagcacaggcatcagtcaggcagatgtttgtcgactggaatggggctatgcaccaccgcctaaaaatggg

SEQ ID NO: 729850 - DNA, 81 bp, Homo sapiens
cgattgaccagctggccctggagtcccctgagcaaattgtggctactaatttgccccctgaagatcaagatggctctgggg

SEQ ID NO: 729851 - DNA, 100 bp, Homo sapiens
tgggaaagaacttggctagcaagacaaacgtgtacatctctagcagtgctggagccaggtggcgagagactgtggatattcataaggagaaagtggcacg

SEQ ID NO: 729852 - DNA, 82 bp, Homo sapiens
cggaatcggggcgcttcgccccgggccccccagcatgaagaccccggcggacacaggtgtggatgtggaagcagccaagcgg

SEQ ID NO: 729853 - DNA, 101 bp, Homo sapiens
actcaccgaggccttctgtggagactgtcaagtagccaagggaaaataagcccaggaaggtcaaggaataagtcagcaacctgatccaggctttactgggg

SEQ ID NO: 729854 - DNA, 100 bp, Homo sapiens
aaaactgatggctaagtttgcatgaaaactgcactttattgcaaggttatgtggtccgaatcagtggtgggaacgacaaacaaggtttccccatgaagca

SEQ ID NO: 729855 - DNA, 82 bp, Homo sapiens
gacacgcttcttctggaagaccagccaacagctcctggtaacgtttttatccatggatgacttgcttgggtaaggacatgaa

SEQ ID NO: 729856 - DNA, 100 bp, Homo sapiens
catgtctgatcccttgctcccatccctgcagcatgaacaaggagtacgagacccaatctagtgcagaagccaaatttgtgaagcagctagaccaatgtga

SEQ ID NO: 729857 - DNA, 51 bp, Homo sapiens
aagattgtgaagcaatagcctaagaagttcatctggacccctaccgaacat

SEQ ID NO: 729858 - DNA, 75 bp, Homo sapiens
gcaccgcgaaagccccaggggccattggaccctacagctgagtcagtgctgattctctcaaatagagcttgaagg

SEQ ID NO: 729859 - DNA, 75 bp, Homo sapiens
ttcccgctggccgccatctgctgcagactggagcctgagagcagcaccagtggcagttcgcagcctccaggactt

SEQ ID NO: 729860 - DNA, 83 bp, Homo sapiens
ctctgggatcccggccaccagcaattgtccgtgcctccggagccagcgtggtggccatagacaacaagatcgaacaggccatg

SEQ ID NO: 729861 - DNA, 100 bp, Homo sapiens
ccgaggtgcctttctccaaaaggccgttaattaaggaaaagttgagccagggcgtgaccctcgtcgtggacagatacgcattttctggtgtggccttcac

SEQ ID NO: 729862 - DNA, 74 bp, Homo sapiens
caacgagatcctgcacatgtctttgagcaggggagagaagacagaagaggttggagaggtcagggaggtgccag

SEQ ID NO: 729863 - DNA, 98 bp, Homo sapiens
cccaagcggccacccgggcctcagggaccccttccccgagagacggcaccatgacccagggaaaggtgaggaattttaaattggaacaagagcaagaa

SEQ ID NO: 729864 - DNA, 82 bp, Homo sapiens
cacaccccggacatccgcgccacacatattaataaggcagcggaaagaagaaatatgaatacggctccatcaagacccagcc

SEQ ID NO: 729865 - DNA, 83 bp, Homo sapiens
ggcttaaatgatgtattttgtgatcgcagcgatgaaaggattatattccatcacaacaagatattctgcttgccagaagaccc

SEQ ID NO: 729866 - DNA, 83 bp, Homo sapiens
cggctgcgggaaatcgggctgaagcgactgagtccgcgatggaggtggatccataaagaacccagccaacccgcagagggagg

SEQ ID NO: 729867 - DNA, 75 bp, Homo sapiens
ttctcaacccctacaacttattcctgtccggagacagcctaagggctcaggcccgatgtcaccgcataggccaga

SEQ ID NO: 729868 - DNA, 90 bp, Homo sapiens
acgaggaggaggaggaggaggaaaaagattgtcctgggtcacataatgccagctgagcgtaaaaagccagcaagtatggaagaaaaagac

SEQ ID NO: 729869 - DNA, 95 bp, Homo sapiens
aaacatgaataggacaaagaacagaccgctggttcgtggacagatcaggaagatgacatttggaagagtcagtgacttggggcaattcatccgag

SEQ ID NO: 729870 - DNA, 98 bp, Homo sapiens
gcatgtcatctttgccaggactgatgcagatgcccctcctccaccagaggactgggaggagcatgtcaacaggagttccgattctgaagaggcatttg

SEQ ID NO: 729871 - DNA, 97 bp, Homo sapiens
cgagcggatcttgcaggagatcgagagcaccgacaccgcctgtgtggggcccaccctccggattttttatcaagcagaaatgcatcgaacaacgaga

SEQ ID NO: 729872 - DNA, 83 bp, Homo sapiens
cctggccagcctgctcatcgcctactgcatgtggacgaatgtggaacctcgctctgtggctgtgttcccttggcactccttag

SEQ ID NO: 729873 - DNA, 49 bp, Homo sapiens
gaaactcctgtatatattcaaacaacaattctgcttggtcagaatcgtg

SEQ ID NO: 729874 - DNA, 98 bp, Homo sapiens
ggccaccgcaacccatgggtggccagggattctgggctgaagaagatgcagagcagcctgaagctggtggactgtatcatcgaggtccacgatgcccg

SEQ ID NO: 729875 - DNA, 51 bp, Homo sapiens
cgcctcgagagacggtttctgagatccccctgaggtgaccgtgtttcccaa

SEQ ID NO: 729876 - DNA, 83 bp, Homo sapiens
ctctgcccccccttccccacgcaaccccagatccatttacactttacactgctgatgcaaggaatcccctgggctcccgtcca

SEQ ID NO: 729877 - DNA, 87 bp, Homo sapiens
ccaaataagctatatactttggttacctatgtacctgttaccactttcaaaaggagccaagaagggaccaagtatattcaaaacctc

SEQ ID NO: 729878 - DNA, 100 bp, Homo sapiens
atctccacgcccagaaattcagacaagagcattctccttatctcatctgcacaggaagcaggtctaagaggttggaaagaaccatgactgtattcaggaa

SEQ ID NO: 729879 - DNA, 101 bp, Homo sapiens
ggcggacagtgcggaactaaaggtgacagagctgaatgaacctctctccaatgaagatcgaaatctcctctctgtggcctacaagaatgtggttggtgcca

SEQ ID NO: 729880 - DNA, 90 bp, Homo sapiens
cccaggaagccgcgggcaaactcagactcgaaggcggcttacagggagaacacagttggcctccaccgtttctgccccacagaaaacgta

SEQ ID NO: 729881 - DNA, 83 bp, Homo sapiens
atgagacccttccggtcttcttttcaggatctaagcctttcccacgttatggttataaaccctccccaccgaatggatgtggc

SEQ ID NO: 729882 - DNA, 75 bp, Homo sapiens
ctgaaaatgcactcggatgccgccgctgtcattgcctttccccatcttcctggttctgctccttcgtggcctagt

SEQ ID NO: 729883 - DNA, 99 bp, Homo sapiens
atcagctgtgaaaaactctttggatgattctgccaaaaagggctactacaaagttctgggaaagggaaagctcccaaagcagcctgtcatcgtgaaggc

SEQ ID NO: 729884 - DNA, 100 bp, Homo sapiens
aagcttcgctgctgggcagttggctggaggggctgctgctgggaacacctggagtctccgcgggcaggatcccctaacaacagtgagagagcaatgcgag

SEQ ID NO: 729885 - DNA, 101 bp, Homo sapiens
tggagtccgacctgccaagtgccgtgacacttctgaaaaatctccaggagcaaacaccattcgcttttcacccaagatgatttgatgtcttataaaactct

SEQ ID NO: 729886 - DNA, 83 bp, Homo sapiens
cttcgtcatgttcttcgcgccctggtgcacattcaggttcccgagcacaaacatcaagataacgttcactgccctgtccagcg

SEQ ID NO: 729887 - DNA, 138 bp, Homo sapiens
tgcctgcttttatggagcatctgcaaagaaggttaaatcaggatggctggataaactctctcctcaaggttttcggctttgtgagaaaccttaccatcaaacacgatggccagcaacgttaccaacaagacagatcct

SEQ ID NO: 729888 - DNA, 83 bp, Homo sapiens
atctcaaaaacaaaattctgaactcaggacttggcaagttcgatacaagaggctgttttcctagcgtggcttgctgcctttgg

SEQ ID NO: 729889 - DNA, 100 bp, Homo sapiens
gtcatcgccacaggctgcaagcgcccaaagccaatgggaatcacctggttcaagagggagaaccgaagattacaggaggccagcatgaggttggaacaag

SEQ ID NO: 729890 - DNA, 75 bp, Homo sapiens
tgatagaaatcatttccatcaataccgggtatttcatggaaacttggagagagaaaagtgatgaagtgatgggag

SEQ ID NO: 729891 - DNA, 100 bp, Homo sapiens
gcggcttttgagcaggagtccgggccctcgtgtcaccgctctgaagtcaaggaggtttttagaacttcagccataaaaatgggcagaattttccttgatc

SEQ ID NO: 729892 - DNA, 98 bp, Homo sapiens
gagctggctgccaatctggggctcactgaacggcagaaaaggtgtgagcggtactgggcccaggagcaggagccactgcagactgggcttttctgcat

SEQ ID NO: 729893 - DNA, 74 bp, Homo sapiens
atgagctggggcaccgagctctggtctccaaaaaaagttggtgatgacattgccaaggcaacgggtgactggaa

SEQ ID NO: 729894 - DNA, 100 bp, Homo sapiens
gcaagtccagcgcgggggctatggaggtgatggacgtgttctccactgatgacctcaccggatttttacagactattgcagatatcatccgaacatgttt

SEQ ID NO: 729895 - DNA, 98 bp, Homo sapiens
tgccattacgagggttcttgggaatagcaggttacagatgtagagctaaaacgactgaaggatgctttcaagaggacctgtggactctcatattacat

SEQ ID NO: 729896 - DNA, 87 bp, Homo sapiens
gggcaggaaattctgtattgctggtcagcaacctcaacccagaggccatctggctgctgtgcacaggcgctcgtgaggctgccttcc

SEQ ID NO: 729897 - DNA, 51 bp, Homo sapiens
agtccgtactgcagctttgaagaaggtcaaaatgcagatcttcgtgaaaac

SEQ ID NO: 729898 - DNA, 73 bp, Homo sapiens
ctcaaaatatttacttatatcaattcctggacacagaggtgaaatggaaacagatgagccagatgatgaatcc

SEQ ID NO: 729899 - DNA, 100 bp, Homo sapiens
ggcctgggcagcctgctggaccctgccaagaagtcgcccatcgcagcagctcggtacgttcttcagatgtgtcatggtctgatactcgtaggaccctccg

SEQ ID NO: 729900 - DNA, 88 bp, Homo sapiens
ctcaaccaaccgcatctcaacaaattccgcgacaaccagatcaggtagatgacattaatgctgataagaatatctcttctgcacagat

SEQ ID NO: 729901 - DNA, 99 bp, Homo sapiens
ctccgtattctctgaagcctggaaacgaggcactcagttggaagagtccagcaaggttgaagatgaaatccactgaggagggaagtccagcaccctgtg

SEQ ID NO: 729902 - DNA, 83 bp, Homo sapiens
ccgcctcgagccagcccgccagcatgccccagtccaaagaagctggcagggcggagatgctggaccacgccgtcctgcttcag

SEQ ID NO: 729903 - DNA, 74 bp, Homo sapiens
aatggataaatggtactgaatggacaagacagtgggcaaacgcagaggcgggaacaaactagccctcaagacgg

SEQ ID NO: 729904 - DNA, 90 bp, Homo sapiens
ctctgaaatcaagtccggatgaaggtggctgcaggaatggcttacatcgagcgcatgaattatatccatagagatctgcgatcagcaaac

SEQ ID NO: 729905 - DNA, 82 bp, Homo sapiens
ccgagtccagcccaggaaaatggagagtgttattaaggaaaagcgggatgcctatgtgagccgcctgaatgccatctatcaa

SEQ ID NO: 729906 - DNA, 95 bp, Homo sapiens
aacacccaggaggcccccgtgaaggagaagcacgcccggcatgtgtcgtggaggccgaatgtttgcaccaaccaaaacctggcgccgttggcatc

SEQ ID NO: 729907 - DNA, 49 bp, Homo sapiens
gaagtgggcccagcgttcattcagggcaagtgtccagagaatggctggg

SEQ ID NO: 729908 - DNA, 83 bp, Homo sapiens
aagtatccaatagggatattgtagaaactgtctttaacctgcgctggccgcgcgccgaacccgagtccggcggcaccgacgac

SEQ ID NO: 729909 - DNA, 90 bp, Homo sapiens
gagcgaccaggccctgaactgcggtgggactgcctcgactggcagcgcgggaaacgtcaaactcgaggctccctacacaccttttctcac

SEQ ID NO: 729910 - DNA, 98 bp, Homo sapiens
atggaagcaggtggaattatgccctgttggttccaatgctgggattggctgcttttcgtggacgacatccttggagaaggcagcgacgacagcgacag

SEQ ID NO: 729911 - DNA, 75 bp, Homo sapiens
gaaaaaattagagacaatgaaaacagagttcctacatgtgaagaggtgctcctgacctctgataaagctgcagcc

SEQ ID NO: 729912 - DNA, 98 bp, Homo sapiens
gaaaatggtaactggagccgtagcgtcggtgctggaagacgaggccacagacacttctgatagtgaaggtggaaatggatattgttgaaaaactggtg

SEQ ID NO: 729913 - DNA, 90 bp, Homo sapiens
catgttccgcctgtgctaccgcgtgttgcggcattcccaggaggactaccgcaagaaccagatgtggtgaacaattcctctccggcactg

SEQ ID NO: 729914 - DNA, 130 bp, Homo sapiens
tttgctaccaggacctacggcaccagtggcctggacaacagacctctgtttggggagacgtccgccaagcactattcctgatcagagaactccagttgcttcaacacacagtatcagtagtgcagccacc

SEQ ID NO: 729915 - DNA, 50 bp, Homo sapiens
tacgcagaaggacctggccacggtgactgtaggacgaggatttggtgtca

SEQ ID NO: 729916 - DNA, 83 bp, Homo sapiens
accttcgaccttggacttctcagcctccagaatgtggcttggatgaggtcatcttctcctatgtgcttggggtcctggaggac

SEQ ID NO: 729917 - DNA, 100 bp, Homo sapiens
tatgatgaagacaacattagctctatttgaattcactgacagacgtctggaaatgctacagtttcaggtggactgtgcattgtcacttattcgacttggg

SEQ ID NO: 729918 - DNA, 100 bp, Homo sapiens
gcggagccagcctgagttgggagaagagctccagagaagtggagactgctgcacggactctggaaccatgaacatatttgatcgaaagatcaactttgat

SEQ ID NO: 729919 - DNA, 74 bp, Homo sapiens
cgggagtcgctgggtgcgtggggctgcctcgccgcgtctcgccacgcttcggaaccaaaaagaagcttcccaga

SEQ ID NO: 729920 - DNA, 100 bp, Homo sapiens
gctgaggagagctgttcagctatggctgctgtcacacattacctgtatctttgccagtttagctggatgctcattcaggccagaagcggactcctagaag

SEQ ID NO: 729921 - DNA, 100 bp, Homo sapiens
aagccttggaaatggaggaaaaagaagaccagcgacaaatttagagaaacctcggcaggcaaggggagagccagttgcgcagagccctgcaaccagcagt

SEQ ID NO: 729922 - DNA, 75 bp, Homo sapiens
aattatcagtggcctacgagataattctattaaggaatgggtaccacagaccatgtcatcgtcctggcgtccacg

SEQ ID NO: 729923 - DNA, 90 bp, Homo sapiens
tgtcaagttcgtgggcaacatctacaccctcaaatgcagagtgcctggtgaagaatgtgatgggatcactagcatgtctgcggagagcgg

SEQ ID NO: 729924 - DNA, 108 bp, Homo sapiens
tctggctctggctgtgcgcgctggcgctgagcctgcagccggccctgccgggactttgaacatgtcggggatcgccctcagcagactcgcccaggagaggaaagcatg

SEQ ID NO: 729925 - DNA, 49 bp, Homo sapiens
accgctgacaagatcgagggcttctgtactccaaagattcaggtttact

SEQ ID NO: 729926 - DNA, 75 bp, Homo sapiens
tctggatttccaaggaagaatttcctctgaagcaccggcggtgcgtctttctacgtgaataggattttgtggctg

SEQ ID NO: 729927 - DNA, 75 bp, Homo sapiens
gcgccgcggacgcgtcatcgagtgtgacgtggtgaaagggactggtgattgcagctggaagtgcccatgaccgag

SEQ ID NO: 729928 - DNA, 100 bp, Homo sapiens
cgcagttcttgtttgtggatcgctgtgatcgtcacttggtttgcctgcaatgagatttcattctctacatttaaaggacatcctttctgagctgctgtga

SEQ ID NO: 729929 - DNA, 121 bp, Homo sapiens
cagcgagttggtcggtcccggggtcacccgctacgggaagcaggcctcgccacaggataccatggccaagcggaatacagtgataggaacaccattttggatggctccagaagtgattcag

SEQ ID NO: 729930 - DNA, 78 bp, Homo sapiens
agagctgcgccggcgagaagcggccgagccagcagcaggtaagaatgattgatgttggctgatattggagtgctcatt

SEQ ID NO: 729931 - DNA, 96 bp, Homo sapiens
tgagctggttgccggggcaggggcggaggcggaggcagaggtggaggcgctttgaaaggcaaagaggccatgctgcgacagaaggactatgagacc

SEQ ID NO: 729932 - DNA, 85 bp, Homo sapiens
gcaggccaaacgtcagcaagaagaagaagcagctgctcagatgaagtgaattcacataaaagggcatcagaaaaatacaaagaca

SEQ ID NO: 729933 - DNA, 75 bp, Homo sapiens
catgggcaagaagcacaagaagcacaaggccgagtggcgctcgtcctacgagggatgcgctacgtcgcctcctac

SEQ ID NO: 729934 - DNA, 98 bp, Homo sapiens
agcagtgaggccaagctccagtgtcccacttgcatcaagctgggcatccagggctcgtacttctgctcgcaggttcgtgggagtaagggagaagtttt

SEQ ID NO: 729935 - DNA, 100 bp, Homo sapiens
cccgcaccagctcccgcctccatctgaagagggctccaggcatccggtcctggtccctgctggttgacaggtagagcaggtctctctgcagccatgtcgg

SEQ ID NO: 729936 - DNA, 75 bp, Homo sapiens
taaagaaatccaacttaccttgtcagcagccttaagtgccttgaaacaattttctgaacaaggactggatccaat

SEQ ID NO: 729937 - DNA, 82 bp, Homo sapiens
aataagaaaactgcctctgatccaagcagagaagctggtgccgacaagaaagccgaggctggggctgggtcagcaaccgaat

SEQ ID NO: 729938 - DNA, 75 bp, Homo sapiens
gcagatgaatggacaccttgaagcagaggagcagcaggaccagggacacggccaacacggtgaaggaaaagttcg

SEQ ID NO: 729939 - DNA, 101 bp, Homo sapiens
ctttgaagaggccagctgggccccttgtactcccagcctgtgatactgggcactggggacctgactgcagccacccctgcaactgcagcgctggccacggg

SEQ ID NO: 729940 - DNA, 100 bp, Homo sapiens
gggactcagcagccttggtgctcaggtgccagatgcaaaggtgacaatctccaatagacttgtgtcttcaccttgctgcattgtgaccagcacctacggc

SEQ ID NO: 729941 - DNA, 82 bp, Homo sapiens
tcctaagcctgcacagccgcggcggcagcagcagtgagaggtgatggctggaccggcggaggaggcgggagcccattgtccc

SEQ ID NO: 729942 - DNA, 108 bp, Homo sapiens
tgccaagatcctagctgatgccacagccaagatggtagaggctgccaagcggggcattacgtcgctggaaagagaacaccatggcccgagtggatgaagccaaaaaaa

SEQ ID NO: 729943 - DNA, 75 bp, Homo sapiens
tcttttgtgaaagtgtataactacaatcacctaatgcccacaaggagaccagcataaacactttggggactgaga

SEQ ID NO: 729944 - DNA, 97 bp, Homo sapiens
ctcgacaaaatggctgatgatttgctggcagctgctgacaagagcctccacaaaattgcatcaggccccacaacagctgcttgcatggaatagcaga

SEQ ID NO: 729945 - DNA, 90 bp, Homo sapiens
ccgagagcgcgaatatcgtcatcgttagaagggaacagaaagaacagcttcaaaagatgaaagacttcgggtctgagccacagatggctg

SEQ ID NO: 729946 - DNA, 82 bp, Homo sapiens
taaaattcttaaaaagatgcagaaagatggatttttgcatgagatgcttctggacagccgctccgggaattctgaagttctg

SEQ ID NO: 729947 - DNA, 75 bp, Homo sapiens
atgaggcgccaaagagaggaaagttacagccgaatgggctacatggatccaaatgaagcccaaactgccaaggag

SEQ ID NO: 729948 - DNA, 74 bp, Homo sapiens
ggcagcgggtcttgggtcctccgagagcagcagcgattgtcagaagcttcagttctggtaaaagagaaggtggg

SEQ ID NO: 729949 - DNA, 83 bp, Homo sapiens
cgggggtcgctacggacttaaaatctccgcaccgcaccctccacctcaggtgagaagccctaccactgcaactgggacggctg

SEQ ID NO: 729950 - DNA, 100 bp, Homo sapiens
aagagcagaagaaacagttagcgcaagacacaggacttacaattctccaagtaaacaactggaagctgaatatggtgggcatgatcagatagatttgtat

SEQ ID NO: 729951 - DNA, 83 bp, Homo sapiens
tgcggaagtgcagctgcctcagttcttagcgcagagtaaacatcagtctccaaagataactacatcccttcttcccatcaaca

SEQ ID NO: 729952 - DNA, 97 bp, Homo sapiens
ggcggggatgaagcagctggcttagaagcagatctggaatgcaaacagatctggcaaaatttgggtccctgcactaggtcagacaatcccctttggg

SEQ ID NO: 729953 - DNA, 100 bp, Homo sapiens
tatatcagttacagcaagaggcacctcgtcccaagagaatcatttgtcctcgggagacttcctctgctaaattacctcgctgccgacagggaggctgggc

SEQ ID NO: 729954 - DNA, 96 bp, Homo sapiens
ctggaacgaacatcccggtgctaggggtgcaggaggaggacggcagcaaccgcagcagcagccttcagaggtacagccccgtggtggaggccggct

SEQ ID NO: 729955 - DNA, 50 bp, Homo sapiens
ggcagctgctgagttctcggtgaaggttttgagcaaaattttggactgtg

SEQ ID NO: 729956 - DNA, 100 bp, Homo sapiens
atggagtaatcgtttcaggagtaaagatggtgttatctgaaaaggttagtcagctgatggaatggactaacaaaagacctgtaataagaatgaatggaga

SEQ ID NO: 729957 - DNA, 75 bp, Homo sapiens
ccgcgagcgcggcctgcaggagggtttgccttcccggattgggcctacaagccagagtcgtcccctggctcaagg

SEQ ID NO: 729958 - DNA, 97 bp, Homo sapiens
tccgcaaactctacatgaaaagtctgttaaaaatctttgcggaagaaatgttggctatttggcgatgagaggtggtgaacagtgaccatactggtat

SEQ ID NO: 729959 - DNA, 100 bp, Homo sapiens
agcttatttaataacatttgagaaacacgaagaatggctaaccacctcccctaagacaagagttacatccatatgggagaatagtctccagatcactaca

SEQ ID NO: 729960 - DNA, 71 bp, Homo sapiens
tttggcccaagaggaattgcttccaaaaaggcatggagatatggaccaaaaggaacgagacgtgattatga

SEQ ID NO: 729961 - DNA, 90 bp, Homo sapiens
gtcgtgtcagcttttggactccctattgtatttgccagagcacatctgcccgtgccccgcatcatggtgcagtcagccagcccggacatc

SEQ ID NO: 729962 - DNA, 100 bp, Homo sapiens
cgacaccgatttcctctcgccgagcggcggatgtcaagccctccaacatcctagtcaactcccgtggggagatcaagctctgtgactttggggtcagcgg

SEQ ID NO: 729963 - DNA, 89 bp, Homo sapiens
agagcgtgaccgagagcgcgaatatcgtcatcgttagaagctccgacagttagttaatatgtgcatcaacccagatccagagaagcgac

SEQ ID NO: 729964 - DNA, 100 bp, Homo sapiens
ctgactcctgcttcccgggtgttgctcgtccagagactgctgctactttgaaacgtacgatagaggccctgatggacagaggagcaatagtgagggactt

SEQ ID NO: 729965 - DNA, 97 bp, Homo sapiens
agagagattcctatagttcaccgagtcttgaagattcatgaaaagattgttaaaatgagtcttcggaagcaaacccctagtgacttcttaaagcaaa

SEQ ID NO: 729966 - DNA, 49 bp, Homo sapiens
gccaggtgtccatccccgtgctgaggtgaagacattcagtgaagcttgc

SEQ ID NO: 729967 - DNA, 75 bp, Homo sapiens
tggctctggacgtggcccgcatcctactgaccccacctgagcacctggagccagctgaggtgggtgtcctggttg

SEQ ID NO: 729968 - DNA, 78 bp, Homo sapiens
atggccgggatcatcaagaaacaaatcttgaagcacctctccaggctgccccccggtgtggaccccacccaagtttcc

SEQ ID NO: 729969 - DNA, 75 bp, Homo sapiens
cgcggaggagaccggaccgaagacggaccgtgccgggaagaggaccatggccaacctggagcgcaccttcatcgc

SEQ ID NO: 729970 - DNA, 100 bp, Homo sapiens
gcctcccggctcgacaagttcaagcagctgcttgccggccccaacacggaccttgttgtcgccgtgatcctgaaggcgctgacctacgacgagaagcggg

SEQ ID NO: 729971 - DNA, 82 bp, Homo sapiens
gccgccgcgacccttggcgcctgcccctgcaacgggaggtgtggacactgccagcggctgcagccgacttggaatgacctgg

SEQ ID NO: 729972 - DNA, 98 bp, Homo sapiens
agtatgaccgggtttctttgatgcgacctcaggaaggagatgaggttaaacactttaagatgagaaaaattgatctctgtctgagctctgaagggtcc

SEQ ID NO: 729973 - DNA, 96 bp, Homo sapiens
agccggccgcggccccctgttgtgttgctgcggagaggcactactgcagtcttcagttaagcaacaagtagaagctattgaaaaacagtacatttc

SEQ ID NO: 729974 - DNA, 100 bp, Homo sapiens
atcagccgctacgtgactcttttctccagaacactcgtgaaactgctcaggccatcaagggtatgcatatacgaaaagccacgaagtatctgaaagatgt

SEQ ID NO: 729975 - DNA, 82 bp, Homo sapiens
gttggtgattggcaggatcctggtatccgctaacagggagtgcatccgccccaacccttttccccctcgtctcctgtgagaa

SEQ ID NO: 729976 - DNA, 50 bp, Homo sapiens
caacctgcgcccccagatgtcccagctcagctcacctatgaaccccgtca

SEQ ID NO: 729977 - DNA, 100 bp, Homo sapiens
agaaccagatccgggagcacgtcatcgccatcgaagatttgaaaaagggcgcatctatacgttcattggagaagtcgtcgtttctgtgaacccttacaag

SEQ ID NO: 729978 - DNA, 100 bp, Homo sapiens
cttcttctccctctcttcgtcctgtctgtacttcatctatgtggccccaggcatcggatgagtctgctccagctgacaaacagtgtaaaccagaggcgac

SEQ ID NO: 729979 - DNA, 71 bp, Homo sapiens
tgtaaccaggtcgtcaagccacaggttttccagtcgcactgcggataccagaaggccctattgatcagggg

SEQ ID NO: 729980 - DNA, 88 bp, Homo sapiens
aggaaagacatggagattctcttaaaaagagactaaggtgtcagtatgttcttcaagctgctctgctcctgggcccaagctattctcc

SEQ ID NO: 729981 - DNA, 75 bp, Homo sapiens
ccagcaccggctccagtgggctctgattttgtgtcatgtatagagaactacagaagaagaggacaagagctatat

SEQ ID NO: 729982 - DNA, 74 bp, Homo sapiens
ggcgatcaacatcaccaacggcgaggaaaatctctaacttccaaggtcccaccaacagttcagaaacctaccac

SEQ ID NO: 729983 - DNA, 51 bp, Homo sapiens
gcgcaactccttggttagtctggaggtttatgatgataaagactacaggag

SEQ ID NO: 729984 - DNA, 130 bp, Homo sapiens
cagcatgctggagacggtgggcatcaacctcttcctctacccgtggaagaaggaattcagaagcatcaaggtgaatggaagagaatccgaagaagaaaatctcaataaatctgaaataagtcaagtgttt

SEQ ID NO: 729985 - DNA, 100 bp, Homo sapiens
accacggagagcacgagagacccgagttcatcgcctacccccatctccgcatcaggaccaagggtgaaacttcctacatccgagtttatcctgagagaag

SEQ ID NO: 729986 - DNA, 97 bp, Homo sapiens
aataaaacatccatttatggactcctgataggagtggtggatctgaaccttctaacagaggaggtaagattatacagctgcacacctcgtaacttct

SEQ ID NO: 729987 - DNA, 100 bp, Homo sapiens
tcgccatgcgccgggggtgggtgcccgaagttgctgatatgtgttcaagatgagtgggatgggagaaaatacctctgacccctccagggcagagacaaga

SEQ ID NO: 729988 - DNA, 100 bp, Homo sapiens
ccggcagcacatcttacaacaggtgctccagctgaaggtgcgagaagaagtcagaaatctacagttactcacacaagtataagccacccgcacttaaaaa

SEQ ID NO: 729989 - DNA, 74 bp, Homo sapiens
gaagctctttgaccttctggatgtccttgagttcaaccagagtggagactgctgcacggactctggaaccatga

SEQ ID NO: 729990 - DNA, 75 bp, Homo sapiens
caagaagtgaattacccgaccctggcaatgctggacgtggctgcaaaccagggctggctggtgactgtcctgaat

SEQ ID NO: 729991 - DNA, 100 bp, Homo sapiens
ccaagatggagttcctcctggggaacccgttcagcacaccagtggggcagtgcctcgtgaataccagggcctggtgaagcacacaggaggctgccactgt

SEQ ID NO: 729992 - DNA, 100 bp, Homo sapiens
agagaacagccctccatcttgcagcccagaaggctgaactccagtgcacccagttagacttggagcggaaactcaagttgaatgaaaatgccatctccag

SEQ ID NO: 729993 - DNA, 80 bp, Homo sapiens
gcgctgccgccgctctgaggagttaaagcaaagtgcctgcattcgtgaggatgattgctcccgagggctccttggtgttt

SEQ ID NO: 729994 - DNA, 100 bp, Homo sapiens
tggatggcagctatttgctgagggacagcgagagcgtgccaggcgtgtactgcctatgtgtgctgaaaaggccaaagttgttgagcccctggactatgag

SEQ ID NO: 729995 - DNA, 100 bp, Homo sapiens
agaagaaggacttcggaatgcactacaacaggaaaatcatattatagatggagtaaagatgaataatacggcagctagtccaatgtctactgcaacttca

SEQ ID NO: 729996 - DNA, 75 bp, Homo sapiens
aaggagtcttcaagtgccctgaggaccagcttcctctggactatgccaagcccgagggcaacatccttcgagacc

SEQ ID NO: 729997 - DNA, 96 bp, Homo sapiens
tggctctgctgctgccgccggcgaaggaggaggcgttgccggattcagaaacacgagttgatctgaaatttatgtacctggatcctccaagagatc

SEQ ID NO: 729998 - DNA, 90 bp, Homo sapiens
aggactctatacagggacgtgatgctggagaattataggaacctggtctccctgggttgttttctgcatggaccgtgccctagaatttgc

SEQ ID NO: 729999 - DNA, 100 bp, Homo sapiens
gcaagtccaaacccagactcatgtagcatctgccccagttgaagactgggatagtttccaagctattttggatcatacctacaaaatgcatgtcaaatca

SEQ ID NO: 730000 - DNA, 82 bp, Homo sapiens
gacccccaagccgccgcggacgcagagtcatcttagtgggatttggggaagcaacagggctgtgtggggtaacctgccacct

SEQ ID NO: 730001 - DNA, 73 bp, Homo sapiens
gacagttcgctacacagcaatgcatcgagacctggaatggccaaatatcaaggtgaagttcaaagtttgaaac

SEQ ID NO: 730002 - DNA, 99 bp, Homo sapiens
ggcttagaggacagtgtggccaagaccttcgagaaatgcatcattgaagccgtgagctcagcctgccaggtgttcacactgcccaaggtgagcgcgaag

SEQ ID NO: 730003 - DNA, 50 bp, Homo sapiens
cggcggtcttcaagctctcagacctgtacatcctctggaaggggccctcc

SEQ ID NO: 730004 - DNA, 82 bp, Homo sapiens
ctggagagcttcatcaaaaatagtgatagctttgataagatgcctaaatcaaaggaacttgtttcttcaagctcttctggca

SEQ ID NO: 730005 - DNA, 83 bp, Homo sapiens
tctttcttgagaccaacttaagctaaccagcaactacacatcaccttcactttgggatatggaatttgataagcagttagcca

SEQ ID NO: 730006 - DNA, 90 bp, Homo sapiens
atattgagctttacatgcacttgaacagactagaaattgcaccacagatatatgggttgactttgccaataccattcctggccatggagg

SEQ ID NO: 730007 - DNA, 100 bp, Homo sapiens
aaaagaccatcctgctctcaactacaacatcgtttcaggagttgtggaaagtaaaaatgtagccctaccaaaaggaactattgtactggcttctccaggc

SEQ ID NO: 730008 - DNA, 100 bp, Homo sapiens
tatctccatcttccctactatgatggtgtgtatgatggcctggcgacccattcaggcacttatggccatttcagccagcatccgtgtcattctggacctt

SEQ ID NO: 730009 - DNA, 90 bp, Homo sapiens
ttcctccttcatcagtgaagaaacgagaatcaagcactcttttggaagagggtaatctctctccaaaaactgaggacacttaccttcccc

SEQ ID NO: 730010 - DNA, 100 bp, Homo sapiens
gcgaatgatcctgaagcctcaaagtttcatggatgtggtggatacccaccctggtctcacgttcctgaaagatgctccagaattccactcccgctacatc

SEQ ID NO: 730011 - DNA, 75 bp, Homo sapiens
aaatccagagaccccctgaagattcgattaaagagtctattgttggggaaatcagacgggaaattgtaagtggac

SEQ ID NO: 730012 - DNA, 74 bp, Homo sapiens
tcaaatacaacaattgaggatgaagatgtgaaagatttgtgctctacaaaaaattggaatgtctcgttttcaga

SEQ ID NO: 730013 - DNA, 74 bp, Homo sapiens
tgcagatcctgattgtaggtggtgtccagctccagactgtggcttctcaataggtttggcatggacaagatcta

SEQ ID NO: 730014 - DNA, 75 bp, Homo sapiens
ctcagaacttggtgctgctagaatgcaggaacagcagggaggtggggaagacagggctccagctaccacaggacg

SEQ ID NO: 730015 - DNA, 50 bp, Homo sapiens
tggctctttggaaagaagccaaagttttctggatatgccgcagaaggatc

SEQ ID NO: 730016 - DNA, 82 bp, Homo sapiens
gcaaagaatccaggacaaaaaggattagattgcagcaggagagaagattcctttgagccaggaagaaataactctgcagggc

SEQ ID NO: 730017 - DNA, 51 bp, Homo sapiens
aaacttttattccacatttggagaaaaaagcttggccagaccacaagcggg

SEQ ID NO: 730018 - DNA, 90 bp, Homo sapiens
accacctcaaagacactggttttttcggctttgtgagaaaccttaccatcaaacacgatggccagcaacgttaccaacaagacagatcct

SEQ ID NO: 730019 - DNA, 75 bp, Homo sapiens
cgggtcgcgtcctggccgccgagatcaggatcctcatgaccagccaaagagaagaagaattaggaagcataaatc

SEQ ID NO: 730020 - DNA, 75 bp, Homo sapiens
ccaggcatgtctcccgaggagtgcaggcgcttcaccacagacgctatcatggtgaacttacttcagattgtgcgg

SEQ ID NO: 730021 - DNA, 101 bp, Homo sapiens
agcttggccttggagcgaggctatcacaagctgcaccagcttctaaccgatggccacagatgtctttaattccaaaaacctggccgttcaggcacaaaaga

SEQ ID NO: 730022 - DNA, 75 bp, Homo sapiens
acggagatggtgcagaagatggaggagttcttggccaggctgactgagagatttgtgctgggagtggatatgttc

SEQ ID NO: 730023 - DNA, 74 bp, Homo sapiens
cctggagtcataccttctatctttgattctccatatcacctacaggattggtccaaaggaagattttttccatt

SEQ ID NO: 730024 - DNA, 82 bp, Homo sapiens
aaactggagagagaccagacctgcaagctctttgacacacagcagttcttgtcaggtaccgaggagaaggcattgtatatgg

SEQ ID NO: 730025 - DNA, 74 bp, Homo sapiens
gaagatcctggaggtggatctgaagaacgggatttagacaagagtcaagaggagatcaaaaaacatcatgccag

SEQ ID NO: 730026 - DNA, 75 bp, Homo sapiens
cacgagcgggtgacgctgggcctgcagcgcggagcagaaagcagaacccgcagataaactcatcctgaaagtcgc

SEQ ID NO: 730027 - DNA, 100 bp, Homo sapiens
agccctggtacttcttcatcatggttggtgttcgaggaagagacattgttgttcttggtgtggagaagaagtcagtggccaaactgcaggatgaaagaac

SEQ ID NO: 730028 - DNA, 128 bp, Homo sapiens
tggttttatgcatctttatccaatcaagtgcccttggacaaagcctgaaaccagagagacaagagagacacctccaacttcgacaaagagttcaccagacagcctgtggaactgacccccactgataa

SEQ ID NO: 730029 - DNA, 87 bp, Homo sapiens
ctttctgcttttgtagatcaacctaagcaggagtggacgcttctcttgtgagccagctggaggtcttacctctttgactgaaccacc

SEQ ID NO: 730030 - DNA, 51 bp, Homo sapiens
ttacctgtgagatgtttcatcccaacagttgaagctccattcataccaaag

SEQ ID NO: 730031 - DNA, 74 bp, Homo sapiens
gccctgtgtgacaccaagataagtaactgtccatgaaactgggaggcgaccgtgttagctgccagttcctgaca

SEQ ID NO: 730032 - DNA, 100 bp, Homo sapiens
tggatcccaaggacctggagccacgggctgccaactgcactcggctgtccgcaggcttgtccaaaaggaaacatcggaatgaccacttaacatctacaac

SEQ ID NO: 730033 - DNA, 90 bp, Homo sapiens
taaggagaaaaaaatcagaaaaaatgagattaagtttagtgatacgacacaagatcgggaggtccttcagtcttggagactataagggag

SEQ ID NO: 730034 - DNA, 98 bp, Homo sapiens
ggcgggcgggagacccgcaccagcgcagccggccctcggcgggacgtgacgcagcgcccggggcgcgggttccagaatatcttaaccatgtaagtaaa

SEQ ID NO: 730035 - DNA, 101 bp, Homo sapiens
ctggacagtgaagggagagaagtggatttgggagacatttaggaggtgtaatggataggtaacagagaagacctcgtcccttcctagtcagggcatcagca

SEQ ID NO: 730036 - DNA, 98 bp, Homo sapiens
cctgtgcggcccctgcttctgcggatgctgaggtcattaagaaggcaaatgataccttaaatggaatcagtagtagttctgtttgcacagaagtaatt

SEQ ID NO: 730037 - DNA, 114 bp, Homo sapiens
ccgccgccgccgccttgctgctgctcaaagctgctgccgccccttgggctaaaaggtactaggttttgacaagcttgcatcatgcgtgagtataagctagtcgttcttggctca

SEQ ID NO: 730038 - DNA, 83 bp, Homo sapiens
agacaaggatgaccaggaatgggaaagccccagtcctcacacaggtattcaggaataccaggatggcgtgcccaagattccaa

SEQ ID NO: 730039 - DNA, 90 bp, Homo sapiens
cgtcccgctggatctgacccgagggaaaagcttcactctgaccatcactgtcttcacaaacccaccgcaagtcgccacctaccacagagc

SEQ ID NO: 730040 - DNA, 76 bp, Homo sapiens
aaaggagtcaaccgattctgcctgtccaagcctgactccctgaaggtacttttagtattccagctagtgcagtgcc

SEQ ID NO: 730041 - DNA, 90 bp, Homo sapiens
cccgatatatgttctctaggccttttagaaaacatggggtattccctcagcggatactacacccatccatttcaaggctatgagcacaga

SEQ ID NO: 730042 - DNA, 75 bp, Homo sapiens
tcccgctcgctgggagagaggtacctctccttttccctctccctttccctaagtgatgaaactacagaatctgtt

SEQ ID NO: 730043 - DNA, 82 bp, Homo sapiens
ctggctcttgccctcatcctggttctggaatcctcagttcaagggcgatgccagtccctccactccagaggagaacgaaacc

SEQ ID NO: 730044 - DNA, 96 bp, Homo sapiens
aaccaactcagcgtgggtgactttgtaaaaatacagaaggcctttgaggcatacacatccctgtgatcatgagtctggctcaaagccaatttatag

SEQ ID NO: 730045 - DNA, 82 bp, Homo sapiens
cgagtgaccgagaccgcggccgggaccgaggaaaaagcttgtggtgaaggggggcaaaaaaaagaagcaagttctgaagttc

SEQ ID NO: 730046 - DNA, 154 bp, Homo sapiens
aaacagcattgaggctgtctgcaagacagtcaagctgcattgcaacagtgcatgtctgacaaacaccacacattgtccaacatccatttttcaccctacatgaatccaaaggaacagatgtggcatcttttgtaaaactgattcttggagacta

SEQ ID NO: 730047 - DNA, 75 bp, Homo sapiens
tttacttttacctacgttggcggccccagaaggccgaatacatcaagcaatggtaacatctttaaatgaagataa

SEQ ID NO: 730048 - DNA, 110 bp, Homo sapiens
ttcccaacatcgactccgagacctccgaaaagcgtttccgcagacagaagtggggagaagcggaggtcttgggcgtctttggtactggcttttttaggggtctgcctggg

SEQ ID NO: 730049 - DNA, 133 bp, Homo sapiens
gaaacagtatctcacctccctaaactggttaatagtggcatggaagatccatttgctacatgaatgtgtaagatcttggaggaagacagcagagagagagagagagatcagagatcccagggttaaaagttgg

SEQ ID NO: 730050 - DNA, 75 bp, Homo sapiens
atgtctgagactcctgctcagtgtagcattaaggtttaccgacaagactgtgaaactttcgggatggtggtgaaa

SEQ ID NO: 730051 - DNA, 90 bp, Homo sapiens
attcccggaaccgcgattcggcgtgtcaggtttacccaaggtccagcctagcccctaggcaccatgtcggacagtgatctaggtgaggac

SEQ ID NO: 730052 - DNA, 100 bp, Homo sapiens
ggaaccacccccgccctcctcagcctgatcctggaagagactcggggccccccagcctccgccaacccaggtatcgaaggatgatcgcagtgatgtggag

SEQ ID NO: 730053 - DNA, 83 bp, Homo sapiens
caggtcgaggacggtcggactcccgcggcgggaggagcctgttcccctgagatccacctccgacccttaagccagagactcag

SEQ ID NO: 730054 - DNA, 100 bp, Homo sapiens
cctgatctcggctgtcggagtgggtgtcctcaagaaaggacgtgatgcctgggccacggcaggagctgctctgtgccttctggaagagtgacagcgacag

SEQ ID NO: 730055 - DNA, 52 bp, Homo sapiens
ccaggctggcggagctgcaggagcaggtgaccacactccccaacacccttgt

SEQ ID NO: 730056 - DNA, 75 bp, Homo sapiens
gcttggggcccgcacggaccctctacttcagatgatcggctgaatgtaacagaggaactaacgtccaacgacaag

SEQ ID NO: 730057 - DNA, 73 bp, Homo sapiens
agaaagtgaggaagttggaagatcagaacgagtatgaatcccgcagggaaaatgccaagtggaataaaaacca

SEQ ID NO: 730058 - DNA, 83 bp, Homo sapiens
cagaagatctgggtgcccgtggaccacaggccctcgttgcccagatgctgacttgacaggaattaagtggaaaaaatatgtat

SEQ ID NO: 730059 - DNA, 80 bp, Homo sapiens
tattgatcctggctttggaatatataaggtatgagaaagtgccagtcatcttggttgggaacaaagtggacctggaaagt

SEQ ID NO: 730060 - DNA, 75 bp, Homo sapiens
gcccggtgcccgaggaggcagccaagctcgtggcctgcctctgcgtgcgtaagaatgattgatgttggctgatat

SEQ ID NO: 730061 - DNA, 108 bp, Homo sapiens
ccaggaaaaagaggaaagtggactgtccggggccgggctcaggagcagagttggaatcgaagcctcttaaaatggcagatgacttggacttcgagacaggagatgcag

SEQ ID NO: 730062 - DNA, 101 bp, Homo sapiens
agccagccgctgttttgccggaggagcccctcaggccggctgaagaagatgcagagcagcctgaagctggtggactgtatcatcgaggtccacgatgcccg

SEQ ID NO: 730063 - DNA, 76 bp, Homo sapiens
cttgaattgggaggggggcagctggagcctcaggcggcagcgcttctagtgacattgtatgcctcctgtattctcc

SEQ ID NO: 730064 - DNA, 80 bp, Homo sapiens
actggaggcacaaggaggacgccggcgtcttctgctcaggtacgtgcagcactacggcctgggcagtgcctgtgacaacg

SEQ ID NO: 730065 - DNA, 80 bp, Homo sapiens
ccccaaacaggacgaaggcgtgctgaagaacatccagtcatggataaaaatgagctggttcagaaggccaaactggccga

SEQ ID NO: 730066 - DNA, 100 bp, Homo sapiens
actcatccatcaggtgctggaggcccctggtgtctacgtgtttggagaactgctggacatgcccaatgttagagagggtaaaccccagacattggctgtc

SEQ ID NO: 730067 - DNA, 101 bp, Homo sapiens
cccagctctccgtgttccggtgtgctctgctgtagctgccactgagaagaaggcggtgactccagctcctcccataaagaggtgggagctgtcctcggacc

SEQ ID NO: 730068 - DNA, 83 bp, Homo sapiens
atgctcctgaagctccttacacatcccctgataaactaaagattgagaggatccagaatccagatctctggaatagctaccag

SEQ ID NO: 730069 - DNA, 90 bp, Homo sapiens
tcccctgtgtgagggcaccatgcccacctgcagctttcctgagctcagcctcacaggccaaagcatcagcaccagaacgcacacccagcc

SEQ ID NO: 730070 - DNA, 96 bp, Homo sapiens
agaaacttctacagagcaaccactcaccagaacatcatcttcagcgggctatttcagcacagcaggtgtatggcgagaagagggataatatggtta

SEQ ID NO: 730071 - DNA, 100 bp, Homo sapiens
cagtgacagtggggaccctgtgctgctgcgcctcttctaccaagtggctgagtacaccttccgccagttaagtgggcagaccaacatccacctcagcaaa

SEQ ID NO: 730072 - DNA, 98 bp, Homo sapiens
agaactccatggctactgtggagctcttcgtgtttctgtttgctcccctggtacacaggatcaaggtttccaatacttatctacaggaatcgccatga

SEQ ID NO: 730073 - DNA, 98 bp, Homo sapiens
cgggctcgggggagcgtgagttgcagaagtctcaggggatccagaactgcagccagtccttgctgggctgttcctgtccatgtgcctggtcacggtgc

SEQ ID NO: 730074 - DNA, 75 bp, Homo sapiens
agtcgtgcaggatctgaaggagaggaaatatcattctgcaaaagaagcttatgaacaacttttgcagacagagaa

SEQ ID NO: 730075 - DNA, 90 bp, Homo sapiens
aaaaggcggatggagaatattattgatcagtgtttgcaaaagccagcagtgacttcatggtcatgacgattttcttcaatgtgagcaggc

SEQ ID NO: 730076 - DNA, 100 bp, Homo sapiens
gagagtctgtgccgacaagatggcggacggggagctgaacgtggacagcctcatcacccggctgctggagggttttgagcaaaattttggactgtgaagc

SEQ ID NO: 730077 - DNA, 75 bp, Homo sapiens
cgttccaatggggtagcgctccccccattggacaagtggaagcagcctagggcctaggcccgggccaccatggcg

SEQ ID NO: 730078 - DNA, 80 bp, Homo sapiens
atcgcagggagtcgccgctggagaggggctcggcgcccggcggggactgcaggggccaaaccagtgctcctgccacctct

SEQ ID NO: 730079 - DNA, 75 bp, Homo sapiens
cctgctaaccttagcagaagaaaggacggtagacctgcccaagtctcccaaggaacttagtgatttggcccgtga

SEQ ID NO: 730080 - DNA, 76 bp, Homo sapiens
ataaacgcccccaatttcccagctgctaaaggaagaggaaggtcaactttgtagtgtgccaactctttgccttgct

SEQ ID NO: 730081 - DNA, 98 bp, Homo sapiens
gacctgggactcccccaaaccaatgtggaatacattcaaactgatgcagctattgatgaggagatgttaaagtaacccatcttgcaggacgacattga

SEQ ID NO: 730082 - DNA, 83 bp, Homo sapiens
cgagatcaatgaacctttagatgaatttacacaaggacacccaggcccattattttcctccagcctccatggaccacagtctt

SEQ ID NO: 730083 - DNA, 100 bp, Homo sapiens
gcccggggctcctctgtcccagctctgcggcccagggggtgacgtgatggcggcagcggtgctgacggaccgggcccagcatccctctctacctgccaac

SEQ ID NO: 730084 - DNA, 100 bp, Homo sapiens
tcggccacttcgagttccatgcagaaaggacccaggagcgataacagtaaatcaaataagatatttgtcggtggaattcctcacaattgtggtgagacag

SEQ ID NO: 730085 - DNA, 90 bp, Homo sapiens
gccactttccggggtgcacagcaagtggaagccagttgagggaagttctccatgaatgtacgtcacaatgatgatgaccgaccaaatccc

SEQ ID NO: 730086 - DNA, 97 bp, Homo sapiens
ggcagtacgggaagaacttcttcagaattagaaaggagctgcttcccaataaggaaacacacaggagaaaacgacgctccacacctttaacttcttc

SEQ ID NO: 730087 - DNA, 82 bp, Homo sapiens
atctacagcacctatcacttgttccctccaagacaactgaatggaatgggccttgacgaaggagaagtcggtgaagcacatg

SEQ ID NO: 730088 - DNA, 71 bp, Homo sapiens
ccgcgatcgtggggcccgcgaggcgggcagccggggcgtccagggctggttgatatgtgaagagccaacct

SEQ ID NO: 730089 - DNA, 83 bp, Homo sapiens
aaggagggaaaacctctgagccagagaataacaataaaaaacccaaaacctcaggctcccagtggcccaggcacccctgaaac

SEQ ID NO: 730090 - DNA, 100 bp, Homo sapiens
ctgtggaaagaagttgcaaaacactgggtgttacacataatattgcattacttcgagaggtgataatcaactcacgctttgtaaaaggagacatcagcac

SEQ ID NO: 730091 - DNA, 98 bp, Homo sapiens
aatacttgggtgacatctgcctgagagatctccaagaattacagggaactctaatgatccaggacaaagaagttaccctggagtatgtatcaagcctg

SEQ ID NO: 730092 - DNA, 75 bp, Homo sapiens
atccttgctggggactgaaaacgcttctgtgagacttgataatagtgggtgggaggacgctactcgctgtggtcg

SEQ ID NO: 730093 - DNA, 100 bp, Homo sapiens
actgcgcaaattccgggagctgcacctgatgcgggttattaatgctgcactggctttagcagcaaaaccacagagtaaactggcccaagagaacatggat

SEQ ID NO: 730094 - DNA, 80 bp, Homo sapiens
cagagattaaatgcggtttccaagcacacggtccacaggtcctggctaccctgggaagagacaagaagtaaatgaagaaa

SEQ ID NO: 730095 - DNA, 75 bp, Homo sapiens
caaaagttcctatctaatattatatgctttcctttgctcccaggagagaagccttataaatgcacctgggatggc

SEQ ID NO: 730096 - DNA, 51 bp, Homo sapiens
gctggactcggattcgttgcctgaggccggaaggtggtggtcgtacgctgt

SEQ ID NO: 730097 - DNA, 100 bp, Homo sapiens
cgacagtacgcctacttctataaagtcatccagtactgtaagattgatgttaaaggcatggtgttcaccccacttcatcagcgtacataagttatctctt

SEQ ID NO: 730098 - DNA, 100 bp, Homo sapiens
gaaggaagaatgggaaaagggagtccaggtaccagccagtccagacaccgttccacagccttctctcaggttgtagaacacgtagagcccttacgtccct

SEQ ID NO: 730099 - DNA, 100 bp, Homo sapiens
cggctgggtaacccagatcgctactaccccgcagttcccggacatgatcctctccgcctctcgagcttttatcaaaatacaactcaaacctagctactcc

SEQ ID NO: 730100 - DNA, 113 bp, Homo sapiens
gtagtcagcctaactatagatacctgatggacaatctttttaaggctctctaaatacgtacagattctgcgataatgtgtggacttttgtactgaatgatgttgaattcagag

SEQ ID NO: 730101 - DNA, 74 bp, Homo sapiens
ctcgactcggtcctgtttcgacagcgaacatgtcgcggcctgtcaggtttcaagtgccccatttgctccaagtc

SEQ ID NO: 730102 - DNA, 76 bp, Homo sapiens
ccggggtattgactctgaagatgcctacccatatgtgggacaggtgttcagtggaatcacacttacaaaatttgga

SEQ ID NO: 730103 - DNA, 83 bp, Homo sapiens
ggcaagagtaacagcagcgccgtcccgtccgacagccaggcccgggagaaaacgtctcagccaaacctggagcgcccccccag

SEQ ID NO: 730104 - DNA, 100 bp, Homo sapiens
acttccacttcgtgttcttcctagcttccctgtatgtgatgatgaccgtcaccaactggttcaagttgggataattcttcactattccacccttgccaca

SEQ ID NO: 730105 - DNA, 75 bp, Homo sapiens
cggcggctccagcgtcctaagagcttttgcctctaatgacagagcagctacagtggatgccatttgtgaatatca

SEQ ID NO: 730106 - DNA, 100 bp, Homo sapiens
cgccgctgctcaccctggtgaactttgaagtggaaaatctggcgtacatgctggtgtgcatgcagtgggcgatattgctatcaatcgcagtagtctttcc

SEQ ID NO: 730107 - DNA, 50 bp, Homo sapiens
ccgccggaaccgcgtggccctgaagggtctcggaggaccccatcctagcc

SEQ ID NO: 730108 - DNA, 100 bp, Homo sapiens
taagaggaaagcgatggaggagctgagcgctgatgagttacagatgtagagctaaaacgactgaaggatgctttcaagaggacctgtggactctcatatt

SEQ ID NO: 730109 - DNA, 96 bp, Homo sapiens
cggtaatgctggtggtctgcatcaccaccggatcaacttcgacaaataggtgtcgtagtcattcttcagcacaattcttaattggagaccaagaac

SEQ ID NO: 730110 - DNA, 82 bp, Homo sapiens
ctcagctcctggggctcctgctgctctggctcccagaacatggtccaagacaattcctgggaaagttcagttcttctcaagt

SEQ ID NO: 730111 - DNA, 95 bp, Homo sapiens
gcccaatatgacgagctggctcggaagaaccgagaggagctagacaagtactggtctcagcagatgtgtcttgctgaatcagggctctcttatcc

SEQ ID NO: 730112 - DNA, 82 bp, Homo sapiens
gacggcaggaggaagagagagagagggattgtctcaaagcttgccaggagcagattgaggcggtgctcctcaatagcctgca

SEQ ID NO: 730113 - DNA, 76 bp, Homo sapiens
gacaattccattttatgtgtctgcgtgctcatatcaagactaagaccctacagcttggggcctgggctcctctgac

SEQ ID NO: 730114 - DNA, 90 bp, Homo sapiens
agtccgtcagccagggcttctgcttcaacatcctgtgcgtgggtacaactccaaaaggagacattggagaagaaccaagctgggtctata

SEQ ID NO: 730115 - DNA, 88 bp, Homo sapiens
tattcatcagtttgttgtgcttgtcaagatcaggtgactctcctattccatctgtttcttcgggatcatcttcacctctttcagccac

SEQ ID NO: 730116 - DNA, 90 bp, Homo sapiens
ccggttttgaccgccacattaccattttttcacccgagggtcggctctaccaagtaggccacacgtgtctacacttagcctctatccatg

SEQ ID NO: 730117 - DNA, 100 bp, Homo sapiens
aaaaaacgggtcgcccgcgattctcagggattgatcgcctcttcaggagcagagggagagccgggctcggcgaggccctcgagggcccagcgccttcatc

SEQ ID NO: 730118 - DNA, 100 bp, Homo sapiens
aagctcgctgctttccctacctccttaagtgactgccaaacgcccaccggctggaattgctctggaggagatgttaaagtaacccatcttgcaggacgac

SEQ ID NO: 730119 - DNA, 82 bp, Homo sapiens
ccgggggcaaggccaaaaagaaggcagctgtgttactggagcaggaacgacagcaggagattgccaagatgggcaccccagt

SEQ ID NO: 730120 - DNA, 98 bp, Homo sapiens
gatatagcacaccatccccagccaatggactcaccctgtcacccaggttggactgcactggcctcaacctcctgagttcaagtgatcgtcccacctca

SEQ ID NO: 730121 - DNA, 98 bp, Homo sapiens
tgtgtgcaatactcctcacgagaaacctttcaacgaagtctaaaaataggaagcttccagaaccaccagacaatgaggatgaagatgaagatgtcaaa

SEQ ID NO: 730122 - DNA, 120 bp, Homo sapiens
aggaactgttcagtcaggtggggccggtgaagcagtgcttcgtggtgactgaaaaaggtttgatgctataagtgcagagctgttgaactggattttgaaatggaaaactgccattcagac

SEQ ID NO: 730123 - DNA, 98 bp, Homo sapiens
tcaggaggagggagcggccgccgcggccaccgaagccaccgcggccacggagaagggcgagaagaagaaggagattggaacttttggcagaaagtcaa

SEQ ID NO: 730124 - DNA, 75 bp, Homo sapiens
agttgcacatttcctgcaaggactccaaagtggtgaggctgaccggttccctgatgtgttacctgcttctgctac

SEQ ID NO: 730125 - DNA, 100 bp, Homo sapiens
ctcaagcacaccgtacagcccagtgatatatgatggtgcacaaggagtacagcaagtgcctgcgtcactcctactgctgcatccgctccccacccggggg

SEQ ID NO: 730126 - DNA, 97 bp, Homo sapiens
ctcatatccttttcagactacattttcctcacaactgttctttccagctccatggagtgtgctgatgagccctgtgatgcctacgaggtggagcaga

SEQ ID NO: 730127 - DNA, 100 bp, Homo sapiens
tgggaaaacgaccagagaggaccacatgaaactcaaggtccagggagtggaggcctcttctgaagagctgaaagctgcctaccggaggctctgtatgctc

SEQ ID NO: 730128 - DNA, 88 bp, Homo sapiens
ggaaaactcaggaccatgatggctcagtttcccacagctatgaatgtgattgcagtaatagcggccaccctcttccccctttggccag

SEQ ID NO: 730129 - DNA, 75 bp, Homo sapiens
cgatctggggcagctgactgccctccaggtgcagcggaactgctgcctgacgctctgcaacttcagcatccccga

SEQ ID NO: 730130 - DNA, 100 bp, Homo sapiens
tattatggtgtaaacaacgattctttggaggcagaagctcctcctggggtagagacagatcttattgatgttggattcacagatgatgtgaagaaaggag

SEQ ID NO: 730131 - DNA, 100 bp, Homo sapiens
gaacgccggatactcatcatttgcagcaaactcagcactgatcttagaaatgaagttgaaaaattacgcaatgaagtgaatgaaagagagaaagcaatgg

SEQ ID NO: 730132 - DNA, 95 bp, Homo sapiens
tgctcaagtcagagggcttttactcctacctgtgtaccgagccagacagaaccaagttgtattgttagacacactggaacaagagatttcaaaat

SEQ ID NO: 730133 - DNA, 98 bp, Homo sapiens
ctcggcctcggcctccgacacgattctggaggaagccgaccaccattgttgccaccgggaggaagatccacatctgcgaaacccttttcacccccaag

SEQ ID NO: 730134 - DNA, 100 bp, Homo sapiens
cggcggcgacgcggacctgcggactagcgaacccggagcctcttagcaatgcataccacgagttagcacaagtgtattcaaccaacaacccctcagaact

SEQ ID NO: 730135 - DNA, 100 bp, Homo sapiens
tgagatcaaatggcacttcattggccacctacagaaacaaaatgtcaacaaattgatggaaaacatagctctgctggcagaaacagctctgagattcctg

SEQ ID NO: 730136 - DNA, 100 bp, Homo sapiens
taccgcatctggctggagccctgcattcgcggcgtgtgcaggcagaggtggaggagacactgaagcgactgcagagccagaagggagtgcagggaatcat

SEQ ID NO: 730137 - DNA, 100 bp, Homo sapiens
ggacaccgggagtgggagagattggactgggagactcagcagaaaatgttttcagactgctcatttctatgtggaagacagcagttcacctcgagtggtc

SEQ ID NO: 730138 - DNA, 100 bp, Homo sapiens
tggagggggtggggagcagctggctatcaatgaggaagggaaaaggccgaggcatcagcgtgtgaagaccgcaaagacgatcccgagtacagttgtgaac

SEQ ID NO: 730139 - DNA, 83 bp, Homo sapiens
ctcattaagagcttggaggcggcccgcggactgaatctggatatggatctgaatccagcttgcgtcgacatggctcaatggtg

SEQ ID NO: 730140 - DNA, 90 bp, Homo sapiens
ggctactacctggagatgctgatcgggacccccccgcagaagggtggccattcagggcaactggggccttcgtcagttgccccttcattc

SEQ ID NO: 730141 - DNA, 100 bp, Homo sapiens
accggcccgtgcacgcctacaaattcttctttaagtccatggaccaggacttcggggtttccaggcctgaggtgcccgccctggccccaggagaatgaac

SEQ ID NO: 730142 - DNA, 71 bp, Homo sapiens
acagaaacgattgtggaaacagaatggagatgtatgcatttcgattcttcatccgcctgtagatgacccac

SEQ ID NO: 730143 - DNA, 100 bp, Homo sapiens
agactacctgccccggcacagcatcgggctggcccagctgctgctcttcgcccagcagatctgcgagacagccgctccgaccgctggtcccagatgccag

SEQ ID NO: 730144 - DNA, 101 bp, Homo sapiens
gaaggaacgaggcaaggagctaaagcagcgtgcgttcagccctgggcaaacggggattcagcgtccgatcctttggaacagggactcacgtgaagcttcca

SEQ ID NO: 730145 - DNA, 82 bp, Homo sapiens
ggacaaaacgccaggcggatctcagaaggccagttcaaagagctgtaggtaaaacttgcctactgatcagttacacaaccaa

SEQ ID NO: 730146 - DNA, 75 bp, Homo sapiens
atgggttctttggagaaaataatgagttctgcgagtgttacacttgcgaaaggatgccgaggaatgtgacagggc

SEQ ID NO: 730147 - DNA, 100 bp, Homo sapiens
aaagaacagcgtaactccagacatggccttggacaagattcgctatgagagcctgacagacccttcgaagttggacagtggtaaagagctgaaaattgac

SEQ ID NO: 730148 - DNA, 90 bp, Homo sapiens
cgagttcttcagcgaggagaacagtccgaaatggcggggactgttggtctcggccctgcggaagaatctacctgttactcgtattttgga

SEQ ID NO: 730149 - DNA, 80 bp, Homo sapiens
tggtgcaggagcgcgagaaggatatcctgacggccatcgccgccgacctgtgcaaggaggaagagcaagcaggccctgag

SEQ ID NO: 730150 - DNA, 90 bp, Homo sapiens
atcgctatgcaggtgcggaagctggtgggcactcagcaccctctgcttaccacagccagatctgagtgggacatacttttgaaggatgtg

SEQ ID NO: 730151 - DNA, 76 bp, Homo sapiens
tgaagatggtgtcctggatgatctccagagccgtggtgagttcatgatcaagtgttgcccacaccaaatgcttcat

SEQ ID NO: 730152 - DNA, 75 bp, Homo sapiens
aaaccgctgaggcttatttgggaaagaaggcagtgaggtcactcaaggagacaatcgaagactgttgggaccagg

SEQ ID NO: 730153 - DNA, 87 bp, Homo sapiens
ccagtgaagatatatgtctacaagttcaaaccttgtactactcagctgatcacaagctgcttgatgggaacctactagatggacagg

SEQ ID NO: 730154 - DNA, 75 bp, Homo sapiens
agccaggaggagtaattcactgacaacaagggaggtgtcacagttttccatttagatcaacaacttcaagttctt

SEQ ID NO: 730155 - DNA, 50 bp, Homo sapiens
gcagagggtgtgtaataaaatacagtctgaaaacttagagaatacagtaa

SEQ ID NO: 730156 - DNA, 100 bp, Homo sapiens
aatttgttcacataaacagattggaatggaagttggatacactttgtgacttgtacgagacactgaccattacacaggctgttatttttctcaatacgag

SEQ ID NO: 730157 - DNA, 100 bp, Homo sapiens
gttatattgaaaaattctcagggagaggaacaggcctttgagagcagccagaagtacaaagaggggaagtacatcattgaactcaaccacatgatcaaag

SEQ ID NO: 730158 - DNA, 83 bp, Homo sapiens
ctattttcttcctgcccctcgttgatgagagcattcgaagtgacctcagcagggcatccagtgctctgtgaagaactgccgca

SEQ ID NO: 730159 - DNA, 80 bp, Homo sapiens
cttggtctcactgacttcaagaatgaagccacggacccttgcgctgaactccagagggagcctttgttggtgaatgaatc

SEQ ID NO: 730160 - DNA, 82 bp, Homo sapiens
cgcagggcctgcagcgggagctggacggcgagcgcgagcggcgcgagaaagatgtagctgagctgattcgggccagagcctg

SEQ ID NO: 730161 - DNA, 100 bp, Homo sapiens
cgaatcttcactcccgctgtctcagcagtctacagcacgtgtttcaatgcatcaaagctactgacatctcatggcatgggcatccaggttccgctgaatg

SEQ ID NO: 730162 - DNA, 75 bp, Homo sapiens
ttacaagagccctgagctgccacggatactgagtggatgtcacactgaattcagtcaacctaaatttgaatcttg

SEQ ID NO: 730163 - DNA, 75 bp, Homo sapiens
tcaagatggaggagtacgcgcgagagccttgatgtgttcagagcaacattgttttgttgacacaagcatttagaa

SEQ ID NO: 730164 - DNA, 83 bp, Homo sapiens
cagctacgaaggatggaatcttcaatcaatcatatttcacaagaaacccagcgtttgctggcagaaccagttcctggcatcaa

SEQ ID NO: 730165 - DNA, 100 bp, Homo sapiens
gtcggctatctcgtgcttccagtgtttggctctgtgcgaaacagaggtatccgttacagcactgatgtgagtgtagatgaagtaaaagctttggcttctc

SEQ ID NO: 730166 - DNA, 98 bp, Homo sapiens
gggatcccagcctcaggcgtgcgcggacggtgtgcgggttcatctgcagaagccagcggacgcctctgttcaacttgtgggttacctggctcatgaga

SEQ ID NO: 730167 - DNA, 76 bp, Homo sapiens
aaacttttggccaagagaatgaaggttcaacagagtttggaaaagatttctaaactggagcaggaaaaagaacatt

SEQ ID NO: 730168 - DNA, 100 bp, Homo sapiens
gaagagacagataatgaagaaaactttattgatctcaacgttttaaaggcccagacatatcacttggttcgagaaatggctgctactaccttaagcggtc

SEQ ID NO: 730169 - DNA, 101 bp, Homo sapiens
gaatggcgtgtggaaaatggaatctatattcagaaaagttgaaacagactggcacatgcaaaatgtttactgaattcatcctcaatgttcccatgggcttg

SEQ ID NO: 730170 - DNA, 80 bp, Homo sapiens
gagacgtgcctttgaccttctgccatgattgtgaggcctccccagccacgtgaaactgtttatgatgataaagactacag

SEQ ID NO: 730171 - DNA, 82 bp, Homo sapiens
ccaccttgtgaagaaagtgccttgcttcccctttgcctaccaccatgataacctgcctagagctggaacgttacctccagag

SEQ ID NO: 730172 - DNA, 113 bp, Homo sapiens
gaggaggaggccggggctctccgggcctcccgccgcttagcctgatgctggaaggacgaaggccactcttcacctccaccatgagcctggacatccagagcctggacatccag

SEQ ID NO: 730173 - DNA, 80 bp, Homo sapiens
tcatgcatttattgatctgactgaagattttacagcaggttttgcacactagggaccaagaagccctcggggacactgct

SEQ ID NO: 730174 - DNA, 100 bp, Homo sapiens
ggtggtgtatgtgcgcttcccagggatcttgagagtgaagatctcgaaggatttcataggcatgtcaacatcgctctaattcagagataatctgttgtac

SEQ ID NO: 730175 - DNA, 82 bp, Homo sapiens
gatttaaaattgcaactgaagcaaactcagacagaaggaggcaatgtatatgcaactggtggaaataatgaaggacagttgg

SEQ ID NO: 730176 - DNA, 90 bp, Homo sapiens
aacagataaaacttcagatatgggatacgcattccccgtcggagccctttctagagaaaccagtgccggatatgactcaggttagtggac

SEQ ID NO: 730177 - DNA, 76 bp, Homo sapiens
ctactcttctaaggatcgctgtcctgacagaagaggttttgaacgaagaatgtgatcagaactggtacaaggcaga

SEQ ID NO: 730178 - DNA, 87 bp, Homo sapiens
gcagtggtcgcttcttctccttggctttgaacccgaaacgtactgggatcgaatgcacctcttccaggaagccattgcacacaggtt

SEQ ID NO: 730179 - DNA, 89 bp, Homo sapiens
aaatcattcaagtggccaagacctctgctgcacagggtctgggggtggtggcatctcccctaaaggaagtggtccctctgtggcaagtg

SEQ ID NO: 730180 - DNA, 80 bp, Homo sapiens
ccgctccccgccggctgtccgcaacctccgccagcgtcggtccctgggcaggtgtggatatggtgtaagatacttcttca

SEQ ID NO: 730181 - DNA, 100 bp, Homo sapiens
gtgctgcagaggacacgaggcggcgggctggagacatggaccgcggcgagcaaggatttaagaggggtgcagatcccggaatgcctgaaccaactgtttt

SEQ ID NO: 730182 - DNA, 74 bp, Homo sapiens
aaaaactggaattttttttcaggctgaggcctgtgtgacaaatgatacgtgtgctccatcctctggtctcccca

SEQ ID NO: 730183 - DNA, 82 bp, Homo sapiens
gcagaataagagactggacgctgtgagggagtgcatccgccccaacccttttccccctcgtctcctgtgagaattccccgtc

SEQ ID NO: 730184 - DNA, 88 bp, Homo sapiens
catggcatcatagttgtgtatgatgtgacagatcaggtggactttgatgctcccctgggctacaaagaacccgaaagacaagtccagc

SEQ ID NO: 730185 - DNA, 101 bp, Homo sapiens
tgaggctcgcgagcctccttcgccgcgccccacttgctcgtgcactttacacacatgaggcctcccagaagttcctgccgaatcgtcttcgtcacccccgg

SEQ ID NO: 730186 - DNA, 76 bp, Homo sapiens
ctgacagtgtcaaaacctttctccaggaccttgccagaccccccagaagttgcaagtagaacaagaggaaaacagg

SEQ ID NO: 730187 - DNA, 98 bp, Homo sapiens
gtgtcgctgggctgtcggcctggaccttgcagccgcaatgctccagatgaagatgagtgagcgggccgcctcgctgagcaccatggtgcccctgcctc

SEQ ID NO: 730188 - DNA, 100 bp, Homo sapiens
gagctgggttctattttccctcctcaaactgactttgcagccacggagaggctttggtgttaagatgttgagtactgccaacatgaagagcagtcagtac

SEQ ID NO: 730189 - DNA, 100 bp, Homo sapiens
aagcaaagaaacaaaagacaactctgcttttccagaaactgtgccaggatcacggacctgagggcactcgctttgctcctgtcagtacacactcccaaac

SEQ ID NO: 730190 - DNA, 90 bp, Homo sapiens
agcacttggaatcacgggttgaaggtcagtcatatgaaattcggatgctggataatcggaaaatgggtgatatgcctgagatcaatggaa

SEQ ID NO: 730191 - DNA, 122 bp, Homo sapiens
gctgcaaggagggcggcgggactgcactcgagtgtccagacctgctcgatggaggtcatgtttctagggactcagtctgccttcatgaagaacagacacaggcagcagggatggtggctggc

SEQ ID NO: 730192 - DNA, 96 bp, Homo sapiens
aggacattccctgttgactgcgtcgcgatgtgtggcgactgtgtggagaaggaatatcccaaccggtggtgaaagtggtgctggaaaaacagtggc

SEQ ID NO: 730193 - DNA, 82 bp, Homo sapiens
cggggcggccgggggctcagagatccaagtgcgcgccctggcgggtccggaccaagatggagttttaacattgaatgcggag

SEQ ID NO: 730194 - DNA, 100 bp, Homo sapiens
gaactgaacttagctcgacggggctgaccgctctggcccagggtggtggaggacttgaagtctcagctggtggcccaggatgactcccagaggctggtgg

SEQ ID NO: 730195 - DNA, 95 bp, Homo sapiens
aagctgactgacgtcatccttgaagccgaccagaatgatagccagtccctggagctggtgcacaggttccagtggagacagggtttcaccatctt

SEQ ID NO: 730196 - DNA, 100 bp, Homo sapiens
tctatctgtgcagccacgcaggcatccagaaagtttcctacactactgaggtttaggggcactgtgaagcaaaagccacgcctcagaatcccaggcggag

SEQ ID NO: 730197 - DNA, 90 bp, Homo sapiens
cctttctcagggctgagatgccgtcgaggatgtaccgaatttgtttgtcaattcgttctgaagaggttacctacctgggcaaagtctcca

SEQ ID NO: 730198 - DNA, 75 bp, Homo sapiens
acatggatttagtggacggcatctttttgaaccaaattatgctgcaaatattcgccaacccaggagcgggaggag

SEQ ID NO: 730199 - DNA, 82 bp, Homo sapiens
gggggaatggattcaacaaaagtatttcttacaggaactgacagactacaaatgaaagatttaaataatatgaaaataacat

SEQ ID NO: 730200 - DNA, 100 bp, Homo sapiens
gggcatttgcgctcgcacctgaggcagtccctgctgtgcacctgggggtacaggtttggaattcacccagttgcaggccgaatgcctggtcagcttaatg

SEQ ID NO: 730201 - DNA, 82 bp, Homo sapiens
agaaaacttcatcctagaccaagtgataaactgaaccctaaaacaattaatccgcgacgagtagaacagcccctctatggtt

SEQ ID NO: 730202 - DNA, 50 bp, Homo sapiens
ggcaagtgctgcctgcaggtccatgccaagacaagaggagcagcagcggc

SEQ ID NO: 730203 - DNA, 82 bp, Homo sapiens
gcagggcctgggccgccgctgctacctgcagcgccgtgtggcacgacacaaaaatcaggacgactgggtttggattcagaag

SEQ ID NO: 730204 - DNA, 100 bp, Homo sapiens
ctgcacgaatacgcctcgataaacagggccgtgccgcagatgcccaccggaatggagaaggaagaggagtcgggcacgaccaggagttgacgcactgctg

SEQ ID NO: 730205 - DNA, 83 bp, Homo sapiens
gagaccatggagaccctcacggagctgggcgacgagctgaccctgggagacatcgacggtgaaagaaaatggcccgaaccaag

SEQ ID NO: 730206 - DNA, 76 bp, Homo sapiens
cggggctgtggaggacctgctgcctagaagtaagagatgctaaaaaccttgtacctatggaccccaatggcctgtc

SEQ ID NO: 730207 - DNA, 118 bp, Homo sapiens
gaagtttctggaatcagaagatgaccctgtcataaagaaaattgcccttcgggaaatccgaatgctcaagggtcttgcctatttgcatactaaaggcaaaatgcatagagatatcaaa

SEQ ID NO: 730208 - DNA, 95 bp, Homo sapiens
gaaggcaccgacgtcatcatgctgaccaccaatcagatccgtaaggagctgcagaggctggagacagagttgggccaacccgctgagcgctggaa

SEQ ID NO: 730209 - DNA, 74 bp, Homo sapiens
atttgttactttttcttgtccgggtgcggataagggacccgacactgattgagaaagatcagtctaaagaaaag

SEQ ID NO: 730210 - DNA, 51 bp, Homo sapiens
cgcagttggaattcatccttggttcaaaccttgtactactcagctgatcac

SEQ ID NO: 730211 - DNA, 83 bp, Homo sapiens
cctgacatatctgagggagaagcacaagatcatgcacagaggtcgagtggtgggcatacttcagaagaactggcgggattatg

SEQ ID NO: 730212 - DNA, 119 bp, Homo sapiens
ggcaaaggcaagagtaacagcagcgccgtcccgtccgacagccaggcccgggagaatgccggtggtggtgtgcacattgagccccggtatagacagttcccccagctgaccagatccca

SEQ ID NO: 730213 - DNA, 100 bp, Homo sapiens
ggacgggatgggcaaacaagcaggatcagcaagacccaaagagggattttttaagcgaacagtccaaaataataaaaggtacacatgtatagaaaaccag

SEQ ID NO: 730214 - DNA, 83 bp, Homo sapiens
caaggcctccggcagctatgcagatctctgttgaggagctggcgcggaatctggtcatcaaggtcaacagggatgctgtcatg

SEQ ID NO: 730215 - DNA, 75 bp, Homo sapiens
gcagtgctcaaactcaccgaccaggtatatttgaaggctcccatgattctgaatggagtctgtgttatctggaaa

SEQ ID NO: 730216 - DNA, 74 bp, Homo sapiens
ggtgccaagacggtgcagggctccgggcaccaggagcatatcaaacagggtctctctctgtcacccagactgga

SEQ ID NO: 730217 - DNA, 75 bp, Homo sapiens
tgcccgggccctcctgaagaggcggcgctcagacaggagcatattaatgaaaagtgccataaactgaaaaaccaa

SEQ ID NO: 730218 - DNA, 75 bp, Homo sapiens
gcctcctccagctgttgttgctgctgatttctggttcagtaagggtgagagccaggctccagactatagtgaatt

SEQ ID NO: 730219 - DNA, 100 bp, Homo sapiens
ccaggaatgcaacattttgccctgcccaggtcacagtgtgagaaacgtccaggcctttgcagttcttcagaatgcatttttaaaagcaaaaaccagcttc

SEQ ID NO: 730220 - DNA, 75 bp, Homo sapiens
gcaaaaaaacttgatcctcgaagagaaggtggtgatcaaaggctggaggtaccatgcacctttgagggaccaagg

SEQ ID NO: 730221 - DNA, 51 bp, Homo sapiens
ctggatcccaagagtgaagctcagcttcagatccagctccaggtcccacag

SEQ ID NO: 730222 - DNA, 90 bp, Homo sapiens
gagatcggcggagaccctcgaagtgcgcaaacttgacactcaccctgaccgacacgaatgcagagtttgagtccagatcccaaagcccag

SEQ ID NO: 730223 - DNA, 83 bp, Homo sapiens
ctgagccatgcccatcgcagccgccccgaaggagccagggagtgcatccgccccaacccttttccccctcgtctcctgtgaga

SEQ ID NO: 730224 - DNA, 101 bp, Homo sapiens
aggaaggacacttggaaattgaacaagcgtcacttgacaagcctatagaatcggttatgatgtgattgctcaagcccaatctgggactgggaaaacggcca

SEQ ID NO: 730225 - DNA, 75 bp, Homo sapiens
tgcttcgtggcccggcaccgttccgcggacgtgctcgcaatggctgccatccggaagaaactggtgattgttggt

SEQ ID NO: 730226 - DNA, 96 bp, Homo sapiens
cagcgccgagtcggagggggcgaagattgacgccagtaagaacgaggaggatgaaggatggatagctcccagttgatccattgtcgggagcttgtg

SEQ ID NO: 730227 - DNA, 83 bp, Homo sapiens
atcgtgacaccagaagaatattataatgtcacagttcagtgtccctggccagtgtccttccacctgtccacaagcatggggaa

SEQ ID NO: 730228 - DNA, 75 bp, Homo sapiens
ggcggtgagcgcccatatgggggttctggagagcggggtgtggggtcatcatcagatttgaaatatttaaagtgg

SEQ ID NO: 730229 - DNA, 84 bp, Homo sapiens
cccaggagcgcgtctcggcgggagcctcaggggagaccggcattggcaaatccacactgatgaacacactcttcaacacgacct

SEQ ID NO: 730230 - DNA, 102 bp, Homo sapiens
gcttggacattttacccttcagtcggcccaagaaatcaaaataaaggaaacacatttcatatactgcaggttcatgggacggctccagacattgcaggcaag

SEQ ID NO: 730231 - DNA, 75 bp, Homo sapiens
ggctgtggcaatggaacaggcttgagaaacagctatatgttctcctttcagccaagacctttcaccagtgcaggg

SEQ ID NO: 730232 - DNA, 90 bp, Homo sapiens
ctggaggcccggggggcccagctcccgtagggagccgtgggcgctcggtgcccgggccgggcagtactatactggcaattgctggagaag

SEQ ID NO: 730233 - DNA, 75 bp, Homo sapiens
cgcggtggtgcaagtggaacccaagccttgaggtttcagttctggccgcctctctgccagctgggagccgctctc

SEQ ID NO: 730234 - DNA, 75 bp, Homo sapiens
ctacaagactctcttcgctctttgcatcttaactgcaggtcaaaatgcagatcttcgtgaaaacccttaccggca

SEQ ID NO: 730235 - DNA, 99 bp, Homo sapiens
aaagaacctctcagccatgaacgtgacccgaagggaacagcatgtgaacaggtacaatgccagggagtactacgaccacctgcccgagctgaagcaggc

SEQ ID NO: 730236 - DNA, 126 bp, Homo sapiens
aggagcgatggccgggatcctggagcactcggtcatgtacccggtggactcggtgaaggtactccaaagattcaggtttactcacgtcatccagcagagaatggaaagtcaaatttcctgaattgc

SEQ ID NO: 730237 - DNA, 83 bp, Homo sapiens
aatatgcagaatgcagaaatcatcagaaaaatgactgaagaatttgatgagagtgaagtcaccctgctgagaaatgaagtggc

SEQ ID NO: 730238 - DNA, 90 bp, Homo sapiens
gccttgtggaaatgaacttcacaagttcctcatctgggacactgctggtcaggaacgggctgcccttttcttgggcctgggggtgttgtt

SEQ ID NO: 730239 - DNA, 101 bp, Homo sapiens
ggggctttaccgctgctacttgcaggccagcgcaggagaaaacgaaaccttcgtgatgagattgactgtagccgagggaactttatattgctgttggaata

SEQ ID NO: 730240 - DNA, 100 bp, Homo sapiens
caagaggcgtttctataagaattgactatcaagaaatccaagtggtaatgggcgaagtttattcagcatccggcaatggacttatcgtagttggggaaac

SEQ ID NO: 730241 - DNA, 74 bp, Homo sapiens
ctccacttgccgagcctgatgatggggacgtgccgcccctttgcggggaaagaatatggcaaagctgatgcaag

SEQ ID NO: 730242 - DNA, 82 bp, Homo sapiens
ctgctgcaacctacggggtgtacttgggaacgaggggtgaagcggcccaggtgaggatcttcaaagctgctgcgggcattct

SEQ ID NO: 730243 - DNA, 100 bp, Homo sapiens
gggaccccagcgcgggcggcggcggctgggcgggagccccagaggatgctggtggactgtgtgcccctggtggaggtggacgacatgatgatcatgggca

SEQ ID NO: 730244 - DNA, 97 bp, Homo sapiens
agggtcaaaggagagcacaaccatcgcagttggaagcccatggggcaggcgcaccacgaggtctgccccaagttccccttaacttgtgacggctgcg

SEQ ID NO: 730245 - DNA, 74 bp, Homo sapiens
ttgccatcgcgtctccgcctgcaggcatccttctttaaaagagaaatccacgttagctctccttgaggtctcga

SEQ ID NO: 730246 - DNA, 135 bp, Homo sapiens
cccggatggaagaaggaggaagtgatccgaaaatctgggctaagtgctggcaagagcgatgtctactacttcaggactcacaccacccggcaagaactgctcactacggctccctgccccagaagtcacacggcc

SEQ ID NO: 730247 - DNA, 50 bp, Homo sapiens
aaaatctccccggtgactttcagggtgagcagggcagcatttccttctcc

SEQ ID NO: 730248 - DNA, 98 bp, Homo sapiens
cgcttggggatggatgccctggttgctgaagaggaggcggaagccaaggatgattgccgccgtggacacagactccccccgagaggtctttttccgag

SEQ ID NO: 730249 - DNA, 90 bp, Homo sapiens
cactgctgctctgctgggacccgaggctgagccaagcagccatccgggtgacctgcataggttcctgcggggtctccaacaaggctaatg

SEQ ID NO: 730250 - DNA, 82 bp, Homo sapiens
aaatggctgagtgtcttgtcatgctagcactgcattaagtgatgcatacagatcttggcatatacagaagggctgcatggaa

SEQ ID NO: 730251 - DNA, 98 bp, Homo sapiens
gtggatcgagtgaacgctgctgatgggagataccatgtcctgtttctcggaacaggcatgtaatgaatttactacacatgtgatgaaccttctccgag

SEQ ID NO: 730252 - DNA, 83 bp, Homo sapiens
gcagcgtgcgttcagccctggggctgcagttcatggagctcgtttcaaagggcaagatctaaaactggcatggaataaaccag

SEQ ID NO: 730253 - DNA, 100 bp, Homo sapiens
tgcaagtccttaactttgttcactcattccagccgtgttgccgcccgctgtgctatgagcagtcagagcgccgtctccacaagagtttacaaatgaaaat

SEQ ID NO: 730254 - DNA, 75 bp, Homo sapiens
caggaggggcgagagggagccgcagctgatgtcagagtaaagccaatcccagctgaaggaatcaagtcaaatcct

SEQ ID NO: 730255 - DNA, 99 bp, Homo sapiens
agagaaattaaccctatacctctgacccaggatcccatgacagattctgttgtcacgtctccttacagagtttgagcggtgctgaactgtcagcaccat

SEQ ID NO: 730256 - DNA, 98 bp, Homo sapiens
ggcttaaactcttggcatttggctttgcctttctggacacagaagtatttgtgacagcaactggaacagatccagaaggagctaagtgttttggaaga

SEQ ID NO: 730257 - DNA, 101 bp, Homo sapiens
caggaccaaaattgtggaaaagtcactctgactcagcccacctgcacccaggtgaaataaacagctttattgctcacacgaagcctgtttggtggtctctt

SEQ ID NO: 730258 - DNA, 96 bp, Homo sapiens
tcatcccctggatgggggaccacaagatcctcatcgacagtactatactggcaattgctggagaagattttgcaattgttgcttctgatactcgat

SEQ ID NO: 730259 - DNA, 82 bp, Homo sapiens
caccaagatgcggatccgggcctttccgggccatgatccaaaggaaccagagcagttgagaaaactgtttattggtggtctg

SEQ ID NO: 730260 - DNA, 101 bp, Homo sapiens
tatttccagatccatactccatgtgatgaagaaggaaaggatatggaatattatcttgtaaaatggaaaggatggccagattctacaaatacttgggaacc

SEQ ID NO: 730261 - DNA, 74 bp, Homo sapiens
gcgcccgccatggtgaacagctcggcaggacttacggtaactattatgagggaggcatggctttccaccgtcgg

SEQ ID NO: 730262 - DNA, 75 bp, Homo sapiens
acaaggatgaacattctgccgaagagaacaagacgtgtgaagactcagctaatggttgcagagaagaatggaaca

SEQ ID NO: 730263 - DNA, 83 bp, Homo sapiens
cggctatggccgtgccctggggctgagccctcagccttaaattggaatgtgagaaactggcaagtgaaaagacagaaatgcag

SEQ ID NO: 730264 - DNA, 60 bp, Homo sapiens
ctacagtcaagcaaaggacctggtgtctgccaatgattttggacaacaaactgagccacc

SEQ ID NO: 730265 - DNA, 76 bp, Homo sapiens
tgggcctcgcgccggctatggccgtgccctggggctgagccctcagcctctgacctgtccaggtgccctgtccagc

SEQ ID NO: 730266 - DNA, 100 bp, Homo sapiens
tgacatttctgaggaagaaaggaaagactccaggaaaaacagcttccatggcacattttgtacagggcacatctagaatgattgccgcagaaagttctac

SEQ ID NO: 730267 - DNA, 113 bp, Homo sapiens
cagcttagaggagtggggaggagaactcagcctgagttcagtcaagatatgaaatcagacatcactgaaggagttgatattccaaagaaacctagattggagaaaccagaaac

SEQ ID NO: 730268 - DNA, 83 bp, Homo sapiens
ggatgcctttccttttgggtcttagacagagtccctgtgaagcaggaagagtgagggcaggttcactgcagctcagcagcatg

SEQ ID NO: 730269 - DNA, 75 bp, Homo sapiens
ctggaaaggaattgttttggcctaggatcatccagattgaagaatggcggtcacgagcagccaagtttgaagaga

SEQ ID NO: 730270 - DNA, 96 bp, Homo sapiens
gagtgccttcaaagatcagaaacatgatttgttcatttctgagtcacaaacagcaggatacctcacagatatgaagagaaggctactaaagacttg

SEQ ID NO: 730271 - DNA, 90 bp, Homo sapiens
ccaccgccgggaggaggaggaggagccgagaggagctgagcgagcgcggaaggcgtccactcccaggtggtccaggtgaacgactccatg

SEQ ID NO: 730272 - DNA, 100 bp, Homo sapiens
gaccgccgggcggcggaaagcagataggaaccaaggctttagccttctcaactcattgactggaacaaaccatagcattgggtcagcagatccctgtcac

SEQ ID NO: 730273 - DNA, 108 bp, Homo sapiens
caccagcattgcctcgaccacactcacctctctctgctcatgcaggagcctgggctgcactgtggtggagatgctgacagagaaaccaccgtgggcagagtatgaagc

SEQ ID NO: 730274 - DNA, 101 bp, Homo sapiens
ccagatgaggtgatggcaacggccaacttcggcaagatccagatcgggatttacgtggagatcaagcgcagcgatggtttctgagtcccttcaacatgatc

SEQ ID NO: 730275 - DNA, 75 bp, Homo sapiens
cgcttcttccagaagggccaagggacttgcttttatttcgggagacttgcagctcctctgctgaaacgtttaagc

SEQ ID NO: 730276 - DNA, 89 bp, Homo sapiens
agctgcagccgccgagccggacgtgtccgcgaagatggcgggccggtttttgaaatcatgaatcctgtttatagtcctggatcttctgg

SEQ ID NO: 730277 - DNA, 50 bp, Homo sapiens
gagcagcatcgaggcccgggaggttgcacactgggccacagaggatccag

SEQ ID NO: 730278 - DNA, 83 bp, Homo sapiens
cccgcggagacccttcgagaaatctcgtctcgaccaagagctgaagctgatcgggtgtggccactgtaagaaaatgaagccgg

SEQ ID NO: 730279 - DNA, 75 bp, Homo sapiens
tctttaagcccccatatctaagcaaaggaactggaatgtcgttgtctgctgggtcttcccctcttcattccccca

SEQ ID NO: 730280 - DNA, 82 bp, Homo sapiens
gccccgggagcagccagcccgtgggcgagccgcccgcccgccgagcagccatgagggtgtacagcaagctgtgattcctggg

SEQ ID NO: 730281 - DNA, 100 bp, Homo sapiens
ctcttgctccagaaagactcactgctcacagctgcccagctgaaagccaagcccttcaacaggcacatttattgaaaaacatgagtcactgcaggcagcc

SEQ ID NO: 730282 - DNA, 97 bp, Homo sapiens
accgctcccggccgccgcgctccggtacacacagtgaaattactgatagcaacaaaggtcggaagatgttggagaagatgggttggaagaaaggaga

SEQ ID NO: 730283 - DNA, 75 bp, Homo sapiens
gcttcaagatgacgtctgtctgtggtcacgtgatgaccctggatttcctggatattgtcttcatgcgaacttggt

SEQ ID NO: 730284 - DNA, 98 bp, Homo sapiens
ggggccgcgctgagggcgcccagctgcaaaagtactttgactcaggagactacaacatggccaaagccaagatgaagaataagcagctgccaagtgca

SEQ ID NO: 730285 - DNA, 100 bp, Homo sapiens
acaagaagagtcaaggacagttcagggaggagttctccaaggtgtctgacttccagcaactgctggcctgtgccagggtgcaagctgagcactggagtgg

SEQ ID NO: 730286 - DNA, 75 bp, Homo sapiens
cttcaaaggctgtcgcaaggaggaagagctgccaaacggaggcccgaagaaaaagaacctgaaaaagtaaatcca

SEQ ID NO: 730287 - DNA, 75 bp, Homo sapiens
cagatgacttcattgccaaagttgttcaaagaccggaacatgaacattttgcagtactgcccctcttccgacatg

SEQ ID NO: 730288 - DNA, 75 bp, Homo sapiens
aagcaagatcccaaggaagtttaagctgcttggggatgacccaaaagaggttttagctaaagaagatactgaggc

SEQ ID NO: 730289 - DNA, 74 bp, Homo sapiens
ggcgagaggactggaggggtgcctctgatcaaagcccccaagagagggcttcgtgggacacatatgcaacatgc

SEQ ID NO: 730290 - DNA, 75 bp, Homo sapiens
gaaaactctagaagtctggatgtcggtgggcctctgagatatgccgtttacggggtcgctggtcatcctctggca

SEQ ID NO: 730291 - DNA, 100 bp, Homo sapiens
gcctgacccgaagtaccgacccgagttatgcccaccctccaactttgcgacggaaatgtgtcatcgaaagccaggggctttgttatgcacctaaagccat

SEQ ID NO: 730292 - DNA, 75 bp, Homo sapiens
ggcggatgccctgcagtacctgcagaaggtctctggagacatcttcagcaggaaatgatccgactagatgaagtc

SEQ ID NO: 730293 - DNA, 82 bp, Homo sapiens
taacagcctcctccaacaaatccctcaacttgctaaaaatcaataatctcaggggcgatataatcaatgaggtggtcctaaa

SEQ ID NO: 730294 - DNA, 104 bp, Homo sapiens
atttttgtgaaacgtgtttcaagaccaaaaaacacaataccaggcatacatttggcagaataaatgaaccaggagctgcagaggctggagacagagttgggcca

SEQ ID NO: 730295 - DNA, 74 bp, Homo sapiens
agttttatctagccacatcttggagggaatctaagggaggaaattatcaactgtgcacaaggaaaaaaatagat

SEQ ID NO: 730296 - DNA, 83 bp, Homo sapiens
tgatcatcaaacagctatggtgatgattagagacatactaatgtacatggaactgtggctgcaccatctgtcttcatcttccc

SEQ ID NO: 730297 - DNA, 75 bp, Homo sapiens
caaaattgtggaaaagtcactctggaggcatacacggaatacctgaggagcatccactatatctcccaggtgtta

SEQ ID NO: 730298 - DNA, 75 bp, Homo sapiens
gatcaatcttaccagagggccctcaggttgtggcagcactgcctgaaggtatgagaccagattctaatctttatg

SEQ ID NO: 730299 - DNA, 75 bp, Homo sapiens
cctcactgcagaggtgctggagctggcaggttatgatgtgattgctcaagcccaatctgggactgggaaaacggc

SEQ ID NO: 730300 - DNA, 100 bp, Homo sapiens
ccttcgcggtggcgatgctcttcttggaaaaccagatccagaaactggaggagtcccgctcgaagctagagttgagaattatggctgcaggaaaatttgc

SEQ ID NO: 730301 - DNA, 50 bp, Homo sapiens
ggctgactgtcttcggagtcggatgtttcagaaagaacaagtggatcctc

SEQ ID NO: 730302 - DNA, 100 bp, Homo sapiens
attcgggccgagatgtctcgctccgtggccttagctgtgctcgcgctactctctctttctggcctggaggctatccagccataccctttttggagacaaa

SEQ ID NO: 730303 - DNA, 82 bp, Homo sapiens
tcttcctctggcccgaagccttcctttatcgctttcaggtactccaaagattcaggtttactcacgtcatccagcagagaat

SEQ ID NO: 730304 - DNA, 51 bp, Homo sapiens
caagactggagaggaagcgactgcgggttggcgctgtacgtttatgagtac

SEQ ID NO: 730305 - DNA, 101 bp, Homo sapiens
ggaggatcacttgagccagggagttgaaggctgcagtgagccctgtttttgccaccacactccagcttggatacccagaaagcggtactctagaaatgaat

SEQ ID NO: 730306 - DNA, 75 bp, Homo sapiens
tacccaatcccaatcagaaggactcagatggtgaagtattacaacgccgagagttacgaagtggaacgctatcga

SEQ ID NO: 730307 - DNA, 82 bp, Homo sapiens
agcgaacctcgagaccaacgtggaggagctgtgggtggaagttccagggtctccctccactgctgtagtaacccgggtccgg

SEQ ID NO: 730308 - DNA, 98 bp, Homo sapiens
cgagaaacacttatcagtgtgccatggggaaacaagccatggatggcagaaacggtggacacaagcgaaatggtcaacggcgctacagaacaaaggac

SEQ ID NO: 730309 - DNA, 100 bp, Homo sapiens
gaataaacatgcaatgaacccaaaaggtctttctctaatacacagaattctaggaaggaggctgttcttttagccaaaatgaaacaccctaatattgttg

SEQ ID NO: 730310 - DNA, 82 bp, Homo sapiens
ttcggtggactccttcggcagtccacccaccgccgccgcctcccaggaaccaggtgcagatgggtctcttccttcctgcccc

SEQ ID NO: 730311 - DNA, 82 bp, Homo sapiens
aaaaagttggaagaaagggtgtcatcacagtaaagatattcaatgcaggaaatgtatgatgtagtatcgggagtggaggatt

SEQ ID NO: 730312 - DNA, 104 bp, Homo sapiens
gtggacggaaacttcctctacgtgtgggggggctacgtggtggcttcccacacttctgactcggacgttccttccggtgtcactgaggtggtcgtgaagctctt

SEQ ID NO: 730313 - DNA, 100 bp, Homo sapiens
gacgctgacatcaatgtcacaaaagcggatgttgaaaaggaatcctgcaatatggcgaacataagagaatattatgagagagctttgagagagtttggat

SEQ ID NO: 730314 - DNA, 82 bp, Homo sapiens
ccgccatgtcatccacttcgcccaacctccagccatcactggtgcaagctatatttaacggagatcctgatgaagttcgagc

SEQ ID NO: 730315 - DNA, 87 bp, Homo sapiens
gaccattcatgccccacctcaggagttgggaccaccagttcagattcgggaactggagcctctcctctgtcacagtgacaatccatc

SEQ ID NO: 730316 - DNA, 76 bp, Homo sapiens
cagggtgatttcaagagacacgctcattggtgggcagtattacttatgggaattgctctgatcatgctaatggctg

SEQ ID NO: 730317 - DNA, 88 bp, Homo sapiens
ctggtgcgtcctggtggacacggggcgccccattcccggcacatccacaagatccttgatatccctgatgggcaccgggccccagctc

SEQ ID NO: 730318 - DNA, 100 bp, Homo sapiens
ctcctcggccccgcaggacggggaggattctgtacagatgagcataacttgctacctcggacctgaacagctgcctgactgcctgaaaggttgtgatgtg

SEQ ID NO: 730319 - DNA, 50 bp, Homo sapiens
ctgctaacagaactggaccttttcgtgatatcagtatcaagataaaagtt

SEQ ID NO: 730320 - DNA, 75 bp, Homo sapiens
ttcctacagatgatgagtcggtggcagagatcaatggaaccatgaacgttcaggtgtgggacacagcaggtcagg

SEQ ID NO: 730321 - DNA, 100 bp, Homo sapiens
ccagcgggtccccggcaaactccttccacttcaagagtgctgagcagatcactgcactgtgcaggagttttaacgacagtcaggccaacggcatggaagg

SEQ ID NO: 730322 - DNA, 51 bp, Homo sapiens
tgagctgcgaggaaaatggcggcgggagcacatacaacttctccgctgacg

SEQ ID NO: 730323 - DNA, 100 bp, Homo sapiens
aaaagtaaaccacgatcgttatgctgagaactcattatacaatgacaaatggaggcagcattaacagttctacacatttactggatcttttggatgaacc

SEQ ID NO: 730324 - DNA, 88 bp, Homo sapiens
cctttccaaaggacgcgaccataactctaaaagagtgaagacatttccacctggacacctgaccatgtgcctgccctgagcagcgagg

SEQ ID NO: 730325 - DNA, 101 bp, Homo sapiens
cgccgaggggatgaggggagcatgggtgccaaggagtcacggatcggattcctcagctacgaggaggcgctgaggagaggacctaatgcactgcacagcat

SEQ ID NO: 730326 - DNA, 75 bp, Homo sapiens
gcaggagacacaagaagcggatccagttgtcgagatgtccacagaaggaggatttggtggtactagcagcagtga

SEQ ID NO: 730327 - DNA, 90 bp, Homo sapiens
gctggtgtggaggagggaagctgcccccggattagacagcaggatgacaagaggagctctacggtgactttgaagacttggaaacagggg

SEQ ID NO: 730328 - DNA, 75 bp, Homo sapiens
caggtgttttcaggttaaccgtcaggaattaaggataacctagacgacataaagaggataattaaagccagagag

SEQ ID NO: 730329 - DNA, 100 bp, Homo sapiens
ggaggtgatgaatgcagctcagggtttcagcggatgagcgtcataaactttgagtgcaataaaaccgcagaccagttaaagaccctgcagaggaattacg

SEQ ID NO: 730330 - DNA, 135 bp, Homo sapiens
gcttcgagggccgggagctcctggtcatcgagctgtccgacaaccctggcgtccatgagcctggtgtcatggagaaactccagctgggcccagagattctgcagcgggaaaatccaaggcttatttatgccaggc

SEQ ID NO: 730331 - DNA, 87 bp, Homo sapiens
gcacccacgaatctgcccacccctcctgtaacccagcctgtttcacttcttgataacgaaggaggcccaacttcattcaataaggag

SEQ ID NO: 730332 - DNA, 100 bp, Homo sapiens
accagaatgagttcaacaccaatgtggccatggcagagatttataagtacgccaagaggtatcggccgcagacagctctggctctggctattgctcagga

SEQ ID NO: 730333 - DNA, 75 bp, Homo sapiens
aaggatcccagttttctctggatgacgtgggaaggctacaacaatccccccatctcaggtgagaatctgattggc

SEQ ID NO: 730334 - DNA, 100 bp, Homo sapiens
agcgggagccggagcgagagcgcgcgggcgcggccgacaggagcagtgaggagaatgaataccttccaagaccagagtggcagctccagtaatagagaac

SEQ ID NO: 730335 - DNA, 82 bp, Homo sapiens
gaataagagactggacgctgtgagacttcccaagtaagaagcggaagaggagccgctggaaccaagacacaatggaacagaa

SEQ ID NO: 730336 - DNA, 88 bp, Homo sapiens
gtgtgtggtgggcttcgacctggagctgggccaggccgtggaggtgctccatacttgcttgcagtgcctacgtggctctggctttggg

SEQ ID NO: 730337 - DNA, 74 bp, Homo sapiens
aaggaacaaaatgtttgtaaattctccttttaccaagagttaaacatgaagtttctggagagacagtggtattt

SEQ ID NO: 730338 - DNA, 100 bp, Homo sapiens
cctgaggaccggcaacatggtgcggtcggggaataaggaccaagaatcgccttcagccctgtctggtgcatccttggcagaaagtgaggaggaaaacacc

SEQ ID NO: 730339 - DNA, 127 bp, Homo sapiens
cgctacgtgagctgggccctgggccagaggcagaaaacggacggaagaaaaggtctggccggtcctgacctgagggctgcatcaagatcttgtcattccacatcgtggtttcctttgaggatgtggc

SEQ ID NO: 730340 - DNA, 90 bp, Homo sapiens
atcaaagtccagatctccatctccaaaaagaagagagaagaagaaggaggttcctgctgtgccagaaacccttaagaaaaagcgaaggaa

SEQ ID NO: 730341 - DNA, 87 bp, Homo sapiens
aaagcatggagaccctccctccagaccatcatcaaagaggggatgctgaccaaacagaacaattcattccagcgatcaaaaaggaga

SEQ ID NO: 730342 - DNA, 100 bp, Homo sapiens
aggctcgtgtggaccccagagcatgcacaggctgctctggccaggctgccgcacctctacaggaactttgccgcggagcagtatgccagtgtgttcgcca

SEQ ID NO: 730343 - DNA, 73 bp, Homo sapiens
acagcaactatacgtctgtattggagtcattggaggtcctggtgaacgccatcatcaacagtggtccccggga

SEQ ID NO: 730344 - DNA, 100 bp, Homo sapiens
gccaagtctagttcattctagggacatgaaaatgttaagcatgattgggacagaatgatagaagctgtacagaatcacattggctctttgaattggggct

SEQ ID NO: 730345 - DNA, 100 bp, Homo sapiens
cggcggcggtcctggtgcggaccctccggccgcagccatgtgggacccgcgggcagctagggttacatcaattgcagacaggttgaatgtggaatttgct

SEQ ID NO: 730346 - DNA, 100 bp, Homo sapiens
agaatgttgagttcggcagcatacaggtcattgctagaatcgtggatggaagcagattcactgagttcaaagccttttatggagacacattagttacagg

SEQ ID NO: 730347 - DNA, 90 bp, Homo sapiens
ctaccactgctggcgctgaccttcatcacagacaacagcctggtggcagcgaatggagatttacagacagtcatctgggtggaggacacc

SEQ ID NO: 730348 - DNA, 90 bp, Homo sapiens
cgctgtgtagcagttccatcagtaagcagaagaagcacctcaaggacttgaagcttacactccagaggccggaaggtggtggtcgtacgc

SEQ ID NO: 730349 - DNA, 82 bp, Homo sapiens
aggaacccttttccagtggcggcggcggcagtgtgcaggggcagagcagtggatcttttgccagaaatgagggcatactggc

SEQ ID NO: 730350 - DNA, 96 bp, Homo sapiens
cctggagcatatctttagggccatcctcatcaagaaaaccgacaggaatccaggtaaaaatggcttgtctaatagctgcattttgttagataaatg

SEQ ID NO: 730351 - DNA, 100 bp, Homo sapiens
cagagagtccccagcaggaaggtctcacctgaggtgaaccttcgaccttggacttctcagcctccagaatggtaccaggatcatctatgaccggaaattc

SEQ ID NO: 730352 - DNA, 99 bp, Homo sapiens
ggagggtttgtgtatgatgagaagccctgtacagtcttgtcaagaaataccctgagccagtctctgagacgcttcgcatctggaatcaagagacccatg

SEQ ID NO: 730353 - DNA, 105 bp, Homo sapiens
ccggcagctgatgttctctcagtttgcacaagggaggcgacagagacagcagcaggaaagcgtctctagcagctgatatccccagacttggatatagttcctcat

SEQ ID NO: 730354 - DNA, 50 bp, Homo sapiens
ggggaggtcacctgacgaggagctcatgatggagcagtccaagaagtcct

SEQ ID NO: 730355 - DNA, 80 bp, Homo sapiens
aataccctttctgtttatagaagtgtcaagaggctaggtattcctgacagccgattcgaagacagtctcttacacctcct

SEQ ID NO: 730356 - DNA, 51 bp, Homo sapiens
gactgcaccgcaccgagggcgagctccagagccataagtgtgatccttggt

SEQ ID NO: 730357 - DNA, 100 bp, Homo sapiens
aagagggggaaaaaggaagtttgtcctgtcctggatcagtttctttgtcatgtagccaagactggagaaacaatatctgggacatgagcgatgatgagac

SEQ ID NO: 730358 - DNA, 82 bp, Homo sapiens
tgccctctgaggagatggtcatgacagtgtactaatggtcacttgatgtgcgctggctgttttatccacctactagcagatg

SEQ ID NO: 730359 - DNA, 75 bp, Homo sapiens
gcagccatggaaaaattaatcaacagagtgggacctaatggtgagaggtttgttggcatccaaagctgttggggt

SEQ ID NO: 730360 - DNA, 76 bp, Homo sapiens
ggaaatggcggagtatctggcctccatcttcggcaccgagaaagacaatcaggatggctaaaggtgaccccaagaa

SEQ ID NO: 730361 - DNA, 100 bp, Homo sapiens
gggaagcatacctgttttcaaaactgtactggtaagtccttatggcttaaatgggacgctaacaggccaagcatacaagatgtcagacccagccactcgt

SEQ ID NO: 730362 - DNA, 90 bp, Homo sapiens
attcctgcctatcctcgaacctgcactgtggacttttcggagatcctgctgggccgtggcttcaccttttggcagtggtttgatggtgtc

SEQ ID NO: 730363 - DNA, 101 bp, Homo sapiens
gtttgaaggtggcccctgtgctgttattgcacctgttcaggattccccagctttccgttgcacaaacagtgaagtgacagtccagcccagcccctatttga

SEQ ID NO: 730364 - DNA, 75 bp, Homo sapiens
ctctggaagaacgtgacgctcaaacgccggagcccggaccttttaccaatttgaggctgcgtgggacagctccat

SEQ ID NO: 730365 - DNA, 82 bp, Homo sapiens
gggacgcgcgcggccgagactctggcctgcagtcgccgccgccgccgccagtccctgaagaggaaggagaaggaatatgagc

SEQ ID NO: 730366 - DNA, 75 bp, Homo sapiens
ctctggtgccaaatacattgtcttaacttccaaacatcatgaaggaggaaatcagtggtgcttcaggatattgtg

SEQ ID NO: 730367 - DNA, 99 bp, Homo sapiens
gaaagagaagacaaagtgtaggaggagctgttttggcccacaaaggatattttcgtgaagctcgtgatgtatttgcccaagtaagagaagcaacagcag

SEQ ID NO: 730368 - DNA, 100 bp, Homo sapiens
aggaagggcgactcttgcctgggagtcagtgcttgggccgtcgggtccgggtactccaaagattcaggtttactcacgtcatccagcagagaatggaaag

SEQ ID NO: 730369 - DNA, 98 bp, Homo sapiens
tggcagccccgagccatggctctcgccgtccgagtcgtttattgggtggtggttggagccccccaaaagataacagctgccaaccaaacgggtggcct

SEQ ID NO: 730370 - DNA, 100 bp, Homo sapiens
acagcttctttcatgggaagaggatcggcagaaagtgttgacactggaagaacgttgcagcaaattagaagatatcttcaagtacgtcccactctgatgc

SEQ ID NO: 730371 - DNA, 90 bp, Homo sapiens
atcgagactcatgactcccagagaggatggcatctagaagtgaagcagccgacacgagtcgttgttcataaaacagcttttgaaagttga

SEQ ID NO: 730372 - DNA, 100 bp, Homo sapiens
gggctttgaatgcatcagaaccatgcacgagccgtacacggtgcgtgaggcccgcatccacgtgcgccatgtccgagacctgctcaagagcctggaccca

SEQ ID NO: 730373 - DNA, 71 bp, Homo sapiens
ttttcctgtatgaagcggttggcaccactgaagtgaccgaatgaggcatagaatgtcaagctaaccaggcg

SEQ ID NO: 730374 - DNA, 50 bp, Homo sapiens
gcaatccttccgagacacctaagctgctatacctgtgttttgactctgtt

SEQ ID NO: 730375 - DNA, 75 bp, Homo sapiens
catgaagaccagcacagcctagatttggggctgatcccttatccaacatggttctaaccttcagtactaaagaag

SEQ ID NO: 730376 - DNA, 75 bp, Homo sapiens
aagaccttctcctaccttcgggaatctgccgccaccggcacggccaggccagcatggtggaccacttacttccag

SEQ ID NO: 730377 - DNA, 106 bp, Homo sapiens
tccaagttcagcatccccaagcagggggagaggtccagttccggccgtaccgcacagacgacttcatcacgcgcctgtactatgagacgcccaggttcacagtgct

SEQ ID NO: 730378 - DNA, 90 bp, Homo sapiens
caaggatatattattttattccaagaaagatcagactgtggcacgtttcaggcaggattcctccttcattcaaactgcatcacccaggag

SEQ ID NO: 730379 - DNA, 100 bp, Homo sapiens
cagattcgcagtggtcgcttcttctccttggagatgtaatcagtgtagagaaaaccgtgaagagatgccttttggacactttcaagcatactgatgaaga

SEQ ID NO: 730380 - DNA, 100 bp, Homo sapiens
tggcgctggggcaccgaccccgcaacgactgcccgggctgcgggaggggaggagagcagagaacgtccccagacatgtcatgctgcccaaggacatagcc

SEQ ID NO: 730381 - DNA, 100 bp, Homo sapiens
aaaaattgttgaaccatacaataagatagttgcccggactgcacaactagcaagacttcagtcagagcaccataacatggtgtgggaagtgaagacaaat

SEQ ID NO: 730382 - DNA, 75 bp, Homo sapiens
tggggaggaagctggaggtcaggacacaggtctctgaaagaagatgaatttggctgagatttgtgataatgcaaa

SEQ ID NO: 730383 - DNA, 100 bp, Homo sapiens
atccgctggagcggagccggccgtacgcggtgctgcgagggcagaacctgggctgaaagtcacaacatgaaaaaccaacagatggatccctttactcggc

SEQ ID NO: 730384 - DNA, 76 bp, Homo sapiens
cagatttcctgcccggggccctcatggacggttggatcagggccgaagtgtaaggcaaacattggtgggcaccgat

SEQ ID NO: 730385 - DNA, 110 bp, Homo sapiens
aactgaaggacttcctccccagcctttgggcttctatccgcagagaggccctaggcgagcccctttaccgggtgagcaccggcaactatgagtaccgcctgatcctgcgc

SEQ ID NO: 730386 - DNA, 101 bp, Homo sapiens
aagaaatatattactggcacagatatattggatatgaaactggaagacatcctggctggactctgtgaagctgagcaggagcagatgcggaagatcctcta

SEQ ID NO: 730387 - DNA, 82 bp, Homo sapiens
caactacagatactttgaagtagaagaagctgatggagcggagagtttaataggcaagaaggaagggagaagacagaaggaa

SEQ ID NO: 730388 - DNA, 75 bp, Homo sapiens
gtgcccaggactgttatgattgggggcaaggttggtgttcgaggaagagacattgttgttcttggtgtggagaag

SEQ ID NO: 730389 - DNA, 75 bp, Homo sapiens
tctaggaaacatatgttacgatagccgttctctacttttagagtcgaaaataaatcctaacactgcataccagaa

SEQ ID NO: 730390 - DNA, 95 bp, Homo sapiens
aaataaatcagagtctactggctggtgtgggccgaagatatgctcatgtggtgttgaggaaagcagacattgacctcaccaagagggcgggagaa

SEQ ID NO: 730391 - DNA, 49 bp, Homo sapiens
ggaaggaattcaggctggaaagtactaggttttgacaagcttgcatcat

SEQ ID NO: 730392 - DNA, 74 bp, Homo sapiens
gattactacgacaccggcgaggaacttggcagggcaagttaaagtcttcagagccctgtatacgtttgaaccca

SEQ ID NO: 730393 - DNA, 58 bp, Homo sapiens
ggaacttctgcccagctctccttgaagtaaattttcgcagaaggacttagaaatgcta

SEQ ID NO: 730394 - DNA, 97 bp, Homo sapiens
ggcactgtctgaggagactacagcagaataactgaagtgaagtgatggactccgatttggagagtagtaagacgtgaaaggaatacacttgtgttta

SEQ ID NO: 730395 - DNA, 75 bp, Homo sapiens
aacatcatcttctccaacgggaacctggacccctgggcagggggcgggacagcacccaagaaaacctcatttggc

SEQ ID NO: 730396 - DNA, 90 bp, Homo sapiens
ggaggccctgccctcagagacgcgccccctagtggaagcagagtgggaagcaggcctggtctccaagtcctctcctaagaagcctcgtgg

SEQ ID NO: 730397 - DNA, 83 bp, Homo sapiens
gccggcgtcaccgccgcggacttcgctttgggccatgaccagaataccctctaccatctgctttggtcagggtgccgctcgag

SEQ ID NO: 730398 - DNA, 97 bp, Homo sapiens
gaagaaaattgctggaataatgaccttgaatagaggaaatgggatatcatctggtgtaccttgaaagacttttaacatacgcagagatagatatctg

SEQ ID NO: 730399 - DNA, 83 bp, Homo sapiens
gaagaacagaaggcgatcaaggccaagtatccgccagtcaataggaagtacgagtgttgtttttcaccattcagaacattgcc

SEQ ID NO: 730400 - DNA, 90 bp, Homo sapiens
tgaaaacatcagcaaatggcttagaaacatagatgagcatgtgcattccgatacaatgggctctcctttgtctaccttatctacctcttg

SEQ ID NO: 730401 - DNA, 75 bp, Homo sapiens
tctgaagttgttcattaagacttcccagcattcctacagatataaatagggaatgaaagctactggttgatttta

SEQ ID NO: 730402 - DNA, 98 bp, Homo sapiens
tgtgcagtggcacctgcgcgaagctggccaaagcctgcccagacggctcacctgtgcgggatggaacaaaagtagagatggggtttcgccatgttggc

SEQ ID NO: 730403 - DNA, 75 bp, Homo sapiens
taaaaaatgccaagacatggttatggccgagagagtgggttaatcgagccccatctattcattttctgagagtgt

SEQ ID NO: 730404 - DNA, 88 bp, Homo sapiens
actggcacagcaccttgtccaaaagctcagcccaggggaggaagccgcagcccaaggaggtcgtcacttgccgggaaggtggctcggg

SEQ ID NO: 730405 - DNA, 51 bp, Homo sapiens
ctgtcttgggtagaagagatgcaggctcatgctgaagattcggttatggac

SEQ ID NO: 730406 - DNA, 100 bp, Homo sapiens
gcttcgagaagcgccacaagaacatgtctgtacacctgtccccctgcttcaggatccctccccgcggcggcgatggcccgagccatgagagtgaggactt

SEQ ID NO: 730407 - DNA, 75 bp, Homo sapiens
ttagacctgtgagtcagaagcgacggcttaggagccccagacaacagcagttctgtagagagtttaaatatgaag

SEQ ID NO: 730408 - DNA, 100 bp, Homo sapiens
acttgcccttccactggatctgccagccctacatccggccgggggctgctccctgaggccaagaagcctcggctcctgcacggcaccctgatcatgaagg

SEQ ID NO: 730409 - DNA, 100 bp, Homo sapiens
aatgatgggaaggtggatcccgccgggaggtactttgctgagagagtctacagggagattgaacaggtgattggcccacatcgccctccagagcttcatg

SEQ ID NO: 730410 - DNA, 83 bp, Homo sapiens
cagagccgcgccgtccgcgccgcccgttctggtgacttaagagattaaaattaatttggttgctgttggttctgaacaaataa

SEQ ID NO: 730411 - DNA, 97 bp, Homo sapiens
actccatgtgtgggacattcattgcggaataacatcggaggagaaggttcgagaacttgtcttggacaattgcaaatcaaatgatggaaaaattgag

SEQ ID NO: 730412 - DNA, 83 bp, Homo sapiens
gccgctctgggatcccggccaccagcaattgtccgacaacgactgaaagacctttcattcagaagctgtttcgtcctgtggct

SEQ ID NO: 730413 - DNA, 88 bp, Homo sapiens
acccacccaacctggtgctctgaaccagcgccaggtccagttctctgagttccgtacagatattgccaggacggaatacctttccaat

SEQ ID NO: 730414 - DNA, 100 bp, Homo sapiens
tgccagggaccaggttaccctaacagcaggaaggttgtagccgctcccgaggccccggcgcggcgcgagggcgcggggcgcggcgtccacaggcgccgag

SEQ ID NO: 730415 - DNA, 49 bp, Homo sapiens
actaagaggtaaatgacgcaaggactcgattaccaatcctgccctacat

SEQ ID NO: 730416 - DNA, 101 bp, Homo sapiens
ttttgcatgggttgatgagtggtatgccaatgaatttccctgtttgccaaagcaagtggcttggatcctggccacaagcaaggttttcatgtatccagagt

SEQ ID NO: 730417 - DNA, 100 bp, Homo sapiens
tgaacagtgaaggatctcactcagaatcctgtccacaatctgtccagtttacaccttaccccaaagagctgccactgcagagccccgccatggaagacac

SEQ ID NO: 730418 - DNA, 82 bp, Homo sapiens
gtaaagtcgagtatctggtgaagtggaaaggatggcccccaaacgtccgtctccaagagagtatgaagagagtgcgtctgta

SEQ ID NO: 730419 - DNA, 98 bp, Homo sapiens
ctgcttgaatgtctgccgaaatgttcaagtttaccaaaagagaggcaccgctggaacactaatgagagctagagccggtgcaggccacgcagaacaag

SEQ ID NO: 730420 - DNA, 104 bp, Homo sapiens
gaagcctcccgggtggcttacagacgctgccagcatcgccgccgccaggggaacgcccttttgcttgtgactggcagggctgcgacaagaagttcgcccgctcc

SEQ ID NO: 730421 - DNA, 128 bp, Homo sapiens
ccactcctgccgtgattgtcagcttcctgaggtctcctcagccatgctgaactgtatccgttacagcactgatgtgagtgtagatgaagtaaaagctttggcttctctgatgacatacaagtgtgcag

SEQ ID NO: 730422 - DNA, 100 bp, Homo sapiens
aaggcttagccatgtcgtccttgatcagaagggtgatcagcaccgcgaaagccccaggggccattggaccctacagaacatgaacgattggatgcccatc

SEQ ID NO: 730423 - DNA, 74 bp, Homo sapiens
gacaatagaaagaaccagcttaaagatatggctattgctactggtggtgcagcattcactcatacggcacaata

SEQ ID NO: 730424 - DNA, 90 bp, Homo sapiens
aaaggagagctaccatcactaagttggattggatgctgctggcaagacaaccattctgtataaactgaagttaggggagatagtcaccac

SEQ ID NO: 730425 - DNA, 103 bp, Homo sapiens
caggtcctcgggggcggcggccacgccaaggacgggtccaggtcaagacctcgtctccgttctcatagtcgtagcagtgaaaggtccagtcacagaagaacgc

SEQ ID NO: 730426 - DNA, 50 bp, Homo sapiens
ccttggaaagaggctttccggcaggcctcaggagtgcaagtagctgatga

SEQ ID NO: 730427 - DNA, 89 bp, Homo sapiens
cgccttcaatgtcaagccccagggcagccgcttggacctgttcggcgagcgccggaaaaacacaccttgactttagtcagatacatcac

SEQ ID NO: 730428 - DNA, 75 bp, Homo sapiens
cttctgggtccatcaccaaagagcagatgccaaatctgggccttcaccgccctgtgctactctgcagacggccac

SEQ ID NO: 730429 - DNA, 100 bp, Homo sapiens
ggccaagtctccatcccagaagaagcctgtatctaaaaaagcaggaggcaagaaaggggcccggaaatccaagcctccagtcagatggctctgaggtgct

SEQ ID NO: 730430 - DNA, 74 bp, Homo sapiens
tcggagcctcactgctcccagcagcacctcagcctgaaagaatagacccaagcgcatcacgacaaggatatgat

SEQ ID NO: 730431 - DNA, 101 bp, Homo sapiens
tagggatattgtagaaactgtctttaacctggaatgtatcctgtcaggtataatgtcagtgaatggcaagaaagttcttcatatggatcgaaacccttact

SEQ ID NO: 730432 - DNA, 97 bp, Homo sapiens
agaacctgcagcaagctccacagcaccctccatgggctcagtcttgctcccgggaagatggttaattccatcaggctggcgcccatgcggctctaca

SEQ ID NO: 730433 - DNA, 82 bp, Homo sapiens
gactccgagacctccgaaaagcgtttccgcagacagaagtggggagaagcggagcagtggacgtcagctcagcgaggtcttc

SEQ ID NO: 730434 - DNA, 50 bp, Homo sapiens
taaggattccaagtaactcttatttgagttttgcggcctccaggtggtgg

SEQ ID NO: 730435 - DNA, 108 bp, Homo sapiens
tgcggagcaggaatgccgcagccgtgccgccaagttcggagggagaagaagcaggaatgaatctgaagtctgctgcagtaaaacacagaaggctttaaaatgttttct

SEQ ID NO: 730436 - DNA, 100 bp, Homo sapiens
cgtgtacaagggcgccgaggtggcgcacttcatgaacgccctgcgctacgatgccatgatcggacagctggcttttaaaggaatgaagagactcaataga

SEQ ID NO: 730437 - DNA, 83 bp, Homo sapiens
cttggctccctgtagctatagcagccgcggcggttaagtatgcggcgccaggagctctgatcgtcgtgtgttgccacccattc

SEQ ID NO: 730438 - DNA, 100 bp, Homo sapiens
cctgggaatgggacccttacccggaaacagggtgtctttggggtgaaggtgctaaaggagaagatagaagctgagaagggtcgtgatgccttccccgtgg

SEQ ID NO: 730439 - DNA, 82 bp, Homo sapiens
gtttgatgctgaacttcaccgttaagagtccttaaatgcactggaagaccaagatttagatgctctcatggcagatctggta

SEQ ID NO: 730440 - DNA, 100 bp, Homo sapiens
gggggcgccgcacgccagcgaccaggtgctggggcccggagtcacctacgtggtcaagagatccagttgtcatcggtatccaggaagctctcctcttcct

SEQ ID NO: 730441 - DNA, 75 bp, Homo sapiens
ctggacttacgaatatacaagaggggagttactggtacttgatttgcaaggtgagcgttatgtacctggagtggg

SEQ ID NO: 730442 - DNA, 89 bp, Homo sapiens
ttcccatggttgccggctcccctctcaggacaacccagatgtgcaacaaagtgcgatgaacccttaggagaaatcttgagagtggacag

SEQ ID NO: 730443 - DNA, 74 bp, Homo sapiens
ttggtagtagtcaatcagcaggtgtatgctgatggtagcatatgtttagatatccttcagaatcgatggagtcc

SEQ ID NO: 730444 - DNA, 82 bp, Homo sapiens
tctggccggccttggtgcggcgagccgagcgaggcagctctgagccgcgcgggtggcccagttgaaatccttcccttcctct

SEQ ID NO: 730445 - DNA, 100 bp, Homo sapiens
gcagcaagctcgccgatgccctctgcgcctgctgggcccgcaggtggagcccccgaggaggggtcccgcggtgcccccggcccggcccccgacggcgcag

SEQ ID NO: 730446 - DNA, 82 bp, Homo sapiens
caggagttcatctacccggagaagcaggagccctactcggcagctgtttttggaaggaagaaagatggaaagcggtgcagtt

SEQ ID NO: 730447 - DNA, 83 bp, Homo sapiens
cctggcgctgctgcccgcgctcgccgcacgagctcaccatggatgatgatatcgccgcgctcgtcgtcgacaacggctccggc

SEQ ID NO: 730448 - DNA, 75 bp, Homo sapiens
tgggagggccaccaatgggacaaactatagggtatgaccccatcatttccccagaggtctcggcctcctttggtg

SEQ ID NO: 730449 - DNA, 83 bp, Homo sapiens
gtacgcccaagccgccctggatggagactcccagggcttccgagtggacctgccaatcaagtcggcccgctaccgtggccagt

SEQ ID NO: 730450 - DNA, 100 bp, Homo sapiens
ctaggactctatgacacggccggacagaggccacagacacgccgatcgtcatacagccggcatccgccaccgagaccacccagctcacagccgactccca

SEQ ID NO: 730451 - DNA, 102 bp, Homo sapiens
aacctttgctgtctatggatctgctctaaaccttatagcctgcttatgggggaaggttgaaatcacaaagattagacacctttttagataggtgttcttcag

SEQ ID NO: 730452 - DNA, 98 bp, Homo sapiens
ggagattacacagaagcaaaagccttgatagcatggatttctgtgagctcactgcatcataggcgagtattagtggaatggctaagagatccatctca

SEQ ID NO: 730453 - DNA, 98 bp, Homo sapiens
accggctgttcgaggccttgactgtagggcagctggtggaatttttgaagaaaatggaatctcgaggccccctttcgtgcgacacggttctgaagatc

SEQ ID NO: 730454 - DNA, 75 bp, Homo sapiens
cgcggagatgtgacccggcagtacggcaaatatggcggaggggcataaggaaatggtggcaggcacttcctccta

SEQ ID NO: 730455 - DNA, 100 bp, Homo sapiens
ggacaagatcatgggcaaaggacagatccagcagccagactgccttccgggtcactgccatggaggagccgcagtcagatcctagcgtcgagccccctct

SEQ ID NO: 730456 - DNA, 74 bp, Homo sapiens
tcaggaactgtgtgtctagatgtaattaatcaaacttggacagctctctatggaagagagaagggcacagttac

SEQ ID NO: 730457 - DNA, 100 bp, Homo sapiens
ttcatgcactctcccctcccgcagagtgatcagcagctggactgtgccttggacctaatgaggcgcctgcctccccagcaaatcgagaaaaacctcagcg

SEQ ID NO: 730458 - DNA, 50 bp, Homo sapiens
gctacaaggccatgtccggacccacactgtcttactactttgaccgcgat

SEQ ID NO: 730459 - DNA, 100 bp, Homo sapiens
gctccctgtagctatagcagccgcggcggttaagtatgcggcgccaggagctagccccggagctatgtggagtctgtggcacggacagcggtggctggac

SEQ ID NO: 730460 - DNA, 75 bp, Homo sapiens
tttaaggcagagaaactggaaatgtttctggaacattcaaattcagtgtttctacagccagttagtctacaaacc

SEQ ID NO: 730461 - DNA, 82 bp, Homo sapiens
tcgtgaggttcagctgatgaagcttctgaaccatccacacatcataaagctttaccagaaaaagcttgtggtgaaggggggc

SEQ ID NO: 730462 - DNA, 75 bp, Homo sapiens
cttcctagtcctttcctgctgatgacgctactgctggggagactcacagatgtgttttcgcattataacaaggac

SEQ ID NO: 730463 - DNA, 101 bp, Homo sapiens
gaagcccgagagatcactgagagagcttttcatgcaacacccaacacttataagcggaagaacacagaaacagctctagacaacaaaccttgtggaccaca

SEQ ID NO: 730464 - DNA, 74 bp, Homo sapiens
tcgcgctgatgttcctggcctggggggaagcttgcctgggaccagtggcagggaccccggaacctgaaggtgct

SEQ ID NO: 730465 - DNA, 90 bp, Homo sapiens
cctgctcctgcctcccccgtcccaccactgaggctgttgggccaggccagtcatgctagaacattctgagaacaataactccacaatggc

SEQ ID NO: 730466 - DNA, 98 bp, Homo sapiens
tcactgtcaccgagccgctgcggccaggtgacagagctgaatgaacctctctccaatgaagatcgaaatctcctctctgtggcctacaagaatgtggt

SEQ ID NO: 730467 - DNA, 138 bp, Homo sapiens
ccgacggcttctccacctacgtgtgcctggtgctgctggtggccaacattttgcggatactcttctgcatcctggtggggaagaagttttaagggaacaagctggaggtgacgctactgagaactttgaggatgtcgg

SEQ ID NO: 730468 - DNA, 74 bp, Homo sapiens
cgctgttctcgctccggagccgctgcacatttcggttggtcaaagaaaaagtgatgtatgaaaaagaggcaaaa

SEQ ID NO: 730469 - DNA, 75 bp, Homo sapiens
ttgataccaagaattaaaaatgcttgtctacaaacatcttcccttgcggttgttctggaattgatagagctccgt

SEQ ID NO: 730470 - DNA, 72 bp, Homo sapiens
cggacgcaggcctggtatggagaacgagaggaaagaagtcccttatcacgctagagacatgacctaacaccc

SEQ ID NO: 730471 - DNA, 50 bp, Homo sapiens
cgtggacgctgactcggaagtgcaggttcacctccatttctcaatgtgaa

SEQ ID NO: 730472 - DNA, 100 bp, Homo sapiens
ggcaacgtgttggaccttccggagcttctcagaagacagagggttttcttttgaggatagaccatgaagctgaaggaacttgagcggccagctgtccagg

SEQ ID NO: 730473 - DNA, 95 bp, Homo sapiens
ctttacttttacctacgttggcggccccagaaggtactcatttgcaattgtgggcatcaatataactgacctggcatataatctactggtcagcg

SEQ ID NO: 730474 - DNA, 75 bp, Homo sapiens
atgtggaaataacggagcaacttgctaatggcaggcattttacaagctatcatggtgaacttacttcagattgtg

SEQ ID NO: 730475 - DNA, 101 bp, Homo sapiens
gattggacccacagggcagatggagtttcgctctgctgcccaggctggagtacagtgatgtgatctcctgacgtcaagtgatccattcgcctcggcctccc

SEQ ID NO: 730476 - DNA, 83 bp, Homo sapiens
gtaagactaggttttggctaagatggcaggattttcataatatatgtagtatgagttccacatcttggcctcttacccagctt

SEQ ID NO: 730477 - DNA, 109 bp, Homo sapiens
ctccatgagttggacagataccaaagagggaagtgtttggattgtgagctatttcagaactgttctcaggactcattattttaacatttgggagaaacacagccagaag

SEQ ID NO: 730478 - DNA, 74 bp, Homo sapiens
cccagattgtgcaagaaccatgggaggggcgtcagggaagaaggagaaagggccaacccctgaagaagcaatac

SEQ ID NO: 730479 - DNA, 50 bp, Homo sapiens
cgaggaagcctgccccttgcttggtgacagcgggaaggtgaccacagtcg

SEQ ID NO: 730480 - DNA, 78 bp, Homo sapiens
ggcgctacgccacctcgagtcgtggtgcgtccagagatcaagcgacgtgcctcagaggctttgcccgaattgcttcgt

SEQ ID NO: 730481 - DNA, 75 bp, Homo sapiens
gacaaggatgaccaggaatgggaaagccccagtcgtgagatggagaataaagaaactctcaaagggttgcacaag

SEQ ID NO: 730482 - DNA, 82 bp, Homo sapiens
gatcagatcgatctaagatggcgactgtcgaaccggtgtcgtgaaaactacccctaaaagccaaaatgggaaaggaaaagac

SEQ ID NO: 730483 - DNA, 80 bp, Homo sapiens
gccatgcctactctgtgaccggggccaagcagtttcacagattccttggtgtctttctccgctgagattttgtcacggac

SEQ ID NO: 730484 - DNA, 75 bp, Homo sapiens
agcggagacctcgctgcgctcatggcgtcgcccggggctcgtgcaatccgcttcagacaggatggtaacgaagcc

SEQ ID NO: 730485 - DNA, 98 bp, Homo sapiens
tacaaatagcaggtagaacttccagaattctcccaaaggactttgtggttggcctctccatcctgctgcggggcacagtccacgagaagctcaagtgg

SEQ ID NO: 730486 - DNA, 83 bp, Homo sapiens
tcctgaaaggagagacacttgtgaacattcaagtgaagcaaaagcctttcatgattatttcaaaaggtgatgacctatcaaca

SEQ ID NO: 730487 - DNA, 74 bp, Homo sapiens
gccgctggcagccgcggatctcaccgccgctcagggccaccagcttgggctccccacggagggcagcaagtggg

SEQ ID NO: 730488 - DNA, 100 bp, Homo sapiens
ggtggccagagtgcaatgccctttcccggcgcctcttactaaaaaagacaagaggaccctgccttggtgtgagagtgagggaagaggaagctggaacgag

SEQ ID NO: 730489 - DNA, 75 bp, Homo sapiens
agtaggagctgctgtcttcggaaggatgggaccattgcaagctgcagaaaatgagaagaccctactgaccagccc

SEQ ID NO: 730490 - DNA, 90 bp, Homo sapiens
ctgtgatcctcatcatcttcagcctagaggtacaagagcttcaggctgcaggagaccggcttttggcaaactgaaaccgtgtcagttcag

SEQ ID NO: 730491 - DNA, 100 bp, Homo sapiens
gcaagactatgaatctctgttccaaatgctttgctgctggtgctcaagaccgaatcggctgggcttttggcctaggattagaaaggctagccatgatcct

SEQ ID NO: 730492 - DNA, 90 bp, Homo sapiens
cgggcggtggcagcaagaagagggactccctggggactgcgggctcagcgcacctcattatcaaggattacaacagcagtgaattgaaaa

SEQ ID NO: 730493 - DNA, 75 bp, Homo sapiens
ctcaagtcaccgtggagctccgccgccccgaaactttcaccgcgagcggggcaacctcctggcttcaggggccag

SEQ ID NO: 730494 - DNA, 96 bp, Homo sapiens
gctgctgcaaaagccagcagcggcagcgggagctgtccggaggccggcgtcgaggctgaaggggatgctaagggagataaagcaaaggtgaaggac

SEQ ID NO: 730495 - DNA, 90 bp, Homo sapiens
cttgagtctactctgtcgctcttgtgccctagcaccccgagaaccgtcagtttgagccagatgatatttgctgcaccatcctttgatgac

SEQ ID NO: 730496 - DNA, 98 bp, Homo sapiens
ttccttcaatgataaattttgtgatcagatgatggtccttgaatgggcaagagggcacatgaagtacggcgtcctccacattcacggcctctacacgg

SEQ ID NO: 730497 - DNA, 83 bp, Homo sapiens
tttagagctgcggaacaggacgccctctgatggatacccacccaccatcccagggtctacaacatccacagccggaccgtcac

SEQ ID NO: 730498 - DNA, 75 bp, Homo sapiens
cacggccggaccgaaggtgcggcggcggaggggagccagggcgccccagcaggctaattcacctaaataagattg

SEQ ID NO: 730499 - DNA, 100 bp, Homo sapiens
ccagagaaaagggtccatgacaatgagcatccagtggaaaacacgccagcttcaaagcaagcttcaaacatacccatatagataaaccagactgctcagg

SEQ ID NO: 730500 - DNA, 100 bp, Homo sapiens
cgacggtcacccgaatcgcagggagtcgccgctggagaggggctcggcgcccggcggggactgcagaacaactctgctcatggtgattacatgcaaaata

SEQ ID NO: 730501 - DNA, 74 bp, Homo sapiens
tagccttcacagagagtccagttgccaagaatcagaaactatccctcttgtgatgaaagctgtctctgggtcca

SEQ ID NO: 730502 - DNA, 100 bp, Homo sapiens
ccattctcaaagcctcctggccccagagacaggacatatttgacagtgattggtacacttctcgaaatctaattgggggcgctgacatcattgtgatcaa

SEQ ID NO: 730503 - DNA, 75 bp, Homo sapiens
tgctagttaggattttattactggcagcatgtatatcttttgtgttgacttcaaaatcaaaactgtagagctaag

SEQ ID NO: 730504 - DNA, 100 bp, Homo sapiens
aaggcagcagcctcaaggagcagccatggccccagacttgtcgcacggatgcagaaaacttaatggaggaggctgagatgatgataattccgaagaaggc

SEQ ID NO: 730505 - DNA, 85 bp, Homo sapiens
caaaccacagatcctcatgatggctgtgcatttggatcagctgctatttggcaatacgaatcactgaaatccaggggtccagagt

SEQ ID NO: 730506 - DNA, 87 bp, Homo sapiens
gggagacagtactatttgggagacaagtgtcagcagggcactgtggcatttgaagatgtggctgtgaacttttcccaggaggagtgg

SEQ ID NO: 730507 - DNA, 100 bp, Homo sapiens
ctgcggccaacaacaaggagacactgctcgccggccgcctggtcgtgggactcggcatcgcaccaaatgtggctccttcagatgtaggaggtggaggtgg

SEQ ID NO: 730508 - DNA, 75 bp, Homo sapiens
aggctaccaaggacagagtcagtgatttccataaattgaagcaaactgtccagaccaaaacgaagaagacgttag

SEQ ID NO: 730509 - DNA, 97 bp, Homo sapiens
tcatgggaggaatgaaggaagaatcgagactaggaagttccaggttaaaggcagcctcagctcacggggcagttgatggtggtagagaacagccctg

SEQ ID NO: 730510 - DNA, 100 bp, Homo sapiens
acaggctgatggcggaggcttcgagtgacccgggtgccgaggagcgggaagagttgctggggtcgcaatggaagaagagatcgccgcgctggtcattgac

SEQ ID NO: 730511 - DNA, 74 bp, Homo sapiens
gacagaacagttaatcctcaatttaagcctgatctaacccctagaaacagtttgtatgccagaagaagggttta

SEQ ID NO: 730512 - DNA, 97 bp, Homo sapiens
ccagtcctagcaagatatatgggagagccttagaaaaatgcagatcacatcctgagggaaatgatgtcactctgaaactcaggctggaatacactgg

SEQ ID NO: 730513 - DNA, 88 bp, Homo sapiens
agaagttatgcttgttggaattggtgacaaaatcagaggcatactttatagatttaccttctatgatggtcctccttttgcaactgga

SEQ ID NO: 730514 - DNA, 151 bp, Homo sapiens
tgccccacggatctaatccggatcgggacccggtcccaggggaggcccccacctccccttctattgttctgtggcccaggaaagaccacagcaagattctttcattcgtctcctcctagcctgggggaccaggctcgaactgaccctggac

SEQ ID NO: 730515 - DNA, 95 bp, Homo sapiens
cttgcgctccggagcgctggctctgctggcgctgaggtcacttttacaaagagaaagtttggattaatgaagaaagcctatgaacttagtgtgct

SEQ ID NO: 730516 - DNA, 74 bp, Homo sapiens
aggaacgaggcaaggagctaaagcagcgtgcgttcagccctggggtgacaccttgtttgtggctggctgcggga

SEQ ID NO: 730517 - DNA, 101 bp, Homo sapiens
ccgcgtcccgctcgctgggagagaggtacctctccttttccctctccctttccctaaggagtacgagagggcctccaaagtggaccagtttgtgacgcgct

SEQ ID NO: 730518 - DNA, 75 bp, Homo sapiens
tcagtttatcacttcctgaaagacctgaagcattgtttgtgctccccaaacctaaagtgatctcctgtctagagc

SEQ ID NO: 730519 - DNA, 100 bp, Homo sapiens
aagtaccgctgtgtgatccgctctgatggtgggtctggtgtgtccaactacgcggagctgatcgtgaaaggtgaagctcgtgtgtggagtgccacggtac

SEQ ID NO: 730520 - DNA, 132 bp, Homo sapiens
ttcgggccgagatgtctcgctccgtggccttagctgtgctcgcgctactctctctttctggcctggaggctatccagcgcagaggtgtccaggacctgcctgctcacggttcgtgtcctgcaggcccatcgc

SEQ ID NO: 730521 - DNA, 90 bp, Homo sapiens
ttatagcctcaaactcccaggctcaagcaatcctaccatgtcagccttcccagtagctggaactacaggaattcttttagttggaccccc

SEQ ID NO: 730522 - DNA, 100 bp, Homo sapiens
aggctcccttgacaggcggctttgcatcggaaatcagctctacagttcagatttgtgaagctgggaatcatttcatcaatgtaatgttgtctcatcccaa

SEQ ID NO: 730523 - DNA, 89 bp, Homo sapiens
gaaagtggagtccgagctgagatccatctgcaccacggtgctggattcagtgcgcctccttgctgtggaagcttgtgtcagtattgccc

SEQ ID NO: 730524 - DNA, 100 bp, Homo sapiens
tacctccaccagatgttggggtgagaaagatcagtctaaagaaaaggagaagaaagtgaaaaaaacaattccttcctgggctaccctttctgccagccag

SEQ ID NO: 730525 - DNA, 75 bp, Homo sapiens
ctcaggagctgctgtcacctggaaaacacgtggcatgatcacacaacagacagcgcgttccttcacctcgggcag

SEQ ID NO: 730526 - DNA, 75 bp, Homo sapiens
ctcgggttcttggggctgttcgcggctgaggttgacatcatggacatatgtgagtccatcctggagaggaagcgg

SEQ ID NO: 730527 - DNA, 74 bp, Homo sapiens
gcgcttatcgtgcggccagtccggcgctggcgccgcgtggcagtgggttgggatgaatgggttccggagagcag

SEQ ID NO: 730528 - DNA, 101 bp, Homo sapiens
atgcattgccattatctgtgaactagcttatagtgatttaggatactacattatcaataaactgcaccatgtggacgagtcggtggggagcaagacgagaa

SEQ ID NO: 730529 - DNA, 75 bp, Homo sapiens
cttgtggagaagaccccggcgctggtgaacgggtgagaaggactggcagaaatacgagactgctcggcggctgaa

SEQ ID NO: 730530 - DNA, 90 bp, Homo sapiens
gtggaggactacagagccggtgatatgatctgtcctgaatgtggcttggttgtaggagtctctgcattagttggacagctcttctggaat

SEQ ID NO: 730531 - DNA, 83 bp, Homo sapiens
cttcagagagaggaagccgaaaacaccctgcaatctttcagacaggtgtccctggccagtgtccttccacctgtccacaagca

SEQ ID NO: 730532 - DNA, 90 bp, Homo sapiens
agaaattgaaaagtactgcccagagaattttgtagacatcaagggtgaagtgatgaacctcctgatgttcctgtcgacgtgggatgggaa

SEQ ID NO: 730533 - DNA, 83 bp, Homo sapiens
ccaccaggtccgggtgaaagcctactaccgcgggattttttatcaagcagaaatgcatcgaacaacgagaatcaagatcactg

SEQ ID NO: 730534 - DNA, 50 bp, Homo sapiens
atcggggtatactggatacactcaaggtactaggttttgacaagcttgca

SEQ ID NO: 730535 - DNA, 100 bp, Homo sapiens
ggatgacagccagtccagccaagatgagctgcagagcaagcagtccaaaggcctggaggagaggagctctggaagatcatcgcagaaccagtaacatgac

SEQ ID NO: 730536 - DNA, 75 bp, Homo sapiens
gtcagagatggagttctcttcacttcaggacatgtttcggagcaacatcccctgtcacctggttgatatctcttg

SEQ ID NO: 730537 - DNA, 75 bp, Homo sapiens
atattaaactcaaagtcattggacaggttatgtgaaattacctccagagaaatttgcacctaagaaacagggcga

SEQ ID NO: 730538 - DNA, 100 bp, Homo sapiens
ccgttggccttcgtacccgtcttgattgagctaggacttctctcaaacttgtgtgctgaggagactcagatgttggcctcagctcctaggctgaactcag

SEQ ID NO: 730539 - DNA, 75 bp, Homo sapiens
catggtcacggagaaggcagcctacataggttcgtgctggccgtgggcagcgccgtctttgatgccatgttcaac

SEQ ID NO: 730540 - DNA, 73 bp, Homo sapiens
accaagccagagccaatggaagaagatcttccagagaataagaagcaggccagagccaacgggctgaagtctt

SEQ ID NO: 730541 - DNA, 100 bp, Homo sapiens
ggagaggaagagactggaatgttgacttgattcccaagttccttatggctaatggcctagtaaatgacaaagactcaaaagattctatgacagaaggaga

SEQ ID NO: 730542 - DNA, 82 bp, Homo sapiens
caggacttggtccgcggcatccgtaaccacaaggaggacgaggatggcccagctgaggctggtgctggggctccacaccctg

SEQ ID NO: 730543 - DNA, 100 bp, Homo sapiens
gtcagtgattcccggaccctggaagagaagagggtggctaatgattaagggcgaacctttcctacacacccatacttctctgcccagcttggagcaggac

SEQ ID NO: 730544 - DNA, 100 bp, Homo sapiens
ttccttgaagtagatgtggatgactgtcaggctgaggaaaaggcagatgctctgaataaggagctgctgatgaccaaacagaagttgattgatgcagaag

SEQ ID NO: 730545 - DNA, 82 bp, Homo sapiens
cacacgaagagctgccgtcgctgcagagaccccgctatggctgcaagatgatgatgaatgaagtcctggcagcttcctgtgt

SEQ ID NO: 730546 - DNA, 75 bp, Homo sapiens
gactgcttagaccacagcgacgaggacgactgccgctctgacgcccgctctgcggcttcggtgtttgaacaggcc

SEQ ID NO: 730547 - DNA, 83 bp, Homo sapiens
atgccattaagaacatccatggagtcaggaggatacgaagcgttttcggcttcctgcccggagctgtgcagcaaacagtcgac

SEQ ID NO: 730548 - DNA, 101 bp, Homo sapiens
ctcggggtggcccccgcttcagtcccagggcaggtactccaaagattcaggtttactcacgtcatccagcagagaatggaaagtcaaatttcctgaattgc

SEQ ID NO: 730549 - DNA, 89 bp, Homo sapiens
gaaagctggtaatagatgtctgacaaactaaagaaagacttgtgttacgaggaggtgcgccagtctgtaactcctgccgagccagtcca

SEQ ID NO: 730550 - DNA, 114 bp, Homo sapiens
gcaatattcagtttccagaatcagcagctccggcagcagtgtcctgtgctgatggtgttggcaggagaaggatttgatcccaaagctgtttcaagtactggcccctcggtacaa

SEQ ID NO: 730551 - DNA, 100 bp, Homo sapiens
cgcaaccgcgggagcagccaagtggactggactcttttcttgacttagctaccaggtcaaaatgcagatcttcgtgaaaacccttaccggcaagaccatc

SEQ ID NO: 730552 - DNA, 74 bp, Homo sapiens
tcttttccagcagctcattcagagatgtgttcagagcaacattgttttgttgacacaagcatttagaagaaagt

SEQ ID NO: 730553 - DNA, 83 bp, Homo sapiens
cagcttcttcttcaacatgctcttcgtattagaaaacgcacttaggaactttgcctgtctgaccaccggggatgtgattgcca

SEQ ID NO: 730554 - DNA, 85 bp, Homo sapiens
gccggagtcagcgatggtgcccggcgaggagaaccaactggtcccgaaagagtgggcagcccatccctcgagtggaatacatgga

SEQ ID NO: 730555 - DNA, 82 bp, Homo sapiens
tatgtacctgttaccactttcaaaagaaaaccagtggctgttacaagtaacagaggcacaggaagggcacctttacgtcctg

SEQ ID NO: 730556 - DNA, 100 bp, Homo sapiens
tctgtgacctgctggcattgaatgatttatagctaagactccaggacacccctgaagccgagaaatgatcagagatactaaatcagcggatcaaaaaaca

SEQ ID NO: 730557 - DNA, 100 bp, Homo sapiens
ggagtatcatcctggtggagaagatgaactaatgagagcagcaggatcagatggtactgaactttttgatcagctgcagaagaaagatcagcaactggag

SEQ ID NO: 730558 - DNA, 82 bp, Homo sapiens
tcagcgactcttctgacctccgcgcgacgtacccgccgccgccgttggctggaggctgaaggggatgctaagggagataaag

SEQ ID NO: 730559 - DNA, 101 bp, Homo sapiens
agcccatgagtagggaggagaaacagaagcttgggtggatacccttcgccatgttatcagccagacaggaggatacagtgatggactcgcagccagtcaga

SEQ ID NO: 730560 - DNA, 75 bp, Homo sapiens
gctgtcatcacaaaagagttgattgaaattatctctggtgctgcagctctttttgcacagtaataagttgactca

SEQ ID NO: 730561 - DNA, 100 bp, Homo sapiens
gagaggtggatctgtgagggaaaagacccaataggataactcaagttactgaaaatatttacaccagcagctccagttcataccaataaagaagatcctg

SEQ ID NO: 730562 - DNA, 98 bp, Homo sapiens
tacagaagttaagtcgcagaatggagaattcatgacccacaaacttaaacatactgagaatactttcagattcctcgaggtctgaacaagaaccactg

SEQ ID NO: 730563 - DNA, 75 bp, Homo sapiens
gctccgccgcgcccgcggcccgcggccgccggggatatgagactttctactcggaatatcctgagtgttgcgtgg

SEQ ID NO: 730564 - DNA, 99 bp, Homo sapiens
aagcattcgtgcagacagggcaaagaaaatgggactggttgaccaactggtggaacccctgggtgaccaagaatatggcccaggtgaccaaagccctgg

SEQ ID NO: 730565 - DNA, 73 bp, Homo sapiens
tgcagcattaaattcccgaactggggagatctgataaaaactggatatgcatctaaaacaagatgtaagtcac

SEQ ID NO: 730566 - DNA, 100 bp, Homo sapiens
gagtattccaaatttgatggcaaggtccttccatagtgacgccccccaaggacatctggaatgtcactggtgcccaggtgtacttgagctgtgaggtcat

SEQ ID NO: 730567 - DNA, 75 bp, Homo sapiens
ggatagataccgaattcttatcacaaagaaacctgctaatattttagttatgggtgaaggtcctgagcgaggaag

SEQ ID NO: 730568 - DNA, 83 bp, Homo sapiens
tggtcttcctgctggggctcatgtttgaggatgccggctccaggagcagcagtggaggtcgggaacgcctcattgtggagccc

SEQ ID NO: 730569 - DNA, 98 bp, Homo sapiens
gcagaggcaattcccggaggactacagtgaccagagatttgccacaatatggacagaagcagtggcagtcctattttggaagaacttttgatgtttac

SEQ ID NO: 730570 - DNA, 100 bp, Homo sapiens
ggcgcctcaggcacctcggcccggactctcagcgttctcatctctcttccttcaccatgaagctgatggacaaattccactcacccaaaatcaagagaac

SEQ ID NO: 730571 - DNA, 75 bp, Homo sapiens
tcaatgctgcgaaagctgccaaaagtgacatgcaggaggaagataccaactagagataaaaataccagaaacata

SEQ ID NO: 730572 - DNA, 90 bp, Homo sapiens
ccggaagttctcatggggaatccatccggaagaccacggccagccaggtgtacgagacattgctcacctacagtgacgtcgtgggcgcgg

SEQ ID NO: 730573 - DNA, 51 bp, Homo sapiens
ggacctcacatcaacttctaccagctgcctgaactgacatcaactcccaat

SEQ ID NO: 730574 - DNA, 117 bp, Homo sapiens
ctggaaacagacccggcgcccagcggtagccctccttgcgcctccgattcccagtggaatgcagtagccctctgggcctgggatattgtggttgataactgtgccatctgcaggaac

SEQ ID NO: 730575 - DNA, 75 bp, Homo sapiens
ggtgtaatacatcatgaactgcagggcgtttagatgccaaccatattacctcagtccccgaggacagttttgaag

SEQ ID NO: 730576 - DNA, 83 bp, Homo sapiens
gactggggattccgacagatcagtgagtcaaccactgcacaggcccgaagggcagagtggacatcctcatcatggatgatgac

SEQ ID NO: 730577 - DNA, 82 bp, Homo sapiens
gggacaaggtgtcaacaatgtgccgattgggaaaatgaggtacgttagtgttcgcgattttaaaggcaaagtgctaattgat

SEQ ID NO: 730578 - DNA, 83 bp, Homo sapiens
gaatatgctagtggaggggaaatatttggcagtcctgttcagaatgagcaaggctttgtggagttcaaaatttctgggcctct

SEQ ID NO: 730579 - DNA, 95 bp, Homo sapiens
ttttaagtggagtggtggatcagaccaaagatggatcagtgtactgttacccggacatacctattccttcacaagttctggttcttcagtgctgc

SEQ ID NO: 730580 - DNA, 100 bp, Homo sapiens
gctggcagcgagtaaagtcttggacagacttaaaccagttataggggtaaacactgatccagaacggtttggcaaacatcgaaaagatgacaagattgag

SEQ ID NO: 730581 - DNA, 87 bp, Homo sapiens
cgagtcatacccccaggagtaagagcccatagcagtctgccagacaatagagcatatggggaccagttactctccacaagaaaattc

SEQ ID NO: 730582 - DNA, 100 bp, Homo sapiens
aagaatgtttttgaccagaaaaccgacaaccttcccagaaagtccaagctcgtggtgggtggaaaagtgttcgccgagatttctacctggacaaggactg

SEQ ID NO: 730583 - DNA, 88 bp, Homo sapiens
atcccggtgctaggggtgcaggaggaggacggcagcaaccgcagcagcagccttcaggttttcttgcagctggtaccatccatgtctc

SEQ ID NO: 730584 - DNA, 101 bp, Homo sapiens
ggccaacatcgcggtgcagcgaatcaagcgggagttcaaggaggtgctgaagagcgaggagatcgatctctttgggctgcctgacctccttgggtgcttgc

SEQ ID NO: 730585 - DNA, 100 bp, Homo sapiens
ctaattgatcagcagcagcagaaaatcattgccctgcagagtggtttacaagctgttccagctcaaccaagataaaatgaatttttccacactgagaaac

SEQ ID NO: 730586 - DNA, 74 bp, Homo sapiens
gcggggcccacctctctaagcctatggaaaagcttctgggagaattctcaccaaatgttcccaaatccttatcc

SEQ ID NO: 730587 - DNA, 51 bp, Homo sapiens
ccttcgcaggtcatgatcttgcagtggtttgaagaaaagcagcagcaattt

SEQ ID NO: 730588 - DNA, 100 bp, Homo sapiens
cacccagtacgagcgggagaaggcgctgcgcaagcacgctgaggagactgaacattcttcacgatctgaaaggaaaagaagagattctttcgggatgttt

SEQ ID NO: 730589 - DNA, 87 bp, Homo sapiens
acacgcttctctcagtggctggatgaccatccatctgaaaaggacaggctcctcctcatcagctatgacttcacacctatggattct

SEQ ID NO: 730590 - DNA, 101 bp, Homo sapiens
gccggcggcctcctgcagcgggcggccccctgcagcctcctgcccaggctccgtctgatcccccaggaaagcagctggaaaacaagagcatgtgaaggaag

SEQ ID NO: 730591 - DNA, 75 bp, Homo sapiens
gggacgctgcctgccacacattgttcccaatgtgctattggcaaagagagaggtggaaaaccatgaattccttgt

SEQ ID NO: 730592 - DNA, 95 bp, Homo sapiens
ctgcctgctccgccccagacctgtcggcgaaaggggggcagtacccaaaggaaacgctacgaaagaatacatggagagcttgcagctgaagcccg

SEQ ID NO: 730593 - DNA, 50 bp, Homo sapiens
gggtctgctctgtgtgccatggacgggtattatcgggggacccacggggt

SEQ ID NO: 730594 - DNA, 100 bp, Homo sapiens
tcacaggaggcagaagctccaggagcagttgctggtgctgctgaagtccctagggaaccaccaattcttcccaggtgttggagcgggccggagagaagta

SEQ ID NO: 730595 - DNA, 75 bp, Homo sapiens
ccaagaagatggttcagttgactattgcaaagatcggccatggatatggaacattccttatgtcaaagcaccgga

SEQ ID NO: 730596 - DNA, 100 bp, Homo sapiens
ggaaaaggagagctcggctgttccagccaggaccccaccaacaactgaacgctttggtcaggctgctacaatggaaggaattggggcaattggtggaact

SEQ ID NO: 730597 - DNA, 50 bp, Homo sapiens
ctagagctggagcatttgccggacaagttggatggcttgaggactggtac

SEQ ID NO: 730598 - DNA, 100 bp, Homo sapiens
cggccccgagatgaagccggcggtggacgagatgttccccgagggcgccgggccctacgtggacctggacgagctccataatgggagaagtaaagaacaa

SEQ ID NO: 730599 - DNA, 83 bp, Homo sapiens
ccgggattttatccaccggcactgccaagatcaggatgacccgaggtatggaatgtgtcctctcaagggagcaagtggatgcc

SEQ ID NO: 730600 - DNA, 98 bp, Homo sapiens
ttggggagtgcctcaacttgttacagcagagtgtgcaccaggcgggccagcccagccagaagccaggagcctcggctggtagccggtctgggtctcca

SEQ ID NO: 730601 - DNA, 100 bp, Homo sapiens
ggacccgccctccaagtacgtggtgactgtgggaaaacacctgactgctcgtgtcctgtgcctcatagtgctgcccctggctctctatacagccaccttt

SEQ ID NO: 730602 - DNA, 83 bp, Homo sapiens
ctcggggtgggtggctcatttcctggccgctcctgggcttcgcggaaaagcaggtgatattctcagtggagaccaggacaagg

SEQ ID NO: 730603 - DNA, 100 bp, Homo sapiens
ccctggaggaggaatcgtggcggaccaaagctggatgttttagaagaatgtatgtctcttcccaagctatcttcttattctggatgggtggtagagcacg

SEQ ID NO: 730604 - DNA, 120 bp, Homo sapiens
agaggcaacatcctggacagcagagctgcacgaagtccgaggcgccgcgagcccagacaatgcagatcttcgtgaagactctgactggtaagaccatcaccctcgaggttgagcccagtg

SEQ ID NO: 730605 - DNA, 100 bp, Homo sapiens
tacagccacgtcttccagatttctactgatttgcaagatctggtcaaatttcagccatcagcaaatcttcttcagcagtatcgttctgctgtgtgcaaac

SEQ ID NO: 730606 - DNA, 100 bp, Homo sapiens
aagatgagtgagcttgaccagttacggcaggaggccgagcaacttaagaaccagattcgacagcaagatggaacttattgatgataacaccgtagtcagg

SEQ ID NO: 730607 - DNA, 100 bp, Homo sapiens
cggcgcgctgctggacgaagagctctcctccttcttcctcaactatctcgctgacacgcagggtttccaggcctgaggtgcccgccctggccccaggaga

SEQ ID NO: 730608 - DNA, 76 bp, Homo sapiens
caaaagaagtacaaggaatttcagaacaggtccctgtgttcatgatgaggactctggcctatcgctcattggaaaa

SEQ ID NO: 730609 - DNA, 100 bp, Homo sapiens
gaaggcttcccgcccccagccatcgagtggcagagagatgggcagcctgtctcttctcccagtctattatcctcccagtccacaacgctgaaccgtggct

SEQ ID NO: 730610 - DNA, 88 bp, Homo sapiens
aaagaaacaagccgtggaataggtgtatcaagtaatggtgcaaagcctgaagttactgatgtcaaggagaaactgaaacaggccaaga

SEQ ID NO: 730611 - DNA, 100 bp, Homo sapiens
aaagagaagaaacgttttctcagaaaaagttggtgattcaaggaaagcacattgcaatgcattatagcaatcccagacctaagtttgaagattggctttg

SEQ ID NO: 730612 - DNA, 75 bp, Homo sapiens
atgctcttgtgctcagtgacatcattcaggtgggctctaccatcatgcccatgtccccagatggactgttcccag

SEQ ID NO: 730613 - DNA, 95 bp, Homo sapiens
cttagcgcccgggcgtcggggcggtaaaaggccggcagaagggaggcacttgaggccaaagatgaagaggaagcctttctggattggagtgatga

SEQ ID NO: 730614 - DNA, 75 bp, Homo sapiens
tggcacacatggttaaggaacaggaggaaaccattcagagggtgagcatggacaatcttgtgccaaaatgcttgt

SEQ ID NO: 730615 - DNA, 100 bp, Homo sapiens
cagattcgcagtggtcgcttcttctccttggctgcatgcagggcatggtgccctacctgcctgagctgatcccgcacctgatccagtgcctgtcggataa

SEQ ID NO: 730616 - DNA, 73 bp, Homo sapiens
gaggagagccggcggcgggaggccaaggccaaatagttgcatcacatgtatctaatccgagagtctcatgctt

SEQ ID NO: 730617 - DNA, 98 bp, Homo sapiens
cgaactcgggttctgacaagatggccgggctgccccgcaggatcatcaagacgcaggaggagggagacgcactgatgacatcgggccgctcctgcagc

SEQ ID NO: 730618 - DNA, 98 bp, Homo sapiens
ggtggccagcgcgcagaggcgggcgcggaggcggctagaaggtgaccgcggatcccagcttcctgcagccaggcgagaaccactgtctctgatcaacg

SEQ ID NO: 730619 - DNA, 78 bp, Homo sapiens
cctcctcctgctgctctcaggggccctggccctgaccgatacttgggcgggttcaaaactggtcaaatcaatggtgat

SEQ ID NO: 730620 - DNA, 100 bp, Homo sapiens
gtcagcacctcaacaacatttttttttggcttaacaaaacatcaaacggcatacaaatggaggttcgtaaagtgaatgaaagcatcaagtataatcaccc

SEQ ID NO: 730621 - DNA, 82 bp, Homo sapiens
acgcaaccacagaaacaagtggtacaggaaaaggggaagatagtgatgtactcagtataaatgcagatgcttatgacagcga

SEQ ID NO: 730622 - DNA, 100 bp, Homo sapiens
tatgcagattatatttctagggacaaacctatcacatttactcagtgtgtaatgctgtgtcatggagctaaaatcggatttttccaaggagatatcaggc

SEQ ID NO: 730623 - DNA, 75 bp, Homo sapiens
actcggggtgcgccagtggaagcgggaggcagttgcagctttcagttttgctgctgcagcccattgagagtgacg

SEQ ID NO: 730624 - DNA, 51 bp, Homo sapiens
agtgggacaaggattgatagaaagggtggactgcgtagggatattgaaatt

SEQ ID NO: 730625 - DNA, 100 bp, Homo sapiens
gacaccgcttactccagaaacatgggtggaagctgggccagggattgggaaaatctcttcagggtacaggtttgcagattccgccagcagcacagcaagc

SEQ ID NO: 730626 - DNA, 50 bp, Homo sapiens
gccggccggcttcccggaactggaaggttatggctcatagttcaccccag

SEQ ID NO: 730627 - DNA, 88 bp, Homo sapiens
gtcaccactggacctccaaggaagccacgtgcagacatctacaaccttcgatctcctgacgagtaaagtgttgagagaggagaaccag

SEQ ID NO: 730628 - DNA, 100 bp, Homo sapiens
gtaatctgcaaaagaagagaagcagaattatacctagaagtctactaatggacagttagtcacccacctacatgttgagagacatagtcttgctctgtta

SEQ ID NO: 730629 - DNA, 100 bp, Homo sapiens
tcaggctttatctgagtacaacagcctgctataactgcggtagaggtggccacattgccaaggactgcaaggagcccaagagagagcgagagcaatgctg

SEQ ID NO: 730630 - DNA, 82 bp, Homo sapiens
ctccagtatgcaactgactacaaggagcaggtctttcccgcggtgacttcccttgggctgaatgaacaggagctgttatttc

SEQ ID NO: 730631 - DNA, 82 bp, Homo sapiens
gatcagggcatacatctttcttcgacaaaggactgctgtgccctaatccgccggtgcctggcccccaaaccttcttcccgac

SEQ ID NO: 730632 - DNA, 75 bp, Homo sapiens
ccgcagaatgatggccccaatcccgtggtccagatcatttatagtgacaaatccctggtacctgacagtgtaaag

SEQ ID NO: 730633 - DNA, 99 bp, Homo sapiens
cacatttcaacatgagggacccactgacagattgtccggtttggcatggattttaaagaaatagaattaattggctcaggtggatttggccaagttttc

SEQ ID NO: 730634 - DNA, 101 bp, Homo sapiens
aagaaatgttgatcccagagaaaagtttgcattttgcccacctcaaagatattttgattgctacctcggacctgaacagctgcctgactgcctgaaaggtt

SEQ ID NO: 730635 - DNA, 136 bp, Homo sapiens
ggcgctctggccggtcagcaagcagctctaccgccgcctcaactgccgcctcgcctactcactctggagcccctgcaggacgctggcatcggattcatcctggtgatagaccggcgacgggacaaatggacctccg

SEQ ID NO: 730636 - DNA, 82 bp, Homo sapiens
ggccgctgtgtggttgcaacggagataaattcccggaaccgcgattcggcgtgtcagtggtggtcctgctccatgatgtccg

SEQ ID NO: 730637 - DNA, 115 bp, Homo sapiens
agagacacaagtcctgttcgctcttttcagcccctcggaaacctgtccagtttaagtcgtcttggtctgagatataacagactgtcagcaatacccagatcattagcaaaatgca

SEQ ID NO: 730638 - DNA, 78 bp, Homo sapiens
cagaggagttcagcaagagaagggatttaaggaaattgacaatggcccttcagctatgctaggtctataatgggaagt

SEQ ID NO: 730639 - DNA, 75 bp, Homo sapiens
cgcctctcggtgatgggctgcgatgtactcaaagtgtccccagttgtcctcatccagggtgctattcgagtccag

SEQ ID NO: 730640 - DNA, 127 bp, Homo sapiens
gcaggtacggaagctgagctgcagagttagccggcatctgacagaaaaatattatgtttgagaccttcaacaccccggccatgtacgtggccatccaggccgtgctgtccctctacgcctctgggcg

SEQ ID NO: 730641 - DNA, 98 bp, Homo sapiens
cctcgccagcagccgtccggagccagccaacgagcggtggaagcagggaaaggcctggagatgaggaagctggttctctcggggttcttggccagcga

SEQ ID NO: 730642 - DNA, 78 bp, Homo sapiens
gcagcatggtgggcgtctacaacggcaagaccttcaaccaggtggagatcaagaaaagcacttggttctgcttcgaga

SEQ ID NO: 730643 - DNA, 83 bp, Homo sapiens
gttaccttcttgctggcgttggtgggagccgtgctctacctctatccggtcaaaatgcagatcttcgtgaaaacccttaccgg

SEQ ID NO: 730644 - DNA, 75 bp, Homo sapiens
cgcgcgtgcgcggacatggcctcaaacgggagccgatatgtggatttactcccttgatggaagcagctgctgctg

SEQ ID NO: 730645 - DNA, 100 bp, Homo sapiens
cgagcccaacgaggatggcacagcctgcgtggagcatccacaatgggtaccccagcctcggtggtcagtgagccacccccttggcaggccccgattgagg

SEQ ID NO: 730646 - DNA, 101 bp, Homo sapiens
cagctggagaacttatatttccgtgagaaaaaatttgctgttgaagttcatgatccacgaagctcgatcaagtcatccgccaaagaagcctgtccagtttg

SEQ ID NO: 730647 - DNA, 90 bp, Homo sapiens
tgcgcatccccgcggacgccacagcgctgtcaaaatgcagatcttcgtgaaaacccttaccggcaagaccatcacccttgaggtggagcc

SEQ ID NO: 730648 - DNA, 75 bp, Homo sapiens
caagttggttgctgatttccaaagatcgccaaactgaggcagcaactacaacgcagtaaacagagtagtcgtcac

SEQ ID NO: 730649 - DNA, 100 bp, Homo sapiens
gtacttgcaagaaacctcaggacttgagtaacagcaacatgagtgaacctctgtatgtgcctgtgaaattccatgatcttccaagtgaaaaacctgagag

SEQ ID NO: 730650 - DNA, 83 bp, Homo sapiens
ggcgcactgggaggtggaacgggccgaactgcaggtattagaaaactactcggatgctccaatgacaccaaaacagattctgc

SEQ ID NO: 730651 - DNA, 75 bp, Homo sapiens
tggtggactcgctctccgagggcgacgcataccccaacggcctgcagcatctgatgatcacagctcagagattca

SEQ ID NO: 730652 - DNA, 100 bp, Homo sapiens
ccgcgagctcctggaggcggcgggatggaggcggcggccgttggaatcgaagcctcttaaaatggcagatgacttggacttcgagacaggagatgcaggg

SEQ ID NO: 730653 - DNA, 100 bp, Homo sapiens
gaaatgtcatccgatggcacaatcaggcatctccttggaaacaatgccatctttgaatgtgagagataaacctagtttcagcatgtctgcagcagagacc

SEQ ID NO: 730654 - DNA, 50 bp, Homo sapiens
gccactcagagtcgcccgagaatacaagattctgctgtactcattggatg

SEQ ID NO: 730655 - DNA, 100 bp, Homo sapiens
cgtcaaccttgaaggcatcgtgtggcaggaaacagaagatggaagaggatcacctagcccgggtagaagaggcaatcacccgtatgcttgtgtgtgccct

SEQ ID NO: 730656 - DNA, 100 bp, Homo sapiens
actgttttactgggggacaactggtttgcaaagtgctcagcaaagcaggctgtaggtttagttgagcaccggaaagaacacaccagttggcgctccgagg

SEQ ID NO: 730657 - DNA, 100 bp, Homo sapiens
agccagatcccagggcggacaacgagaagtcgtcagtactatactggcaattgctggagaagattttgcaattgttgcttctgatactcgattgagtgaa

SEQ ID NO: 730658 - DNA, 75 bp, Homo sapiens
aaggcgggagacgagaagcctgaaaagtcgcagcgagctggagccgccggagtggcgtagatgtttactatgcag

SEQ ID NO: 730659 - DNA, 83 bp, Homo sapiens
ctcaccgagacggcgatccgggcgctcgagacttaccagagccacaagatataacacgtgggaaccggaggagaacatcctgg

SEQ ID NO: 730660 - DNA, 55 bp, Homo sapiens
atctgcagtcccaaagaaacgctgagcagcccctgcccttgatggatcagctggc

SEQ ID NO: 730661 - DNA, 50 bp, Homo sapiens
ctgaagagggaagacacgcggaaacagggcatcctgtacctgaaccagga

SEQ ID NO: 730662 - DNA, 119 bp, Homo sapiens
tgtcgcggcgaggaggtgggcgcgctggagcaggagcggggccggaactggagccgaggcgcaggtggcgctgggtactccaaagattcaggtttactcacgtcatccagcagagaatg

SEQ ID NO: 730663 - DNA, 87 bp, Homo sapiens
cacccgcgccaggtccaagctgccgtccggcaagaacatcctggtcttcggagcctgtggtgctgaccgacacaaatcttgtgtatc

SEQ ID NO: 730664 - DNA, 83 bp, Homo sapiens
cgcgggagcctttggggcaccacagagatgcgggtgacttaagagattaaaattaatttggttgctgttggttctgaacaaat

SEQ ID NO: 730665 - DNA, 100 bp, Homo sapiens
tcggcgcacaggaaatgcaactcgaagtggacaaaatgggaaccaaacttggagagctttctagacctggaaggcctcctaagaggactcaaagtgtcac

SEQ ID NO: 730666 - DNA, 100 bp, Homo sapiens
tgcctgaagcaacaactacagcatttgaatcaaatggttatgagccttagagtttctgaactccaagtactgttgggctacgccgggagaaacaagcacg

SEQ ID NO: 730667 - DNA, 50 bp, Homo sapiens
atggggtcccactatgttgcccaggctggtcttgaactcctggactcaag

SEQ ID NO: 730668 - DNA, 90 bp, Homo sapiens
ccagctattgctgcagcatttgccaaggagacatccctcttagctgcatcctacacagatagctctgatgatgaggtttctccccgagag

SEQ ID NO: 730669 - DNA, 73 bp, Homo sapiens
agaacatctactctttcaactacaccagccagcccgaccaggatttttagactctgaggagcagttggagcta

SEQ ID NO: 730670 - DNA, 83 bp, Homo sapiens
tcaaagcctctgtggacatgtttgatcagcttttgcaagcagatgaggcctgcctgtgttaatacacctagtgaggagtggag

SEQ ID NO: 730671 - DNA, 75 bp, Homo sapiens
gccaagttcggggccaggacgtcgggaggacctgcattactctactgactggcagagacaggagaggtagatgtc

SEQ ID NO: 730672 - DNA, 82 bp, Homo sapiens
gcggacggtacaaccggagctgtcaggtattgggagagttgctgctacatctttaggaaatttgactaaccatggttctgaa

SEQ ID NO: 730673 - DNA, 82 bp, Homo sapiens
accattcttccctgggctggtgaagtacatgaactcagggccggttgtggccatgtccaatggatgggaccccaatgaaatg

SEQ ID NO: 730674 - DNA, 75 bp, Homo sapiens
aacagattacaaatgagaagctggctatggttaaagcgatagaccacatggtacaaggccatgctgcttttccag

SEQ ID NO: 730675 - DNA, 75 bp, Homo sapiens
aactccagctgtgaaagcaacataaatgattagtgacaagagctggggttaggatccggttggactctgacatcg

SEQ ID NO: 730676 - DNA, 100 bp, Homo sapiens
caagctttagccgccgaggccgcgtgtcccaaaggccagatggatcctgagcttgaaaaaaaactgaaagagaataaaatatctttagagtcggaatatg

SEQ ID NO: 730677 - DNA, 98 bp, Homo sapiens
cttcaatcccatcaccaaagggcacattcagatgtttgactgcctgcgctgctgacttaaggccccaacaccaaacacagaagcaacagccttacaca

SEQ ID NO: 730678 - DNA, 74 bp, Homo sapiens
tgaattcacagtctaccatgaattggaaggagtcgatagcagcagttggtgacgagatggcactcagaaacggc

SEQ ID NO: 730679 - DNA, 75 bp, Homo sapiens
tttctctcacccatccatgggaagccctgctactgctggattagcgccaggatgaagtgtcctcttgctagcacc

SEQ ID NO: 730680 - DNA, 83 bp, Homo sapiens
ttttcaagaactgccgtcttctttgcctgcactaatgaaggaccctctattgtcccaggcctgtgttggctgcctggaggcct

SEQ ID NO: 730681 - DNA, 100 bp, Homo sapiens
ctggttagccaaaaagtcctgattttctgctcaatagaggctgtcattttagaaaatgaagaacttcccaaactgtttcttgatttcctaaatgtgcgac

SEQ ID NO: 730682 - DNA, 100 bp, Homo sapiens
ggcgtctgcacaatccctaatggcccccagatctgccaaggagaccttcaggataaacccaaatgtagcagcaaatttcttgattgcacattgatccaac

SEQ ID NO: 730683 - DNA, 90 bp, Homo sapiens
agatggcggctgtgagtctgcggctcggcgacttggtgtgaggatgacggccgaggcgcaccggcgcgtggtggtggagtacctgcgggc

SEQ ID NO: 730684 - DNA, 90 bp, Homo sapiens
tgctgctggggctgggctcgccagtcttggggacagtgtcagcgatattaccttccaaatgatgatggagaattttatcagttctgttac

SEQ ID NO: 730685 - DNA, 100 bp, Homo sapiens
ggatcggtgggtttatctcaaggcctgagtagccggtaacaaacgagggttcccgggattggaccgacgcagccatgtctgcagatgtggatcccgaatc

SEQ ID NO: 730686 - DNA, 82 bp, Homo sapiens
atgccgctcctaagcctgcacagccgcggcggcagcagcagtgagaggaacgccacagaagtatgatcccactttcaaagga

SEQ ID NO: 730687 - DNA, 83 bp, Homo sapiens
tgcggaggacagctctgatgaggaggagcaggccgggctctcgccatgggtcactgtcgcctctgccacgggaagttttcctc

SEQ ID NO: 730688 - DNA, 98 bp, Homo sapiens
aggcaccaaggacctccaagacaggttctaagctggtctatgtccatcaccttcttggagaaggagcctttgcccaggtgtacgaagctacccaggga

SEQ ID NO: 730689 - DNA, 90 bp, Homo sapiens
tgtagggagcatagctgctacactgaagatgaagcaaggcccaatgacccaggcgctccctgtgctgtcaggaatctacaggacttggct

SEQ ID NO: 730690 - DNA, 90 bp, Homo sapiens
ctgtgtctggctgccttatctttacacgctgcagtttgctgatggccgccaaagttggagttcgtatgttgatgacatctgattagcaga

SEQ ID NO: 730691 - DNA, 100 bp, Homo sapiens
ggacagggggctggcagccccactccccagctcctgccccctatagaaggcctactctgtgaagagaacattgatgactgtgcccggggtccccattgcc

SEQ ID NO: 730692 - DNA, 82 bp, Homo sapiens
caggatacagggtcaaaggagagcacaaccatcgcagttggaagcccatggggcaggatgagacctgcacgcagtggctcac

SEQ ID NO: 730693 - DNA, 74 bp, Homo sapiens
ggagcttctcagaagacagagggttttcttttgagccttaaagaaggagaggatcagaaagagataaagattga

SEQ ID NO: 730694 - DNA, 100 bp, Homo sapiens
cctggagcagttgtatgtgtagaaagtgaaatcagaggagatgtaactatcgatgtgttcagagcaacattgttttgttgacacaagcatttagaagaaa

SEQ ID NO: 730695 - DNA, 96 bp, Homo sapiens
ggagatggctacgtgatccatctggctcctccaaggcaagtgtccagagaatggctgggatgaaagtacacttgaactctttttacatgaacttgc

SEQ ID NO: 730696 - DNA, 74 bp, Homo sapiens
gatctagaggcataattaggataataaatcctataacaatgcagtgtataaagtccttaggaaaaaatctggat

SEQ ID NO: 730697 - DNA, 98 bp, Homo sapiens
cggtgcaagaggcgcaaacaagccaatcccaggaggaaaaacgctgtcgcctggttgggcccggaaatgggacgtcgcgctttctcagggagcgtaga

SEQ ID NO: 730698 - DNA, 75 bp, Homo sapiens
atctgaactttctggggaacagaccagttgtgaatcctcactatggatgggctcattgaggacattaagcatcgg

SEQ ID NO: 730699 - DNA, 90 bp, Homo sapiens
gaagaagcaaagacctttgatcagctgacaccagaagagagcaaggaaaggcttggtgaacagcagagaatttcaaaggaccttgctaat

SEQ ID NO: 730700 - DNA, 98 bp, Homo sapiens
ttttgtccacatgagaggattacctttccaagccaatgcccaagacattataaacgcactttgaggtgaatgaccggaaggacccccaagagacggcc

SEQ ID NO: 730701 - DNA, 75 bp, Homo sapiens
ggggcaattaccatggcagctgctcaagcagttcaggctacagctcaggtggttattaacttggtgatgcttttg

SEQ ID NO: 730702 - DNA, 75 bp, Homo sapiens
caaagttcttccagtcctcctaggcatcttattgatcctccagtcgagggaacaagtgcagaacaggataatcgg

SEQ ID NO: 730703 - DNA, 87 bp, Homo sapiens
caccgcagtcgtgcaggatctgaaggagatgcggtggtgctagaatttgttatattttccatgagacttttgggcgaaccttagaat

SEQ ID NO: 730704 - DNA, 75 bp, Homo sapiens
gccggccggccgactagggtgaggtcgccactccttcctttcagctcctgtcttcgttcctggctagaacaagac

SEQ ID NO: 730705 - DNA, 97 bp, Homo sapiens
aaaataattaaatattcttaccgaggtacgaagatgccctggtgctcctgctcacagaggtgttgaatcgaatccagttcagatacaaccaagccca

SEQ ID NO: 730706 - DNA, 100 bp, Homo sapiens
cggggtggtcaccaaagtccagcacagaccctcgggcctcatcatggccaggaaggaccgtataatagacgctggccccaaaggaaactactctcgattt

SEQ ID NO: 730707 - DNA, 103 bp, Homo sapiens
tgcatttattgatctgactgaagattttacagcagttggtgcttcccgtgctgctgttgatgctggctttgttcccaatgacatgcaagttggacagacggga

SEQ ID NO: 730708 - DNA, 100 bp, Homo sapiens
tatgatggatgacttggagttaataggattagattacctttggaggctcctgggcaacgtgctggtctgtgtgctggcccatcactttggcaaagaattc

SEQ ID NO: 730709 - DNA, 100 bp, Homo sapiens
acctcgctgcttcccagagctttcacgaaggcaccgacgtcatcatgctgaccaccaatcagatccgtaaggcacgtctgagaatggtggatgtggtgga

SEQ ID NO: 730710 - DNA, 82 bp, Homo sapiens
gcgccggagctgaaacacgacgtgaagggaccacttaatagtgagtcttccaaccagagcttgtgcagcgtcggatccttga

SEQ ID NO: 730711 - DNA, 100 bp, Homo sapiens
gggcgagcgaggaggatggcggagtcggggctcctgacgatgccttcaattaagttgcagagttctgatggagagatatttgaagttgatgtggaaattg

SEQ ID NO: 730712 - DNA, 74 bp, Homo sapiens
cccaatccccggcagctctctcagattcagaaacacgagttgatctgaaatttatgtacctggatcctccaaga

SEQ ID NO: 730713 - DNA, 99 bp, Homo sapiens
gtggctgcaccttcaaacggacgaaagtgttggatctgttggtttcaaggttaactacaaagctagttatgtatcaaatcccatttgcaagggttgttt

SEQ ID NO: 730714 - DNA, 75 bp, Homo sapiens
caggaccaccaaaaataactttggctggtttggagaacatttataaagagttgtctacagacatagaggattttg

SEQ ID NO: 730715 - DNA, 100 bp, Homo sapiens
cgcggatctcaccgccgctcaggcagggtaccaccatcttaaggacagaaaagctacaggactctaggaggccaccgtcctgatttgggaagtccaactt

SEQ ID NO: 730716 - DNA, 101 bp, Homo sapiens
tatcctatcctggtcagaggaagtgtgagggtctgaagattggggacacgttcttcgtgccatgaaggaggacagtgaaaaagttccgagcttgttaactg

SEQ ID NO: 730717 - DNA, 101 bp, Homo sapiens
gcctgccgcctcgctgtccctgcggcttctggggtactatactggcaattgctggagaagattttgcaattgttgcttctgatactcgattgagtgaaggg

SEQ ID NO: 730718 - DNA, 75 bp, Homo sapiens
gcggcgcggcagcggagggacggcagtctcgcgcggatcttagaaatgaagttgaaaaattacgcaatgaagtga

SEQ ID NO: 730719 - DNA, 100 bp, Homo sapiens
ctggtctgcgcgggtcacgcgtccccagtcctcgggcggggtatggcatttcaaatatagatacaaccattgaaggaacgtcagatgacctgactgttgt

SEQ ID NO: 730720 - DNA, 83 bp, Homo sapiens
gtcaacggcttcatcagcaccttgggttcctctgtgacgagggtgcaggtatctctggggactacatcgatcgcgtggacgag

SEQ ID NO: 730721 - DNA, 90 bp, Homo sapiens
cttctgcaacacggctacggtctacaagatctgcgcctggatgcagctcttggcagctcaccaagatggaggaacagagcccatggccca

SEQ ID NO: 730722 - DNA, 88 bp, Homo sapiens
ttggtccttctctaaacgaccatctgaagcatctgcttacaagccaatgaggtcttactgtgtagcccaggctgctctggaactcctg

SEQ ID NO: 730723 - DNA, 100 bp, Homo sapiens
tcagctccacattgagagcaaaatctacaagatgatgcagggaggaggtggccactaacacggacaccagccgaaatgccggaaatgcggtcctgtttga

SEQ ID NO: 730724 - DNA, 132 bp, Homo sapiens
cagtattcccatgtcttggaacgaattcatcctttggaaactgaacaggcaggattagaatcgcaaaatgtcgtgactttgagaatatgctgtggtttgaatctttgctgttttatggttgtgaagaacgag

SEQ ID NO: 730725 - DNA, 75 bp, Homo sapiens
ctgcagtaccccactctacgatcagtctgcgctcctcagaccaccggcaggtgaacagcctgatgcagaccgagg

SEQ ID NO: 730726 - DNA, 82 bp, Homo sapiens
atcgggagcgcaaggtcgccctcaaggccatgatcaaaacagcactacaaacaccactggtttcccgaaaagccgtccaagg

SEQ ID NO: 730727 - DNA, 104 bp, Homo sapiens
ctcgggggccgctctgggatcccggccaccagcaattgtccgatctgcttggctttgaggaagagtggcagtactgcctcactgcataagggatgggatcagag

SEQ ID NO: 730728 - DNA, 90 bp, Homo sapiens
tctgattacgacatggctgagatcaccaatatccgacctagctttgcggagcgtgctttggacaccatgaattttgatgttataaagggc

SEQ ID NO: 730729 - DNA, 96 bp, Homo sapiens
gaacaaaaaacaccacagtactatcgtctatcattggatgaagtggctccggagatccttagattgtaagcaaaagaaatcaaggtcaagatctgg

SEQ ID NO: 730730 - DNA, 74 bp, Homo sapiens
aatttcaagcgaggctctgggcagagtggaccacggggagccccacgagaaatgggcaagttcatgaaacctgg

SEQ ID NO: 730731 - DNA, 50 bp, Homo sapiens
gcttgctggagagaagagcagtgagaagaaaaatggctacaaacttccta

SEQ ID NO: 730732 - DNA, 82 bp, Homo sapiens
tcatcggggatgtggacgaaggggccgacctcctaggatcccatgacagattctgttgtcacgtctccttacagagtttgag

SEQ ID NO: 730733 - DNA, 100 bp, Homo sapiens
ggcacagccccgcaggatcccaagccctgcagactaccgcagccagcgtaccttctccaggcaaattccgttcccctgcagcaccatctcctttggctct

SEQ ID NO: 730734 - DNA, 87 bp, Homo sapiens
tcgcagtggtcgcttcttctccttggtggtgaaattgcctctacctttgatcacccagaactggtgaagcttggaagttgcaaactt

SEQ ID NO: 730735 - DNA, 100 bp, Homo sapiens
gtgctcctggacaactactacacgcagccgctgtgcacgccgtcgcggagccagctgctcactggccgctaccagccagcagacttcataggaaagcaag

SEQ ID NO: 730736 - DNA, 97 bp, Homo sapiens
gctctgatgaagattaagcacgtgagcaactttgtccggaagtgcatggagagtagaaaactgatttctgctacagacattcagtactctggcagtc

SEQ ID NO: 730737 - DNA, 75 bp, Homo sapiens
tgggatagcgttgcaaatccttaaaagagtcttaacgctagtgagacctgcaacgacttccacccgatgttcttc

SEQ ID NO: 730738 - DNA, 100 bp, Homo sapiens
gaaaaattacagcacatctcagtgaatttgcaagtgatgttctcagtgcagctgagtcttggtgagcagacatgggaatccgaaggcagcagtataaaga

SEQ ID NO: 730739 - DNA, 71 bp, Homo sapiens
ccagagctgcaaggagggcctgagccccagaggcccagctccagttgatcatggccttgccaggttggtga

SEQ ID NO: 730740 - DNA, 88 bp, Homo sapiens
ccagatcaacacaattgatagtcaaaaccgctttccgggatgccgctgcaaagcacagtgcaacaccaagcagtgcccgtgctacctg

SEQ ID NO: 730741 - DNA, 90 bp, Homo sapiens
atttcaacaaactggtgctggtcaattacccattcattgatgtggggttggctgagaatggggagaaggaacccccgacaacactactct

SEQ ID NO: 730742 - DNA, 100 bp, Homo sapiens
gaagaagatccttcaaaattaaaagaggagcagcatggcatttcagtcactggtttgcagagtccaggaatccatcaacagcatcaagtccagactaagc

SEQ ID NO: 730743 - DNA, 100 bp, Homo sapiens
atttgggttgcatccactttttggctgttctgaagagtgttactgtgaacattcatgcacaaatttttatgtggaggtttttggattcaaagcataaaaa

SEQ ID NO: 730744 - DNA, 74 bp, Homo sapiens
aaaacaatagctcaaggaaacctttccaacacagatgtccaagctgccaagtgtggtggacacaggcctattca

SEQ ID NO: 730745 - DNA, 75 bp, Homo sapiens
gcgccattccaggaaagaaaggggtgccaagtcctgccctgccaacttcttggcagctgccgacgacaaactcag

SEQ ID NO: 730746 - DNA, 82 bp, Homo sapiens
ctacatttggagcctggacacgcagtacagcaagacctgcctagagctggaacgttacctccagagcgagccctgctatgtt

SEQ ID NO: 730747 - DNA, 75 bp, Homo sapiens
aaccgccagatcaacctggagctctacgcctcctacgtttacctgtccatggtctgcctcagccacctccctgac

SEQ ID NO: 730748 - DNA, 88 bp, Homo sapiens
tagagccttggatccaggagaacggcggctggctcagagtcaagatctccactgaagttggcatcacaaatgttgatctttccaccgt

SEQ ID NO: 730749 - DNA, 97 bp, Homo sapiens
ctcctgagtagctgtgattacagaccatttaatttggcagagcggaaagctagcgcccattcaatagtagaatgtgatcctgtacgaaaagaagtta

SEQ ID NO: 730750 - DNA, 95 bp, Homo sapiens
tcaaggtggccatagaatggccgggcgcctaccccaaactcatggaaattgatcagaactcccccactggaaaggattctgaaagaaatgaagtc

SEQ ID NO: 730751 - DNA, 80 bp, Homo sapiens
caacaagatgtgggcacaaaaactaccattcgcctgatgaactctcagtcctattttgtaacggattatgatccaaccat

SEQ ID NO: 730752 - DNA, 83 bp, Homo sapiens
cagtaccgcagcatcctggcggagacgtgtactaatggtcacttgatgtgcgctggctgttttatccacctactagcagatgc

SEQ ID NO: 730753 - DNA, 82 bp, Homo sapiens
gtcgtttttacccggccaaagtcactgctgttaacaaggatgctccggaccaaaatttaacagtgccatccgaggaaagatt

SEQ ID NO: 730754 - DNA, 100 bp, Homo sapiens
aaaacaaaacaaagacgctggggaaacttcaccaagagcctcggcagctccagagcgacgggaaacgaaagtattaggagagttcctgcatccctgtgaa

SEQ ID NO: 730755 - DNA, 100 bp, Homo sapiens
cgagatcctcggggccccagaggccgcggacaccgacctggaggctggatcctcattgaccgctgtgggaagcactttggtacgatactcaactaccttc

SEQ ID NO: 730756 - DNA, 100 bp, Homo sapiens
cctttctgctcctcgcggcccagtctcacagaaagttctccgctcccagacatgggtccctcggcttcctgcctcggaagcgcagcagcaggcatcgtgg

SEQ ID NO: 730757 - DNA, 95 bp, Homo sapiens
cgcagaggtgcggccggggaggcgcgcggaggctggagctggaggcgcggcgccggtgagctgagttaagtgggcagaccaacatccacctcagc

SEQ ID NO: 730758 - DNA, 97 bp, Homo sapiens
ggagtgccaaaaaatattttaacctcaatgttcatggaacgcctttttacccaagtcagccggtgtatcagtcagcacctatcatagtgcctacgca

SEQ ID NO: 730759 - DNA, 98 bp, Homo sapiens
ccacgctgcatcatgagtgcagccggctgcaggagcagctagcgcagctaagaagtatagaaaggtcgctggcaaagagatctactcggataccttag

SEQ ID NO: 730760 - DNA, 49 bp, Homo sapiens
attgttggagccaacattgagacttatgtggcccggccagataagattt

SEQ ID NO: 730761 - DNA, 96 bp, Homo sapiens
cggggagcgtccggagctagctggatcctctaggcagattcggatgcaagcgcaaagcaacaccattcaaggaggaatgataggcaacttcatgaa

SEQ ID NO: 730762 - DNA, 100 bp, Homo sapiens
actgtgcagagatcagagtactaagagacagcctacgaggacaagcagaaactcaagcggaccgagatcatcagccgctcctggttcccctctgcccccg

SEQ ID NO: 730763 - DNA, 100 bp, Homo sapiens
cttgcctagtgggccttccttcccagaattaaacaaccaccatgtcgagcaaaaaggcaaagaccaagaccaccaagaagcgccctcagcgtgcaacatc

SEQ ID NO: 730764 - DNA, 95 bp, Homo sapiens
tcctgcctcccagagaggggagccggcgaggatcaaaatcttcgaaggaggatgcatcaatctcaaataattctacaagtaaaaggaaatctgag

SEQ ID NO: 730765 - DNA, 98 bp, Homo sapiens
cggagacctacctgcggcgtcggcagctgctgctccgaggtttactcctggcttgggggcattaggaagcactggaggctcttcgggaactaatggat

SEQ ID NO: 730766 - DNA, 76 bp, Homo sapiens
cctgtggataaggcgaaggaaggcctgcacagctgaccacagttgggaaacgttgctgtctttggattcaggatct

SEQ ID NO: 730767 - DNA, 50 bp, Homo sapiens
cggacaagcacagtcttcggaagaattcttccatctctatgacaacaagc

SEQ ID NO: 730768 - DNA, 132 bp, Homo sapiens
cccctttattaccctttgtgtcatcctccacagctccagggaaggcactcaaaagtggggggcaggaaagtattgctgacagacagaacgccttggaggctgagtggaggacggtgcaggcctctcgcagag

SEQ ID NO: 730769 - DNA, 83 bp, Homo sapiens
ggttctgccagatgttcctggggttactgtaaatgggaaggacaggcagagctaaacaaggactatggactacgtggcttctt

SEQ ID NO: 730770 - DNA, 75 bp, Homo sapiens
cttagactaccccaggaacccgcgccgcgagggctccttccctcagagagaactcgatgccaccgcaacggtatt

SEQ ID NO: 730771 - DNA, 98 bp, Homo sapiens
ggcgccgggaccctcaggctcagatcagtggccgaggccccagaggaaggctgtgggatgacaccaaatgccaacccatcccaaatttacaacatcga

SEQ ID NO: 730772 - DNA, 74 bp, Homo sapiens
gaatgtgacacggacaaggatagttttggctgatgtattgtctaaagccccaggaaaaatggtggaaaattcac

SEQ ID NO: 730773 - DNA, 104 bp, Homo sapiens
cgtgagcgagcagaggcttaaggtcttcagcggggcgctccaggaggcactcacagagcccgcggttcccttcaaaaagcggctgcaagatctggaggtgcggg

SEQ ID NO: 730774 - DNA, 82 bp, Homo sapiens
atggtcatgagctttgtgaacctgggagtgcctgtgaagaaaacggggtattgccctgaggcttatattctgcctcagttgt

SEQ ID NO: 730775 - DNA, 75 bp, Homo sapiens
acagctccgggaccggccgaaaggcgaggaaccgatgatatcatcaagttgaatcgaaaggaagggaagaagcag

SEQ ID NO: 730776 - DNA, 82 bp, Homo sapiens
gaagaagactcccccacatctggcctcgaagcggaggatccctgtgtcccagccgggcatggccgacccccaccagcttttc

SEQ ID NO: 730777 - DNA, 73 bp, Homo sapiens
actgaaaattctggataatggtgaatgggttagtcatattgatgtgatcacagcagagatggccaaagacttt

SEQ ID NO: 730778 - DNA, 75 bp, Homo sapiens
cgcagtccaagtcccggaagatcgcgatcctgggctaccggtctgtgggccctccctatcctgaagacattagct

SEQ ID NO: 730779 - DNA, 100 bp, Homo sapiens
gcgcggcgcatcacggtgcgcgtggccggtccaccttctccaatccctgcctgctgggagaggacgatctcttgagaaaggaaagacttctgtgctcccg

SEQ ID NO: 730780 - DNA, 100 bp, Homo sapiens
cttggtaaagagcaccttgggacccaaaggcatgcaagcttcaaaaccgaaagtacctccaaaatctgaaaaagaaaatgatcctctgcgaacaccggag

SEQ ID NO: 730781 - DNA, 76 bp, Homo sapiens
ctcgacttctcaatcccaagtggccaaaggttgaaaggattgtagacaagaggaagaacaagaaaggaaaatggga

SEQ ID NO: 730782 - DNA, 83 bp, Homo sapiens
gcgggaaatcgggctgaagcgactgagtccgcgatggagaaagaaatgaccgcccggatgtgccactgagagccccgcgggtc

SEQ ID NO: 730783 - DNA, 98 bp, Homo sapiens
atcttttcctccgcctggtgggtccctccctgctgcgggacagcagctggtttgaagatgccgcatttggattggatgaattccaaattctgcttgct

SEQ ID NO: 730784 - DNA, 88 bp, Homo sapiens
aagagcctgcccgaagcctttggatcagcatgcaggactatgctgttagtaaagccggctcagttcggggaagctgcaggagttcggc

SEQ ID NO: 730785 - DNA, 100 bp, Homo sapiens
cctaagggcccttcgcgggagagcgtcgtgcacgcgggccagaggcggctactttgacgcacacgctcttgccatggacttcatgagcataggattccga

SEQ ID NO: 730786 - DNA, 74 bp, Homo sapiens
cgagcttcagcaagctctctccaacgttgacatgaagacaatggagactgcagagaaactggctagatttgttg

SEQ ID NO: 730787 - DNA, 100 bp, Homo sapiens
tgggagagaggtacctctccttttccctctccctttccctaaggcacagaccccacaggctcctcggacactgggtccatcacctcctgccccatcatcc

SEQ ID NO: 730788 - DNA, 99 bp, Homo sapiens
caaagtcaggccttgtgaaaccagcaacttggagtcatcacggatgtatgacgttttggaaccgcagcagggcagaggctgtggcagctcaggaagcgg

SEQ ID NO: 730789 - DNA, 100 bp, Homo sapiens
agaattatgggagcgcatttccccagggttcactactgtgatagacaaagtggcaaagagtgtgtgacctgtctgacattagcccctgtgcagatgactt

SEQ ID NO: 730790 - DNA, 48 bp, Homo sapiens
ggaactggcccggaaacaggaggacgggccagcagcctcccccgatgg

SEQ ID NO: 730791 - DNA, 100 bp, Homo sapiens
agggcaacttcgctgtggtgaagctggggcggcaccggatcaccaagacggaggcaactatggagaaagtgggatggaagccttcaaagatatgtcagcg

SEQ ID NO: 730792 - DNA, 100 bp, Homo sapiens
cttttatgagagatttatagaagataaaattcgacagttcgttgatttatgctctatgagtaatgtggtgaagcagtattttccaatttgaagattcatt

SEQ ID NO: 730793 - DNA, 50 bp, Homo sapiens
aaaagagtgggagacattcccagggagaacctgcacttgttgccaagtct

SEQ ID NO: 730794 - DNA, 100 bp, Homo sapiens
gggggaatcttttttcactgtctttggggttttcttcccagcggctacaggtcagttgaacataccgatggtcagagtgtcctaacagactcactatggc

SEQ ID NO: 730795 - DNA, 75 bp, Homo sapiens
gtggggcggtcccggccccgcaggactttccttatcccagttgattgtgcagaatacactgcctgtcgcttgtct

SEQ ID NO: 730796 - DNA, 100 bp, Homo sapiens
gcttgctctcaactgtgttggtgggaaaagctccacagagctgctgcggcagttagctctgttatgttctgaacccacacatgttttcggaaggaccaga

SEQ ID NO: 730797 - DNA, 74 bp, Homo sapiens
caagcatgatgattcttcagataacttctgtgaagctgatgttggactaaatgctcttccttcagaggattatc

SEQ ID NO: 730798 - DNA, 90 bp, Homo sapiens
acagcattcctgaaatacatccaggaaagacatggagattctcttaaaaagcttttgaaatgacattaacagaaggaagtaagttggaga

SEQ ID NO: 730799 - DNA, 113 bp, Homo sapiens
ggaagatgccggccgtgtccaagggggacgggatgcggggcctggcggtcttcatctcggatatccgcaactttgccaccttccagagaagaggtacgagatgacaagacaac

SEQ ID NO: 730800 - DNA, 100 bp, Homo sapiens
tgtgggcgctgctggcgctctggctgtgctgcgcgacccccgcgcatggtgacagagttagtccttgataattgcctgtgtgtcaatggggaaattgaag

SEQ ID NO: 730801 - DNA, 50 bp, Homo sapiens
ctcctgagaagctgggattacagcttgaagctcaactagagaaaaaggac

SEQ ID NO: 730802 - DNA, 100 bp, Homo sapiens
gagcactcggtcatgtacccggtggactcggtgaaggtctcagctgagtctgctctgatcacccaacaagacctagctccccagcagagagcggccccac

SEQ ID NO: 730803 - DNA, 96 bp, Homo sapiens
gaacggctcccacagccgggcgttgggggaaaggctgcctgctgtttcccggggagatcatgaaacgaggtcgccttcccagcagcagtgaggatt

SEQ ID NO: 730804 - DNA, 100 bp, Homo sapiens
ggagtggctggagtgccagaagaggatcgacgcctatgtcgacgagcagcacctgtctctgaaagccaaaagggccaaggtccaggacccgtgagaggag

SEQ ID NO: 730805 - DNA, 82 bp, Homo sapiens
ctccgccgcgctgcgcacgcccagcattactctactgactggcagagacaggagaggtagatgtccacgcccacagaccctg

SEQ ID NO: 730806 - DNA, 101 bp, Homo sapiens
cagaaatgaacctgcccacggtgtccgcgctcaggatggattaattgcctctgaaggagccataagtcccgatttcttcaatgattaccaccttcaaaatg

SEQ ID NO: 730807 - DNA, 75 bp, Homo sapiens
acgagtgggaggtgctgagccgctcaggcaattttcgttctgctctcaatgatgtgacagctgccagaaagctaa

SEQ ID NO: 730808 - DNA, 90 bp, Homo sapiens
ctgaaactctacgaggataaccagacaagggcgaacaagggcagcaaggctacggagaggctgaagaagaagctgtcggagcaggagtca

SEQ ID NO: 730809 - DNA, 82 bp, Homo sapiens
tcccattaccccactctttccgccctaatggaggtctccagtttaggtgaaatgacaatggatgctctgttggctcgattga

SEQ ID NO: 730810 - DNA, 100 bp, Homo sapiens
agttcttacaacatggcagacattgacaaatgttggctgaacaggcgtcagatcgatgggtctttgaatagaactcccaccgggttctatgaccgagtgt

SEQ ID NO: 730811 - DNA, 100 bp, Homo sapiens
aagaattatcctcatcttaggggataaatttacggagaaatggcagcacacgttgggtggaattacttttaagggtgaaagaggtccccctgggaaccca

SEQ ID NO: 730812 - DNA, 83 bp, Homo sapiens
aggccgtgcagatcctggacgagctggcggagaagctcaagcgcagcggatcgtgtgaagaagggatttgacttccagtggcc

SEQ ID NO: 730813 - DNA, 100 bp, Homo sapiens
agtttcacatccttgtctgtgaagctaaactcaatgctgctgtgtgggaagaagatttgtaaagaaaactcttagccaactcgtctaaatgttattagga

SEQ ID NO: 730814 - DNA, 76 bp, Homo sapiens
cttatggtaatgtcggccattgagaaattgttgaggcaggatggacaaccggaaattttctacacattttggaatt

SEQ ID NO: 730815 - DNA, 101 bp, Homo sapiens
ttctttagttccatcaaacacagaggaatgaccaccatggcagatggcaacagaggatgtcaacaattttttggaggaaataatgaagatgtttcattttc

SEQ ID NO: 730816 - DNA, 75 bp, Homo sapiens
caagaggccccagagggaaaagaagcccaaagttttaaagaaaaagcggatggtggttcctgctgccctcaaggt

SEQ ID NO: 730817 - DNA, 75 bp, Homo sapiens
ctcggtggttgccatggcaccagggacggtgactgtggttaagcagcaacgaaggttttgggaacagtaaaatgg

SEQ ID NO: 730818 - DNA, 97 bp, Homo sapiens
cataagactgcagccatcttggaagcataagctctctcaagcacctcttttgccttctttactaaaatgtctcaagagctggctttatgtgctgggg

SEQ ID NO: 730819 - DNA, 88 bp, Homo sapiens
gggcagctactcagcaccgacgctgacagggatggtgcctggtgccaagctctcctgatgaaatgtgttctgccccactgggctccag

SEQ ID NO: 730820 - DNA, 76 bp, Homo sapiens
gtcggaccagcgtcgggccagtcattcaggaaaaatttctgccgtttctggacatgttccaaaaagagagtgtgcg

SEQ ID NO: 730821 - DNA, 83 bp, Homo sapiens
ggaggacaaagagcccctcatcgagctcttcgtcaaggtagagcaagaagatggtgtttctgcccctcaaatggtcccttgca

SEQ ID NO: 730822 - DNA, 51 bp, Homo sapiens
aatccatcttcatcctaccgctccgcccgctggagtgcaatgacgcgatct

SEQ ID NO: 730823 - DNA, 101 bp, Homo sapiens
tacaatgatcgtgctgtattggagagagaagtccaaaaaaggatcctgtttgctgtgtaatcctgagaatggactgcaagagaggaaaaactgggcgtctg

SEQ ID NO: 730824 - DNA, 104 bp, Homo sapiens
gaggaaatagtggcaggtgacagtctgcatgtgcagttttcaggctaccaagcagtttctcgaagagattaacaagtggacagttcagtacaatgtttccccgc

SEQ ID NO: 730825 - DNA, 99 bp, Homo sapiens
catgggtgtgaaccatgagaagtatgacaacagcctcaagatcatcagctctgcctccttttcaactctccacattttgtattgccttcccagacctgc

SEQ ID NO: 730826 - DNA, 46 bp, Homo sapiens
gagtgtccagacctgctcgatggtctctgtggcacattttgtttcc

SEQ ID NO: 730827 - DNA, 74 bp, Homo sapiens
gtgaagagacatgagatgattgccaaacccccagggaaaaagaccttgatgaagttctgcagacccactcagtg

SEQ ID NO: 730828 - DNA, 97 bp, Homo sapiens
gttcagctccttccagcttgggaacaggctacttcggaagaggaagaacgtctgagaaataaaattcgagctgatcatgagaaggccttggaagaag

SEQ ID NO: 730829 - DNA, 98 bp, Homo sapiens
tgcagaatttttgactggagactatagtagttgcctgacctggtaccccagctggggacactctaccagttaatggaaagcagagtcaaaacttttca

SEQ ID NO: 730830 - DNA, 140 bp, Homo sapiens
atacaaaagacaaggaagatgagctgtcctttcaggaaggagccattatttatgtcatcaagaagaatgacgatggaaactttgagggaaattttgagtcactggaccttgcggaatttgctaagaagcagccatggtgg

SEQ ID NO: 730831 - DNA, 135 bp, Homo sapiens
agaaattaccatttcatacttcacagaatggaggtttcagcagccaaagccccaagtgccgcagacttgtctgagattctgaattcttgccgccaggatggggaaacagaacagcaagctgcgcccggaggtcat

SEQ ID NO: 730832 - DNA, 114 bp, Homo sapiens
gcttgacatctctgctgtagtggacaaagatttccttgataagtagtaagcattaataatgtctttcatctttgagtggatctacaatggcttcagcagtgtgctccagttcct

SEQ ID NO: 730833 - DNA, 83 bp, Homo sapiens
gtcacccggcaactcagaaacatcaggtccaaggtggaagttaaacgagctgagcctcgggacagcaagagccaagcgccggg

SEQ ID NO: 730834 - DNA, 80 bp, Homo sapiens
ctctcgggagaagcagcgcctgttcccggggcagatccaggttcaggttttgggatttgagattgacgcggtgaactctg

SEQ ID NO: 730835 - DNA, 76 bp, Homo sapiens
gtggcaactctgtgggatggacatgcagccgtttggcatggcatggagaatggtggaaagcaaagtcccttttaac

SEQ ID NO: 730836 - DNA, 90 bp, Homo sapiens
gaagctcttccccaacatgttgccatccacatttgagactcagtcactcaaggtgaccttgaggaaccctgggagctcaggaaggaagga

SEQ ID NO: 730837 - DNA, 83 bp, Homo sapiens
aacagaaacacctaggaagggagaactgttgatattcactgatggactccaaagaatcattaactcctggtagagaagaaaac

SEQ ID NO: 730838 - DNA, 100 bp, Homo sapiens
caagcagaaagttgaacagaacgcggctcccagccacaccaagttcaggccatgttggggccccgatgccgtgcaatttgataaaacttgttgatgtgga

SEQ ID NO: 730839 - DNA, 101 bp, Homo sapiens
ccccgccccaccgccatcccgtcccggggagcccctaggcccgggtcccggatccccgcgcacccggccaggtgacatgctgatcattgaagaagaccaaa

SEQ ID NO: 730840 - DNA, 83 bp, Homo sapiens
agtaaaccaagaagaaatccacagatttagttctgcctatgaaaggaggttccctacatgtcctttgattccgatgttcgtgg

SEQ ID NO: 730841 - DNA, 102 bp, Homo sapiens
ctgacagatgccagcgtagctgaatccagtaccaaaaacgtcaacaacagttttacggggcaagattcttgccaagagaattaatgtgcgtattgagcacat

SEQ ID NO: 730842 - DNA, 100 bp, Homo sapiens
aaccgtgacaactgccatgtcacaagaaaatacctgccagtcaacagcttcagcaagtgtcaacattggtcagttagagcatcaacttatattgtcagtg

SEQ ID NO: 730843 - DNA, 100 bp, Homo sapiens
agattggtgtctactacatcgatcacatcaacaagaaatggtcaatgcatggtttgctgagagagttcacaccatccctgtgtgcaaggaaggtatcaga

SEQ ID NO: 730844 - DNA, 74 bp, Homo sapiens
gatgaaggcttctcttctagttctcaggacgtcaacggattcaaaagtctttatctcttgcaaggttcagtagt

SEQ ID NO: 730845 - DNA, 90 bp, Homo sapiens
gtgaagcctgcctacagttttcacaaatcttctaaaacagtgagaattacctttggattcaactgcagaaataaagatcattatgggata

SEQ ID NO: 730846 - DNA, 100 bp, Homo sapiens
caggttgagggatgggactggaaatcaaatgttacagggaccactgacatttatggatgtggccatagagttctctttggaggagtggcagtgcctggac

SEQ ID NO: 730847 - DNA, 90 bp, Homo sapiens
ctggtcaccccagccggcagttgcccaagatctgatacaagggagagcttatggatggagaccaaacatccagatctggagtgccggcac

SEQ ID NO: 730848 - DNA, 100 bp, Homo sapiens
cgcggtcgagatcgccatgcctacccttacctggctgagcagtgctggaatggcggctttatctacctgatcatgctgcgtcgctttaagcacaaagccc

SEQ ID NO: 730849 - DNA, 100 bp, Homo sapiens
tctcatcaaggtgaacgggcggcccctggagatgattgagccgcgcacgctacagtacaagggaagtgttcgccagttactacatgaaaagataagagat

SEQ ID NO: 730850 - DNA, 98 bp, Homo sapiens
aaaatggagccgaggtagtggagtacgctgtgacacaggagagcaaggcattgggatcccgtggcagttgcagcactgaagtggagaaggagacccag

SEQ ID NO: 730851 - DNA, 100 bp, Homo sapiens
gaactaggatgtcccgacatgaaggaaacctcgacctgtctcccagttggttgcacagcaggttactcagcagtttgtgcctcctacacagtcaaagaaa

SEQ ID NO: 730852 - DNA, 100 bp, Homo sapiens
gtcagccttcccagtagctggaactacagcctctgtgtccagatgtttgactggtttgactaccatggccacatgtgtatctcctttgagcttctgggcc

SEQ ID NO: 730853 - DNA, 100 bp, Homo sapiens
cgtggcgctcgagttcctggaccgtgagagcatcaagctcgtgtccatcggtgtcatggagaaactccagctgggcccagagattctgcagcgggaaaat

SEQ ID NO: 730854 - DNA, 88 bp, Homo sapiens
gaccgagagagctcactcagccagctctagaggacaaaatcccagtccttggcacaaactcaggaaatggaagccggagtctgttttt

SEQ ID NO: 730855 - DNA, 50 bp, Homo sapiens
ggaaagctattaactgtcctgaaggaaaaggggaagatagtgatgtactc

SEQ ID NO: 730856 - DNA, 98 bp, Homo sapiens
ggggcgacgctggctgcagggacccggtgacagcgtgagagattcctgacattcagacaactgacttgtaactgacttataactgacttgtaatacac

SEQ ID NO: 730857 - DNA, 101 bp, Homo sapiens
atttgtgactcacaatctgtcttttgatgaaatcaacaaagcctttgaactgatgcattctggaaagaggtttcatcagtttcacccttttctgtgtgcgg

SEQ ID NO: 730858 - DNA, 85 bp, Homo sapiens
ggaggactacctggcaagtggttatcagataatctcaggagacactgaagaagggaggctctgtggacagaggagcagtaacaat

SEQ ID NO: 730859 - DNA, 88 bp, Homo sapiens
cccgcatcttcgccgtctggaaagacctgcagccagttacctactgcgagccggccttctggtgctccatctcctactacgagctgaa

SEQ ID NO: 730860 - DNA, 96 bp, Homo sapiens
ctgtgcagccgcgaggaggcgcgggaggtgttcgagaacgaccccgagacgacggccgaagccctgcagcccacgctacagccggagatgcagctc

SEQ ID NO: 730861 - DNA, 90 bp, Homo sapiens
cttcctcaatctgctgtggtcagcacccctgcagatcatcctggcgatctacttcctctggcaggtggttcagaatctggggagccttat

SEQ ID NO: 730862 - DNA, 100 bp, Homo sapiens
cggccggtgccagcacctttcggcttctgagacggcggcagcagcggcattcagccacattgtaaatcaccttgtgagggcaaaatgcaaagaggtgacc

SEQ ID NO: 730863 - DNA, 75 bp, Homo sapiens
cccaagtggctctcccacccagtgccctgtgagcaacctgcactcctccgtgagatgaactgcctctcctcctcc

SEQ ID NO: 730864 - DNA, 82 bp, Homo sapiens
caaaaccaacgcctggctcggagcagcagcctctgagatgtgaagttcatttccaatccgccctccatggtggcagcgggga

SEQ ID NO: 730865 - DNA, 50 bp, Homo sapiens
tggatagtcgtaaacttcctatgataactcagattgatggacaacttttc

SEQ ID NO: 730866 - DNA, 51 bp, Homo sapiens
ctggactttgggcgtcccattgccatgcatgatgccttcttctgtagagtg

SEQ ID NO: 730867 - DNA, 100 bp, Homo sapiens
gagaatagtggttcttaactctcttcttggacacttaatgattgttggcaagaaatgtgctgctgatctgggcctgaataagggttatcgaatggtggtg

SEQ ID NO: 730868 - DNA, 141 bp, Homo sapiens
atcagtgacgagagggagagcaagaccatcatgctgcgcggccttcccatcaccatcacagagagcgatgtgtttggagaagagggattgaccctgaatcttgaagacgttcagcctcatgacttaggaaaagttggagag

SEQ ID NO: 730869 - DNA, 74 bp, Homo sapiens
agcatttgtgaagcacatcatgtccagctaaacctcgtgcccaggttgactctggaagctcccttgtctgccaa

SEQ ID NO: 730870 - DNA, 98 bp, Homo sapiens
ctggtgtctaaaccgcctcggctccagaacctgggtatcaacccagcaaacattggcttcagtaccctgactatggagtctgacaaattcatctgcat

SEQ ID NO: 730871 - DNA, 97 bp, Homo sapiens
tgtgcagtggcacctgcgcgaagctggccaaagcctgcccagacggctcacctgtgcgggatggaacaaaagatgctgctgttctcaacaatgtagc

SEQ ID NO: 730872 - DNA, 101 bp, Homo sapiens
tgccgccagctgcaccctcctcgccaccgatctcctgttggagccgtacaacaaataccgcttcctgtccaatggacacgtcaccatccccgggcagcagg

SEQ ID NO: 730873 - DNA, 100 bp, Homo sapiens
ggccgagcaacagtgtagtggcgtattccacatagcaaacaggcatgaggcatgccatttacgacaagctggatgatgatggtttgatagctccaggggt

SEQ ID NO: 730874 - DNA, 98 bp, Homo sapiens
agcaatctcattaaattactgatgtcagaagattattttacacaagcaatggaagtgaaagcattagttacatccatatgggagaatagtctccagat

SEQ ID NO: 730875 - DNA, 83 bp, Homo sapiens
gtcttgcaacagtggccgcacgcatagggctttgttcgcgggggtcacagctctcatggctgcagctagcgtgaccccccctg

SEQ ID NO: 730876 - DNA, 83 bp, Homo sapiens
ccgcgaccatggcctcctccgaggtggcgcggcacctggttctaaatgagaagaaacttcaagaggttgatagtttatggaaa

SEQ ID NO: 730877 - DNA, 96 bp, Homo sapiens
tcaagatcctcaagaagaagaagttgcgaaggatccccaacggggaggccaacgtgaagaacttccccgggcgctgcctggacaggcctgcctgcg

SEQ ID NO: 730878 - DNA, 75 bp, Homo sapiens
cgctgcggagcgaacctcacctttccagggcgcaagccttttatgtcacctcggtaccctggaggtccaaggccc

SEQ ID NO: 730879 - DNA, 100 bp, Homo sapiens
tgtgccctgctggcttcattcccaccaggacacctaccccatgatgctgcggtgaagcgggccgaccacctggaggagctgctggagcagcacaggaggc

SEQ ID NO: 730880 - DNA, 74 bp, Homo sapiens
cggcagcgggtcttgggtcctccgagagcagcagcggcatcaagcatgatggaaccatgtgtgatacctgccgc

SEQ ID NO: 730881 - DNA, 88 bp, Homo sapiens
agaggttcagggagctgttgctgtatggccgtaagaagtggagacctttggcgacttggcctttggcgacatcttcctccacctgctc

SEQ ID NO: 730882 - DNA, 75 bp, Homo sapiens
accagttaacagcagattgtcagatatattccgggtggtcccattcatatcagccttgttgtcctcctggtgcga

SEQ ID NO: 730883 - DNA, 100 bp, Homo sapiens
aagttcccggctcccaggtttattctcccatagcatgtgacgagcttccccaactggtaacccttccacaccccaatcttcatggaccagagatcttgga

SEQ ID NO: 730884 - DNA, 89 bp, Homo sapiens
gatcgccgcgctcagcgacaaacaatgacctgaccaacggtgcagatgggatgctggccacaagctccaatgggtctcagtacagcggc

SEQ ID NO: 730885 - DNA, 90 bp, Homo sapiens
atcggtgaagagaggttttgaattcacgcttatggtagtggacgaagaatgctgttcaagctttgattgataagcaccaaagaataccag

SEQ ID NO: 730886 - DNA, 96 bp, Homo sapiens
agtggctcagtgcaaatgtgcaaaaaggtttcaggtggagcagatcggagagaataaataccggggtgatcagcccatgacctaaacctccagaca

SEQ ID NO: 730887 - DNA, 83 bp, Homo sapiens
cgaggccgcgaactgcatcatggagaaatcttcccaaggctgcagacaccgacggatttgctttgggagccagagtagctgcc

SEQ ID NO: 730888 - DNA, 100 bp, Homo sapiens
gtagggataggagtgacttaaattctcccagtcggtggaggtataaataactacatgtaaaattaatgcagttcccgggtgatcagcccatgacctaaac

SEQ ID NO: 730889 - DNA, 76 bp, Homo sapiens
ccaggcttccttgtacccacaggtgaaaaatctctgtcttgaaaagggggccgtacggcacagaagatgactttgc

SEQ ID NO: 730890 - DNA, 90 bp, Homo sapiens
gcggcggtggcgagaggtgcggcgaaggaggcagaggcacttatgcttgtcagaaacaaatgccaggagagctgtagacagaggatatgt

SEQ ID NO: 730891 - DNA, 90 bp, Homo sapiens
cactctcaccatccggctacttatgcatggaaaggagagaaggatattcctggactgactgatactacagtgcctcgccgcctgggcccc

SEQ ID NO: 730892 - DNA, 100 bp, Homo sapiens
ccgcccaggacccagccgtgttgagtgaagctcttggggccagcgtgcgtcctgacgcacaggagagagctgaaggggtatactctagttgaatatgaaa

SEQ ID NO: 730893 - DNA, 75 bp, Homo sapiens
gttgagggcacgagtcgggtcctgagaccagctgggagtgtccactcgccttccaccagcatggcaacgtcttca

SEQ ID NO: 730894 - DNA, 75 bp, Homo sapiens
acgtagttaaagcccactagcctaaagccgggcggactgcgtgatgatgacagcctcttcatctatgactgcagt

SEQ ID NO: 730895 - DNA, 90 bp, Homo sapiens
ggagattgtcctgatactaaggacaagtatgcacagaaaactgaatctgtagataacgagggagaatgaattgtcatgaaaaattggggt

SEQ ID NO: 730896 - DNA, 50 bp, Homo sapiens
tcccgcgcctcgctcagctccaacatgggaagacatgtaaggaatttgca

SEQ ID NO: 730897 - DNA, 75 bp, Homo sapiens
aaatggactccctggctgctggagagttgaatgccagccaccagccatgggtcaggtgccaggaccagagcccaa

SEQ ID NO: 730898 - DNA, 100 bp, Homo sapiens
gtggactcggcgatggagctgttatttttagatacttttaaacacccgagcgctgaggtggtattaaagataatcaaacattatcaagaagaaggacaag

SEQ ID NO: 730899 - DNA, 100 bp, Homo sapiens
cctgggcccaactgtgaccgatttaaactgcacataccatatgctggagagacattaaagtgcagcagtgaggatgccagagttcatgggtttctagaag

SEQ ID NO: 730900 - DNA, 88 bp, Homo sapiens
cactgctttccactcggctcctgtcgtccgttctctcaggctcccgttcagcatgtaggagaatactaaccctgcacagattgtgatg

SEQ ID NO: 730901 - DNA, 82 bp, Homo sapiens
tgcttgtggaagccacccgggagtttgaggaggttgtggctgccaggctcattcaagagagccccaccctgagcaagctggc

SEQ ID NO: 730902 - DNA, 90 bp, Homo sapiens
tgcagatgtacgcccaagccgccctggatggagactcccaggtttatctggcaagactgaggcaaataagactacagaatttcaatgagc

SEQ ID NO: 730903 - DNA, 100 bp, Homo sapiens
cttcatgccgctgttctttgtttccccggtgtctgttgcagcttgcgtttggggctttcgacatgacaggtcactagagaaaccccgagactcttcagtt

SEQ ID NO: 730904 - DNA, 80 bp, Homo sapiens
atggagtccaacatatgatgtatcttctatcttaacatcaattcagtggagaatctgtacacagccctgcagagcattga

SEQ ID NO: 730905 - DNA, 82 bp, Homo sapiens
ggacggtgtggggcggtcccggccccgcaggcaagagcggtgagcggggcgcctatgcctccttcgggagagacgcaggcgt

SEQ ID NO: 730906 - DNA, 100 bp, Homo sapiens
cgcgctgctcctgctgctcatcccggtggccgccgcgcaggagcctcccggagctgacagaaacagtctccgccagtcaagaaaccctcaaaagtatttt

SEQ ID NO: 730907 - DNA, 49 bp, Homo sapiens
aggcgctgcgcaagcacgctgaggagtctgcagatctccaggggagccc

SEQ ID NO: 730908 - DNA, 100 bp, Homo sapiens
caacggggaagtgtccttcatcaacatcaagacactcaatgagtgggattccagggcaacatcagatgctgacctgaaagaacatatggttggaatcata

SEQ ID NO: 730909 - DNA, 99 bp, Homo sapiens
cgtaggtggccacctatggcttttggggtgctggagaatctggtaaaagcaccattgtgaagcagatgaggatcctgcatgttaatgggtttaatggag

SEQ ID NO: 730910 - DNA, 100 bp, Homo sapiens
ggcaaagaggtgttgcagaacctcggccccaaggacaaggatggcccaacagcaggccttgaggttccgaggtccggctcccccaccaaatgcagtgatg

SEQ ID NO: 730911 - DNA, 82 bp, Homo sapiens
ggtgctcccccacccccattctcttcaggggggcttcctctaggtaacaagatgctcaactatagtgctcccagtgcagggg

SEQ ID NO: 730912 - DNA, 75 bp, Homo sapiens
cgcgcccggcgcccctgagccggccgagcggcgacggaccgcgaggatgagcaattcttaggttttggctcagat

SEQ ID NO: 730913 - DNA, 100 bp, Homo sapiens
tgcatctctgcaaactcaacttgctgggccggtgcaactattcgcagtccgagcgcacccagtcagcttgaagagtttcaaatggaccctaccactgaga

SEQ ID NO: 730914 - DNA, 98 bp, Homo sapiens
ccagcaccatggccagcaccatttccggtgctggagaatctggtaaaagcaccattgtgaagcagatgaggatcctgcatgttaatgggtttaatgga

SEQ ID NO: 730915 - DNA, 90 bp, Homo sapiens
cccacgggctctacctgaccctgcaggcccggattgcatttctacaaggcgaaagaaaaggtcaagagaacctgaagaaggacttagtaa

SEQ ID NO: 730916 - DNA, 97 bp, Homo sapiens
ttaccctaacagcaggaaggttgtaagggacaatggagaacattgcagcccaggctctggagcacattcactccaatgaggtgatcatgaccattgg

SEQ ID NO: 730917 - DNA, 51 bp, Homo sapiens
tggtttttttctttctagaaagtgagcttgacaaaagtaagctgaagccag

SEQ ID NO: 730918 - DNA, 82 bp, Homo sapiens
tttacagaggaatagtctacaaaggaagacttgtaacctggagaagagacttcctagcatgggctgttgtgctggagagaac

SEQ ID NO: 730919 - DNA, 100 bp, Homo sapiens
gacgctctcagctctcggcgcacggcccaggagatacaactcgtcaacgaatcaaattcagtgatgacagagtatgcaagagtcaccttctcaactgttg

SEQ ID NO: 730920 - DNA, 75 bp, Homo sapiens
ggcatgtagtctacacaggacctgagaatctgagaaactgcaggtgtggacactgccagcggctgcagccgactt

SEQ ID NO: 730921 - DNA, 50 bp, Homo sapiens
cttgaaccggcactgtgagaagatggagacctttggcgacttggcctttg

SEQ ID NO: 730922 - DNA, 100 bp, Homo sapiens
ggcggcggtggcatctgcggccatggcggcgactactgccaaccccgtcgtcctcttgagttctggcgccttgactactgggaagatgacttgcggcgcc

SEQ ID NO: 730923 - DNA, 75 bp, Homo sapiens
agggcgcggcctctccgccgggtgtaccacctgtcgcggcgcgagacctctggagaggcagatgcgaaccagaac

SEQ ID NO: 730924 - DNA, 90 bp, Homo sapiens
acgccgaggcgcttctgcatctgtgggccgagtcccaggacatcaaagctctgcagaaagaactcgagcaatttgccaagctcctgaagc

SEQ ID NO: 730925 - DNA, 97 bp, Homo sapiens
atcttcaccgtgtacctgggctcgagcctgcacatgaagattctgatgatggtgggcctgcctgctgctggcaagaccacatgggccatcaaacatg

SEQ ID NO: 730926 - DNA, 75 bp, Homo sapiens
ttttgatgttggactgcataatttcttaatcagccttcctctccggttctgggtgaacatcctgaagaaccccca

SEQ ID NO: 730927 - DNA, 100 bp, Homo sapiens
acgtctgcggaagtgcagctgcctcagttcttagcgcaggtgacatgtacagccatgatgggaatactgatgagccagaatgggtaaagacagagcgaga

SEQ ID NO: 730928 - DNA, 51 bp, Homo sapiens
agcagacgcatgcgatgtatggaggaggagaacggggctgaggaggaagaa

SEQ ID NO: 730929 - DNA, 74 bp, Homo sapiens
ggccatggtgttgctgctgtactccttctccgatataattggtgattacaactttcctctataaattaactctt

SEQ ID NO: 730930 - DNA, 74 bp, Homo sapiens
ccgcccgcaactccgccgcccaccatggcttccgaggagctgtacgagatcttggagaaattcattcaaggctt

SEQ ID NO: 730931 - DNA, 74 bp, Homo sapiens
ccggacctcgtcaggccgctgcagatgaccattccaggttttcgtcatcgaggtgaagacaaaaggaggatcca

SEQ ID NO: 730932 - DNA, 75 bp, Homo sapiens
cttcaatgagtaaacatattcctgattatatctgtccaagatgcgagtctggttttatcgaggagcttccggaag

SEQ ID NO: 730933 - DNA, 100 bp, Homo sapiens
ctgcacagccgcggcggcagcagcagtgagaggaaggaagcagccaccctcgccatggcctccccgcccgcctgcccctcggaggaggacgagagcctga

SEQ ID NO: 730934 - DNA, 100 bp, Homo sapiens
ctcgacctctggttctacttcacactgcagaactgggttctggactttgggcgtcccattgccatgaattggcagagggggtcgatttgggaggaaaggt

SEQ ID NO: 730935 - DNA, 115 bp, Homo sapiens
ggctttgggggccttgcttccattttccattattatgtggactaccggagcgacagcgcagtccaagaccttgcagaccccagagtcagaaggagtgagaaccctgacccctaat

SEQ ID NO: 730936 - DNA, 96 bp, Homo sapiens
aaatcaagggcatagtagaggagagtgttactggagttcacaggtatgtgatagtggaatgtgaagatcaagatactcagcagagagatccaaaga

SEQ ID NO: 730937 - DNA, 80 bp, Homo sapiens
gcgccgcggacgcgtcatcgagtgtgacgtggtgaaagttggagttcgcggtgcagatgacctgtcagagctgtgtggac

SEQ ID NO: 730938 - DNA, 96 bp, Homo sapiens
aagcctctaggagcccgagatggagggatccttctgagaagtgaagccatttggactttctggtgctactatatcggggccacagatgatgcagcc

SEQ ID NO: 730939 - DNA, 98 bp, Homo sapiens
cccagcactcccagctgcgcagggcctgccaggtggcgctcggtttgtcctggttgtggtcaagactggatgatgtaactggctctctaggaagcctc

SEQ ID NO: 730940 - DNA, 75 bp, Homo sapiens
ctctgccctcctggcgggcccggcggctctcactatccagggccaattcctgtccccccagcagcatggcatcgt

SEQ ID NO: 730941 - DNA, 100 bp, Homo sapiens
ccaaccgcaaccattgacgccatgtcgggttattcgagtgaccgagaccgcggccgggaccgaggattgtaaaccatggctgtgtggatacaagctcagc

SEQ ID NO: 730942 - DNA, 74 bp, Homo sapiens
ggtaaagacagcttctgggccaaagcagagttctcccaggagaaagccatgttcagttcgagcgccaagatcgt

SEQ ID NO: 730943 - DNA, 75 bp, Homo sapiens
aactagatccaggttggaatcctcagggaagacaaaggcgctttggctaagctggtggaagctatcaggaccaat

SEQ ID NO: 730944 - DNA, 74 bp, Homo sapiens
agaaactaagttgctgaacgggggagtcctcagcactgcctcttctatttccctgtggaaacctcaaaagagaa

SEQ ID NO: 730945 - DNA, 98 bp, Homo sapiens
ccgaatccatcatcaaacggcggatccgaaaggcggaagtgtttcgagacacagtccacatgctgttggagtggctttctgaagcagagcaaacgctt

SEQ ID NO: 730946 - DNA, 75 bp, Homo sapiens
ctactctcaatgctttgaactggttaaacaaggtaggagcattgcttttcgtggtgaaagaggcaatgatgaatc

SEQ ID NO: 730947 - DNA, 101 bp, Homo sapiens
caggatgaaagtgagcagtccagaaagcggcttatcgaacagagccgggagttcaagaagaacactccagagtgcctggctctctggctatgaaaatcctg

SEQ ID NO: 730948 - DNA, 99 bp, Homo sapiens
tccatacacctctcatttctccagatgccaacattgacctcacaaccgagcaaattgaagagacgttaaaatacttcccagaaaaagtcctacctggag

SEQ ID NO: 730949 - DNA, 99 bp, Homo sapiens
tttgcacagaaccagctagttatttggaagtacccaaccatggccaaggtggctgaactcaaaggtggtttctcagtattcaagtctgctttctccaat

SEQ ID NO: 730950 - DNA, 75 bp, Homo sapiens
cgctctggctgtgctgcgcgacccccgcgcatggtgaaaggtgtagcagtcactcggcctacacccacagcatcg

SEQ ID NO: 730951 - DNA, 75 bp, Homo sapiens
gagtgagagcaaccgtgaaccggaaccggatctccacggccaggagggtccaggattatatctgtccaagatgcg

SEQ ID NO: 730952 - DNA, 100 bp, Homo sapiens
cagataatgaagactttccatcaagttgtagtgatgatgaagatgttgcaccattgtcagccaaatttgctgatatttatccattgagtaattatgatga

SEQ ID NO: 730953 - DNA, 100 bp, Homo sapiens
ttggaccgagccgatcgccgcggggcagttcgggccggctgtcctggcgcgaattcaattcgtcataatctgtccctacacagcaagttcattcgtgtgc

SEQ ID NO: 730954 - DNA, 75 bp, Homo sapiens
cccttgtgctcgttgtcgccgcggtcctgctgttggggcagggtggacaggaagcagctcagcccagcctgggag

SEQ ID NO: 730955 - DNA, 100 bp, Homo sapiens
gttgttggtccttctctaaacgaccatctgaagcatctgcttacaagcatgcagaatcctgatacactatcagcaatgtcaaaccctagagcaatgcagg

SEQ ID NO: 730956 - DNA, 96 bp, Homo sapiens
cggcggcgacgcggacctgcggactagcgaacccggagcctgctatgggatggatgaagaagagaaccactatgtctcgcagctcagggaagtcta

SEQ ID NO: 730957 - DNA, 103 bp, Homo sapiens
cctggagcctcagttggaagcagccgatccagcctgcggagcctgtggggcaggcctgagacctgggaggaagctggagaaaagatgccctctgaatctttgt

SEQ ID NO: 730958 - DNA, 100 bp, Homo sapiens
ctggtctaggtgctgctcctgaacttggtctctgagccatggcttcccatagacactcaggtatgctatacctccggagcatggaaaacgacttgaaaga

SEQ ID NO: 730959 - DNA, 50 bp, Homo sapiens
agtgacctcctggacttcagcatggctggacggcagtctggaaacgacca

SEQ ID NO: 730960 - DNA, 88 bp, Homo sapiens
aagttctgatgttccactgaaatcacaatggaaagtcttgacttgactgctgtgatgcagatccatccgccctagcaaaatatgttct

SEQ ID NO: 730961 - DNA, 100 bp, Homo sapiens
tctgtgtgctccctccggcgagagactttgtcagctcccgcacagtaacgcgccaagcccatctttgtgtgcttgcatccaactgtgatgagcctatgta

SEQ ID NO: 730962 - DNA, 100 bp, Homo sapiens
ggcaactccagggtgtctggtccacgacctatcctaggcgccatgccgcctgtgttgggctcatccctttctgaagtccgtagatatgtttaagttccgg

SEQ ID NO: 730963 - DNA, 51 bp, Homo sapiens
tgatttctgcatttccaactgagcacaatgacagatttcctcaaggaccac

SEQ ID NO: 730964 - DNA, 75 bp, Homo sapiens
tgggccgcgacctggttctcccggagtctacagagacacaccctgagccggcgccgtgtcatcccgctgccccag

SEQ ID NO: 730965 - DNA, 75 bp, Homo sapiens
gaacgcttattcaacggcaaaagagcatgtcctttgcaacctgatcacacaaatgatgaaaaagaatagaacttt

SEQ ID NO: 730966 - DNA, 75 bp, Homo sapiens
cgcggctgggcgttcatctaccacgctttcgtacttgtcagcttgtgggaaagtgacatcagcgtccacccgcta

SEQ ID NO: 730967 - DNA, 100 bp, Homo sapiens
tactgctgctgttactgcagcagtaaagtgaaagccctgtgtaaggaatgtgtagtagaacgttgtcgcatattgcgtctgaagaaccaactaaatgaag

SEQ ID NO: 730968 - DNA, 128 bp, Homo sapiens
gcccttccagcggtggccacacgtcacacagtggggacaacagcagtgagcaaggtgctggagaatctggtaaaagcaccattgtgaagcagatgaggatcctgcatgttaatgggtttaatggagag

SEQ ID NO: 730969 - DNA, 73 bp, Homo sapiens
gaaaaggcatttctcctagctgttgacgttggtgctcgtgacctctttatggctccgagctctgtccagtggt

SEQ ID NO: 730970 - DNA, 101 bp, Homo sapiens
aggaagcgaaggaggcgggagcggagacctcgctgcgctcatggcgtcgcccgggttccttctgatgatgggcgtgcttttctgctgcggagccggcttct

SEQ ID NO: 730971 - DNA, 86 bp, Homo sapiens
gccgctgggctcggaggactcggagtcggagggcttggagttccaggtgttgggggccttggagtggattgggccgtggaacaggc

SEQ ID NO: 730972 - DNA, 100 bp, Homo sapiens
ctcagcttcctttctggaacaactggacccaaagagatctctgttgaggagctggcgcggaatctggtcatcaaggtcaacagggatgctgtcatgaaaa

SEQ ID NO: 730973 - DNA, 75 bp, Homo sapiens
tgattgcagaattcacatatttgctcaacaaaatgatcagatacaaactggactctcaggacaaaacgacaccag

SEQ ID NO: 730974 - DNA, 100 bp, Homo sapiens
gtcagacgaacgtggggcaggatggacggcaaatcgccggggagtggcctgtacagcaacctccagcagtacgatctcccgtaccccgaggccatttttg

SEQ ID NO: 730975 - DNA, 75 bp, Homo sapiens
gaatattactgctgccctgatgaagaagttcctgaatctgagtcttgagtaatagcctgcagctggtgttttgag

SEQ ID NO: 730976 - DNA, 82 bp, Homo sapiens
tcttcgctctcttcctggctgcgtccctaggctcttgatggaaatgtgtatgatcatctcaaggattatttaatagccttca

SEQ ID NO: 730977 - DNA, 100 bp, Homo sapiens
cagccaaaagattgaaggaaggtgatacaatgatggggcagcaagtggccaaaggagaggagacgccgtgagcgggacgaccagatgtaccgagagcggc

SEQ ID NO: 730978 - DNA, 100 bp, Homo sapiens
ccgtgttttgcagctcttcacccgaattgtccagcagaagcagtgagttcctcctcctaactcaggcttccaggaaggatatcctctgcttctcagacct

SEQ ID NO: 730979 - DNA, 90 bp, Homo sapiens
gtgagaaaagcgagcctcttctgataactcaggatttacttgaaacaaaaggagaccctaatcttcagttaattggccttggtcctcaca

SEQ ID NO: 730980 - DNA, 98 bp, Homo sapiens
acacctgtattggcctgccaggacagagtgctcagagttttacagattcgaaatcagagcaaagcctctgggtctgggctctgtgagggagatgaagt

SEQ ID NO: 730981 - DNA, 75 bp, Homo sapiens
atgtgaaacctccaaatgtggaaggagatttaaccatagtagaaagaatggagaactattaactgcctttcttct

SEQ ID NO: 730982 - DNA, 96 bp, Homo sapiens
tgggggctgaggatgacaaaaaagccttcatagctctggccaggctgccgcacctctacaggaactttgccgcggagcagtatgccagtgtgttcg

SEQ ID NO: 730983 - DNA, 100 bp, Homo sapiens
cagcctcccgagaagctgggattacagctgctgctggacacccactcgctgaagatggtcctgctcgatctcccctccatcagctcgcaggtggtgagga

SEQ ID NO: 730984 - DNA, 107 bp, Homo sapiens
ccggagacaagctctgtccgcggagaggagtgggacaactcctaaagaatatcagctgcatccagtgtccccagacgagaatacaagccaaggcctgtgaaaaggag

SEQ ID NO: 730985 - DNA, 100 bp, Homo sapiens
ttacaaattcagaacagtacagagcccgaccccctgcttgccactctagaaaacaaagaacagtctgaacttgatcaagatttggatgatgttgaagaag

SEQ ID NO: 730986 - DNA, 100 bp, Homo sapiens
cggagacaacaacctgctgggcaccttcatctggaataaggatcccatgacagattctgttgtcacgtctccttacagagtttgagcggtgctgaactgt

SEQ ID NO: 730987 - DNA, 73 bp, Homo sapiens
cgggaccaatcaccatggaccttactgggtgatctggaccctctggcatctctcaaatcgctgacttacctaa

SEQ ID NO: 730988 - DNA, 96 bp, Homo sapiens
cggcctcctagggggtcgtcgtggtccagacagtttagcagaacagcctccgcggctccggggagaagtttgtcagaggaatggctgtgaatggat

SEQ ID NO: 730989 - DNA, 129 bp, Homo sapiens
gggaggccggccggtgccagcacctttcggcttctgagacggcggcagcagcggcattcaggacgagattgaggagctgcgggccgagatgctggagatgcgggacgtctatatggaggaggacgtgta

SEQ ID NO: 730990 - DNA, 82 bp, Homo sapiens
ggaaaacagagaaagaagtgataggagggctctgtagacccaacatgagtgaagtttcctgcaagaaacgggacgactattt

SEQ ID NO: 730991 - DNA, 88 bp, Homo sapiens
ccagcagatggcggatgccctgcagtacctgcagaaggtctctggagacatcttcagcaggtctgctcaccaggtggccagataccgc

SEQ ID NO: 730992 - DNA, 75 bp, Homo sapiens
caagtccccagggaatgccacagcatcctccagcacctcagttgccagacttagaagacttgatgaaaagggaga

SEQ ID NO: 730993 - DNA, 75 bp, Homo sapiens
ctatggacagggctttccttctttcctacgggtgaccattgtgaggtagatattttgttctaattttccagatga

SEQ ID NO: 730994 - DNA, 110 bp, Homo sapiens
agcagatggcggatgccctgcagtacctgcagaaggtctctggagacatcttcagcagtaatagctcttcaagtctgcaataaaaaatggcctccaacaaaactacattg

SEQ ID NO: 730995 - DNA, 100 bp, Homo sapiens
agtgaaaagcatgagcaagctgatgaagatctgctctctcaatatgaaaatggtagctccacagtagattggaggtggacacaaaggaagaggcagccag

SEQ ID NO: 730996 - DNA, 95 bp, Homo sapiens
tgaattgggtagagagaccaaagatcttgatgaggtggggtggaagacaacccgtgagtattacaccttcatgtgggttactttgcccattgacc

SEQ ID NO: 730997 - DNA, 92 bp, Homo sapiens
aggagctgagcctgctggtgctgctgcctgacgacggcgtggagctcagcacggagttcttggtttcgactcagaaaacatatggtgctgac

SEQ ID NO: 730998 - DNA, 100 bp, Homo sapiens
agtcattgtttggatctgttgctgatgatcagaaacttatgatgagacctgtcttctggttacctggatgatactaagcaggaaacagctaatgggccca

SEQ ID NO: 730999 - DNA, 90 bp, Homo sapiens
ccgccaccgagcgtgctgagcaaccgcagcctccgcggccgagagtgcagcgagatttggagtggatcagttacgagatgacaatctaga

SEQ ID NO: 731000 - DNA, 114 bp, Homo sapiens
gcagatggggctgctctcggccctgcctctggctgtggaaacaggcctccaagtacccaagagcactacaaacaccactggtttcccgaaaagccgtccaagggctccggctac

SEQ ID NO: 731001 - DNA, 100 bp, Homo sapiens
gacaatcctactttgaccgtaatggacatcagcccacccagccgttaaagagaactgccgtcctgatggaagagaacttggtgaattcagaaccacaact

SEQ ID NO: 731002 - DNA, 100 bp, Homo sapiens
catttccaggggtcagttgtccagttcatccctgagccttgagctcccagtcgcagatttctgacaattttgatcaagaaagaggaaaaaaccgctacat

SEQ ID NO: 731003 - DNA, 82 bp, Homo sapiens
tggcaaagacgacatccggtgcgccgaggctgctcacaaaagctccctggggaagggaatgcagggttgctggggctgggcc

SEQ ID NO: 731004 - DNA, 90 bp, Homo sapiens
tgggaaaatatgtcaataacctgaacactgaccagctctcagttgcacttctcaaagtgaaagccctgtgtaaggaatgtgtagtagaac

SEQ ID NO: 731005 - DNA, 74 bp, Homo sapiens
tgaaatcttccaagtccaaggatgtttttcccaaacagttttgggtgctgattcagaggccctcactgattcct

SEQ ID NO: 731006 - DNA, 100 bp, Homo sapiens
ccgcgcgcccggccggcccggagcaccgagctcgcggcacggtaggagaggctgggaggcggcagaatgcagccagaggagggcacaggctggctgctgg

SEQ ID NO: 731007 - DNA, 74 bp, Homo sapiens
ggtccctgtgacctgtggagacacggccagatctgccctccattccagctcaaccaagataaaatgaatttttc

SEQ ID NO: 731008 - DNA, 88 bp, Homo sapiens
aaaaacggcccttggatgatggagattgtgaataagtggaatacagctctcattggccttatgacatactttcgggaggctgtggtga

SEQ ID NO: 731009 - DNA, 95 bp, Homo sapiens
gcccggaactacgagtacctgatccgcctcttccaggagtgggagtcatgacagaaccatgcaagatattgtttacaaattggtaccaggcctcc

SEQ ID NO: 731010 - DNA, 82 bp, Homo sapiens
gcacatggctgaccacccctaaaagcacctggccccgctacagcaaaccaggcagaagctcctcctggggtagagacagatc

SEQ ID NO: 731011 - DNA, 100 bp, Homo sapiens
aaaaggtccaaactcctatctccttacagcccgcagacacaagaataatccagaatggctactctgatctatgttgataaggaaaatggagaaccaggca

SEQ ID NO: 731012 - DNA, 103 bp, Homo sapiens
cgggggctttcgcccgggtcctcctagaaattccccccgaagaagactcccccacatctggacacgatgaggcgagtggtacgacagagcaagtttcggcatg

SEQ ID NO: 731013 - DNA, 75 bp, Homo sapiens
caagtctcatctgcattaaagctctccattgaaccctctcacaaaaggacttgtcgctgatcaaggtgattgacg

SEQ ID NO: 731014 - DNA, 94 bp, Homo sapiens
ccgacgtgggcggtgggccccagccccacagaccagcccagcattcagtgtactaatggtcacttgatgtgcgctggctgttttatccacctac

SEQ ID NO: 731015 - DNA, 74 bp, Homo sapiens
atatgttcgactggctcctgattacgatgctttggatgttgccaacaaagccctgctgctcctgggggccgccg

SEQ ID NO: 731016 - DNA, 100 bp, Homo sapiens
tggcgatccttcaccaatgtcaactccaggatgctctacttcgcccctgatctggttttcaatgagcagacctacaggtggacaaggagaggcacaattt

SEQ ID NO: 731017 - DNA, 88 bp, Homo sapiens
cagctgccggagcccgagtggatcggggacggagagaacacgagcccatcagccttaccctgtaggaattctagtgactatgttgcca

SEQ ID NO: 731018 - DNA, 50 bp, Homo sapiens
gaactcgtgagccggattgatgtcatccgtccttggctcaggatttggag

SEQ ID NO: 731019 - DNA, 89 bp, Homo sapiens
ggagaaccagccgactggagcaggcagcagcccagattcaaccctatgaaaagataaaggccaggggcttgcctgataatatatcttcc

SEQ ID NO: 731020 - DNA, 100 bp, Homo sapiens
ggaaatgaaattaaggcttttaataggggacggcaaaacagaacagaaaggcggagataaaaagaggggtgttaaaagaccacgagaagatcatggccgt

SEQ ID NO: 731021 - DNA, 83 bp, Homo sapiens
gcttactggaaactggatgcagcaaggaaataggatttaaccgctctctgcctcccaggtactccaaagattcaggtttactc

SEQ ID NO: 731022 - DNA, 98 bp, Homo sapiens
atggattaaattttttgctgatggagagctggaatctatgggattttcagctcgatacaatttcacacctgttgcagatctgatctcttctgaacacc

SEQ ID NO: 731023 - DNA, 100 bp, Homo sapiens
catcgttaccagggagagcagtgaactgctccgcatcgagcagaaggacttcaaggcactatgggagacatcgctattgcggttccgaggcagtgggaag

SEQ ID NO: 731024 - DNA, 101 bp, Homo sapiens
gagaaactggggagtctgccccaccaacatggcccgcagagttaatgcagggcttggcacgatacgtgttccagtcaggagtggaggcagcacagacagtg

SEQ ID NO: 731025 - DNA, 75 bp, Homo sapiens
cttgcatgagcggttataatggtaccatctttgcatatatcatcgagaaaggagaagaacactgtggacatctaa

SEQ ID NO: 731026 - DNA, 50 bp, Homo sapiens
aagcagcaaagtgaattgcagagtcaggatgttgacaatgcgtctctggc

SEQ ID NO: 731027 - DNA, 101 bp, Homo sapiens
tggcgccggcccgcaaaagctgcaggagcatcgctaggtgttgccgccaccgggaagcggggctgcagggccaattcctgtccccccagcagcatggcatc

SEQ ID NO: 731028 - DNA, 83 bp, Homo sapiens
gcggcgccatggcagggcttgcaggtgacgcggcgcacggcgcggatggtggccgagtggcagtgtgtgggcttctgccacgg

SEQ ID NO: 731029 - DNA, 100 bp, Homo sapiens
gctggtccaggccttccagtacacagacgagcatggggaagctaccagatggcctaacaaattcaaactcagggaagaaatgagacgagacctgatgcct

SEQ ID NO: 731030 - DNA, 75 bp, Homo sapiens
ccgacatcgacgccgcgtggcaggcgctgcgcacccggacactggggttgggaaatcaagcatcgtgtgtcgatt

SEQ ID NO: 731031 - DNA, 83 bp, Homo sapiens
ataaaaataaactgcttgaacatcctttgactggttagccaggactcagtggcttttgaggatgtgtctgtgagcttcagcca

SEQ ID NO: 731032 - DNA, 51 bp, Homo sapiens
cgcgactcggcgcccgcccgcgctgagatctgtatctgtggacctgaatgt

SEQ ID NO: 731033 - DNA, 82 bp, Homo sapiens
tgggagcagatcgattttaccttggataccctgctttgggagatatgtcagtattgaattctcccagacatcagagctgtat

SEQ ID NO: 731034 - DNA, 126 bp, Homo sapiens
ggggagaagaggattggaggtgtcagtgttaaaggaacctctacaacgaaggtgaagccacggaagataagatgaagaaactgagtctcagagaggtgaagtgacttgcccaagatcacagcaatt

SEQ ID NO: 731035 - DNA, 74 bp, Homo sapiens
caaccagctgccgccgtccatcctgctcaagcatacattcctactccaatctactttggagcagtcattgacac

SEQ ID NO: 731036 - DNA, 74 bp, Homo sapiens
tttgtggatcgctgtgatcgtcacttgacagaggaatctccttatattaatggcaggtattatagtaaaattat

SEQ ID NO: 731037 - DNA, 75 bp, Homo sapiens
tcatgagcgatgttaccattgtgaaagaaggttgggttcagaagaggggagtcagagtattcatcgaaaagaaag

SEQ ID NO: 731038 - DNA, 74 bp, Homo sapiens
acgactcttggtgagcgaggagctctccgagaagcaatgagtgagggccccaaggctgttgcagctcctcgacc

SEQ ID NO: 731039 - DNA, 76 bp, Homo sapiens
gggggagtgcgcggcggccgcagctgccacaaaccaggtctctccaggtgacactggatgggatgtcttcagcctc

SEQ ID NO: 731040 - DNA, 71 bp, Homo sapiens
gatcgactcggacacagaggacagcggcagcgacgagaacctggatcaggacgctgtttgtgactgtagta

SEQ ID NO: 731041 - DNA, 75 bp, Homo sapiens
ggcatttcccaggatgagcagctatccaagtcaagtttttcgttggaatatacgttgcacatttatggcgattct

SEQ ID NO: 731042 - DNA, 99 bp, Homo sapiens
gtgtcgcggcgtctgaaaggggccactggccgtgctggtatagaggactctaagaagtggggcatgctgtttctggtgaaccagctgtttaaaatctac

SEQ ID NO: 731043 - DNA, 50 bp, Homo sapiens
gctttccctctcgcgtctctggctgcaggggacgcccccttccagtgctg

SEQ ID NO: 731044 - DNA, 75 bp, Homo sapiens
ctcaatttgctggatttaagcactgctgcactttatgagtttcttaaacaattaggtctacatcctaactggcaa

SEQ ID NO: 731045 - DNA, 100 bp, Homo sapiens
caggctggctcccgtctccaggccccaaggagccacacctggaccagaccccaggaaagaaacacctggattcttatctagctgactgctacgatgccat

SEQ ID NO: 731046 - DNA, 75 bp, Homo sapiens
cactcacccagtgatgacatggacagcatcatcttcccaaaggtacgtcagcctgtcatatgcatcaacaaccat

SEQ ID NO: 731047 - DNA, 50 bp, Homo sapiens
cccctgccctcggagcctatgaatcctggcccgtgatgctgatgagcgag

SEQ ID NO: 731048 - DNA, 75 bp, Homo sapiens
tgttggagaatatgtgcggcattatccacgaggcaaacgacattgtatgcaaacctgttccattctttcttcgtg

SEQ ID NO: 731049 - DNA, 100 bp, Homo sapiens
ctgcagaccaatggacaccttctaagagtttggcgagtcagtgactgaagcgcccgtccattccaaggtcaaaatgcagatcttcgtgaaaacccttacc

SEQ ID NO: 731050 - DNA, 82 bp, Homo sapiens
ctcgcgagcctccttcgccgcgccccacttgctcgtgcactttacacacatgaggacatggatttgattgacatactttgga

SEQ ID NO: 731051 - DNA, 82 bp, Homo sapiens
acctctctgatgagatggatcgctcagagcccgggcgctgtggaagagattctagaccgggagaacaagcgaatggctgaca

SEQ ID NO: 731052 - DNA, 100 bp, Homo sapiens
gaaggtctcagagctttacgatgtcacttgggaaggttattgagccacatgatatatcagtggcactcaacacccgaaaattgtggagcatgcaccttca

SEQ ID NO: 731053 - DNA, 51 bp, Homo sapiens
gccctcacggagaagcagtggctaaggcataatgcagtgaagatgggtgaa

SEQ ID NO: 731054 - DNA, 75 bp, Homo sapiens
tcggaagtggtgccttcagcacagattctacaagggggttgctcctctctggatgagacagataccatacaccat

SEQ ID NO: 731055 - DNA, 100 bp, Homo sapiens
ggagggcatgttccgtggcctcgcccaggccgacggattttccactggggactatgtcccacctgtatgatcagagagaaagatacaagttttacttaag

SEQ ID NO: 731056 - DNA, 83 bp, Homo sapiens
ccgcagtcgccactggctgcctgagggacccagacatggagctgcgggaagaagcctggtctccggggccgctggattctgag

SEQ ID NO: 731057 - DNA, 100 bp, Homo sapiens
tcaacccgaagaaagccagggcctatggcagaggttcccagggaccttcttgcgagtccacaagcaacggcagacacagtgcctcatcacccaaagcccc

SEQ ID NO: 731058 - DNA, 75 bp, Homo sapiens
cgcacgtgggccgaggccgcgcgcctggccaagtcctgtatctgccatgtctgtggcgtccacctcaacaggctg

SEQ ID NO: 731059 - DNA, 75 bp, Homo sapiens
acctggagaccttcgagcaccccaacgtggtcagacttgtgcaccatggacaattttgctgagggagatttcact

SEQ ID NO: 731060 - DNA, 121 bp, Homo sapiens
gggcctcagtgtcttctccatgctctgctgcttctggcctctgggcatcgcagccttctacttgtcccatgaggaactttatattgctgttggaatatctggagccatccaacatttagct

SEQ ID NO: 731061 - DNA, 75 bp, Homo sapiens
ccgccgccgcctgaggaggcgagctagccgggagttacaccgccaccgccaggaaccttgagtcagatgtctgga

SEQ ID NO: 731062 - DNA, 75 bp, Homo sapiens
caacgacgttccatctgtggaaggacctaccaaccagattggtttatcttggaagctaaagggcattgctcatcc

SEQ ID NO: 731063 - DNA, 90 bp, Homo sapiens
aaagccgggctcggcccgaggcccccaggacctccatctcccaatgttggagatggcccactgcgtgaccttggttcagctgtccatttc

SEQ ID NO: 731064 - DNA, 82 bp, Homo sapiens
gaggaacaagtacattagagccgaggttcatggttgcaaaagcttctcatttcagagagatgccaggatcctaagtgcctgc

SEQ ID NO: 731065 - DNA, 75 bp, Homo sapiens
ggaattttgccgatttcatgactaaccagtgacatggatttgattgacatactttggaggcaagatatagatctt

SEQ ID NO: 731066 - DNA, 100 bp, Homo sapiens
tgaaccatggacaagtatattctgctgccacaaagactgtaaagtgcttcatttcaacagctgagtgggtaattccagaattgattggccataccattgt

SEQ ID NO: 731067 - DNA, 100 bp, Homo sapiens
ttgagctcaaggccctcaggctgctgaacttccagaggcaggtccggcaggttcggctattccaggacgaggagatctacagcgacctgtacctgaccgt

SEQ ID NO: 731068 - DNA, 88 bp, Homo sapiens
agttgttctccgtaaccagaaacaggttcattcattggaccgtataatagacgctggccccaaaggaaactactctcgatttatgaat

SEQ ID NO: 731069 - DNA, 100 bp, Homo sapiens
gccgcaccaatggcttccgtgctgtcctacgaaagcctggtccacgccgtggccggagccgtgtgccaggtcaccagatggaaagcgaaaaagaaagaac

SEQ ID NO: 731070 - DNA, 50 bp, Homo sapiens
caagggtgtatgacacagatgcgaggtgcagcagttcctgcggcaagccc

SEQ ID NO: 731071 - DNA, 90 bp, Homo sapiens
gtttatctcaaggcctgagtagccggtaacaaacgagggttcccgggattggaccgacgcagccatgtgatgctattgctgagattagag

SEQ ID NO: 731072 - DNA, 75 bp, Homo sapiens
cactatgctggatgaacaaaaggaatacttggctttctctgactcaagtaaatgggtttttgagcaccctgaaac

SEQ ID NO: 731073 - DNA, 75 bp, Homo sapiens
tttacctccagtgtcccttcttccacatgaaaaggataagtcattaacagctgaagagaagacgattacagaaaa

SEQ ID NO: 731074 - DNA, 75 bp, Homo sapiens
agaaactcgaggagctaaaagcgaaggccgcggggaaggggcccttgggatgtggaaagctacgatccagttttg

SEQ ID NO: 731075 - DNA, 75 bp, Homo sapiens
ttcgggtctacccctaatcacgccatccactgcagagcaatccttccttgtcaggacactccttctgtgaaatta

SEQ ID NO: 731076 - DNA, 90 bp, Homo sapiens
gatacgagtgcgtccattcctgttgccagctcctgcgccctccggactaacctcaaaaaccagctcccctttgaattggagatttactac

SEQ ID NO: 731077 - DNA, 100 bp, Homo sapiens
aggaatacattctttcatcattaagaaatcaggaatggatattttgaacagtgccatagaaaatcttatgacctcatccaacaaggaggactggctgtca

SEQ ID NO: 731078 - DNA, 98 bp, Homo sapiens
cgatctcattgacagctgcattcaatcttttggcggtaaccagcgtgagctcgcccgccagaagaatatgaaaaagcagagcgactcggttaagggaa

SEQ ID NO: 731079 - DNA, 90 bp, Homo sapiens
gccggtgctgcagaaccagatccgggagcacgtcatcgccatcgaaggtgttgacttcaaaatcaaaactgtagagctaagaggaaagaa

SEQ ID NO: 731080 - DNA, 75 bp, Homo sapiens
aaaaagctgccctgagacggtgtcccgccgaaagaacctgagagccagaagcaacaaagatgccaaggatccaac

SEQ ID NO: 731081 - DNA, 75 bp, Homo sapiens
gctcggtgctggagaacttcgtgggccgggagtaccctgacttctaccggaagctctacggcctcttggacccct

SEQ ID NO: 731082 - DNA, 100 bp, Homo sapiens
cggggcaaacagtgagtggggttcagcgtagactctggaccaggagaggcccgcggtgaccgaggcctgggccccggctcactgttaatgaagcggctgc

SEQ ID NO: 731083 - DNA, 50 bp, Homo sapiens
gaagatgaccatcatcatgaagaccctaaagtaaattggttgaagaaatt

SEQ ID NO: 731084 - DNA, 74 bp, Homo sapiens
ccaatctgaatatcaaaatagcaggtgaccaagaatatggcccaggtgaccaaagccctggacaaggccctgag

SEQ ID NO: 731085 - DNA, 143 bp, Homo sapiens
gtggagaggagcttcctggagtccattgacgacgccttggctgagaaggcaagcctccagtcgcaattgccagagaacattgagctgaaggttgaagtggagagcttgaaacgagaactccaggacaagaaacagcatctgga

SEQ ID NO: 731086 - DNA, 82 bp, Homo sapiens
accgacgtcatcatgctgaccaccaatcagatccgtaagtttaagctatgaagaaggacatccctcacactctgaaacagat

SEQ ID NO: 731087 - DNA, 75 bp, Homo sapiens
cggcgcggcgctcgctcctacgggggaaatttgcagtggtgagaaaatgtataaagaaagattctgggaaagaat

SEQ ID NO: 731088 - DNA, 100 bp, Homo sapiens
cagaacaatcttgaatcatgaagctactaaccagagccggctctttctcggtatatttgaaggctcccatgattctgaatggagtctgtgttatctggaa

SEQ ID NO: 731089 - DNA, 95 bp, Homo sapiens
agaaccaccagcagcccaacggcggcgagcccttccttataggcgtcagcgggggaacagctagcggcaaggctggctacagcaaacatcattca

SEQ ID NO: 731090 - DNA, 75 bp, Homo sapiens
atttctaaaccctgatcattgcttaagagatattcactgagggggtacaagcaattttccagtcttgacccttta

SEQ ID NO: 731091 - DNA, 74 bp, Homo sapiens
gtctgtgcagatgtacgcccaagccgccctggatggagactcccagataacgaaggaggcccaacttcattcaa

SEQ ID NO: 731092 - DNA, 89 bp, Homo sapiens
gggcgtcggtcgtcggtggggtcggagctgggcgcggagcccctcacagtgcaggtacctggggcccaagatttggtggatttctctcc

SEQ ID NO: 731093 - DNA, 110 bp, Homo sapiens
ctccaggattagggaaagtcaatgaactggcaagggaactgaatttttcagtggatgaaatcaatcaaatacgtgtggaaaatccaaattctttaatttctcagagcttc

SEQ ID NO: 731094 - DNA, 100 bp, Homo sapiens
tggcataggttatgaagctaatcctggcgttccaccagcaaccatgagtggttccatgatgggaagtgacatggggttgagcattcatgatggtacctgg

SEQ ID NO: 731095 - DNA, 90 bp, Homo sapiens
ctatggggcggtggaggagacggcttggaaaacggagagactggggagaaccctgggcgctgcctatggcacagccaagagcggtaccgg

SEQ ID NO: 731096 - DNA, 101 bp, Homo sapiens
aaaagttcagtgggaagcatgtcgtctttatcgctcagatcctggccaatttggagcaaggcttagcagaagacggcggcatgagcagcgtgactcaggag

SEQ ID NO: 731097 - DNA, 108 bp, Homo sapiens
gatgccttcaatactacctttatttccaccatagctcaagcctggagaaagaattgaaatcagaaaaagagcaaagacaggctcttcagcgcgaattacagcacgaga

SEQ ID NO: 731098 - DNA, 82 bp, Homo sapiens
cagaatctgcccacagagttcggacctcctgccccccgaggtctgcagtctcctgaacccagcagccatctacgccaacaac

SEQ ID NO: 731099 - DNA, 100 bp, Homo sapiens
gcccttcgctatgacttcctgatagcggaaaagaaggtgcttcctggaggggcctgccccactgttcctgtgctgagttccaggacagcctcaacttcag

SEQ ID NO: 731100 - DNA, 75 bp, Homo sapiens
ccaggatggagataaaggaactcaaagaatttgggactccatccccgtgtctacctccctccttggagacacttc

SEQ ID NO: 731101 - DNA, 100 bp, Homo sapiens
tcgttgcttgcttgcctgtgcgcgcgtgcgcggacatggcctcaaacggtggcggcgggaaggccaaggtctctggcagacccagcagccgaaaagccaa

SEQ ID NO: 731102 - DNA, 82 bp, Homo sapiens
caaggaaaaactggagagcttcatcaaaaatagtgatagctttgataaaaaaggtggacaagtcctattttcaagagaagat

SEQ ID NO: 731103 - DNA, 76 bp, Homo sapiens
gaaccccgcgcccgcaggacgccccagccaggctggacgtaaagaaagaagtgatgcactcaattctgcaatagat

SEQ ID NO: 731104 - DNA, 75 bp, Homo sapiens
ggatccccgccgctctgtctacaacccgagcaaaacacttactattttggagtttaaagtatgtcatcatggcaa

SEQ ID NO: 731105 - DNA, 82 bp, Homo sapiens
ctccagtgggaaggggtaccggcaagagagtcagaagaggccaagtgatggaaatagtggattaatggcaaaaaagcaaaag

SEQ ID NO: 731106 - DNA, 100 bp, Homo sapiens
cattcaccggcacaccgtggtgaagctggcccacacctatcaaagccccctgctctactgtgacctggagatgcacccactgggcctatgtaataacaat

SEQ ID NO: 731107 - DNA, 50 bp, Homo sapiens
ggcatctacatgggcagaccaactcaaatagctgaaacctttggacttca

SEQ ID NO: 731108 - DNA, 100 bp, Homo sapiens
ggagaggttactttcaatggaggagtgaaaaggctctcagtgtctgagttaaatgaaatcctggaagaaattgagactgccattaaggagtactctgagg

SEQ ID NO: 731109 - DNA, 50 bp, Homo sapiens
ccgatggagacgcagtaagcgaggtagtgaagctgattttagctcctcga

SEQ ID NO: 731110 - DNA, 90 bp, Homo sapiens
ctccctacgatgagaactggttctacacgcgagctggggttgtgtccactgtggtccccgactctgcccacaagctgttcatcgggggct

SEQ ID NO: 731111 - DNA, 74 bp, Homo sapiens
ttcaatactacctttatttccaccatagaaactccccaacttttaaatcatttgaagaaaaggtcgaaaactta

SEQ ID NO: 731112 - DNA, 98 bp, Homo sapiens
ttgtagacttgctaaaggagaagtctggtgtaatacaagatgctttaaagaagtatgacctgtcagcctctacattctctcctgacggaagagttttt

SEQ ID NO: 731113 - DNA, 50 bp, Homo sapiens
caagaatgaagccgcggaccctcgcgttgttgacctcctgtactggagag

SEQ ID NO: 731114 - DNA, 101 bp, Homo sapiens
tggactgtgggctggtgtgtggaactgagacgagttgtactgctgtcacaggaaatggacgctggattacaagcatggcagctcaggcagcagaagttgca

SEQ ID NO: 731115 - DNA, 74 bp, Homo sapiens
acgtgtcattatggaactacttatgagactgcagcgaggcaagaaacaacagattgaaaatggtagtggagcag

SEQ ID NO: 731116 - DNA, 98 bp, Homo sapiens
ggctgtggaccgggcggcacgcacgcggtgcagggtaacatggcggatgcggaaggtgtgcctgcacaggagacagcaccagccaagctgattgtgta

SEQ ID NO: 731117 - DNA, 119 bp, Homo sapiens
agaaaaagaaaagctgaagtgcatgaaaaggaaacatcacaatggctatttgggatcccctaacaacagtgagagagcaatgcgagcagttggagaaatgtgtaaaggcccgggagcgg

SEQ ID NO: 731118 - DNA, 82 bp, Homo sapiens
aaggatatcgacgtcgtgatccagaagtccagagctgaggactgcctgtttgcagacaggtgatttggcttctgcacagtta

SEQ ID NO: 731119 - DNA, 83 bp, Homo sapiens
cccaaagttgcatttcctcgtcgagcgcaacccaaggaaggagtcaagactgagaacaacgatcatattaatttgaaggtggc

SEQ ID NO: 731120 - DNA, 51 bp, Homo sapiens
cttggattcagacgccgattcgcccaggagtgttcagcctgggtgttcctg

SEQ ID NO: 731121 - DNA, 98 bp, Homo sapiens
ctcggctgcgggcacctcccaacgccaccttggaacatttctacctgaccagtggcaagcagcccaagcagaattatatccagatcgagagacagaag

SEQ ID NO: 731122 - DNA, 83 bp, Homo sapiens
ccggaagatcgcgatcctgggctaccggtctgtggcgtgagtgcatctccatccacgttggccaggctggtgtccagattggc

SEQ ID NO: 731123 - DNA, 90 bp, Homo sapiens
aatcctgcggcagaagccgagttcaacatcctcctggccaccgactcctacaagcgtgagtgcatctccatccacgttggccaggctggt

SEQ ID NO: 731124 - DNA, 100 bp, Homo sapiens
ctggtgccactcccaaaaaactatcaagttgggatcaggcagaggaagcagtacaggttttgattaagcactcagctgatgtcaatgcaagggacaagaa

SEQ ID NO: 731125 - DNA, 100 bp, Homo sapiens
tgggaagataaatgaaggggtctagatgtaaatgtcagtggaaaggagagctaccatcactaagtacaaaacgtttaattgtggatgtcatccggttcca

SEQ ID NO: 731126 - DNA, 100 bp, Homo sapiens
cactttgcattgactggaaacaatggcatttacagaaagagtcaacagcagtggcaacaggtctgctcaccaggtggccagataccgcccacgtgccccc

SEQ ID NO: 731127 - DNA, 100 bp, Homo sapiens
tcgagcgacagagacaagctgagcttgccgcacaaaaagctagagaggtgaagatcatgacggagaaggaactcctggccgtggcttgtgagcagtttct

SEQ ID NO: 731128 - DNA, 110 bp, Homo sapiens
attaacagacaagacacttttcagaaagacagatatggagtttggacctccaacagttaatgataaactaatgagattttttgatcactgtgagaagtttttaactgaag

SEQ ID NO: 731129 - DNA, 100 bp, Homo sapiens
tctgctcctctgcctcctccctgttcccagagctttttctctagagaagattttgaaggcggcttttggccgttgctccagggagaactgcaaatatctt

SEQ ID NO: 731130 - DNA, 126 bp, Homo sapiens
aacggacgatgtattactaagctggaaaacatggggtttcgagtgggacaaggattgatagaaaggaaggagctcattgccaagttagatcaggcagaaaaggagaaggtggatgctgctgagctg

SEQ ID NO: 731131 - DNA, 75 bp, Homo sapiens
ctgttccaaaaacagtggataattttgtggccttagctacaggagaggactacaaatccctccaggatatcattg

SEQ ID NO: 731132 - DNA, 100 bp, Homo sapiens
gaaacatcgagtcactttgcctggacaggaggaaccctgtcctcttcctgactatactcctccagaaattttctcttttgaaagtactactggatttaca

SEQ ID NO: 731133 - DNA, 74 bp, Homo sapiens
tgaggcaggagatgagcaaggatctggaggagatgaccatgctgctcttataccactctaccatgagctccaaa

SEQ ID NO: 731134 - DNA, 76 bp, Homo sapiens
tgtggatttaccttatcccctcaacaacttttcagtggcaagactcagcccaggagagtgttattactcgagatat

SEQ ID NO: 731135 - DNA, 50 bp, Homo sapiens
ccgggaggtgtggaagagccggggtttcacttccatcgcccaggctggag

SEQ ID NO: 731136 - DNA, 101 bp, Homo sapiens
ctactgcaacttgctctgtgggattatcagaggtgccttggaaatggaaaaggggaagatagtgatgtactcagtataaatgcagatgcttatgacagcga

SEQ ID NO: 731137 - DNA, 100 bp, Homo sapiens
gcagtacaggatatgaagaaattgagggttcttgccatggctttgatgaactaggtggacttctcaaaccaacagtggcctctcagaaccagaaccttcc

SEQ ID NO: 731138 - DNA, 114 bp, Homo sapiens
atttccccagccctgtggatgctgcattccgtcaaggtcacaacagtgtctttctgatcaagaactacctgaagaagcaggtcacacccctcttcattcacttcagaaataata

SEQ ID NO: 731139 - DNA, 82 bp, Homo sapiens
cggatctcaccgccgctcaggatctgaagaagacacttgaatcatgggtgacgttaaaaattttctgtatgcctggtgtggc

SEQ ID NO: 731140 - DNA, 101 bp, Homo sapiens
cggaggagcaatggtcacccgggatcgagctgagaatagggacggccccaagggctttgtgaaggatgtccatgaagactctgtcaccatcttctttgaaa

SEQ ID NO: 731141 - DNA, 111 bp, Homo sapiens
atcatttgttgtatctggtgatctgtgccatggggctctttgtccatgaattcttctacagtctgctgtacactcctgatcatgtagttggacctggagcagacattgatc

SEQ ID NO: 731142 - DNA, 98 bp, Homo sapiens
caaatgtctgactctgactctcggactgagaaacgcaagccgcggcgagtcctttgcacatgttggcaacacacgcatccgcatcggcctccctgccc

SEQ ID NO: 731143 - DNA, 101 bp, Homo sapiens
ttcaaacaaccaaccctgatttcctgcttctccttttcatgagtgttcctgtggtctctgcacctcctttctggagattcggctgattcttttttcattgt

SEQ ID NO: 731144 - DNA, 80 bp, Homo sapiens
cgccgctctgtctacaacccgaggttgatgccggcccaggatggatcagacctgtgaactacccagaagaaattgtctgc

SEQ ID NO: 731145 - DNA, 90 bp, Homo sapiens
cctgagctgctcaccatgtggtttggggagtctgaggccaatgtcagagaaatctttgacaaggctgctttgctggctctgcaagaaaat

SEQ ID NO: 731146 - DNA, 111 bp, Homo sapiens
aggccaacgacctgtttgagagtgggaacatgacgcaggtgcaggtgtctcttctcgccctggcggggaaggaagctcttcgtgggcggtcttgactggagcacgacccaa

SEQ ID NO: 731147 - DNA, 99 bp, Homo sapiens
gctgctgggtacctgccccgctggtcccagggacagagtcctgagcaaggaaacctagaagggagagaggaataccatggaattgagtcctgtctggta

SEQ ID NO: 731148 - DNA, 50 bp, Homo sapiens
ctcaggacttcacggtgcccgtggtgaagcagcgcttgcagatgtacaac

SEQ ID NO: 731149 - DNA, 82 bp, Homo sapiens
tgttcctgagtgtcaactatctgggggggacattcccaggcatacactagcgtggctaaggcccctctgcacctgcatgaga

SEQ ID NO: 731150 - DNA, 127 bp, Homo sapiens
ccgtttacttcaagagctgagggcaaagcagcctgacctagctcctggactgaccactattggagcctggagtgaactactttatgtccaagggtatcctggatgattcgccaaaggaaatagcaaa

SEQ ID NO: 731151 - DNA, 103 bp, Homo sapiens
ctggagaagctgggattggagattccacccaaacttgctggtcactgggaggtttggtgcacctcgatttggaggaagtagggcagggcccttatctggaaag

SEQ ID NO: 731152 - DNA, 99 bp, Homo sapiens
cggcgcgcccggtgacggcggagaggcgccccccgcagcaggtactccaaagattcaggtttactcacgtcatccagcagagaatggaaagtcaaattt

SEQ ID NO: 731153 - DNA, 80 bp, Homo sapiens
agaggaccagaaggagccatggggctccctggaatgagaggcccctcaggaccaggactatttgccacgacatttcaaag

SEQ ID NO: 731154 - DNA, 98 bp, Homo sapiens
ataaaagagacctctacttagctcagcaattcttaccttgccaagaagcttgagagaagaaaaatttcagaaaaattgtctcaatttgactagaatat

SEQ ID NO: 731155 - DNA, 100 bp, Homo sapiens
agattttactttatgtgagaaaatctacaatttcttcgagacactcatataaaggatgtaaccattactaacgatggtgcaaccatcctgaagttactgg

SEQ ID NO: 731156 - DNA, 99 bp, Homo sapiens
gtggaatgagagaaccgaggaacgaagaaacagacattcaacatgattgcatttgaagctttccttaaagtttcccatgtctcaatggactcctgaata

SEQ ID NO: 731157 - DNA, 82 bp, Homo sapiens
ccatcttcgaacttagacttccggaaggactttggcgaggatggtgtcggacggcatgacaggcagcaatcctgtgtcccct

SEQ ID NO: 731158 - DNA, 100 bp, Homo sapiens
ttccttcttacagagatgtgactctgtttgagtatccatatattcctgcacatattacaaagcctaaggaacataagaagttgtttctggttcagcttca

SEQ ID NO: 731159 - DNA, 100 bp, Homo sapiens
ggcctgtgaagtttaccatagtgtggcatttgaagtatcatacctgtcacaatgagcattctaatctggaaagcgtgtttgatgtcttggatggggaaga

SEQ ID NO: 731160 - DNA, 100 bp, Homo sapiens
gtttgctacacaagatcctcagattgaaaagacttttgaagttaatgtacttgcacatttctgggaaaacagttcctcctgaggatttcagagaagagct

SEQ ID NO: 731161 - DNA, 99 bp, Homo sapiens
gacaagatggcggacggggagctgaacgtggacagcctcatcacccggctgctggaggagtggtggacatgacaacagagtcaactgcatacagtggca

SEQ ID NO: 731162 - DNA, 83 bp, Homo sapiens
tctcatggtgctattccacgaaatattctctacagttgagtggtgattttatgcaatggcttcaagccacagttcttcaccag

SEQ ID NO: 731163 - DNA, 90 bp, Homo sapiens
gtatcaagacagtgtctactatattgatacccttggaagaattatgaatttaacagtaatgctgtgggtaattccagaattgattggcca

SEQ ID NO: 731164 - DNA, 50 bp, Homo sapiens
cataatttggggttcaagattccaggtataagtgtgctagcggagtgtct

SEQ ID NO: 731165 - DNA, 74 bp, Homo sapiens
cacgaattggccttattaatgatatgttactatgcgagtcagaagaaaacatttgaaattaatcccagacaccc

SEQ ID NO: 731166 - DNA, 76 bp, Homo sapiens
catttgcaaagggaccaagctgaagaaggaggagatgttaaagtaacccatcttgcaggacgacattgaagattgg

SEQ ID NO: 731167 - DNA, 100 bp, Homo sapiens
ggccgcacctgcagcgagtgccaggaactcttctggggagaccccgacgtggagtgccgaggtattccagttttctcatgggagcatcaagaggattttc

SEQ ID NO: 731168 - DNA, 75 bp, Homo sapiens
aatttcgtactggaaaaacccagctttctcataccctctgtggacttggatgttgtgggtgatggtatgcagtgt

SEQ ID NO: 731169 - DNA, 100 bp, Homo sapiens
ggcctacctgccgtccaggctgtgtatcaaaagcatttgatgaatacagaaatatcagccaaaaggacattgtggacagcataaaaggagaattatctgg

SEQ ID NO: 731170 - DNA, 75 bp, Homo sapiens
cctcagtggatgacttcctctctgtctcaggttgtctgcattcaaaagagcattctattaaagctaccttaattt

SEQ ID NO: 731171 - DNA, 83 bp, Homo sapiens
cggccaccctactgcctggaggccggggagccgacgcctggtgacaaccaaagccaagcaactgaaggattcagtgacctgct

SEQ ID NO: 731172 - DNA, 100 bp, Homo sapiens
gcaagaaaagcctctgggagcagaagggaggctccaagacctcatcaacaattaaggacccacctgccatgctgtgaggacacccaggccacatagagag

SEQ ID NO: 731173 - DNA, 128 bp, Homo sapiens
cgcaggggttcctccaagatggcggcgcagaggaggagcttgctgcagagtgcatgaggatgacgttcaacacttcaaggtcatgcgagacaacaagggtaattactttctgtggactgagaagtttc

SEQ ID NO: 731174 - DNA, 100 bp, Homo sapiens
aggagttccctcacatgcgggacatcgtgattgctggacgtccagatcggtgacatcgtcacagtgggcgagtgccggcctctgagcaagacagtgcgct

SEQ ID NO: 731175 - DNA, 100 bp, Homo sapiens
caaaagcggaaccttcgcctcagaaaaagggtgcgggacccctcctcaccgtgcggtcacgctacgtcaaaagctacctcctcccggataagcagagcaa

SEQ ID NO: 731176 - DNA, 121 bp, Homo sapiens
cctacttcaaggataagggcgacagcaacagctctgccggctggaagttgaggctgtgaagctgggcagggtttcagctgagctgaggttggaagtccctgaccttcagctgtggccgcct

SEQ ID NO: 731177 - DNA, 82 bp, Homo sapiens
aaattggattttctcattccactgtcaaaggagttgcgggagcttcaggacgagaaggcagagctgcagaagatctgcgagg

SEQ ID NO: 731178 - DNA, 51 bp, Homo sapiens
cagcaaggatgttaatagccttggataaatggggtcacagtggttataaag

SEQ ID NO: 731179 - DNA, 100 bp, Homo sapiens
tcctacaaatatgtatgaagtgtactgcagtgctctgctgtcggatggcaccattacagaaagcccagatggatgcctgtccaatccctgctttgccggc

SEQ ID NO: 731180 - DNA, 90 bp, Homo sapiens
ggggagccccgggagccgcacgatttctatattcagatgaagttcaaattggtccagaaacagttatgaccactctttatactgccaaga

SEQ ID NO: 731181 - DNA, 74 bp, Homo sapiens
acctcctggtgagaagtcttcagacgtttagtcaagcttggttctgttccacatgtacgactcggacagcgacg

SEQ ID NO: 731182 - DNA, 100 bp, Homo sapiens
cagctgcggaaggaatgtggatcctgagaagctacagagccctggaaagcaggagactcacgtgcaggacccagtggcttttaaggatgtggctgtgaac

SEQ ID NO: 731183 - DNA, 50 bp, Homo sapiens
tggtcccagaccagacccacatacgattcatcaatggtgctaaggaaatt

SEQ ID NO: 731184 - DNA, 100 bp, Homo sapiens
acaaagatggcggcagggaccagcagttactgggaaggctttggaactgcgacataactagcgatggctgctgcgatctcacaaagcttctccaagaaaa

SEQ ID NO: 731185 - DNA, 75 bp, Homo sapiens
gtggaggctgtcgcccagagagagcgccgtcgggtatcatgaactgatcactaaatatgggaagttggagccttt

SEQ ID NO: 731186 - DNA, 100 bp, Homo sapiens
ggcggttctgtctacaggttctgtctgcttcccacttaacagacccattttggctttctatcactcaaagggtcttactggacagagctcattcagacta

SEQ ID NO: 731187 - DNA, 115 bp, Homo sapiens
tatctcctttaccttgtggaaatgatttcctcaggactccagattatctacaacactgatgagaataactgaagtgaagtgatggactccgatttggagagtagtaagacgtgaa

SEQ ID NO: 731188 - DNA, 100 bp, Homo sapiens
acctgctctgtaccaactgccggaaagtgctgcggaaggaccaaaagatctcagattgctataactgaaggtatatttgaacttccaaatctcacaattc

SEQ ID NO: 731189 - DNA, 75 bp, Homo sapiens
ggcctcttcctgaagcatgtggagtatgaggtttccagccagggaaagcaggcaggatgggagagtcgccgatag

SEQ ID NO: 731190 - DNA, 83 bp, Homo sapiens
aaagaagaaggggaagaaaagaaggggaagaagatcaaaacccaccatgccccaggaactgtggctgcaccatctgtcttcat

SEQ ID NO: 731191 - DNA, 100 bp, Homo sapiens
tgttttcccggttctgaagagatctgttcaagttctaagagaagcaaggaagaagtaggcatcaatactgagtacaagccagctgccatgttgtgagcac

SEQ ID NO: 731192 - DNA, 90 bp, Homo sapiens
gtgttgctcacagccctgcgtcctgctgcgccagggcccgcgccaccgccacaggaggcctgaagtctcgctctgtcatccaggctggag

SEQ ID NO: 731193 - DNA, 98 bp, Homo sapiens
gagaaaacagcaggcacccaagcgggcggcagaacgaagtcggcctactggagttcttccaaaatgtgataaaagaaactagggcagagccaaaaaag

SEQ ID NO: 731194 - DNA, 100 bp, Homo sapiens
ggaagatggcggacggcgtggaccacatagacatttacgcggatgtcggcgaagagttcaaccaggctcttacagcactactttcagatgatagcaagtt

SEQ ID NO: 731195 - DNA, 88 bp, Homo sapiens
gccttcgccacgccggggtcttcaggttctagagccttctttccgccaggcctttcccaataccaaccgctggttcctcacctgcatt

SEQ ID NO: 731196 - DNA, 78 bp, Homo sapiens
aaatgaaccaagcacacgtgtccgatgtggcaaaggagcagagaactttgacaagttcttcacacgaggacagcccgt

SEQ ID NO: 731197 - DNA, 73 bp, Homo sapiens
gatgtcagttgcactccttagatacgcacaagccaaaacctttgggggcccactgatgatggtgaagaagaga

SEQ ID NO: 731198 - DNA, 100 bp, Homo sapiens
cgctgcttgggtcaggttcgccggtcgcgggagccccgccgtgcagtcggaggtaaaatatggaaattatgctttcgtatgggatgcagctgtattggaa

SEQ ID NO: 731199 - DNA, 71 bp, Homo sapiens
catggcattcctcagggaatactttgagagtccggagaaggcggcttccttggagtatgactatgagacca

SEQ ID NO: 731200 - DNA, 50 bp, Homo sapiens
ctacattgctcatcggatcacccctaagttctctcctgcgctatggtgga

SEQ ID NO: 731201 - DNA, 50 bp, Homo sapiens
ttcccggcgggctcagacatgaacgaagtggatccccctcagccacctca

SEQ ID NO: 731202 - DNA, 83 bp, Homo sapiens
ctcactgtggctcactttcggcggagggaccaaggtggagatcaaactctcccatcaaaggacgtgcacagccttatgatccc

SEQ ID NO: 731203 - DNA, 100 bp, Homo sapiens
agccgccatgcagggtcgaacggactgcatccgagccctgatgctagcaggtcccgcggcagtgctggtggccatggttcccgtagccagaaggagttgc

SEQ ID NO: 731204 - DNA, 82 bp, Homo sapiens
ggagcgcttggaccccggcttctgggacgcgtcaggtggcgacatgtctaagaatgtgagccagtcacagatggcaaaattg

SEQ ID NO: 731205 - DNA, 82 bp, Homo sapiens
cgggctgctgctccagagggcggaggagccttcacgtaaatgggtccagtcatgcctcccagtaagaagccagaaagctcag

SEQ ID NO: 731206 - DNA, 77 bp, Homo sapiens
gggcagaatacagagatatggaatcagtttctccacagacactacccaaagcagtccttcactacagtggcagacag

SEQ ID NO: 731207 - DNA, 82 bp, Homo sapiens
tccatttggggaccagagatggacggtcactcagcctatggagacaatgcagatcttcgtgaagactctgactggtaagacc

SEQ ID NO: 731208 - DNA, 75 bp, Homo sapiens
acacagccattggtacatcatgctcagatattgcggagggatttttacctcctataactccaccagaaaagtttt

SEQ ID NO: 731209 - DNA, 100 bp, Homo sapiens
tctcctcattgaagctatgcagtatttctttggcatcactgcagctagtaatttgccttctggattacttgtgtatgcggatacctgcttcagtaccatc

SEQ ID NO: 731210 - DNA, 90 bp, Homo sapiens
tggcagtggacgtggatttggggatggctataatgggtatggaggaggacctggaggcatgttacatggaattggaaaatttatagttga

SEQ ID NO: 731211 - DNA, 83 bp, Homo sapiens
attcgagtgaccgagaccgcggccgggaccgaggtgtactaatggtcacttgatgtgcgctggctgttttatccacctactag

SEQ ID NO: 731212 - DNA, 90 bp, Homo sapiens
ctcagttggaagcagccgatccagcctgcggagcctgtggggcaggtatcattgcccagtgcctaagatcttttatgttcagctcactgt

SEQ ID NO: 731213 - DNA, 50 bp, Homo sapiens
aaaatagtgatagctttgataagctggagcattggatttgctaaaggagc

SEQ ID NO: 731214 - DNA, 100 bp, Homo sapiens
ataataaagtgccctattacatcaaaacctatgagaaccccaaagacattaaagattgctgaaatacaggcaagacggattgctgtggactgggaatcct

SEQ ID NO: 731215 - DNA, 97 bp, Homo sapiens
cacatctcaactaacagtattgacgctgtaagagcatcagggaagtgttcgccagttactacatgaaaagataagagatgcttatactcacccacaa

SEQ ID NO: 731216 - DNA, 74 bp, Homo sapiens
atttcggaccaggaccaggaagtaactttagaggaggatctggccctcgggaccaaggatcacgtcatgactcc

SEQ ID NO: 731217 - DNA, 87 bp, Homo sapiens
cgacttggattacagaatgacctcttctccttgtgtgaagcagtattctggaaagtttttctaagactagtgaagaactgaaggagt

SEQ ID NO: 731218 - DNA, 100 bp, Homo sapiens
cttcatagctctggcgattggaaccctctactccaacgccctcttccagctcatcccggagtctgaagttgcagccggagtgaagaagagcggaccgctg

SEQ ID NO: 731219 - DNA, 99 bp, Homo sapiens
agaggagctttaccgcaattatggcatcctggccgatgccacggagcaagtgggccaggattctgaaaccttccttgtatccctcctgagacatctttg

SEQ ID NO: 731220 - DNA, 75 bp, Homo sapiens
acactagagacagacggctggcagggttcccagttttccagacctgaagtgttttccaatcaaagcgaagagacg

SEQ ID NO: 731221 - DNA, 80 bp, Homo sapiens
ggggcctgccccccacgccgagctggccgcgccgaccaccatcccggtcaccacgaggctgatgtggtcatcaagttccc

SEQ ID NO: 731222 - DNA, 75 bp, Homo sapiens
gcgctgtcttcccgcttgcgtcagggacctgcccgactcagtgaacctagaagtcggaatccggaagaagatcga

SEQ ID NO: 731223 - DNA, 100 bp, Homo sapiens
gttttaggggccagcagatgcaggaaaatttcgatattgaagtgtcaaaatccatagatggaaaagatgctttgttttccggaaagttcgaagcttgcta

SEQ ID NO: 731224 - DNA, 98 bp, Homo sapiens
aaaatttcgatattgaagtgtcaaaatccatagatggaaaagatggtgaccctgacgtcctccttggcttgaagcaagggtagctaatgagagaaggc

SEQ ID NO: 731225 - DNA, 83 bp, Homo sapiens
tgcagacttggccaaatggacgggactattaagaacatgaaaggctcccggagcagcgctgactcctccaggaaacactgagg

SEQ ID NO: 731226 - DNA, 75 bp, Homo sapiens
ttcgatctccgccctggggtcattgtcagtgacctgtgtaattatgcagaagaatggagctggattacacacagc

SEQ ID NO: 731227 - DNA, 100 bp, Homo sapiens
gtttccacttcccaagaaccttctggccaaggtgattcagattgcaacgtcatcctccacagctaagacatatctgaagagatggattaagaatgctttg

SEQ ID NO: 731228 - DNA, 100 bp, Homo sapiens
cggggccacagaggactactcctatggcagctggtacatcgatgagccccaggggggcgaggagctccagccagagggagcatgtcctttgcaacctgat

SEQ ID NO: 731229 - DNA, 75 bp, Homo sapiens
gtggtggccaagtatgcgcccagcggattctacattgcctccggaggccaggccaggatcagatgggaagtggaa

SEQ ID NO: 731230 - DNA, 98 bp, Homo sapiens
aatcaggctgacctcgacacagagtggaatctgtttatagacgtgcagttcctggcctcggtgctgcccccagacacggatcctgcgttcttcgagca

SEQ ID NO: 731231 - DNA, 100 bp, Homo sapiens
cttttgtggggcacgacgagaaagtccgcagccccaaacattactccacaggatccgctgaacataggatgttgccacaaaatctacctcgtgtattttt

SEQ ID NO: 731232 - DNA, 73 bp, Homo sapiens
agccactgattagcaatttaaagatcctctccaagaccattaaaaatctcaagtgacgactttgggaaactct

SEQ ID NO: 731233 - DNA, 101 bp, Homo sapiens
aaggagttcaagaattcccagaagaggcagcatgcggaaggcattgctgggagcctgaaaactgtgaatggaactaccactgctggaatgaagcatggatg

SEQ ID NO: 731234 - DNA, 75 bp, Homo sapiens
gtggatggcaaatgctgtaaggaatgcaaatttccatctcccaacctctatagccagctgaatgcactacagttt

SEQ ID NO: 731235 - DNA, 82 bp, Homo sapiens
ttactccattttggccagaaattcaaggatatgggccctcacattttccaaacctgtccatctgctaactattttgactgca

SEQ ID NO: 731236 - DNA, 89 bp, Homo sapiens
tgtgggtccattctgtagacgagtatctgatttaggaaagtcctatcggatgctgagatcattcagatggagagaccagagaagagaac

SEQ ID NO: 731237 - DNA, 82 bp, Homo sapiens
gccgggagcgacttccaggatatagccctggagcatggagatatggaccaaaaggaacgagacgtgattatgagggagtttc

SEQ ID NO: 731238 - DNA, 50 bp, Homo sapiens
gttcaacgtgaaggtgatccgaggggacggcaaaacagaacagaaaggcg

SEQ ID NO: 731239 - DNA, 98 bp, Homo sapiens
cggagagcgagagcgcgaaggaaatctggccgccgccgccgcgagcgctcccggtaagaatgattgatgttggctgatattggagtgctcattcacat

SEQ ID NO: 731240 - DNA, 98 bp, Homo sapiens
tggtgccaaacagggcagaacgcaactcagctctgggaaacgcttcgttaagggactcaggcagtacgggaagaacttcttcagaattagaaaggagc

SEQ ID NO: 731241 - DNA, 75 bp, Homo sapiens
gaagaaagcggatgttggttttgccatggattacagtttaaagacaatttctgtgatcaagttgtcatttggaag

SEQ ID NO: 731242 - DNA, 82 bp, Homo sapiens
cttgaagtttgtggatgaaaattgggaaggttccctcaagtccaaggaactgtggctgcaccatctgtcttcatcttcccgc

SEQ ID NO: 731243 - DNA, 75 bp, Homo sapiens
gccacggtgatgagccgggcctggcggacgcggcgccatcgcagtcaggcgcccaattcccagatgcctacggga

SEQ ID NO: 731244 - DNA, 126 bp, Homo sapiens
ttcgagtgcctctacccataccctgttcatcacccatgtgacagacagagccaggaaactctgatgaggaagaaagtgcttcagaatctgaactttggaagggtccactaccagagacagatgaaa

SEQ ID NO: 731245 - DNA, 100 bp, Homo sapiens
agaggaagtgattcggagaaactgagagcattgaatgtgcaggttctttcagcgatgaagaacgatacagatacagggaatatgcagaaagaggttatga

SEQ ID NO: 731246 - DNA, 50 bp, Homo sapiens
cagggggaagttccacgcactttatcagcatgcagtgacctggagttcag

SEQ ID NO: 731247 - DNA, 51 bp, Homo sapiens
caacgagatcctgcacatgtctttcaaaacagtgcagcagacttgtccatg

SEQ ID NO: 731248 - DNA, 75 bp, Homo sapiens
actccctcaagtttcatttgtgaagaaactagaaaaactgcttttggaattatctctacagtgaagaaacctcgg

SEQ ID NO: 731249 - DNA, 74 bp, Homo sapiens
ggagtcctgccgtagcatgattgcgctcatggatggcatgacgcgcctcctgctcaccaagattcccttcttca

SEQ ID NO: 731250 - DNA, 96 bp, Homo sapiens
agctgacggtggaggttcgcggctctaacggggctttctacaagcagagagactttcaagcagctggctggatgttcgtcatattgaaaagtatgt

SEQ ID NO: 731251 - DNA, 100 bp, Homo sapiens
gcactgcatggttgctgctggatgtgttgtgttcctggcttccctctggatgctgacagaaacaagggcttatggagattttgcatggagtaaccccctg

SEQ ID NO: 731252 - DNA, 51 bp, Homo sapiens
cctgaatcttggtgtttggacataggagtgggaccctgaagatgtgaacct

SEQ ID NO: 731253 - DNA, 80 bp, Homo sapiens
gggcaaccgggcggccacgttcccgctgcaggtcaatgagctgaaggagaaaggcaacaaggccctgagcgtgggtaaca

SEQ ID NO: 731254 - DNA, 100 bp, Homo sapiens
gccgcagtgagttgggcaggttcttggccaagcagggtggagccagccatcctgagacgtccgtacagcccgtactggtggagtgtcaggaggccactct

SEQ ID NO: 731255 - DNA, 82 bp, Homo sapiens
cccaagtagctgggattacagaacctcaagaaggcatgaagccagcccctgcagtgccgtccacccgcccctctgggcctgc

SEQ ID NO: 731256 - DNA, 75 bp, Homo sapiens
gtgcaggctctgaaagcccgtatgacctccttccacagggtcacctgtctgtgtgcccagtttgaagccgtcctg

SEQ ID NO: 731257 - DNA, 100 bp, Homo sapiens
gatgacgcagtaagaaggccatcagtagatgccagtccctcaaccttgaactttccagacgcagaactggcaagtgtccagagaatggctgggatgaaag

SEQ ID NO: 731258 - DNA, 88 bp, Homo sapiens
cgagcggccgaagcagctttgcgcttcctgcctgacacagctcacttcaagaagtgcacaatgtcagaacgtggaattaagtgggctt

SEQ ID NO: 731259 - DNA, 100 bp, Homo sapiens
tgcaccgccaccggcccgacctcatgtccggcgggcggtggcctccgtggtgggcggctggctgctgtgtctgcgtgaccgttactccttcttccacaag

SEQ ID NO: 731260 - DNA, 98 bp, Homo sapiens
gaagagctgcagtctttgtgggacaaggccctgctgctcctgggggccgccgccctggcctgcctcgccctggacctcctcttcctgctcttctactc

SEQ ID NO: 731261 - DNA, 97 bp, Homo sapiens
taattattctccaggttggaaattcaatcactgggagctcaaggtcagaagagatcaattctacagaaatttccagtggttctgttgaggctttatg

SEQ ID NO: 731262 - DNA, 50 bp, Homo sapiens
ctccaggattagggaaagtcaatggtggtggaagatggatatgaattttt

SEQ ID NO: 731263 - DNA, 83 bp, Homo sapiens
cttggactgagtcctgcaggacacaggtcatgcaagacaagataatctgccttccgaaaagagtgcagcctgctcagaaccac

SEQ ID NO: 731264 - DNA, 49 bp, Homo sapiens
gcgcgaccacagctatgcgaccgaaggagtcttttagtcctgctataca

SEQ ID NO: 731265 - DNA, 100 bp, Homo sapiens
cctctgatggcaccttacttcagcccctcaagggacacaaagacactgtgtactgtgtggcatatgcgaaggatggccttcccttcttcttggtggtgtt

SEQ ID NO: 731266 - DNA, 95 bp, Homo sapiens
ctatggacgactccgaggaacattgagtgaaacctgctgtggaccctgctgctgccaagctgtggaccctctcagccaacgatatggaggacgac

SEQ ID NO: 731267 - DNA, 100 bp, Homo sapiens
gccactgccagcactggggtggcagcctgccacatcgggggcaccaccctccatgcctttgcaggtgggagatgccatcccagcagtggaggtgtttgaa

SEQ ID NO: 731268 - DNA, 100 bp, Homo sapiens
agatgttgtcaaggtggcctaccaggaggccaggggtgtcgccatggtccttgaatgggcaagagggcacatgaagtacggcgtcctccacattcacggc

SEQ ID NO: 731269 - DNA, 98 bp, Homo sapiens
tgtcctggtggcagaaacaaccatggccaggatacgaagagtccaccctgcacctggtgttgcgcctgcgaggtggcattattgagccttctctccgc

SEQ ID NO: 731270 - DNA, 75 bp, Homo sapiens
ctcggagcgcggtccctgtattggtctcctgctcctagagggatcagtgtccttcagtgatgtggctgtgggctt

SEQ ID NO: 731271 - DNA, 101 bp, Homo sapiens
acaacggaaggaagctgatcacaaagcccagttggctcgaacccagaagctgcagcaggaacttgaggctgccaatcagatgcctggagttactgtaaaag

SEQ ID NO: 731272 - DNA, 75 bp, Homo sapiens
atttaatccagaagtatttcaaccacagatggcactgccaacaggtctcgtctacagaggactggtctttcaata

SEQ ID NO: 731273 - DNA, 98 bp, Homo sapiens
ggcgcgcggcgctctggctctggctgtgcgcgctggcgctgagcctgcagccggccctgccggctcttgcagccaatgccggaacaggatttgctgtt

SEQ ID NO: 731274 - DNA, 82 bp, Homo sapiens
cagaccttgccagagacctggcaaatgacatcatgacactggcacgccagccccacgggcctgctcctgacggtgctggtgg

SEQ ID NO: 731275 - DNA, 113 bp, Homo sapiens
gagatgccgggggagcggggccttccacaccccctccgtgggtgtgtggaagtgctctctggcgtggtggtcatatcgagtaaggattcagtccaacaccagggagtgtcttt

SEQ ID NO: 731276 - DNA, 75 bp, Homo sapiens
agctaagactccaggacacccctgaagccgagaaatggttcgatacaagaggctgttttcctagcgtggcttgct

SEQ ID NO: 731277 - DNA, 75 bp, Homo sapiens
actttccaaatggcagaatacctgaaactggagtttatcaaggatgagatggccttctgctacacccaggctccc

SEQ ID NO: 731278 - DNA, 101 bp, Homo sapiens
attgcaccactgcactccagcctggattcactttataggaacagcttcagcttcagtgatgaaaaactgaattctccaacagactctaccccagctcttct

SEQ ID NO: 731279 - DNA, 100 bp, Homo sapiens
ccacctacagaaacaaaatgtcaacaaattgatgggctttggtgaagcacgtgcagtctaaaggatacccaaatgaacgttttgaacttctcaccaactt

SEQ ID NO: 731280 - DNA, 75 bp, Homo sapiens
gttgtctccgatccagaggatctgcaagtacccgctcctccttaagagatccgtgctcagctcacagagcagatg

SEQ ID NO: 731281 - DNA, 75 bp, Homo sapiens
tgcagaactgggttctggactttgggcgtcccattgccatgatgaagatgaagatggtgatcgaattacagtgag

SEQ ID NO: 731282 - DNA, 75 bp, Homo sapiens
tcagatgctgccagggtccctgaagagggaagacacgcggaaacaggggccagtgtcattcaaagatgtggctgt

SEQ ID NO: 731283 - DNA, 82 bp, Homo sapiens
accccttctcccaggaggggagacaatgcagatcttcgtgaagactctgactggtaagaccatcaccctcgaggttgagccc

SEQ ID NO: 731284 - DNA, 90 bp, Homo sapiens
gctggtcacagccacactctgcaccgctaggccgtccccgaccttgcctgaacaagatgaagatgacgccaacagactcggggagaaggt

SEQ ID NO: 731285 - DNA, 80 bp, Homo sapiens
ccttagaagaaacaattcttcgacatactctccagcttcaagtgaacatgattaaagatgatgggacagttattcatttc

SEQ ID NO: 731286 - DNA, 80 bp, Homo sapiens
gcctagtaatgactgggatatttactactgggccacagatgacagtcatgtccctttccagggacctcaaggacgacttt

SEQ ID NO: 731287 - DNA, 100 bp, Homo sapiens
ctcgtttcctgggaggagtataaaaatgccacctacggctacgttttaggctgagggtaaaaagctgggattggtaggctgggtccagaacactgaccgg

SEQ ID NO: 731288 - DNA, 75 bp, Homo sapiens
tccatgggaaaccttcggtggtgtacagatttttcacaagacttggacaggtctcctctgagcctccggcctcca

SEQ ID NO: 731289 - DNA, 108 bp, Homo sapiens
agggatcgctgcaacctttagactaatgactgtccgaaacatcgcctccatctgtaatatggtacagcagggaagaactggaaactcagagaaagaaactgcccttcc

SEQ ID NO: 731290 - DNA, 83 bp, Homo sapiens
caggcggcgcaacccccggcggttccagtacagcttgtgctgcattgcacctgtcctcgcggccaaggtgctcagaggcgtcg

SEQ ID NO: 731291 - DNA, 82 bp, Homo sapiens
acagtggacaaccagaaagaaagtttatgcaaacctttgttctggctcctgaaaaagcacagctgagtacaagctaactgga

SEQ ID NO: 731292 - DNA, 88 bp, Homo sapiens
tgccggtgccggcctagcgtcctggaattacttcaatcaagtcatgactgtccaaagtatgataatcacatgagagtgctcgttgcta

SEQ ID NO: 731293 - DNA, 75 bp, Homo sapiens
cccaggtccccgcccgcaggtcccgggcaggatgtacagttacccagcacgtgtacctcctcctcctcctattgc

SEQ ID NO: 731294 - DNA, 83 bp, Homo sapiens
ggacgttcccttcacggagaaagattttgacagaaaaatatggctcaggagactaaccagaccccggggcccatgctgtgtag

SEQ ID NO: 731295 - DNA, 78 bp, Homo sapiens
ttctctccctctgcccccccttccccacgcaaccccagatccatttacactttacagcaacagcattattgagaaaag

SEQ ID NO: 731296 - DNA, 90 bp, Homo sapiens
caagctgaagcggatcctggaggagcgccatagtatccacttcatcattaagagaacaccttccaccatgaccacctcagcaagttccca

SEQ ID NO: 731297 - DNA, 98 bp, Homo sapiens
ccaaccgctggtcctttgacggcatcgaccgctggatcaaggagatcgatgagggtggcgctccaaccccctttgaccggaactatgggaccaagctg

SEQ ID NO: 731298 - DNA, 100 bp, Homo sapiens
tgatgacagtctgcctctatcttacacaaagcatgcgtgagaacaaggagaagcaggcgctgtctgacctcatgatcaagcctgtgcagcggatcccacg

SEQ ID NO: 731299 - DNA, 83 bp, Homo sapiens
aagtgattcaagttaatcatcagactgtgcagttcctacagaggttgacagctaccatagcctattccctctagaaccactgc

SEQ ID NO: 731300 - DNA, 75 bp, Homo sapiens
ctgcctcagagccccacctgagcctgccgactggcttcgtgggacacatatgcaacatgcctatgatttttacaa

SEQ ID NO: 731301 - DNA, 83 bp, Homo sapiens
cgacagcacagacagaatccctgctaccaactcaatgatgaggcacggcggctcattgctgatttggggagcacatctattac

SEQ ID NO: 731302 - DNA, 74 bp, Homo sapiens
ttttttttttttttaggtaccagcatcaagatgatttatggtaataagttcctggtccagaactttacacagaa

SEQ ID NO: 731303 - DNA, 100 bp, Homo sapiens
cacgggcatcggaaaagccatcgtgaaggagctcctggagctggtgtcttccatctgaaattgaagtgaaatacaaaatggctgaatgttatacaatgct

SEQ ID NO: 731304 - DNA, 80 bp, Homo sapiens
acctgcagaaggtctctggagacatcttcagcagtcacaggtccaaggggcaaatagcgaattcccatggaggagaatca

SEQ ID NO: 731305 - DNA, 157 bp, Homo sapiens
cggggccacccgcgagtccagcgtcgccgcagccccccaatgcggccgcgagaagcagcgggggggcaggcgatcgaagactcatgtagacaaagcctgcaagcttggggaagccaggcacccccaggtcagcctcgggcgacagcccccgtcctgc

SEQ ID NO: 731306 - DNA, 97 bp, Homo sapiens
agtactgagcctgttggaggaactggcccggaaacaggaggacgttaacacagaaatctgcctcctgggccatgccgcttctaaggcctgtttcttc

SEQ ID NO: 731307 - DNA, 83 bp, Homo sapiens
cgggcaccgcggtgctgctggtcacggccaacgtgggctcgctcttcgacgacacctgcctagagctggaacgttacctccag

SEQ ID NO: 731308 - DNA, 100 bp, Homo sapiens
gcagactttgctgagggtgacccaggtacttcgacctggtgtcctgtggtttctaaggaatttgaatgatccagatttcaatccagtacaggaaatgatc

SEQ ID NO: 731309 - DNA, 106 bp, Homo sapiens
ctcgctctgggtctccaggcccgcgaccgtccgccagtcgtcccgaggtgaggcggaaccaaccctcctggccatgggaggggccgtggtggacgagggccccaca

SEQ ID NO: 731310 - DNA, 96 bp, Homo sapiens
cggactgcgccgcccgaggccgtcggccgccgtcagcgagggcgccgagcaacttcggatagagcctcctcaaatccaaatgctaccagctccagc

SEQ ID NO: 731311 - DNA, 90 bp, Homo sapiens
caaaaaggtgcatataccactgaggcggggtttcaccatgttgcccagactggtcttgaactcctgagcttaagcaatccacctgcctcg

SEQ ID NO: 731312 - DNA, 75 bp, Homo sapiens
tcagttggaagcagccgatccagcctgcggagcctgtggggcagtgtcctgggtcatgaaacttaatccacagca

SEQ ID NO: 731313 - DNA, 50 bp, Homo sapiens
accgccctggccatctaccatgtggtgaaaggtgtagcagtcactcggcc

SEQ ID NO: 731314 - DNA, 95 bp, Homo sapiens
cgtggactaagaacgcattgccgccggtcctgaccaccgtgaacggacagtcccccccagaggagaaggcagagcccccccaggctatgaatgcc

SEQ ID NO: 731315 - DNA, 75 bp, Homo sapiens
accgctcaggtgctgcaggcacagcccgagaaaccgcagcactacactgacttatcagatgccctggtcatcttc

SEQ ID NO: 731316 - DNA, 101 bp, Homo sapiens
ggtgcgtggggctgcctcgccgcgtctcgccacgtggaatgcagtagccctctgggcctgggatattgtggttgataactgtgccatctgcaggaaccaca

SEQ ID NO: 731317 - DNA, 80 bp, Homo sapiens
agggatgatgaagaagacctgctggatggtgctcctggagctgttggtgggaatatacccctcaggggttattggactgg

SEQ ID NO: 731318 - DNA, 98 bp, Homo sapiens
gtgaaatcctgtcctgaagactgtaagttggttgaatctggcgatgtggaacccatggatatggagggctgactatatacaccatgttttttcctggc

SEQ ID NO: 731319 - DNA, 103 bp, Homo sapiens
gaaaaaccgcgaagtcatggggctctgtcgggaaggtgctggagaatctggtaaaagcaccattgtgaagcagatgaggatcctgcatgttaatgggtttaat

SEQ ID NO: 731320 - DNA, 76 bp, Homo sapiens
ccccgaccttcacctccagtttatgactgcctgcggccaggaggacaggagaacttgccgggctggaactacacct

SEQ ID NO: 731321 - DNA, 96 bp, Homo sapiens
gccctgactgagctgctggctaagatcaccaacacagacgtgcatcaagatggtgctcatgtggaccagtggtgacgccttcaagacggcctactt

SEQ ID NO: 731322 - DNA, 83 bp, Homo sapiens
tgacatccctttccgagtcaactggcccggcaccgagttctctctgcaaattgtggctactaatttgccccctgaagatcaag

SEQ ID NO: 731323 - DNA, 100 bp, Homo sapiens
ggggaagaggcccaccctggagtaaccctcactggagaatccagagaatggaatcactagttccccttgtacagagtttgaaaaaacggatggaagtacc

SEQ ID NO: 731324 - DNA, 100 bp, Homo sapiens
gtggtgacaccagctctgaagtaagcacagtagaactgctgcatctgcaacaacagcagccaacaaatggaattttcttgagcatgtttctaatcgtttt

SEQ ID NO: 731325 - DNA, 90 bp, Homo sapiens
ctttaaatccggagggggaaaaaatcccaaggtctgcaaagctggcccccaagaggaccctttccaagtccccagctgggggccctgtgt

SEQ ID NO: 731326 - DNA, 82 bp, Homo sapiens
ggaaagttgaaggggacatgtatgaatctgcaaacaatcgagtcgaagaattccatccactgacgccaacctgccatctggc

SEQ ID NO: 731327 - DNA, 50 bp, Homo sapiens
ggcgcggggaccgctgtgctctcgtcaccttcaggccattcagaggagga

SEQ ID NO: 731328 - DNA, 50 bp, Homo sapiens
ggagctcaaagtgtgccttctcgggtaatgctacagccctttgactatga

SEQ ID NO: 731329 - DNA, 83 bp, Homo sapiens
aaccgggacccggtgtctgctcctgtcgccttcgcctcctaatccctagccactatgacccaacatgagtgaagtttcctgca

SEQ ID NO: 731330 - DNA, 100 bp, Homo sapiens
ccccgcatcacgtgtctgcactcgctttcctcggattcccggatgtgggatgcttggatattaattcatctgtgaaaggggctcgttttgtcagattctg

SEQ ID NO: 731331 - DNA, 100 bp, Homo sapiens
gagctcatgtggcctgcggctcctgtcgcctgtagtatggacctgtctgccaatcaggacgaggagaccgaccaggagaccttccagctggagatcgacc

SEQ ID NO: 731332 - DNA, 74 bp, Homo sapiens
acacagggagctccaggactcaccctcagagctgccaaacggaggcccgaagaaaaagaacctgaaaaagtaaa

SEQ ID NO: 731333 - DNA, 73 bp, Homo sapiens
gactatggttatgggggacaaaaaagacctttagaagatggagaattggcagagggggtcgatttgggaggaa

SEQ ID NO: 731334 - DNA, 90 bp, Homo sapiens
ggcatgatagaatctgatcctgacttaggggaatattttctttttacttcccatcttgattccctgccgaacgacaccgtaactatccgc

SEQ ID NO: 731335 - DNA, 98 bp, Homo sapiens
ggcgtggagatatggcgcaactgcggcgcatctgtctcgtaactgtgtaatcaaggaactagcaccacaacaggaaggtaacccaggagaagtattcc

SEQ ID NO: 731336 - DNA, 83 bp, Homo sapiens
ggccggcccagagctcccgggtcgtctttcgtgtggccgcgaggtcagcccaaggccaaccccactgtcactctgttcccgcc

SEQ ID NO: 731337 - DNA, 100 bp, Homo sapiens
gtttttcctgtcgtacgtgggacaggccacgctgtccgtccgcagtaccgacgcctgcagggtttccaggcctgaggtgcccgccctggccccaggagaa

SEQ ID NO: 731338 - DNA, 98 bp, Homo sapiens
ccggcgcctcggacaccttcgagggttgggccatcatgcacggacgaggcagaggagtggccggtcccatgggccgggggcgcctgatgccaaacaag

SEQ ID NO: 731339 - DNA, 96 bp, Homo sapiens
gcaatagatacatggagcccatcagaatggcagatggcttatgaaccacaggtgccttcaaatctcttgacaaagatggcactggacaaatccagg

SEQ ID NO: 731340 - DNA, 100 bp, Homo sapiens
cggccacagcctgcagcggagcccacgagaggcagcgccatggcggagcagacctactcgtggcttatcaggagggcagacttcaaaagctactaaaaat

SEQ ID NO: 731341 - DNA, 100 bp, Homo sapiens
tggaagcaggactgcgccgcgtcttcctcaaggtacttggaaaaatggacaaggattgtgaaatgaaacgcaccacactggacagccctttggggaagct

SEQ ID NO: 731342 - DNA, 75 bp, Homo sapiens
catccgttggatatccacaccatccttctcgctgcaggcacctgtgagaatatgaacttctcttggaggaatgaa

SEQ ID NO: 731343 - DNA, 82 bp, Homo sapiens
aacatggaggaggaagaaatgaatgatggctcacagatggtgagatctcagaaatggcacctcgaaaggggaaggaaaagaa

SEQ ID NO: 731344 - DNA, 90 bp, Homo sapiens
attgttacttagtgctgccacctgctggatgttaaaaggaggagacatcacagctttcccagatcgggaggaaaaatatggaatgtgttt

SEQ ID NO: 731345 - DNA, 100 bp, Homo sapiens
gtggctggttctggtgctggtattggaacagtctttggcagccttatcattggttatgccagctgcactaatggaaagattgcctctagctgtcagttat

SEQ ID NO: 731346 - DNA, 83 bp, Homo sapiens
ctcgggagccctggagtccactaaagcggcaacatgagtgagaatgaggaagaggaaatttctcagcaagaaggcagtgggga

SEQ ID NO: 731347 - DNA, 82 bp, Homo sapiens
cgctgcaacctttagactaatgactgtccgaaacatcgcctccatctgtaatatgcgatgaagaacgatacagatacaggga

SEQ ID NO: 731348 - DNA, 75 bp, Homo sapiens
cctatggcaacagcaaccatagcaacagccatgtgttttccagaatgccgaactggggaggaggcaagaaatgtg

SEQ ID NO: 731349 - DNA, 90 bp, Homo sapiens
cgggggtggtgccgcgctcctggccccgcgcgggcggacggcggaggcgcctcccagccagagactgctgctactttgaaacgtacgata

SEQ ID NO: 731350 - DNA, 97 bp, Homo sapiens
acagtcttccgcaggaaggagatgtgaaggtctgaagaaaaccctgcgggatgagatcaatgccattctgcagaagaggattatggtgctggatgga

SEQ ID NO: 731351 - DNA, 83 bp, Homo sapiens
ctatcacctgccagctcatcacaaaatatgagatcctgactccaaactccattcccaagggtttcatggacgggaagcaggcg

SEQ ID NO: 731352 - DNA, 100 bp, Homo sapiens
ggaacagagactctttggtcaaaagatatggcgccatatcaggaatatgcttttaaggctattaaccagggtggccttacatcagtagctgtcagaggga

SEQ ID NO: 731353 - DNA, 115 bp, Homo sapiens
ggacggggagctgaacgtggacagcctcatcacccggctgctggagggagaagatgcagtagaggatgatgctgaagagaaccctattgtcttagagtttcagcaggaaagggag

SEQ ID NO: 731354 - DNA, 87 bp, Homo sapiens
ccaaggggtggccgctgccaagcagggattaacatctgctcgtgcagctgagatcctggcgcgagatggtcccaacgccctcactcc

SEQ ID NO: 731355 - DNA, 75 bp, Homo sapiens
tcaaaacttaactcctggatacagatactcacatgcgcagtacctgctatggaggaatcaagaaaggagtgtgtg

SEQ ID NO: 731356 - DNA, 100 bp, Homo sapiens
gacactccagagtgaacagcctttacaggttgccagggaagtatgggtagtattacctgcatcgcttggaaaggtgatacattagtgcttggagatatgg

SEQ ID NO: 731357 - DNA, 100 bp, Homo sapiens
caactagttcctgaatataaggaaaaacagacacctgaaagtcttcctcaaaataacaatccaggggcctttacaacaactaaacggacaggcattccag

SEQ ID NO: 731358 - DNA, 49 bp, Homo sapiens
atggaggctgagcatttattcaggatgttgagaaagagaaggaaaccca

SEQ ID NO: 731359 - DNA, 88 bp, Homo sapiens
ggctgatttagaaggaggttcaggctacggtgagccgaaggtgcgcttcccttcccacttcagctctgacttgaaggacctgctgcgg

SEQ ID NO: 731360 - DNA, 50 bp, Homo sapiens
ggtgggcagtgagcggaagcgaatcatgtttgagaccttcaacaccccag

SEQ ID NO: 731361 - DNA, 51 bp, Homo sapiens
catagcattcgcctactccgtgaaggaggagcccccaccgagccgagtccc

SEQ ID NO: 731362 - DNA, 75 bp, Homo sapiens
gccgtgtgccatgactacgacatccacttctaccccaccttccggatcaactactacttcatcaacagccagggc

SEQ ID NO: 731363 - DNA, 82 bp, Homo sapiens
ccgcggcccgctactctccgggaggggcgcttcccgacgccaaggtgctgacctcgctatcaaatacccaagttggatgttg

SEQ ID NO: 731364 - DNA, 100 bp, Homo sapiens
gccaatgttggagccgtctgcaaagtgtccccggcaagaagtacaagccagctgccatgttgtgagcacataccacatagctccatggagatgcccatgt

SEQ ID NO: 731365 - DNA, 100 bp, Homo sapiens
gccgtgcccctgtcgagtcccgactactacgagaggctgggccaactccagcacgggctgcgggacagaatcccaaggactgcagcaaagccaaaaagct

SEQ ID NO: 731366 - DNA, 82 bp, Homo sapiens
aagtggtgaaacccaaacaacatctcctgctattccttgggctgcctttcctgcagctatttgagaaagtcaaagaagtttg

SEQ ID NO: 731367 - DNA, 75 bp, Homo sapiens
cttccatccgccagctgccatgagcgagcgcctccgtcccagggtcgagctgtgcagttttagcgggtacaagat

SEQ ID NO: 731368 - DNA, 90 bp, Homo sapiens
cctagcaccccgagaaccgtcagtttgagccagatgataatctcagtgataccttgaagaagctgaagataacagctgttgacaagactg

SEQ ID NO: 731369 - DNA, 100 bp, Homo sapiens
cgcagacccctcggaggctgaagcgacgccggaggcagaaatgcatcgtgattcctgtccattggactgtaaggtttatgtaggcaatcttggaaacaat

SEQ ID NO: 731370 - DNA, 130 bp, Homo sapiens
ccgccgctgcgcccgacgctccctgtctgggaccttctccctgcctggacccctactattgcaacaaggtggataaattagatgcttcagaatcactgagaaaagaagaagaacaagctacagagacaca

SEQ ID NO: 731371 - DNA, 76 bp, Homo sapiens
aagtaacatgactaaaaagaagcgggagaatctgggcgtcgctctagaggtgctgagcacagtgctctccatgtat

SEQ ID NO: 731372 - DNA, 96 bp, Homo sapiens
tcttcctaagctgaagaacctctacctggtgctcctggagctgttggtgggaatatacccctcaggggttattggactggtccctcacctagggga

SEQ ID NO: 731373 - DNA, 75 bp, Homo sapiens
tgagctactttttacagggcaagattaaactgcaaatatctcatgaagctgctgcctgtatcactggtctccggg

SEQ ID NO: 731374 - DNA, 101 bp, Homo sapiens
aggagatggatgagaggaggcggcagaacattgcttatgaatatctgtgccacttagaggaagccaaaaggggtttgccaacttgttaataagatggagga

SEQ ID NO: 731375 - DNA, 87 bp, Homo sapiens
acttcccagcaggaattgagccacagagtaattatattccaggaacaagcacatcatgattgacttggggactggcaacaacaacaa

SEQ ID NO: 731376 - DNA, 103 bp, Homo sapiens
cacactgctccaccagtcctctgacaagtttgtctcggagctgtggaaggatgcggagtttaagagagctgtgaaagtagcaacaggacaagaactctcaaac

SEQ ID NO: 731377 - DNA, 75 bp, Homo sapiens
gtcgacctgccggagtcgaggattccagggtcgaacactcgaatatgacagatacctagcatctagcaaaataat

SEQ ID NO: 731378 - DNA, 100 bp, Homo sapiens
gccgccgccaccgccgccgaggagtcaggaagttcaagatggccgccgcggagacccagtcgctacgggagcagccagaattgataggcagcagtttgaa

SEQ ID NO: 731379 - DNA, 100 bp, Homo sapiens
aggagctacgaggctacatgaaccgggaagcctgggccgagccagtggcccccagaggatgagaaggaggtgatccgccgggccatccagaaagagctga

SEQ ID NO: 731380 - DNA, 100 bp, Homo sapiens
ggagagaagaagagaggccttcaccaatattgtgtatctgaatgatatgagcctgatggaaggggacaatggagtcacagatgctgggaagtatggcccg

SEQ ID NO: 731381 - DNA, 83 bp, Homo sapiens
ggccgccctgggccgggccccaccggacgcatctgggctgatgggccgtaccctgcaccgtgagccacccgcaggagaccagg

SEQ ID NO: 731382 - DNA, 90 bp, Homo sapiens
cctgaggttgtggaaaaggaagattactcagagattatagggagcatggatatgtcttctccgactactatgaagaagcctgaaaagcca

SEQ ID NO: 731383 - DNA, 74 bp, Homo sapiens
taacatcgtgacctccagttccatccatgttgctgcaaatgcaaagtaaagcagcggttcggctgaaagaagac

SEQ ID NO: 731384 - DNA, 111 bp, Homo sapiens
cccaccttccctcgccctaatcccccaacgaggaaggaaggagcagttggttcaatctctggacaatgcagatcttcgtgaagactctgactggtaagaccatcaccctcg

SEQ ID NO: 731385 - DNA, 100 bp, Homo sapiens
tccagaagaccgagcgggactatgtgggcacgctggagttcctggtgtcggtactccaaagattcaggtttactcacgtcatccagcagagaatggaaag

SEQ ID NO: 731386 - DNA, 96 bp, Homo sapiens
taacctgccccggcttcaggatttacacagacgtggggcgatgcttgtgaccctgcagctcctcaaagtgtcatggagaaactccagctgggccca

SEQ ID NO: 731387 - DNA, 98 bp, Homo sapiens
cacacagaattctctacatttgtgaaagtcagtttctgaggaatttcatcaggatgaagtaggtgttccaggtagcaattcagctgacctattgcgct

SEQ ID NO: 731388 - DNA, 90 bp, Homo sapiens
aggcccaacaaaagagactagaagccttattcactaaaattcaggaggaatttgaagaacatgaagtatgatgaagaaggtgaagaagcg

SEQ ID NO: 731389 - DNA, 82 bp, Homo sapiens
aaagcagcgtgcgttcagccctgggctcacggacacagacctaattaaacagtgtatagatgaatgcacagccaggattgaa

SEQ ID NO: 731390 - DNA, 90 bp, Homo sapiens
gggccgcgaacacctcactattgatggtgtagcgctttaggggaagatttgataatgggctgcattaaaagtaaagaaaacaaaagtcca

SEQ ID NO: 731391 - DNA, 82 bp, Homo sapiens
gggcttccactgattctacattatggtgagaattatgaagatgatgacctagtaaattctgatgaggttatgaagaaaccat

SEQ ID NO: 731392 - DNA, 98 bp, Homo sapiens
gcaaaatcaaccagctttcggaggagaatggagacctttcctttaaggtctcggcgcggaagatggccggcggcgtggacggccccatcgggatcccg

SEQ ID NO: 731393 - DNA, 100 bp, Homo sapiens
cttgaggaaggacctatgatagaacaacttagcaaaatgttctttactactaagcaccgttggtatcctcatggacggaattacatgaatgacagtcttc

SEQ ID NO: 731394 - DNA, 100 bp, Homo sapiens
tatatcaagccaaactttgtgattcaggagaactggtcgccatcaagaaagtattgcaggacaagagatttaagccgcggcccatggagcccgccggccc

SEQ ID NO: 731395 - DNA, 100 bp, Homo sapiens
gaggaggacgccgcggtgaagttctccgccatgaacctgaggggcctcttccaggacttcaacccgaggattttaaacaatttgaacctaatgactttta

SEQ ID NO: 731396 - DNA, 75 bp, Homo sapiens
cctcaagcctatgaactgccctgcacactgggttccaaaaggtcccaggtgtcctctccgtgcagtcggaaaaag

SEQ ID NO: 731397 - DNA, 96 bp, Homo sapiens
tgaaaagtcgcagcgagctggagccgccggagagacggaacctcactatgttgcccaggctggtctcgaactccttgtctcaagggatcctcccac

SEQ ID NO: 731398 - DNA, 83 bp, Homo sapiens
ggccggggtgctcagccaggccgactacctcaacctggtgcagtgcgagacgctagaggcaaattgtggctactaatttgccc

SEQ ID NO: 731399 - DNA, 98 bp, Homo sapiens
gaccttgaagaacagcttactgaagggtcatcaagactcctgagatagcaaacttggccttgcttggctttggagatatctttgccctgctgtttgac

SEQ ID NO: 731400 - DNA, 75 bp, Homo sapiens
gcttacgtctctgctcttcagtacaatcctatgtccggtctgtgctacgacagcaaaatgttccaggtgcatcag

SEQ ID NO: 731401 - DNA, 100 bp, Homo sapiens
agatggatgagaggaggcggcagaacattgcttatgaatatctgtgccacttagaggaagccaaaaggttggtcaaagaaaaagtgatgtatgaaaaaga

SEQ ID NO: 731402 - DNA, 100 bp, Homo sapiens
ttgcagcctcccccagaaagcaatgataattcccaggacagtcagtctggtactaacaatgcaggtccggcccggagcggccatgtcccacggccccaag

SEQ ID NO: 731403 - DNA, 75 bp, Homo sapiens
tcgtccagcccaccccggtgccttgctctggaagtgttgttaataacagtactggtagtggaagggattgccgtg

SEQ ID NO: 731404 - DNA, 50 bp, Homo sapiens
ccgggactccctggaaacctagaaatgaacttggagcgtgatgcccagaa

SEQ ID NO: 731405 - DNA, 100 bp, Homo sapiens
gggaggaagaagaagaggaggaggacgatgacgaggaggaaaaggcccctgtgacctagagaagaagaaggaggttcctgctgtgccagaaacccttaag

SEQ ID NO: 731406 - DNA, 100 bp, Homo sapiens
ttctgagaaaacatggtcaacgtcttgaaaggagtgcttatagaatggtgcagagaatgtagaaagagtgttggttactgttatccaaggagcagttgaa

SEQ ID NO: 731407 - DNA, 97 bp, Homo sapiens
aaaagagacatgaagaattggtatttcaaatgaccaccatgttgcaaaagggcccttgcggatgtcatgagaccacagggccactgcaacactgatc

SEQ ID NO: 731408 - DNA, 100 bp, Homo sapiens
gaacctttgatgacttttaatctgtatgaagaatggacacaagttgcaagcttcatcacgtttcgctcctgtgcctacctggacaagaagcataccatct

SEQ ID NO: 731409 - DNA, 100 bp, Homo sapiens
tgaagaagttataaggttttttgactgtgattcactagtgtgcctctgcgaatttaaagctcatgaaaacagccgctacatctgttacttttgttggtgt

SEQ ID NO: 731410 - DNA, 98 bp, Homo sapiens
gacagatgccagcgtagctgaatccagtaccaaaaacgtcaacaacagttttacgatgccttcaattaagttgcagagttctgatggagagatatttg

SEQ ID NO: 731411 - DNA, 75 bp, Homo sapiens
caggaggcggtgcacagcgccaagccctttggagtgaatcaacctggaccttatatcatgtatacaactgtagat

SEQ ID NO: 731412 - DNA, 100 bp, Homo sapiens
tctcacacatctaaacttaagtggaaataaactgaaagatatcagcaccttggaacctttggaatatcagaagctctttcctgacattcccatagggtat

SEQ ID NO: 731413 - DNA, 75 bp, Homo sapiens
gttgttgttggcgactgtgcttcaagcgaaatacaggtatcaggatgaagatacacctcctcaagagcatatttc

SEQ ID NO: 731414 - DNA, 82 bp, Homo sapiens
tacggcaaaggcaagagtaacagcagcgccgtcccgtccgacagccaggcccgggagaatcaggatggctaaaggtgacccc

SEQ ID NO: 731415 - DNA, 75 bp, Homo sapiens
ccatgtgggacagcctgggagaggaacagaagcaggtgaaagaaaatggcccgaaccaagcagactgctcgtaag

SEQ ID NO: 731416 - DNA, 82 bp, Homo sapiens
gccgcccgccgggcgctctcgcttcagtcagtcgggccgcgccgcgcctcagctctgttgcagaactgctttattcactgca

SEQ ID NO: 731417 - DNA, 100 bp, Homo sapiens
cagcaccttcggcatctgcccctgccatgaccactgtggagaacaaatccaagattagcacaggcacacaagccatgccccctcttttctctttgggata

SEQ ID NO: 731418 - DNA, 100 bp, Homo sapiens
actttataaacagcaggtgaagaagctggaaaaagcccttaagaaaaacgtcaagcacaatgatgctatacaatgtgtctcctacaatcctattactcat

SEQ ID NO: 731419 - DNA, 74 bp, Homo sapiens
gtggatatatttttggtttcttacatgaaaaatcaaaatggtacatttaagatttcctcctctgatgctcctct

SEQ ID NO: 731420 - DNA, 100 bp, Homo sapiens
cgccacgaattctcgcgtcgtctcgcgagagtccaagttaaagaacatggcgacgtctaatctgttaaaggatgtgatggtggcaggtgggatggagagc

SEQ ID NO: 731421 - DNA, 100 bp, Homo sapiens
tccaaggaagccacgtgcagacatctacaaccttcgatctcctgacgagcctggttgcagcatgcttgaaatctgggatgtggaagacccttccaatgca

SEQ ID NO: 731422 - DNA, 75 bp, Homo sapiens
gagttggaattcaagaatgatgaaactgtgtcgatggccaggtggtcttcataaactatactgccttgtgatgcc

SEQ ID NO: 731423 - DNA, 83 bp, Homo sapiens
gaaacatcaatactataatcttaaggacttggtggacatcacaaagcaacctgtgaccaaactgcagctggaatacccagtac

SEQ ID NO: 731424 - DNA, 75 bp, Homo sapiens
ccgtatgcctgttatgaacttggctgtcttctattagacaaaccagagctctcaaaggtctatggccctgtgttc

SEQ ID NO: 731425 - DNA, 75 bp, Homo sapiens
gggcgcagagcgcgggaggcggcggcggcgcggagcccagaaccgggctgtgggtcggcccaaggggaagctggg

SEQ ID NO: 731426 - DNA, 83 bp, Homo sapiens
cgcagggcctgcagcgggagctggacggcgagcgcgagcggcgcgagaaaatgtggacgagtgctcactagcagaaaaaacct

SEQ ID NO: 731427 - DNA, 101 bp, Homo sapiens
aatgacctggtcactccattctttgtcgtcttcctctcagaatatgtgggtgactgtaggacgaggatttggtgtcacataccaactggtatcaaaaatct

SEQ ID NO: 731428 - DNA, 100 bp, Homo sapiens
cgccgcatccacagctaccgagagcaccagcctccctacatcattgcagtgttgcctcgatatgttgagatccgaacatttgaaccgaggcttctggtcc

SEQ ID NO: 731429 - DNA, 101 bp, Homo sapiens
gggtcctcctgctcacagtgtgaataacagtgtaaacaggaacatcgataagtagtgtaaaaacttgcacaatgaaatccgaagccaaggatggagaggag

SEQ ID NO: 731430 - DNA, 100 bp, Homo sapiens
aaatcggagagctgatcgagtaccaatttctttcaaggtgctcccaggtgaccatgagtatcccaaatgtagacccaagatgtgaacgagtgtgccaccg

SEQ ID NO: 731431 - DNA, 75 bp, Homo sapiens
ctgcaccatgcagtgcatagtgggcatcttgaggtggtgaaggtgggtctggttgaagactctccctccacagca

SEQ ID NO: 731432 - DNA, 100 bp, Homo sapiens
cgtcgggcgcgggcaaggccatcggcgtcctgaccagcggcggcgacgcgcaagagatgccctgtatccaagcccaatatgggacaccagcaccgagtcc

SEQ ID NO: 731433 - DNA, 75 bp, Homo sapiens
gcatcattttttcaaaataggcactgccagtgaaagatgtagaagataaacctgaacaacaaaccagaacaagag

SEQ ID NO: 731434 - DNA, 100 bp, Homo sapiens
ggaaaaattaatcaacagagtgggacctaatggtgagagggtgaagactgtctccttctgttgaagtctttgcctcctgctgaagctgagaaaactgcag

SEQ ID NO: 731435 - DNA, 101 bp, Homo sapiens
cagggcccgcggggtgaaggcgctcatggacggaagacccctggctctataagctgaattatggcagcccagtcaagacacgaagatcgattgagaagtta

SEQ ID NO: 731436 - DNA, 75 bp, Homo sapiens
gcggttgctgcggggctcgggttcttggggctgttcgcggctgagggagaagaaatgggtgaccgttggtgacac

SEQ ID NO: 731437 - DNA, 100 bp, Homo sapiens
ctgcttgcccagcttgggaaagaggaggctgctgcaaaggaccgatcggcggttagaggagtgcttggactcggcgtgatttttggactctggacgttac

SEQ ID NO: 731438 - DNA, 90 bp, Homo sapiens
ccggaatggagaaggaagaggagtcggggagagaccattctaacacaggtaccgtccagacagtgcctctgagaaagggaacctaaaggc

SEQ ID NO: 731439 - DNA, 80 bp, Homo sapiens
ggggggattctcgacctgctaacagaactggaccttttcgatgttttactgtgcctggctaactatagtcgagggggtga

SEQ ID NO: 731440 - DNA, 80 bp, Homo sapiens
cgacaagccgctggcagccgcggatctcaccgccgctcaggccccaccattgctctctctgtcttcagttccccaggagg

SEQ ID NO: 731441 - DNA, 100 bp, Homo sapiens
ctgggagacgctgcctcggcccggacgcgcccgcgcccccgcggctggagggtgggaagtcccacctggccatcgtgcagaaggtaaacaacgagggtga

SEQ ID NO: 731442 - DNA, 100 bp, Homo sapiens
cacagaaactcctcagtggccctttcaacctgccaaggcttggtacaccaggggttggaaaaaccacactaggcaaagaacttgcgtcaaaatcaggact

SEQ ID NO: 731443 - DNA, 97 bp, Homo sapiens
gagatgcctgggcgtcaccatgccacagctacccacttgttgccaccagaactgataaatttcaaacggaagagagtggcagcatttagaaagaatc

SEQ ID NO: 731444 - DNA, 80 bp, Homo sapiens
agtgtgcaataaaaagtgttcttcagcatcaagcctacaggaacatagaaagtgtgtgctgtatttgtgggccttgaaaa

SEQ ID NO: 731445 - DNA, 100 bp, Homo sapiens
aaatgaatatgttcatggtgatataaaagcagcaaatctacttttgggttacaaaaatccagaccagggtgacatccagcagctgctctttgtctcggac

SEQ ID NO: 731446 - DNA, 76 bp, Homo sapiens
gcccaccctacatttagcgcatcatgtgatccggttcagggcgacagctcagtgaagtcttcattcagttaccttc

SEQ ID NO: 731447 - DNA, 73 bp, Homo sapiens
agtgagctgtccctgctggaggagcgcttccgggctaaagaacgtgccaatggaatggagcttgatgggcgta

SEQ ID NO: 731448 - DNA, 106 bp, Homo sapiens
gtggaagatggcgcctgttgtgacaggttcagaatgaccgaagaagcatgccgaacacggagtcagaaacgagcgcttgaacgggacccaacagaggacgatgtgg

SEQ ID NO: 731449 - DNA, 74 bp, Homo sapiens
tggaatggaggaatgcttgaatatagccagttccattgagcatattggaccagctatcccagaagtcagctctg

SEQ ID NO: 731450 - DNA, 71 bp, Homo sapiens
aaggtcgcctctttgctgcaccaggtgtcctggagacaggtcctgaacgaggctgtgggggccctgatgta

SEQ ID NO: 731451 - DNA, 96 bp, Homo sapiens
ctgtctcagcctctcaagtacctggaattacaggtccaggaggcccaggaggtcctgggggacccatgggtcgcatgggaggccgtggaggagata

SEQ ID NO: 731452 - DNA, 100 bp, Homo sapiens
cccagaggtcgtggaggtggccgtggaggcagaggtggcatggggttggtgttcgaggaagagacattgttgttcttggtgtggagaagaagtcagtggc

SEQ ID NO: 731453 - DNA, 73 bp, Homo sapiens
gaagccacacagtgtccagatacgaggggaagccgaggcctggatggctatcaagggcctgatggaccccggg

SEQ ID NO: 731454 - DNA, 90 bp, Homo sapiens
tcctccctttcatggttccatcagccgccttcatcaaatcaaacaggtcatcccagactggaaggagcaggaatgggaccccgaaaagcc

SEQ ID NO: 731455 - DNA, 96 bp, Homo sapiens
ctttgaactacaaagtggaggggaagtttgtctggattttcctgtagaactgagggcagaatgttctcctgggcagcgttgtgatctttgccacct

SEQ ID NO: 731456 - DNA, 90 bp, Homo sapiens
gccgtgttcggggagtctttcagatgcgtttagcccagcccctgctggtaaccaaggtcctcctccaatgatgggtatgaatatgaacaa

SEQ ID NO: 731457 - DNA, 100 bp, Homo sapiens
gcagccccgcacgaggacgcacgctaccctggaatgcaggctacgccgagagctggtgactgccctcatgtgtgatttgcggcggccagcggcaggtggg

SEQ ID NO: 731458 - DNA, 82 bp, Homo sapiens
caaacaggctgcgccaggctttatcggaccacagcttccctctcacatgataaagacgtggttaacttggacctcaaatcca

SEQ ID NO: 731459 - DNA, 100 bp, Homo sapiens
acgacacaacaagccggaagtggaagtcagaccttctcttccaccttctaaacaagctaacaagaatctgattttgaaggctatatctgaagctcaagaa

SEQ ID NO: 731460 - DNA, 100 bp, Homo sapiens
agtagatgataaagatgatgatatccttctcaaccttgtgggatgtgaaaactctgttactgaaggccggagcctcaacagaaagctcctttagttcctc

SEQ ID NO: 731461 - DNA, 100 bp, Homo sapiens
gcatttatgaccaacacaaatggtaaaattccagttaggagggctattgagtggccagacttccccaacaaatgccaaattggagaaactggactctcag

SEQ ID NO: 731462 - DNA, 82 bp, Homo sapiens
tggcggcgctggaagggatgtcgtctcagcagtgctcgggcgcaggacgccgtggaggaccggctggacaggaacctgtggc

SEQ ID NO: 731463 - DNA, 100 bp, Homo sapiens
aatcacagagactcggagagcatcactgatgaaagccttgagggaattagacagattttctgttttgaatagccaacacatgtttgaagtactagctgcc

SEQ ID NO: 731464 - DNA, 90 bp, Homo sapiens
ccccagcgctcagcttgccctcattgctgccagccagagcttcctgcagccagggtatccaggatgccaaccgttgggtccctaccctcc

SEQ ID NO: 731465 - DNA, 100 bp, Homo sapiens
atacctcttgggactgggctcgatttgagcatcctggcactgcaggctcgcacttagccctggatacccagattcatcctcctcccctgggatggcatag

SEQ ID NO: 731466 - DNA, 107 bp, Homo sapiens
cagaattcagaaggagctggcggacatcactttagaccctccacctaattgcagggaatctctgcatatagctacaaagtcacccagggaaggacaagctcatggag

SEQ ID NO: 731467 - DNA, 100 bp, Homo sapiens
caggacacaacaccgcggagccctgcaggcgtacctggagtagaacagaaaaattattatgtctgtgttcccttgggactcattggaaattgtacagtga

SEQ ID NO: 731468 - DNA, 82 bp, Homo sapiens
caacaagtacaagcggcgggtgccccggggtggatgtgaacactgaccggaagatcagtgccaaggagatgcagcgctggat

SEQ ID NO: 731469 - DNA, 90 bp, Homo sapiens
agcgattggacagaatttgtgaagattctctcgggcctagccgtccttggaacccgatattcgggctgggcggttccgcggcctgggcct

SEQ ID NO: 731470 - DNA, 100 bp, Homo sapiens
tgctggaggcctcgctgaggaacgacgccgaggaagatgcctgtgaggagccaccaacatttgaagctatggagctcattggtaaaccaaaaccctacta

SEQ ID NO: 731471 - DNA, 50 bp, Homo sapiens
caggcttccaaaagcccttacaatgggttaatgttcgtgaagaaattgaa

SEQ ID NO: 731472 - DNA, 98 bp, Homo sapiens
cctacaactcatgcccagcagcagcaagcagacaggtgatttggcttctgcacagttaggaggagcaccaaaccgatgggaggttttgtcagccacac

SEQ ID NO: 731473 - DNA, 75 bp, Homo sapiens
cgtggggctgcctcgccgcgtctcgccacgaaagctctgggtgtgcggcagtaccatgtggcctcagtcctgtgc

SEQ ID NO: 731474 - DNA, 96 bp, Homo sapiens
gagactttgtcagctcccgcacagtaacgtgtaggagctgcacgatctgggaacctcacgtttatggtgggaggagttgaagatgaatttgctgct

SEQ ID NO: 731475 - DNA, 50 bp, Homo sapiens
tgggattggagagaaacaggaactgagaggcatgccaggtggaagtgagg

SEQ ID NO: 731476 - DNA, 100 bp, Homo sapiens
cggcactggctcttcagtcccttcaagatgataaggatgccttctatgtggcagacctgggagacattctaaagaaacatctgaggtggttaaaagctct

SEQ ID NO: 731477 - DNA, 100 bp, Homo sapiens
gagcgcagctggacccagcagccgctgtctccagtgccgcagcagcagatgatatcatcaagttgaatcgaaaggaagggaagaagcagaattttccaag

SEQ ID NO: 731478 - DNA, 100 bp, Homo sapiens
taaaggtcctaggaaaatgtctgtgatcattcctggaatgacactgaatcataagcagatcccctatcagccacaaaacagacaaggcctggagttaccc

SEQ ID NO: 731479 - DNA, 90 bp, Homo sapiens
atcactggagtcagagcgataaatgagttctgcctcaaatccaggcagaagtcaattcatctggaaagactatctctgagtcagacttaa

SEQ ID NO: 731480 - DNA, 100 bp, Homo sapiens
cacggctgaaccctccttctcaatcttggaacagcacccccttctttaagaagaactgatgaccaccccaattttacagcccactgaggccctgtcccca

SEQ ID NO: 731481 - DNA, 151 bp, Homo sapiens
tgatgtaaccattacaaatgatggtgctaccattctgaaacaaatgcaagtattacatccagcagccagaatggctatctacaaaatggtaggcactgtgatcatgatgaaaatgaatgaggatggcctgacgcctgagcagcgagtagac

SEQ ID NO: 731482 - DNA, 75 bp, Homo sapiens
aatggtgtcattatctccatcccattgacagaaaccagagactgctgctactttgaaacgtacgatagaggccct

SEQ ID NO: 731483 - DNA, 98 bp, Homo sapiens
ctccgggccccgtacccggagagcggcaactcgcgcactcaaaggtgcggccgcgggcactgccgagctgctgccatccccgagtggatccctcaact

SEQ ID NO: 731484 - DNA, 100 bp, Homo sapiens
gaccccttgggtaggggacgttgtcgtgccctgcacacaggcttcccagagacccgccgtagtgcagactcaaggtcctgaacgaggctgtgggggccct

SEQ ID NO: 731485 - DNA, 101 bp, Homo sapiens
ctgcagaaccaacgaggtggccgaatcttccttcaggatatcaaggtgaagcaactcgtgcccatccgcgatcaatccctgcaggaggagctggctcgcca

SEQ ID NO: 731486 - DNA, 75 bp, Homo sapiens
agtacttcagtaagagatgggacctttccaaagtgaaactgatgagatttgatgatccactgttggggcctcgac

SEQ ID NO: 731487 - DNA, 50 bp, Homo sapiens
ccagcggcttaagccatggctgagaaagatcagtctaaagaaaaggagaa

SEQ ID NO: 731488 - DNA, 75 bp, Homo sapiens
ggaggagcctgttccagaactgctggaagctgaggatcaagacttcaaatcccaaaagaacttcatcattaacat

SEQ ID NO: 731489 - DNA, 82 bp, Homo sapiens
agttatattccatctactgtctttttcttcaatgggcagcatatgaaagtggattatggacatgaagaggagcatcggcggc

SEQ ID NO: 731490 - DNA, 87 bp, Homo sapiens
gggtcatcaccatggatgggacgctgcaggccctgacacattcctgaaggcgctaaaagacgaaaagttacaaggactgaagaccaa

SEQ ID NO: 731491 - DNA, 100 bp, Homo sapiens
aggtctccgtgcagcccaacttccagcaggacaagacaggacagctggagcccctgctgtcccggttcactgaggaggaggagctacagatgaccaggat

SEQ ID NO: 731492 - DNA, 151 bp, Homo sapiens
gacccagtcacctgtctggagcaagaaaaagagccctggaatatgaagagacatgagatggtggatgaacccccagtttgtgatgtctggctggggtataggttattcatttcgatgtgacattgttgactattcacggtcacccacagct

SEQ ID NO: 731493 - DNA, 92 bp, Homo sapiens
ccccgccccgctcaccttagccccgcgcccgaggcacctgaatggacagaagaggacctcagccaactgacaagaagtatggttaagttccc

SEQ ID NO: 731494 - DNA, 75 bp, Homo sapiens
cttcgagttcctggccttcaagaatggccataggaaaaggatacagagtagagtttcatgaacctgaaacttggt

SEQ ID NO: 731495 - DNA, 101 bp, Homo sapiens
gtcctggctggagtcgctttcatggtcttgctgattccactcaacggagctgtggccgtgaagatgcgcgccttccagggccaagaccagcttcaagtctc

SEQ ID NO: 731496 - DNA, 100 bp, Homo sapiens
cgagggcgcggagttccaggtcgagcagttaggccgcgagcgactgcggcgccgagccgtatggtttgaagtggtgaacatggatttttctcggcttcac

SEQ ID NO: 731497 - DNA, 96 bp, Homo sapiens
aaaaatgcacaattctatctcttgggcaatcttcacggggctggctgctctgtgtctcttccaaggtgcagcagtgaacagcagtgagagtctccc

SEQ ID NO: 731498 - DNA, 100 bp, Homo sapiens
caaaaggtgatctggacaaaggaacaggtatctcagacagcccacctgaggatattgaccataaggactcatatctcattacaagaagcatcatggccga

SEQ ID NO: 731499 - DNA, 50 bp, Homo sapiens
gttatgggctctgtcgccgtgggtctctgagcggcccctgatgttcctgt

SEQ ID NO: 731500 - DNA, 50 bp, Homo sapiens
gaacacagtggacagtgacaagaccaaactagagtcagaacgaatactag

SEQ ID NO: 731501 - DNA, 101 bp, Homo sapiens
tcacctcctagagaccaggctgccatcatgctctggaagcttgtggagaatgtcaagtacgaagatatctatgagccaatggagatcttcgtggatgatga

SEQ ID NO: 731502 - DNA, 82 bp, Homo sapiens
cgggctggagcctgacgagctggcggggggatatgagactttctactcggaatatcctgagtgttgcgtggatgtaaaaccc

SEQ ID NO: 731503 - DNA, 100 bp, Homo sapiens
tccatagtcaccacttcacttcacctctttctggaaaccagctgcatatctatgtgagactgaattttcctcttagacttcagctaaaactgtgtattgc

SEQ ID NO: 731504 - DNA, 100 bp, Homo sapiens
tctgcttccaggacaagtcctgcgcttggggatcctctgtacgcccgttcactggtatctttcagatgaaggcattgaagcttgcacaagctctccagac

SEQ ID NO: 731505 - DNA, 75 bp, Homo sapiens
tatgtgaggacgcagatgtctggtaatgaggttttaaaatcaaagatgggaaaatcggagaaaattgcccttccc

SEQ ID NO: 731506 - DNA, 80 bp, Homo sapiens
ctttaatcctgaaagccatgcagcggtgcagggctcgcggcctggcaagaatgtacagctgacagagaacgagatccgcg

SEQ ID NO: 731507 - DNA, 83 bp, Homo sapiens
cccgcaggtcttcacccaggccctggagtgcatgcgcaggttttgacctgtagcagagaaccaattctggagaacagcctcac

SEQ ID NO: 731508 - DNA, 100 bp, Homo sapiens
gcccagactgtgaacctgctggccgagtggctcattcagacaggctgaccccgcactacatctacccaccagccatcgtgcagcccagcgtggtgatccc

SEQ ID NO: 731509 - DNA, 100 bp, Homo sapiens
aggagcagatttacaaactggccaagaagggccttactccttcacagatcgatttgacaagatcaaagctgcaggaaaatggacagtgaggttcagagag

SEQ ID NO: 731510 - DNA, 99 bp, Homo sapiens
agacaaaagaagagcagtcacagatcaccagccaggtggagccgccaccaaaatgcagattttcgtgaaaacccttacggggaagaccatcaccctcga

SEQ ID NO: 731511 - DNA, 100 bp, Homo sapiens
cttctcccggctggcggcgaccggcctcagctgcagcgggcccggggcgtggggcctggggaaattaaagagggtgctttactgttgccctgaaattttc

SEQ ID NO: 731512 - DNA, 75 bp, Homo sapiens
gttgttaccctcggacgtagcccggcttgtattgggctcttgagatctgtcaacagagaaactttgtagaagaga

SEQ ID NO: 731513 - DNA, 98 bp, Homo sapiens
actgacacccataccttttgggcttcagaatgcagtgttttcggcctgaaagtaagcaggagccagtgaaaacagaaatgggtcctccaccatctcca

SEQ ID NO: 731514 - DNA, 75 bp, Homo sapiens
gcaattcagatggcccaagaacaggctacagatactgaaattttgagcgcatacatgttttaaccgtctggatct

SEQ ID NO: 731515 - DNA, 95 bp, Homo sapiens
ccgccgccaccaccaccgccgctgccccggctgcctcctccctgagagggaatctggaaaaattgcaatcaaaacatcatttctctaagaaaatt

SEQ ID NO: 731516 - DNA, 75 bp, Homo sapiens
ctgctcgtggttgacagaacaaggcgattaggaaacatgaagcctgcaccagcatggactacttttagagttggc

SEQ ID NO: 731517 - DNA, 100 bp, Homo sapiens
gaaagaattcatcagcgatggcagtttcatagtattgagtacccaagtggccttggaccatctggagtctgtgcctgagaaactgagcctactagaagat

SEQ ID NO: 731518 - DNA, 75 bp, Homo sapiens
gcgagcccctcacagaccgtccagcgagcggtgtctgtaaatcccggctggacagtcttgtgaaattgagactct

SEQ ID NO: 731519 - DNA, 75 bp, Homo sapiens
agagacaggaggcagtagccaaacacccaggatgaagactccgggaaggctgacagcgacgtggctgacgacgtg

SEQ ID NO: 731520 - DNA, 96 bp, Homo sapiens
acacggaccgcgcccgccgggcacacaagaatggtcactcgctgtgcttcgccgtgagccgctcgctgctgctgacgtgcctggtgccggccgcgc

SEQ ID NO: 731521 - DNA, 100 bp, Homo sapiens
aatcccagttcttccacaccaccagtgaggcgcttggttccttacttctagagtctggaatatttaaaaaggtaatgaaagcatgggatgctcatgtgac

SEQ ID NO: 731522 - DNA, 100 bp, Homo sapiens
ctgagtatgaagctgcagctaccagattaaaaggaatagtcccattagcaaagcttcccattgaccggggtggaggtgaaggaaaggccatgtacattga

SEQ ID NO: 731523 - DNA, 75 bp, Homo sapiens
gtggcgtcttggtgttctccacgctggttcgcagggtggacccgaactccccggtgctcttggaggacccagtcc

SEQ ID NO: 731524 - DNA, 82 bp, Homo sapiens
aagaagtggagcgtgtcctgaaggagttccaccaggccgggaagcccatcggagtgaagacatttccacctggacacctgac

SEQ ID NO: 731525 - DNA, 75 bp, Homo sapiens
gcggctctctacgtccctgcggagcagccggggccacctacagatgctcctgcagtggacacagcagaacaagtc

SEQ ID NO: 731526 - DNA, 83 bp, Homo sapiens
tattatgcaggtggtctgtgaagccacacagtgtccagatacgagggtgatatggaaagccctgtgtttgcatttcccctgct

SEQ ID NO: 731527 - DNA, 100 bp, Homo sapiens
gagctgtgcagccgcgaggaggcgcgggaggtgttcgagaacgaccccgagacggcctcctcgctggggaggcagagtcctcgcgtggtctcctgcctcg

SEQ ID NO: 731528 - DNA, 74 bp, Homo sapiens
tgattgaatggaaagtctgtttggatgggctgaaatacttgggtcagcaggttgtagacactcctgggatcctg

SEQ ID NO: 731529 - DNA, 90 bp, Homo sapiens
gtgtcccagatcaccgccatcgaggcacagcacttgctcaagaggaaaccaggatgaaacaggcgcctatttaatcgacagagaccccac

SEQ ID NO: 731530 - DNA, 78 bp, Homo sapiens
aaaggaagacttgtaacctggagaagagatctcaggaaacaggctcgacagctggaaaatgaacttgacctgaaacta

SEQ ID NO: 731531 - DNA, 95 bp, Homo sapiens
ggcaatatttttaaactacagaaaagatggaaactttggacttcaagaacttggattaaagaacttgacaggtgctggagaatctggtaaaagca

SEQ ID NO: 731532 - DNA, 115 bp, Homo sapiens
caaggagagcagcagcgagtccttcatcagccgtctgctggccatcgtggcagacctctacgagcaggagcagtacagtttctcttcagcaacgggtagcagaattggaaaaaat

SEQ ID NO: 731533 - DNA, 97 bp, Homo sapiens
ccaacagcctctaatatggagtatatgttgctatacctgcctttcaggaactgccctcgttttcaagaacttgagagtgagactttgaaatcagagg

SEQ ID NO: 731534 - DNA, 87 bp, Homo sapiens
aaaaaatcagttagggctgtggttttacatccaagacaacatgaagccattattatatcaggaaccgaaatggccaagcatatccag

SEQ ID NO: 731535 - DNA, 100 bp, Homo sapiens
gaagaagatggtgatggtggagaggaagacgtccaagttagaagaacccgaagaacctaaagtgctaacaccagaagaacaattagcagataaactgcgg

SEQ ID NO: 731536 - DNA, 50 bp, Homo sapiens
cagcaggacgtcactgttggaagaagcagctagtacaccactgaatcctt

SEQ ID NO: 731537 - DNA, 90 bp, Homo sapiens
ctctacagaaggaagcacaaaaagggacagtcgcttctgcagaaagccgtcattacacctgattttgaaaaaaaccactgtgttccacca

SEQ ID NO: 731538 - DNA, 74 bp, Homo sapiens
aaagagtcaacagcagtggcaacagttcttcagccaatcctgttccttgctggtgcgcctggtgccggtcctct

SEQ ID NO: 731539 - DNA, 153 bp, Homo sapiens
taggacagtatgcaccttaagatcctgaagaaacggcacaaaatgttcaagtgatgtttagaaataacttgtgaggtgaaagaaaatggcccgaaccaagcagactgctcgtaagtccaccggtgggaaagccccccgcaaacagctggccac

SEQ ID NO: 731540 - DNA, 90 bp, Homo sapiens
ccgggagcaggagctgggcctaggtctgcgccctggggtttgttaaagttgttaagaataaggcctactttaagagataccaagtgaaat

SEQ ID NO: 731541 - DNA, 74 bp, Homo sapiens
acaaatgcgctcagcttcaattggacactgatgaaattcaagttaactatcctggaatgtttgaattgatggaa

SEQ ID NO: 731542 - DNA, 80 bp, Homo sapiens
atggcggcgctggagagggggcgctgagctgttgggaatgttgtaccatctttgggtaggcagacttccctgacgacatc

SEQ ID NO: 731543 - DNA, 98 bp, Homo sapiens
ggaggtggcggcggcggcggcggcggctgctgctgctgctgcccgcgtccgaggctcgcgggcggcgggcccgggtctcctctgagcctccggcctcc

SEQ ID NO: 731544 - DNA, 75 bp, Homo sapiens
ctggctggtgcggacacaacccaatagggccacccgttcatcgtgcagttcaatgatggaaatgccgccgtggtg

SEQ ID NO: 731545 - DNA, 51 bp, Homo sapiens
ccagaaactgtgccaggatcacgctccttcagagatcacctttgccatcga

SEQ ID NO: 731546 - DNA, 75 bp, Homo sapiens
caggaagctgcggctgagtcgccagcagccagcttcgggtgtagcctattctcatccaactacagttgctagcta

SEQ ID NO: 731547 - DNA, 100 bp, Homo sapiens
cccaagcggtttcaaacggcttagagcaggccgcttggttctgacccagctgaggacaggcgacactaacaggtgaagatctcgggagaccatgactaag

SEQ ID NO: 731548 - DNA, 109 bp, Homo sapiens
aacagaattctgtgttgctgttggagcagatttcttctctgtgtagcaaggtgaccaagaatatggcccaggtgaccaaagccctggacaaggccctgagcaccatgga

SEQ ID NO: 731549 - DNA, 83 bp, Homo sapiens
ggagtctgaggccaatgtcagagaaatctttgacaaggtggataattactgtaccttcctcatggaaaaagttttatttaaag

SEQ ID NO: 731550 - DNA, 75 bp, Homo sapiens
cagcctcccgactagctgggattacagagatggggcctcactctggtcacccaagctggagtgcagtggcaccac

SEQ ID NO: 731551 - DNA, 90 bp, Homo sapiens
cctctgcgtcctgccaacgcctctttggaagaaatggcttctctagaggaggaagcctgcagccttaagattcttggtgccaccattgag

SEQ ID NO: 731552 - DNA, 122 bp, Homo sapiens
atttggtacatcagcttgcctcaagtctggaaagaaattggcttgggctcatcaagatgccacaccacatgaagcccttgccatattacagctatgaccagcctgtgatcgggtactgccag

SEQ ID NO: 731553 - DNA, 74 bp, Homo sapiens
tgaactgcttctttcctgcctcaaagatttctctatgaatcatcatcaagaactctgggagaacttttgaattc

SEQ ID NO: 731554 - DNA, 82 bp, Homo sapiens
accggatccccagccgcttctgaccacacagacggggcggacctgtgcagaaactccgctgagcagaacttgccgccagaat

SEQ ID NO: 731555 - DNA, 90 bp, Homo sapiens
ccagcagctaatcacattttctcacaggaggaagacagcgaacccctcccaccacaggatgcccagacctctgggtcactgttgcactac

SEQ ID NO: 731556 - DNA, 75 bp, Homo sapiens
ctgctcacgttcatcatggtgcctggctgccaggcagggtggcccagttgaaatccttcccttcctctaccttgg

SEQ ID NO: 731557 - DNA, 82 bp, Homo sapiens
gcatacatctttcttcgacaaagggtatttctgggaaaagccagcttctgtttgcactggtcttcacaactcgttacctgga

SEQ ID NO: 731558 - DNA, 100 bp, Homo sapiens
ctgggtcacctggaatgtgttcattatctgcttttatttggaagtaggtggactctcaaaggctggagtaaaagggacattgggaagattagttggaatt

SEQ ID NO: 731559 - DNA, 74 bp, Homo sapiens
ccacctttccctttatttccggaggcttgcattgatgacaatgttgatatggtgaagtttctggtagaaaatgg

SEQ ID NO: 731560 - DNA, 100 bp, Homo sapiens
ttgcagatgaggaaattgagactttgacaagtcaaagagcacagctggaatgcaagtcaatgaataaccctataccttccaatttgaaatcagaagcaaa

SEQ ID NO: 731561 - DNA, 75 bp, Homo sapiens
ctattccccaaacaatgccaagtccttgggattgtgaccccaggaattgtaggaaatgctctatgtacagtgaag

SEQ ID NO: 731562 - DNA, 100 bp, Homo sapiens
cactgaaacggaggctaccaactccctcatcactgctccgggtgaattctcagagtaaacatcagtctccaaagataactacatcccttcttcccatcaa

SEQ ID NO: 731563 - DNA, 75 bp, Homo sapiens
gatgcttccctagctgagcctcaggtacaggtttgcagattccgccagcagcacagcaagctctacagatgagtg

SEQ ID NO: 731564 - DNA, 94 bp, Homo sapiens
attttaacatgagcttttcaagaaatggaattgaaaagtccagaggaagaggaaccttcagaagtttagtctttttggagacataagtgttcta

SEQ ID NO: 731565 - DNA, 83 bp, Homo sapiens
ctgtctgcaacgacccttacacgttggcccagcagctgactcatatagagctggtttggaacaaactctcccttcacttgttg

SEQ ID NO: 731566 - DNA, 75 bp, Homo sapiens
cggctacgtgggcaaccgggcggccacgttcccgctgcagggactggtgattgcagctggaagtgcccatgaccg

SEQ ID NO: 731567 - DNA, 76 bp, Homo sapiens
cacttgcctatccagaaagcaacagcagagattcagaccaggatgtagcactcaaacttgcccaggagcgagctga

SEQ ID NO: 731568 - DNA, 100 bp, Homo sapiens
ggggacccggcctctgtgcgggtgctgctgcccctcgcccacttcttcctgagccacgagaaaaaagagtgccggcgggaccaccgcccaccgtgtgctc

SEQ ID NO: 731569 - DNA, 99 bp, Homo sapiens
tatcgtggtcgtgcatgcctgcagggtgtacaactatgagcctttgacacagctcaagaatgtcagagcaaattactatggaaaatacattgctctaag

SEQ ID NO: 731570 - DNA, 75 bp, Homo sapiens
cagcggcaaggtctccaagtcccagctcaaggttgatgataattagaagcatgctttccactgaacttcccgaca

SEQ ID NO: 731571 - DNA, 100 bp, Homo sapiens
gaatggctcttacagcaagatcccctgtggacatctctacagcaatgagtgaacgggcacttgctcagaaaagactcagtgagaatgcatttgatcttga

SEQ ID NO: 731572 - DNA, 75 bp, Homo sapiens
ccggacatgatcctctccgcctctcgaggtacggactaaggtcagccatgtcatctgagcctcccccaccaccac

SEQ ID NO: 731573 - DNA, 98 bp, Homo sapiens
tcggagactagaggctggataccaaatagcagtggaaaccgagccccctcccttgctgcactcagggacatgactgtcagcacttctaccccccctca

SEQ ID NO: 731574 - DNA, 89 bp, Homo sapiens
ggagtttgaggagatggacattttggaccagggagccctacagcgtctcttcaaaaaggtacgtgcagcactacggcctgggcagtgcc

SEQ ID NO: 731575 - DNA, 100 bp, Homo sapiens
cgaagaactcgagcgacagagacaagctgagcttgccgcacaaaaagctagagaggattctcaaagttggattggtggaaacaatgaaccattgacaggc

SEQ ID NO: 731576 - DNA, 83 bp, Homo sapiens
ccagaccctggagcctcagttggaagcagccgatccagcctgcggagcctgtggggcagcctaccttatgttcagtattttgg

SEQ ID NO: 731577 - DNA, 100 bp, Homo sapiens
ggcgctggaaaaagtgaatttcgtaaccagaagccgaagccggagaaccaagaacctgcacttgttgccaagtcttccatcttactagatgtgaaacctt

SEQ ID NO: 731578 - DNA, 100 bp, Homo sapiens
cccatgtctctgacatcgttggtccgccaaaatgaagtttaatccctttgtgacttccgaccgaagcaagaatcgcaaaaggcatttcaatgcaccttcc

SEQ ID NO: 731579 - DNA, 90 bp, Homo sapiens
gcaccagagtcggcgtaactatcgcctgacagggtatctgaagtaaaaggggtgagggtcgctgtctgcccattgatagaggccagattg

SEQ ID NO: 731580 - DNA, 51 bp, Homo sapiens
aaggattccaagtaactcttatttgattagtgggatggtttggccatgaac

SEQ ID NO: 731581 - DNA, 99 bp, Homo sapiens
gtacacacaggagagctggctgcagtaaaaatcattaaattggagcctggtggcagaggagctggggcatcgcccaccgctgtagccagctgcatagtt

SEQ ID NO: 731582 - DNA, 100 bp, Homo sapiens
ttctttgcatctggcttacccctggttactgaggaaacaccttcaggagaagcagcttttccagaagcctgttaaaagcaaggtctccccacaagcaact

SEQ ID NO: 731583 - DNA, 100 bp, Homo sapiens
cttttttagaaaactcagcagtgagacctacagtcaagcaaaggacctgggttccacttccaaacatgagttccaggccgagacaaagaagcttttggac

SEQ ID NO: 731584 - DNA, 82 bp, Homo sapiens
ataagattgaggaatttcttgaagaagtcttatgccctcccaagttttggagatcatattcattggaggacactggaagatg

SEQ ID NO: 731585 - DNA, 75 bp, Homo sapiens
ttattcatctgtccagcatgactcatccccgggagtgttgagattccagacagcattggaaaagacatagaaaag

SEQ ID NO: 731586 - DNA, 100 bp, Homo sapiens
agaagggtgccgagacagaactcgtcagattcttgcctgcaggcatagttacaccaaaagtgatctatgaggaagcaactgacctagacaaattcatcac

SEQ ID NO: 731587 - DNA, 50 bp, Homo sapiens
ttaaggattccaagtaactcttatttggcattgaacctggccacatccca

SEQ ID NO: 731588 - DNA, 74 bp, Homo sapiens
aaacagtgctagtgaaagaatgttattctgtcttcacaaaccggaggtgtgtcccggcatggatatccggaaca

SEQ ID NO: 731589 - DNA, 73 bp, Homo sapiens
ctggctcttcctggagaccgggcagctccccaaagacaggagcacagactctaaaatagagctcaagcttgag

SEQ ID NO: 731590 - DNA, 82 bp, Homo sapiens
gcaagagtaacagcagcgccgtcccgtccgacagccaggcccgggagaaaagccgaggccaaaagagcatgtgagtggcttc

SEQ ID NO: 731591 - DNA, 75 bp, Homo sapiens
ctgtctcctggtgaccgagcacccgcctccgggcatcttcaacttctgaagatgatgagaaactgaaaaagagga

SEQ ID NO: 731592 - DNA, 74 bp, Homo sapiens
aagagggaagacacgcggaaacaggtcggattgtttgtgctgaacgaactgtcctcttgcttcagaagcccctt

SEQ ID NO: 731593 - DNA, 100 bp, Homo sapiens
gaaagtcccagatttttgctcattaacagaaaagaagaggagaatgctaagcagaacatggatgggtgcaaaaaagagctgccccgcttgcaagagccgg

SEQ ID NO: 731594 - DNA, 75 bp, Homo sapiens
ctttaccgtgccattggaaatataatacagaagtttacggtgagttttatcccgtgccacctccctatagcgttg

SEQ ID NO: 731595 - DNA, 100 bp, Homo sapiens
ttgcttcaaggacacagcttgcattgatgccagatatacgaaacccagaaggaactcagtacagttcccatcctcagatggcagccatgagaccaagggg

SEQ ID NO: 731596 - DNA, 75 bp, Homo sapiens
tgcaaaggcctgtgtgcacaaggtgtacagagccagtgggccggatggagccactggcagaggccagagaatcca

SEQ ID NO: 731597 - DNA, 103 bp, Homo sapiens
tacaaactggccaagaagggccttactccttcacagatcgagcatgtctgttcgatcctggcttccctcctgcggaacctgagagggcagcagcggacccggc

SEQ ID NO: 731598 - DNA, 50 bp, Homo sapiens
cgcctcaaggtcgcccaagtggttccgaggaacagagctgtagaggtcac

SEQ ID NO: 731599 - DNA, 100 bp, Homo sapiens
ggacagcatcatcttcccaaagattttgagatacagagtgaaaatggggagaactgtaatcaagacatgtttgagaatgaatcacgtaagatattctcgg

SEQ ID NO: 731600 - DNA, 80 bp, Homo sapiens
acgaccctctgaccgaagagacgagggagctcttggataagcatcgtcatcagacagtgaggaggacccagaagccttgg

SEQ ID NO: 731601 - DNA, 50 bp, Homo sapiens
acaattgaagacagaaaccggattgtagaaggcatgaaacaaaaaatgtg

SEQ ID NO: 731602 - DNA, 100 bp, Homo sapiens
ccaacatggcggagagagaggtggagtccggcccccgaaagagggtaacttgcccaggagtcgtgcttaaagacaaagaggacatctatcttagcatctg

SEQ ID NO: 731603 - DNA, 100 bp, Homo sapiens
gcacactggaggtcccagagcacgacgagcgcggaggaccgggaggctcccgggcttgcgtggattgcttgctgatgccattgttctttttacatcaagt

SEQ ID NO: 731604 - DNA, 82 bp, Homo sapiens
ctgcggcgcccgctggccgggctggctgcggccgccctgggccgggccccaccggacggttttaaaatcaaagatgggaaaa

SEQ ID NO: 731605 - DNA, 83 bp, Homo sapiens
cagaaccaccagggcgacctggacgtagccaagcgcatgatccgcatggccaaggctggcagtgatggggccaagattgggaa

SEQ ID NO: 731606 - DNA, 100 bp, Homo sapiens
agcgagggcaaagagctggtggcctcaggtgaaaaatcaacagtacaaattctgaagtttgtaaacttgctgatggtggtggtaagccatggcagatgat

SEQ ID NO: 731607 - DNA, 74 bp, Homo sapiens
tacgggaagcggctggaggagtcaccatttaacaaccaggtgtggggacccgtccacagatcccccgctgctga

SEQ ID NO: 731608 - DNA, 73 bp, Homo sapiens
tggctgaagatggctactctggagttgagatgagcagcaccagcagtaagagggctccgaccacggcaaccca

SEQ ID NO: 731609 - DNA, 82 bp, Homo sapiens
gtgaaattgaggtcacaccttcagtccttcgagcaagcaggttggtctcctcttcatattgcggcttctgctggccgggatg

SEQ ID NO: 731610 - DNA, 82 bp, Homo sapiens
ggacgcggcgagaaagcacggggtgaaactgaccacagtgctcaccacccaccaccactgatgagcgggatcgtgtgcagaa

SEQ ID NO: 731611 - DNA, 100 bp, Homo sapiens
acgcatcgtcaaaggacacctgaggacgtctcaaagaagctcggcgggagagctgagcgctcggaagaaccaaggaggcagttccctccatccccatcag

SEQ ID NO: 731612 - DNA, 82 bp, Homo sapiens
atgacatcagtttctggaagaagaagaagagcatgatcggcatgtccaccaaggcagactccatcaagaatgctggaggaag

SEQ ID NO: 731613 - DNA, 80 bp, Homo sapiens
ctgggttcgcctgcccagcaaatgcgaaggccgaagaacagttgagaattgttgaagaacaaagaaagattcatgaggaa

SEQ ID NO: 731614 - DNA, 100 bp, Homo sapiens
gcctagtgatcctgagtacaacacggtggcaagcaagtttaatcagacctgctcacacttcagaatagagaaggtgaacatgtcaaaccttttaagccag

SEQ ID NO: 731615 - DNA, 101 bp, Homo sapiens
ggtaactatggaagaagccagcagaggaactccttaagctttgaggaagagccataactacctggagcagaatgattatttggagccacagaaaatcattt

SEQ ID NO: 731616 - DNA, 100 bp, Homo sapiens
taccagatcaacgtcctccgggaccggagtcagaaccctccgcagagtaaagcctctacggcagacacatgcaggccaacccagaaccaccgaagaagaa

SEQ ID NO: 731617 - DNA, 88 bp, Homo sapiens
gaaaccccgtaaagtggttggttgcagttgtgtagtagttaagagtttgatgctccaagccctctcccagagactacagagaacgtgg

SEQ ID NO: 731618 - DNA, 100 bp, Homo sapiens
tctggcctccccttctattggaatttccactgcatgctagctagtccttccctggcagctgttgtgctgtgtatggacgtgggctttaccatgagtaact

SEQ ID NO: 731619 - DNA, 74 bp, Homo sapiens
ttcaggttattcttccagttacacaagggagacgtggtgggcggtccttcctgtgacacgacccttgagtgaca

SEQ ID NO: 731620 - DNA, 83 bp, Homo sapiens
ctgctcctgctctgctacctgtgtcttgggacaaggtgcgcattcctggtgtgctgcagcgattgggagtgacatactttgtg

SEQ ID NO: 731621 - DNA, 50 bp, Homo sapiens
aagcaacttcaacaggaacttcagagatggggactcgcagtgttgcccag

SEQ ID NO: 731622 - DNA, 100 bp, Homo sapiens
ggagacgccagtgtgacctggcgggagtggagacctgcaagtcattagagtcacaggtgcttcattggagatgggaagacccgcctcatcctgaaggctc

SEQ ID NO: 731623 - DNA, 102 bp, Homo sapiens
agaatggacagcaaattatggatgaacctatgggagaggaggagattaacccacaaactggctggttgatatgtgaagagccaacctgtcgcaatcgaactc

SEQ ID NO: 731624 - DNA, 98 bp, Homo sapiens
atatccaggtgctgagccaggagcagcagcctttctgttatgaagacagtatggagtttccagaccatagtagacatttgctacagtgtctgagcgag

SEQ ID NO: 731625 - DNA, 75 bp, Homo sapiens
gtttatgccaaatcaactgccttacagagacgtctcagagaggctgtgcagctgctggaggactataagcatggg

SEQ ID NO: 731626 - DNA, 98 bp, Homo sapiens
aaaggaagatctgatgaatggtgttaaaaaagaaatctccatttctattattgggaagattataagcgccatggctatggctagtgttaaattgcttg

SEQ ID NO: 731627 - DNA, 90 bp, Homo sapiens
agcaggtgtaccaggaaattgccatcctcaagaagctggaccaccccaatgtggtgaagctggtggaggaattgaatgatctggcacggg

SEQ ID NO: 731628 - DNA, 101 bp, Homo sapiens
agaaggagccgcctgtgagtcagcctgcagcctcgtcagactcggagacgtctgacagtgacgatgagggttacttgattagctgtgtttggaactgctac

SEQ ID NO: 731629 - DNA, 99 bp, Homo sapiens
ctggtggtgattgtgctgaacaaagaccgggaatgggaaaaggtgtttacaaaatatgggaagtgttacatgtttaactcaggcgaggatggcaaacct

SEQ ID NO: 731630 - DNA, 76 bp, Homo sapiens
cacaccagcagggaccatagctctcagaaactaaagttacagagtggagaggtaacaaaagaagagaggcagcctg

SEQ ID NO: 731631 - DNA, 98 bp, Homo sapiens
ggcaccacagatgtgacgcggacaatgcattttgggacccctacagcctacgagaaggactccctggaggaaaagcggaagcggcagcggtctgaacg

SEQ ID NO: 731632 - DNA, 82 bp, Homo sapiens
cgagcgcccagcgccgcgccgggagcctcggagaagtcaatgtgcccatcgctggacgaagcccagcccttccccctgcctt

SEQ ID NO: 731633 - DNA, 74 bp, Homo sapiens
aaagtataaatgaagacttaaaagatatattacatgctgcaaagcagatagacctctttattgtgcaaagctgc

SEQ ID NO: 731634 - DNA, 100 bp, Homo sapiens
tttaatactggtgaacttggccatgaccatctggattctcaaagtcatgaacttcacaattcccagcgacttctccgtgtcccttaaagcgtcagggaag

SEQ ID NO: 731635 - DNA, 82 bp, Homo sapiens
gtgaaaaataccacgacaaaaccaccctaatttttggaagtaccagcacagtgacgcttcctgaaaccttgttgtttgtgtc

SEQ ID NO: 731636 - DNA, 75 bp, Homo sapiens
ttccctgggctaaaggcatcatcaagaggtctttcccgcggtgacttcccttgggctgaatgaacaggagctgtt

SEQ ID NO: 731637 - DNA, 51 bp, Homo sapiens
ggattccaagtaactcttatttgatgcagcaggagttggaaaaaaatataa

SEQ ID NO: 731638 - DNA, 83 bp, Homo sapiens
cctcctgcgaggcctcccgggctccgggaaaactacactggccagggatcgcttacacctgagacgaactacagaacagcacg

SEQ ID NO: 731639 - DNA, 100 bp, Homo sapiens
ggcggatgccctgcagtacctgcagaaggtctctggagacatcttcagcaggggcaagctctgtgtgattgattggaagacatcagagaaaccaaagcct

SEQ ID NO: 731640 - DNA, 100 bp, Homo sapiens
ctcggcccccttaaagggacagggactgctgcaacctacggggtgtacttgggaacgaggggtgaagcggcccaggtgtcctgtggccaggcggaaagca

SEQ ID NO: 731641 - DNA, 82 bp, Homo sapiens
cacctgtccgctacgctcgccggggctgcggccgcccgagggcctgatcaagatccggggggaccggtgctggcgagacctc

SEQ ID NO: 731642 - DNA, 100 bp, Homo sapiens
tgtaggaaaggactgccgggatggcttctatgaggctgagctctgcccggaccgctgcatccacagggtcctaaaaaggtggggacgctgtggcgagaag

SEQ ID NO: 731643 - DNA, 75 bp, Homo sapiens
gggacagcagcaatttcagaggctgaagattctactctgctactcaagtagtggtcactatgattctgtgtactc

SEQ ID NO: 731644 - DNA, 82 bp, Homo sapiens
caggagagcccatggcaggaccggcacggcgaaaccttcaccttcagataagtttataccatggatagcacaaaggagaagt

SEQ ID NO: 731645 - DNA, 102 bp, Homo sapiens
gaggactttccttacctgtttttccagctcacccactgccagcagaggacaaattgatggccaggagatcactgccaccgccgtgctggccccctggcctag

SEQ ID NO: 731646 - DNA, 80 bp, Homo sapiens
ctgcgttgtgaggggtgtcagctcagtgccggtggtggtgtgcacattgagccccggtatagacagttcccccagctgac

SEQ ID NO: 731647 - DNA, 83 bp, Homo sapiens
gcttgatcttctagactccatggcaccgggctgagcggacaaatttacatgtattggagaccagaccagaagcccttctgaat

SEQ ID NO: 731648 - DNA, 80 bp, Homo sapiens
gcggtttccaagtggtgctggaagacacagtgcttttccctgagggcgggggacaggtctcggtccagctcgacttccag

SEQ ID NO: 731649 - DNA, 100 bp, Homo sapiens
cggcaccttatttctctgctgagtgtccagatcctccaaagacagatctgaatttgaaagacatattggctgacctgatacctaaggagcaggccagaat

SEQ ID NO: 731650 - DNA, 90 bp, Homo sapiens
ctaaatgaggaatgtctttcctaccatctaaaatacgaaggtttctggctgggaaactggtggtgacaaaagagaaagagaagaaagtgg

SEQ ID NO: 731651 - DNA, 82 bp, Homo sapiens
gaagaaggccaaggctgcagaagccaaagccacggtcacgccgccagcgctgctcctcaggccagctccccaccggactaca

SEQ ID NO: 731652 - DNA, 100 bp, Homo sapiens
atccctttgatgccggaaaatggggcaaagtgatcaatttcctaaaagggtgaagttgaacaaattgctatgatgaaaccaaaaggccagactgaacacg

SEQ ID NO: 731653 - DNA, 75 bp, Homo sapiens
cgggagattcagccgtgaagcaagtgcagatagatggccttgtatggcatttcaaatatagatacaaccattgaa

SEQ ID NO: 731654 - DNA, 100 bp, Homo sapiens
ctggtataccctcaaacccctcagacaatgaattcacaacctcaaacccgttctccgttcctctgtgacgagggtgcaggtatctctggggactacatcg

SEQ ID NO: 731655 - DNA, 75 bp, Homo sapiens
gcgggagaggcgagctcgcgatgagtggtctcggcaggctcttcgggaaggacaagaggcggtcaggaaggagga

SEQ ID NO: 731656 - DNA, 90 bp, Homo sapiens
atctttctcccggaagtcaccattggagctcatcagactgaccgtgtcttacatcagttcagagaggtatggaacgccgtggactccggg

SEQ ID NO: 731657 - DNA, 96 bp, Homo sapiens
gaaaaaatgacatccagcgacaaggactttaggaaaaagcaatttcggtatctactagaatccaaaggaaaaaaacctggtattatcaacgaagaa

SEQ ID NO: 731658 - DNA, 100 bp, Homo sapiens
ccagaggactttcttccagcttctgctgtccttctttgtggagagcaaggaatgccgtcttggaagccgattttgcaaagaggggatacaagcttccaaa

SEQ ID NO: 731659 - DNA, 140 bp, Homo sapiens
gccagcctaatccaaagactgtggaacttttaagtggagtggtggatcagaccaaagatggggaattattggaatgccgcctctttcccaaacccatcctcctacctgcacttctctactttccaaggggaaactagcgc

SEQ ID NO: 731660 - DNA, 83 bp, Homo sapiens
gtccgctgagcggggcgacccgagggtgtttgtgaaccgaagtttagcaatggaaaagataaagtgttttggttttgatatgg

SEQ ID NO: 731661 - DNA, 75 bp, Homo sapiens
cagaaggctagaagaatcagacgtgctccaggaggccagaaggaaatacaagtgctttggggacgagtactacgg

SEQ ID NO: 731662 - DNA, 83 bp, Homo sapiens
cacggctggggagcccggacgaggagttcttccacaaggacacattcagctaacgtattttagcaggtggagtgaggttgaag

SEQ ID NO: 731663 - DNA, 83 bp, Homo sapiens
ccaagcgacagctgtcagaggggcaggagcttctgggagccaccgtctgaaggaacagattatcagtctggtcaatcagatct

SEQ ID NO: 731664 - DNA, 83 bp, Homo sapiens
gccccgcccggcccgggccatgtcggtgggcgagctctacagccagatgcggcattccaaaagaactcactgtcctgattggg

SEQ ID NO: 731665 - DNA, 75 bp, Homo sapiens
agtcgcctccaggccaagagggatccttcacccgtgtctggaatctggaaactgttcttcaggaagaaacccatt

SEQ ID NO: 731666 - DNA, 100 bp, Homo sapiens
cgggaatgctgtgcaggcaaaaggaaaacaaaggcattcaggagccacaaaacgctatgtattagaggaagctgagcaactggagcctcgagttagtgct

SEQ ID NO: 731667 - DNA, 75 bp, Homo sapiens
cacagacaacatacaggacgaattgcataatcaccagcaacacccgggacaataatacgggggccacctaccccc

SEQ ID NO: 731668 - DNA, 100 bp, Homo sapiens
gcttctcctgctcagagttcctgcctccagctgccaggggggacagccagccagcagcaggaggatttccacccagaagacagagaaggagccagtggtc

SEQ ID NO: 731669 - DNA, 99 bp, Homo sapiens
ggttcgacgaggagacccagaggacgttcctcaaggaggtgaaaggtgtagcagtcactcggcctacacccacagcatcgaccttgtgaacccagcgac

SEQ ID NO: 731670 - DNA, 88 bp, Homo sapiens
cggccactgcggatccctgaaaccaaaggcggggtttcaccatgttgcccagactggtcttgaactcctgagcttaagcaatccacct

SEQ ID NO: 731671 - DNA, 100 bp, Homo sapiens
gccagaacacgtggatgcccacccaccactgagcctcatggatgacttgaaagtagggcatccttcacccatctgaagggaggaaatagtggcaggtgac

SEQ ID NO: 731672 - DNA, 100 bp, Homo sapiens
gtctgcaacatggctagagactgccgggactggtcagatgaacccatcaaagagtgcggacttatcaaactggtttcaaagcacagagctcaagtaattt

SEQ ID NO: 731673 - DNA, 100 bp, Homo sapiens
ctgcgtttgcaggccacgttctttcccatctccaccgaatgtacaagcgcttgcgtgtcggcctctgtggcagactcattttattagtgctgcactcaag

SEQ ID NO: 731674 - DNA, 98 bp, Homo sapiens
tactactttgaacagcatagagccaatcacattttgcacaagggcagtcaccatgaaagaacctcagagtgacagagccaaaagaccagtgcctcatt

SEQ ID NO: 731675 - DNA, 82 bp, Homo sapiens
cgggactctgaggaaaagctcgcaccagatggaaatcatattatgtagaatacttgggtgacatctgcctgagagatctcca

SEQ ID NO: 731676 - DNA, 98 bp, Homo sapiens
aggtcaacgaccggtggcagcatctcctggacctcattgcagccagacgactgcaagaacattgccaacatcatgaagacactcgcctatcgaggctt

SEQ ID NO: 731677 - DNA, 51 bp, Homo sapiens
tgcttctaaatctgttgatgaatgtggaaattggtgaaagtgtacgtggag

SEQ ID NO: 731678 - DNA, 98 bp, Homo sapiens
agaaggggacttgggcccagtttatggcttccagtggaggcattttggggcagaatacagagatatggaatcagttctggacatggcaagacatgtgc

SEQ ID NO: 731679 - DNA, 94 bp, Homo sapiens
tcttccgctgcatccccatcttcggcatgtccttcgcctgccagtcgtgagaagccctaccactgcaactgggacggctgcggctggaagtttg

SEQ ID NO: 731680 - DNA, 82 bp, Homo sapiens
tgagatgtcctatggcttgaacattgaaatgcacaagcagacaatgcagatcttcgtgaagactctgactggtaagaccatc

SEQ ID NO: 731681 - DNA, 107 bp, Homo sapiens
acatctagtggaagcggcaagcagagaaaacctgccaatcaagatgagtatgggcacctgttcaccgaagttgaggctggtcacaactccggcggcccaaggagctg

SEQ ID NO: 731682 - DNA, 100 bp, Homo sapiens
gaatagttgatgattgggccaatgatggatggggcctgaagaaagctgctgatggggctgctgagccaaggcggacaaggagagcttcgagaaggcgtac

SEQ ID NO: 731683 - DNA, 100 bp, Homo sapiens
cttcagaataacctaatccccaaagtgtgtccagagttatgcaacttgacccaggtatgtacaagctgtgaggacaacgcagaagccaatgggttttgtg

SEQ ID NO: 731684 - DNA, 98 bp, Homo sapiens
ccgcctttccagcatgcaggggctgctcagaattcagtttgcctgttctgtatgcaagttccgtagctttgatgacgaagagatccagaagcatctgc

SEQ ID NO: 731685 - DNA, 90 bp, Homo sapiens
cccgactcggctcttccctttaacttccaggctgcctatggcctgagtgaccaactggtttcaagacaacagatgaattgtgaaagagag

SEQ ID NO: 731686 - DNA, 96 bp, Homo sapiens
gcgccctacagctccggctgggcatgtgctggagaatctggtaaaagcaccattgtgaagcagatgaggatcctgcatgttaatgggtttaatgga

SEQ ID NO: 731687 - DNA, 100 bp, Homo sapiens
gatgagctcacagagctgctggcagggatcactggcactgaagtgtggaccccctggcccaggtgactcagctattccgggaacatctcttagagcgagc

SEQ ID NO: 731688 - DNA, 94 bp, Homo sapiens
cgacgagatcttccgcaacctggagaacgccaagcgcttcgccatcgacatagacaatgcagatcttcgtgaagactctgactggtaagaccat

SEQ ID NO: 731689 - DNA, 75 bp, Homo sapiens
ttcagcccgtggcccggatgcaggacagacccctcagagccgctcccgaggccccggcgcggcgcgagggcgcgg

SEQ ID NO: 731690 - DNA, 100 bp, Homo sapiens
cagccgcttccggagccgcgggcgagatttgggatgatgaaattgttgcagacttttacgtagctgttccagaaataatgcctgaacttaatcgattaag

SEQ ID NO: 731691 - DNA, 98 bp, Homo sapiens
gctgcggcgcgcagagcgaggctgcgggaccccaggatgggggacaggaggctgcggggcctcaggtggtcctgacaaccaagtccactttgaagggt

SEQ ID NO: 731692 - DNA, 90 bp, Homo sapiens
gccaaggcggcggggccgggaggggccgaacctgtgcgcgaagccgatcctactgcagggccatgagcggtccattacgcagattaagta

SEQ ID NO: 731693 - DNA, 100 bp, Homo sapiens
gcctacatcagtcccgacgtgctcagcgatagccatccgagcttgtttcctggggtttgtgttcggctgcggcacgctgctaagttttagccagtcttct

SEQ ID NO: 731694 - DNA, 75 bp, Homo sapiens
caaaaagaagttctcaaaacaaagcgtttagaagaagaatgtgaatcctctctttgcacatctgcgttaagagcc

SEQ ID NO: 731695 - DNA, 83 bp, Homo sapiens
cgggtggcggcgaacgcggagagcacgccatgaaggcctcgggcacgtggtcccaggctgcacccatggcagaaggaggaggg

SEQ ID NO: 731696 - DNA, 74 bp, Homo sapiens
ggaggacagttcgctacacagcaatgcatcgagaatattgaaggatgtttgttccaagatctctaaaaatcaag

SEQ ID NO: 731697 - DNA, 78 bp, Homo sapiens
tgccctaggggccaggaccggcgtgacagcctccagtgtttgagaacaaagataagattgtgatcatcatggaatatg

SEQ ID NO: 731698 - DNA, 90 bp, Homo sapiens
cgcgaagctggccaaagcctgcccagacggctcacctgtgcgggatggaacaaaaggtcccaggaaggtggcgtcagcatctgcagccgc

SEQ ID NO: 731699 - DNA, 88 bp, Homo sapiens
agaatgtaagacaggaaaataattaaatattcttaccgaggtgatgcaaatgaagcttcatatagttgctttgattgcccagaaggga

SEQ ID NO: 731700 - DNA, 98 bp, Homo sapiens
gcagctccagagctttgtcaaagacaccttgcagagtgaagtcaagcccatcctagagaagctgacccaggaccaggatgtggacgtcaaatactttg

SEQ ID NO: 731701 - DNA, 101 bp, Homo sapiens
cggaaggcggaggccgagaccagacgcggagccatggccgaggtgttgcggacgctggccggaaattgaacttagctcattaagggaagctttgtctttcg

SEQ ID NO: 731702 - DNA, 98 bp, Homo sapiens
ttcagttacaagagaaactttatgtgcctgtaaaagaatacccagatgtaagaagagttcctgggtcaagtggtcaccttcataaaaccgaagacggg

SEQ ID NO: 731703 - DNA, 100 bp, Homo sapiens
aaaatatttgggagggggtcccgccagcgccgtgacgtggactacagtgacgccctcacggagaagcagtggctaaggataacgaaggaggcccaacttc

SEQ ID NO: 731704 - DNA, 98 bp, Homo sapiens
aaggacttcaacatgcccctcactatctcccgggatttgcatgcagccactgttaacccggaccccagtttaaaagagtttgaaggagcaaccctacg

SEQ ID NO: 731705 - DNA, 96 bp, Homo sapiens
caacgggcagtttgtcgaacgatgttggactcatagtcactgccagaaagagttgaagtattgataacaccaaggaactctatcacaatttgaaaa

SEQ ID NO: 731706 - DNA, 100 bp, Homo sapiens
accagcaccccagccacccccagctcttcagcattgtccgccaggcctgtgtccggagcctgagctgtgagctggagcagagccagaaggaggcctcaga

SEQ ID NO: 731707 - DNA, 101 bp, Homo sapiens
ggggtcgacagtgactaccatgacgaaaacatgtactacagccagtcttctatgtttccacatcggtcagaaaaagatggctggctatttgcctcagaata

SEQ ID NO: 731708 - DNA, 51 bp, Homo sapiens
gttaatttcaaagcttttcccatggagacaaatgctgtgcttcatgaagtt

SEQ ID NO: 731709 - DNA, 98 bp, Homo sapiens
cacagcagaggagatcaagcgggagcagaggctcagctgtccctgccacagagccaggaaataagaagccccgtggtcagagatggaaggaaccccca

SEQ ID NO: 731710 - DNA, 100 bp, Homo sapiens
gcagtactacctggcctgctcgccccgcgccgccaaccccttccagcagaagttccacctggtgccaagcatcaacaccatgagtggcagtcaggagctg

SEQ ID NO: 731711 - DNA, 97 bp, Homo sapiens
gtacctttggtttcacagaagatctctgccaggcaaggccatcttagaggaaaacaggaaatcattttcacaactttataagttggcaagacttaag

SEQ ID NO: 731712 - DNA, 82 bp, Homo sapiens
tcgaacccgcctgcgatggggcgagaaaggtcccactgcagccctccaagcaggttttaaaatcaaagatgggaaaatcgga

SEQ ID NO: 731713 - DNA, 90 bp, Homo sapiens
cagtgttatcatcctactcagtctgttctccactcctcatgacaatagaatctaattggagatgtggaagacatagtttacagagaattc

SEQ ID NO: 731714 - DNA, 74 bp, Homo sapiens
ttgtaccattcatagcagtcttgaaggaaaaacaagaatggtggtggctttacattgcagataggaaggagcag

SEQ ID NO: 731715 - DNA, 73 bp, Homo sapiens
aggattccaagtaactcttatttgctcgatcaagtcatccgccaaagaagcctgtccagtttggaactgttcc

SEQ ID NO: 731716 - DNA, 83 bp, Homo sapiens
cactcggccaaggaaactcccagggcccgcccaggacccccaagccgccgcggacgcagaaatgctttgtggtctacagccac

SEQ ID NO: 731717 - DNA, 100 bp, Homo sapiens
ctcctcgcagttggactggtgggaactgggaacactggagacctgatttctaactgacgctaccgtcgcggccgccgtgagaaagatcagtctaaagaaa

SEQ ID NO: 731718 - DNA, 82 bp, Homo sapiens
atctaaaacaccagaggttgaaaaaatctcagcacgacccacaacagggctttttggtggtgctggagttggcaagactgta

SEQ ID NO: 731719 - DNA, 90 bp, Homo sapiens
cagatccagggtcactcagctcctcgacatttccacacccagacccaaagtttgcaacaatcagtcagagtctcgctctgtcgtccaggc

SEQ ID NO: 731720 - DNA, 75 bp, Homo sapiens
tctccagcgggcctggactgtgggctggtgtgtggaactggtccggggatcccgagctgtcctgcagctgtaccc

SEQ ID NO: 731721 - DNA, 100 bp, Homo sapiens
aggagtgaatgtttcagggtggagaagaatctgcttgtctatgggaatctccgtatgttatgatgaagaaaaatcatgaaatgcttgaaggcaatgagcg

SEQ ID NO: 731722 - DNA, 75 bp, Homo sapiens
gggcatgagctgagagcaccacgccgaggccacgaggcagataaaacgtcactgtgcagagccttttacagaata

SEQ ID NO: 731723 - DNA, 116 bp, Homo sapiens
cccgatgagcggcggcctcggcctccggcgcagcccggaaatgtccggcaagatcgagaaagcaggagtttctgtgtgaccagaagtacagtgatgaagagaaccttccagaaaag

SEQ ID NO: 731724 - DNA, 98 bp, Homo sapiens
ccgaggcgttctcccgactctggaccgacgtgatgggtatcctgtccgtttctgacctggagagacgtacagcatgttattgtcaggacttcccgtgc

SEQ ID NO: 731725 - DNA, 82 bp, Homo sapiens
agcatttacaggccccaccgaaaaaccttaaagggctgagagcttgagggcagcattttgaaagcgaagcagaagccgtaga

SEQ ID NO: 731726 - DNA, 100 bp, Homo sapiens
aaagaatgacagcaagaggcaaaacttcggacatagaggccaaccaacctttggagatctggagcagcaaccatttgttccccagtgcagagaaagcgac

SEQ ID NO: 731727 - DNA, 82 bp, Homo sapiens
ccaggagttcgtctcttacgtctgcggaagtgcagctgcctcagttcttagcgcagggagaagcatgacactggccaacact

SEQ ID NO: 731728 - DNA, 88 bp, Homo sapiens
gtgaaggaatgggacaagacccatctttatgcaaagccagcgttacagtaatgttccaggttacttttcacatagaaccatatagcaa

SEQ ID NO: 731729 - DNA, 75 bp, Homo sapiens
cttcctgaccaatgacatccttcacgagatgccggagcggttgcagggcacacattactcggtgcagtcggacat

SEQ ID NO: 731730 - DNA, 83 bp, Homo sapiens
tggatgatgtgttcccgcgtctactacatggtgacggcaattgcctcatgcatgccacttctcagtacatgtggggcgttcag

SEQ ID NO: 731731 - DNA, 100 bp, Homo sapiens
caggtgaatttaaaggagcagccctggtgtcacctatcagtaaaaggcaattaagttggaatatgcaaggttggttaagttggcccaagaagacacccca

SEQ ID NO: 731732 - DNA, 95 bp, Homo sapiens
acaacctccgtcctctgggctcaagcagtcctcgcatctcagcctcccaaggagctgggacctcaggttattctcgttcaagttaatccaggtga

SEQ ID NO: 731733 - DNA, 83 bp, Homo sapiens
ctggaatctggaatgaaatcttccaagtccaaggatgtgacctccggctagcctgtttcagccacctcgtcgtcctggccttg

SEQ ID NO: 731734 - DNA, 90 bp, Homo sapiens
caaggtgctatctcagagaccaggggagcccaaagaagtgtgaagctgaagaggcagagccaccagctgccacacagccccaaacctcag

SEQ ID NO: 731735 - DNA, 75 bp, Homo sapiens
tataaaggaaaacaagaggccccagagggaaaagaagcccaaagttttaaagatagggatgaggaagaaatgacc

SEQ ID NO: 731736 - DNA, 71 bp, Homo sapiens
tgagtatgacatgaccaagatgcccgagtgctacttctactccaagttcgagcacgagcggctccgcaaat

SEQ ID NO: 731737 - DNA, 82 bp, Homo sapiens
cggtgcccgaggaggcagccaagctcgtggcctgcctctgcgtgcgcccagctgagagccagcctggaggttacccagcagc

SEQ ID NO: 731738 - DNA, 100 bp, Homo sapiens
ctcatacgtctgcaggtgcaaacaaggctacattctcaactcggatcagacgacttgcagaataacttcaaatgagcatttttcaactgcagaagaaagt

SEQ ID NO: 731739 - DNA, 106 bp, Homo sapiens
gagctttgtctataagggtggaaaaatctacaaggttccttccactgaagcagaagccctggcatctaaatatggtgcacctgaagattgggaactcaaaacacag

SEQ ID NO: 731740 - DNA, 75 bp, Homo sapiens
gcagaatcccaacgttcaggatattttgggagaacttagagaaaagggctcactcagtaacttgatggattttgt

SEQ ID NO: 731741 - DNA, 75 bp, Homo sapiens
aagtacctctggcttcccctctcttcaactagggtctaaattatggataataatggaatacctgggcggtggttc

SEQ ID NO: 731742 - DNA, 100 bp, Homo sapiens
ctgcagccaccacagtacttctgggaagaggaggaagagctgaatgactcaagtctggacctgggacccactgcaggtacaggtttgcagattccgccag

SEQ ID NO: 731743 - DNA, 99 bp, Homo sapiens
cgcgacctacctgggcgctccgcgcccccggatgctgcagaaacatgccaaaggccaggatttgtttgatcagattgtgtaccacttggaccttgtgga

SEQ ID NO: 731744 - DNA, 75 bp, Homo sapiens
ggcggcgcgagtgggcgcgggcccggtgggccagaagctggcagggcggagatgctggaccacgccgtcctgctt

SEQ ID NO: 731745 - DNA, 74 bp, Homo sapiens
gaacagagtcaagtggaatcaaagctgttaggcaattttcttcagtggtatggcattttctcaaataaaactct

SEQ ID NO: 731746 - DNA, 100 bp, Homo sapiens
aggagccgttcccttcggccgtcacaaattattcttgacagaagtattttaaaagaaaaatctttacgatggcctcagcagtacttagttctgttcccac

SEQ ID NO: 731747 - DNA, 49 bp, Homo sapiens
gtatgaacaaaaccagtctgatgtgcaaagcgaaggctggagctaggag

SEQ ID NO: 731748 - DNA, 75 bp, Homo sapiens
ggccgaacaatgaagctcctgaagccgacctgggtcaaccacaatgctccaaaaccttggaattaatccagctaa

SEQ ID NO: 731749 - DNA, 75 bp, Homo sapiens
tttagacttgccagaacagaacactattcacaaagattgcctgcagtttattggaaacttggatttaactggcca

SEQ ID NO: 731750 - DNA, 100 bp, Homo sapiens
cgaattccagaatgatgaaattgtgtttgaagaaaaggcccaagtggatccccttagtgctctgaaatatttacaaaatgatctttatataactgtggat

SEQ ID NO: 731751 - DNA, 50 bp, Homo sapiens
cctgggcctcctgtgcaaaagcatgcgttttgctgctgacatcatctccg

SEQ ID NO: 731752 - DNA, 90 bp, Homo sapiens
agggagtgcgtggaggagctgtgcagccgcgaggaggcgcgggaggtgttcgagaacgaccccgagacgccgctcctgacatcactggcc

SEQ ID NO: 731753 - DNA, 99 bp, Homo sapiens
gaaaggattttgcacttgtgcagaccgggcgagcagagtaagaagcaggcaggggaaatggaaggtgatgcagtcgaagccattgtggaggagtccgaa

SEQ ID NO: 731754 - DNA, 90 bp, Homo sapiens
ggaggggccgcgccgccaccgtctgaactaggatgtcccgacatgaaggtcatctctgaatttgagcaatggtgaaacggaatctgtgaa

SEQ ID NO: 731755 - DNA, 100 bp, Homo sapiens
gcgggatcccaaatcggaagtgaattcggattgtttgctgggcggtggccagtttgaatactcccttcataccagcaaatcccaacatgtcccctttgga

SEQ ID NO: 731756 - DNA, 146 bp, Homo sapiens
caaccactcaccaaatccatgtggagcagtccatcagcctcctccttaacttcctgcttgcagcgtttgatccgacggaaccgctggactccaggttccttgcctgggagtaggagaaatccacctgctgggggctgagtgtggcc

SEQ ID NO: 731757 - DNA, 76 bp, Homo sapiens
tgtccggaattcatggggtgaaccatggggctgtgtggagaagattgggggctggctgaggaaaaatgtgctggtg

SEQ ID NO: 731758 - DNA, 100 bp, Homo sapiens
tacaccaaatgtgaaggtgatgaggttgaagatctctatgagcttttgaaacttgttaaggcctatggcatgtctgcgttacctttaaatctgataaaag

SEQ ID NO: 731759 - DNA, 100 bp, Homo sapiens
gaaaagactgcgaggtggccgcagctgtggccggagagacgcaagatggctgtcctctctaaggaatatggttttgtgcttctaactggtgctgccagct

SEQ ID NO: 731760 - DNA, 75 bp, Homo sapiens
tcatctcagccacgaagtacagccggaggatcctaagcacttcaagtcagagaagacaggacggggacagttgag

SEQ ID NO: 731761 - DNA, 82 bp, Homo sapiens
aacgcgctgcacctctacctgtggctctttctgctgggcctgcccttcaccctctacatgtccagttacaacacagggatca

SEQ ID NO: 731762 - DNA, 114 bp, Homo sapiens
atcaaattgaagagagcagttgaagaagtgaagaaattattggtacctgcactgggaaggatgagttcttgcagcaacgtctgtgggtccaggcaggcacaggctgcagctgag

SEQ ID NO: 731763 - DNA, 100 bp, Homo sapiens
ggaaccctggtcaccgtctcctcagatgccggaaggtccttctgaatcccttccctgttccttaggttgcactagtcgggggttccatgctggggggcag

SEQ ID NO: 731764 - DNA, 100 bp, Homo sapiens
gcagaattcacaagatccaatcccttgtccttaaaagactatgtcagagagtcacaatgaccttgcacaataacagtacaacctcgcctttgtttccaaa

SEQ ID NO: 731765 - DNA, 90 bp, Homo sapiens
ctgcgttctgaagcccgagaggagccacaatggagacgccgccgctgcctcccgctggatggatgaaaaggcaagaggaaaaacaaagca

SEQ ID NO: 731766 - DNA, 100 bp, Homo sapiens
ggagcctttgcttcctcaaatacgagcgggaactgcgttgagcgctggattccaggccgagtgctggcgaggcgcgcagaactctccgcccagttcgccg

SEQ ID NO: 731767 - DNA, 75 bp, Homo sapiens
ggaaagcaaggccaaagacagggagaaggacagagcgggatgccaccagcttgtccaaagggaagttccaggagc

SEQ ID NO: 731768 - DNA, 82 bp, Homo sapiens
ccgaggaccagctcaatgacaggttgattcttcaccacactgaaaccattaggaaaaatccttgtggttaacagcagaggct

SEQ ID NO: 731769 - DNA, 100 bp, Homo sapiens
ctccagtgtcccttcttccacatgaaaaggataaggtttgtctgccattgtggatttcctgggcagagtggagtgaaggtgccaaaagccaagaagacac

SEQ ID NO: 731770 - DNA, 101 bp, Homo sapiens
ctcgtggccgacggaacaatgaagaaggtgggtgcggctgctatttggacgagagttccccctgcaggaccttctggtggtctgggatgccttgtttgcag

SEQ ID NO: 731771 - DNA, 75 bp, Homo sapiens
tgggacttcccgtccgcggcgtggaggatggagtcttattctgtcgccaggctggagtgcagtggtatgatcttg

SEQ ID NO: 731772 - DNA, 100 bp, Homo sapiens
cggaggctgccatggacgacgaggaggagacgtaccggctctggaaaatccgcaagaccatcatgcagatgggggctccggaggtggcgcccaggctctg

SEQ ID NO: 731773 - DNA, 100 bp, Homo sapiens
acaaccccaaaacaaaaacttggagtgtgatgccacctatgtccacacatagacatggccttgctgatgccattaataatgctgcaggctttggtttcag

SEQ ID NO: 731774 - DNA, 75 bp, Homo sapiens
tccagtagaatttcttatccaagtgcttttacccagcacctgtccagtgaaacaacttgataatcgtttcgaggg

SEQ ID NO: 731775 - DNA, 135 bp, Homo sapiens
gactctcggtcgtgcagcggcggcgagcgctcgcgagcggctgcgggacgcgaggtttccggttacagaatgtctgaaggggacagtgtgggagaatccgtccatgggaaaccttcggtggtgtacagatttttc

SEQ ID NO: 731776 - DNA, 50 bp, Homo sapiens
gccaggaaaggctctatgagagcagcccaggatggcggcccaggtgactc

SEQ ID NO: 731777 - DNA, 90 bp, Homo sapiens
cagcatccaaacattatcactctaaaggatgaatggaagttggatacactttgtgacttgtacgagacactgaccattacacaggctgtt

SEQ ID NO: 731778 - DNA, 75 bp, Homo sapiens
caggcatgtctcccgaggagtgcaggcgcttcaccacagacggcgaagatgaagagatggctgacccaatggaag

SEQ ID NO: 731779 - DNA, 74 bp, Homo sapiens
ctgaaacttcaggagctccgcaaagtgtgtctccaggaggcgaccccaccaacaactgaacgctttggtcaggc

SEQ ID NO: 731780 - DNA, 100 bp, Homo sapiens
aaggctgcagggaaggccccagagtcagagaagccggcgcagagcctggtatggagagtcggcttgactacactgtgtggagcaagttttaaagaagcaa

SEQ ID NO: 731781 - DNA, 98 bp, Homo sapiens
ttgaatgtgtcaaaaccaaacaccctcagctccacattgagagcaaaatctacaagatgatgcagggaggaggtctcggcgcggaagatggccggcgg

SEQ ID NO: 731782 - DNA, 82 bp, Homo sapiens
ctcgacccagggcccgcgggccaggagagcgctcggcgggaggatacgaagcgttttcggcttcctgcccggagctgtgcag

SEQ ID NO: 731783 - DNA, 100 bp, Homo sapiens
gacacgtcgcacatttagaagatgatgaaggagatgatgatgaatctaaacagcctagtgatgaccactttgtacagatcatgtgtatccgaaaagggaa

SEQ ID NO: 731784 - DNA, 74 bp, Homo sapiens
tcccggcgaaagtgagcgaggtttgcccggagcgcgcacgaggtgaacatcattccaataattgcaaaagctga

SEQ ID NO: 731785 - DNA, 89 bp, Homo sapiens
agctgagttccttttggaggatccgtcttcaggcaggatatgatggatgatatctgtcaggagcaatttctagagctgtcctacttgaa

SEQ ID NO: 731786 - DNA, 74 bp, Homo sapiens
gaataaaaagattcccaggatgtgagcaacacgggaccgaaattgcctgtgttctacctgtactgatggatggc

SEQ ID NO: 731787 - DNA, 50 bp, Homo sapiens
ttaatataccagacactgcaactggtgagtatttggacattctcgctatc

SEQ ID NO: 731788 - DNA, 75 bp, Homo sapiens
aacggagtgaccaagagcaggtttgaggtatcatgatattagctggtttgacatcaagtcatttgtgagtcatca

SEQ ID NO: 731789 - DNA, 100 bp, Homo sapiens
taaaaaggcctgggatgatctcaagaaatatttggagcccaggtgtcctcggatggttttatctctgaaagccaaggctaagtcgaaatgtggcccaacc

SEQ ID NO: 731790 - DNA, 82 bp, Homo sapiens
cccgcctctgcgtctttgctcccggagcgcttgaaggagctgcggcactgccagtgaaagatgtagaagataaacctgaaca

SEQ ID NO: 731791 - DNA, 121 bp, Homo sapiens
gttctatgtttacgcacagctgcctgtcaccccagatgtcctcatcatcccgtcagagctgaggtacttcgtgaagagcagagaggagccttcaggggaagtagaggtggccgaggttggg

SEQ ID NO: 731792 - DNA, 83 bp, Homo sapiens
cgggcggtgagcgcccatatgggggttctggagagcggggtgtgggcctgtcaggattggagctgctttccgagcacctggac

SEQ ID NO: 731793 - DNA, 75 bp, Homo sapiens
ctacaaccagagcttcttccagagccttctcaaagccacagcaaccatgtccaagggacctgcagttggtattga

SEQ ID NO: 731794 - DNA, 73 bp, Homo sapiens
cctctgcccagcttcccaacttcaggaagctgtctcgtgcagacttgaccgagtacctcagcacacattacaa

SEQ ID NO: 731795 - DNA, 50 bp, Homo sapiens
tctatttccaaagtatgttgcacccaggactttccttatcccagttgatt

SEQ ID NO: 731796 - DNA, 75 bp, Homo sapiens
gacctcccaaagcgctgggattacaggactgtttctttttccaaaagaggagctcaaaagagaaagttcatctag

SEQ ID NO: 731797 - DNA, 100 bp, Homo sapiens
gagcagagaatctgtggaattattgctggaagactggcatgtatcttgcaatatattcagaactctccctcctagtgacagcaatgaatttgatccagaa

SEQ ID NO: 731798 - DNA, 74 bp, Homo sapiens
cacagaaggagcaaatacttcttcatccatgggctccccaaaggaagtcattttctcagacatcactgaaaatt

SEQ ID NO: 731799 - DNA, 100 bp, Homo sapiens
cgaccttggacttctcagcctccagaatggaggatcagctgatttattcggaggatttgctgactttggctcagctgctgcatcaggcagtttcccttcc

SEQ ID NO: 731800 - DNA, 74 bp, Homo sapiens
gcgtggcccagagaccaagatcactgataagaaatgttctcgacagcaagtgtatccaaagtgtgtacatcagt

SEQ ID NO: 731801 - DNA, 100 bp, Homo sapiens
acatcaaagaggtggtgcggaagatgatcagccaggcacagaaggtctacgacgttcctccatcggtgagcaaggatgtgcccgatggcccactgctgcg

SEQ ID NO: 731802 - DNA, 90 bp, Homo sapiens
caatggagtcgagtctagaattcacacagagccacctagttcccttgccccaccctcagaccctgcagaagctgaaggttcctatcatcg

SEQ ID NO: 731803 - DNA, 78 bp, Homo sapiens
cgacgtggaggcggagtggcgcccggcgaggtagcgccaggcgaggcattctactggagataccaaagttcccttctg

SEQ ID NO: 731804 - DNA, 75 bp, Homo sapiens
ctggcatgacgtgcaggtctctagcgccaaacggggattcagcgtccgatcctttggaacagggactcacgtgaa

SEQ ID NO: 731805 - DNA, 98 bp, Homo sapiens
gatggaagaagacgggtccactgtgcttgcagacagtccagaagacatgcacagctggattaaggagattggcgcagctgtccaggccctcaagtgcc

SEQ ID NO: 731806 - DNA, 100 bp, Homo sapiens
ctgcccaagaaggacattatcaagtttctgcaggaacacggttcagattcggtgtacattccaagcagagtggccctcatccttcagaatgtggatctgc

SEQ ID NO: 731807 - DNA, 75 bp, Homo sapiens
ctggaattgctactgctgcctctgtcactcctggtgaccagcattcaaggactaagagcctctggaaaggactca

SEQ ID NO: 731808 - DNA, 100 bp, Homo sapiens
ccctggaagcagcagctcaccgaggacggggactcgcgagatccctccaaaatcaagtggggcgatgctggcgctgagtacgtcgtggagtccactggcg

SEQ ID NO: 731809 - DNA, 100 bp, Homo sapiens
gccagccacattgagcagagaggaggaacagagacccggacggcatttggcattgaatttgcacgatctcagttttccattcgtctgagaactcgttcct

SEQ ID NO: 731810 - DNA, 100 bp, Homo sapiens
ctggatttatataagaagatgcaggctggagaagaagtcactgaacttaggagaaagtatacagaattacagctggaattgaagattcctgtctctggat

SEQ ID NO: 731811 - DNA, 100 bp, Homo sapiens
tggcgaatggggctcacgtcgacaaacccactttcagagctgtggagattggcccagaccaggatctggatgttgttgaaatcacagaaaacagccagga

SEQ ID NO: 731812 - DNA, 75 bp, Homo sapiens
ctgtgaagccacacagtgtccagatacgagggttggatggcaagcatgtggtgtttggcaaagtgaaagaaggca

SEQ ID NO: 731813 - DNA, 100 bp, Homo sapiens
aacaagattacagctaatctatttcgaatactactagaaaaaagaagtgctgttaatacgtctcagagaaagatgtcacatctgctaaagcactgtatga

SEQ ID NO: 731814 - DNA, 74 bp, Homo sapiens
tgttgatatagccagagcccgaaaagaagattactctgcaacagctaaagggcaagtgtccagagaatggctgg

SEQ ID NO: 731815 - DNA, 97 bp, Homo sapiens
ctgaggcctccccagccatgcagaactgtcctcgatgggcttcctggaatattggtgtgtttatttgcatcagatgtgctggaattcatagaaatct

SEQ ID NO: 731816 - DNA, 101 bp, Homo sapiens
cctcgataaacagggccgtgccgcagatgcccaccggaatggagaaggaagaggagtcgggggatatgagactttctactcggaatatcctgagtgttgcg

SEQ ID NO: 731817 - DNA, 75 bp, Homo sapiens
ttcgactgctagagccgagcgaagctgtactaatggtcacttgatgtgcgctggctgttttatccacctactagc

SEQ ID NO: 731818 - DNA, 75 bp, Homo sapiens
catcacctcatgaaaatgatacgtgatttcagcattctcttttacagggttccacaagatgaatggacagggtac

SEQ ID NO: 731819 - DNA, 75 bp, Homo sapiens
gagaatgtccccatcatgtacatctgccatgggatgacgcctcaggtcctttcccataacctgtgcacggtgctg

SEQ ID NO: 731820 - DNA, 76 bp, Homo sapiens
cccccaatttcccagctgctaaaggaagaggaaggtttccaatacttatctacaggaatcgccatgaccccagctc

SEQ ID NO: 731821 - DNA, 75 bp, Homo sapiens
tcgtcagactccagcagccaagatggtgaagcagatcgagagcaagttcacagccatgaatgaaccacagtgctt

SEQ ID NO: 731822 - DNA, 74 bp, Homo sapiens
gcggctgcaatatggcggaggcggaaggggaaagcctggagtcctggctcaggaccagttactctccacaagaa

SEQ ID NO: 731823 - DNA, 75 bp, Homo sapiens
gaagggtgttttggaggagttgctgtggtttatcaaggacagtcattttgtttactcattcagccctgttgcagg

SEQ ID NO: 731824 - DNA, 98 bp, Homo sapiens
tggtggcagagtccaccgctgtcccgcggcctggagtacaacgaggtcaacgtcaccctggacctgggccagcctcctgcccgaaggccacctgaacc

SEQ ID NO: 731825 - DNA, 82 bp, Homo sapiens
actgcctggccgaatcagccttttcacgctcaaggagtcatactccatgggtttatgtgataaatgatcttggcatagaaga

SEQ ID NO: 731826 - DNA, 101 bp, Homo sapiens
acaccgtcaccaccttggtggagaacaagaaagctcagctggtggtgattgcacacgacgtggatcccatcgaggactaccccatcacagatgtctgccag

SEQ ID NO: 731827 - DNA, 90 bp, Homo sapiens
gacgtcatcatgctgaccaccaatcagatccgtaagggagagcaacaagccccggccctcagagctcagccggatgagcgcagcccagag

SEQ ID NO: 731828 - DNA, 100 bp, Homo sapiens
gagaagtgctgcaaggctgacgataaggagacctgctttgccgaggagggccatgatccaaaggaaccagagcagttgagaaaactgtttattggtggtc

SEQ ID NO: 731829 - DNA, 99 bp, Homo sapiens
ctcggtcccgcgctgcgcatccccgcggacgccacagcgctgtttgggaaaagttcttaagttctgaaacgccgcggatcaatgtctttatggcagtgc

SEQ ID NO: 731830 - DNA, 82 bp, Homo sapiens
ccggtgacagcgtgagaggttcgcagaagacacctatggctgccgatgaaggctcagcagagaaacaggcaggagaggccca

SEQ ID NO: 731831 - DNA, 100 bp, Homo sapiens
gcgaacctgagccggaacgggccagcgctgcaagaggcctacgtgcgggtggtcaccgagaagtccccgaccgactggcatttgttgctatcggggacta

SEQ ID NO: 731832 - DNA, 75 bp, Homo sapiens
gaacccgcccatgaagccagatttctcccagatgggatggaggtggataccacaccaacagttgctggacagttt

SEQ ID NO: 731833 - DNA, 100 bp, Homo sapiens
ccgctatcacagctgctgcaatcgcttgggagagctcctgggccacccctcctttcaggtcaagcgcgagcttcggcctcggctctgtaccatgaagaag

SEQ ID NO: 731834 - DNA, 100 bp, Homo sapiens
gccgcgttggcctcgccgcccctgctcgggtttccaaggtgctattgggagctcatgcactcttggccaacgggtctgtgatgtcacgggtagggacagc

SEQ ID NO: 731835 - DNA, 107 bp, Homo sapiens
cggtgctgcagaaccagatccgggagcacgtcatcgccatcgaagacaatgcagatcttcgtgaagactctgactggtaagaccatcaccctcgaggttgagcccag

SEQ ID NO: 731836 - DNA, 75 bp, Homo sapiens
ggtttttctacgcattgattccatgtttgctcacagagggcacggaaacgaatacagtggctcccggacctcttt

SEQ ID NO: 731837 - DNA, 101 bp, Homo sapiens
ccggaaccactctttgtgccgcagcttcgcaggcatagaatgtcaagctaaccaggcgtccgctacttcagaagagtgtactgtcgcatggggagtctgta

SEQ ID NO: 731838 - DNA, 100 bp, Homo sapiens
tgttaaaaaaccaaagacgggcgcaaagattgcttgaagaaatccatgccatgaaggcgcggggcgaaggagctgctagaacaatgctgaggcgggtgag

SEQ ID NO: 731839 - DNA, 74 bp, Homo sapiens
acatcatgccgagccttccttgtaacagcgcgaatccccaccaaggttcggctttccagtttggcagcagcact

SEQ ID NO: 731840 - DNA, 75 bp, Homo sapiens
ttaaaaaggatgatattggacgaaggaatgggcaaggtttttgtggaaactctggataagtgtttcgaaaatgtg

SEQ ID NO: 731841 - DNA, 83 bp, Homo sapiens
agcgaggtcgcggcaggttcgaggtcattagtaattatcagcactttagatgggagaattgctgccttggatcctgaaaatca

SEQ ID NO: 731842 - DNA, 50 bp, Homo sapiens
ccgcagtacaagaactggagaggcatttaaacttccctcttagaactgct

SEQ ID NO: 731843 - DNA, 136 bp, Homo sapiens
cgcttctctgaaaggctctccttgcagctgcttagacgctggatttttttcgggtagtggaaaaccaggagtgcctgtgaagaaaacggggtattgccctgaggcttatattctgcctcagttgtcttttcttgaa

SEQ ID NO: 731844 - DNA, 100 bp, Homo sapiens
ggaggtgccgctgccgtggccgcccggctgccgggagccgacagcttcgcgccgggtggggagcattaagcgggaaatgaccttcacatttcagtcagag

SEQ ID NO: 731845 - DNA, 100 bp, Homo sapiens
ctcaccaacagatgaagacagatgcaccaacgagatgctggttgccaacattgacttgggtcctactattttggacattgctggctacgacctaaataag

SEQ ID NO: 731846 - DNA, 90 bp, Homo sapiens
ccttctggatctcagcagggatgaatgcaaaagaattcttcgaaaattggaatcccacgtggcgaagtctcgattttggaattatgccag

SEQ ID NO: 731847 - DNA, 74 bp, Homo sapiens
caggaaccagctcgggggccaactctgaggagtccactgcagcaggatagaccctttttccggtaactaaactt

SEQ ID NO: 731848 - DNA, 51 bp, Homo sapiens
tggacaaaggaacaggtatctcagatggccaccatgtctgggagatggaag

SEQ ID NO: 731849 - DNA, 98 bp, Homo sapiens
ggcgccggagacgatgccgttattattcactgaccagcgctgacctgtcagcccttcaaggcttcaactcgccaggaatgctgtcgctgggacaggtg

SEQ ID NO: 731850 - DNA, 96 bp, Homo sapiens
cttcaatctccatggagtccttaaaaggcacaggagattcagtagatgaacaggtatgtgatagtggaatgtgaagatcaagatactcagcagaga

SEQ ID NO: 731851 - DNA, 101 bp, Homo sapiens
atgcgttgcctggctccacgccctgctgggtcctacctgtcagagccccaagtcattttttgagaccagtactgttataatccctatttacagatgaagaa

SEQ ID NO: 731852 - DNA, 97 bp, Homo sapiens
attttgctcattcttggaatgaatcatgggtaaatcgaatggaagaaggaaacccaaggttgtggtatgctgccctgctgttcgtggcatttgccct

SEQ ID NO: 731853 - DNA, 102 bp, Homo sapiens
gccagtggcactcccagctcggatgatcggctgaatgtaacagaggaactaacgtccaacgacaagacgaggattctcaacgtccagtccaggctcacagac

SEQ ID NO: 731854 - DNA, 90 bp, Homo sapiens
gcggggaggtgggtactacacaaccgtctccagccttggtctgagtggactgtcctgcagggctttgttcgcgggggtcacagctctcat

SEQ ID NO: 731855 - DNA, 96 bp, Homo sapiens
caggcatgcgccaccacgcccagctggattactgggccagttacaggtcttgttcttactggacatccaaggtcaggcatggggttctggtgactt

SEQ ID NO: 731856 - DNA, 82 bp, Homo sapiens
tcccttggtcaaaagcgcactaaatcgtctccaagacttaattcagtgcacaaatgagatgaatgtgaacatcccacagttg

SEQ ID NO: 731857 - DNA, 88 bp, Homo sapiens
ggaggaagtaggggtgcacctcagcactatcccaagactgctggcaacagatcatcggccgtggcaatgaccaggtggccatcagctc

SEQ ID NO: 731858 - DNA, 90 bp, Homo sapiens
tgaagagaggttttgaattcacgcttatggtagtggttgagtcagcagatactggagttatttgaaacatgtcagcagcaaataagtgat

SEQ ID NO: 731859 - DNA, 75 bp, Homo sapiens
cttgaacttctcagcctccagaacggtgctggagaatctggtaaaagcaccattgtgaagcagatgaggatcctg

SEQ ID NO: 731860 - DNA, 74 bp, Homo sapiens
ccagaagctgccaccgaaccaagtgagaaagatcagtctaaagaaaaggagaagaaagtgaaaaaaacaattcc

SEQ ID NO: 731861 - DNA, 101 bp, Homo sapiens
cctcctgccgtgtaaccctcacggcaacgggctgctctacgccggcttcaaccaggaccacgggaactgggaacagccaggtgccccaaagcaaatacgcg

SEQ ID NO: 731862 - DNA, 90 bp, Homo sapiens
gaggcctgcaaagctgtacaagagatcatgcagagcatgttactctgaggtttctgaagcaccagcaaatggattaagtaaaggtctggg

SEQ ID NO: 731863 - DNA, 74 bp, Homo sapiens
gaaagacctccactcttcaaacagttcggatagagaggagtccctctgcaggcgcaagggcagatgcagaccca

SEQ ID NO: 731864 - DNA, 83 bp, Homo sapiens
ttcagtgggctgtgattttcagaggggaatactaagaacgtactgtaagaactctgtggacggcctctggtactgcttcgatg

SEQ ID NO: 731865 - DNA, 96 bp, Homo sapiens
tggatgataaacaatggctcaccacaatctctcagtatgacaaggaagtcggacagtggaacaaattccgagacctgttgaaggaggatgttccca

SEQ ID NO: 731866 - DNA, 76 bp, Homo sapiens
gaggacctcctggtgcgcatcctgctgctggctgcccttgtctcctttaattatatccagatcgagagacagaaga

SEQ ID NO: 731867 - DNA, 100 bp, Homo sapiens
tggctctataagctgaattatggcagcccagtcaagaagcatcaagtgtacctgatttgtgaacctatcttgcttcagttggtttcctcctaaatattag

SEQ ID NO: 731868 - DNA, 82 bp, Homo sapiens
agtgcccttgtggcgaatggggctcacgtcgaatatgagatcctgactccaaactccattcccaagggtttcatggacggga

SEQ ID NO: 731869 - DNA, 100 bp, Homo sapiens
ccgaagaggcctgcagtgggagagcaggtgcaagaagaaacacacgctgctgtgccccgactttgcccgcaggggggcgtgtccccgcggcgcccagtgc

SEQ ID NO: 731870 - DNA, 105 bp, Homo sapiens
gagcccttccttataggcgtcagcgggggaacagctagcggcaaggatatatcccctggggcagctggtggggctgaagatggtttctttgtgcccccaaccaag

SEQ ID NO: 731871 - DNA, 90 bp, Homo sapiens
gaccctgttcctgaacggcagccccaagaacggaaagcagatataatttctacagtagaatttaatcattctggagaattactagcaaca

SEQ ID NO: 731872 - DNA, 95 bp, Homo sapiens
cccacatcccccataggtcactgtgtggccatctaccactttgaaggtcattgattacaacggggaacgcacgctggatggttttaagaaattcc

SEQ ID NO: 731873 - DNA, 73 bp, Homo sapiens
ccctggtggcctttccctccagctctgtctatcctaccaaggtacatctccgttcatggatgcattaacagcc

SEQ ID NO: 731874 - DNA, 100 bp, Homo sapiens
tgtgatggaaaattatactcagtggctgcaaaaagaaaatggctttgtaaagaagtttgaacctaaatctggctggatgacttttctagaagttacagga

SEQ ID NO: 731875 - DNA, 87 bp, Homo sapiens
cgagcccgacctcgggcgccccgccggtcacctccgcgcggacaccagactcggtgaaatacctggagtgctcagctctcacccaga

SEQ ID NO: 731876 - DNA, 75 bp, Homo sapiens
ttgtggttggcttctgttacgctaggaatatggcaaacaattcctagaggacctgtgcaacaacctcttgaggat

SEQ ID NO: 731877 - DNA, 88 bp, Homo sapiens
gccgagccgggccgcggcgccgagtcgaacggggagccgagctggagctgccgcggcgcagccagaactcctgggacccttggacaga

SEQ ID NO: 731878 - DNA, 83 bp, Homo sapiens
gcatctgccggctgctccgcaccccggggtcccaggaagggcggcccaggtacacggtcctcttctcgcacggcaatgccgtg

SEQ ID NO: 731879 - DNA, 100 bp, Homo sapiens
cccacttcgacctgagctgggaggccactagcagccagttccggcccgaggacaccgactaccagcagtacggcaagaagaagctgaaatacctgcccta

SEQ ID NO: 731880 - DNA, 50 bp, Homo sapiens
ggaacaggacgccctctgatggcaaagtgcacctggagctgcggctgagc

SEQ ID NO: 731881 - DNA, 100 bp, Homo sapiens
caaaatatggtgtgaaggttggcctgacaaattatgctgcagcatattgtactggcctgctgctggcccgcagggctgtcctggaggaccacagtcagat

SEQ ID NO: 731882 - DNA, 88 bp, Homo sapiens
agacggattcatttagagctgcggaacaggacgccctctgatgttaaacccatccagagtaatggctgcggccttacccaggaccctg

SEQ ID NO: 731883 - DNA, 100 bp, Homo sapiens
ggaagatttgcatgatatgcttgcttcattgggtgctggagaatctggtaaaagcaccattgtgaagcagatgaggatcctgcatgttaatgggtttaat

SEQ ID NO: 731884 - DNA, 98 bp, Homo sapiens
aaaacaaggcgattccgcagtccccccgttccctggaggtcctgtggaatggacagagcgggatgccaccagcttgtccaaagggaagttccaggagc

SEQ ID NO: 731885 - DNA, 95 bp, Homo sapiens
agagcctttgactgtgaagagacatgagatggtgaatgaacccccagtatctggagtccatctttcaccatcttctcctgagattgtactggacc

SEQ ID NO: 731886 - DNA, 98 bp, Homo sapiens
cgctttccgggagactggagtcgaaggccgtgaggtaggtgatgctctgatgctgctgcctcttatgaattgacgacaggtgcagagagagaataaac

SEQ ID NO: 731887 - DNA, 50 bp, Homo sapiens
cgaggtggtacgaggggtcgtggccgaggggcaagattcttgccaagaga

SEQ ID NO: 731888 - DNA, 82 bp, Homo sapiens
ccacccctaaaagcacctggccccgctacagcaaaccagcaaattgtggctactaatttgccccctgaagatcaagatggct

SEQ ID NO: 731889 - DNA, 95 bp, Homo sapiens
atacagaagaatgaaggctgcaatcacatgcagtgtgctaagcttcccatcgacggtcagtgcgcacgttgtaatcagctgaggccatgtcagga

SEQ ID NO: 731890 - DNA, 100 bp, Homo sapiens
agagatgctcagctaagggagttcctggatggtctttagattgatacaccaatcctctgaaattgcatgcaaaaatctcctcagagaaattttgaaattg

SEQ ID NO: 731891 - DNA, 98 bp, Homo sapiens
aatacatgatttaaacaagagatttccacagaaggccgaatacatcaagcaatggtaacatctttaaatgaagataatgaaagtgtaactgttgaatg

SEQ ID NO: 731892 - DNA, 82 bp, Homo sapiens
ttgcctttgttgattaactggacaaattcagcaaatcctgaaggaacccaaagtggctgcttctgttttgaatccctatgtg

SEQ ID NO: 731893 - DNA, 50 bp, Homo sapiens
cgcaaccccagatccatttacactttacaacttcctgggaatgaaaatgg

SEQ ID NO: 731894 - DNA, 87 bp, Homo sapiens
tcaagcaagttgaagatgacattcagcaacttctcaagaaaattaatgagctcactgaaaatgctgaaccagatctggacgacaatg

SEQ ID NO: 731895 - DNA, 83 bp, Homo sapiens
gcgcgcgacgccatgggccggccgggcccagagctcctgtctctcagacctgcctagagctggaacgttacctccagagcgag

SEQ ID NO: 731896 - DNA, 90 bp, Homo sapiens
gtgtttgtgatcaggagagcagtcttctgaagaattgtggctcagttttcttggaaactacttggaggagctttatctttatatactgcc

SEQ ID NO: 731897 - DNA, 100 bp, Homo sapiens
cgaggcgaagaggccgacgaggaagacccgggtggctgcgcccctgcctcgcttcccaggcgccggcggctgcaggtgctgctacccccgtatgatgatg

SEQ ID NO: 731898 - DNA, 100 bp, Homo sapiens
catagaaatattaaagaccttaaactggccttcagtgagttctacctcagtctaatcctgctgcagaactatcagcttactgaaacaaatgcaggtatca

SEQ ID NO: 731899 - DNA, 98 bp, Homo sapiens
gtttctataggattttattgcacaaaggcaacggtgactttcaaaacccatcctcatgccaacaaactacccttgaaggattctttcacttacgagga

SEQ ID NO: 731900 - DNA, 82 bp, Homo sapiens
ctagcagccttctccaaagccacatggaaagaatatggcaaagctgatgcaagatgggtttattttgatccaaccattgtgt

SEQ ID NO: 731901 - DNA, 49 bp, Homo sapiens
atcattgtccaggcctgcagaggtggctttatcctgtggataaacgcag

SEQ ID NO: 731902 - DNA, 98 bp, Homo sapiens
caggaagccgcgggcaaactcagactcgaaggaggagacatcacagctttcccagatcgggaggaaaaatatggaatgtgttttaccgctgactgaac

SEQ ID NO: 731903 - DNA, 100 bp, Homo sapiens
gaggtggcagggggcctggctccgggcagtgcggtattgcggaatgctgcagcactccttactctcttttgggtttggtcttcacggtttcttttgttgc

SEQ ID NO: 731904 - DNA, 50 bp, Homo sapiens
ggaactctacaacccaatccaggtacagcctttccttcataccatttgca

SEQ ID NO: 731905 - DNA, 50 bp, Homo sapiens
gagatcgagaccatcctggctaacacggcctaaaggggagtggccccagt

SEQ ID NO: 731906 - DNA, 100 bp, Homo sapiens
cactggcaaggcccagcttgtgaaaatgaccatatactccttgacgacagggactaccaccttcaccttcatgcccacaaggtgtcacactgcaaggctg

SEQ ID NO: 731907 - DNA, 75 bp, Homo sapiens
tggagcttttcccctccccgggaacttggcattagaattcctcgaccactaggacagggaccaagcagattcatc

SEQ ID NO: 731908 - DNA, 95 bp, Homo sapiens
cctgttcagcagcattggtgaagttgaatctgcaaaacttattcgggataaagtagcaggtggaggtggaggaagcgtccctgggatcgagagga

SEQ ID NO: 731909 - DNA, 100 bp, Homo sapiens
ggcgggcgtgcatcatccacggggtgctgcagatcctgttccaggtgaaggacttaactaagtacttggatcccagtgggctcggcgtgatcagctttga

SEQ ID NO: 731910 - DNA, 82 bp, Homo sapiens
tgaaacgtctgtgggttacgccatctttaagatctctggaaacatggctacagaacatgttaatggaaatggtactgaagag

SEQ ID NO: 731911 - DNA, 83 bp, Homo sapiens
cactacttcgtgctgtgcgggatcgacgcggacagcgggctggagcctgacgagctggcggggcctattccctggtggattcc

SEQ ID NO: 731912 - DNA, 82 bp, Homo sapiens
agacattacaccatctgaattgcctgcaaacccaggttctgccattactgcaatagccacatctgtgtgtcacggcccaccc

SEQ ID NO: 731913 - DNA, 100 bp, Homo sapiens
gatgaatggaacatctatgtcttcccccaatgcatgtggaggcattgccctgatcctttcaggaagtttcattgaagtgcaaagtgtgattagtgatgag

SEQ ID NO: 731914 - DNA, 75 bp, Homo sapiens
tagataagcaactggattttttaactgaagatagtgcctttcagccctaccaggctcatcaacagagcagacgag

SEQ ID NO: 731915 - DNA, 101 bp, Homo sapiens
ggacttgcagaagtaccacaacagggacacctggttccagctgcagcacgtggacgctgactcggaagtgcagaatcattgatcagcgattcgagaaggtt

SEQ ID NO: 731916 - DNA, 82 bp, Homo sapiens
ccccggtacatctgaaagccgggaaatggactttccttatcccagttgattgtgcagaatacactgcctgtcgcttgtcttc

SEQ ID NO: 731917 - DNA, 75 bp, Homo sapiens
ttcctattgggccatcttggctccaccaccctgctagagaccgttggatggcagcttaaccttcagatggctcac

SEQ ID NO: 731918 - DNA, 50 bp, Homo sapiens
ttaacatcagtcatgaaaaatactgagttactgaaagctctcgaaattac

SEQ ID NO: 731919 - DNA, 75 bp, Homo sapiens
aaaccatggaggagcactgcaagcttgagcaccagcagccagctgaggtgggtgtcctggttggcaaagaccggt

SEQ ID NO: 731920 - DNA, 75 bp, Homo sapiens
cagaaatggtatcaagaaaccccgatcacaaagatacgaatctcttaaggggatcccgtacaaggtggtggcacg

SEQ ID NO: 731921 - DNA, 100 bp, Homo sapiens
agccaggatatcatgcccctgtggcattgcttaatgatataccacagtcaacagaacaggaagaaaaaatgctgggcatcttggtgcagcacaaagtccg

SEQ ID NO: 731922 - DNA, 156 bp, Homo sapiens
atgaacgcagctgtgccgcgggtgccaggcccccagcctcccctgaaccctgccacggcaccccatgccccccataccaggagatgttgcgttgagtgcagagttcaggtaagattctgggggcaactgctgtgtttccagtaccctaaccctccc

SEQ ID NO: 731923 - DNA, 80 bp, Homo sapiens
agagatagtgtcacctgccctacttgtcagggaacaggaagaattcctagggccatcagagggttctcgcttcagcacaa

SEQ ID NO: 731924 - DNA, 90 bp, Homo sapiens
gccgtgcgccgcagcccgggcccaggccccggcagcgcctgggacaaggaaggtgaaattgttgaagtggatgaagaaacagcagctatc

SEQ ID NO: 731925 - DNA, 99 bp, Homo sapiens
tagcagattgtttggctggcagtctgctaacacactagctataggagaggagctctacggtgactttgaagacttggaaacaggggacgtgcacaaggg

SEQ ID NO: 731926 - DNA, 116 bp, Homo sapiens
tttgctgggccgggtaccatggacgtgggcgaacttctgagctaccagatgaggaaaatgaggcccaaagaagtgatgccacttggttaaggtcccagagcaggtcagaatcagac

SEQ ID NO: 731927 - DNA, 100 bp, Homo sapiens
gacattctcagtgacgccaagaggagacagcagggcagttctctctcgggttcaaaagaggagaagcgcatctaccgggtgcctgttttcacagcgccct

SEQ ID NO: 731928 - DNA, 83 bp, Homo sapiens
ctacttcaacccgcaccttgtgttccggaagttccaggtttttagaacttcagccataaaaatgggcagaattttccttgatc

SEQ ID NO: 731929 - DNA, 83 bp, Homo sapiens
cagcgatgacgtctctgaggtggacgcgcggcacatcattgaagatgggcagtagcgaaccccttcccatcgcagatggtgac

SEQ ID NO: 731930 - DNA, 100 bp, Homo sapiens
taaaccacatcaccagtttaaagaatctgattgggacagtggccttagagctattgagaatttgatgcaaaagaaggggaaatttgattacatactgtta

SEQ ID NO: 731931 - DNA, 85 bp, Homo sapiens
ggaagagaaagatgacagcccacagaacatacggtccctaatgagcacagagaagaccaagggcttctgccagctggtggtctcg

SEQ ID NO: 731932 - DNA, 108 bp, Homo sapiens
cgccatcttgtgggagcaaaaccaacgcctggctcggagcagcagcctctgaggttttaaaatcaaagatgggaaaatcggagaaaattgcccttccccatggccagc

SEQ ID NO: 731933 - DNA, 74 bp, Homo sapiens
ctcatcccaggttgccttggaaaatgccaacgccgtgtctgaagctttctaaaaccaatttttccaacaacaac

SEQ ID NO: 731934 - DNA, 100 bp, Homo sapiens
atatgaccctatggaagcagaagaagctgaggatgaagaagatgagtatgtattcccgtgtgccagagtgccaggtcaccacatactattatgttgggtt

SEQ ID NO: 731935 - DNA, 90 bp, Homo sapiens
tgacaggggacctgacttactacaaaaagggtccacatatagcctcagttacattagctgcttatgaatgcaattcagttaattttcccg

SEQ ID NO: 731936 - DNA, 59 bp, Homo sapiens
cagttttgattcagcagactccagaggtgatcaagtgggaaagaagcctaaggaataaa

SEQ ID NO: 731937 - DNA, 76 bp, Homo sapiens
ctgaggtgcagttccggcaccggacacccagcagcccatggaagttgagatcgcggattcaggtgtggctctatga

SEQ ID NO: 731938 - DNA, 100 bp, Homo sapiens
cgtcaaggccaacatcacgcccttcggcgccgaccaggcattcctgcatcgcatccggcagaacgtggccgactcagtggagaagggcctcacggaggag

SEQ ID NO: 731939 - DNA, 82 bp, Homo sapiens
tcctcctgcggcgccgtggagtcccggtcgagaggcggcgcccgcgccgagcgccagccagacaatgcagatcttcgtgaag

SEQ ID NO: 731940 - DNA, 74 bp, Homo sapiens
agaggaacgaaacagctggattcagatcattcaggacacaatcaacaccctgctacgaggaacaccggcaagag

SEQ ID NO: 731941 - DNA, 75 bp, Homo sapiens
gttgaagaccaggtacctgaagctggttgggtatctacagccattggttgctgttcaggtcagctttgctcctaa

SEQ ID NO: 731942 - DNA, 75 bp, Homo sapiens
cgagccgggatctcaggtcctcgggggcggcggccacgccaaggacgggacccgctggggcccagcccctactca

SEQ ID NO: 731943 - DNA, 97 bp, Homo sapiens
atttttcctaatactgggactgacttacctaggaatgagagggacaggagtatctgaggatggagaactcagcaacggattctcgctctgtcgccca

SEQ ID NO: 731944 - DNA, 100 bp, Homo sapiens
tggccactatggaattctaatttgaaccatgtttggattgaagccgcctctgtattacttaccagggccggtgggaaagtcagcaggatgtatcccaaac

SEQ ID NO: 731945 - DNA, 100 bp, Homo sapiens
ctgtggaactgctctggcagtcatcgtgcctgaaggagtacatgccctttatgaagatattcttgaggaataagaaagccttgagttttgtgaaaaaccg

SEQ ID NO: 731946 - DNA, 90 bp, Homo sapiens
agagaattgccttcaaccgggaacagagaatgtttaaggtgtaatggataggtaacagagaagacctcgtcccttcctagtcagggcatc

SEQ ID NO: 731947 - DNA, 100 bp, Homo sapiens
cttgattacccgttaagtcccccaaagatgagatttacctgtgagatgtttcatcccaacagacaaggcatttcaaatgtcatcgagaaggcagagactt

SEQ ID NO: 731948 - DNA, 50 bp, Homo sapiens
gttcagcggagaataacatatcttcagtgtgcccaagcacgtgtgggaag

SEQ ID NO: 731949 - DNA, 75 bp, Homo sapiens
tgaaaaataccacgacaaaaccaccctagtggcggctttgaaatacatcccatctgtcctgcatgatgtagaaat

SEQ ID NO: 731950 - DNA, 111 bp, Homo sapiens
gtccggagtaacttggccaggctggccccgagcggaactggagaaagctgaggtgggagagcccatcaactgtgaggcctgggagtggcttcacagggtggtgggggacag

SEQ ID NO: 731951 - DNA, 74 bp, Homo sapiens
tttgctctgagcatcagtcacggggtgtccgcaatgttgccagtgtctgtctgcagattggctacccaactgtt

SEQ ID NO: 731952 - DNA, 50 bp, Homo sapiens
caaagggccccttacacaccagacaggagtggaaacaaaatgtcagtcag

SEQ ID NO: 731953 - DNA, 101 bp, Homo sapiens
agagacagcgccgccggccgtggggagcggacgcagtgatttgctccccctcgtgcagcaacccccacacccagcaccagcatggccgaaacagaagccct

SEQ ID NO: 731954 - DNA, 100 bp, Homo sapiens
ggctgctgcgctgaacctctcggctctccacagccccgcgcacaggcctccggagctagagccggtgcaggccacgcagaacaagacagggaagtatgtg

SEQ ID NO: 731955 - DNA, 100 bp, Homo sapiens
tttgtgatcgttggcggacattttggccatccggctgtccttagagcaagccctgcctcctgagccaaaggaagaaaatgctgagcctgtgagcaaactg

SEQ ID NO: 731956 - DNA, 90 bp, Homo sapiens
gtgatgcagggatgcctggaatagaagagaatgacctagcaaaagttgatgatcttccccctggcaggatggggaagcagaatagcaaac

SEQ ID NO: 731957 - DNA, 75 bp, Homo sapiens
ccgcgcagcccagcgcagccatgttcgatacaagaggctgttttcctagcgtggcttgctgcctttggtaagaac

SEQ ID NO: 731958 - DNA, 50 bp, Homo sapiens
ctgatttctgctctgatgacattagactgcaattacatgcctgtctactg

SEQ ID NO: 731959 - DNA, 83 bp, Homo sapiens
actttactcactcatttctgtgacctgaaagctgccaatgccaggatgctccagaccttgtatgattacttctggtgggaacg

SEQ ID NO: 731960 - DNA, 74 bp, Homo sapiens
ggcacataggagcaaaagttcactaaccctgcagtggaaggaacaggagtacagctgtgtagtaaagatgcctt

SEQ ID NO: 731961 - DNA, 74 bp, Homo sapiens
aaacatagagaattctgggcttccacacaactccagtgctaactcaacagacttcccaagtaagaagcggaaga

SEQ ID NO: 731962 - DNA, 100 bp, Homo sapiens
acagagatggcgagcgcccggattggggatgagtatgcggaggacagctctgatgaggagaattggctgtgaaaggactgaggcagccatctgggggtag

SEQ ID NO: 731963 - DNA, 98 bp, Homo sapiens
acgcagaagcagggggatgacagctctgaatgggggaactccttcttctggttatccaggtacctcaagggaagtacaaagttttgccaacagagcga

SEQ ID NO: 731964 - DNA, 100 bp, Homo sapiens
ggcaaagtgtggaaacagcagatgtaccctcagtacgccacctactattacccccagtatctgcaagccaaggttaatgtgggtaagtctcatccaatcc

SEQ ID NO: 731965 - DNA, 75 bp, Homo sapiens
tgctcaacaagggcctgccgcttgataacgaaggaggcccaacttcattcaataaggagcctgacggatttatcc

SEQ ID NO: 731966 - DNA, 74 bp, Homo sapiens
ctcacctttgtcttcctggcaagcctccttgttctcattgaggcttgtggaatatacccgtgctgatggcacag

SEQ ID NO: 731967 - DNA, 50 bp, Homo sapiens
ctttcccgaatctcagaatgccaaatcttctctacatataccctcagagt

SEQ ID NO: 731968 - DNA, 108 bp, Homo sapiens
gcgacgggcagcccgggcccggcgaggcagaccactgccgccgcatactggtgcgagcctacaggactgtgtgcagcgtgaacgggcccctggtggtgctggaccggg

SEQ ID NO: 731969 - DNA, 100 bp, Homo sapiens
cgtggtacagctgtacctcactatgggattcattacaggtattgggagagttgctgctacatctttaggaaatttgactaaccatggttctgaagattta

SEQ ID NO: 731970 - DNA, 100 bp, Homo sapiens
gatcggagccagccggttgttgccatggcattcgccagctggtggtacaagacgaaatgcactcggtgatggaaagagagccactattctgaagaacact

SEQ ID NO: 731971 - DNA, 82 bp, Homo sapiens
ctccgacgtgtgctccgcccagggggtgcgaggataccccacgctgaccggttccctgatgtgttacctgcttctgctactg

SEQ ID NO: 731972 - DNA, 98 bp, Homo sapiens
ggactggcagtgcccacacgtgtgcgttctccccgtccgcccgaagctggctactccaagaccctggcatgaggctgaggacaacttacaagggcttc

SEQ ID NO: 731973 - DNA, 100 bp, Homo sapiens
gaggcctggagcccccggaagttgccatcctcagcctccaccttcctctccccaggtctggctctgggagaggagtggacagcagctggttgagatacat

SEQ ID NO: 731974 - DNA, 48 bp, Homo sapiens
gcaacttaatcgggatatcgaggactcagcccaggagagtgttattac

SEQ ID NO: 731975 - DNA, 50 bp, Homo sapiens
ggccaggatgctatagcattgtcagtaaatgcactcggtgatggaaagag

SEQ ID NO: 731976 - DNA, 133 bp, Homo sapiens
caacaggatttggtctccacggtcaacgtggtatactcgcagacaacccaaccggtatacaatggagagcacaagcttcattttatccctgccctgattggccccttcctagaagtgaccttgataccccagc

SEQ ID NO: 731977 - DNA, 98 bp, Homo sapiens
ctgccggctggatgggaagttaatgtttacggcgaagtctactcaacgtttccaagattgcttccaagtatgatcatcaggcagaagaagatcttcgc

SEQ ID NO: 731978 - DNA, 82 bp, Homo sapiens
cgacagtggcggcggcgccatggcagggcttgcagcctgacatttaccccggtaactgctgggcatttaaaggctcccaggg

SEQ ID NO: 731979 - DNA, 108 bp, Homo sapiens
ctgcctcagcctcccgagtagctggaactacagataactgataccgtgcttccagaagatttttctaacagtgtttgcaagctataaaatagtgctttcacttagaaa

SEQ ID NO: 731980 - DNA, 100 bp, Homo sapiens
gcggtatcaaatggaaagtttttccaaatattcatctgtacaggcctccccatggccacccatggaccagtcggcattcacttcctcccttctgcggccc

SEQ ID NO: 731981 - DNA, 100 bp, Homo sapiens
gcctccccttggattcagacgccgattcgcccagatcgttaactgaagacaatatgcaaaattctcacatggatgaatacagaaattctagtaatggcag

SEQ ID NO: 731982 - DNA, 50 bp, Homo sapiens
cggcgccatggcagggcttgcaggcggctgttgaagagtgaacttggatc

SEQ ID NO: 731983 - DNA, 82 bp, Homo sapiens
attccatttggggaccagagatggacggtcactcagcctatggaggttacaaaagtggatgaaaccagagggatcgcacatg

SEQ ID NO: 731984 - DNA, 100 bp, Homo sapiens
tgctcgctccaggcaggagcctttgaaatgctcatcgtgggacgcttcatcatgggcatagatggagatcctgtttgaccaaactcagagatcaattaag

SEQ ID NO: 731985 - DNA, 89 bp, Homo sapiens
ctattatcagatcaaccaccaaagtgggaaacattgaaatcaaggaaagaccacagcaagattctttcattcgtctcctcctagcctgg

SEQ ID NO: 731986 - DNA, 123 bp, Homo sapiens
agtagcccttggaaccatgatgcattgtcagaccctaaaggatcaaccctctgcatacagtaaattcctctgtgacgagggtgcaggtatctctggggactacatcgatcgcgtggacgagcc

SEQ ID NO: 731987 - DNA, 134 bp, Homo sapiens
cgacgagcgggccctggctcaggaacagggacagcacctcatcccctggatgggggaccacaagatcctcatcgacaggaccagctttatccagggactctaccattcccacccctttggccccactccacgac

SEQ ID NO: 731988 - DNA, 82 bp, Homo sapiens
gggagccgcccggggcagggctcgggagagcgggtttttctatatgagtggagaagacagctgttaccagggaggtcataca

SEQ ID NO: 731989 - DNA, 101 bp, Homo sapiens
gccgtctctggcacctaacccagcagaccgctcaccccatcgggttgttggaagaggagcctttggagttgtttgcaaagctaagtggagagcaaaagatg

SEQ ID NO: 731990 - DNA, 106 bp, Homo sapiens
cttatggagtcggtacctcttggccatggagagacatggagttgatcatcaagtaatttctggagcagctgtacaagatgcagcactggcagccggtgtacccccc

SEQ ID NO: 731991 - DNA, 95 bp, Homo sapiens
cctacccagagacagacaactggtacctctccctgcagctcatgtgccctgagaatgctgagggctcttcagagcagcaggacacctgctcaaac

SEQ ID NO: 731992 - DNA, 75 bp, Homo sapiens
tgtccaactccaagaagcagtaggacagcgttatcctgaagatagttcacgaacccgatcatcagccagttcttc

SEQ ID NO: 731993 - DNA, 73 bp, Homo sapiens
gcaacgagacgtggggcgtaacaaaggaagctgagaagtacaaagctgaagatgagaagcagagggacaaggt

SEQ ID NO: 731994 - DNA, 100 bp, Homo sapiens
ccccgcggacgccacagcgctctggagaagaagcaggcgctccctccattccagccacagatcacagacgactacggtctggacaactttgacacacagt

SEQ ID NO: 731995 - DNA, 88 bp, Homo sapiens
cctcacaccagacctacggagggagctggaaattcctgacgttcattgatctgtcatccgtccttggctcaggatttggagagcttgc

SEQ ID NO: 731996 - DNA, 101 bp, Homo sapiens
actgcattgtgagccgcctgggatgcttcagcctcttttcaaggtgcaagtgcgcccagtactggccagaccaaggctgctggacctatgggaatattcgg

SEQ ID NO: 731997 - DNA, 98 bp, Homo sapiens
cgctatgacgtgctgggggtcatcgacagctgcaaggaggccgtcaccttcaaggccgtcagacaagatcagcttgaacgggtctttttacgacttgg

SEQ ID NO: 731998 - DNA, 125 bp, Homo sapiens
ctcaatatctgtcttcggtggactccttcggcagtccacccaccgccgccgcctcccaggtatcatgatattagctggtttgacatcaagtcatttgtgagtcatcagatcttctcctgaaaatg

SEQ ID NO: 731999 - DNA, 100 bp, Homo sapiens
acagtctctgacatcagctctcctgggaccctccaagagcactagtgtctagaaggcactaaggttccacttacttacatgatcatttcgagagatgtaa

SEQ ID NO: 732000 - DNA, 101 bp, Homo sapiens
aagccttgtctttacctcacctgctccctgcccatatctaccacaggccactttggcatgaaaacaacagttttgttggcatgtgaagctccagtttcctc

SEQ ID NO: 732001 - DNA, 100 bp, Homo sapiens
agtttgtagatcttctgcaaggagaacggcattgttaactacctacaggaagtgtgaataaccctataccttccaatttgaaatcagaagcaaaaaaggc

SEQ ID NO: 732002 - DNA, 90 bp, Homo sapiens
cccctcgcccgcccgggccgccaggtaccggcggacgtcgagaaatgtcaggatcggatggagtgtttcaatgctgacctgaaagctgac

SEQ ID NO: 732003 - DNA, 95 bp, Homo sapiens
tgaggggcaggagcatgatgagctgagcttcaaggctgggcaattgaaggaacagactaaaaatcgtgtcctggaaggaaactacaggtactacc

SEQ ID NO: 732004 - DNA, 97 bp, Homo sapiens
ctcgctgggagagaggtacctctccttttccctctccctttccctaagattgtctaaagccccaggaaaaatggtggaaaattcaccgtcgccattg

SEQ ID NO: 732005 - DNA, 82 bp, Homo sapiens
ttttttgtggcttccttcgttattggagccaggcctacaccccagcaattctgtggtgttcttggtcacacatttatggagt

SEQ ID NO: 732006 - DNA, 80 bp, Homo sapiens
aggcggaggcagaggtggaggcgctttgaaaggccaagtcctgtatctgccatgtctgtggcgtccacctcaacaggctg

SEQ ID NO: 732007 - DNA, 100 bp, Homo sapiens
gggaacgtgagtatcaaccaagacatgtcatgctgcccaaggacatagccaagctggtccctaaaacccatctgatgtctgaatctgaatggaggaatct

SEQ ID NO: 732008 - DNA, 50 bp, Homo sapiens
cggcgatgcctgagagggggtcggagctcaccatggatgatgatatcgcc

SEQ ID NO: 732009 - DNA, 74 bp, Homo sapiens
gcgctgcccgcactcctggtcctgctcggggctctgttcccaggtacactggcatgaggcccacaagttcctga

SEQ ID NO: 732010 - DNA, 82 bp, Homo sapiens
ccactgtcttctcttcctcctccaccgagtcgtgctctcgccccaacccgcgcgccaggtgaagcaaatcatggaggaggct

SEQ ID NO: 732011 - DNA, 100 bp, Homo sapiens
ggataattgggatgatgacaatgtagaggatgacttctctaatcagttacggtgatgcagaagatggggaagaatatgatgacccttttgctgggcctcc

SEQ ID NO: 732012 - DNA, 82 bp, Homo sapiens
gcggcagacggcgacagtggcggcggcgccatggcagggcttgcaggattatatctgtccaagatgcgagtctggttttatc

SEQ ID NO: 732013 - DNA, 73 bp, Homo sapiens
ggagccattttgagcaatggggaacgctcacggactgtgtgattgttcagattccattctgtggggaaattga

SEQ ID NO: 732014 - DNA, 75 bp, Homo sapiens
gggtccctcaggcactggtggagacctgtcgcttcgtagcaaccggaagaattaacctcgagtctgcacgctttt

SEQ ID NO: 732015 - DNA, 89 bp, Homo sapiens
cttttggaataataacaaagcctcattaattgaatatataaagcaggtgcacctagctgcaggacaagttcgagcatcttaaaatgatt

SEQ ID NO: 732016 - DNA, 100 bp, Homo sapiens
ggacgaggagaacagtgaactccggtcctgcacgccctgtctgaaggccaacattgagcgtctggaggaggtgatggtggatataatggatttggaggtg

SEQ ID NO: 732017 - DNA, 95 bp, Homo sapiens
atagctgcaattgataatggtctagcatttccttttaaacatcctgatgaatggagagcatatgaagaagatgactttatgtgtaagaaggcggc

SEQ ID NO: 732018 - DNA, 100 bp, Homo sapiens
aactattacagaattctgcactgaagcaagctgtccagtcatgtctgcaggtccgagagaaagcatgggattatggcaaccacagaatctcagtagtaca

SEQ ID NO: 732019 - DNA, 96 bp, Homo sapiens
agatggagtgggcacgttaccaggaagtgacttaaagcaattctgtggtgttcttggtcacacatttatggagtttctgaagggcagtggagatta

SEQ ID NO: 732020 - DNA, 100 bp, Homo sapiens
gaagggcggaacatcattgggctgcaggtcctggtgcttgatggtcgaggccatctcctgggccgcctggcggccatcgtggctaaacaggtactgctgg

SEQ ID NO: 732021 - DNA, 82 bp, Homo sapiens
ggctgcagaagccaaagccacgatttctccacccaggtgaactcctccctcacctccccgacggggcgaggctccatggctg

SEQ ID NO: 732022 - DNA, 96 bp, Homo sapiens
tcactcacccttccgaactcttaacatcaatgggcaaatccccacaggagaaggaaataatgcatatactgccatgtcagattcctacttacccag

SEQ ID NO: 732023 - DNA, 75 bp, Homo sapiens
tgatcacatcaatatctgcagttccaatttcccaaaaagagttgcatgaacaagatttaaacaagagacttgaaa

SEQ ID NO: 732024 - DNA, 100 bp, Homo sapiens
ctttgcctgtgagaggaacaagcgtccctgatccagaaggtgacagaccccgtgcggctgacacagctgtatgagcaggcccggtgggacctgctgctgg

SEQ ID NO: 732025 - DNA, 97 bp, Homo sapiens
acaacaccatcttctttacaacctatgcaaatggctcctgcagtggcgacatgtctaagaatgtgagccagtcacagatggcaaaattgaaccaaca

SEQ ID NO: 732026 - DNA, 100 bp, Homo sapiens
atcagtggcagacagatgaagaaggcgttcgcaccggaaaatgtagcttcccggttaagcagcacaagccagcgaggaggcagtgtcatttcgccgtgaa

SEQ ID NO: 732027 - DNA, 82 bp, Homo sapiens
gggccggctgaccaggaacctgggcgagcagcggcgggggcccgagggacccaacatgagtgaagtttcctgcaagaaacgg

SEQ ID NO: 732028 - DNA, 83 bp, Homo sapiens
aacagcctggcgtccgccacggcgaggaggatggccgagaccagtccaggttggagacccaggtgtgggaggcgcacaaccca

SEQ ID NO: 732029 - DNA, 83 bp, Homo sapiens
gccgggctggctgcggccgccctgggccgggccccaccggacgggtttgccttcccggattgggcctacaagccagagtcgtc

SEQ ID NO: 732030 - DNA, 51 bp, Homo sapiens
cgcagtggtcgcttcttctccttggtaacctggatgaggacatcattgcag

SEQ ID NO: 732031 - DNA, 75 bp, Homo sapiens
gtggagagatcataatttggggttcaagattccaggatctcactggcatcgaatctatggatcagtgtcgccata

SEQ ID NO: 732032 - DNA, 82 bp, Homo sapiens
acggctacacatctattatttatcgactctcatcaaaaagaaacctggatcctgataacttaagtgactctctcttttccgg

SEQ ID NO: 732033 - DNA, 75 bp, Homo sapiens
atggggctcttccccagaactacaggggctctggccatcttcgtgtcttcacctcctcctcgtcctcttcgagcc

SEQ ID NO: 732034 - DNA, 100 bp, Homo sapiens
tactcgggacgctgcacctcccgcgccgcacggtggacgagatatggatcagaaactttcgaagttggtagaagagctcacaacttcaggagaaccccga

SEQ ID NO: 732035 - DNA, 83 bp, Homo sapiens
aagagtcaacagcagtggcaacaggccagaagcggactcctagaagaggggagcagcaaggatggaatgacagccgtgggccg

SEQ ID NO: 732036 - DNA, 51 bp, Homo sapiens
cttcttgtgtatctggagaaaatagaggtgaaaggtgtagcagtcactcgg

SEQ ID NO: 732037 - DNA, 80 bp, Homo sapiens
aaagctgaaatggattcacacaagttccgagactactgtgctatctgcttaagatgggagtggcctgggtctccaaaagc

SEQ ID NO: 732038 - DNA, 50 bp, Homo sapiens
tgacagagttataccaaaccctaggtctccatggtaggagtgcagctttc

SEQ ID NO: 732039 - DNA, 100 bp, Homo sapiens
cgggccgagatgtctcgctccgtggccttagctgtgctcgcgctactctctctttctggcctggaggctatccagcgcctgagaactgggaggaagctgg

SEQ ID NO: 732040 - DNA, 75 bp, Homo sapiens
ggcagaagatggctgtggagagcccgtccgacagcgctgagagcggttccgccaccccagccgcagatgtttggt

SEQ ID NO: 732041 - DNA, 74 bp, Homo sapiens
ggatgctgtcaacgaagccctggagctgcaagctttcttcctggtggcagatgacatcatggattcatccctta

SEQ ID NO: 732042 - DNA, 96 bp, Homo sapiens
gcgaccactgcttctccgtgggcagcattggcgaccagcgcttcacgatcttgtggaagccctgaagccagagtatgtggcacctcttgtcctttg

SEQ ID NO: 732043 - DNA, 96 bp, Homo sapiens
cggcgacgtggtgtgcaccggctggctgaggaaatcgcctcccgagaagaagttgaggcgctattgaagcagccgacacgagtcgttgttcataaa

SEQ ID NO: 732044 - DNA, 90 bp, Homo sapiens
ggccggggaccttgccaaccctcccaagaagttcagagggccaggaaggaatactgggagaatcttcggatagcctcaggccggccatac

SEQ ID NO: 732045 - DNA, 97 bp, Homo sapiens
ctacctccgggtcaagatccctctccgccttggaatggatggctttggccaaccagttggcattcttggacgccctgccacagcatatggattccgc

SEQ ID NO: 732046 - DNA, 75 bp, Homo sapiens
ggacaacaaaagcctcctacaagagtcctaccaaaagggaaggtgtggctcattgactttaatccatttggtgaa

SEQ ID NO: 732047 - DNA, 90 bp, Homo sapiens
aatcaagcaccttcattctgctggaattattcatcgggtagcctttccagtaaatatatgactcagggaaaagcctcagcgaagaggacc

SEQ ID NO: 732048 - DNA, 75 bp, Homo sapiens
cagccgagcgggcccgttccgccggagctgaggaccaggtagacatagctgacattgagaatgaagagaaccgct

SEQ ID NO: 732049 - DNA, 98 bp, Homo sapiens
cttgaagatacgttaaagaaagctcaaattaatgatgcaaaataccatgaggtgcatggctgcctcctaatcccatagtccagaggaggcatccctag

SEQ ID NO: 732050 - DNA, 101 bp, Homo sapiens
gtgaggcttccccagccacgtggaactaattccttaactttggaggcagtgaaacgactaatagcagaaggtaataaagaagaactacgaaaatgttttgg

SEQ ID NO: 732051 - DNA, 75 bp, Homo sapiens
atcgactccagcgtgctctctcggaataagacagagccagagactgctgctactttgaaacgtacgatagaggcc

SEQ ID NO: 732052 - DNA, 82 bp, Homo sapiens
aggcactgctttttcatgacgggcgtgatggtgggcatgggtcagaaggattcctatgtgggcgacgaggcccagagcaaga

SEQ ID NO: 732053 - DNA, 100 bp, Homo sapiens
gaccatcatgctgcgcggccttcccatcaccatcacagagagcgatggttattttggagctgttggagcactccttgagctgttgaagatcccgtgatca

SEQ ID NO: 732054 - DNA, 89 bp, Homo sapiens
tataaccaagtaccaagtgaagactttgaacgcactcctcagagtccgactctcccacctgctaagggacaggccttcagtatttggca

SEQ ID NO: 732055 - DNA, 99 bp, Homo sapiens
gagtccaccgctgtcccgcggcctggagtacaacgaggtcaacgtcaccctggacctgggccagctggagcagttcaacatgatggagaacgccatcag

SEQ ID NO: 732056 - DNA, 104 bp, Homo sapiens
accatgagcaaagctcaccctcccgagttgaaaaacagccaactcttcctgccaaataaatagagtcatcagtcatcctactcttccgatcagcatcactgctc

SEQ ID NO: 732057 - DNA, 75 bp, Homo sapiens
tcaccaacccccatcctattcttgtgggaagccgtgtccgccttttaagattgtgattctggatgaagcagattc

SEQ ID NO: 732058 - DNA, 74 bp, Homo sapiens
ctggaggagtttgcccaggccgagtctaaagaccaagcggatgcagtggtgcagtatgacgtggagctgattgc

SEQ ID NO: 732059 - DNA, 80 bp, Homo sapiens
ggactttcttttggccctaggccccttcctgcccctgtcgtcagcagggcaaactctttgattctacaatagctgatgag

SEQ ID NO: 732060 - DNA, 74 bp, Homo sapiens
ttgtcaaaaggaggattgaggaggatcagatcaataatggaggcaatggtatctctgcattagccagattggac

SEQ ID NO: 732061 - DNA, 50 bp, Homo sapiens
atgaagactaaagcatctgtcagaaaaatggagaaggatgaaactgtgag

SEQ ID NO: 732062 - DNA, 76 bp, Homo sapiens
cacaggaagccatcagcagtgccatccagcttctagaagacccattacagaggcctgagacagctgcctgtgtggg

SEQ ID NO: 732063 - DNA, 97 bp, Homo sapiens
gccactgggttcttcaaaggataaactacctacatagaggacatacctttggttaaaggagctgccgtcaggttgcataccctgtcctgagggcgcg

SEQ ID NO: 732064 - DNA, 100 bp, Homo sapiens
acagatgtcctactgtgtgccaagctgaagaagacctctgcagggctggcctgccactcctcctgctatgatgcctgggcagatcccggacccttcggtg

SEQ ID NO: 732065 - DNA, 100 bp, Homo sapiens
aatgagtcttcaagctctgtaagacatagcatagcggcctgaccacaggggtggccttcgggcatcacgccaagttcatcgcttcaacaggcatggacag

SEQ ID NO: 732066 - DNA, 82 bp, Homo sapiens
gggtaccgcttgccaactttggagacctgcctagagctggaacgttacctccagagcgagccctgctatgtttcagcctcag

SEQ ID NO: 732067 - DNA, 74 bp, Homo sapiens
gcttctcctcatcaactggggatgattacagttcttcctaaaaaagaagaagatccttcagagcaacgattgca

SEQ ID NO: 732068 - DNA, 99 bp, Homo sapiens
gcaacacggctacggtctacaagatctgcgcctggatgcagctcttggcagctcctctggtgcaagtgtggtagctattgacaacaaaatcgagcaagc

SEQ ID NO: 732069 - DNA, 75 bp, Homo sapiens
cctgtctcaacgatacctattttctagtgctgagatcctgagacaatgcactgttgcaagaattcaattccgtct

SEQ ID NO: 732070 - DNA, 100 bp, Homo sapiens
cgttctggatgctagagtgagtgtgcccacctgcgtaagggggcagagacagtgtccccagttgtcctcatccagggtgctattcgagtccagcctgaag

SEQ ID NO: 732071 - DNA, 75 bp, Homo sapiens
ccgatgtcgtcatcaccagggaggaagcggagcggattcgcaggaatggtggttccttctaagaccaaaattgtg

SEQ ID NO: 732072 - DNA, 74 bp, Homo sapiens
ggagactcacttatgtgcacaatgagatttaccgcattgtttctcagaagcaaatgtcagacagacgcgaaaat

SEQ ID NO: 732073 - DNA, 50 bp, Homo sapiens
actttgggcgtcccattgccatgcaggatcctaaggcctttgtagtcctt

SEQ ID NO: 732074 - DNA, 51 bp, Homo sapiens
aaaagatgaatgcaaggaaaaggagggttatcaatactctggctgaccatc

SEQ ID NO: 732075 - DNA, 75 bp, Homo sapiens
cagcctcaaacaggagctggagcagctcaaagaggccaggccaggatcagatgggaagtggaagcttgtcatgac

SEQ ID NO: 732076 - DNA, 50 bp, Homo sapiens
cctggtgctgcccctgggcaagattgagtttgtgacgggcaccaaaaaag

SEQ ID NO: 732077 - DNA, 100 bp, Homo sapiens
ttaaaacctgacacttttaacagaatacagtcgttttgaagctaaaatacatgatttacgggagcagatgatgaatagtagtattagttcagggtcaggt

SEQ ID NO: 732078 - DNA, 100 bp, Homo sapiens
tcaaaaacaaggttctggaaacaactgggcatatggctatcagaggactcctgaaacctggagagctacctgctgtataaaggctggcctgagggcattt

SEQ ID NO: 732079 - DNA, 75 bp, Homo sapiens
tgcctgcaccatgtccgccagagagtgtgaacatggctacgcctcttcattcccgtccatgccgagcccccgact

SEQ ID NO: 732080 - DNA, 101 bp, Homo sapiens
aggagatcctgcatagccttcacagagagtccagttgccaagattggagctggagtgagccttccaggaattttggctgccaaatgtggtgcagaagtaat

SEQ ID NO: 732081 - DNA, 101 bp, Homo sapiens
ccacacgcccctccacatggctgccctcctcctgcttccctggctcatgttgctcacaggtgtccaggatgtggaggtgcacttggaggaccagatggtct

SEQ ID NO: 732082 - DNA, 100 bp, Homo sapiens
cctccctgcgtggtggactgtggcaccgggtatcgagaaccttccctgcgaacttcagaggaacttccagctgatgcgagagctggaccagaggacggaa

SEQ ID NO: 732083 - DNA, 75 bp, Homo sapiens
agagttctttgaggctgtaaacgaggccattttgctattgccaacactcctgatagctgaatgtgtgctggttta

SEQ ID NO: 732084 - DNA, 51 bp, Homo sapiens
aaaagacctgtggctattaagataggtccagtggcattgcagagcacggat

SEQ ID NO: 732085 - DNA, 82 bp, Homo sapiens
cgcgccggctatggccgtgccctggggctgagccctcagatgctgtgtgctgtggacccacctggggttcatggagtgggcc

SEQ ID NO: 732086 - DNA, 100 bp, Homo sapiens
tgtatgatagtgttagttccacagatggggaggacagtctagagagaaaggtttccctaggacttctgcatgcccatgccacacatatcctgtggccccc

SEQ ID NO: 732087 - DNA, 90 bp, Homo sapiens
tccaggttcccatggttgccggctcccctctcaggacaacccagatgtgcaacaaagtgcgatgactgggccagtgccattcgcgtcgca

SEQ ID NO: 732088 - DNA, 83 bp, Homo sapiens
aaaccagacagcaccattcaggatgctggtttataccaaggacagggatcatagacggtatttctatgtaaacgaacagtcgg

SEQ ID NO: 732089 - DNA, 100 bp, Homo sapiens
acccacagcagcagcacctgcttccagactcagagtgtgagaaaaaaataaactcctatttgtttatggcaagtgctgaagctgctgaaagatggcagaa

SEQ ID NO: 732090 - DNA, 82 bp, Homo sapiens
gacggcgcgggcgccggcgaggagagcccgcggctgcaggtgaccctggcaaagatgagagtgcacatttcgtcctgcctga

SEQ ID NO: 732091 - DNA, 100 bp, Homo sapiens
attcggggtctgggttctggtgccgcgcagctttccccgctattgtggaaaacatggctgagttccggcctgagatgtgtacagagggtgcccagcaggg

SEQ ID NO: 732092 - DNA, 74 bp, Homo sapiens
gtcgcctccaggccaagagggatccttcacccgtgtctggctggtctccaatttctggcctcaagtgatcctcc

SEQ ID NO: 732093 - DNA, 75 bp, Homo sapiens
atttatttctttggagacaaaactatgccaaatagcctaacatggcagaccagagacagcgctcactgtctacct

SEQ ID NO: 732094 - DNA, 100 bp, Homo sapiens
gtgtgtcggaatatgtataactggctactgcagaatcccaaaaatgtctgtgttgtccactgcttggaacaagttccagttccagtctaccacccaacac

SEQ ID NO: 732095 - DNA, 85 bp, Homo sapiens
agacagagggcctgaggcaggagatgagcaaggatctggaggaggcgggcgtctaaaattctgggaagcagaacctggccggagc

SEQ ID NO: 732096 - DNA, 96 bp, Homo sapiens
gaggatggcagcaaacaagtgtctgtgcacaggagtcagagagggggaaccgccgtcccaacatcacaaaaagtactacgacatttctgccaaaag

SEQ ID NO: 732097 - DNA, 50 bp, Homo sapiens
gaacgcttcgcccgttggtgctatgcaatctgaaagcaaatcctgtttag

SEQ ID NO: 732098 - DNA, 75 bp, Homo sapiens
catggaccgggagatgatcctggcggattttcaggtggatcttcttgttccaaccaaagtgactggcatcattac

SEQ ID NO: 732099 - DNA, 128 bp, Homo sapiens
acaagctatgccttgagctcctcaatgtgggtgtagagtctaaactcatccttaaaggggtcatactgctgctcctcaggcagtgcaggacaacccagctatgcccacatcctcaggctcagaaggga

SEQ ID NO: 732100 - DNA, 100 bp, Homo sapiens
gcccgaacaccgcgccttcggaagcccgttcggcctggaggagccgcagtgggtcccggacaaggaggcttcgtgagcttcgacaacccggccagcgcgc

SEQ ID NO: 732101 - DNA, 83 bp, Homo sapiens
aggacttcatcaagctcattaacagcaactctgatgtggagttcttgaagcaactaagatattgagctcctggcagcttgcag

SEQ ID NO: 732102 - DNA, 95 bp, Homo sapiens
gggagtactcattcctgtaatagctgtggtcgaggtggtgcatctatctatggcaaacagtttgaagatgaacttcatccagacttgaaattcac

SEQ ID NO: 732103 - DNA, 82 bp, Homo sapiens
cggccgcgcagggagctctcgaggcaacgccggggcgcccgaggtctggaaggcgcagtcaccttcaggccattcagaggag

SEQ ID NO: 732104 - DNA, 80 bp, Homo sapiens
tgaattccaacaacttcaaagtaaaatcagtttaatttcagaaaaggaactgtggctgcaccatctgtcttcatcttccc

SEQ ID NO: 732105 - DNA, 75 bp, Homo sapiens
tgagacagctgaagcgtgttggggaaggagctgtaaagagaggattcgcagaggcatttttggaacatctttgga

SEQ ID NO: 732106 - DNA, 81 bp, Homo sapiens
acaccgggacacccgcgaggccggaaaatgggagtgcatccgccccaacccttttccccctcgtctcctgtgagaattccc

SEQ ID NO: 732107 - DNA, 100 bp, Homo sapiens
gcacgattggatttgccgaagattaggaagaatccactgatagaaatcatttccatcaataccggctcaatgtcaattgctgcaagcttagtgagtgaag

SEQ ID NO: 732108 - DNA, 50 bp, Homo sapiens
ctggggctggtcaggaaaccaaggtcaaaatgcagatcttcgtgaaaacc

SEQ ID NO: 732109 - DNA, 101 bp, Homo sapiens
agagtcagagagaggagagactaaggacgctaggtgggcagggctcttcacttgcagaaattggagatattgctggtgttgctgatgttacaatcagacag

SEQ ID NO: 732110 - DNA, 115 bp, Homo sapiens
gcagttgctggtgctgctgaagtccctagggaaccaccaattcttcccaggcagttgtgaaaaacttcaggacaaaaatgtttcatttaaggacttgtgctgctaagttgaggcc

SEQ ID NO: 732111 - DNA, 90 bp, Homo sapiens
gaaggaaacgggactaaactggcgggctccgtggaagcgtggccggcagcgtcccggacgaggagtgccctcacctgaatgtgcggaagg

SEQ ID NO: 732112 - DNA, 100 bp, Homo sapiens
tcaagacgccctggagggcggcctcggccatgcagttcttcaccaagggctaccaggagaccatctcagagattcagaggagcttattggaaggaggtgg

SEQ ID NO: 732113 - DNA, 100 bp, Homo sapiens
gttcattggatcaaacatgtcacaagagtcggacaacatcctgaggttagcattacacttctcccagtggagcccatgacttctgatcaggacgctaagg

SEQ ID NO: 732114 - DNA, 98 bp, Homo sapiens
agtgcgcatgcgtggctctccggcaccggtccgtactccagcgagctcatgatggagcagtccaagaagtcctccctcatggtggcccgcagtattct

SEQ ID NO: 732115 - DNA, 50 bp, Homo sapiens
gtttgtcttctgctttggcccaggttatcctacgcggagagccaggtacc

SEQ ID NO: 732116 - DNA, 100 bp, Homo sapiens
tgcaggacaccctcctcctccagcacccttgcctactccccgcgggacgaggaggacagcatgggggggccctcagcctcttggccttgaacgggctgtt

SEQ ID NO: 732117 - DNA, 75 bp, Homo sapiens
gacttgacacgatattttttgctaagcaggtgaccaagaatatggcccaggtgaccaaagccctggacaaggccc

SEQ ID NO: 732118 - DNA, 80 bp, Homo sapiens
agccgcgccccaccccgccagctccagagccacgtacggtgatgatgaacagtctacacagatggctgcaagttgggaag

SEQ ID NO: 732119 - DNA, 106 bp, Homo sapiens
gcccgggcagctctgcgaggcagcggctggagagggaaccatggggactgtgcacgcccggtttgcagatggcgtgtacctggttctgctcatgggccttctggaa

SEQ ID NO: 732120 - DNA, 101 bp, Homo sapiens
gcggcagtcgcgctgagggactcggctcagggggaagtccgtttgtcctcctaccacgctgacaggtgtgcttgaaagggaaatgcaggcacggcctccac

SEQ ID NO: 732121 - DNA, 100 bp, Homo sapiens
gggtctggctccttcggggacatctatttggcgatcaacatcaccaacggcgagacagcatcgcacagaattattttaaaaaaaagcagtgatccaagca

SEQ ID NO: 732122 - DNA, 74 bp, Homo sapiens
tcgccgtgaagatggcgtctaccagccggccccaaggcccagaagaaatttaagcgtcttatgctgcatcggat

SEQ ID NO: 732123 - DNA, 75 bp, Homo sapiens
tggaggtgcagggccaggaggaacatgagattgtaatgtagcagacccagccatggcggccccacagctgggtcc

SEQ ID NO: 732124 - DNA, 100 bp, Homo sapiens
ttggaaaaacctcaaaatatgatggtggttggacagtcagcatttgcagactttgggggacttgatctcatcttcatgccaggccttgggtttgacaaac

SEQ ID NO: 732125 - DNA, 100 bp, Homo sapiens
cggagcggcggatctggacacccagcggtctgacatcgcgacgctgctcaaaacctcgctccggaaaggggacacctgggaatagtgcctaccgatcagc

SEQ ID NO: 732126 - DNA, 89 bp, Homo sapiens
tggcatatgtgctgctgcctctgctgtacctcctggtccggaagcacatcaacagagcgagtacaggggctcaggtccaggtggcaggg

SEQ ID NO: 732127 - DNA, 50 bp, Homo sapiens
agagctggtgagagcggtgactttggaggaggctgaggatggcattattg

SEQ ID NO: 732128 - DNA, 83 bp, Homo sapiens
cttggactgagtcctgcaggacacagctttcggaaaatgtgattgatcgaatgaaggaatcctctccatctggttcgaagtct

SEQ ID NO: 732129 - DNA, 101 bp, Homo sapiens
gaatcagcagcctgggcagtctccccaaggcatgcggcccatgagcaacatgagcctgatcttttggccagaaggagattaaaaagatgcccctcaagatg

SEQ ID NO: 732130 - DNA, 100 bp, Homo sapiens
gactttgttggatcaagcccagagagatctctacagagatgtgatgttggagaactacaagaatctcattatactagaaaggagaatcacttgaacccag

SEQ ID NO: 732131 - DNA, 75 bp, Homo sapiens
atctgagaggaaagcgtttattgtagaggtaatagttaacctcttctgtgagaagtcagaaggtgatctctttaa

SEQ ID NO: 732132 - DNA, 98 bp, Homo sapiens
gacgcccactttgccggcatgcatgatgcaaccttaaaatcagtgacaagaaacattccaaacaagcaacagtcttcaagaaattaaactggcaagtg

SEQ ID NO: 732133 - DNA, 88 bp, Homo sapiens
ctctgcacagggaacctctaccttctctcgagagcttttgtccccccggatctcaaggtctctaattaacagaagatggcaaagccca

SEQ ID NO: 732134 - DNA, 98 bp, Homo sapiens
ggcccagggttgttcacctgcccaaaaattgtgtcttgagggagaagatgtcaaccggacactagaaggtggaaggaaacctcttcattatgcagcag

SEQ ID NO: 732135 - DNA, 80 bp, Homo sapiens
ccgacaacgccttcatgctgctcacgcagggagtgcatccgccccaacccttttccccctcgtctcctgtgagaattccc

SEQ ID NO: 732136 - DNA, 74 bp, Homo sapiens
aacagacagatttgtcatgaagaaactcaatgatcgtgtcatgagagtctcctctgagcctccggcctccataa

SEQ ID NO: 732137 - DNA, 100 bp, Homo sapiens
cggcgaggcgcagctgtaccgccagttcaccaccaccgtgcaggtcgtcatcttcataggctcgctgctcgggaagccgtggcggacggagcagacggag

SEQ ID NO: 732138 - DNA, 100 bp, Homo sapiens
tcggatgctgatggggctggacctgctggtgttcgcccacgaccatggcatgctggaagatggactgccctccaatggtgtgccccgatctacagcccca

SEQ ID NO: 732139 - DNA, 75 bp, Homo sapiens
agctcgtagcctgccactccgtgcgttctgtttggattctgcaaagcagactcgtcagaaagttgctgtgaactg

SEQ ID NO: 732140 - DNA, 82 bp, Homo sapiens
ggaagtgagaccgaaatagactctgaagtaatatctggactttgaaattgttcttctgtgtggcagttcagaatgatggatc

SEQ ID NO: 732141 - DNA, 58 bp, Homo sapiens
gaggggagaggcctggaggacaccaacatggtgctggagaatctggtaaaagcaccat

SEQ ID NO: 732142 - DNA, 80 bp, Homo sapiens
tggaggtggaggatatgatggttacaatgaaggaggaaattttggcggtggtgaggaagaggatggagatgaagatgagg

SEQ ID NO: 732143 - DNA, 96 bp, Homo sapiens
gtttctgggaaaggaaatgaagttatattttgctcaggggcctttatcatctgctggactcctggattggttttgttacttctagacgtgtgctgt

SEQ ID NO: 732144 - DNA, 51 bp, Homo sapiens
ctaccgtcaccagcagaagataaagtgtactaatggtcacttgatgtgcgc

SEQ ID NO: 732145 - DNA, 100 bp, Homo sapiens
aaatgtcctggccgcgccgcctcctgctcagatacctgttcccggccctcctgcttcacgaacatctgctcaaattaatgaccatgggggatatgaagac

SEQ ID NO: 732146 - DNA, 100 bp, Homo sapiens
gatgacatatttttggacctgaaacagaaattctggaacacctatatggttctccttactatgacaatgtccgccccctctcttaccctgattcggatgc

SEQ ID NO: 732147 - DNA, 100 bp, Homo sapiens
tttgttgaagatgatgtagctttggttcagagaggcttaccagcaacatcagatatcaaagacgttgacagtttgatgaggatttctggcagaattgagt

SEQ ID NO: 732148 - DNA, 82 bp, Homo sapiens
cacctgtccagcatccgaccaccgaggctggagggggagaacacccagaacactggaactattttggggctgatgagaatct

SEQ ID NO: 732149 - DNA, 83 bp, Homo sapiens
ggacgctgccagtttgcacagcagcagactgtgccctgtccacggtgcctcctgcatgtcctgctgccctgagctgtcccgag

SEQ ID NO: 732150 - DNA, 98 bp, Homo sapiens
ttgattccagtgtgaactgtcaatcataagctactttgaaacatatggtacatttgtgttaaggctagtcaccctgctgtggaatagaaggccagaat

SEQ ID NO: 732151 - DNA, 100 bp, Homo sapiens
aaataccacaggatggagactacgagtttttgtcactcagcccagtccatcagtttctcagcccagtacttctcagagtgaagaaaaagctcctgaattg

SEQ ID NO: 732152 - DNA, 96 bp, Homo sapiens
gatgcaaatgatgtagttattactgtcccgtttgattttggagaaaagcaaaaaaatgctcttgggactcagaattcatgattgaagaaatgcagg

SEQ ID NO: 732153 - DNA, 75 bp, Homo sapiens
aattgatctcgccaaaaaggacatctttggagccagcaggtagttccaatttgccagcagaatgagtacagaaag

SEQ ID NO: 732154 - DNA, 100 bp, Homo sapiens
gaccctggagtgaactggattccatgtagagacccctggagtttctttcaagatggcttgaaaacagctgataagttgaaacagtacattgaaaaactgg

SEQ ID NO: 732155 - DNA, 98 bp, Homo sapiens
cagccacatactatccgtttgttcaggaaccaccagtgacagagttcatacgttttatgaagctgtggggtacatgattggtgcacaaacagatcaaa

SEQ ID NO: 732156 - DNA, 100 bp, Homo sapiens
aagaacccccctatcaacaccaagagtcaggcagtgaaggttatcaatagtctggctgtctatcgtcatcgtgagactgactttggtgtaggagttcgag

SEQ ID NO: 732157 - DNA, 83 bp, Homo sapiens
ccagaagtccagagctgaggactgcctgtttgcagatatgcacccaatgtccagggagcgtgcaaaatttgtcaaaagtggcc

SEQ ID NO: 732158 - DNA, 82 bp, Homo sapiens
ggactccttcggcagtccacccaccgccgccgcctcccaggggcctagaagacagttcccaggaggccgaggacgaggcatc

SEQ ID NO: 732159 - DNA, 74 bp, Homo sapiens
taagcagttggaggctgtgtctgaaataaacggtgactggcaaagagctgatgcagtctggaataaaatccaag

SEQ ID NO: 732160 - DNA, 89 bp, Homo sapiens
tgaaggatggggaggagcggggggaggaggacccagaagctgggaatggaggaagaagatgtgattgaagtttatcaggaacaaacggg

SEQ ID NO: 732161 - DNA, 75 bp, Homo sapiens
gggaaacaagaaaacatcaaagaggtctagcaaaggtctcggcgcggaagatggccggcggcgtggacggcccca

SEQ ID NO: 732162 - DNA, 90 bp, Homo sapiens
cctggcgatctacttcctctggcaggtgaaggcgtttgggccggggctgcagggaggcagtgcgggctcccccgcccgcttcaccatcga

SEQ ID NO: 732163 - DNA, 100 bp, Homo sapiens
acatcaaagacagctttcacagtttgcgggactcagtcccatcactccaaggagagaagatggactagaggcttttaccagatttcttaaaactgaattc

SEQ ID NO: 732164 - DNA, 75 bp, Homo sapiens
acgtcagcgtgatgctgaggtgactcgactaagagaattaaccagatggtggatgcttccaaaagcatcgaagct

SEQ ID NO: 732165 - DNA, 75 bp, Homo sapiens
tggtttctagccccagctgtacctctaattgtaaccttggagagcggaacaggcgaggaaaagtagtcccttctc

SEQ ID NO: 732166 - DNA, 100 bp, Homo sapiens
caagaagcagctcctgcatctggcggaggagaagattctggatgaaattgaagaacataacatcaaaatctatcacttacctgatgcagaatcagatgaa

SEQ ID NO: 732167 - DNA, 87 bp, Homo sapiens
tggaccctgagccctgggacctctgaagtgaacactgcagggccatttggcaaggggagagccagttgcgcagagccctgcaaccag

SEQ ID NO: 732168 - DNA, 100 bp, Homo sapiens
atgaggatgacaaactctggagtaattggagccaagaaatgagtatagattctgaaaaagagttccacgtcctcccttatcgagtctttgttccccttcc

SEQ ID NO: 732169 - DNA, 100 bp, Homo sapiens
cgggcccgtcaagctgcgcctgacagcatactgctgttccacggcctcgaagcgaagaggtggtgaagctgagagaccctatccagggaacccgccagcg

SEQ ID NO: 732170 - DNA, 100 bp, Homo sapiens
tggcggatctggaggagcagttgtctgatgaagagaaggctttcagagtatggatgcatgctggagattaaggacgtgagaacgtttcctgatggaagtt

SEQ ID NO: 732171 - DNA, 100 bp, Homo sapiens
tttcctctcacctgggttttcttagccctctacttttcaagacaccaagtgagaggccaaccagtgacaaagcataaatcatggacaccagagaataagg

SEQ ID NO: 732172 - DNA, 50 bp, Homo sapiens
ggtggttttactggagtattggaactcagcaggaaatccaaatctcctcc

SEQ ID NO: 732173 - DNA, 100 bp, Homo sapiens
acaggattcaccacagtacttcacatcgtcgttcacatgggaatctgaatctgaagctgaagaaggtgactgaattttgaaactacaccctcagtaaagc

SEQ ID NO: 732174 - DNA, 90 bp, Homo sapiens
gaaaaagaggatacctctgcgatcccgggtcatctccagatgctagggttatgggaaattcggcgccttcatcagtatgtgaaatttgct

SEQ ID NO: 732175 - DNA, 83 bp, Homo sapiens
aggaaacatccaagaaaaatgtccttaaagcaattgagcaggctgatctactgcaggaggtggacccccaaaagtacaagggc

SEQ ID NO: 732176 - DNA, 90 bp, Homo sapiens
acgagttcaggaaggctcaggaagaggagagcagcaagcgggaagatgagaatgtgcctactgctcctgatcctccaagtcaacatttac

SEQ ID NO: 732177 - DNA, 100 bp, Homo sapiens
gaggagtatgccaaccagcatggccctggacagagggatttgttattgcgaatgatgtggacaacaagcgctgctacctgctcgtccatcaagccaagag

SEQ ID NO: 732178 - DNA, 100 bp, Homo sapiens
tatcaaaaccatcgtcgttacgtgaaatctcgagatgatagtcaactaaatggagattctagtgctttgctttgcatagtatgggactgggactccaatg

SEQ ID NO: 732179 - DNA, 100 bp, Homo sapiens
cgggagctctcccgtctcacaggggataagaagtttcaggacctggccatgggcacagatgctgagggagagaagatcaaggaccctatgcgagccatcg

SEQ ID NO: 732180 - DNA, 100 bp, Homo sapiens
tttctgaagtggaccccaagctcgtgtctaatctgatgccctttcagagagctggagtcaagctgaaggtgatgtggccgccctcaaccgacgcatccag

SEQ ID NO: 732181 - DNA, 74 bp, Homo sapiens
gatcctggtcctcgatccgcccacagacctcaaattcaaagaactgataaatttcaaacggaagagagtggcag

SEQ ID NO: 732182 - DNA, 88 bp, Homo sapiens
gcaaatccaagaaggggctgtcctcgtcctccagctgttatctggaagatgtccagctcgccgctgtccaagaaacgtcgcgtgtccg

SEQ ID NO: 732183 - DNA, 100 bp, Homo sapiens
accatgggctggctgcactgggagcgcttcatgtgcaaccttgactgccaggaagagccagattcctgcatcagtggggttgcccagactctcaagaaag

SEQ ID NO: 732184 - DNA, 74 bp, Homo sapiens
cgagctggagactggcagtgtcccaatccactctgcggtggagctgtggaagccaggcgcacaggatgcaagca

SEQ ID NO: 732185 - DNA, 96 bp, Homo sapiens
tggaggcggcggctgcacactacccacccagaagaagtccgtccatgtcaaagatgaggtgctggagaatctggtaaaagcaccattgtgaagcag

SEQ ID NO: 732186 - DNA, 100 bp, Homo sapiens
agaggaatgtgctcttgtcctggcattgcatccacaggaggggcaggaaattctttgaaggactttgcctcccgggccaaactggcagttcaaaaactag

SEQ ID NO: 732187 - DNA, 82 bp, Homo sapiens
tgctgctgcaaaacttttctatctgccctgtcctctaccacgcagggacggtcctgctcaactccctcctggacaccgtgcc

SEQ ID NO: 732188 - DNA, 50 bp, Homo sapiens
cacatttgtcatgatgacagtgacaaggattccttggcagcagagattga

SEQ ID NO: 732189 - DNA, 90 bp, Homo sapiens
cacagtaatagatttgggaattagttttcaaatatatgttctacagcttgtgctgtgagtgtggtgttccgataagtccaaatcctgcca

SEQ ID NO: 732190 - DNA, 98 bp, Homo sapiens
cgcgcgccgctgcatcccgcgtccagcacctacgtcccgctgccgtcgccgccgccaccatgcccaagagaaagagtgagtgtcgtggttggggtgct

SEQ ID NO: 732191 - DNA, 152 bp, Homo sapiens
acctgccaatcccccctcacccaggcccctgtcaagaaggtgccggtggtgcgagtcttcggagcgaccccggcagtattcccacgagcattctgctgagatgaacaatcagatgacctcgtgtgagatttggaggagagaaggaaatggag

SEQ ID NO: 732192 - DNA, 100 bp, Homo sapiens
ggagttggagttgctactaaaaagagaggtgcctttatctgatgatgatgaaagttacacagtctgcaaaatgaatgttcaccgtcgatgtgagaccaac

SEQ ID NO: 732193 - DNA, 82 bp, Homo sapiens
gcaggaggccgagcaacttaagaaccagattcgagttttgggatttgagattgacgcggtgaactctgtccagttttcaaac

SEQ ID NO: 732194 - DNA, 75 bp, Homo sapiens
agaggaccagaccctgaaacctggcaaagtcgatgtgaagacagacgtgtccaacacgctctcttgggctctgta

SEQ ID NO: 732195 - DNA, 90 bp, Homo sapiens
ctgattggattgatgaacaatgaagcagctcagtcagccataatggcaggtgaagaaattaatgaagactatccagtagaaattcacgag

SEQ ID NO: 732196 - DNA, 74 bp, Homo sapiens
tgctgggtccgctgagcggggcgacccgaggtgaggcggaaccaaccctcctggccatgggaggggccgtggtg

SEQ ID NO: 732197 - DNA, 96 bp, Homo sapiens
tttgaaactgtaggacaaggcccgccgcctagcaaagactattaccagttactggtcacccggtctcaggtgcgagaagatgtactaaattcattg

SEQ ID NO: 732198 - DNA, 98 bp, Homo sapiens
tttatctggcaactgtaactaatgctatcacttttggaggactgcttggggatgccactgacaacatgcaggcctatatgaacccaatagcaatggcg

SEQ ID NO: 732199 - DNA, 90 bp, Homo sapiens
gagagcatcacaatataatattaggggtgttacgtataggctcactcaaggatgtgatcttcgtggtggaaagctaaattttaaaaccac

SEQ ID NO: 732200 - DNA, 100 bp, Homo sapiens
ctggcccacttggctgccgaggtggagggcaagtgcttacagtcaggcttcgagatgcttaaggaagaggagttgtacgcatgtcagagaggttgcaggc

SEQ ID NO: 732201 - DNA, 74 bp, Homo sapiens
tcagactacttctcatgaactcaccattccaaacgatcttcttggacacttaatgattgttggcaagaaatgtg

SEQ ID NO: 732202 - DNA, 100 bp, Homo sapiens
ccggactatttttgtatgcgatgaagatgctactttagaattaagagttaaaactgtgaaatactttaaagatgtatttccactacacaaaattttccac

SEQ ID NO: 732203 - DNA, 133 bp, Homo sapiens
accatctggtatctgaagtatcattggccttgaggaagaagacatgctctacagtgctcagtctttgagcctagtgtaagcggaatggatccgcctttcggggatgcctttcgaagccacaccttttcggaac

SEQ ID NO: 732204 - DNA, 98 bp, Homo sapiens
gggtctgcaagcagatgataaaggtggtcttcgagggatagcacgaggtggtctgacaggactaacacttaccagcctctatgcactatataataact

SEQ ID NO: 732205 - DNA, 100 bp, Homo sapiens
gcaggagtcggcggctcagttgtccatgaccctgaaggtccaggagtacccgaccctcaagaaatcgtggatgggaatgtgaagatgaccctgggcatga

SEQ ID NO: 732206 - DNA, 75 bp, Homo sapiens
cttaaaaatcaccagttactttaatgagaagaggatcacctagcccgggtagaagaggcaatcacccgtatgctt

SEQ ID NO: 732207 - DNA, 83 bp, Homo sapiens
ctgtgccactttgcatcccacgccggaggaggcattaacgagaccgggtaagcatccacccaacccaccagtatcaccaggaa

SEQ ID NO: 732208 - DNA, 113 bp, Homo sapiens
cagagatgcattcaaaaagatgaagccaccaaaaatccctttcatgcccttattgcttaaagagactgcaaataggacatttcaagaaaaaggcatcctggtaggagagagca

SEQ ID NO: 732209 - DNA, 100 bp, Homo sapiens
gaaaaaagagaactggtattcaaagaggatggtcaggaacctgcacttgttgccaagtcttccatcttactagatgtgaaaccttgggatgatgagacag

SEQ ID NO: 732210 - DNA, 82 bp, Homo sapiens
agtgtggacgtgaacgggggtcctgagcctgccccagccagtaccagcgccgtggacggggaggtttactgcatcgacgcgc

SEQ ID NO: 732211 - DNA, 100 bp, Homo sapiens
ggtggaatatgccaaggaaaaactggagagcttcatcaaaaatagtgatagctttgataaatgaggctgccagccttgagagcaccaccgttacctggtt

SEQ ID NO: 732212 - DNA, 82 bp, Homo sapiens
ctggattcaagtcccaggagtcctgaccagagagcagggcgtgatggtgggcatgggtcagaaggattcctatgtgggcgac

SEQ ID NO: 732213 - DNA, 100 bp, Homo sapiens
aagcctacaaaagtgtggagaggttccttcaggaggatcagtgtacgacacctgttctacctgggaatgcaaaccctgagctgcaaataagaacacagac

SEQ ID NO: 732214 - DNA, 100 bp, Homo sapiens
cttggagccaactagaggcagggtcatccttgcccttgtcctcccctttcatccctatgtggaaaacgatcttcgggggcctggtgtggatcctggtggc

SEQ ID NO: 732215 - DNA, 83 bp, Homo sapiens
ttttgagaacagagtgctgttttagagctggcagcagcatctcagcccaagagaagaaatgcactcggtgatggaaagagagc

SEQ ID NO: 732216 - DNA, 100 bp, Homo sapiens
ctcagccactgcgggcgaggagggcacaaggccaggttcccaagagctcagatccgagtgaatgcagtaaaccccacagtggtgatgacgtccatgggcc

SEQ ID NO: 732217 - DNA, 75 bp, Homo sapiens
gagtgttgcagagcctgcggggcaagatctcagcctcccgcgacgatgcccctcaacgttagcttcaccaacagg

SEQ ID NO: 732218 - DNA, 83 bp, Homo sapiens
gcagtgtccacaaatcttttccaggcctgcagcctgtcatgcaggagttggcatacattggttgcagcatgcagagatactgg

SEQ ID NO: 732219 - DNA, 100 bp, Homo sapiens
ccctggtggatggcgaggatgagagtaaacattgctatcttcagaaattaaggaatgagaggcaaggaagaaaggacattcatcttggaaagacccaaag

SEQ ID NO: 732220 - DNA, 115 bp, Homo sapiens
aatgccaagacagtggagtgggactggaaactgctcacctatgtcatggaggaagaggcaccttttgatgtcccagcagaccctgaggaatgtgccaccgatagtgtttgttcaa

SEQ ID NO: 732221 - DNA, 100 bp, Homo sapiens
gcatctttttctgagtccagggccgatgaggtggcgcctgcaaagaaggccaagcctgccatgccacaagcagatgggatgtcaggtcgggaaccatcct

SEQ ID NO: 732222 - DNA, 90 bp, Homo sapiens
cgcaggggcgcgcagcgcggggagctgccagccacgtactggaccaatccccagttcaaaatccgtttggatgaagtggatgaggaccag

SEQ ID NO: 732223 - DNA, 98 bp, Homo sapiens
tgggaccgcaagctgagcgagctgtcagagcccggggacggcgaggccctcatgtaccacacggggtcaagcaagcacccaggccatcaggtgctgat

SEQ ID NO: 732224 - DNA, 74 bp, Homo sapiens
cactgctggggctggagaaagcggaccttctggaactcatgccactctcagagttccgccatggagtcatagtt

SEQ ID NO: 732225 - DNA, 100 bp, Homo sapiens
gctgctgcggaggcgttggagcgcggaaatctggaaccgggatggcgacgtctacactgagtcggaggcgaaggtctcctctgagcctccggcctccata

SEQ ID NO: 732226 - DNA, 76 bp, Homo sapiens
ttcacatgtcaaccggatttgtggaccagtaaagttctcccacaagcatcgagagtaaacatgaggttacgatcct

SEQ ID NO: 732227 - DNA, 78 bp, Homo sapiens
aaaagagaggtgcctttatctgatgatgatgaaagttacacagcaacaaggcgtgcaggtattttgatgaaggacgtg

SEQ ID NO: 732228 - DNA, 75 bp, Homo sapiens
cagctgagcaagtccaccaacagtttctgtgtcccacttcatctttaataagccttgaaaagatcttttgaggtc

SEQ ID NO: 732229 - DNA, 127 bp, Homo sapiens
tgtatgaactggacggtgatcctgaaaggaaagagttcctggatgacctcttcgtctttatgcagaagaggggtttttcgttggaatatacgttgcacatttatggcgattctgagtgtgagggcag

SEQ ID NO: 732230 - DNA, 74 bp, Homo sapiens
acttcaggaacctgctgtcagtggccctgacttctcaaaaagcactgcacagaggaggaggcagcagaacccca

SEQ ID NO: 732231 - DNA, 101 bp, Homo sapiens
aacaccctgagtgcggatttctgctatgatgacagacaagttggatggcttgaggactggtactaaaaggaaacgtgactgggaggccattgccagcagaa

SEQ ID NO: 732232 - DNA, 100 bp, Homo sapiens
gttcatggaagaggatgttggacttcttacttggtttaggattgggtgtgtgtgtctcctctctgaatggcactcaaatgtttgctgactcctactctgc

SEQ ID NO: 732233 - DNA, 74 bp, Homo sapiens
tttcaacaaccccacagaggactttaggagaaagttgctgaaggcaggagggagagagtcagtactgaaacagg

SEQ ID NO: 732234 - DNA, 100 bp, Homo sapiens
atttgaagaaagctatgcagactgtttatctcagggaaatatcaagataaccctaaggaatatcttggatgtcttcacggggcttatgacttattctgag

SEQ ID NO: 732235 - DNA, 75 bp, Homo sapiens
cgactacttcaaccaggaggttttccgagacaacaacggcaccgcggattttttatcaagcagaaatgcatcgaa

SEQ ID NO: 732236 - DNA, 100 bp, Homo sapiens
ggaatccctactggtactttgtagtcaagatgatagtccaggtgctcaggccactttaaagagttttatggacgaggagccccctacaatgccttgacgg

SEQ ID NO: 732237 - DNA, 80 bp, Homo sapiens
ctcactgctgttggcaccaccacccgagactccttaaccgagatcaacctgtctgttgtgaaagattttcaagactatat

SEQ ID NO: 732238 - DNA, 138 bp, Homo sapiens
tggcctcgttacctgcaggtattgggagatccacagctaagacgccaggacccactggaagcctagaaatgattaacgtcttcaaggacccagttgctgatcccaacaaaaggtccaaaaagggccgattatctttac

SEQ ID NO: 732239 - DNA, 82 bp, Homo sapiens
gcgcagcgctgccatggagcccagcagcaaggtattagaaaactactcggatgctccaatgacaccaaaacagattctgcag

SEQ ID NO: 732240 - DNA, 100 bp, Homo sapiens
cagcacttctgggacgcacagagaccgtgaagattccaagttcaggagaactcgaccggctgataatcggaagagatataaagaagaaaataatgatcat

SEQ ID NO: 732241 - DNA, 101 bp, Homo sapiens
tgggattggagattccacccaaacttgctggtcactgggagatgatgtctaccgtagaaaagcctcagaaagacagtatcagagaaggctggaagatgaat

SEQ ID NO: 732242 - DNA, 100 bp, Homo sapiens
cagcaccatggcgaccaccgtcagcactcagcgcgggccgactacatttggtcaattttgtggaacctgtgggcctcaattactccatgtttattcctac

SEQ ID NO: 732243 - DNA, 100 bp, Homo sapiens
ggacttccaatatgagaatgccaacatgtggttcaagaaccttgacaagctcatccggctggtaaatgcgcagaggcatttcatccttcatgaagccatt

SEQ ID NO: 732244 - DNA, 125 bp, Homo sapiens
acgaacacaaatgcaggagggagaggtgccaagaagcagcggtacacgcctcaagaaaggagaactagttatgaaccgtttcatccaggcccatccccagtggatcatgattcactggaatcgaa

SEQ ID NO: 732245 - DNA, 100 bp, Homo sapiens
ggtattctgaagaagacaagagtcatggaaaaaaccaagtggctggatatcaaaggaaatcatggtgaacatgtcaaaccttttaagccagagaaagcaa

SEQ ID NO: 732246 - DNA, 100 bp, Homo sapiens
tcatttaaccccaaaatcagtgattctacatctcaagctcatattttgaagtgtttacggtgtaccacatgaaggaagatggttgggtgaaagtagaaag

SEQ ID NO: 732247 - DNA, 90 bp, Homo sapiens
ttaccctggagtatgtatcaagcctggatttttggtactgcaaacgagtcatataaaagtgggtctggagtaaacaacagaagaactgag

SEQ ID NO: 732248 - DNA, 100 bp, Homo sapiens
gggagagcgggcagccttccaggtggacagatgtgagtatgcagtgctcacaggatatacttcgaatgctcctctctcttcagccagttcttcaggatgc

SEQ ID NO: 732249 - DNA, 100 bp, Homo sapiens
cgactttgaggatctggaggacggagaggacctgttcaccagcactgtctccaccctagaggaatttataagtatttgaccgtactcaaaatgtgcaagg

SEQ ID NO: 732250 - DNA, 74 bp, Homo sapiens
tgaccgagagcgtgaccgagagcgcgaatatcgtcatcgttagaagggcctcggcttcacaggatggggctgcc

SEQ ID NO: 732251 - DNA, 75 bp, Homo sapiens
caagaacaagggccgcgatgtggaatgggatcttgtgtgtgataatgcctggaaggtccatatcgctaagttctc

SEQ ID NO: 732252 - DNA, 112 bp, Homo sapiens
cagatcctgagacccggacagtggcagtgaaacaggttggatggcaagcatgtggtgtttggcaaagtgaaagaaggcatgaatattgtggaggccatggagcgctttgggt

SEQ ID NO: 732253 - DNA, 100 bp, Homo sapiens
ggaagaacagcctgaagaagggctccctcgtgaagaacctgaaggacacactaggatgtcacatgtacttcagtttgaggataaaagcagaaaagtgaaa

SEQ ID NO: 732254 - DNA, 90 bp, Homo sapiens
cgggcccggagcagccgccgccgcagcgcgaacatggacgccgtcaacgccttcaaccaggagttggtccaggcgcaatgttcagcgtat

SEQ ID NO: 732255 - DNA, 95 bp, Homo sapiens
gggggcttcccctgaccccttaggccctccccctgcaggtgccctcgcgcccctcccggggtccccaggattctgctggaagaagtaagagtgtt

SEQ ID NO: 732256 - DNA, 50 bp, Homo sapiens
gccagttatttgcctcagtaaaagagaatacaggagtttccagaaaatat

SEQ ID NO: 732257 - DNA, 114 bp, Homo sapiens
ggaagaccgcgcgcagggcctgcagcgggagctggacggcgagcgcgagcggcgcgagaaagacctgaaggagaagaaggagaaggtggaggagaaggcaagccggaaagagcg

SEQ ID NO: 732258 - DNA, 90 bp, Homo sapiens
cacccttctggagccacctgctgcctgggcccaaagagcctgttttggaaagaccacagcaagattctttcattcgtctcctcctagcct

SEQ ID NO: 732259 - DNA, 51 bp, Homo sapiens
gccagatcaaccactacccatgggtcagggcaaaagagttggtagtggtgc

SEQ ID NO: 732260 - DNA, 101 bp, Homo sapiens
ccggcgagctgcacctggagatctgcctgaaggacctggaggaggaccacgcctgcatccccatcaagctgagcattgaggatttcacagcatatggcggt

SEQ ID NO: 732261 - DNA, 97 bp, Homo sapiens
tggctgcggcagcaggggactagcgtgagaggtatcgagaaccttccctgcgaacttcagaggaacttccagctgatgcgagagctggaccagagga

SEQ ID NO: 732262 - DNA, 100 bp, Homo sapiens
ctttaaagaaggcaaggagagaatgtatgaagaacagtcacaggacagataacgaaggaggcccaacttcattcaataaggagcctgacggatttatccc

SEQ ID NO: 732263 - DNA, 100 bp, Homo sapiens
tgccagaagactcgggaggaccagggaagcagtgaaaatgatgagagataagaaacctccttccagtaagtatactttcctacaatgcatgtctttctcc

SEQ ID NO: 732264 - DNA, 82 bp, Homo sapiens
ccagaacgacctgatgggcacggccgaggacttcgccgaccagattcttcgctgctgctgccttaccgccgagaaccaccac

SEQ ID NO: 732265 - DNA, 75 bp, Homo sapiens
gtaatggtgcaaagcctgaagaggttgaaacggaacagtattacagtttttttctggtagagctgaaagaacgtg

SEQ ID NO: 732266 - DNA, 51 bp, Homo sapiens
aatgcgcagagcaaacatctttcaaagaaaaagcttgtggtgaaggggggc

SEQ ID NO: 732267 - DNA, 98 bp, Homo sapiens
ttccaggccggttcaccaaggaggcagggacccttgcctactatgaggtcagaatggcggcagtggagcatcgtcattcttcaggattgccctactgg

SEQ ID NO: 732268 - DNA, 98 bp, Homo sapiens
gagaagttgatgactctcgtgaacatagctttaataggggaagaggaagaacgtctgagaaataaaattcgagctgatcatgagaaggccttggaaga

SEQ ID NO: 732269 - DNA, 82 bp, Homo sapiens
caagcaaatgctgccttccttgttggatgctacatggctactgcagcactggggtgtcagttgttggtccgacccagaacgc

SEQ ID NO: 732270 - DNA, 100 bp, Homo sapiens
gccggcagcgtcccggacgaggaggttccccaaggactctagcacctggactgtggaccaccagctcctgtggggggaggccctgctcatcaccccagtg

SEQ ID NO: 732271 - DNA, 74 bp, Homo sapiens
gggagcgtcctggggctgtgctccatggcgagctggtattctaccttgtaaatactgttatttgtatatactgt

SEQ ID NO: 732272 - DNA, 112 bp, Homo sapiens
actgggtccccaaagtcttggaacagcgacgacaaggcttggaaacatacttacagacattccacttcttccatctattacatctctgagtctaaatgaaaatgaagagaag

SEQ ID NO: 732273 - DNA, 74 bp, Homo sapiens
ctatacactcattatctgatacttgtaatcaggaaaattgcctaagaattatgacccaaaagttaccccagatc

SEQ ID NO: 732274 - DNA, 100 bp, Homo sapiens
tttcgctgcaggtgtcaactctgaaatggtcaagctttatgaccttcgttcttttgataagactcagcccgcctgcacccaggtgaaatatacagccttg

SEQ ID NO: 732275 - DNA, 100 bp, Homo sapiens
aaattcaacagcagcgattactagacattgccaagaaggaaaatgtcaaaattagtgatgaggtggaacgtgtgatcaccattatgcagaatccacgcca

SEQ ID NO: 732276 - DNA, 50 bp, Homo sapiens
cggaaacgggatggggagctggaccaggctggagcgcaatggcgcgatct

SEQ ID NO: 732277 - DNA, 100 bp, Homo sapiens
agaggggagtcatcatgagcgatgttaccattgtgaaagaaggttgggttcagaagaggggtttgcctgcaatgagatttcattctctacatttaaagga

SEQ ID NO: 732278 - DNA, 74 bp, Homo sapiens
ggtgccctcaacatctctcagagacgaaaggttttgatgatgatggttcagaatttcatgaacatatatttctg

SEQ ID NO: 732279 - DNA, 75 bp, Homo sapiens
ctgctgcctctgccacgttactacagccaaccgatccggatcacctgtttgaaaccatctcccaagccatgctga

SEQ ID NO: 732280 - DNA, 98 bp, Homo sapiens
acgaagcaaaatccacaaaaaagtagataggaaagccagcaaaggcaggaaacttcgcatttaaatcaaacggtattgagatggattgggttatgaaa

SEQ ID NO: 732281 - DNA, 75 bp, Homo sapiens
attggggagcctggttagaactctgtaacctgatcacagacaaagagatgggagatgcacttatttacatggaac

SEQ ID NO: 732282 - DNA, 75 bp, Homo sapiens
cgccgccgctacgggaccgcctgagctttctacaccgggccctgtttgtgctcttcgtcctggcctacatccaca

SEQ ID NO: 732283 - DNA, 95 bp, Homo sapiens
cctggagcctcagttggaagcagccgatccagcctgcggagcctgtggggcagggtgcttcaaggatgaccgcatcgtcttctggacttggatgt

SEQ ID NO: 732284 - DNA, 75 bp, Homo sapiens
ggcggccggggcggcggaggcggaggcggccggcccggagttgtctgctggttctcagcttgaagaagattctgc

SEQ ID NO: 732285 - DNA, 50 bp, Homo sapiens
tcagacacaacctctttataacataaggccctggccaacgtcaacattgg

SEQ ID NO: 732286 - DNA, 74 bp, Homo sapiens
aagtggccaagacctctgctgcacagcatgctacaagtgaaaactgatgagaaactgaatgtgtctgatgagaa

SEQ ID NO: 732287 - DNA, 75 bp, Homo sapiens
ctcagtggccggagcagcctcaaagcagaagccgagaacaccagctcactcagtaacttgatggattttgtgaag

SEQ ID NO: 732288 - DNA, 82 bp, Homo sapiens
gcggctggcctcaccgcccactggtttcaccagtgatcattaaagaatgggcagcttacaaaggaaagtctcctcaaacccc

SEQ ID NO: 732289 - DNA, 100 bp, Homo sapiens
actcgccccacacgaggctgcggcgttctgggcgctgtgacctcttccagaagaaagggtatttgaagtataccatacaactgttttgaaaatccagcgt

SEQ ID NO: 732290 - DNA, 100 bp, Homo sapiens
ttccgaaagctgggactgaggcagtgccttgtaactcacaatgggatctggaaatagtatattcctatttacatggtatggaagccttatcaaacttgag

SEQ ID NO: 732291 - DNA, 82 bp, Homo sapiens
tctgtcagtgagatggcttctaacaaggaagaggatcacctagcccgggtagaagaggcaatcacccgtatgcttgtgtgtg

SEQ ID NO: 732292 - DNA, 88 bp, Homo sapiens
gtccgagtcccaggtcaagagcctctgcgagaagcttccgaagaactgaccattgctggcatgacgtttacaacttttgatctgggtg

SEQ ID NO: 732293 - DNA, 83 bp, Homo sapiens
ccagaggactttcttccagcttctgctgtccttctttgtggagagcaaggtgaaatctgtaagccatgacctggagcaactgc

SEQ ID NO: 732294 - DNA, 75 bp, Homo sapiens
accatggaccatcctgctggtcagcactgcggctggtttctagagaggaaggatctccccagctgtcttcagcaa

SEQ ID NO: 732295 - DNA, 82 bp, Homo sapiens
cggaggagtcagctgtgtgtccagaacgtgccatggagacgcttaacgggaaagtacggtggccagactttaaccaggaagc

SEQ ID NO: 732296 - DNA, 74 bp, Homo sapiens
aagaagagaccatccatatttccagtgttatccaagataaattctgtgggattataaacatttcagtagaaggc

SEQ ID NO: 732297 - DNA, 88 bp, Homo sapiens
catgatgattcttcagataacttctgtgaagctgatggtctctaattaacagaagatggcaaagcccagccacagcagctatgtcctt

SEQ ID NO: 732298 - DNA, 50 bp, Homo sapiens
caccgagtactcttatgcagtccccatggcgagggctgcattgcccttcg

SEQ ID NO: 732299 - DNA, 77 bp, Homo sapiens
atcgctgaagatgttgatggagaagctctaagtacactcgtcttgaatagatgttttgagagattacagaagaggag

SEQ ID NO: 732300 - DNA, 88 bp, Homo sapiens
agagtactgatgaggaaagtgaaaaccaaactgatctctctgggttggcttcaggtcacagaacagaaagtgctggtggacatctctt

SEQ ID NO: 732301 - DNA, 83 bp, Homo sapiens
cgagcgcccggattggggatgagtatgcggaggacagctctgatgaggagctcaccatggatgatgatatcgccgcgctcgtc

SEQ ID NO: 732302 - DNA, 80 bp, Homo sapiens
cttcacatgtaattcagaaattagggacagcctgtggacatctctacagcaatgagtgaacgggcacttgctcagaaaag

SEQ ID NO: 732303 - DNA, 106 bp, Homo sapiens
ggggtgcgccggcagaggatccagtgttcaccatcctggccccggaaggtgagaagccctaccactgcaactgggacggctgcggctggaagtttgcgcgctcaga

SEQ ID NO: 732304 - DNA, 75 bp, Homo sapiens
ccgaccccgacccggcccggtcaggccccatactcagggtgtccgcaatgttgccagtgtctgtctgcagattgg

SEQ ID NO: 732305 - DNA, 50 bp, Homo sapiens
agcggccaatggcacggaggcctgcgtgttctgcggggagtgtctccagc

SEQ ID NO: 732306 - DNA, 83 bp, Homo sapiens
ccctccttctcaatcttggaacagcacccccttctttaagagtgctgcagcagctcccagtccagtgctaggaaacattcccc

SEQ ID NO: 732307 - DNA, 75 bp, Homo sapiens
agactctcttcgctctttgcatcttaactgcaggtgcagctgaacctggtgttttagaggataccttggtcccag

SEQ ID NO: 732308 - DNA, 50 bp, Homo sapiens
cgttaaggaccgttacgtttcccggggaagtgttcgccagttactacatg

SEQ ID NO: 732309 - DNA, 100 bp, Homo sapiens
caaaggatcatggtcatcaaagccaaagagcgttctaccaaggagaagcagagctcagaggaagaagaaaaggaaacaagaggggttcagaagaggcgag

SEQ ID NO: 732310 - DNA, 100 bp, Homo sapiens
cccgctcctaaggcaggaagatggtggccgcaaagaagacggtcaaatgggctctctcattcttggagtgaaaggattccagacacaaaacatatttcag

SEQ ID NO: 732311 - DNA, 96 bp, Homo sapiens
aagtgtgagcatgacccccatgtgctcctggccgtggccaagcgggatgtagctcattttgggatacgagtctccatcgtggagcctggcttcttc

SEQ ID NO: 732312 - DNA, 100 bp, Homo sapiens
gtctgagatggggacgctgtggcaccactggtcgccggtactcatcagcctggccgccctgttttccaaagatgttccatttaagcagacctcttccata

SEQ ID NO: 732313 - DNA, 96 bp, Homo sapiens
ccgccactgccgcaggaggcgtgagggcgtctctggccgagcctctttttgtggaaaacgacagcagcagcagtggcctggaagacgccaccgcta

SEQ ID NO: 732314 - DNA, 50 bp, Homo sapiens
gcccggcccggcagcgacatggaagggagaagaaatgggtgaccgttggt

SEQ ID NO: 732315 - DNA, 83 bp, Homo sapiens
ccaaaccattactgatgatgtggaggttaacagctatctttctaatgttccagtggaaaacttctttgtgaaatgcaatggag

SEQ ID NO: 732316 - DNA, 75 bp, Homo sapiens
ccgcccggcagctgccccgtctgagaaatcccaaaaggataatcacttacaatgaagccatggatagtccagatc

SEQ ID NO: 732317 - DNA, 98 bp, Homo sapiens
ggcggagctgtccccagagaccctatgcaacgggcagctgggctgcagtgaccccgctttcctcacgcccagatctggagaagggactcctgaaagcc

SEQ ID NO: 732318 - DNA, 98 bp, Homo sapiens
attcgcatgggcctactttacatcacactctgcataggaaatttacatgccacttatgtgatagaagtttcacagagaagtgggccctgaacaaccac

SEQ ID NO: 732319 - DNA, 96 bp, Homo sapiens
ccagcaggacatggagcagtacctgtccactggctacctgcagattgcagagcggcgaggctcacaggcagaaggaattttccttgtcttggatga

SEQ ID NO: 732320 - DNA, 100 bp, Homo sapiens
ttcacatctgtggaaaggattgcaagagaagttcttgaagggagaacccaaagtccttgggtaggttgtgacagttggaagtgtcatgtacaacatgcgg

SEQ ID NO: 732321 - DNA, 88 bp, Homo sapiens
gcgcacattttgcagcctgcaccggccaacggtatattacagctaatactgacacagaagaacagagttttccagtccctaaggcatt

SEQ ID NO: 732322 - DNA, 99 bp, Homo sapiens
actacaggaacatggtcttgctgggcgaggaaacgagacctctttcgttccttctagaaggtctggaggacgtagagttattgaaaatgcagatggttc

SEQ ID NO: 732323 - DNA, 50 bp, Homo sapiens
agaacttgccggtgccagctgaggtgaagctgtgtgactttggctttgct

SEQ ID NO: 732324 - DNA, 75 bp, Homo sapiens
ctggctgccatagatgaggccctggcagccttgcacgtgacgaaccctctgcaggtcctggtgaacgccatcatc

SEQ ID NO: 732325 - DNA, 82 bp, Homo sapiens
cgaaggaggacgccggccagcagaagtggggctgaccctgtgaccagtgtggggaaaaggaaagccatcaccaagtcgggcc

SEQ ID NO: 732326 - DNA, 97 bp, Homo sapiens
tgctcaggatcatgcagagttcagctatgttctcaatgggatactcaacttgattccatcaaccaggatgttgcttcagagtgtgaagtcaaatgca

SEQ ID NO: 732327 - DNA, 100 bp, Homo sapiens
acgggagccgtccgggggcagcagcggcagcgaggcggcgccgcaggatggtacatggtgcagtggccgggagcacgcatccttcggcgtcaggagctag

SEQ ID NO: 732328 - DNA, 100 bp, Homo sapiens
ctgctcaagtcctgtcctcttctgaccaaagagccctaaaccagttgtttgagaaaatcatggcattagacattgatgagcgccacctactgcgtcttgg

SEQ ID NO: 732329 - DNA, 95 bp, Homo sapiens
tattaactcttacctgaagcccatgttgcagcgggactttattaccgctttaccagttcagtggggactgcccaccgtgtctgcggccggtgtca

SEQ ID NO: 732330 - DNA, 80 bp, Homo sapiens
aagggaacgtggaaagcgcatacaggaccctaaacagcctggagcattggtaagcgtcacactgccaaagtgagagctgc

SEQ ID NO: 732331 - DNA, 100 bp, Homo sapiens
gataaagtggtagcttctaggcttactccagagtcccagaaaatcagttcgaggaaagggaaaggggcaaaaacgaaagcgcaagaaatcccggtataag

SEQ ID NO: 732332 - DNA, 100 bp, Homo sapiens
cttcgggcctctggaatttagcgctcgcccagctagccgcagtgcaggtcgtaatctgaaggagtggctgagggagcaattttgtgatcatccgctggag

SEQ ID NO: 732333 - DNA, 82 bp, Homo sapiens
gaaacaagaagaagagaaccctgcggaggagaccggcgaggagaagcagtttggtgccctggttgtcagatgttggaaagca

SEQ ID NO: 732334 - DNA, 50 bp, Homo sapiens
gagacatggaccgcggcgagcaagagctccctctttgcccactagcaggg

SEQ ID NO: 732335 - DNA, 100 bp, Homo sapiens
catctcctacattagcgtctacgaccaccaagctatccagtcagttcgctgctattcccatgggtcacaggagacagatgaggagtttgatgctcgctgg

SEQ ID NO: 732336 - DNA, 100 bp, Homo sapiens
aaaggagggactgatagagagaactgaacgaatgaagaagactatggcatcacaagtgtcacgttggacctctcgaacaaccagctgagcgagatccctg

SEQ ID NO: 732337 - DNA, 82 bp, Homo sapiens
gtcataaaataccagtggaggccgacttcttgtatgcatactccacagcacctggtagaaaattatggcatgccgtttagca

SEQ ID NO: 732338 - DNA, 96 bp, Homo sapiens
gcaaatgaagctctcgaggctgctaagagactaaatatttggagtctgggagtgatccttttcatgttggtgtgtgggcagccgccctttcaagaa

SEQ ID NO: 732339 - DNA, 75 bp, Homo sapiens
atcaacacggtcaacgtggacggcttgacagccctgcaccagtcactgtgtgcccagtattctgcagacaaacga

SEQ ID NO: 732340 - DNA, 82 bp, Homo sapiens
cttggtttcgggatctcggtgctgcagacggcgagacctcctgcacagaccatggtgaatccgggcagcagctcgcagccgc

SEQ ID NO: 732341 - DNA, 108 bp, Homo sapiens
ggcccgacgagctggagcgcctgtcaggctgggaggaggaggaggagagctgggggcggaggaaagcgcaaagggaaaagcaagaagtggaaagaaatcctgaagttc

SEQ ID NO: 732342 - DNA, 116 bp, Homo sapiens
tgggaagaagaggagtgccagcaggatgtcagtcttttgaggaaacaggaaaatgtttataggaggccttagctgggacactacaaagaaagatctgaaggactacttttccaaat

SEQ ID NO: 732343 - DNA, 87 bp, Homo sapiens
cacagcaagttcctgcttctgggacagctctactgacggtatcttgcggtaccgagtagatttccagggaatggaataccaaggagg

SEQ ID NO: 732344 - DNA, 59 bp, Homo sapiens
agccatggccctccacagcccgcagaaagttggagtgactggtccccctgatccacaag

SEQ ID NO: 732345 - DNA, 101 bp, Homo sapiens
ggacgtcaaatatatagaaatgaagagggttgcagaagctaaggcagatccagttcctaatggtttgcgagctttgccagttttctatgcctgcacagttg

SEQ ID NO: 732346 - DNA, 100 bp, Homo sapiens
ttcagctcttcacagggggtagaacaagtggtactaggattatacattgtaagaggtgacaacgtgaggagatgttaaagtaacccatcttgcaggacga

SEQ ID NO: 732347 - DNA, 100 bp, Homo sapiens
cctagccagactcagggatcaaagagcaaacagattcagtggcctgcattgaaaaccatgagctgttttccaagagcttcatctccatggaagtgcctgt

SEQ ID NO: 732348 - DNA, 95 bp, Homo sapiens
gaagcataatgacattgtggacagtgacagcgatgctgaggatcgaggaacgttgtctggaagacagagatgtcaatgaccccatgcccaaccga

SEQ ID NO: 732349 - DNA, 49 bp, Homo sapiens
agtggagagagtggtgctggaaagggtggtgattccactgaagcaactg

SEQ ID NO: 732350 - DNA, 100 bp, Homo sapiens
aggatgatgctgactttgatgaagattgttcagttcaagggaatgaagaattcagaataattttggtaaatggattccaatatggggaataagaataagc

SEQ ID NO: 732351 - DNA, 74 bp, Homo sapiens
tgggttgcacctggggaatgggaggaagaacgtgcaaaacgtgaggagctagagcgaatactggaagagaataa

SEQ ID NO: 732352 - DNA, 100 bp, Homo sapiens
ctcggtcctggccgcgattttctgcaggccccacgagtgggaggtgctgagccgctcaggtctgcgcaggcatggcactaagtgtcccatggcacatttg

SEQ ID NO: 732353 - DNA, 101 bp, Homo sapiens
gcggaccatgataatttccccagagcgtcttgatccttttgcagatgacatctttccaggaacagcgtgaggaggacagaagcacccaacaggactgctca

SEQ ID NO: 732354 - DNA, 98 bp, Homo sapiens
gagtttcgggctgatgctcggttccagggtcacccccgagaggacaacaggcatctggaagtgctctctcgccactctgggtgctttactgtctctgg

SEQ ID NO: 732355 - DNA, 82 bp, Homo sapiens
ttccccccgcatcgcctcccgtggaagcccaggcccgcttcgcagcaattctgtggtgttcttggtcacacatttatggagt

SEQ ID NO: 732356 - DNA, 97 bp, Homo sapiens
ctgcgcgagcggagggaggcgggcaatgcatgaaccattgcaaacttggcaagatgcaccatacatttttattgtacatattggcatttcatcctca

SEQ ID NO: 732357 - DNA, 101 bp, Homo sapiens
caagaatagtgcttgctgctgctggaggtgcaagttttgaaactgcttttgaatttgtctgaaaatccagccatgacagaaggacttctccgtgcccaagt

SEQ ID NO: 732358 - DNA, 100 bp, Homo sapiens
cagtgagctcggccggcaaccgagggacccgcgtccaggggtacttcggtccttggtggaagcatctagctcaggtgtgtcggtactgagcctgtgtgag

SEQ ID NO: 732359 - DNA, 82 bp, Homo sapiens
cttatgagtacctttgtcatttggaagaagcgaagagatgcctgaggaaacccagacccaagaccaaccgatggaggaggag

SEQ ID NO: 732360 - DNA, 100 bp, Homo sapiens
ctgggcacccacggagcctccggggctggcgggctgcgtgcacttcccccacacggcgccctgtgaggtgcgcgtgctcatgctcctgtactcgtccaag

SEQ ID NO: 732361 - DNA, 74 bp, Homo sapiens
cgcagatagcagagccatccttggggtgaccatagccgatgactactcagatccctttgatgccaagaatgatc

SEQ ID NO: 732362 - DNA, 100 bp, Homo sapiens
gaaacatgctagaattacctggaacttcatcatcatctacttcacaggaattgccatttgccaagaataaggagacgggtgctttggctgcggccaaagt

SEQ ID NO: 732363 - DNA, 100 bp, Homo sapiens
ttgctgttgaatgaacaggaacttcagttgggagccgctgagtgtcttctcattgcagtcagcagaaaagccttggacaagattcgctatgagagcctga

SEQ ID NO: 732364 - DNA, 100 bp, Homo sapiens
ggaagaggcatgccagaggtagagcagattctgaaggaagatttccattaggtaatttgtttaatcagtgcaagcgaaattaagggaaaatggatgtaga

SEQ ID NO: 732365 - DNA, 75 bp, Homo sapiens
agcacagataatgaagactttccatcaaggttctgaaaagtgccttttctgaaaactctgctgcttggattctac

SEQ ID NO: 732366 - DNA, 100 bp, Homo sapiens
ctttgtcactccccggcggcagcacgaaagtaccatcacctgtgattacagaggaaaccacccttcaactggaagatatcattaaacagaggataagaga

SEQ ID NO: 732367 - DNA, 116 bp, Homo sapiens
gctctacaacgtgctggccaaggtgaagcgcgagcgcgacgagtataagcggaggcataatcaccagcaacacccgggacaataatacgggggccacctacccccacctgaacttc

SEQ ID NO: 732368 - DNA, 100 bp, Homo sapiens
tcacacaggatccgcccctggacatggaggagaaggtccgcttcaagtcaactgcaacttggcctcttgatccaccaaaggatgagaaacaagggtggag

SEQ ID NO: 732369 - DNA, 99 bp, Homo sapiens
cgagtgtgtaggtgacaggacagcggccaggcccgcccctcccctcggttatgagtccagggacaatatggagctcatagtgaagcagatttctgatga

SEQ ID NO: 732370 - DNA, 82 bp, Homo sapiens
ggaaaaggacgcaaagttctccggcgagcgggagatacagatgacccaccaagaattactcagaaccctgtgatcaatggga

SEQ ID NO: 732371 - DNA, 100 bp, Homo sapiens
agcagaaagttctccccagacggcagccaattcagcagctgagctgttgaagcagggggcaggccaactacacagacccccagagcaaactgcggttcag

SEQ ID NO: 732372 - DNA, 106 bp, Homo sapiens
gaaaattttccttgacctttaggtgcttttatattcatctcaaaaacaaaattctgaactcaggacttggcaaggtcgacaagtgcccccaatgatttatggtaca

SEQ ID NO: 732373 - DNA, 87 bp, Homo sapiens
tggatccaggataacggaggctggcttgacccatcttatcaccgtcttctctggcactcagtatttggagtaatcagttgttaccag

SEQ ID NO: 732374 - DNA, 116 bp, Homo sapiens
ctactctgtcgctcttgtgccctagcaccccgagaaccgtcagtttgagccagatggaagcagttcaggtacttttgaagcattctgcagatgttaatgctcgagacaaaaattgg

SEQ ID NO: 732375 - DNA, 75 bp, Homo sapiens
acagccattctcccatgtctactcgcaggcgtcatgttgggaatcgggcatcctgtacacgtcaaagaagagccc

SEQ ID NO: 732376 - DNA, 87 bp, Homo sapiens
ctagagcaaggaaaagagccctggaatatgaagagacatgcgatggtagatcaacccccagatctccaagaaggagaagcttctctc

SEQ ID NO: 732377 - DNA, 100 bp, Homo sapiens
gctggtcgtgttcgtcctcggcggccccggcgccggcaaggggacccagtgcgcccgcatcgtcgagcggaagatccatccaaaagctatgtgaaattac

SEQ ID NO: 732378 - DNA, 75 bp, Homo sapiens
cggggtggtggcaatggtcgtggaggccaagtggaggtgactggtgatgaatacaatgtggaaagcattgatggt

SEQ ID NO: 732379 - DNA, 80 bp, Homo sapiens
agacctgaactcttcagataatcagagtggaggaagtacagccagcattctctgtggacattgactcggagctggtggag

SEQ ID NO: 732380 - DNA, 100 bp, Homo sapiens
ccgacttcgatgatcgtgtgtcggatgaggagaagaaaacattcctgagaagtggaccccagaggtgaagcacttctgccccaacgtgcccatcatcctg

SEQ ID NO: 732381 - DNA, 96 bp, Homo sapiens
gggaaacgcagcagtgagcacgttcattcccagggccgtgtgatgggggaccgcagtgtgctctacaaggcaagctttgttgcttctgaaaacagg

SEQ ID NO: 732382 - DNA, 75 bp, Homo sapiens
cggaggctgacgaggaggcggatcccccggcgtcaggtatggacctgtctgccaatcaggacgaggagaccgacc

SEQ ID NO: 732383 - DNA, 82 bp, Homo sapiens
attcattgtactgaatattacccttgtgcttgccgatgctgccaagggaaaaattaagaagaagagaagagagaaaacaaat

SEQ ID NO: 732384 - DNA, 97 bp, Homo sapiens
gagactgtcttacgctgacaaagattattgaagcaagactaaagatgatgaggagtctgatgaggaagctgtgaagaaaaccaacaaatgtgtacta

SEQ ID NO: 732385 - DNA, 100 bp, Homo sapiens
ggatttcaccgcgcggcggctctcagcccgagcgggaagaagttccgcagcaagccgcagctggcgcgctacctgggcggctccatggacctgagcacct

SEQ ID NO: 732386 - DNA, 82 bp, Homo sapiens
aaaagggtcctcctgctcacagtgtgaataacagatactgtggattatcccccagaaagctgttcgttggattctagtcatg

SEQ ID NO: 732387 - DNA, 83 bp, Homo sapiens
tgggagccgtgctctacctctatccgcaaacggggattcagcgtccgatcctttggaacagggactcacgtgaagcttccagg

SEQ ID NO: 732388 - DNA, 98 bp, Homo sapiens
tctcttcctcacttttctcctcgctgggcaaaccttggagaggagtccagccagtctctgagcaggcttgcttccggcgtcatggctcaaagggcctt

SEQ ID NO: 732389 - DNA, 95 bp, Homo sapiens
ttgacaatgcccgtcttgctgctgatgactttagagtcaactatctcctggccagcttctataccaagtatgatgctgcgcacttcctcatcaac

SEQ ID NO: 732390 - DNA, 90 bp, Homo sapiens
gtcctgcaggtattgggagatccacagctaagacaccgggacctcctggaagccaaaaatgtcaccaggagactaaagtccatcaaaaac

SEQ ID NO: 732391 - DNA, 100 bp, Homo sapiens
tgggatttttgagctggtggaagtggttggaaatggcacctatggacaagtctataaggcatatactagtgtctcaaaggcttcacttggccttgcagat

SEQ ID NO: 732392 - DNA, 82 bp, Homo sapiens
gctgaagactccagtatgcaactgactacaaggagaattcggttccctcaaaattataaaggcaggaaagctcaagacaaag

SEQ ID NO: 732393 - DNA, 49 bp, Homo sapiens
gaaaatgttgcttcatatgagatacttttgtggaactctatgggaacaa

SEQ ID NO: 732394 - DNA, 85 bp, Homo sapiens
tctgtttctctgctgcaccgacctcgacgtcttgcctgtgtcccacttgttcgcggcctataggcaaaggaaggatgaactggag

SEQ ID NO: 732395 - DNA, 89 bp, Homo sapiens
gcaggtcacattcacctgtgggcagagggacagcctttgaagaagatggtggagagaattcgcaagttccagattctcaatgatgagat

SEQ ID NO: 732396 - DNA, 96 bp, Homo sapiens
atggacagggatgataattgggcctccaagagtgtatgcccacgcaggcgcgacgctggaggggaagatgtatatcacctgcggccgcagagggga

SEQ ID NO: 732397 - DNA, 55 bp, Homo sapiens
tggataatataatcaactcctctgcctgagagacaagagagacacctccaacttc

SEQ ID NO: 732398 - DNA, 75 bp, Homo sapiens
aaagaataaacttatccaaaatcgacaagtacttcaagaaaagagtagttgaacagctacggaagaacctgatag

SEQ ID NO: 732399 - DNA, 74 bp, Homo sapiens
gcgcctctcccaggacccgcctggctgcgagatatgtcatgcttcaccccttcctccatctgctgcacctacca

SEQ ID NO: 732400 - DNA, 75 bp, Homo sapiens
cgcggttgccaagcgctcggcgcttggcgctggcgctggccaaggcgaacccagcgggtgccgcttctccacccg

SEQ ID NO: 732401 - DNA, 75 bp, Homo sapiens
cagtttccagtggcagcagtacagcattactttatagcaaacgactggctgacttatccttgtataatgaattcc

SEQ ID NO: 732402 - DNA, 90 bp, Homo sapiens
atcccaggttgccttggaaaatgccaacgccgtgtctgaaggtataagtgtgctagcggagtgtctagattgtcctgaattgaaagcaac

SEQ ID NO: 732403 - DNA, 100 bp, Homo sapiens
gccattcataatcatcaatacaagcagaaaaacagtcatagattgcagcatctccagtgacaatacgaatgtaaagttatcgcagaaaaatctcatcagg

SEQ ID NO: 732404 - DNA, 100 bp, Homo sapiens
agtaacccgcgaaatgatgggatagcgttgcaaatccttaaaagagtcttaacggtatggctatcctgatccttcttacctgaaacgtgtcaaagaggag

SEQ ID NO: 732405 - DNA, 88 bp, Homo sapiens
tcttaattatgtctgagaaaaggtactacgacgtccccatcgccaccctggacttctcctcgctgtacccgtccatcatgatggccca

SEQ ID NO: 732406 - DNA, 73 bp, Homo sapiens
ggtgccccacaggccactgtgcaggatctccactcggccctgacacagtggcgttcagctgatagagcgggaa

SEQ ID NO: 732407 - DNA, 76 bp, Homo sapiens
cgagagcgcgaatatcgtcatcgttagaaggtatcatgatattagctggtttgacatcaagtcatttgtgagtcat

SEQ ID NO: 732408 - DNA, 83 bp, Homo sapiens
ctggcctgggcgctccggtggcggcggagcggaaggagagttttacatggaagtggcttacagaaacttggcgctgaggtgca

SEQ ID NO: 732409 - DNA, 75 bp, Homo sapiens
tttccagaagatgattccaacgccaccaattccaacctggaatactcccccagttgcaagaggcgcaggaccgtg

SEQ ID NO: 732410 - DNA, 73 bp, Homo sapiens
aacattctgccgaagagaacaagacgtgtgaagactcaggtctaagagtgtaaccagttccagtagcagtagc

SEQ ID NO: 732411 - DNA, 83 bp, Homo sapiens
tgttttgaagagaaggggaataagactgcatctgttcatatgagaatcaaagaatcttcaggatggcagcaagtgtttacgag

SEQ ID NO: 732412 - DNA, 83 bp, Homo sapiens
gtgcatgcgccaggcaggccgttacttaccaggtcatgcaagacaagataatctgccttccgaaaagagtgcagcctgctcag

SEQ ID NO: 732413 - DNA, 85 bp, Homo sapiens
gaagatggcggccggcgaaaggagctggtgcctgtgcaagttgttgagagcatctgttaagaacatcttcagccagccggcctgc

SEQ ID NO: 732414 - DNA, 75 bp, Homo sapiens
gttgcccccttaggattgagcgtcccgtctgacgtggagttgggcacagacagaagcttgatgactctaaaccta

SEQ ID NO: 732415 - DNA, 100 bp, Homo sapiens
cagagcaggagaagctgagcctttctggacagaccaacctgtcagtgctgcaaacatccctttaaaagtagttggaatgttcccaagtagaggtgagaaa

SEQ ID NO: 732416 - DNA, 83 bp, Homo sapiens
tggctaataattggtcactgtatgacttatagtacaggtgatattacttctgattctagatgtctgctccatctggacacaag

SEQ ID NO: 732417 - DNA, 50 bp, Homo sapiens
agaaagtggacaaagagaggagtcagtttggaaattttagcattcaggtg

SEQ ID NO: 732418 - DNA, 100 bp, Homo sapiens
gctcctcccccgtcctccgttagctaattaaaacatttttcagggacgtagccatccagagaaagttactgtggcccatgtcctaaaaactggatatgtt

SEQ ID NO: 732419 - DNA, 50 bp, Homo sapiens
ctcctgagtagctgggactgcaggccctccagggaaacgaggtaagagag

SEQ ID NO: 732420 - DNA, 96 bp, Homo sapiens
tggaggtgggaaggtgtgtccggaggtttgcaggggtgcagtgtgtctggtcttatgaggacagcccagaaacttgcaggacctgtgccgaattaa

SEQ ID NO: 732421 - DNA, 100 bp, Homo sapiens
tctttccagaggccaggctttatgggagcatgggttaccagcgacgcaccctcacaggagaaaacgacgctccacacctttaacttcttccacacttcct

SEQ ID NO: 732422 - DNA, 100 bp, Homo sapiens
ctttattagaagattctacaagtgacttaagaagcaaaaaattcaagaaactgactaaagctatatgtggactggatatgctgcaggctgctagtcatta

SEQ ID NO: 732423 - DNA, 94 bp, Homo sapiens
ctcgcgggtccgggagcgcggcggagacgatgcctgagatcagagtcacgcccttggacaatgcagatcttcgtgaagactctgactggtaaga

SEQ ID NO: 732424 - DNA, 100 bp, Homo sapiens
ttttaggccaaggagctactgcaaatgtctttcgtggaagacataagaaattcgagctcaactggtagaacaacaaaaatgcctggagcagcaaacggag

SEQ ID NO: 732425 - DNA, 96 bp, Homo sapiens
ggcggacggggagctgaacgtggacagcctcatcacccggctgctggagggttggtcaaagaaaaagtgatgtatgaaaaagaggcaaaacaacaa

SEQ ID NO: 732426 - DNA, 100 bp, Homo sapiens
aagcgtctttcaagaggtgcagtctttgaagggctgggtaatgttgcatctgtggagctaaagtatagcactctccctgggcgcagggccctgaagaact

SEQ ID NO: 732427 - DNA, 100 bp, Homo sapiens
atttttagttgaagagtctcttcccctttcagagctcacagagacttcaaatgcttcccgtgcggcctgcgacccatggaaggagagtggtgacatctcg

SEQ ID NO: 732428 - DNA, 75 bp, Homo sapiens
tgtggggagttggcaacgcgacacagagccaggccgggacctgggggctcctgccggatccatgggggcggccag

SEQ ID NO: 732429 - DNA, 98 bp, Homo sapiens
gctggatctctggtgagacatttttcttccttctgtcacatcacacccaatgcactgttgcaagaattcaattccgtcttcctgatggttcttccttt

SEQ ID NO: 732430 - DNA, 100 bp, Homo sapiens
ttgaatgcggaatccatagatgttcacagcgttgtcaccgaggtccctgtgaaacatgtagacaagaggaagataccaactagagataaaaataccagaa

SEQ ID NO: 732431 - DNA, 100 bp, Homo sapiens
ttggatttgccagggcatgtagctctccaggcttgcaagcgattaccagctagagaccgttggatggcagcttaaccttcagatggctcactctgctcaa

SEQ ID NO: 732432 - DNA, 100 bp, Homo sapiens
ggaaactggcggctgctggtagttccatgctgtctgttcagacttcagcttggttggaggcaatgttcactgcaatgtgcgaatgccaggccttgcatcc

SEQ ID NO: 732433 - DNA, 75 bp, Homo sapiens
aaatcctgtcctgaagactgtaaggtacccactgatggtaatgctggcctgctggctgaaccccagattgccatg

SEQ ID NO: 732434 - DNA, 100 bp, Homo sapiens
gaaatccttgtgacagtaggagcatatggatctctttttaacaccattcaagcattaattgatgagggagatgaactcgatcaagtcatccgccaaagaa

SEQ ID NO: 732435 - DNA, 101 bp, Homo sapiens
gccagccaatcatcctctgttgactggccagagagtccttgatgccctttttccgaagagagaagggcacagttacctaagtatcaacgtaatcttcctcg

SEQ ID NO: 732436 - DNA, 76 bp, Homo sapiens
tttcacaaatattgggctgacattaaagagaacaaggccaggggcaacatgcaggttctggtgacttacggtggcg

SEQ ID NO: 732437 - DNA, 100 bp, Homo sapiens
atccatttctataacaagtctctggcagagcaccgaaccccagatgtgctcaagaaatgccagcagccagaagatcagctgccatgttacttgactcaca

SEQ ID NO: 732438 - DNA, 100 bp, Homo sapiens
tcgggcgccggcgagatgcctttgttcaccgccaaccccttcgagcaagacgtgggagtccaatgtgctgattgctgctaacagtcagggtacaattaag

SEQ ID NO: 732439 - DNA, 82 bp, Homo sapiens
aacgggggtcttcctcctccgccgttgacaggcgagaaccactgtctctgatcaacgtgcggaagaggaacgtggaatctgg

SEQ ID NO: 732440 - DNA, 96 bp, Homo sapiens
cagaagctaaagcaggccaacgaggcggtggtgaaccgagtgtttgacaagctgtccccgctgcacgagcgcatctactgtgcactctctggttca

SEQ ID NO: 732441 - DNA, 90 bp, Homo sapiens
ctttgtgcttcacgatccagaggctcggtggatcaatgagctggtgatgctgctggagtggtggtcgggcacggaatgcaccatcttcac

SEQ ID NO: 732442 - DNA, 100 bp, Homo sapiens
cgaagcaaacagtctcatccattttggatacacttggggatgatgacttcttcaacataattgctaattctccactttaccaatacttacaggatctggg

SEQ ID NO: 732443 - DNA, 88 bp, Homo sapiens
aaggctcttccctgaccattttctactgtccctgcgcgaggggcaagattcttgccaagagaattaatgtgcgtattgagcacattaa

SEQ ID NO: 732444 - DNA, 74 bp, Homo sapiens
ccggattggggatgagtatgcggaggacagctctgatgaggagcggagcgtgctttggacaccatgaattttga

SEQ ID NO: 732445 - DNA, 101 bp, Homo sapiens
cgatggcagcgacacaattgtctgtgacagtaacagtacttgggatcccccagttccaaagtgtcttaaagggagaggcggcgagacaattcgttctatct

SEQ ID NO: 732446 - DNA, 101 bp, Homo sapiens
attgatctggtcagcagtgatgatgaagagcctagcacctcttatactgatggtgcatgtagtctttggactggttatttctggttttgaagtaatcgaac

SEQ ID NO: 732447 - DNA, 82 bp, Homo sapiens
cagaaaaatggtggtgatggcgcgactctcgcggcccgagcggccggaccttgtcttcgacagagcgggatgccaccagctt

SEQ ID NO: 732448 - DNA, 90 bp, Homo sapiens
tggggaggccaaagagacacagcccatttttttagggtttgtgtttagtgaatcagagggatctgcattagaacagtttgaaggtggccc

SEQ ID NO: 732449 - DNA, 75 bp, Homo sapiens
agatgtggcagaagaacaagaagttgagaccgagaatgtggaaacagaattagaagtgcgtctcaccaaccagcc

SEQ ID NO: 732450 - DNA, 50 bp, Homo sapiens
gggcagcgcaccggcaggcggggcggcaccttcctacttctgcccagcca

SEQ ID NO: 732451 - DNA, 90 bp, Homo sapiens
cttatcagcagatcaaaggataaacttgaccaggtttccagtgaaataaactataatgtaactgcaaactccaagctggtcattatcacg

SEQ ID NO: 732452 - DNA, 100 bp, Homo sapiens
aatcagtgcttcggggcacttagcacagcgcctggcgcaagtgccctgcaggagtcattaaatcaaaacttcatgctgatcatcacccaccgagaagtcc

SEQ ID NO: 732453 - DNA, 75 bp, Homo sapiens
caaactctcacgctcacaccgggtcatctgattttttcggctttgtgagaaaccttaccatcaaacacgatggcc

SEQ ID NO: 732454 - DNA, 104 bp, Homo sapiens
ctgaaaacatttttgaaaagacaagccatcaaaactgccttcagaagcaaaagaatctctttggcagtaacagtcttgatggaggaagcagccctatgatcaag

SEQ ID NO: 732455 - DNA, 87 bp, Homo sapiens
aattcaacaacttcaagaaaagaatttgcatgctgtagtacaaactccaggttcatcgggattaggcagccctcttggccgaagtcg

SEQ ID NO: 732456 - DNA, 83 bp, Homo sapiens
gctatacctaaaacgtaatggtattaagaattctggacgtggtgggtcctctggtgcgaaattccggatttccttgggtcttc

SEQ ID NO: 732457 - DNA, 83 bp, Homo sapiens
agaaccatgctcaccgaccctacaatgcagatcttcgtgaagactctgactggtaagaccatcaccctcgaggttgagcccag

SEQ ID NO: 732458 - DNA, 100 bp, Homo sapiens
ccggtgcgcttgcgcggcctccagcgacgagagtcccgggaggaggaacagcacagcatgctgggctctggatttaaagctgagcgcttaagagtgaatt

SEQ ID NO: 732459 - DNA, 99 bp, Homo sapiens
ctattctcaggatatgacaggggtaacacccttccagatgatttttgaggaatggaacaaagaggctgcagcaaatgcccaaaagtgggcaaaccagtg

SEQ ID NO: 732460 - DNA, 51 bp, Homo sapiens
aagagtgatgtggttttggataagggctgacaggacaactggatcagtttc

SEQ ID NO: 732461 - DNA, 90 bp, Homo sapiens
ctcctccccagttctactcaagccttattgaagagataggaactcttggttgggataagtttccaatacttatctacaggaatcgccatg

SEQ ID NO: 732462 - DNA, 99 bp, Homo sapiens
cacgacctgcagcgcttccttagcgatttccgtacgtagagaaatcgacactcttaatgaacgtttagctgctgaaggacaagcgattgatggagcaga

SEQ ID NO: 732463 - DNA, 74 bp, Homo sapiens
gctctctaaattgactcagctccagtgtttaactgctgaagagatcttttcccttcatggcttttcaaatgcta

SEQ ID NO: 732464 - DNA, 100 bp, Homo sapiens
aggaacttggttccccctccctcagcttccgccccaaaaggcatgtgggcacattccatgacagtacaggattatcaggatctcatagaccgaggatggc

SEQ ID NO: 732465 - DNA, 82 bp, Homo sapiens
gaacgatgttggactcatagtcactgccagaaagtggttatggccagtgagaatgtgcggtgttgcattgcagaagaagcta

SEQ ID NO: 732466 - DNA, 75 bp, Homo sapiens
cttggagctgccgccgccgggactcccgtcccagcaggtgggaatgatggttagatgctgccgaacatacgaaga

SEQ ID NO: 732467 - DNA, 75 bp, Homo sapiens
catcatgctgcgcggccttcccatcaccatcacagagagcgatggtgatcttgatactgcagcagtaaaagtgga

SEQ ID NO: 732468 - DNA, 100 bp, Homo sapiens
tcatcatcccgtcagagctgaggtacttcgtgaaggtggaggtcctgattgccataagcagcctcacgtctccgctgctgttcacagcctctggatatct

SEQ ID NO: 732469 - DNA, 111 bp, Homo sapiens
ggcagcggcggcggctggactaaacaggtcacctgcagctgtgttggagtagaagaacatcatgctgttgacattgacctgtatcactgtcccaactgtgcagttttacat

SEQ ID NO: 732470 - DNA, 99 bp, Homo sapiens
tgttccgttgcgagctgcagctgcgatctctgtggtaggcccagccaatggagatcttcgtggatgatgagacgaagttgacgctgcatgggttgcagc

SEQ ID NO: 732471 - DNA, 73 bp, Homo sapiens
gtcccagctacttgggaggctgaggtgatctgtgaaaatggttcgctattcacttgacccggagaaccccacg

SEQ ID NO: 732472 - DNA, 100 bp, Homo sapiens
actcggatgccgccgctgtcaactcagaagtcaaaaacctcctttcagatgataactcagaaggccttactttattggatttgttgagcttcacctatca

SEQ ID NO: 732473 - DNA, 100 bp, Homo sapiens
cgggaaaaggagagctcggctgttccagccagggtgaagtattacaacgccgagagttacgaagtggaacgctatcgagaggccatcatcaaatatcagg

SEQ ID NO: 732474 - DNA, 100 bp, Homo sapiens
aagaccccaagttcaaggaactggtcaagactctcagcgttctcatctctcttccttcaccatgaagctgatggacaaattccactcacccaaaatcaag

SEQ ID NO: 732475 - DNA, 51 bp, Homo sapiens
tattgatctgactgaagattttacagcagactatggaaatgatgttagaca

SEQ ID NO: 732476 - DNA, 75 bp, Homo sapiens
caggagagaagcgcggaagaaggcctccgtggaggccagattgaaggctttatcctgtggataaacgcagagtga

SEQ ID NO: 732477 - DNA, 83 bp, Homo sapiens
gggctgctgaggatggagcctccagtcagctcccagcagcagagggctctggggagcaggaggtacttcatcgattccaccaa

SEQ ID NO: 732478 - DNA, 118 bp, Homo sapiens
ctccgggcctcccgccgcttagcctgatgctggaaggacgaagttccagggtctccctccactgctgtagtaacccgggtccggggcctcggtggtgctcctgatgcccctcacccac

SEQ ID NO: 732479 - DNA, 76 bp, Homo sapiens
ccgtcctgcggtaccagccaccccctgagtatggggtaacgaggttgcttagccagacaatgaaggatcatctagt

SEQ ID NO: 732480 - DNA, 128 bp, Homo sapiens
ccctgctatccccaacaagaggaaagacacacctaccaagaagccagtcaagcggccaggacatccggaacacggtgggcaacgtgcccttggagtggtacgatgacttcccccacgtgggctacgac

SEQ ID NO: 732481 - DNA, 100 bp, Homo sapiens
tcatcatcgtcaaagaagaagaaaacaaaggtagaacatggaggatcgtcaggctctaaacaaaattctggtacagagaactacaacttagtacagaaag

SEQ ID NO: 732482 - DNA, 96 bp, Homo sapiens
cgctgctgctgccgctgccgccctgagtcactgcctgcgcagctccggccgcctggctccccatactagtcgccgctccagaacctgggtatcaac

SEQ ID NO: 732483 - DNA, 75 bp, Homo sapiens
gccgagtcactgtcctggtacaaggatgaggagggattgtgggactttaccaaatcggtttgtaataacacctag

SEQ ID NO: 732484 - DNA, 100 bp, Homo sapiens
ctcaagtgatggtttaaggcaaagggaagttcttcggaacctttcttcccctggatgggaaaacatctcaagcagaagaaggaggaggagtcggcgggcg

SEQ ID NO: 732485 - DNA, 82 bp, Homo sapiens
atgaattcccatggaggcttttcttccaaccaggccagaagcggactcctagaagaggggagcagcaaggatggaatgacag

SEQ ID NO: 732486 - DNA, 98 bp, Homo sapiens
ataaagaaggagaaggaaaatggcttctctagatgcctgaggaagtgcaccatggagaggaggaggtggagacttttgcctttcaggcagaaattgcc

SEQ ID NO: 732487 - DNA, 82 bp, Homo sapiens
gtcatcatgggccggcctggaacagcccaagaggagagggtttgaccgcttcggaccagatggcacgggcaggaaacggaag

SEQ ID NO: 732488 - DNA, 100 bp, Homo sapiens
ccagtgcacagcaggcaacgaagctgggaaggaaagctgtgtggtgcgagtaactgtacagtgctaagacatcaagcacacaaagaattttatgcctaca

SEQ ID NO: 732489 - DNA, 100 bp, Homo sapiens
gcctcctgcagcgggcggccccctgcagcctcctgcccaggctccggatgctttcattggatttggaggaaatgtgatcaggcaacaagtcaaggataac

SEQ ID NO: 732490 - DNA, 89 bp, Homo sapiens
cgggcccgctgggcgactgcctgcgggactgggaggatctacagcaggacttccagaacatccagaagcctggaatggtcccccctccg

SEQ ID NO: 732491 - DNA, 75 bp, Homo sapiens
agcttcccccaacttttacagaacatccattgcttagagatccactgtgtgtggagagtaatgcagcatcatgcc

SEQ ID NO: 732492 - DNA, 122 bp, Homo sapiens
ggaagaccgcgcgcagggcctgcagcgggagctggacggcgagcgcgagcggcgcgagaaaccaagacaatgcaaactccagtgaacattcccgtgcctgtgctccggctgccccggggccc

SEQ ID NO: 732493 - DNA, 74 bp, Homo sapiens
ttatacaggctctggaaaaacatgaagcaaaccagtccagctacgggggcccagccagccagcagctgagtggg

SEQ ID NO: 732494 - DNA, 90 bp, Homo sapiens
tattctgctgattcacaattatggagactgtatcctgtctacctttcatgaccaactacagttttcattgcaacgtctgccatcacagtg

SEQ ID NO: 732495 - DNA, 100 bp, Homo sapiens
ctgcagcaagccgcacctggagaagctgaccctgggcatcacgcgcatcctagcacaatcctggaggaagagaaggctcagcaagaagagcgcatgagga

SEQ ID NO: 732496 - DNA, 83 bp, Homo sapiens
cagagctctcagcgccgctcccagccacagcctcccgcgcctcgctcagctccaacatgaatcagcatgattcttcagaggct

SEQ ID NO: 732497 - DNA, 75 bp, Homo sapiens
cagagagacggcagccgctgtacagattcatcaccacggtctacatcatccgggtcacgtggtccagcggctcca

SEQ ID NO: 732498 - DNA, 90 bp, Homo sapiens
accaaggagactgcaggctacctcaggggccgtccccaggacactgtccggatcttccctccctgccgagaccgacccgcccgcccgcgg

SEQ ID NO: 732499 - DNA, 98 bp, Homo sapiens
tccaattggccagagggttgctatctgggatgtttctatttgccacaagatacggaatttttgaacgatgtaaagagttggtagaagcaggatatgat

SEQ ID NO: 732500 - DNA, 98 bp, Homo sapiens
cgtgatccagaagtccagagctgaggactgcctgtttgcaggttttgacaacaattcgttcagggcaccgagcaaacatatttagtgcaaagttctta

SEQ ID NO: 732501 - DNA, 98 bp, Homo sapiens
tcaaggatccttcaaataacttcaggtttgtagaagactatgaacctaccaaagctgacagttatagaaagaaagtggttcttgatggggaagaagtt

SEQ ID NO: 732502 - DNA, 75 bp, Homo sapiens
taaaactgaagatgtgaatactctggactgatcctttgaaatactccagccatgactaaaagagaagcagaggag

SEQ ID NO: 732503 - DNA, 89 bp, Homo sapiens
ggaaagaattggagcaaaaagaggttgattacagcggcctcagggttcaggcaatgcaaataagttctgacacagaccttagagatgag

SEQ ID NO: 732504 - DNA, 100 bp, Homo sapiens
ggctgcgcggctaccgtggccgagctaggactgactgcattgcacagatgatggatatttacgtatgtttgaaacgaccatcctggatggtggacaataa

SEQ ID NO: 732505 - DNA, 100 bp, Homo sapiens
aatgtgtcagccgatgcaccgagtccagcccaggaaaatggagagaacagtccaggctctgcagacagcatcccacctgtcccagcaggctgacctgagg

SEQ ID NO: 732506 - DNA, 75 bp, Homo sapiens
ccgccgcgccgcccggcagcctcggcagatgccttcaattaagttgcagagttctgatggagagatatttgaagt

SEQ ID NO: 732507 - DNA, 100 bp, Homo sapiens
accagctttgacaatacaggaaatgtttactgtggatattcataaggagaaagtggcacgaagagagattggtattttgacaacaaataagaatacatca

SEQ ID NO: 732508 - DNA, 97 bp, Homo sapiens
tttccccggagctgggccgcgaacacctcactattgatggtgtagcgctttaggggaaggcaatactgaacactgcgcagcttgcagaggtctcctg

SEQ ID NO: 732509 - DNA, 83 bp, Homo sapiens
cttcggcagtccacccaccgccgccgcctcccaggagaagatggggagccccgaggatgacctgattgggattccattcccgg

SEQ ID NO: 732510 - DNA, 75 bp, Homo sapiens
ctgccagacaatagagcatatggtccggcttcccatctacacttttcaataaagcatccacatacactgtcctgg

SEQ ID NO: 732511 - DNA, 100 bp, Homo sapiens
acttttaagattccaggacctctgatggctgatttcatcttcaaggtgtcagttgtacccgaggcgttctcagcagcagcaagtacctgtggtggatttc

SEQ ID NO: 732512 - DNA, 82 bp, Homo sapiens
aaaatcaacgacaacttgagcacagcaaagccttctagacaagctcagtggaatctgaagggcccaccccatggaggaatgc

SEQ ID NO: 732513 - DNA, 97 bp, Homo sapiens
tcagttgccacgttcaaacaagcagctttttgaattactttgttatgcagaaagtgaacaggagtacagctgtgtagtaaagatgccttctggtgaa

SEQ ID NO: 732514 - DNA, 83 bp, Homo sapiens
tgagatcagaggccctgtgatgatcgtgtcaggggtcctactgggcaatagacaccaatccgaaggaagatgtgctgcctact

SEQ ID NO: 732515 - DNA, 83 bp, Homo sapiens
atggagtcgagtctagaattcacacagagccacctaggggctggtggcagcagcgtcgtcataggtaatattggtgccctgat

SEQ ID NO: 732516 - DNA, 50 bp, Homo sapiens
ataagtcagatgactttctgtgtttaccgacaagactgtgaaactttcgg

SEQ ID NO: 732517 - DNA, 50 bp, Homo sapiens
cttaaccatgctgttggatttgcaagtgaaacccagggccccaggaaacc

SEQ ID NO: 732518 - DNA, 96 bp, Homo sapiens
gtcggggctgcagccgtcatgccggggatagtggagctgcccactctagaggagctgaaagtagatgaggaatggaagttggatacactttgtgac

SEQ ID NO: 732519 - DNA, 100 bp, Homo sapiens
ccgcgactcgggctgagggagctcgggccaatcagagggacggccccagaatggcatgctcgaggccacagtcatgccctaccttcaggtgttatcagaa

SEQ ID NO: 732520 - DNA, 97 bp, Homo sapiens
aacgacctggtgaagagggcccggctggtgcgaggttttggccaaattgggcgagggcacaaaataaccacttaccccttctcaccgaggaagagcg

SEQ ID NO: 732521 - DNA, 90 bp, Homo sapiens
catggttccagtctatcctcaggcaggacctaaggtcctacttggatgacggtccttcgctacccaccaaacagaacgaggaattccgcc

SEQ ID NO: 732522 - DNA, 96 bp, Homo sapiens
tgggttctgctgtcaatggtgttgtccaaaagctgacttcatgagaccgaggatctcgttcgttgatcgatgctacatattcagcatgttagataa

SEQ ID NO: 732523 - DNA, 75 bp, Homo sapiens
attcacccttgtagagtcattcctgcctttgagcggactcccttttaagtaataatttttcaccatgcatcggaa

SEQ ID NO: 732524 - DNA, 100 bp, Homo sapiens
atcgtcaagaccatcatcactttcattgtctcggacgtgcggggcctgggcctcccggtccgcaagcagaggctgggaggcggcagaatgcagccagagg

SEQ ID NO: 732525 - DNA, 82 bp, Homo sapiens
tagggaaacctgggggctccctggacaactccgagcagggtgagaactctgtctcagtcgacgggaagtgcagtgactccac

SEQ ID NO: 732526 - DNA, 100 bp, Homo sapiens
gcaccgggatcgtgaccgagaccgtgaccgagagcgtgaccgagagcgcgaatatcgtcatcgttagaagatccaacttagaaataatgtttcattcaag

SEQ ID NO: 732527 - DNA, 75 bp, Homo sapiens
gccgctgttttgccggaggagcccctcaggccgactcctcacaaatcccaggccgacacaacagcagagaaaaca

SEQ ID NO: 732528 - DNA, 100 bp, Homo sapiens
cctgggtaacacacgtctgcggtgttacccacgactgcctgggacctggccaagggctccacacaccaagaccaaggtaatcaaatgcaaagcagctgtg

SEQ ID NO: 732529 - DNA, 80 bp, Homo sapiens
cctaccctgactacgggagttgggaggacccgggacaccgcacagccgggaaatgggatcagtgtctttcaatgatgtga

SEQ ID NO: 732530 - DNA, 100 bp, Homo sapiens
cagagtacacgctcctcacagagcgaggcctcccgcgccgcagggagtttgtgatgcaggtgaacggctgggacatgaccatggtcacacacgaccaggc

SEQ ID NO: 732531 - DNA, 50 bp, Homo sapiens
ttacctcgctgaccctatgaagtgattcgcctttgccagtctcatctcgt

SEQ ID NO: 732532 - DNA, 100 bp, Homo sapiens
gcagcccaggtggataaggaacatctcttcccagcggctcagctcctgcaaaatcttccttattctgaaaagatgacagttttgtttgtctacaatggcc

SEQ ID NO: 732533 - DNA, 96 bp, Homo sapiens
agcagttgtatcaagtccagcttgcacagcaacagacaggggcaagtgtccgagtggtgaatcagctacttacagagatggatggtctggaagcac

SEQ ID NO: 732534 - DNA, 82 bp, Homo sapiens
gattctggaactttctatgatcaggcagttgtcagggtaagggactgttctgaagaacctttccatttagtgatcaagatat

SEQ ID NO: 732535 - DNA, 100 bp, Homo sapiens
tgcagatatgaccattaaactatgggattttcagggctttgaatgcatcagaaccatgcacggaatggttccccaaggtgaggccaactttgctccatct

SEQ ID NO: 732536 - DNA, 100 bp, Homo sapiens
ctcagtgtacaaatctggggcaaagctgccattgacaaggcgcctctgtcgaagagccttctgctggtccccagtgccctctccctcctgctcgccctcc

SEQ ID NO: 732537 - DNA, 87 bp, Homo sapiens
ctacttccattccagaaagatggcatcatttttgccctcaaaagaaatggcaggaggtaactgagttctatgttcaaaatgaaaatt

SEQ ID NO: 732538 - DNA, 100 bp, Homo sapiens
cggcgcgccgccgcccggcgccgcgggactgggagaccgggcacagtaaccttggtgcacgaccgaaagggctgtctactctggtgaagagtggtgtccc

SEQ ID NO: 732539 - DNA, 83 bp, Homo sapiens
gaagccgcctctgtattacttaccagatgcctgtgaggagccaccaacatttgaagctatggagctcattggtaaaccaaaac

SEQ ID NO: 732540 - DNA, 100 bp, Homo sapiens
cacgccaacagtacctcattgctctttggcgactcttattggctcaaaaactgcagatccttgctgttacggtcacacccagtttcatctgttacctgac

SEQ ID NO: 732541 - DNA, 75 bp, Homo sapiens
cgcgtccgactgccagggatccctcacgccgcgaggtgctggagaatctggtaaaagcaccattgtgaagcagat

SEQ ID NO: 732542 - DNA, 71 bp, Homo sapiens
cgaccagggacctgcccgcctgcggctgctccgggtcaatttttctgtggaaataaatattgtgataaaaa

SEQ ID NO: 732543 - DNA, 83 bp, Homo sapiens
gtctgcgagccaggattcccggatgatgacctggaagaaggtgaagtgaaggaccccagtgacaggaaggtgaggcctcgtcc

SEQ ID NO: 732544 - DNA, 100 bp, Homo sapiens
ctccgggaagaatgctgccctttacaccgggtccagtgaccataccatccgctgctataatgttaaggttctctacttaaaagacaatgactactgatga

SEQ ID NO: 732545 - DNA, 100 bp, Homo sapiens
ggaggagtccagggagcccagcacagaaatgtgatacctcaaagcacaaagtgctggtagtgtctgtgtgtcctcaatctttgccttattttgctgctaa

SEQ ID NO: 732546 - DNA, 75 bp, Homo sapiens
ccctttccgtttccagggttccgaccagaagccctgtcaatgaagacaatcaagatggtgtcacgcactctgatg

SEQ ID NO: 732547 - DNA, 75 bp, Homo sapiens
ctcgggtggtcctcagggagggcatctgcatctgggaccgacctcctgggctggctgatcaaagaggaagcagca

SEQ ID NO: 732548 - DNA, 90 bp, Homo sapiens
gaaaaataaaacgagaaattcaaaatctaaaactctttcgtcatcctcatattatcaaactagctgacaatttactggttcatcaatgaa

SEQ ID NO: 732549 - DNA, 74 bp, Homo sapiens
ttacacaaattgatgcacaaaataagctggaaaaatctgaggaaggaaaatcacctcggcagtgtttgaaggaa

SEQ ID NO: 732550 - DNA, 88 bp, Homo sapiens
tgtgttggctgcgtgccaggccttggagaacagcacgtccccgctgagtggagccctggtattccttgaacatgcatacctttcccag

SEQ ID NO: 732551 - DNA, 75 bp, Homo sapiens
ctggcgcagcccacgctcatgatcgacttcctcacccgcgcctgcgacctcgtgggtcctggccttcgagatctt

SEQ ID NO: 732552 - DNA, 83 bp, Homo sapiens
cttctccactttcgccagcccgtgccgcgagcgcggcctgcaggagggcagcgaggtcacaggccccacctttgctgatggcg

SEQ ID NO: 732553 - DNA, 90 bp, Homo sapiens
gacggtggaggttcgcggctctaacggggctttctacaaggcatccaggctggagaagcagaacagcacacctgagagtgactacgacaa

SEQ ID NO: 732554 - DNA, 80 bp, Homo sapiens
ctcggggcgggcgccgcgggacctctccgggccatggaaagttcaggagccctggaaaggagaaggaataagacggcagg

SEQ ID NO: 732555 - DNA, 75 bp, Homo sapiens
accaagggctaccaggagaccatctcagctgagatgagtgaactgagtgtggcacagaaaccagaaaaacttttg

SEQ ID NO: 732556 - DNA, 75 bp, Homo sapiens
taccttctggaagctactactacgtggtgcttggaaagacaaatttacatgtattggagaccagaccagaagccc

SEQ ID NO: 732557 - DNA, 75 bp, Homo sapiens
ataggaggaaaattcatcatctggaatccagacgctctgcagtgtcccatcgtcttatgcggatggcggggaaag

SEQ ID NO: 732558 - DNA, 99 bp, Homo sapiens
cccagaattttccagtgccctgaaaaatagtgaggcaggcgactaatcagattgtgatgaattgtgctgatattgatattattacagcttcatatgcac

SEQ ID NO: 732559 - DNA, 75 bp, Homo sapiens
tatgaagagcggatgaggatacagaaggctggaggaaacgtcagtaatctatgccagcaattatgacaatgttag

SEQ ID NO: 732560 - DNA, 95 bp, Homo sapiens
cgtcatcagagaattcatactgttccagaagaaggcttcttattgggatgtgtgtttgcaattgcggattatccagagcagatgtctgataagca

SEQ ID NO: 732561 - DNA, 100 bp, Homo sapiens
cggcggtgcgcggggcgttgggtcagcgggtctgggactggtggcaccggcggcggcgtaggacggaggcgtcgctaggacattgccgagaatggctgcg

SEQ ID NO: 732562 - DNA, 98 bp, Homo sapiens
tttgaattgcagccacaagagccaaactcattttttgatggaataggcaatttgtgtatggtgattggtggagccaacctcggtcgtgttggtgtgat

SEQ ID NO: 732563 - DNA, 100 bp, Homo sapiens
gtcgccagggtcattgtcgtggatttgcacagtcggctgggcggtgcaatggcgatacccagaaataatcgcttaatgtatattcatagctaccaaagct

SEQ ID NO: 732564 - DNA, 114 bp, Homo sapiens
gactggcaggagcagattccaaaggcacaggaagaagcttgcagatctgagtgggacatacttttgaaggatgtgcaatgttcaatcataagtgtgacaaaaactgacaagcag

SEQ ID NO: 732565 - DNA, 82 bp, Homo sapiens
gcagctgtcgccgccgctctcagatcatcaatgctgtggtactgttgattttattgagtgccctggctgatccggatcagta

SEQ ID NO: 732566 - DNA, 97 bp, Homo sapiens
aaacgttttgagcttcaacatggcctcgctgtgatatgtatgacagtgatcagcagctggactgtgccttggacctaatgaggcgcctgcctcccca

SEQ ID NO: 732567 - DNA, 96 bp, Homo sapiens
ctttgccgaatgaaaggagtcaacagctatcccagcctcttcatttttcggtctggaatggttttactgcaatcacagcaaccaaccccatttggc

SEQ ID NO: 732568 - DNA, 90 bp, Homo sapiens
ctggaggttgactggcagcagcgcaccatccactccagaaccaggcccagtcctatgcggagagactgcgtctgggtttggccgtcattc

SEQ ID NO: 732569 - DNA, 101 bp, Homo sapiens
attgtccatattcagattggccagtgtggcaaccagatcggagccaagtgatgatctaaccacaacagggactgataactgcactttcaacacctgccaga

SEQ ID NO: 732570 - DNA, 82 bp, Homo sapiens
cgcatcaaggactatcacagttacatgctacaggggccattaagtttaatgatggcctgagcttacaggaaagttgccgcct

SEQ ID NO: 732571 - DNA, 75 bp, Homo sapiens
tgggcgcttagcctggctcacgcacgccaccctggagaaatgtgccacgtgctcccagcccatcctggaccggat

SEQ ID NO: 732572 - DNA, 100 bp, Homo sapiens
gccaaagcgagggagcattggagaaaatcaggtagggaagacatatgagctactcaactgtgacaagcacaagtctatattgttgaagaatggacgggac

SEQ ID NO: 732573 - DNA, 74 bp, Homo sapiens
cgaggcagctgtactaggactgggaacgggttaatgaactttctgaggaagaagaggaagatgaaaagctggaa

SEQ ID NO: 732574 - DNA, 87 bp, Homo sapiens
gtgagcctggactcgccctcctatgtcctgtacagtgagctgaagagacgcctgaaagctgagaagaaagtagcagagaaggaggcc

SEQ ID NO: 732575 - DNA, 100 bp, Homo sapiens
gtctcttacgtctgcggaagtgcagctgcctcagttcttagcgcagactggttgaaatagcagaatcccgttttcccagatattttaacactgaagaaaa

SEQ ID NO: 732576 - DNA, 100 bp, Homo sapiens
ctacagaacagcacgtaccagaggtggaagtccaagtcaaacgcagaaggactgcctcactgagcaaccaagagatcatggggttgacagcagcattttc

SEQ ID NO: 732577 - DNA, 100 bp, Homo sapiens
caaaaatccagaagtacaagcagtctgtggatgaggatcgcagtacggaacctgaccgattgcaggtgtttcacaagagagccatcatgccttacggtgt

SEQ ID NO: 732578 - DNA, 74 bp, Homo sapiens
cattctgcaagcaggcaacctgaatacaggttttcttccacccctgagatggcaagaccagccccttgtcttcc

SEQ ID NO: 732579 - DNA, 73 bp, Homo sapiens
aatctgagcaatatggaatattttgtgccacacacaaaaagaggaaccgctgctgctggccgaactcaagccc

SEQ ID NO: 732580 - DNA, 88 bp, Homo sapiens
gctggtggagcgctccacgctcaaagacagccagctaaaggtgtggatgagcaaatacggctggagtgccgacgagtcggggcagatc

SEQ ID NO: 732581 - DNA, 75 bp, Homo sapiens
tcctcgtggaatttgaagattctacagataaatcagcaagagtgagccatggagctacgtgtggggaacaagtac

SEQ ID NO: 732582 - DNA, 75 bp, Homo sapiens
acagcacagttcctgggaaggtggagccaccagcctctccctggccacggaaaggtatgatatatttgatccaag

SEQ ID NO: 732583 - DNA, 88 bp, Homo sapiens
taaagactaatcctgacatgttgttagcagtttttgaaggaatctggggtattggtgttgcaactcagaaggttaacttgaatcagat

SEQ ID NO: 732584 - DNA, 96 bp, Homo sapiens
tctcaaggcggattaattagcccaagaaacattatattcatgcctggcagctgcgattcagccacctcgtggggtatggtgctagatattactctt

SEQ ID NO: 732585 - DNA, 75 bp, Homo sapiens
ccctgaagtcggtgtctgctgcgttcacggcaggattcggttagatgccatggacaatattaccaggcagaacca

SEQ ID NO: 732586 - DNA, 75 bp, Homo sapiens
tcactttcaaaccactttcagtaacagtttggaaattttagcattcaggtgccaggaatgcagatgggacagcca

SEQ ID NO: 732587 - DNA, 98 bp, Homo sapiens
ttctttccagtgctaaaggatctctgatctggccttcctatctgctggcctcggcatacttgcaccctcagagacctaccccctacctacaaccagct

SEQ ID NO: 732588 - DNA, 100 bp, Homo sapiens
cggtggtgtgtttgctgtctccagcagccatggcaatgacaggctcaacaccttgctcatccatgagtaaccacacaaaggaaagggtgacaatgaccaa

SEQ ID NO: 732589 - DNA, 98 bp, Homo sapiens
cacccgcctccgggcatcttcaactcaaagttaaacctcctccacaaatttcacccagcaaatcgatgggcggagaattttgtgtggctgctatcttc

SEQ ID NO: 732590 - DNA, 100 bp, Homo sapiens
agagcctcagcaggagcctgttctcatcaccatggcaacaggctttgagcataagatcacagtccaggcctctccaactctggataagcggaaaggatcc

SEQ ID NO: 732591 - DNA, 83 bp, Homo sapiens
caagatccagtcatctgggggcccactgcagattgcagagggaatggcatacatcgagcggaagaactacattcaccgggacc

SEQ ID NO: 732592 - DNA, 80 bp, Homo sapiens
ccgtgccctccgacagccaggcccgcgagaagagcaggccgggctctcgccatgggtcactgtcgcctctgccacgggaa

SEQ ID NO: 732593 - DNA, 126 bp, Homo sapiens
ggaccacaggcttccagtacgagctggttaggaggcacagggcgtcggacctgcacgagctgtctgaaatggtggagtcaatgaagaaagtagcagggatggatgtggagctgacagttgaagaaa

SEQ ID NO: 732594 - DNA, 75 bp, Homo sapiens
tgcacgcactaactccacaggtgttaaaggttaatttggagtggcccctggagtcagtttcctacaccatccgag

SEQ ID NO: 732595 - DNA, 82 bp, Homo sapiens
agagtttgtggaagtcatttctttacccaagaatgacctgctgcagagacttgatgggttgagttccagaataaattctaca

SEQ ID NO: 732596 - DNA, 80 bp, Homo sapiens
cagatgaagcatttacctatctagactgggaccattggtgatgagaaggcaaacatgttcagaagtcaagtaactggaaa

SEQ ID NO: 732597 - DNA, 50 bp, Homo sapiens
ccatcgttgctgccttcttcgtcaaggaattactgaaccttcaacatgcc

SEQ ID NO: 732598 - DNA, 100 bp, Homo sapiens
agtttggattggagtccagataaaaggggtctctgcgtctgtagttcatttgaccaaacgtctcttcaagaaaatgaggaggaggagattgggaacctag

SEQ ID NO: 732599 - DNA, 101 bp, Homo sapiens
cggaaaactcccaacttcctgatggactagaggcttttaccagatttcttaaaactgaattcagtgaagaaaatattgaattttggatagcctgtgaagat

SEQ ID NO: 732600 - DNA, 101 bp, Homo sapiens
tcaaccttgtgggatgtgaaaactctgttactgaaggtgaaaggaaagcaagccaggatggatatttacgacactcaaaccttgggggttgtggtctttgg

SEQ ID NO: 732601 - DNA, 96 bp, Homo sapiens
ctgtaacttacgtgtactttaccaacgagctgaagcaggttttgtggtctttgcaacccttgtggtcattgtggccttgatattaatcttcgtggt

SEQ ID NO: 732602 - DNA, 98 bp, Homo sapiens
agagaaaaccagttaaaaatgttgcctaatgtaaagaaagaatgaggcctgttaaagcagctttgaaacaacttgataggcctgagaaaggcctttca

SEQ ID NO: 732603 - DNA, 100 bp, Homo sapiens
agcgccggaacgccgaggcccaggatgaaaatttacaggaattcggaggaaaatatttcagtggtcattactaaaacgctcagagtcagatacattcagc

SEQ ID NO: 732604 - DNA, 51 bp, Homo sapiens
accgggatcggttgccttgagcctggtcacggagctgctggacgtctccat

SEQ ID NO: 732605 - DNA, 50 bp, Homo sapiens
ctctgattgcccccctccaaacacgaggagggtgaggacaaaatcttctt

SEQ ID NO: 732606 - DNA, 90 bp, Homo sapiens
attttgcagagcatcccccaaagacagattgaagaaatgcagagacaggtggttcccctctctcagcgaagtggtgttcttgaatggtgc

SEQ ID NO: 732607 - DNA, 100 bp, Homo sapiens
tgaggagtaagcggcgcggtagcgaaggccgccgaacctgcctggctagccggcgacttgagtgacgaggggggctgtcggggggctgttaggtgcctgg

SEQ ID NO: 732608 - DNA, 98 bp, Homo sapiens
gtgttgtgccagcctacaggaggaaaggccagactcacagaagcaaaatttaccgagtttccgcggaacgtgacggcgaccgaggggcagaatgtgga

SEQ ID NO: 732609 - DNA, 88 bp, Homo sapiens
tttctggacaaacctcagccctaacggtggtggagaacccaaagggccaaaagagaaacattggctactttgacaaccttaaagcgga

SEQ ID NO: 732610 - DNA, 78 bp, Homo sapiens
ttctactgtaaagtcaccaacgagatcttccgccactacgatgatgtcttggcattgcccattttcaagcaggaagat

SEQ ID NO: 732611 - DNA, 49 bp, Homo sapiens
agaccactggattagcagaccctgctttttcctgaaaccaagtacctct

SEQ ID NO: 732612 - DNA, 50 bp, Homo sapiens
ccgatttcatgactaaccagtatgttgcttgttggagagatggtggtaag

SEQ ID NO: 732613 - DNA, 90 bp, Homo sapiens
ccggcatcccaagccgcctcccgccgccccggcccggcgcgcagaaagatgtagcacttaagcctcaggaacgtgtggagaaacgccaga

SEQ ID NO: 732614 - DNA, 50 bp, Homo sapiens
atcttgaaaagctgccagaaaggaatggtctgccgaaaaccgaccgaccc

SEQ ID NO: 732615 - DNA, 82 bp, Homo sapiens
gagtctccgcgtcccgctcgctgggagagagggcgtgatggtgggcatgggtcagaaggattcctatgtgggcgacgaggcc

SEQ ID NO: 732616 - DNA, 50 bp, Homo sapiens
ttgtcacaggggatgatattcagacacagatccaaaatacggagctggca

SEQ ID NO: 732617 - DNA, 100 bp, Homo sapiens
ccgcggggctgtccaggcacgcgaggcccctcagctagcattggatatgtggaggaaattgatggttgaaccacttcaggccatccttatccgaatgctg

SEQ ID NO: 732618 - DNA, 82 bp, Homo sapiens
tggaggagtccaactcagaggacgaggcctccttcaagtccgagggtcccgacggcctacacatggggcgctgtgggcgccg

SEQ ID NO: 732619 - DNA, 75 bp, Homo sapiens
tctctcacaacctcagccagctctacttcacagcaggattcatcacaggttgaaaacgacatatctgctttcacc

SEQ ID NO: 732620 - DNA, 88 bp, Homo sapiens
ggaactgatggcgttcctgttacctctcatcattgtgttaatggtgaagcacagcgattcccgagccatgtggctagaaatcctcctc

SEQ ID NO: 732621 - DNA, 98 bp, Homo sapiens
ggagagcagtacttagagttatataaaccacttcccagagcaggaatttataagtatttgaccgtactcaaaatgtgcaaggaagaataatggaagcc

SEQ ID NO: 732622 - DNA, 90 bp, Homo sapiens
tgataaaatacttatcagtatcttatatgttagcttgacctatgcagatcttattccagggggcagaccgggccgttccagtgctgatca

SEQ ID NO: 732623 - DNA, 87 bp, Homo sapiens
gacagggtctacaagaacgagtgcgccttctcctacgactctcccctgttttcactcattagctcctgaggtaaacaaattgaaaaa

SEQ ID NO: 732624 - DNA, 75 bp, Homo sapiens
gccatcgttgctgccttcttcgtcaaggtggccaccgagtactaaattcacttgggaataaaagaaaaacataag

SEQ ID NO: 732625 - DNA, 100 bp, Homo sapiens
ttcctttccaattccgtccagaaaatgaggaagacatcctggttgttaccactcagattaaatgccttaatggataaagaaaaattggatgttaagattg

SEQ ID NO: 732626 - DNA, 49 bp, Homo sapiens
caagggaccaaggtggaaatcaaacttaataaaggtatccatggagaac

SEQ ID NO: 732627 - DNA, 100 bp, Homo sapiens
actgacaggtgaccgatgtacaggactttcctctaaaatgcaagatacaatggaggagaacagtgagaggatagcattgaagctgaacttacaagaagag

SEQ ID NO: 732628 - DNA, 75 bp, Homo sapiens
acagtatctcacctccctaaactggttaatagtggcatggaagatccatttggttgtgcattatgtgtgactctt

SEQ ID NO: 732629 - DNA, 82 bp, Homo sapiens
gcagacatcttcagccgctgccagaaaaccgtgaggacatactgaatgccggtgacaaattaacagaggtccttgaagaggc

SEQ ID NO: 732630 - DNA, 101 bp, Homo sapiens
ttcaacgctctgctgcccgctgtgagggaaaagggtcccagggctggtggttgctttgggtctacagctacgtcttacccgcctcctgcctcaacagcctg

SEQ ID NO: 732631 - DNA, 100 bp, Homo sapiens
cttatttcactctggtcacgcccgagctctgatgcaagcgaagaaccttttccctaatacgtacctcattgtgggagattgtcttcaaatttacagcacc

SEQ ID NO: 732632 - DNA, 86 bp, Homo sapiens
tctggtgtcctgaacctggaagttgtgctttttaaggggaggacgaggaagaaacgaacgtgatagttctcagctacccccagtac

SEQ ID NO: 732633 - DNA, 100 bp, Homo sapiens
aacagcagtcaatgtccgaaacatccttcatctggactgggcagcctttggggtcatgacccttccctccatcggcatccccctgctattgtggtactcc

SEQ ID NO: 732634 - DNA, 98 bp, Homo sapiens
agacaacaggatcgtctcgtccaagagccatccaaaactctgtttgtcaaaggcctgtctgaggataccactgaagagacattaaaggagtcatttga

SEQ ID NO: 732635 - DNA, 98 bp, Homo sapiens
cagcctgcacggatggtcttgaaacacaaatggtttttggccaaatttgagtttcatcatggtgactatgaaaaacagtttctgcatgtactgagccg

SEQ ID NO: 732636 - DNA, 73 bp, Homo sapiens
tcctatgtcccctattatctcccctgcccagagatcttaaatgattctggggaccattctgaccacatgcatt

SEQ ID NO: 732637 - DNA, 100 bp, Homo sapiens
tgatgggtcgaggcggacgcgcggctgcgtcagattcaagtcaatctgaaagtcccagccagccaagtgacgctgacattaaggaccagccagaaaatgg

SEQ ID NO: 732638 - DNA, 83 bp, Homo sapiens
acggcccgagacacaccaggccggcaggctgagaaaagcgagaccgcgtgcgaggaccgggccaattcctgtccccccagcag

SEQ ID NO: 732639 - DNA, 75 bp, Homo sapiens
atttggagtgtgcgtgcgcgccgagcgatggcccactgcgtgaccttggttcagctgtccatttcctgtgaccat

SEQ ID NO: 732640 - DNA, 82 bp, Homo sapiens
aaaaagttcagtgggaagcatgtcgtctttatcgctcagattacaggctgtgccagccctggaaaaacagttacaattgttg

SEQ ID NO: 732641 - DNA, 100 bp, Homo sapiens
gcgggagggcctggactgggacctcatacttgatcctgctccctcggtgtctgcattgactcctcatgctgggactggacccgtcaacccccctgctcgc

SEQ ID NO: 732642 - DNA, 75 bp, Homo sapiens
ctgcgtggcctctacacaaccgccaaggccgatgcagaggctgagtgcaagtctctggacactatgggcacacga

SEQ ID NO: 732643 - DNA, 100 bp, Homo sapiens
ccgtacctcgcagaggccaggatctcctttaacctgggggcagattcgcttcaagctcagcttatcaatatgggtgttattcctaccttagtgaaattac

SEQ ID NO: 732644 - DNA, 50 bp, Homo sapiens
cgacgaggaagaggaggtttctgaggctgcctgctgtttcccggggagat

SEQ ID NO: 732645 - DNA, 92 bp, Homo sapiens
gagattcttaaccgctgacacaattaaacactgcagtgggaagtgccagacacagcttcagaatgtgactccttaaattcttccattggaag

SEQ ID NO: 732646 - DNA, 74 bp, Homo sapiens
ggccaggacgcccccgagggtgtagaccgcgcccctggagtgctcatcatcactgtaggggacctttgaaagag

SEQ ID NO: 732647 - DNA, 82 bp, Homo sapiens
tttctgaaatgattctccagaatttctcctcataaaaaagacctgaaagatgtctgaaaattccagtgacagtgattcatct

SEQ ID NO: 732648 - DNA, 50 bp, Homo sapiens
gctttggttaaacgaatcaaagaggacaatgaaggccaaacagctctaca

SEQ ID NO: 732649 - DNA, 83 bp, Homo sapiens
ggaatttgtggctggctggatctctgagaatggatcttggagaatgtctgaaagtccatgacctggctttaagagcggattat

SEQ ID NO: 732650 - DNA, 98 bp, Homo sapiens
accgccatcactatgagagctttcaagatgatgaaggcgctagtatgctcatccttcttgataatgccaaaaggagcagctgatgagccagatccggg

SEQ ID NO: 732651 - DNA, 76 bp, Homo sapiens
cgcggccgactcgcaagatggcgccgacgaagttatacggaagcgtctcctcattgatggagatggtgctggagat

SEQ ID NO: 732652 - DNA, 50 bp, Homo sapiens
cgcaggatgaacctgaagggcatccagatacttttctgctgtgagaatgt

SEQ ID NO: 732653 - DNA, 75 bp, Homo sapiens
gttaaagtctctcttcaccctgccgtcatgtctaagtcagagtaatagctcttcaagtctgcaataaaaaatggc

SEQ ID NO: 732654 - DNA, 100 bp, Homo sapiens
tcttagggctcaagacagggccctgtattttagtgacagctcatctcagctgaacaccagtctaccattccttcaaaatatcagttttagagaatgtggc

SEQ ID NO: 732655 - DNA, 102 bp, Homo sapiens
ctcggagatccgaggagccatcggcagttcccaggagtaagaacctgagagcgtgtgagatatgagccgcacagcctacacggtgggagccctgcttctcct

SEQ ID NO: 732656 - DNA, 101 bp, Homo sapiens
acctcaaaatatgatggtggttggacagtcagcatttgcagactttggaagagaatggagactacacatatgtggaaagagtgaagatacccttggatcat

SEQ ID NO: 732657 - DNA, 51 bp, Homo sapiens
tgcggctgctcttctacgatgaggaatcgggattaaaagttaaccagccag

SEQ ID NO: 732658 - DNA, 100 bp, Homo sapiens
cctgcttgaccttccctgtgtacctccacccccaggtgtgggcccatcgctggatggatctgtcagaacacggctttgggctggccctgctcaacgactg

SEQ ID NO: 732659 - DNA, 100 bp, Homo sapiens
ggaaagactgttccaaaaacagtggataattttgtggccttagctacaggagagttttttgctccactcaagcctgttagaatcaccatggaatacagct

SEQ ID NO: 732660 - DNA, 89 bp, Homo sapiens
cctcaaactcccaggctcaagcaatcctaccatgtcagccttcccagtagctggaactacagttttttacaggagtgggacaacgctgg

SEQ ID NO: 732661 - DNA, 98 bp, Homo sapiens
ccgacccccaggcagctcgccgctccctagcaccttctccagtcgacactctcgcgcccggagattacacacactccgcctgcaggaatacttatcag

SEQ ID NO: 732662 - DNA, 98 bp, Homo sapiens
cacaatcaggaagaaacatctccaaagacccatctttagattttgtggaagtataatactttgtcattatgagatgtcgtctctcggtgcctcctttg

SEQ ID NO: 732663 - DNA, 100 bp, Homo sapiens
aaggaggccgagccgggatctcaggtcctcgggggcggcggccacgccaaggacgggtgaaaggaaagcaagccaggatggatatttacgacactcaaac

SEQ ID NO: 732664 - DNA, 75 bp, Homo sapiens
agacgtgggcgccctccccgccaaggcccgtgcgaggtcttatcgaatgttacttagcctccaacagtattcgag

SEQ ID NO: 732665 - DNA, 75 bp, Homo sapiens
aactatctgaatcccagtagtggacagtggggtcaacgttaaagtattgcacaatcagctggtccttttccacaa

SEQ ID NO: 732666 - DNA, 100 bp, Homo sapiens
gagggatccaaacatcgaggctctgaatggcaactgctctgacactgagggtgataaaagaaaatgtggctgaagttacccgaagttcagcttgcagtgt

SEQ ID NO: 732667 - DNA, 98 bp, Homo sapiens
ggatctggacacccagcggtctgacatcgcgacgctgctcaaaacctcgctccggaaaggggacacctggttaaagatcgaggtccggaagccactag

SEQ ID NO: 732668 - DNA, 90 bp, Homo sapiens
caggacctcccaggatctcccaagtcgggaccaccaccagaacagttgactatagtcaatggggccaatggagccaagtgtatggaaacc

SEQ ID NO: 732669 - DNA, 74 bp, Homo sapiens
caagtgggatgtttcaacaaccaaagctcgagtgctgagagtgagggaacatcctgtttatggaccatatgttg

SEQ ID NO: 732670 - DNA, 96 bp, Homo sapiens
aagaatttgacagcagtgaagtcaggaggcacttctgatagctttgtgaagggagatgtttgggatttcaatcacaagtgtgaggatattggacat

SEQ ID NO: 732671 - DNA, 75 bp, Homo sapiens
aagatgagatttacctgtgagatgtttcatcccaacatttgacggtgagaacatgtatatgagcatgacagagcc

SEQ ID NO: 732672 - DNA, 82 bp, Homo sapiens
cgccggcacgcgaagtggccgcatccgcaaggaagcggggagaggtggtgagagatgacccctgttgaggatttcattggtg

SEQ ID NO: 732673 - DNA, 100 bp, Homo sapiens
atggaaaaagttctgggtgatactgaaggggtcgtcactgtactggtatagcaatcaaatggtcctcgatgggcttcctggaatattggtgtgtttattt

SEQ ID NO: 732674 - DNA, 74 bp, Homo sapiens
agcatggcaagcccatgttcacccaggggctgtgctcttggatctggaccagcagaccctgcccggagtggccc

SEQ ID NO: 732675 - DNA, 75 bp, Homo sapiens
gttgctcacagctatggaggacttgcttttgttgaactgatggaagatggtaccccaaagcatatcatccagatg

SEQ ID NO: 732676 - DNA, 75 bp, Homo sapiens
atcttacagaatcagaggtgcagccgcaagaaaggtctaggagctctacggtgactttgaagacttggaaacagg

SEQ ID NO: 732677 - DNA, 80 bp, Homo sapiens
ctggtcgagccggaggaagccaccaggaaggatatggagtaatagtactaaatcccaatgaaaactatattgaagtagaa

SEQ ID NO: 732678 - DNA, 50 bp, Homo sapiens
cataaaacagttctcactgaactacagttcctgcggatggtggatgcctg

SEQ ID NO: 732679 - DNA, 75 bp, Homo sapiens
cctggtcctggccccggagctgttgctggacccctggcaggttgttgactgtggccctcctgatgatctacccag

SEQ ID NO: 732680 - DNA, 75 bp, Homo sapiens
caacaggttacctcgagctgaagtgagcaggtacaagaatattccacagatgtcctttgatgatacagaaaggga

SEQ ID NO: 732681 - DNA, 83 bp, Homo sapiens
gccgctcaccccgcggccgcaccttcccgccttctcagggcccttaagtgagaagcaggaggctttgatgaccaagagccccg

SEQ ID NO: 732682 - DNA, 75 bp, Homo sapiens
agaacacagttggagaaaatcggcagctgagacggccttggccggagtgagctgagtcgacagaaacttcatacc

SEQ ID NO: 732683 - DNA, 100 bp, Homo sapiens
tcgacctgctaacagaactggaccttttcggtgccaggatggtgggagaactccgctacagggaattcagggtgcccctggggcccggcttacatgccta

SEQ ID NO: 732684 - DNA, 103 bp, Homo sapiens
gcaaaatgctagggcagatgactgatcaagtggctgacctccgtgccaggcgattgaccgaggcctggcttttgaacttgtctatagccctgctatcaaagac

SEQ ID NO: 732685 - DNA, 95 bp, Homo sapiens
cactgacgccgggaccgggaccgccgccgccgccgccaccatggttagctttatacgtctacgaatatttactgcacgtaggagcacagaaatct

SEQ ID NO: 732686 - DNA, 100 bp, Homo sapiens
ggatgctcaaagggtttttcgggaaaaagcacctgacttccttcctcttctgaacaaaggcctcaggggagcaatggcatttgcgttggccatccgtgac

SEQ ID NO: 732687 - DNA, 90 bp, Homo sapiens
ctgagtggttgtgtggtcgcgtctcggaaaccggtagcgcttgcagcatgggaccgacgtcatggttcggtgcctcaagctgctgaagga

SEQ ID NO: 732688 - DNA, 50 bp, Homo sapiens
acggcttcatcagcaccttggggtggtgaatcccaaaaagaaaggaaaaa

SEQ ID NO: 732689 - DNA, 100 bp, Homo sapiens
gaggacactgaaattcagagaggggaagtgatttgcctcagcttgtactgtttagctgacagatttgaagaatatcctaaactgagggagctcatcaggc

SEQ ID NO: 732690 - DNA, 90 bp, Homo sapiens
agccagcacagctcaggccagttcgtcggctgccagcaacaatcaccagtgaggaagggaaactgtctacctctcaagatgctgcttgta

SEQ ID NO: 732691 - DNA, 75 bp, Homo sapiens
ctggattcgtggcgccacaagctcattcactgtgtaggttaattatagaaaatgccaagtaggaaatttgccgat

SEQ ID NO: 732692 - DNA, 80 bp, Homo sapiens
aattagaactgcagaggttcctctacagcaagaatctatgtactttcatcagcgcggccagtaagtttgcacagctccag

SEQ ID NO: 732693 - DNA, 100 bp, Homo sapiens
tcagtcctgggggcctctccaatgggagccgtgaggaatgctactggggccacgtcttctgggaccaggtgctgcaggtgaatagtttgatccagactca

SEQ ID NO: 732694 - DNA, 100 bp, Homo sapiens
gttcttttgtccccgggtagagcctgtcctgggggaacagagaggccctgcggtggctacgggcagtgtgaaggagaagggacacgagggggcagcgggc

SEQ ID NO: 732695 - DNA, 58 bp, Homo sapiens
ctggatgctccactgtgcttgccaagggactctcgggcccggccaccttatactgttg

SEQ ID NO: 732696 - DNA, 100 bp, Homo sapiens
gtttgattacatggattgtgagctgaagctttctgaatcagagcaacttatgactctcatctctgctgcacgagaatatgagatagagttcatctatgcg

SEQ ID NO: 732697 - DNA, 100 bp, Homo sapiens
gtatgtgcgcttcccagggatcttgagagtgaagatctcgaaggatttcataggtgtgatgaatgcagactctgctaccattttggctgtttggatcctc

SEQ ID NO: 732698 - DNA, 124 bp, Homo sapiens
tgagcggcggcagaggctacggggctcggtttggctgactggggagtcggcaggcggcagatctgtgctgttctggctgctgtcactgaggtgattcgctcccagggagggaaggagacggaga

SEQ ID NO: 732699 - DNA, 75 bp, Homo sapiens
catcactttgccgatttatacaaaggagcataaggagaattattttttactcccttataaagcccagtatcaatg

SEQ ID NO: 732700 - DNA, 100 bp, Homo sapiens
tggtaggctatgaccacgagaagccaggaagcgctatagaaatgaagggagtcccagccctagacagtccccgaagcgccggcgtgaacattctccggac

SEQ ID NO: 732701 - DNA, 110 bp, Homo sapiens
attgaggctggatgctgcgatcccgcagcaatttgagaactggcgagagaaccagccggacaatttcttcgcgggtggcgaggactgtgtggtgatggtggcgcatgaaa

SEQ ID NO: 732702 - DNA, 100 bp, Homo sapiens
cctccggccagggccgggagccgggccggcctagccagttgatattcactgatggactccaaagaatcattaactcctggtagagaagaaaaccccagca

SEQ ID NO: 732703 - DNA, 90 bp, Homo sapiens
gtcaacgttccactctgtgttgatatgtgtctcaattggttgctcaatgtctatgacacgaccctgatgctcccataagacagaaaatgc

SEQ ID NO: 732704 - DNA, 100 bp, Homo sapiens
gttccggaaccatttgaaggaacagcatcctgacatcgaaaacccggacctcgcttacctgcatgctgctattattcatggactatccagtctaacagct

SEQ ID NO: 732705 - DNA, 114 bp, Homo sapiens
cgggagggagggcgggcggcgcgagtgggcgcgggcccggtgggccagactgtgccctgtccacggtgcctcctgcatgtcctgctgccctgagctgtcccgagctaggtgaca

SEQ ID NO: 732706 - DNA, 100 bp, Homo sapiens
aataccagcacccccaccgtcagcagctacagccctccacaggtgacaacatccgggaattcttgctgagcctcagatactttcgaatcttcatcgccct

SEQ ID NO: 732707 - DNA, 83 bp, Homo sapiens
gggcccccggccgaaatgacagtgctggcgccagcctggagcccaacagccctgggaggagcggggacactgaggacctctct

SEQ ID NO: 732708 - DNA, 50 bp, Homo sapiens
aatcaatgctgtccaaacttaaacatgataaatcaagggagagatctcag

SEQ ID NO: 732709 - DNA, 75 bp, Homo sapiens
cagcactgtggataacacctctgtttttggcagggtgatgcagatagaacatgaaaggctcccggagcagcgctg

SEQ ID NO: 732710 - DNA, 51 bp, Homo sapiens
aggtctggagctcgaccgggccaggcctttgaagacctcagcaaactaatg

SEQ ID NO: 732711 - DNA, 96 bp, Homo sapiens
cctgaactcttcagataatcagagtggaggaagtacagccagcaatcctccaggtcctattgacaatactaagattgcagtcactaaatgtggtaa

SEQ ID NO: 732712 - DNA, 82 bp, Homo sapiens
ctaccctgactacagctggagcgcccagaggcgagccctggtggaggaagagatcaaggaccttgagcaggaaaaggaccac

SEQ ID NO: 732713 - DNA, 50 bp, Homo sapiens
ccgcttttctctaaggaacccggtatattgagatcttcagaagtagcagg

SEQ ID NO: 732714 - DNA, 50 bp, Homo sapiens
gaatgtgatttgcttgaagatatgagagagtattatgagggaggccgagg

SEQ ID NO: 732715 - DNA, 75 bp, Homo sapiens
ccgggagcccgccgcgctggtagcggttcctagaaggtgagcgcggacggtatgcaaagttgtgaatccagtggt

SEQ ID NO: 732716 - DNA, 50 bp, Homo sapiens
ttggtttgtccagagacagtgagcagccctttctaaggcacaaaatgatg

SEQ ID NO: 732717 - DNA, 82 bp, Homo sapiens
ggagaaggcccagccaatgaagatgaagacataggaggcatcaagcatgatggaaccatgtgtgatacctgccgccagcaac

SEQ ID NO: 732718 - DNA, 74 bp, Homo sapiens
tgtatgaccacaaacagccatcaagaaatttaagatccgcattgaagacccaccccgcagaaagcacatggtat

SEQ ID NO: 732719 - DNA, 100 bp, Homo sapiens
gagtcttgggatcagacatgaagaccccagaggatcctgcagtgcaggcccggaggctgtttgatgtcctgcacgagcccttcttgaaagtaccctgatg

SEQ ID NO: 732720 - DNA, 100 bp, Homo sapiens
accatgtcagccttcccagtagctggaactacagagggcttcagaggctgggaggtggagcatggcgggaacggctgggccatagaaaagaacctaacac

SEQ ID NO: 732721 - DNA, 100 bp, Homo sapiens
ggaattccctggatgaaggccgtcaccttaccttaaaccttttaagcaaggaaattgaactaagaaatggagagacaccatgaccacccttgatgataag

SEQ ID NO: 732722 - DNA, 80 bp, Homo sapiens
gttggtgtgattagcttcgcagtctggaaagctttaggagttcacagtctgataccccaatgtccttctttgactttgtg

SEQ ID NO: 732723 - DNA, 90 bp, Homo sapiens
cgactcggtgattgaggacaagaccatcgagctcatgggaacgatcagcgttggagtagatgccaccgacctttttgatcgctatgatga

SEQ ID NO: 732724 - DNA, 90 bp, Homo sapiens
aaaaatgtgctcacagttgcgaatattgacccatttctaccagacagagtttcactcctgttacccaggctggaggacaatgatgtgatc

SEQ ID NO: 732725 - DNA, 82 bp, Homo sapiens
cggctcttcccgcccgccttccgccgtctcttcgagttcttcgtgctgctcaagtgtactaatggtcacttgatgtgcgctg

SEQ ID NO: 732726 - DNA, 83 bp, Homo sapiens
tgccatgtatccgcagggcagacatccgccctgggcgctgcctatggcacagccaagagcggtaccggcattgcggccatgtc

SEQ ID NO: 732727 - DNA, 75 bp, Homo sapiens
aagctctctcttgagccgctgccttgttaccagctggagcttgacgcagagctccttaataagcatttatagtca

SEQ ID NO: 732728 - DNA, 126 bp, Homo sapiens
cacagactctcacccccatcctgggcatccacgggggctcctctatgataatggcagataagactggactattcctctttgtatatgtgtaaacccaaaaggagcatgaaacgagacgacaccaag

SEQ ID NO: 732729 - DNA, 101 bp, Homo sapiens
tctttgattgaatacttacataatgcattggaacatgacatgagattaaggaattactctgcttaatgtaagcaagctgaacattttgaagcttgctcctg

SEQ ID NO: 732730 - DNA, 100 bp, Homo sapiens
aataacgggaccatcattcctttccggaagcacacagtgcgcggggagcgttcctacaggagagtgcgtagaagggctgcgggaaaatgactatctgctg

SEQ ID NO: 732731 - DNA, 100 bp, Homo sapiens
gtcagcacaaccaatttgcattagtgaatattggcttggaaatgataaaattagccagcttaccaggatgggacccacagaacttttgatagaaatggag

SEQ ID NO: 732732 - DNA, 50 bp, Homo sapiens
caggaagaattgttacgcaaacaggtctctctgaagaggctatcatggag

SEQ ID NO: 732733 - DNA, 98 bp, Homo sapiens
ggcgccatcttcgaacttagacttccggaaggactttggcgaggttcatagccctgatgaagcaagttactctgctctcctaataaatgcaagaaaat

SEQ ID NO: 732734 - DNA, 100 bp, Homo sapiens
gtgccccggcgccacctggagagaggccgcgtcctgggcagaggtaaaatgtcggttccaggaccttaccaggcggccactgggccttcctcagcaccat

SEQ ID NO: 732735 - DNA, 75 bp, Homo sapiens
aaggtcctgaaggagaagagaaagctgtttatccgttccatgggtgaagggaagaactgctaaagctttgaggtc

SEQ ID NO: 732736 - DNA, 96 bp, Homo sapiens
attcgaattcacaatgcagagctgcagcgttatatcctggcaaccttactaaaggaagagagaagggcacagttacctaagtatcaacgtaatctt

SEQ ID NO: 732737 - DNA, 100 bp, Homo sapiens
gaagctggccaaagcctgcccagacggctcacctgtgcgggatggaacaaaagggatcgtgggactttaccagatcggtttgtaataacacctcgaagac

SEQ ID NO: 732738 - DNA, 82 bp, Homo sapiens
aacagctacgcatagaagccgggattgagcgcatcaagatcatgatgctgccgccaccgccgccaccacggagcgagaagcc

SEQ ID NO: 732739 - DNA, 100 bp, Homo sapiens
ctcatactctgttatagataaacaaggaagtgcacggctgtctataacgtgctgccgggtctcaggatggaggagtgaagtctcctgtcgccgtggttcc

SEQ ID NO: 732740 - DNA, 75 bp, Homo sapiens
atggtcaagaatcgctctataagatctgcaagctacatcatgtgacagtggaattatagaagatgtgaagaaaac

SEQ ID NO: 732741 - DNA, 100 bp, Homo sapiens
cagccttcatttctctgaacatactgccttatgggacagatcaaagggctctgaactcctacttcgagcctccggtggaggagagcgccttggaacgccg

SEQ ID NO: 732742 - DNA, 95 bp, Homo sapiens
ccctgcgcaaggttgttggggagttcaagcctacaacacagcagtcccctcaggatgagcaggaaaagctcttggatgaagccatacaggctgtg

SEQ ID NO: 732743 - DNA, 98 bp, Homo sapiens
atactttccttccactggccagcattctcctctattagactagaactgtggataaacctcagataagctgttgccaggtgatgcaggagccctttggt

SEQ ID NO: 732744 - DNA, 100 bp, Homo sapiens
gtcacggtggttgctgccttcgtctgcacttaccttggaagccaatatatcttcacagaaatggcctcggtgagaagccctaccactgcaactgggacgg

SEQ ID NO: 732745 - DNA, 101 bp, Homo sapiens
gagtgacatgcagttggatggcggtgactgcgtggttatcaatactctggctgaccatcatcatcgtgggactgactttggtggaagtccttggttacatg

SEQ ID NO: 732746 - DNA, 75 bp, Homo sapiens
gagctcattgagagaaccatgatggtcaattgccatgcacacttctggaatacagattctgttcatcttgctctg

SEQ ID NO: 732747 - DNA, 71 bp, Homo sapiens
ttttgttatcttctggataaatctaagcaactgttcaatgggttaaggttgcagtgagccaggattgtgcg

SEQ ID NO: 732748 - DNA, 100 bp, Homo sapiens
attccctgtctgtgtgcagaggggattcaacttcaatttttctgcagtggctctgggtccagccccttacttaaagctgttccatttcctccaagtcacc

SEQ ID NO: 732749 - DNA, 82 bp, Homo sapiens
ggaggaaaggggcgtggctgtggagaaggcgctccggggcgaagcagaaatggtggagtcaatgaagaaagtagcagggatg

SEQ ID NO: 732750 - DNA, 96 bp, Homo sapiens
tgagtagcttggttggtggtaccctaaaattagggcatgattaagtgtggcaacatggcccgagaagggctgcgggtgctcgtggtggcaaagaag

SEQ ID NO: 732751 - DNA, 50 bp, Homo sapiens
aaaactcacaccgacagcatcaagtggctttctagaagatgaccatagag

SEQ ID NO: 732752 - DNA, 100 bp, Homo sapiens
aatcatcaatgaagcaagtaaggcaatctgaaagcaaatcctgtttagatgcaggcgaaggttcctggtgacccaggctctcaccttaccgtcccttacc

SEQ ID NO: 732753 - DNA, 90 bp, Homo sapiens
tggcaagaagcgtgcggggaccgatggcagtcctatgcaccagctccccaccccatggctcctcccagccccagcacaaacagcagcagc

SEQ ID NO: 732754 - DNA, 101 bp, Homo sapiens
agtccctgctcccagtcagctcccagcttcaagcccaaccaagtgcgagatctgcgtgaaaagagtacaagcgcaagctagccagagtttccctggtgcgc

SEQ ID NO: 732755 - DNA, 101 bp, Homo sapiens
cacgtgacaagagtgcttgtgaaggacacagctgtgcagacgccagatcctgccttcacctacgagtggaccaagggctggggtgtagtggtgcgatcttg

SEQ ID NO: 732756 - DNA, 96 bp, Homo sapiens
tgtttcctgaacggctcctgctcctgctggacaagcccacagagggcccagcttccaacagtctcacagaaagttctccgctcccagacatgggtc

SEQ ID NO: 732757 - DNA, 100 bp, Homo sapiens
ctattgccaccatgagtttctccggcaagtaccaactgcagagccaggaaaactttgaagccttcatgaaggcaatcgctattgacctgaaaagtggttc

SEQ ID NO: 732758 - DNA, 100 bp, Homo sapiens
tttggtttccctggcaggggttgaactgtggagtgtgtggcagagagtgaggaagaagatgaaatggaagttgaagaccaggatagtaaagaagccaaaa

SEQ ID NO: 732759 - DNA, 75 bp, Homo sapiens
tcgccaaatatgaaataatggatggtgcaccagtaaaagcattgtgcttcccagtactcggagcttttagagacc

SEQ ID NO: 732760 - DNA, 87 bp, Homo sapiens
ctgccttcttgggaattgcttcgtttgccattttcttatggagaactgtccttgttttgtccaaccaaaatctagtactttgctatt

SEQ ID NO: 732761 - DNA, 100 bp, Homo sapiens
gtgtgacttatgcctccatgatccctctccagatgatgcagaactacctcaggctggctctactacccgaaggatagtgcccgaagttgctgcttggcat

SEQ ID NO: 732762 - DNA, 134 bp, Homo sapiens
cgagacctacccgaacgacgcgggcgagcggggctttggacgccggtggagacgcaggcgaggttgcctgtgatttgcttcggaggattattcgtatcttgaatctcagtaagagactccaaggacaactgcaa

SEQ ID NO: 732763 - DNA, 80 bp, Homo sapiens
ttaaggtcttcagcggggcgctccaggaggcactcacagatggatggagtggaaccctggcttccccttgagcatcgatg

SEQ ID NO: 732764 - DNA, 83 bp, Homo sapiens
aaaagatccaaggagaatataagtacacccaagtgggtcctgatcacaacaggacagaactgtaccgctctctttttggccag

SEQ ID NO: 732765 - DNA, 100 bp, Homo sapiens
cagttgagctaatggtggagccaaaatgctattgccctgtcttcatcaacatttaatcagtcttgcaagagcaaaatccgtccctagccacacatactcc

SEQ ID NO: 732766 - DNA, 100 bp, Homo sapiens
atggaagaagcttcgtgtccaacctgttcagtcaatgaagcctgtgagtggacacccttttctcaaaaagcctcacagcatggaaccacaggttactcta

SEQ ID NO: 732767 - DNA, 100 bp, Homo sapiens
ccgatttgaaaaccaggtggatatgaaaggagctggaagctatcaaagctcgagtcagggagatggaggaagaagctgagaagctaaaggagctacagaa

SEQ ID NO: 732768 - DNA, 100 bp, Homo sapiens
gtcgcgctgggacccacactggcttttaaggaggacacccggacacctggaagctgggaaatgaaatcgagctatagcagattatcttcgttcaaatggc

SEQ ID NO: 732769 - DNA, 100 bp, Homo sapiens
aagattttgaagacaatcgtcacttatacaggtccagaggtgtccttctaaagctggtagaggtttcacgagtcatcagggacccagaacccttctcttt

SEQ ID NO: 732770 - DNA, 100 bp, Homo sapiens
cccgagtccgcgggaagatggcggcgccgctcatccccctctcccagcaggaaccggagtttattgaaggaggaagaccctgctgtgcttatctctgagg

SEQ ID NO: 732771 - DNA, 75 bp, Homo sapiens
ctggattctgaggaccagcagatggccagtcacgagaacccaggccacgtgctgtacgccgacatcaagatggag

SEQ ID NO: 732772 - DNA, 98 bp, Homo sapiens
agaagaataaggagaaggataagtcgaaggggaaggcgcctgaagaggacgaagggaagacactgatcaaggtggcagaagctgaaaagcaactggga

SEQ ID NO: 732773 - DNA, 98 bp, Homo sapiens
tcaaggcaagaccgaattcagaaggatatcgacgtcgtgatccagaagtccagagctgaggactgcctgtttgcagagaaatcaacttttcagtaatt

SEQ ID NO: 732774 - DNA, 98 bp, Homo sapiens
ctcctccttggtcgccgcgtccttggctggcgtggccaattcctgtccccccagcagcatggcatcgtgtgctgaaccctctgagccctctgccccac

SEQ ID NO: 732775 - DNA, 75 bp, Homo sapiens
tcgcaagtgttctggtcctggtcgccacacctttttcgaagtgttgatttttggaggagacatcctgaaatttgc

SEQ ID NO: 732776 - DNA, 83 bp, Homo sapiens
ccgcgcgctctacaacgtgctggccaaggtgaagcgcgagcgcgacgagtataagcggaggattttttatcaagcagaaatgc

SEQ ID NO: 732777 - DNA, 87 bp, Homo sapiens
agcccggagctgctgaaccctgagcccaggagactgagcccagatggcttccggaaagtggtccacatcgagcagggcggcctggtc

SEQ ID NO: 732778 - DNA, 100 bp, Homo sapiens
gtccgaaggaggaagggaaccaacccactttctcggcgccgcggctcttttctaaaagtgtgtatcaaaccgaatgataaaaaagcagcacacatcttca

SEQ ID NO: 732779 - DNA, 101 bp, Homo sapiens
tcaatgtccctctgctgggaacagtgcctcacaaggcatcaggggaagccatatgtttttgaccgtgtattccccccaaacacgactcaagagcaagttta

SEQ ID NO: 732780 - DNA, 100 bp, Homo sapiens
aagagtttcacagaacagccttggggagatgacaaaacttggtagcaagacagccctcaatagacggggccaataataagaagtggacaatacagtattt

SEQ ID NO: 732781 - DNA, 51 bp, Homo sapiens
cccgagcacatcatttatatacaggtttgcctgcaatgagatttcattctc

SEQ ID NO: 732782 - DNA, 102 bp, Homo sapiens
cttcgtggcatctatgcttacggttttgagaagccttccgctattcagcagagagctattattccctgtattaaaggtttcaatacaaaaacaggctccaga

SEQ ID NO: 732783 - DNA, 83 bp, Homo sapiens
tgggagtcacctgaaagccaggaaatgatgggacctgcaaaggataaactggtcattggacggatctttcatattgtggagaa

SEQ ID NO: 732784 - DNA, 100 bp, Homo sapiens
tatggctctgccgtgccacctgctgcacccacgaatctgcccacccctcctgtaacccagcctgtttcacttcttggtggtcattgggactcccacactt

SEQ ID NO: 732785 - DNA, 75 bp, Homo sapiens
ctctcaggaactattccagctttctcagtatctacagggggcagtgcccaaaggaaatgccactaaagaattcat

SEQ ID NO: 732786 - DNA, 96 bp, Homo sapiens
acgacctcagctcccagaggatcaccagcgtggctgtcaataccagcaaatatgcagaaagctatcggatccaaacctatgctgaatatatgggga

SEQ ID NO: 732787 - DNA, 74 bp, Homo sapiens
tgcagatgcagtgtggctctggatagcaccttatggacagtgagaaggcaaccaaagtgcaggacatcaaaaac

SEQ ID NO: 732788 - DNA, 100 bp, Homo sapiens
cgagcctcgtggtgtggtgtatggccgtgggcatctcctacattagcgtctacgaccaccaagtattatcagaaaatccacccagcttcaccattactgt

SEQ ID NO: 732789 - DNA, 75 bp, Homo sapiens
cactgaaattcatcctgagatgagcttcctgcagatttcacaaaactgcatcttactgacagtctccacccacag

SEQ ID NO: 732790 - DNA, 89 bp, Homo sapiens
cgggcgtctccgccggctactgccgcttcagttctcccggtgtggccacgagtcgggtccaagggtggggaaggacttctccagctgcc

SEQ ID NO: 732791 - DNA, 100 bp, Homo sapiens
gtgctacagagacgtgtctgatctaaagatgcggaaaacgccatgcggtacataaatgggacgcgtctggatgaccgaatcattcgcacagactgggacg

SEQ ID NO: 732792 - DNA, 83 bp, Homo sapiens
ttccggcgccgctctccgagctcgatccgctgctcgcacgggagccagctgggtggaatacttcattgctccatcagtagata

SEQ ID NO: 732793 - DNA, 97 bp, Homo sapiens
agctacaacgtcagcatgatcaactggaggctcagaagctggaatatcatcaggttcgggaggccttgaggaaagcagagaaggagctagaatctca

SEQ ID NO: 732794 - DNA, 136 bp, Homo sapiens
ctggtgccgcgttcctgctgctctgcctgctccacaagcggcgccgcgccctcggcctgcacggagccttttgaatggactgatgtgttctaagcccgaagatccagtagaatacttggaaagttgtttacaaaaa

SEQ ID NO: 732795 - DNA, 118 bp, Homo sapiens
aggggccgtgggggtcgtgggccggagcgcctccttcgcaggcttcagcagtgcacagagccggaggatcgcagacagaatggaggaagcggaaggcgtctcggaggggagcagagga

SEQ ID NO: 732796 - DNA, 100 bp, Homo sapiens
gctgctggaggaggataacaagttttgtgcagattgccagtctaaagtcattgaagtcaacaagagagacatagtcttcctggtggatggctcatctgca

SEQ ID NO: 732797 - DNA, 75 bp, Homo sapiens
atcaatgtcacaaaagcggatgttgaaaagaatttctctgcaaagaatgtccaaaaattcatattcacattgatc

SEQ ID NO: 732798 - DNA, 98 bp, Homo sapiens
ggaaagctgcccagccaccagcaaccccccagatctcttccctgaagaacaggctgaaaaaggtctccacaaccactggggatggtgtggccagagcg

SEQ ID NO: 732799 - DNA, 100 bp, Homo sapiens
cagaaggactgggatgatacaccttttccacagggaattgagttgggtgcttcaaggatgaccgcatcgtcttctggacttggatgttctccacctactt

SEQ ID NO: 732800 - DNA, 96 bp, Homo sapiens
cttgtgctttttcccatgatgggcagatgctagtctcagggttgtccttctattcaggccactcttcgttttccatgtactgcatgctgtttgtgg

SEQ ID NO: 732801 - DNA, 98 bp, Homo sapiens
tgattgtgaggcctccccagccacgtgaaactagaatgtaactggtcactacatttccccctttcatgatattcctctgaaggtgaactctaaagagg

SEQ ID NO: 732802 - DNA, 74 bp, Homo sapiens
gtctatggaatttgcaccaaattgaaaacatctcccaatgaagtgagagggtccaagcctggtaagaatgtcca

SEQ ID NO: 732803 - DNA, 82 bp, Homo sapiens
gcaggaccctaacgacaggcgcctccggcccatttacggtatcatgatattagctggtttgacatcaagtcatttgtgagtc

SEQ ID NO: 732804 - DNA, 101 bp, Homo sapiens
accatgacgataagcaaccagcatttagagctgtttatgaagcactgagaaatgacccagatgatgtggtaccagttggccaaagaagagcctggtgttgg

SEQ ID NO: 732805 - DNA, 98 bp, Homo sapiens
gaagattggaaaaaggtgctgcagcaggaagaagctgggatctgattgaacaggatgacaaggagtatgtgggctttgcaaccctccccaaccaagtc

SEQ ID NO: 732806 - DNA, 87 bp, Homo sapiens
ttcagcagccctccagctacttcctgcctgccatgccccaggttttcgtaacaccccagggcctgtaaggtttggtgtttccctttc

SEQ ID NO: 732807 - DNA, 75 bp, Homo sapiens
ctacctctatactgatgaagctgtggtgataaaagttgcctttccccatcttcctggttctgctccttcgtggcc

SEQ ID NO: 732808 - DNA, 82 bp, Homo sapiens
gttcgttgtgccagcgactaaaaagagcaaaatgatgcttcaacacccaggccaggtctctgcctcggaagtgagtgcttct

SEQ ID NO: 732809 - DNA, 75 bp, Homo sapiens
caggagctcatcgatctccggggaccggtagagcaggtctctctgcagccatgtcggccaaggcaatttcagagc

SEQ ID NO: 732810 - DNA, 99 bp, Homo sapiens
atccaggagagcccatggcaggaccggcacggcgaaaccttcaccttcaggtggagccgccaccaaaatgcagattttcgtgaaaacccttacggggaa

SEQ ID NO: 732811 - DNA, 90 bp, Homo sapiens
ctatgtataaaagtaaatgggaagctatttcctttgcctgttactcctggatggagcacctctgatagcaatccacaaagccaggtatta

SEQ ID NO: 732812 - DNA, 100 bp, Homo sapiens
tctgagttttttgatcttccaagtctcaataaaaacatccccgtcatcgagtatgagcagttcatcgcagtgtactatgaggggctgcaggacaagctgg

SEQ ID NO: 732813 - DNA, 100 bp, Homo sapiens
ggaaaatctccccggtgactttcaggctgcgctgaagaaataccagactgagcaaaggagcaaaggcgacgccctggacaagtgtcaggctgagctgaag

SEQ ID NO: 732814 - DNA, 50 bp, Homo sapiens
ctccattctccaggaactgtacgaaaggtacttgaagtttattgagttgc

SEQ ID NO: 732815 - DNA, 75 bp, Homo sapiens
ggcgcttggacggcgggaaccggctccggagcgagaacgcgcatgcttcaggactgccccaaggcccgcagggag

SEQ ID NO: 732816 - DNA, 74 bp, Homo sapiens
ccggtgccggcctagcgtcctggaattacttcaatcaaacacgatgaggcgagtggtacgacagagcaagtttc

SEQ ID NO: 732817 - DNA, 100 bp, Homo sapiens
agtgtgagggagagaaccagcacttctgggacgcacagagaccgtgaagattccaagttcaggagaactcgaccggtgcccctgggcgctgggattgctc

SEQ ID NO: 732818 - DNA, 96 bp, Homo sapiens
gctgtaaccacctcacagattccagcttcggaacaagagaccctggttttaaaatcaaagatgggaaaatcggagaaaattgcccttccccatggc

SEQ ID NO: 732819 - DNA, 100 bp, Homo sapiens
tggaggaatgttttaattcttcggaaataccaagtggtctctattcctctctttggtgctgacactattggccagagaagtcctgatggaccggtactga

SEQ ID NO: 732820 - DNA, 83 bp, Homo sapiens
cggacggccggcgggggcggcgtgcggcctagcgtctcaggttgtgaccgagattcccgacgagagagactgaggggaagaga

SEQ ID NO: 732821 - DNA, 100 bp, Homo sapiens
ggaacatggacaggaactgtggacagtgaagagaggcctctcccaaagcacctgcgcagataacgaaggaggcccaacttcattcaataaggagcctgac

SEQ ID NO: 732822 - DNA, 100 bp, Homo sapiens
caatgacaaactgacggaaaaggagagagactccaccagcccattggagaaaagttactgttcagtccctgaaggcttgtgccataaaagagtgggagac

SEQ ID NO: 732823 - DNA, 89 bp, Homo sapiens
cgtccgcgtccggcacgcgagatggagcgccgtgaaaaatggagtgctggcatacattgggaattttcgcctgcttgcagagctttcca

SEQ ID NO: 732824 - DNA, 75 bp, Homo sapiens
ctctaggcaggctggcaggcaacaccttagggatgcacaggaacaaacgagggaatatgcctcctatggaacatg

SEQ ID NO: 732825 - DNA, 99 bp, Homo sapiens
cctcggcggcggtggccgctagctccaaggaagccttcatctcctcgtcctccaggcagcacaagccattgtggaatctccaccaggtgtacagaacgg

SEQ ID NO: 732826 - DNA, 50 bp, Homo sapiens
ggcatccctcctgaccagcagagatacagccttttcctccctctccatga

SEQ ID NO: 732827 - DNA, 75 bp, Homo sapiens
cccctcgctgggcttgctttggcaacagagtgcctgacccaggtcagaaatgactgctgtccatgcaggcaacat

SEQ ID NO: 732828 - DNA, 100 bp, Homo sapiens
cttcggagaatggagtcttccatcaatcatatctcacaggttccagcaacagatagaaatgctttaagttcactctggggaaagctggcctctgaaatct

SEQ ID NO: 732829 - DNA, 75 bp, Homo sapiens
agcgcaccggtcccccagcggcagccgagcccgcccgcgcgccggaagctcttcgtgggcggtcttgactggagc

SEQ ID NO: 732830 - DNA, 83 bp, Homo sapiens
cagctgggcgagtatctggaggagttggaatcgaagcctcttaaaatggcagatgacttggacttcgagacaggagatgcagg

SEQ ID NO: 732831 - DNA, 90 bp, Homo sapiens
cgagacctacccgaacgacgcgggcgagcggggctttggacgccggtggagacgcaggcgaggaactggatgcatttcagccatacccca

SEQ ID NO: 732832 - DNA, 75 bp, Homo sapiens
gatcctctccgcctctcgaggtacggactaaggaggtgaggtcctggcagggtgatggctcccccatggccaatg

SEQ ID NO: 732833 - DNA, 74 bp, Homo sapiens
gtccgggagctgggcggccatttaccagtttgatggtgacagtgcctacgtggggatgagtgacggaaacccag

SEQ ID NO: 732834 - DNA, 88 bp, Homo sapiens
caccttcgaatcggagctcagcgaccctgtggagctcctggtggcagatcccagatggattttttgcccatttttatgccatttgtga

SEQ ID NO: 732835 - DNA, 82 bp, Homo sapiens
ccattttcgagtgaaggacccggagccgaaacaccggtaggagcggggagatcatggaagggaagtggttgctgtgtatgtt

SEQ ID NO: 732836 - DNA, 50 bp, Homo sapiens
ctcccaggtagctgggattacaggtcatacttacctggttgcttgcgcat

SEQ ID NO: 732837 - DNA, 75 bp, Homo sapiens
ggctgataagtctagattcaccaatgtcaaacagtttattgcaccagattcgacctcacattactactttgcgca

SEQ ID NO: 732838 - DNA, 51 bp, Homo sapiens
gcgtgcgagacggcggaagcagtgaagtaagaactctgctagagaggaaat

SEQ ID NO: 732839 - DNA, 101 bp, Homo sapiens
gtcgcagcgagctggagccgccggaggtggggaccaaggcatactgaacacattttttagcagctgggcaacaacagatatcagaaaacacctgccgttta

SEQ ID NO: 732840 - DNA, 101 bp, Homo sapiens
ttgctggtgccttcattcatgaaaagcatgcccatacgattaaacctgccctatatatgcaaacagatttgcagtaccaacctatgcagccaagcaacctc

SEQ ID NO: 732841 - DNA, 100 bp, Homo sapiens
gtggaagcggccaccgactactgtcagcagctgtgccaggtgttcaggcgcttcgtggaggttggccgggtggcctatgtctcctttggacctcatgccg

SEQ ID NO: 732842 - DNA, 100 bp, Homo sapiens
agggtttaagactctgacattcctggctgtcatgctcattgttctgaactccacgctgcatccagtggaactaaagccgttccaggattatcaaaaactg

SEQ ID NO: 732843 - DNA, 75 bp, Homo sapiens
gctcaagttacaatcgttcctgacaaagatgatgtatgccgagattttgctgtcctggaggaccacaccctggct

SEQ ID NO: 732844 - DNA, 110 bp, Homo sapiens
ttcatccagagacagaaacaaacctttcaagttcagaattggcaaacaggaagtcatcaaaggttttgaagagggtgcagcccagactaccatgccggggatgaagcgag

SEQ ID NO: 732845 - DNA, 100 bp, Homo sapiens
gcccccactcgcgctgcgatgacgcgctcactgttcaagggaaacttttggggagagtcacaccgggacagctcatgtcctatattcagctcttcaagaa

SEQ ID NO: 732846 - DNA, 101 bp, Homo sapiens
gccagatcatcggtcaggccaagaagcatccgagccgggacgaccctgggacagtctccactggggcagatccagctgaccatccggcacagctcgcagag

SEQ ID NO: 732847 - DNA, 82 bp, Homo sapiens
ctgcactgtgccttcgcgcacggccccctggacctgcggccgcccgtgtgtgacgtcagattatacccaacaagcaacccaa

SEQ ID NO: 732848 - DNA, 90 bp, Homo sapiens
gtgatgcggaagcagaaaaccatcaatcgcttcctcatgaggaatccagggccaaggcttgtgttcaatcgtgtgaatggccggcgggcc

SEQ ID NO: 732849 - DNA, 85 bp, Homo sapiens
gttcgcgtctctctgctgcggcgcggggaccgctgtgctctcgacctgcctagagctggaacgttacctccagagcgagccctgc

SEQ ID NO: 732850 - DNA, 119 bp, Homo sapiens
gtatgcatggtgtggggttggtgtgattagcttcgcagtctggaaagctttaggagttcacagttcgtcattgaattttgagaagcattctgaaaactttgcatggacagagaatcgtt

SEQ ID NO: 732851 - DNA, 97 bp, Homo sapiens
ctcccgagtggctgggattacagaccaggtgataggtttgatcgagacagaccgttgagaggacgtggaggcccgagagggggtatgcgcggcagag

SEQ ID NO: 732852 - DNA, 74 bp, Homo sapiens
cttcacactgcagaactgggttctggactttgggcgtcccattgccatggatccaaggattctgtagctacaat

SEQ ID NO: 732853 - DNA, 100 bp, Homo sapiens
cgttcagcaaaggagatcggctaggaaagctgctggagccagttctgcttctcggcaaggagcgatttgctggtgtagacatccgtgtccgtgtaaaggg

SEQ ID NO: 732854 - DNA, 97 bp, Homo sapiens
gaaatagtggcaggtgacagtctgcatgtgcagttttcaggtgtggatgaggtcaccattgtcaacattttgaccaaccgcagcaatgcacagagac

SEQ ID NO: 732855 - DNA, 100 bp, Homo sapiens
gaaaattcttacagaaggcatatgaatccaaaattgattatgacaagaatagcctaacatggcagaccagagacagcgctcactgtctacctctggggag

SEQ ID NO: 732856 - DNA, 74 bp, Homo sapiens
gaagaagcaacacgcaaacgagagctgaggctaatgaaaaacagatttcaacactacacttgcacaatgtcttt

SEQ ID NO: 732857 - DNA, 80 bp, Homo sapiens
cgctgggccgccagcctcggcaccgtcctttcctttctccctcgcgttagagaaattcactgcatgtaactatgaccacg

SEQ ID NO: 732858 - DNA, 83 bp, Homo sapiens
ttcttgtttgtggatcgctgtgatcgtcacttgcatttgacattgtgcagcaaagaaatggttatggagaagcccagtccgct

SEQ ID NO: 732859 - DNA, 75 bp, Homo sapiens
cagacagaggggagcacagagaaagagaatgatgaagagaaaggcccggagactaatgtgacagtgatgataaca

SEQ ID NO: 732860 - DNA, 100 bp, Homo sapiens
agccccatccaggttcccatggttgccggctcccctctcaggacaacccagatgtgcaacaaagtgcgatgaatctcattttcagcttctgccagagcca

SEQ ID NO: 732861 - DNA, 101 bp, Homo sapiens
ggcatttacagaaagagtcaacagcagtggcaacaggtggatcatccatgccatggagtatgaacttcagatccgtggcggagacaagccagccttggact

SEQ ID NO: 732862 - DNA, 74 bp, Homo sapiens
gataaccatgtggtggccgccggtggcgtggagaagccggagcggttgcagggcacacattactcggtgcagtc

SEQ ID NO: 732863 - DNA, 75 bp, Homo sapiens
gcagcgcggagcctgcggccaaggtcttgatgcagaactttattatgtgagaaatgaccttattagtcactacgc

SEQ ID NO: 732864 - DNA, 110 bp, Homo sapiens
gatgaagtgaagtgcaaatcttccaagtctaatagacctaaagccacagtcttcaagagcccacggacaccacctcaacggaaacgatttgaacagcagcaaaaactctt

SEQ ID NO: 732865 - DNA, 82 bp, Homo sapiens
agctgggcaccaggaagcgaaggctggctgaagctcagggccctgtctgctctgtggactcaacagtttgtggcaagacaag

SEQ ID NO: 732866 - DNA, 98 bp, Homo sapiens
ctgtatgcgcgccccatcttcctgcgcctcctgcctgagctgcacaaaacaggaagggcccagcctcacctacgagacctgcagccccccgaccagct

SEQ ID NO: 732867 - DNA, 125 bp, Homo sapiens
ccgacgtacagcgggccgggaaaagtggcactgaggctctggaacttctgcccagctctccttgatgtcctcctcgcactttcttaccagccctttgcaaaatttttcttgatgaaagtgctcca

SEQ ID NO: 732868 - DNA, 84 bp, Homo sapiens
cagaagtttcattccttgactacattaagggaggcccccaaatacatcaagatgtttgtactggatgaagctgacgaaatgtta

SEQ ID NO: 732869 - DNA, 75 bp, Homo sapiens
ttctaatccaaaatgggatgaacagctaactgtgggcaattccaaaagtcttcagatttccaaaaggaaggactg

SEQ ID NO: 732870 - DNA, 100 bp, Homo sapiens
ccaaggtctctcgcgggcgggagaacggaaaactcccaacttcctggcatcattcttaacaaagaagttaaatattggtgggaaaagagtaaaccttgcc

SEQ ID NO: 732871 - DNA, 101 bp, Homo sapiens
acatagaaatggccaagaaggcagccaagctgagcagccaggtgatgatgaacagtctacacagatggctgcaagttgggaagatgataaagttacagaag

SEQ ID NO: 732872 - DNA, 75 bp, Homo sapiens
cttgaattcttctacaggaaagacttcacagagaatgcagttgtcttgacttcaggtctgtctgttctgttggca

SEQ ID NO: 732873 - DNA, 75 bp, Homo sapiens
atcttcttcacccgggcggtgcaggagagtcgcggttgctgatcgtggtgcttgagtagagccgtggttggtgac

SEQ ID NO: 732874 - DNA, 96 bp, Homo sapiens
ccaattgagaactactgctctaaactgttcacgcaaagaatctgctccacaagttttgcttccagaagaagagaaaattatagtggaagaaactaa

SEQ ID NO: 732875 - DNA, 90 bp, Homo sapiens
gcagtaccgtttcctcagcggcggagttgtggaaagtaaaaatgtagccctaccaaaaggaactattgtactggcttctccaggctggac

SEQ ID NO: 732876 - DNA, 75 bp, Homo sapiens
tacgtcccgtctctagccctggcgctccgccggtcccgttctgcagatgtccggtctgtgctacgacagcaaaat

SEQ ID NO: 732877 - DNA, 99 bp, Homo sapiens
atctatggcaacattgtatctattaatatacagcttctgtatttatcaggagggaattgtcgagaatcttttcaaatgggcccgagaggccgatcaacc

SEQ ID NO: 732878 - DNA, 46 bp, Homo sapiens
gactgtcccagaagtgaatcgcagcattagtgccagcagtagttcc

SEQ ID NO: 732879 - DNA, 84 bp, Homo sapiens
gtttcagaattgcaattccaaaatgtgtaagacgggatattctcttctgtgctgtcaaggacaatgcagatcttcgtgaagact

SEQ ID NO: 732880 - DNA, 100 bp, Homo sapiens
cggtggcgatgctcttcttggaaaaccagatccagaaactggaggagtcccgctcgaagctaggtcagcccaaggctgccccctcggtcactctgttccc

SEQ ID NO: 732881 - DNA, 83 bp, Homo sapiens
tgaggtgcttgtcggtctggactgatgaaaatccatatggatgggtttgtggagttcttccatgtagaggacctagaaggtgg

SEQ ID NO: 732882 - DNA, 100 bp, Homo sapiens
tggagaccgcgctccgggacagcagccgcgtcctgcaggccatgcttgccacccagctgcgcagcttcgatggtgctgccttcacctgcctggagactgc

SEQ ID NO: 732883 - DNA, 83 bp, Homo sapiens
ctgggggttcggggagcgcttggaccccggcttctgggacgcgtcagatagcctgggctggaagctcttctacgtcacaggct

SEQ ID NO: 732884 - DNA, 50 bp, Homo sapiens
ggaagatggcgcctgttgtgacaggatccatttcactgggcttggcttcc

SEQ ID NO: 732885 - DNA, 100 bp, Homo sapiens
ctggaaacggttcacaaggaagccgagtcccaaggatggaagagtgtagaaagtgtcccaaagttggtgtctgaatatatgtccaaaaagataaaagttg

SEQ ID NO: 732886 - DNA, 74 bp, Homo sapiens
tggtgacatacaaaggaagggaggctgacttatccttgtataatgaattccgattgtggaaggatgagcccaca

SEQ ID NO: 732887 - DNA, 80 bp, Homo sapiens
tcttctatacaattatgatttgcctgtgccagttatagcagcaggaatggctgtgctccattgaagtgacttgtgaatca

SEQ ID NO: 732888 - DNA, 100 bp, Homo sapiens
actatgtgactatcattgatgccccaggacacagagactttatcaaaaacatgattacagggacatctcaggcttgaccactatgctatcatcaagtttc

SEQ ID NO: 732889 - DNA, 98 bp, Homo sapiens
tgacctcgcccacgcccagcagcagcagcaacagctccttgtgaaggcaacacattcttctgccatagtaacatgtgtattaataatactttggtctg

SEQ ID NO: 732890 - DNA, 100 bp, Homo sapiens
ctgtccaatcacctcgcaggagccctagggtccaggttcacactagaaggccaaaacttccgcaaacatctgatgatgaaaagaaagatttttgagactg

SEQ ID NO: 732891 - DNA, 77 bp, Homo sapiens
ccgcgaacacctcactattgatggtgtagcgctttaggggaagggaatgaaagctactggttgattttaaagtgcct

SEQ ID NO: 732892 - DNA, 90 bp, Homo sapiens
ggactctgggtgttttgctaccgtgaccgtttagaaacttgggaaccgtgggtgctgttgccttggactgcaaagggaatgtagcctacg

SEQ ID NO: 732893 - DNA, 75 bp, Homo sapiens
cacggccgtgagccggccctgcgccggcaggtcgcgggacatactgtggcgcctgctgacatggcctccagaaac

SEQ ID NO: 732894 - DNA, 90 bp, Homo sapiens
gcaaaatcgagcgggccattggtcagaaatgtgaattccaggatgcctatgttctgttgagtgaaaagaaaatttctagtatccagtcca

SEQ ID NO: 732895 - DNA, 83 bp, Homo sapiens
cggagccgcccgaagcgcccgcgagccgccggccgggagggatccgggtcctgaagtgaacctccttggcctgggcgaagctg

SEQ ID NO: 732896 - DNA, 82 bp, Homo sapiens
tgtatttagtgtgacgactgttgacctgaaaaggttgtcgaaataataattccacagcctcttctaacaatgcctacaatgt

SEQ ID NO: 732897 - DNA, 90 bp, Homo sapiens
gttcattgtttgtcaccacaaaaaggacagaggagacacaccttgaagaaacaacagagagccaacagaatggtgaagaaggcacgtcta

SEQ ID NO: 732898 - DNA, 90 bp, Homo sapiens
cttgaaaaagccagttctaatcagttcatcaatggtgctaaggaaatttgctatgctcttcgagctgagggttattgggctgactttatt

SEQ ID NO: 732899 - DNA, 51 bp, Homo sapiens
cttgtggaaaagctggatgtgctctccttgctcagattggtcctccagaag

SEQ ID NO: 732900 - DNA, 105 bp, Homo sapiens
aattacgccaatgtggacggactcactgccctgcaccagatcagaacactgaggctcagagaagttaactactccaaagtcatatagccagtattttctggagct

SEQ ID NO: 732901 - DNA, 82 bp, Homo sapiens
agctggggcaccgagctctgggtactggctgtgatcgaacttctcaaccctcagagacttagatcttccacctcactccctc

SEQ ID NO: 732902 - DNA, 100 bp, Homo sapiens
acaacctggagctggtccctgaaagtctctgcagggtcctgaggacaccgtgagccagccaggcctggccgctgggcctgaccggccccccagcccctac

SEQ ID NO: 732903 - DNA, 75 bp, Homo sapiens
ctggccgccaaaccccagctggaactccggccacagccagcatgcagagacggtatctcgccgtgttgctcaggc

SEQ ID NO: 732904 - DNA, 49 bp, Homo sapiens
aacatgtggaatcccaatgccgtggccagtttcattgtcaacggcggca

SEQ ID NO: 732905 - DNA, 100 bp, Homo sapiens
catcgtggtaggctatgaccacgagaagccaggttatgggtgctacatgtgtgctttcagagcagtagtgtgaggaagcttggagtgggatggcaggacg

SEQ ID NO: 732906 - DNA, 101 bp, Homo sapiens
ccatgtggaaaatgatgcttaatatcgatgaatttggaggttttggttcagttagtggaaaaattgaaatagaaatcaagatcaaccatgaaggagaagta

SEQ ID NO: 732907 - DNA, 75 bp, Homo sapiens
gcgccatggcggagcagacctactcgtgtaccaaatatgccccaacagcggcaagaccagcatcatcagagtgcc

SEQ ID NO: 732908 - DNA, 75 bp, Homo sapiens
ccgagcacccaggcgactgcctcatcttcaaggtatgacctggacgcgtgtgacattcaagaaaaatacccggat

SEQ ID NO: 732909 - DNA, 74 bp, Homo sapiens
tttacgttcatgtaaacagcatgacgtgaggccgtggatgcaggcattaagaattgcctgaggttctgtccatt

SEQ ID NO: 732910 - DNA, 50 bp, Homo sapiens
gaaagagtcaacagcagtggcaacaggacaaggtgcaacgctggttgata

SEQ ID NO: 732911 - DNA, 98 bp, Homo sapiens
tgaaacagaacctgtccaggagctggcatgacgtgcaggtctctagcgcttacagaatgtctgaaggggacagtgtgggagaatccgtccatgggaaa

SEQ ID NO: 732912 - DNA, 100 bp, Homo sapiens
taccattactgcagccacacgccttggaggtgaagtgtcctgcttagtagctggaaccaaatgtgacaagatgacacacaataatttttggttgaagaag

SEQ ID NO: 732913 - DNA, 82 bp, Homo sapiens
cataccttttaatcccctggccgaaagtcatcctttaatagacgaggtactccaaagattcaggtttactcacgtcatccag

SEQ ID NO: 732914 - DNA, 100 bp, Homo sapiens
gggctgtcgctggtgcagctcaacgagctgctggaggacgagggccagctgacggagatggtgcagaagatggaggagagatggggtctcactatgttgc

SEQ ID NO: 732915 - DNA, 100 bp, Homo sapiens
ggcctactcgcccgccaccctgcgctgccgccgctctgaggagttaaagaataacaagcctttgtattcatttgaagataatgcagactatgtttatgat

SEQ ID NO: 732916 - DNA, 100 bp, Homo sapiens
gttctgatcacgggggacaaccggaagacagccagagctattgccacccagaactttgtcagcgagcaagaacaatgccaggaggtctggagaaaacgtg

SEQ ID NO: 732917 - DNA, 75 bp, Homo sapiens
gaggcactcagttggaagagtccagcaaggttaagtatacccaaggtggacttgaaaacctcgaactttcaagaa

SEQ ID NO: 732918 - DNA, 75 bp, Homo sapiens
tgtggtgccacatcgtactgatggatttgctgaagcaattcacaggaagatgatttgaagtgggtagaagagaat

SEQ ID NO: 732919 - DNA, 101 bp, Homo sapiens
aactggaacctctgttcactcaagggttcagaatctcccatgatgattggtgagttgagaagtgaccttgatgatgttgatccctagaggaacatgcccag

SEQ ID NO: 732920 - DNA, 100 bp, Homo sapiens
ggacccccaggaggtgaccctgcaggtgctgtgctggccattggtgacccaaagatgatgaaaaatatgttcctgcccacaaggagttagcgacctactg

SEQ ID NO: 732921 - DNA, 76 bp, Homo sapiens
acaataaaccgacgtttagccaggcagaggtgtccaggacctgcctgctcacggttcgtgtcctgcaggcccatcg

SEQ ID NO: 732922 - DNA, 100 bp, Homo sapiens
ccccacctgcccggtgcccgaggaggcagccaagctcgtagcctgccactccgtgcgagctgagaagaagcctggaacttagtgtaaatctacaaaggaa

SEQ ID NO: 732923 - DNA, 82 bp, Homo sapiens
cttagctgtgctcgcgctactctctctttctggcctggaggctatccagcgtctcctccgggctggggctgagcaagccctc

SEQ ID NO: 732924 - DNA, 51 bp, Homo sapiens
catggcaatggggatttatactggggcaggcagtggttaaaggttcccttc

SEQ ID NO: 732925 - DNA, 100 bp, Homo sapiens
ggctctgctcccgcctgccggcatctgggctaggctgctggtggtctacccttggacccagaggttctttgagtcctttggggatctgtccactcctgat

SEQ ID NO: 732926 - DNA, 90 bp, Homo sapiens
cagtactaaactttctgagcttcatgacaatcaggacggtcttgtgccgaggcctgcctggagccccagatcaccccttcctactacacc

SEQ ID NO: 732927 - DNA, 100 bp, Homo sapiens
gaaaaggttgtgaaaccttttaactctccacagtggagtccattatttcctctggcttcctcaaattcatattcacagatccttgccagcacattacaga

SEQ ID NO: 732928 - DNA, 76 bp, Homo sapiens
agaagacatggatgatgagcgccttaaggatctctttggcaagtttgaggagaaggcagagcccccccaggctatg

SEQ ID NO: 732929 - DNA, 100 bp, Homo sapiens
gaagaagggaaggcgcgagtgaggaaaggaggtactgtagttctcttgcaactagcaagtgaagccttgccaaatgacatgaccttggctcttgcttacc

SEQ ID NO: 732930 - DNA, 51 bp, Homo sapiens
cgggccggctgtcctggcgcgtccaagtggtaagaagttcagaagcaagcc

SEQ ID NO: 732931 - DNA, 83 bp, Homo sapiens
ggcggcaccaacggcaccaactattcgcggagctggaatgactggcaacccagatcagtcgcatcgaatacattcattcaaag

SEQ ID NO: 732932 - DNA, 100 bp, Homo sapiens
atttagaaccagctgtttaccagagtggaataatgtatttgtggccttggacatgaggcagtcagtcctctgttgctgttaacataaggtcagggactga

SEQ ID NO: 732933 - DNA, 75 bp, Homo sapiens
ggcaacgtacgtcagacggcagtggtggaaaagatccatgccaagtaccactccaaaggcaaggaaccatgattg

SEQ ID NO: 732934 - DNA, 75 bp, Homo sapiens
cctcgggcgggggctggcccggggttccaggcctccggtgtggctgtctctgatggtgtcatcaaggtgttcaac

SEQ ID NO: 732935 - DNA, 100 bp, Homo sapiens
cagatgaaagagaagtttctggtcactccccaggattatgcgcggaattctgtgcgtctggtcatccggaaggttcagtatgccccagagaggcctggcc

SEQ ID NO: 732936 - DNA, 100 bp, Homo sapiens
caccagtagcttttctgagaatacttgctgaaaaggaagttttctggaatggtttcttaaacaattaggtctacatcctaactggcaattcgttgatgta

SEQ ID NO: 732937 - DNA, 100 bp, Homo sapiens
tcagaacaagcccctgtattttgctgatcggctgtatgactccatgaagggtacccagtgtgttgaacaaattcaagagttggttctacgcttctgtgag

SEQ ID NO: 732938 - DNA, 74 bp, Homo sapiens
ctggaggcctgggaagccaacgaccacacgcagttcgagaacttgtcttggacaattgcaaatcaaatgatgga

SEQ ID NO: 732939 - DNA, 50 bp, Homo sapiens
gaattgggatcgtgtcgctgcgtacaatgtggtgaagaaatggcttgagg

SEQ ID NO: 732940 - DNA, 82 bp, Homo sapiens
cgaacacggtgctactcaaggcccgggaaggcagtgaaaaagcagtctggctcccgaggtccaccccttataccccaaggtc

SEQ ID NO: 732941 - DNA, 100 bp, Homo sapiens
caagaatgaactctaccactggtttcccatttttaacccagtggacagtttgcggttgtgaagaaatgccgtgagaaaagcaccggcctccagtatgccg

SEQ ID NO: 732942 - DNA, 82 bp, Homo sapiens
cgaatcccgaggcaatctcggaggcgatgaaggatttgggggcagagcacttggcaggtcatgaaggggtccaacttctcgg

SEQ ID NO: 732943 - DNA, 82 bp, Homo sapiens
gagggcgagacacgcctgggcccaggtgtggcgtctctgtccccatctggttttaggtctcagcggcggtggcagccgaggt

SEQ ID NO: 732944 - DNA, 75 bp, Homo sapiens
ggagccaccagcctctccttgagtacatgtgatgcagaaaagtcttacgaagtattactgagctttgtgataagt

SEQ ID NO: 732945 - DNA, 101 bp, Homo sapiens
ctcagcgccgcggggatgggggcctcgggcgccccgcagccccccaacatcctgctcctgctcatggacgacggaggagcttcccaccatctacaagtgtc

SEQ ID NO: 732946 - DNA, 83 bp, Homo sapiens
acctggcatatctgggcgccaagccgcggagcctccagacggatggtcatcatgggccagtgctactacaacgagaccatcgg

SEQ ID NO: 732947 - DNA, 101 bp, Homo sapiens
tctacctgaacctgtgggaccacctgcaggagtctagggacaggaagatggttggcgacgtgaccggggcccaggcctatgcctccaccgccaagtgcctg

SEQ ID NO: 732948 - DNA, 82 bp, Homo sapiens
agcctcccctgcaccggcaggtgagaggcggatctacagacataggtatcgagaaccttccctgcgaacttcagaggaactt

SEQ ID NO: 732949 - DNA, 51 bp, Homo sapiens
cctcacctgcagcagcccagctttctactgtgcacttgcccccgtggccgc

SEQ ID NO: 732950 - DNA, 74 bp, Homo sapiens
tcggtggtgttggcgctgaggacccggacagccggccagaacacaaagcgtgaatccggaagaaaagttcaatc

SEQ ID NO: 732951 - DNA, 90 bp, Homo sapiens
atccttactaaccacgaccatcaaatccgtgtcggagtccttacagaatatgccttccgcatgtctcgtctcagtgcccggctatttggt

SEQ ID NO: 732952 - DNA, 76 bp, Homo sapiens
aagttgtcgacgaccgacagggtggtgaaaggggggacacagcgattgccacgcgccattggaatgtccctggcca

SEQ ID NO: 732953 - DNA, 83 bp, Homo sapiens
tgctcgcgctactctctctttctggcctggaggctatccagcgtaagtaaggaggtctctgtaccatggctcgtacaaagcag

SEQ ID NO: 732954 - DNA, 100 bp, Homo sapiens
aaggccttggtggtatagatttcagtagctcctcagataaaaagagtgaagccaaaaaccttccctcttacccggggccgagcaagatgagggattgcta

SEQ ID NO: 732955 - DNA, 82 bp, Homo sapiens
aactcatccgatgcaagtatttcatacacctactgtggtattaggggaatattcctacctcttagataaggaaacgccagag

SEQ ID NO: 732956 - DNA, 98 bp, Homo sapiens
gggggaaccgccgccccggccggacctcgaccctgagctctatctcagtgtacacgggacctgcaggacccaagggcaacctgggctctaagggcgaa

SEQ ID NO: 732957 - DNA, 90 bp, Homo sapiens
gccccatccgcaacctggaggtcaagttcaccaagaataccctctaccatctgctttggtcagggtgccgctcgaggatttaaaagcaac

SEQ ID NO: 732958 - DNA, 83 bp, Homo sapiens
cctagtagaaaaagttcttgggacaaacttcatttgatgagtgaccgaggaggtggcgttcctttgaggaaaattgacagact

SEQ ID NO: 732959 - DNA, 95 bp, Homo sapiens
gtctcctcagcagacgcggaagtggcgagtaagaaaagaagctatgatgggtctggctcagctttataagaaatactgtcttcatggtgaagcag

SEQ ID NO: 732960 - DNA, 100 bp, Homo sapiens
agaagagccatggacatcatttgcaggtcatacctgcttggagtcctcgaatgccaccttgctgaccaatgcagagaagattgccaccatcaccaccaca

SEQ ID NO: 732961 - DNA, 76 bp, Homo sapiens
tgcagggcatcatcaatttcgagcagaaggttcgagaacttgtcttggacaattgcaaatcaaatgatggaaaaat

SEQ ID NO: 732962 - DNA, 75 bp, Homo sapiens
ggcgtgcggagcggcggcggaccacctccaggctccatctactctttgaagcttctgcccagcttgcattgtttc

SEQ ID NO: 732963 - DNA, 101 bp, Homo sapiens
atgtgtggcggattactgggacagatggaataaaggttggggagactacacctgacaaacttttcactcttatagaagtggaatgtttaggggcctgtgtg

SEQ ID NO: 732964 - DNA, 98 bp, Homo sapiens
gccatctggaggctgtatggccgcagtgatgtccttgcattgcccatttttaagcaagaagagtcgagtttgcctcctgataatgagaataaaatcct

SEQ ID NO: 732965 - DNA, 98 bp, Homo sapiens
ggcagaggattcgctcccagagcagctgcggccagtgttgacctaaccaatgaagaaacaactgattccaccacttctaaaatcagcccatctgaaga

SEQ ID NO: 732966 - DNA, 82 bp, Homo sapiens
acgggacctgctccttcctcatcgtgcttgtcaacaaggcgctgctgaccacctacgggtgcaggcaaccatagatatttta

SEQ ID NO: 732967 - DNA, 50 bp, Homo sapiens
cggaaggacagcacgagcacccccatagacgatcagctgaacactctctt

SEQ ID NO: 732968 - DNA, 100 bp, Homo sapiens
ggagggaccctggcccggaggaagaaagccaaggagggaaaattgggccgatttccacctatgatgcatcatcaccaggcaccctcagatggccagactc

SEQ ID NO: 732969 - DNA, 82 bp, Homo sapiens
ctcttactgcgggccgctccgacggcggtccatcctgagcagccatcagcagggaccctttctacgaaatgctcgcagcacg

SEQ ID NO: 732970 - DNA, 75 bp, Homo sapiens
ctgcagtacctgcagaaggtctctggagacatcttcagcaggaagaaatgttggctatttggcgatgagaggtgg

SEQ ID NO: 732971 - DNA, 100 bp, Homo sapiens
atcttaccttgcccaccaacttcagagatttgtccaaggcagccaatcctttctttaagttgttgactatgctaatggagtttgctggtggacctccagg

SEQ ID NO: 732972 - DNA, 100 bp, Homo sapiens
cgtccaacgtcggggaagttgtctgactctttttgatcagaacaatgctgcaaaaaaagaagagtcagaaactgccaacaaaaatgattcttcaaagaag

SEQ ID NO: 732973 - DNA, 82 bp, Homo sapiens
gatctttgaaatgctaagattcttggataccacagtatcataaaattcctctaaatgcaatgggtgagtcaagtgaagacat

SEQ ID NO: 732974 - DNA, 75 bp, Homo sapiens
gtcgtttgtttctccaaggtttgaaaagcagctggcctgcaagggccctcctcaggacctgtctgttcatctctg

SEQ ID NO: 732975 - DNA, 98 bp, Homo sapiens
ctccttttccctctccctttccctaagcattgacttccaaagactcctggcacatgaggaagaaacccagaagaggagagcaaaggagtcaggaatgg

SEQ ID NO: 732976 - DNA, 100 bp, Homo sapiens
cttgcaagggaactggagacaatgaaaatcttgtcagttggaaaatggatataccttatttgattatgatgttggactgaatgatataattcagctgcta

SEQ ID NO: 732977 - DNA, 80 bp, Homo sapiens
ccggtgtaaatgttgagcctttttggcctggcttgtttgcaaagaaaatctgcagctgtgcctaggggagtttctaccca

SEQ ID NO: 732978 - DNA, 75 bp, Homo sapiens
ccctactgcctggaggccggggagccgacgcctggtcctgctcaatctggaattttgtcagatcgtgaagtggta

SEQ ID NO: 732979 - DNA, 75 bp, Homo sapiens
ccaggcaatgctggatagataccgaattcttatcacaaaggaatgtatcctgtcaggtataatgtcagtgaatgg

SEQ ID NO: 732980 - DNA, 83 bp, Homo sapiens
cggagcagcgcgtcgtggggcgagcggcaggtgaaattcgatgctactgtgatgctgcccactgtgtagccactggttatatg

SEQ ID NO: 732981 - DNA, 75 bp, Homo sapiens
cggctgtaccggcagatcctcaggggcaagtacagttactctggggaggatacagttgatatattagttggatgg

SEQ ID NO: 732982 - DNA, 101 bp, Homo sapiens
cccgctctccaaggagctgcggcagaagtacaatgtccgctccatgcccatccgcaaggacgacgaggtccagtggaaagaggccagaagatcagtgagca

SEQ ID NO: 732983 - DNA, 98 bp, Homo sapiens
gactccttcctgctgcggttcctgcgcgcccgggatttcgatctggacctggcctggcgggctcccaggccagtgccagtacttgggcttgccagtgg

SEQ ID NO: 732984 - DNA, 73 bp, Homo sapiens
agcagacatgccttgttggaatcgcctccagggtcgtatagacctccccctcctatgggcaaaccaccaggtt

SEQ ID NO: 732985 - DNA, 100 bp, Homo sapiens
cccgatttctatttgactggcaatagtctgtactataaccaagagtggacattgtgggatcgctttgaggtacaagggctgcagcctaatggtgaggaga

SEQ ID NO: 732986 - DNA, 100 bp, Homo sapiens
gcatccgggcggccgcttgagatcggcgctttgagaactgagcgcatgtggagttcggaggaaaagggctcagagaatgtaactggtcactacatttccc

SEQ ID NO: 732987 - DNA, 100 bp, Homo sapiens
agatgccagcgtagctgaatccagtaccaaaaacgtcaacaacagttttacgggtttctatcttactaaaggatatttcagaaaatctatattcactgag

SEQ ID NO: 732988 - DNA, 90 bp, Homo sapiens
aagaagctggctgactgcgagaaggtggctgtggagttcgggaaccagctggaggtggacatcttcaataaggagctactgctaatcccc

SEQ ID NO: 732989 - DNA, 74 bp, Homo sapiens
aatcccttgttaaaggaggtctgtgccggagggttcttgttcaggggaaagcaagatagtttcatttggatttg

SEQ ID NO: 732990 - DNA, 99 bp, Homo sapiens
gagggaagatgagaagcccctggtgctggagatgctgaagctgggagaaccaccacagacgacgagctagaagagatgctggagagcgggaagccatcc

SEQ ID NO: 732991 - DNA, 100 bp, Homo sapiens
gggtgtggggtgttccacgctatgttgggagtgttcgctttcgaggaaatactcttaattctaaggaaaacctggaagcacaatgggagatgacagtgag

SEQ ID NO: 732992 - DNA, 82 bp, Homo sapiens
agacgttcagctcccggaaaaactacaccaagcacatgttcatccactcggaaatcttcccaaggctgcagacaccgacgga

SEQ ID NO: 732993 - DNA, 75 bp, Homo sapiens
gccccctcgccgtgctcagccttctgagaagcagtgtgccaggactttgaaaggctgctaggatgttgctgttgt

SEQ ID NO: 732994 - DNA, 75 bp, Homo sapiens
cctcgcctttgccgatccgccgcccgtccacacccgccgccaggagttttgagagcaaaatgacaacacccagaa

SEQ ID NO: 732995 - DNA, 74 bp, Homo sapiens
ctaaacttttggccaagagaatgaagaggatggagatgaagatgaggaagctgagtcagctacgggcaagcggg

SEQ ID NO: 732996 - DNA, 80 bp, Homo sapiens
cgctcttaggcgacacacctggaagcaggtctcggcgcggaagatggccggcggcgtggacggccccatcgggatcccgt

SEQ ID NO: 732997 - DNA, 100 bp, Homo sapiens
cggcgccgccgaggcccagatgcgccaggcgcagacggggaagcggagccaacatgccagtggcccggagctgggtttgtcgcaaaacttatgtgacccc

SEQ ID NO: 732998 - DNA, 100 bp, Homo sapiens
ctgccaggatgtggagtggacttcctagcagagtgctgggcctaaaggagataacatttatgaatggagatcaactatacttggtccaccgggttctgta

SEQ ID NO: 732999 - DNA, 50 bp, Homo sapiens
cgccgcgcacaaccgcacgtgcagggaccttaccaggacacattagaatt

SEQ ID NO: 733000 - DNA, 73 bp, Homo sapiens
caaaagcgcaagcatgatgagatcaaccatgtgcagaaggaacagattatggcctttgcaagcaaatgagtac

SEQ ID NO: 733001 - DNA, 82 bp, Homo sapiens
cgaactcgaccaggagcggaaggcgcgctatgccatccagcagaaattgaaaggagccttcacgtaaatgggtccagtcatg

SEQ ID NO: 733002 - DNA, 133 bp, Homo sapiens
tcgcggcgctcgagggaccatggccgatcctcgcgtgagacagatcaagatcaagaccggcgtggtgaagcgcaattcaattaaaccccagctatatcagggcaatattgaggagagcagagttgtatgagaa

SEQ ID NO: 733003 - DNA, 96 bp, Homo sapiens
tgcgggagaacatcaaggccagcaccggagtccagctacttgctcttttagttcccactttgatatcttacctgctggatgaaaattcttttgcct

SEQ ID NO: 733004 - DNA, 80 bp, Homo sapiens
aggacccacgttttcgagggcgcagagaagaaaggattctggttgatctgaaaaatgaagtttggtatcaaaaatgtcat

SEQ ID NO: 733005 - DNA, 100 bp, Homo sapiens
agcgacctgaatgaggtcccggtgaaggagctgagatgtcgccacaatgaatgagcagggcttctgcaagatcgtgggccgctctaaggatatgatcatc

SEQ ID NO: 733006 - DNA, 100 bp, Homo sapiens
gaggcaccgggatcgtgaccgagaccgtgaccgagagcgtgaccgagagcgcgaatatcgtcatcgttagaagcatgtcctggaattggaagccaaaatg

SEQ ID NO: 733007 - DNA, 75 bp, Homo sapiens
tggcacccgaggtcatcaaacagtcggcctatgactcgaagcaaaaagaatgtttccagctgctacatttaagag

SEQ ID NO: 733008 - DNA, 80 bp, Homo sapiens
gcagacccggtttgctgatcgccccagggatcaggaggttgatgataattagaagcatgctttccactgaacttcccgac

SEQ ID NO: 733009 - DNA, 75 bp, Homo sapiens
cagctgagcgctgccatcccggccacgcgggtggaggtgtccgtgtcctgcagaataagaccacagcttgccaaa

SEQ ID NO: 733010 - DNA, 100 bp, Homo sapiens
gctgtaccagtacacggcccacgttgccaggcagacctgttatcctaaactaggtgagtcagcttttggtacatgtgatgattttcagtgtaaccaatga

SEQ ID NO: 733011 - DNA, 74 bp, Homo sapiens
aatgagagaaaaggccaaagagaggtgttctgaacaagttcaaggccaaagaggtgctgaaaaaatatttggag

SEQ ID NO: 733012 - DNA, 82 bp, Homo sapiens
aaatcttagctctctcaatctctgtctgaactggatcataaatgacagattccagaggggtgactaccatattgatgtctgt

SEQ ID NO: 733013 - DNA, 50 bp, Homo sapiens
acagaacgtggcacgttggaggaaatcaatggagtctcgctttgtcaccc

SEQ ID NO: 733014 - DNA, 100 bp, Homo sapiens
tgggaaatgccgtgtcagtggggttgttttgggtccgggtgtcagtgaacggggctgtggttctggaggagcctgttggggagctgcgagccctctggga

SEQ ID NO: 733015 - DNA, 98 bp, Homo sapiens
ttgcttcagagtgtgaagtcaaatgcatgccaacattccagttttttaagaagggacaaaagtatgatccagagctgtcatctcgacaatttggggtt

SEQ ID NO: 733016 - DNA, 51 bp, Homo sapiens
gagtttaaggagctgaaagcgcggttggtcaaagaaaaagtgatgtatgaa

SEQ ID NO: 733017 - DNA, 98 bp, Homo sapiens
ccgattcctcctccttggtcgccgcgtccttggctggcgtggaggagtggatgcgggccatccagatggtcgccaacagcctcaagcagcgggcccca

SEQ ID NO: 733018 - DNA, 100 bp, Homo sapiens
cggcgagggaggacagggggttcatcatgggtggtcttcaagctgacagagaagctgacggaacagaaggagtggatgaagatataattgtgacccaaag

SEQ ID NO: 733019 - DNA, 50 bp, Homo sapiens
tttcagaggggaatgctaagagtgtgtactgtaagcacggtcacctgtgt

SEQ ID NO: 733020 - DNA, 100 bp, Homo sapiens
gcctttgaccttctgccatgattgtgaggcctccccagccacgtgaaactgaatggaagttggatacactttgtgacttgtacgagacactgaccattac

SEQ ID NO: 733021 - DNA, 100 bp, Homo sapiens
cactgtcagcgagaccatgacgcccatgcactaccacctgcgggagatcatcatctgcacctaccgccaggccagtactgatgcaggcactgcaggagcc

SEQ ID NO: 733022 - DNA, 100 bp, Homo sapiens
gcggggcagccgccgctcctccgggtgtaatgttcaagctcagaaatgccttatgtggatcgtcagaatcgcatttgtggttttctagacattgaagaaa

SEQ ID NO: 733023 - DNA, 100 bp, Homo sapiens
atttgtaggcgggttatctgcgaacacagtagtggaagatgtaaagcaatatttcgagcagtttggcaagggacccagacatggagctgcgggaagaagc

SEQ ID NO: 733024 - DNA, 100 bp, Homo sapiens
ccacggccactccagtgccaacagccaattctacaggctttcttctagtcaagatgagtgataaaccagacttgtcggaagtggagaagtttgacaggtc

SEQ ID NO: 733025 - DNA, 97 bp, Homo sapiens
cagccagtattcgggaaaggcagacagatgcctgaggaagtgcaccatggagaggaggaggtggagacttttgcctttcaggcagaaattgcccaac

SEQ ID NO: 733026 - DNA, 75 bp, Homo sapiens
tgggtcacgaggcttcacggaggaggtggggagtaccctgacttctaccggaagctctacggcctcttggacccc

SEQ ID NO: 733027 - DNA, 100 bp, Homo sapiens
aaccggtagcgcttgcagcatgtcttccgtgtgtgctaagatcgtgcagctcctggggcagaatgaggtggactatcgccagaagcaggtggtcatcctg

SEQ ID NO: 733028 - DNA, 100 bp, Homo sapiens
atccgggcccgggtgtcttccggcagctcctctgaggtctcctccatcaactccgacctggagttctgggaggtgatcagtgatgaacatggcatcgacc

SEQ ID NO: 733029 - DNA, 74 bp, Homo sapiens
gtgaccgagagcgcgaatatcgtcatcgttagaagatgtgatgaatatgtcacccagttggatgagatgcagag

SEQ ID NO: 733030 - DNA, 90 bp, Homo sapiens
ctcgggggtcatgatgggcagcaagatggcgtctgctagtagggtcgttcagaactcgaaaattaatgctgaaaataaggcgaagatcaa

SEQ ID NO: 733031 - DNA, 90 bp, Homo sapiens
ttccgccctaatggaggtctccagtttcgaatccctgcccagagtccagcgcttccttcctgtcgaggatcaccttctggtggatcacag

SEQ ID NO: 733032 - DNA, 75 bp, Homo sapiens
gagagaggtacctctccttttccctctccctttccctaagcttccttcaaaatgtctactgttcacgaaatcctg

SEQ ID NO: 733033 - DNA, 51 bp, Homo sapiens
gatgccaatctgaatatcaaaatagcaggaagcagaatctggtaatataag

SEQ ID NO: 733034 - DNA, 131 bp, Homo sapiens
aggagtttgaggacaagctggaggtggagcagcagaacaagaggcagctggaacggcggaccttgtgccggagccgactactggagatgacagtgatgctgccacctttaagccaactctccccgatctgt

SEQ ID NO: 733035 - DNA, 100 bp, Homo sapiens
ttttggtgcagctagagaattagaagatgatgagcagtttgtttctctgtatggcacagaagaatatttgggtttttaatgaccacaacaagcaagcatg

SEQ ID NO: 733036 - DNA, 100 bp, Homo sapiens
ggggagcggcgttggaggccaccgtttccagccctccttacagcctagaaaaaatgacagatctcgtagctgtttgggatgttgctttaagtgacggagt

SEQ ID NO: 733037 - DNA, 74 bp, Homo sapiens
ctcatcaacatcacggagcacgaggtcctctccacccggatcctggccatgaaggcctcgctctgcaagctgtc

SEQ ID NO: 733038 - DNA, 48 bp, Homo sapiens
gtgtgcaaacccgagagaactgggatgtggtttcccacagtaaaaaac

SEQ ID NO: 733039 - DNA, 131 bp, Homo sapiens
tggggtccctgttgctcaccccgcaggagaacgagtccctcttcactttcctcggcaagaaatgtgtggtctatggtaccgttgcttcaggtgatatccaggggttctcctatgtcttttgaagattctag

SEQ ID NO: 733040 - DNA, 80 bp, Homo sapiens
ggctaccatggtctacaagactctcttcgctctttgcatcttaactgcaggctgatcagctgaccgaagaacagattgct

SEQ ID NO: 733041 - DNA, 75 bp, Homo sapiens
cctacttcaagtactccgtcatgatcaacaaggccacgccctacaactacccagccaatgaatttccctgtttgc

SEQ ID NO: 733042 - DNA, 75 bp, Homo sapiens
cggtgacgacaggcagcaaaagaccagttacaacattaaagcctgaacttggaaagataatgtacagtgatttca

SEQ ID NO: 733043 - DNA, 80 bp, Homo sapiens
ccctgcagtacctgcagaaggtctctggagacatcttcagcaggggcactatggcagacaaagttaggaggcagaggccg

SEQ ID NO: 733044 - DNA, 83 bp, Homo sapiens
tccttgctggtgcatgcgtcgtcggcctctgggcagcaggttttgtagtgcatccctgagcatgagcacagaatgaagcggcg

SEQ ID NO: 733045 - DNA, 75 bp, Homo sapiens
ctggagtccgcgcctccctggctgcatcttcctcccgtgaggctggccgagctccacgctgatctgaagatacag

SEQ ID NO: 733046 - DNA, 106 bp, Homo sapiens
gcgggacagagcgcctgcgaccccagtcggtgctccggggaggtcacctgacgaggagcaataggagtgaaacatccacatctgataacacagaaacttaccaaga

SEQ ID NO: 733047 - DNA, 100 bp, Homo sapiens
caagagtccacaaagggacctgatgaagcgaagatcaagaaaggcctaaagaatgtatttgacgaagcaatattggctgccctggagcctccagaaccga

SEQ ID NO: 733048 - DNA, 101 bp, Homo sapiens
gagaagcagttcctgccggcgctgctgagtttcttcatctacaacccgcgcttctggccgcgggaaggagagtgggcctttggagtgacgctgtgggaact

SEQ ID NO: 733049 - DNA, 100 bp, Homo sapiens
ccacccaggcctcagccaggacctttcaggccagacaggagcacctgaccaaaggcttcacagaagtcagcatccggtattgtagctgtccctttcagcg

SEQ ID NO: 733050 - DNA, 82 bp, Homo sapiens
catcacctacccgcagggcctggcactggccaaggagattgcagggtgcgtgaacgcagtgaacgcgaacaacgcatgcagg

SEQ ID NO: 733051 - DNA, 98 bp, Homo sapiens
ggagatctacgaccttcagagcaaatgtcagggtcctcatcaccgggggcatcgtggccacagctgggcgcttcacccagtggtactttggtgcctac

SEQ ID NO: 733052 - DNA, 50 bp, Homo sapiens
gcagcgcggcagagtcatgggggccaagaataaaatctttatgaactaac

SEQ ID NO: 733053 - DNA, 105 bp, Homo sapiens
ccggagcgcggagcccggctcccgcaccatggaggaggacgacagctacggtgtcgtgaaaactacccctaaaagccaaaatgggaaaggaaaagactcatatca

SEQ ID NO: 733054 - DNA, 49 bp, Homo sapiens
ctgcgttaagccggctctggagacagatgtccctaaaccaatgactgct

SEQ ID NO: 733055 - DNA, 50 bp, Homo sapiens
cacttcatccagcagtgcacagttcttcgcacactcatgggacacaaagc

SEQ ID NO: 733056 - DNA, 100 bp, Homo sapiens
gccagggacagaggccagcgcgctgcaacacaagatcaagaactccatctggtcagtatgggaatcctttaaataaatatatcagacattatgaaggatt

SEQ ID NO: 733057 - DNA, 82 bp, Homo sapiens
gtcaccctcgtcttgcattttcccgcgtgcgtgtatgccgacaaaaggatcaaggtggcgaagcccgtggtggagatggatg

SEQ ID NO: 733058 - DNA, 95 bp, Homo sapiens
gcggcggtggcagccatgttgtttaattgacctgctgactgtgggcgagtctcggcagatggtagctgtggcagagaagatccggacagccttgc

SEQ ID NO: 733059 - DNA, 101 bp, Homo sapiens
atgagatactttctagaattgctaaggaaacggaagagattaaggaccttgaagaacagcttactgaagcaactggccatgccacagcacataaagattac

SEQ ID NO: 733060 - DNA, 101 bp, Homo sapiens
agggaatccgggtgtccctgtacctgcagctgctgcagctgctgcacagaaattaatgcgaacagacagacttgaggaaacccagcgtttgctggcagaac

SEQ ID NO: 733061 - DNA, 75 bp, Homo sapiens
attgaccccacttccaaggaagaccccaagttcaaggaactggtcaagagcccaggctaccagagcacctgtccc

SEQ ID NO: 733062 - DNA, 99 bp, Homo sapiens
aaatattccacactacctacagtgaaatagcatggatttcatccattatgctggctgttatgtacgcaggaggacttgtttacactgggcatgtaaacg

SEQ ID NO: 733063 - DNA, 75 bp, Homo sapiens
tgggacagcccctgccttctaccaggattggttgccgtggtctttactgcttttctccctgatgtgtgaaacaag

SEQ ID NO: 733064 - DNA, 100 bp, Homo sapiens
agcaccccaaagcaattacacccagaagattacctttgactcttgtcccaggcaagaaacctattggaattcgagacttaattaatgaagctttgcatcg

SEQ ID NO: 733065 - DNA, 74 bp, Homo sapiens
caccttcagtatctcagtcctccagtgtttggatattcaggtactccgtggaaggcttcatcgacaagaacaga

SEQ ID NO: 733066 - DNA, 82 bp, Homo sapiens
tgggctggacagcggccacgggcagcctcgatgctgaacattctagtatgccagtagaaaaaaatatcactttagaaaggcc

SEQ ID NO: 733067 - DNA, 100 bp, Homo sapiens
ttgtacgatttctggtacagttagatgactacagacggaatcagtccccaatgcctggaaattcctcattggattactgtgttttaaacagaatttcgtg

SEQ ID NO: 733068 - DNA, 96 bp, Homo sapiens
tggaagagagcggcggccgctcacaacatgcacagcctggcgacggctgcggcagtggagctactgctgtggttcaggcagccctatgcaaaccca

SEQ ID NO: 733069 - DNA, 58 bp, Homo sapiens
ttgatctccgccaccgtcttcaggccaggtatattgaagcaagtcaaagattacatta

SEQ ID NO: 733070 - DNA, 75 bp, Homo sapiens
ggggccttggcgaatggctttcttgctggccacttgcggatgccctgcaggagtcattaaatcaaaacttcatgc

SEQ ID NO: 733071 - DNA, 75 bp, Homo sapiens
atggaaggaaagtgtccctgtcctgaacccctacggtggagaccatccatggaaaagaacccccctgatgatacg

SEQ ID NO: 733072 - DNA, 143 bp, Homo sapiens
ctgcggttgtcaaggattcagagcagatgtgatctgcgctaggtggcatctcctctcacggatgcctcggaaatctgaaatagagtactatgctatgttggctaaaactggtgtccatcactacagtggcaataatattgaac

SEQ ID NO: 733073 - DNA, 90 bp, Homo sapiens
cctgtacagcctgcagaactgatggaatacaggggggacagttagattctgaattgttaagcagagctgcttgatgcagaagatgaagac

SEQ ID NO: 733074 - DNA, 75 bp, Homo sapiens
cgcccgggagctgtcggccccggcccgactctatcacaagaaggagatggcgtctaccagaaggggatggacttc

SEQ ID NO: 733075 - DNA, 100 bp, Homo sapiens
aagaagttaaggagtatgcccaagttttccgtgaacatgccaacaaattgattgaggtgggcaatgggcactccaatgaggcagccttgatcctccacag

SEQ ID NO: 733076 - DNA, 75 bp, Homo sapiens
tcccagctctctctgggcatctggaaaggtggacgtctgatttatgaagctccccatccacctatctgagtacct

SEQ ID NO: 733077 - DNA, 90 bp, Homo sapiens
cgggagggctgtgtgatggcctcggagcgcccggagccggaggttatgaagacagtatggagtttccagaccatagtagacatttgctac

SEQ ID NO: 733078 - DNA, 87 bp, Homo sapiens
acattctgggtgacacgctgggggtcggcaccttcggcaaagtgaaggagggctttaaggaagcagcggagaagtttcgaatggaat

SEQ ID NO: 733079 - DNA, 90 bp, Homo sapiens
cttagaagtggtgatgcaagaagtttctaggaaaggccggacaccaggtgctggcatcggccccaccattcagattggggaggagacggt

SEQ ID NO: 733080 - DNA, 100 bp, Homo sapiens
cctgtgtggccaagaagctggtgtgcggagatgaagggaggggctggagacaggtctgaggaggaggcgtcatccacggagaaaccaaccaaagccttgc

SEQ ID NO: 733081 - DNA, 75 bp, Homo sapiens
ccgagggaaacaagaaaacatcaaagaggtctagcaaaggtcaaagattctaaactgcctgcatataaggatctc

SEQ ID NO: 733082 - DNA, 116 bp, Homo sapiens
ataaagtcctgaatgtgaccctgcagattacgctctctcagattaaggatatgatgcatacttctactggaggagggttctgtgactgtggagacacagaggcatggaaaactggc

SEQ ID NO: 733083 - DNA, 75 bp, Homo sapiens
ggcacccacaggcctaacattcgcgagtccaccttccgccgtccgcgaggtggccatggtggaggtgcagctgga

SEQ ID NO: 733084 - DNA, 83 bp, Homo sapiens
gcaacttttccgaggaggaggacagcgagcgcagcagtgacggcgaggaggccgagacaatgcagatcttcgtgaagactctg

SEQ ID NO: 733085 - DNA, 98 bp, Homo sapiens
tgggatagcagattgtttgcctactccaggttcttcagaagagtgtgatcattggagtgattgaaggtggagatgtgatggaagagaggctgaggtca

SEQ ID NO: 733086 - DNA, 100 bp, Homo sapiens
ttagagctcaacccagacacctgcaggttggcaaaagcagcttttgatgatgcaattgcagaactggatacgctgagtgaagaaagctataaggactcta

SEQ ID NO: 733087 - DNA, 101 bp, Homo sapiens
ccagaaactaacccaacagcagaaagcggccaaagaatttagaacgagtctacgtggacacgcaagtttcagcgagcggggatttcctgcgaggccgagcg

SEQ ID NO: 733088 - DNA, 75 bp, Homo sapiens
ccggctttccggacgccacgtgcagaccggaagagacacgcggggcttcaggacccagccgccgcctccatctct

SEQ ID NO: 733089 - DNA, 51 bp, Homo sapiens
gataaggactccagccactatacgttggaacttgccaggaatccagcaatg

SEQ ID NO: 733090 - DNA, 101 bp, Homo sapiens
cgggcaggagcctggcgaggatgcaccttcccctgccttggaaaggcgcattctacattctaaaggggagctcagtgaagatagacataaacagtatgagg

SEQ ID NO: 733091 - DNA, 114 bp, Homo sapiens
aacgggagtgtcctggacccagctgagcgggcggtcattcgcatcgcagttccagggtctccctccactgctgtagtaacccgggtccggggcctcggtggtgctcctgatgcc

SEQ ID NO: 733092 - DNA, 87 bp, Homo sapiens
aactctttgatgatgcatccaggattaaactgcaaatatctcatgaagctgctgcctgtatcactggtctccgggcagccatggagg

SEQ ID NO: 733093 - DNA, 75 bp, Homo sapiens
gcagaaattatattttccagcccgtgtctgcagaacaactcttggaatttatgcaccagttgcctgcttttgcca

SEQ ID NO: 733094 - DNA, 101 bp, Homo sapiens
gaactgaaaaagaaaactgggcaatattagagaaaattaggaagactgaaaggcaaggccatttaaatgtgttgaccctgatagtcctttgcacagtgatc

SEQ ID NO: 733095 - DNA, 75 bp, Homo sapiens
cacatgtgaaaccagacctcatagatgttgatcttgtaagagaatttgcaccatcctgggattgtaaacctggaa

SEQ ID NO: 733096 - DNA, 75 bp, Homo sapiens
gccgagcaggaggcgccatcatgagatgctcttagtgatcttgcattacactttctgaataaaatgaagatcatg

SEQ ID NO: 733097 - DNA, 90 bp, Homo sapiens
caacaaatacaatttctcttttgactactatgcattcctgattctaataatgatctcctacattccaaagttgctgggagcctgagcacc

SEQ ID NO: 733098 - DNA, 88 bp, Homo sapiens
cgagcgcaccccgcccccggcgccatcttcccgaccgcgagccgtccagtcccctgcagagagctgtgacctgctgggtgacatccag

SEQ ID NO: 733099 - DNA, 100 bp, Homo sapiens
ggcctgatggatcatgaggatttcagagcctgcctgatttccatgggttatgacctggaatattccctgggcttttgaggcaataaagcaagcaagtgaa

SEQ ID NO: 733100 - DNA, 82 bp, Homo sapiens
aaaatatcccaaggactaatctgatcgggtcttccttcatgtcagaaagcaacattgaatgcagaagaaatggcggacttct

SEQ ID NO: 733101 - DNA, 100 bp, Homo sapiens
aaaaatcatttttcttctctgggaaggtgaacatttgtagcattgatttcccggatctggtaacatggcaaaagatatctctgttgaggagctggcgcgg

SEQ ID NO: 733102 - DNA, 100 bp, Homo sapiens
cctcccccttctttcgatcagagatcggcggagaccctcgaagtgcgcaaacttgacactcaccctgaccgcagtgattccagcagtagttcaagtgatg

SEQ ID NO: 733103 - DNA, 76 bp, Homo sapiens
ctgaaggaaaacctccttatgctgatatacatccaatgagggttccacaaatcaacaagacttttcttcagggaaa

SEQ ID NO: 733104 - DNA, 100 bp, Homo sapiens
gttgctgctgtactccttctccggactatgatttaatctccaaagaaccaaagccttttgtatttgagggaaaagtacgtggtcctattgttgttcctac

SEQ ID NO: 733105 - DNA, 50 bp, Homo sapiens
gggtggaaaagtgttcgccgagggaccattgacatttatggatgtggcca

SEQ ID NO: 733106 - DNA, 100 bp, Homo sapiens
gtttagtttagtctgtgaggaaactggcggctgctggtagttccatgctgtctgttcagacttcagcttggtgttcttctgtgtggcagttcagaatgat

SEQ ID NO: 733107 - DNA, 100 bp, Homo sapiens
gaacatgcagtccctgcttcctgcctaatctatgccagcaattatgacaatgttagcagaccatgcagctcgtcagctgcttgatttcagccaaaaactg

SEQ ID NO: 733108 - DNA, 75 bp, Homo sapiens
gacattcagtcagaagaaggctgctattgaaagagagtatgcacagtgctactatatcggggccacagatgatgc

SEQ ID NO: 733109 - DNA, 100 bp, Homo sapiens
ctgtttctactcttgggatttccaaaaggaccacaggatattggtcccattctattcagtgggctcgggatgagtttgaaggcctcttcaagcagccagc

SEQ ID NO: 733110 - DNA, 82 bp, Homo sapiens
aacccgttcttgcctcaggccagtcgcctccaggccaagagggatccttcacccgtgtctgacctcctgccccccgaggtct

SEQ ID NO: 733111 - DNA, 96 bp, Homo sapiens
cttttctcgtgctgtggttgcctcactggggattgtacattttctctttggcccagagtgcccttatgcctgcacagttgttttttaagacggaag

SEQ ID NO: 733112 - DNA, 74 bp, Homo sapiens
gccagctcaaccgcttcgtgcaactctccgggcggccgcacctgccaggtaacagtatgactaaatatactgag

SEQ ID NO: 733113 - DNA, 83 bp, Homo sapiens
cgcaaccccagatccatttacactttacagtggatcttgaacgcaccttcacgtttcgaaattcaaagcagacctactcaggg

SEQ ID NO: 733114 - DNA, 100 bp, Homo sapiens
cagcattatagagagagagatgatgatcaggagaaagcttcttgctatctacctccaccatgatgaaagtgtgttaaccaacgtgttctgctcacaaatg

SEQ ID NO: 733115 - DNA, 100 bp, Homo sapiens
gaaatcgcctcccgagaagaagttgaggcgctatttcacacaaaagatgttggacaatttctacaattttgcttcatcatttgctgtctctcaggcccag

SEQ ID NO: 733116 - DNA, 97 bp, Homo sapiens
aatgtgtgaacaccgtgattgcagatattgttaatcctgccagtctttctcttcaagccagggtgcatcctcagaaacctactcaacacagcactct

SEQ ID NO: 733117 - DNA, 90 bp, Homo sapiens
cgttggttcaaggatggcaaggagctcaaccgcagccgagacattcgcatcaaatatggcaacggcagattcagcattcccatatttgaa

SEQ ID NO: 733118 - DNA, 100 bp, Homo sapiens
ccctgaaaagattgaaaatatctacatgcgaagtgagcctgttgctcaggtgtttgtccacggagaaagcctgcagtactgccaaatctgtcgaaaggga

SEQ ID NO: 733119 - DNA, 88 bp, Homo sapiens
tcagcagccgccgccagagcaggacgaaccgccaatcgcaaggcacctctgagaacttcagtagccacgatggaggtgatgaacctga

SEQ ID NO: 733120 - DNA, 82 bp, Homo sapiens
ggaaacactccctggaggttctgacccactccctctcagcctccgcctggtctctggttgacatcatggacatatgtgagtc

SEQ ID NO: 733121 - DNA, 100 bp, Homo sapiens
cccgaaacgcgagtccggagaggagttccgcatggagaagttgaaccagctgtgggagaaggcccagcgagatgatgacctggaagaaggtgaagtgaag

SEQ ID NO: 733122 - DNA, 51 bp, Homo sapiens
atttattaaaggaagcacacctaaggccctggccaacgtcaacattgggag

SEQ ID NO: 733123 - DNA, 100 bp, Homo sapiens
tgcctatccagctccttacttggatgaatatggagaaacagaccctggcctgaagatgggtttccagatttccaggattctgtgcaaacactcttccagc

SEQ ID NO: 733124 - DNA, 100 bp, Homo sapiens
aaggaaatcatgtcaagcgaagccttgaaaaagctgccctgagacggtgtcccgccgaaagtttcaccagtgatcattaaagaatgggcagcttacaaag

SEQ ID NO: 733125 - DNA, 75 bp, Homo sapiens
ctgatgtgtctctcacggcttgaaaggcctggcatgcgtgggcagtgatgaacttcgaagctgtgctacactaca

SEQ ID NO: 733126 - DNA, 101 bp, Homo sapiens
gctgtggggctttgtaaagccatgtcccagtgtgaatgggaaacgctacttcgaatgccaggccaagtatggcgcctttgtcaagccagcagtcgtgacgg

SEQ ID NO: 733127 - DNA, 100 bp, Homo sapiens
tccagagtctacaacgtggtgatatacagccatggcagagagagatcatcattgcctgaatttagctttgtgactgcaagagcaagaccagttcctgtct

SEQ ID NO: 733128 - DNA, 100 bp, Homo sapiens
aagaagatcaaaacccaccatgccccagatcaccggggaacccttgatccgtcgatcagatgataatgaaaaggccttgaaaatccgcctgcaagcctac

SEQ ID NO: 733129 - DNA, 74 bp, Homo sapiens
agtctttccgcttcttgaatttctctctgtaaaggaggcttttctgatgtggatcacacctatgctcaaagaac

SEQ ID NO: 733130 - DNA, 75 bp, Homo sapiens
gctgacaccgccgccacaccgccgccacaccgccgctgcctcagtcatgccggatacaatgtctctttgctatat

SEQ ID NO: 733131 - DNA, 83 bp, Homo sapiens
aacaaatcagatcgcactcctgaaattaggaaaattgccactgctttataagaatccacattcatctcaatggaaggatcctg

SEQ ID NO: 733132 - DNA, 75 bp, Homo sapiens
aacaatggatggcaactccctgctctcggtaccaagggaagactaggagagctggagttgcagttaaaacatgga

SEQ ID NO: 733133 - DNA, 100 bp, Homo sapiens
gatgacattgacctctttggatctgatgatgaggagctagatgagaccctgtcggagagactatggggcctgacggagatgtttccggagagggtccggt

SEQ ID NO: 733134 - DNA, 100 bp, Homo sapiens
ggtgatgccaccccagcccgtggtcctgatgccaacagtgtaccagcagggcgttggctatgtgcccatcacagagctcccagctcctccagcagccgac

SEQ ID NO: 733135 - DNA, 90 bp, Homo sapiens
ctgagctgcgaggaaaatggcggcgggagagcaaatcatggaggaagataaaaaacatggtgcactggtctcccttcgtcatgtccttca

SEQ ID NO: 733136 - DNA, 100 bp, Homo sapiens
atactcacaatgggctactggccaacatacacgcccatggaagtgcacttaaccccagaatttcctcactgcttggaggaagatgagaattctcagaggt

SEQ ID NO: 733137 - DNA, 82 bp, Homo sapiens
ccgcggttctaaagctgcgaggcccgcggccgccgactgctgcgagcaagcggtctcctgaggctggctgtgctgcctgagg

SEQ ID NO: 733138 - DNA, 50 bp, Homo sapiens
gagtggctctgcttctagaagcgtaagggttccccactgaaggacttggt

SEQ ID NO: 733139 - DNA, 83 bp, Homo sapiens
tgcagagatgctgtggttcggggggtgctcggagaagccgtacaagtgctcagagtgcagcaaggccttcagccagaagcgag

SEQ ID NO: 733140 - DNA, 100 bp, Homo sapiens
gcatccgggccgtgctgctggggcctcccggggccggtaaagggacccaggacttcactgaggatgtcaactgtgcttttgagttcctgctgaagctcac

SEQ ID NO: 733141 - DNA, 100 bp, Homo sapiens
cagctacttaatcctactcagaagaacttgtacagagatgtgatgttggagaactatagcaatctggttttcttgggttgaagaaatatggagatcaaca

SEQ ID NO: 733142 - DNA, 100 bp, Homo sapiens
ccgttaagtcccccaaagatgagatttacctgtgagatgtttcatcccaacacaaaggatggtgattactggagattgcttatacctggaaactataaac

SEQ ID NO: 733143 - DNA, 99 bp, Homo sapiens
agtcagcagccggcagcagcagcggagaccacctgggaacgtcccagcagttctcctgggattccagccagccctggctctcacaggagctctctgcct

SEQ ID NO: 733144 - DNA, 100 bp, Homo sapiens
tttgcttttgttgaatttgaagatccccgagatgcagctgatgcagtccgagagctagatggaaggagcttgaaatcgtcattggagatgaacacatttc

SEQ ID NO: 733145 - DNA, 82 bp, Homo sapiens
gggtcgcccccaccattatttcgctgggattctgtccctgaccgtcttcacagtccaggtgatcttgactactgctttacag

SEQ ID NO: 733146 - DNA, 98 bp, Homo sapiens
ccggctcctccagctaccggcccaaggccatctacctggacatcgatggacgcattcagaaggcctccggtgtggctgtctctgatggtgtcatcaag

SEQ ID NO: 733147 - DNA, 100 bp, Homo sapiens
tgtggtctcaaccccggtagacctggaggtgaagctgcggatcgcccaagatgctatctgtgagcagcagttgataatgtgcataaaatctgggaacagg

SEQ ID NO: 733148 - DNA, 75 bp, Homo sapiens
cgccgctctagcggccgggactctgaactatggcgagatggctccgaagtcaaaaaagaaggggcaccccgggag

SEQ ID NO: 733149 - DNA, 101 bp, Homo sapiens
agctatgcagtatttctttggcatcactgcagctagtaatttgccttctggattgttcaaaccttgtactactcagctgatcacaagctgcttgatgggaa

SEQ ID NO: 733150 - DNA, 97 bp, Homo sapiens
tagacttgtctgacctagaagctgagaaactggtgatgttccagaggaggctgaggccaccatggagcagtgtgcgtgcgtggagagagagctggac

SEQ ID NO: 733151 - DNA, 100 bp, Homo sapiens
ctcggtggtcatgctgctccaccacgtggtcactctcatcctcatcgtctcctcctacgccttccggctggaccgctttgagaagaccaatgagatgctg

SEQ ID NO: 733152 - DNA, 82 bp, Homo sapiens
aatgaagaaagtcagggggactgcaaaggccaatgttggtgctggcaaaaagtaacaaatgtggcaattattttggatctat

SEQ ID NO: 733153 - DNA, 75 bp, Homo sapiens
ctccgaggcgaccactcctgtgatcgttgcggctggggctggaggggaggaagatcagcattgttgatattgcca

SEQ ID NO: 733154 - DNA, 100 bp, Homo sapiens
ctttgacaagtttgagtgttgctggaacggttcggataggtacttggaaaaatggacaaggattgtgaaatgaaacgcaccacactggacagccctttgg

SEQ ID NO: 733155 - DNA, 98 bp, Homo sapiens
cggggccgggacgccatgtccatggaggaccccttctttgtggtgaaagggagctttcaagttgtggatggaataaaaaagaaaaatatagttctgca

SEQ ID NO: 733156 - DNA, 100 bp, Homo sapiens
aaaagatctctggaagcgattaatgataaaatttcatggagaagaaggccttgactacggaggggttgccaggagtagcccatcgaagccagagcagtga

SEQ ID NO: 733157 - DNA, 80 bp, Homo sapiens
aagaattagtgtctccatcgtcatcagaaactgaaggcaactttgtctatcgcacaggaattctcaagaaatttgaggaa

SEQ ID NO: 733158 - DNA, 111 bp, Homo sapiens
cgggtcgcgcgcggccgagtcgcggaggcgcctccgctgcagtcgctgcgtctccaagggggatatgagactttctactcggaatatcctgagtgttgcgtggatgtaaaa

SEQ ID NO: 733159 - DNA, 110 bp, Homo sapiens
atgacacctctgggcttgagaataagactgttgttgtcaccacaattttggtgatcttattcctgataatgttggttatgcgcaaacgtgttgctcttaccatcgccttg

SEQ ID NO: 733160 - DNA, 83 bp, Homo sapiens
cagaacagttggatcttgctcagtctctgtcagaggaagatcccttgaacaagttgaaatcatcgcagaaggataaagttcgt

SEQ ID NO: 733161 - DNA, 75 bp, Homo sapiens
ctgcggtggccaccgcggcggagcccgaggtactttgatggaaacctggagaagctctttgctgagtgtcatgta

SEQ ID NO: 733162 - DNA, 89 bp, Homo sapiens
accaccgtttccatcgtctcgtagtccgacgcctggggcgatggatccgtttacggagggaccagttactctccacaagaaaattcaca

SEQ ID NO: 733163 - DNA, 90 bp, Homo sapiens
ggggtccgccgtcctagccgctgctgtcttcgtgggaggcgccgtgagttcgccgctggtggctccggtgctcttattaaacaagtgaac

SEQ ID NO: 733164 - DNA, 76 bp, Homo sapiens
gtacaagcttacgtctctgctcttcagtacaatcctctgacaagctctctactgatgatctgaactccctcattgc

SEQ ID NO: 733165 - DNA, 101 bp, Homo sapiens
aggaattgttttggcctaggatcatccaggttatcaatactctggctgaccatcatcatcgtgggactgactttggtggaagtccttggttacatgtcatt

SEQ ID NO: 733166 - DNA, 100 bp, Homo sapiens
gatgcccaggtgagggccgcggtggagatgtatattgaggactgggtcattgtccacagaaggagtgtgggctgctgctctcctctgagggcgagtgtca

SEQ ID NO: 733167 - DNA, 100 bp, Homo sapiens
agccttttgttccaggaatcacaaatgatatggtagacgttacatccaagaggaaataatccaggcaaggaagcacaagctgatcaagatgtgtagttct

SEQ ID NO: 733168 - DNA, 100 bp, Homo sapiens
ctaaaaacaagactggggctgctcccatcattgatgtggtgcgatcggtaatcttcagcaagtactgcaactccagcgacatcatggacctgttctgcat

SEQ ID NO: 733169 - DNA, 90 bp, Homo sapiens
agacggctttggaatccaccagctacatccagctccctgaggcaggtatctggacaggaagacttctcccatcagctttaccagaggaag

SEQ ID NO: 733170 - DNA, 82 bp, Homo sapiens
cggaggagcccgaccgacccggttatgaagacagtatggagtttccagaccatagtagacatttgctacagtgtctgagcga

SEQ ID NO: 733171 - DNA, 90 bp, Homo sapiens
gaatcccctgtttgagaaaaggcctaagaattttggcattgatcatgtttcaggcatatggagacaaacagggaccactgcatggaatgt

SEQ ID NO: 733172 - DNA, 75 bp, Homo sapiens
aggctctgtctggggtcacgtcgcacgggctgtcctgcgaggccaagacaatgcaaactccagtgaacattcccg

SEQ ID NO: 733173 - DNA, 100 bp, Homo sapiens
cttccccgccccggggagcccgccccctgccccgcgtccctgccgacaggttggggtgactcagtgggaacgccatctgagcggggcatgacctatgacg

SEQ ID NO: 733174 - DNA, 48 bp, Homo sapiens
gctccaggagacccacaagggcaaagtcagctttgtgaaagaagctat

SEQ ID NO: 733175 - DNA, 101 bp, Homo sapiens
tttttcggatgatgccttcaatactacctttatttccaccataggtatctagaagagcagaagacagagaatggaaaagataaggaacagaaacaaacaaa

SEQ ID NO: 733176 - DNA, 113 bp, Homo sapiens
tcgctggtggtgcaggcgctgcgccgcaacgccgagcgcaccgacatctgcctgctcaaagatgatatcatcaagttgaatcgaaaggaagggaagaagcagaattttccaag

SEQ ID NO: 733177 - DNA, 75 bp, Homo sapiens
gcattctgatgggaacttgtgtgttaaagtaacagatgatttagttgaggcatacacggaatacctgaggagcat

SEQ ID NO: 733178 - DNA, 50 bp, Homo sapiens
cgagcgcctcgacctcggtctgagaagaacatgtgatcatccaggccgag

SEQ ID NO: 733179 - DNA, 99 bp, Homo sapiens
tacttgcaagaaacctcaggacttgagtaacagcaacatgttaatgacagttcggactatcacaggaaatatctactatgcaaggtcaggaactaagat

SEQ ID NO: 733180 - DNA, 82 bp, Homo sapiens
cacaggtgaatttaaaggagcagccctggtgtcacctatcagtaaaaggaaacttttgagaagaactttgaaagagaaaccc

SEQ ID NO: 733181 - DNA, 100 bp, Homo sapiens
gtgaagagacaggaggcagtagccaaacacccagaggtcctcaaagagggcagcgggctgttcccagatctcctggtgagggagacggaggccgtcatcc

SEQ ID NO: 733182 - DNA, 100 bp, Homo sapiens
ctatcaggcaccagacttgggatcagttataaactctagagtgccgaaaactaaatgtgacccttacgtacttgagcatggagatgaagtcaaaattgga

SEQ ID NO: 733183 - DNA, 83 bp, Homo sapiens
tccgtctccgacgagccccgtgaagcccagttcccctgccagcaagcctgatggtgagtgttgcagagagctgctggacacag

SEQ ID NO: 733184 - DNA, 100 bp, Homo sapiens
gcttctttcttctggcatcattaacggaccttttaccatgaatagttctactccttctacaggtccttggatgtggctgtgttgcccaagctattctcag

SEQ ID NO: 733185 - DNA, 100 bp, Homo sapiens
ctctgagggagggtccgagccagccgctgttttgccggaggagcccctcaggccagtcgttcaccagacaggtgttatggaagctgctgaaggttgtgaa

SEQ ID NO: 733186 - DNA, 74 bp, Homo sapiens
ctcgctgtacgccgagcacccaggcgactgcctcatcttcaaggccggtctaattgaagccaacggagaactca

SEQ ID NO: 733187 - DNA, 98 bp, Homo sapiens
ttgttgcttagaaaagcctaggcatttctgtaacatttggtttatcaggtagaagatgtgtgtgaagaagaaatgccagaagagtcagatgaatgtgt

SEQ ID NO: 733188 - DNA, 98 bp, Homo sapiens
tcgttgctgagtgtactctaaaagaaagtgcagctatcaaccagattcttggcagaagggaacttagtgatttggcccgtgaccctccagcacaatgt

SEQ ID NO: 733189 - DNA, 75 bp, Homo sapiens
acggtcggactcccgcggcgggaggagcctgttcccctgagcccttcctggatctggagagagcagctgctgctg

SEQ ID NO: 733190 - DNA, 50 bp, Homo sapiens
gccgtgtggcacgacacaaaaatcagttctcctgtgcctcctgttggctc

SEQ ID NO: 733191 - DNA, 58 bp, Homo sapiens
gtggattttaagccaaacacataatatttttactcagttatataagtttggagagaca

SEQ ID NO: 733192 - DNA, 82 bp, Homo sapiens
gtctgtacatagagctacttcctggaagccagttgagggaagttctccatgaatgtacgtcacaatgatgatgaccgaccaa

SEQ ID NO: 733193 - DNA, 99 bp, Homo sapiens
cgctggcaaaggaggaaaaaccaaattcaccatagagaatgtgacacggacaaggatagttttggctgatgtgtgcttagaattacagcccaacaactt

SEQ ID NO: 733194 - DNA, 100 bp, Homo sapiens
gctcagctttcgtggaggtgctggtgggcagttcagctggaggcgctggggagcaagactatgagcatccctctctacctgccaacatcctgtattagag

SEQ ID NO: 733195 - DNA, 98 bp, Homo sapiens
tggttggtgacgggacagagcggtcggtgacagcctcaagggcttcagcaccgcgcccatggcagagccagaccacggagtctcgctctgtcgcccag

SEQ ID NO: 733196 - DNA, 101 bp, Homo sapiens
ccgtccgccgccaccacccactccggacacagagtgtgaacatggctacgcctcttcattcccgtccatgccgagcccccgactgcagcattcaaagcccc

SEQ ID NO: 733197 - DNA, 74 bp, Homo sapiens
ctgctgcgttcacggcaggattcggttagatgcttgtggttggtggcatcgaccgggtttatgaaattggacgc

SEQ ID NO: 733198 - DNA, 83 bp, Homo sapiens
gagagcgtgaatttgcctcggggacgcctctccaggctccccttccctgcgggcatatccgctcctctcggtgatcacccgcc

SEQ ID NO: 733199 - DNA, 75 bp, Homo sapiens
tggcaagggcttattgttcctatcgggtgctaccaaggttttgcttttgcatggaaatgtctactgcacagttgc

SEQ ID NO: 733200 - DNA, 90 bp, Homo sapiens
aagccttgggtttctttcttaaaggactgatttttagaactccacatttgagcaaaagctggcaggctgacagaggcggcctcaggacgg

SEQ ID NO: 733201 - DNA, 90 bp, Homo sapiens
caaggcccgcccgggagggccggggccgcgctcagaaatacaggtatcaggatgaagatacacctcctcaagagcatatttccccacaaa

SEQ ID NO: 733202 - DNA, 100 bp, Homo sapiens
ctgatggtaggaggcagtagttccccgcttcccttccgcgggagggagagttagcccacagaattcttccagtccctgggtggggacggagaaaggaacg

SEQ ID NO: 733203 - DNA, 75 bp, Homo sapiens
agggaaccctggtcaccgtctcctcagactctaaaatagagctcaagcttgagaagagagaaccactaaagggca

SEQ ID NO: 733204 - DNA, 100 bp, Homo sapiens
aagctggccaaagcctgcccagacggctcacctgtgcgggatggaacaaaaggtacatcaggaacgtctctatcaagaatacaatttcagcaaggctgag

SEQ ID NO: 733205 - DNA, 100 bp, Homo sapiens
gcgtgacagcaatgacagtgttttttcccctggatacagctagacttcgacttcaggagattacctaagcaaattgaagaacgtaatgaaagactaaaag

SEQ ID NO: 733206 - DNA, 90 bp, Homo sapiens
taccattcgcctgatgaactctcagtcgtgagatggagaataaagaaactctcaaagggttgcacaagatggatgatcgtccagaggaac

SEQ ID NO: 733207 - DNA, 75 bp, Homo sapiens
acttggcagaatgtgggaagtggcacatgtttcagatgggaaccttctcttcgcatgaccccggaccaggccctc

SEQ ID NO: 733208 - DNA, 83 bp, Homo sapiens
agctttccgactcggattccgacatgacggtcgcacccagcgacaggccgctgcaattgccatttccctacgtcactcctgcc

SEQ ID NO: 733209 - DNA, 100 bp, Homo sapiens
gctccaaggcctgggccgcttcctgcaagaaaacaagcagcttctgcacgacgcactggcccaggacctgcacaaggagagaagtttgctgaggaatgcc

SEQ ID NO: 733210 - DNA, 90 bp, Homo sapiens
tgtcgtcaattatttccgaaccgtgggatttgaggagcaagctagtgcttttcaggaacaggtgtctgcttttggggcagagttttcatc

SEQ ID NO: 733211 - DNA, 49 bp, Homo sapiens
ccccgttccctggaggtcctgtggaatgttcaaagaggaaatctcccgg

SEQ ID NO: 733212 - DNA, 100 bp, Homo sapiens
cagaagtctaacctgcccgggacgcccgcaccaactcctgcgcgcgggcgtctctggccgagcctctttttgtggaaaacgacagcagcagcagtggcct

SEQ ID NO: 733213 - DNA, 75 bp, Homo sapiens
accttttggcccaatgaatatcagatgatgaaccaggtggaagggcagcagaagaaccttgtgcacgccattgag

SEQ ID NO: 733214 - DNA, 75 bp, Homo sapiens
ggaaagtctaagggatatggctttgtctcctttttcaacaaatggttcacagacattgggaccttcgagacagtg

SEQ ID NO: 733215 - DNA, 98 bp, Homo sapiens
cagacagcagctaagctggttcatcccatcagcctggattggtgaaactgaatcacaggagatatttccaggcccagcagcaaagaaacctggataac

SEQ ID NO: 733216 - DNA, 101 bp, Homo sapiens
atgcctccacacctaccactacccgtgtgccagcgatgcaggtttggtgcacctcgatttggaggaagtagggcagggcccttatctggaaagaagtttgg

SEQ ID NO: 733217 - DNA, 75 bp, Homo sapiens
ggacgagccgccgcacatctgggacagaaatcgctttggcaaacccagcttgcagccaatgaacccgccttccag

SEQ ID NO: 733218 - DNA, 100 bp, Homo sapiens
tcgatgtcaagtggctcaacgagaacgccgtggagaaggtgaacatcaagccgcaggtgcccctgggcgctgggattgctctagcctgtaagtataatgg

SEQ ID NO: 733219 - DNA, 75 bp, Homo sapiens
gaaagagtcaacagcagtggcaacaggagtggaagctggacacactatgtgacttgtatgaaaccctgaccatca

SEQ ID NO: 733220 - DNA, 51 bp, Homo sapiens
tcaatgtcaagtcatctttggctcaaatgagctcacagtgcctgcacttta

SEQ ID NO: 733221 - DNA, 100 bp, Homo sapiens
gggtttcattttggatctctctcgattcagtccctgcaagaacctgcattgtaccatcttcctcatgggaccagtgaaacagctgaagcgaatgtttgag

SEQ ID NO: 733222 - DNA, 74 bp, Homo sapiens
ctgccagggagcaagtctgcatcgcagaggccagggtttgggaaaagttcttaagttctgaaacgccgcggatc

SEQ ID NO: 733223 - DNA, 98 bp, Homo sapiens
gtctcctttatcatcaacctctttgtcatggctgtctttgggcaggccttctaccagaaaaccaaccaggctgcggccctgtctcagcgggaccctcc

SEQ ID NO: 733224 - DNA, 83 bp, Homo sapiens
gatgggatctgcactgatgattgaaacagcaagaaaccccacatgtcctaaggtaatagcctgcagctggtgttttgagaagc

SEQ ID NO: 733225 - DNA, 82 bp, Homo sapiens
tggagaaccaccgcatcaagagcttcaagaacaagggccgcgatgtggaaagatcctgaaggagctagacgagtgctacgag

SEQ ID NO: 733226 - DNA, 101 bp, Homo sapiens
accccggaagtgtgggcgcggctgcggtttaacccgcggtggcggcggcgacggcggccctggcaggtgtacatcggtgagctcccgcaggacttcctccg

SEQ ID NO: 733227 - DNA, 158 bp, Homo sapiens
tcgctggatattaaaccatttcttccctttcctcttgacactgcagctgcagtcaacctcttccccaatttcaatgcggaaaaccgtcttcagatacagtccctaagcccaagagagccccaaaacagaagaaagtagtagaggctgtaaactctgac

SEQ ID NO: 733228 - DNA, 90 bp, Homo sapiens
ggacaaaagccaagaggaggacagttcgctacacagcaatgcatcgagttttctggatatgccgcagaaggatccgtgccagaagcaagc

SEQ ID NO: 733229 - DNA, 90 bp, Homo sapiens
gttttgcctccggttggggctgctgtttctcttcgccgacgtgagaaggcaaccaaagtgcaggacatcaaaaacaacctgaaagaggcg

SEQ ID NO: 733230 - DNA, 75 bp, Homo sapiens
tggaacagcagtggcaagatctcatgtccatcatggaaatgcaggcatttgaggagactcatctgacctcccttg

SEQ ID NO: 733231 - DNA, 82 bp, Homo sapiens
atggggttgtcctctttaagaaggtgtggaaccactttgacagcggttcgtgcccaggccaggccatcggtgtcaaaacacg

SEQ ID NO: 733232 - DNA, 100 bp, Homo sapiens
agaacttgtgccccagttgctgtgctccaaggacacacaggatcaattacatctttacaggttgcagatatcaagaaagtcaacaacttcatcagagaac

SEQ ID NO: 733233 - DNA, 101 bp, Homo sapiens
cccaactacccattcatcaacattcggtcaagtggctttttgaaagcaaagatgagcaacactcaagctgagaggtccataataggcatgatcgacatgtt

SEQ ID NO: 733234 - DNA, 100 bp, Homo sapiens
ctcagggtttctcctggagtcaccgagccgtggtccacttcgtcgtgcctgatgacgcggacctggtggagctcaagcgggagctggaagccgtcgggga

SEQ ID NO: 733235 - DNA, 99 bp, Homo sapiens
gctgctgctctggaagaacgtgacgctcaaacgccggagcccgagggagacgctgttgcggcagctggagacgaaccagctggacatggacgccacgct

SEQ ID NO: 733236 - DNA, 75 bp, Homo sapiens
ggactccctgcagatgttcctgccccagatctcattcgtcggttcggatccaagccagttctgtggtcagcaagg

SEQ ID NO: 733237 - DNA, 90 bp, Homo sapiens
caactttgaagagatcgactacaaggagatcgaggtggaagagcaatcatttggggaagaatctacagttgctgatggacagagtggatg

SEQ ID NO: 733238 - DNA, 101 bp, Homo sapiens
cccgctgccttgctacggctactacccctgcttagactctccaacatgtgccttctgaccatacaaatgaaacttccaacagtactgtgaaaccaccaact

SEQ ID NO: 733239 - DNA, 91 bp, Homo sapiens
ataaggacaaaagccaagaggaggacagttcgctacacagcaatgcatcgaggaacacgtggccatcagtaatcatgagcaacccattcgc

SEQ ID NO: 733240 - DNA, 83 bp, Homo sapiens
cggggcctttatttctcgtcggcggcgccctgcaccgcgcctcgcaaagttgtgaccgagattcccgacgagagagactgagg

SEQ ID NO: 733241 - DNA, 97 bp, Homo sapiens
aaaaaagaggatgagcacttggtggcgtctgatgctgaactggatgctaaacttgaggtgtctttcctgaagactatcttcccgtctcaaaatggac

SEQ ID NO: 733242 - DNA, 83 bp, Homo sapiens
ggacagcagccccgagcactgtggccgaggcccacctgctgacatctacctgccaggattgtcagtggcttcgccccgaggag

SEQ ID NO: 733243 - DNA, 100 bp, Homo sapiens
tttcttatttagccggagtgagaagcaagaaggccctggacacagcaatatctctgggctttcacagaggttggagcaatcactgaagaaactgaagcct

SEQ ID NO: 733244 - DNA, 98 bp, Homo sapiens
ctggccgaagcgaagggcgacgccaagccggaggatctcacattcttgaaggtggcattgaagagcactaagatcggaagatgagtgagcttgaccag

SEQ ID NO: 733245 - DNA, 100 bp, Homo sapiens
catccagccttagcaaaccagagctaataatcacaagaagttgtcagaatttggaattagaaatggcagccggcttcaagcagatgacttcctccaggac

SEQ ID NO: 733246 - DNA, 100 bp, Homo sapiens
gccgcacggagttgcgtcccggggacttggggccgcagggaggtgctgccttcacctgcctggagactgccttccgcctggacgccctgcaccggcagat

SEQ ID NO: 733247 - DNA, 75 bp, Homo sapiens
ctgcttatggcggcgctggagagggggcgctgagctgttgggagaaagagatgacttgatgtctgcactagtttc

SEQ ID NO: 733248 - DNA, 73 bp, Homo sapiens
gccatcttcacagctgaaatctcagggcagctcaaatgtggcacctgcgatggttgaagtcccagcatatgtg

SEQ ID NO: 733249 - DNA, 75 bp, Homo sapiens
accacacgaaccgcaccaccagctggatcgacccgcgggacaggttggtcaaagaaaaagtgatgtatgaaaaag

SEQ ID NO: 733250 - DNA, 97 bp, Homo sapiens
tgcgtcccgccaccggccgcttctgtcctcgatcattggaaattgtgtgtccatcttggttttgagctctgctctgcctgtgatgtcgagaacactg

SEQ ID NO: 733251 - DNA, 100 bp, Homo sapiens
ccgctttctttggaggaaaccaccgcatcagatctgcgctgcggcagaggcaggtcgcttataccaagttgaatatgccatggaagctattggacatgca

SEQ ID NO: 733252 - DNA, 102 bp, Homo sapiens
gtccagagctgagaaggactgcctgtttgcaggtgaatgaaaactttgccattgatttgatagcagagcagcccgtgagcgaggtggagactcgggtgatag

SEQ ID NO: 733253 - DNA, 80 bp, Homo sapiens
aaaccaacgcctggctcggagcagcagcctctgaggtgtggacactgccagcggctgcagccgacttggaatgacctggg

SEQ ID NO: 733254 - DNA, 50 bp, Homo sapiens
cttccatcaatcatatctcacagactgggaagaagagcaggtcagcagtc

SEQ ID NO: 733255 - DNA, 75 bp, Homo sapiens
cagatgttcctggggttactgtaaatgggaaggacaggcagagctaaacaaggcctggcaacctcattctttaac

SEQ ID NO: 733256 - DNA, 82 bp, Homo sapiens
ttgccatgtggaagaaactggtcgtgagatggagaataaagaaactctcaaagggttgcacaagatggatgatcgtccagag

SEQ ID NO: 733257 - DNA, 80 bp, Homo sapiens
ccatgagctggggcaccgagctctgggtggaaatgagttctcaacagtttcctcggttaggagccccttctaccgggctg

SEQ ID NO: 733258 - DNA, 97 bp, Homo sapiens
ggtagatattaaaccagacaagtgtcctaggagagtgaacagaggaatgtttgctgggggattgaaggagatggaacaggaagaggtcctgatccac

SEQ ID NO: 733259 - DNA, 75 bp, Homo sapiens
acattcatctcaacctcgacaggcgaacaggatatctgaagcttttggaaaagaagaagagagtccaactcaaag

SEQ ID NO: 733260 - DNA, 82 bp, Homo sapiens
tcgaagaagcaaacaaaaagtatgatggattacagcaacagttgtcttcagtagaaagggatttgtaggtgaaaatgcccag

SEQ ID NO: 733261 - DNA, 100 bp, Homo sapiens
acagttttcttcagcgcccaggatgcagccggctaagggtgcttcaaggatgaccgcatcgtcttctggacttggatgttctccacctacttcatggaga

SEQ ID NO: 733262 - DNA, 82 bp, Homo sapiens
tactgtggggccgcggccggaccgagcgcctcgacctcggtctgagatgcctgctctgtgcctgtatctgagatcatcgccg

SEQ ID NO: 733263 - DNA, 90 bp, Homo sapiens
cccagctctgcagccacatactatccgtttgttcaggaaccaccagtgacagaacacatcaactggatcattctgctcattacctgcgcc

SEQ ID NO: 733264 - DNA, 75 bp, Homo sapiens
gcggaacctggaggaggtggagttctgtgtggaaggtctgagttcactgacaccatcctgtccgtgcacccctct

SEQ ID NO: 733265 - DNA, 100 bp, Homo sapiens
attgacttacgcaggattctcagcccttgcctgggagaacagttcaggagacagatggccccaagagcccagatccaggactctggactgtcttcacact

SEQ ID NO: 733266 - DNA, 100 bp, Homo sapiens
tcgaccccttctgcccggcgcttcggcccgggccgctcaggtgcagaatgcatacacagccacagctatcaacagcaccaacttctgcacctcagcaaag

SEQ ID NO: 733267 - DNA, 97 bp, Homo sapiens
cctctgcgggaagcgggcggccccggccgcctccgcgagggcaccatggaggtgaatgcagcttcgagagctgtgcccaggagtgaacaaccagccc

SEQ ID NO: 733268 - DNA, 90 bp, Homo sapiens
aagaagacggaaatccaaaggcagacagtacgggctcccttcgccaaactcttcattttctctatggcggacttccaccacaaatggagg

SEQ ID NO: 733269 - DNA, 51 bp, Homo sapiens
caagtctcccaacaacagagacaggccagtactgatgcaggcactgcagga

SEQ ID NO: 733270 - DNA, 100 bp, Homo sapiens
atcccagcctcaggcgtgcgcggacggtgtgcggacattcacggcatggtgtaactcccacctccggaaggcggggacacagatcgagaacatcgaagag

SEQ ID NO: 733271 - DNA, 100 bp, Homo sapiens
cccaggacctccaggggaacaatgaggcctacgcagagctcatcgtccttgatgaggcgatggctgtgctccagcatcacgacgccgtcagcggcacctc

SEQ ID NO: 733272 - DNA, 50 bp, Homo sapiens
ctcctgaatagctgggaccacagatctctataaaaatggactccaaagag

SEQ ID NO: 733273 - DNA, 76 bp, Homo sapiens
cagcgtagcccgagtcggtcagcgccggagctctactgagatgaagaaagaaaaagaatacctgctcagctccaga

SEQ ID NO: 733274 - DNA, 76 bp, Homo sapiens
aagaaacccagcttgatatgttggctaagtgctatttatggaggtacctatatgctgaataaacccattgaagaaa

SEQ ID NO: 733275 - DNA, 51 bp, Homo sapiens
gatgctctctctggaccgatcccactgctagtgatacagagcgagatggac

SEQ ID NO: 733276 - DNA, 98 bp, Homo sapiens
ggccgcgcactgaggaggcggcggccgacggtggcggcgggatgcaggaaacattggcaaatttggagcgacagatctatgcttttgagggaagctac

SEQ ID NO: 733277 - DNA, 75 bp, Homo sapiens
ccgcccctcgcctctgcccgtgagcgtacgagatgatgcctattggccagaaggaaagcgtgtggcaatggagga

SEQ ID NO: 733278 - DNA, 82 bp, Homo sapiens
gctgtgctcgcgctactctctctttctggcctggaggctatccagccattactctactgactggcagagacaggagaggtag

SEQ ID NO: 733279 - DNA, 100 bp, Homo sapiens
ctcctgttgggccatttccgagaactcccatcagtttctgtatagtgtaaaaggacactggggttgggaaatcaagcatcgtgtgtcgatttgtccagga

SEQ ID NO: 733280 - DNA, 98 bp, Homo sapiens
tgcctgtaactacccagatgaaatcaagacgcaacagccctcatcgagggatgctcagtggcggcttatttggcctccccaggacggactggagcatc

SEQ ID NO: 733281 - DNA, 122 bp, Homo sapiens
gtgggaatgcctgaatgatgatcagagagatttatacagagatgtgatgttggagaattacagcaacctggtttcaatggcttagcagtgtctgcaaaaacgaatcttttcctacaacctgt

SEQ ID NO: 733282 - DNA, 75 bp, Homo sapiens
ttgaccttctgccatgattgtgaggcctccccagccacgtgaaacttaaagatgacggcgccttgaggtaagcta

SEQ ID NO: 733283 - DNA, 95 bp, Homo sapiens
gcacaagagcaccatactttgaggagcttcctgcggctgagggagggatgaaacaagtacccatgtgaccaccaccactgggactgcgctggatt

SEQ ID NO: 733284 - DNA, 100 bp, Homo sapiens
cgacaagatcaccacggacgagatgatcaaacgcctgaaggttatcttatgatgaggcttttgctatggctaatgatcccttggaaggcttccatgaagt

SEQ ID NO: 733285 - DNA, 100 bp, Homo sapiens
ccggaggaggatcttctgcggattgttggaatctaccggttttggccaaattgggcgagggcacaaaataaccacttaccccttctcaccgaggaagagc

SEQ ID NO: 733286 - DNA, 76 bp, Homo sapiens
tcgaaaaagaaccgcgcgggaagccccagcccgcagccctcggggctcctgtccaaatatgacccccagaaggagg

SEQ ID NO: 733287 - DNA, 96 bp, Homo sapiens
aataatgaagtggtagtaggagctgaaagattacgagttttagctctgtgtcctcagtatcctgcctggcacgtggagggaagcctggaggagggg

SEQ ID NO: 733288 - DNA, 101 bp, Homo sapiens
tttccatatggatcatttccctatgttgctagaccagtacactggcaacctggtcatacagcgatggcaagccggcaggtggatattgcaactcagggctg

SEQ ID NO: 733289 - DNA, 90 bp, Homo sapiens
cccttggtgatgagcctcggaaagtgctcctgcggctgtatggagcgattttgcagatggaaactggtggtgacaaaagagaaagagaag

SEQ ID NO: 733290 - DNA, 51 bp, Homo sapiens
atgtgagatcttgaaagtgggcgagttgcaatgagtctgcaggtcttaaac

SEQ ID NO: 733291 - DNA, 75 bp, Homo sapiens
gagaggaagcagtgatgcattgaggtacccagcgtgccaatgcccgggctccagccccttacaagcgggatttcg

SEQ ID NO: 733292 - DNA, 75 bp, Homo sapiens
atgcctcttttggacaaagtaagaccgatctttgaaccaccagctccaggagaaggcaactccagtcagaacagc

SEQ ID NO: 733293 - DNA, 98 bp, Homo sapiens
gacttccctgaaaaagctaaggatatctttattgaagctcacctttgtctaaataatttaattggttggggtcagataagaagaggagtgacaatcaa

SEQ ID NO: 733294 - DNA, 100 bp, Homo sapiens
tccaggacaagtcctgcgcttggggatcctctgtacgcccgttcactgggcagctgcaatgactctccgcacggtattattgtcattgcaagcactattg

SEQ ID NO: 733295 - DNA, 82 bp, Homo sapiens
accggggtcacttagactaccccaggaacccgcgccgcgagggctccttccctcagaacatgaaaggctcccggagcagcgc

SEQ ID NO: 733296 - DNA, 75 bp, Homo sapiens
ggggaatggaagcggagaacgcgggcagatggatggtgacagttctacaacagatgcttctcaactaggaatctc

SEQ ID NO: 733297 - DNA, 75 bp, Homo sapiens
ttcctcacacacagttacttgccaagacgattgaagtaaaataccatgaagattttgaaaaaacaaaggggagag

SEQ ID NO: 733298 - DNA, 74 bp, Homo sapiens
acttcattggccacctacagaaacaaaatgtcaacaaattgatgggtctcctaaagcgtgcttttcaaaagtcg

SEQ ID NO: 733299 - DNA, 75 bp, Homo sapiens
agaacaagtggtactaggattatacattgtaagaggtgacaacgtaaatacacaatcgagggcagctgaagtcac

SEQ ID NO: 733300 - DNA, 83 bp, Homo sapiens
agcgggccacgcacctcgtcaccaaggccaaggtctcagatgatgataaagaaaagggagagggagctcttccaactgggaaa

SEQ ID NO: 733301 - DNA, 75 bp, Homo sapiens
cgcctcggaaaccaggagatcatgaggtatctgaaaactgaagagtggagaatatgttcagcagggaacaagagg

SEQ ID NO: 733302 - DNA, 80 bp, Homo sapiens
agagcagaggatggaacacttcagtgcattcaaggcagtccgttgccactgggcagtatagatatgttgtccagcctgcc

SEQ ID NO: 733303 - DNA, 83 bp, Homo sapiens
gagcgaagtacagcttatggatgggtaaagtcagtgataaatcttttgtttgctgcatatactggagatgtgtctgcacttcg

SEQ ID NO: 733304 - DNA, 83 bp, Homo sapiens
gacacttacaagatggacagggatgataattgggcctccaagagaaataatgcaaaaggtgtcccaaggctcctgaccagtga

SEQ ID NO: 733305 - DNA, 82 bp, Homo sapiens
ctcgtagcctgccactccgtgcgcgccatgtcagaaccggctggggatgtccgtcagaacccatgcggcagcaaggcctgcc

SEQ ID NO: 733306 - DNA, 103 bp, Homo sapiens
cctgtgggcacagacaaggagctcagtgacctcctggacttcagcatggtttggtgcacctcgatttggaggaagtagggcagggcccttatctggaaagaag

SEQ ID NO: 733307 - DNA, 98 bp, Homo sapiens
cggagagccccggagtgagcggagtagcgagtcggcaacccggagacagacaattttcccgcagagcccaattacatgggcagcaggcagcagtttgt

SEQ ID NO: 733308 - DNA, 50 bp, Homo sapiens
cgggccgccaagcctctgcaaggaatcagagatcattgatttcttcctgg

SEQ ID NO: 733309 - DNA, 82 bp, Homo sapiens
cccaaaagccgccacctgaccatcaagttgcccccaagtttcctggcagtgtgtgatactgaggaggtgagcttgtttctgg

SEQ ID NO: 733310 - DNA, 43 bp, Homo sapiens
ccgcgtttcagccctagggaagccacaatggtgcgcatgaatg

SEQ ID NO: 733311 - DNA, 90 bp, Homo sapiens
ctctacatagacgacaccctgacggattctgataatcctgaccttcgagaccggggctatatttattggcgccttctctcaactgaccct

SEQ ID NO: 733312 - DNA, 82 bp, Homo sapiens
cagaaattcattcacaaacctggcagcaacacagtcactcctggcggcaaaccaaacaaaaccagagtcatctggggaaaag

SEQ ID NO: 733313 - DNA, 75 bp, Homo sapiens
aaaacctgaggctgatgacccaaaggttggtgttcgaggaagagacattgttgttcttggtgtggagaagaagtc

SEQ ID NO: 733314 - DNA, 82 bp, Homo sapiens
gaagaggcagaaggagcaggctctgcgggaggtggagcacctgaagagatgccagcagatcattgagaagcagccaggccac

SEQ ID NO: 733315 - DNA, 74 bp, Homo sapiens
ctcctcactcagcatcgaggagactaagtacgccatgaagtgcctggacaaaaagcgcatcaagatgaagcagg

SEQ ID NO: 733316 - DNA, 125 bp, Homo sapiens
cagcaatagagctaatcccctcagttaccaatccagaaaaccttccatcgctgccagatattccacccatacagctgtacccaagaattaaaccaagacaaaggagcttggcctgaaacttccac

SEQ ID NO: 733317 - DNA, 75 bp, Homo sapiens
gctagcaaagtaattgcactgaaagaggagaaggcagagcccccccaggctatgaatgccctgatgcggttgaac

SEQ ID NO: 733318 - DNA, 100 bp, Homo sapiens
cgcagcccagaaccctgaggacctccgcatgtttgccagtcggccaagatctgaccgtgatggcggcccttggcttgggcttcctcacctcaaatttccg

SEQ ID NO: 733319 - DNA, 98 bp, Homo sapiens
cggtagttgctccaaaacctaagtacaacccatacaaacaacctggaggtgagggtggaatgcaagctttaggacttcacctgacagatccaagtcaa

SEQ ID NO: 733320 - DNA, 83 bp, Homo sapiens
ctcttacgtatttgtgtgacttgactcttcaaacacaaaggagcaatttacagcaatgagggatttatacatgaaaaatggac

SEQ ID NO: 733321 - DNA, 82 bp, Homo sapiens
gggaggcgacgctaagttgctgatcgtggcggcaccatgactcctgtgaggatgcagcactccctggcaggtcagacctatg

SEQ ID NO: 733322 - DNA, 90 bp, Homo sapiens
tccttgtctacagccgtccaccttgccagccccagttctccttgacggagcccatgaaggagggccgctggagacccttcatcatcaggc

SEQ ID NO: 733323 - DNA, 101 bp, Homo sapiens
gatgaacaatccttccactaatggcgtgaatggccatttaccaggagatgcacttgcagcaggaagattgccagaacagttggacaaactgtgaaaagccc

SEQ ID NO: 733324 - DNA, 100 bp, Homo sapiens
gtacagatgaggaagttacatctttggcaaagtctctcatcaaatcctggaaaaaattattagggaggagctttatctttatatactgcccttaccacac

SEQ ID NO: 733325 - DNA, 100 bp, Homo sapiens
gaaaggaggaatgacaagattattgtctttgctgacaatgtgtttgccctaaaggaatatgccattcgactgaacaagttgttcctcaaagtcattcaag

SEQ ID NO: 733326 - DNA, 75 bp, Homo sapiens
aacctgctcaccggggagtctgatacacagactattgcagatatcatccgaacatgtttgggacccaagtccatg

SEQ ID NO: 733327 - DNA, 82 bp, Homo sapiens
cagcttcctatgatgacagttaccttggtcatgtacgtagaagggactgcagttgtgatgggttttgaagatcccatgctac

SEQ ID NO: 733328 - DNA, 90 bp, Homo sapiens
atcgacaaggaagatttgcatgatatgcttgcttctctaggttgtgctacgagccaaggactggctgccaggagctcctgggggcaccgc

SEQ ID NO: 733329 - DNA, 98 bp, Homo sapiens
cccggccatcatcacccaggtgaccaaccccaaggaggacgagggccggttgccgggcgcgggcgagaaaggctgtgaggatatcattgctgagagca

SEQ ID NO: 733330 - DNA, 114 bp, Homo sapiens
gagacccaacagcttatgcattagctgaacatctttcagagttgtatccttctacatcaaacagttcgttaactgcagacgtaaattctggatttgccaaacgtgttcgacaag

SEQ ID NO: 733331 - DNA, 109 bp, Homo sapiens
tgagggattgctactgcacggtgaacctggaccaggaggaggttttcaggaccaaaattgtggaaaagtcactctgatatttggagttcttacaacatggcagacattg

SEQ ID NO: 733332 - DNA, 73 bp, Homo sapiens
aaatataaacctttcaagagtcaagtaaagcctatccctcggccagatcctgtgcataataatgaagaaacac

SEQ ID NO: 733333 - DNA, 100 bp, Homo sapiens
tcagtggaagacggagctggtcggcccgaagtgtcaacagcatctccaccctggagcctgtgagccggtgccagcgcctgagtgagctgtacctgcggag

SEQ ID NO: 733334 - DNA, 96 bp, Homo sapiens
tgccggcttctcccctacgcgctacacaagtggagctccttttcctccacctaccttcccgagacaagtcctgcgcttggggatcctctgtacgcc

SEQ ID NO: 733335 - DNA, 100 bp, Homo sapiens
catcacagtcaactatcgacttggagtactcggatccaaggattctgtagctacaatgttgtcaagactttttcgaatgcatggcctctttgtggcctcc

SEQ ID NO: 733336 - DNA, 76 bp, Homo sapiens
ctgagctgctccaaaaaattctcgaggcatgttacatggaattggaaaatttatagttgaaataatttgctgtcgt

SEQ ID NO: 733337 - DNA, 99 bp, Homo sapiens
gccctgtaggctggagggactgtgaggtaaacagctgagggggaggagacggtggggtgtttttcctgaatgtgccatttgattccatcatggagcggc

SEQ ID NO: 733338 - DNA, 100 bp, Homo sapiens
tccgagagctatttcccgcaccaatgagaatgacccgacaacctcatcagccttgaaaggtgccatccagttaggcattacccacactgtggggagcctg

SEQ ID NO: 733339 - DNA, 80 bp, Homo sapiens
ggatttccaaggaagaatttcctctgaagcaccggttcgtgctggccgtgggcagcgccgtctttgatgccatgttcaac

SEQ ID NO: 733340 - DNA, 90 bp, Homo sapiens
cagcggcggcagcggagagcgagagaggggagcaggtacctgaaagaattccgcacagagcagtgcccactctttgtgcaacacaaatgc

SEQ ID NO: 733341 - DNA, 100 bp, Homo sapiens
cggcggaaaaccgaagttggaagtgtctcttagcagcgcgcggagaagaacggggagccagctgtgtgtaacagcatctcaaaccctgtcaccaaggaga

SEQ ID NO: 733342 - DNA, 75 bp, Homo sapiens
ggaatatgtggctaatctccttaagtcggccttccctcacctacaagaggcttcgtgggacacatatgcaacatg

SEQ ID NO: 733343 - DNA, 100 bp, Homo sapiens
aatgaaagaatctaaacagcctgcctcacaactccaaaaacaaaagggagatactccagcttcagcaacaggaaagaccacagcaagattctttcattcg

SEQ ID NO: 733344 - DNA, 50 bp, Homo sapiens
aggaaaggccagactcacagaagagaaccttctgaggctccaatcacttt

SEQ ID NO: 733345 - DNA, 100 bp, Homo sapiens
ctctgtcttggggagtacccagtggagcagatgacaaccatagcccagtgccaatgcatcttctgtactctggcacagtaaccttggtgcacgaccgaaa

SEQ ID NO: 733346 - DNA, 75 bp, Homo sapiens
ctcccgcggcgggaggagcctgttcccctgagggtgaggtggctttgaccccgggttgcccggccagcacgaccg

SEQ ID NO: 733347 - DNA, 75 bp, Homo sapiens
cttgaacttaatacagcaagaaagaccatcaagtttaccaacttaattcagtgcacaaatgagatgaatgtgaac

SEQ ID NO: 733348 - DNA, 102 bp, Homo sapiens
cccgcccaaggtgaacccgtggactaagaacgcattgccgccggtcctgaccaccgtgaacggacagtcccccccagtgcagaatacagaaactgcagccat

SEQ ID NO: 733349 - DNA, 82 bp, Homo sapiens
aaggagacgctcctggcactgcagagctggaagtcgagtgtgctactcaactcaggagatttggagacaaactgaacttccg

SEQ ID NO: 733350 - DNA, 50 bp, Homo sapiens
aggaaacatacatgctgtcactaagcagcctatgtgcttcccaagctgta

SEQ ID NO: 733351 - DNA, 100 bp, Homo sapiens
ctcacggccagccctggggtgttccccgtcactgttttaaaattggtggtgaatggtggacatggatcgattataaccgcttccaggagctcatccagga

SEQ ID NO: 733352 - DNA, 51 bp, Homo sapiens
ctctggggctgcttgctgaccgcttgagaaagatcagtctaaagaaaagga

SEQ ID NO: 733353 - DNA, 100 bp, Homo sapiens
ggccgacatcatccaccactggaacgccaaccggctggacctgttcgagatcagccagccgaccgagacactggccaaaagaagaccctagacaagaaag

SEQ ID NO: 733354 - DNA, 101 bp, Homo sapiens
gctcatcaatgctgaggagcagacgagtggccaggcttctggggctgactcaactgtttgctgctttgtggtgcacaagcggtgccatgaatttgtcacat

SEQ ID NO: 733355 - DNA, 100 bp, Homo sapiens
tctgatctacgaaagtcatgttacccaacaccgggccgctcctttgaacctgtaggtactcggccccgagtggactccatgagctctgtggaggaggatg

SEQ ID NO: 733356 - DNA, 111 bp, Homo sapiens
ggccattgagctgtgcacgaccacaccgctgatgaagacaaggactcacagtggctgcaaggtgtaggccctgcttccgtgatggttgggaatctggttgctggaaaacgt

SEQ ID NO: 733357 - DNA, 73 bp, Homo sapiens
taccatctcatctcaagaatggaggaagcccccgagcgcccacagcatgaaggaggaggccttcctccggcgc

SEQ ID NO: 733358 - DNA, 142 bp, Homo sapiens
tggacatgttgaaaattaggtctgaattcaagagaaagtacggcaagtccctgtactattatatccagccgcccttcaccgcagagaaccggaagaaaaccatggataagatcatcaggggcaagctggcactgccccccta

SEQ ID NO: 733359 - DNA, 80 bp, Homo sapiens
tcgaagccattcagtcctcaatctccttttccttggctacccaagctccaccatgaggcgaggtggatggaggaagcgag

SEQ ID NO: 733360 - DNA, 101 bp, Homo sapiens
gctccggaaaggggacacctggccccttcacagatgtagtcactacaaatcttaaattgcgaaatccatcggatagaaaagtgtgtttcaaagtgaagact

SEQ ID NO: 733361 - DNA, 80 bp, Homo sapiens
acaattggaaataaacctgtggagactatcggttttgactctattatgaaacagcaaagtgatccgtatgtgaaactttc

SEQ ID NO: 733362 - DNA, 80 bp, Homo sapiens
ctggcagccccgctctctgcattaattatcttcacccccaaatccctgttgcgccaccccgaggccagatccagctttga

SEQ ID NO: 733363 - DNA, 89 bp, Homo sapiens
ccatggacagagactaccacgtggcatgttaccactgtgagttcctgggcttcccgatggactcgagtttttactatgtgagcatcccg

SEQ ID NO: 733364 - DNA, 74 bp, Homo sapiens
gggaaaaggattgttgagctatttgtgaacattagcaagaatgacagcccatatcaaggcggtgtattcttttt

SEQ ID NO: 733365 - DNA, 80 bp, Homo sapiens
ctcctgccacctatgacgatgggtctgataatttagaagtatgcagtactatactggcaattgctggagaagattttgca

SEQ ID NO: 733366 - DNA, 50 bp, Homo sapiens
ccttcacagcatgtggttttgtgcaggcagacctgttatcctaaactagg

SEQ ID NO: 733367 - DNA, 88 bp, Homo sapiens
gaaacatgctagaattacctggaacttcatcatcatctacttcacaggaattgccatttgtgaaaggtgtagcagtcactcggcctac

SEQ ID NO: 733368 - DNA, 98 bp, Homo sapiens
ataaacctatcttctttcattatggagggaggtttggcagatggagaacctgatcgaacttcgaccttagctggatctccaaaatacaagtgaatcac

SEQ ID NO: 733369 - DNA, 50 bp, Homo sapiens
atcttccgaagagggagagacggaagtggttggaataaaaacagggttga

SEQ ID NO: 733370 - DNA, 88 bp, Homo sapiens
tcaccggcgtgccccaccatgtcagacgcagccgtagacaccagctccgaaatcaccaccaaggttaaacactttaagatgagaaaaa

SEQ ID NO: 733371 - DNA, 88 bp, Homo sapiens
tgaataaagaaatgtactatagatactactttaggaaaacactgtttgatgcaactgtgaaagttccttttcttaagaaatgcaagga

SEQ ID NO: 733372 - DNA, 100 bp, Homo sapiens
cggctcagcgtctggctgctgctgctgcccgccgcccttctgctccacgaggagcacagccgggccgctgcgaaggtgtcccacggccgtccgttggcgc

SEQ ID NO: 733373 - DNA, 97 bp, Homo sapiens
tctggcccaccaaaaccattgccaaaggatggatatgacttagtgcaggctaaagaattacctccaaagccattgtcaagaccacagcagtcatctg

SEQ ID NO: 733374 - DNA, 90 bp, Homo sapiens
catcaatagacagcattcagaaggaccccagcttttcatgcaacacccaacacttataagcggaagaacacagaaacagctctagacaac

SEQ ID NO: 733375 - DNA, 82 bp, Homo sapiens
agcatggctacatctcccggtgcttcacgcggaaatacacgcgagaacgtgaaggcattcttcagccgcgtagccgccctgg

SEQ ID NO: 733376 - DNA, 83 bp, Homo sapiens
gttagatgctcttgttggaagaatactaccagacaatgcagatcttcgtgaagactctgactggtaagaccatcaccctcgag

SEQ ID NO: 733377 - DNA, 75 bp, Homo sapiens
cagatgatgacagctgtgtccttaacaaccaggccccagtgaggattctacacgtagattgttcaaatttccttt

SEQ ID NO: 733378 - DNA, 74 bp, Homo sapiens
cgcggccgcaccttcccgccttctcagccagagactgctgctactttgaaacgtacgatagaggccctgatgga

SEQ ID NO: 733379 - DNA, 90 bp, Homo sapiens
caaatgcttatgatataggacatgctgtaatatggatcaccgccatgatggttcgagaacttgtcttggacaattgcaaatcaaatgatg

SEQ ID NO: 733380 - DNA, 100 bp, Homo sapiens
gaactactacaaactgcgcacagaaggagatgatgatgaccactggatcgtcgacacagactacgacacgtatgccgtgcagtactcctgccgcctcctg

SEQ ID NO: 733381 - DNA, 110 bp, Homo sapiens
cccaggaggcggagcggacaaggctccggcctgcgaggaggacccagatgatgtggtaccagttggccaaagaagagcctggtgttggtgcatgtgctttggactagcat

SEQ ID NO: 733382 - DNA, 49 bp, Homo sapiens
gtctcttagaagtgggagctgaacggataaaagaatcagagtgtctcaa

SEQ ID NO: 733383 - DNA, 90 bp, Homo sapiens
gcgccatattgcggccctcagcggccgcgaccgagtcatggctgagacctacgaagctccaccatgaggcgaggtggatggaggaagcga

SEQ ID NO: 733384 - DNA, 83 bp, Homo sapiens
atgcttctgtggaagatgatgcttttatcaagatgatcttccaaaacccaagactactgaagtaattaggaaaggctcaatta

SEQ ID NO: 733385 - DNA, 100 bp, Homo sapiens
gacccaaagtcagaccaacttcacctgccccattacaaaggaaattgatggcaaatctttgctgctcatgcagcgcacagatgtgctcaccggcctgtcc

SEQ ID NO: 733386 - DNA, 73 bp, Homo sapiens
atctgcgtgtgcggggtgcgtgggtgcctggagatgaagctggaaaggtacttcttgcaagggatatgcatta

SEQ ID NO: 733387 - DNA, 82 bp, Homo sapiens
cgacaagccgctggcagccgcggatctcaccgccgctcagggtggtaccatggccacatgtctggcgggcaggcagagacgc

SEQ ID NO: 733388 - DNA, 51 bp, Homo sapiens
ttcccgccggccgccgccgcccgagtttctgtgtttgaagaacatacgcac

SEQ ID NO: 733389 - DNA, 83 bp, Homo sapiens
acccggcgggtggaggagatcaaggaaagaaccggaggctgaagcaggccaaagaagaagctcaggctgaaattgaacagtac

SEQ ID NO: 733390 - DNA, 98 bp, Homo sapiens
ctgagaccaggaactcagcagagaaactttgtgtggcctgattccaccaagagaaggcccaggaggaagaagagaaaaagatgctgtggttactagtg

SEQ ID NO: 733391 - DNA, 83 bp, Homo sapiens
taatttttggaacaatttgatgagctaggagaagcaaggtctcgctgtgttaccctggctggagtgcagtggctacttacagg

SEQ ID NO: 733392 - DNA, 82 bp, Homo sapiens
agaagcaggctctgatggagcagcagagacgatgtgaagttcatttccaatccgccctccatggtggcagcggggagcgtgg

SEQ ID NO: 733393 - DNA, 133 bp, Homo sapiens
tacaagggtcctgaagtcagttgttgcatcaaatacttcatatttggcttcaatgtcatattttgggtgctggagaatctggtaaaagcaccattgtgaagcagatgaggatcctgcatgttaatgggtttaa

SEQ ID NO: 733394 - DNA, 90 bp, Homo sapiens
gtatgatttaaccagtcaatactcaaagatacaggagagagggaacaaaagacgctttatgagtactattaatcccgtagatgcaatata

SEQ ID NO: 733395 - DNA, 85 bp, Homo sapiens
gattagcttcgcagtctggaaagctttaggagttcacagtatcctaagtgtgaacgtgaagtccccagccctgctgctgagccag

SEQ ID NO: 733396 - DNA, 83 bp, Homo sapiens
caagaggcaaaggggaggttacgcagcaaaccatccagaaggtgagcatgggtttatgcgtcttaggcattattgtgatggcg

SEQ ID NO: 733397 - DNA, 115 bp, Homo sapiens
gacgagcctcctgcagcggaacatgaccccccaaggcctgcagatcatgattgagacagccctcagcgcctttttccaggagaccaacatcccctacagccaccatcaccaccag

SEQ ID NO: 733398 - DNA, 83 bp, Homo sapiens
tggcagcaaggtgggcccggacggcacaccctacgttaccgtgctcaagccctgggcgctgcctatggcacagccaagagcgg

SEQ ID NO: 733399 - DNA, 82 bp, Homo sapiens
cgtcatggggctgtttggaaagacccaggagaagccgcccaaagaactgtgcctccggagccagcgtggtggccatagacaa

SEQ ID NO: 733400 - DNA, 75 bp, Homo sapiens
aaatttcgatattgaagtgtcaaaatccatagatggaaaagatgccagcagccagcttcgggtgtagcctattct

SEQ ID NO: 733401 - DNA, 100 bp, Homo sapiens
ctgcgcctcgtgtctgccgtcaaccgcaggaggatgaagctgctgctgggcatcgccttgctggcctacgtcgcctgtagagctgagtaaagaagaagta

SEQ ID NO: 733402 - DNA, 130 bp, Homo sapiens
aaagtacctaaggacccacaaagaagtagagtggctcataagtggtttcttcaggctgtcattatttgtatcaaaaacaaagaatttgaaaaggcttcaaaaattttgaaaaaacatatgtccaaggacc

SEQ ID NO: 733403 - DNA, 101 bp, Homo sapiens
ctcgcaggagcaacacgtgatgtgtctacttatcagggtgaatgccaaagatgacgaaggtgtcctcgttggatcctgggacaatatctatgcctatggcg

SEQ ID NO: 733404 - DNA, 75 bp, Homo sapiens
ccgagctgagatccatctgcaccacggtgctgattgggaaaatgaggtacgttagtgttcgcgattttaaaggca

SEQ ID NO: 733405 - DNA, 90 bp, Homo sapiens
acttcagtaacttcaaataatgagatcatcacttcaagtgaagaccatagatactaatggaccatactaccaaggaccagtccacctgaa

SEQ ID NO: 733406 - DNA, 75 bp, Homo sapiens
gtcgtttggtttgatcttgttgactatgaggaagttctagggcaaagtgcaattgctggggaagaacatcccaga

SEQ ID NO: 733407 - DNA, 100 bp, Homo sapiens
ctttaacgtgagcccgctgcaggtgtgcggcccagtccgagacagcagctaaagaggctacaaccatcgatttgagtatcctcgcagaaactgcatcacc

SEQ ID NO: 733408 - DNA, 52 bp, Homo sapiens
ccagctgttcaccactgagctatgctggactgggatcagatgggaagcggaa

SEQ ID NO: 733409 - DNA, 75 bp, Homo sapiens
agtccccccgttccctggaggtcctgtggaatggtaatttcatctgtgccaaagcctccagaggacaagccagaa

SEQ ID NO: 733410 - DNA, 96 bp, Homo sapiens
gctggatctaaattgagagaaatggagtcaaaagaggagccatcaaaactcgatcaggatgttttggccgctcttgaatgtgcagacgtcgacccc

SEQ ID NO: 733411 - DNA, 73 bp, Homo sapiens
cccaagctactggtgccagaacacagagacagcagcccagtgcaatgatagatcactgcgaccagaggaaatt

SEQ ID NO: 733412 - DNA, 134 bp, Homo sapiens
agcccccgaggacggccgtgcggcccatcacggagcgcagcctcctgcagggggacgaatgagaactggactgatgaccaactgcttggttttaaaccatgcaatgaaaaccttattgctggctgcaatataat

SEQ ID NO: 733413 - DNA, 100 bp, Homo sapiens
ctgtaacttacgtgtactttaccaacgagctgaagcagacatgcgtcgggatgtccaggaaatttttcgcatgaccccccacgagaagcaggtcatgatg

SEQ ID NO: 733414 - DNA, 100 bp, Homo sapiens
aatcacgcatcacaagtcgcctgcagccgcccgaagagccaagagtcagtattccggccagcttcacgaagtcagagagttattcaagcggagaaatgtt

SEQ ID NO: 733415 - DNA, 83 bp, Homo sapiens
tccttggggacggagcagcgcgtcgtggggcgagcggcagcccgatctgctcaacttcaagaagggatggatgtcgatcttgg

SEQ ID NO: 733416 - DNA, 100 bp, Homo sapiens
cccaagaagcctatcagaatgaattaaagattgaaagtgtagaacgttccttcattctctcagccagtccctggatggctttgtatttgcactaaatcag

SEQ ID NO: 733417 - DNA, 75 bp, Homo sapiens
gcagagaataagctggacaccaaatacccgtacgagtcctgtgtatggaaactcacatgagtcagctcagtctag

SEQ ID NO: 733418 - DNA, 83 bp, Homo sapiens
acggcgagcgcgagcggcgcgagaaaaagatggctgtgccacccacgtatgccgatcttggcaaatctgccagggatgtcttc

SEQ ID NO: 733419 - DNA, 75 bp, Homo sapiens
tttggaactagtgccggcggctctccaccccccaggatctgcctacaaactggtttgctactttaccaactggtc

SEQ ID NO: 733420 - DNA, 102 bp, Homo sapiens
gcctgtcctctccaagatgcagttttttgatgctgaggagctcctggtcgatgaagaggatgatgtttttggtgaagtttgatgaaggccggaacaactttg

SEQ ID NO: 733421 - DNA, 74 bp, Homo sapiens
ccacacaactaggagagtgtccccatccggtgagactttgcagacggtggtccagctgctcacctgtgacctgc

SEQ ID NO: 733422 - DNA, 75 bp, Homo sapiens
tacgaccgtcttttcccttagaggcaccagctccagaacctgggtatcaacccagcaaacattggcttcagtacc

SEQ ID NO: 733423 - DNA, 83 bp, Homo sapiens
ctgtcatcctgctggatgaggccctcaagtacctgtcccggaaccacatgcacggtcccaagatggtggccatgcagaattac

SEQ ID NO: 733424 - DNA, 80 bp, Homo sapiens
gcgatagcaatgcacagccaatttcatgctccactatagattcgggaactggagcctctcctctgtcacagtgacaatcc

SEQ ID NO: 733425 - DNA, 96 bp, Homo sapiens
gtcaccgttcacacagatggaaacgaacagctctctgtaatgcgatactcaccaggaaagaccacagcaagattctttcattcgtctcctcctagc

SEQ ID NO: 733426 - DNA, 100 bp, Homo sapiens
caggacctgagcaggaacctggagttttcaggatctagtgaaaagccatttgatgtatgcggtcagagaagaagtggaggtcctcaaagagcaaatcaaa

SEQ ID NO: 733427 - DNA, 97 bp, Homo sapiens
caagaaattgaaagttcaagggtagaactaagaagtttggaaaagattatatcccagttgccagagttgggctgttcctacacagatgttgctgctc

SEQ ID NO: 733428 - DNA, 90 bp, Homo sapiens
tccaacacccgctgctgcccgcccgctgcctgcctgcctggcatctctctctcccggttggtcaaagaaaaagtgatgtatgaaaaagag

SEQ ID NO: 733429 - DNA, 88 bp, Homo sapiens
tgctcaactgcctgcacgtcgtcaccctgtacaatcactggcacagcctccaggttggcgggctcatctgcgctggggttctgtgcgc

SEQ ID NO: 733430 - DNA, 83 bp, Homo sapiens
cttgcgcctgcctctccaggatgtctacaaaattggtgggaagacaaaggcgctttggctaagctggtggaagctatcaggac

SEQ ID NO: 733431 - DNA, 125 bp, Homo sapiens
cttgcctcaagtttctttcaccgcagtgggctaccataaacacatcaccttgatttttaatcccacgagtacaggggctcaggtccaggtggcaggggatatgctacccaactcaactgagcggg

SEQ ID NO: 733432 - DNA, 100 bp, Homo sapiens
cgctcgtcccgctcgtcatggcctacccgggatacggaggagggggcctgggtcccttgtgagggtcgctgatggcagaacagaagcccctccaccctcc

SEQ ID NO: 733433 - DNA, 100 bp, Homo sapiens
caacaagcagcctattatgcccagacaagtccccagggaatgccacagcatcctccagcacctcagcttaacagagcgttccaaaaagaggactctccag

SEQ ID NO: 733434 - DNA, 100 bp, Homo sapiens
cgaggacacgctatgtccttttggcttcgaggtttaccccttccagcaagccctggatgaaaacatggacctcttggaaggtataactggctttgaagac

SEQ ID NO: 733435 - DNA, 100 bp, Homo sapiens
ctgacaggccgctctgtggagtttgaggagatggacattttggaccagggagccctacagcgtctcttcaaaaagactacagtggtagtggaggccgaag

SEQ ID NO: 733436 - DNA, 75 bp, Homo sapiens
cagctctgcggctcgggccctgagcatgactaatatgttctgcacaagacatgaaggcacagacagcactgtctt

SEQ ID NO: 733437 - DNA, 82 bp, Homo sapiens
aggaggcagtggccctggtggaagacttgcagaaagaacctggaagacagaggctggagggaaccaacaatcctatatttct

SEQ ID NO: 733438 - DNA, 51 bp, Homo sapiens
gccgaatcttccttcaggatatcaaggatgctctggagttttggctgcaag

SEQ ID NO: 733439 - DNA, 75 bp, Homo sapiens
ttgaaagaagaagatggagaagaaatagttacctatgatcgttgggtgggactatatcagcatacaagatagtac

SEQ ID NO: 733440 - DNA, 75 bp, Homo sapiens
caaaggagcccagggctctctgctgtgcaggctgtctctctgagaacccgagaatccacattcatctcaatggaa

SEQ ID NO: 733441 - DNA, 75 bp, Homo sapiens
gatgaatttcttttggatttaggacatcatgaaaggctgacaaacgggctcatcataatgcactggaacgaaaac

SEQ ID NO: 733442 - DNA, 101 bp, Homo sapiens
gagagcgtgaccgagagcgcgaatatcgtcatcgttagaagctcggtcatgagcaccgacagtaactcactggcacgtgaatttctgaccgatgtcaaccg

SEQ ID NO: 733443 - DNA, 100 bp, Homo sapiens
cgagactggcgggggtggacgcccgggccgggctgcgcccgcttcttgcaggggccacctacagatgctcctgcagtggacacagcagaacaagtctata

SEQ ID NO: 733444 - DNA, 110 bp, Homo sapiens
agcatgccctccacccatgccatgtccggcaccgccatccccatttctatggtcctcctcacctatggccgctggcagtagagacggggtttcgccatgttggccaggat

SEQ ID NO: 733445 - DNA, 100 bp, Homo sapiens
ggaaatctttgggatgctcaatgtggaatgcagtagccctctgggcctgggatattgtggttgataactgtgccatctgcaggaaccacattatggatct

SEQ ID NO: 733446 - DNA, 100 bp, Homo sapiens
tgaaagaatacatcaagattctgaatctggtgatgaacttagcagcagctccactgaacagataagggtccggcctctttggcctacccccgttggctcc

SEQ ID NO: 733447 - DNA, 83 bp, Homo sapiens
gaagcagccgatccagcctgcggagcctgtggggcagctgggagaaccaccacagacgacgagctagaagagatgctggagag

SEQ ID NO: 733448 - DNA, 87 bp, Homo sapiens
ttttttcattgttccactggacgctcatcagagggaagatctttttcctcaattgacagtgagaccgtgcactaccactatggccct

SEQ ID NO: 733449 - DNA, 125 bp, Homo sapiens
ccatggcggacaacgagaaactggacaaccaacggctcaagaatttcaagaacaaaggccgcgacttggaggatttttagactctgaggagcagttggagctaatccacattatggaaatggaaa

SEQ ID NO: 733450 - DNA, 74 bp, Homo sapiens
ctctatccatctctcgaagacttgaaggtagacaaagtaattcagttggccttggcagaattgtatgaagatga

SEQ ID NO: 733451 - DNA, 76 bp, Homo sapiens
gaagatagtttccagtggatgagccgcgtgctgcagtggaatgcagtagccctctgggcctgggatattgtggttg

SEQ ID NO: 733452 - DNA, 96 bp, Homo sapiens
aggctcgcgagcctccttcgccgcgccccacttgctcgtgcactttacacacatgaggtgacctcaaagcagaagctctgaattcacctctcatct

SEQ ID NO: 733453 - DNA, 90 bp, Homo sapiens
catccctgaggttaacaattaccatcaaaatgttttgtggagactatgtgttccttgatgatctccctgaggattttagtgatgctttag

SEQ ID NO: 733454 - DNA, 90 bp, Homo sapiens
acagcatatttgagtcatttccttcgtacccacagtgcttcatgagagctgtagtgatggtcctaaatagcatgagtgtcagctggagcg

SEQ ID NO: 733455 - DNA, 96 bp, Homo sapiens
tttgtaggctccgccaagaggcgccgcaggaggaggtacagcatgtgtactgaccgggcagccctttgacacaatgaaagtgaagatgcagacgtt

SEQ ID NO: 733456 - DNA, 101 bp, Homo sapiens
accaacgtggggtccctgttgctcaccccgcaggagaacgagtccctcttcactttcctcggcaagaaatgtgtgagatggggtttgaccttgttgtccag

SEQ ID NO: 733457 - DNA, 100 bp, Homo sapiens
tgaccaccggcctggtattgggatgcacacgtcacatggagatgggcgtcaagaagttacctctcgtaccagccgctcaggagctcggtgtagaaactct

SEQ ID NO: 733458 - DNA, 96 bp, Homo sapiens
aaagagacctctacttagctcagcaattcttaccttgtgctggagaatctggtaaaagcaccattgtgaagcagatgaggatcctgcatgttaatg

SEQ ID NO: 733459 - DNA, 51 bp, Homo sapiens
gtgacacaaggaaagtattctacaggtactagcaaaggccagacgtcttac

SEQ ID NO: 733460 - DNA, 96 bp, Homo sapiens
tcaacaccaggactacagtaaggctgaaatcattgaagtgcttggagtgcagaactgaaagagctccaaaaggaattcttcatttgtctcctgatg

SEQ ID NO: 733461 - DNA, 98 bp, Homo sapiens
gaggagcgaggcagctgtactaggactgggaacggatcgatctctttgggctgcctgacctccttgggtgcttgctattaattaacagactttgtggg

SEQ ID NO: 733462 - DNA, 100 bp, Homo sapiens
agtcttgccacaagacaaagaatactataaagtaaaagaacctggtgaaagtcccatattctggagcgagaacccgagcagcgccatgagcaacactacc

SEQ ID NO: 733463 - DNA, 100 bp, Homo sapiens
ctccctggacccctccttcacgcacgccctgcgcctggtgaaccaagacagtaagctcttccagaaagaaggggatttggatcctaattgtctcttatct

SEQ ID NO: 733464 - DNA, 102 bp, Homo sapiens
cagacaatgccctgaggcacacagtgtaccccaagcccgaggaatggccaaacgtaccaagaaagtcgggatcgtcggtaaatacgggacccgctatggggc

SEQ ID NO: 733465 - DNA, 100 bp, Homo sapiens
cccagaggaaactgacggagacgcagatgtggacttgaaagaagctgcagcggaggaaggcgaggaccgtataattgatgccggcccaaaaggaaattat

SEQ ID NO: 733466 - DNA, 80 bp, Homo sapiens
tgacctctgagaaagtgagccagaaacatgctgagcctttgacaggtcaaaatgcagatcttcgtgaaaacccttaccgg

SEQ ID NO: 733467 - DNA, 75 bp, Homo sapiens
tccagggcaagaacctggacaccgtgaaggtctttggggtgttggagtcccctgaactctccagggcatcttcgg

SEQ ID NO: 733468 - DNA, 90 bp, Homo sapiens
ccaaaaggcaaaagaggcaccaaacacccaagcccagtgtgccatcataatgtttgatgtaacatcgagagttacttacaagaatgtgcc

SEQ ID NO: 733469 - DNA, 100 bp, Homo sapiens
ttgccgagaaggagttgtttcccattgcagcccaggtggataaggaacatctcttcccagcggctcagctgtttttggaaggaagaaagatggaaagcgg

SEQ ID NO: 733470 - DNA, 97 bp, Homo sapiens
tgggctcctgaagttgcgccgctgccggtcgggggaagagacctgacagggcaggtaagccccctcccggtttacatctggatgtagtcaaaggaga

SEQ ID NO: 733471 - DNA, 101 bp, Homo sapiens
caaatctgggtcctcaaagaggaacaaagtcatcaagctagtggacatcacggacatccagaaggtgtcccgacccaggctaagcttgagcatggctgagc

SEQ ID NO: 733472 - DNA, 50 bp, Homo sapiens
tggctttacatgcaatacatgagttgtatcccgcattttgtattcacaac

SEQ ID NO: 733473 - DNA, 98 bp, Homo sapiens
tgattgttagtggaacttctacccgacacttacatgccatggccttctacgttgtgaaaatgaaagatgatgcacaatcagtagaaactctgggaaag

SEQ ID NO: 733474 - DNA, 100 bp, Homo sapiens
ctgggagaattggtacataatggttgcattaaagcattaaaggatagttcttcaggaacagaacgaacagagcataccagaaattcctgatgacctgaag

SEQ ID NO: 733475 - DNA, 100 bp, Homo sapiens
cgcggcccggaatcggggcgcttcgccccgggccccccagcatgaagaccccggcggacacagcggagctggagtttgttcagatcatcatcatcgtggt

SEQ ID NO: 733476 - DNA, 115 bp, Homo sapiens
gcaaaggcaagagtaacagcagcgccgtcccgtccgacagccaggcccgggagaaggtggcccagttgaaatccttcccttcctctaccttggaagtgcctaccatgcatccaag

SEQ ID NO: 733477 - DNA, 100 bp, Homo sapiens
aagcaatcctaccatgtcagccttcccagtagctggaactacagctttgtttgctagcaaaatgctttaagcctgcccttccatatcttgacgtggatat

SEQ ID NO: 733478 - DNA, 120 bp, Homo sapiens
gcctgcagctcttgggttttttgtggcttccttcgttattggagccaggcctacaccccagacaatgcagatcttcgtgaagactctgactggtaagaccatcaccctcgaggttgagcc

SEQ ID NO: 733479 - DNA, 50 bp, Homo sapiens
agaaacaaaatgtcaacaaattgatgggcttgaagctgcaaaagatgatt

SEQ ID NO: 733480 - DNA, 101 bp, Homo sapiens
acgcagcaagacccgcgccgccgggacccccaggacgacgtgtacctggacatcaccgctttggaggaattttttacatcacttgtgaagcaagaaatggt

SEQ ID NO: 733481 - DNA, 83 bp, Homo sapiens
gccagcggcagacagaacgggacctgtgtcagagcaatttgtgatctaccaggttggcttgatccccagtcagtactatgggg

SEQ ID NO: 733482 - DNA, 90 bp, Homo sapiens
ctttctaccctttactccctgcaaagaaacaagagtgcttatcccagctaagctccagggcaccttggctggggtcatcgatctcgccgt

SEQ ID NO: 733483 - DNA, 100 bp, Homo sapiens
cagccacatactatccgtttgttcaggaaccaccagtgacagagttttgcacactagggaccaagaagccctcggggacactgctgagaaaagactgccg

SEQ ID NO: 733484 - DNA, 75 bp, Homo sapiens
gaggggatatcagtcgcttccctcctgccagtgatgtaaattggagtcaaccaggtgaaaagaagttaactgggg

SEQ ID NO: 733485 - DNA, 89 bp, Homo sapiens
gccgtccgtgtcaccgccggaacctggcgcagtgttatagttttgccgctggactcttccctcccttcccccaccccatcaggatgata

SEQ ID NO: 733486 - DNA, 96 bp, Homo sapiens
cgaccttgctgcaccagagaaagaagcagcgattcctcagtaaacacatctctcaccgcggaggaaaaccaattctgtgtcctcggaggaccacag

SEQ ID NO: 733487 - DNA, 76 bp, Homo sapiens
atgtgaatgccattgtcgcccatgttctcttaccgtggctgagcatggagctgtccccccgcagtcctccggagat

SEQ ID NO: 733488 - DNA, 50 bp, Homo sapiens
ccggaatggagaaggaagaggagtcgattctggctacattggagattggt

SEQ ID NO: 733489 - DNA, 104 bp, Homo sapiens
aatggacaagctgaagaaggtgctgagcgggcaggacacggaggaccggagcggcctgtccgaggtgctgcaggaggcttctcacatgctttgggatatcttca

SEQ ID NO: 733490 - DNA, 50 bp, Homo sapiens
gccctttccacctcgcggcagttcggtctagatgttgatggaatatatcg

SEQ ID NO: 733491 - DNA, 83 bp, Homo sapiens
cggatgagtacgataccgaagcgggctgtgtgccccttctccacccagagcaattctgtggtgttcttggtcacacatttatg

SEQ ID NO: 733492 - DNA, 75 bp, Homo sapiens
tcgagatgattatcgtaggaggagtcctccacctcgtcgcagacaatgcagatcttcgtgaagactctgactggt

SEQ ID NO: 733493 - DNA, 98 bp, Homo sapiens
cggacagctcggacagcgcccagggccggagcccgagcccttggaggtgggagagttcagagcacacgctgctgagtggacagccaacgtcacagccg

SEQ ID NO: 733494 - DNA, 75 bp, Homo sapiens
catgcagagatactggatatgactggtttgagcaactgcttcaaaacgcaatgaatcgctccctggctaatgtga

SEQ ID NO: 733495 - DNA, 75 bp, Homo sapiens
aaacaggagcacctgctggcgctaaaaggatgacagtcatgagtctcctggttctcgtcctgagctggggctcca

SEQ ID NO: 733496 - DNA, 83 bp, Homo sapiens
gcagaaggaggtcctgccgtccatgcggaagatcgtcgccacctggatgctggagggcgtgatggtgggcatgggtcagaagg

SEQ ID NO: 733497 - DNA, 82 bp, Homo sapiens
gcgccccctccaggaccccccagtgcgagccgcaggccccggagatgctgcagcgagaaacacaactggttttgagaatcca

SEQ ID NO: 733498 - DNA, 74 bp, Homo sapiens
aagatgtctcctttgcctacccaaaccgcccagatgtcttagtgctacagccttctaccagcaactctcaacgc

SEQ ID NO: 733499 - DNA, 100 bp, Homo sapiens
ggggcctctgaactagtggcagaattgagcacactttatcagtgtattagcctccaggaccactggctgcccatgagagacgaaggatggcatccaaggg

SEQ ID NO: 733500 - DNA, 75 bp, Homo sapiens
tcgagttcttcgtgctgctcaaggtggaagttaaacgagctgagcctcgggacagcaagagccaagcgccgggac

SEQ ID NO: 733501 - DNA, 100 bp, Homo sapiens
ggagaaggagctgctcagcagccagagggacgggcggtttgaaggccgcccggtgcccgacggtgacgccaagcagagtcccgcaggctcccgatggcga

SEQ ID NO: 733502 - DNA, 100 bp, Homo sapiens
gatgtcgcagacggccatgtccgaaacctacgccggctcagttcggggaagctgcaggagttcggcgtgggtgatggcagcaagctgaccttggtaccca

SEQ ID NO: 733503 - DNA, 75 bp, Homo sapiens
cttaaatggggatctggtggtcgtgaaactgcttcccgaggagcattggaagctggccagctcagcgtccctgga

SEQ ID NO: 733504 - DNA, 51 bp, Homo sapiens
caatggatgaacagagcgtggagggccgttgctccagggagaactgcaaat

SEQ ID NO: 733505 - DNA, 88 bp, Homo sapiens
ttgtcgggtacattgatatatgtaaattacggaagatcatttatatacacatggccctagcacaaaacacagatcttaaagaacgctt

SEQ ID NO: 733506 - DNA, 100 bp, Homo sapiens
ggcgggggcccagggcaggcgcggagccgggccggcagatgcacgaaggagagagagtgagaagtctctagaaaatgaaacactcaataaggaggaagat

SEQ ID NO: 733507 - DNA, 99 bp, Homo sapiens
atgaggatcagtacaaccaaccaggctgctgacagtgatgatgaagatttggatgacttatttgtgggacctgttgggaactctgacctctcaccttat

SEQ ID NO: 733508 - DNA, 80 bp, Homo sapiens
cccagagctcccgggtcgtctttcgtgtggccgcgagctctctcttccgaatttgtaatgaaagatttactacacaaagg

SEQ ID NO: 733509 - DNA, 100 bp, Homo sapiens
agctgaacctggtgttttagaggataccttggtcccagagtcatcatgaagatttggaagtcaaaccagaaacttcaggctctactacgatggcaagcac

SEQ ID NO: 733510 - DNA, 100 bp, Homo sapiens
cgcctccaggccaagagggatccttcacccgtgtctggtgtgggcccatcgctggatggatctgtcagaacacggctttgggctggccctgctcaacgac

SEQ ID NO: 733511 - DNA, 99 bp, Homo sapiens
gcagccccgagctgggcagtgtccccagccgccatggatagcgacgacgagatggtggaggaggcggtggaagaaaaaaccgggaagatcctgacggag

SEQ ID NO: 733512 - DNA, 75 bp, Homo sapiens
acctgctccgccgctacaaccagagcgaggctgaacccagcgggtgccgcttctccacccgaggcttccacctcc

SEQ ID NO: 733513 - DNA, 97 bp, Homo sapiens
tgttgcttcagagtgtgaagtcaaatgcatgccaacattccagttttttaagaagggacaaaagaaaatcgcgctgcaactcaaagccacgctggag

SEQ ID NO: 733514 - DNA, 75 bp, Homo sapiens
cttcctatcacgggcactagtgtggctctcctgttccagcaattgggtgattctggcggccccttgatagttcac

SEQ ID NO: 733515 - DNA, 83 bp, Homo sapiens
agaacatccgagggtgcctgggaatcggtcgcctggaggaccagtatttcccatggaggcttcagaatggagccatctgccac

SEQ ID NO: 733516 - DNA, 78 bp, Homo sapiens
cgacctcgacgtcttgcctgtgtcccacttgttcgcggcctatagtgtctccagaacgctatagctatggcacctcca

SEQ ID NO: 733517 - DNA, 51 bp, Homo sapiens
gaggcggcggcggcggactggcggggcacctggacgatgacggattaccgc

SEQ ID NO: 733518 - DNA, 83 bp, Homo sapiens
catcaaccgggccgtgccccagatgcccaccgggatggagaaggaggaggaatcggtgaaatgacaatggatgctctgttggc

SEQ ID NO: 733519 - DNA, 90 bp, Homo sapiens
cgtcaagctggccaagcacaaagagcttgctccctacgatgagaactggttctacacgcgagctgtagagaaatggtcagaaggaacgac

SEQ ID NO: 733520 - DNA, 90 bp, Homo sapiens
gccgagccgggccgcgccgccgctgccgccgccgcgcgcgggtgtgtgtctggggaagagacttacagaagtggagttgctgagtcaaag

SEQ ID NO: 733521 - DNA, 74 bp, Homo sapiens
tcggcgctgccgtctctggaggagtactggcaacaggcgccatgtcagaaccggctggggatgtccgtcagaac

SEQ ID NO: 733522 - DNA, 83 bp, Homo sapiens
acttggctggacggcgcggccacggagaagggcgcgttccaaagaactactggttcagattttagctcttcccaagttgtgaa

SEQ ID NO: 733523 - DNA, 101 bp, Homo sapiens
cctcccgagactctccttgcttggaattctgcccactctgcggagttagcagtcacgacctccagcacaggtctgccatcatggatgttctcgcagaagca

SEQ ID NO: 733524 - DNA, 75 bp, Homo sapiens
agcagctgcttcctgcttgtctcagaaggttctaggacaaggaaaatgggactttgcctcccgggccaaactggc

SEQ ID NO: 733525 - DNA, 95 bp, Homo sapiens
cgacatggacctgcgccggacgctgttcgccaacatcgtgctctcaggtggctcaacgcttttcaaaggaggtgttcacagaactgcaggagaag

SEQ ID NO: 733526 - DNA, 101 bp, Homo sapiens
catggggatccgggagaagcacccacaaaactagcatcctcctggaggagctcggctcctcaagagttactgatctatgaaatggcagagaatggaaaaaa

SEQ ID NO: 733527 - DNA, 88 bp, Homo sapiens
tctgagccagagaataacaataaaaaacccaaaacctcaggctcccaggtacatggtaggatcaacttcctgaccttgtgacagatcc

SEQ ID NO: 733528 - DNA, 115 bp, Homo sapiens
ctcatccaaaaagtctgagcgaggagtgactgccaaaaaggagtatgtgtgccaggcctgagccgggccgggctcccgttcgggctgatgcgccgggagctggcgtgtgaaggct

SEQ ID NO: 733529 - DNA, 80 bp, Homo sapiens
gggacgagatctagaatcaactgagagagatgcttaaaaatcaccagttactttaatgactgatggatttacaactgagt

SEQ ID NO: 733530 - DNA, 100 bp, Homo sapiens
cagcaatgaatgtggatcacgaggttaacctcttagtggaggaaattcatcgtttgggttcaaaaagggcctttacaacaactaaacggacaggcattcc

SEQ ID NO: 733531 - DNA, 83 bp, Homo sapiens
caggcagatgtttgtcgactggaatggataacgaaggaggcccaacttcattcaataaggagcctgacggatttatcccagac

SEQ ID NO: 733532 - DNA, 100 bp, Homo sapiens
tttttcttgccttagcgacataccagtctctgtacccactcaccttgtttgtcccaggactcctctatctcctccagtagggacggggtttcaccgtgtt

SEQ ID NO: 733533 - DNA, 83 bp, Homo sapiens
cttgccgctgctgtcctgcgaccccaagcaggttgtttacattcagagctctatcaataagaggaatacatattacagtgaat

SEQ ID NO: 733534 - DNA, 100 bp, Homo sapiens
ccccgctgggctggccctgcagggaccatggaatccagagctgagtacgcaggccccatggagcgggcaggggcagagagcatcctggccaaccgctcgg

SEQ ID NO: 733535 - DNA, 83 bp, Homo sapiens
ctgcatgtgtgtgcgcgcgaaggagcggaagaatggcagtgctcaaactcaccgaccagtgtcttctcagaaacaaccagctg

SEQ ID NO: 733536 - DNA, 98 bp, Homo sapiens
ttagctgtgctcgcgctactctctctttctggcctggaggctatccagcttacatggacacagaacagtatgaagaagcagtacgagactatgaaaaa

SEQ ID NO: 733537 - DNA, 101 bp, Homo sapiens
cgcccccatcatcagctcggtccagaagctggttctgtatgagactagagctgcatgaacaaccgggaggtgctggagcaggtggagcgaggctacaggat

SEQ ID NO: 733538 - DNA, 90 bp, Homo sapiens
cctgaagccccacgtcgggatcgtccactacgaaggccacctacaaatagcaggcattcccatcaagagcaccatggacaaccccaccac

SEQ ID NO: 733539 - DNA, 82 bp, Homo sapiens
tctctcccaggccacaagacatttcctgctcggaaccttgtttactaattgaatctgagaaaaaggggttgattgaaagaat

SEQ ID NO: 733540 - DNA, 80 bp, Homo sapiens
aagcgcaatactattgcttccattgctgctggtgtactagacgcgtgaccaaaaccaaagacggccatgaagtgagatcg

SEQ ID NO: 733541 - DNA, 129 bp, Homo sapiens
tggatcatggctgccgcgccgccgctacgggaccgcctgagctttctacaccgggcttgggcactgtttaaaggaaagttccgagaaggcatcgacaagccggaccctcccacctggaagacgcgcctg

SEQ ID NO: 733542 - DNA, 100 bp, Homo sapiens
catcatctgaggacggctcaggagcatgacaagcgagaccctgtggtggcttattactgaagatttggagactggagttcaccttgaccctgccgtcaaa

SEQ ID NO: 733543 - DNA, 78 bp, Homo sapiens
atcttggtgagaaacattaagacctactaccaggcagataccaacagtgaccggctcttcacagtgaacgatgttaaa

SEQ ID NO: 733544 - DNA, 89 bp, Homo sapiens
atttaatggaaaatcgcttggttaaaacctgacacttttaacagcccctcatatggaaaatttgaaatgcagaggggaaacagtagcaa

SEQ ID NO: 733545 - DNA, 74 bp, Homo sapiens
ttccagaaaaagtgctcctgggactccaggataccagatgtgttcagagcaacattgttttgttgacacaagca

SEQ ID NO: 733546 - DNA, 100 bp, Homo sapiens
gactccacgctcgcttgccctgattctctccgccctgcacttttgccagctgaaggtccagggagaagcaaggaggatgggctttggactagaaatagcc

SEQ ID NO: 733547 - DNA, 75 bp, Homo sapiens
agcagccctggtgtcacctatcagtaaaagattacatcgtcagcccaaacatctccttgcatttttgttggctga

SEQ ID NO: 733548 - DNA, 100 bp, Homo sapiens
gggccatgacacacaaaaagaaagactgctttgaggtaaattcaactggaagggaactattaaagcaattctgaaacaggccccagacaatgaaataacc

SEQ ID NO: 733549 - DNA, 75 bp, Homo sapiens
ggaaatcctaatgacagtctccaaattcgcctccatctgtaccatggtttttagaacttcagccataaaaatggg

SEQ ID NO: 733550 - DNA, 100 bp, Homo sapiens
cagaagccgagttcaacatcctcctggccaccgactcctacaaggactttttttatgaagacatggagtccttgacgcagatgcttagggccttggcaac

SEQ ID NO: 733551 - DNA, 75 bp, Homo sapiens
tacaagggcgccgaggtggcgcacttcatgaacgccctgcgctacgatgccatgagagatgccaaaggccagtac

SEQ ID NO: 733552 - DNA, 75 bp, Homo sapiens
tattatatgctttcctttgctcccagttttgtccatcaactaaaggcacaaacagatacctcacttctactggtg

SEQ ID NO: 733553 - DNA, 74 bp, Homo sapiens
tgcccactactgtttcagcctgctcaaagtcaatggtagtagtcatggtctgagcaaataaggtgtataaaaaa

SEQ ID NO: 733554 - DNA, 97 bp, Homo sapiens
gttggctcgaatgtgtacataactcccgcaggatctcagggcctgccgccccattatgatgatgtcgagcctaaagaatgttttttgatacaaccaa

SEQ ID NO: 733555 - DNA, 133 bp, Homo sapiens
ctaaggaacatggcgaaggtggagcaggtcctgagcctcgagccgcagcacgagctcaaattccgaggaaataccgtctgaaggctgaatcggaagcacggcagaactggccccagaactgggggtttttaac

SEQ ID NO: 733556 - DNA, 75 bp, Homo sapiens
agcggcggcggccttggactttgctgtctttcctcgcggagacagatttgaacatggaattcaatccttcagatc

SEQ ID NO: 733557 - DNA, 90 bp, Homo sapiens
gggtactacacaaccgtctccagccttggtctgagtggactgtcctgcagcaaccatgtccaagggacctgcagttggtattgatcttgg

SEQ ID NO: 733558 - DNA, 99 bp, Homo sapiens
cagggcacaccaaactccatctggcatgtggcgtcatagtagaattaatcaaaagcaagaaaatggctggaagagctgtcttgttggcaggacctcctg

SEQ ID NO: 733559 - DNA, 98 bp, Homo sapiens
gtctggtcctactacgcgtacgtggtggagctctgcgtgtaatatcaacacctttgagaacagaatgttaatgcttgatgggatgccggcagtcagag

SEQ ID NO: 733560 - DNA, 96 bp, Homo sapiens
cgatgccggaaaaacaccttggcccgccggaagggcaggcacatgggcatagggtgaggtggctttgaccccgggttgcccggccagcacgaccga

SEQ ID NO: 733561 - DNA, 98 bp, Homo sapiens
cggagctcccccaagagccggaaagggagtttggccgctggaaagtaaataaccttgcagttgagagaagaaatttccttggctctcctctgcctctt

SEQ ID NO: 733562 - DNA, 75 bp, Homo sapiens
attggacagatgctgcgtactcatttcacacattctcagggcggcgactggcggcgcgatggacctgaccgggct

SEQ ID NO: 733563 - DNA, 75 bp, Homo sapiens
tcgcgcgcaagcacgcacgacatacgcaaactcgcactgaggcgcccacagaggtcattgagactgcctcttctc

SEQ ID NO: 733564 - DNA, 75 bp, Homo sapiens
gggattgccccggaagagggaggcgtggacgcaccagtgtgcttttcttggagaaagaagaaaagaagaaagaag

SEQ ID NO: 733565 - DNA, 100 bp, Homo sapiens
acgaaagcctacaaaagtgtggagaggttccttcaggaggatcagcacagcaatggccaaagatgaacgagtgaacctgctgtccttcactgggagcact

SEQ ID NO: 733566 - DNA, 51 bp, Homo sapiens
ttcgctgcgcgtgcacattccgtgagcatgtttttgaacacattaacaccg

SEQ ID NO: 733567 - DNA, 82 bp, Homo sapiens
agagctgttaacacttcctagataacggggtatttgaagtataccatacaactgttttgaaaatccagcgtggacaatggct

SEQ ID NO: 733568 - DNA, 50 bp, Homo sapiens
atcaggagcagttacaggaaattgagaatgtcacgtcatctcctcagtat

SEQ ID NO: 733569 - DNA, 97 bp, Homo sapiens
tatttccaggacaacagcccagacagcccggaactcaacaaagtgtctctagtgatccctgaaaagttccagcatattttgcgagtactcaacacca

SEQ ID NO: 733570 - DNA, 75 bp, Homo sapiens
gctcgggagggagactgttgttcccggagatgcggcgcgcaggtagttacttttggtgacgctgtccagttccca

SEQ ID NO: 733571 - DNA, 80 bp, Homo sapiens
attttgccgatttcatgactaaccagtgataatctacaggggtacaaaacccaaaacaaatttctaaataaggagatttt

SEQ ID NO: 733572 - DNA, 100 bp, Homo sapiens
cctgcggaggctgaagcgggagtgtgggggcctgcagacgctgctccggaacagccaccaggtgttccaagatcgatgctatagaagacaaacaagggaa

SEQ ID NO: 733573 - DNA, 99 bp, Homo sapiens
gactccatccaggaggaagtgcgggccaagagcaagctgctggagaagatgcagaggaagatagccgcaatggctgaaaatggtgataatgaaaagatg

SEQ ID NO: 733574 - DNA, 82 bp, Homo sapiens
cgtcgattaaagagccatctgtggtgccaattgaaggagcatcagatccatgctgctgctgactcggagccccacagcttgg

SEQ ID NO: 733575 - DNA, 82 bp, Homo sapiens
cccgggcactatgtgaatttgggtgtcaacagcatctccaccctggagcctgtgagccggtgccagcgcctgagtgagctgt

SEQ ID NO: 733576 - DNA, 87 bp, Homo sapiens
tgctggggaaaggcagctttggcaagtgggtaattccagaattgattggccataccattgtcactgtattactgctcatgtcattgc

SEQ ID NO: 733577 - DNA, 100 bp, Homo sapiens
cgcgtgtctaggtgagtcgcggtgggtcctcgcttgcagttcagcgaccacgtaagcactatcctttgtactccctcaacgtggcctccatgtggttgaa

SEQ ID NO: 733578 - DNA, 75 bp, Homo sapiens
ggagttccaccaggccgggaagcccatcgggtttggtgcacctcgatttggaggaagtagggcagggcccttatc

SEQ ID NO: 733579 - DNA, 90 bp, Homo sapiens
tgacggcgtgaccgacccgagccgttactccacaggatccgctgaacataggatgttgccacaaaatctacctcgtgtatttttctcttt

SEQ ID NO: 733580 - DNA, 104 bp, Homo sapiens
cgtgtccgggctacctgtttgaagagattgctaatatatcagctacttcagtgggctgctatctggctccatcagaatgaacagcagccctctcttcctgcact

SEQ ID NO: 733581 - DNA, 75 bp, Homo sapiens
cgcgggtccgtgcgcccagcgtcccagggcccaggccgagcagagcttcagacgccctatggcgtccgcctcgac

SEQ ID NO: 733582 - DNA, 100 bp, Homo sapiens
ggaggagaagccggaggaggacaacgactaccaccgcagcgacgagcaggattgaaagaaggtggcaagaggaagaagcagaagcagagagaggagtcga

SEQ ID NO: 733583 - DNA, 100 bp, Homo sapiens
ccgccgtttcaaagcctccaagtttggctccacccgtggtgcaggaactgtgtttgatgccttcccggatcagggccgttgctccagggagaactgcaaa

SEQ ID NO: 733584 - DNA, 83 bp, Homo sapiens
ggggcctggcggtcttcatctcggatatccgcaactggggagtcggtgaagtacttcctggacaacttggaccggatcggcca

SEQ ID NO: 733585 - DNA, 100 bp, Homo sapiens
gaaaacaaagatgatgataatgttttcagcagcaatttgccctcagagatggtttcacccaaatatcactggtgtggaggcagaaaacctactgttgaca

SEQ ID NO: 733586 - DNA, 100 bp, Homo sapiens
agtgatgaatgcaagaggcgtttctataagaattggaaagaccacagcaagattctttcattcgtctcctcctagcctgggggaccaggctcgaactgac

SEQ ID NO: 733587 - DNA, 74 bp, Homo sapiens
tgggacgcctgtccgaccgcctcggcaggaaccgggaccgccagcgcaggagaaaatgaaactgaagccgtggt

SEQ ID NO: 733588 - DNA, 75 bp, Homo sapiens
ccgaaggccctatcaggacatggagtatgaaagacggtgtggtggctcacgtctgtaatcccagcactttgacag

SEQ ID NO: 733589 - DNA, 80 bp, Homo sapiens
atgcccaagacattataaacgagccagatgaccaagatgctccagatgaacatgagtcgcctccacctgaagatgcccca

SEQ ID NO: 733590 - DNA, 74 bp, Homo sapiens
agcaaataaccgttttgaaattgtatagccgagaccatgtggtggaaggggaaccgtatgctggttatgataga

SEQ ID NO: 733591 - DNA, 74 bp, Homo sapiens
atatattagtctacttgctgacacaaagctggatctacatttaaaggttttatgacttacctagtggagccttt

SEQ ID NO: 733592 - DNA, 99 bp, Homo sapiens
ggacggggccgggcgacctgggcaccagcaggacccgaggccaggagccaggggcccagaaggaaacattggcaaatttggagcgacagatctatgctt

SEQ ID NO: 733593 - DNA, 90 bp, Homo sapiens
ggtctgactaccagtggctctgcagagatccagatgcagaggtgtgccttcatgtactgaggcttgtccagtctgtggttctggaacctg

SEQ ID NO: 733594 - DNA, 82 bp, Homo sapiens
agctgaatgtgttactccattgctgaggagtgagggagaaccgaagattacaggaggccagcatgaggttggaacaagagaa

SEQ ID NO: 733595 - DNA, 71 bp, Homo sapiens
aaaggtggaggccgggaggacgaaggggagtacatcaagacctggcggccacgctacttcctcctcaagaa

SEQ ID NO: 733596 - DNA, 75 bp, Homo sapiens
acaaccttcgatctcctgacgagtggttatcactaggctaaaactggacaaagaccgcaaaaagatcctcgaacg

SEQ ID NO: 733597 - DNA, 90 bp, Homo sapiens
attcactggaagaactgcaaagaaagcaatccgagaggaaattctattttgactccagcacgggcttacagtgctctcggatcagcaaaa

SEQ ID NO: 733598 - DNA, 142 bp, Homo sapiens
gtacccgctacataaagccatcaaagtggagagagaagacgtggtcttcctgtatctgattgaaatggattcccagtatatttgccttccctccatgatctccaacactatccgataaagtagaagcaactgaggtaccgtg

SEQ ID NO: 733599 - DNA, 100 bp, Homo sapiens
gccgcccgccgggcatggggagccgcttcctgggcggctgcggcagcggaggaggatgctctgggctaggcgagcgaatgtctgcgacaacgagctcctg

SEQ ID NO: 733600 - DNA, 90 bp, Homo sapiens
gacagtttgtgccagctctccagagagaaaagctttgtgacaacaaactgtgctctgcagttttcatcccgtggaatccgacccggcctg

SEQ ID NO: 733601 - DNA, 76 bp, Homo sapiens
gggcgactctgtgcctcgctgaggatggtcagtaggacagaaggtaacattgatgactcgctcattggtggaaatg

SEQ ID NO: 733602 - DNA, 100 bp, Homo sapiens
ccgcttctgggctagcatgatggaggcagccagaatgttccggagaatcacagcagctgccactaggctgttccgcagtgatggctgtggcggcagtttc

SEQ ID NO: 733603 - DNA, 97 bp, Homo sapiens
acgttagcgtgagtgatcactctcaatcccgggcatccgcgacttggctgctgtcaacctggacagctcactggcggacctgggcctggactcgctc

SEQ ID NO: 733604 - DNA, 75 bp, Homo sapiens
aacaaagccacccagccaatgaaggtatcgaaggatgatcgcagtgatgtggagagcagctcagaggaagaagat

SEQ ID NO: 733605 - DNA, 98 bp, Homo sapiens
ggcgggccacgaggaggcgaagcgcggcgggcaggcgctacgagataaaaatctggataatgccgcagaagcagctgaacaatttaaattaatccaag

SEQ ID NO: 733606 - DNA, 75 bp, Homo sapiens
cggcgttggaggccaccgtttccaggttgattccaaagatagttctcataactccacaaactctgaatttgcagc

SEQ ID NO: 733607 - DNA, 75 bp, Homo sapiens
aatagagctgccagaggttccctccgagccccttcctgagaagatcccaggactttccttatcccagttgattgt

SEQ ID NO: 733608 - DNA, 100 bp, Homo sapiens
ctgttgcccagttggtgaagagacttacagatgcaggtattggtggcatggatggaacacaacagcagatttttaaaatgttagcagaggtactaggagg

SEQ ID NO: 733609 - DNA, 140 bp, Homo sapiens
gtttctctgccttgctgatctgagctcagacctgccaatttaccagagataattgataacaccctgtaacagctgagaacattttagtggacaaaccaaatgaccaatcttcaagatggtcttcagagagcaactatcct

SEQ ID NO: 733610 - DNA, 50 bp, Homo sapiens
cagaatctcagtccaacaaaaggtgaagatggagctggaaaaacaagctt

SEQ ID NO: 733611 - DNA, 90 bp, Homo sapiens
accctccaactttgcgacggaaatgtgtcatcgaaagccaggaacaaatgctaagcatggactgcgctgcaaagcctgtaagatgagcat

SEQ ID NO: 733612 - DNA, 100 bp, Homo sapiens
tcccagtgccccacaccaccgcactgtcgctgcccgcctgccctgaggagtccccgctgcttgacctgtcaccatggcccaccgatttccagccctcacc

SEQ ID NO: 733613 - DNA, 80 bp, Homo sapiens
cgaggaggcagccacggggcccctggcctgcctgctccgcttcagcggactctcgctggtctacctgctcttcctgctgc

SEQ ID NO: 733614 - DNA, 100 bp, Homo sapiens
ttgtgggccgccgtcggcagcaagaacagagagagaggtggacagatctgagagatactgaggagaagatggtataaactggtccatcagtgacaaagac

SEQ ID NO: 733615 - DNA, 82 bp, Homo sapiens
gctgctatggcaatgtctataatcctttaccctctccaagcaggtgcaactgccaaaagaactggcgtaagaggcaacagag

SEQ ID NO: 733616 - DNA, 156 bp, Homo sapiens
aggtaatgctgatgcttcaagtcttggaaccacacttcgagaatcactgttataatgtacagcagaactgcatgatcagcagcctcccgcgacgatgcccctcaacgttagcttcaccaacaggaactatgacctcgactacgactcggtgcagcc

SEQ ID NO: 733617 - DNA, 126 bp, Homo sapiens
cggcctcggtgcaggcagcggccgccgccgccgagacagctgcgcgggcgagcatccccacgcaaccagcatctcagacatgtcgaaaaagatgttttgatccctaaaataatgagagaaaaggcc

SEQ ID NO: 733618 - DNA, 98 bp, Homo sapiens
tggaggttcgcgcgcacagtgatggaggagatggagtggtgtctcaagtcaaaatttcaggtggggaagacgtcgctgatcctgtccctggtgggcga

SEQ ID NO: 733619 - DNA, 100 bp, Homo sapiens
gcccgggccccgctcctctgaactcccgcgtgtgttctgactatggcaaagaaggtctttgccgcgtgcacgggcaagaagctcttctggctgccattag

SEQ ID NO: 733620 - DNA, 83 bp, Homo sapiens
ggccctgccctccgagggcttcagtctggagccgcccagagaagtccattggaatattaagcccaggagttgctttggggatg

SEQ ID NO: 733621 - DNA, 50 bp, Homo sapiens
caccgccctggccatctaccatgtggaagctgaagtcttcagcagaaccc

SEQ ID NO: 733622 - DNA, 88 bp, Homo sapiens
gaacgtcttgcaacagtggccgcacgcataggctttacaggaagtatggtgctggcatctgcttggcttctagagagtcttacaatcg

SEQ ID NO: 733623 - DNA, 100 bp, Homo sapiens
tagaggagctttaccgcaattatggcatcctggccgatgccacggagcaagtgggccaggtacggtggttgaggagagcaatggttctgatgagatggag

SEQ ID NO: 733624 - DNA, 129 bp, Homo sapiens
caagaaacccctgcagtacttgaagatttgcataaagccaacattcgcaccgtcatggtcacagggttgtgagtcccggcccagcccctccacccccctgcccccccgatgcgaccatgggctctggca

SEQ ID NO: 733625 - DNA, 100 bp, Homo sapiens
agcaacttgacctcggtcccagtgccccacaccaccgcactgtcgctgcccgcctgccctgaggagtccccgctgcttgccccagtgaccttgattcacc

SEQ ID NO: 733626 - DNA, 74 bp, Homo sapiens
gccccctgcaaagcctgcacaagctctgtgagaggatagaggaattaaatatgggtgatgttgagaaaggcaag

SEQ ID NO: 733627 - DNA, 97 bp, Homo sapiens
tggataataggtcaagaaatcctaaatcagaacttttcagtcctcaaccactgaagaagaagcttgatgcttggctgtcagaagacatgaattacgc

SEQ ID NO: 733628 - DNA, 100 bp, Homo sapiens
ccgcgtgctgggaggagactggagcccggttaggaagaatggagttggcgactcgctaccagatcctcaagcccgccgacaagaacaaggggaagtacgg

SEQ ID NO: 733629 - DNA, 74 bp, Homo sapiens
cctacagttactatgcctcgaatcaagattttcagctgaactctcatctctcaacactggcaaatattcataag

SEQ ID NO: 733630 - DNA, 74 bp, Homo sapiens
ctgtcactatcagcaagtcacaatcagaattggcagagggggtcgatttgggaggaaaggtgtggctataaact

SEQ ID NO: 733631 - DNA, 75 bp, Homo sapiens
atttctctgaacatactgccttatgggacagatcaaatggaacttgctaaggaagaaaagtgtgaatttctgcca

SEQ ID NO: 733632 - DNA, 100 bp, Homo sapiens
ccctttggagtcgggaggctccagtgatgttgtccttgtcagctatgtcccatcctcccagcgacagcagggtgctgcagggtgcacagctgatcgccgt

SEQ ID NO: 733633 - DNA, 74 bp, Homo sapiens
agcagcccccgaaggccctatcaggacatggagtatgaaagacgattctctcgggcctagccgtccttggaacc

SEQ ID NO: 733634 - DNA, 87 bp, Homo sapiens
ccgccacaccgccgctgcctcagtcatgccgattcagaatggacagtttagaagaacctcagaaaaaagtctttaaggctcgaaaaa

SEQ ID NO: 733635 - DNA, 100 bp, Homo sapiens
gcggtgattttcgacatgggcggagttctcattccttctccagggagagtcgctgcaggagagaagatgactgaggaggaggtggagaccgttctggcag

SEQ ID NO: 733636 - DNA, 75 bp, Homo sapiens
agcaacggcagcgtgcagatcaacttcttccagctggtgggccagccggccgtacacttgaagcgtgacttcttc

SEQ ID NO: 733637 - DNA, 97 bp, Homo sapiens
cagcacgccagtgagggagatggagaccaatcacccacccagtgtgcgtgagagggtccaagcctggtaagaatgtccagcttcaggagaatgaaat

SEQ ID NO: 733638 - DNA, 49 bp, Homo sapiens
ctcggaacccgtggtcctccgcttcatatctaaatgagtgtggcctgaa

SEQ ID NO: 733639 - DNA, 100 bp, Homo sapiens
tggggctcgctgctcatcatgctcaagtcagagggcttttactcctacctgtgtaccgagccaggattacaaggcagaggaagacccagcaaaatttaaa

SEQ ID NO: 733640 - DNA, 95 bp, Homo sapiens
ttttgcaacaacataacactgcaccttccaacaggacatggatttgattgacatactttggaggcaagatatagatcttggagtaagtcgagaag

SEQ ID NO: 733641 - DNA, 100 bp, Homo sapiens
gtgctgctggttagtgtgctctgagggagggtccgagccagccgctgttttgccggaggagcccctcaggccagttggtgttgaccccgatcaagaccca

SEQ ID NO: 733642 - DNA, 83 bp, Homo sapiens
tttctcatggatgttcttcttcgagtatttgtagaagggtcagaaaaagagtgcacgccagtatcacgtacagttctttggtg

SEQ ID NO: 733643 - DNA, 88 bp, Homo sapiens
tctggccagctgactgcacttcttttttgagaaaggaaggaatatatcctgactgattcaggctctccccggaggctcagccccctct

SEQ ID NO: 733644 - DNA, 100 bp, Homo sapiens
agaagagccaaggaataaacatgcaatgaacccaaaaggaagcctggctacagataagggaccaaaatgactgactcaaaatatttcaccacgaccaaga

SEQ ID NO: 733645 - DNA, 75 bp, Homo sapiens
aaagccggcaaaaccacttacagctgaaaaggatttctctctgatcaaacggacagttcaggactcagaatctaa

SEQ ID NO: 733646 - DNA, 96 bp, Homo sapiens
ggcaaatgaaagagctccaggatcagctcgaagcagaacagtatttctcaaatgcaagttctagccggtttttcctacaaggaatccagttgaata

SEQ ID NO: 733647 - DNA, 101 bp, Homo sapiens
ggcagggtcatccttgcccttgtcctcccctttcatccctatgtggaaaacgctgggaacttctggggtaggacgttgtctgctatctccagttccacaga

SEQ ID NO: 733648 - DNA, 50 bp, Homo sapiens
gctgtccctgctggaggagcgcttccggattcatgttacatgtaaagctg

SEQ ID NO: 733649 - DNA, 75 bp, Homo sapiens
gtgacggcggtcggaggtgtaggagggagccgtggaggtccagatacactgaagagatggtgccttggcaccctt

SEQ ID NO: 733650 - DNA, 98 bp, Homo sapiens
cgctctgcggcggggatggcgcggctgcgcttcgggaacccggtgccggactgcgcctgctgcgacgatgaggtggtcctgcagtgcagcgctaccgt

SEQ ID NO: 733651 - DNA, 50 bp, Homo sapiens
cggagctcgtccagctgcgtgcctagaacttggagcgtgatgcccagaag

SEQ ID NO: 733652 - DNA, 75 bp, Homo sapiens
ctttctgaagctcatgaagactgtgtaaataatatcagattcatgatgttgctatcaaaagttgagaaattgtca

SEQ ID NO: 733653 - DNA, 90 bp, Homo sapiens
gcgcgagctttcccgggataagtagctttagcgatcgggagacagccgggcgctgcaagatgagttttgatcatcctgagaaaaatgggc

SEQ ID NO: 733654 - DNA, 83 bp, Homo sapiens
cgaggaggcagccaagctcgtagcctgccactccgtgcctactggtgctactacaaccatctatgcagttgaagcagatggtg

SEQ ID NO: 733655 - DNA, 75 bp, Homo sapiens
accgtgcagcggggcatcatcaagatgggagaagatgtcaaccggacactagaaggtggaaggaaacctcttcat

SEQ ID NO: 733656 - DNA, 50 bp, Homo sapiens
ataaaactaccaacaggcacagagtgatgtcttggcattgcccattttca

SEQ ID NO: 733657 - DNA, 82 bp, Homo sapiens
ctggaaccctggggactacgacgtccctcaaaccttgcttctaggagataaaaagcttccccgggcgctgcctggacaggcc

SEQ ID NO: 733658 - DNA, 75 bp, Homo sapiens
gtgctgaaatgtttgacgacactgatggtttggttttctgtctcaactggtctctgacaagcctctgactgaatg

SEQ ID NO: 733659 - DNA, 98 bp, Homo sapiens
gagcagctgggcacggtgcccctccctatcctcttggccaggaaggtcccttcagtgaagaaaggggcaagaatggtgagggagctgtttgtcatggc

SEQ ID NO: 733660 - DNA, 82 bp, Homo sapiens
accaggattttatcatggacacgtttcttacttggattttgcaaacttttgttaggagtgataaacccaaactgttcagagg

SEQ ID NO: 733661 - DNA, 98 bp, Homo sapiens
agcgcgtgcccgcgaggagccgccgcgcgcccgcgccctccgcgcgacgccaggagctccttcccttaacagagctgagagaggcatctggagctgca

SEQ ID NO: 733662 - DNA, 100 bp, Homo sapiens
tgatattttgacctccttccatgaatcacaaatgttcttaatggcatctagaatgaaaacaagtgttcatagtcggttggggattatttataatcctaca

SEQ ID NO: 733663 - DNA, 82 bp, Homo sapiens
gcgggccggacgctgagcggagcagctgcgccacgacaatgcagatcttcgtgaagactctgactggtaagaccatcaccct

SEQ ID NO: 733664 - DNA, 100 bp, Homo sapiens
ggaatggccgtcttcgggttcgtcctcttcttggtgctgtggctgatgcatttcatggctatcatctacacgttttgacacaagggcgcatatcttcaaa

SEQ ID NO: 733665 - DNA, 75 bp, Homo sapiens
tagccctgctccaggaatgggacctcgagtcactgtgcaccaaggatgacattgatcttgatgccttggctgcag

SEQ ID NO: 733666 - DNA, 100 bp, Homo sapiens
tgattgccacctggatgctgttctctctcttcacgctcattttggagactataattcttccatacatcatccaggctatctttccgatagtcactttata

SEQ ID NO: 733667 - DNA, 100 bp, Homo sapiens
gtctcccaagacaacttcctcaccagcaccttacagggacagggtgccttatcggagagactgcggagcttcagcatgcaggacctcaccaccatcaggg

SEQ ID NO: 733668 - DNA, 51 bp, Homo sapiens
ctgcaataagccgccttccaagaggacgtcggtgatgaaggagaagaagaa

SEQ ID NO: 733669 - DNA, 75 bp, Homo sapiens
acattggtacaatgaatacatttaaggggaagaaggagaaagggccaacccctgaagaagcaatacagaaactga

SEQ ID NO: 733670 - DNA, 83 bp, Homo sapiens
ctcaacgtggacgtggtcaagtacgagagtggccctgacggaggggaggaagcgagaaggttttgggattcgaattcagtggg

SEQ ID NO: 733671 - DNA, 100 bp, Homo sapiens
tgctgctgcctcttcatcctcttcctcttcctctcggagctcaccggatttataacgacagaagttgagaaagatcagtctaaagaaaaggagaagaaag

SEQ ID NO: 733672 - DNA, 100 bp, Homo sapiens
ccaaggatgaagaacggagacgaaaccgtccatgtttgatgtgagccgggagctgggctccagcgttgcactgtacagccgcaaagtcctcatccagacc

SEQ ID NO: 733673 - DNA, 100 bp, Homo sapiens
aaaaatcttggtgggatgcggtttgtactctgattcacagaaaagcagtgccgccatggcatcagatgaaggcaaactttttgttggagggctgagtttt

SEQ ID NO: 733674 - DNA, 82 bp, Homo sapiens
accgggaggccctggccgccgcctgcgaggcgctgcgagcaggcagtatttggcagtcgtattcagagataaacccctggag

SEQ ID NO: 733675 - DNA, 82 bp, Homo sapiens
aaatggttgacacctttacacagagcagttgcatcttgtagtgagggctgaaaacacagttaaatcactttcaaagttaaaa

SEQ ID NO: 733676 - DNA, 83 bp, Homo sapiens
gcgggtcttgggtcctccgagagcagcagcgtttcggagcaacatcccctgtcacctggttgatatctcttgcggattaccct

SEQ ID NO: 733677 - DNA, 75 bp, Homo sapiens
gacatccgagcgaaagagaaagagagaggtgtgggaaatggaactggatagactcaagaatcaggatggcgaaat

SEQ ID NO: 733678 - DNA, 99 bp, Homo sapiens
ttggccgtacattctataatcaggcaattatgtcttctaaaaatattgcacagattagcctgaggcctgctcagtcgttcctaatgaataaaaatcaag

SEQ ID NO: 733679 - DNA, 75 bp, Homo sapiens
gacacctcctcggaagtcggcatctctctccaacctgcattctctgcacaacgtcaccctggcgctggagctgct

SEQ ID NO: 733680 - DNA, 83 bp, Homo sapiens
caaggacagagtcagtgatttccataaattgaagcaaaatcactgtgtccactactatgatcttcgtaacactaaacagccaa

SEQ ID NO: 733681 - DNA, 118 bp, Homo sapiens
tggggcaccgccgacgcctcgggagccatggccgaagggggagaaggaggcgaggacgagatccagtttctgaggactttggtgacaaagttcctgctgatataaggttaacttccat

SEQ ID NO: 733682 - DNA, 90 bp, Homo sapiens
gtggttccacctaatgtcagggaccttctggatattttacgggaaagagtgctgcatggtgctgaaccattgccatattatactgctgcc

SEQ ID NO: 733683 - DNA, 82 bp, Homo sapiens
ctcaatatctgtcttcggtggactccttcggcagtccacccaccgccgccgcctcccagatctcctgggaggcccccgtgga

SEQ ID NO: 733684 - DNA, 100 bp, Homo sapiens
tcacctcgcgtcgcgcccgggaggaaggaacgaggcaaggagctaaagcagcgtgcgttcagccctgggccgggtaacagatcttgtaaaccaacaacaa

SEQ ID NO: 733685 - DNA, 108 bp, Homo sapiens
tcaatatctgtcttcggtggactccttcggcagtccacccaccgccgccgcctcccagttacagacgttccacgttccgtctccctgtgccagccctcaggacctgag

SEQ ID NO: 733686 - DNA, 82 bp, Homo sapiens
gtttcatctgtggatggagtattgacctgcctagagctggaacgttacctccagagcgagccctgctatgtttcagcctcag

SEQ ID NO: 733687 - DNA, 51 bp, Homo sapiens
ctcaacaaccatttctaagtggagttgatccctgaattttattatctccct

SEQ ID NO: 733688 - DNA, 82 bp, Homo sapiens
cgctagggaagatcgcaccgcggacgcccgctgagcttggcgcacgggccgaccagggaaagcaggcaggatgggagagtcg

SEQ ID NO: 733689 - DNA, 100 bp, Homo sapiens
cggccagcggagccctgggctggggcaggagccggcatccagatgtacctctgcaacagagagcactatggctacctgcccatccccctgaagccccatc

SEQ ID NO: 733690 - DNA, 75 bp, Homo sapiens
ccgacgccatcaggctcaacgaggaactcaaagtggatgaggaaagttggatccatgccgtctacacccctgtag

SEQ ID NO: 733691 - DNA, 75 bp, Homo sapiens
caggggcagagggaccactctgacaggaacgtcaaggtcgtgggaaataaaaggcagttctacacagactgcagc

SEQ ID NO: 733692 - DNA, 80 bp, Homo sapiens
cgcggggcacaggatccggagctggagcccccagatgacgtccggttgtttgccttcgtgcgcttcaccaccggggatgc

SEQ ID NO: 733693 - DNA, 75 bp, Homo sapiens
ttggtgtgattagcttcgcagtctggaaagctttaggagttcacagtgttgggggccgtcccgctcctaaggcag

SEQ ID NO: 733694 - DNA, 52 bp, Homo sapiens
gccagctgttcaccaccgagctaggccaggccaggatcagatgggaagtgga

SEQ ID NO: 733695 - DNA, 83 bp, Homo sapiens
ggtcgatggtcggcggcgcccggatgggcagctgagatgaaatcagacatcactgaaggagttgatattccaaagaaacctag

SEQ ID NO: 733696 - DNA, 50 bp, Homo sapiens
agatattttacactgggtttaccaacagatgcggtggtgctagaatttgt

SEQ ID NO: 733697 - DNA, 100 bp, Homo sapiens
ccctgcaaagcctgggagcagctggattccatttaaagaggaccggcagagaacaaatgccaagaactgttgtgcaagtgtgaccaggagattgctaact

SEQ ID NO: 733698 - DNA, 100 bp, Homo sapiens
gaggaggaagaggaaagaaaaggagtcaggaatgcctcttaggtacatgtcccagagcaagcacacggaggcccgggagctcatgtactcgggagccctg

SEQ ID NO: 733699 - DNA, 98 bp, Homo sapiens
ggaggatgcaagtcctgacagattcagcaacactgatgacattattgacgatgtggagagttttgttgctgccgcggagatcctgaaagagagaggcg

SEQ ID NO: 733700 - DNA, 100 bp, Homo sapiens
acgccggctggaaccaggaccccacgcacgtcatccgcttcccgctcaatggctactgccggctcaactcggtacaggtacaccaggggttggaaaaacc

SEQ ID NO: 733701 - DNA, 98 bp, Homo sapiens
tcacactgccccggcggggaggacgagaatcggtgtggtttttcgttggaatatacgttgcacatttatggcgattctgagtgtgagggcagacttct

SEQ ID NO: 733702 - DNA, 75 bp, Homo sapiens
ggatagcgttgcaaatccttaaaagagtcttaacgggtgaaaaggaacagcctgtatttgcaatgaccggccttc

SEQ ID NO: 733703 - DNA, 75 bp, Homo sapiens
ctgctgcccagtttgagctctgggaagaagaggagcaggccgggacgcccaccgatcttcaagacactgctggag

SEQ ID NO: 733704 - DNA, 116 bp, Homo sapiens
atgaaccttgccctggggttaacactccagtgggatgaacagacaaaccccacaagcactgcatacggtcatttgaaccaattctccgcctccttccccagggaatctctcctgtc

SEQ ID NO: 733705 - DNA, 90 bp, Homo sapiens
caggaacagaaaaccaaacaccacatgttgtctcttagaagtgggagctgaacgggttgatttgggaagcagagcacagcagcccaaatt

SEQ ID NO: 733706 - DNA, 76 bp, Homo sapiens
agcaggcgctcaccatgttccctggagacttccaccgctgtcagaaggcaatgaccgctaaaggaggcgatatctc

SEQ ID NO: 733707 - DNA, 82 bp, Homo sapiens
agagccccagtcagccaagtttcagacagaccgtgagcagttttaaaatcaaagatgggaaaatcggagaaaattgcccttc

SEQ ID NO: 733708 - DNA, 75 bp, Homo sapiens
gtcttcttcgtaaaaggttgcctgttacaaatgaaatgccggtgatgaacaatgacaagcactgctttgaatgct

SEQ ID NO: 733709 - DNA, 76 bp, Homo sapiens
ttgatcccaggaaacaagagattgttgctgacttatcaaactggtttcaaagcacagagctcaagtaatttacacc

SEQ ID NO: 733710 - DNA, 51 bp, Homo sapiens
gctaccacggccgagctcttcgaggctcgtggtcccaagaagcatctgaag

SEQ ID NO: 733711 - DNA, 100 bp, Homo sapiens
ctgctacgtggagaaaacctcggataagttagaacaatcagcccttcaagcagaacttgagaaggaaaggcaagccctcaagaatgcccttggaaaagcc

SEQ ID NO: 733712 - DNA, 100 bp, Homo sapiens
gaggttctgcagaaggttgtgactttagtatacatttcccgaggtacctagtgtctgagcggcacagacgagatctcgatcgaaggcgagatggcggacg

SEQ ID NO: 733713 - DNA, 100 bp, Homo sapiens
gtggaaattttgagccatttcgaatcacttaaaggagtggacattgctagcaatgagctcccaaagccatccaggaagatgcccaggaagaatttggctg

SEQ ID NO: 733714 - DNA, 95 bp, Homo sapiens
gcacccatgtcccaggtgtatggagcgccacatctcctgagattatttggcatgcccaagagaatcgtaaatgcaaaaattgcttgccttgactt

SEQ ID NO: 733715 - DNA, 113 bp, Homo sapiens
cggagatacctccaaagccggtacgcctgttcccagagttcggggctgaggaagctgccctcgaaaccctccagaagacatctgtcctgcagaggccctaccactgcgaggcc

SEQ ID NO: 733716 - DNA, 83 bp, Homo sapiens
cagacgaagacagtccctggatcaccgacagcacagacagaatccctgctaccacttcgttccagagcccagcatgaatggat

SEQ ID NO: 733717 - DNA, 98 bp, Homo sapiens
tcgcgtctcggaaaccggtagcgcttgcagcatggagctacagaaggcccaaaagaagaaatatatcaagaagaagcctttgctgaaggaggtagaac

SEQ ID NO: 733718 - DNA, 100 bp, Homo sapiens
tgagcctcctcctctccttctacctgctggggttgcttgtcagtagcgggcaaggttgaaatcacaaagattagacacctttttagataggtgttcttca

SEQ ID NO: 733719 - DNA, 97 bp, Homo sapiens
gcggagctgtgcgagagcctcctcacttggggatcgcttacacctgagacgaactacagaacagcacgtaccagaggtggaagtccaagtcaaacgc

SEQ ID NO: 733720 - DNA, 95 bp, Homo sapiens
ctggaggttttcaaggccctcacagacaatgggagacacatcacctacttggaggaagagctggcctacctcctgagctgtggcttccctccccg

SEQ ID NO: 733721 - DNA, 100 bp, Homo sapiens
gttacaaaaccagttggtggtgacaagaacggcggtacccgggtggttaaacttcgcaaaatggtcaatgggaaggatctttcaaaggccactcatgaag

SEQ ID NO: 733722 - DNA, 87 bp, Homo sapiens
tgtttctcaggaggatggagctagttagctgtctgttgtctgtagcccagccagagactgctgctactttgaaacgtacgatagagg

SEQ ID NO: 733723 - DNA, 82 bp, Homo sapiens
gacagcgaacatgtcgcggcctgtcagaacaagttgaaatcatcgcagaaggataaagttcgtcagtttatgatcttcacac

SEQ ID NO: 733724 - DNA, 100 bp, Homo sapiens
accccatcgaggcttccctggttgcttagctgggtctcggccacggcgtggagagcggcaacctccaagcccttgcctccagcccctgctccagatgagt

SEQ ID NO: 733725 - DNA, 75 bp, Homo sapiens
gttgcattgcctgcaagctctgcgaggccatctgccccgcccaggtttactcatttggggagatgccgtgggact

SEQ ID NO: 733726 - DNA, 90 bp, Homo sapiens
tcaaaatggaggaagagagcggcgcgcccggcgtgccgagcggcaacggggctccgggccctaaggggaggaatcattatagattctaaa

SEQ ID NO: 733727 - DNA, 83 bp, Homo sapiens
gcggccaagcagccaaccatgctcaacttcggtgcctctctccagcagactgcgcaagagtgagccatggagctacgtgtggg

SEQ ID NO: 733728 - DNA, 50 bp, Homo sapiens
cgggagtggaccatcgggcggagacgagtacatgggctgtgttgaagtgc

SEQ ID NO: 733729 - DNA, 74 bp, Homo sapiens
cactggaagaagatgaagaggaactttttaaaattgcatttgcccagtataacatggatcagttcacgcctgtg

SEQ ID NO: 733730 - DNA, 76 bp, Homo sapiens
agcatatttttttagtcacaagcttattgaattgatcggccacatcaggctaattcacctaaataagattgatcct

SEQ ID NO: 733731 - DNA, 100 bp, Homo sapiens
ggacgcggatttttggcctcatactctgttatagataaacaaggggtcaagcaagcacccaggccatcaggtgctgatagaaatgtatcagtggactcta

SEQ ID NO: 733732 - DNA, 100 bp, Homo sapiens
gcttcctgggttcacgccattctcctgcctcagcctcctgagtagctgggattacaggcacccgccaccacgcccaggatgttccagcataagaagatac

SEQ ID NO: 733733 - DNA, 75 bp, Homo sapiens
cggcagccgaggccgcgaactgcatcatggagctgtcgcctggttgggcccggaaatgggacgtcgcgctttctc

SEQ ID NO: 733734 - DNA, 111 bp, Homo sapiens
agggtgattctgaagagggtctggaggagccttctcaagaacagaggttgcttagccagacaatgaaggatcatctagtaagagtagcaaatgaagctgaatttatcctga

SEQ ID NO: 733735 - DNA, 78 bp, Homo sapiens
tcatggagaggtcatctcagttccacacaagatcatcacccaccttcgaaaagaggatgacatgactgactccctgcg

SEQ ID NO: 733736 - DNA, 100 bp, Homo sapiens
cctcaactggatagagtactgctcttcccgaagagcaaaggttggtttgttggaccttgaactcaatcggctgacgaaagcgctatttttggctttagtt

SEQ ID NO: 733737 - DNA, 74 bp, Homo sapiens
ccgcctacaggagtatgatgcaagaacttcttggtatacatgaacaagcagcagtaggatttttaacactaatg

SEQ ID NO: 733738 - DNA, 96 bp, Homo sapiens
agaaactttatgtgcctgtaaaagaatacccagatgacttcatagacctcacgttgtcgaagactcaacgaaagactccaaccgttattcataaac

SEQ ID NO: 733739 - DNA, 90 bp, Homo sapiens
gaacgccgtccgctcaggaggcgccccgcgaccggcgcgatgagtgccaacgaggaccaggaggcagactgccagattcacttacagccc

SEQ ID NO: 733740 - DNA, 100 bp, Homo sapiens
ggccgccaggcactgagctggagcccgcctggagagacagacacgtgtgctggaagcccaggaagcacacatcaaggctcccttgccagcagggtgctgc

SEQ ID NO: 733741 - DNA, 98 bp, Homo sapiens
gcgtcctcatgtatggcccacctggctgtgggaagaccatgttggcaaaggcggtggcacatcacacaacaggagaccagccactaactggggcgtac

SEQ ID NO: 733742 - DNA, 58 bp, Homo sapiens
ttggccatatttctgtacctggaattccccctcgaagcggaggatccctgtgtcccag

SEQ ID NO: 733743 - DNA, 76 bp, Homo sapiens
ggagcattacgtactgaacttctcacaaaacagtgagaaagatcagtctaaagaaaaggagaagaaagtgaaaaaa

SEQ ID NO: 733744 - DNA, 75 bp, Homo sapiens
ccgatccgccgcccgtccacacccgccgccagagtgcgatgacatggatcctgcggacaaaccgccccagggcgt

SEQ ID NO: 733745 - DNA, 102 bp, Homo sapiens
ctgctggaggcctcgctgaggaacgacgccgaggaaggtgattgcagtggtcatggacgtgttcacagacatcgacatcttcagagacctgcaagaaatatg

SEQ ID NO: 733746 - DNA, 100 bp, Homo sapiens
gcgacgcaagatggcagccaccacgggctcggttgctgggcatattggattttacccatcataggcgctgttctcttaggtttcctgtaccgctactaca

SEQ ID NO: 733747 - DNA, 100 bp, Homo sapiens
agccgcgagccagctgcgcgaagggcaaatcataccccttcagggggccattcccacctgtatggaatccaattacctacttagatcataacaacttttg

SEQ ID NO: 733748 - DNA, 50 bp, Homo sapiens
tggtaataggaccccagaaaactgcatagctgtcagtcagatgggaactc

SEQ ID NO: 733749 - DNA, 98 bp, Homo sapiens
cgaataaagtttatcacgccgggcatccgcacttccactaatagccaagtagacaagctgaccctgtcagggagtgacagcgtcatccttggtgatac

SEQ ID NO: 733750 - DNA, 82 bp, Homo sapiens
tccgccttctctgtcagctctttccccgtcagcatcccagccgtgctcacggttatgccaaggacgccctgaatctggcaca

SEQ ID NO: 733751 - DNA, 100 bp, Homo sapiens
agatgagttctaccagacgacttatgggggtttcacagaggtggttggttctagctattgccatggtacgtttttatatggaaaaaggaacacacagagg

SEQ ID NO: 733752 - DNA, 90 bp, Homo sapiens
gacagatgaagctccccaaggagctgcagatcagctgtttcatgtattagccttgcacatgcggctttatagcattgactctgagtataa

SEQ ID NO: 733753 - DNA, 99 bp, Homo sapiens
ctaggcgaagatccggactctgggtgttttgctaccgtgaccgtttagcctttaaatctacaagacagcagccttcccgaaatgtcactactaagaatt

SEQ ID NO: 733754 - DNA, 100 bp, Homo sapiens
ggaacatctcaccaattttaaatcagtgtgctgctctggttggtgaagaccagcctctttgcccagatcttcctgaacttgatctttctgaactagatgt

SEQ ID NO: 733755 - DNA, 75 bp, Homo sapiens
ggccgcatcgggggcgactcaggcctgtccagccggggcaagaagacgccaatgagtgtgaagggaagccatgcc

SEQ ID NO: 733756 - DNA, 90 bp, Homo sapiens
gcccccccttccccacgcaaccccagatccatttacactttacactccagctcaaggtccctgctgaaggtcggagagcttggcatggcc

SEQ ID NO: 733757 - DNA, 98 bp, Homo sapiens
cgaaggccgggacccggttccccggcccacagtgggggtgtgcaaacccgagagaactggatcagcttgaacgggtctttttacgacttggccatgct

SEQ ID NO: 733758 - DNA, 101 bp, Homo sapiens
ctgaggaccattattttttaatggtcatggaaaatggaagatttgcaaaatacaaatattttacccatgtcatgatcaataagacagatatgctaatgata

SEQ ID NO: 733759 - DNA, 100 bp, Homo sapiens
caaaccctgggagacccgccgaattccgggagccggaccgggaccaggaccgggccccactttccaactgctgcctcatatccgggggaatgtgggcttt

SEQ ID NO: 733760 - DNA, 96 bp, Homo sapiens
gctgcagccgctggttcctcggtacgaggaggccctgtcccagctggaggagtctgtcaaggtatccctgttgatccgccgggagctgacagagag

SEQ ID NO: 733761 - DNA, 100 bp, Homo sapiens
tgccagtggaagaatgtggagctcaacatccacgtgcgcgcggagccatggttatcatgtcggagttcagcgcggaccccgcgggccagggtcagggcca

SEQ ID NO: 733762 - DNA, 100 bp, Homo sapiens
gcctcccgagtatctgggattacagggctgggaagaggctaggcgacgtggtttcagatacgaaaaggactattgctgggaatattttctgtcttcaaac

SEQ ID NO: 733763 - DNA, 89 bp, Homo sapiens
gggaaaatcagcaagagctttctggaagaaaggaaatgttaggatcactttattctggtctgtcgagttgcttatgaaattatgcaaac

SEQ ID NO: 733764 - DNA, 75 bp, Homo sapiens
tgaatgatttatagctaagactccaggacacccctgaagccgagaaatgtttgtacaatgacgacagaaacctgc

SEQ ID NO: 733765 - DNA, 90 bp, Homo sapiens
tacaggtgcctgctaccacacccggttcaactactcaatttcatgctggcatgagaagataatcctttgaaacatcattaattgaagtga

SEQ ID NO: 733766 - DNA, 82 bp, Homo sapiens
gaacaccctaaggaaattgagacgtcagatggacatcattgtgtctgaagatcaaaatacttgctggatggtggactcagag

SEQ ID NO: 733767 - DNA, 100 bp, Homo sapiens
ctcaggctggaacttgccctgtctcctcgcagatgaggagctgacatggacccaaatcctcgggccgccctggagcgccagcagctccgccttcgggagc

SEQ ID NO: 733768 - DNA, 75 bp, Homo sapiens
gatgtcaggagggcagcagtagaatcacttgggttcattctattcaggagaaagttctgccactaatgaacccag

SEQ ID NO: 733769 - DNA, 100 bp, Homo sapiens
aacgatcagcacttcagtcggaaagttggaacctctgacaagaccaagtactaccttcaaggcaagatgatgatgaatgaagtcctggcagcttcctgtg

SEQ ID NO: 733770 - DNA, 83 bp, Homo sapiens
gacagcgtggactttgatattgatgtgaacgcctctgtgtttgaaacaaacattcgagtttgtctttgtcagcgccacgtgag

SEQ ID NO: 733771 - DNA, 98 bp, Homo sapiens
ggacagggtcgggggacacgcaggatgagccccgcgaccactggcacattcttgctgacaggtattttgatgttggactgcataatttcttaatcagg

SEQ ID NO: 733772 - DNA, 82 bp, Homo sapiens
agcacttcagtcggaaagttggaacctctgacaagaccaagtactaccttcaaggttttaaaatcaaagatgggaaaatcgg

SEQ ID NO: 733773 - DNA, 82 bp, Homo sapiens
ggccgtgctgcttatggcggcgctggagagggggcgctgagctgttgggcaattctgtggtgttcttggtcacacatttatg

SEQ ID NO: 733774 - DNA, 50 bp, Homo sapiens
ccaaagtgggaaacattgaaatcaaggacccagatgatgtggtaccagtt

SEQ ID NO: 733775 - DNA, 83 bp, Homo sapiens
ctgcgtggggctcggccgcgcggactgaaggagactgaagggactggtgattgcagctggaagtgcccatgaccgagctggcg

SEQ ID NO: 733776 - DNA, 50 bp, Homo sapiens
gtatggtccaattcctgtggactttcagttgttcccatgactttgccgac

SEQ ID NO: 733777 - DNA, 75 bp, Homo sapiens
gtacttctgccactgctgctccgtggagatcgtcccgcgcctgccggacccttgaacatctgtgaagaaatgact

SEQ ID NO: 733778 - DNA, 101 bp, Homo sapiens
gagcacttggctcttatctactttggaggcctgtctggctcctttctctacacaggagagttgatctctctaatgtattagatcttcatgcctttgatagt

SEQ ID NO: 733779 - DNA, 90 bp, Homo sapiens
tgaagagcgacaagccgctggcagccgcggatctcaccgccgctcaggatttggtcgtattgggcgcctggtcaccagggctgcttttaa

SEQ ID NO: 733780 - DNA, 75 bp, Homo sapiens
ttcatcctaccgctccgccccattccagagaaccatgtgctgtgagggccttccgagtccatctgtttaatcctg

SEQ ID NO: 733781 - DNA, 76 bp, Homo sapiens
ttctgttaaggattctcagaagaatggttgtactggtcagtggacatctggacagctgggatgttgggcagggtgc

SEQ ID NO: 733782 - DNA, 83 bp, Homo sapiens
actttaggagaaagttgctgaaggcaggagggtctccagagaatacagagggcaaagatggatccaaagtaactaaacaggag

SEQ ID NO: 733783 - DNA, 100 bp, Homo sapiens
cctgaagagagaaggcaaagaacctctggtgttgaaagcccagacacatggccccaggccaagcaccccatcaggctaccccgtggagggatgcccaccc

SEQ ID NO: 733784 - DNA, 98 bp, Homo sapiens
ggcgccccgtggggcttcaccctgaagggcggccgcgagcacggcgagccgctggtcatcaccaaggttggtgttcgaggaagagacattgttgttct

SEQ ID NO: 733785 - DNA, 100 bp, Homo sapiens
ctcctgcggttggtgagattacctgggtctagagtgcggagctgctccgtggccacgaggacgtcaccatggtgtccttgaatggccattttggacaaaa

SEQ ID NO: 733786 - DNA, 74 bp, Homo sapiens
tctcccaaattctcagagcttgttatgaagtgtctgctgcacagagctttacatccccgggagcctctaccccc

SEQ ID NO: 733787 - DNA, 100 bp, Homo sapiens
tgcgtctagcctttgcccacgcagttacagacgttccacgttccgtctccctgtgccagccctcaggacctgagcagcggccttgccgtagcctatgtgc

SEQ ID NO: 733788 - DNA, 82 bp, Homo sapiens
tggctgttagaagaattcatgctcatccgggttaatgttcgtgaagaaattgaagagttttttccaagaatgtggaagataa

SEQ ID NO: 733789 - DNA, 85 bp, Homo sapiens
agaggcacaaccttcagagaataagaaaacaagatactgcaatggattgaagagctgacgcaagttggacagaaggaggtgttgg

SEQ ID NO: 733790 - DNA, 75 bp, Homo sapiens
agaaatcacctatgtttacagcgacagtttggaatagttgatgctgatggatatttaagtttgtatcaaacaaac

SEQ ID NO: 733791 - DNA, 82 bp, Homo sapiens
ggcctgcagcgggagctggacggcgagcgcgagcggcgcgagaaaatcatggaagggaagtggttgctgtgtatgttactgg

SEQ ID NO: 733792 - DNA, 100 bp, Homo sapiens
cacatctcaagagcaagtgtataatgactgtgcaaagaagattgttaaagaaagaactggttgtcttcttgggcggtgttgcagggttcatctttacttt

SEQ ID NO: 733793 - DNA, 88 bp, Homo sapiens
ccaaattgaggcgcaatgatgagaggatgtggtggtctactctgatgtcaatcttgagggctaggtgctggagaatctggtaaaagca

SEQ ID NO: 733794 - DNA, 96 bp, Homo sapiens
aggctccggaggcggcgggacagagcgcctgcgaccccagtcggtgctccggggaggtcacctgacgaggagtggttagcaggaagaagatgagcc

SEQ ID NO: 733795 - DNA, 82 bp, Homo sapiens
accgagctgcggctgctgtgggaacagcatatgccatatatgagctggctgtggcttcatttcccaagaagcaggagtgact

SEQ ID NO: 733796 - DNA, 50 bp, Homo sapiens
cttctgagtagctgggacaacagactgctttctgattccaaacagttcaa

SEQ ID NO: 733797 - DNA, 74 bp, Homo sapiens
atcctgtcaaaatagtccgatgccacgaacatacagaaatccttaccgcagcaattccatttccgtgagggcgt

SEQ ID NO: 733798 - DNA, 83 bp, Homo sapiens
tggtcccagaaacgtcactatcaagaaggtgttggggatgtcctttgcactgaccctgaactgccagattgacaaaaccagcc

SEQ ID NO: 733799 - DNA, 75 bp, Homo sapiens
agagctgaggactgcctgtttgcagggcaagaatatcacggcatgggcatgagtagcttgaaactgctgaagtat

SEQ ID NO: 733800 - DNA, 90 bp, Homo sapiens
cgacatgagtgatgtggaggaaaacaacttcgagggcagaaccctgagagatggttggtgccatgtggaaggtgattgtttcgctggtcc

SEQ ID NO: 733801 - DNA, 100 bp, Homo sapiens
actttatgtgcctgtaaaagaatacccagatgtgcatacattcagagggccacactggtgtgaatactgtgccaactttatgtggggtctcattgctcag

SEQ ID NO: 733802 - DNA, 75 bp, Homo sapiens
gcaaacaattgacattcacgttaaagagggaatatgtttatccagaagccagagacagacaatacttactatttt

SEQ ID NO: 733803 - DNA, 73 bp, Homo sapiens
accaaagcgcctgaggaccggcaacatggtgcggtcggggaataagatcaacaggcggtccttcgggtcggag

SEQ ID NO: 733804 - DNA, 75 bp, Homo sapiens
aagatggaggagctggtggtggaagtgcggggctccaatggcgctttctacaagacaatgcagatcttcgtgaag

SEQ ID NO: 733805 - DNA, 50 bp, Homo sapiens
tatgcctactctcaagaaatggattccaactccacagagtgaccagagag

SEQ ID NO: 733806 - DNA, 100 bp, Homo sapiens
ctagaattacctggaacttcatcatcatctacttcacaggaattgccatttgttgcatcataaatacaaaggactgaagttataaaagagaaaagagaag

SEQ ID NO: 733807 - DNA, 74 bp, Homo sapiens
gtggaattatgccctgttggttccaatgctgggattggctgcttttcgaggaagttaacatccctaataggagg

SEQ ID NO: 733808 - DNA, 100 bp, Homo sapiens
gcccgcgcggagtctgagggagatggaagttgagcaagagcagcggcgcagaaaggtggaggccgggaggacgaagatcgcccaggaccacaccgcagcg

SEQ ID NO: 733809 - DNA, 75 bp, Homo sapiens
tgctgctcacatggtgtctgggcccttggcactccggttacctgtcctgctgccgattcctggatgacaatcaga

SEQ ID NO: 733810 - DNA, 82 bp, Homo sapiens
gaggcaccaaatctggcctgggggcccgagaagcttcctctcaggaggcagttcccatgttatacgcagcagatacttacgg

SEQ ID NO: 733811 - DNA, 101 bp, Homo sapiens
tggataaccaacaagatggggaagaaaaggattgagaactttaagagtggtgtgggaacaagtcagacctcagcgagcttcgggaggtctccttggctgag

SEQ ID NO: 733812 - DNA, 98 bp, Homo sapiens
aagtgggagcccagttggaagcccgggaccgtttaaaaaactggtgcctgactgacagaagttcttgcccccggggagctggtgtggacagaggaggg

SEQ ID NO: 733813 - DNA, 74 bp, Homo sapiens
tccagaccttgccctactaagattttggaagatgttgtggatacttttgtggaactctatgggaacaatgcagc

SEQ ID NO: 733814 - DNA, 101 bp, Homo sapiens
gccagatgcagatctgaagacctattttactgataagaaaacacatctttacacactaagcatccgtgtcattctggaccttactcccaactaccggggtg

SEQ ID NO: 733815 - DNA, 101 bp, Homo sapiens
gagagagaggtggacagatctgagagatactgaggctgtgggtgagcgtggaggatgctcagatgcacaccgtcaccatctggctcacagtgcgccctgat

SEQ ID NO: 733816 - DNA, 80 bp, Homo sapiens
ccgagagagcctgcggaacctgcgcggctactacaaccagagcgaggccggtctcgaagtgctgcagctaaaactcatac

SEQ ID NO: 733817 - DNA, 82 bp, Homo sapiens
ccgggacaccgcacagccgggaaatggagtccaaaactacttacctggaagaccttccaccaccccctgagtatgaattggc

SEQ ID NO: 733818 - DNA, 126 bp, Homo sapiens
cctgagaaaagcaagaaggaactgaaaagggaagcccggaatttgctcaaatctcatcttaaccttggttggatggcaagcatgtggtgtttggcaaagtgaaagaaggcatgaatattgtggagg

SEQ ID NO: 733819 - DNA, 75 bp, Homo sapiens
aaaccagaatgaaagtagtcagggtctattacaatggctaccatggagacacctctgaaacatttttggtgggca

SEQ ID NO: 733820 - DNA, 100 bp, Homo sapiens
caaagaggccgcggaggagaagccggaggaggacaacgactaccaccgcagcgacgagcagtggactaaagaggatggacatagaacttccacctctgct

SEQ ID NO: 733821 - DNA, 78 bp, Homo sapiens
tttgggtacgtgcaagagttcatacaagcagagctaaagatcacattcaggcggccattgcccaactggacctgttag

SEQ ID NO: 733822 - DNA, 101 bp, Homo sapiens
aggtactggaaacccacaggcacacccaacatttgacattgtgcagcaaagaaatggttatggagaagcccagtccgctgcttgtagggcgggagtttgtg

SEQ ID NO: 733823 - DNA, 75 bp, Homo sapiens
aagttccatatttaagtagtctgcttcagcctttttcaggctcgattccttttgtccaaagtgaacccatctcag

SEQ ID NO: 733824 - DNA, 75 bp, Homo sapiens
ctcctactatccatttcaactacagatactttgaagtagaagaagctgatgtgtggcccagagttgctcagaatt

SEQ ID NO: 733825 - DNA, 90 bp, Homo sapiens
cgatgatcgtgtgtcggatgaggagaagggggagcacctggggaccacggaagcgaccgaggccttctttgccatgaccaagctctttca

SEQ ID NO: 733826 - DNA, 117 bp, Homo sapiens
ccggtgcttccctgaggctgaggcgcccggcctcccgcccgccgcgctccagatgaagtgtgagcactgcacgcgcaagacaatgcagatcttcgtgaagactctgactggtaagac

SEQ ID NO: 733827 - DNA, 82 bp, Homo sapiens
gtggactctgccgacaccggagagaggggactcgtgggggatgttagcgtgcctgtgcacggtgctctggcacctccctgca

SEQ ID NO: 733828 - DNA, 90 bp, Homo sapiens
ggggaagtcagaggtggcgacttcaactccgtcggaggcaactcactttgttggagggatgtataggggacattccagctacatcacaca

SEQ ID NO: 733829 - DNA, 130 bp, Homo sapiens
ggcgacccggtgtgtggcgcgcccagagccccgcgtttcagccctagggaagggccgttgctccagggagaactgcaaatatcttcatccacccccacatttaaaaacgcagttggagataaatggacgc

SEQ ID NO: 733830 - DNA, 75 bp, Homo sapiens
gactgtcctgtccctgctgggccgtgtttggactcctgcctcgatgaaggatttgggggcagagcacttggcagg

SEQ ID NO: 733831 - DNA, 83 bp, Homo sapiens
gccgtgtttcctctttcggccgcgctggtgaacagtgcaccgtccaggtgaggttagagctggggcatcgcgcccaactgcgc

SEQ ID NO: 733832 - DNA, 83 bp, Homo sapiens
cagagcgctactcctggcagtgcgtcaatcagagcgtcctgtgcggaagcggggagaggtggtgagagatgacccctgttgag

SEQ ID NO: 733833 - DNA, 96 bp, Homo sapiens
agatcaaagagaaagttcataaatacaacttagcagtcacagacaagttgaagatgaccttgggcccagaatgtgttcagtatcttcaacaagaat

SEQ ID NO: 733834 - DNA, 90 bp, Homo sapiens
aggcactcaagtcctggctcagcaagactctcgagcccataattgagcccctgagtcctgagttggtggcagctgcatctgctgtggcag

SEQ ID NO: 733835 - DNA, 90 bp, Homo sapiens
atctctcctaaggaagaagcctagaagaggaggaagaggaaagaaaaggagtcaggaatgcctcttaggaatctgtcttcctgacctgag

SEQ ID NO: 733836 - DNA, 99 bp, Homo sapiens
ctgaggcttatttgggaaagaagggggatagtttcatagtaagttctgaattccctgtaagactgagtgtatacttagaagaagaggatattactgaag

SEQ ID NO: 733837 - DNA, 75 bp, Homo sapiens
cacttgcacgaaagctttcctaggccaaaaagagggcttatttcaaaacctttgtccctcagttccaggaggcag

SEQ ID NO: 733838 - DNA, 99 bp, Homo sapiens
agtgggggtgtgcaaacccgagagaactggataaacatgatgctggcaaacctgtacaagaaggctggtcaggagcgcccttcagtcaccagctataag

SEQ ID NO: 733839 - DNA, 83 bp, Homo sapiens
tgacaagaattaactcaaatatctcttcttaacacctacctgattctggcatacaatgccagaagtgggtggagaactgtagg

SEQ ID NO: 733840 - DNA, 82 bp, Homo sapiens
agcgtcatgaacccgagctatagagaaaggagatgagaaaagttgccagacggccagcattgccactgccagtgcatccgcc

SEQ ID NO: 733841 - DNA, 98 bp, Homo sapiens
ttgtccaaggacgccgcatcaccacacgcaggaggaggagaacggggctgaggaggaagaagaagaaactgccgaggatggagaggaggaagatgaag

SEQ ID NO: 733842 - DNA, 82 bp, Homo sapiens
aggcggccggcctggtgcgcaaggccccgaacaacagggtcccctggaagtgacgctgactcagccagtgaggagcgggcct

SEQ ID NO: 733843 - DNA, 75 bp, Homo sapiens
gaatacattcctgattacctgccacccattgtgtcttctcaagaaggtgtaccttgaaagacttttaacatacgc

SEQ ID NO: 733844 - DNA, 75 bp, Homo sapiens
gacccgcgtgtcgcccctcagcagtgaatgggtaccacagaccatgtcatcgtcctggcgtccacgaaccgagct

SEQ ID NO: 733845 - DNA, 95 bp, Homo sapiens
acattcatactgatgtcttttctgaaccaagagctgttatgtccgtggttcagaccctgtattaaagcttttggacgacaatgggaacattgctg

SEQ ID NO: 733846 - DNA, 82 bp, Homo sapiens
gcgtcttcctcaaggtggggttcggggggccaccgaatcgctgtcacgccggcaggtgtgtgtctggggaagagacttacag

SEQ ID NO: 733847 - DNA, 75 bp, Homo sapiens
gggattctcgacctgctaacagaactggaccttttcgatgatgatgtgcctgcagatatggttgcagaagaatca

SEQ ID NO: 733848 - DNA, 75 bp, Homo sapiens
ccccggcccacagtgggggtgtgcaaacccgagagaactggcaatgcagttgcaggcgagagtgctctagatcga

SEQ ID NO: 733849 - DNA, 111 bp, Homo sapiens
gtcctcacctcgctactcgcttgcctacccgccggcccgcgggtctacttcctcaaaggctgaaggtgatgtggccgccctcaaccgacgcatccagctcgttgaggagga

SEQ ID NO: 733850 - DNA, 100 bp, Homo sapiens
ctcacgctgcggaggaagcggagcgccgctgggggccgggttcgcatcttcacatacctcattggacgagaggctgcgtttgcagacaatctaaagtgga

SEQ ID NO: 733851 - DNA, 83 bp, Homo sapiens
cggcaagccgctcagcaagctccacatccccgtgaaacctgcccctggccatcatcatctccctgcccatcgtgacgctggtg

SEQ ID NO: 733852 - DNA, 100 bp, Homo sapiens
gggaaacaagcccttccgtgtactcgggaatccggcacaaggcactgggctacgtgctggacaggtagcagtagctgatgtgcagtttggccccatgaga

SEQ ID NO: 733853 - DNA, 51 bp, Homo sapiens
cctggtggcctcccagacagtgcaaagggtcaaggaggaggtcaagttggc

SEQ ID NO: 733854 - DNA, 87 bp, Homo sapiens
tcggcagggaggatgacggagctgcagtcggcactgctactgcgaagacagctggcagatgtgagaagggtgttatgtctctagtga

SEQ ID NO: 733855 - DNA, 100 bp, Homo sapiens
gaacatagacgtggagttccacatccggcacaactacccctggaacaagttgccggccaacgtgagacaggcaggtgacagcagggacatgtctcgggag

SEQ ID NO: 733856 - DNA, 100 bp, Homo sapiens
cagcagcagaaattccagtgactagtaatggagaagttgatgactctcgtgaacatagctttaataggttttatccctgcagtgaatgatttgacctctg

SEQ ID NO: 733857 - DNA, 90 bp, Homo sapiens
tgaaggtttacacttgtcaacttcctcttcagtcatcagtgtgaccaagaatatggcccaggtgaccaaagccctggacaaggccctgag

SEQ ID NO: 733858 - DNA, 98 bp, Homo sapiens
cgaaggatccccaacggggaggccaacgtgaagaactccaccgggggacggctacgtgcaggcggacgcccggggccccccggaccacgaggagcacc

SEQ ID NO: 733859 - DNA, 87 bp, Homo sapiens
tacgtctgtactgtgctttgatggggatcgctggactcaatgaacagcagagaatttcaaaggaccttgctaatatctgtaagacgg

SEQ ID NO: 733860 - DNA, 100 bp, Homo sapiens
aaatgccccaaggatgaagaacggagacgatagcaaagccattgtggatgggaacctgaagctcatcttgggtctggtgtggacgctgatcctccactac

SEQ ID NO: 733861 - DNA, 83 bp, Homo sapiens
ctgcagcgccgtgtggcacgacacaaaaatcaggccatgtagggcaggaccgggtggactttggccagactgagccgcacacg

SEQ ID NO: 733862 - DNA, 98 bp, Homo sapiens
gaagatggatttttggctgtatgttcagaagctaaaggccttcccttcttcttggtggtgttcttgagtaagataatctggactggcccccgtctttg

SEQ ID NO: 733863 - DNA, 82 bp, Homo sapiens
ggcgaacagccatcccgggcactatgtgaatttgggtgtcttgggacaaggtgcgcattcctggtgtgctgcagcgattggg

SEQ ID NO: 733864 - DNA, 100 bp, Homo sapiens
gccagtcgacccccaggaaaggaaaaacccacaaacatgttcacaacgggcatgatatggtccagacctgtacatgaataactttggttagtcagagtga

SEQ ID NO: 733865 - DNA, 100 bp, Homo sapiens
ctccagtgtcccttcttccacatgaaaaggataaggttcaggttcttcggaatgctggagaagaagtgactctaacagtgtcatttttaaaaagagcacc

SEQ ID NO: 733866 - DNA, 76 bp, Homo sapiens
ggcctcggggactcctcatacgccaactttcatccatcccaggggaatcacttacctatgccagcacaactttcaa

SEQ ID NO: 733867 - DNA, 100 bp, Homo sapiens
gagtcatgcccgcctgtctgctgatggtccctttgtggtacgtgctttccttcgtagttcaacaagtgaaggtttattactgaagattgatccattgttg

SEQ ID NO: 733868 - DNA, 114 bp, Homo sapiens
gctgaccctgatggaggaagtgctcctgctgggcctcaaggaccgcgagggcttgcgtttcaagaaagcccatgtaacacatcctgaactgaaagccaccttttgcctaccaat

SEQ ID NO: 733869 - DNA, 75 bp, Homo sapiens
atcgaatctcttctccctccccttcttgaatctgaatctgaagctgaagaaggtgactgaattttgaaactacac

SEQ ID NO: 733870 - DNA, 83 bp, Homo sapiens
cgagccggggcgccgggagctattgggacctgcgggtcagcccaaggccaaccccactgtcactctgttcccgccctcctctg

SEQ ID NO: 733871 - DNA, 90 bp, Homo sapiens
ggaagagattaaggaccttgaagaacagcttactgaagagatcaatggcttttcaaaagcagcacaccaaactgtcaaagtggtgatccc

SEQ ID NO: 733872 - DNA, 100 bp, Homo sapiens
aaagcttccagcaaagatgccatcagaataacctgggtatcttgtggtctgaaagagaagaaattgaaactgcacaggcttacctagagtcatcagaagc

SEQ ID NO: 733873 - DNA, 82 bp, Homo sapiens
tgctgacccacaaacaagctcaaggtgctggagaatctggtaaaagcaccattgtgaagcagatgaggatcctgcatgttaa

SEQ ID NO: 733874 - DNA, 75 bp, Homo sapiens
ctcaatctctggaaaaacttcttgccaaccaaagtgtggtatctgtgcgctttgaagaagatgaagacaggaact

SEQ ID NO: 733875 - DNA, 75 bp, Homo sapiens
agtaatggtgcaaagcctgaagtcccgcggcagtgctggtggccatggttcccgtagccagaaggagttgcccac

SEQ ID NO: 733876 - DNA, 75 bp, Homo sapiens
gctaccctgctttttctggtgtcctgaacctggaagttgtgctttttaagatactgaacggctgtattcagtggt

SEQ ID NO: 733877 - DNA, 80 bp, Homo sapiens
gtgagtggaagccatgaggccaaaggcagttgtattgctatccagtcagttcgctgctattcccatgggtcacaggagac

SEQ ID NO: 733878 - DNA, 133 bp, Homo sapiens
ggagttcagcttttagagcaggtgtatgatcttttggaggaggaggatgaatttgatagagaggtaatagcctgcagctggtgttttgagaagccctactgctgaaaacttaacaattttgtgtaataaaaat

SEQ ID NO: 733879 - DNA, 74 bp, Homo sapiens
ggcgctctcctggctcccttctgccccagctccgtctcggcggcggcgggtatggacctgtctgccaatcagga

SEQ ID NO: 733880 - DNA, 89 bp, Homo sapiens
cagtccgttgctttactttttgcttcaccgacatagtcattatgccgaagagaaagttgactatattgtggagtatgactatgatgctg

SEQ ID NO: 733881 - DNA, 101 bp, Homo sapiens
aggcgcatcactcccagctgcgcaaagcttgcgaggtggcgttaggttggaatgttgcatcagcaggtagaagaacatgaaaaaatcaagcaagagatgac

SEQ ID NO: 733882 - DNA, 97 bp, Homo sapiens
cagaaagaagaggaaatgactgagtcccagcacacagcaagaaggaggccatcagcaaactgggaagaggaccctcaccaggaaccacatctgccag

SEQ ID NO: 733883 - DNA, 96 bp, Homo sapiens
tcttctggcagcttccggaggagcccccacttaatgggacgtcatcacttgaggcagcaggttatcaatagtctggctgtctatcgtcatcgtgag

SEQ ID NO: 733884 - DNA, 87 bp, Homo sapiens
atgtttgggtttgtgctggacattcctgagaggagccagagtccgggaccatgtctggagaactaccaccaaacattaacatcaagg

SEQ ID NO: 733885 - DNA, 79 bp, Homo sapiens
cccggccgaggtggcggcggctcctcagcaatggctgccatccggaagaaactggtgattgttggtgatggagcctgtg

SEQ ID NO: 733886 - DNA, 75 bp, Homo sapiens
agttttggtagaagatgtggtacacactcagttaattaatctgaattcaattcgtcataatctgtccctacacag

SEQ ID NO: 733887 - DNA, 101 bp, Homo sapiens
ggcggctggcctcaccgcccactgggtcacggagctgctggacgtctccatggagctgggctgtttcctggctggagcgctcgtctcctctcagggccccg

SEQ ID NO: 733888 - DNA, 82 bp, Homo sapiens
gaagaggcagaaggagcaggctctgcgggaggtggagcacctgaagagatgccagcagggcgccaatgcttcggcattagag

SEQ ID NO: 733889 - DNA, 75 bp, Homo sapiens
tcattctagaaagaagcgatacaggtgggtttgatctggacatcaaaggctggggcggagaggatgtgcaccttt

SEQ ID NO: 733890 - DNA, 75 bp, Homo sapiens
agtatctcacctccctaaactggttaatagtggcatggaagatccatttgttctgggaggtgatcagtgatgaac

SEQ ID NO: 733891 - DNA, 75 bp, Homo sapiens
gctgagggctgtggtgcggcaccggcgagccagcattcactttataggaacagcttcagcttcagtgatgaaaaa

SEQ ID NO: 733892 - DNA, 100 bp, Homo sapiens
ggaggatggaagagctgcacaaccaagaggtgcaaaaacgaaagcaactggagctcagatctgtgacttcctccgcggagccacagtccatagaatcctc

SEQ ID NO: 733893 - DNA, 100 bp, Homo sapiens
gagctggctgcggagcggcgagggacctcgcagggagccatccgatgtacaccaggggttggaaaaaccacactaggcaaagaacttgcgtcaaaatcag

SEQ ID NO: 733894 - DNA, 97 bp, Homo sapiens
tactcatctgtgagaacagaagctttatctgtgatagaattgctgcttaaaaaacttgaagtttaaggaagaaatctctaaacgttttaaatcacat

SEQ ID NO: 733895 - DNA, 76 bp, Homo sapiens
actggccttgatttggcagctaatgagaagctgtattcttcaggacttgtggaatgtgaggatcaggatccactta

SEQ ID NO: 733896 - DNA, 73 bp, Homo sapiens
cttcgtcttccgaatgaactacagccgcaagaaccaggactcggaagagagcggggtattccctacaggagct

SEQ ID NO: 733897 - DNA, 100 bp, Homo sapiens
aggacaagcgcttctcgggcaccgtcaggaacagatggagtcggataactgttcaggaggagatgatgactggacccatctgtcttcaaaagaagtggac

SEQ ID NO: 733898 - DNA, 90 bp, Homo sapiens
ctatcctcggtgctgtggtgcagagctagttcctctccagctcagccgcgtaggttgaaatcacaaagattagacacctttttagatagg

SEQ ID NO: 733899 - DNA, 98 bp, Homo sapiens
ttaaaagagcgaataaagtttatcacgccgggctggaagacccaggagaaggcggaggctcaggtgcccacatgatcagcacagccagggtacctgct

SEQ ID NO: 733900 - DNA, 140 bp, Homo sapiens
agctgctcaggctgaggcggtgtgctcagcacagagcccccggaactggcatctgcagggcgtgaggccagagtggactgggcaaatcaacgctggtcaacacgctcttcaaatcccaagtgagccgcaaggcctccagc

SEQ ID NO: 733901 - DNA, 74 bp, Homo sapiens
ttaaggattccaagtaactcttatttggttgaaaatcgatgactttaatgatgaactcaataagctgctggaag

SEQ ID NO: 733902 - DNA, 75 bp, Homo sapiens
cttcggtggactccttcggcagtccacccaccgccgccgcctcccaggtatgtgaggagcagcgctgtgaggagg

SEQ ID NO: 733903 - DNA, 101 bp, Homo sapiens
gatgctggcgagacgacagcgagatcctctccaggccctgcggcgccgcaatcaggagctgaagcaacagccactgaggcggctcccagctgcgttggcga

SEQ ID NO: 733904 - DNA, 82 bp, Homo sapiens
aggccaataatccgttatggagcatgcctttaccccgttggagcccctgctttccactggctttgaagacaagattcccaaa

SEQ ID NO: 733905 - DNA, 100 bp, Homo sapiens
tcgtggtgaaggtccggggcttgccctggtcttgctcggccgatgaagtgcagaggtttttttctggcctgggcaatatttaagggaaagtataaggagg

SEQ ID NO: 733906 - DNA, 100 bp, Homo sapiens
ggggtagagaccgccgggtctcggcccgcaccaggagcggaacaaatgagcgggatcgtgtgcagaagaaaaccttcaccaagtgggtcaacaagcacct

SEQ ID NO: 733907 - DNA, 100 bp, Homo sapiens
ccggtgggaactgaggaagcgcccaaggttcatcaatgccagaagacgaattcttcagccaatgttggattcaagttgttcagagacccccaaaacaaag

SEQ ID NO: 733908 - DNA, 122 bp, Homo sapiens
ctgactgcaaagaccccaaggcctgcaccattctcctccggggggctagcaaagagattctctcgatgaagactggcccatttgcagagcactccaaccagctgtggaacatcagcgccgtc

SEQ ID NO: 733909 - DNA, 117 bp, Homo sapiens
tggaatcaaagataaatccaaatactgcatatcagaaacaacagagagacaagagagacacctccaacttcgacaaagagttcaccagacagcctgtggaactgacccccactgata

SEQ ID NO: 733910 - DNA, 101 bp, Homo sapiens
gcaaacaacgccaatgtccagcacagcgccctcacagtggtgcccccagggggggccctcagcctcttggccttgaacgggctgttcatcttgattcacaa

SEQ ID NO: 733911 - DNA, 97 bp, Homo sapiens
aaagaagttgcaaaacactggattctctaaccatggcacaggtagagaaacgtggaggtttgctccggaaatcttcagcctccaaaaaaccactgaa
